United States Patent Application Publication US 2014/0004565 A1 - sequence listing, part 20

SEQ ID NO: 381407 - RNA, 19 nt, Artificial Sequence
  Description of Artificial Sequence: Synthetic oligonucleotide
gagauccaugagauuggcu

SEQ ID NO: 381408 - RNA, 19 nt, Artificial Sequence
  Description of Artificial Sequence: Synthetic oligonucleotide
caucgagggcaucaauagu

SEQ ID NO: 381409 - RNA, 19 nt, Artificial Sequence
  Description of Artificial Sequence: Synthetic oligonucleotide
caguaguuucaccaagguu

SEQ ID NO: 381410 - RNA, 19 nt, Artificial Sequence
  Description of Artificial Sequence: Synthetic oligonucleotide
caccuguaucagguaccag

SEQ ID NO: 381411 - RNA, 19 nt, Artificial Sequence
  Description of Artificial Sequence: Synthetic oligonucleotide
cgcacuuagguaaggcuca

SEQ ID NO: 381412 - RNA, 19 nt, Artificial Sequence
  Description of Artificial Sequence: Synthetic oligonucleotide
cccucuaauggaggcagug

SEQ ID NO: 381413 - RNA, 19 nt, Artificial Sequence
  Description of Artificial Sequence: Synthetic oligonucleotide
cuaagucgugggguggcaa

SEQ ID NO: 381414 - RNA, 19 nt, Artificial Sequence
  Description of Artificial Sequence: Synthetic oligonucleotide
aguauacaugaggccuaua

SEQ ID NO: 381415 - RNA, 19 nt, Artificial Sequence
  Description of Artificial Sequence: Synthetic oligonucleotide
cgcagacgugcugauaaag

SEQ ID NO: 381416 - RNA, 19 nt, Artificial Sequence
  Description of Artificial Sequence: Synthetic oligonucleotide
cugcucuuuauacgaucgu

SEQ ID NO: 381417 - RNA, 19 nt, Artificial Sequence
  Description of Artificial Sequence: Synthetic oligonucleotide
gguuugcugauagcugacu

SEQ ID NO: 381418 - RNA, 19 nt, Artificial Sequence
  Description of Artificial Sequence: Synthetic oligonucleotide
ccaucgcgacccucuuggc

SEQ ID NO: 381419 - RNA, 19 nt, Artificial Sequence
  Description of Artificial Sequence: Synthetic oligonucleotide
ggggugaucugugauugau

SEQ ID NO: 381420 - RNA, 19 nt, Artificial Sequence
  Description of Artificial Sequence: Synthetic oligonucleotide
ccccaguuguuacugccaa

SEQ ID NO: 381421 - RNA, 19 nt, Artificial Sequence
  Description of Artificial Sequence: Synthetic oligonucleotide
ggcgacucuauugggccua

SEQ ID NO: 381422 - RNA, 19 nt, Artificial Sequence
  Description of Artificial Sequence: Synthetic oligonucleotide
cccgcacuuagguaaggcu

SEQ ID NO: 381423 - RNA, 19 nt, Artificial Sequence
  Description of Artificial Sequence: Synthetic oligonucleotide
ggccuauaucugucaucaa

SEQ ID NO: 381424 - RNA, 19 nt, Artificial Sequence
  Description of Artificial Sequence: Synthetic oligonucleotide
guucggguuccuacaguuu

SEQ ID NO: 381425 - RNA, 19 nt, Artificial Sequence
  Description of Artificial Sequence: Synthetic oligonucleotide
caggcuccgccaugccgaa

SEQ ID NO: 381426 - RNA, 19 nt, Artificial Sequence
  Description of Artificial Sequence: Synthetic oligonucleotide
gggcgacucuauugggccu

SEQ ID NO: 381427 - RNA, 19 nt, Artificial Sequence
  Description of Artificial Sequence: Synthetic oligonucleotide
gcacuuagguaaggcucaa

SEQ ID NO: 381428 - RNA, 19 nt, Artificial Sequence
  Description of Artificial Sequence: Synthetic oligonucleotide
ccgcagacgugcugauaaa

SEQ ID NO: 381429 - RNA, 19 nt, Artificial Sequence
  Description of Artificial Sequence: Synthetic oligonucleotide
gcgacucuauugggccuaa

SEQ ID NO: 381430 - RNA, 19 nt, Artificial Sequence
  Description of Artificial Sequence: Synthetic oligonucleotide
cagcaggggcgacucuauu

SEQ ID NO: 381431 - RNA, 19 nt, Artificial Sequence
  Description of Artificial Sequence: Synthetic oligonucleotide
cgaucguacauguguccuu

SEQ ID NO: 381432 - RNA, 19 nt, Artificial Sequence
  Description of Artificial Sequence: Synthetic oligonucleotide
ccgccaugccgaaaaccuu

SEQ ID NO: 381433 - RNA, 19 nt, Artificial Sequence
  Description of Artificial Sequence: Synthetic oligonucleotide
cgccgcagacgugcugaua

SEQ ID NO: 381434 - RNA, 19 nt, Artificial Sequence
  Description of Artificial Sequence: Synthetic oligonucleotide
aauuucaugauuauuauac

SEQ ID NO: 381435 - RNA, 19 nt, Artificial Sequence
  Description of Artificial Sequence: Synthetic oligonucleotide
aauaaaaucaguucgccag

SEQ ID NO: 381436 - RNA, 19 nt, Artificial Sequence
  Description of Artificial Sequence: Synthetic oligonucleotide
auauuaaagacauacuugg

SEQ ID NO: 381437 - RNA, 19 nt, Artificial Sequence
  Description of Artificial Sequence: Synthetic oligonucleotide
auuaacauguucuguagcc

SEQ ID NO: 381438 - RNA, 19 nt, Artificial Sequence
  Description of Artificial Sequence: Synthetic oligonucleotide
uaaguauacauuuaggugu

SEQ ID NO: 381439 - RNA, 19 nt, Artificial Sequence
  Description of Artificial Sequence: Synthetic oligonucleotide
aaaucuaaacacuacccag

SEQ ID NO: 381440 - RNA, 19 nt, Artificial Sequence
  Description of Artificial Sequence: Synthetic oligonucleotide
uuuacucuuaggaauagag

SEQ ID NO: 381441 - RNA, 19 nt, Artificial Sequence
  Description of Artificial Sequence: Synthetic oligonucleotide
cuaaacacuacccagaaac

SEQ ID NO: 381442 - RNA, 19 nt, Artificial Sequence
  Description of Artificial Sequence: Synthetic oligonucleotide
aaacgaagaucccauauag

SEQ ID NO: 381443 - RNA, 19 nt, Artificial Sequence
  Description of Artificial Sequence: Synthetic oligonucleotide
auaguaguaaucaucauac

SEQ ID NO: 381444 - RNA, 19 nt, Artificial Sequence
  Description of Artificial Sequence: Synthetic oligonucleotide
accaaaucuaaacacuacc

SEQ ID NO: 381445 - RNA, 19 nt, Artificial Sequence
  Description of Artificial Sequence: Synthetic oligonucleotide
ugcaacguaaauuucaucu

SEQ ID NO: 381446 - RNA, 19 nt, Artificial Sequence
  Description of Artificial Sequence: Synthetic oligonucleotide
aguaaguauacauuuaggu

SEQ ID NO: 381447 - RNA, 19 nt, Artificial Sequence
  Description of Artificial Sequence: Synthetic oligonucleotide
ucaaauagaucucugggga

SEQ ID NO: 381448 - RNA, 19 nt, Artificial Sequence
  Description of Artificial Sequence: Synthetic oligonucleotide
ucaaauaaugguacaagcu

SEQ ID NO: 381449 - RNA, 19 nt, Artificial Sequence
  Description of Artificial Sequence: Synthetic oligonucleotide
accuguuuagauuuagggc

SEQ ID NO: 381450 - RNA, 19 nt, Artificial Sequence
  Description of Artificial Sequence: Synthetic oligonucleotide
ucuagcuccaacuugaaaa

SEQ ID NO: 381451 - RNA, 19 nt, Artificial Sequence
  Description of Artificial Sequence: Synthetic oligonucleotide
guaaguauacauuuaggug

SEQ ID NO: 381452 - RNA, 19 nt, Artificial Sequence
  Description of Artificial Sequence: Synthetic oligonucleotide
uucgccagaaacauaagug

SEQ ID NO: 381453 - RNA, 19 nt, Artificial Sequence
  Description of Artificial Sequence: Synthetic oligonucleotide
ugaauaaacggaaucugga

SEQ ID NO: 381454 - RNA, 19 nt, Artificial Sequence
  Description of Artificial Sequence: Synthetic oligonucleotide
uccaccacgauaguuaugg

SEQ ID NO: 381455 - RNA, 19 nt, Artificial Sequence
  Description of Artificial Sequence: Synthetic oligonucleotide
gacuuuaccacucauuaac

SEQ ID NO: 381456 - RNA, 19 nt, Artificial Sequence
  Description of Artificial Sequence: Synthetic oligonucleotide
uucugaauggauaacugca

SEQ ID NO: 381457 - RNA, 19 nt, Artificial Sequence
  Description of Artificial Sequence: Synthetic oligonucleotide
aauaucucggugccaacag

SEQ ID NO: 381458 - RNA, 19 nt, Artificial Sequence
  Description of Artificial Sequence: Synthetic oligonucleotide
gaucacuauccuuaaauug

SEQ ID NO: 381459 - RNA, 19 nt, Artificial Sequence
  Description of Artificial Sequence: Synthetic oligonucleotide
uacuacagccaaaugagcc

SEQ ID NO: 381460 - RNA, 19 nt, Artificial Sequence
  Description of Artificial Sequence: Synthetic oligonucleotide
acagauucccuauuguuuc

SEQ ID NO: 381461 - RNA, 19 nt, Artificial Sequence
  Description of Artificial Sequence: Synthetic oligonucleotide
ugaauaaccggcucuacca

SEQ ID NO: 381462 - RNA, 19 nt, Artificial Sequence
  Description of Artificial Sequence: Synthetic oligonucleotide
gaauaaacggaaucuggag

SEQ ID NO: 381463 - RNA, 19 nt, Artificial Sequence
  Description of Artificial Sequence: Synthetic oligonucleotide
uuaaccuacgccuugccug

SEQ ID NO: 381464 - RNA, 19 nt, Artificial Sequence
  Description of Artificial Sequence: Synthetic oligonucleotide
cucaaauaaugguacaagc

SEQ ID NO: 381465 - RNA, 19 nt, Artificial Sequence
  Description of Artificial Sequence: Synthetic oligonucleotide
aauaaccggcucuaccacg

SEQ ID NO: 381466 - RNA, 19 nt, Artificial Sequence
  Description of Artificial Sequence: Synthetic oligonucleotide
uuuaccuuauucuagcaau

SEQ ID NO: 381467 - RNA, 19 nt, Artificial Sequence
  Description of Artificial Sequence: Synthetic oligonucleotide
caaauaaugguacaagcuc

SEQ ID NO: 381468 - RNA, 19 nt, Artificial Sequence
  Description of Artificial Sequence: Synthetic oligonucleotide
uuccccacaaauaucucgg

SEQ ID NO: 381469 - RNA, 19 nt, Artificial Sequence
  Description of Artificial Sequence: Synthetic oligonucleotide
cucucugugaauaaccggc

SEQ ID NO: 381470 - RNA, 19 nt, Artificial Sequence
  Description of Artificial Sequence: Synthetic oligonucleotide
aaagugacaaacgcauaac

SEQ ID NO: 381471 - RNA, 19 nt, Artificial Sequence
  Description of Artificial Sequence: Synthetic oligonucleotide
agugccuuaaucuuugacu

SEQ ID NO: 381472 - RNA, 19 nt, Artificial Sequence
  Description of Artificial Sequence: Synthetic oligonucleotide
acgaagaucccauauaggu

SEQ ID NO: 381473 - RNA, 19 nt, Artificial Sequence
  Description of Artificial Sequence: Synthetic oligonucleotide
aaauuauaacugcaccugu

SEQ ID NO: 381474 - RNA, 19 nt, Artificial Sequence
  Description of Artificial Sequence: Synthetic oligonucleotide
uagauuuagggccaguuuc

SEQ ID NO: 381475 - RNA, 19 nt, Artificial Sequence
  Description of Artificial Sequence: Synthetic oligonucleotide
aacagcauaaagaauacaa

SEQ ID NO: 381476 - RNA, 19 nt, Artificial Sequence
  Description of Artificial Sequence: Synthetic oligonucleotide
uauccuuaaauuguugaag

SEQ ID NO: 381477 - RNA, 19 nt, Artificial Sequence
  Description of Artificial Sequence: Synthetic oligonucleotide
cucaaauuauaacugcacc

SEQ ID NO: 381478 - RNA, 19 nt, Artificial Sequence
  Description of Artificial Sequence: Synthetic oligonucleotide
uaugagguggaccauaaua

SEQ ID NO: 381479 - RNA, 19 nt, Artificial Sequence
  Description of Artificial Sequence: Synthetic oligonucleotide
ucuucuaugggaucagccc

SEQ ID NO: 381480 - RNA, 19 nt, Artificial Sequence
  Description of Artificial Sequence: Synthetic oligonucleotide
uuguucauguccaagcgga

SEQ ID NO: 381481 - RNA, 19 nt, Artificial Sequence
  Description of Artificial Sequence: Synthetic oligonucleotide
caaaugguuuugaaaaccc

SEQ ID NO: 381482 - RNA, 19 nt, Artificial Sequence
  Description of Artificial Sequence: Synthetic oligonucleotide
uuauucuagcaauuuaagu

SEQ ID NO: 381483 - RNA, 19 nt, Artificial Sequence
  Description of Artificial Sequence: Synthetic oligonucleotide
caauuuaccuuauucuagc

SEQ ID NO: 381484 - RNA, 19 nt, Artificial Sequence
  Description of Artificial Sequence: Synthetic oligonucleotide
agccaaaugguuuugaaaa

SEQ ID NO: 381485 - RNA, 19 nt, Artificial Sequence
  Description of Artificial Sequence: Synthetic oligonucleotide
guaacauacaaauaguugu

SEQ ID NO: 381486 - RNA, 19 nt, Artificial Sequence
  Description of Artificial Sequence: Synthetic oligonucleotide
aacuaccuuuucaagacac

SEQ ID NO: 381487 - RNA, 19 nt, Artificial Sequence
  Description of Artificial Sequence: Synthetic oligonucleotide
aaagccuauuguuggcaac

SEQ ID NO: 381488 - RNA, 19 nt, Artificial Sequence
  Description of Artificial Sequence: Synthetic oligonucleotide
aacgcauaaccucuguuga

SEQ ID NO: 381489 - RNA, 19 nt, Artificial Sequence
  Description of Artificial Sequence: Synthetic oligonucleotide
uaaaucacuaugugcaacu

SEQ ID NO: 381490 - RNA, 19 nt, Artificial Sequence
  Description of Artificial Sequence: Synthetic oligonucleotide
accagcaucaagcaauguc

SEQ ID NO: 381491 - RNA, 19 nt, Artificial Sequence
  Description of Artificial Sequence: Synthetic oligonucleotide
acauuguauguacuacagc

SEQ ID NO: 381492 - RNA, 19 nt, Artificial Sequence
  Description of Artificial Sequence: Synthetic oligonucleotide
auaguuaugguaaucauaa

SEQ ID NO: 381493 - RNA, 19 nt, Artificial Sequence
  Description of Artificial Sequence: Synthetic oligonucleotide
uaugggaucagcccauuca

SEQ ID NO: 381494 - RNA, 19 nt, Artificial Sequence
  Description of Artificial Sequence: Synthetic oligonucleotide
caccuguuuagauuuaggg

SEQ ID NO: 381495 - RNA, 19 nt, Artificial Sequence
  Description of Artificial Sequence: Synthetic oligonucleotide
aacgcgugcucgcugcucc

SEQ ID NO: 381496 - RNA, 19 nt, Artificial Sequence
  Description of Artificial Sequence: Synthetic oligonucleotide
acaucaaguguauagccug

SEQ ID NO: 381497 - RNA, 19 nt, Artificial Sequence
  Description of Artificial Sequence: Synthetic oligonucleotide
uaguuguucugauacaaga

SEQ ID NO: 381498 - RNA, 19 nt, Artificial Sequence
  Description of Artificial Sequence: Synthetic oligonucleotide
gcauaaagaauacaaguag

SEQ ID NO: 381499 - RNA, 19 nt, Artificial Sequence
  Description of Artificial Sequence: Synthetic oligonucleotide
guuaugguaaucauaacca

SEQ ID NO: 381500 - RNA, 19 nt, Artificial Sequence
  Description of Artificial Sequence: Synthetic oligonucleotide
aagguugcguacaaacagc

SEQ ID NO: 381501 - RNA, 19 nt, Artificial Sequence
  Description of Artificial Sequence: Synthetic oligonucleotide
ugcagaaguaguauccaug

SEQ ID NO: 381502 - RNA, 19 nt, Artificial Sequence
  Description of Artificial Sequence: Synthetic oligonucleotide
uacuaaauucuucaagaau

SEQ ID NO: 381503 - RNA, 19 nt, Artificial Sequence
  Description of Artificial Sequence: Synthetic oligonucleotide
guuaccagaauccccgcgg

SEQ ID NO: 381504 - RNA, 19 nt, Artificial Sequence
  Description of Artificial Sequence: Synthetic oligonucleotide
aauuuaccuuauucuagca

SEQ ID NO: 381505 - RNA, 19 nt, Artificial Sequence
  Description of Artificial Sequence: Synthetic oligonucleotide
uguugaagaacugccaaug

SEQ ID NO: 381506 - RNA, 19 nt, Artificial Sequence
  Description of Artificial Sequence: Synthetic oligonucleotide
uugguaacauacaaauagu

SEQ ID NO: 381507 - RNA, 19 nt, Artificial Sequence
  Description of Artificial Sequence: Synthetic oligonucleotide
gaauggauaacugcagaag

SEQ ID NO: 381508 - RNA, 19 nt, Artificial Sequence
  Description of Artificial Sequence: Synthetic oligonucleotide
acaccaaugugcuuuccgg

SEQ ID NO: 381509 - RNA, 19 nt, Artificial Sequence
  Description of Artificial Sequence: Synthetic oligonucleotide
auaaccucuguugagacca

SEQ ID NO: 381510 - RNA, 19 nt, Artificial Sequence
  Description of Artificial Sequence: Synthetic oligonucleotide
ugcaacuagcccugcaacg

SEQ ID NO: 381511 - RNA, 19 nt, Artificial Sequence
  Description of Artificial Sequence: Synthetic oligonucleotide
uuaccuuugccauaacuuc

SEQ ID NO: 381512 - RNA, 19 nt, Artificial Sequence
  Description of Artificial Sequence: Synthetic oligonucleotide
aaucaggaaugccugcuca

SEQ ID NO: 381513 - RNA, 19 nt, Artificial Sequence
  Description of Artificial Sequence: Synthetic oligonucleotide
ugcugaccugaauaaacgg

SEQ ID NO: 381514 - RNA, 19 nt, Artificial Sequence
  Description of Artificial Sequence: Synthetic oligonucleotide
uccaucauuaaacgaagau

SEQ ID NO: 381515 - RNA, 19 nt, Artificial Sequence
  Description of Artificial Sequence: Synthetic oligonucleotide
caacguaaauuucaucuag

SEQ ID NO: 381516 - RNA, 19 nt, Artificial Sequence
  Description of Artificial Sequence: Synthetic oligonucleotide
uggauuguuaaaauauaua

SEQ ID NO: 381517 - RNA, 19 nt, Artificial Sequence
  Description of Artificial Sequence: Synthetic oligonucleotide
acuaccuagguuuucaguu

SEQ ID NO: 381518 - RNA, 19 nt, Artificial Sequence
  Description of Artificial Sequence: Synthetic oligonucleotide
gaaacauuguauguacuac

SEQ ID NO: 381519 - RNA, 19 nt, Artificial Sequence
  Description of Artificial Sequence: Synthetic oligonucleotide
aagaacugccaaugcgccg

SEQ ID NO: 381520 - RNA, 19 nt, Artificial Sequence
  Description of Artificial Sequence: Synthetic oligonucleotide
aaucuaaacacuacccaga

SEQ ID NO: 381521 - RNA, 19 nt, Artificial Sequence
  Description of Artificial Sequence: Synthetic oligonucleotide
aaacggaaucuggaggugg

SEQ ID NO: 381522 - RNA, 19 nt, Artificial Sequence
  Description of Artificial Sequence: Synthetic oligonucleotide
acucuuaggaauagagccc

SEQ ID NO: 381523 - RNA, 19 nt, Artificial Sequence
  Description of Artificial Sequence: Synthetic oligonucleotide
ugaauggauaacugcagaa

SEQ ID NO: 381524 - RNA, 19 nt, Artificial Sequence
  Description of Artificial Sequence: Synthetic oligonucleotide
acuuuaccacucauuaacc

SEQ ID NO: 381525 - RNA, 19 nt, Artificial Sequence
  Description of Artificial Sequence: Synthetic oligonucleotide
uuuaccacucauuaaccua

SEQ ID NO: 381526 - RNA, 19 nt, Artificial Sequence
  Description of Artificial Sequence: Synthetic oligonucleotide
aggcauaugagguggacca

SEQ ID NO: 381527 - RNA, 19 nt, Artificial Sequence
  Description of Artificial Sequence: Synthetic oligonucleotide
ucgccagaaacauaagugu

SEQ ID NO: 381528 - RNA, 19 nt, Artificial Sequence
  Description of Artificial Sequence: Synthetic oligonucleotide
ugccuguaagucuucauga

SEQ ID NO: 381529 - RNA, 19 nt, Artificial Sequence
  Description of Artificial Sequence: Synthetic oligonucleotide
caagcucauccucaaauag

SEQ ID NO: 381530 - RNA, 19 nt, Artificial Sequence
  Description of Artificial Sequence: Synthetic oligonucleotide
cugcugaccugaauaaacg

SEQ ID NO: 381531 - RNA, 19 nt, Artificial Sequence
  Description of Artificial Sequence: Synthetic oligonucleotide
aaauaucucggugccaaca

SEQ ID NO: 381532 - RNA, 19 nt, Artificial Sequence
  Description of Artificial Sequence: Synthetic oligonucleotide
uggaccauaauaguaguaa

SEQ ID NO: 381533 - RNA, 19 nt, Artificial Sequence
  Description of Artificial Sequence: Synthetic oligonucleotide
aaucaguucgccagaaaca

SEQ ID NO: 381534 - RNA, 19 nt, Artificial Sequence
  Description of Artificial Sequence: Synthetic oligonucleotide
aauuguugaagaacugcca

SEQ ID NO: 381535 - RNA, 19 nt, Artificial Sequence
  Description of Artificial Sequence: Synthetic oligonucleotide
accaauuuaccuuauucua

SEQ ID NO: 381536 - RNA, 19 nt, Artificial Sequence
  Description of Artificial Sequence: Synthetic oligonucleotide
aaaagccuauuguuggcaa

SEQ ID NO: 381537 - RNA, 19 nt, Artificial Sequence
  Description of Artificial Sequence: Synthetic oligonucleotide
uuauaacugcaccuguuua

SEQ ID NO: 381538 - RNA, 19 nt, Artificial Sequence
  Description of Artificial Sequence: Synthetic oligonucleotide
cauaaguguggcuuuguuc

SEQ ID NO: 381539 - RNA, 19 nt, Artificial Sequence
  Description of Artificial Sequence: Synthetic oligonucleotide
aagcggauuggauuguuaa

SEQ ID NO: 381540 - RNA, 19 nt, Artificial Sequence
  Description of Artificial Sequence: Synthetic oligonucleotide
aacgaagaucccauauagg

SEQ ID NO: 381541 - RNA, 19 nt, Artificial Sequence
  Description of Artificial Sequence: Synthetic oligonucleotide
aacuaccuagguuuucagu

SEQ ID NO: 381542 - RNA, 19 nt, Artificial Sequence
  Description of Artificial Sequence: Synthetic oligonucleotide
auuauaacugcaccuguuu

SEQ ID NO: 381543 - RNA, 19 nt, Artificial Sequence
  Description of Artificial Sequence: Synthetic oligonucleotide
uaucucggugccaacagaa

SEQ ID NO: 381544 - RNA, 19 nt, Artificial Sequence
  Description of Artificial Sequence: Synthetic oligonucleotide
acgaauuucaugauuauua

SEQ ID NO: 381545 - RNA, 19 nt, Artificial Sequence
  Description of Artificial Sequence: Synthetic oligonucleotide
acugcaccuguuuagauuu

SEQ ID NO: 381546 - RNA, 19 nt, Artificial Sequence
  Description of Artificial Sequence: Synthetic oligonucleotide
aauagaucucuggggaucu

SEQ ID NO: 381547 - RNA, 19 nt, Artificial Sequence
  Description of Artificial Sequence: Synthetic oligonucleotide
ugguacaagcucauccuca

SEQ ID NO: 381548 - RNA, 19 nt, Artificial Sequence
  Description of Artificial Sequence: Synthetic oligonucleotide
ucaagcaaugucugaaaau

SEQ ID NO: 381549 - RNA, 19 nt, Artificial Sequence
  Description of Artificial Sequence: Synthetic oligonucleotide
cuuuacuggaguccgcuac

SEQ ID NO: 381550 - RNA, 19 nt, Artificial Sequence
  Description of Artificial Sequence: Synthetic oligonucleotide
gauuggauuguuaaaauau

SEQ ID NO: 381551 - RNA, 19 nt, Artificial Sequence
  Description of Artificial Sequence: Synthetic oligonucleotide
gguaacauacaaauaguug

SEQ ID NO: 381552 - RNA, 19 nt, Artificial Sequence
  Description of Artificial Sequence: Synthetic oligonucleotide
uauguacuacagccaaaug

SEQ ID NO: 381553 - RNA, 19 nt, Artificial Sequence
  Description of Artificial Sequence: Synthetic oligonucleotide
gugccuuaaucuuugacuc

SEQ ID NO: 381554 - RNA, 19 nt, Artificial Sequence
  Description of Artificial Sequence: Synthetic oligonucleotide
augguacaagcucauccuc

SEQ ID NO: 381555 - RNA, 19 nt, Artificial Sequence
  Description of Artificial Sequence: Synthetic oligonucleotide
acgauaguuaugguaauca

SEQ ID NO: 381556 - RNA, 19 nt, Artificial Sequence
  Description of Artificial Sequence: Synthetic oligonucleotide
aaacugacuaaaugacuuu

SEQ ID NO: 381557 - RNA, 19 nt, Artificial Sequence
  Description of Artificial Sequence: Synthetic oligonucleotide
uuacagauucccuauuguu

SEQ ID NO: 381558 - RNA, 19 nt, Artificial Sequence
  Description of Artificial Sequence: Synthetic oligonucleotide
agacuuugacuuuaccacu

SEQ ID NO: 381559 - RNA, 19 nt, Artificial Sequence
  Description of Artificial Sequence: Synthetic oligonucleotide
uccuugguuuuacucuuag

SEQ ID NO: 381560 - RNA, 19 nt, Artificial Sequence
  Description of Artificial Sequence: Synthetic oligonucleotide
acccaauuaggucaaaguu

SEQ ID NO: 381561 - RNA, 19 nt, Artificial Sequence
  Description of Artificial Sequence: Synthetic oligonucleotide
aagagugccuuaaucuuug

SEQ ID NO: 381562 - RNA, 19 nt, Artificial Sequence
  Description of Artificial Sequence: Synthetic oligonucleotide
uccaacauuuccccagacu

SEQ ID NO: 381563 - RNA, 19 nt, Artificial Sequence
  Description of Artificial Sequence: Synthetic oligonucleotide
caccccuuccucuagcucc

SEQ ID NO: 381564 - RNA, 19 nt, Artificial Sequence
  Description of Artificial Sequence: Synthetic oligonucleotide
accugaauaaacggaaucu

SEQ ID NO: 381565 - RNA, 19 nt, Artificial Sequence
  Description of Artificial Sequence: Synthetic oligonucleotide
ugacuaaaugacuuuucua

SEQ ID NO: 381566 - RNA, 19 nt, Artificial Sequence
  Description of Artificial Sequence: Synthetic oligonucleotide
uccgguuggugauauaaaa

SEQ ID NO: 381567 - RNA, 19 nt, Artificial Sequence
  Description of Artificial Sequence: Synthetic oligonucleotide
gaacgccucuugcugaucc

SEQ ID NO: 381568 - RNA, 19 nt, Artificial Sequence
  Description of Artificial Sequence: Synthetic oligonucleotide
uucccuauuguuucuacuu

SEQ ID NO: 381569 - RNA, 19 nt, Artificial Sequence
  Description of Artificial Sequence: Synthetic oligonucleotide
ugagguggaccauaauagu

SEQ ID NO: 381570 - RNA, 19 nt, Artificial Sequence
  Description of Artificial Sequence: Synthetic oligonucleotide
acaauuuaacagccucuug

SEQ ID NO: 381571 - RNA, 19 nt, Artificial Sequence
  Description of Artificial Sequence: Synthetic oligonucleotide
gaccugaauaaacggaauc

SEQ ID NO: 381572 - RNA, 19 nt, Artificial Sequence
  Description of Artificial Sequence: Synthetic oligonucleotide
agaucacuauccuuaaauu

SEQ ID NO: 381573 - RNA, 19 nt, Artificial Sequence
  Description of Artificial Sequence: Synthetic oligonucleotide
uuaccagaauccccgcggc

SEQ ID NO: 381574 - RNA, 19 nt, Artificial Sequence
  Description of Artificial Sequence: Synthetic oligonucleotide
gagaucacuauccuuaaau

SEQ ID NO: 381575 - RNA, 19 nt, Artificial Sequence
  Description of Artificial Sequence: Synthetic oligonucleotide
auuaaccuacgccuugccu

SEQ ID NO: 381576 - RNA, 19 nt, Artificial Sequence
  Description of Artificial Sequence: Synthetic oligonucleotide
aacguaaauuucaucuagu

SEQ ID NO: 381577 - RNA, 19 nt, Artificial Sequence
  Description of Artificial Sequence: Synthetic oligonucleotide
uguccaagcggauuggauu

SEQ ID NO: 381578 - RNA, 19 nt, Artificial Sequence
  Description of Artificial Sequence: Synthetic oligonucleotide
ucaaguguauagccuguuc

SEQ ID NO: 381579 - RNA, 19 nt, Artificial Sequence
  Description of Artificial Sequence: Synthetic oligonucleotide
gaauaaccggcucuaccac

SEQ ID NO: 381580 - RNA, 19 nt, Artificial Sequence
  Description of Artificial Sequence: Synthetic oligonucleotide
aaauagcaguuguguacca

SEQ ID NO: 381581 - RNA, 19 nt, Artificial Sequence
  Description of Artificial Sequence: Synthetic oligonucleotide
acaaauaucucggugccaa

SEQ ID NO: 381582 - RNA, 19 nt, Artificial Sequence
  Description of Artificial Sequence: Synthetic oligonucleotide
aagccuauuguuggcaacu

SEQ ID NO: 381583 - RNA, 19 nt, Artificial Sequence
  Description of Artificial Sequence: Synthetic oligonucleotide
ccaauuuaccuuauucuag

SEQ ID NO: 381584 - RNA, 19 nt, Artificial Sequence
  Description of Artificial Sequence: Synthetic oligonucleotide
ccucaaauagaucucuggg

SEQ ID NO: 381585 - RNA, 19 nt, Artificial Sequence
  Description of Artificial Sequence: Synthetic oligonucleotide
agccaaauucucaaucagg

SEQ ID NO: 381586 - RNA, 19 nt, Artificial Sequence
  Description of Artificial Sequence: Synthetic oligonucleotide
uguugggcgccuccucucg

SEQ ID NO: 381587 - RNA, 19 nt, Artificial Sequence
  Description of Artificial Sequence: Synthetic oligonucleotide
uugcguacaaacagcacuu

SEQ ID NO: 381588 - RNA, 19 nt, Artificial Sequence
  Description of Artificial Sequence: Synthetic oligonucleotide
cuucacucguuccaguuuc

SEQ ID NO: 381589 - RNA, 19 nt, Artificial Sequence
  Description of Artificial Sequence: Synthetic oligonucleotide
gauaguuaugguaaucaua

SEQ ID NO: 381590 - RNA, 19 nt, Artificial Sequence
  Description of Artificial Sequence: Synthetic oligonucleotide
uaggaauagagcccacaaa

SEQ ID NO: 381591 - RNA, 19 nt, Artificial Sequence
  Description of Artificial Sequence: Synthetic oligonucleotide
cuuuccggaacgaauuuca

SEQ ID NO: 381592 - RNA, 19 nt, Artificial Sequence
  Description of Artificial Sequence: Synthetic oligonucleotide
ucaaucaggaaugccugcu

SEQ ID NO: 381593 - RNA, 19 nt, Artificial Sequence
  Description of Artificial Sequence: Synthetic oligonucleotide
cauaaccucuguugagacc

SEQ ID NO: 381594 - RNA, 19 nt, Artificial Sequence
  Description of Artificial Sequence: Synthetic oligonucleotide
ucauuaaccuacgccuugc

SEQ ID NO: 381595 - RNA, 19 nt, Artificial Sequence
  Description of Artificial Sequence: Synthetic oligonucleotide
aauuauaacugcaccuguu

SEQ ID NO: 381596 - RNA, 19 nt, Artificial Sequence
  Description of Artificial Sequence: Synthetic oligonucleotide
uucugcacaugagagagau

SEQ ID NO: 381597 - RNA, 19 nt, Artificial Sequence
  Description of Artificial Sequence: Synthetic oligonucleotide
ucccuauuguuucuacuuc

SEQ ID NO: 381598 - RNA, 19 nt, Artificial Sequence
  Description of Artificial Sequence: Synthetic oligonucleotide
cacucauuaaccuacgccu

SEQ ID NO: 381599 - RNA, 19 nt, Artificial Sequence
  Description of Artificial Sequence: Synthetic oligonucleotide
uuaccuuauucuagcaauu

SEQ ID NO: 381600 - RNA, 19 nt, Artificial Sequence
  Description of Artificial Sequence: Synthetic oligonucleotide
ucacuauccuuaaauuguu

SEQ ID NO: 381601 - RNA, 19 nt, Artificial Sequence
  Description of Artificial Sequence: Synthetic oligonucleotide
acuuuuaccuuugccauaa

SEQ ID NO: 381602 - RNA, 19 nt, Artificial Sequence
  Description of Artificial Sequence: Synthetic oligonucleotide
gauucccuauuguuucuac

SEQ ID NO: 381603 - RNA, 19 nt, Artificial Sequence
  Description of Artificial Sequence: Synthetic oligonucleotide
uaaccuacgccuugccugu

SEQ ID NO: 381604 - RNA, 19 nt, Artificial Sequence
  Description of Artificial Sequence: Synthetic oligonucleotide
uaguaguaaucaucauaca

SEQ ID NO: 381605 - RNA, 19 nt, Artificial Sequence
  Description of Artificial Sequence: Synthetic oligonucleotide
caucucgcucaucaaaaug

SEQ ID NO: 381606 - RNA, 19 nt, Artificial Sequence
  Description of Artificial Sequence: Synthetic oligonucleotide
acaaauaguuguucugaua

SEQ ID NO: 381607 - RNA, 19 nt, Artificial Sequence
  Description of Artificial Sequence: Synthetic oligonucleotide
aacgaauuucaugauuauu

SEQ ID NO: 381608 - RNA, 19 nt, Artificial Sequence
  Description of Artificial Sequence: Synthetic oligonucleotide
ucucgcucaucaaaaugaa

SEQ ID NO: 381609 - RNA, 19 nt, Artificial Sequence
  Description of Artificial Sequence: Synthetic oligonucleotide
ucuaaacacuacccagaaa

SEQ ID NO: 381610 - RNA, 19 nt, Artificial Sequence
  Description of Artificial Sequence: Synthetic oligonucleotide
cuucuaugggaucagccca

SEQ ID NO: 381611 - RNA, 19 nt, Artificial Sequence
  Description of Artificial Sequence: Synthetic oligonucleotide
ugcgccgucuucauugaac

SEQ ID NO: 381612 - RNA, 19 nt, Artificial Sequence
  Description of Artificial Sequence: Synthetic oligonucleotide
aucccauauagguccagcu

SEQ ID NO: 381613 - RNA, 19 nt, Artificial Sequence
  Description of Artificial Sequence: Synthetic oligonucleotide
uuuuacucuuaggaauaga

SEQ ID NO: 381614 - RNA, 19 nt, Artificial Sequence
  Description of Artificial Sequence: Synthetic oligonucleotide
cucauuaaccuacgccuug

SEQ ID NO: 381615 - RNA, 19 nt, Artificial Sequence
  Description of Artificial Sequence: Synthetic oligonucleotide
aagcuucgauagcucuuuc

SEQ ID NO: 381616 - RNA, 19 nt, Artificial Sequence
  Description of Artificial Sequence: Synthetic oligonucleotide
acaugagagagaucacuau

SEQ ID NO: 381617 - RNA, 19 nt, Artificial Sequence
  Description of Artificial Sequence: Synthetic oligonucleotide
gaggcauaugagguggacc

SEQ ID NO: 381618 - RNA, 19 nt, Artificial Sequence
  Description of Artificial Sequence: Synthetic oligonucleotide
ugguccuuuacuggagucc

SEQ ID NO: 381619 - RNA, 19 nt, Artificial Sequence
  Description of Artificial Sequence: Synthetic oligonucleotide
acaaguagccaaaugguuu

SEQ ID NO: 381620 - RNA, 19 nt, Artificial Sequence
  Description of Artificial Sequence: Synthetic oligonucleotide
auauccaccacgauaguua

SEQ ID NO: 381621 - RNA, 19 nt, Artificial Sequence
  Description of Artificial Sequence: Synthetic oligonucleotide
aucaguucgccagaaacau

SEQ ID NO: 381622 - RNA, 19 nt, Artificial Sequence
  Description of Artificial Sequence: Synthetic oligonucleotide
uauccaccacgauaguuau

SEQ ID NO: 381623 - RNA, 19 nt, Artificial Sequence
  Description of Artificial Sequence: Synthetic oligonucleotide
uugacugcaccaucucgcu

SEQ ID NO: 381624 - RNA, 19 nt, Artificial Sequence
  Description of Artificial Sequence: Synthetic oligonucleotide
cuucgauagcucuuucauc

SEQ ID NO: 381625 - RNA, 19 nt, Artificial Sequence
  Description of Artificial Sequence: Synthetic oligonucleotide
augggaucagcccauucaa

SEQ ID NO: 381626 - RNA, 19 nt, Artificial Sequence
  Description of Artificial Sequence: Synthetic oligonucleotide
ugcaccuguuuagauuuag

SEQ ID NO: 381627 - RNA, 19 nt, Artificial Sequence
  Description of Artificial Sequence: Synthetic oligonucleotide
aauccccgcggccucuuug

SEQ ID NO: 381628 - RNA, 19 nt, Artificial Sequence
  Description of Artificial Sequence: Synthetic oligonucleotide
uucuaugggaucagcccau

SEQ ID NO: 381629 - RNA, 19 nt, Artificial Sequence
  Description of Artificial Sequence: Synthetic oligonucleotide
caaucuaucagucuccaau

SEQ ID NO: 381630 - RNA, 19 nt, Artificial Sequence
  Description of Artificial Sequence: Synthetic oligonucleotide
uguccgaccgggucgggug

SEQ ID NO: 381631 - RNA, 19 nt, Artificial Sequence
  Description of Artificial Sequence: Synthetic oligonucleotide
ugccuuaaucuuugacuca

SEQ ID NO: 381632 - RNA, 19 nt, Artificial Sequence
  Description of Artificial Sequence: Synthetic oligonucleotide
acgcauaaccucuguugag

SEQ ID NO: 381633 - RNA, 19 nt, Artificial Sequence
  Description of Artificial Sequence: Synthetic oligonucleotide
ucccauauagguccagcuu

SEQ ID NO: 381634 - RNA, 19 nt, Artificial Sequence
  Description of Artificial Sequence: Synthetic oligonucleotide
auuaaacgaagaucccaua

SEQ ID NO: 381635 - RNA, 19 nt, Artificial Sequence
  Description of Artificial Sequence: Synthetic oligonucleotide
ggauccaucauuaaacgaa

SEQ ID NO: 381636 - RNA, 19 nt, Artificial Sequence
  Description of Artificial Sequence: Synthetic oligonucleotide
cacuauccuuaaauuguug

SEQ ID NO: 381637 - RNA, 19 nt, Artificial Sequence
  Description of Artificial Sequence: Synthetic oligonucleotide
uguuuagauuuagggccag

SEQ ID NO: 381638 - RNA, 19 nt, Artificial Sequence
  Description of Artificial Sequence: Synthetic oligonucleotide
gacuuugacuuuaccacuc

SEQ ID NO: 381639 - RNA, 19 nt, Artificial Sequence
  Description of Artificial Sequence: Synthetic oligonucleotide
cauuaaccuacgccuugcc

SEQ ID NO: 381640 - RNA, 19 nt, Artificial Sequence
  Description of Artificial Sequence: Synthetic oligonucleotide
agauuuagggccaguuucu

SEQ ID NO: 381641 - RNA, 19 nt, Artificial Sequence
  Description of Artificial Sequence: Synthetic oligonucleotide
auuggcaagguugcguaca

SEQ ID NO: 381642 - RNA, 19 nt, Artificial Sequence
  Description of Artificial Sequence: Synthetic oligonucleotide
aguuguucugauacaagau

SEQ ID NO: 381643 - RNA, 19 nt, Artificial Sequence
  Description of Artificial Sequence: Synthetic oligonucleotide
acgaccucuugauggagca

SEQ ID NO: 381644 - RNA, 19 nt, Artificial Sequence
  Description of Artificial Sequence: Synthetic oligonucleotide
gguccuuuacuggaguccg

SEQ ID NO: 381645 - RNA, 19 nt, Artificial Sequence
  Description of Artificial Sequence: Synthetic oligonucleotide
guagccauguuuccagaga

SEQ ID NO: 381646 - RNA, 19 nt, Artificial Sequence
  Description of Artificial Sequence: Synthetic oligonucleotide
uucacucguuccaguuucc

SEQ ID NO: 381647 - RNA, 19 nt, Artificial Sequence
  Description of Artificial Sequence: Synthetic oligonucleotide
uucugugguaaaccagcau

SEQ ID NO: 381648 - RNA, 19 nt, Artificial Sequence
  Description of Artificial Sequence: Synthetic oligonucleotide
agcaguuguguaccaauuu

SEQ ID NO: 381649 - RNA, 19 nt, Artificial Sequence
  Description of Artificial Sequence: Synthetic oligonucleotide
cacgaccucuugauggagc

SEQ ID NO: 381650 - RNA, 19 nt, Artificial Sequence
  Description of Artificial Sequence: Synthetic oligonucleotide
auaucucggugccaacaga

SEQ ID NO: 381651 - RNA, 19 nt, Artificial Sequence
  Description of Artificial Sequence: Synthetic oligonucleotide
ccacucauuaaccuacgcc

SEQ ID NO: 381652 - RNA, 19 nt, Artificial Sequence
  Description of Artificial Sequence: Synthetic oligonucleotide
cugaauggauaacugcaga

SEQ ID NO: 381653 - RNA, 19 nt, Artificial Sequence
  Description of Artificial Sequence: Synthetic oligonucleotide
cagaugucucaaauuauaa

SEQ ID NO: 381654 - RNA, 19 nt, Artificial Sequence
  Description of Artificial Sequence: Synthetic oligonucleotide
uauuggcaagguugcguac

SEQ ID NO: 381655 - RNA, 19 nt, Artificial Sequence
  Description of Artificial Sequence: Synthetic oligonucleotide
uaccuagguuuucaguuuu

SEQ ID NO: 381656 - RNA, 19 nt, Artificial Sequence
  Description of Artificial Sequence: Synthetic oligonucleotide
cuguugagaccaguaagug

SEQ ID NO: 381657 - RNA, 19 nt, Artificial Sequence
  Description of Artificial Sequence: Synthetic oligonucleotide
cauuaaacgaagaucccau

SEQ ID NO: 381658 - RNA, 19 nt, Artificial Sequence
  Description of Artificial Sequence: Synthetic oligonucleotide
ccaucauuaaacgaagauc

SEQ ID NO: 381659 - RNA, 19 nt, Artificial Sequence
  Description of Artificial Sequence: Synthetic oligonucleotide
aaaucacuaugugcaacua

SEQ ID NO: 381660 - RNA, 19 nt, Artificial Sequence
  Description of Artificial Sequence: Synthetic oligonucleotide
ggaacgaauuucaugauua

SEQ ID NO: 381661 - RNA, 19 nt, Artificial Sequence
  Description of Artificial Sequence: Synthetic oligonucleotide
gaggagcagccccacgacc

SEQ ID NO: 381662 - RNA, 19 nt, Artificial Sequence
  Description of Artificial Sequence: Synthetic oligonucleotide
uaaccggcucuaccacggg

SEQ ID NO: 381663 - RNA, 19 nt, Artificial Sequence
  Description of Artificial Sequence: Synthetic oligonucleotide
uaguuaccagaauccccgc

SEQ ID NO: 381664 - RNA, 19 nt, Artificial Sequence
  Description of Artificial Sequence: Synthetic oligonucleotide
cccuauuguuucuacuucc

SEQ ID NO: 381665 - RNA, 19 nt, Artificial Sequence
  Description of Artificial Sequence: Synthetic oligonucleotide
aguaaucaucauacauuug

SEQ ID NO: 381666 - RNA, 19 nt, Artificial Sequence
  Description of Artificial Sequence: Synthetic oligonucleotide
aggaauccuguccgaccgg

SEQ ID NO: 381667 - RNA, 19 nt, Artificial Sequence
  Description of Artificial Sequence: Synthetic oligonucleotide
cauaugagguggaccauaa

SEQ ID NO: 381668 - RNA, 19 nt, Artificial Sequence
  Description of Artificial Sequence: Synthetic oligonucleotide
caguuucccaaacugacua

SEQ ID NO: 381669 - RNA, 19 nt, Artificial Sequence
  Description of Artificial Sequence: Synthetic oligonucleotide
agcggauuggauuguuaaa

SEQ ID NO: 381670 - RNA, 19 nt, Artificial Sequence
  Description of Artificial Sequence: Synthetic oligonucleotide
ucauauccaccacgauagu

SEQ ID NO: 381671 - RNA, 19 nt, Artificial Sequence
  Description of Artificial Sequence: Synthetic oligonucleotide
ccccacgaccucuugaugg

SEQ ID NO: 381672 - RNA, 19 nt, Artificial Sequence
  Description of Artificial Sequence: Synthetic oligonucleotide
aacgccucuugcugaucca

SEQ ID NO: 381673 - RNA, 19 nt, Artificial Sequence
  Description of Artificial Sequence: Synthetic oligonucleotide
ugccaaugcgccgucuuca

SEQ ID NO: 381674 - RNA, 19 nt, Artificial Sequence
  Description of Artificial Sequence: Synthetic oligonucleotide
ccacaaauaucucggugcc

SEQ ID NO: 381675 - RNA, 19 nt, Artificial Sequence
  Description of Artificial Sequence: Synthetic oligonucleotide
uuccaacauuuccccagac

SEQ ID NO: 381676 - RNA, 19 nt, Artificial Sequence
  Description of Artificial Sequence: Synthetic oligonucleotide
caaucaggaaugccugcuc

SEQ ID NO: 381677 - RNA, 19 nt, Artificial Sequence
  Description of Artificial Sequence: Synthetic oligonucleotide
cugacuaaaugacuuuucu

SEQ ID NO: 381678 - RNA, 19 nt, Artificial Sequence
  Description of Artificial Sequence: Synthetic oligonucleotide
aguguauagccuguucuuu

SEQ ID NO: 381679 - RNA, 19 nt, Artificial Sequence
  Description of Artificial Sequence: Synthetic oligonucleotide
gagguggaccauaauagua

SEQ ID NO: 381680 - RNA, 19 nt, Artificial Sequence
  Description of Artificial Sequence: Synthetic oligonucleotide
cacggggaggagcagcccc

SEQ ID NO: 381681 - RNA, 19 nt, Artificial Sequence
  Description of Artificial Sequence: Synthetic oligonucleotide
guauacauuuaggugugaa

SEQ ID NO: 381682 - RNA, 19 nt, Artificial Sequence
  Description of Artificial Sequence: Synthetic oligonucleotide
ugcuuuccggaacgaauuu

SEQ ID NO: 381683 - RNA, 19 nt, Artificial Sequence
  Description of Artificial Sequence: Synthetic oligonucleotide
agguugcguacaaacagca

SEQ ID NO: 381684 - RNA, 19 nt, Artificial Sequence
  Description of Artificial Sequence: Synthetic oligonucleotide
guucgccagaaacauaagu

SEQ ID NO: 381685 - RNA, 19 nt, Artificial Sequence
  Description of Artificial Sequence: Synthetic oligonucleotide
ucggugccaacagaaggcu

SEQ ID NO: 381686 - RNA, 19 nt, Artificial Sequence
  Description of Artificial Sequence: Synthetic oligonucleotide
uagcccugcaacguaaauu

SEQ ID NO: 381687 - RNA, 19 nt, Artificial Sequence
  Description of Artificial Sequence: Synthetic oligonucleotide
agagaucacuauccuuaaa

SEQ ID NO: 381688 - RNA, 19 nt, Artificial Sequence
  Description of Artificial Sequence: Synthetic oligonucleotide
ccuugacugcaccaucucg

SEQ ID NO: 381689 - RNA, 19 nt, Artificial Sequence
  Description of Artificial Sequence: Synthetic oligonucleotide
aacuagcccugcaacguaa

SEQ ID NO: 381690 - RNA, 19 nt, Artificial Sequence
  Description of Artificial Sequence: Synthetic oligonucleotide
cuccucucgcaccacgaac

SEQ ID NO: 381691 - RNA, 19 nt, Artificial Sequence
  Description of Artificial Sequence: Synthetic oligonucleotide
uaccaccccuuccucuagc

SEQ ID NO: 381692 - RNA, 19 nt, Artificial Sequence
  Description of Artificial Sequence: Synthetic oligonucleotide
agccccacgaccucuugau

SEQ ID NO: 381693 - RNA, 19 nt, Artificial Sequence
  Description of Artificial Sequence: Synthetic oligonucleotide
gaccgggucggguggcggg

SEQ ID NO: 381694 - RNA, 19 nt, Artificial Sequence
  Description of Artificial Sequence: Synthetic oligonucleotide
ggaauccuguccgaccggg

SEQ ID NO: 381695 - RNA, 19 nt, Artificial Sequence
  Description of Artificial Sequence: Synthetic oligonucleotide
guauguacuacagccaaau

SEQ ID NO: 381696 - RNA, 19 nt, Artificial Sequence
  Description of Artificial Sequence: Synthetic oligonucleotide
caccaaugugcuuuccgga

SEQ ID NO: 381697 - RNA, 19 nt, Artificial Sequence
  Description of Artificial Sequence: Synthetic oligonucleotide
aagaucccauauaggucca

SEQ ID NO: 381698 - RNA, 19 nt, Artificial Sequence
  Description of Artificial Sequence: Synthetic oligonucleotide
gaacgaauuucaugauuau

SEQ ID NO: 381699 - RNA, 19 nt, Artificial Sequence
  Description of Artificial Sequence: Synthetic oligonucleotide
gcccucgaccucuuguugg

SEQ ID NO: 381700 - RNA, 19 nt, Artificial Sequence
  Description of Artificial Sequence: Synthetic oligonucleotide
cuaugggaucagcccauuc

SEQ ID NO: 381701 - RNA, 19 nt, Artificial Sequence
  Description of Artificial Sequence: Synthetic oligonucleotide
aguugguaacauacaaaua

SEQ ID NO: 381702 - RNA, 19 nt, Artificial Sequence
  Description of Artificial Sequence: Synthetic oligonucleotide
caccacgauaguuauggua

SEQ ID NO: 381703 - RNA, 19 nt, Artificial Sequence
  Description of Artificial Sequence: Synthetic oligonucleotide
accaccccuuccucuagcu

SEQ ID NO: 381704 - RNA, 19 nt, Artificial Sequence
  Description of Artificial Sequence: Synthetic oligonucleotide
ucuuuguuguugggcgccu

SEQ ID NO: 381705 - RNA, 19 nt, Artificial Sequence
  Description of Artificial Sequence: Synthetic oligonucleotide
gguuuuacucuuaggaaua

SEQ ID NO: 381706 - RNA, 19 nt, Artificial Sequence
  Description of Artificial Sequence: Synthetic oligonucleotide
aucucggugccaacagaag

SEQ ID NO: 381707 - RNA, 19 nt, Artificial Sequence
  Description of Artificial Sequence: Synthetic oligonucleotide
gcaguuguguaccaauuua

SEQ ID NO: 381708 - RNA, 19 nt, Artificial Sequence
  Description of Artificial Sequence: Synthetic oligonucleotide
agagugccuuaaucuuuga

SEQ ID NO: 381709 - RNA, 19 nt, Artificial Sequence
  Description of Artificial Sequence: Synthetic oligonucleotide
acgcgugcucgcugcuccc

SEQ ID NO: 381710 - RNA, 19 nt, Artificial Sequence
  Description of Artificial Sequence: Synthetic oligonucleotide
gcugaccugaauaaacgga

SEQ ID NO: 381711 - RNA, 19 nt, Artificial Sequence
  Description of Artificial Sequence: Synthetic oligonucleotide
caaguagccaaaugguuuu

SEQ ID NO: 381712 - RNA, 19 nt, Artificial Sequence
  Description of Artificial Sequence: Synthetic oligonucleotide
aguauacauuuagguguga

SEQ ID NO: 381713 - RNA, 19 nt, Artificial Sequence
  Description of Artificial Sequence: Synthetic oligonucleotide
cauuugauucuuugcugcu

SEQ ID NO: 381714 - RNA, 19 nt, Artificial Sequence
  Description of Artificial Sequence: Synthetic oligonucleotide
auccccgcggccucuuugu

SEQ ID NO: 381715 - RNA, 19 nt, Artificial Sequence
  Description of Artificial Sequence: Synthetic oligonucleotide
acucauuaaccuacgccuu

SEQ ID NO: 381716 - RNA, 19 nt, Artificial Sequence
  Description of Artificial Sequence: Synthetic oligonucleotide
aguucgccagaaacauaag

SEQ ID NO: 381717 - RNA, 19 nt, Artificial Sequence
  Description of Artificial Sequence: Synthetic oligonucleotide
gcggauuggauuguuaaaa

SEQ ID NO: 381718 - RNA, 19 nt, Artificial Sequence
  Description of Artificial Sequence: Synthetic oligonucleotide
gggaacgcgugcucgcugc

SEQ ID NO: 381719 - RNA, 19 nt, Artificial Sequence
  Description of Artificial Sequence: Synthetic oligonucleotide
gcaccuguuuagauuuagg

SEQ ID NO: 381720 - RNA, 19 nt, Artificial Sequence
  Description of Artificial Sequence: Synthetic oligonucleotide
guccgaccgggucgggugg

SEQ ID NO: 381721 - RNA, 19 nt, Artificial Sequence
  Description of Artificial Sequence: Synthetic oligonucleotide
uccaagcggauuggauugu

SEQ ID NO: 381722 - RNA, 19 nt, Artificial Sequence
  Description of Artificial Sequence: Synthetic oligonucleotide
accggcucuaccacgggga

SEQ ID NO: 381723 - RNA, 19 nt, Artificial Sequence
  Description of Artificial Sequence: Synthetic oligonucleotide
caaacagcacuuuuaccuu

SEQ ID NO: 381724 - RNA, 19 nt, Artificial Sequence
  Description of Artificial Sequence: Synthetic oligonucleotide
ggccaaucuaucagucucc

SEQ ID NO: 381725 - RNA, 19 nt, Artificial Sequence
  Description of Artificial Sequence: Synthetic oligonucleotide
guugggcgccuccucucgc

SEQ ID NO: 381726 - RNA, 19 nt, Artificial Sequence
  Description of Artificial Sequence: Synthetic oligonucleotide
gcuucgauagcucuuucau

SEQ ID NO: 381727 - RNA, 19 nt, Artificial Sequence
  Description of Artificial Sequence: Synthetic oligonucleotide
aucaaguguauagccuguu

SEQ ID NO: 381728 - RNA, 19 nt, Artificial Sequence
  Description of Artificial Sequence: Synthetic oligonucleotide
agauucccuauuguuucua

SEQ ID NO: 381729 - RNA, 19 nt, Artificial Sequence
  Description of Artificial Sequence: Synthetic oligonucleotide
accuagguuuucaguuuug

SEQ ID NO: 381730 - RNA, 19 nt, Artificial Sequence
  Description of Artificial Sequence: Synthetic oligonucleotide
caucaaguguauagccugu

SEQ ID NO: 381731 - RNA, 19 nt, Artificial Sequence
  Description of Artificial Sequence: Synthetic oligonucleotide
cgaggaauccuguccgacc

SEQ ID NO: 381732 - RNA, 19 nt, Artificial Sequence
  Description of Artificial Sequence: Synthetic oligonucleotide
uaaccauaguauggaucuu

SEQ ID NO: 381733 - RNA, 19 nt, Artificial Sequence
  Description of Artificial Sequence: Synthetic oligonucleotide
ugcguacaaacagcacuuu

SEQ ID NO: 381734 - RNA, 19 nt, Artificial Sequence
  Description of Artificial Sequence: Synthetic oligonucleotide
cacuuuuaccuuugccaua

SEQ ID NO: 381735 - RNA, 19 nt, Artificial Sequence
  Description of Artificial Sequence: Synthetic oligonucleotide
uagucacaucaaguguaua

SEQ ID NO: 381736 - RNA, 19 nt, Artificial Sequence
  Description of Artificial Sequence: Synthetic oligonucleotide
caagcggauuggauuguua

SEQ ID NO: 381737 - RNA, 19 nt, Artificial Sequence
  Description of Artificial Sequence: Synthetic oligonucleotide
cuaccuagguuuucaguuu

SEQ ID NO: 381738 - RNA, 19 nt, Artificial Sequence
  Description of Artificial Sequence: Synthetic oligonucleotide
cacaaauaucucggugcca

SEQ ID NO: 381739 - RNA, 19 nt, Artificial Sequence
  Description of Artificial Sequence: Synthetic oligonucleotide
gagaucuccccgcggggcu

SEQ ID NO: 381740 - RNA, 19 nt, Artificial Sequence
  Description of Artificial Sequence: Synthetic oligonucleotide
cuuuguuguugggcgccuc

SEQ ID NO: 381741 - RNA, 19 nt, Artificial Sequence
  Description of Artificial Sequence: Synthetic oligonucleotide
uccgcuacuuuggucccuu

SEQ ID NO: 381742 - RNA, 19 nt, Artificial Sequence
  Description of Artificial Sequence: Synthetic oligonucleotide
gguggcggggaacgcgugc

SEQ ID NO: 381743 - RNA, 19 nt, Artificial Sequence
  Description of Artificial Sequence: Synthetic oligonucleotide
accgggucggguggcgggg

SEQ ID NO: 381744 - RNA, 19 nt, Artificial Sequence
  Description of Artificial Sequence: Synthetic oligonucleotide
cuaccuccacgcccucgac

SEQ ID NO: 381745 - RNA, 19 nt, Artificial Sequence
  Description of Artificial Sequence: Synthetic oligonucleotide
aaccuacgccuugccugug

SEQ ID NO: 381746 - RNA, 19 nt, Artificial Sequence
  Description of Artificial Sequence: Synthetic oligonucleotide
gccuauuguuggcaacuga

SEQ ID NO: 381747 - RNA, 19 nt, Artificial Sequence
  Description of Artificial Sequence: Synthetic oligonucleotide
gcuuuccggaacgaauuuc

SEQ ID NO: 381748 - RNA, 19 nt, Artificial Sequence
  Description of Artificial Sequence: Synthetic oligonucleotide
gccauaacuucaggaucag

SEQ ID NO: 381749 - RNA, 19 nt, Artificial Sequence
  Description of Artificial Sequence: Synthetic oligonucleotide
acuagcccugcaacguaaa

SEQ ID NO: 381750 - RNA, 19 nt, Artificial Sequence
  Description of Artificial Sequence: Synthetic oligonucleotide
caacuagcccugcaacgua

SEQ ID NO: 381751 - RNA, 19 nt, Artificial Sequence
  Description of Artificial Sequence: Synthetic oligonucleotide
gaacgcgugcucgcugcuc

SEQ ID NO: 381752 - RNA, 19 nt, Artificial Sequence
  Description of Artificial Sequence: Synthetic oligonucleotide
cagauucccuauuguuucu

SEQ ID NO: 381753 - RNA, 19 nt, Artificial Sequence
  Description of Artificial Sequence: Synthetic oligonucleotide
uggcaagguugcguacaaa

SEQ ID NO: 381754 - RNA, 19 nt, Artificial Sequence
  Description of Artificial Sequence: Synthetic oligonucleotide
ucauccgguuggugauaua

SEQ ID NO: 381755 - RNA, 19 nt, Artificial Sequence
  Description of Artificial Sequence: Synthetic oligonucleotide
gcaacuagcccugcaacgu

SEQ ID NO: 381756 - RNA, 19 nt, Artificial Sequence
  Description of Artificial Sequence: Synthetic oligonucleotide
cugcagaaguaguauccau

SEQ ID NO: 381757 - RNA, 19 nt, Artificial Sequence
  Description of Artificial Sequence: Synthetic oligonucleotide
gcucgcugcucccuguguc

SEQ ID NO: 381758 - RNA, 19 nt, Artificial Sequence
  Description of Artificial Sequence: Synthetic oligonucleotide
auccaccacgauaguuaug

SEQ ID NO: 381759 - RNA, 19 nt, Artificial Sequence
  Description of Artificial Sequence: Synthetic oligonucleotide
gugcuuuccggaacgaauu

SEQ ID NO: 381760 - RNA, 19 nt, Artificial Sequence
  Description of Artificial Sequence: Synthetic oligonucleotide
gccaaucuaucagucucca

SEQ ID NO: 381761 - RNA, 19 nt, Artificial Sequence
  Description of Artificial Sequence: Synthetic oligonucleotide
cucgcucaucaaaaugaau

SEQ ID NO: 381762 - RNA, 19 nt, Artificial Sequence
  Description of Artificial Sequence: Synthetic oligonucleotide
ccucuguugagaccaguaa

SEQ ID NO: 381763 - RNA, 19 nt, Artificial Sequence
  Description of Artificial Sequence: Synthetic oligonucleotide
ggauauccauagccaccuc

SEQ ID NO: 381764 - RNA, 19 nt, Artificial Sequence
  Description of Artificial Sequence: Synthetic oligonucleotide
cccauauagguccagcuuu

SEQ ID NO: 381765 - RNA, 19 nt, Artificial Sequence
  Description of Artificial Sequence: Synthetic oligonucleotide
augcgccgucuucauugaa

SEQ ID NO: 381766 - RNA, 19 nt, Artificial Sequence
  Description of Artificial Sequence: Synthetic oligonucleotide
auagaucucuggggaucuu

SEQ ID NO: 381767 - RNA, 19 nt, Artificial Sequence
  Description of Artificial Sequence: Synthetic oligonucleotide
gccuuaaucuuugacucau

SEQ ID NO: 381768 - RNA, 19 nt, Artificial Sequence
  Description of Artificial Sequence: Synthetic oligonucleotide
gcggggaacgcgugcucgc

SEQ ID NO: 381769 - RNA, 19 nt, Artificial Sequence
  Description of Artificial Sequence: Synthetic oligonucleotide
cguaaauuucaucuaguuu

SEQ ID NO: 381770 - RNA, 19 nt, Artificial Sequence
  Description of Artificial Sequence: Synthetic oligonucleotide
cgcauaaccucuguugaga

SEQ ID NO: 381771 - RNA, 19 nt, Artificial Sequence
  Description of Artificial Sequence: Synthetic oligonucleotide
cccacgaccucuugaugga

SEQ ID NO: 381772 - RNA, 19 nt, Artificial Sequence
  Description of Artificial Sequence: Synthetic oligonucleotide
gaauccuguccgaccgggu

SEQ ID NO: 381773 - RNA, 19 nt, Artificial Sequence
  Description of Artificial Sequence: Synthetic oligonucleotide
ccgaggaauccuguccgac

SEQ ID NO: 381774 - RNA, 19 nt, Artificial Sequence
  Description of Artificial Sequence: Synthetic oligonucleotide
uccccgcggccucuuuguu

SEQ ID NO: 381775 - RNA, 19 nt, Artificial Sequence
  Description of Artificial Sequence: Synthetic oligonucleotide
gucauccgguuggugauau

SEQ ID NO: 381776 - RNA, 19 nt, Artificial Sequence
  Description of Artificial Sequence: Synthetic oligonucleotide
ccaguuucccaaacugacu

SEQ ID NO: 381777 - RNA, 19 nt, Artificial Sequence
  Description of Artificial Sequence: Synthetic oligonucleotide
cuagcccugcaacguaaau

SEQ ID NO: 381778 - RNA, 19 nt, Artificial Sequence
  Description of Artificial Sequence: Synthetic oligonucleotide
gucggguggcggggaacgc

SEQ ID NO: 381779 - RNA, 19 nt, Artificial Sequence
  Description of Artificial Sequence: Synthetic oligonucleotide
ccgguuggugauauaaaau

SEQ ID NO: 381780 - RNA, 19 nt, Artificial Sequence
  Description of Artificial Sequence: Synthetic oligonucleotide
gggcgccuccucucgcacc

SEQ ID NO: 381781 - RNA, 19 nt, Artificial Sequence
  Description of Artificial Sequence: Synthetic oligonucleotide
cugcaccuguuuagauuua

SEQ ID NO: 381782 - RNA, 19 nt, Artificial Sequence
  Description of Artificial Sequence: Synthetic oligonucleotide
ccacgaccucuugauggag

SEQ ID NO: 381783 - RNA, 19 nt, Artificial Sequence
  Description of Artificial Sequence: Synthetic oligonucleotide
gcguacaaacagcacuuuu

SEQ ID NO: 381784 - RNA, 19 nt, Artificial Sequence
  Description of Artificial Sequence: Synthetic oligonucleotide
ccaaucuaucagucuccaa

SEQ ID NO: 381785 - RNA, 19 nt, Artificial Sequence
  Description of Artificial Sequence: Synthetic oligonucleotide
ccaccccuuccucuagcuc

SEQ ID NO: 381786 - RNA, 19 nt, Artificial Sequence
  Description of Artificial Sequence: Synthetic oligonucleotide
cgauaguuaugguaaucau

SEQ ID NO: 381787 - RNA, 19 nt, Artificial Sequence
  Description of Artificial Sequence: Synthetic oligonucleotide
cggugccaacagaaggcug

SEQ ID NO: 381788 - RNA, 19 nt, Artificial Sequence
  Description of Artificial Sequence: Synthetic oligonucleotide
ccuuuacuggaguccgcua

SEQ ID NO: 381789 - RNA, 19 nt, Artificial Sequence
  Description of Artificial Sequence: Synthetic oligonucleotide
cggauuggauuguuaaaau

SEQ ID NO: 381790 - RNA, 19 nt, Artificial Sequence
  Description of Artificial Sequence: Synthetic oligonucleotide
cgcccucgaccucuuguug

SEQ ID NO: 381791 - RNA, 19 nt, Artificial Sequence
  Description of Artificial Sequence: Synthetic oligonucleotide
gccaaugcgccgucuucau

SEQ ID NO: 381792 - RNA, 19 nt, Artificial Sequence
  Description of Artificial Sequence: Synthetic oligonucleotide
ggaacgcgugcucgcugcu

SEQ ID NO: 381793 - RNA, 19 nt, Artificial Sequence
  Description of Artificial Sequence: Synthetic oligonucleotide
gaauccccgcggccucuuu

SEQ ID NO: 381794 - RNA, 19 nt, Artificial Sequence
  Description of Artificial Sequence: Synthetic oligonucleotide
ccacggggaggagcagccc

SEQ ID NO: 381795 - RNA, 19 nt, Artificial Sequence
  Description of Artificial Sequence: Synthetic oligonucleotide
ggcauaugagguggaccau

SEQ ID NO: 381796 - RNA, 19 nt, Artificial Sequence
  Description of Artificial Sequence: Synthetic oligonucleotide
ccgcuacuuuggucccuug

SEQ ID NO: 381797 - RNA, 19 nt, Artificial Sequence
  Description of Artificial Sequence: Synthetic oligonucleotide
cgcggccucuuuguuguug

SEQ ID NO: 381798 - RNA, 19 nt, Artificial Sequence
  Description of Artificial Sequence: Synthetic oligonucleotide
guccgcuacuuuggucccu

SEQ ID NO: 381799 - RNA, 19 nt, Artificial Sequence
  Description of Artificial Sequence: Synthetic oligonucleotide
ccgaccgggucggguggcg

SEQ ID NO: 381800 - RNA, 19 nt, Artificial Sequence
  Description of Artificial Sequence: Synthetic oligonucleotide
cgaccgggucggguggcgg

SEQ ID NO: 381801 - RNA, 19 nt, Artificial Sequence
  Description of Artificial Sequence: Synthetic oligonucleotide
ccaccacgauaguuauggu

SEQ ID NO: 381802 - RNA, 19 nt, Artificial Sequence
  Description of Artificial Sequence: Synthetic oligonucleotide
gggcugcggccgaggaauc

SEQ ID NO: 381803 - RNA, 19 nt, Artificial Sequence
  Description of Artificial Sequence: Synthetic oligonucleotide
cgaacgccucuugcugauc

SEQ ID NO: 381804 - RNA, 19 nt, Artificial Sequence
  Description of Artificial Sequence: Synthetic oligonucleotide
ccaaugcgccgucuucauu

SEQ ID NO: 381805 - RNA, 19 nt, Artificial Sequence
  Description of Artificial Sequence: Synthetic oligonucleotide
ccaagcggauuggauuguu

SEQ ID NO: 381806 - RNA, 19 nt, Artificial Sequence
  Description of Artificial Sequence: Synthetic oligonucleotide
ccgcggccucuuuguuguu

SEQ ID NO: 381807 - RNA, 19 nt, Artificial Sequence
  Description of Artificial Sequence: Synthetic oligonucleotide
gacauauucagacugaagg

SEQ ID NO: 381808 - RNA, 19 nt, Artificial Sequence
  Description of Artificial Sequence: Synthetic oligonucleotide
aaacguauuaccgaaauac

SEQ ID NO: 381809 - RNA, 19 nt, Artificial Sequence
  Description of Artificial Sequence: Synthetic oligonucleotide
ugaauuacgggaaaguagg

SEQ ID NO: 381810 - RNA, 19 nt, Artificial Sequence
  Description of Artificial Sequence: Synthetic oligonucleotide
uauaauguaacacuguaca

SEQ ID NO: 381811 - RNA, 19 nt, Artificial Sequence
  Description of Artificial Sequence: Synthetic oligonucleotide
aaugcuagaauuucccugg

SEQ ID NO: 381812 - RNA, 19 nt, Artificial Sequence
  Description of Artificial Sequence: Synthetic oligonucleotide
uguaaaugcaguaacaaac

SEQ ID NO: 381813 - RNA, 19 nt, Artificial Sequence
  Description of Artificial Sequence: Synthetic oligonucleotide
aaaccaauuuaacuagccc

SEQ ID NO: 381814 - RNA, 19 nt, Artificial Sequence
  Description of Artificial Sequence: Synthetic oligonucleotide
aauauagucuagcuuuuac

SEQ ID NO: 381815 - RNA, 19 nt, Artificial Sequence
  Description of Artificial Sequence: Synthetic oligonucleotide
uguauaaauaagcuuaaga

SEQ ID NO: 381816 - RNA, 19 nt, Artificial Sequence
  Description of Artificial Sequence: Synthetic oligonucleotide
ucaugauacauauauaaug

SEQ ID NO: 381817 - RNA, 19 nt, Artificial Sequence
  Description of Artificial Sequence: Synthetic oligonucleotide
aauguaacacuguacaugu

SEQ ID NO: 381818 - RNA, 19 nt, Artificial Sequence
  Description of Artificial Sequence: Synthetic oligonucleotide
aauuauuugguacugcagu

SEQ ID NO: 381819 - RNA, 19 nt, Artificial Sequence
  Description of Artificial Sequence: Synthetic oligonucleotide
ucaacuuuccaucagguga

SEQ ID NO: 381820 - RNA, 19 nt, Artificial Sequence
  Description of Artificial Sequence: Synthetic oligonucleotide
uuaguaauggacauauuca

SEQ ID NO: 381821 - RNA, 19 nt, Artificial Sequence
  Description of Artificial Sequence: Synthetic oligonucleotide
aucuaugaagaacaggucg

SEQ ID NO: 381822 - RNA, 19 nt, Artificial Sequence
  Description of Artificial Sequence: Synthetic oligonucleotide
aaccaauuuaacuagcccu

SEQ ID NO: 381823 - RNA, 19 nt, Artificial Sequence
  Description of Artificial Sequence: Synthetic oligonucleotide
aauuauguuaacaaaccug

SEQ ID NO: 381824 - RNA, 19 nt, Artificial Sequence
  Description of Artificial Sequence: Synthetic oligonucleotide
uugaauuacgggaaaguag

SEQ ID NO: 381825 - RNA, 19 nt, Artificial Sequence
  Description of Artificial Sequence: Synthetic oligonucleotide
uuaagacauacacauguag

SEQ ID NO: 381826 - RNA, 19 nt, Artificial Sequence
  Description of Artificial Sequence: Synthetic oligonucleotide
uuugaaacugacaucagaa

SEQ ID NO: 381827 - RNA, 19 nt, Artificial Sequence
  Description of Artificial Sequence: Synthetic oligonucleotide
ugguuuacugaauucauag

SEQ ID NO: 381828 - RNA, 19 nt, Artificial Sequence
  Description of Artificial Sequence: Synthetic oligonucleotide
acuauucauaacaaaauac

SEQ ID NO: 381829 - RNA, 19 nt, Artificial Sequence
  Description of Artificial Sequence: Synthetic oligonucleotide
aagccuauauacuagucug

SEQ ID NO: 381830 - RNA, 19 nt, Artificial Sequence
  Description of Artificial Sequence: Synthetic oligonucleotide
aagcacuuuguaugaaacc

SEQ ID NO: 381831 - RNA, 19 nt, Artificial Sequence
  Description of Artificial Sequence: Synthetic oligonucleotide
aaagucuaaaucaaaauau

SEQ ID NO: 381832 - RNA, 19 nt, Artificial Sequence
  Description of Artificial Sequence: Synthetic oligonucleotide
ugaacaaggcaucuuacug

SEQ ID NO: 381833 - RNA, 19 nt, Artificial Sequence
  Description of Artificial Sequence: Synthetic oligonucleotide
aauggcuggaauaaagcac

SEQ ID NO: 381834 - RNA, 19 nt, Artificial Sequence
  Description of Artificial Sequence: Synthetic oligonucleotide
agaagauagagacauccuc

SEQ ID NO: 381835 - RNA, 19 nt, Artificial Sequence
  Description of Artificial Sequence: Synthetic oligonucleotide
aacucaacuuuccaucagg

SEQ ID NO: 381836 - RNA, 19 nt, Artificial Sequence
  Description of Artificial Sequence: Synthetic oligonucleotide
uuugcuuuuaggauguggu

SEQ ID NO: 381837 - RNA, 19 nt, Artificial Sequence
  Description of Artificial Sequence: Synthetic oligonucleotide
aguagucaacuuuacaauc

SEQ ID NO: 381838 - RNA, 19 nt, Artificial Sequence
  Description of Artificial Sequence: Synthetic oligonucleotide
cuauauacuagucugaaga

SEQ ID NO: 381839 - RNA, 19 nt, Artificial Sequence
  Description of Artificial Sequence: Synthetic oligonucleotide
uuuauuagcaguguauucu

SEQ ID NO: 381840 - RNA, 19 nt, Artificial Sequence
  Description of Artificial Sequence: Synthetic oligonucleotide
uucgcaagcagccuggaag

SEQ ID NO: 381841 - RNA, 19 nt, Artificial Sequence
  Description of Artificial Sequence: Synthetic oligonucleotide
uaguaauggacauauucag

SEQ ID NO: 381842 - RNA, 19 nt, Artificial Sequence
  Description of Artificial Sequence: Synthetic oligonucleotide
aaaauuugcaguagucaac

SEQ ID NO: 381843 - RNA, 19 nt, Artificial Sequence
  Description of Artificial Sequence: Synthetic oligonucleotide
uuaaaacuguguauggaca

SEQ ID NO: 381844 - RNA, 19 nt, Artificial Sequence
  Description of Artificial Sequence: Synthetic oligonucleotide
uauauaauguaacacugua

SEQ ID NO: 381845 - RNA, 19 nt, Artificial Sequence
  Description of Artificial Sequence: Synthetic oligonucleotide
uccuauacaagaaacuaac

SEQ ID NO: 381846 - RNA, 19 nt, Artificial Sequence
  Description of Artificial Sequence: Synthetic oligonucleotide
aauuauuucagcaugugua

SEQ ID NO: 381847 - RNA, 19 nt, Artificial Sequence
  Description of Artificial Sequence: Synthetic oligonucleotide
uuauaaguggagaaucucu

SEQ ID NO: 381848 - RNA, 19 nt, Artificial Sequence
  Description of Artificial Sequence: Synthetic oligonucleotide
ucauguguauaaauaagcu

SEQ ID NO: 381849 - RNA, 19 nt, Artificial Sequence
  Description of Artificial Sequence: Synthetic oligonucleotide
uguucauagaacaacuaaa

SEQ ID NO: 381850 - RNA, 19 nt, Artificial Sequence
  Description of Artificial Sequence: Synthetic oligonucleotide
aaccauacuaaagcuaaac

SEQ ID NO: 381851 - RNA, 19 nt, Artificial Sequence
  Description of Artificial Sequence: Synthetic oligonucleotide
caaacaacggcacucuugg

SEQ ID NO: 381852 - RNA, 19 nt, Artificial Sequence
  Description of Artificial Sequence: Synthetic oligonucleotide
uuuaacuagcccuugccca

SEQ ID NO: 381853 - RNA, 19 nt, Artificial Sequence
  Description of Artificial Sequence: Synthetic oligonucleotide
uguucauguguauaaauaa

SEQ ID NO: 381854 - RNA, 19 nt, Artificial Sequence
  Description of Artificial Sequence: Synthetic oligonucleotide
aacuauucauaacaaaaua

SEQ ID NO: 381855 - RNA, 19 nt, Artificial Sequence
  Description of Artificial Sequence: Synthetic oligonucleotide
agauacauaugacauauau

SEQ ID NO: 381856 - RNA, 19 nt, Artificial Sequence
  Description of Artificial Sequence: Synthetic oligonucleotide
uauauuugcgcccgaagac

SEQ ID NO: 381857 - RNA, 19 nt, Artificial Sequence
  Description of Artificial Sequence: Synthetic oligonucleotide
uacauguaaaugcaguaac

SEQ ID NO: 381858 - RNA, 19 nt, Artificial Sequence
  Description of Artificial Sequence: Synthetic oligonucleotide
uccacuaaaugcuagaauu

SEQ ID NO: 381859 - RNA, 19 nt, Artificial Sequence
  Description of Artificial Sequence: Synthetic oligonucleotide
uauuauaaguggagaaucu

SEQ ID NO: 381860 - RNA, 19 nt, Artificial Sequence
  Description of Artificial Sequence: Synthetic oligonucleotide
uccguauucucgcagaugu

SEQ ID NO: 381861 - RNA, 19 nt, Artificial Sequence
  Description of Artificial Sequence: Synthetic oligonucleotide
uagucuagcuuuuacauaa

SEQ ID NO: 381862 - RNA, 19 nt, Artificial Sequence
  Description of Artificial Sequence: Synthetic oligonucleotide
auuauguuaacaaaccuga

SEQ ID NO: 381863 - RNA, 19 nt, Artificial Sequence
  Description of Artificial Sequence: Synthetic oligonucleotide
ugugccuuauguauguuca

SEQ ID NO: 381864 - RNA, 19 nt, Artificial Sequence
  Description of Artificial Sequence: Synthetic oligonucleotide
aaauuugcaguagucaacu

SEQ ID NO: 381865 - RNA, 19 nt, Artificial Sequence
  Description of Artificial Sequence: Synthetic oligonucleotide
cauugcagugcauuuauag

SEQ ID NO: 381866 - RNA, 19 nt, Artificial Sequence
  Description of Artificial Sequence: Synthetic oligonucleotide
uguauggacaucuccauaa

SEQ ID NO: 381867 - RNA, 19 nt, Artificial Sequence
  Description of Artificial Sequence: Synthetic oligonucleotide
aguguacccaucuacuuag

SEQ ID NO: 381868 - RNA, 19 nt, Artificial Sequence
  Description of Artificial Sequence: Synthetic oligonucleotide
aauguguuuuccuaacaaa

SEQ ID NO: 381869 - RNA, 19 nt, Artificial Sequence
  Description of Artificial Sequence: Synthetic oligonucleotide
agaauguucugguuuacug

SEQ ID NO: 381870 - RNA, 19 nt, Artificial Sequence
  Description of Artificial Sequence: Synthetic oligonucleotide
cuagucugaagauaucccc

SEQ ID NO: 381871 - RNA, 19 nt, Artificial Sequence
  Description of Artificial Sequence: Synthetic oligonucleotide
acauauaacucaacuuucc

SEQ ID NO: 381872 - RNA, 19 nt, Artificial Sequence
  Description of Artificial Sequence: Synthetic oligonucleotide
aguucagacagacuucaag

SEQ ID NO: 381873 - RNA, 19 nt, Artificial Sequence
  Description of Artificial Sequence: Synthetic oligonucleotide
aagauauccccuccuaaga

SEQ ID NO: 381874 - RNA, 19 nt, Artificial Sequence
  Description of Artificial Sequence: Synthetic oligonucleotide
ggugaguguaauuauuugg

SEQ ID NO: 381875 - RNA, 19 nt, Artificial Sequence
  Description of Artificial Sequence: Synthetic oligonucleotide
uugcaauuaaaacuuuuaa

SEQ ID NO: 381876 - RNA, 19 nt, Artificial Sequence
  Description of Artificial Sequence: Synthetic oligonucleotide
uuuauuauaaguggagaau

SEQ ID NO: 381877 - RNA, 19 nt, Artificial Sequence
  Description of Artificial Sequence: Synthetic oligonucleotide
cagacuucaagagagaaug

SEQ ID NO: 381878 - RNA, 19 nt, Artificial Sequence
  Description of Artificial Sequence: Synthetic oligonucleotide
uuuaacacucucuaaggua

SEQ ID NO: 381879 - RNA, 19 nt, Artificial Sequence
  Description of Artificial Sequence: Synthetic oligonucleotide
uauggacaucuccauaaag

SEQ ID NO: 381880 - RNA, 19 nt, Artificial Sequence
  Description of Artificial Sequence: Synthetic oligonucleotide
uauuugguacugcaguuac

SEQ ID NO: 381881 - RNA, 19 nt, Artificial Sequence
  Description of Artificial Sequence: Synthetic oligonucleotide
ugggagauaaacuauucau

SEQ ID NO: 381882 - RNA, 19 nt, Artificial Sequence
  Description of Artificial Sequence: Synthetic oligonucleotide
ucgguuuaucccuucauug

SEQ ID NO: 381883 - RNA, 19 nt, Artificial Sequence
  Description of Artificial Sequence: Synthetic oligonucleotide
agucuaaaucaaaauauag

SEQ ID NO: 381884 - RNA, 19 nt, Artificial Sequence
  Description of Artificial Sequence: Synthetic oligonucleotide
gagaaucaguaucugagac

SEQ ID NO: 381885 - RNA, 19 nt, Artificial Sequence
  Description of Artificial Sequence: Synthetic oligonucleotide
auauaauguaacacuguac

SEQ ID NO: 381886 - RNA, 19 nt, Artificial Sequence
  Description of Artificial Sequence: Synthetic oligonucleotide
aaccuguaguguuucauga

SEQ ID NO: 381887 - RNA, 19 nt, Artificial Sequence
  Description of Artificial Sequence: Synthetic oligonucleotide
auuaccgaaauacauuaaa

SEQ ID NO: 381888 - RNA, 19 nt, Artificial Sequence
  Description of Artificial Sequence: Synthetic oligonucleotide
acaacggcacucuugguag

SEQ ID NO: 381889 - RNA, 19 nt, Artificial Sequence
  Description of Artificial Sequence: Synthetic oligonucleotide
auuauaaguggagaaucuc

SEQ ID NO: 381890 - RNA, 19 nt, Artificial Sequence
  Description of Artificial Sequence: Synthetic oligonucleotide
aacaggcuaucagaguccc

SEQ ID NO: 381891 - RNA, 19 nt, Artificial Sequence
  Description of Artificial Sequence: Synthetic oligonucleotide
aaacuauucauaacaaaau

SEQ ID NO: 381892 - RNA, 19 nt, Artificial Sequence
  Description of Artificial Sequence: Synthetic oligonucleotide
auagucuuuuauaaaguuc

SEQ ID NO: 381893 - RNA, 19 nt, Artificial Sequence
  Description of Artificial Sequence: Synthetic oligonucleotide
ugaaaccaauuuaacuagc

SEQ ID NO: 381894 - RNA, 19 nt, Artificial Sequence
  Description of Artificial Sequence: Synthetic oligonucleotide
uuauguauuugauucuaaa

SEQ ID NO: 381895 - RNA, 19 nt, Artificial Sequence
  Description of Artificial Sequence: Synthetic oligonucleotide
uacuagucugaagauaucc

SEQ ID NO: 381896 - RNA, 19 nt, Artificial Sequence
  Description of Artificial Sequence: Synthetic oligonucleotide
guaacaaacguauuaccga

SEQ ID NO: 381897 - RNA, 19 nt, Artificial Sequence
  Description of Artificial Sequence: Synthetic oligonucleotide
ugaaugaacuccaguucag

SEQ ID NO: 381898 - RNA, 19 nt, Artificial Sequence
  Description of Artificial Sequence: Synthetic oligonucleotide
uaacaaacguauuaccgaa

SEQ ID NO: 381899 - RNA, 19 nt, Artificial Sequence
  Description of Artificial Sequence: Synthetic oligonucleotide
uguguauaaauaagcuuaa

SEQ ID NO: 381900 - RNA, 19 nt, Artificial Sequence
  Description of Artificial Sequence: Synthetic oligonucleotide
caugcaugcucacaaggcg

SEQ ID NO: 381901 - RNA, 19 nt, Artificial Sequence
  Description of Artificial Sequence: Synthetic oligonucleotide
uguuaacaaaccugaguca

SEQ ID NO: 381902 - RNA, 19 nt, Artificial Sequence
  Description of Artificial Sequence: Synthetic oligonucleotide
aaaacuguguauggacauc

SEQ ID NO: 381903 - RNA, 19 nt, Artificial Sequence
  Description of Artificial Sequence: Synthetic oligonucleotide
ugagucaaacauucauucc

SEQ ID NO: 381904 - RNA, 19 nt, Artificial Sequence
  Description of Artificial Sequence: Synthetic oligonucleotide
auaacucaacuuuccauca

SEQ ID NO: 381905 - RNA, 19 nt, Artificial Sequence
  Description of Artificial Sequence: Synthetic oligonucleotide
aauuacgggaaaguaggcu

SEQ ID NO: 381906 - RNA, 19 nt, Artificial Sequence
  Description of Artificial Sequence: Synthetic oligonucleotide
aacugacaucagaacaugc

SEQ ID NO: 381907 - RNA, 19 nt, Artificial Sequence
  Description of Artificial Sequence: Synthetic oligonucleotide
aacaacggcacucuuggua

SEQ ID NO: 381908 - RNA, 19 nt, Artificial Sequence
  Description of Artificial Sequence: Synthetic oligonucleotide
ugauaugguucucuucccc

SEQ ID NO: 381909 - RNA, 19 nt, Artificial Sequence
  Description of Artificial Sequence: Synthetic oligonucleotide
uuccuauacaagaaacuaa

SEQ ID NO: 381910 - RNA, 19 nt, Artificial Sequence
  Description of Artificial Sequence: Synthetic oligonucleotide
ugcaguuacggaaaauuau

SEQ ID NO: 381911 - RNA, 19 nt, Artificial Sequence
  Description of Artificial Sequence: Synthetic oligonucleotide
acuucaagagagaauguuc

SEQ ID NO: 381912 - RNA, 19 nt, Artificial Sequence
  Description of Artificial Sequence: Synthetic oligonucleotide
cacgauugcagucacguug

SEQ ID NO: 381913 - RNA, 19 nt, Artificial Sequence
  Description of Artificial Sequence: Synthetic oligonucleotide
ucuaagaauggaaccgccu

SEQ ID NO: 381914 - RNA, 19 nt, Artificial Sequence
  Description of Artificial Sequence: Synthetic oligonucleotide
aucauuuuaguagcugcac

SEQ ID NO: 381915 - RNA, 19 nt, Artificial Sequence
  Description of Artificial Sequence: Synthetic oligonucleotide
ucugcuauauaaacucuau

SEQ ID NO: 381916 - RNA, 19 nt, Artificial Sequence
  Description of Artificial Sequence: Synthetic oligonucleotide
caugauacauauauaaugu

SEQ ID NO: 381917 - RNA, 19 nt, Artificial Sequence
  Description of Artificial Sequence: Synthetic oligonucleotide
ucagcauguguaaaccugu

SEQ ID NO: 381918 - RNA, 19 nt, Artificial Sequence
  Description of Artificial Sequence: Synthetic oligonucleotide
uaaaacuguguauggacau

SEQ ID NO: 381919 - RNA, 19 nt, Artificial Sequence
  Description of Artificial Sequence: Synthetic oligonucleotide
gaacaaggcaucuuacuga

SEQ ID NO: 381920 - RNA, 19 nt, Artificial Sequence
  Description of Artificial Sequence: Synthetic oligonucleotide
auuacgggaaaguaggcuu

SEQ ID NO: 381921 - RNA, 19 nt, Artificial Sequence
  Description of Artificial Sequence: Synthetic oligonucleotide
ucauugguguucauagaac

SEQ ID NO: 381922 - RNA, 19 nt, Artificial Sequence
  Description of Artificial Sequence: Synthetic oligonucleotide
uaggaugugguccacuaaa

SEQ ID NO: 381923 - RNA, 19 nt, Artificial Sequence
  Description of Artificial Sequence: Synthetic oligonucleotide
agauaaguuugaaugaacu

SEQ ID NO: 381924 - RNA, 19 nt, Artificial Sequence
  Description of Artificial Sequence: Synthetic oligonucleotide
  modified_base (4)..(4): a, c, u, g, unknown or other
uuunuuccaggaagugcug

SEQ ID NO: 381925 - RNA, 19 nt, Artificial Sequence
  Description of Artificial Sequence: Synthetic oligonucleotide
agcgcuuugccucauagau

SEQ ID NO: 381926 - RNA, 19 nt, Artificial Sequence
  Description of Artificial Sequence: Synthetic oligonucleotide
aauaacacaauggcuggaa

SEQ ID NO: 381927 - RNA, 19 nt, Artificial Sequence
  Description of Artificial Sequence: Synthetic oligonucleotide
cuuauauuugcgcccgaag

SEQ ID NO: 381928 - RNA, 19 nt, Artificial Sequence
  Description of Artificial Sequence: Synthetic oligonucleotide
acuuucacuuauuaaggaa

SEQ ID NO: 381929 - RNA, 19 nt, Artificial Sequence
  Description of Artificial Sequence: Synthetic oligonucleotide
cuucuuauauuugcgcccg

SEQ ID NO: 381930 - RNA, 19 nt, Artificial Sequence
  Description of Artificial Sequence: Synthetic oligonucleotide
acaaagaaccuccaaugau

SEQ ID NO: 381931 - RNA, 19 nt, Artificial Sequence
  Description of Artificial Sequence: Synthetic oligonucleotide
acaaacguauuaccgaaau

SEQ ID NO: 381932 - RNA, 19 nt, Artificial Sequence
  Description of Artificial Sequence: Synthetic oligonucleotide
ugaagauauccccuccuaa

SEQ ID NO: 381933 - RNA, 19 nt, Artificial Sequence
  Description of Artificial Sequence: Synthetic oligonucleotide
uguacccaucuacuuagca

SEQ ID NO: 381934 - RNA, 19 nt, Artificial Sequence
  Description of Artificial Sequence: Synthetic oligonucleotide
ugguacugcaguuacggaa

SEQ ID NO: 381935 - RNA, 19 nt, Artificial Sequence
  Description of Artificial Sequence: Synthetic oligonucleotide
ugcccauucgcaagcagcc

SEQ ID NO: 381936 - RNA, 19 nt, Artificial Sequence
  Description of Artificial Sequence: Synthetic oligonucleotide
cagauguucaggaaccuuc

SEQ ID NO: 381937 - RNA, 19 nt, Artificial Sequence
  Description of Artificial Sequence: Synthetic oligonucleotide
cuucgcacgauguugucac

SEQ ID NO: 381938 - RNA, 19 nt, Artificial Sequence
  Description of Artificial Sequence: Synthetic oligonucleotide
cauaugacauauauacaca

SEQ ID NO: 381939 - RNA, 19 nt, Artificial Sequence
  Description of Artificial Sequence: Synthetic oligonucleotide
accgcaaucgccccuuccg

SEQ ID NO: 381940 - RNA, 19 nt, Artificial Sequence
  Description of Artificial Sequence: Synthetic oligonucleotide
auaauguaacacuguacau

SEQ ID NO: 381941 - RNA, 19 nt, Artificial Sequence
  Description of Artificial Sequence: Synthetic oligonucleotide
auuauuugguacugcaguu

SEQ ID NO: 381942 - RNA, 19 nt, Artificial Sequence
  Description of Artificial Sequence: Synthetic oligonucleotide
augaacaaggcaucuuacu

SEQ ID NO: 381943 - RNA, 19 nt, Artificial Sequence
  Description of Artificial Sequence: Synthetic oligonucleotide
ucccuagagaacuggcuag

SEQ ID NO: 381944 - RNA, 19 nt, Artificial Sequence
  Description of Artificial Sequence: Synthetic oligonucleotide
auguucaggaaccuucgca

SEQ ID NO: 381945 - RNA, 19 nt, Artificial Sequence
  Description of Artificial Sequence: Synthetic oligonucleotide
gguuuacugaauucauagg

SEQ ID NO: 381946 - RNA, 19 nt, Artificial Sequence
  Description of Artificial Sequence: Synthetic oligonucleotide
aaauucugauccaagcaau

SEQ ID NO: 381947 - RNA, 19 nt, Artificial Sequence
  Description of Artificial Sequence: Synthetic oligonucleotide
uuugcgcccgaagacaaag

SEQ ID NO: 381948 - RNA, 19 nt, Artificial Sequence
  Description of Artificial Sequence: Synthetic oligonucleotide
agauagagacauccuccgg

SEQ ID NO: 381949 - RNA, 19 nt, Artificial Sequence
  Description of Artificial Sequence: Synthetic oligonucleotide
aacguauuaccgaaauaca

SEQ ID NO: 381950 - RNA, 19 nt, Artificial Sequence
  Description of Artificial Sequence: Synthetic oligonucleotide
agcauguguaaaccuguag

SEQ ID NO: 381951 - RNA, 19 nt, Artificial Sequence
  Description of Artificial Sequence: Synthetic oligonucleotide
acaugaacaaggcaucuua

SEQ ID NO: 381952 - RNA, 19 nt, Artificial Sequence
  Description of Artificial Sequence: Synthetic oligonucleotide
gagggucuaaggauggcgg

SEQ ID NO: 381953 - RNA, 19 nt, Artificial Sequence
  Description of Artificial Sequence: Synthetic oligonucleotide
aaaugcaguaacaaacgua

SEQ ID NO: 381954 - RNA, 19 nt, Artificial Sequence
  Description of Artificial Sequence: Synthetic oligonucleotide
uauucucgcagauguucag

SEQ ID NO: 381955 - RNA, 19 nt, Artificial Sequence
  Description of Artificial Sequence: Synthetic oligonucleotide
aaguucccuagagaacugg

SEQ ID NO: 381956 - RNA, 19 nt, Artificial Sequence
  Description of Artificial Sequence: Synthetic oligonucleotide
  modified_base (2)..(2): a, c, u, g, unknown or other
unuuccaggaagugcugcu

SEQ ID NO: 381957 - RNA, 19 nt, Artificial Sequence
  Description of Artificial Sequence: Synthetic oligonucleotide
gaagggauagaacggcuga

SEQ ID NO: 381958 - RNA, 19 nt, Artificial Sequence
  Description of Artificial Sequence: Synthetic oligonucleotide
aggugaguguaauuauuug

SEQ ID NO: 381959 - RNA, 19 nt, Artificial Sequence
  Description of Artificial Sequence: Synthetic oligonucleotide
uucccuagagaacuggcua

SEQ ID NO: 381960 - RNA, 19 nt, Artificial Sequence
  Description of Artificial Sequence: Synthetic oligonucleotide
uauuugcgcccgaagacaa

SEQ ID NO: 381961 - RNA, 19 nt, Artificial Sequence
  Description of Artificial Sequence: Synthetic oligonucleotide
gcuagaauuucccuggaac

SEQ ID NO: 381962 - RNA, 19 nt, Artificial Sequence
  Description of Artificial Sequence: Synthetic oligonucleotide
gcucauaauguucauacuc

SEQ ID NO: 381963 - RNA, 19 nt, Artificial Sequence
  Description of Artificial Sequence: Synthetic oligonucleotide
agagggucuaaggauggcg

SEQ ID NO: 381964 - RNA, 19 nt, Artificial Sequence
  Description of Artificial Sequence: Synthetic oligonucleotide
uauuaccgaaauacauuaa

SEQ ID NO: 381965 - RNA, 19 nt, Artificial Sequence
  Description of Artificial Sequence: Synthetic oligonucleotide
  modified_base (3)..(3): a, c, u, g, unknown or other
uunuuccaggaagugcugc

SEQ ID NO: 381966 - RNA, 19 nt, Artificial Sequence
  Description of Artificial Sequence: Synthetic oligonucleotide
cucaagucucucaacggug

SEQ ID NO: 381967 - RNA, 19 nt, Artificial Sequence
  Description of Artificial Sequence: Synthetic oligonucleotide
uuaacuagcccuugcccau

SEQ ID NO: 381968 - RNA, 19 nt, Artificial Sequence
  Description of Artificial Sequence: Synthetic oligonucleotide
uaguguacccaucuacuua

SEQ ID NO: 381969 - RNA, 19 nt, Artificial Sequence
  Description of Artificial Sequence: Synthetic oligonucleotide
uagccgggaguuuauggag

SEQ ID NO: 381970 - RNA, 19 nt, Artificial Sequence
  Description of Artificial Sequence: Synthetic oligonucleotide
accugagucaaacauucau

SEQ ID NO: 381971 - RNA, 19 nt, Artificial Sequence
  Description of Artificial Sequence: Synthetic oligonucleotide
aagaagauagagacauccu

SEQ ID NO: 381972 - RNA, 19 nt, Artificial Sequence
  Description of Artificial Sequence: Synthetic oligonucleotide
uagucaacuuuacaaucau

SEQ ID NO: 381973 - RNA, 19 nt, Artificial Sequence
  Description of Artificial Sequence: Synthetic oligonucleotide
ggucggcaaauucugaucc

SEQ ID NO: 381974 - RNA, 19 nt, Artificial Sequence
  Description of Artificial Sequence: Synthetic oligonucleotide
uagaauuucccuggaacaa

SEQ ID NO: 381975 - RNA, 19 nt, Artificial Sequence
  Description of Artificial Sequence: Synthetic oligonucleotide
gauagaacggcugaggaau

SEQ ID NO: 381976 - RNA, 19 nt, Artificial Sequence
  Description of Artificial Sequence: Synthetic oligonucleotide
aguucccuagagaacuggc

SEQ ID NO: 381977 - RNA, 19 nt, Artificial Sequence
  Description of Artificial Sequence: Synthetic oligonucleotide
caauggcuggaauaaagca

SEQ ID NO: 381978 - RNA, 19 nt, Artificial Sequence
  Description of Artificial Sequence: Synthetic oligonucleotide
uauuagcaguguauucuuc

SEQ ID NO: 381979 - RNA, 19 nt, Artificial Sequence
  Description of Artificial Sequence: Synthetic oligonucleotide
augauacauauauaaugua

SEQ ID NO: 381980 - RNA, 19 nt, Artificial Sequence
  Description of Artificial Sequence: Synthetic oligonucleotide
gaacggcugaggaaucucg

SEQ ID NO: 381981 - RNA, 19 nt, Artificial Sequence
  Description of Artificial Sequence: Synthetic oligonucleotide
ucgcaagcagccuggaaga

SEQ ID NO: 381982 - RNA, 19 nt, Artificial Sequence
  Description of Artificial Sequence: Synthetic oligonucleotide
uuaguguacccaucuacuu

SEQ ID NO: 381983 - RNA, 19 nt, Artificial Sequence
  Description of Artificial Sequence: Synthetic oligonucleotide
acggaaaauuauguuaaca

SEQ ID NO: 381984 - RNA, 19 nt, Artificial Sequence
  Description of Artificial Sequence: Synthetic oligonucleotide
cauauucagacugaaggga

SEQ ID NO: 381985 - RNA, 19 nt, Artificial Sequence
  Description of Artificial Sequence: Synthetic oligonucleotide
agauauccccuccuaagaa

SEQ ID NO: 381986 - RNA, 19 nt, Artificial Sequence
  Description of Artificial Sequence: Synthetic oligonucleotide
uuacgggaaaguaggcuuc

SEQ ID NO: 381987 - RNA, 19 nt, Artificial Sequence
  Description of Artificial Sequence: Synthetic oligonucleotide
gaaccuccaaugaugcuug

SEQ ID NO: 381988 - RNA, 19 nt, Artificial Sequence
  Description of Artificial Sequence: Synthetic oligonucleotide
gauggcggugugcuccucg

SEQ ID NO: 381989 - RNA, 19 nt, Artificial Sequence
  Description of Artificial Sequence: Synthetic oligonucleotide
guagucaacuuuacaauca

SEQ ID NO: 381990 - RNA, 19 nt, Artificial Sequence
  Description of Artificial Sequence: Synthetic oligonucleotide
guguucauagaacaacuaa

SEQ ID NO: 381991 - RNA, 19 nt, Artificial Sequence
  Description of Artificial Sequence: Synthetic oligonucleotide
ccgaagacaaagaaccucc

SEQ ID NO: 381992 - RNA, 19 nt, Artificial Sequence
  Description of Artificial Sequence: Synthetic oligonucleotide
gauauccccuccuaagaaa

SEQ ID NO: 381993 - RNA, 19 nt, Artificial Sequence
  Description of Artificial Sequence: Synthetic oligonucleotide
acugacaucagaacaugca

SEQ ID NO: 381994 - RNA, 19 nt, Artificial Sequence
  Description of Artificial Sequence: Synthetic oligonucleotide
agaauggaaccgccuucac

SEQ ID NO: 381995 - RNA, 19 nt, Artificial Sequence
  Description of Artificial Sequence: Synthetic oligonucleotide
auauuugcgcccgaagaca

SEQ ID NO: 381996 - RNA, 19 nt, Artificial Sequence
  Description of Artificial Sequence: Synthetic oligonucleotide
cucauugguguucauagaa

SEQ ID NO: 381997 - RNA, 19 nt, Artificial Sequence
  Description of Artificial Sequence: Synthetic oligonucleotide
agaaccuccaaugaugcuu

SEQ ID NO: 381998 - RNA, 19 nt, Artificial Sequence
  Description of Artificial Sequence: Synthetic oligonucleotide
gcuucuuauauuugcgccc

SEQ ID NO: 381999 - RNA, 19 nt, Artificial Sequence
  Description of Artificial Sequence: Synthetic oligonucleotide
guagauacauaugacauau

SEQ ID NO: 382000 - RNA, 19 nt, Artificial Sequence
  Description of Artificial Sequence: Synthetic oligonucleotide
uguaaaccuguaguguuuc

SEQ ID NO: 382001 - RNA, 19 nt, Artificial Sequence
  Description of Artificial Sequence: Synthetic oligonucleotide
uuuaucccuucauugcuuu

SEQ ID NO: 382002 - RNA, 19 nt, Artificial Sequence
  Description of Artificial Sequence: Synthetic oligonucleotide
aguaauggacauauucaga

SEQ ID NO: 382003 - RNA, 19 nt, Artificial Sequence
  Description of Artificial Sequence: Synthetic oligonucleotide
cagcaggaaagucuaaauc

SEQ ID NO: 382004 - RNA, 19 nt, Artificial Sequence
  Description of Artificial Sequence: Synthetic oligonucleotide
gagacucuccuuuagugua

SEQ ID NO: 382005 - RNA, 19 nt, Artificial Sequence
  Description of Artificial Sequence: Synthetic oligonucleotide
agucauuagccagugcucu

SEQ ID NO: 382006 - RNA, 19 nt, Artificial Sequence
  Description of Artificial Sequence: Synthetic oligonucleotide
cacuuauuaaggaagaauu

SEQ ID NO: 382007 - RNA, 19 nt, Artificial Sequence
  Description of Artificial Sequence: Synthetic oligonucleotide
cuuauguauguucaugugu

SEQ ID NO: 382008 - RNA, 19 nt, Artificial Sequence
  Description of Artificial Sequence: Synthetic oligonucleotide
aucuuacugaagccuauau

SEQ ID NO: 382009 - RNA, 19 nt, Artificial Sequence
  Description of Artificial Sequence: Synthetic oligonucleotide
auagucuagcuuuuacaua

SEQ ID NO: 382010 - RNA, 19 nt, Artificial Sequence
  Description of Artificial Sequence: Synthetic oligonucleotide
auugcauguccagaugucu

SEQ ID NO: 382011 - RNA, 19 nt, Artificial Sequence
  Description of Artificial Sequence: Synthetic oligonucleotide
uacuuagcagcauuuucuu

SEQ ID NO: 382012 - RNA, 19 nt, Artificial Sequence
  Description of Artificial Sequence: Synthetic oligonucleotide
agaucauugcagugcauuu

SEQ ID NO: 382013 - RNA, 19 nt, Artificial Sequence
  Description of Artificial Sequence: Synthetic oligonucleotide
uggugugccuuauguaugu

SEQ ID NO: 382014 - RNA, 19 nt, Artificial Sequence
  Description of Artificial Sequence: Synthetic oligonucleotide
ugcgcccgaagacaaagaa

SEQ ID NO: 382015 - RNA, 19 nt, Artificial Sequence
  Description of Artificial Sequence: Synthetic oligonucleotide
gaauuacgggaaaguaggc

SEQ ID NO: 382016 - RNA, 19 nt, Artificial Sequence
  Description of Artificial Sequence: Synthetic oligonucleotide
acauguaaaugcaguaaca

SEQ ID NO: 382017 - RNA, 19 nt, Artificial Sequence
  Description of Artificial Sequence: Synthetic oligonucleotide
uuaggaugugguccacuaa

SEQ ID NO: 382018 - RNA, 19 nt, Artificial Sequence
  Description of Artificial Sequence: Synthetic oligonucleotide
gaagacaaagaaccuccaa

SEQ ID NO: 382019 - RNA, 19 nt, Artificial Sequence
  Description of Artificial Sequence: Synthetic oligonucleotide
accgccuucacuggagugg

SEQ ID NO: 382020 - RNA, 19 nt, Artificial Sequence
  Description of Artificial Sequence: Synthetic oligonucleotide
caugacauaacaggcuauc

SEQ ID NO: 382021 - RNA, 19 nt, Artificial Sequence
  Description of Artificial Sequence: Synthetic oligonucleotide
auaacacaauggcuggaau

SEQ ID NO: 382022 - RNA, 19 nt, Artificial Sequence
  Description of Artificial Sequence: Synthetic oligonucleotide
guaguguuucaugacauaa

SEQ ID NO: 382023 - RNA, 19 nt, Artificial Sequence
  Description of Artificial Sequence: Synthetic oligonucleotide
gaauuucccuggaacaauc

SEQ ID NO: 382024 - RNA, 19 nt, Artificial Sequence
  Description of Artificial Sequence: Synthetic oligonucleotide
gcaguuacggaaaauuaug

SEQ ID NO: 382025 - RNA, 19 nt, Artificial Sequence
  Description of Artificial Sequence: Synthetic oligonucleotide
aaggcgaugcccaucucga

SEQ ID NO: 382026 - RNA, 19 nt, Artificial Sequence
  Description of Artificial Sequence: Synthetic oligonucleotide
aagcgcuuugccucauaga

SEQ ID NO: 382027 - RNA, 19 nt, Artificial Sequence
  Description of Artificial Sequence: Synthetic oligonucleotide
gcauucaaguucccuagag

SEQ ID NO: 382028 - RNA, 19 nt, Artificial Sequence
  Description of Artificial Sequence: Synthetic oligonucleotide
ccauacuaaagcuaaacaa

SEQ ID NO: 382029 - RNA, 19 nt, Artificial Sequence
  Description of Artificial Sequence: Synthetic oligonucleotide
cauugcauguccagauguc

SEQ ID NO: 382030 - RNA, 19 nt, Artificial Sequence
  Description of Artificial Sequence: Synthetic oligonucleotide
ucuaaggauggcggugugc

SEQ ID NO: 382031 - RNA, 19 nt, Artificial Sequence
  Description of Artificial Sequence: Synthetic oligonucleotide
acguauuaccgaaauacau

SEQ ID NO: 382032 - RNA, 19 nt, Artificial Sequence
  Description of Artificial Sequence: Synthetic oligonucleotide
gggaaagagggucuaagga

SEQ ID NO: 382033 - RNA, 19 nt, Artificial Sequence
  Description of Artificial Sequence: Synthetic oligonucleotide
ucuuauauuugcgcccgaa

SEQ ID NO: 382034 - RNA, 19 nt, Artificial Sequence
  Description of Artificial Sequence: Synthetic oligonucleotide
auauacuagucugaagaua

SEQ ID NO: 382035 - RNA, 19 nt, Artificial Sequence
  Description of Artificial Sequence: Synthetic oligonucleotide
guguauaaauaagcuuaag

SEQ ID NO: 382036 - RNA, 19 nt, Artificial Sequence
  Description of Artificial Sequence: Synthetic oligonucleotide
cacuuucacuuauuaagga

SEQ ID NO: 382037 - RNA, 19 nt, Artificial Sequence
  Description of Artificial Sequence: Synthetic oligonucleotide
aaccuucgcacgauguugu

SEQ ID NO: 382038 - RNA, 19 nt, Artificial Sequence
  Description of Artificial Sequence: Synthetic oligonucleotide
agaacggcugaggaaucuc

SEQ ID NO: 382039 - RNA, 19 nt, Artificial Sequence
  Description of Artificial Sequence: Synthetic oligonucleotide
gcuagccgggaguuuaugg

SEQ ID NO: 382040 - RNA, 19 nt, Artificial Sequence
  Description of Artificial Sequence: Synthetic oligonucleotide
ugcuagaauuucccuggaa

SEQ ID NO: 382041 - RNA, 19 nt, Artificial Sequence
  Description of Artificial Sequence: Synthetic oligonucleotide
aacaugaacaaggcaucuu

SEQ ID NO: 382042 - RNA, 19 nt, Artificial Sequence
  Description of Artificial Sequence: Synthetic oligonucleotide
auuugguacugcaguuacg

SEQ ID NO: 382043 - RNA, 19 nt, Artificial Sequence
  Description of Artificial Sequence: Synthetic oligonucleotide
aaacaacggcacucuuggu

SEQ ID NO: 382044 - RNA, 19 nt, Artificial Sequence
  Description of Artificial Sequence: Synthetic oligonucleotide
augacauaacaggcuauca

SEQ ID NO: 382045 - RNA, 19 nt, Artificial Sequence
  Description of Artificial Sequence: Synthetic oligonucleotide
ggaugugguccacuaaaug

SEQ ID NO: 382046 - RNA, 19 nt, Artificial Sequence
  Description of Artificial Sequence: Synthetic oligonucleotide
cugggagauaaacuauuca

SEQ ID NO: 382047 - RNA, 19 nt, Artificial Sequence
  Description of Artificial Sequence: Synthetic oligonucleotide
auggcggugugcuccucgg

SEQ ID NO: 382048 - RNA, 19 nt, Artificial Sequence
  Description of Artificial Sequence: Synthetic oligonucleotide
aacaggucguagugcucga

SEQ ID NO: 382049 - RNA, 19 nt, Artificial Sequence
  Description of Artificial Sequence: Synthetic oligonucleotide
aacaaacguauuaccgaaa

SEQ ID NO: 382050 - RNA, 19 nt, Artificial Sequence
  Description of Artificial Sequence: Synthetic oligonucleotide
accaauuuaacuagcccuu

SEQ ID NO: 382051 - RNA, 19 nt, Artificial Sequence
  Description of Artificial Sequence: Synthetic oligonucleotide
auauccccuccuaagaaau

SEQ ID NO: 382052 - RNA, 19 nt, Artificial Sequence
  Description of Artificial Sequence: Synthetic oligonucleotide
ucgcacgauguugucacug

SEQ ID NO: 382053 - RNA, 19 nt, Artificial Sequence
  Description of Artificial Sequence: Synthetic oligonucleotide
gugugccuuauguauguuc

SEQ ID NO: 382054 - RNA, 19 nt, Artificial Sequence
  Description of Artificial Sequence: Synthetic oligonucleotide
cuuuccaucaggugagugu

SEQ ID NO: 382055 - RNA, 19 nt, Artificial Sequence
  Description of Artificial Sequence: Synthetic oligonucleotide
agacauacacauguagaua

SEQ ID NO: 382056 - RNA, 19 nt, Artificial Sequence
  Description of Artificial Sequence: Synthetic oligonucleotide
agucucucaacggugcuau

SEQ ID NO: 382057 - RNA, 19 nt, Artificial Sequence
  Description of Artificial Sequence: Synthetic oligonucleotide
gcuuuuaggauguggucca

SEQ ID NO: 382058 - RNA, 19 nt, Artificial Sequence
  Description of Artificial Sequence: Synthetic oligonucleotide
uucuuauauuugcgcccga

SEQ ID NO: 382059 - RNA, 19 nt, Artificial Sequence
  Description of Artificial Sequence: Synthetic oligonucleotide
ccaaacaacggcacucuug

SEQ ID NO: 382060 - RNA, 19 nt, Artificial Sequence
  Description of Artificial Sequence: Synthetic oligonucleotide
gaauggaaccgccuucacu

SEQ ID NO: 382061 - RNA, 19 nt, Artificial Sequence
  Description of Artificial Sequence: Synthetic oligonucleotide
ucucaacggugcuauguuu

SEQ ID NO: 382062 - RNA, 19 nt, Artificial Sequence
  Description of Artificial Sequence: Synthetic oligonucleotide
auauacaauuuaauuccuu

SEQ ID NO: 382063 - RNA, 19 nt, Artificial Sequence
  Description of Artificial Sequence: Synthetic oligonucleotide
auagaacggcugaggaauc

SEQ ID NO: 382064 - RNA, 19 nt, Artificial Sequence
  Description of Artificial Sequence: Synthetic oligonucleotide
uagauacauaugacauaua

SEQ ID NO: 382065 - RNA, 19 nt, Artificial Sequence
  Description of Artificial Sequence: Synthetic oligonucleotide
agggucuaaggauggcggu

SEQ ID NO: 382066 - RNA, 19 nt, Artificial Sequence
  Description of Artificial Sequence: Synthetic oligonucleotide
uuccguauucucgcagaug

SEQ ID NO: 382067 - RNA, 19 nt, Artificial Sequence
  Description of Artificial Sequence: Synthetic oligonucleotide
uagagacauccuccgggaa

SEQ ID NO: 382068 - RNA, 19 nt, Artificial Sequence
  Description of Artificial Sequence: Synthetic oligonucleotide
ccuuauguauguucaugug

SEQ ID NO: 382069 - RNA, 19 nt, Artificial Sequence
  Description of Artificial Sequence: Synthetic oligonucleotide
cuugcccauucgcaagcag

SEQ ID NO: 382070 - RNA, 19 nt, Artificial Sequence
  Description of Artificial Sequence: Synthetic oligonucleotide
uuucuucgguuuaucccuu

SEQ ID NO: 382071 - RNA, 19 nt, Artificial Sequence
  Description of Artificial Sequence: Synthetic oligonucleotide
augcccaucucgaacaaaa

SEQ ID NO: 382072 - RNA, 19 nt, Artificial Sequence
  Description of Artificial Sequence: Synthetic oligonucleotide
gcugguccccuccacauug

SEQ ID NO: 382073 - RNA, 19 nt, Artificial Sequence
  Description of Artificial Sequence: Synthetic oligonucleotide
ucauugcagugcauuuaua

SEQ ID NO: 382074 - RNA, 19 nt, Artificial Sequence
  Description of Artificial Sequence: Synthetic oligonucleotide
uccaucaggugaguguaau

SEQ ID NO: 382075 - RNA, 19 nt, Artificial Sequence
  Description of Artificial Sequence: Synthetic oligonucleotide
aaaccauacuaaagcuaaa

SEQ ID NO: 382076 - RNA, 19 nt, Artificial Sequence
  Description of Artificial Sequence: Synthetic oligonucleotide
caguuacggaaaauuaugu

SEQ ID NO: 382077 - RNA, 19 nt, Artificial Sequence
  Description of Artificial Sequence: Synthetic oligonucleotide
augcaugcucacaaggcga

SEQ ID NO: 382078 - RNA, 19 nt, Artificial Sequence
  Description of Artificial Sequence: Synthetic oligonucleotide
uagaacggcugaggaaucu

SEQ ID NO: 382079 - RNA, 19 nt, Artificial Sequence
  Description of Artificial Sequence: Synthetic oligonucleotide
uacgggaaaguaggcuuca

SEQ ID NO: 382080 - RNA, 19 nt, Artificial Sequence
  Description of Artificial Sequence: Synthetic oligonucleotide
uauccccuccuaagaaaua

SEQ ID NO: 382081 - RNA, 19 nt, Artificial Sequence
  Description of Artificial Sequence: Synthetic oligonucleotide
auggacauauucagacuga

SEQ ID NO: 382082 - RNA, 19 nt, Artificial Sequence
  Description of Artificial Sequence: Synthetic oligonucleotide
uugcgcccgaagacaaaga

SEQ ID NO: 382083 - RNA, 19 nt, Artificial Sequence
  Description of Artificial Sequence: Synthetic oligonucleotide
aucuggcacagcauucaag

SEQ ID NO: 382084 - RNA, 19 nt, Artificial Sequence
  Description of Artificial Sequence: Synthetic oligonucleotide
gugguccacuaaaugcuag

SEQ ID NO: 382085 - RNA, 19 nt, Artificial Sequence
  Description of Artificial Sequence: Synthetic oligonucleotide
agccucacgauugcaguca

SEQ ID NO: 382086 - RNA, 19 nt, Artificial Sequence
  Description of Artificial Sequence: Synthetic oligonucleotide
aaucaguaucugagacucu

SEQ ID NO: 382087 - RNA, 19 nt, Artificial Sequence
  Description of Artificial Sequence: Synthetic oligonucleotide
accuucgcacgauguuguc

SEQ ID NO: 382088 - RNA, 19 nt, Artificial Sequence
  Description of Artificial Sequence: Synthetic oligonucleotide
ggacauauucagacugaag

SEQ ID NO: 382089 - RNA, 19 nt, Artificial Sequence
  Description of Artificial Sequence: Synthetic oligonucleotide
ccauucgcaagcagccugg

SEQ ID NO: 382090 - RNA, 19 nt, Artificial Sequence
  Description of Artificial Sequence: Synthetic oligonucleotide
gguuuaucccuucauugcu

SEQ ID NO: 382091 - RNA, 19 nt, Artificial Sequence
  Description of Artificial Sequence: Synthetic oligonucleotide
cgguuuaucccuucauugc

SEQ ID NO: 382092 - RNA, 19 nt, Artificial Sequence
  Description of Artificial Sequence: Synthetic oligonucleotide
agccuauauacuagucuga

SEQ ID NO: 382093 - RNA, 19 nt, Artificial Sequence
  Description of Artificial Sequence: Synthetic oligonucleotide
cuaagaauggaaccgccuu

SEQ ID NO: 382094 - RNA, 19 nt, Artificial Sequence
  Description of Artificial Sequence: Synthetic oligonucleotide
cauaacaggcuaucagagu

SEQ ID NO: 382095 - RNA, 19 nt, Artificial Sequence
  Description of Artificial Sequence: Synthetic oligonucleotide
cucacgauugcagucacgu

SEQ ID NO: 382096 - RNA, 19 nt, Artificial Sequence
  Description of Artificial Sequence: Synthetic oligonucleotide
gaccgcaaucgccccuucc

SEQ ID NO: 382097 - RNA, 19 nt, Artificial Sequence
  Description of Artificial Sequence: Synthetic oligonucleotide
ggcgaugcccaucucgaac

SEQ ID NO: 382098 - RNA, 19 nt, Artificial Sequence
  Description of Artificial Sequence: Synthetic oligonucleotide
aaccugagucaaacauuca

SEQ ID NO: 382099 - RNA, 19 nt, Artificial Sequence
  Description of Artificial Sequence: Synthetic oligonucleotide
caaacguauuaccgaaaua

SEQ ID NO: 382100 - RNA, 19 nt, Artificial Sequence
  Description of Artificial Sequence: Synthetic oligonucleotide
gacuucaagagagaauguu

SEQ ID NO: 382101 - RNA, 19 nt, Artificial Sequence
  Description of Artificial Sequence: Synthetic oligonucleotide
ggggaaauguguuuuccua

SEQ ID NO: 382102 - RNA, 19 nt, Artificial Sequence
  Description of Artificial Sequence: Synthetic oligonucleotide
aucuacuuagcagcauuuu

SEQ ID NO: 382103 - RNA, 19 nt, Artificial Sequence
  Description of Artificial Sequence: Synthetic oligonucleotide
acaaggcgaugcccaucuc

SEQ ID NO: 382104 - RNA, 19 nt, Artificial Sequence
  Description of Artificial Sequence: Synthetic oligonucleotide
cugcuauauaaacucuaua

SEQ ID NO: 382105 - RNA, 19 nt, Artificial Sequence
  Description of Artificial Sequence: Synthetic oligonucleotide
agacuucaagagagaaugu

SEQ ID NO: 382106 - RNA, 19 nt, Artificial Sequence
  Description of Artificial Sequence: Synthetic oligonucleotide
gucggcaaauucugaucca

SEQ ID NO: 382107 - RNA, 19 nt, Artificial Sequence
  Description of Artificial Sequence: Synthetic oligonucleotide
auucgcaagcagccuggaa

SEQ ID NO: 382108 - RNA, 19 nt, Artificial Sequence
  Description of Artificial Sequence: Synthetic oligonucleotide
gccuuauguauguucaugu

SEQ ID NO: 382109 - RNA, 19 nt, Artificial Sequence
  Description of Artificial Sequence: Synthetic oligonucleotide
cccuggaacaauccaguug

SEQ ID NO: 382110 - RNA, 19 nt, Artificial Sequence
  Description of Artificial Sequence: Synthetic oligonucleotide
ucacgauugcagucacguu

SEQ ID NO: 382111 - RNA, 19 nt, Artificial Sequence
  Description of Artificial Sequence: Synthetic oligonucleotide
cuuuuaggaugugguccac

SEQ ID NO: 382112 - RNA, 19 nt, Artificial Sequence
  Description of Artificial Sequence: Synthetic oligonucleotide
cuccuaagaaauacauuau

SEQ ID NO: 382113 - RNA, 19 nt, Artificial Sequence
  Description of Artificial Sequence: Synthetic oligonucleotide
cacaaggcgaugcccaucu

SEQ ID NO: 382114 - RNA, 19 nt, Artificial Sequence
  Description of Artificial Sequence: Synthetic oligonucleotide
uucgcacgauguugucacu

SEQ ID NO: 382115 - RNA, 19 nt, Artificial Sequence
  Description of Artificial Sequence: Synthetic oligonucleotide
cugcugcugcugcugcugc

SEQ ID NO: 382116 - RNA, 19 nt, Artificial Sequence
  Description of Artificial Sequence: Synthetic oligonucleotide
acaaggcaucuuacugaag

SEQ ID NO: 382117 - RNA, 19 nt, Artificial Sequence
  Description of Artificial Sequence: Synthetic oligonucleotide
accaaacaacggcacucuu

SEQ ID NO: 382118 - RNA, 19 nt, Artificial Sequence
  Description of Artificial Sequence: Synthetic oligonucleotide
cccauucgcaagcagccug

SEQ ID NO: 382119 - RNA, 19 nt, Artificial Sequence
  Description of Artificial Sequence: Synthetic oligonucleotide
ugcugcugcugcugcugcu

SEQ ID NO: 382120 - RNA, 19 nt, Artificial Sequence
  Description of Artificial Sequence: Synthetic oligonucleotide
ggaaucucgcugaggagga

SEQ ID NO: 382121 - RNA, 19 nt, Artificial Sequence
  Description of Artificial Sequence: Synthetic oligonucleotide
gggucuaaggauggcggug

SEQ ID NO: 382122 - RNA, 19 nt, Artificial Sequence
  Description of Artificial Sequence: Synthetic oligonucleotide
agccgggaguuuauggaga

SEQ ID NO: 382123 - RNA, 19 nt, Artificial Sequence
  Description of Artificial Sequence: Synthetic oligonucleotide
acgggaaaguaggcuucag

SEQ ID NO: 382124 - RNA, 19 nt, Artificial Sequence
  Description of Artificial Sequence: Synthetic oligonucleotide
ccaauuuaacuagcccuug

SEQ ID NO: 382125 - RNA, 19 nt, Artificial Sequence
  Description of Artificial Sequence: Synthetic oligonucleotide
cgcacgauguugucacugg

SEQ ID NO: 382126 - RNA, 19 nt, Artificial Sequence
  Description of Artificial Sequence: Synthetic oligonucleotide
guacugcaguuacggaaaa

SEQ ID NO: 382127 - RNA, 19 nt, Artificial Sequence
  Description of Artificial Sequence: Synthetic oligonucleotide
gguccacuaaaugcuagaa

SEQ ID NO: 382128 - RNA, 19 nt, Artificial Sequence
  Description of Artificial Sequence: Synthetic oligonucleotide
gucuagcuuuuacauaauu

SEQ ID NO: 382129 - RNA, 19 nt, Artificial Sequence
  Description of Artificial Sequence: Synthetic oligonucleotide
cccgaagacaaagaaccuc

SEQ ID NO: 382130 - RNA, 19 nt, Artificial Sequence
  Description of Artificial Sequence: Synthetic oligonucleotide
caucuacuuagcagcauuu

SEQ ID NO: 382131 - RNA, 19 nt, Artificial Sequence
  Description of Artificial Sequence: Synthetic oligonucleotide
ccaagaccgcugcugcugc

SEQ ID NO: 382132 - RNA, 19 nt, Artificial Sequence
  Description of Artificial Sequence: Synthetic oligonucleotide
guguacccaucuacuuagc

SEQ ID NO: 382133 - RNA, 19 nt, Artificial Sequence
  Description of Artificial Sequence: Synthetic oligonucleotide
ccagaugucuaagaaugga

SEQ ID NO: 382134 - RNA, 19 nt, Artificial Sequence
  Description of Artificial Sequence: Synthetic oligonucleotide
gccuauauacuagucugaa

SEQ ID NO: 382135 - RNA, 19 nt, Artificial Sequence
  Description of Artificial Sequence: Synthetic oligonucleotide
gaaccgccuucacuggagu

SEQ ID NO: 382136 - RNA, 19 nt, Artificial Sequence
  Description of Artificial Sequence: Synthetic oligonucleotide
uggaccgcaaucgccccuu

SEQ ID NO: 382137 - RNA, 19 nt, Artificial Sequence
  Description of Artificial Sequence: Synthetic oligonucleotide
gguguucauagaacaacua

SEQ ID NO: 382138 - RNA, 19 nt, Artificial Sequence
  Description of Artificial Sequence: Synthetic oligonucleotide
cgccccuuccguauucucg

SEQ ID NO: 382139 - RNA, 19 nt, Artificial Sequence
  Description of Artificial Sequence: Synthetic oligonucleotide
uaacuagcccuugcccauu

SEQ ID NO: 382140 - RNA, 19 nt, Artificial Sequence
  Description of Artificial Sequence: Synthetic oligonucleotide
ccuauacaagaaacuaacu

SEQ ID NO: 382141 - RNA, 19 nt, Artificial Sequence
  Description of Artificial Sequence: Synthetic oligonucleotide
ggcaucuuacugaagccua

SEQ ID NO: 382142 - RNA, 19 nt, Artificial Sequence
  Description of Artificial Sequence: Synthetic oligonucleotide
ccucacuuucacuuauuaa

SEQ ID NO: 382143 - RNA, 19 nt, Artificial Sequence
  Description of Artificial Sequence: Synthetic oligonucleotide
aggcgaugcccaucucgaa

SEQ ID NO: 382144 - RNA, 19 nt, Artificial Sequence
  Description of Artificial Sequence: Synthetic oligonucleotide
ucgccccuuccguauucuc

SEQ ID NO: 382145 - RNA, 19 nt, Artificial Sequence
  Description of Artificial Sequence: Synthetic oligonucleotide
ccuuccguauucucgcaga

SEQ ID NO: 382146 - RNA, 19 nt, Artificial Sequence
  Description of Artificial Sequence: Synthetic oligonucleotide
cccuagagaacuggcuagc

SEQ ID NO: 382147 - RNA, 19 nt, Artificial Sequence
  Description of Artificial Sequence: Synthetic oligonucleotide
guuuaucccuucauugcuu

SEQ ID NO: 382148 - RNA, 19 nt, Artificial Sequence
  Description of Artificial Sequence: Synthetic oligonucleotide
caucuuacugaagccuaua

SEQ ID NO: 382149 - RNA, 19 nt, Artificial Sequence
  Description of Artificial Sequence: Synthetic oligonucleotide
gcugcugcugcugcugcug

SEQ ID NO: 382150 - RNA, 19 nt, Artificial Sequence
  Description of Artificial Sequence: Synthetic oligonucleotide
aucgccccuuccguauucu

SEQ ID NO: 382151 - RNA, 19 nt, Artificial Sequence
  Description of Artificial Sequence: Synthetic oligonucleotide
ccucacgauugcagucacg

SEQ ID NO: 382152 - RNA, 19 nt, Artificial Sequence
  Description of Artificial Sequence: Synthetic oligonucleotide
ggggcaugaagaggguaac

SEQ ID NO: 382153 - RNA, 19 nt, Artificial Sequence
  Description of Artificial Sequence: Synthetic oligonucleotide
caacggcacucuugguaga

SEQ ID NO: 382154 - RNA, 19 nt, Artificial Sequence
  Description of Artificial Sequence: Synthetic oligonucleotide
cucucaacggugcuauguu

SEQ ID NO: 382155 - RNA, 19 nt, Artificial Sequence
  Description of Artificial Sequence: Synthetic oligonucleotide
cccaagaccgcugcugcug

SEQ ID NO: 382156 - RNA, 19 nt, Artificial Sequence
  Description of Artificial Sequence: Synthetic oligonucleotide
cguauuaccgaaauacauu

SEQ ID NO: 382157 - RNA, 19 nt, Artificial Sequence
  Description of Artificial Sequence: Synthetic oligonucleotide
cuuccguauucucgcagau

SEQ ID NO: 382158 - RNA, 19 nt, Artificial Sequence
  Description of Artificial Sequence: Synthetic oligonucleotide
caagucucucaacggugcu

SEQ ID NO: 382159 - RNA, 19 nt, Artificial Sequence
  Description of Artificial Sequence: Synthetic oligonucleotide
auuugcgcccgaagacaaa

SEQ ID NO: 382160 - RNA, 19 nt, Artificial Sequence
  Description of Artificial Sequence: Synthetic oligonucleotide
ccugagucaaacauucauu

SEQ ID NO: 382161 - RNA, 19 nt, Artificial Sequence
  Description of Artificial Sequence: Synthetic oligonucleotide
cugcugcugcugcugcuca

SEQ ID NO: 382162 - RNA, 19 nt, Artificial Sequence
  Description of Artificial Sequence: Synthetic oligonucleotide
caccaaacaacggcacucu

SEQ ID NO: 382163 - RNA, 19 nt, Artificial Sequence
  Description of Artificial Sequence: Synthetic oligonucleotide
ccucaagucucucaacggu

SEQ ID NO: 382164 - RNA, 19 nt, Artificial Sequence
  Description of Artificial Sequence: Synthetic oligonucleotide
gccucacgauugcagucac

SEQ ID NO: 382165 - RNA, 19 nt, Artificial Sequence
  Description of Artificial Sequence: Synthetic oligonucleotide
ggaaccuucgcacgauguu

SEQ ID NO: 382166 - RNA, 19 nt, Artificial Sequence
  Description of Artificial Sequence: Synthetic oligonucleotide
acaggcuaucagaguccca

SEQ ID NO: 382167 - RNA, 19 nt, Artificial Sequence
  Description of Artificial Sequence: Synthetic oligonucleotide
cauucgcaagcagccugga

SEQ ID NO: 382168 - RNA, 19 nt, Artificial Sequence
  Description of Artificial Sequence: Synthetic oligonucleotide
ccacauugcauguccagau

SEQ ID NO: 382169 - RNA, 19 nt, Artificial Sequence
  Description of Artificial Sequence: Synthetic oligonucleotide
gcugcugcugcugcugcuc

SEQ ID NO: 382170 - RNA, 19 nt, Artificial Sequence
  Description of Artificial Sequence: Synthetic oligonucleotide
cgaagacaaagaaccucca

SEQ ID NO: 382171 - RNA, 19 nt, Artificial Sequence
  Description of Artificial Sequence: Synthetic oligonucleotide
gcgcuuugccucauagauc

SEQ ID NO: 382172 - RNA, 19 nt, Artificial Sequence
  Description of Artificial Sequence: Synthetic oligonucleotide
ggcuagccgggaguuuaug

SEQ ID NO: 382173 - RNA, 19 nt, Artificial Sequence
  Description of Artificial Sequence: Synthetic oligonucleotide
ccuggucggcaaauucuga

SEQ ID NO: 382174 - RNA, 19 nt, Artificial Sequence
  Description of Artificial Sequence: Synthetic oligonucleotide
ccuucgcacgauguuguca

SEQ ID NO: 382175 - RNA, 19 nt, Artificial Sequence
  Description of Artificial Sequence: Synthetic oligonucleotide
ccuuuaguguacccaucua

SEQ ID NO: 382176 - RNA, 19 nt, Artificial Sequence
  Description of Artificial Sequence: Synthetic oligonucleotide
guggaccgcaaucgccccu

SEQ ID NO: 382177 - RNA, 19 nt, Artificial Sequence
  Description of Artificial Sequence: Synthetic oligonucleotide
cagggucaucuggcacagc

SEQ ID NO: 382178 - RNA, 19 nt, Artificial Sequence
  Description of Artificial Sequence: Synthetic oligonucleotide
ccgcugcugcugcugcugc

SEQ ID NO: 382179 - RNA, 19 nt, Artificial Sequence
  Description of Artificial Sequence: Synthetic oligonucleotide
caaucgccccuuccguauu

SEQ ID NO: 382180 - RNA, 19 nt, Artificial Sequence
  Description of Artificial Sequence: Synthetic oligonucleotide
ggaccgcaaucgccccuuc

SEQ ID NO: 382181 - RNA, 19 nt, Artificial Sequence
  Description of Artificial Sequence: Synthetic oligonucleotide
cccuccuaagaaauacauu

SEQ ID NO: 382182 - RNA, 19 nt, Artificial Sequence
  Description of Artificial Sequence: Synthetic oligonucleotide
ggcuggaauaaagcacuuu

SEQ ID NO: 382183 - RNA, 19 nt, Artificial Sequence
  Description of Artificial Sequence: Synthetic oligonucleotide
gcccgaagacaaagaaccu

SEQ ID NO: 382184 - RNA, 19 nt, Artificial Sequence
  Description of Artificial Sequence: Synthetic oligonucleotide
ccccuuccguauucucgca

SEQ ID NO: 382185 - RNA, 19 nt, Artificial Sequence
  Description of Artificial Sequence: Synthetic oligonucleotide
ccaucaggugaguguaauu

SEQ ID NO: 382186 - RNA, 19 nt, Artificial Sequence
  Description of Artificial Sequence: Synthetic oligonucleotide
ccgcaaucgccccuuccgu

SEQ ID NO: 382187 - RNA, 19 nt, Artificial Sequence
  Description of Artificial Sequence: Synthetic oligonucleotide
ggguccgaugauggagccu

SEQ ID NO: 382188 - RNA, 19 nt, Artificial Sequence
  Description of Artificial Sequence: Synthetic oligonucleotide
gcccauucgcaagcagccu

SEQ ID NO: 382189 - RNA, 19 nt, Artificial Sequence
  Description of Artificial Sequence: Synthetic oligonucleotide
ggugugccuuauguauguu

SEQ ID NO: 382190 - RNA, 19 nt, Artificial Sequence
  Description of Artificial Sequence: Synthetic oligonucleotide
ccguauucucgcagauguu

SEQ ID NO: 382191 - RNA, 19 nt, Artificial Sequence
  Description of Artificial Sequence: Synthetic oligonucleotide
cgcugcugcugcugcugcu

SEQ ID NO: 382192 - RNA, 19 nt, Artificial Sequence
  Description of Artificial Sequence: Synthetic oligonucleotide
aaucagagaugguauagcc

SEQ ID NO: 382193 - RNA, 19 nt, Artificial Sequence
  Description of Artificial Sequence: Synthetic oligonucleotide
ccaucaauaauuuauaugg

SEQ ID NO: 382194 - RNA, 19 nt, Artificial Sequence
  Description of Artificial Sequence: Synthetic oligonucleotide
aaauccuccgaauucgggg

SEQ ID NO: 382195 - RNA, 19 nt, Artificial Sequence
  Description of Artificial Sequence: Synthetic oligonucleotide
gaaguuauuggacaagacc

SEQ ID NO: 382196 - RNA, 19 nt, Artificial Sequence
  Description of Artificial Sequence: Synthetic oligonucleotide
cuagugaugacucaaaauc

SEQ ID NO: 382197 - RNA, 19 nt, Artificial Sequence
  Description of Artificial Sequence: Synthetic oligonucleotide
uuuaauauggcggagccug

SEQ ID NO: 382198 - RNA, 19 nt, Artificial Sequence
  Description of Artificial Sequence: Synthetic oligonucleotide
gaaucauuauagaugauag

SEQ ID NO: 382199 - RNA, 19 nt, Artificial Sequence
  Description of Artificial Sequence: Synthetic oligonucleotide
gaugguauagccucggggc

SEQ ID NO: 382200 - RNA, 19 nt, Artificial Sequence
  Description of Artificial Sequence: Synthetic oligonucleotide
auagguugcauuuguaguc

SEQ ID NO: 382201 - RNA, 19 nt, Artificial Sequence
  Description of Artificial Sequence: Synthetic oligonucleotide
ugcauuuguaguccaacgg

SEQ ID NO: 382202 - RNA, 19 nt, Artificial Sequence
  Description of Artificial Sequence: Synthetic oligonucleotide
gagacguuuaauauggcgg

SEQ ID NO: 382203 - RNA, 19 nt, Artificial Sequence
  Description of Artificial Sequence: Synthetic oligonucleotide
gaugacucaaaauccuccg

SEQ ID NO: 382204 - RNA, 19 nt, Artificial Sequence
  Description of Artificial Sequence: Synthetic oligonucleotide
acagguuucggucggacac

SEQ ID NO: 382205 - RNA, 19 nt, Artificial Sequence
  Description of Artificial Sequence: Synthetic oligonucleotide
uagugaugacucaaaaucc

SEQ ID NO: 382206 - RNA, 19 nt, Artificial Sequence
  Description of Artificial Sequence: Synthetic oligonucleotide
agaagagcuagauuugcuc

SEQ ID NO: 382207 - RNA, 19 nt, Artificial Sequence
  Description of Artificial Sequence: Synthetic oligonucleotide
aggacggcaauuuuguggg

SEQ ID NO: 382208 - RNA, 19 nt, Artificial Sequence
  Description of Artificial Sequence: Synthetic oligonucleotide
ucauuugauaggauggcca

SEQ ID NO: 382209 - RNA, 19 nt, Artificial Sequence
  Description of Artificial Sequence: Synthetic oligonucleotide
uggccugucucauaggugg

SEQ ID NO: 382210 - RNA, 19 nt, Artificial Sequence
  Description of Artificial Sequence: Synthetic oligonucleotide
agggauagaugucaguggg

SEQ ID NO: 382211 - RNA, 19 nt, Artificial Sequence
  Description of Artificial Sequence: Synthetic oligonucleotide
agcauaagagcauuggaca

SEQ ID NO: 382212 - RNA, 19 nt, Artificial Sequence
  Description of Artificial Sequence: Synthetic oligonucleotide
accaucaauaauuuauaug

SEQ ID NO: 382213 - RNA, 19 nt, Artificial Sequence
  Description of Artificial Sequence: Synthetic oligonucleotide
ugugacacggccuucuuca

SEQ ID NO: 382214 - RNA, 19 nt, Artificial Sequence
  Description of Artificial Sequence: Synthetic oligonucleotide
acuuuacuggauccgaguc

SEQ ID NO: 382215 - RNA, 19 nt, Artificial Sequence
  Description of Artificial Sequence: Synthetic oligonucleotide
ugcacugaccgcucgaagg

SEQ ID NO: 382216 - RNA, 19 nt, Artificial Sequence
  Description of Artificial Sequence: Synthetic oligonucleotide
cuguauaccuguaggaacc

SEQ ID NO: 382217 - RNA, 19 nt, Artificial Sequence
  Description of Artificial Sequence: Synthetic oligonucleotide
uauaccuguaggaaccgug

SEQ ID NO: 382218 - RNA, 19 nt, Artificial Sequence
  Description of Artificial Sequence: Synthetic oligonucleotide
aaugguaaagcuguaggaa

SEQ ID NO: 382219 - RNA, 19 nt, Artificial Sequence
  Description of Artificial Sequence: Synthetic oligonucleotide
aaacucuguauaccuguag

SEQ ID NO: 382220 - RNA, 19 nt, Artificial Sequence
  Description of Artificial Sequence: Synthetic oligonucleotide
ugucgagccacgaaggaca

SEQ ID NO: 382221 - RNA, 19 nt, Artificial Sequence
  Description of Artificial Sequence: Synthetic oligonucleotide
uaaaggcauaguuuguuga

SEQ ID NO: 382222 - RNA, 19 nt, Artificial Sequence
  Description of Artificial Sequence: Synthetic oligonucleotide
ucaaauaaagaagcugucu

SEQ ID NO: 382223 - RNA, 19 nt, Artificial Sequence
  Description of Artificial Sequence: Synthetic oligonucleotide
uucgugauggggcugaauc

SEQ ID NO: 382224 - RNA, 19 nt, Artificial Sequence
  Description of Artificial Sequence: Synthetic oligonucleotide
guuuggauagugcaccucc

SEQ ID NO: 382225 - RNA, 19 nt, Artificial Sequence
  Description of Artificial Sequence: Synthetic oligonucleotide
gauagugcaccuccucacg

SEQ ID NO: 382226 - RNA, 19 nt, Artificial Sequence
  Description of Artificial Sequence: Synthetic oligonucleotide
uuuacuggauccgagucug

SEQ ID NO: 382227 - RNA, 19 nt, Artificial Sequence
  Description of Artificial Sequence: Synthetic oligonucleotide
gagggauagaugucagugg

SEQ ID NO: 382228 - RNA, 19 nt, Artificial Sequence
  Description of Artificial Sequence: Synthetic oligonucleotide
aaaggcauaguuuguugau

SEQ ID NO: 382229 - RNA, 19 nt, Artificial Sequence
  Description of Artificial Sequence: Synthetic oligonucleotide
gaagagcuagauuugcuca

SEQ ID NO: 382230 - RNA, 19 nt, Artificial Sequence
  Description of Artificial Sequence: Synthetic oligonucleotide
uacaggacggcaauuuugu

SEQ ID NO: 382231 - RNA, 19 nt, Artificial Sequence
  Description of Artificial Sequence: Synthetic oligonucleotide
cauuugauaggauggccag

SEQ ID NO: 382232 - RNA, 19 nt, Artificial Sequence
  Description of Artificial Sequence: Synthetic oligonucleotide
cagcauaagagcauuggac

SEQ ID NO: 382233 - RNA, 19 nt, Artificial Sequence
  Description of Artificial Sequence: Synthetic oligonucleotide
uuuguaguccaacggugug

SEQ ID NO: 382234 - RNA, 19 nt, Artificial Sequence
  Description of Artificial Sequence: Synthetic oligonucleotide
gaugcugaggaugaccugc

SEQ ID NO: 382235 - RNA, 19 nt, Artificial Sequence
  Description of Artificial Sequence: Synthetic oligonucleotide
agcggggagaacuggaagg

SEQ ID NO: 382236 - RNA, 19 nt, Artificial Sequence
  Description of Artificial Sequence: Synthetic oligonucleotide
aaagucaaauaaagaagcu

SEQ ID NO: 382237 - RNA, 19 nt, Artificial Sequence
  Description of Artificial Sequence: Synthetic oligonucleotide
cauuuguaguccaacggug

SEQ ID NO: 382238 - RNA, 19 nt, Artificial Sequence
  Description of Artificial Sequence: Synthetic oligonucleotide
ugauguccgaggagaaggg

SEQ ID NO: 382239 - RNA, 19 nt, Artificial Sequence
  Description of Artificial Sequence: Synthetic oligonucleotide
uuaauauggcggagccugg

SEQ ID NO: 382240 - RNA, 19 nt, Artificial Sequence
  Description of Artificial Sequence: Synthetic oligonucleotide
ugguauugggaccaccgug

SEQ ID NO: 382241 - RNA, 19 nt, Artificial Sequence
  Description of Artificial Sequence: Synthetic oligonucleotide
uguguuagagcgugggaga

SEQ ID NO: 382242 - RNA, 19 nt, Artificial Sequence
  Description of Artificial Sequence: Synthetic oligonucleotide
aaaauccuccgaauucggg

SEQ ID NO: 382243 - RNA, 19 nt, Artificial Sequence
  Description of Artificial Sequence: Synthetic oligonucleotide
agacguuuaauauggcgga

SEQ ID NO: 382244 - RNA, 19 nt, Artificial Sequence
  Description of Artificial Sequence: Synthetic oligonucleotide
acguuuaauauggcggagc

SEQ ID NO: 382245 - RNA, 19 nt, Artificial Sequence
  Description of Artificial Sequence: Synthetic oligonucleotide
uggauagugcaccuccuca

SEQ ID NO: 382246 - RNA, 19 nt, Artificial Sequence
  Description of Artificial Sequence: Synthetic oligonucleotide
cuagauuugcucaaggucu

SEQ ID NO: 382247 - RNA, 19 nt, Artificial Sequence
  Description of Artificial Sequence: Synthetic oligonucleotide
agccuuguccccuaggucu

SEQ ID NO: 382248 - RNA, 19 nt, Artificial Sequence
  Description of Artificial Sequence: Synthetic oligonucleotide
ucgucucugcuuuuggaag

SEQ ID NO: 382249 - RNA, 19 nt, Artificial Sequence
  Description of Artificial Sequence: Synthetic oligonucleotide
ugcucaaggucugcgaggg

SEQ ID NO: 382250 - RNA, 19 nt, Artificial Sequence
  Description of Artificial Sequence: Synthetic oligonucleotide
agaaucauuauagaugaua

SEQ ID NO: 382251 - RNA, 19 nt, Artificial Sequence
  Description of Artificial Sequence: Synthetic oligonucleotide
aauauggcggagccuggca

SEQ ID NO: 382252 - RNA, 19 nt, Artificial Sequence
  Description of Artificial Sequence: Synthetic oligonucleotide
aacggugugaugaucacau

SEQ ID NO: 382253 - RNA, 19 nt, Artificial Sequence
  Description of Artificial Sequence: Synthetic oligonucleotide
uauuggacucaucaccaaa

SEQ ID NO: 382254 - RNA, 19 nt, Artificial Sequence
  Description of Artificial Sequence: Synthetic oligonucleotide
gacucagucguccaagguc

SEQ ID NO: 382255 - RNA, 19 nt, Artificial Sequence
  Description of Artificial Sequence: Synthetic oligonucleotide
ugucuguaccuagugauga

SEQ ID NO: 382256 - RNA, 19 nt, Artificial Sequence
  Description of Artificial Sequence: Synthetic oligonucleotide
auuugauaggauggccagc

SEQ ID NO: 382257 - RNA, 19 nt, Artificial Sequence
  Description of Artificial Sequence: Synthetic oligonucleotide
gaaucagagaugguauagc

SEQ ID NO: 382258 - RNA, 19 nt, Artificial Sequence
  Description of Artificial Sequence: Synthetic oligonucleotide
aaguuacccaugguagggg

SEQ ID NO: 382259 - RNA, 19 nt, Artificial Sequence
  Description of Artificial Sequence: Synthetic oligonucleotide
aagagcuagauuugcucaa

SEQ ID NO: 382260 - RNA, 19 nt, Artificial Sequence
  Description of Artificial Sequence: Synthetic oligonucleotide
cauguagggccaucugucg

SEQ ID NO: 382261 - RNA, 19 nt, Artificial Sequence
  Description of Artificial Sequence: Synthetic oligonucleotide
uugccuuuagccgccaucc

SEQ ID NO: 382262 - RNA, 19 nt, Artificial Sequence
  Description of Artificial Sequence: Synthetic oligonucleotide
uuagccgccaucccuuugu

SEQ ID NO: 382263 - RNA, 19 nt, Artificial Sequence
  Description of Artificial Sequence: Synthetic oligonucleotide
agaaguuauuggacaagac

SEQ ID NO: 382264 - RNA, 19 nt, Artificial Sequence
  Description of Artificial Sequence: Synthetic oligonucleotide
uguauaccuguaggaaccg

SEQ ID NO: 382265 - RNA, 19 nt, Artificial Sequence
  Description of Artificial Sequence: Synthetic oligonucleotide
auccuuagugggcaucagg

SEQ ID NO: 382266 - RNA, 19 nt, Artificial Sequence
  Description of Artificial Sequence: Synthetic oligonucleotide
uaggggaccuucagguggg

SEQ ID NO: 382267 - RNA, 19 nt, Artificial Sequence
  Description of Artificial Sequence: Synthetic oligonucleotide
cauaagagcauuggacagc

SEQ ID NO: 382268 - RNA, 19 nt, Artificial Sequence
  Description of Artificial Sequence: Synthetic oligonucleotide
gucugcgaggguuggaagg

SEQ ID NO: 382269 - RNA, 19 nt, Artificial Sequence
  Description of Artificial Sequence: Synthetic oligonucleotide
ucaccagaaucauuauaga

SEQ ID NO: 382270 - RNA, 19 nt, Artificial Sequence
  Description of Artificial Sequence: Synthetic oligonucleotide
gguauugggaccaccgugg

SEQ ID NO: 382271 - RNA, 19 nt, Artificial Sequence
  Description of Artificial Sequence: Synthetic oligonucleotide
uuacccaugguaggggugc

SEQ ID NO: 382272 - RNA, 19 nt, Artificial Sequence
  Description of Artificial Sequence: Synthetic oligonucleotide
uuguaaaggcauaguuugu

SEQ ID NO: 382273 - RNA, 19 nt, Artificial Sequence
  Description of Artificial Sequence: Synthetic oligonucleotide
uguaccuagugaugacuca

SEQ ID NO: 382274 - RNA, 19 nt, Artificial Sequence
  Description of Artificial Sequence: Synthetic oligonucleotide
uacuguggguugaaagaug

SEQ ID NO: 382275 - RNA, 19 nt, Artificial Sequence
  Description of Artificial Sequence: Synthetic oligonucleotide
guuuguugauguccgagga

SEQ ID NO: 382276 - RNA, 19 nt, Artificial Sequence
  Description of Artificial Sequence: Synthetic oligonucleotide
uuuggauagugcaccuccu

SEQ ID NO: 382277 - RNA, 19 nt, Artificial Sequence
  Description of Artificial Sequence: Synthetic oligonucleotide
ggggcugaaucagagaugg

SEQ ID NO: 382278 - RNA, 19 nt, Artificial Sequence
  Description of Artificial Sequence: Synthetic oligonucleotide
auagccucggggccggagg

SEQ ID NO: 382279 - RNA, 19 nt, Artificial Sequence
  Description of Artificial Sequence: Synthetic oligonucleotide
gccguuucuugucacagcg

SEQ ID NO: 382280 - RNA, 19 nt, Artificial Sequence
  Description of Artificial Sequence: Synthetic oligonucleotide
ugguguaccugagaggcca

SEQ ID NO: 382281 - RNA, 19 nt, Artificial Sequence
  Description of Artificial Sequence: Synthetic oligonucleotide
uccgagucuggccuugggc

SEQ ID NO: 382282 - RNA, 19 nt, Artificial Sequence
  Description of Artificial Sequence: Synthetic oligonucleotide
cacgaucuuggccacacug

SEQ ID NO: 382283 - RNA, 19 nt, Artificial Sequence
  Description of Artificial Sequence: Synthetic oligonucleotide
gcggagacguuuaauaugg

SEQ ID NO: 382284 - RNA, 19 nt, Artificial Sequence
  Description of Artificial Sequence: Synthetic oligonucleotide
gcauaagagcauuggacag

SEQ ID NO: 382285 - RNA, 19 nt, Artificial Sequence
  Description of Artificial Sequence: Synthetic oligonucleotide
aacuccuccaagugggauu

SEQ ID NO: 382286 - RNA, 19 nt, Artificial Sequence
  Description of Artificial Sequence: Synthetic oligonucleotide
gcuagauuugcucaagguc

SEQ ID NO: 382287 - RNA, 19 nt, Artificial Sequence
  Description of Artificial Sequence: Synthetic oligonucleotide
ucuguaccuagugaugacu

SEQ ID NO: 382288 - RNA, 19 nt, Artificial Sequence
  Description of Artificial Sequence: Synthetic oligonucleotide
ucugucgagccacgaagga

SEQ ID NO: 382289 - RNA, 19 nt, Artificial Sequence
  Description of Artificial Sequence: Synthetic oligonucleotide
aggacucagucguccaagg

SEQ ID NO: 382290 - RNA, 19 nt, Artificial Sequence
  Description of Artificial Sequence: Synthetic oligonucleotide
cuguaccuagugaugacuc

SEQ ID NO: 382291 - RNA, 19 nt, Artificial Sequence
  Description of Artificial Sequence: Synthetic oligonucleotide
ugguauagccucggggccg

SEQ ID NO: 382292 - RNA, 19 nt, Artificial Sequence
  Description of Artificial Sequence: Synthetic oligonucleotide
gauggcccgcucgauaggg

SEQ ID NO: 382293 - RNA, 19 nt, Artificial Sequence
  Description of Artificial Sequence: Synthetic oligonucleotide
ggagggauagaugucagug

SEQ ID NO: 382294 - RNA, 19 nt, Artificial Sequence
  Description of Artificial Sequence: Synthetic oligonucleotide
acgaaggacagguuucggu

SEQ ID NO: 382295 - RNA, 19 nt, Artificial Sequence
  Description of Artificial Sequence: Synthetic oligonucleotide
caagaaguuauuggacaag

SEQ ID NO: 382296 - RNA, 19 nt, Artificial Sequence
  Description of Artificial Sequence: Synthetic oligonucleotide
accgugcucauuugauagg

SEQ ID NO: 382297 - RNA, 19 nt, Artificial Sequence
  Description of Artificial Sequence: Synthetic oligonucleotide
ucauaggaugggaucuggu

SEQ ID NO: 382298 - RNA, 19 nt, Artificial Sequence
  Description of Artificial Sequence: Synthetic oligonucleotide
uauugggaccaccguggcc

SEQ ID NO: 382299 - RNA, 19 nt, Artificial Sequence
  Description of Artificial Sequence: Synthetic oligonucleotide
uguuagagcgugggagagg

SEQ ID NO: 382300 - RNA, 19 nt, Artificial Sequence
  Description of Artificial Sequence: Synthetic oligonucleotide
ugaguggguucuccaagcu

SEQ ID NO: 382301 - RNA, 19 nt, Artificial Sequence
  Description of Artificial Sequence: Synthetic oligonucleotide
ugacacggccuucuucacc

SEQ ID NO: 382302 - RNA, 19 nt, Artificial Sequence
  Description of Artificial Sequence: Synthetic oligonucleotide
guaagagaaugugugugac

SEQ ID NO: 382303 - RNA, 19 nt, Artificial Sequence
  Description of Artificial Sequence: Synthetic oligonucleotide
gguauggggagcuguagug

SEQ ID NO: 382304 - RNA, 19 nt, Artificial Sequence
  Description of Artificial Sequence: Synthetic oligonucleotide
gauguccgaggagaagggg

SEQ ID NO: 382305 - RNA, 19 nt, Artificial Sequence
  Description of Artificial Sequence: Synthetic oligonucleotide
gacuguggcccucauacaa

SEQ ID NO: 382306 - RNA, 19 nt, Artificial Sequence
  Description of Artificial Sequence: Synthetic oligonucleotide
ugucucauaggugggugug

SEQ ID NO: 382307 - RNA, 19 nt, Artificial Sequence
  Description of Artificial Sequence: Synthetic oligonucleotide
uccccauccaggaucccug

SEQ ID NO: 382308 - RNA, 19 nt, Artificial Sequence
  Description of Artificial Sequence: Synthetic oligonucleotide
cagucguccaaggucagcc

SEQ ID NO: 382309 - RNA, 19 nt, Artificial Sequence
  Description of Artificial Sequence: Synthetic oligonucleotide
auacaggacggcaauuuug

SEQ ID NO: 382310 - RNA, 19 nt, Artificial Sequence
  Description of Artificial Sequence: Synthetic oligonucleotide
auuuguaguccaacggugu

SEQ ID NO: 382311 - RNA, 19 nt, Artificial Sequence
  Description of Artificial Sequence: Synthetic oligonucleotide
gacucauuggguagcagga

SEQ ID NO: 382312 - RNA, 19 nt, Artificial Sequence
  Description of Artificial Sequence: Synthetic oligonucleotide
ugucgucucugcuuuugga

SEQ ID NO: 382313 - RNA, 19 nt, Artificial Sequence
  Description of Artificial Sequence: Synthetic oligonucleotide
ggccauauuugcauguagg

SEQ ID NO: 382314 - RNA, 19 nt, Artificial Sequence
  Description of Artificial Sequence: Synthetic oligonucleotide
uuacuggauccgagucugg

SEQ ID NO: 382315 - RNA, 19 nt, Artificial Sequence
  Description of Artificial Sequence: Synthetic oligonucleotide
agaugccaagaaguuauug

SEQ ID NO: 382316 - RNA, 19 nt, Artificial Sequence
  Description of Artificial Sequence: Synthetic oligonucleotide
ugaggaugaccugcuguag

SEQ ID NO: 382317 - RNA, 19 nt, Artificial Sequence
  Description of Artificial Sequence: Synthetic oligonucleotide
ucugcgaggguuggaagga

SEQ ID NO: 382318 - RNA, 19 nt, Artificial Sequence
  Description of Artificial Sequence: Synthetic oligonucleotide
gguaagagaauguguguga

SEQ ID NO: 382319 - RNA, 19 nt, Artificial Sequence
  Description of Artificial Sequence: Synthetic oligonucleotide
gacguuuaauauggcggag

SEQ ID NO: 382320 - RNA, 19 nt, Artificial Sequence
  Description of Artificial Sequence: Synthetic oligonucleotide
cucaaugagccggccaagg

SEQ ID NO: 382321 - RNA, 19 nt, Artificial Sequence
  Description of Artificial Sequence: Synthetic oligonucleotide
aaguugaauuggcccuuga

SEQ ID NO: 382322 - RNA, 19 nt, Artificial Sequence
  Description of Artificial Sequence: Synthetic oligonucleotide
agguauggggagcuguagu

SEQ ID NO: 382323 - RNA, 19 nt, Artificial Sequence
  Description of Artificial Sequence: Synthetic oligonucleotide
gggcuuauuggacucauca

SEQ ID NO: 382324 - RNA, 19 nt, Artificial Sequence
  Description of Artificial Sequence: Synthetic oligonucleotide
acggcaauuuugugggugu

SEQ ID NO: 382325 - RNA, 19 nt, Artificial Sequence
  Description of Artificial Sequence: Synthetic oligonucleotide
aggccauuaggggagcggg

SEQ ID NO: 382326 - RNA, 19 nt, Artificial Sequence
  Description of Artificial Sequence: Synthetic oligonucleotide
agggucaauagguugcauu

SEQ ID NO: 382327 - RNA, 19 nt, Artificial Sequence
  Description of Artificial Sequence: Synthetic oligonucleotide
gagcggggagaacuggaag

SEQ ID NO: 382328 - RNA, 19 nt, Artificial Sequence
  Description of Artificial Sequence: Synthetic oligonucleotide
cuugauccugccccagccc

SEQ ID NO: 382329 - RNA, 19 nt, Artificial Sequence
  Description of Artificial Sequence: Synthetic oligonucleotide
agagcuagauuugcucaag

SEQ ID NO: 382330 - RNA, 19 nt, Artificial Sequence
  Description of Artificial Sequence: Synthetic oligonucleotide
ugucauaggaugggaucug

SEQ ID NO: 382331 - RNA, 19 nt, Artificial Sequence
  Description of Artificial Sequence: Synthetic oligonucleotide
cagcuuacuugccuuuagc

SEQ ID NO: 382332 - RNA, 19 nt, Artificial Sequence
  Description of Artificial Sequence: Synthetic oligonucleotide
uggcggagacguuuaauau

SEQ ID NO: 382333 - RNA, 19 nt, Artificial Sequence
  Description of Artificial Sequence: Synthetic oligonucleotide
cuguggcccucauacaaac

SEQ ID NO: 382334 - RNA, 19 nt, Artificial Sequence
  Description of Artificial Sequence: Synthetic oligonucleotide
uuuagccgccaucccuuug

SEQ ID NO: 382335 - RNA, 19 nt, Artificial Sequence
  Description of Artificial Sequence: Synthetic oligonucleotide
uaauuuauaugggguuaaa

SEQ ID NO: 382336 - RNA, 19 nt, Artificial Sequence
  Description of Artificial Sequence: Synthetic oligonucleotide
augguauugggaccaccgu

SEQ ID NO: 382337 - RNA, 19 nt, Artificial Sequence
  Description of Artificial Sequence: Synthetic oligonucleotide
ugcgaggguuggaaggaga

SEQ ID NO: 382338 - RNA, 19 nt, Artificial Sequence
  Description of Artificial Sequence: Synthetic oligonucleotide
cugucagaaacucuguaua

SEQ ID NO: 382339 - RNA, 19 nt, Artificial Sequence
  Description of Artificial Sequence: Synthetic oligonucleotide
accuagugaugacucaaaa

SEQ ID NO: 382340 - RNA, 19 nt, Artificial Sequence
  Description of Artificial Sequence: Synthetic oligonucleotide
ggcggagacguuuaauaug

SEQ ID NO: 382341 - RNA, 19 nt, Artificial Sequence
  Description of Artificial Sequence: Synthetic oligonucleotide
ggaucccugacugggaccg

SEQ ID NO: 382342 - RNA, 19 nt, Artificial Sequence
  Description of Artificial Sequence: Synthetic oligonucleotide
ggguaagagaaugugugug

SEQ ID NO: 382343 - RNA, 19 nt, Artificial Sequence
  Description of Artificial Sequence: Synthetic oligonucleotide
aggguugaugccuggcacu

SEQ ID NO: 382344 - RNA, 19 nt, Artificial Sequence
  Description of Artificial Sequence: Synthetic oligonucleotide
aaccacggcagagucugug

SEQ ID NO: 382345 - RNA, 19 nt, Artificial Sequence
  Description of Artificial Sequence: Synthetic oligonucleotide
aggaaccgugcucauuuga

SEQ ID NO: 382346 - RNA, 19 nt, Artificial Sequence
  Description of Artificial Sequence: Synthetic oligonucleotide
auauggcggagccuggcaa

SEQ ID NO: 382347 - RNA, 19 nt, Artificial Sequence
  Description of Artificial Sequence: Synthetic oligonucleotide
cacaaagcuaggguugaug

SEQ ID NO: 382348 - RNA, 19 nt, Artificial Sequence
  Description of Artificial Sequence: Synthetic oligonucleotide
gaggccauuaggggagcgg

SEQ ID NO: 382349 - RNA, 19 nt, Artificial Sequence
  Description of Artificial Sequence: Synthetic oligonucleotide
caauaauuuauaugggguu

SEQ ID NO: 382350 - RNA, 19 nt, Artificial Sequence
  Description of Artificial Sequence: Synthetic oligonucleotide
cuugccuuuagccgccauc

SEQ ID NO: 382351 - RNA, 19 nt, Artificial Sequence
  Description of Artificial Sequence: Synthetic oligonucleotide
gucaauagguugcauuugu

SEQ ID NO: 382352 - RNA, 19 nt, Artificial Sequence
  Description of Artificial Sequence: Synthetic oligonucleotide
gauuugucgucucugcuuu

SEQ ID NO: 382353 - RNA, 19 nt, Artificial Sequence
  Description of Artificial Sequence: Synthetic oligonucleotide
agccacuuuacuggauccg

SEQ ID NO: 382354 - RNA, 19 nt, Artificial Sequence
  Description of Artificial Sequence: Synthetic oligonucleotide
ucagugggauuggagcggc

SEQ ID NO: 382355 - RNA, 19 nt, Artificial Sequence
  Description of Artificial Sequence: Synthetic oligonucleotide
cugugccagcauaagagca

SEQ ID NO: 382356 - RNA, 19 nt, Artificial Sequence
  Description of Artificial Sequence: Synthetic oligonucleotide
ugccagcauaagagcauug

SEQ ID NO: 382357 - RNA, 19 nt, Artificial Sequence
  Description of Artificial Sequence: Synthetic oligonucleotide
gccgccaucccuuuguaug

SEQ ID NO: 382358 - RNA, 19 nt, Artificial Sequence
  Description of Artificial Sequence: Synthetic oligonucleotide
guauugggaccaccguggc

SEQ ID NO: 382359 - RNA, 19 nt, Artificial Sequence
  Description of Artificial Sequence: Synthetic oligonucleotide
uggccuaauuuuccucccu

SEQ ID NO: 382360 - RNA, 19 nt, Artificial Sequence
  Description of Artificial Sequence: Synthetic oligonucleotide
ggaccaagaucucagccca

SEQ ID NO: 382361 - RNA, 19 nt, Artificial Sequence
  Description of Artificial Sequence: Synthetic oligonucleotide
uguaggugucaggacgcug

SEQ ID NO: 382362 - RNA, 19 nt, Artificial Sequence
  Description of Artificial Sequence: Synthetic oligonucleotide
gagguauggggagcuguag

SEQ ID NO: 382363 - RNA, 19 nt, Artificial Sequence
  Description of Artificial Sequence: Synthetic oligonucleotide
ugccguuucuugucacagc

SEQ ID NO: 382364 - RNA, 19 nt, Artificial Sequence
  Description of Artificial Sequence: Synthetic oligonucleotide
gcggugcuugucuacaucc

SEQ ID NO: 382365 - RNA, 19 nt, Artificial Sequence
  Description of Artificial Sequence: Synthetic oligonucleotide
cguuuaauauggcggagcc

SEQ ID NO: 382366 - RNA, 19 nt, Artificial Sequence
  Description of Artificial Sequence: Synthetic oligonucleotide
agaggcaaacuuggguuug

SEQ ID NO: 382367 - RNA, 19 nt, Artificial Sequence
  Description of Artificial Sequence: Synthetic oligonucleotide
cauuggguagcaggauggg

SEQ ID NO: 382368 - RNA, 19 nt, Artificial Sequence
  Description of Artificial Sequence: Synthetic oligonucleotide
guggccuaauuuuccuccc

SEQ ID NO: 382369 - RNA, 19 nt, Artificial Sequence
  Description of Artificial Sequence: Synthetic oligonucleotide
ggauagugcaccuccucac

SEQ ID NO: 382370 - RNA, 19 nt, Artificial Sequence
  Description of Artificial Sequence: Synthetic oligonucleotide
accugagaggccauauuug

SEQ ID NO: 382371 - RNA, 19 nt, Artificial Sequence
  Description of Artificial Sequence: Synthetic oligonucleotide
gacagguuucggucggaca

SEQ ID NO: 382372 - RNA, 19 nt, Artificial Sequence
  Description of Artificial Sequence: Synthetic oligonucleotide
guggcggagacguuuaaua

SEQ ID NO: 382373 - RNA, 19 nt, Artificial Sequence
  Description of Artificial Sequence: Synthetic oligonucleotide
ggugggguaagagaaugug

SEQ ID NO: 382374 - RNA, 19 nt, Artificial Sequence
  Description of Artificial Sequence: Synthetic oligonucleotide
guccucaccagaaucauua

SEQ ID NO: 382375 - RNA, 19 nt, Artificial Sequence
  Description of Artificial Sequence: Synthetic oligonucleotide
acaggacggcaauuuugug

SEQ ID NO: 382376 - RNA, 19 nt, Artificial Sequence
  Description of Artificial Sequence: Synthetic oligonucleotide
guaggaaccgugcucauuu

SEQ ID NO: 382377 - RNA, 19 nt, Artificial Sequence
  Description of Artificial Sequence: Synthetic oligonucleotide
accguggccuaauuuuccu

SEQ ID NO: 382378 - RNA, 19 nt, Artificial Sequence
  Description of Artificial Sequence: Synthetic oligonucleotide
uggagggauagaugucagu

SEQ ID NO: 382379 - RNA, 19 nt, Artificial Sequence
  Description of Artificial Sequence: Synthetic oligonucleotide
uaggaaccgugcucauuug

SEQ ID NO: 382380 - RNA, 19 nt, Artificial Sequence
  Description of Artificial Sequence: Synthetic oligonucleotide
auaggcugccagauuuguc

SEQ ID NO: 382381 - RNA, 19 nt, Artificial Sequence
  Description of Artificial Sequence: Synthetic oligonucleotide
caggaucccugacugggac

SEQ ID NO: 382382 - RNA, 19 nt, Artificial Sequence
  Description of Artificial Sequence: Synthetic oligonucleotide
cugagaggccauauuugca

SEQ ID NO: 382383 - RNA, 19 nt, Artificial Sequence
  Description of Artificial Sequence: Synthetic oligonucleotide
gaaccgugcucauuugaua

SEQ ID NO: 382384 - RNA, 19 nt, Artificial Sequence
  Description of Artificial Sequence: Synthetic oligonucleotide
ggacaaaguugaauuggcc

SEQ ID NO: 382385 - RNA, 19 nt, Artificial Sequence
  Description of Artificial Sequence: Synthetic oligonucleotide
gucuguaccuagugaugac

SEQ ID NO: 382386 - RNA, 19 nt, Artificial Sequence
  Description of Artificial Sequence: Synthetic oligonucleotide
gauccgguggcggagacgu

SEQ ID NO: 382387 - RNA, 19 nt, Artificial Sequence
  Description of Artificial Sequence: Synthetic oligonucleotide
caggacucagucguccaag

SEQ ID NO: 382388 - RNA, 19 nt, Artificial Sequence
  Description of Artificial Sequence: Synthetic oligonucleotide
uugauaggauggccagcuc

SEQ ID NO: 382389 - RNA, 19 nt, Artificial Sequence
  Description of Artificial Sequence: Synthetic oligonucleotide
ugguaucaggucugagcaa

SEQ ID NO: 382390 - RNA, 19 nt, Artificial Sequence
  Description of Artificial Sequence: Synthetic oligonucleotide
guuagagcgugggagaggu

SEQ ID NO: 382391 - RNA, 19 nt, Artificial Sequence
  Description of Artificial Sequence: Synthetic oligonucleotide
agucguccaaggucagccu

SEQ ID NO: 382392 - RNA, 19 nt, Artificial Sequence
  Description of Artificial Sequence: Synthetic oligonucleotide
gggagaacuggaagguagg

SEQ ID NO: 382393 - RNA, 19 nt, Artificial Sequence
  Description of Artificial Sequence: Synthetic oligonucleotide
uucucgggcuuuuguugcu

SEQ ID NO: 382394 - RNA, 19 nt, Artificial Sequence
  Description of Artificial Sequence: Synthetic oligonucleotide
auaugggguuaaaauguau

SEQ ID NO: 382395 - RNA, 19 nt, Artificial Sequence
  Description of Artificial Sequence: Synthetic oligonucleotide
ugaccugcuguagguguca

SEQ ID NO: 382396 - RNA, 19 nt, Artificial Sequence
  Description of Artificial Sequence: Synthetic oligonucleotide
cuuuacuggauccgagucu

SEQ ID NO: 382397 - RNA, 19 nt, Artificial Sequence
  Description of Artificial Sequence: Synthetic oligonucleotide
uuagagcgugggagaggug

SEQ ID NO: 382398 - RNA, 19 nt, Artificial Sequence
  Description of Artificial Sequence: Synthetic oligonucleotide
ucggucggacacgaucuug

SEQ ID NO: 382399 - RNA, 19 nt, Artificial Sequence
  Description of Artificial Sequence: Synthetic oligonucleotide
gcauuuguaguccaacggu

SEQ ID NO: 382400 - RNA, 19 nt, Artificial Sequence
  Description of Artificial Sequence: Synthetic oligonucleotide
gcagcuuacuugccuuuag

SEQ ID NO: 382401 - RNA, 19 nt, Artificial Sequence
  Description of Artificial Sequence: Synthetic oligonucleotide
ccuugauccugccccagcc

SEQ ID NO: 382402 - RNA, 19 nt, Artificial Sequence
  Description of Artificial Sequence: Synthetic oligonucleotide
acauaggcugccagauuug

SEQ ID NO: 382403 - RNA, 19 nt, Artificial Sequence
  Description of Artificial Sequence: Synthetic oligonucleotide
gggccggaggccauuaggg

SEQ ID NO: 382404 - RNA, 19 nt, Artificial Sequence
  Description of Artificial Sequence: Synthetic oligonucleotide
ggucaauagguugcauuug

SEQ ID NO: 382405 - RNA, 19 nt, Artificial Sequence
  Description of Artificial Sequence: Synthetic oligonucleotide
gauccgagucuggccuugg

SEQ ID NO: 382406 - RNA, 19 nt, Artificial Sequence
  Description of Artificial Sequence: Synthetic oligonucleotide
gcaguaggugaacuggcca

SEQ ID NO: 382407 - RNA, 19 nt, Artificial Sequence
  Description of Artificial Sequence: Synthetic oligonucleotide
cugcuguaggugucaggac

SEQ ID NO: 382408 - RNA, 19 nt, Artificial Sequence
  Description of Artificial Sequence: Synthetic oligonucleotide
cgaaggacagguuucgguc

SEQ ID NO: 382409 - RNA, 19 nt, Artificial Sequence
  Description of Artificial Sequence: Synthetic oligonucleotide
cacgaaggacagguuucgg

SEQ ID NO: 382410 - RNA, 19 nt, Artificial Sequence
  Description of Artificial Sequence: Synthetic oligonucleotide
acggugugaugaucacaug

SEQ ID NO: 382411 - RNA, 19 nt, Artificial Sequence
  Description of Artificial Sequence: Synthetic oligonucleotide
ggggccggaggccauuagg

SEQ ID NO: 382412 - RNA, 19 nt, Artificial Sequence
  Description of Artificial Sequence: Synthetic oligonucleotide
cugcacugaccgcucgaag

SEQ ID NO: 382413 - RNA, 19 nt, Artificial Sequence
  Description of Artificial Sequence: Synthetic oligonucleotide
ugcugguaucaggucugag

SEQ ID NO: 382414 - RNA, 19 nt, Artificial Sequence
  Description of Artificial Sequence: Synthetic oligonucleotide
cuggauccgagucuggccu

SEQ ID NO: 382415 - RNA, 19 nt, Artificial Sequence
  Description of Artificial Sequence: Synthetic oligonucleotide
ccacuuuacuggauccgag

SEQ ID NO: 382416 - RNA, 19 nt, Artificial Sequence
  Description of Artificial Sequence: Synthetic oligonucleotide
gguauagccucggggccgg

SEQ ID NO: 382417 - RNA, 19 nt, Artificial Sequence
  Description of Artificial Sequence: Synthetic oligonucleotide
uggcuuggcugugccagca

SEQ ID NO: 382418 - RNA, 19 nt, Artificial Sequence
  Description of Artificial Sequence: Synthetic oligonucleotide
ggucugcgaggguuggaag

SEQ ID NO: 382419 - RNA, 19 nt, Artificial Sequence
  Description of Artificial Sequence: Synthetic oligonucleotide
guagggccaucugucgagc

SEQ ID NO: 382420 - RNA, 19 nt, Artificial Sequence
  Description of Artificial Sequence: Synthetic oligonucleotide
uccgguggcggagacguuu

SEQ ID NO: 382421 - RNA, 19 nt, Artificial Sequence
  Description of Artificial Sequence: Synthetic oligonucleotide
ggccgaguucccucagagg

SEQ ID NO: 382422 - RNA, 19 nt, Artificial Sequence
  Description of Artificial Sequence: Synthetic oligonucleotide
cacuuuacuggauccgagu

SEQ ID NO: 382423 - RNA, 19 nt, Artificial Sequence
  Description of Artificial Sequence: Synthetic oligonucleotide
ccuaguggcugaaguuacc

SEQ ID NO: 382424 - RNA, 19 nt, Artificial Sequence
  Description of Artificial Sequence: Synthetic oligonucleotide
aagaugccaagaaguuauu

SEQ ID NO: 382425 - RNA, 19 nt, Artificial Sequence
  Description of Artificial Sequence: Synthetic oligonucleotide
gucgagccacgaaggacag

SEQ ID NO: 382426 - RNA, 19 nt, Artificial Sequence
  Description of Artificial Sequence: Synthetic oligonucleotide
cauuggggcugguccccag

SEQ ID NO: 382427 - RNA, 19 nt, Artificial Sequence
  Description of Artificial Sequence: Synthetic oligonucleotide
uucggucggacacgaucuu

SEQ ID NO: 382428 - RNA, 19 nt, Artificial Sequence
  Description of Artificial Sequence: Synthetic oligonucleotide
acuguggcccucauacaaa

SEQ ID NO: 382429 - RNA, 19 nt, Artificial Sequence
  Description of Artificial Sequence: Synthetic oligonucleotide
cggucggacacgaucuugg

SEQ ID NO: 382430 - RNA, 19 nt, Artificial Sequence
  Description of Artificial Sequence: Synthetic oligonucleotide
ggguugaaagaugccaaga

SEQ ID NO: 382431 - RNA, 19 nt, Artificial Sequence
  Description of Artificial Sequence: Synthetic oligonucleotide
gggaccggaccuuggacuc

SEQ ID NO: 382432 - RNA, 19 nt, Artificial Sequence
  Description of Artificial Sequence: Synthetic oligonucleotide
cacggauccgguggcggag

SEQ ID NO: 382433 - RNA, 19 nt, Artificial Sequence
  Description of Artificial Sequence: Synthetic oligonucleotide
gccggaggccauuagggga

SEQ ID NO: 382434 - RNA, 19 nt, Artificial Sequence
  Description of Artificial Sequence: Synthetic oligonucleotide
gaucccugacugggaccgg

SEQ ID NO: 382435 - RNA, 19 nt, Artificial Sequence
  Description of Artificial Sequence: Synthetic oligonucleotide
cgcucgauagggauacccc

SEQ ID NO: 382436 - RNA, 19 nt, Artificial Sequence
  Description of Artificial Sequence: Synthetic oligonucleotide
gggccugcggaccaagauc

SEQ ID NO: 382437 - RNA, 19 nt, Artificial Sequence
  Description of Artificial Sequence: Synthetic oligonucleotide
ggugccguuucuugucaca

SEQ ID NO: 382438 - RNA, 19 nt, Artificial Sequence
  Description of Artificial Sequence: Synthetic oligonucleotide
cugccagauuugucgucuc

SEQ ID NO: 382439 - RNA, 19 nt, Artificial Sequence
  Description of Artificial Sequence: Synthetic oligonucleotide
cuacuguggguugaaagau

SEQ ID NO: 382440 - RNA, 19 nt, Artificial Sequence
  Description of Artificial Sequence: Synthetic oligonucleotide
guaucaggucugagcaaga

SEQ ID NO: 382441 - RNA, 19 nt, Artificial Sequence
  Description of Artificial Sequence: Synthetic oligonucleotide
ugaccgcucgaaggacuca

SEQ ID NO: 382442 - RNA, 19 nt, Artificial Sequence
  Description of Artificial Sequence: Synthetic oligonucleotide
uacccagcuugaaguccuc

SEQ ID NO: 382443 - RNA, 19 nt, Artificial Sequence
  Description of Artificial Sequence: Synthetic oligonucleotide
gcugaaucagagaugguau

SEQ ID NO: 382444 - RNA, 19 nt, Artificial Sequence
  Description of Artificial Sequence: Synthetic oligonucleotide
aggacuacuguggguugaa

SEQ ID NO: 382445 - RNA, 19 nt, Artificial Sequence
  Description of Artificial Sequence: Synthetic oligonucleotide
ccaccaucaauaauuuaua

SEQ ID NO: 382446 - RNA, 19 nt, Artificial Sequence
  Description of Artificial Sequence: Synthetic oligonucleotide
acgcuggcagugccugucu

SEQ ID NO: 382447 - RNA, 19 nt, Artificial Sequence
  Description of Artificial Sequence: Synthetic oligonucleotide
ggagcggcugugguguacc

SEQ ID NO: 382448 - RNA, 19 nt, Artificial Sequence
  Description of Artificial Sequence: Synthetic oligonucleotide
ccgcucgaaggacucauug

SEQ ID NO: 382449 - RNA, 19 nt, Artificial Sequence
  Description of Artificial Sequence: Synthetic oligonucleotide
aucccugacugggaccgga

SEQ ID NO: 382450 - RNA, 19 nt, Artificial Sequence
  Description of Artificial Sequence: Synthetic oligonucleotide
cugcgaggguuggaaggag

SEQ ID NO: 382451 - RNA, 19 nt, Artificial Sequence
  Description of Artificial Sequence: Synthetic oligonucleotide
ggaugguauugggaccacc

SEQ ID NO: 382452 - RNA, 19 nt, Artificial Sequence
  Description of Artificial Sequence: Synthetic oligonucleotide
uagccgccaucccuuugua

SEQ ID NO: 382453 - RNA, 19 nt, Artificial Sequence
  Description of Artificial Sequence: Synthetic oligonucleotide
ccauuaggggagcggggag

SEQ ID NO: 382454 - RNA, 19 nt, Artificial Sequence
  Description of Artificial Sequence: Synthetic oligonucleotide
uacccaugguaggggugca

SEQ ID NO: 382455 - RNA, 19 nt, Artificial Sequence
  Description of Artificial Sequence: Synthetic oligonucleotide
ggccauuaggggagcgggg

SEQ ID NO: 382456 - RNA, 19 nt, Artificial Sequence
  Description of Artificial Sequence: Synthetic oligonucleotide
cagcuacuuguaaaggcau

SEQ ID NO: 382457 - RNA, 19 nt, Artificial Sequence
  Description of Artificial Sequence: Synthetic oligonucleotide
ccugucucauaggugggug

SEQ ID NO: 382458 - RNA, 19 nt, Artificial Sequence
  Description of Artificial Sequence: Synthetic oligonucleotide
gccuaguggcugaaguuac

SEQ ID NO: 382459 - RNA, 19 nt, Artificial Sequence
  Description of Artificial Sequence: Synthetic oligonucleotide
cugucucauaggugggugu

SEQ ID NO: 382460 - RNA, 19 nt, Artificial Sequence
  Description of Artificial Sequence: Synthetic oligonucleotide
gguuuggauagugcaccuc

SEQ ID NO: 382461 - RNA, 19 nt, Artificial Sequence
  Description of Artificial Sequence: Synthetic oligonucleotide
gccauuaggggagcgggga

SEQ ID NO: 382462 - RNA, 19 nt, Artificial Sequence
  Description of Artificial Sequence: Synthetic oligonucleotide
ggccuaguggcugaaguua

SEQ ID NO: 382463 - RNA, 19 nt, Artificial Sequence
  Description of Artificial Sequence: Synthetic oligonucleotide
caggacuacuguggguuga

SEQ ID NO: 382464 - RNA, 19 nt, Artificial Sequence
  Description of Artificial Sequence: Synthetic oligonucleotide
ccgcucgauagggauaccc

SEQ ID NO: 382465 - RNA, 19 nt, Artificial Sequence
  Description of Artificial Sequence: Synthetic oligonucleotide
ggaagguaggggaccuuca

SEQ ID NO: 382466 - RNA, 19 nt, Artificial Sequence
  Description of Artificial Sequence: Synthetic oligonucleotide
ccuagugaugacucaaaau

SEQ ID NO: 382467 - RNA, 19 nt, Artificial Sequence
  Description of Artificial Sequence: Synthetic oligonucleotide
cauaggcugccagauuugu

SEQ ID NO: 382468 - RNA, 19 nt, Artificial Sequence
  Description of Artificial Sequence: Synthetic oligonucleotide
gggauagaugucaguggga

SEQ ID NO: 382469 - RNA, 19 nt, Artificial Sequence
  Description of Artificial Sequence: Synthetic oligonucleotide
cuccuggacuucccuccuc

SEQ ID NO: 382470 - RNA, 19 nt, Artificial Sequence
  Description of Artificial Sequence: Synthetic oligonucleotide
gccggccaaggccugucag

SEQ ID NO: 382471 - RNA, 19 nt, Artificial Sequence
  Description of Artificial Sequence: Synthetic oligonucleotide
ggauccgguggcggagacg

SEQ ID NO: 382472 - RNA, 19 nt, Artificial Sequence
  Description of Artificial Sequence: Synthetic oligonucleotide
gcccgcucgauagggauac

SEQ ID NO: 382473 - RNA, 19 nt, Artificial Sequence
  Description of Artificial Sequence: Synthetic oligonucleotide
ggccugcggaccaagaucu

SEQ ID NO: 382474 - RNA, 19 nt, Artificial Sequence
  Description of Artificial Sequence: Synthetic oligonucleotide
ggugcaucagaggcaaacu

SEQ ID NO: 382475 - RNA, 19 nt, Artificial Sequence
  Description of Artificial Sequence: Synthetic oligonucleotide
cugucugacuguggcccuc

SEQ ID NO: 382476 - RNA, 19 nt, Artificial Sequence
  Description of Artificial Sequence: Synthetic oligonucleotide
guccaacggugugaugauc

SEQ ID NO: 382477 - RNA, 19 nt, Artificial Sequence
  Description of Artificial Sequence: Synthetic oligonucleotide
cccugacugggaccggacc

SEQ ID NO: 382478 - RNA, 19 nt, Artificial Sequence
  Description of Artificial Sequence: Synthetic oligonucleotide
ccaucccuuuguaugucca

SEQ ID NO: 382479 - RNA, 19 nt, Artificial Sequence
  Description of Artificial Sequence: Synthetic oligonucleotide
ccuuggacucaggacucag

SEQ ID NO: 382480 - RNA, 19 nt, Artificial Sequence
  Description of Artificial Sequence: Synthetic oligonucleotide
acggauccgguggcggaga

SEQ ID NO: 382481 - RNA, 19 nt, Artificial Sequence
  Description of Artificial Sequence: Synthetic oligonucleotide
ggacagguuucggucggac

SEQ ID NO: 382482 - RNA, 19 nt, Artificial Sequence
  Description of Artificial Sequence: Synthetic oligonucleotide
aggacagguuucggucgga

SEQ ID NO: 382483 - RNA, 19 nt, Artificial Sequence
  Description of Artificial Sequence: Synthetic oligonucleotide
guauaccuguaggaaccgu

SEQ ID NO: 382484 - RNA, 19 nt, Artificial Sequence
  Description of Artificial Sequence: Synthetic oligonucleotide
caaggauguccugcaaggu

SEQ ID NO: 382485 - RNA, 19 nt, Artificial Sequence
  Description of Artificial Sequence: Synthetic oligonucleotide
gguugcauuuguaguccaa

SEQ ID NO: 382486 - RNA, 19 nt, Artificial Sequence
  Description of Artificial Sequence: Synthetic oligonucleotide
uuggagcggcuguggugua

SEQ ID NO: 382487 - RNA, 19 nt, Artificial Sequence
  Description of Artificial Sequence: Synthetic oligonucleotide
ggcaguacccagaucugcu

SEQ ID NO: 382488 - RNA, 19 nt, Artificial Sequence
  Description of Artificial Sequence: Synthetic oligonucleotide
ggaaccgugcucauuugau

SEQ ID NO: 382489 - RNA, 19 nt, Artificial Sequence
  Description of Artificial Sequence: Synthetic oligonucleotide
gcugccagauuugucgucu

SEQ ID NO: 382490 - RNA, 19 nt, Artificial Sequence
  Description of Artificial Sequence: Synthetic oligonucleotide
gugucaggacgcuggcagu

SEQ ID NO: 382491 - RNA, 19 nt, Artificial Sequence
  Description of Artificial Sequence: Synthetic oligonucleotide
gaagggccuaguggcugaa

SEQ ID NO: 382492 - RNA, 19 nt, Artificial Sequence
  Description of Artificial Sequence: Synthetic oligonucleotide
cuuguccccuaggucucca

SEQ ID NO: 382493 - RNA, 19 nt, Artificial Sequence
  Description of Artificial Sequence: Synthetic oligonucleotide
ccguggccuaauuuuccuc

SEQ ID NO: 382494 - RNA, 19 nt, Artificial Sequence
  Description of Artificial Sequence: Synthetic oligonucleotide
ggguuaaaauguauauauu

SEQ ID NO: 382495 - RNA, 19 nt, Artificial Sequence
  Description of Artificial Sequence: Synthetic oligonucleotide
cucccuugucuggggccag

SEQ ID NO: 382496 - RNA, 19 nt, Artificial Sequence
  Description of Artificial Sequence: Synthetic oligonucleotide
ggacucagucguccaaggu

SEQ ID NO: 382497 - RNA, 19 nt, Artificial Sequence
  Description of Artificial Sequence: Synthetic oligonucleotide
gaccgcucgaaggacucau

SEQ ID NO: 382498 - RNA, 19 nt, Artificial Sequence
  Description of Artificial Sequence: Synthetic oligonucleotide
auggcccgcucgauaggga

SEQ ID NO: 382499 - RNA, 19 nt, Artificial Sequence
  Description of Artificial Sequence: Synthetic oligonucleotide
cagguagcugcuuccccau

SEQ ID NO: 382500 - RNA, 19 nt, Artificial Sequence
  Description of Artificial Sequence: Synthetic oligonucleotide
ggccuaauuuuccucccuu

SEQ ID NO: 382501 - RNA, 19 nt, Artificial Sequence
  Description of Artificial Sequence: Synthetic oligonucleotide
cgagccacgaaggacaggu

SEQ ID NO: 382502 - RNA, 19 nt, Artificial Sequence
  Description of Artificial Sequence: Synthetic oligonucleotide
cuuuagccgccaucccuuu

SEQ ID NO: 382503 - RNA, 19 nt, Artificial Sequence
  Description of Artificial Sequence: Synthetic oligonucleotide
ccggccaaggccugucaga

SEQ ID NO: 382504 - RNA, 19 nt, Artificial Sequence
  Description of Artificial Sequence: Synthetic oligonucleotide
ccuuuagccgccaucccuu

SEQ ID NO: 382505 - RNA, 19 nt, Artificial Sequence
  Description of Artificial Sequence: Synthetic oligonucleotide
ccgaggagaaggggcugag

SEQ ID NO: 382506 - RNA, 19 nt, Artificial Sequence
  Description of Artificial Sequence: Synthetic oligonucleotide
gcggggagaacuggaaggu

SEQ ID NO: 382507 - RNA, 19 nt, Artificial Sequence
  Description of Artificial Sequence: Synthetic oligonucleotide
gggccuaguggcugaaguu

SEQ ID NO: 382508 - RNA, 19 nt, Artificial Sequence
  Description of Artificial Sequence: Synthetic oligonucleotide
accgcucgaaggacucauu

SEQ ID NO: 382509 - RNA, 19 nt, Artificial Sequence
  Description of Artificial Sequence: Synthetic oligonucleotide
ggacuacuguggguugaaa

SEQ ID NO: 382510 - RNA, 19 nt, Artificial Sequence
  Description of Artificial Sequence: Synthetic oligonucleotide
gccccuucgugauggggcu

SEQ ID NO: 382511 - RNA, 19 nt, Artificial Sequence
  Description of Artificial Sequence: Synthetic oligonucleotide
ggaccggaccuuggacuca

SEQ ID NO: 382512 - RNA, 19 nt, Artificial Sequence
  Description of Artificial Sequence: Synthetic oligonucleotide
cccuucgugauggggcuga

SEQ ID NO: 382513 - RNA, 19 nt, Artificial Sequence
  Description of Artificial Sequence: Synthetic oligonucleotide
ggguugaugccuggcacuu

SEQ ID NO: 382514 - RNA, 19 nt, Artificial Sequence
  Description of Artificial Sequence: Synthetic oligonucleotide
cagcggugcuugucuacau

SEQ ID NO: 382515 - RNA, 19 nt, Artificial Sequence
  Description of Artificial Sequence: Synthetic oligonucleotide
gcccucauacaaacucugu

SEQ ID NO: 382516 - RNA, 19 nt, Artificial Sequence
  Description of Artificial Sequence: Synthetic oligonucleotide
ggacggcaauuuugugggu

SEQ ID NO: 382517 - RNA, 19 nt, Artificial Sequence
  Description of Artificial Sequence: Synthetic oligonucleotide
cuucgugauggggcugaau

SEQ ID NO: 382518 - RNA, 19 nt, Artificial Sequence
  Description of Artificial Sequence: Synthetic oligonucleotide
ccgguggcggagacguuua

SEQ ID NO: 382519 - RNA, 19 nt, Artificial Sequence
  Description of Artificial Sequence: Synthetic oligonucleotide
ggcccgcucgauagggaua

SEQ ID NO: 382520 - RNA, 19 nt, Artificial Sequence
  Description of Artificial Sequence: Synthetic oligonucleotide
cagggucaauagguugcau

SEQ ID NO: 382521 - RNA, 19 nt, Artificial Sequence
  Description of Artificial Sequence: Synthetic oligonucleotide
ccccuucgugauggggcug

SEQ ID NO: 382522 - RNA, 19 nt, Artificial Sequence
  Description of Artificial Sequence: Synthetic oligonucleotide
gccugcggaccaagaucuc

SEQ ID NO: 382523 - RNA, 19 nt, Artificial Sequence
  Description of Artificial Sequence: Synthetic oligonucleotide
cccgcucgauagggauacc

SEQ ID NO: 382524 - RNA, 19 nt, Artificial Sequence
  Description of Artificial Sequence: Synthetic oligonucleotide
auccgguggcggagacguu

SEQ ID NO: 382525 - RNA, 19 nt, Artificial Sequence
  Description of Artificial Sequence: Synthetic oligonucleotide
cggggccggaggccauuag

SEQ ID NO: 382526 - RNA, 19 nt, Artificial Sequence
  Description of Artificial Sequence: Synthetic oligonucleotide
ccgcagcucugcucuugaa

SEQ ID NO: 382527 - RNA, 19 nt, Artificial Sequence
  Description of Artificial Sequence: Synthetic oligonucleotide
gguccacugcaggccgagu

SEQ ID NO: 382528 - RNA, 19 nt, Artificial Sequence
  Description of Artificial Sequence: Synthetic oligonucleotide
gguuucggucggacacgau

SEQ ID NO: 382529 - RNA, 19 nt, Artificial Sequence
  Description of Artificial Sequence: Synthetic oligonucleotide
cgguggcggagacguuuaa

SEQ ID NO: 382530 - RNA, 19 nt, Artificial Sequence
  Description of Artificial Sequence: Synthetic oligonucleotide
ccgaggagaugaggcguuu

SEQ ID NO: 382531 - RNA, 19 nt, Artificial Sequence
  Description of Artificial Sequence: Synthetic oligonucleotide
aagacaaaccccuaagccc

SEQ ID NO: 382532 - RNA, 19 nt, Artificial Sequence
  Description of Artificial Sequence: Synthetic oligonucleotide
aauaauuaugcuuaucucu

SEQ ID NO: 382533 - RNA, 19 nt, Artificial Sequence
  Description of Artificial Sequence: Synthetic oligonucleotide
aagcauguaaaauccaacc

SEQ ID NO: 382534 - RNA, 19 nt, Artificial Sequence
  Description of Artificial Sequence: Synthetic oligonucleotide
aauaauuagucaccgacag

SEQ ID NO: 382535 - RNA, 19 nt, Artificial Sequence
  Description of Artificial Sequence: Synthetic oligonucleotide
ugaauugagauuauaaugu

SEQ ID NO: 382536 - RNA, 19 nt, Artificial Sequence
  Description of Artificial Sequence: Synthetic oligonucleotide
uuuagaauagcuuucaaaa

SEQ ID NO: 382537 - RNA, 19 nt, Artificial Sequence
  Description of Artificial Sequence: Synthetic oligonucleotide
uuaauaauuagucaccgac

SEQ ID NO: 382538 - RNA, 19 nt, Artificial Sequence
  Description of Artificial Sequence: Synthetic oligonucleotide
acagguauuuaccaaaggc

SEQ ID NO: 382539 - RNA, 19 nt, Artificial Sequence
  Description of Artificial Sequence: Synthetic oligonucleotide
aaacauaucugccagagaa

SEQ ID NO: 382540 - RNA, 19 nt, Artificial Sequence
  Description of Artificial Sequence: Synthetic oligonucleotide
agacuaauggucuacuacc

SEQ ID NO: 382541 - RNA, 19 nt, Artificial Sequence
  Description of Artificial Sequence: Synthetic oligonucleotide
aaaacauaauuccugagau

SEQ ID NO: 382542 - RNA, 19 nt, Artificial Sequence
  Description of Artificial Sequence: Synthetic oligonucleotide
auuagagugaaauauacau

SEQ ID NO: 382543 - RNA, 19 nt, Artificial Sequence
  Description of Artificial Sequence: Synthetic oligonucleotide
aaaacuuccggcuacugca

SEQ ID NO: 382544 - RNA, 19 nt, Artificial Sequence
  Description of Artificial Sequence: Synthetic oligonucleotide
aguaugcugaguuuucucc

SEQ ID NO: 382545 - RNA, 19 nt, Artificial Sequence
  Description of Artificial Sequence: Synthetic oligonucleotide
aaagucauuauucccgaag

SEQ ID NO: 382546 - RNA, 19 nt, Artificial Sequence
  Description of Artificial Sequence: Synthetic oligonucleotide
uaucuauuaauaauuuuca

SEQ ID NO: 382547 - RNA, 19 nt, Artificial Sequence
  Description of Artificial Sequence: Synthetic oligonucleotide
aauguggugagacagaguu

SEQ ID NO: 382548 - RNA, 19 nt, Artificial Sequence
  Description of Artificial Sequence: Synthetic oligonucleotide
aauuugucaaaacauuaga

SEQ ID NO: 382549 - RNA, 19 nt, Artificial Sequence
  Description of Artificial Sequence: Synthetic oligonucleotide
aaugguaacguuuuggguu

SEQ ID NO: 382550 - RNA, 19 nt, Artificial Sequence
  Description of Artificial Sequence: Synthetic oligonucleotide
aaagguauaccauauggaa

SEQ ID NO: 382551 - RNA, 19 nt, Artificial Sequence
  Description of Artificial Sequence: Synthetic oligonucleotide
aaagcgugaucauccaggc

SEQ ID NO: 382552 - RNA, 19 nt, Artificial Sequence
  Description of Artificial Sequence: Synthetic oligonucleotide
aaaugcauaaaacacugaa

SEQ ID NO: 382553 - RNA, 19 nt, Artificial Sequence
  Description of Artificial Sequence: Synthetic oligonucleotide
aagaucgcagggcagauag

SEQ ID NO: 382554 - RNA, 19 nt, Artificial Sequence
  Description of Artificial Sequence: Synthetic oligonucleotide
caacauagcaggaacaugc

SEQ ID NO: 382555 - RNA, 19 nt, Artificial Sequence
  Description of Artificial Sequence: Synthetic oligonucleotide
ugcuaaauaauuaugcuua

SEQ ID NO: 382556 - RNA, 19 nt, Artificial Sequence
  Description of Artificial Sequence: Synthetic oligonucleotide
gaaauguagaggaacaugc

SEQ ID NO: 382557 - RNA, 19 nt, Artificial Sequence
  Description of Artificial Sequence: Synthetic oligonucleotide
aacguuuuggguugguggg

SEQ ID NO: 382558 - RNA, 19 nt, Artificial Sequence
  Description of Artificial Sequence: Synthetic oligonucleotide
gauuauaauguucaauuca

SEQ ID NO: 382559 - RNA, 19 nt, Artificial Sequence
  Description of Artificial Sequence: Synthetic oligonucleotide
aauugaaggaaaaccacuc

SEQ ID NO: 382560 - RNA, 19 nt, Artificial Sequence
  Description of Artificial Sequence: Synthetic oligonucleotide
gugaauugagauuauaaug

SEQ ID NO: 382561 - RNA, 19 nt, Artificial Sequence
  Description of Artificial Sequence: Synthetic oligonucleotide
uuagaauagcuuucaaaag

SEQ ID NO: 382562 - RNA, 19 nt, Artificial Sequence
  Description of Artificial Sequence: Synthetic oligonucleotide
aaaacagguauuuaccaaa

SEQ ID NO: 382563 - RNA, 19 nt, Artificial Sequence
  Description of Artificial Sequence: Synthetic oligonucleotide
aauaaucacaguaugcuga

SEQ ID NO: 382564 - RNA, 19 nt, Artificial Sequence
  Description of Artificial Sequence: Synthetic oligonucleotide
agauuauaauguucaauuc

SEQ ID NO: 382565 - RNA, 19 nt, Artificial Sequence
  Description of Artificial Sequence: Synthetic oligonucleotide
aauguucucaaaugcauaa

SEQ ID NO: 382566 - RNA, 19 nt, Artificial Sequence
  Description of Artificial Sequence: Synthetic oligonucleotide
uaacguuuuggguuggugg

SEQ ID NO: 382567 - RNA, 19 nt, Artificial Sequence
  Description of Artificial Sequence: Synthetic oligonucleotide
ucacaaagcgugaucaucc

SEQ ID NO: 382568 - RNA, 19 nt, Artificial Sequence
  Description of Artificial Sequence: Synthetic oligonucleotide
auagccgagaaguucgagc

SEQ ID NO: 382569 - RNA, 19 nt, Artificial Sequence
  Description of Artificial Sequence: Synthetic oligonucleotide
uucaauucagacuaauggu

SEQ ID NO: 382570 - RNA, 19 nt, Artificial Sequence
  Description of Artificial Sequence: Synthetic oligonucleotide
cagguauuuaccaaaggcc

SEQ ID NO: 382571 - RNA, 19 nt, Artificial Sequence
  Description of Artificial Sequence: Synthetic oligonucleotide
uaauaauuagucaccgaca

SEQ ID NO: 382572 - RNA, 19 nt, Artificial Sequence
  Description of Artificial Sequence: Synthetic oligonucleotide
aauugagauuauaauguuc

SEQ ID NO: 382573 - RNA, 19 nt, Artificial Sequence
  Description of Artificial Sequence: Synthetic oligonucleotide
ugucaaucacccauaauga

SEQ ID NO: 382574 - RNA, 19 nt, Artificial Sequence
  Description of Artificial Sequence: Synthetic oligonucleotide
aacacauuaauugaaggaa

SEQ ID NO: 382575 - RNA, 19 nt, Artificial Sequence
  Description of Artificial Sequence: Synthetic oligonucleotide
ucaaucacccauaaugaac

SEQ ID NO: 382576 - RNA, 19 nt, Artificial Sequence
  Description of Artificial Sequence: Synthetic oligonucleotide
aagucguuaauugagacau

SEQ ID NO: 382577 - RNA, 19 nt, Artificial Sequence
  Description of Artificial Sequence: Synthetic oligonucleotide
uaauugagacauaaagcug

SEQ ID NO: 382578 - RNA, 19 nt, Artificial Sequence
  Description of Artificial Sequence: Synthetic oligonucleotide
aguuaauaauuagucaccg

SEQ ID NO: 382579 - RNA, 19 nt, Artificial Sequence
  Description of Artificial Sequence: Synthetic oligonucleotide
cuaauggucuacuaccugc

SEQ ID NO: 382580 - RNA, 19 nt, Artificial Sequence
  Description of Artificial Sequence: Synthetic oligonucleotide
gagagcaucacaaagcgug

SEQ ID NO: 382581 - RNA, 19 nt, Artificial Sequence
  Description of Artificial Sequence: Synthetic oligonucleotide
aagucauuauucccgaagu

SEQ ID NO: 382582 - RNA, 19 nt, Artificial Sequence
  Description of Artificial Sequence: Synthetic oligonucleotide
caauuugucaaaacauuag

SEQ ID NO: 382583 - RNA, 19 nt, Artificial Sequence
  Description of Artificial Sequence: Synthetic oligonucleotide
caaagcgugaucauccagg

SEQ ID NO: 382584 - RNA, 19 nt, Artificial Sequence
  Description of Artificial Sequence: Synthetic oligonucleotide
aagaagacguuuccaacug

SEQ ID NO: 382585 - RNA, 19 nt, Artificial Sequence
  Description of Artificial Sequence: Synthetic oligonucleotide
acaagucguuaauugagac

SEQ ID NO: 382586 - RNA, 19 nt, Artificial Sequence
  Description of Artificial Sequence: Synthetic oligonucleotide
aaucacaguaugcugaguu

SEQ ID NO: 382587 - RNA, 19 nt, Artificial Sequence
  Description of Artificial Sequence: Synthetic oligonucleotide
uuagucaccgacaggauuc

SEQ ID NO: 382588 - RNA, 19 nt, Artificial Sequence
  Description of Artificial Sequence: Synthetic oligonucleotide
ucacccauaaugaacacau

SEQ ID NO: 382589 - RNA, 19 nt, Artificial Sequence
  Description of Artificial Sequence: Synthetic oligonucleotide
cuacaagucguuaauugag

SEQ ID NO: 382590 - RNA, 19 nt, Artificial Sequence
  Description of Artificial Sequence: Synthetic oligonucleotide
ugccucaugauaauguucu

SEQ ID NO: 382591 - RNA, 19 nt, Artificial Sequence
  Description of Artificial Sequence: Synthetic oligonucleotide
aagcuaguccaacauagca

SEQ ID NO: 382592 - RNA, 19 nt, Artificial Sequence
  Description of Artificial Sequence: Synthetic oligonucleotide
cagauagccgagaaguucg

SEQ ID NO: 382593 - RNA, 19 nt, Artificial Sequence
  Description of Artificial Sequence: Synthetic oligonucleotide
aguuugggccccuucaaac

SEQ ID NO: 382594 - RNA, 19 nt, Artificial Sequence
  Description of Artificial Sequence: Synthetic oligonucleotide
uuguuccuaucucugacag

SEQ ID NO: 382595 - RNA, 19 nt, Artificial Sequence
  Description of Artificial Sequence: Synthetic oligonucleotide
aaucccagaauguggugag

SEQ ID NO: 382596 - RNA, 19 nt, Artificial Sequence
  Description of Artificial Sequence: Synthetic oligonucleotide
acaaagcaaucccagaaug

SEQ ID NO: 382597 - RNA, 19 nt, Artificial Sequence
  Description of Artificial Sequence: Synthetic oligonucleotide
ugaucauccaggcaauugu

SEQ ID NO: 382598 - RNA, 19 nt, Artificial Sequence
  Description of Artificial Sequence: Synthetic oligonucleotide
cauucgagaagccaugaag

SEQ ID NO: 382599 - RNA, 19 nt, Artificial Sequence
  Description of Artificial Sequence: Synthetic oligonucleotide
agguauaccauauggaaaa

SEQ ID NO: 382600 - RNA, 19 nt, Artificial Sequence
  Description of Artificial Sequence: Synthetic oligonucleotide
uguguuuugccucaugaua

SEQ ID NO: 382601 - RNA, 19 nt, Artificial Sequence
  Description of Artificial Sequence: Synthetic oligonucleotide
uccuacaagucguuaauug

SEQ ID NO: 382602 - RNA, 19 nt, Artificial Sequence
  Description of Artificial Sequence: Synthetic oligonucleotide
ucugccagagaaauguaga

SEQ ID NO: 382603 - RNA, 19 nt, Artificial Sequence
  Description of Artificial Sequence: Synthetic oligonucleotide
uuggcuuauaggaaaacau

SEQ ID NO: 382604 - RNA, 19 nt, Artificial Sequence
  Description of Artificial Sequence: Synthetic oligonucleotide
ucuucugcggacaaacacu

SEQ ID NO: 382605 - RNA, 19 nt, Artificial Sequence
  Description of Artificial Sequence: Synthetic oligonucleotide
uguuuuggcuuauaggaaa

SEQ ID NO: 382606 - RNA, 19 nt, Artificial Sequence
  Description of Artificial Sequence: Synthetic oligonucleotide
uuauaauguucaauucaga

SEQ ID NO: 382607 - RNA, 19 nt, Artificial Sequence
  Description of Artificial Sequence: Synthetic oligonucleotide
agcaaucugucuuucuggg

SEQ ID NO: 382608 - RNA, 19 nt, Artificial Sequence
  Description of Artificial Sequence: Synthetic oligonucleotide
aaagcuaguccaacauagc

SEQ ID NO: 382609 - RNA, 19 nt, Artificial Sequence
  Description of Artificial Sequence: Synthetic oligonucleotide
aacguaagucauucugaag

SEQ ID NO: 382610 - RNA, 19 nt, Artificial Sequence
  Description of Artificial Sequence: Synthetic oligonucleotide
aaucacccauaaugaacac

SEQ ID NO: 382611 - RNA, 19 nt, Artificial Sequence
  Description of Artificial Sequence: Synthetic oligonucleotide
uguagaggaacaugccucc

SEQ ID NO: 382612 - RNA, 19 nt, Artificial Sequence
  Description of Artificial Sequence: Synthetic oligonucleotide
agcgugaucauccaggcaa

SEQ ID NO: 382613 - RNA, 19 nt, Artificial Sequence
  Description of Artificial Sequence: Synthetic oligonucleotide
gagauuauaauguucaauu

SEQ ID NO: 382614 - RNA, 19 nt, Artificial Sequence
  Description of Artificial Sequence: Synthetic oligonucleotide
aauccuacaagucguuaau

SEQ ID NO: 382615 - RNA, 19 nt, Artificial Sequence
  Description of Artificial Sequence: Synthetic oligonucleotide
cucugaaagcacuugacuc

SEQ ID NO: 382616 - RNA, 19 nt, Artificial Sequence
  Description of Artificial Sequence: Synthetic oligonucleotide
auaauuagucaccgacagg

SEQ ID NO: 382617 - RNA, 19 nt, Artificial Sequence
  Description of Artificial Sequence: Synthetic oligonucleotide
agauucuuuaaccucuagu

SEQ ID NO: 382618 - RNA, 19 nt, Artificial Sequence
  Description of Artificial Sequence: Synthetic oligonucleotide
cagacuucggaaaugcuug

SEQ ID NO: 382619 - RNA, 19 nt, Artificial Sequence
  Description of Artificial Sequence: Synthetic oligonucleotide
uucgagaagccaugaagag

SEQ ID NO: 382620 - RNA, 19 nt, Artificial Sequence
  Description of Artificial Sequence: Synthetic oligonucleotide
gcuaguccaacauagcagg

SEQ ID NO: 382621 - RNA, 19 nt, Artificial Sequence
  Description of Artificial Sequence: Synthetic oligonucleotide
caaccaaacacagcaaccg

SEQ ID NO: 382622 - RNA, 19 nt, Artificial Sequence
  Description of Artificial Sequence: Synthetic oligonucleotide
caaagacaaaccccuaagc

SEQ ID NO: 382623 - RNA, 19 nt, Artificial Sequence
  Description of Artificial Sequence: Synthetic oligonucleotide
ucacuagauucuuuaaccu

SEQ ID NO: 382624 - RNA, 19 nt, Artificial Sequence
  Description of Artificial Sequence: Synthetic oligonucleotide
uucgagcugguuaucuggg

SEQ ID NO: 382625 - RNA, 19 nt, Artificial Sequence
  Description of Artificial Sequence: Synthetic oligonucleotide
aauggucuacuaccugcuc

SEQ ID NO: 382626 - RNA, 19 nt, Artificial Sequence
  Description of Artificial Sequence: Synthetic oligonucleotide
auacaugcugaacauagaa

SEQ ID NO: 382627 - RNA, 19 nt, Artificial Sequence
  Description of Artificial Sequence: Synthetic oligonucleotide
cacaacguaagucauucug

SEQ ID NO: 382628 - RNA, 19 nt, Artificial Sequence
  Description of Artificial Sequence: Synthetic oligonucleotide
aaguggauguguccauuag

SEQ ID NO: 382629 - RNA, 19 nt, Artificial Sequence
  Description of Artificial Sequence: Synthetic oligonucleotide
accacaacguaagucauuc

SEQ ID NO: 382630 - RNA, 19 nt, Artificial Sequence
  Description of Artificial Sequence: Synthetic oligonucleotide
ugcggacaaacacugguug

SEQ ID NO: 382631 - RNA, 19 nt, Artificial Sequence
  Description of Artificial Sequence: Synthetic oligonucleotide
caaucacccauaaugaaca

SEQ ID NO: 382632 - RNA, 19 nt, Artificial Sequence
  Description of Artificial Sequence: Synthetic oligonucleotide
guucgagcugguuaucugg

SEQ ID NO: 382633 - RNA, 19 nt, Artificial Sequence
  Description of Artificial Sequence: Synthetic oligonucleotide
ccugcauugagcaagauca

SEQ ID NO: 382634 - RNA, 19 nt, Artificial Sequence
  Description of Artificial Sequence: Synthetic oligonucleotide
aauucgauguccccugcau

SEQ ID NO: 382635 - RNA, 19 nt, Artificial Sequence
  Description of Artificial Sequence: Synthetic oligonucleotide
aaugcauaaaacacugaaa

SEQ ID NO: 382636 - RNA, 19 nt, Artificial Sequence
  Description of Artificial Sequence: Synthetic oligonucleotide
uucgauguccccugcauac

SEQ ID NO: 382637 - RNA, 19 nt, Artificial Sequence
  Description of Artificial Sequence: Synthetic oligonucleotide
agaaguucgagcugguuau

SEQ ID NO: 382638 - RNA, 19 nt, Artificial Sequence
  Description of Artificial Sequence: Synthetic oligonucleotide
guccauauguuuucaguag

SEQ ID NO: 382639 - RNA, 19 nt, Artificial Sequence
  Description of Artificial Sequence: Synthetic oligonucleotide
aaccauucgugggugcacc

SEQ ID NO: 382640 - RNA, 19 nt, Artificial Sequence
  Description of Artificial Sequence: Synthetic oligonucleotide
gagucuguccaguuuacac

SEQ ID NO: 382641 - RNA, 19 nt, Artificial Sequence
  Description of Artificial Sequence: Synthetic oligonucleotide
ugucguucaucucuggaaa

SEQ ID NO: 382642 - RNA, 19 nt, Artificial Sequence
  Description of Artificial Sequence: Synthetic oligonucleotide
agacguuuccaacuggcug

SEQ ID NO: 382643 - RNA, 19 nt, Artificial Sequence
  Description of Artificial Sequence: Synthetic oligonucleotide
uccuaauucauguuacuuu

SEQ ID NO: 382644 - RNA, 19 nt, Artificial Sequence
  Description of Artificial Sequence: Synthetic oligonucleotide
agcguucuggaucaugaag

SEQ ID NO: 382645 - RNA, 19 nt, Artificial Sequence
  Description of Artificial Sequence: Synthetic oligonucleotide
uaaugguaacguuuugggu

SEQ ID NO: 382646 - RNA, 19 nt, Artificial Sequence
  Description of Artificial Sequence: Synthetic oligonucleotide
uaaguuacuugggagugug

SEQ ID NO: 382647 - RNA, 19 nt, Artificial Sequence
  Description of Artificial Sequence: Synthetic oligonucleotide
cagacuaauggucuacuac

SEQ ID NO: 382648 - RNA, 19 nt, Artificial Sequence
  Description of Artificial Sequence: Synthetic oligonucleotide
uccccugcauacaagguga

SEQ ID NO: 382649 - RNA, 19 nt, Artificial Sequence
  Description of Artificial Sequence: Synthetic oligonucleotide
uguaagaucgcagggcaga

SEQ ID NO: 382650 - RNA, 19 nt, Artificial Sequence
  Description of Artificial Sequence: Synthetic oligonucleotide
uaauggucuacuaccugcu

SEQ ID NO: 382651 - RNA, 19 nt, Artificial Sequence
  Description of Artificial Sequence: Synthetic oligonucleotide
ugcaauucgauguccccug

SEQ ID NO: 382652 - RNA, 19 nt, Artificial Sequence
  Description of Artificial Sequence: Synthetic oligonucleotide
auaauuccugagauaacuc

SEQ ID NO: 382653 - RNA, 19 nt, Artificial Sequence
  Description of Artificial Sequence: Synthetic oligonucleotide
gguaaugguaacguuuugg

SEQ ID NO: 382654 - RNA, 19 nt, Artificial Sequence
  Description of Artificial Sequence: Synthetic oligonucleotide
ugagauuauaauguucaau

SEQ ID NO: 382655 - RNA, 19 nt, Artificial Sequence
  Description of Artificial Sequence: Synthetic oligonucleotide
uuucccugcuaaauaauua

SEQ ID NO: 382656 - RNA, 19 nt, Artificial Sequence
  Description of Artificial Sequence: Synthetic oligonucleotide
aacauagaagaagacguuu

SEQ ID NO: 382657 - RNA, 19 nt, Artificial Sequence
  Description of Artificial Sequence: Synthetic oligonucleotide
ugaaauuuucccugcuaaa

SEQ ID NO: 382658 - RNA, 19 nt, Artificial Sequence
  Description of Artificial Sequence: Synthetic oligonucleotide
agggaugaaaguucagcug

SEQ ID NO: 382659 - RNA, 19 nt, Artificial Sequence
  Description of Artificial Sequence: Synthetic oligonucleotide
agggacccuacacugacag

SEQ ID NO: 382660 - RNA, 19 nt, Artificial Sequence
  Description of Artificial Sequence: Synthetic oligonucleotide
uggcuuauaggaaaacaua

SEQ ID NO: 382661 - RNA, 19 nt, Artificial Sequence
  Description of Artificial Sequence: Synthetic oligonucleotide
acccgguuaacaucccagc

SEQ ID NO: 382662 - RNA, 19 nt, Artificial Sequence
  Description of Artificial Sequence: Synthetic oligonucleotide
gguauggucauucugucca

SEQ ID NO: 382663 - RNA, 19 nt, Artificial Sequence
  Description of Artificial Sequence: Synthetic oligonucleotide
auucgagaagccaugaaga

SEQ ID NO: 382664 - RNA, 19 nt, Artificial Sequence
  Description of Artificial Sequence: Synthetic oligonucleotide
uccaaagguauaccauaug

SEQ ID NO: 382665 - RNA, 19 nt, Artificial Sequence
  Description of Artificial Sequence: Synthetic oligonucleotide
cuucugcggacaaacacug

SEQ ID NO: 382666 - RNA, 19 nt, Artificial Sequence
  Description of Artificial Sequence: Synthetic oligonucleotide
uugucgagugcucaucccu

SEQ ID NO: 382667 - RNA, 19 nt, Artificial Sequence
  Description of Artificial Sequence: Synthetic oligonucleotide
aaaguggauguguccauua

SEQ ID NO: 382668 - RNA, 19 nt, Artificial Sequence
  Description of Artificial Sequence: Synthetic oligonucleotide
gaauccuacaagucguuaa

SEQ ID NO: 382669 - RNA, 19 nt, Artificial Sequence
  Description of Artificial Sequence: Synthetic oligonucleotide
aagguauaccauauggaaa

SEQ ID NO: 382670 - RNA, 19 nt, Artificial Sequence
  Description of Artificial Sequence: Synthetic oligonucleotide
auaauuaugcuuaucucua

SEQ ID NO: 382671 - RNA, 19 nt, Artificial Sequence
  Description of Artificial Sequence: Synthetic oligonucleotide
uugacucuggguccgugug

SEQ ID NO: 382672 - RNA, 19 nt, Artificial Sequence
  Description of Artificial Sequence: Synthetic oligonucleotide
aaccccuaagcccaaguuu

SEQ ID NO: 382673 - RNA, 19 nt, Artificial Sequence
  Description of Artificial Sequence: Synthetic oligonucleotide
caaucugucuuucugggga

SEQ ID NO: 382674 - RNA, 19 nt, Artificial Sequence
  Description of Artificial Sequence: Synthetic oligonucleotide
uagauucuuuaaccucuag

SEQ ID NO: 382675 - RNA, 19 nt, Artificial Sequence
  Description of Artificial Sequence: Synthetic oligonucleotide
uccacauuugauguaccug

SEQ ID NO: 382676 - RNA, 19 nt, Artificial Sequence
  Description of Artificial Sequence: Synthetic oligonucleotide
cacuagauucuuuaaccuc

SEQ ID NO: 382677 - RNA, 19 nt, Artificial Sequence
  Description of Artificial Sequence: Synthetic oligonucleotide
ucggcugauccucgcaggg

SEQ ID NO: 382678 - RNA, 19 nt, Artificial Sequence
  Description of Artificial Sequence: Synthetic oligonucleotide
gaugccaaguuaauaauua

SEQ ID NO: 382679 - RNA, 19 nt, Artificial Sequence
  Description of Artificial Sequence: Synthetic oligonucleotide
uagcuuucaaaagaauccu

SEQ ID NO: 382680 - RNA, 19 nt, Artificial Sequence
  Description of Artificial Sequence: Synthetic oligonucleotide
agaauagcuuucaaaagaa

SEQ ID NO: 382681 - RNA, 19 nt, Artificial Sequence
  Description of Artificial Sequence: Synthetic oligonucleotide
agcuaguccaacauagcag

SEQ ID NO: 382682 - RNA, 19 nt, Artificial Sequence
  Description of Artificial Sequence: Synthetic oligonucleotide
aaacgcugugagcaaucug

SEQ ID NO: 382683 - RNA, 19 nt, Artificial Sequence
  Description of Artificial Sequence: Synthetic oligonucleotide
gagaaguucgagcugguua

SEQ ID NO: 382684 - RNA, 19 nt, Artificial Sequence
  Description of Artificial Sequence: Synthetic oligonucleotide
uccauuaggcucugugaca

SEQ ID NO: 382685 - RNA, 19 nt, Artificial Sequence
  Description of Artificial Sequence: Synthetic oligonucleotide
ucucaccagucuugaauag

SEQ ID NO: 382686 - RNA, 19 nt, Artificial Sequence
  Description of Artificial Sequence: Synthetic oligonucleotide
ugucagucagucucugaca

SEQ ID NO: 382687 - RNA, 19 nt, Artificial Sequence
  Description of Artificial Sequence: Synthetic oligonucleotide
cucaugauaauguucucaa

SEQ ID NO: 382688 - RNA, 19 nt, Artificial Sequence
  Description of Artificial Sequence: Synthetic oligonucleotide
ugucgagugcucaucccug

SEQ ID NO: 382689 - RNA, 19 nt, Artificial Sequence
  Description of Artificial Sequence: Synthetic oligonucleotide
acaaagcgugaucauccag

SEQ ID NO: 382690 - RNA, 19 nt, Artificial Sequence
  Description of Artificial Sequence: Synthetic oligonucleotide
guuaauaauuagucaccga

SEQ ID NO: 382691 - RNA, 19 nt, Artificial Sequence
  Description of Artificial Sequence: Synthetic oligonucleotide
agacaaaccccuaagccca

SEQ ID NO: 382692 - RNA, 19 nt, Artificial Sequence
  Description of Artificial Sequence: Synthetic oligonucleotide
ggccccuucaaacaggugc

SEQ ID NO: 382693 - RNA, 19 nt, Artificial Sequence
  Description of Artificial Sequence: Synthetic oligonucleotide
ugcuccgccgauuaggcuc

SEQ ID NO: 382694 - RNA, 19 nt, Artificial Sequence
  Description of Artificial Sequence: Synthetic oligonucleotide
agugucaaaguggaugugu

SEQ ID NO: 382695 - RNA, 19 nt, Artificial Sequence
  Description of Artificial Sequence: Synthetic oligonucleotide
aaguuguggagagcaucac

SEQ ID NO: 382696 - RNA, 19 nt, Artificial Sequence
  Description of Artificial Sequence: Synthetic oligonucleotide
uagcauucgagaagccaug

SEQ ID NO: 382697 - RNA, 19 nt, Artificial Sequence
  Description of Artificial Sequence: Synthetic oligonucleotide
auguauguguuuugccuca

SEQ ID NO: 382698 - RNA, 19 nt, Artificial Sequence
  Description of Artificial Sequence: Synthetic oligonucleotide
accggagcuguuuugauuu

SEQ ID NO: 382699 - RNA, 19 nt, Artificial Sequence
  Description of Artificial Sequence: Synthetic oligonucleotide
cauuagagugaaauauaca

SEQ ID NO: 382700 - RNA, 19 nt, Artificial Sequence
  Description of Artificial Sequence: Synthetic oligonucleotide
cuuauaggaaaacauaauu

SEQ ID NO: 382701 - RNA, 19 nt, Artificial Sequence
  Description of Artificial Sequence: Synthetic oligonucleotide
acauaucugccagagaaau

SEQ ID NO: 382702 - RNA, 19 nt, Artificial Sequence
  Description of Artificial Sequence: Synthetic oligonucleotide
aacccgguuaacaucccag

SEQ ID NO: 382703 - RNA, 19 nt, Artificial Sequence
  Description of Artificial Sequence: Synthetic oligonucleotide
uucggcugauccucgcagg

SEQ ID NO: 382704 - RNA, 19 nt, Artificial Sequence
  Description of Artificial Sequence: Synthetic oligonucleotide
auaguccucugccauuucu

SEQ ID NO: 382705 - RNA, 19 nt, Artificial Sequence
  Description of Artificial Sequence: Synthetic oligonucleotide
aauacaugcugaacauaga

SEQ ID NO: 382706 - RNA, 19 nt, Artificial Sequence
  Description of Artificial Sequence: Synthetic oligonucleotide
aaaccccuaagcccaaguu

SEQ ID NO: 382707 - RNA, 19 nt, Artificial Sequence
  Description of Artificial Sequence: Synthetic oligonucleotide
auuaggcucugugacagca

SEQ ID NO: 382708 - RNA, 19 nt, Artificial Sequence
  Description of Artificial Sequence: Synthetic oligonucleotide
ccucaaaagaagcagaaca

SEQ ID NO: 382709 - RNA, 19 nt, Artificial Sequence
  Description of Artificial Sequence: Synthetic oligonucleotide
auguaccugcccucaaaag

SEQ ID NO: 382710 - RNA, 19 nt, Artificial Sequence
  Description of Artificial Sequence: Synthetic oligonucleotide
auagcuccagacuucggaa

SEQ ID NO: 382711 - RNA, 19 nt, Artificial Sequence
  Description of Artificial Sequence: Synthetic oligonucleotide
uugagauuauaauguucaa

SEQ ID NO: 382712 - RNA, 19 nt, Artificial Sequence
  Description of Artificial Sequence: Synthetic oligonucleotide
gauguaccugcccucaaaa

SEQ ID NO: 382713 - RNA, 19 nt, Artificial Sequence
  Description of Artificial Sequence: Synthetic oligonucleotide
acaacguaagucauucuga

SEQ ID NO: 382714 - RNA, 19 nt, Artificial Sequence
  Description of Artificial Sequence: Synthetic oligonucleotide
cuaaauaauuaugcuuauc

SEQ ID NO: 382715 - RNA, 19 nt, Artificial Sequence
  Description of Artificial Sequence: Synthetic oligonucleotide
ucgagaagccaugaagaga

SEQ ID NO: 382716 - RNA, 19 nt, Artificial Sequence
  Description of Artificial Sequence: Synthetic oligonucleotide
aguucgagcugguuaucug

SEQ ID NO: 382717 - RNA, 19 nt, Artificial Sequence
  Description of Artificial Sequence: Synthetic oligonucleotide
ugcauugagcaagaucaca

SEQ ID NO: 382718 - RNA, 19 nt, Artificial Sequence
  Description of Artificial Sequence: Synthetic oligonucleotide
uugcagguaaugguaacgu

SEQ ID NO: 382719 - RNA, 19 nt, Artificial Sequence
  Description of Artificial Sequence: Synthetic oligonucleotide
agacaaagugcaggaugcc

SEQ ID NO: 382720 - RNA, 19 nt, Artificial Sequence
  Description of Artificial Sequence: Synthetic oligonucleotide
gauuaggcuccgguuggcg

SEQ ID NO: 382721 - RNA, 19 nt, Artificial Sequence
  Description of Artificial Sequence: Synthetic oligonucleotide
aaguucgagcugguuaucu

SEQ ID NO: 382722 - RNA, 19 nt, Artificial Sequence
  Description of Artificial Sequence: Synthetic oligonucleotide
ucaugauaauguucucaaa

SEQ ID NO: 382723 - RNA, 19 nt, Artificial Sequence
  Description of Artificial Sequence: Synthetic oligonucleotide
ucguuaauugagacauaaa

SEQ ID NO: 382724 - RNA, 19 nt, Artificial Sequence
  Description of Artificial Sequence: Synthetic oligonucleotide
ucguucaucucuggaaaca

SEQ ID NO: 382725 - RNA, 19 nt, Artificial Sequence
  Description of Artificial Sequence: Synthetic oligonucleotide
gacguuuccaacuggcugu

SEQ ID NO: 382726 - RNA, 19 nt, Artificial Sequence
  Description of Artificial Sequence: Synthetic oligonucleotide
agcucugucuacuuacaaa

SEQ ID NO: 382727 - RNA, 19 nt, Artificial Sequence
  Description of Artificial Sequence: Synthetic oligonucleotide
ucgcagggaugaaaguuca

SEQ ID NO: 382728 - RNA, 19 nt, Artificial Sequence
  Description of Artificial Sequence: Synthetic oligonucleotide
agacagaguucucaccagu

SEQ ID NO: 382729 - RNA, 19 nt, Artificial Sequence
  Description of Artificial Sequence: Synthetic oligonucleotide
aacauagcaggaacaugca

SEQ ID NO: 382730 - RNA, 19 nt, Artificial Sequence
  Description of Artificial Sequence: Synthetic oligonucleotide
aguuacuugggagugugaa

SEQ ID NO: 382731 - RNA, 19 nt, Artificial Sequence
  Description of Artificial Sequence: Synthetic oligonucleotide
acauaauuccugagauaac

SEQ ID NO: 382732 - RNA, 19 nt, Artificial Sequence
  Description of Artificial Sequence: Synthetic oligonucleotide
uccggcuacugcaauucga

SEQ ID NO: 382733 - RNA, 19 nt, Artificial Sequence
  Description of Artificial Sequence: Synthetic oligonucleotide
cauaaagcugacaaacgcu

SEQ ID NO: 382734 - RNA, 19 nt, Artificial Sequence
  Description of Artificial Sequence: Synthetic oligonucleotide
ggacccuacacugacagug

SEQ ID NO: 382735 - RNA, 19 nt, Artificial Sequence
  Description of Artificial Sequence: Synthetic oligonucleotide
cauaauuccugagauaacu

SEQ ID NO: 382736 - RNA, 19 nt, Artificial Sequence
  Description of Artificial Sequence: Synthetic oligonucleotide
caucucuggaaacauaucu

SEQ ID NO: 382737 - RNA, 19 nt, Artificial Sequence
  Description of Artificial Sequence: Synthetic oligonucleotide
auggcuauggaaguacuaa

SEQ ID NO: 382738 - RNA, 19 nt, Artificial Sequence
  Description of Artificial Sequence: Synthetic oligonucleotide
gguguuuuacuguuugguc

SEQ ID NO: 382739 - RNA, 19 nt, Artificial Sequence
  Description of Artificial Sequence: Synthetic oligonucleotide
agggcuagcaagccuuuca

SEQ ID NO: 382740 - RNA, 19 nt, Artificial Sequence
  Description of Artificial Sequence: Synthetic oligonucleotide
uuccuaauucauguuacuu

SEQ ID NO: 382741 - RNA, 19 nt, Artificial Sequence
  Description of Artificial Sequence: Synthetic oligonucleotide
cuugucgagugcucauccc

SEQ ID NO: 382742 - RNA, 19 nt, Artificial Sequence
  Description of Artificial Sequence: Synthetic oligonucleotide
ucacaccguugauugcagg

SEQ ID NO: 382743 - RNA, 19 nt, Artificial Sequence
  Description of Artificial Sequence: Synthetic oligonucleotide
uuauucccgaaguggguau

SEQ ID NO: 382744 - RNA, 19 nt, Artificial Sequence
  Description of Artificial Sequence: Synthetic oligonucleotide
ucccagaauguggugagac

SEQ ID NO: 382745 - RNA, 19 nt, Artificial Sequence
  Description of Artificial Sequence: Synthetic oligonucleotide
aaaacuuguuuuggcuuau

SEQ ID NO: 382746 - RNA, 19 nt, Artificial Sequence
  Description of Artificial Sequence: Synthetic oligonucleotide
guguuuugccucaugauaa

SEQ ID NO: 382747 - RNA, 19 nt, Artificial Sequence
  Description of Artificial Sequence: Synthetic oligonucleotide
aaguggguauggucauucu

SEQ ID NO: 382748 - RNA, 19 nt, Artificial Sequence
  Description of Artificial Sequence: Synthetic oligonucleotide
cauacaccugucacuucag

SEQ ID NO: 382749 - RNA, 19 nt, Artificial Sequence
  Description of Artificial Sequence: Synthetic oligonucleotide
uucagacuaauggucuacu

SEQ ID NO: 382750 - RNA, 19 nt, Artificial Sequence
  Description of Artificial Sequence: Synthetic oligonucleotide
ucagacuaauggucuacua

SEQ ID NO: 382751 - RNA, 19 nt, Artificial Sequence
  Description of Artificial Sequence: Synthetic oligonucleotide
gggaucauuaaagcucugg

SEQ ID NO: 382752 - RNA, 19 nt, Artificial Sequence
  Description of Artificial Sequence: Synthetic oligonucleotide
ugccccgaucgccaagccg

SEQ ID NO: 382753 - RNA, 19 nt, Artificial Sequence
  Description of Artificial Sequence: Synthetic oligonucleotide
auuauucccgaagugggua

SEQ ID NO: 382754 - RNA, 19 nt, Artificial Sequence
  Description of Artificial Sequence: Synthetic oligonucleotide
ugguuaucuggguagcauu

SEQ ID NO: 382755 - RNA, 19 nt, Artificial Sequence
  Description of Artificial Sequence: Synthetic oligonucleotide
gucguuaauugagacauaa

SEQ ID NO: 382756 - RNA, 19 nt, Artificial Sequence
  Description of Artificial Sequence: Synthetic oligonucleotide
agcugcuccgccgauuagg

SEQ ID NO: 382757 - RNA, 19 nt, Artificial Sequence
  Description of Artificial Sequence: Synthetic oligonucleotide
uggaaguacuaagucccug

SEQ ID NO: 382758 - RNA, 19 nt, Artificial Sequence
  Description of Artificial Sequence: Synthetic oligonucleotide
acacauuaauugaaggaaa

SEQ ID NO: 382759 - RNA, 19 nt, Artificial Sequence
  Description of Artificial Sequence: Synthetic oligonucleotide
uggguauggucauucuguc

SEQ ID NO: 382760 - RNA, 19 nt, Artificial Sequence
  Description of Artificial Sequence: Synthetic oligonucleotide
gugaucauccaggcaauug

SEQ ID NO: 382761 - RNA, 19 nt, Artificial Sequence
  Description of Artificial Sequence: Synthetic oligonucleotide
acccuacacugacaguguc

SEQ ID NO: 382762 - RNA, 19 nt, Artificial Sequence
  Description of Artificial Sequence: Synthetic oligonucleotide
acaaacgcugugagcaauc

SEQ ID NO: 382763 - RNA, 19 nt, Artificial Sequence
  Description of Artificial Sequence: Synthetic oligonucleotide
ucggaaaugcuuggcuuug

SEQ ID NO: 382764 - RNA, 19 nt, Artificial Sequence
  Description of Artificial Sequence: Synthetic oligonucleotide
gaugccccgaucgccaagc

SEQ ID NO: 382765 - RNA, 19 nt, Artificial Sequence
  Description of Artificial Sequence: Synthetic oligonucleotide
accauucgugggugcaccg

SEQ ID NO: 382766 - RNA, 19 nt, Artificial Sequence
  Description of Artificial Sequence: Synthetic oligonucleotide
gguauuuaccaaaggcccc

SEQ ID NO: 382767 - RNA, 19 nt, Artificial Sequence
  Description of Artificial Sequence: Synthetic oligonucleotide
aucacaguaugcugaguuu

SEQ ID NO: 382768 - RNA, 19 nt, Artificial Sequence
  Description of Artificial Sequence: Synthetic oligonucleotide
gaauugagauuauaauguu

SEQ ID NO: 382769 - RNA, 19 nt, Artificial Sequence
  Description of Artificial Sequence: Synthetic oligonucleotide
gauagccgagaaguucgag

SEQ ID NO: 382770 - RNA, 19 nt, Artificial Sequence
  Description of Artificial Sequence: Synthetic oligonucleotide
aagcgugaucauccaggca

SEQ ID NO: 382771 - RNA, 19 nt, Artificial Sequence
  Description of Artificial Sequence: Synthetic oligonucleotide
ccaaguuucacagggcuag

SEQ ID NO: 382772 - RNA, 19 nt, Artificial Sequence
  Description of Artificial Sequence: Synthetic oligonucleotide
caguaugcugaguuuucuc

SEQ ID NO: 382773 - RNA, 19 nt, Artificial Sequence
  Description of Artificial Sequence: Synthetic oligonucleotide
cauuugauguaccugcccu

SEQ ID NO: 382774 - RNA, 19 nt, Artificial Sequence
  Description of Artificial Sequence: Synthetic oligonucleotide
caacguaagucauucugaa

SEQ ID NO: 382775 - RNA, 19 nt, Artificial Sequence
  Description of Artificial Sequence: Synthetic oligonucleotide
caccgacaggauuccauag

SEQ ID NO: 382776 - RNA, 19 nt, Artificial Sequence
  Description of Artificial Sequence: Synthetic oligonucleotide
uccagcgagugcaaauaua

SEQ ID NO: 382777 - RNA, 19 nt, Artificial Sequence
  Description of Artificial Sequence: Synthetic oligonucleotide
uguuccuaucucugacagu

SEQ ID NO: 382778 - RNA, 19 nt, Artificial Sequence
  Description of Artificial Sequence: Synthetic oligonucleotide
agguaaugguaacguuuug

SEQ ID NO: 382779 - RNA, 19 nt, Artificial Sequence
  Description of Artificial Sequence: Synthetic oligonucleotide
ugaacccgguuaacauccc

SEQ ID NO: 382780 - RNA, 19 nt, Artificial Sequence
  Description of Artificial Sequence: Synthetic oligonucleotide
gccgauuaggcuccgguug

SEQ ID NO: 382781 - RNA, 19 nt, Artificial Sequence
  Description of Artificial Sequence: Synthetic oligonucleotide
guaccugcccucaaaagaa

SEQ ID NO: 382782 - RNA, 19 nt, Artificial Sequence
  Description of Artificial Sequence: Synthetic oligonucleotide
ugacaaacgcugugagcaa

SEQ ID NO: 382783 - RNA, 19 nt, Artificial Sequence
  Description of Artificial Sequence: Synthetic oligonucleotide
uugucagagucuguccagu

SEQ ID NO: 382784 - RNA, 19 nt, Artificial Sequence
  Description of Artificial Sequence: Synthetic oligonucleotide
gucguucaucucuggaaac

SEQ ID NO: 382785 - RNA, 19 nt, Artificial Sequence
  Description of Artificial Sequence: Synthetic oligonucleotide
aggauggcggugaacccgg

SEQ ID NO: 382786 - RNA, 19 nt, Artificial Sequence
  Description of Artificial Sequence: Synthetic oligonucleotide
aggguuggcauagcauguc

SEQ ID NO: 382787 - RNA, 19 nt, Artificial Sequence
  Description of Artificial Sequence: Synthetic oligonucleotide
uauucccgaaguggguaug

SEQ ID NO: 382788 - RNA, 19 nt, Artificial Sequence
  Description of Artificial Sequence: Synthetic oligonucleotide
cauugagcaagaucacaaa

SEQ ID NO: 382789 - RNA, 19 nt, Artificial Sequence
  Description of Artificial Sequence: Synthetic oligonucleotide
ggguccguguguuugcuug

SEQ ID NO: 382790 - RNA, 19 nt, Artificial Sequence
  Description of Artificial Sequence: Synthetic oligonucleotide
cugcauugagcaagaucac

SEQ ID NO: 382791 - RNA, 19 nt, Artificial Sequence
  Description of Artificial Sequence: Synthetic oligonucleotide
gagaugccaaguuaauaau

SEQ ID NO: 382792 - RNA, 19 nt, Artificial Sequence
  Description of Artificial Sequence: Synthetic oligonucleotide
ugcagguaaugguaacguu

SEQ ID NO: 382793 - RNA, 19 nt, Artificial Sequence
  Description of Artificial Sequence: Synthetic oligonucleotide
ggcuacugcaauucgaugu

SEQ ID NO: 382794 - RNA, 19 nt, Artificial Sequence
  Description of Artificial Sequence: Synthetic oligonucleotide
gucgagugcucaucccugc

SEQ ID NO: 382795 - RNA, 19 nt, Artificial Sequence
  Description of Artificial Sequence: Synthetic oligonucleotide
auucgauguccccugcaua

SEQ ID NO: 382796 - RNA, 19 nt, Artificial Sequence
  Description of Artificial Sequence: Synthetic oligonucleotide
agaugccaaguuaauaauu

SEQ ID NO: 382797 - RNA, 19 nt, Artificial Sequence
  Description of Artificial Sequence: Synthetic oligonucleotide
ggugaacccgguuaacauc

SEQ ID NO: 382798 - RNA, 19 nt, Artificial Sequence
  Description of Artificial Sequence: Synthetic oligonucleotide
auagcaugucacaccguug

SEQ ID NO: 382799 - RNA, 19 nt, Artificial Sequence
  Description of Artificial Sequence: Synthetic oligonucleotide
aggaaacuccucacacagg

SEQ ID NO: 382800 - RNA, 19 nt, Artificial Sequence
  Description of Artificial Sequence: Synthetic oligonucleotide
guccccuaacucaugagga

SEQ ID NO: 382801 - RNA, 19 nt, Artificial Sequence
  Description of Artificial Sequence: Synthetic oligonucleotide
uagucaccgacaggauucc

SEQ ID NO: 382802 - RNA, 19 nt, Artificial Sequence
  Description of Artificial Sequence: Synthetic oligonucleotide
cauuaggcucugugacagc

SEQ ID NO: 382803 - RNA, 19 nt, Artificial Sequence
  Description of Artificial Sequence: Synthetic oligonucleotide
guagcauucgagaagccau

SEQ ID NO: 382804 - RNA, 19 nt, Artificial Sequence
  Description of Artificial Sequence: Synthetic oligonucleotide
auaccaaaagcuaguccaa

SEQ ID NO: 382805 - RNA, 19 nt, Artificial Sequence
  Description of Artificial Sequence: Synthetic oligonucleotide
gacuaauggucuacuaccu

SEQ ID NO: 382806 - RNA, 19 nt, Artificial Sequence
  Description of Artificial Sequence: Synthetic oligonucleotide
aagaauccuacaagucguu

SEQ ID NO: 382807 - RNA, 19 nt, Artificial Sequence
  Description of Artificial Sequence: Synthetic oligonucleotide
aaacuuccggcuacugcaa

SEQ ID NO: 382808 - RNA, 19 nt, Artificial Sequence
  Description of Artificial Sequence: Synthetic oligonucleotide
ccugagauaacucuuugua

SEQ ID NO: 382809 - RNA, 19 nt, Artificial Sequence
  Description of Artificial Sequence: Synthetic oligonucleotide
agcauucgagaagccauga

SEQ ID NO: 382810 - RNA, 19 nt, Artificial Sequence
  Description of Artificial Sequence: Synthetic oligonucleotide
uggcugucaaucacccaua

SEQ ID NO: 382811 - RNA, 19 nt, Artificial Sequence
  Description of Artificial Sequence: Synthetic oligonucleotide
gaaccauucgugggugcac

SEQ ID NO: 382812 - RNA, 19 nt, Artificial Sequence
  Description of Artificial Sequence: Synthetic oligonucleotide
gcguucuggaucaugaaga

SEQ ID NO: 382813 - RNA, 19 nt, Artificial Sequence
  Description of Artificial Sequence: Synthetic oligonucleotide
cugagauaacucuuuguau

SEQ ID NO: 382814 - RNA, 19 nt, Artificial Sequence
  Description of Artificial Sequence: Synthetic oligonucleotide
agagcaucacaaagcguga

SEQ ID NO: 382815 - RNA, 19 nt, Artificial Sequence
  Description of Artificial Sequence: Synthetic oligonucleotide
ggguauggucauucugucc

SEQ ID NO: 382816 - RNA, 19 nt, Artificial Sequence
  Description of Artificial Sequence: Synthetic oligonucleotide
augccccgaucgccaagcc

SEQ ID NO: 382817 - RNA, 19 nt, Artificial Sequence
  Description of Artificial Sequence: Synthetic oligonucleotide
ggacaaacacugguugaag

SEQ ID NO: 382818 - RNA, 19 nt, Artificial Sequence
  Description of Artificial Sequence: Synthetic oligonucleotide
agucagucucugacacagc

SEQ ID NO: 382819 - RNA, 19 nt, Artificial Sequence
  Description of Artificial Sequence: Synthetic oligonucleotide
cccgaaguggguaugguca

SEQ ID NO: 382820 - RNA, 19 nt, Artificial Sequence
  Description of Artificial Sequence: Synthetic oligonucleotide
cccgguuaacaucccagcg

SEQ ID NO: 382821 - RNA, 19 nt, Artificial Sequence
  Description of Artificial Sequence: Synthetic oligonucleotide
ccagcgagugcaaauauaa

SEQ ID NO: 382822 - RNA, 19 nt, Artificial Sequence
  Description of Artificial Sequence: Synthetic oligonucleotide
uccucgcagggaugaaagu

SEQ ID NO: 382823 - RNA, 19 nt, Artificial Sequence
  Description of Artificial Sequence: Synthetic oligonucleotide
acguuuccaacuggcuguc

SEQ ID NO: 382824 - RNA, 19 nt, Artificial Sequence
  Description of Artificial Sequence: Synthetic oligonucleotide
gguagcauucgagaagcca

SEQ ID NO: 382825 - RNA, 19 nt, Artificial Sequence
  Description of Artificial Sequence: Synthetic oligonucleotide
cuaguccaacauagcagga

SEQ ID NO: 382826 - RNA, 19 nt, Artificial Sequence
  Description of Artificial Sequence: Synthetic oligonucleotide
cacaaagcgugaucaucca

SEQ ID NO: 382827 - RNA, 19 nt, Artificial Sequence
  Description of Artificial Sequence: Synthetic oligonucleotide
ccgauuaggcuccgguugg

SEQ ID NO: 382828 - RNA, 19 nt, Artificial Sequence
  Description of Artificial Sequence: Synthetic oligonucleotide
cauucgugggugcaccgga

SEQ ID NO: 382829 - RNA, 19 nt, Artificial Sequence
  Description of Artificial Sequence: Synthetic oligonucleotide
caccuauuuuacauugucu

SEQ ID NO: 382830 - RNA, 19 nt, Artificial Sequence
  Description of Artificial Sequence: Synthetic oligonucleotide
gcauugagcaagaucacaa

SEQ ID NO: 382831 - RNA, 19 nt, Artificial Sequence
  Description of Artificial Sequence: Synthetic oligonucleotide
gguuggaaccacaacguaa

SEQ ID NO: 382832 - RNA, 19 nt, Artificial Sequence
  Description of Artificial Sequence: Synthetic oligonucleotide
cauugucagucagucucug

SEQ ID NO: 382833 - RNA, 19 nt, Artificial Sequence
  Description of Artificial Sequence: Synthetic oligonucleotide
cauagcaugucacaccguu

SEQ ID NO: 382834 - RNA, 19 nt, Artificial Sequence
  Description of Artificial Sequence: Synthetic oligonucleotide
aaguuacuugggaguguga

SEQ ID NO: 382835 - RNA, 19 nt, Artificial Sequence
  Description of Artificial Sequence: Synthetic oligonucleotide
gauggcuauggaaguacua

SEQ ID NO: 382836 - RNA, 19 nt, Artificial Sequence
  Description of Artificial Sequence: Synthetic oligonucleotide
agaauccuacaagucguua

SEQ ID NO: 382837 - RNA, 19 nt, Artificial Sequence
  Description of Artificial Sequence: Synthetic oligonucleotide
gcagauagccgagaaguuc

SEQ ID NO: 382838 - RNA, 19 nt, Artificial Sequence
  Description of Artificial Sequence: Synthetic oligonucleotide
ggcuagcaagccuuucaug

SEQ ID NO: 382839 - RNA, 19 nt, Artificial Sequence
  Description of Artificial Sequence: Synthetic oligonucleotide
ccgucgaugaaguugugga

SEQ ID NO: 382840 - RNA, 19 nt, Artificial Sequence
  Description of Artificial Sequence: Synthetic oligonucleotide
aaccacucugaaagcacuu

SEQ ID NO: 382841 - RNA, 19 nt, Artificial Sequence
  Description of Artificial Sequence: Synthetic oligonucleotide
aaccacaacguaagucauu

SEQ ID NO: 382842 - RNA, 19 nt, Artificial Sequence
  Description of Artificial Sequence: Synthetic oligonucleotide
uguauguguuuugccucau

SEQ ID NO: 382843 - RNA, 19 nt, Artificial Sequence
  Description of Artificial Sequence: Synthetic oligonucleotide
uuccuaucucugacaguuu

SEQ ID NO: 382844 - RNA, 19 nt, Artificial Sequence
  Description of Artificial Sequence: Synthetic oligonucleotide
cuagcaagccuuucauggu

SEQ ID NO: 382845 - RNA, 19 nt, Artificial Sequence
  Description of Artificial Sequence: Synthetic oligonucleotide
cagguaaugguaacguuuu

SEQ ID NO: 382846 - RNA, 19 nt, Artificial Sequence
  Description of Artificial Sequence: Synthetic oligonucleotide
cacaccguugauugcaggu

SEQ ID NO: 382847 - RNA, 19 nt, Artificial Sequence
  Description of Artificial Sequence: Synthetic oligonucleotide
acaccguugauugcaggua

SEQ ID NO: 382848 - RNA, 19 nt, Artificial Sequence
  Description of Artificial Sequence: Synthetic oligonucleotide
caauucgauguccccugca

SEQ ID NO: 382849 - RNA, 19 nt, Artificial Sequence
  Description of Artificial Sequence: Synthetic oligonucleotide
uaagaucgcagggcagaua

SEQ ID NO: 382850 - RNA, 19 nt, Artificial Sequence
  Description of Artificial Sequence: Synthetic oligonucleotide
gaaguucgagcugguuauc

SEQ ID NO: 382851 - RNA, 19 nt, Artificial Sequence
  Description of Artificial Sequence: Synthetic oligonucleotide
auccuacaagucguuaauu

SEQ ID NO: 382852 - RNA, 19 nt, Artificial Sequence
  Description of Artificial Sequence: Synthetic oligonucleotide
caccguugauugcagguaa

SEQ ID NO: 382853 - RNA, 19 nt, Artificial Sequence
  Description of Artificial Sequence: Synthetic oligonucleotide
gguuggcauagcaugucac

SEQ ID NO: 382854 - RNA, 19 nt, Artificial Sequence
  Description of Artificial Sequence: Synthetic oligonucleotide
uuuggguuggugggcuuuu

SEQ ID NO: 382855 - RNA, 19 nt, Artificial Sequence
  Description of Artificial Sequence: Synthetic oligonucleotide
gccgucgaugaaguugugg

SEQ ID NO: 382856 - RNA, 19 nt, Artificial Sequence
  Description of Artificial Sequence: Synthetic oligonucleotide
ucgccaagccgucgaugaa

SEQ ID NO: 382857 - RNA, 19 nt, Artificial Sequence
  Description of Artificial Sequence: Synthetic oligonucleotide
gaagaaggugaaauccguu

SEQ ID NO: 382858 - RNA, 19 nt, Artificial Sequence
  Description of Artificial Sequence: Synthetic oligonucleotide
agauagccgagaaguucga

SEQ ID NO: 382859 - RNA, 19 nt, Artificial Sequence
  Description of Artificial Sequence: Synthetic oligonucleotide
ggguuggcauagcauguca

SEQ ID NO: 382860 - RNA, 19 nt, Artificial Sequence
  Description of Artificial Sequence: Synthetic oligonucleotide
gcugcuccgccgauuaggc

SEQ ID NO: 382861 - RNA, 19 nt, Artificial Sequence
  Description of Artificial Sequence: Synthetic oligonucleotide
ccucaugauaauguucuca

SEQ ID NO: 382862 - RNA, 19 nt, Artificial Sequence
  Description of Artificial Sequence: Synthetic oligonucleotide
gcuaaauaauuaugcuuau

SEQ ID NO: 382863 - RNA, 19 nt, Artificial Sequence
  Description of Artificial Sequence: Synthetic oligonucleotide
ggaaccauucgugggugca

SEQ ID NO: 382864 - RNA, 19 nt, Artificial Sequence
  Description of Artificial Sequence: Synthetic oligonucleotide
gagugcucaucccugcauu

SEQ ID NO: 382865 - RNA, 19 nt, Artificial Sequence
  Description of Artificial Sequence: Synthetic oligonucleotide
gugcuucggcugauccucg

SEQ ID NO: 382866 - RNA, 19 nt, Artificial Sequence
  Description of Artificial Sequence: Synthetic oligonucleotide
uucucccacccaacauauu

SEQ ID NO: 382867 - RNA, 19 nt, Artificial Sequence
  Description of Artificial Sequence: Synthetic oligonucleotide
gugcucaucccugcauuga

SEQ ID NO: 382868 - RNA, 19 nt, Artificial Sequence
  Description of Artificial Sequence: Synthetic oligonucleotide
gacaaacgcugugagcaau

SEQ ID NO: 382869 - RNA, 19 nt, Artificial Sequence
  Description of Artificial Sequence: Synthetic oligonucleotide
agcuguuauuuugcauuua

SEQ ID NO: 382870 - RNA, 19 nt, Artificial Sequence
  Description of Artificial Sequence: Synthetic oligonucleotide
cugcaauucgauguccccu

SEQ ID NO: 382871 - RNA, 19 nt, Artificial Sequence
  Description of Artificial Sequence: Synthetic oligonucleotide
caaaccccuaagcccaagu

SEQ ID NO: 382872 - RNA, 19 nt, Artificial Sequence
  Description of Artificial Sequence: Synthetic oligonucleotide
gcaaccgccuucugagaga

SEQ ID NO: 382873 - RNA, 19 nt, Artificial Sequence
  Description of Artificial Sequence: Synthetic oligonucleotide
ccguugauugcagguaaug

SEQ ID NO: 382874 - RNA, 19 nt, Artificial Sequence
  Description of Artificial Sequence: Synthetic oligonucleotide
gacccuacacugacagugu

SEQ ID NO: 382875 - RNA, 19 nt, Artificial Sequence
  Description of Artificial Sequence: Synthetic oligonucleotide
ccauucgugggugcaccgg

SEQ ID NO: 382876 - RNA, 19 nt, Artificial Sequence
  Description of Artificial Sequence: Synthetic oligonucleotide
accguugauugcagguaau

SEQ ID NO: 382877 - RNA, 19 nt, Artificial Sequence
  Description of Artificial Sequence: Synthetic oligonucleotide
ccccaaccgcuccagcagg

SEQ ID NO: 382878 - RNA, 19 nt, Artificial Sequence
  Description of Artificial Sequence: Synthetic oligonucleotide
uggguccguguguuugcuu

SEQ ID NO: 382879 - RNA, 19 nt, Artificial Sequence
  Description of Artificial Sequence: Synthetic oligonucleotide
ggcugucaaucacccauaa

SEQ ID NO: 382880 - RNA, 19 nt, Artificial Sequence
  Description of Artificial Sequence: Synthetic oligonucleotide
guauggucauucuguccau

SEQ ID NO: 382881 - RNA, 19 nt, Artificial Sequence
  Description of Artificial Sequence: Synthetic oligonucleotide
agucaccgacaggauucca

SEQ ID NO: 382882 - RNA, 19 nt, Artificial Sequence
  Description of Artificial Sequence: Synthetic oligonucleotide
cccuacacugacaguguca

SEQ ID NO: 382883 - RNA, 19 nt, Artificial Sequence
  Description of Artificial Sequence: Synthetic oligonucleotide
gacaaaccccuaagcccaa

SEQ ID NO: 382884 - RNA, 19 nt, Artificial Sequence
  Description of Artificial Sequence: Synthetic oligonucleotide
gcggugaacccgguuaaca

SEQ ID NO: 382885 - RNA, 19 nt, Artificial Sequence
  Description of Artificial Sequence: Synthetic oligonucleotide
gcuccgccgauuaggcucc

SEQ ID NO: 382886 - RNA, 19 nt, Artificial Sequence
  Description of Artificial Sequence: Synthetic oligonucleotide
gucaccgacaggauuccau

SEQ ID NO: 382887 - RNA, 19 nt, Artificial Sequence
  Description of Artificial Sequence: Synthetic oligonucleotide
caaacgcugugagcaaucu

SEQ ID NO: 382888 - RNA, 19 nt, Artificial Sequence
  Description of Artificial Sequence: Synthetic oligonucleotide
agucguuaauugagacaua

SEQ ID NO: 382889 - RNA, 19 nt, Artificial Sequence
  Description of Artificial Sequence: Synthetic oligonucleotide
guaagaucgcagggcagau

SEQ ID NO: 382890 - RNA, 19 nt, Artificial Sequence
  Description of Artificial Sequence: Synthetic oligonucleotide
cccuucaaacaggugcaug

SEQ ID NO: 382891 - RNA, 19 nt, Artificial Sequence
  Description of Artificial Sequence: Synthetic oligonucleotide
ccguguguuugcuugugaa

SEQ ID NO: 382892 - RNA, 19 nt, Artificial Sequence
  Description of Artificial Sequence: Synthetic oligonucleotide
ccgacaggauuccauagcu

SEQ ID NO: 382893 - RNA, 19 nt, Artificial Sequence
  Description of Artificial Sequence: Synthetic oligonucleotide
cugcggacaaacacugguu

SEQ ID NO: 382894 - RNA, 19 nt, Artificial Sequence
  Description of Artificial Sequence: Synthetic oligonucleotide
ggcuugucgagugcucauc

SEQ ID NO: 382895 - RNA, 19 nt, Artificial Sequence
  Description of Artificial Sequence: Synthetic oligonucleotide
ggaugaaaguucagcugcu

SEQ ID NO: 382896 - RNA, 19 nt, Artificial Sequence
  Description of Artificial Sequence: Synthetic oligonucleotide
gaagccaaucugaccuuuu

SEQ ID NO: 382897 - RNA, 19 nt, Artificial Sequence
  Description of Artificial Sequence: Synthetic oligonucleotide
cagcgagugcaaauauaau

SEQ ID NO: 382898 - RNA, 19 nt, Artificial Sequence
  Description of Artificial Sequence: Synthetic oligonucleotide
ccgguuaacaucccagcgu

SEQ ID NO: 382899 - RNA, 19 nt, Artificial Sequence
  Description of Artificial Sequence: Synthetic oligonucleotide
caacaagcucugucuacuu

SEQ ID NO: 382900 - RNA, 19 nt, Artificial Sequence
  Description of Artificial Sequence: Synthetic oligonucleotide
cuccagcgagugcaaauau

SEQ ID NO: 382901 - RNA, 19 nt, Artificial Sequence
  Description of Artificial Sequence: Synthetic oligonucleotide
gccccgaucgccaagccgu

SEQ ID NO: 382902 - RNA, 19 nt, Artificial Sequence
  Description of Artificial Sequence: Synthetic oligonucleotide
caaccgccuucugagagau

SEQ ID NO: 382903 - RNA, 19 nt, Artificial Sequence
  Description of Artificial Sequence: Synthetic oligonucleotide
cccaaguuucacagggcua

SEQ ID NO: 382904 - RNA, 19 nt, Artificial Sequence
  Description of Artificial Sequence: Synthetic oligonucleotide
caccggagcuguuuugauu

SEQ ID NO: 382905 - RNA, 19 nt, Artificial Sequence
  Description of Artificial Sequence: Synthetic oligonucleotide
ggggaucauuaaagcucug

SEQ ID NO: 382906 - RNA, 19 nt, Artificial Sequence
  Description of Artificial Sequence: Synthetic oligonucleotide
ccccuaacucaugaggaaa

SEQ ID NO: 382907 - RNA, 19 nt, Artificial Sequence
  Description of Artificial Sequence: Synthetic oligonucleotide
ccggagcuguuuugauuuc

SEQ ID NO: 382908 - RNA, 19 nt, Artificial Sequence
  Description of Artificial Sequence: Synthetic oligonucleotide
ggcggugaacccgguuaac

SEQ ID NO: 382909 - RNA, 19 nt, Artificial Sequence
  Description of Artificial Sequence: Synthetic oligonucleotide
cccgaucgccaagccgucg

SEQ ID NO: 382910 - RNA, 19 nt, Artificial Sequence
  Description of Artificial Sequence: Synthetic oligonucleotide
agccgucgaugaaguugug

SEQ ID NO: 382911 - RNA, 19 nt, Artificial Sequence
  Description of Artificial Sequence: Synthetic oligonucleotide
cgauuaggcuccgguuggc

SEQ ID NO: 382912 - RNA, 19 nt, Artificial Sequence
  Description of Artificial Sequence: Synthetic oligonucleotide
cuccgccgauuaggcuccg

SEQ ID NO: 382913 - RNA, 19 nt, Artificial Sequence
  Description of Artificial Sequence: Synthetic oligonucleotide
cugcuccgccgauuaggcu

SEQ ID NO: 382914 - RNA, 19 nt, Artificial Sequence
  Description of Artificial Sequence: Synthetic oligonucleotide
cgguuaacaucccagcguu

SEQ ID NO: 382915 - RNA, 19 nt, Artificial Sequence
  Description of Artificial Sequence: Synthetic oligonucleotide
gggacccuacacugacagu

SEQ ID NO: 382916 - RNA, 19 nt, Artificial Sequence
  Description of Artificial Sequence: Synthetic oligonucleotide
ggcagauagccgagaaguu

SEQ ID NO: 382917 - RNA, 19 nt, Artificial Sequence
  Description of Artificial Sequence: Synthetic oligonucleotide
ccucgcagggaugaaaguu

SEQ ID NO: 382918 - RNA, 19 nt, Artificial Sequence
  Description of Artificial Sequence: Synthetic oligonucleotide
gggccccuucaaacaggug

SEQ ID NO: 382919 - RNA, 19 nt, Artificial Sequence
  Description of Artificial Sequence: Synthetic oligonucleotide
gcaccggagcuguuuugau

SEQ ID NO: 382920 - RNA, 19 nt, Artificial Sequence
  Description of Artificial Sequence: Synthetic oligonucleotide
cggugaacccgguuaacau

SEQ ID NO: 382921 - RNA, 19 nt, Artificial Sequence
  Description of Artificial Sequence: Synthetic oligonucleotide
ccgaaguggguauggucau

SEQ ID NO: 382922 - RNA, 19 nt, Artificial Sequence
  Description of Artificial Sequence: Synthetic oligonucleotide
ccacaacguaagucauucu

SEQ ID NO: 382923 - RNA, 19 nt, Artificial Sequence
  Description of Artificial Sequence: Synthetic oligonucleotide
ccgccgauuaggcuccggu

SEQ ID NO: 382924 - RNA, 19 nt, Artificial Sequence
  Description of Artificial Sequence: Synthetic oligonucleotide
cacuugacucuggguccgu

SEQ ID NO: 382925 - RNA, 19 nt, Artificial Sequence
  Description of Artificial Sequence: Synthetic oligonucleotide
ccgagaaguucgagcuggu

SEQ ID NO: 382926 - RNA, 19 nt, Artificial Sequence
  Description of Artificial Sequence: Synthetic oligonucleotide
cgagugcucaucccugcau

SEQ ID NO: 382927 - RNA, 19 nt, Artificial Sequence
  Description of Artificial Sequence: Synthetic oligonucleotide
cggcugauccucgcaggga

SEQ ID NO: 382928 - RNA, 19 nt, Artificial Sequence
  Description of Artificial Sequence: Synthetic oligonucleotide
ccccugcauacaaggugau

SEQ ID NO: 382929 - RNA, 19 nt, Artificial Sequence
  Description of Artificial Sequence: Synthetic oligonucleotide
cgccgauuaggcuccgguu

SEQ ID NO: 382930 - RNA, 19 nt, Artificial Sequence
  Description of Artificial Sequence: Synthetic oligonucleotide
aauuuauucacccagucag

SEQ ID NO: 382931 - RNA, 19 nt, Artificial Sequence
  Description of Artificial Sequence: Synthetic oligonucleotide
uuaaauuauaacaaguccu

SEQ ID NO: 382932 - RNA, 19 nt, Artificial Sequence
  Description of Artificial Sequence: Synthetic oligonucleotide
aaagcaaggaagguuaucc

SEQ ID NO: 382933 - RNA, 19 nt, Artificial Sequence
  Description of Artificial Sequence: Synthetic oligonucleotide
auaacaaguccuuucaagc

SEQ ID NO: 382934 - RNA, 19 nt, Artificial Sequence
  Description of Artificial Sequence: Synthetic oligonucleotide
ugaaucagagacaaguugg

SEQ ID NO: 382935 - RNA, 19 nt, Artificial Sequence
  Description of Artificial Sequence: Synthetic oligonucleotide
aauaccuaucuacacuucc

SEQ ID NO: 382936 - RNA, 19 nt, Artificial Sequence
  Description of Artificial Sequence: Synthetic oligonucleotide
ucuuaugugagcuugacac

SEQ ID NO: 382937 - RNA, 19 nt, Artificial Sequence
  Description of Artificial Sequence: Synthetic oligonucleotide
cuuauguaaacucagcucc

SEQ ID NO: 382938 - RNA, 19 nt, Artificial Sequence
  Description of Artificial Sequence: Synthetic oligonucleotide
aaaagaugccaccacgucg

SEQ ID NO: 382939 - RNA, 19 nt, Artificial Sequence
  Description of Artificial Sequence: Synthetic oligonucleotide
uauaaauuugguuacgcug

SEQ ID NO: 382940 - RNA, 19 nt, Artificial Sequence
  Description of Artificial Sequence: Synthetic oligonucleotide
aauacuucgagaugaacca

SEQ ID NO: 382941 - RNA, 19 nt, Artificial Sequence
  Description of Artificial Sequence: Synthetic oligonucleotide
auauaugugggccaaacag

SEQ ID NO: 382942 - RNA, 19 nt, Artificial Sequence
  Description of Artificial Sequence: Synthetic oligonucleotide
uuuaaagggaauuuauuca

SEQ ID NO: 382943 - RNA, 19 nt, Artificial Sequence
  Description of Artificial Sequence: Synthetic oligonucleotide
aaagaaacaugccugcuug

SEQ ID NO: 382944 - RNA, 19 nt, Artificial Sequence
  Description of Artificial Sequence: Synthetic oligonucleotide
uggaauacuagccaaauuc

SEQ ID NO: 382945 - RNA, 19 nt, Artificial Sequence
  Description of Artificial Sequence: Synthetic oligonucleotide
agauaauaaaggcagcuuc

SEQ ID NO: 382946 - RNA, 19 nt, Artificial Sequence
  Description of Artificial Sequence: Synthetic oligonucleotide
aagaacaacuagucgauag

SEQ ID NO: 382947 - RNA, 19 nt, Artificial Sequence
  Description of Artificial Sequence: Synthetic oligonucleotide
ucuacugccaaacucaacu

SEQ ID NO: 382948 - RNA, 19 nt, Artificial Sequence
  Description of Artificial Sequence: Synthetic oligonucleotide
aauaauucgaucugcuacu

SEQ ID NO: 382949 - RNA, 19 nt, Artificial Sequence
  Description of Artificial Sequence: Synthetic oligonucleotide
aacacgaauauucagcagu

SEQ ID NO: 382950 - RNA, 19 nt, Artificial Sequence
  Description of Artificial Sequence: Synthetic oligonucleotide
aaaauauguggucaggcga

SEQ ID NO: 382951 - RNA, 19 nt, Artificial Sequence
  Description of Artificial Sequence: Synthetic oligonucleotide
uaacuuaaaauaccuaucu

SEQ ID NO: 382952 - RNA, 19 nt, Artificial Sequence
  Description of Artificial Sequence: Synthetic oligonucleotide
ucagagauuuacuaaauac

SEQ ID NO: 382953 - RNA, 19 nt, Artificial Sequence
  Description of Artificial Sequence: Synthetic oligonucleotide
uauaacaaguccuuucaag

SEQ ID NO: 382954 - RNA, 19 nt, Artificial Sequence
  Description of Artificial Sequence: Synthetic oligonucleotide
agcccuagauaauaaaggc

SEQ ID NO: 382955 - RNA, 19 nt, Artificial Sequence
  Description of Artificial Sequence: Synthetic oligonucleotide
guaacuuucauauauugga

SEQ ID NO: 382956 - RNA, 19 nt, Artificial Sequence
  Description of Artificial Sequence: Synthetic oligonucleotide
uauaaaggauauuuugacc

SEQ ID NO: 382957 - RNA, 19 nt, Artificial Sequence
  Description of Artificial Sequence: Synthetic oligonucleotide
agcaguaaacaucuucugc

SEQ ID NO: 382958 - RNA, 19 nt, Artificial Sequence
  Description of Artificial Sequence: Synthetic oligonucleotide
aaaauaccuaucuacacuu

SEQ ID NO: 382959 - RNA, 19 nt, Artificial Sequence
  Description of Artificial Sequence: Synthetic oligonucleotide
uucaauacugauauaaaua

SEQ ID NO: 382960 - RNA, 19 nt, Artificial Sequence
  Description of Artificial Sequence: Synthetic oligonucleotide
aaauugaacucugggacac

SEQ ID NO: 382961 - RNA, 19 nt, Artificial Sequence
  Description of Artificial Sequence: Synthetic oligonucleotide
auuauaacaaguccuuuca

SEQ ID NO: 382962 - RNA, 19 nt, Artificial Sequence
  Description of Artificial Sequence: Synthetic oligonucleotide
auagagcacacucugccgc

SEQ ID NO: 382963 - RNA, 19 nt, Artificial Sequence
  Description of Artificial Sequence: Synthetic oligonucleotide
gaaagcaacacgaauauuc

SEQ ID NO: 382964 - RNA, 19 nt, Artificial Sequence
  Description of Artificial Sequence: Synthetic oligonucleotide
ugagcuugacacaagcuag

SEQ ID NO: 382965 - RNA, 19 nt, Artificial Sequence
  Description of Artificial Sequence: Synthetic oligonucleotide
aguaaacaucuucugcugc

SEQ ID NO: 382966 - RNA, 19 nt, Artificial Sequence
  Description of Artificial Sequence: Synthetic oligonucleotide
acaucaacaacauaccaca

SEQ ID NO: 382967 - RNA, 19 nt, Artificial Sequence
  Description of Artificial Sequence: Synthetic oligonucleotide
caaaguaccgacugcaugc

SEQ ID NO: 382968 - RNA, 19 nt, Artificial Sequence
  Description of Artificial Sequence: Synthetic oligonucleotide
agucgauagauuuaaauaa

SEQ ID NO: 382969 - RNA, 19 nt, Artificial Sequence
  Description of Artificial Sequence: Synthetic oligonucleotide
ugcguugagacucuguugc

SEQ ID NO: 382970 - RNA, 19 nt, Artificial Sequence
  Description of Artificial Sequence: Synthetic oligonucleotide
uucgauaacgguaagcaaa

SEQ ID NO: 382971 - RNA, 19 nt, Artificial Sequence
  Description of Artificial Sequence: Synthetic oligonucleotide
auaauugagugguagugag

SEQ ID NO: 382972 - RNA, 19 nt, Artificial Sequence
  Description of Artificial Sequence: Synthetic oligonucleotide
aauugagugguagugaggu

SEQ ID NO: 382973 - RNA, 19 nt, Artificial Sequence
  Description of Artificial Sequence: Synthetic oligonucleotide
gaagguuauccucaugggg

SEQ ID NO: 382974 - RNA, 19 nt, Artificial Sequence
  Description of Artificial Sequence: Synthetic oligonucleotide
aaacuaaauaaacuaugaa

SEQ ID NO: 382975 - RNA, 19 nt, Artificial Sequence
  Description of Artificial Sequence: Synthetic oligonucleotide
uacaucaacaacauaccac

SEQ ID NO: 382976 - RNA, 19 nt, Artificial Sequence
  Description of Artificial Sequence: Synthetic oligonucleotide
uauuuugaccacuaguuaa

SEQ ID NO: 382977 - RNA, 19 nt, Artificial Sequence
  Description of Artificial Sequence: Synthetic oligonucleotide
uuacaauacuucgagauga

SEQ ID NO: 382978 - RNA, 19 nt, Artificial Sequence
  Description of Artificial Sequence: Synthetic oligonucleotide
agcaacacgaauauucagc

SEQ ID NO: 382979 - RNA, 19 nt, Artificial Sequence
  Description of Artificial Sequence: Synthetic oligonucleotide
auaacgguaagcaaacuuc

SEQ ID NO: 382980 - RNA, 19 nt, Artificial Sequence
  Description of Artificial Sequence: Synthetic oligonucleotide
cuuuaaucaggucaacagc

SEQ ID NO: 382981 - RNA, 19 nt, Artificial Sequence
  Description of Artificial Sequence: Synthetic oligonucleotide
ucuaagggcggcaagcuca

SEQ ID NO: 382982 - RNA, 19 nt, Artificial Sequence
  Description of Artificial Sequence: Synthetic oligonucleotide
caugguaagagauucugac

SEQ ID NO: 382983 - RNA, 19 nt, Artificial Sequence
  Description of Artificial Sequence: Synthetic oligonucleotide
aagcccuagauaauaaagg

SEQ ID NO: 382984 - RNA, 19 nt, Artificial Sequence
  Description of Artificial Sequence: Synthetic oligonucleotide
uaagguaucucuagcauau

SEQ ID NO: 382985 - RNA, 19 nt, Artificial Sequence
  Description of Artificial Sequence: Synthetic oligonucleotide
augaccauuacagucagag

SEQ ID NO: 382986 - RNA, 19 nt, Artificial Sequence
  Description of Artificial Sequence: Synthetic oligonucleotide
acaacuagucgauagauuu

SEQ ID NO: 382987 - RNA, 19 nt, Artificial Sequence
  Description of Artificial Sequence: Synthetic oligonucleotide
aauauaugugggccaaaca

SEQ ID NO: 382988 - RNA, 19 nt, Artificial Sequence
  Description of Artificial Sequence: Synthetic oligonucleotide
aauaauugagugguaguga

SEQ ID NO: 382989 - RNA, 19 nt, Artificial Sequence
  Description of Artificial Sequence: Synthetic oligonucleotide
cugaccagcaaacucaagc

SEQ ID NO: 382990 - RNA, 19 nt, Artificial Sequence
  Description of Artificial Sequence: Synthetic oligonucleotide
uuacaucuuucucugaccu

SEQ ID NO: 382991 - RNA, 19 nt, Artificial Sequence
  Description of Artificial Sequence: Synthetic oligonucleotide
auaacuuaaaauaccuauc

SEQ ID NO: 382992 - RNA, 19 nt, Artificial Sequence
  Description of Artificial Sequence: Synthetic oligonucleotide
cauugaugccauucgaagg

SEQ ID NO: 382993 - RNA, 19 nt, Artificial Sequence
  Description of Artificial Sequence: Synthetic oligonucleotide
aaguugguaccaauuuucc

SEQ ID NO: 382994 - RNA, 19 nt, Artificial Sequence
  Description of Artificial Sequence: Synthetic oligonucleotide
aucucaauuauccugggaa

SEQ ID NO: 382995 - RNA, 19 nt, Artificial Sequence
  Description of Artificial Sequence: Synthetic oligonucleotide
guuacuguuucgauaacgg

SEQ ID NO: 382996 - RNA, 19 nt, Artificial Sequence
  Description of Artificial Sequence: Synthetic oligonucleotide
ugcuuauguaaacucagcu

SEQ ID NO: 382997 - RNA, 19 nt, Artificial Sequence
  Description of Artificial Sequence: Synthetic oligonucleotide
aagggcggcaagcucauuc

SEQ ID NO: 382998 - RNA, 19 nt, Artificial Sequence
  Description of Artificial Sequence: Synthetic oligonucleotide
uuuaagguaucucuagcau

SEQ ID NO: 382999 - RNA, 19 nt, Artificial Sequence
  Description of Artificial Sequence: Synthetic oligonucleotide
acauaccacaauuuaaacu

SEQ ID NO: 383000 - RNA, 19 nt, Artificial Sequence
  Description of Artificial Sequence: Synthetic oligonucleotide
gagaaguacauuugcuucc

SEQ ID NO: 383001 - RNA, 19 nt, Artificial Sequence
  Description of Artificial Sequence: Synthetic oligonucleotide
uuauaaauuugguuacgcu

SEQ ID NO: 383002 - RNA, 19 nt, Artificial Sequence
  Description of Artificial Sequence: Synthetic oligonucleotide
cuugagacaaguuugguaa

SEQ ID NO: 383003 - RNA, 19 nt, Artificial Sequence
  Description of Artificial Sequence: Synthetic oligonucleotide
uagucgauagauuuaaaua

SEQ ID NO: 383004 - RNA, 19 nt, Artificial Sequence
  Description of Artificial Sequence: Synthetic oligonucleotide
auucaauacugauauaaau

SEQ ID NO: 383005 - RNA, 19 nt, Artificial Sequence
  Description of Artificial Sequence: Synthetic oligonucleotide
ucucaauuauccugggaag

SEQ ID NO: 383006 - RNA, 19 nt, Artificial Sequence
  Description of Artificial Sequence: Synthetic oligonucleotide
uuuccagaccaaaguaccg

SEQ ID NO: 383007 - RNA, 19 nt, Artificial Sequence
  Description of Artificial Sequence: Synthetic oligonucleotide
caagcccuagauaauaaag

SEQ ID NO: 383008 - RNA, 19 nt, Artificial Sequence
  Description of Artificial Sequence: Synthetic oligonucleotide
acugaccgcagcuucacac

SEQ ID NO: 383009 - RNA, 19 nt, Artificial Sequence
  Description of Artificial Sequence: Synthetic oligonucleotide
ucuucgcucuuuaaucagg

SEQ ID NO: 383010 - RNA, 19 nt, Artificial Sequence
  Description of Artificial Sequence: Synthetic oligonucleotide
aguaacuuucauauauugg

SEQ ID NO: 383011 - RNA, 19 nt, Artificial Sequence
  Description of Artificial Sequence: Synthetic oligonucleotide
uucaauaauucgaucugcu

SEQ ID NO: 383012 - RNA, 19 nt, Artificial Sequence
  Description of Artificial Sequence: Synthetic oligonucleotide
uaauugagugguagugagg

SEQ ID NO: 383013 - RNA, 19 nt, Artificial Sequence
  Description of Artificial Sequence: Synthetic oligonucleotide
gugguagugagguuuaagc

SEQ ID NO: 383014 - RNA, 19 nt, Artificial Sequence
  Description of Artificial Sequence: Synthetic oligonucleotide
cacaauucgcucaaucacc

SEQ ID NO: 383015 - RNA, 19 nt, Artificial Sequence
  Description of Artificial Sequence: Synthetic oligonucleotide
caaucugagcucuaagggc

SEQ ID NO: 383016 - RNA, 19 nt, Artificial Sequence
  Description of Artificial Sequence: Synthetic oligonucleotide
uacuguuucgauaacggua

SEQ ID NO: 383017 - RNA, 19 nt, Artificial Sequence
  Description of Artificial Sequence: Synthetic oligonucleotide
acuaguuaaguuuuauaaa

SEQ ID NO: 383018 - RNA, 19 nt, Artificial Sequence
  Description of Artificial Sequence: Synthetic oligonucleotide
auaaauuugguuacgcuga

SEQ ID NO: 383019 - RNA, 19 nt, Artificial Sequence
  Description of Artificial Sequence: Synthetic oligonucleotide
gucaguaguauccacuggc

SEQ ID NO: 383020 - RNA, 19 nt, Artificial Sequence
  Description of Artificial Sequence: Synthetic oligonucleotide
ucgauagauuuaaauaauc

SEQ ID NO: 383021 - RNA, 19 nt, Artificial Sequence
  Description of Artificial Sequence: Synthetic oligonucleotide
aucuaagugaccugcguug

SEQ ID NO: 383022 - RNA, 19 nt, Artificial Sequence
  Description of Artificial Sequence: Synthetic oligonucleotide
auauuuggcaugucgggug

SEQ ID NO: 383023 - RNA, 19 nt, Artificial Sequence
  Description of Artificial Sequence: Synthetic oligonucleotide
cauauguaaguccuauuug

SEQ ID NO: 383024 - RNA, 19 nt, Artificial Sequence
  Description of Artificial Sequence: Synthetic oligonucleotide
aagcaacacgaauauucag

SEQ ID NO: 383025 - RNA, 19 nt, Artificial Sequence
  Description of Artificial Sequence: Synthetic oligonucleotide
agaugauacauucuggcuu

SEQ ID NO: 383026 - RNA, 19 nt, Artificial Sequence
  Description of Artificial Sequence: Synthetic oligonucleotide
ucgauaacgguaagcaaac

SEQ ID NO: 383027 - RNA, 19 nt, Artificial Sequence
  Description of Artificial Sequence: Synthetic oligonucleotide
ucgagaugaaccauauggu

SEQ ID NO: 383028 - RNA, 19 nt, Artificial Sequence
  Description of Artificial Sequence: Synthetic oligonucleotide
ugguagugagguuuaagca

SEQ ID NO: 383029 - RNA, 19 nt, Artificial Sequence
  Description of Artificial Sequence: Synthetic oligonucleotide
aaagaugccaccacgucgu

SEQ ID NO: 383030 - RNA, 19 nt, Artificial Sequence
  Description of Artificial Sequence: Synthetic oligonucleotide
aacucaacuuugcaagcca

SEQ ID NO: 383031 - RNA, 19 nt, Artificial Sequence
  Description of Artificial Sequence: Synthetic oligonucleotide
uaacgguaagcaaacuucu

SEQ ID NO: 383032 - RNA, 19 nt, Artificial Sequence
  Description of Artificial Sequence: Synthetic oligonucleotide
aaucuaagugaccugcguu

SEQ ID NO: 383033 - RNA, 19 nt, Artificial Sequence
  Description of Artificial Sequence: Synthetic oligonucleotide
caugcugaccacaauucgc

SEQ ID NO: 383034 - RNA, 19 nt, Artificial Sequence
  Description of Artificial Sequence: Synthetic oligonucleotide
aaagcaacacgaauauuca

SEQ ID NO: 383035 - RNA, 19 nt, Artificial Sequence
  Description of Artificial Sequence: Synthetic oligonucleotide
ugaggcuauucauuaaacu

SEQ ID NO: 383036 - RNA, 19 nt, Artificial Sequence
  Description of Artificial Sequence: Synthetic oligonucleotide
ugaggcauuuccauaucca

SEQ ID NO: 383037 - RNA, 19 nt, Artificial Sequence
  Description of Artificial Sequence: Synthetic oligonucleotide
ugucccucuaacagaaagc

SEQ ID NO: 383038 - RNA, 19 nt, Artificial Sequence
  Description of Artificial Sequence: Synthetic oligonucleotide
cuuucuaaugacaccccag

SEQ ID NO: 383039 - RNA, 19 nt, Artificial Sequence
  Description of Artificial Sequence: Synthetic oligonucleotide
auaccuaucuacacuuccc

SEQ ID NO: 383040 - RNA, 19 nt, Artificial Sequence
  Description of Artificial Sequence: Synthetic oligonucleotide
caauaauugagugguagug

SEQ ID NO: 383041 - RNA, 19 nt, Artificial Sequence
  Description of Artificial Sequence: Synthetic oligonucleotide
uacacuucccaucucaauu

SEQ ID NO: 383042 - RNA, 19 nt, Artificial Sequence
  Description of Artificial Sequence: Synthetic oligonucleotide
gucuuuaagguaucucuag

SEQ ID NO: 383043 - RNA, 19 nt, Artificial Sequence
  Description of Artificial Sequence: Synthetic oligonucleotide
aacuuaaaauaccuaucua

SEQ ID NO: 383044 - RNA, 19 nt, Artificial Sequence
  Description of Artificial Sequence: Synthetic oligonucleotide
cugaaucagagacaaguug

SEQ ID NO: 383045 - RNA, 19 nt, Artificial Sequence
  Description of Artificial Sequence: Synthetic oligonucleotide
uacgcugacauuuuguauu

SEQ ID NO: 383046 - RNA, 19 nt, Artificial Sequence
  Description of Artificial Sequence: Synthetic oligonucleotide
auaacaguguccucauuga

SEQ ID NO: 383047 - RNA, 19 nt, Artificial Sequence
  Description of Artificial Sequence: Synthetic oligonucleotide
aauacuagccaaauucaau

SEQ ID NO: 383048 - RNA, 19 nt, Artificial Sequence
  Description of Artificial Sequence: Synthetic oligonucleotide
agaccaaaguaccgacugc

SEQ ID NO: 383049 - RNA, 19 nt, Artificial Sequence
  Description of Artificial Sequence: Synthetic oligonucleotide
gcugaaauugaacucuggg

SEQ ID NO: 383050 - RNA, 19 nt, Artificial Sequence
  Description of Artificial Sequence: Synthetic oligonucleotide
uaaucaggucaacagcaga

SEQ ID NO: 383051 - RNA, 19 nt, Artificial Sequence
  Description of Artificial Sequence: Synthetic oligonucleotide
uuuauucacccagucagga

SEQ ID NO: 383052 - RNA, 19 nt, Artificial Sequence
  Description of Artificial Sequence: Synthetic oligonucleotide
ugagguuuaagcagccuuc

SEQ ID NO: 383053 - RNA, 19 nt, Artificial Sequence
  Description of Artificial Sequence: Synthetic oligonucleotide
ugcugcuuauguaaacuca

SEQ ID NO: 383054 - RNA, 19 nt, Artificial Sequence
  Description of Artificial Sequence: Synthetic oligonucleotide
gaccauuacagucagagau

SEQ ID NO: 383055 - RNA, 19 nt, Artificial Sequence
  Description of Artificial Sequence: Synthetic oligonucleotide
auauccaauacuguacucu

SEQ ID NO: 383056 - RNA, 19 nt, Artificial Sequence
  Description of Artificial Sequence: Synthetic oligonucleotide
aggcacuuaauccagccca

SEQ ID NO: 383057 - RNA, 19 nt, Artificial Sequence
  Description of Artificial Sequence: Synthetic oligonucleotide
uucgaaggagaccaaugac

SEQ ID NO: 383058 - RNA, 19 nt, Artificial Sequence
  Description of Artificial Sequence: Synthetic oligonucleotide
cuaguaacagggcaaacca

SEQ ID NO: 383059 - RNA, 19 nt, Artificial Sequence
  Description of Artificial Sequence: Synthetic oligonucleotide
agcuuuguggagcacucuc

SEQ ID NO: 383060 - RNA, 19 nt, Artificial Sequence
  Description of Artificial Sequence: Synthetic oligonucleotide
agaacaacuagucgauaga

SEQ ID NO: 383061 - RNA, 19 nt, Artificial Sequence
  Description of Artificial Sequence: Synthetic oligonucleotide
cuuuaagguaucucuagca

SEQ ID NO: 383062 - RNA, 19 nt, Artificial Sequence
  Description of Artificial Sequence: Synthetic oligonucleotide
uacucuaguaacagggcaa

SEQ ID NO: 383063 - RNA, 19 nt, Artificial Sequence
  Description of Artificial Sequence: Synthetic oligonucleotide
cauagagcacacucugccg

SEQ ID NO: 383064 - RNA, 19 nt, Artificial Sequence
  Description of Artificial Sequence: Synthetic oligonucleotide
uaccuaucuacacuuccca

SEQ ID NO: 383065 - RNA, 19 nt, Artificial Sequence
  Description of Artificial Sequence: Synthetic oligonucleotide
gaucucuacugccaaacuc

SEQ ID NO: 383066 - RNA, 19 nt, Artificial Sequence
  Description of Artificial Sequence: Synthetic oligonucleotide
aacuagucgauagauuuaa

SEQ ID NO: 383067 - RNA, 19 nt, Artificial Sequence
  Description of Artificial Sequence: Synthetic oligonucleotide
auuuugaccacuaguuaag

SEQ ID NO: 383068 - RNA, 19 nt, Artificial Sequence
  Description of Artificial Sequence: Synthetic oligonucleotide
ucuagcauauuuggcaugu

SEQ ID NO: 383069 - RNA, 19 nt, Artificial Sequence
  Description of Artificial Sequence: Synthetic oligonucleotide
uuauaacaaguccuuucaa

SEQ ID NO: 383070 - RNA, 19 nt, Artificial Sequence
  Description of Artificial Sequence: Synthetic oligonucleotide
aaaggauauuuugaccacu

SEQ ID NO: 383071 - RNA, 19 nt, Artificial Sequence
  Description of Artificial Sequence: Synthetic oligonucleotide
uuaugugagcuugacacaa

SEQ ID NO: 383072 - RNA, 19 nt, Artificial Sequence
  Description of Artificial Sequence: Synthetic oligonucleotide
cucucuucgcucuuuaauc

SEQ ID NO: 383073 - RNA, 19 nt, Artificial Sequence
  Description of Artificial Sequence: Synthetic oligonucleotide
gauauuuugaccacuaguu

SEQ ID NO: 383074 - RNA, 19 nt, Artificial Sequence
  Description of Artificial Sequence: Synthetic oligonucleotide
caagccaacagugaaccag

SEQ ID NO: 383075 - RNA, 19 nt, Artificial Sequence
  Description of Artificial Sequence: Synthetic oligonucleotide
cuaguuaaguuuuauaaau

SEQ ID NO: 383076 - RNA, 19 nt, Artificial Sequence
  Description of Artificial Sequence: Synthetic oligonucleotide
cuggcuagucuuaugugag

SEQ ID NO: 383077 - RNA, 19 nt, Artificial Sequence
  Description of Artificial Sequence: Synthetic oligonucleotide
aagcaaggaagguuauccu

SEQ ID NO: 383078 - RNA, 19 nt, Artificial Sequence
  Description of Artificial Sequence: Synthetic oligonucleotide
cuacccauccaacaucagc

SEQ ID NO: 383079 - RNA, 19 nt, Artificial Sequence
  Description of Artificial Sequence: Synthetic oligonucleotide
cuuccuggcccucaugucc

SEQ ID NO: 383080 - RNA, 19 nt, Artificial Sequence
  Description of Artificial Sequence: Synthetic oligonucleotide
ucaagauuuagaacacauu

SEQ ID NO: 383081 - RNA, 19 nt, Artificial Sequence
  Description of Artificial Sequence: Synthetic oligonucleotide
cauucgaaggagaccaaug

SEQ ID NO: 383082 - RNA, 19 nt, Artificial Sequence
  Description of Artificial Sequence: Synthetic oligonucleotide
cuagucuuaugugagcuug

SEQ ID NO: 383083 - RNA, 19 nt, Artificial Sequence
  Description of Artificial Sequence: Synthetic oligonucleotide
guagugagguuuaagcagc

SEQ ID NO: 383084 - RNA, 19 nt, Artificial Sequence
  Description of Artificial Sequence: Synthetic oligonucleotide
ucaauaauucgaucugcua

SEQ ID NO: 383085 - RNA, 19 nt, Artificial Sequence
  Description of Artificial Sequence: Synthetic oligonucleotide
ucucuagcauauuuggcau

SEQ ID NO: 383086 - RNA, 19 nt, Artificial Sequence
  Description of Artificial Sequence: Synthetic oligonucleotide
uuacuguuucgauaacggu

SEQ ID NO: 383087 - RNA, 19 nt, Artificial Sequence
  Description of Artificial Sequence: Synthetic oligonucleotide
auauuuugaccacuaguua

SEQ ID NO: 383088 - RNA, 19 nt, Artificial Sequence
  Description of Artificial Sequence: Synthetic oligonucleotide
agacaaguuugguaaagaa

SEQ ID NO: 383089 - RNA, 19 nt, Artificial Sequence
  Description of Artificial Sequence: Synthetic oligonucleotide
uggaagaaucuaagugacc

SEQ ID NO: 383090 - RNA, 19 nt, Artificial Sequence
  Description of Artificial Sequence: Synthetic oligonucleotide
uaugugagcuugacacaag

SEQ ID NO: 383091 - RNA, 19 nt, Artificial Sequence
  Description of Artificial Sequence: Synthetic oligonucleotide
auuuauucacccagucagg

SEQ ID NO: 383092 - RNA, 19 nt, Artificial Sequence
  Description of Artificial Sequence: Synthetic oligonucleotide
gcaauugauggaaagcagg

SEQ ID NO: 383093 - RNA, 19 nt, Artificial Sequence
  Description of Artificial Sequence: Synthetic oligonucleotide
gaugccauucgaaggagac

SEQ ID NO: 383094 - RNA, 19 nt, Artificial Sequence
  Description of Artificial Sequence: Synthetic oligonucleotide
agcauuuaggugucugugu

SEQ ID NO: 383095 - RNA, 19 nt, Artificial Sequence
  Description of Artificial Sequence: Synthetic oligonucleotide
aggucaaaauaugugguca

SEQ ID NO: 383096 - RNA, 19 nt, Artificial Sequence
  Description of Artificial Sequence: Synthetic oligonucleotide
acuuaauccagcccagcau

SEQ ID NO: 383097 - RNA, 19 nt, Artificial Sequence
  Description of Artificial Sequence: Synthetic oligonucleotide
agucaggaauguuuuauua

SEQ ID NO: 383098 - RNA, 19 nt, Artificial Sequence
  Description of Artificial Sequence: Synthetic oligonucleotide
uucaagcccuagauaauaa

SEQ ID NO: 383099 - RNA, 19 nt, Artificial Sequence
  Description of Artificial Sequence: Synthetic oligonucleotide
uucaauauaugugggccaa

SEQ ID NO: 383100 - RNA, 19 nt, Artificial Sequence
  Description of Artificial Sequence: Synthetic oligonucleotide
uuucgauaacgguaagcaa

SEQ ID NO: 383101 - RNA, 19 nt, Artificial Sequence
  Description of Artificial Sequence: Synthetic oligonucleotide
cccucuaacagaaagcaac

SEQ ID NO: 383102 - RNA, 19 nt, Artificial Sequence
  Description of Artificial Sequence: Synthetic oligonucleotide
ugagcuuuguggagcacuc

SEQ ID NO: 383103 - RNA, 19 nt, Artificial Sequence
  Description of Artificial Sequence: Synthetic oligonucleotide
cugcuuauguaaacucagc

SEQ ID NO: 383104 - RNA, 19 nt, Artificial Sequence
  Description of Artificial Sequence: Synthetic oligonucleotide
agucuuaugugagcuugac

SEQ ID NO: 383105 - RNA, 19 nt, Artificial Sequence
  Description of Artificial Sequence: Synthetic oligonucleotide
acuguuucgauaacgguaa

SEQ ID NO: 383106 - RNA, 19 nt, Artificial Sequence
  Description of Artificial Sequence: Synthetic oligonucleotide
ucuacacuucccaucucaa

SEQ ID NO: 383107 - RNA, 19 nt, Artificial Sequence
  Description of Artificial Sequence: Synthetic oligonucleotide
guaguauccacuggccuag

SEQ ID NO: 383108 - RNA, 19 nt, Artificial Sequence
  Description of Artificial Sequence: Synthetic oligonucleotide
uugagugguagugagguuu

SEQ ID NO: 383109 - RNA, 19 nt, Artificial Sequence
  Description of Artificial Sequence: Synthetic oligonucleotide
auaugugggccaaacagga

SEQ ID NO: 383110 - RNA, 19 nt, Artificial Sequence
  Description of Artificial Sequence: Synthetic oligonucleotide
uaugguuuuccagaccaaa

SEQ ID NO: 383111 - RNA, 19 nt, Artificial Sequence
  Description of Artificial Sequence: Synthetic oligonucleotide
uuucaagcccuagauaaua

SEQ ID NO: 383112 - RNA, 19 nt, Artificial Sequence
  Description of Artificial Sequence: Synthetic oligonucleotide
ugaucucuacugccaaacu

SEQ ID NO: 383113 - RNA, 19 nt, Artificial Sequence
  Description of Artificial Sequence: Synthetic oligonucleotide
uaauucgaucugcuacuac

SEQ ID NO: 383114 - RNA, 19 nt, Artificial Sequence
  Description of Artificial Sequence: Synthetic oligonucleotide
ucggcagcuacccauccaa

SEQ ID NO: 383115 - RNA, 19 nt, Artificial Sequence
  Description of Artificial Sequence: Synthetic oligonucleotide
uuauccugggaagaacaac

SEQ ID NO: 383116 - RNA, 19 nt, Artificial Sequence
  Description of Artificial Sequence: Synthetic oligonucleotide
acgguaagcaaacuucuuu

SEQ ID NO: 383117 - RNA, 19 nt, Artificial Sequence
  Description of Artificial Sequence: Synthetic oligonucleotide
ucuaagugaccugcguuga

SEQ ID NO: 383118 - RNA, 19 nt, Artificial Sequence
  Description of Artificial Sequence: Synthetic oligonucleotide
gguaucucuagcauauuug

SEQ ID NO: 383119 - RNA, 19 nt, Artificial Sequence
  Description of Artificial Sequence: Synthetic oligonucleotide
aaaguaccgacugcaugcu

SEQ ID NO: 383120 - RNA, 19 nt, Artificial Sequence
  Description of Artificial Sequence: Synthetic oligonucleotide
uucuucggcagcuacccau

SEQ ID NO: 383121 - RNA, 19 nt, Artificial Sequence
  Description of Artificial Sequence: Synthetic oligonucleotide
agcaauugauggaaagcag

SEQ ID NO: 383122 - RNA, 19 nt, Artificial Sequence
  Description of Artificial Sequence: Synthetic oligonucleotide
gauaacgguaagcaaacuu

SEQ ID NO: 383123 - RNA, 19 nt, Artificial Sequence
  Description of Artificial Sequence: Synthetic oligonucleotide
acgcugacauuuuguauug

SEQ ID NO: 383124 - RNA, 19 nt, Artificial Sequence
  Description of Artificial Sequence: Synthetic oligonucleotide
cucuucgcucuuuaaucag

SEQ ID NO: 383125 - RNA, 19 nt, Artificial Sequence
  Description of Artificial Sequence: Synthetic oligonucleotide
uuacgcugacauuuuguau

SEQ ID NO: 383126 - RNA, 19 nt, Artificial Sequence
  Description of Artificial Sequence: Synthetic oligonucleotide
augccauucgaaggagacc

SEQ ID NO: 383127 - RNA, 19 nt, Artificial Sequence
  Description of Artificial Sequence: Synthetic oligonucleotide
ugaugccauucgaaggaga

SEQ ID NO: 383128 - RNA, 19 nt, Artificial Sequence
  Description of Artificial Sequence: Synthetic oligonucleotide
ugaccauuacagucagaga

SEQ ID NO: 383129 - RNA, 19 nt, Artificial Sequence
  Description of Artificial Sequence: Synthetic oligonucleotide
acuggccuaggcuuuacau

SEQ ID NO: 383130 - RNA, 19 nt, Artificial Sequence
  Description of Artificial Sequence: Synthetic oligonucleotide
auacuuugguggaggaggg

SEQ ID NO: 383131 - RNA, 19 nt, Artificial Sequence
  Description of Artificial Sequence: Synthetic oligonucleotide
ucauucucgagugcagaga

SEQ ID NO: 383132 - RNA, 19 nt, Artificial Sequence
  Description of Artificial Sequence: Synthetic oligonucleotide
uagucuuaugugagcuuga

SEQ ID NO: 383133 - RNA, 19 nt, Artificial Sequence
  Description of Artificial Sequence: Synthetic oligonucleotide
guuacgcugacauuuugua

SEQ ID NO: 383134 - RNA, 19 nt, Artificial Sequence
  Description of Artificial Sequence: Synthetic oligonucleotide
ugcuucagacauccauagc

SEQ ID NO: 383135 - RNA, 19 nt, Artificial Sequence
  Description of Artificial Sequence: Synthetic oligonucleotide
gugaccugcguugagacuc

SEQ ID NO: 383136 - RNA, 19 nt, Artificial Sequence
  Description of Artificial Sequence: Synthetic oligonucleotide
gauacauucuggcuuuuau

SEQ ID NO: 383137 - RNA, 19 nt, Artificial Sequence
  Description of Artificial Sequence: Synthetic oligonucleotide
gaccaaaguaccgacugca

SEQ ID NO: 383138 - RNA, 19 nt, Artificial Sequence
  Description of Artificial Sequence: Synthetic oligonucleotide
aaggauauuuugaccacua

SEQ ID NO: 383139 - RNA, 19 nt, Artificial Sequence
  Description of Artificial Sequence: Synthetic oligonucleotide
agaaaucaugaaaacuuau

SEQ ID NO: 383140 - RNA, 19 nt, Artificial Sequence
  Description of Artificial Sequence: Synthetic oligonucleotide
ccuuucaagcccuagauaa

SEQ ID NO: 383141 - RNA, 19 nt, Artificial Sequence
  Description of Artificial Sequence: Synthetic oligonucleotide
aagcugaaauugaacucug

SEQ ID NO: 383142 - RNA, 19 nt, Artificial Sequence
  Description of Artificial Sequence: Synthetic oligonucleotide
gaugauacauucuggcuuu

SEQ ID NO: 383143 - RNA, 19 nt, Artificial Sequence
  Description of Artificial Sequence: Synthetic oligonucleotide
ugcuggcuagucuuaugug

SEQ ID NO: 383144 - RNA, 19 nt, Artificial Sequence
  Description of Artificial Sequence: Synthetic oligonucleotide
uaaguccuauuugaggcau

SEQ ID NO: 383145 - RNA, 19 nt, Artificial Sequence
  Description of Artificial Sequence: Synthetic oligonucleotide
cuuaugugagcuugacaca

SEQ ID NO: 383146 - RNA, 19 nt, Artificial Sequence
  Description of Artificial Sequence: Synthetic oligonucleotide
acaauucgcucaaucacca

SEQ ID NO: 383147 - RNA, 19 nt, Artificial Sequence
  Description of Artificial Sequence: Synthetic oligonucleotide
guaagagauucugacauua

SEQ ID NO: 383148 - RNA, 19 nt, Artificial Sequence
  Description of Artificial Sequence: Synthetic oligonucleotide
ugagugguagugagguuua

SEQ ID NO: 383149 - RNA, 19 nt, Artificial Sequence
  Description of Artificial Sequence: Synthetic oligonucleotide
uccccuugguuacuguuuc

SEQ ID NO: 383150 - RNA, 19 nt, Artificial Sequence
  Description of Artificial Sequence: Synthetic oligonucleotide
aguaccgacugcaugcuga

SEQ ID NO: 383151 - RNA, 19 nt, Artificial Sequence
  Description of Artificial Sequence: Synthetic oligonucleotide
auaaauuucuuaggucaaa

SEQ ID NO: 383152 - RNA, 19 nt, Artificial Sequence
  Description of Artificial Sequence: Synthetic oligonucleotide
aaguaccgacugcaugcug

SEQ ID NO: 383153 - RNA, 19 nt, Artificial Sequence
  Description of Artificial Sequence: Synthetic oligonucleotide
ggagacuuggaccugaccu

SEQ ID NO: 383154 - RNA, 19 nt, Artificial Sequence
  Description of Artificial Sequence: Synthetic oligonucleotide
aaugacaccccagguuuau

SEQ ID NO: 383155 - RNA, 19 nt, Artificial Sequence
  Description of Artificial Sequence: Synthetic oligonucleotide
cuugguuacuguuucgaua

SEQ ID NO: 383156 - RNA, 19 nt, Artificial Sequence
  Description of Artificial Sequence: Synthetic oligonucleotide
uccucacuggccagcguug

SEQ ID NO: 383157 - RNA, 19 nt, Artificial Sequence
  Description of Artificial Sequence: Synthetic oligonucleotide
ucuucggcagcuacccauc

SEQ ID NO: 383158 - RNA, 19 nt, Artificial Sequence
  Description of Artificial Sequence: Synthetic oligonucleotide
gacauacuuugguggagga

SEQ ID NO: 383159 - RNA, 19 nt, Artificial Sequence
  Description of Artificial Sequence: Synthetic oligonucleotide
aacaacuagucgauagauu

SEQ ID NO: 383160 - RNA, 19 nt, Artificial Sequence
  Description of Artificial Sequence: Synthetic oligonucleotide
uggcuagucuuaugugagc

SEQ ID NO: 383161 - RNA, 19 nt, Artificial Sequence
  Description of Artificial Sequence: Synthetic oligonucleotide
acauacuuugguggaggag

SEQ ID NO: 383162 - RNA, 19 nt, Artificial Sequence
  Description of Artificial Sequence: Synthetic oligonucleotide
cuacuacuugagaaguaca

SEQ ID NO: 383163 - RNA, 19 nt, Artificial Sequence
  Description of Artificial Sequence: Synthetic oligonucleotide
cuagucgauagauuuaaau

SEQ ID NO: 383164 - RNA, 19 nt, Artificial Sequence
  Description of Artificial Sequence: Synthetic oligonucleotide
ggcugguaagcugaaauug

SEQ ID NO: 383165 - RNA, 19 nt, Artificial Sequence
  Description of Artificial Sequence: Synthetic oligonucleotide
cuagauaauaaaggcagcu

SEQ ID NO: 383166 - RNA, 19 nt, Artificial Sequence
  Description of Artificial Sequence: Synthetic oligonucleotide
ggucaggcgaauuuucuga

SEQ ID NO: 383167 - RNA, 19 nt, Artificial Sequence
  Description of Artificial Sequence: Synthetic oligonucleotide
gaaucuaagugaccugcgu

SEQ ID NO: 383168 - RNA, 19 nt, Artificial Sequence
  Description of Artificial Sequence: Synthetic oligonucleotide
ccaaugaccauuacaguca

SEQ ID NO: 383169 - RNA, 19 nt, Artificial Sequence
  Description of Artificial Sequence: Synthetic oligonucleotide
ccuagauaauaaaggcagc

SEQ ID NO: 383170 - RNA, 19 nt, Artificial Sequence
  Description of Artificial Sequence: Synthetic oligonucleotide
ggauauuuugaccacuagu

SEQ ID NO: 383171 - RNA, 19 nt, Artificial Sequence
  Description of Artificial Sequence: Synthetic oligonucleotide
cugcguugagacucuguug

SEQ ID NO: 383172 - RNA, 19 nt, Artificial Sequence
  Description of Artificial Sequence: Synthetic oligonucleotide
ucaugucuuuaagguaucu

SEQ ID NO: 383173 - RNA, 19 nt, Artificial Sequence
  Description of Artificial Sequence: Synthetic oligonucleotide
cacuuaauccagcccagca

SEQ ID NO: 383174 - RNA, 19 nt, Artificial Sequence
  Description of Artificial Sequence: Synthetic oligonucleotide
gcauuuaggugucuguguc

SEQ ID NO: 383175 - RNA, 19 nt, Artificial Sequence
  Description of Artificial Sequence: Synthetic oligonucleotide
ugaccucuugacugaccgc

SEQ ID NO: 383176 - RNA, 19 nt, Artificial Sequence
  Description of Artificial Sequence: Synthetic oligonucleotide
uaaugacaccccagguuua

SEQ ID NO: 383177 - RNA, 19 nt, Artificial Sequence
  Description of Artificial Sequence: Synthetic oligonucleotide
ucccucuaacagaaagcaa

SEQ ID NO: 383178 - RNA, 19 nt, Artificial Sequence
  Description of Artificial Sequence: Synthetic oligonucleotide
gaucugcuacuacuugaga

SEQ ID NO: 383179 - RNA, 19 nt, Artificial Sequence
  Description of Artificial Sequence: Synthetic oligonucleotide
caugucggguggcuuuggg

SEQ ID NO: 383180 - RNA, 19 nt, Artificial Sequence
  Description of Artificial Sequence: Synthetic oligonucleotide
cccaauaauugagugguag

SEQ ID NO: 383181 - RNA, 19 nt, Artificial Sequence
  Description of Artificial Sequence: Synthetic oligonucleotide
gucagagauuuacuaaaua

SEQ ID NO: 383182 - RNA, 19 nt, Artificial Sequence
  Description of Artificial Sequence: Synthetic oligonucleotide
agagcacacucugccgcgc

SEQ ID NO: 383183 - RNA, 19 nt, Artificial Sequence
  Description of Artificial Sequence: Synthetic oligonucleotide
ucgcucaaucaccauccuc

SEQ ID NO: 383184 - RNA, 19 nt, Artificial Sequence
  Description of Artificial Sequence: Synthetic oligonucleotide
gcuggcuagucuuauguga

SEQ ID NO: 383185 - RNA, 19 nt, Artificial Sequence
  Description of Artificial Sequence: Synthetic oligonucleotide
accuaucuacacuucccau

SEQ ID NO: 383186 - RNA, 19 nt, Artificial Sequence
  Description of Artificial Sequence: Synthetic oligonucleotide
cucaucuugagacaaguuu

SEQ ID NO: 383187 - RNA, 19 nt, Artificial Sequence
  Description of Artificial Sequence: Synthetic oligonucleotide
gucuuaugugagcuugaca

SEQ ID NO: 383188 - RNA, 19 nt, Artificial Sequence
  Description of Artificial Sequence: Synthetic oligonucleotide
gaacaacuagucgauagau

SEQ ID NO: 383189 - RNA, 19 nt, Artificial Sequence
  Description of Artificial Sequence: Synthetic oligonucleotide
uucgcucaaucaccauccu

SEQ ID NO: 383190 - RNA, 19 nt, Artificial Sequence
  Description of Artificial Sequence: Synthetic oligonucleotide
agugaccugcguugagacu

SEQ ID NO: 383191 - RNA, 19 nt, Artificial Sequence
  Description of Artificial Sequence: Synthetic oligonucleotide
agucagagauuuacuaaau

SEQ ID NO: 383192 - RNA, 19 nt, Artificial Sequence
  Description of Artificial Sequence: Synthetic oligonucleotide
ugaccugcguugagacucu

SEQ ID NO: 383193 - RNA, 19 nt, Artificial Sequence
  Description of Artificial Sequence: Synthetic oligonucleotide
uuuguggagcacucuccuu

SEQ ID NO: 383194 - RNA, 19 nt, Artificial Sequence
  Description of Artificial Sequence: Synthetic oligonucleotide
accacuaguuaaguuuuau

SEQ ID NO: 383195 - RNA, 19 nt, Artificial Sequence
  Description of Artificial Sequence: Synthetic oligonucleotide
gaaucagagacaaguuggu

SEQ ID NO: 383196 - RNA, 19 nt, Artificial Sequence
  Description of Artificial Sequence: Synthetic oligonucleotide
acuucgagaugaaccauau

SEQ ID NO: 383197 - RNA, 19 nt, Artificial Sequence
  Description of Artificial Sequence: Synthetic oligonucleotide
uuguauugugcuggcuagu

SEQ ID NO: 383198 - RNA, 19 nt, Artificial Sequence
  Description of Artificial Sequence: Synthetic oligonucleotide
ugguaccaauuuuccuuac

SEQ ID NO: 383199 - RNA, 19 nt, Artificial Sequence
  Description of Artificial Sequence: Synthetic oligonucleotide
cucuacugccaaacucaac

SEQ ID NO: 383200 - RNA, 19 nt, Artificial Sequence
  Description of Artificial Sequence: Synthetic oligonucleotide
agccaguaagcagccaucu

SEQ ID NO: 383201 - RNA, 19 nt, Artificial Sequence
  Description of Artificial Sequence: Synthetic oligonucleotide
aguccuauuugaggcauuu

SEQ ID NO: 383202 - RNA, 19 nt, Artificial Sequence
  Description of Artificial Sequence: Synthetic oligonucleotide
ggcggcaagcucauucucg

SEQ ID NO: 383203 - RNA, 19 nt, Artificial Sequence
  Description of Artificial Sequence: Synthetic oligonucleotide
cagcuacccauccaacauc

SEQ ID NO: 383204 - RNA, 19 nt, Artificial Sequence
  Description of Artificial Sequence: Synthetic oligonucleotide
auuguccauuaggagucug

SEQ ID NO: 383205 - RNA, 19 nt, Artificial Sequence
  Description of Artificial Sequence: Synthetic oligonucleotide
auucgaucugcuacuacuu

SEQ ID NO: 383206 - RNA, 19 nt, Artificial Sequence
  Description of Artificial Sequence: Synthetic oligonucleotide
ugacugaccgcagcuucac

SEQ ID NO: 383207 - RNA, 19 nt, Artificial Sequence
  Description of Artificial Sequence: Synthetic oligonucleotide
accauuacagucagagauu

SEQ ID NO: 383208 - RNA, 19 nt, Artificial Sequence
  Description of Artificial Sequence: Synthetic oligonucleotide
gagcuugacacaagcuaga

SEQ ID NO: 383209 - RNA, 19 nt, Artificial Sequence
  Description of Artificial Sequence: Synthetic oligonucleotide
ccuuacaauacuucgagau

SEQ ID NO: 383210 - RNA, 19 nt, Artificial Sequence
  Description of Artificial Sequence: Synthetic oligonucleotide
caacuagucgauagauuua

SEQ ID NO: 383211 - RNA, 19 nt, Artificial Sequence
  Description of Artificial Sequence: Synthetic oligonucleotide
caucucaauuauccuggga

SEQ ID NO: 383212 - RNA, 19 nt, Artificial Sequence
  Description of Artificial Sequence: Synthetic oligonucleotide
cucuaagggcggcaagcuc

SEQ ID NO: 383213 - RNA, 19 nt, Artificial Sequence
  Description of Artificial Sequence: Synthetic oligonucleotide
uucacccagucaggaaugu

SEQ ID NO: 383214 - RNA, 19 nt, Artificial Sequence
  Description of Artificial Sequence: Synthetic oligonucleotide
cuguuucgauaacgguaag

SEQ ID NO: 383215 - RNA, 19 nt, Artificial Sequence
  Description of Artificial Sequence: Synthetic oligonucleotide
uggggagacuuggaccuga

SEQ ID NO: 383216 - RNA, 19 nt, Artificial Sequence
  Description of Artificial Sequence: Synthetic oligonucleotide
gcuuucuaaugacacccca

SEQ ID NO: 383217 - RNA, 19 nt, Artificial Sequence
  Description of Artificial Sequence: Synthetic oligonucleotide
ucccaauaauugaguggua

SEQ ID NO: 383218 - RNA, 19 nt, Artificial Sequence
  Description of Artificial Sequence: Synthetic oligonucleotide
gucgauagauuuaaauaau

SEQ ID NO: 383219 - RNA, 19 nt, Artificial Sequence
  Description of Artificial Sequence: Synthetic oligonucleotide
cauucucgagugcagagau

SEQ ID NO: 383220 - RNA, 19 nt, Artificial Sequence
  Description of Artificial Sequence: Synthetic oligonucleotide
ccucuaacagaaagcaaca

SEQ ID NO: 383221 - RNA, 19 nt, Artificial Sequence
  Description of Artificial Sequence: Synthetic oligonucleotide
auacuucgagaugaaccau

SEQ ID NO: 383222 - RNA, 19 nt, Artificial Sequence
  Description of Artificial Sequence: Synthetic oligonucleotide
cagggcaaaccagcuauuc

SEQ ID NO: 383223 - RNA, 19 nt, Artificial Sequence
  Description of Artificial Sequence: Synthetic oligonucleotide
cuucgcucuuuaaucaggu

SEQ ID NO: 383224 - RNA, 19 nt, Artificial Sequence
  Description of Artificial Sequence: Synthetic oligonucleotide
cuuuguggagcacucuccu

SEQ ID NO: 383225 - RNA, 19 nt, Artificial Sequence
  Description of Artificial Sequence: Synthetic oligonucleotide
gcuuuguggagcacucucc

SEQ ID NO: 383226 - RNA, 19 nt, Artificial Sequence
  Description of Artificial Sequence: Synthetic oligonucleotide
gcgaauuuucugaaucuca

SEQ ID NO: 383227 - RNA, 19 nt, Artificial Sequence
  Description of Artificial Sequence: Synthetic oligonucleotide
agcaaccaugaugaagcaa

SEQ ID NO: 383228 - RNA, 19 nt, Artificial Sequence
  Description of Artificial Sequence: Synthetic oligonucleotide
gacugcaugcugaccacaa

SEQ ID NO: 383229 - RNA, 19 nt, Artificial Sequence
  Description of Artificial Sequence: Synthetic oligonucleotide
cucuaguaacagggcaaac

SEQ ID NO: 383230 - RNA, 19 nt, Artificial Sequence
  Description of Artificial Sequence: Synthetic oligonucleotide
agaaagcaacacgaauauu

SEQ ID NO: 383231 - RNA, 19 nt, Artificial Sequence
  Description of Artificial Sequence: Synthetic oligonucleotide
guauugugcuggcuagucu

SEQ ID NO: 383232 - RNA, 19 nt, Artificial Sequence
  Description of Artificial Sequence: Synthetic oligonucleotide
ggcacuuaauccagcccag

SEQ ID NO: 383233 - RNA, 19 nt, Artificial Sequence
  Description of Artificial Sequence: Synthetic oligonucleotide
guaacagggcaaaccagcu

SEQ ID NO: 383234 - RNA, 19 nt, Artificial Sequence
  Description of Artificial Sequence: Synthetic oligonucleotide
gcccuagauaauaaaggca

SEQ ID NO: 383235 - RNA, 19 nt, Artificial Sequence
  Description of Artificial Sequence: Synthetic oligonucleotide
aagguaucucuagcauauu

SEQ ID NO: 383236 - RNA, 19 nt, Artificial Sequence
  Description of Artificial Sequence: Synthetic oligonucleotide
auauguggucaggcgaauu

SEQ ID NO: 383237 - RNA, 19 nt, Artificial Sequence
  Description of Artificial Sequence: Synthetic oligonucleotide
acgucguccccuggugggg

SEQ ID NO: 383238 - RNA, 19 nt, Artificial Sequence
  Description of Artificial Sequence: Synthetic oligonucleotide
ccaaauauuuacucauggu

SEQ ID NO: 383239 - RNA, 19 nt, Artificial Sequence
  Description of Artificial Sequence: Synthetic oligonucleotide
accaaaguaccgacugcau

SEQ ID NO: 383240 - RNA, 19 nt, Artificial Sequence
  Description of Artificial Sequence: Synthetic oligonucleotide
uaccgacugcaugcugacc

SEQ ID NO: 383241 - RNA, 19 nt, Artificial Sequence
  Description of Artificial Sequence: Synthetic oligonucleotide
gacugaccgcagcuucaca

SEQ ID NO: 383242 - RNA, 19 nt, Artificial Sequence
  Description of Artificial Sequence: Synthetic oligonucleotide
acuagucgauagauuuaaa

SEQ ID NO: 383243 - RNA, 19 nt, Artificial Sequence
  Description of Artificial Sequence: Synthetic oligonucleotide
gcggcaagcucauucucga

SEQ ID NO: 383244 - RNA, 19 nt, Artificial Sequence
  Description of Artificial Sequence: Synthetic oligonucleotide
aggcucaucuugagacaag

SEQ ID NO: 383245 - RNA, 19 nt, Artificial Sequence
  Description of Artificial Sequence: Synthetic oligonucleotide
ccucuugacugaccgcagc

SEQ ID NO: 383246 - RNA, 19 nt, Artificial Sequence
  Description of Artificial Sequence: Synthetic oligonucleotide
gaccugaccucugcccuga

SEQ ID NO: 383247 - RNA, 19 nt, Artificial Sequence
  Description of Artificial Sequence: Synthetic oligonucleotide
cugcuacuacuugagaagu

SEQ ID NO: 383248 - RNA, 19 nt, Artificial Sequence
  Description of Artificial Sequence: Synthetic oligonucleotide
ggaccugaccucugcccug

SEQ ID NO: 383249 - RNA, 19 nt, Artificial Sequence
  Description of Artificial Sequence: Synthetic oligonucleotide
ccaauaauugagugguagu

SEQ ID NO: 383250 - RNA, 19 nt, Artificial Sequence
  Description of Artificial Sequence: Synthetic oligonucleotide
cugaccgcagcuucacacu

SEQ ID NO: 383251 - RNA, 19 nt, Artificial Sequence
  Description of Artificial Sequence: Synthetic oligonucleotide
ggucacaaucuuggcaauc

SEQ ID NO: 383252 - RNA, 19 nt, Artificial Sequence
  Description of Artificial Sequence: Synthetic oligonucleotide
guccuauuugaggcauuuc

SEQ ID NO: 383253 - RNA, 19 nt, Artificial Sequence
  Description of Artificial Sequence: Synthetic oligonucleotide
gcagcuacccauccaacau

SEQ ID NO: 383254 - RNA, 19 nt, Artificial Sequence
  Description of Artificial Sequence: Synthetic oligonucleotide
cagcuuaaucuucaagauu

SEQ ID NO: 383255 - RNA, 19 nt, Artificial Sequence
  Description of Artificial Sequence: Synthetic oligonucleotide
gguuacgcugacauuuugu

SEQ ID NO: 383256 - RNA, 19 nt, Artificial Sequence
  Description of Artificial Sequence: Synthetic oligonucleotide
cuacacuucccaucucaau

SEQ ID NO: 383257 - RNA, 19 nt, Artificial Sequence
  Description of Artificial Sequence: Synthetic oligonucleotide
ggagaccaaugaccauuac

SEQ ID NO: 383258 - RNA, 19 nt, Artificial Sequence
  Description of Artificial Sequence: Synthetic oligonucleotide
caccccagguuuaucugua

SEQ ID NO: 383259 - RNA, 19 nt, Artificial Sequence
  Description of Artificial Sequence: Synthetic oligonucleotide
ccacuaguuaaguuuuaua

SEQ ID NO: 383260 - RNA, 19 nt, Artificial Sequence
  Description of Artificial Sequence: Synthetic oligonucleotide
gcacuuaauccagcccagc

SEQ ID NO: 383261 - RNA, 19 nt, Artificial Sequence
  Description of Artificial Sequence: Synthetic oligonucleotide
gggaauuuauucacccagu

SEQ ID NO: 383262 - RNA, 19 nt, Artificial Sequence
  Description of Artificial Sequence: Synthetic oligonucleotide
ccccuugguuacuguuucg

SEQ ID NO: 383263 - RNA, 19 nt, Artificial Sequence
  Description of Artificial Sequence: Synthetic oligonucleotide
ccaguaagcagccaucuuu

SEQ ID NO: 383264 - RNA, 19 nt, Artificial Sequence
  Description of Artificial Sequence: Synthetic oligonucleotide
ggcaugucggguggcuuug

SEQ ID NO: 383265 - RNA, 19 nt, Artificial Sequence
  Description of Artificial Sequence: Synthetic oligonucleotide
ggccagcguugucuuuggg

SEQ ID NO: 383266 - RNA, 19 nt, Artificial Sequence
  Description of Artificial Sequence: Synthetic oligonucleotide
cuaagggcggcaagcucau

SEQ ID NO: 383267 - RNA, 19 nt, Artificial Sequence
  Description of Artificial Sequence: Synthetic oligonucleotide
cauuaggagucuggaacau

SEQ ID NO: 383268 - RNA, 19 nt, Artificial Sequence
  Description of Artificial Sequence: Synthetic oligonucleotide
gaccugcguugagacucug

SEQ ID NO: 383269 - RNA, 19 nt, Artificial Sequence
  Description of Artificial Sequence: Synthetic oligonucleotide
gguuauccucauggggaga

SEQ ID NO: 383270 - RNA, 19 nt, Artificial Sequence
  Description of Artificial Sequence: Synthetic oligonucleotide
cgaauuuucugaaucucau

SEQ ID NO: 383271 - RNA, 19 nt, Artificial Sequence
  Description of Artificial Sequence: Synthetic oligonucleotide
acagggcaaaccagcuauu

SEQ ID NO: 383272 - RNA, 19 nt, Artificial Sequence
  Description of Artificial Sequence: Synthetic oligonucleotide
cguugagacucuguugcuc

SEQ ID NO: 383273 - RNA, 19 nt, Artificial Sequence
  Description of Artificial Sequence: Synthetic oligonucleotide
ccgcaccuuccccagcuac

SEQ ID NO: 383274 - RNA, 19 nt, Artificial Sequence
  Description of Artificial Sequence: Synthetic oligonucleotide
gggcggcaagcucauucuc

SEQ ID NO: 383275 - RNA, 19 nt, Artificial Sequence
  Description of Artificial Sequence: Synthetic oligonucleotide
gcuagucuuaugugagcuu

SEQ ID NO: 383276 - RNA, 19 nt, Artificial Sequence
  Description of Artificial Sequence: Synthetic oligonucleotide
gcucaaucaccauccucau

SEQ ID NO: 383277 - RNA, 19 nt, Artificial Sequence
  Description of Artificial Sequence: Synthetic oligonucleotide
gggccaaacaggacuggcu

SEQ ID NO: 383278 - RNA, 19 nt, Artificial Sequence
  Description of Artificial Sequence: Synthetic oligonucleotide
ccagaccaaaguaccgacu

SEQ ID NO: 383279 - RNA, 19 nt, Artificial Sequence
  Description of Artificial Sequence: Synthetic oligonucleotide
cgguaagcaaacuucuuuu

SEQ ID NO: 383280 - RNA, 19 nt, Artificial Sequence
  Description of Artificial Sequence: Synthetic oligonucleotide
gggugggacuccauucugu

SEQ ID NO: 383281 - RNA, 19 nt, Artificial Sequence
  Description of Artificial Sequence: Synthetic oligonucleotide
ggcccucaugucccucuaa

SEQ ID NO: 383282 - RNA, 19 nt, Artificial Sequence
  Description of Artificial Sequence: Synthetic oligonucleotide
gccauucgaaggagaccaa

SEQ ID NO: 383283 - RNA, 19 nt, Artificial Sequence
  Description of Artificial Sequence: Synthetic oligonucleotide
cgauaacgguaagcaaacu

SEQ ID NO: 383284 - RNA, 19 nt, Artificial Sequence
  Description of Artificial Sequence: Synthetic oligonucleotide
gcccagcauuuaggugucu

SEQ ID NO: 383285 - RNA, 19 nt, Artificial Sequence
  Description of Artificial Sequence: Synthetic oligonucleotide
cgucguccccugguggggu

SEQ ID NO: 383286 - RNA, 19 nt, Artificial Sequence
  Description of Artificial Sequence: Synthetic oligonucleotide
agaaaauugacccucaggc

SEQ ID NO: 383287 - RNA, 19 nt, Artificial Sequence
  Description of Artificial Sequence: Synthetic oligonucleotide
ucugauguaauuauuaccg

SEQ ID NO: 383288 - RNA, 19 nt, Artificial Sequence
  Description of Artificial Sequence: Synthetic oligonucleotide
aauuauuugaucaaacuac

SEQ ID NO: 383289 - RNA, 19 nt, Artificial Sequence
  Description of Artificial Sequence: Synthetic oligonucleotide
uuuagucugacuuucaugc

SEQ ID NO: 383290 - RNA, 19 nt, Artificial Sequence
  Description of Artificial Sequence: Synthetic oligonucleotide
uuagauuccaaccuaguag

SEQ ID NO: 383291 - RNA, 19 nt, Artificial Sequence
  Description of Artificial Sequence: Synthetic oligonucleotide
aaagacaacuccaagguac

SEQ ID NO: 383292 - RNA, 19 nt, Artificial Sequence
  Description of Artificial Sequence: Synthetic oligonucleotide
uuuauaggcaaaaugccag

SEQ ID NO: 383293 - RNA, 19 nt, Artificial Sequence
  Description of Artificial Sequence: Synthetic oligonucleotide
ugcuaauuuacuaugaggu

SEQ ID NO: 383294 - RNA, 19 nt, Artificial Sequence
  Description of Artificial Sequence: Synthetic oligonucleotide
aaacaaaacaaaacaaaac

SEQ ID NO: 383295 - RNA, 19 nt, Artificial Sequence
  Description of Artificial Sequence: Synthetic oligonucleotide
aucgcaauaaaccucacuc

SEQ ID NO: 383296 - RNA, 19 nt, Artificial Sequence
  Description of Artificial Sequence: Synthetic oligonucleotide
aguaugaaaugauuauugc

SEQ ID NO: 383297 - RNA, 19 nt, Artificial Sequence
  Description of Artificial Sequence: Synthetic oligonucleotide
aauccuacuguuuagucug

SEQ ID NO: 383298 - RNA, 19 nt, Artificial Sequence
  Description of Artificial Sequence: Synthetic oligonucleotide
ucaaauaggggaauggaug

SEQ ID NO: 383299 - RNA, 19 nt, Artificial Sequence
  Description of Artificial Sequence: Synthetic oligonucleotide
aagaugcuaggguuaagcc

SEQ ID NO: 383300 - RNA, 19 nt, Artificial Sequence
  Description of Artificial Sequence: Synthetic oligonucleotide
cuugauagcuccaaguucc

SEQ ID NO: 383301 - RNA, 19 nt, Artificial Sequence
  Description of Artificial Sequence: Synthetic oligonucleotide
ugugcaaaucacaaggucc

SEQ ID NO: 383302 - RNA, 19 nt, Artificial Sequence
  Description of Artificial Sequence: Synthetic oligonucleotide
gauacgaugaacucugacc

SEQ ID NO: 383303 - RNA, 19 nt, Artificial Sequence
  Description of Artificial Sequence: Synthetic oligonucleotide
uagauuccaaccuaguagg

SEQ ID NO: 383304 - RNA, 19 nt, Artificial Sequence
  Description of Artificial Sequence: Synthetic oligonucleotide
aauggauaaagggucacac

SEQ ID NO: 383305 - RNA, 19 nt, Artificial Sequence
  Description of Artificial Sequence: Synthetic oligonucleotide
aaugcuaauuuacuaugag

SEQ ID NO: 383306 - RNA, 19 nt, Artificial Sequence
  Description of Artificial Sequence: Synthetic oligonucleotide
ugcuuuagcaaaaugacaa

SEQ ID NO: 383307 - RNA, 19 nt, Artificial Sequence
  Description of Artificial Sequence: Synthetic oligonucleotide
ucaugugauaugaaagagg

SEQ ID NO: 383308 - RNA, 19 nt, Artificial Sequence
  Description of Artificial Sequence: Synthetic oligonucleotide
uuuaaugcuaauuuacuau

SEQ ID NO: 383309 - RNA, 19 nt, Artificial Sequence
  Description of Artificial Sequence: Synthetic oligonucleotide
uuaaugcuaauuuacuaug

SEQ ID NO: 383310 - RNA, 19 nt, Artificial Sequence
  Description of Artificial Sequence: Synthetic oligonucleotide
agaugcuaggguuaagccc

SEQ ID NO: 383311 - RNA, 19 nt, Artificial Sequence
  Description of Artificial Sequence: Synthetic oligonucleotide
uuuuauuccuuuaggggag

SEQ ID NO: 383312 - RNA, 19 nt, Artificial Sequence
  Description of Artificial Sequence: Synthetic oligonucleotide
uacuaugagguucagagaa

SEQ ID NO: 383313 - RNA, 19 nt, Artificial Sequence
  Description of Artificial Sequence: Synthetic oligonucleotide
ugugauaugaaagagggau

SEQ ID NO: 383314 - RNA, 19 nt, Artificial Sequence
  Description of Artificial Sequence: Synthetic oligonucleotide
aauuuggcugaccugaggu

SEQ ID NO: 383315 - RNA, 19 nt, Artificial Sequence
  Description of Artificial Sequence: Synthetic oligonucleotide
uuauuauuguuuucaaugu

SEQ ID NO: 383316 - RNA, 19 nt, Artificial Sequence
  Description of Artificial Sequence: Synthetic oligonucleotide
accgccauuauauuuuggc

SEQ ID NO: 383317 - RNA, 19 nt, Artificial Sequence
  Description of Artificial Sequence: Synthetic oligonucleotide
aaucuuuacacuccaggcu

SEQ ID NO: 383318 - RNA, 19 nt, Artificial Sequence
  Description of Artificial Sequence: Synthetic oligonucleotide
cugacuuucaugcaugagg

SEQ ID NO: 383319 - RNA, 19 nt, Artificial Sequence
  Description of Artificial Sequence: Synthetic oligonucleotide
agaccuuucaaaccagagc

SEQ ID NO: 383320 - RNA, 19 nt, Artificial Sequence
  Description of Artificial Sequence: Synthetic oligonucleotide
agacauaaucuacagcaac

SEQ ID NO: 383321 - RNA, 19 nt, Artificial Sequence
  Description of Artificial Sequence: Synthetic oligonucleotide
aacuaaucuugcuuuagca

SEQ ID NO: 383322 - RNA, 19 nt, Artificial Sequence
  Description of Artificial Sequence: Synthetic oligonucleotide
uaggguuaagcccaaagca

SEQ ID NO: 383323 - RNA, 19 nt, Artificial Sequence
  Description of Artificial Sequence: Synthetic oligonucleotide
aaaucacaagguccuggcc

SEQ ID NO: 383324 - RNA, 19 nt, Artificial Sequence
  Description of Artificial Sequence: Synthetic oligonucleotide
agguauuccuuuuccaccc

SEQ ID NO: 383325 - RNA, 19 nt, Artificial Sequence
  Description of Artificial Sequence: Synthetic oligonucleotide
auacgaugaacucugaccu

SEQ ID NO: 383326 - RNA, 19 nt, Artificial Sequence
  Description of Artificial Sequence: Synthetic oligonucleotide
ugaaaucuagccuuuagau

SEQ ID NO: 383327 - RNA, 19 nt, Artificial Sequence
  Description of Artificial Sequence: Synthetic oligonucleotide
uuccuacauaaccaggugg

SEQ ID NO: 383328 - RNA, 19 nt, Artificial Sequence
  Description of Artificial Sequence: Synthetic oligonucleotide
gacagauccagucaauuug

SEQ ID NO: 383329 - RNA, 19 nt, Artificial Sequence
  Description of Artificial Sequence: Synthetic oligonucleotide
gaugcagaugccuugaaga

SEQ ID NO: 383330 - RNA, 19 nt, Artificial Sequence
  Description of Artificial Sequence: Synthetic oligonucleotide
gaaaucuagccuuuagaug

SEQ ID NO: 383331 - RNA, 19 nt, Artificial Sequence
  Description of Artificial Sequence: Synthetic oligonucleotide
aauguuaccagugauccaa

SEQ ID NO: 383332 - RNA, 19 nt, Artificial Sequence
  Description of Artificial Sequence: Synthetic oligonucleotide
uaugaaagagggaugcaga

SEQ ID NO: 383333 - RNA, 19 nt, Artificial Sequence
  Description of Artificial Sequence: Synthetic oligonucleotide
aaaugauuauugcuauugu

SEQ ID NO: 383334 - RNA, 19 nt, Artificial Sequence
  Description of Artificial Sequence: Synthetic oligonucleotide
aacuacuuggaagacacug

SEQ ID NO: 383335 - RNA, 19 nt, Artificial Sequence
  Description of Artificial Sequence: Synthetic oligonucleotide
aaaucauacacaacgcucu

SEQ ID NO: 383336 - RNA, 19 nt, Artificial Sequence
  Description of Artificial Sequence: Synthetic oligonucleotide
aaugauuauugcuauuguu

SEQ ID NO: 383337 - RNA, 19 nt, Artificial Sequence
  Description of Artificial Sequence: Synthetic oligonucleotide
uuugaacuaaucuugcuuu

SEQ ID NO: 383338 - RNA, 19 nt, Artificial Sequence
  Description of Artificial Sequence: Synthetic oligonucleotide
aaccuaguagguuaaaaua

SEQ ID NO: 383339 - RNA, 19 nt, Artificial Sequence
  Description of Artificial Sequence: Synthetic oligonucleotide
aggagcaugguucaaaaga

SEQ ID NO: 383340 - RNA, 19 nt, Artificial Sequence
  Description of Artificial Sequence: Synthetic oligonucleotide
ugaaauggcacaagguaac

SEQ ID NO: 383341 - RNA, 19 nt, Artificial Sequence
  Description of Artificial Sequence: Synthetic oligonucleotide
aauuauuaccgccauuaua

SEQ ID NO: 383342 - RNA, 19 nt, Artificial Sequence
  Description of Artificial Sequence: Synthetic oligonucleotide
gucaaagcaucucuggagg

SEQ ID NO: 383343 - RNA, 19 nt, Artificial Sequence
  Description of Artificial Sequence: Synthetic oligonucleotide
ucaaauguuaccagugauc

SEQ ID NO: 383344 - RNA, 19 nt, Artificial Sequence
  Description of Artificial Sequence: Synthetic oligonucleotide
auagcuccaaguuccuacc

SEQ ID NO: 383345 - RNA, 19 nt, Artificial Sequence
  Description of Artificial Sequence: Synthetic oligonucleotide
aaucauacacaacgcucuc

SEQ ID NO: 383346 - RNA, 19 nt, Artificial Sequence
  Description of Artificial Sequence: Synthetic oligonucleotide
uguuuuaaaaugugaguuc

SEQ ID NO: 383347 - RNA, 19 nt, Artificial Sequence
  Description of Artificial Sequence: Synthetic oligonucleotide
cuaaggucccuucaguucc

SEQ ID NO: 383348 - RNA, 19 nt, Artificial Sequence
  Description of Artificial Sequence: Synthetic oligonucleotide
agaaacccuugucagcacc

SEQ ID NO: 383349 - RNA, 19 nt, Artificial Sequence
  Description of Artificial Sequence: Synthetic oligonucleotide
auaaccaggugguuuguuc

SEQ ID NO: 383350 - RNA, 19 nt, Artificial Sequence
  Description of Artificial Sequence: Synthetic oligonucleotide
uuaucuguucccuugggaa

SEQ ID NO: 383351 - RNA, 19 nt, Artificial Sequence
  Description of Artificial Sequence: Synthetic oligonucleotide
aaaccaaagaggguaggag

SEQ ID NO: 383352 - RNA, 19 nt, Artificial Sequence
  Description of Artificial Sequence: Synthetic oligonucleotide
uuuuaucuguucccuuggg

SEQ ID NO: 383353 - RNA, 19 nt, Artificial Sequence
  Description of Artificial Sequence: Synthetic oligonucleotide
ugagguucagagaaguccu

SEQ ID NO: 383354 - RNA, 19 nt, Artificial Sequence
  Description of Artificial Sequence: Synthetic oligonucleotide
aaagcagaccaacacugga

SEQ ID NO: 383355 - RNA, 19 nt, Artificial Sequence
  Description of Artificial Sequence: Synthetic oligonucleotide
caaacaaaacaaaacaaaa

SEQ ID NO: 383356 - RNA, 19 nt, Artificial Sequence
  Description of Artificial Sequence: Synthetic oligonucleotide
ucuagccuuuagaugaacc

SEQ ID NO: 383357 - RNA, 19 nt, Artificial Sequence
  Description of Artificial Sequence: Synthetic oligonucleotide
ugaugaaugcuaagguccc

SEQ ID NO: 383358 - RNA, 19 nt, Artificial Sequence
  Description of Artificial Sequence: Synthetic oligonucleotide
uccuacauaaccagguggu

SEQ ID NO: 383359 - RNA, 19 nt, Artificial Sequence
  Description of Artificial Sequence: Synthetic oligonucleotide
aaaugugaguuccaauaaa

SEQ ID NO: 383360 - RNA, 19 nt, Artificial Sequence
  Description of Artificial Sequence: Synthetic oligonucleotide
cuaggguuaagcccaaagc

SEQ ID NO: 383361 - RNA, 19 nt, Artificial Sequence
  Description of Artificial Sequence: Synthetic oligonucleotide
uuuaucuguucccuuggga

SEQ ID NO: 383362 - RNA, 19 nt, Artificial Sequence
  Description of Artificial Sequence: Synthetic oligonucleotide
uagguuaaaauagaauuaa

SEQ ID NO: 383363 - RNA, 19 nt, Artificial Sequence
  Description of Artificial Sequence: Synthetic oligonucleotide
gaagaugcuaggguuaagc

SEQ ID NO: 383364 - RNA, 19 nt, Artificial Sequence
  Description of Artificial Sequence: Synthetic oligonucleotide
acgaugaacucugaccucc

SEQ ID NO: 383365 - RNA, 19 nt, Artificial Sequence
  Description of Artificial Sequence: Synthetic oligonucleotide
agauacgaugaacucugac

SEQ ID NO: 383366 - RNA, 19 nt, Artificial Sequence
  Description of Artificial Sequence: Synthetic oligonucleotide
auacacaacgcucucuuca

SEQ ID NO: 383367 - RNA, 19 nt, Artificial Sequence
  Description of Artificial Sequence: Synthetic oligonucleotide
cuuuguauuugaacuaauc

SEQ ID NO: 383368 - RNA, 19 nt, Artificial Sequence
  Description of Artificial Sequence: Synthetic oligonucleotide
augaguaugaaaugauuau

SEQ ID NO: 383369 - RNA, 19 nt, Artificial Sequence
  Description of Artificial Sequence: Synthetic oligonucleotide
accuaguagguuaaaauag

SEQ ID NO: 383370 - RNA, 19 nt, Artificial Sequence
  Description of Artificial Sequence: Synthetic oligonucleotide
guuuuaucuguucccuugg

SEQ ID NO: 383371 - RNA, 19 nt, Artificial Sequence
  Description of Artificial Sequence: Synthetic oligonucleotide
aaugugaguuccaauaaaa

SEQ ID NO: 383372 - RNA, 19 nt, Artificial Sequence
  Description of Artificial Sequence: Synthetic oligonucleotide
cugcugauaacauuccuac

SEQ ID NO: 383373 - RNA, 19 nt, Artificial Sequence
  Description of Artificial Sequence: Synthetic oligonucleotide
uugcuuuagcaaaaugaca

SEQ ID NO: 383374 - RNA, 19 nt, Artificial Sequence
  Description of Artificial Sequence: Synthetic oligonucleotide
ugguucauucacuuuggcc

SEQ ID NO: 383375 - RNA, 19 nt, Artificial Sequence
  Description of Artificial Sequence: Synthetic oligonucleotide
aagguaaccaagagcuugg

SEQ ID NO: 383376 - RNA, 19 nt, Artificial Sequence
  Description of Artificial Sequence: Synthetic oligonucleotide
agaaugaucacuaucugau

SEQ ID NO: 383377 - RNA, 19 nt, Artificial Sequence
  Description of Artificial Sequence: Synthetic oligonucleotide
agauucucugcuuucccag

SEQ ID NO: 383378 - RNA, 19 nt, Artificial Sequence
  Description of Artificial Sequence: Synthetic oligonucleotide
acuaucugaucuucaaaca

SEQ ID NO: 383379 - RNA, 19 nt, Artificial Sequence
  Description of Artificial Sequence: Synthetic oligonucleotide
caaaucacaagguccuggc

SEQ ID NO: 383380 - RNA, 19 nt, Artificial Sequence
  Description of Artificial Sequence: Synthetic oligonucleotide
aaccucacucucugcuugc

SEQ ID NO: 383381 - RNA, 19 nt, Artificial Sequence
  Description of Artificial Sequence: Synthetic oligonucleotide
acuaaucuugcuuuagcaa

SEQ ID NO: 383382 - RNA, 19 nt, Artificial Sequence
  Description of Artificial Sequence: Synthetic oligonucleotide
gauccaauuuuacacagua

SEQ ID NO: 383383 - RNA, 19 nt, Artificial Sequence
  Description of Artificial Sequence: Synthetic oligonucleotide
augcucuccaaaugaaauc

SEQ ID NO: 383384 - RNA, 19 nt, Artificial Sequence
  Description of Artificial Sequence: Synthetic oligonucleotide
aaaaccaaagaggguagga

SEQ ID NO: 383385 - RNA, 19 nt, Artificial Sequence
  Description of Artificial Sequence: Synthetic oligonucleotide
cuagcugggcacaggaagg

SEQ ID NO: 383386 - RNA, 19 nt, Artificial Sequence
  Description of Artificial Sequence: Synthetic oligonucleotide
acagauacgaugaacucug

SEQ ID NO: 383387 - RNA, 19 nt, Artificial Sequence
  Description of Artificial Sequence: Synthetic oligonucleotide
uguuuugaaaacaccuaua

SEQ ID NO: 383388 - RNA, 19 nt, Artificial Sequence
  Description of Artificial Sequence: Synthetic oligonucleotide
uauuugaacuaaucuugcu

SEQ ID NO: 383389 - RNA, 19 nt, Artificial Sequence
  Description of Artificial Sequence: Synthetic oligonucleotide
aacucugaccuccugggaa

SEQ ID NO: 383390 - RNA, 19 nt, Artificial Sequence
  Description of Artificial Sequence: Synthetic oligonucleotide
ugaacuaaucuugcuuuag

SEQ ID NO: 383391 - RNA, 19 nt, Artificial Sequence
  Description of Artificial Sequence: Synthetic oligonucleotide
uucaaaagacagauccagu

SEQ ID NO: 383392 - RNA, 19 nt, Artificial Sequence
  Description of Artificial Sequence: Synthetic oligonucleotide
uuccaugaguaugaaauga

SEQ ID NO: 383393 - RNA, 19 nt, Artificial Sequence
  Description of Artificial Sequence: Synthetic oligonucleotide
guaauuauuaccgccauua

SEQ ID NO: 383394 - RNA, 19 nt, Artificial Sequence
  Description of Artificial Sequence: Synthetic oligonucleotide
uguuacaugccaugagaac

SEQ ID NO: 383395 - RNA, 19 nt, Artificial Sequence
  Description of Artificial Sequence: Synthetic oligonucleotide
uuccuuuaggggagcauag

SEQ ID NO: 383396 - RNA, 19 nt, Artificial Sequence
  Description of Artificial Sequence: Synthetic oligonucleotide
cuaaucuugcuuuagcaaa

SEQ ID NO: 383397 - RNA, 19 nt, Artificial Sequence
  Description of Artificial Sequence: Synthetic oligonucleotide
auuagauuccaaccuagua

SEQ ID NO: 383398 - RNA, 19 nt, Artificial Sequence
  Description of Artificial Sequence: Synthetic oligonucleotide
caaguuuacacuucauaca

SEQ ID NO: 383399 - RNA, 19 nt, Artificial Sequence
  Description of Artificial Sequence: Synthetic oligonucleotide
auuuggcugaccugagguc

SEQ ID NO: 383400 - RNA, 19 nt, Artificial Sequence
  Description of Artificial Sequence: Synthetic oligonucleotide
gaugagaugaugaaugcua

SEQ ID NO: 383401 - RNA, 19 nt, Artificial Sequence
  Description of Artificial Sequence: Synthetic oligonucleotide
gauaacauuccuacauaac

SEQ ID NO: 383402 - RNA, 19 nt, Artificial Sequence
  Description of Artificial Sequence: Synthetic oligonucleotide
aaccaucgcaauaaaccuc

SEQ ID NO: 383403 - RNA, 19 nt, Artificial Sequence
  Description of Artificial Sequence: Synthetic oligonucleotide
aggauagaagaugcuaggg

SEQ ID NO: 383404 - RNA, 19 nt, Artificial Sequence
  Description of Artificial Sequence: Synthetic oligonucleotide
caaauaggggaauggauga

SEQ ID NO: 383405 - RNA, 19 nt, Artificial Sequence
  Description of Artificial Sequence: Synthetic oligonucleotide
ucuguaaagcuguuuuauc

SEQ ID NO: 383406 - RNA, 19 nt, Artificial Sequence
  Description of Artificial Sequence: Synthetic oligonucleotide
ucuuuugauuccugugggc

SEQ ID NO: 383407 - RNA, 19 nt, Artificial Sequence
  Description of Artificial Sequence: Synthetic oligonucleotide
acagauccagucaauuugg

SEQ ID NO: 383408 - RNA, 19 nt, Artificial Sequence
  Description of Artificial Sequence: Synthetic oligonucleotide
uuauaggcaaaaugccagu

SEQ ID NO: 383409 - RNA, 19 nt, Artificial Sequence
  Description of Artificial Sequence: Synthetic oligonucleotide
aaacccuugucagcacccc

SEQ ID NO: 383410 - RNA, 19 nt, Artificial Sequence
  Description of Artificial Sequence: Synthetic oligonucleotide
caagguaaccaagagcuug

SEQ ID NO: 383411 - RNA, 19 nt, Artificial Sequence
  Description of Artificial Sequence: Synthetic oligonucleotide
ucaaggauagaagaugcua

SEQ ID NO: 383412 - RNA, 19 nt, Artificial Sequence
  Description of Artificial Sequence: Synthetic oligonucleotide
uauuaccgccauuauauuu

SEQ ID NO: 383413 - RNA, 19 nt, Artificial Sequence
  Description of Artificial Sequence: Synthetic oligonucleotide
augauuauugcuauuguuu

SEQ ID NO: 383414 - RNA, 19 nt, Artificial Sequence
  Description of Artificial Sequence: Synthetic oligonucleotide
cauacacacaaguguggcc

SEQ ID NO: 383415 - RNA, 19 nt, Artificial Sequence
  Description of Artificial Sequence: Synthetic oligonucleotide
uuaacaucacugugcaaau

SEQ ID NO: 383416 - RNA, 19 nt, Artificial Sequence
  Description of Artificial Sequence: Synthetic oligonucleotide
uuacuaugagguucagaga

SEQ ID NO: 383417 - RNA, 19 nt, Artificial Sequence
  Description of Artificial Sequence: Synthetic oligonucleotide
uuccagaaugaucacuauc

SEQ ID NO: 383418 - RNA, 19 nt, Artificial Sequence
  Description of Artificial Sequence: Synthetic oligonucleotide
uuauuugaucaaacuacuu

SEQ ID NO: 383419 - RNA, 19 nt, Artificial Sequence
  Description of Artificial Sequence: Synthetic oligonucleotide
ucgcaauaaaccucacucu

SEQ ID NO: 383420 - RNA, 19 nt, Artificial Sequence
  Description of Artificial Sequence: Synthetic oligonucleotide
ucuguugcgaugguucuca

SEQ ID NO: 383421 - RNA, 19 nt, Artificial Sequence
  Description of Artificial Sequence: Synthetic oligonucleotide
uaaggagcaugguucaaaa

SEQ ID NO: 383422 - RNA, 19 nt, Artificial Sequence
  Description of Artificial Sequence: Synthetic oligonucleotide
aauuagauuccaaccuagu

SEQ ID NO: 383423 - RNA, 19 nt, Artificial Sequence
  Description of Artificial Sequence: Synthetic oligonucleotide
uaauuauuaccgccauuau

SEQ ID NO: 383424 - RNA, 19 nt, Artificial Sequence
  Description of Artificial Sequence: Synthetic oligonucleotide
uuggccgugaaauggcaca

SEQ ID NO: 383425 - RNA, 19 nt, Artificial Sequence
  Description of Artificial Sequence: Synthetic oligonucleotide
ugccaggucaguuaacauc

SEQ ID NO: 383426 - RNA, 19 nt, Artificial Sequence
  Description of Artificial Sequence: Synthetic oligonucleotide
gaaccaucgcaauaaaccu

SEQ ID NO: 383427 - RNA, 19 nt, Artificial Sequence
  Description of Artificial Sequence: Synthetic oligonucleotide
aggguuaagcccaaagcag

SEQ ID NO: 383428 - RNA, 19 nt, Artificial Sequence
  Description of Artificial Sequence: Synthetic oligonucleotide
ugccucaccuuguaaggag

SEQ ID NO: 383429 - RNA, 19 nt, Artificial Sequence
  Description of Artificial Sequence: Synthetic oligonucleotide
gagaccuuucaaaccagag

SEQ ID NO: 383430 - RNA, 19 nt, Artificial Sequence
  Description of Artificial Sequence: Synthetic oligonucleotide
ucugucaaauaggggaaug

SEQ ID NO: 383431 - RNA, 19 nt, Artificial Sequence
  Description of Artificial Sequence: Synthetic oligonucleotide
auaccacuaguuccacuuc

SEQ ID NO: 383432 - RNA, 19 nt, Artificial Sequence
  Description of Artificial Sequence: Synthetic oligonucleotide
uuagucugacuuucaugca

SEQ ID NO: 383433 - RNA, 19 nt, Artificial Sequence
  Description of Artificial Sequence: Synthetic oligonucleotide
augaaccaucgcaauaaac

SEQ ID NO: 383434 - RNA, 19 nt, Artificial Sequence
  Description of Artificial Sequence: Synthetic oligonucleotide
caaagaggguaggaggagg

SEQ ID NO: 383435 - RNA, 19 nt, Artificial Sequence
  Description of Artificial Sequence: Synthetic oligonucleotide
gaaugaucacuaucugauc

SEQ ID NO: 383436 - RNA, 19 nt, Artificial Sequence
  Description of Artificial Sequence: Synthetic oligonucleotide
ucuuuguauuugaacuaau

SEQ ID NO: 383437 - RNA, 19 nt, Artificial Sequence
  Description of Artificial Sequence: Synthetic oligonucleotide
uuaccgccauuauauuuug

SEQ ID NO: 383438 - RNA, 19 nt, Artificial Sequence
  Description of Artificial Sequence: Synthetic oligonucleotide
auuaccgccauuauauuuu

SEQ ID NO: 383439 - RNA, 19 nt, Artificial Sequence
  Description of Artificial Sequence: Synthetic oligonucleotide
uuuggccgugaaauggcac

SEQ ID NO: 383440 - RNA, 19 nt, Artificial Sequence
  Description of Artificial Sequence: Synthetic oligonucleotide
caugccaugagaacaagcu

SEQ ID NO: 383441 - RNA, 19 nt, Artificial Sequence
  Description of Artificial Sequence: Synthetic oligonucleotide
ucuuuacacuccaggcugu

SEQ ID NO: 383442 - RNA, 19 nt, Artificial Sequence
  Description of Artificial Sequence: Synthetic oligonucleotide
ggaaauuggaggaauguga

SEQ ID NO: 383443 - RNA, 19 nt, Artificial Sequence
  Description of Artificial Sequence: Synthetic oligonucleotide
gaaacccuugucagcaccc

SEQ ID NO: 383444 - RNA, 19 nt, Artificial Sequence
  Description of Artificial Sequence: Synthetic oligonucleotide
aagacaacuccaagguaca

SEQ ID NO: 383445 - RNA, 19 nt, Artificial Sequence
  Description of Artificial Sequence: Synthetic oligonucleotide
aaggccguaucugauguaa

SEQ ID NO: 383446 - RNA, 19 nt, Artificial Sequence
  Description of Artificial Sequence: Synthetic oligonucleotide
caguagguaggaaggcugc

SEQ ID NO: 383447 - RNA, 19 nt, Artificial Sequence
  Description of Artificial Sequence: Synthetic oligonucleotide
gcugcuaucuguaaagcug

SEQ ID NO: 383448 - RNA, 19 nt, Artificial Sequence
  Description of Artificial Sequence: Synthetic oligonucleotide
uaagcccaaagcagguuuc

SEQ ID NO: 383449 - RNA, 19 nt, Artificial Sequence
  Description of Artificial Sequence: Synthetic oligonucleotide
caauuuggcugaccugagg

SEQ ID NO: 383450 - RNA, 19 nt, Artificial Sequence
  Description of Artificial Sequence: Synthetic oligonucleotide
accaucgcaauaaaccuca

SEQ ID NO: 383451 - RNA, 19 nt, Artificial Sequence
  Description of Artificial Sequence: Synthetic oligonucleotide
ucacucuagcucauuuuau

SEQ ID NO: 383452 - RNA, 19 nt, Artificial Sequence
  Description of Artificial Sequence: Synthetic oligonucleotide
cugaggucacucuagcuca

SEQ ID NO: 383453 - RNA, 19 nt, Artificial Sequence
  Description of Artificial Sequence: Synthetic oligonucleotide
caccaugcaacuguuuggc

SEQ ID NO: 383454 - RNA, 19 nt, Artificial Sequence
  Description of Artificial Sequence: Synthetic oligonucleotide
gaaugcuaaggucccuuca

SEQ ID NO: 383455 - RNA, 19 nt, Artificial Sequence
  Description of Artificial Sequence: Synthetic oligonucleotide
ggagcauaggaaauuggag

SEQ ID NO: 383456 - RNA, 19 nt, Artificial Sequence
  Description of Artificial Sequence: Synthetic oligonucleotide
uccuuuaggggagcauagg

SEQ ID NO: 383457 - RNA, 19 nt, Artificial Sequence
  Description of Artificial Sequence: Synthetic oligonucleotide
gugggauuaugcccucugg

SEQ ID NO: 383458 - RNA, 19 nt, Artificial Sequence
  Description of Artificial Sequence: Synthetic oligonucleotide
cugugcaaaucacaagguc

SEQ ID NO: 383459 - RNA, 19 nt, Artificial Sequence
  Description of Artificial Sequence: Synthetic oligonucleotide
ccugggaacagucaggcug

SEQ ID NO: 383460 - RNA, 19 nt, Artificial Sequence
  Description of Artificial Sequence: Synthetic oligonucleotide
uugaacuaaucuugcuuua

SEQ ID NO: 383461 - RNA, 19 nt, Artificial Sequence
  Description of Artificial Sequence: Synthetic oligonucleotide
ugcugauaacauuccuaca

SEQ ID NO: 383462 - RNA, 19 nt, Artificial Sequence
  Description of Artificial Sequence: Synthetic oligonucleotide
agacagauccagucaauuu

SEQ ID NO: 383463 - RNA, 19 nt, Artificial Sequence
  Description of Artificial Sequence: Synthetic oligonucleotide
uuuauuccuuuaggggagc

SEQ ID NO: 383464 - RNA, 19 nt, Artificial Sequence
  Description of Artificial Sequence: Synthetic oligonucleotide
guauuccuuuuccacccag

SEQ ID NO: 383465 - RNA, 19 nt, Artificial Sequence
  Description of Artificial Sequence: Synthetic oligonucleotide
aagacagauccagucaauu

SEQ ID NO: 383466 - RNA, 19 nt, Artificial Sequence
  Description of Artificial Sequence: Synthetic oligonucleotide
gacaugugcgccccggcac

SEQ ID NO: 383467 - RNA, 19 nt, Artificial Sequence
  Description of Artificial Sequence: Synthetic oligonucleotide
auaggaaauuggaggaaug

SEQ ID NO: 383468 - RNA, 19 nt, Artificial Sequence
  Description of Artificial Sequence: Synthetic oligonucleotide
ugaaugcuaaggucccuuc

SEQ ID NO: 383469 - RNA, 19 nt, Artificial Sequence
  Description of Artificial Sequence: Synthetic oligonucleotide
cuugcuacuagacugggau

SEQ ID NO: 383470 - RNA, 19 nt, Artificial Sequence
  Description of Artificial Sequence: Synthetic oligonucleotide
gugaaauggcacaagguaa

SEQ ID NO: 383471 - RNA, 19 nt, Artificial Sequence
  Description of Artificial Sequence: Synthetic oligonucleotide
gccgugaaauggcacaagg

SEQ ID NO: 383472 - RNA, 19 nt, Artificial Sequence
  Description of Artificial Sequence: Synthetic oligonucleotide
acgaggcucgggcugagug

SEQ ID NO: 383473 - RNA, 19 nt, Artificial Sequence
  Description of Artificial Sequence: Synthetic oligonucleotide
uagcuccaaguuccuaccc

SEQ ID NO: 383474 - RNA, 19 nt, Artificial Sequence
  Description of Artificial Sequence: Synthetic oligonucleotide
gcuaggguuaagcccaaag

SEQ ID NO: 383475 - RNA, 19 nt, Artificial Sequence
  Description of Artificial Sequence: Synthetic oligonucleotide
caagguacaggaggccugg

SEQ ID NO: 383476 - RNA, 19 nt, Artificial Sequence
  Description of Artificial Sequence: Synthetic oligonucleotide
gucacucuagcucauuuua

SEQ ID NO: 383477 - RNA, 19 nt, Artificial Sequence
  Description of Artificial Sequence: Synthetic oligonucleotide
aguacccucuugcccuuuc

SEQ ID NO: 383478 - RNA, 19 nt, Artificial Sequence
  Description of Artificial Sequence: Synthetic oligonucleotide
uucaugcaugaggaggaug

SEQ ID NO: 383479 - RNA, 19 nt, Artificial Sequence
  Description of Artificial Sequence: Synthetic oligonucleotide
acuaugagguucagagaag

SEQ ID NO: 383480 - RNA, 19 nt, Artificial Sequence
  Description of Artificial Sequence: Synthetic oligonucleotide
uuauuaccgccauuauauu

SEQ ID NO: 383481 - RNA, 19 nt, Artificial Sequence
  Description of Artificial Sequence: Synthetic oligonucleotide
ugugcgccccggcacuagg

SEQ ID NO: 383482 - RNA, 19 nt, Artificial Sequence
  Description of Artificial Sequence: Synthetic oligonucleotide
augcuaaggucccuucagu

SEQ ID NO: 383483 - RNA, 19 nt, Artificial Sequence
  Description of Artificial Sequence: Synthetic oligonucleotide
ccuugccucaccuuguaag

SEQ ID NO: 383484 - RNA, 19 nt, Artificial Sequence
  Description of Artificial Sequence: Synthetic oligonucleotide
gaaauuggaggaaugugau

SEQ ID NO: 383485 - RNA, 19 nt, Artificial Sequence
  Description of Artificial Sequence: Synthetic oligonucleotide
gaauggauaaagggucaca

SEQ ID NO: 383486 - RNA, 19 nt, Artificial Sequence
  Description of Artificial Sequence: Synthetic oligonucleotide
ugcuugcuacuagacuggg

SEQ ID NO: 383487 - RNA, 19 nt, Artificial Sequence
  Description of Artificial Sequence: Synthetic oligonucleotide
auuccuuuaggggagcaua

SEQ ID NO: 383488 - RNA, 19 nt, Artificial Sequence
  Description of Artificial Sequence: Synthetic oligonucleotide
acagacaugugcgccccgg

SEQ ID NO: 383489 - RNA, 19 nt, Artificial Sequence
  Description of Artificial Sequence: Synthetic oligonucleotide
gacccucaggcuggaaugg

SEQ ID NO: 383490 - RNA, 19 nt, Artificial Sequence
  Description of Artificial Sequence: Synthetic oligonucleotide
guguuuugaaaacaccuau

SEQ ID NO: 383491 - RNA, 19 nt, Artificial Sequence
  Description of Artificial Sequence: Synthetic oligonucleotide
aaguuccuagaaggccagg

SEQ ID NO: 383492 - RNA, 19 nt, Artificial Sequence
  Description of Artificial Sequence: Synthetic oligonucleotide
auagaagaugcuaggguua

SEQ ID NO: 383493 - RNA, 19 nt, Artificial Sequence
  Description of Artificial Sequence: Synthetic oligonucleotide
aucuagccuuuagaugaac

SEQ ID NO: 383494 - RNA, 19 nt, Artificial Sequence
  Description of Artificial Sequence: Synthetic oligonucleotide
uacgaugaacucugaccuc

SEQ ID NO: 383495 - RNA, 19 nt, Artificial Sequence
  Description of Artificial Sequence: Synthetic oligonucleotide
uugcuacuagacugggauc

SEQ ID NO: 383496 - RNA, 19 nt, Artificial Sequence
  Description of Artificial Sequence: Synthetic oligonucleotide
uacacacaaguguggccac

SEQ ID NO: 383497 - RNA, 19 nt, Artificial Sequence
  Description of Artificial Sequence: Synthetic oligonucleotide
guaggaaggcugcauuuaa

SEQ ID NO: 383498 - RNA, 19 nt, Artificial Sequence
  Description of Artificial Sequence: Synthetic oligonucleotide
augugaguuccaauaaaau

SEQ ID NO: 383499 - RNA, 19 nt, Artificial Sequence
  Description of Artificial Sequence: Synthetic oligonucleotide
caauccuacuguuuagucu

SEQ ID NO: 383500 - RNA, 19 nt, Artificial Sequence
  Description of Artificial Sequence: Synthetic oligonucleotide
auaaagggucacacugcag

SEQ ID NO: 383501 - RNA, 19 nt, Artificial Sequence
  Description of Artificial Sequence: Synthetic oligonucleotide
caaccuaguagguuaaaau

SEQ ID NO: 383502 - RNA, 19 nt, Artificial Sequence
  Description of Artificial Sequence: Synthetic oligonucleotide
aagcccaaagcagguuuca

SEQ ID NO: 383503 - RNA, 19 nt, Artificial Sequence
  Description of Artificial Sequence: Synthetic oligonucleotide
ggggccacaucuguuaugc

SEQ ID NO: 383504 - RNA, 19 nt, Artificial Sequence
  Description of Artificial Sequence: Synthetic oligonucleotide
gcuaaggucccuucaguuc

SEQ ID NO: 383505 - RNA, 19 nt, Artificial Sequence
  Description of Artificial Sequence: Synthetic oligonucleotide
ccaccaugcaacuguuugg

SEQ ID NO: 383506 - RNA, 19 nt, Artificial Sequence
  Description of Artificial Sequence: Synthetic oligonucleotide
guuaccagugauccaauuu

SEQ ID NO: 383507 - RNA, 19 nt, Artificial Sequence
  Description of Artificial Sequence: Synthetic oligonucleotide
acaugugcgccccggcacu

SEQ ID NO: 383508 - RNA, 19 nt, Artificial Sequence
  Description of Artificial Sequence: Synthetic oligonucleotide
cuuuugauuccugugggcu

SEQ ID NO: 383509 - RNA, 19 nt, Artificial Sequence
  Description of Artificial Sequence: Synthetic oligonucleotide
ccuaguagguuaaaauaga

SEQ ID NO: 383510 - RNA, 19 nt, Artificial Sequence
  Description of Artificial Sequence: Synthetic oligonucleotide
agcccaaagcagguuucac

SEQ ID NO: 383511 - RNA, 19 nt, Artificial Sequence
  Description of Artificial Sequence: Synthetic oligonucleotide
gagcaugguucaaaagaca

SEQ ID NO: 383512 - RNA, 19 nt, Artificial Sequence
  Description of Artificial Sequence: Synthetic oligonucleotide
aaucuagccuuuagaugaa

SEQ ID NO: 383513 - RNA, 19 nt, Artificial Sequence
  Description of Artificial Sequence: Synthetic oligonucleotide
uauuccuuuaggggagcau

SEQ ID NO: 383514 - RNA, 19 nt, Artificial Sequence
  Description of Artificial Sequence: Synthetic oligonucleotide
cucaggcuggaauggauaa

SEQ ID NO: 383515 - RNA, 19 nt, Artificial Sequence
  Description of Artificial Sequence: Synthetic oligonucleotide
cagucaauuuggcugaccu

SEQ ID NO: 383516 - RNA, 19 nt, Artificial Sequence
  Description of Artificial Sequence: Synthetic oligonucleotide
agacaacuccaagguacag

SEQ ID NO: 383517 - RNA, 19 nt, Artificial Sequence
  Description of Artificial Sequence: Synthetic oligonucleotide
ugugggcugcuaucuguaa

SEQ ID NO: 383518 - RNA, 19 nt, Artificial Sequence
  Description of Artificial Sequence: Synthetic oligonucleotide
gacagacaugugcgccccg

SEQ ID NO: 383519 - RNA, 19 nt, Artificial Sequence
  Description of Artificial Sequence: Synthetic oligonucleotide
uuggcugaccugaggucuc

SEQ ID NO: 383520 - RNA, 19 nt, Artificial Sequence
  Description of Artificial Sequence: Synthetic oligonucleotide
cacaguaagguauuccuuu

SEQ ID NO: 383521 - RNA, 19 nt, Artificial Sequence
  Description of Artificial Sequence: Synthetic oligonucleotide
aguuaacaucacugugcaa

SEQ ID NO: 383522 - RNA, 19 nt, Artificial Sequence
  Description of Artificial Sequence: Synthetic oligonucleotide
cugcuaucuguaaagcugu

SEQ ID NO: 383523 - RNA, 19 nt, Artificial Sequence
  Description of Artificial Sequence: Synthetic oligonucleotide
gggagcauaggaaauugga

SEQ ID NO: 383524 - RNA, 19 nt, Artificial Sequence
  Description of Artificial Sequence: Synthetic oligonucleotide
augaaugcuaaggucccuu

SEQ ID NO: 383525 - RNA, 19 nt, Artificial Sequence
  Description of Artificial Sequence: Synthetic oligonucleotide
aguagguaggaaggcugca

SEQ ID NO: 383526 - RNA, 19 nt, Artificial Sequence
  Description of Artificial Sequence: Synthetic oligonucleotide
ggguccacgaggcucgggc

SEQ ID NO: 383527 - RNA, 19 nt, Artificial Sequence
  Description of Artificial Sequence: Synthetic oligonucleotide
guucauucacuuuggccgu

SEQ ID NO: 383528 - RNA, 19 nt, Artificial Sequence
  Description of Artificial Sequence: Synthetic oligonucleotide
agaagaugcuaggguuaag

SEQ ID NO: 383529 - RNA, 19 nt, Artificial Sequence
  Description of Artificial Sequence: Synthetic oligonucleotide
gugcaaaucacaagguccu

SEQ ID NO: 383530 - RNA, 19 nt, Artificial Sequence
  Description of Artificial Sequence: Synthetic oligonucleotide
ugaggucacucuagcucau

SEQ ID NO: 383531 - RNA, 19 nt, Artificial Sequence
  Description of Artificial Sequence: Synthetic oligonucleotide
ggucaguuaacaucacugu

SEQ ID NO: 383532 - RNA, 19 nt, Artificial Sequence
  Description of Artificial Sequence: Synthetic oligonucleotide
cgcaauaaaccucacucuc

SEQ ID NO: 383533 - RNA, 19 nt, Artificial Sequence
  Description of Artificial Sequence: Synthetic oligonucleotide
cacaucuguuaugcucucc

SEQ ID NO: 383534 - RNA, 19 nt, Artificial Sequence
  Description of Artificial Sequence: Synthetic oligonucleotide
cagacaugugcgccccggc

SEQ ID NO: 383535 - RNA, 19 nt, Artificial Sequence
  Description of Artificial Sequence: Synthetic oligonucleotide
ucugcuucccugggccuca

SEQ ID NO: 383536 - RNA, 19 nt, Artificial Sequence
  Description of Artificial Sequence: Synthetic oligonucleotide
ggccaauccuacuguuuag

SEQ ID NO: 383537 - RNA, 19 nt, Artificial Sequence
  Description of Artificial Sequence: Synthetic oligonucleotide
ccagaaugaucacuaucug

SEQ ID NO: 383538 - RNA, 19 nt, Artificial Sequence
  Description of Artificial Sequence: Synthetic oligonucleotide
uccuacuguuuagucugac

SEQ ID NO: 383539 - RNA, 19 nt, Artificial Sequence
  Description of Artificial Sequence: Synthetic oligonucleotide
cacagauacgaugaacucu

SEQ ID NO: 383540 - RNA, 19 nt, Artificial Sequence
  Description of Artificial Sequence: Synthetic oligonucleotide
cuaugagguucagagaagu

SEQ ID NO: 383541 - RNA, 19 nt, Artificial Sequence
  Description of Artificial Sequence: Synthetic oligonucleotide
ugagugggauuaugcccuc

SEQ ID NO: 383542 - RNA, 19 nt, Artificial Sequence
  Description of Artificial Sequence: Synthetic oligonucleotide
cuccuugauagcuccaagu

SEQ ID NO: 383543 - RNA, 19 nt, Artificial Sequence
  Description of Artificial Sequence: Synthetic oligonucleotide
gucaaauaggggaauggau

SEQ ID NO: 383544 - RNA, 19 nt, Artificial Sequence
  Description of Artificial Sequence: Synthetic oligonucleotide
gccaaguuuacacuucaua

SEQ ID NO: 383545 - RNA, 19 nt, Artificial Sequence
  Description of Artificial Sequence: Synthetic oligonucleotide
ggaagugccaggucaguua

SEQ ID NO: 383546 - RNA, 19 nt, Artificial Sequence
  Description of Artificial Sequence: Synthetic oligonucleotide
uuaugcccucuggaugcug

SEQ ID NO: 383547 - RNA, 19 nt, Artificial Sequence
  Description of Artificial Sequence: Synthetic oligonucleotide
ggaauggauaaagggucac

SEQ ID NO: 383548 - RNA, 19 nt, Artificial Sequence
  Description of Artificial Sequence: Synthetic oligonucleotide
ggggagcauaggaaauugg

SEQ ID NO: 383549 - RNA, 19 nt, Artificial Sequence
  Description of Artificial Sequence: Synthetic oligonucleotide
aguuccuaccccagaccug

SEQ ID NO: 383550 - RNA, 19 nt, Artificial Sequence
  Description of Artificial Sequence: Synthetic oligonucleotide
aucugucaaauaggggaau

SEQ ID NO: 383551 - RNA, 19 nt, Artificial Sequence
  Description of Artificial Sequence: Synthetic oligonucleotide
acacaguaagguauuccuu

SEQ ID NO: 383552 - RNA, 19 nt, Artificial Sequence
  Description of Artificial Sequence: Synthetic oligonucleotide
gauuccaaccuaguagguu

SEQ ID NO: 383553 - RNA, 19 nt, Artificial Sequence
  Description of Artificial Sequence: Synthetic oligonucleotide
gcuggggucaaggauagaa

SEQ ID NO: 383554 - RNA, 19 nt, Artificial Sequence
  Description of Artificial Sequence: Synthetic oligonucleotide
gccacagauacgaugaacu

SEQ ID NO: 383555 - RNA, 19 nt, Artificial Sequence
  Description of Artificial Sequence: Synthetic oligonucleotide
cgugaaauggcacaaggua

SEQ ID NO: 383556 - RNA, 19 nt, Artificial Sequence
  Description of Artificial Sequence: Synthetic oligonucleotide
cacuauccugaccuucaga

SEQ ID NO: 383557 - RNA, 19 nt, Artificial Sequence
  Description of Artificial Sequence: Synthetic oligonucleotide
caaaugaaaucuagccuuu

SEQ ID NO: 383558 - RNA, 19 nt, Artificial Sequence
  Description of Artificial Sequence: Synthetic oligonucleotide
cugggaacagucaggcugu

SEQ ID NO: 383559 - RNA, 19 nt, Artificial Sequence
  Description of Artificial Sequence: Synthetic oligonucleotide
auuaugcccucuggaugcu

SEQ ID NO: 383560 - RNA, 19 nt, Artificial Sequence
  Description of Artificial Sequence: Synthetic oligonucleotide
cuguugcgaugguucucag

SEQ ID NO: 383561 - RNA, 19 nt, Artificial Sequence
  Description of Artificial Sequence: Synthetic oligonucleotide
gggccaauccuacuguuua

SEQ ID NO: 383562 - RNA, 19 nt, Artificial Sequence
  Description of Artificial Sequence: Synthetic oligonucleotide
ccugggccuucaaagauca

SEQ ID NO: 383563 - RNA, 19 nt, Artificial Sequence
  Description of Artificial Sequence: Synthetic oligonucleotide
augcaacuguuuggcaggu

SEQ ID NO: 383564 - RNA, 19 nt, Artificial Sequence
  Description of Artificial Sequence: Synthetic oligonucleotide
gcuaauuuacuaugagguu

SEQ ID NO: 383565 - RNA, 19 nt, Artificial Sequence
  Description of Artificial Sequence: Synthetic oligonucleotide
caucgcaauaaaccucacu

SEQ ID NO: 383566 - RNA, 19 nt, Artificial Sequence
  Description of Artificial Sequence: Synthetic oligonucleotide
cuacagcaaccuucaucca

SEQ ID NO: 383567 - RNA, 19 nt, Artificial Sequence
  Description of Artificial Sequence: Synthetic oligonucleotide
ccgccauuauauuuuggca

SEQ ID NO: 383568 - RNA, 19 nt, Artificial Sequence
  Description of Artificial Sequence: Synthetic oligonucleotide
gguauuccuuuuccaccca

SEQ ID NO: 383569 - RNA, 19 nt, Artificial Sequence
  Description of Artificial Sequence: Synthetic oligonucleotide
cuacuagacugggauccca

SEQ ID NO: 383570 - RNA, 19 nt, Artificial Sequence
  Description of Artificial Sequence: Synthetic oligonucleotide
cuacauaaccaggugguuu

SEQ ID NO: 383571 - RNA, 19 nt, Artificial Sequence
  Description of Artificial Sequence: Synthetic oligonucleotide
ggcacuaggaagggcagaa

SEQ ID NO: 383572 - RNA, 19 nt, Artificial Sequence
  Description of Artificial Sequence: Synthetic oligonucleotide
gccauuauauuuuggcauu

SEQ ID NO: 383573 - RNA, 19 nt, Artificial Sequence
  Description of Artificial Sequence: Synthetic oligonucleotide
cagauacgaugaacucuga

SEQ ID NO: 383574 - RNA, 19 nt, Artificial Sequence
  Description of Artificial Sequence: Synthetic oligonucleotide
gcaauaaaccucacucucu

SEQ ID NO: 383575 - RNA, 19 nt, Artificial Sequence
  Description of Artificial Sequence: Synthetic oligonucleotide
caccucuccccagauucuc

SEQ ID NO: 383576 - RNA, 19 nt, Artificial Sequence
  Description of Artificial Sequence: Synthetic oligonucleotide
gccguaucugauguaauua

SEQ ID NO: 383577 - RNA, 19 nt, Artificial Sequence
  Description of Artificial Sequence: Synthetic oligonucleotide
gucaaggauagaagaugcu

SEQ ID NO: 383578 - RNA, 19 nt, Artificial Sequence
  Description of Artificial Sequence: Synthetic oligonucleotide
cgaggcucgggcugagugg

SEQ ID NO: 383579 - RNA, 19 nt, Artificial Sequence
  Description of Artificial Sequence: Synthetic oligonucleotide
cagaaccgccagcucccac

SEQ ID NO: 383580 - RNA, 19 nt, Artificial Sequence
  Description of Artificial Sequence: Synthetic oligonucleotide
auccuacuguuuagucuga

SEQ ID NO: 383581 - RNA, 19 nt, Artificial Sequence
  Description of Artificial Sequence: Synthetic oligonucleotide
guagguaggaaggcugcau

SEQ ID NO: 383582 - RNA, 19 nt, Artificial Sequence
  Description of Artificial Sequence: Synthetic oligonucleotide
gguuaagcccaaagcaggu

SEQ ID NO: 383583 - RNA, 19 nt, Artificial Sequence
  Description of Artificial Sequence: Synthetic oligonucleotide
ccucaccuuguaaggagca

SEQ ID NO: 383584 - RNA, 19 nt, Artificial Sequence
  Description of Artificial Sequence: Synthetic oligonucleotide
ccggcacuaggaagggcag

SEQ ID NO: 383585 - RNA, 19 nt, Artificial Sequence
  Description of Artificial Sequence: Synthetic oligonucleotide
gcacuaggaagggcagaag

SEQ ID NO: 383586 - RNA, 19 nt, Artificial Sequence
  Description of Artificial Sequence: Synthetic oligonucleotide
ccacuaguuccacuucuga

SEQ ID NO: 383587 - RNA, 19 nt, Artificial Sequence
  Description of Artificial Sequence: Synthetic oligonucleotide
augugcgccccggcacuag

SEQ ID NO: 383588 - RNA, 19 nt, Artificial Sequence
  Description of Artificial Sequence: Synthetic oligonucleotide
cagagccaagccaauccau

SEQ ID NO: 383589 - RNA, 19 nt, Artificial Sequence
  Description of Artificial Sequence: Synthetic oligonucleotide
gccaauccaucccuugcua

SEQ ID NO: 383590 - RNA, 19 nt, Artificial Sequence
  Description of Artificial Sequence: Synthetic oligonucleotide
guuaagcccaaagcagguu

SEQ ID NO: 383591 - RNA, 19 nt, Artificial Sequence
  Description of Artificial Sequence: Synthetic oligonucleotide
ugcuaggguuaagcccaaa

SEQ ID NO: 383592 - RNA, 19 nt, Artificial Sequence
  Description of Artificial Sequence: Synthetic oligonucleotide
gcgccccggcacuaggaag

SEQ ID NO: 383593 - RNA, 19 nt, Artificial Sequence
  Description of Artificial Sequence: Synthetic oligonucleotide
guacccucuugcccuuucu

SEQ ID NO: 383594 - RNA, 19 nt, Artificial Sequence
  Description of Artificial Sequence: Synthetic oligonucleotide
aggccguaucugauguaau

SEQ ID NO: 383595 - RNA, 19 nt, Artificial Sequence
  Description of Artificial Sequence: Synthetic oligonucleotide
aggcugcauuuaaugcuaa

SEQ ID NO: 383596 - RNA, 19 nt, Artificial Sequence
  Description of Artificial Sequence: Synthetic oligonucleotide
ccguaucugauguaauuau

SEQ ID NO: 383597 - RNA, 19 nt, Artificial Sequence
  Description of Artificial Sequence: Synthetic oligonucleotide
cgccauuauauuuuggcau

SEQ ID NO: 383598 - RNA, 19 nt, Artificial Sequence
  Description of Artificial Sequence: Synthetic oligonucleotide
caaggccguaucugaugua

SEQ ID NO: 383599 - RNA, 19 nt, Artificial Sequence
  Description of Artificial Sequence: Synthetic oligonucleotide
ccaucgcaauaaaccucac

SEQ ID NO: 383600 - RNA, 19 nt, Artificial Sequence
  Description of Artificial Sequence: Synthetic oligonucleotide
gccaauccuacuguuuagu

SEQ ID NO: 383601 - RNA, 19 nt, Artificial Sequence
  Description of Artificial Sequence: Synthetic oligonucleotide
ucgggcugagugggauuau

SEQ ID NO: 383602 - RNA, 19 nt, Artificial Sequence
  Description of Artificial Sequence: Synthetic oligonucleotide
ccgugaaauggcacaaggu

SEQ ID NO: 383603 - RNA, 19 nt, Artificial Sequence
  Description of Artificial Sequence: Synthetic oligonucleotide
ccacccagugaggcuauug

SEQ ID NO: 383604 - RNA, 19 nt, Artificial Sequence
  Description of Artificial Sequence: Synthetic oligonucleotide
gcuugcuacuagacuggga

SEQ ID NO: 383605 - RNA, 19 nt, Artificial Sequence
  Description of Artificial Sequence: Synthetic oligonucleotide
ugggaacagucaggcuguu

SEQ ID NO: 383606 - RNA, 19 nt, Artificial Sequence
  Description of Artificial Sequence: Synthetic oligonucleotide
gagguucagagaaguccuu

SEQ ID NO: 383607 - RNA, 19 nt, Artificial Sequence
  Description of Artificial Sequence: Synthetic oligonucleotide
augcuaggguuaagcccaa

SEQ ID NO: 383608 - RNA, 19 nt, Artificial Sequence
  Description of Artificial Sequence: Synthetic oligonucleotide
ggcugcauuuaaugcuaau

SEQ ID NO: 383609 - RNA, 19 nt, Artificial Sequence
  Description of Artificial Sequence: Synthetic oligonucleotide
cucaccuuguaaggagcau

SEQ ID NO: 383610 - RNA, 19 nt, Artificial Sequence
  Description of Artificial Sequence: Synthetic oligonucleotide
cguaucugauguaauuauu

SEQ ID NO: 383611 - RNA, 19 nt, Artificial Sequence
  Description of Artificial Sequence: Synthetic oligonucleotide
caugugcgccccggcacua

SEQ ID NO: 383612 - RNA, 19 nt, Artificial Sequence
  Description of Artificial Sequence: Synthetic oligonucleotide
gcgaugguucucagaagau

SEQ ID NO: 383613 - RNA, 19 nt, Artificial Sequence
  Description of Artificial Sequence: Synthetic oligonucleotide
ccgagucucucuuccuggu

SEQ ID NO: 383614 - RNA, 19 nt, Artificial Sequence
  Description of Artificial Sequence: Synthetic oligonucleotide
cagcucccaccuggaaugu

SEQ ID NO: 383615 - RNA, 19 nt, Artificial Sequence
  Description of Artificial Sequence: Synthetic oligonucleotide
gaguacccucuugcccuuu

SEQ ID NO: 383616 - RNA, 19 nt, Artificial Sequence
  Description of Artificial Sequence: Synthetic oligonucleotide
ccuacauaaccaggugguu

SEQ ID NO: 383617 - RNA, 19 nt, Artificial Sequence
  Description of Artificial Sequence: Synthetic oligonucleotide
cacgaggcucgggcugagu

SEQ ID NO: 383618 - RNA, 19 nt, Artificial Sequence
  Description of Artificial Sequence: Synthetic oligonucleotide
cggcacuaggaagggcaga

SEQ ID NO: 383619 - RNA, 19 nt, Artificial Sequence
  Description of Artificial Sequence: Synthetic oligonucleotide
aaugauaugauauguaacg

SEQ ID NO: 383620 - RNA, 19 nt, Artificial Sequence
  Description of Artificial Sequence: Synthetic oligonucleotide
  modified_base (7)..(7): a, c, u, g, unknown or other
auuaaanaaguuuuguguc

SEQ ID NO: 383621 - RNA, 19 nt, Artificial Sequence
  Description of Artificial Sequence: Synthetic oligonucleotide
uaaacaaugucuccgagcg

SEQ ID NO: 383622 - RNA, 19 nt, Artificial Sequence
  Description of Artificial Sequence: Synthetic oligonucleotide
ucugagauauccaugaggg

SEQ ID NO: 383623 - RNA, 19 nt, Artificial Sequence
  Description of Artificial Sequence: Synthetic oligonucleotide
  modified_base (8)..(8): a, c, u, g, unknown or other
uauuaaanaaguuuugugu

SEQ ID NO: 383624 - RNA, 19 nt, Artificial Sequence
  Description of Artificial Sequence: Synthetic oligonucleotide
uuaaacuugacacuaccag

SEQ ID NO: 383625 - RNA, 19 nt, Artificial Sequence
  Description of Artificial Sequence: Synthetic oligonucleotide
gacacgauugcucuuaugg

SEQ ID NO: 383626 - RNA, 19 nt, Artificial Sequence
  Description of Artificial Sequence: Synthetic oligonucleotide
ugagauauccaugagggcg

SEQ ID NO: 383627 - RNA, 19 nt, Artificial Sequence
  Description of Artificial Sequence: Synthetic oligonucleotide
aauuuccgcagucacuugc

SEQ ID NO: 383628 - RNA, 19 nt, Artificial Sequence
  Description of Artificial Sequence: Synthetic oligonucleotide
uuugcaucuuuccuuaccg

SEQ ID NO: 383629 - RNA, 19 nt, Artificial Sequence
  Description of Artificial Sequence: Synthetic oligonucleotide
uaugauauguaacguacag

SEQ ID NO: 383630 - RNA, 19 nt, Artificial Sequence
  Description of Artificial Sequence: Synthetic oligonucleotide
uuaggaugucucuuuaucg

SEQ ID NO: 383631 - RNA, 19 nt, Artificial Sequence
  Description of Artificial Sequence: Synthetic oligonucleotide
aaaugauaugauauguaac

SEQ ID NO: 383632 - RNA, 19 nt, Artificial Sequence
  Description of Artificial Sequence: Synthetic oligonucleotide
aaaaguucgguugcagagc

SEQ ID NO: 383633 - RNA, 19 nt, Artificial Sequence
  Description of Artificial Sequence: Synthetic oligonucleotide
auauguaacguacaggcgu

SEQ ID NO: 383634 - RNA, 19 nt, Artificial Sequence
  Description of Artificial Sequence: Synthetic oligonucleotide
uucacugcaugcuugcucg

SEQ ID NO: 383635 - RNA, 19 nt, Artificial Sequence
  Description of Artificial Sequence: Synthetic oligonucleotide
ugacauauggguuagccgu

SEQ ID NO: 383636 - RNA, 19 nt, Artificial Sequence
  Description of Artificial Sequence: Synthetic oligonucleotide
  modified_base (3)..(3): a, c, u, g, unknown or other
aanaaguuuugugucugac

SEQ ID NO: 383637 - RNA, 19 nt, Artificial Sequence
  Description of Artificial Sequence: Synthetic oligonucleotide
  modified_base (6)..(6): a, c, u, g, unknown or other
uuaaanaaguuuugugucu

SEQ ID NO: 383638 - RNA, 19 nt, Artificial Sequence
  Description of Artificial Sequence: Synthetic oligonucleotide
aaguccagauacgauacgc

SEQ ID NO: 383639 - RNA, 19 nt, Artificial Sequence
  Description of Artificial Sequence: Synthetic oligonucleotide
ucugacuucuccgacaccg

SEQ ID NO: 383640 - RNA, 19 nt, Artificial Sequence
  Description of Artificial Sequence: Synthetic oligonucleotide
uucucaagugacuugagga

SEQ ID NO: 383641 - RNA, 19 nt, Artificial Sequence
  Description of Artificial Sequence: Synthetic oligonucleotide
gauaugauauguaacguac

SEQ ID NO: 383642 - RNA, 19 nt, Artificial Sequence
  Description of Artificial Sequence: Synthetic oligonucleotide
  modified_base (2)..(2): a, c, u, g, unknown or other
anaaguuuugugucugaca

SEQ ID NO: 383643 - RNA, 19 nt, Artificial Sequence
  Description of Artificial Sequence: Synthetic oligonucleotide
acuugacacuaccaggucc

SEQ ID NO: 383644 - RNA, 19 nt, Artificial Sequence
  Description of Artificial Sequence: Synthetic oligonucleotide
agccauaacgguuauuggg

SEQ ID NO: 383645 - RNA, 19 nt, Artificial Sequence
  Description of Artificial Sequence: Synthetic oligonucleotide
uguguaacuagcaccauuc

SEQ ID NO: 383646 - RNA, 19 nt, Artificial Sequence
  Description of Artificial Sequence: Synthetic oligonucleotide
acagcuuuugauccgaaug

SEQ ID NO: 383647 - RNA, 19 nt, Artificial Sequence
  Description of Artificial Sequence: Synthetic oligonucleotide
uguacguggaggcaguucu

SEQ ID NO: 383648 - RNA, 19 nt, Artificial Sequence
  Description of Artificial Sequence: Synthetic oligonucleotide
uccugcauauaaaagcuca

SEQ ID NO: 383649 - RNA, 19 nt, Artificial Sequence
  Description of Artificial Sequence: Synthetic oligonucleotide
auuucagcggcucaggcca

SEQ ID NO: 383650 - RNA, 19 nt, Artificial Sequence
  Description of Artificial Sequence: Synthetic oligonucleotide
uguauuugccuucugccgu

SEQ ID NO: 383651 - RNA, 19 nt, Artificial Sequence
  Description of Artificial Sequence: Synthetic oligonucleotide
gguccugugaccuuuauug

SEQ ID NO: 383652 - RNA, 19 nt, Artificial Sequence
  Description of Artificial Sequence: Synthetic oligonucleotide
uacgauacgcaguucagca

SEQ ID NO: 383653 - RNA, 19 nt, Artificial Sequence
  Description of Artificial Sequence: Synthetic oligonucleotide
uuaccgcuaaacaaugucu

SEQ ID NO: 383654 - RNA, 19 nt, Artificial Sequence
  Description of Artificial Sequence: Synthetic oligonucleotide
ugaguaucugggcuuugcg

SEQ ID NO: 383655 - RNA, 19 nt, Artificial Sequence
  Description of Artificial Sequence: Synthetic oligonucleotide
uauguaacguacaggcgug

SEQ ID NO: 383656 - RNA, 19 nt, Artificial Sequence
  Description of Artificial Sequence: Synthetic oligonucleotide
agcaacaaaggagagacug

SEQ ID NO: 383657 - RNA, 19 nt, Artificial Sequence
  Description of Artificial Sequence: Synthetic oligonucleotide
agauacgauacgcaguuca

SEQ ID NO: 383658 - RNA, 19 nt, Artificial Sequence
  Description of Artificial Sequence: Synthetic oligonucleotide
gaguaucugggcuuugcgg

SEQ ID NO: 383659 - RNA, 19 nt, Artificial Sequence
  Description of Artificial Sequence: Synthetic oligonucleotide
caguucugaacugagaggc

SEQ ID NO: 383660 - RNA, 19 nt, Artificial Sequence
  Description of Artificial Sequence: Synthetic oligonucleotide
accgcuaaacaaugucucc

SEQ ID NO: 383661 - RNA, 19 nt, Artificial Sequence
  Description of Artificial Sequence: Synthetic oligonucleotide
uuacaaggauccaacauuu

SEQ ID NO: 383662 - RNA, 19 nt, Artificial Sequence
  Description of Artificial Sequence: Synthetic oligonucleotide
gauauguaacguacaggcg

SEQ ID NO: 383663 - RNA, 19 nt, Artificial Sequence
  Description of Artificial Sequence: Synthetic oligonucleotide
aacuugacacuaccagguc

SEQ ID NO: 383664 - RNA, 19 nt, Artificial Sequence
  Description of Artificial Sequence: Synthetic oligonucleotide
ugauaugauauguaacgua

SEQ ID NO: 383665 - RNA, 19 nt, Artificial Sequence
  Description of Artificial Sequence: Synthetic oligonucleotide
acacgauugcucuuauggg

SEQ ID NO: 383666 - RNA, 19 nt, Artificial Sequence
  Description of Artificial Sequence: Synthetic oligonucleotide
uugaggauaucuacacccc

SEQ ID NO: 383667 - RNA, 19 nt, Artificial Sequence
  Description of Artificial Sequence: Synthetic oligonucleotide
uuccuuaccgcuaaacaau

SEQ ID NO: 383668 - RNA, 19 nt, Artificial Sequence
  Description of Artificial Sequence: Synthetic oligonucleotide
accuuuaagaaguggccag

SEQ ID NO: 383669 - RNA, 19 nt, Artificial Sequence
  Description of Artificial Sequence: Synthetic oligonucleotide
gugacauauggguuagccg

SEQ ID NO: 383670 - RNA, 19 nt, Artificial Sequence
  Description of Artificial Sequence: Synthetic oligonucleotide
augauauguaacguacagg

SEQ ID NO: 383671 - RNA, 19 nt, Artificial Sequence
  Description of Artificial Sequence: Synthetic oligonucleotide
auacgauacgcaguucagc

SEQ ID NO: 383672 - RNA, 19 nt, Artificial Sequence
  Description of Artificial Sequence: Synthetic oligonucleotide
ucaagugacuugaggauau

SEQ ID NO: 383673 - RNA, 19 nt, Artificial Sequence
  Description of Artificial Sequence: Synthetic oligonucleotide
cuuaccgcuaaacaauguc

SEQ ID NO: 383674 - RNA, 19 nt, Artificial Sequence
  Description of Artificial Sequence: Synthetic oligonucleotide
uguguacccgcuccugagg

SEQ ID NO: 383675 - RNA, 19 nt, Artificial Sequence
  Description of Artificial Sequence: Synthetic oligonucleotide
gcaacuucguaauuuuagg

SEQ ID NO: 383676 - RNA, 19 nt, Artificial Sequence
  Description of Artificial Sequence: Synthetic oligonucleotide
uccagauacgauacgcagu

SEQ ID NO: 383677 - RNA, 19 nt, Artificial Sequence
  Description of Artificial Sequence: Synthetic oligonucleotide
ucucaagugacuugaggau

SEQ ID NO: 383678 - RNA, 19 nt, Artificial Sequence
  Description of Artificial Sequence: Synthetic oligonucleotide
uccuuaccgcuaaacaaug

SEQ ID NO: 383679 - RNA, 19 nt, Artificial Sequence
  Description of Artificial Sequence: Synthetic oligonucleotide
uuggacgacucgcucagug

SEQ ID NO: 383680 - RNA, 19 nt, Artificial Sequence
  Description of Artificial Sequence: Synthetic oligonucleotide
uaccgcuaaacaaugucuc

SEQ ID NO: 383681 - RNA, 19 nt, Artificial Sequence
  Description of Artificial Sequence: Synthetic oligonucleotide
ggcacuauugcuucucuag

SEQ ID NO: 383682 - RNA, 19 nt, Artificial Sequence
  Description of Artificial Sequence: Synthetic oligonucleotide
cuuuaagcgccuucucccc

SEQ ID NO: 383683 - RNA, 19 nt, Artificial Sequence
  Description of Artificial Sequence: Synthetic oligonucleotide
gauacgauacgcaguucag

SEQ ID NO: 383684 - RNA, 19 nt, Artificial Sequence
  Description of Artificial Sequence: Synthetic oligonucleotide
uccguagcugguuacuuga

SEQ ID NO: 383685 - RNA, 19 nt, Artificial Sequence
  Description of Artificial Sequence: Synthetic oligonucleotide
ggcacaaucgcuacaaaag

SEQ ID NO: 383686 - RNA, 19 nt, Artificial Sequence
  Description of Artificial Sequence: Synthetic oligonucleotide
ucuagcucggucacauaga

SEQ ID NO: 383687 - RNA, 19 nt, Artificial Sequence
  Description of Artificial Sequence: Synthetic oligonucleotide
cagagcuugcauuggaaug

SEQ ID NO: 383688 - RNA, 19 nt, Artificial Sequence
  Description of Artificial Sequence: Synthetic oligonucleotide
uguggguuccaguuagacu

SEQ ID NO: 383689 - RNA, 19 nt, Artificial Sequence
  Description of Artificial Sequence: Synthetic oligonucleotide
uguguaagcugaugcuggc

SEQ ID NO: 383690 - RNA, 19 nt, Artificial Sequence
  Description of Artificial Sequence: Synthetic oligonucleotide
accccgucgaguccuagac

SEQ ID NO: 383691 - RNA, 19 nt, Artificial Sequence
  Description of Artificial Sequence: Synthetic oligonucleotide
cuugcucgcaaaaguucgg

SEQ ID NO: 383692 - RNA, 19 nt, Artificial Sequence
  Description of Artificial Sequence: Synthetic oligonucleotide
ugcuugcucgcaaaaguuc

SEQ ID NO: 383693 - RNA, 19 nt, Artificial Sequence
  Description of Artificial Sequence: Synthetic oligonucleotide
cuuuugauccgaaugagau

SEQ ID NO: 383694 - RNA, 19 nt, Artificial Sequence
  Description of Artificial Sequence: Synthetic oligonucleotide
auaacgguuauugggcgug

SEQ ID NO: 383695 - RNA, 19 nt, Artificial Sequence
  Description of Artificial Sequence: Synthetic oligonucleotide
gagggugcaccguucuggg

SEQ ID NO: 383696 - RNA, 19 nt, Artificial Sequence
  Description of Artificial Sequence: Synthetic oligonucleotide
auguccugugucgagguuc

SEQ ID NO: 383697 - RNA, 19 nt, Artificial Sequence
  Description of Artificial Sequence: Synthetic oligonucleotide
ugccccacuauuuccaaaa

SEQ ID NO: 383698 - RNA, 19 nt, Artificial Sequence
  Description of Artificial Sequence: Synthetic oligonucleotide
guuagccguuuucuggucc

SEQ ID NO: 383699 - RNA, 19 nt, Artificial Sequence
  Description of Artificial Sequence: Synthetic oligonucleotide
ucguaauuuuaggaugucu

SEQ ID NO: 383700 - RNA, 19 nt, Artificial Sequence
  Description of Artificial Sequence: Synthetic oligonucleotide
ccuuuaagcgccuucuccc

SEQ ID NO: 383701 - RNA, 19 nt, Artificial Sequence
  Description of Artificial Sequence: Synthetic oligonucleotide
cugauguacguggaggcag

SEQ ID NO: 383702 - RNA, 19 nt, Artificial Sequence
  Description of Artificial Sequence: Synthetic oligonucleotide
gauggccguggacacagug

SEQ ID NO: 383703 - RNA, 19 nt, Artificial Sequence
  Description of Artificial Sequence: Synthetic oligonucleotide
aaacaaugucuccgagcgu

SEQ ID NO: 383704 - RNA, 19 nt, Artificial Sequence
  Description of Artificial Sequence: Synthetic oligonucleotide
ucuuuccuuaccgcuaaac

SEQ ID NO: 383705 - RNA, 19 nt, Artificial Sequence
  Description of Artificial Sequence: Synthetic oligonucleotide
uuauugggcgugacauaug

SEQ ID NO: 383706 - RNA, 19 nt, Artificial Sequence
  Description of Artificial Sequence: Synthetic oligonucleotide
agcuuuugauccgaaugag

SEQ ID NO: 383707 - RNA, 19 nt, Artificial Sequence
  Description of Artificial Sequence: Synthetic oligonucleotide
aggcacaaucgcuacaaaa

SEQ ID NO: 383708 - RNA, 19 nt, Artificial Sequence
  Description of Artificial Sequence: Synthetic oligonucleotide
aacgguuauugggcgugac

SEQ ID NO: 383709 - RNA, 19 nt, Artificial Sequence
  Description of Artificial Sequence: Synthetic oligonucleotide
uaacguacaggcgugugua

SEQ ID NO: 383710 - RNA, 19 nt, Artificial Sequence
  Description of Artificial Sequence: Synthetic oligonucleotide
gauguguacccgcuccuga

SEQ ID NO: 383711 - RNA, 19 nt, Artificial Sequence
  Description of Artificial Sequence: Synthetic oligonucleotide
auaacaugcacaggucaga

SEQ ID NO: 383712 - RNA, 19 nt, Artificial Sequence
  Description of Artificial Sequence: Synthetic oligonucleotide
ugggguacccgccccacga

SEQ ID NO: 383713 - RNA, 19 nt, Artificial Sequence
  Description of Artificial Sequence: Synthetic oligonucleotide
cuuuaucgcugcuguuugc

SEQ ID NO: 383714 - RNA, 19 nt, Artificial Sequence
  Description of Artificial Sequence: Synthetic oligonucleotide
uguaacguacaggcgugug

SEQ ID NO: 383715 - RNA, 19 nt, Artificial Sequence
  Description of Artificial Sequence: Synthetic oligonucleotide
ugccgucucucgaaggcug

SEQ ID NO: 383716 - RNA, 19 nt, Artificial Sequence
  Description of Artificial Sequence: Synthetic oligonucleotide
ugugcccggcagcugguag

SEQ ID NO: 383717 - RNA, 19 nt, Artificial Sequence
  Description of Artificial Sequence: Synthetic oligonucleotide
caaguccagauacgauacg

SEQ ID NO: 383718 - RNA, 19 nt, Artificial Sequence
  Description of Artificial Sequence: Synthetic oligonucleotide
gcuugcucgcaaaaguucg

SEQ ID NO: 383719 - RNA, 19 nt, Artificial Sequence
  Description of Artificial Sequence: Synthetic oligonucleotide
guagugaauuuccgcaguc

SEQ ID NO: 383720 - RNA, 19 nt, Artificial Sequence
  Description of Artificial Sequence: Synthetic oligonucleotide
agacugauuucagcggcuc

SEQ ID NO: 383721 - RNA, 19 nt, Artificial Sequence
  Description of Artificial Sequence: Synthetic oligonucleotide
gccauaacgguuauugggc

SEQ ID NO: 383722 - RNA, 19 nt, Artificial Sequence
  Description of Artificial Sequence: Synthetic oligonucleotide
guugcagagcuugcauugg

SEQ ID NO: 383723 - RNA, 19 nt, Artificial Sequence
  Description of Artificial Sequence: Synthetic oligonucleotide
ugauccgaaugagaugccu

SEQ ID NO: 383724 - RNA, 19 nt, Artificial Sequence
  Description of Artificial Sequence: Synthetic oligonucleotide
agacuggcgccccuuucuc

SEQ ID NO: 383725 - RNA, 19 nt, Artificial Sequence
  Description of Artificial Sequence: Synthetic oligonucleotide
uugauccgaaugagaugcc

SEQ ID NO: 383726 - RNA, 19 nt, Artificial Sequence
  Description of Artificial Sequence: Synthetic oligonucleotide
gaauuuccgcagucacuug

SEQ ID NO: 383727 - RNA, 19 nt, Artificial Sequence
  Description of Artificial Sequence: Synthetic oligonucleotide
gcgagaacuuuggagacgg

SEQ ID NO: 383728 - RNA, 19 nt, Artificial Sequence
  Description of Artificial Sequence: Synthetic oligonucleotide
ugccgugugucuugcuaag

SEQ ID NO: 383729 - RNA, 19 nt, Artificial Sequence
  Description of Artificial Sequence: Synthetic oligonucleotide
guaucgugggagcugccac

SEQ ID NO: 383730 - RNA, 19 nt, Artificial Sequence
  Description of Artificial Sequence: Synthetic oligonucleotide
cugauuucagcggcucagg

SEQ ID NO: 383731 - RNA, 19 nt, Artificial Sequence
  Description of Artificial Sequence: Synthetic oligonucleotide
ccauaacgguuauugggcg

SEQ ID NO: 383732 - RNA, 19 nt, Artificial Sequence
  Description of Artificial Sequence: Synthetic oligonucleotide
acgauugcucuuauggggu

SEQ ID NO: 383733 - RNA, 19 nt, Artificial Sequence
  Description of Artificial Sequence: Synthetic oligonucleotide
cuugacacuaccagguccu

SEQ ID NO: 383734 - RNA, 19 nt, Artificial Sequence
  Description of Artificial Sequence: Synthetic oligonucleotide
aacguacaggcguguguaa

SEQ ID NO: 383735 - RNA, 19 nt, Artificial Sequence
  Description of Artificial Sequence: Synthetic oligonucleotide
cccgucgaguccuagacag

SEQ ID NO: 383736 - RNA, 19 nt, Artificial Sequence
  Description of Artificial Sequence: Synthetic oligonucleotide
gcuaaacaaugucuccgag

SEQ ID NO: 383737 - RNA, 19 nt, Artificial Sequence
  Description of Artificial Sequence: Synthetic oligonucleotide
cagugcaaccucaguggcc

SEQ ID NO: 383738 - RNA, 19 nt, Artificial Sequence
  Description of Artificial Sequence: Synthetic oligonucleotide
ugggcgugacauauggguu

SEQ ID NO: 383739 - RNA, 19 nt, Artificial Sequence
  Description of Artificial Sequence: Synthetic oligonucleotide
aaccccgucgaguccuaga

SEQ ID NO: 383740 - RNA, 19 nt, Artificial Sequence
  Description of Artificial Sequence: Synthetic oligonucleotide
ucaggcgacuugccgugug

SEQ ID NO: 383741 - RNA, 19 nt, Artificial Sequence
  Description of Artificial Sequence: Synthetic oligonucleotide
acgguuauugggcgugaca

SEQ ID NO: 383742 - RNA, 19 nt, Artificial Sequence
  Description of Artificial Sequence: Synthetic oligonucleotide
agggugcaccguucugggc

SEQ ID NO: 383743 - RNA, 19 nt, Artificial Sequence
  Description of Artificial Sequence: Synthetic oligonucleotide
agcggucgauggcauccgc

SEQ ID NO: 383744 - RNA, 19 nt, Artificial Sequence
  Description of Artificial Sequence: Synthetic oligonucleotide
acguacaggcguguguaag

SEQ ID NO: 383745 - RNA, 19 nt, Artificial Sequence
  Description of Artificial Sequence: Synthetic oligonucleotide
augccuuuaagcgccuucu

SEQ ID NO: 383746 - RNA, 19 nt, Artificial Sequence
  Description of Artificial Sequence: Synthetic oligonucleotide
gcacuauugcuucucuagc

SEQ ID NO: 383747 - RNA, 19 nt, Artificial Sequence
  Description of Artificial Sequence: Synthetic oligonucleotide
uccuaaccccgucgagucc

SEQ ID NO: 383748 - RNA, 19 nt, Artificial Sequence
  Description of Artificial Sequence: Synthetic oligonucleotide
acgacucgcucagugcaac

SEQ ID NO: 383749 - RNA, 19 nt, Artificial Sequence
  Description of Artificial Sequence: Synthetic oligonucleotide
aucugacuaaguggcagcu

SEQ ID NO: 383750 - RNA, 19 nt, Artificial Sequence
  Description of Artificial Sequence: Synthetic oligonucleotide
uggcauaagauggcuguau

SEQ ID NO: 383751 - RNA, 19 nt, Artificial Sequence
  Description of Artificial Sequence: Synthetic oligonucleotide
guuauugggcgugacauau

SEQ ID NO: 383752 - RNA, 19 nt, Artificial Sequence
  Description of Artificial Sequence: Synthetic oligonucleotide
uugcucgcaaaaguucggu

SEQ ID NO: 383753 - RNA, 19 nt, Artificial Sequence
  Description of Artificial Sequence: Synthetic oligonucleotide
cuucugccgucucucgaag

SEQ ID NO: 383754 - RNA, 19 nt, Artificial Sequence
  Description of Artificial Sequence: Synthetic oligonucleotide
uggcaacuucguaauuuua

SEQ ID NO: 383755 - RNA, 19 nt, Artificial Sequence
  Description of Artificial Sequence: Synthetic oligonucleotide
ucuuguuggcgagaacuuu

SEQ ID NO: 383756 - RNA, 19 nt, Artificial Sequence
  Description of Artificial Sequence: Synthetic oligonucleotide
agacacgauugcucuuaug

SEQ ID NO: 383757 - RNA, 19 nt, Artificial Sequence
  Description of Artificial Sequence: Synthetic oligonucleotide
acgauacgcaguucagcaa

SEQ ID NO: 383758 - RNA, 19 nt, Artificial Sequence
  Description of Artificial Sequence: Synthetic oligonucleotide
ugccuuuaagcgccuucuc

SEQ ID NO: 383759 - RNA, 19 nt, Artificial Sequence
  Description of Artificial Sequence: Synthetic oligonucleotide
caccuuuaagaaguggcca

SEQ ID NO: 383760 - RNA, 19 nt, Artificial Sequence
  Description of Artificial Sequence: Synthetic oligonucleotide
uguacccgcuccugaggac

SEQ ID NO: 383761 - RNA, 19 nt, Artificial Sequence
  Description of Artificial Sequence: Synthetic oligonucleotide
ccgcuaaacaaugucuccg

SEQ ID NO: 383762 - RNA, 19 nt, Artificial Sequence
  Description of Artificial Sequence: Synthetic oligonucleotide
aaacugccauguguaacua

SEQ ID NO: 383763 - RNA, 19 nt, Artificial Sequence
  Description of Artificial Sequence: Synthetic oligonucleotide
ggcauaagauggcuguauc

SEQ ID NO: 383764 - RNA, 19 nt, Artificial Sequence
  Description of Artificial Sequence: Synthetic oligonucleotide
guaacguacaggcgugugu

SEQ ID NO: 383765 - RNA, 19 nt, Artificial Sequence
  Description of Artificial Sequence: Synthetic oligonucleotide
cauagaucaggugguccuc

SEQ ID NO: 383766 - RNA, 19 nt, Artificial Sequence
  Description of Artificial Sequence: Synthetic oligonucleotide
ggggcgguaagucucccug

SEQ ID NO: 383767 - RNA, 19 nt, Artificial Sequence
  Description of Artificial Sequence: Synthetic oligonucleotide
cccgcagguacugauagag

SEQ ID NO: 383768 - RNA, 19 nt, Artificial Sequence
  Description of Artificial Sequence: Synthetic oligonucleotide
uagcucggucacauagauc

SEQ ID NO: 383769 - RNA, 19 nt, Artificial Sequence
  Description of Artificial Sequence: Synthetic oligonucleotide
cgugacauauggguuagcc

SEQ ID NO: 383770 - RNA, 19 nt, Artificial Sequence
  Description of Artificial Sequence: Synthetic oligonucleotide
gguacccgccccacgaggg

SEQ ID NO: 383771 - RNA, 19 nt, Artificial Sequence
  Description of Artificial Sequence: Synthetic oligonucleotide
gcugguuacuugacauugg

SEQ ID NO: 383772 - RNA, 19 nt, Artificial Sequence
  Description of Artificial Sequence: Synthetic oligonucleotide
ugcguggaugcugggguac

SEQ ID NO: 383773 - RNA, 19 nt, Artificial Sequence
  Description of Artificial Sequence: Synthetic oligonucleotide
cgauacgcaguucagcaac

SEQ ID NO: 383774 - RNA, 19 nt, Artificial Sequence
  Description of Artificial Sequence: Synthetic oligonucleotide
uccgaaugagaugccuuua

SEQ ID NO: 383775 - RNA, 19 nt, Artificial Sequence
  Description of Artificial Sequence: Synthetic oligonucleotide
uaacgguuauugggcguga

SEQ ID NO: 383776 - RNA, 19 nt, Artificial Sequence
  Description of Artificial Sequence: Synthetic oligonucleotide
aggcgacuugccguguguc

SEQ ID NO: 383777 - RNA, 19 nt, Artificial Sequence
  Description of Artificial Sequence: Synthetic oligonucleotide
gcuggcauaagauggcugu

SEQ ID NO: 383778 - RNA, 19 nt, Artificial Sequence
  Description of Artificial Sequence: Synthetic oligonucleotide
gguuccaguuagacuggcg

SEQ ID NO: 383779 - RNA, 19 nt, Artificial Sequence
  Description of Artificial Sequence: Synthetic oligonucleotide
cguacaggcguguguaagc

SEQ ID NO: 383780 - RNA, 19 nt, Artificial Sequence
  Description of Artificial Sequence: Synthetic oligonucleotide
gcaaccucaguggccaugc

SEQ ID NO: 383781 - RNA, 19 nt, Artificial Sequence
  Description of Artificial Sequence: Synthetic oligonucleotide
acgagggugcaccguucug

SEQ ID NO: 383782 - RNA, 19 nt, Artificial Sequence
  Description of Artificial Sequence: Synthetic oligonucleotide
gccuagugcagcacgauga

SEQ ID NO: 383783 - RNA, 19 nt, Artificial Sequence
  Description of Artificial Sequence: Synthetic oligonucleotide
ugguagccauaacgguuau

SEQ ID NO: 383784 - RNA, 19 nt, Artificial Sequence
  Description of Artificial Sequence: Synthetic oligonucleotide
cauaacgguuauugggcgu

SEQ ID NO: 383785 - RNA, 19 nt, Artificial Sequence
  Description of Artificial Sequence: Synthetic oligonucleotide
gguagugaauuuccgcagu

SEQ ID NO: 383786 - RNA, 19 nt, Artificial Sequence
  Description of Artificial Sequence: Synthetic oligonucleotide
ggcgugacauauggguuag

SEQ ID NO: 383787 - RNA, 19 nt, Artificial Sequence
  Description of Artificial Sequence: Synthetic oligonucleotide
cuagcucggucacauagau

SEQ ID NO: 383788 - RNA, 19 nt, Artificial Sequence
  Description of Artificial Sequence: Synthetic oligonucleotide
auguaacguacaggcgugu

SEQ ID NO: 383789 - RNA, 19 nt, Artificial Sequence
  Description of Artificial Sequence: Synthetic oligonucleotide
cuugaguaucugggcuuug

SEQ ID NO: 383790 - RNA, 19 nt, Artificial Sequence
  Description of Artificial Sequence: Synthetic oligonucleotide
ccucaaacugccaugugua

SEQ ID NO: 383791 - RNA, 19 nt, Artificial Sequence
  Description of Artificial Sequence: Synthetic oligonucleotide
guguaacuagcaccauucu

SEQ ID NO: 383792 - RNA, 19 nt, Artificial Sequence
  Description of Artificial Sequence: Synthetic oligonucleotide
auacgcaguucagcaacaa

SEQ ID NO: 383793 - RNA, 19 nt, Artificial Sequence
  Description of Artificial Sequence: Synthetic oligonucleotide
acauauggguuagccguuu

SEQ ID NO: 383794 - RNA, 19 nt, Artificial Sequence
  Description of Artificial Sequence: Synthetic oligonucleotide
cuuccuaaccccgucgagu

SEQ ID NO: 383795 - RNA, 19 nt, Artificial Sequence
  Description of Artificial Sequence: Synthetic oligonucleotide
aucgugggagcugccacau

SEQ ID NO: 383796 - RNA, 19 nt, Artificial Sequence
  Description of Artificial Sequence: Synthetic oligonucleotide
cguguguaagcugaugcug

SEQ ID NO: 383797 - RNA, 19 nt, Artificial Sequence
  Description of Artificial Sequence: Synthetic oligonucleotide
gaggcacaaucgcuacaaa

SEQ ID NO: 383798 - RNA, 19 nt, Artificial Sequence
  Description of Artificial Sequence: Synthetic oligonucleotide
uaaccccgucgaguccuag

SEQ ID NO: 383799 - RNA, 19 nt, Artificial Sequence
  Description of Artificial Sequence: Synthetic oligonucleotide
gauccgaaugagaugccuu

SEQ ID NO: 383800 - RNA, 19 nt, Artificial Sequence
  Description of Artificial Sequence: Synthetic oligonucleotide
cucuuuaucgcugcuguuu

SEQ ID NO: 383801 - RNA, 19 nt, Artificial Sequence
  Description of Artificial Sequence: Synthetic oligonucleotide
aggcguguguaagcugaug

SEQ ID NO: 383802 - RNA, 19 nt, Artificial Sequence
  Description of Artificial Sequence: Synthetic oligonucleotide
aguuagacuggcgccccuu

SEQ ID NO: 383803 - RNA, 19 nt, Artificial Sequence
  Description of Artificial Sequence: Synthetic oligonucleotide
ggcaauuuacaaggaucca

SEQ ID NO: 383804 - RNA, 19 nt, Artificial Sequence
  Description of Artificial Sequence: Synthetic oligonucleotide
caagugacuugaggauauc

SEQ ID NO: 383805 - RNA, 19 nt, Artificial Sequence
  Description of Artificial Sequence: Synthetic oligonucleotide
ggcuuccuaaccccgucga

SEQ ID NO: 383806 - RNA, 19 nt, Artificial Sequence
  Description of Artificial Sequence: Synthetic oligonucleotide
cgagggugcaccguucugg

SEQ ID NO: 383807 - RNA, 19 nt, Artificial Sequence
  Description of Artificial Sequence: Synthetic oligonucleotide
gguuagccguuuucugguc

SEQ ID NO: 383808 - RNA, 19 nt, Artificial Sequence
  Description of Artificial Sequence: Synthetic oligonucleotide
aucuuuccuuaccgcuaaa

SEQ ID NO: 383809 - RNA, 19 nt, Artificial Sequence
  Description of Artificial Sequence: Synthetic oligonucleotide
ccucaggcgacuugccgug

SEQ ID NO: 383810 - RNA, 19 nt, Artificial Sequence
  Description of Artificial Sequence: Synthetic oligonucleotide
gguuauugggcgugacaua

SEQ ID NO: 383811 - RNA, 19 nt, Artificial Sequence
  Description of Artificial Sequence: Synthetic oligonucleotide
gauauccaugagggcgcuc

SEQ ID NO: 383812 - RNA, 19 nt, Artificial Sequence
  Description of Artificial Sequence: Synthetic oligonucleotide
ugucuccgagcgugcccca

SEQ ID NO: 383813 - RNA, 19 nt, Artificial Sequence
  Description of Artificial Sequence: Synthetic oligonucleotide
ugcgggccucaaacugcca

SEQ ID NO: 383814 - RNA, 19 nt, Artificial Sequence
  Description of Artificial Sequence: Synthetic oligonucleotide
cacuugaguaucugggcuu

SEQ ID NO: 383815 - RNA, 19 nt, Artificial Sequence
  Description of Artificial Sequence: Synthetic oligonucleotide
gacgacucgcucagugcaa

SEQ ID NO: 383816 - RNA, 19 nt, Artificial Sequence
  Description of Artificial Sequence: Synthetic oligonucleotide
cagauacgauacgcaguuc

SEQ ID NO: 383817 - RNA, 19 nt, Artificial Sequence
  Description of Artificial Sequence: Synthetic oligonucleotide
ccaguuagacuggcgcccc

SEQ ID NO: 383818 - RNA, 19 nt, Artificial Sequence
  Description of Artificial Sequence: Synthetic oligonucleotide
gcagacacgauugcucuua

SEQ ID NO: 383819 - RNA, 19 nt, Artificial Sequence
  Description of Artificial Sequence: Synthetic oligonucleotide
gucgaguccuagacagcuc

SEQ ID NO: 383820 - RNA, 19 nt, Artificial Sequence
  Description of Artificial Sequence: Synthetic oligonucleotide
gacauauggguuagccguu

SEQ ID NO: 383821 - RNA, 19 nt, Artificial Sequence
  Description of Artificial Sequence: Synthetic oligonucleotide
ccagauacgauacgcaguu

SEQ ID NO: 383822 - RNA, 19 nt, Artificial Sequence
  Description of Artificial Sequence: Synthetic oligonucleotide
gggcgcucucccgaagagg

SEQ ID NO: 383823 - RNA, 19 nt, Artificial Sequence
  Description of Artificial Sequence: Synthetic oligonucleotide
gggguacccgccccacgag

SEQ ID NO: 383824 - RNA, 19 nt, Artificial Sequence
  Description of Artificial Sequence: Synthetic oligonucleotide
cgcuaaacaaugucuccga

SEQ ID NO: 383825 - RNA, 19 nt, Artificial Sequence
  Description of Artificial Sequence: Synthetic oligonucleotide
cugaagcccaggugcgucu

SEQ ID NO: 383826 - RNA, 19 nt, Artificial Sequence
  Description of Artificial Sequence: Synthetic oligonucleotide
guuagacuggcgccccuuu

SEQ ID NO: 383827 - RNA, 19 nt, Artificial Sequence
  Description of Artificial Sequence: Synthetic oligonucleotide
cgauugcucuuauggggug

SEQ ID NO: 383828 - RNA, 19 nt, Artificial Sequence
  Description of Artificial Sequence: Synthetic oligonucleotide
ggcgcucucccgaagaggu

SEQ ID NO: 383829 - RNA, 19 nt, Artificial Sequence
  Description of Artificial Sequence: Synthetic oligonucleotide
ccguagcugguuacuugac

SEQ ID NO: 383830 - RNA, 19 nt, Artificial Sequence
  Description of Artificial Sequence: Synthetic oligonucleotide
cuugggagucagccggccu

SEQ ID NO: 383831 - RNA, 19 nt, Artificial Sequence
  Description of Artificial Sequence: Synthetic oligonucleotide
ucgugggagcugccacauu

SEQ ID NO: 383832 - RNA, 19 nt, Artificial Sequence
  Description of Artificial Sequence: Synthetic oligonucleotide
gucuuguuggcgagaacuu

SEQ ID NO: 383833 - RNA, 19 nt, Artificial Sequence
  Description of Artificial Sequence: Synthetic oligonucleotide
ccgucgaguccuagacagc

SEQ ID NO: 383834 - RNA, 19 nt, Artificial Sequence
  Description of Artificial Sequence: Synthetic oligonucleotide
cacgagggugcaccguucu

SEQ ID NO: 383835 - RNA, 19 nt, Artificial Sequence
  Description of Artificial Sequence: Synthetic oligonucleotide
ccauucugguagccauaac

SEQ ID NO: 383836 - RNA, 19 nt, Artificial Sequence
  Description of Artificial Sequence: Synthetic oligonucleotide
ggcgacuugccgugugucu

SEQ ID NO: 383837 - RNA, 19 nt, Artificial Sequence
  Description of Artificial Sequence: Synthetic oligonucleotide
gcgugccccacuauuucca

SEQ ID NO: 383838 - RNA, 19 nt, Artificial Sequence
  Description of Artificial Sequence: Synthetic oligonucleotide
cgacucgcucagugcaacc

SEQ ID NO: 383839 - RNA, 19 nt, Artificial Sequence
  Description of Artificial Sequence: Synthetic oligonucleotide
cuccgagcgugccccacua

SEQ ID NO: 383840 - RNA, 19 nt, Artificial Sequence
  Description of Artificial Sequence: Synthetic oligonucleotide
gcguggaugcugggguacc

SEQ ID NO: 383841 - RNA, 19 nt, Artificial Sequence
  Description of Artificial Sequence: Synthetic oligonucleotide
cuaaccccgucgaguccua

SEQ ID NO: 383842 - RNA, 19 nt, Artificial Sequence
  Description of Artificial Sequence: Synthetic oligonucleotide
guacccgccccacgagggu

SEQ ID NO: 383843 - RNA, 19 nt, Artificial Sequence
  Description of Artificial Sequence: Synthetic oligonucleotide
caggcgacuugccgugugu

SEQ ID NO: 383844 - RNA, 19 nt, Artificial Sequence
  Description of Artificial Sequence: Synthetic oligonucleotide
gagaugccuuuaagcgccu

SEQ ID NO: 383845 - RNA, 19 nt, Artificial Sequence
  Description of Artificial Sequence: Synthetic oligonucleotide
ccuuaccgcuaaacaaugu

SEQ ID NO: 383846 - RNA, 19 nt, Artificial Sequence
  Description of Artificial Sequence: Synthetic oligonucleotide
ccuuuaagaaguggccagu

SEQ ID NO: 383847 - RNA, 19 nt, Artificial Sequence
  Description of Artificial Sequence: Synthetic oligonucleotide
cagacacgauugcucuuau

SEQ ID NO: 383848 - RNA, 19 nt, Artificial Sequence
  Description of Artificial Sequence: Synthetic oligonucleotide
ccuaaccccgucgaguccu

SEQ ID NO: 383849 - RNA, 19 nt, Artificial Sequence
  Description of Artificial Sequence: Synthetic oligonucleotide
gcgugacauauggguuagc

SEQ ID NO: 383850 - RNA, 19 nt, Artificial Sequence
  Description of Artificial Sequence: Synthetic oligonucleotide
caguuagacuggcgccccu

SEQ ID NO: 383851 - RNA, 19 nt, Artificial Sequence
  Description of Artificial Sequence: Synthetic oligonucleotide
caggcguguguaagcugau

SEQ ID NO: 383852 - RNA, 19 nt, Artificial Sequence
  Description of Artificial Sequence: Synthetic oligonucleotide
cgucgaguccuagacagcu

SEQ ID NO: 383853 - RNA, 19 nt, Artificial Sequence
  Description of Artificial Sequence: Synthetic oligonucleotide
cagguccgacaugauguau

SEQ ID NO: 383854 - RNA, 19 nt, Artificial Sequence
  Description of Artificial Sequence: Synthetic oligonucleotide
ccccgucgaguccuagaca

SEQ ID NO: 383855 - RNA, 19 nt, Artificial Sequence
  Description of Artificial Sequence: Synthetic oligonucleotide
gcgacuugccgugugucuu

SEQ ID NO: 383856 - RNA, 19 nt, Artificial Sequence
  Description of Artificial Sequence: Synthetic oligonucleotide
cugugcccggcagcuggua

SEQ ID NO: 383857 - RNA, 19 nt, Artificial Sequence
  Description of Artificial Sequence: Synthetic oligonucleotide
cccacgagggugcaccguu

SEQ ID NO: 383858 - RNA, 19 nt, Artificial Sequence
  Description of Artificial Sequence: Synthetic oligonucleotide
ccgagcgugccccacuauu

SEQ ID NO: 383859 - RNA, 19 nt, Artificial Sequence
  Description of Artificial Sequence: Synthetic oligonucleotide
ccgacaccguggagggugu

SEQ ID NO: 383860 - RNA, 19 nt, Artificial Sequence
  Description of Artificial Sequence: Synthetic oligonucleotide
cgacaccguggagggugug

SEQ ID NO: 383861 - RNA, 19 nt, Artificial Sequence
  Description of Artificial Sequence: Synthetic oligonucleotide
ccgccccacgagggugcac

SEQ ID NO: 383862 - RNA, 19 nt, Artificial Sequence
  Description of Artificial Sequence: Synthetic oligonucleotide
cccgccccacgagggugca

SEQ ID NO: 383863 - RNA, 19 nt, Artificial Sequence
  Description of Artificial Sequence: Synthetic oligonucleotide
ccccacgagggugcaccgu

SEQ ID NO: 383864 - RNA, 19 nt, Artificial Sequence
  Description of Artificial Sequence: Synthetic oligonucleotide
auuaacaagacccuuaagg

SEQ ID NO: 383865 - RNA, 19 nt, Artificial Sequence
  Description of Artificial Sequence: Synthetic oligonucleotide
agugauaugagguguaucc

SEQ ID NO: 383866 - RNA, 19 nt, Artificial Sequence
  Description of Artificial Sequence: Synthetic oligonucleotide
uuuaagaagguucaugagc

SEQ ID NO: 383867 - RNA, 19 nt, Artificial Sequence
  Description of Artificial Sequence: Synthetic oligonucleotide
agugauguaacauucagug

SEQ ID NO: 383868 - RNA, 19 nt, Artificial Sequence
  Description of Artificial Sequence: Synthetic oligonucleotide
ugaagcgagacucugagag

SEQ ID NO: 383869 - RNA, 19 nt, Artificial Sequence
  Description of Artificial Sequence: Synthetic oligonucleotide
uuaagaagguucaugagca

SEQ ID NO: 383870 - RNA, 19 nt, Artificial Sequence
  Description of Artificial Sequence: Synthetic oligonucleotide
acaaacaugaaucaccuug

SEQ ID NO: 383871 - RNA, 19 nt, Artificial Sequence
  Description of Artificial Sequence: Synthetic oligonucleotide
aaugaccagaacuugaaga

SEQ ID NO: 383872 - RNA, 19 nt, Artificial Sequence
  Description of Artificial Sequence: Synthetic oligonucleotide
auauagauagaaaucgucc

SEQ ID NO: 383873 - RNA, 19 nt, Artificial Sequence
  Description of Artificial Sequence: Synthetic oligonucleotide
auaucaguuacaucugggc

SEQ ID NO: 383874 - RNA, 19 nt, Artificial Sequence
  Description of Artificial Sequence: Synthetic oligonucleotide
aguagcaagguuuaucuuc

SEQ ID NO: 383875 - RNA, 19 nt, Artificial Sequence
  Description of Artificial Sequence: Synthetic oligonucleotide
uuugacaacucaaauugag

SEQ ID NO: 383876 - RNA, 19 nt, Artificial Sequence
  Description of Artificial Sequence: Synthetic oligonucleotide
ugucugaucauauucaaga

SEQ ID NO: 383877 - RNA, 19 nt, Artificial Sequence
  Description of Artificial Sequence: Synthetic oligonucleotide
auagauaggagaugcaguc

SEQ ID NO: 383878 - RNA, 19 nt, Artificial Sequence
  Description of Artificial Sequence: Synthetic oligonucleotide
uguucuaaggauugcagag

SEQ ID NO: 383879 - RNA, 19 nt, Artificial Sequence
  Description of Artificial Sequence: Synthetic oligonucleotide
uuaacaagacccuuaaggu

SEQ ID NO: 383880 - RNA, 19 nt, Artificial Sequence
  Description of Artificial Sequence: Synthetic oligonucleotide
ucuuugaacaacuuuggca

SEQ ID NO: 383881 - RNA, 19 nt, Artificial Sequence
  Description of Artificial Sequence: Synthetic oligonucleotide
aacgaaucgaggaacauuc

SEQ ID NO: 383882 - RNA, 19 nt, Artificial Sequence
  Description of Artificial Sequence: Synthetic oligonucleotide
ugacaacucaaauugagug

SEQ ID NO: 383883 - RNA, 19 nt, Artificial Sequence
  Description of Artificial Sequence: Synthetic oligonucleotide
auuacuucaagugagcuug

SEQ ID NO: 383884 - RNA, 19 nt, Artificial Sequence
  Description of Artificial Sequence: Synthetic oligonucleotide
agucacuccacuuauaaca

SEQ ID NO: 383885 - RNA, 19 nt, Artificial Sequence
  Description of Artificial Sequence: Synthetic oligonucleotide
ugaugaguucauaaagggg

SEQ ID NO: 383886 - RNA, 19 nt, Artificial Sequence
  Description of Artificial Sequence: Synthetic oligonucleotide
uauagauagaaaucgucca

SEQ ID NO: 383887 - RNA, 19 nt, Artificial Sequence
  Description of Artificial Sequence: Synthetic oligonucleotide
auagauagaaaucguccac

SEQ ID NO: 383888 - RNA, 19 nt, Artificial Sequence
  Description of Artificial Sequence: Synthetic oligonucleotide
uuauuaguuugaaagacau

SEQ ID NO: 383889 - RNA, 19 nt, Artificial Sequence
  Description of Artificial Sequence: Synthetic oligonucleotide
aagguuuaucuucaugcuc

SEQ ID NO: 383890 - RNA, 19 nt, Artificial Sequence
  Description of Artificial Sequence: Synthetic oligonucleotide
uaucaguuacaucugggcc

SEQ ID NO: 383891 - RNA, 19 nt, Artificial Sequence
  Description of Artificial Sequence: Synthetic oligonucleotide
ugugagucgacauccauug

SEQ ID NO: 383892 - RNA, 19 nt, Artificial Sequence
  Description of Artificial Sequence: Synthetic oligonucleotide
ugcauuaguauuuuauugu

SEQ ID NO: 383893 - RNA, 19 nt, Artificial Sequence
  Description of Artificial Sequence: Synthetic oligonucleotide
uguucauuaaaucgacccc

SEQ ID NO: 383894 - RNA, 19 nt, Artificial Sequence
  Description of Artificial Sequence: Synthetic oligonucleotide
ugaaauuguuuuaagugaa

SEQ ID NO: 383895 - RNA, 19 nt, Artificial Sequence
  Description of Artificial Sequence: Synthetic oligonucleotide
ucuugugaugaagagaaag

SEQ ID NO: 383896 - RNA, 19 nt, Artificial Sequence
  Description of Artificial Sequence: Synthetic oligonucleotide
ucaaauugagugaugaguu

SEQ ID NO: 383897 - RNA, 19 nt, Artificial Sequence
  Description of Artificial Sequence: Synthetic oligonucleotide
gugaugaguucauaaaggg

SEQ ID NO: 383898 - RNA, 19 nt, Artificial Sequence
  Description of Artificial Sequence: Synthetic oligonucleotide
gauuucucuauuuaugaga

SEQ ID NO: 383899 - RNA, 19 nt, Artificial Sequence
  Description of Artificial Sequence: Synthetic oligonucleotide
uuaguugccuuccaguaca

SEQ ID NO: 383900 - RNA, 19 nt, Artificial Sequence
  Description of Artificial Sequence: Synthetic oligonucleotide
cuccgaauagcccucaucg

SEQ ID NO: 383901 - RNA, 19 nt, Artificial Sequence
  Description of Artificial Sequence: Synthetic oligonucleotide
uguuauaggccacuuggug

SEQ ID NO: 383902 - RNA, 19 nt, Artificial Sequence
  Description of Artificial Sequence: Synthetic oligonucleotide
ugaaaaucgucuucggucu

SEQ ID NO: 383903 - RNA, 19 nt, Artificial Sequence
  Description of Artificial Sequence: Synthetic oligonucleotide
uggacauacaucuuugaac

SEQ ID NO: 383904 - RNA, 19 nt, Artificial Sequence
  Description of Artificial Sequence: Synthetic oligonucleotide
ugauaugagguguauccag

SEQ ID NO: 383905 - RNA, 19 nt, Artificial Sequence
  Description of Artificial Sequence: Synthetic oligonucleotide
uugugauucaaugguaggg

SEQ ID NO: 383906 - RNA, 19 nt, Artificial Sequence
  Description of Artificial Sequence: Synthetic oligonucleotide
auuaguugccuuccaguac

SEQ ID NO: 383907 - RNA, 19 nt, Artificial Sequence
  Description of Artificial Sequence: Synthetic oligonucleotide
aaauugagugaugaguuca

SEQ ID NO: 383908 - RNA, 19 nt, Artificial Sequence
  Description of Artificial Sequence: Synthetic oligonucleotide
cugaaaaucgucuucgguc

SEQ ID NO: 383909 - RNA, 19 nt, Artificial Sequence
  Description of Artificial Sequence: Synthetic oligonucleotide
uggauuucucuauuuauga

SEQ ID NO: 383910 - RNA, 19 nt, Artificial Sequence
  Description of Artificial Sequence: Synthetic oligonucleotide
ucauaaaggggcacguaag

SEQ ID NO: 383911 - RNA, 19 nt, Artificial Sequence
  Description of Artificial Sequence: Synthetic oligonucleotide
augagguguauccagcgcg

SEQ ID NO: 383912 - RNA, 19 nt, Artificial Sequence
  Description of Artificial Sequence: Synthetic oligonucleotide
uuccauaaaggguugagaa

SEQ ID NO: 383913 - RNA, 19 nt, Artificial Sequence
  Description of Artificial Sequence: Synthetic oligonucleotide
ucgaggaacauucuuuucu

SEQ ID NO: 383914 - RNA, 19 nt, Artificial Sequence
  Description of Artificial Sequence: Synthetic oligonucleotide
aaggagaugcauuaguauu

SEQ ID NO: 383915 - RNA, 19 nt, Artificial Sequence
  Description of Artificial Sequence: Synthetic oligonucleotide
uaaaggggcacguaagccc

SEQ ID NO: 383916 - RNA, 19 nt, Artificial Sequence
  Description of Artificial Sequence: Synthetic oligonucleotide
caaucaggguguuauaggc

SEQ ID NO: 383917 - RNA, 19 nt, Artificial Sequence
  Description of Artificial Sequence: Synthetic oligonucleotide
uaacaagacccuuaaggug

SEQ ID NO: 383918 - RNA, 19 nt, Artificial Sequence
  Description of Artificial Sequence: Synthetic oligonucleotide
aagcgagacucugagaggg

SEQ ID NO: 383919 - RNA, 19 nt, Artificial Sequence
  Description of Artificial Sequence: Synthetic oligonucleotide
uucauaaaggggcacguaa

SEQ ID NO: 383920 - RNA, 19 nt, Artificial Sequence
  Description of Artificial Sequence: Synthetic oligonucleotide
cauuuuagucuucaguuug

SEQ ID NO: 383921 - RNA, 19 nt, Artificial Sequence
  Description of Artificial Sequence: Synthetic oligonucleotide
aaaggguugagaaauccug

SEQ ID NO: 383922 - RNA, 19 nt, Artificial Sequence
  Description of Artificial Sequence: Synthetic oligonucleotide
aaucaggguguuauaggcc

SEQ ID NO: 383923 - RNA, 19 nt, Artificial Sequence
  Description of Artificial Sequence: Synthetic oligonucleotide
uuugagaggacccuccaaa

SEQ ID NO: 383924 - RNA, 19 nt, Artificial Sequence
  Description of Artificial Sequence: Synthetic oligonucleotide
gcaagguuuaucuucaugc

SEQ ID NO: 383925 - RNA, 19 nt, Artificial Sequence
  Description of Artificial Sequence: Synthetic oligonucleotide
auaugagguguauccagcg

SEQ ID NO: 383926 - RNA, 19 nt, Artificial Sequence
  Description of Artificial Sequence: Synthetic oligonucleotide
ggcaaaaucaaaguaaggc

SEQ ID NO: 383927 - RNA, 19 nt, Artificial Sequence
  Description of Artificial Sequence: Synthetic oligonucleotide
uuaagugaacuauggcugc

SEQ ID NO: 383928 - RNA, 19 nt, Artificial Sequence
  Description of Artificial Sequence: Synthetic oligonucleotide
uagaguuuacagcucacac

SEQ ID NO: 383929 - RNA, 19 nt, Artificial Sequence
  Description of Artificial Sequence: Synthetic oligonucleotide
gauaucaguuacaucuggg

SEQ ID NO: 383930 - RNA, 19 nt, Artificial Sequence
  Description of Artificial Sequence: Synthetic oligonucleotide
gaaaauagcagugcugcug

SEQ ID NO: 383931 - RNA, 19 nt, Artificial Sequence
  Description of Artificial Sequence: Synthetic oligonucleotide
cuuccaguacauaauugcc

SEQ ID NO: 383932 - RNA, 19 nt, Artificial Sequence
  Description of Artificial Sequence: Synthetic oligonucleotide
agcauaaaaccgcauguug

SEQ ID NO: 383933 - RNA, 19 nt, Artificial Sequence
  Description of Artificial Sequence: Synthetic oligonucleotide
aucaguuacaucugggcca

SEQ ID NO: 383934 - RNA, 19 nt, Artificial Sequence
  Description of Artificial Sequence: Synthetic oligonucleotide
cauaaaaccgcauguugug

SEQ ID NO: 383935 - RNA, 19 nt, Artificial Sequence
  Description of Artificial Sequence: Synthetic oligonucleotide
cuuguucuaaggauugcag

SEQ ID NO: 383936 - RNA, 19 nt, Artificial Sequence
  Description of Artificial Sequence: Synthetic oligonucleotide
uacagauuaacaagacccu

SEQ ID NO: 383937 - RNA, 19 nt, Artificial Sequence
  Description of Artificial Sequence: Synthetic oligonucleotide
uaagcccaaacgaaucgag

SEQ ID NO: 383938 - RNA, 19 nt, Artificial Sequence
  Description of Artificial Sequence: Synthetic oligonucleotide
ugcagaguuggauauagau

SEQ ID NO: 383939 - RNA, 19 nt, Artificial Sequence
  Description of Artificial Sequence: Synthetic oligonucleotide
cauccauuaccacacacac

SEQ ID NO: 383940 - RNA, 19 nt, Artificial Sequence
  Description of Artificial Sequence: Synthetic oligonucleotide
ugagucgacauccauugaa

SEQ ID NO: 383941 - RNA, 19 nt, Artificial Sequence
  Description of Artificial Sequence: Synthetic oligonucleotide
cuuaaggugcuuagaaaac

SEQ ID NO: 383942 - RNA, 19 nt, Artificial Sequence
  Description of Artificial Sequence: Synthetic oligonucleotide
cacuccacuuauaacauac

SEQ ID NO: 383943 - RNA, 19 nt, Artificial Sequence
  Description of Artificial Sequence: Synthetic oligonucleotide
aaaucaaaguaaggccgcg

SEQ ID NO: 383944 - RNA, 19 nt, Artificial Sequence
  Description of Artificial Sequence: Synthetic oligonucleotide
ucugaagugauguaacauu

SEQ ID NO: 383945 - RNA, 19 nt, Artificial Sequence
  Description of Artificial Sequence: Synthetic oligonucleotide
aaucgaggaacauucuuuu

SEQ ID NO: 383946 - RNA, 19 nt, Artificial Sequence
  Description of Artificial Sequence: Synthetic oligonucleotide
aaaccgcauguugugauuc

SEQ ID NO: 383947 - RNA, 19 nt, Artificial Sequence
  Description of Artificial Sequence: Synthetic oligonucleotide
agcagcauaaaaccgcaug

SEQ ID NO: 383948 - RNA, 19 nt, Artificial Sequence
  Description of Artificial Sequence: Synthetic oligonucleotide
cuuuaagaagguucaugag

SEQ ID NO: 383949 - RNA, 19 nt, Artificial Sequence
  Description of Artificial Sequence: Synthetic oligonucleotide
cugaagugauguaacauuc

SEQ ID NO: 383950 - RNA, 19 nt, Artificial Sequence
  Description of Artificial Sequence: Synthetic oligonucleotide
aaggguugagaaauccugg

SEQ ID NO: 383951 - RNA, 19 nt, Artificial Sequence
  Description of Artificial Sequence: Synthetic oligonucleotide
guugagaaauccugggcag

SEQ ID NO: 383952 - RNA, 19 nt, Artificial Sequence
  Description of Artificial Sequence: Synthetic oligonucleotide
agagcuaaauacauuuuag

SEQ ID NO: 383953 - RNA, 19 nt, Artificial Sequence
  Description of Artificial Sequence: Synthetic oligonucleotide
ugaagugauguaacauuca

SEQ ID NO: 383954 - RNA, 19 nt, Artificial Sequence
  Description of Artificial Sequence: Synthetic oligonucleotide
caucugaugaagucacucc

SEQ ID NO: 383955 - RNA, 19 nt, Artificial Sequence
  Description of Artificial Sequence: Synthetic oligonucleotide
gaguuuacagcucacacgu

SEQ ID NO: 383956 - RNA, 19 nt, Artificial Sequence
  Description of Artificial Sequence: Synthetic oligonucleotide
uccaaucaggguguuauag

SEQ ID NO: 383957 - RNA, 19 nt, Artificial Sequence
  Description of Artificial Sequence: Synthetic oligonucleotide
ugucugaaaggauaucagu

SEQ ID NO: 383958 - RNA, 19 nt, Artificial Sequence
  Description of Artificial Sequence: Synthetic oligonucleotide
uucaugcucacuuagcauu

SEQ ID NO: 383959 - RNA, 19 nt, Artificial Sequence
  Description of Artificial Sequence: Synthetic oligonucleotide
gacaacucaaauugaguga

SEQ ID NO: 383960 - RNA, 19 nt, Artificial Sequence
  Description of Artificial Sequence: Synthetic oligonucleotide
agcgcgucagcugucaugc

SEQ ID NO: 383961 - RNA, 19 nt, Artificial Sequence
  Description of Artificial Sequence: Synthetic oligonucleotide
uuguggguaaguuguuggg

SEQ ID NO: 383962 - RNA, 19 nt, Artificial Sequence
  Description of Artificial Sequence: Synthetic oligonucleotide
uuuugcuaaccaguguucc

SEQ ID NO: 383963 - RNA, 19 nt, Artificial Sequence
  Description of Artificial Sequence: Synthetic oligonucleotide
gggauuaugccccaucccg

SEQ ID NO: 383964 - RNA, 19 nt, Artificial Sequence
  Description of Artificial Sequence: Synthetic oligonucleotide
aggguugagaaauccuggg

SEQ ID NO: 383965 - RNA, 19 nt, Artificial Sequence
  Description of Artificial Sequence: Synthetic oligonucleotide
agcggaguagcauuaguug

SEQ ID NO: 383966 - RNA, 19 nt, Artificial Sequence
  Description of Artificial Sequence: Synthetic oligonucleotide
aaaguaaggccgcggauuu

SEQ ID NO: 383967 - RNA, 19 nt, Artificial Sequence
  Description of Artificial Sequence: Synthetic oligonucleotide
ccaucgaagagacaggugg

SEQ ID NO: 383968 - RNA, 19 nt, Artificial Sequence
  Description of Artificial Sequence: Synthetic oligonucleotide
agaagaguugugcugggga

SEQ ID NO: 383969 - RNA, 19 nt, Artificial Sequence
  Description of Artificial Sequence: Synthetic oligonucleotide
uuugcuaaccaguguuccc

SEQ ID NO: 383970 - RNA, 19 nt, Artificial Sequence
  Description of Artificial Sequence: Synthetic oligonucleotide
guuacaucugggccaaugc

SEQ ID NO: 383971 - RNA, 19 nt, Artificial Sequence
  Description of Artificial Sequence: Synthetic oligonucleotide
agcacauuuccauccgggg

SEQ ID NO: 383972 - RNA, 19 nt, Artificial Sequence
  Description of Artificial Sequence: Synthetic oligonucleotide
uggggauuaugccccaucc

SEQ ID NO: 383973 - RNA, 19 nt, Artificial Sequence
  Description of Artificial Sequence: Synthetic oligonucleotide
gauaugagguguauccagc

SEQ ID NO: 383974 - RNA, 19 nt, Artificial Sequence
  Description of Artificial Sequence: Synthetic oligonucleotide
uccaguacauaauugccau

SEQ ID NO: 383975 - RNA, 19 nt, Artificial Sequence
  Description of Artificial Sequence: Synthetic oligonucleotide
agugagauagccaacacuu

SEQ ID NO: 383976 - RNA, 19 nt, Artificial Sequence
  Description of Artificial Sequence: Synthetic oligonucleotide
uucauuugaugucccucag

SEQ ID NO: 383977 - RNA, 19 nt, Artificial Sequence
  Description of Artificial Sequence: Synthetic oligonucleotide
ugcuguacaagcucuggac

SEQ ID NO: 383978 - RNA, 19 nt, Artificial Sequence
  Description of Artificial Sequence: Synthetic oligonucleotide
augaggaggggucggacuc

SEQ ID NO: 383979 - RNA, 19 nt, Artificial Sequence
  Description of Artificial Sequence: Synthetic oligonucleotide
gaagcgagacucugagagg

SEQ ID NO: 383980 - RNA, 19 nt, Artificial Sequence
  Description of Artificial Sequence: Synthetic oligonucleotide
auuauuaguuugaaagaca

SEQ ID NO: 383981 - RNA, 19 nt, Artificial Sequence
  Description of Artificial Sequence: Synthetic oligonucleotide
ucaagauaagaggaacucu

SEQ ID NO: 383982 - RNA, 19 nt, Artificial Sequence
  Description of Artificial Sequence: Synthetic oligonucleotide
uagaaaucguccacaucug

SEQ ID NO: 383983 - RNA, 19 nt, Artificial Sequence
  Description of Artificial Sequence: Synthetic oligonucleotide
gauuaacaagacccuuaag

SEQ ID NO: 383984 - RNA, 19 nt, Artificial Sequence
  Description of Artificial Sequence: Synthetic oligonucleotide
cacuuagcauuccaggccc

SEQ ID NO: 383985 - RNA, 19 nt, Artificial Sequence
  Description of Artificial Sequence: Synthetic oligonucleotide
gaguucauaaaggggcacg

SEQ ID NO: 383986 - RNA, 19 nt, Artificial Sequence
  Description of Artificial Sequence: Synthetic oligonucleotide
uucacagggugcugaaaag

SEQ ID NO: 383987 - RNA, 19 nt, Artificial Sequence
  Description of Artificial Sequence: Synthetic oligonucleotide
aggugauuuugcuaaccag

SEQ ID NO: 383988 - RNA, 19 nt, Artificial Sequence
  Description of Artificial Sequence: Synthetic oligonucleotide
agcauuaguugccuuccag

SEQ ID NO: 383989 - RNA, 19 nt, Artificial Sequence
  Description of Artificial Sequence: Synthetic oligonucleotide
gaggggucggacucgagcc

SEQ ID NO: 383990 - RNA, 19 nt, Artificial Sequence
  Description of Artificial Sequence: Synthetic oligonucleotide
uauggguuuucauuauuau

SEQ ID NO: 383991 - RNA, 19 nt, Artificial Sequence
  Description of Artificial Sequence: Synthetic oligonucleotide
agguuuaucuucaugcuca

SEQ ID NO: 383992 - RNA, 19 nt, Artificial Sequence
  Description of Artificial Sequence: Synthetic oligonucleotide
ugagaaugaccagaacuug

SEQ ID NO: 383993 - RNA, 19 nt, Artificial Sequence
  Description of Artificial Sequence: Synthetic oligonucleotide
ucggacucgagccaauggu

SEQ ID NO: 383994 - RNA, 19 nt, Artificial Sequence
  Description of Artificial Sequence: Synthetic oligonucleotide
agcuugaaauuguuuuaag

SEQ ID NO: 383995 - RNA, 19 nt, Artificial Sequence
  Description of Artificial Sequence: Synthetic oligonucleotide
uaaaaccgcauguugugau

SEQ ID NO: 383996 - RNA, 19 nt, Artificial Sequence
  Description of Artificial Sequence: Synthetic oligonucleotide
uauuacuucaagugagcuu

SEQ ID NO: 383997 - RNA, 19 nt, Artificial Sequence
  Description of Artificial Sequence: Synthetic oligonucleotide
gaacauucuuuucuaugca

SEQ ID NO: 383998 - RNA, 19 nt, Artificial Sequence
  Description of Artificial Sequence: Synthetic oligonucleotide
aaaauagauaggagaugca

SEQ ID NO: 383999 - RNA, 19 nt, Artificial Sequence
  Description of Artificial Sequence: Synthetic oligonucleotide
ucuuauccagcggaguagc

SEQ ID NO: 384000 - RNA, 19 nt, Artificial Sequence
  Description of Artificial Sequence: Synthetic oligonucleotide
ggugcuuggauuugucagg

SEQ ID NO: 384001 - RNA, 19 nt, Artificial Sequence
  Description of Artificial Sequence: Synthetic oligonucleotide
uugagaaauccugggcagg

SEQ ID NO: 384002 - RNA, 19 nt, Artificial Sequence
  Description of Artificial Sequence: Synthetic oligonucleotide
gauuuugcuaaccaguguu

SEQ ID NO: 384003 - RNA, 19 nt, Artificial Sequence
  Description of Artificial Sequence: Synthetic oligonucleotide
ugaacuauggcugcauuuu

SEQ ID NO: 384004 - RNA, 19 nt, Artificial Sequence
  Description of Artificial Sequence: Synthetic oligonucleotide
aauccagacucagaccugu

SEQ ID NO: 384005 - RNA, 19 nt, Artificial Sequence
  Description of Artificial Sequence: Synthetic oligonucleotide
uuucucuauuuaugagaag

SEQ ID NO: 384006 - RNA, 19 nt, Artificial Sequence
  Description of Artificial Sequence: Synthetic oligonucleotide
ccacuuauaacauacacaa

SEQ ID NO: 384007 - RNA, 19 nt, Artificial Sequence
  Description of Artificial Sequence: Synthetic oligonucleotide
ucgagccaaugguagaccc

SEQ ID NO: 384008 - RNA, 19 nt, Artificial Sequence
  Description of Artificial Sequence: Synthetic oligonucleotide
cuucauuugaugucccuca

SEQ ID NO: 384009 - RNA, 19 nt, Artificial Sequence
  Description of Artificial Sequence: Synthetic oligonucleotide
agcaagguuuaucuucaug

SEQ ID NO: 384010 - RNA, 19 nt, Artificial Sequence
  Description of Artificial Sequence: Synthetic oligonucleotide
ucguccacaucugaugaag

SEQ ID NO: 384011 - RNA, 19 nt, Artificial Sequence
  Description of Artificial Sequence: Synthetic oligonucleotide
acucgagccaaugguagac

SEQ ID NO: 384012 - RNA, 19 nt, Artificial Sequence
  Description of Artificial Sequence: Synthetic oligonucleotide
caucgaagagacagguggc

SEQ ID NO: 384013 - RNA, 19 nt, Artificial Sequence
  Description of Artificial Sequence: Synthetic oligonucleotide
aucgaggaacauucuuuuc

SEQ ID NO: 384014 - RNA, 19 nt, Artificial Sequence
  Description of Artificial Sequence: Synthetic oligonucleotide
aagugauguaacauucagu

SEQ ID NO: 384015 - RNA, 19 nt, Artificial Sequence
  Description of Artificial Sequence: Synthetic oligonucleotide
gguugagaaauccugggca

SEQ ID NO: 384016 - RNA, 19 nt, Artificial Sequence
  Description of Artificial Sequence: Synthetic oligonucleotide
agugcagguggcaaaauca

SEQ ID NO: 384017 - RNA, 19 nt, Artificial Sequence
  Description of Artificial Sequence: Synthetic oligonucleotide
gaacuggauagucggacca

SEQ ID NO: 384018 - RNA, 19 nt, Artificial Sequence
  Description of Artificial Sequence: Synthetic oligonucleotide
gauagccaacacuuccaug

SEQ ID NO: 384019 - RNA, 19 nt, Artificial Sequence
  Description of Artificial Sequence: Synthetic oligonucleotide
uuaugccccaucccgcuga

SEQ ID NO: 384020 - RNA, 19 nt, Artificial Sequence
  Description of Artificial Sequence: Synthetic oligonucleotide
caaauugagugaugaguuc

SEQ ID NO: 384021 - RNA, 19 nt, Artificial Sequence
  Description of Artificial Sequence: Synthetic oligonucleotide
auggacauacaucuuugaa

SEQ ID NO: 384022 - RNA, 19 nt, Artificial Sequence
  Description of Artificial Sequence: Synthetic oligonucleotide
acauuuuagucuucaguuu

SEQ ID NO: 384023 - RNA, 19 nt, Artificial Sequence
  Description of Artificial Sequence: Synthetic oligonucleotide
ggauuucucuauuuaugag

SEQ ID NO: 384024 - RNA, 19 nt, Artificial Sequence
  Description of Artificial Sequence: Synthetic oligonucleotide
cuggauagucggaccaucc

SEQ ID NO: 384025 - RNA, 19 nt, Artificial Sequence
  Description of Artificial Sequence: Synthetic oligonucleotide
ugcuuagaaaacucaucaa

SEQ ID NO: 384026 - RNA, 19 nt, Artificial Sequence
  Description of Artificial Sequence: Synthetic oligonucleotide
aaucucgaacaggggugcc

SEQ ID NO: 384027 - RNA, 19 nt, Artificial Sequence
  Description of Artificial Sequence: Synthetic oligonucleotide
gaucuuauccagcggagua

SEQ ID NO: 384028 - RNA, 19 nt, Artificial Sequence
  Description of Artificial Sequence: Synthetic oligonucleotide
aaacgaaucgaggaacauu

SEQ ID NO: 384029 - RNA, 19 nt, Artificial Sequence
  Description of Artificial Sequence: Synthetic oligonucleotide
aaaaccgcauguugugauu

SEQ ID NO: 384030 - RNA, 19 nt, Artificial Sequence
  Description of Artificial Sequence: Synthetic oligonucleotide
aaaggggcacguaagccca

SEQ ID NO: 384031 - RNA, 19 nt, Artificial Sequence
  Description of Artificial Sequence: Synthetic oligonucleotide
uugcuaaccaguguucccu

SEQ ID NO: 384032 - RNA, 19 nt, Artificial Sequence
  Description of Artificial Sequence: Synthetic oligonucleotide
gccccuauuacuucaagug

SEQ ID NO: 384033 - RNA, 19 nt, Artificial Sequence
  Description of Artificial Sequence: Synthetic oligonucleotide
uggauagucggaccauccu

SEQ ID NO: 384034 - RNA, 19 nt, Artificial Sequence
  Description of Artificial Sequence: Synthetic oligonucleotide
gaaucucgaacaggggugc

SEQ ID NO: 384035 - RNA, 19 nt, Artificial Sequence
  Description of Artificial Sequence: Synthetic oligonucleotide
cauuccaggccccuauuac

SEQ ID NO: 384036 - RNA, 19 nt, Artificial Sequence
  Description of Artificial Sequence: Synthetic oligonucleotide
acguguugaguccugcaca

SEQ ID NO: 384037 - RNA, 19 nt, Artificial Sequence
  Description of Artificial Sequence: Synthetic oligonucleotide
acuucaagugagcuugaaa

SEQ ID NO: 384038 - RNA, 19 nt, Artificial Sequence
  Description of Artificial Sequence: Synthetic oligonucleotide
aucuuauccagcggaguag

SEQ ID NO: 384039 - RNA, 19 nt, Artificial Sequence
  Description of Artificial Sequence: Synthetic oligonucleotide
uauccagcggaguagcauu

SEQ ID NO: 384040 - RNA, 19 nt, Artificial Sequence
  Description of Artificial Sequence: Synthetic oligonucleotide
cccuauuacuucaagugag

SEQ ID NO: 384041 - RNA, 19 nt, Artificial Sequence
  Description of Artificial Sequence: Synthetic oligonucleotide
auaggguucugugagucga

SEQ ID NO: 384042 - RNA, 19 nt, Artificial Sequence
  Description of Artificial Sequence: Synthetic oligonucleotide
uguaugguuucagccuucc

SEQ ID NO: 384043 - RNA, 19 nt, Artificial Sequence
  Description of Artificial Sequence: Synthetic oligonucleotide
uccaacugugugcuacaca

SEQ ID NO: 384044 - RNA, 19 nt, Artificial Sequence
  Description of Artificial Sequence: Synthetic oligonucleotide
gguucaugagcaucgggug

SEQ ID NO: 384045 - RNA, 19 nt, Artificial Sequence
  Description of Artificial Sequence: Synthetic oligonucleotide
gagaaugaccagaacuuga

SEQ ID NO: 384046 - RNA, 19 nt, Artificial Sequence
  Description of Artificial Sequence: Synthetic oligonucleotide
caucagaaucaaagagggc

SEQ ID NO: 384047 - RNA, 19 nt, Artificial Sequence
  Description of Artificial Sequence: Synthetic oligonucleotide
aguuuguugucuccuggaa

SEQ ID NO: 384048 - RNA, 19 nt, Artificial Sequence
  Description of Artificial Sequence: Synthetic oligonucleotide
uccguggagugagauagcc

SEQ ID NO: 384049 - RNA, 19 nt, Artificial Sequence
  Description of Artificial Sequence: Synthetic oligonucleotide
gaaaaucgucuucggucug

SEQ ID NO: 384050 - RNA, 19 nt, Artificial Sequence
  Description of Artificial Sequence: Synthetic oligonucleotide
gaaaggauaucaguuacau

SEQ ID NO: 384051 - RNA, 19 nt, Artificial Sequence
  Description of Artificial Sequence: Synthetic oligonucleotide
ucccuuaacugcuguacaa

SEQ ID NO: 384052 - RNA, 19 nt, Artificial Sequence
  Description of Artificial Sequence: Synthetic oligonucleotide
auaaaaccgcauguuguga

SEQ ID NO: 384053 - RNA, 19 nt, Artificial Sequence
  Description of Artificial Sequence: Synthetic oligonucleotide
cauggugagccacuuucac

SEQ ID NO: 384054 - RNA, 19 nt, Artificial Sequence
  Description of Artificial Sequence: Synthetic oligonucleotide
caagggagucauucacagg

SEQ ID NO: 384055 - RNA, 19 nt, Artificial Sequence
  Description of Artificial Sequence: Synthetic oligonucleotide
ugguuucagccuuccuccg

SEQ ID NO: 384056 - RNA, 19 nt, Artificial Sequence
  Description of Artificial Sequence: Synthetic oligonucleotide
acguaagcccaaacgaauc

SEQ ID NO: 384057 - RNA, 19 nt, Artificial Sequence
  Description of Artificial Sequence: Synthetic oligonucleotide
ggggugucagccuguaugg

SEQ ID NO: 384058 - RNA, 19 nt, Artificial Sequence
  Description of Artificial Sequence: Synthetic oligonucleotide
agaaauccugggcaggguu

SEQ ID NO: 384059 - RNA, 19 nt, Artificial Sequence
  Description of Artificial Sequence: Synthetic oligonucleotide
gucggacucgagccaaugg

SEQ ID NO: 384060 - RNA, 19 nt, Artificial Sequence
  Description of Artificial Sequence: Synthetic oligonucleotide
auacaguagagugacugaa

SEQ ID NO: 384061 - RNA, 19 nt, Artificial Sequence
  Description of Artificial Sequence: Synthetic oligonucleotide
aguucauaaaggggcacgu

SEQ ID NO: 384062 - RNA, 19 nt, Artificial Sequence
  Description of Artificial Sequence: Synthetic oligonucleotide
aaccgcauguugugauuca

SEQ ID NO: 384063 - RNA, 19 nt, Artificial Sequence
  Description of Artificial Sequence: Synthetic oligonucleotide
ccuuaacugcuguacaagc

SEQ ID NO: 384064 - RNA, 19 nt, Artificial Sequence
  Description of Artificial Sequence: Synthetic oligonucleotide
uugagaggacccuccaaau

SEQ ID NO: 384065 - RNA, 19 nt, Artificial Sequence
  Description of Artificial Sequence: Synthetic oligonucleotide
cucaaauugagugaugagu

SEQ ID NO: 384066 - RNA, 19 nt, Artificial Sequence
  Description of Artificial Sequence: Synthetic oligonucleotide
ggcacguaagcccaaacga

SEQ ID NO: 384067 - RNA, 19 nt, Artificial Sequence
  Description of Artificial Sequence: Synthetic oligonucleotide
acuggauagucggaccauc

SEQ ID NO: 384068 - RNA, 19 nt, Artificial Sequence
  Description of Artificial Sequence: Synthetic oligonucleotide
gggcacguaagcccaaacg

SEQ ID NO: 384069 - RNA, 19 nt, Artificial Sequence
  Description of Artificial Sequence: Synthetic oligonucleotide
cacguguugaguccugcac

SEQ ID NO: 384070 - RNA, 19 nt, Artificial Sequence
  Description of Artificial Sequence: Synthetic oligonucleotide
cuuucuugugaugaagaga

SEQ ID NO: 384071 - RNA, 19 nt, Artificial Sequence
  Description of Artificial Sequence: Synthetic oligonucleotide
auagucggaccauccuuug

SEQ ID NO: 384072 - RNA, 19 nt, Artificial Sequence
  Description of Artificial Sequence: Synthetic oligonucleotide
guacagaugagugcaucug

SEQ ID NO: 384073 - RNA, 19 nt, Artificial Sequence
  Description of Artificial Sequence: Synthetic oligonucleotide
cauuaguugccuuccagua

SEQ ID NO: 384074 - RNA, 19 nt, Artificial Sequence
  Description of Artificial Sequence: Synthetic oligonucleotide
caguagagugacugaaguc

SEQ ID NO: 384075 - RNA, 19 nt, Artificial Sequence
  Description of Artificial Sequence: Synthetic oligonucleotide
ucaguuacaucugggccaa

SEQ ID NO: 384076 - RNA, 19 nt, Artificial Sequence
  Description of Artificial Sequence: Synthetic oligonucleotide
uagauaggagaugcagucu

SEQ ID NO: 384077 - RNA, 19 nt, Artificial Sequence
  Description of Artificial Sequence: Synthetic oligonucleotide
ccuauuacuucaagugagc

SEQ ID NO: 384078 - RNA, 19 nt, Artificial Sequence
  Description of Artificial Sequence: Synthetic oligonucleotide
guauccagcgcgucagcug

SEQ ID NO: 384079 - RNA, 19 nt, Artificial Sequence
  Description of Artificial Sequence: Synthetic oligonucleotide
gcggaguagcauuaguugc

SEQ ID NO: 384080 - RNA, 19 nt, Artificial Sequence
  Description of Artificial Sequence: Synthetic oligonucleotide
uuauccagcggaguagcau

SEQ ID NO: 384081 - RNA, 19 nt, Artificial Sequence
  Description of Artificial Sequence: Synthetic oligonucleotide
aaucgucuucggucuggug

SEQ ID NO: 384082 - RNA, 19 nt, Artificial Sequence
  Description of Artificial Sequence: Synthetic oligonucleotide
gaauagcccucaucgucac

SEQ ID NO: 384083 - RNA, 19 nt, Artificial Sequence
  Description of Artificial Sequence: Synthetic oligonucleotide
auuuuagucuucaguuugu

SEQ ID NO: 384084 - RNA, 19 nt, Artificial Sequence
  Description of Artificial Sequence: Synthetic oligonucleotide
agaaugaccagaacuugaa

SEQ ID NO: 384085 - RNA, 19 nt, Artificial Sequence
  Description of Artificial Sequence: Synthetic oligonucleotide
ucaguguauggguuuucau

SEQ ID NO: 384086 - RNA, 19 nt, Artificial Sequence
  Description of Artificial Sequence: Synthetic oligonucleotide
uguauccagcgcgucagcu

SEQ ID NO: 384087 - RNA, 19 nt, Artificial Sequence
  Description of Artificial Sequence: Synthetic oligonucleotide
uuacuucaagugagcuuga

SEQ ID NO: 384088 - RNA, 19 nt, Artificial Sequence
  Description of Artificial Sequence: Synthetic oligonucleotide
uggaucaguguauggguuu

SEQ ID NO: 384089 - RNA, 19 nt, Artificial Sequence
  Description of Artificial Sequence: Synthetic oligonucleotide
aguacauaauugccauuuu

SEQ ID NO: 384090 - RNA, 19 nt, Artificial Sequence
  Description of Artificial Sequence: Synthetic oligonucleotide
uccgaauagcccucaucgu

SEQ ID NO: 384091 - RNA, 19 nt, Artificial Sequence
  Description of Artificial Sequence: Synthetic oligonucleotide
uccccgagcacauuuccau

SEQ ID NO: 384092 - RNA, 19 nt, Artificial Sequence
  Description of Artificial Sequence: Synthetic oligonucleotide
ugcuaaccaguguucccug

SEQ ID NO: 384093 - RNA, 19 nt, Artificial Sequence
  Description of Artificial Sequence: Synthetic oligonucleotide
ucggaccauccuuugaaua

SEQ ID NO: 384094 - RNA, 19 nt, Artificial Sequence
  Description of Artificial Sequence: Synthetic oligonucleotide
gcugauagagauccugaac

SEQ ID NO: 384095 - RNA, 19 nt, Artificial Sequence
  Description of Artificial Sequence: Synthetic oligonucleotide
aucgucacagggauggaca

SEQ ID NO: 384096 - RNA, 19 nt, Artificial Sequence
  Description of Artificial Sequence: Synthetic oligonucleotide
auuaugccccaucccgcug

SEQ ID NO: 384097 - RNA, 19 nt, Artificial Sequence
  Description of Artificial Sequence: Synthetic oligonucleotide
aggauaucaguuacaucug

SEQ ID NO: 384098 - RNA, 19 nt, Artificial Sequence
  Description of Artificial Sequence: Synthetic oligonucleotide
uugccggccaucgaagaga

SEQ ID NO: 384099 - RNA, 19 nt, Artificial Sequence
  Description of Artificial Sequence: Synthetic oligonucleotide
uagucggaccauccuuuga

SEQ ID NO: 384100 - RNA, 19 nt, Artificial Sequence
  Description of Artificial Sequence: Synthetic oligonucleotide
gugcuacacaguagcaagg

SEQ ID NO: 384101 - RNA, 19 nt, Artificial Sequence
  Description of Artificial Sequence: Synthetic oligonucleotide
cagucuuaucauccagcag

SEQ ID NO: 384102 - RNA, 19 nt, Artificial Sequence
  Description of Artificial Sequence: Synthetic oligonucleotide
uagcauuaguugccuucca

SEQ ID NO: 384103 - RNA, 19 nt, Artificial Sequence
  Description of Artificial Sequence: Synthetic oligonucleotide
uagcauuccaggccccuau

SEQ ID NO: 384104 - RNA, 19 nt, Artificial Sequence
  Description of Artificial Sequence: Synthetic oligonucleotide
agguguauccagcgcguca

SEQ ID NO: 384105 - RNA, 19 nt, Artificial Sequence
  Description of Artificial Sequence: Synthetic oligonucleotide
ugaagucacuccacuuaua

SEQ ID NO: 384106 - RNA, 19 nt, Artificial Sequence
  Description of Artificial Sequence: Synthetic oligonucleotide
gaggacccuccaaauacug

SEQ ID NO: 384107 - RNA, 19 nt, Artificial Sequence
  Description of Artificial Sequence: Synthetic oligonucleotide
gguguauccagcgcgucag

SEQ ID NO: 384108 - RNA, 19 nt, Artificial Sequence
  Description of Artificial Sequence: Synthetic oligonucleotide
aggagaugcauuaguauuu

SEQ ID NO: 384109 - RNA, 19 nt, Artificial Sequence
  Description of Artificial Sequence: Synthetic oligonucleotide
ucaggguguuauaggccac

SEQ ID NO: 384110 - RNA, 19 nt, Artificial Sequence
  Description of Artificial Sequence: Synthetic oligonucleotide
guagaguuuacagcucaca

SEQ ID NO: 384111 - RNA, 19 nt, Artificial Sequence
  Description of Artificial Sequence: Synthetic oligonucleotide
gauuaugccccaucccgcu

SEQ ID NO: 384112 - RNA, 19 nt, Artificial Sequence
  Description of Artificial Sequence: Synthetic oligonucleotide
gaccauccuuugaauacug

SEQ ID NO: 384113 - RNA, 19 nt, Artificial Sequence
  Description of Artificial Sequence: Synthetic oligonucleotide
aggaucuuauccagcggag

SEQ ID NO: 384114 - RNA, 19 nt, Artificial Sequence
  Description of Artificial Sequence: Synthetic oligonucleotide
agugaacuauggcugcauu

SEQ ID NO: 384115 - RNA, 19 nt, Artificial Sequence
  Description of Artificial Sequence: Synthetic oligonucleotide
uguugcuccccgagcacau

SEQ ID NO: 384116 - RNA, 19 nt, Artificial Sequence
  Description of Artificial Sequence: Synthetic oligonucleotide
acuuagcauuccaggcccc

SEQ ID NO: 384117 - RNA, 19 nt, Artificial Sequence
  Description of Artificial Sequence: Synthetic oligonucleotide
acacuucaaacuggaggag

SEQ ID NO: 384118 - RNA, 19 nt, Artificial Sequence
  Description of Artificial Sequence: Synthetic oligonucleotide
ccggccaucgaagagacag

SEQ ID NO: 384119 - RNA, 19 nt, Artificial Sequence
  Description of Artificial Sequence: Synthetic oligonucleotide
ugccggccaucgaagagac

SEQ ID NO: 384120 - RNA, 19 nt, Artificial Sequence
  Description of Artificial Sequence: Synthetic oligonucleotide
aguacuacacuggcuugga

SEQ ID NO: 384121 - RNA, 19 nt, Artificial Sequence
  Description of Artificial Sequence: Synthetic oligonucleotide
ugcaucugacagccccuug

SEQ ID NO: 384122 - RNA, 19 nt, Artificial Sequence
  Description of Artificial Sequence: Synthetic oligonucleotide
gcagucuuaucauccagca

SEQ ID NO: 384123 - RNA, 19 nt, Artificial Sequence
  Description of Artificial Sequence: Synthetic oligonucleotide
auaggagaugcagucuuau

SEQ ID NO: 384124 - RNA, 19 nt, Artificial Sequence
  Description of Artificial Sequence: Synthetic oligonucleotide
gaauccagacucagaccug

SEQ ID NO: 384125 - RNA, 19 nt, Artificial Sequence
  Description of Artificial Sequence: Synthetic oligonucleotide
guauggguuuucauuauua

SEQ ID NO: 384126 - RNA, 19 nt, Artificial Sequence
  Description of Artificial Sequence: Synthetic oligonucleotide
gggaucuaacugcaccucc

SEQ ID NO: 384127 - RNA, 19 nt, Artificial Sequence
  Description of Artificial Sequence: Synthetic oligonucleotide
acuagugcugggaagcuuu

SEQ ID NO: 384128 - RNA, 19 nt, Artificial Sequence
  Description of Artificial Sequence: Synthetic oligonucleotide
gagucgacauccauugaaa

SEQ ID NO: 384129 - RNA, 19 nt, Artificial Sequence
  Description of Artificial Sequence: Synthetic oligonucleotide
guacuacacuggcuuggag

SEQ ID NO: 384130 - RNA, 19 nt, Artificial Sequence
  Description of Artificial Sequence: Synthetic oligonucleotide
cuuccauaaaggguugaga

SEQ ID NO: 384131 - RNA, 19 nt, Artificial Sequence
  Description of Artificial Sequence: Synthetic oligonucleotide
cguaagcccaaacgaaucg

SEQ ID NO: 384132 - RNA, 19 nt, Artificial Sequence
  Description of Artificial Sequence: Synthetic oligonucleotide
gagugauaugagguguauc

SEQ ID NO: 384133 - RNA, 19 nt, Artificial Sequence
  Description of Artificial Sequence: Synthetic oligonucleotide
uuccauccggggugauccg

SEQ ID NO: 384134 - RNA, 19 nt, Artificial Sequence
  Description of Artificial Sequence: Synthetic oligonucleotide
guaagcccaaacgaaucga

SEQ ID NO: 384135 - RNA, 19 nt, Artificial Sequence
  Description of Artificial Sequence: Synthetic oligonucleotide
ggaggggucggacucgagc

SEQ ID NO: 384136 - RNA, 19 nt, Artificial Sequence
  Description of Artificial Sequence: Synthetic oligonucleotide
ggugauuuugcuaaccagu

SEQ ID NO: 384137 - RNA, 19 nt, Artificial Sequence
  Description of Artificial Sequence: Synthetic oligonucleotide
cagcuggaucaguguaugg

SEQ ID NO: 384138 - RNA, 19 nt, Artificial Sequence
  Description of Artificial Sequence: Synthetic oligonucleotide
aauccugggcaggguuauc

SEQ ID NO: 384139 - RNA, 19 nt, Artificial Sequence
  Description of Artificial Sequence: Synthetic oligonucleotide
ggaguacuacacuggcuug

SEQ ID NO: 384140 - RNA, 19 nt, Artificial Sequence
  Description of Artificial Sequence: Synthetic oligonucleotide
ggacucgagccaaugguag

SEQ ID NO: 384141 - RNA, 19 nt, Artificial Sequence
  Description of Artificial Sequence: Synthetic oligonucleotide
caucgucacagggauggac

SEQ ID NO: 384142 - RNA, 19 nt, Artificial Sequence
  Description of Artificial Sequence: Synthetic oligonucleotide
cucgagccaaugguagacc

SEQ ID NO: 384143 - RNA, 19 nt, Artificial Sequence
  Description of Artificial Sequence: Synthetic oligonucleotide
ucacuagugcugggaagcu

SEQ ID NO: 384144 - RNA, 19 nt, Artificial Sequence
  Description of Artificial Sequence: Synthetic oligonucleotide
cauccuuugaauacugguu

SEQ ID NO: 384145 - RNA, 19 nt, Artificial Sequence
  Description of Artificial Sequence: Synthetic oligonucleotide
ggauuaugccccaucccgc

SEQ ID NO: 384146 - RNA, 19 nt, Artificial Sequence
  Description of Artificial Sequence: Synthetic oligonucleotide
aagugagcuugaaauuguu

SEQ ID NO: 384147 - RNA, 19 nt, Artificial Sequence
  Description of Artificial Sequence: Synthetic oligonucleotide
ggggauuaugccccauccc

SEQ ID NO: 384148 - RNA, 19 nt, Artificial Sequence
  Description of Artificial Sequence: Synthetic oligonucleotide
ugauccggaagaggaguuc

SEQ ID NO: 384149 - RNA, 19 nt, Artificial Sequence
  Description of Artificial Sequence: Synthetic oligonucleotide
caagugagcuugaaauugu

SEQ ID NO: 384150 - RNA, 19 nt, Artificial Sequence
  Description of Artificial Sequence: Synthetic oligonucleotide
gguguugccggccaucgaa

SEQ ID NO: 384151 - RNA, 19 nt, Artificial Sequence
  Description of Artificial Sequence: Synthetic oligonucleotide
ccgaauagcccucaucguc

SEQ ID NO: 384152 - RNA, 19 nt, Artificial Sequence
  Description of Artificial Sequence: Synthetic oligonucleotide
agaggacccuccaaauacu

SEQ ID NO: 384153 - RNA, 19 nt, Artificial Sequence
  Description of Artificial Sequence: Synthetic oligonucleotide
aggccccuauuacuucaag

SEQ ID NO: 384154 - RNA, 19 nt, Artificial Sequence
  Description of Artificial Sequence: Synthetic oligonucleotide
cuguaugguuucagccuuc

SEQ ID NO: 384155 - RNA, 19 nt, Artificial Sequence
  Description of Artificial Sequence: Synthetic oligonucleotide
gauagucggaccauccuuu

SEQ ID NO: 384156 - RNA, 19 nt, Artificial Sequence
  Description of Artificial Sequence: Synthetic oligonucleotide
uggcggcgugugaugagga

SEQ ID NO: 384157 - RNA, 19 nt, Artificial Sequence
  Description of Artificial Sequence: Synthetic oligonucleotide
cuauuacuucaagugagcu

SEQ ID NO: 384158 - RNA, 19 nt, Artificial Sequence
  Description of Artificial Sequence: Synthetic oligonucleotide
gucugaucauauucaagau

SEQ ID NO: 384159 - RNA, 19 nt, Artificial Sequence
  Description of Artificial Sequence: Synthetic oligonucleotide
uuccaaucaggguguuaua

SEQ ID NO: 384160 - RNA, 19 nt, Artificial Sequence
  Description of Artificial Sequence: Synthetic oligonucleotide
gagaugcauuaguauuuua

SEQ ID NO: 384161 - RNA, 19 nt, Artificial Sequence
  Description of Artificial Sequence: Synthetic oligonucleotide
gauccggaagaggaguucu

SEQ ID NO: 384162 - RNA, 19 nt, Artificial Sequence
  Description of Artificial Sequence: Synthetic oligonucleotide
caucccgcugauagagauc

SEQ ID NO: 384163 - RNA, 19 nt, Artificial Sequence
  Description of Artificial Sequence: Synthetic oligonucleotide
acagguggcggcgugugau

SEQ ID NO: 384164 - RNA, 19 nt, Artificial Sequence
  Description of Artificial Sequence: Synthetic oligonucleotide
cuuauccagcggaguagca

SEQ ID NO: 384165 - RNA, 19 nt, Artificial Sequence
  Description of Artificial Sequence: Synthetic oligonucleotide
uacuucaagugagcuugaa

SEQ ID NO: 384166 - RNA, 19 nt, Artificial Sequence
  Description of Artificial Sequence: Synthetic oligonucleotide
gggucuggauccuuugaca

SEQ ID NO: 384167 - RNA, 19 nt, Artificial Sequence
  Description of Artificial Sequence: Synthetic oligonucleotide
caaugcugucugaacugga

SEQ ID NO: 384168 - RNA, 19 nt, Artificial Sequence
  Description of Artificial Sequence: Synthetic oligonucleotide
cuggauccuuugacaacuc

SEQ ID NO: 384169 - RNA, 19 nt, Artificial Sequence
  Description of Artificial Sequence: Synthetic oligonucleotide
gggaguacuacacuggcuu

SEQ ID NO: 384170 - RNA, 19 nt, Artificial Sequence
  Description of Artificial Sequence: Synthetic oligonucleotide
cagcgcgucagcugucaug

SEQ ID NO: 384171 - RNA, 19 nt, Artificial Sequence
  Description of Artificial Sequence: Synthetic oligonucleotide
cccaaacgaaucgaggaac

SEQ ID NO: 384172 - RNA, 19 nt, Artificial Sequence
  Description of Artificial Sequence: Synthetic oligonucleotide
guugaguccugcacaucca

SEQ ID NO: 384173 - RNA, 19 nt, Artificial Sequence
  Description of Artificial Sequence: Synthetic oligonucleotide
gcggcgugugaugaggagg

SEQ ID NO: 384174 - RNA, 19 nt, Artificial Sequence
  Description of Artificial Sequence: Synthetic oligonucleotide
cacguaagcccaaacgaau

SEQ ID NO: 384175 - RNA, 19 nt, Artificial Sequence
  Description of Artificial Sequence: Synthetic oligonucleotide
agcgagacucugagagggg

SEQ ID NO: 384176 - RNA, 19 nt, Artificial Sequence
  Description of Artificial Sequence: Synthetic oligonucleotide
ccaaacgaaucgaggaaca

SEQ ID NO: 384177 - RNA, 19 nt, Artificial Sequence
  Description of Artificial Sequence: Synthetic oligonucleotide
gcauuaguugccuuccagu

SEQ ID NO: 384178 - RNA, 19 nt, Artificial Sequence
  Description of Artificial Sequence: Synthetic oligonucleotide
auaggccacuuggugucug

SEQ ID NO: 384179 - RNA, 19 nt, Artificial Sequence
  Description of Artificial Sequence: Synthetic oligonucleotide
cagguggcggcgugugaug

SEQ ID NO: 384180 - RNA, 19 nt, Artificial Sequence
  Description of Artificial Sequence: Synthetic oligonucleotide
ccgagcacauuuccauccg

SEQ ID NO: 384181 - RNA, 19 nt, Artificial Sequence
  Description of Artificial Sequence: Synthetic oligonucleotide
ucaucgucacagggaugga

SEQ ID NO: 384182 - RNA, 19 nt, Artificial Sequence
  Description of Artificial Sequence: Synthetic oligonucleotide
ccauaaaggguugagaaau

SEQ ID NO: 384183 - RNA, 19 nt, Artificial Sequence
  Description of Artificial Sequence: Synthetic oligonucleotide
caaaguaaggccgcggauu

SEQ ID NO: 384184 - RNA, 19 nt, Artificial Sequence
  Description of Artificial Sequence: Synthetic oligonucleotide
gcuccccgagcacauuucc

SEQ ID NO: 384185 - RNA, 19 nt, Artificial Sequence
  Description of Artificial Sequence: Synthetic oligonucleotide
ccccuauuacuucaaguga

SEQ ID NO: 384186 - RNA, 19 nt, Artificial Sequence
  Description of Artificial Sequence: Synthetic oligonucleotide
uaacuccaaccugcagagu

SEQ ID NO: 384187 - RNA, 19 nt, Artificial Sequence
  Description of Artificial Sequence: Synthetic oligonucleotide
ugccaaugggugggcaauc

SEQ ID NO: 384188 - RNA, 19 nt, Artificial Sequence
  Description of Artificial Sequence: Synthetic oligonucleotide
aaguaaggccgcggauuuu

SEQ ID NO: 384189 - RNA, 19 nt, Artificial Sequence
  Description of Artificial Sequence: Synthetic oligonucleotide
gugagucgacauccauuga

SEQ ID NO: 384190 - RNA, 19 nt, Artificial Sequence
  Description of Artificial Sequence: Synthetic oligonucleotide
cuccccgagcacauuucca

SEQ ID NO: 384191 - RNA, 19 nt, Artificial Sequence
  Description of Artificial Sequence: Synthetic oligonucleotide
auccggaagaggaguucug

SEQ ID NO: 384192 - RNA, 19 nt, Artificial Sequence
  Description of Artificial Sequence: Synthetic oligonucleotide
cugcagaguuggauauaga

SEQ ID NO: 384193 - RNA, 19 nt, Artificial Sequence
  Description of Artificial Sequence: Synthetic oligonucleotide
guucauaaaggggcacgua

SEQ ID NO: 384194 - RNA, 19 nt, Artificial Sequence
  Description of Artificial Sequence: Synthetic oligonucleotide
gucuucggucuggugcuug

SEQ ID NO: 384195 - RNA, 19 nt, Artificial Sequence
  Description of Artificial Sequence: Synthetic oligonucleotide
gacagguggcggcguguga

SEQ ID NO: 384196 - RNA, 19 nt, Artificial Sequence
  Description of Artificial Sequence: Synthetic oligonucleotide
guguauggguuuucauuau

SEQ ID NO: 384197 - RNA, 19 nt, Artificial Sequence
  Description of Artificial Sequence: Synthetic oligonucleotide
gcccaaacgaaucgaggaa

SEQ ID NO: 384198 - RNA, 19 nt, Artificial Sequence
  Description of Artificial Sequence: Synthetic oligonucleotide
agggugcugaaaagacaca

SEQ ID NO: 384199 - RNA, 19 nt, Artificial Sequence
  Description of Artificial Sequence: Synthetic oligonucleotide
cugugagucgacauccauu

SEQ ID NO: 384200 - RNA, 19 nt, Artificial Sequence
  Description of Artificial Sequence: Synthetic oligonucleotide
gaagaggagcauccuuauu

SEQ ID NO: 384201 - RNA, 19 nt, Artificial Sequence
  Description of Artificial Sequence: Synthetic oligonucleotide
gcacguaagcccaaacgaa

SEQ ID NO: 384202 - RNA, 19 nt, Artificial Sequence
  Description of Artificial Sequence: Synthetic oligonucleotide
cgagccaaugguagacccc

SEQ ID NO: 384203 - RNA, 19 nt, Artificial Sequence
  Description of Artificial Sequence: Synthetic oligonucleotide
cagcggaguagcauuaguu

SEQ ID NO: 384204 - RNA, 19 nt, Artificial Sequence
  Description of Artificial Sequence: Synthetic oligonucleotide
gugcuuggauuugucaggu

SEQ ID NO: 384205 - RNA, 19 nt, Artificial Sequence
  Description of Artificial Sequence: Synthetic oligonucleotide
gugaugaggaggggucgga

SEQ ID NO: 384206 - RNA, 19 nt, Artificial Sequence
  Description of Artificial Sequence: Synthetic oligonucleotide
gcgucagcugucaugcuga

SEQ ID NO: 384207 - RNA, 19 nt, Artificial Sequence
  Description of Artificial Sequence: Synthetic oligonucleotide
gagaaauccugggcagggu

SEQ ID NO: 384208 - RNA, 19 nt, Artificial Sequence
  Description of Artificial Sequence: Synthetic oligonucleotide
ggccccuauuacuucaagu

SEQ ID NO: 384209 - RNA, 19 nt, Artificial Sequence
  Description of Artificial Sequence: Synthetic oligonucleotide
ggggcacguaagcccaaac

SEQ ID NO: 384210 - RNA, 19 nt, Artificial Sequence
  Description of Artificial Sequence: Synthetic oligonucleotide
ggucggacucgagccaaug

SEQ ID NO: 384211 - RNA, 19 nt, Artificial Sequence
  Description of Artificial Sequence: Synthetic oligonucleotide
cauucacagggugcugaaa

SEQ ID NO: 384212 - RNA, 19 nt, Artificial Sequence
  Description of Artificial Sequence: Synthetic oligonucleotide
ggaccauccuuugaauacu

SEQ ID NO: 384213 - RNA, 19 nt, Artificial Sequence
  Description of Artificial Sequence: Synthetic oligonucleotide
cgcgucagcugucaugcug

SEQ ID NO: 384214 - RNA, 19 nt, Artificial Sequence
  Description of Artificial Sequence: Synthetic oligonucleotide
agggauggacauacaucuu

SEQ ID NO: 384215 - RNA, 19 nt, Artificial Sequence
  Description of Artificial Sequence: Synthetic oligonucleotide
gcgagacucugagagggga

SEQ ID NO: 384216 - RNA, 19 nt, Artificial Sequence
  Description of Artificial Sequence: Synthetic oligonucleotide
auccagcgcgucagcuguc

SEQ ID NO: 384217 - RNA, 19 nt, Artificial Sequence
  Description of Artificial Sequence: Synthetic oligonucleotide
caggccccuauuacuucaa

SEQ ID NO: 384218 - RNA, 19 nt, Artificial Sequence
  Description of Artificial Sequence: Synthetic oligonucleotide
ggaucuuauccagcggagu

SEQ ID NO: 384219 - RNA, 19 nt, Artificial Sequence
  Description of Artificial Sequence: Synthetic oligonucleotide
agggugcugaaaggugauu

SEQ ID NO: 384220 - RNA, 19 nt, Artificial Sequence
  Description of Artificial Sequence: Synthetic oligonucleotide
cuucggucuggugcuugga

SEQ ID NO: 384221 - RNA, 19 nt, Artificial Sequence
  Description of Artificial Sequence: Synthetic oligonucleotide
cauccggggugauccggaa

SEQ ID NO: 384222 - RNA, 19 nt, Artificial Sequence
  Description of Artificial Sequence: Synthetic oligonucleotide
cggccaucgaagagacagg

SEQ ID NO: 384223 - RNA, 19 nt, Artificial Sequence
  Description of Artificial Sequence: Synthetic oligonucleotide
ccucaucgucacagggaug

SEQ ID NO: 384224 - RNA, 19 nt, Artificial Sequence
  Description of Artificial Sequence: Synthetic oligonucleotide
ggagaugcauuaguauuuu

SEQ ID NO: 384225 - RNA, 19 nt, Artificial Sequence
  Description of Artificial Sequence: Synthetic oligonucleotide
aggggcacguaagcccaaa

SEQ ID NO: 384226 - RNA, 19 nt, Artificial Sequence
  Description of Artificial Sequence: Synthetic oligonucleotide
cagggugcugaaaggugau

SEQ ID NO: 384227 - RNA, 19 nt, Artificial Sequence
  Description of Artificial Sequence: Synthetic oligonucleotide
cacaaacaugaaucaccuu

SEQ ID NO: 384228 - RNA, 19 nt, Artificial Sequence
  Description of Artificial Sequence: Synthetic oligonucleotide
ccguggagugagauagcca

SEQ ID NO: 384229 - RNA, 19 nt, Artificial Sequence
  Description of Artificial Sequence: Synthetic oligonucleotide
caggguguuauaggccacu

SEQ ID NO: 384230 - RNA, 19 nt, Artificial Sequence
  Description of Artificial Sequence: Synthetic oligonucleotide
ggagugauaugagguguau

SEQ ID NO: 384231 - RNA, 19 nt, Artificial Sequence
  Description of Artificial Sequence: Synthetic oligonucleotide
cagccccuuguagaguuua

SEQ ID NO: 384232 - RNA, 19 nt, Artificial Sequence
  Description of Artificial Sequence: Synthetic oligonucleotide
cagcucacacguguugagu

SEQ ID NO: 384233 - RNA, 19 nt, Artificial Sequence
  Description of Artificial Sequence: Synthetic oligonucleotide
cccucaucgucacagggau

SEQ ID NO: 384234 - RNA, 19 nt, Artificial Sequence
  Description of Artificial Sequence: Synthetic oligonucleotide
ggaucaguguauggguuuu

SEQ ID NO: 384235 - RNA, 19 nt, Artificial Sequence
  Description of Artificial Sequence: Synthetic oligonucleotide
ccaucccgcugauagagau

SEQ ID NO: 384236 - RNA, 19 nt, Artificial Sequence
  Description of Artificial Sequence: Synthetic oligonucleotide
cggggugauccggaagagg

SEQ ID NO: 384237 - RNA, 19 nt, Artificial Sequence
  Description of Artificial Sequence: Synthetic oligonucleotide
cgcugauagagauccugaa

SEQ ID NO: 384238 - RNA, 19 nt, Artificial Sequence
  Description of Artificial Sequence: Synthetic oligonucleotide
gagcagcauaaaaccgcau

SEQ ID NO: 384239 - RNA, 19 nt, Artificial Sequence
  Description of Artificial Sequence: Synthetic oligonucleotide
ccggggugauccggaagag

SEQ ID NO: 384240 - RNA, 19 nt, Artificial Sequence
  Description of Artificial Sequence: Synthetic oligonucleotide
gcaucgggugguucuuggu

SEQ ID NO: 384241 - RNA, 19 nt, Artificial Sequence
  Description of Artificial Sequence: Synthetic oligonucleotide
cggacucgagccaauggua

SEQ ID NO: 384242 - RNA, 19 nt, Artificial Sequence
  Description of Artificial Sequence: Synthetic oligonucleotide
gcuuccaaucaggguguua

SEQ ID NO: 384243 - RNA, 19 nt, Artificial Sequence
  Description of Artificial Sequence: Synthetic oligonucleotide
cucgaacaggggugccaau

SEQ ID NO: 384244 - RNA, 19 nt, Artificial Sequence
  Description of Artificial Sequence: Synthetic oligonucleotide
ccagcggaguagcauuagu

SEQ ID NO: 384245 - RNA, 19 nt, Artificial Sequence
  Description of Artificial Sequence: Synthetic oligonucleotide
cacuagugcugggaagcuu

SEQ ID NO: 384246 - RNA, 19 nt, Artificial Sequence
  Description of Artificial Sequence: Synthetic oligonucleotide
ccgcauguugugauucaau

SEQ ID NO: 384247 - RNA, 19 nt, Artificial Sequence
  Description of Artificial Sequence: Synthetic oligonucleotide
ccaaugggugggcaaucau

SEQ ID NO: 384248 - RNA, 19 nt, Artificial Sequence
  Description of Artificial Sequence: Synthetic oligonucleotide
cauuuccauccggggugau

SEQ ID NO: 384249 - RNA, 19 nt, Artificial Sequence
  Description of Artificial Sequence: Synthetic oligonucleotide
gccggccaucgaagagaca

SEQ ID NO: 384250 - RNA, 19 nt, Artificial Sequence
  Description of Artificial Sequence: Synthetic oligonucleotide
gcgcgucagcugucaugcu

SEQ ID NO: 384251 - RNA, 19 nt, Artificial Sequence
  Description of Artificial Sequence: Synthetic oligonucleotide
gggucggacucgagccaau

SEQ ID NO: 384252 - RNA, 19 nt, Artificial Sequence
  Description of Artificial Sequence: Synthetic oligonucleotide
ccagcgcgucagcugucau

SEQ ID NO: 384253 - RNA, 19 nt, Artificial Sequence
  Description of Artificial Sequence: Synthetic oligonucleotide
aaaauucucagcaauauac

SEQ ID NO: 384254 - RNA, 19 nt, Artificial Sequence
  Description of Artificial Sequence: Synthetic oligonucleotide
agucuuuaaauacauauac

SEQ ID NO: 384255 - RNA, 19 nt, Artificial Sequence
  Description of Artificial Sequence: Synthetic oligonucleotide
cauaacaagaucuuuauag

SEQ ID NO: 384256 - RNA, 19 nt, Artificial Sequence
  Description of Artificial Sequence: Synthetic oligonucleotide
agugcaaucguuuucacgg

SEQ ID NO: 384257 - RNA, 19 nt, Artificial Sequence
  Description of Artificial Sequence: Synthetic oligonucleotide
acugaauuggaguaggacc

SEQ ID NO: 384258 - RNA, 19 nt, Artificial Sequence
  Description of Artificial Sequence: Synthetic oligonucleotide
agcuuuguaacuuggaacc

SEQ ID NO: 384259 - RNA, 19 nt, Artificial Sequence
  Description of Artificial Sequence: Synthetic oligonucleotide
cuuaacgugaaucaaaagc

SEQ ID NO: 384260 - RNA, 19 nt, Artificial Sequence
  Description of Artificial Sequence: Synthetic oligonucleotide
aaauaagcaauucuuauau

SEQ ID NO: 384261 - RNA, 19 nt, Artificial Sequence
  Description of Artificial Sequence: Synthetic oligonucleotide
uuaacgugaaucaaaagca

SEQ ID NO: 384262 - RNA, 19 nt, Artificial Sequence
  Description of Artificial Sequence: Synthetic oligonucleotide
uguauaagcuuccauuucg

SEQ ID NO: 384263 - RNA, 19 nt, Artificial Sequence
  Description of Artificial Sequence: Synthetic oligonucleotide
uuugaaagcagcuuaacgu

SEQ ID NO: 384264 - RNA, 19 nt, Artificial Sequence
  Description of Artificial Sequence: Synthetic oligonucleotide
auauuugcaacuuagcuca

SEQ ID NO: 384265 - RNA, 19 nt, Artificial Sequence
  Description of Artificial Sequence: Synthetic oligonucleotide
uuuugaaagcagcuuaacg

SEQ ID NO: 384266 - RNA, 19 nt, Artificial Sequence
  Description of Artificial Sequence: Synthetic oligonucleotide
aauacaugcagcaucauug

SEQ ID NO: 384267 - RNA, 19 nt, Artificial Sequence
  Description of Artificial Sequence: Synthetic oligonucleotide
aacaagaucuuuauagagc

SEQ ID NO: 384268 - RNA, 19 nt, Artificial Sequence
  Description of Artificial Sequence: Synthetic oligonucleotide
gauucaaugauaucagaag

SEQ ID NO: 384269 - RNA, 19 nt, Artificial Sequence
  Description of Artificial Sequence: Synthetic oligonucleotide
ugcacuaucccacugaucu

SEQ ID NO: 384270 - RNA, 19 nt, Artificial Sequence
  Description of Artificial Sequence: Synthetic oligonucleotide
aaugaaaguuuguuguguc

SEQ ID NO: 384271 - RNA, 19 nt, Artificial Sequence
  Description of Artificial Sequence: Synthetic oligonucleotide
uaaacaggugaaaauaagc

SEQ ID NO: 384272 - RNA, 19 nt, Artificial Sequence
  Description of Artificial Sequence: Synthetic oligonucleotide
aaaacccucagauuuuauc

SEQ ID NO: 384273 - RNA, 19 nt, Artificial Sequence
  Description of Artificial Sequence: Synthetic oligonucleotide
ugauguaagggacaaguag

SEQ ID NO: 384274 - RNA, 19 nt, Artificial Sequence
  Description of Artificial Sequence: Synthetic oligonucleotide
auuaauaauguccugacuu

SEQ ID NO: 384275 - RNA, 19 nt, Artificial Sequence
  Description of Artificial Sequence: Synthetic oligonucleotide
aguuaggugaaucccgucc

SEQ ID NO: 384276 - RNA, 19 nt, Artificial Sequence
  Description of Artificial Sequence: Synthetic oligonucleotide
caaagagauccuuugaucc

SEQ ID NO: 384277 - RNA, 19 nt, Artificial Sequence
  Description of Artificial Sequence: Synthetic oligonucleotide
aaacccucagauuuuauca

SEQ ID NO: 384278 - RNA, 19 nt, Artificial Sequence
  Description of Artificial Sequence: Synthetic oligonucleotide
ugacuuaccagauuugugc

SEQ ID NO: 384279 - RNA, 19 nt, Artificial Sequence
  Description of Artificial Sequence: Synthetic oligonucleotide
uauauuugcaacuuagcuc

SEQ ID NO: 384280 - RNA, 19 nt, Artificial Sequence
  Description of Artificial Sequence: Synthetic oligonucleotide
aacccauaaaaccugugag

SEQ ID NO: 384281 - RNA, 19 nt, Artificial Sequence
  Description of Artificial Sequence: Synthetic oligonucleotide
auauauuugcaacuuagcu

SEQ ID NO: 384282 - RNA, 19 nt, Artificial Sequence
  Description of Artificial Sequence: Synthetic oligonucleotide
auuguuguuucccaaaucu

SEQ ID NO: 384283 - RNA, 19 nt, Artificial Sequence
  Description of Artificial Sequence: Synthetic oligonucleotide
aaacgauuggcccagaauu

SEQ ID NO: 384284 - RNA, 19 nt, Artificial Sequence
  Description of Artificial Sequence: Synthetic oligonucleotide
uuacauuuaaacgauuggc

SEQ ID NO: 384285 - RNA, 19 nt, Artificial Sequence
  Description of Artificial Sequence: Synthetic oligonucleotide
aaaauaagcaauucuuaua

SEQ ID NO: 384286 - RNA, 19 nt, Artificial Sequence
  Description of Artificial Sequence: Synthetic oligonucleotide
uuuucgucuauuuuggcac

SEQ ID NO: 384287 - RNA, 19 nt, Artificial Sequence
  Description of Artificial Sequence: Synthetic oligonucleotide
acaaguagaacucaguaau

SEQ ID NO: 384288 - RNA, 19 nt, Artificial Sequence
  Description of Artificial Sequence: Synthetic oligonucleotide
uucgguuucgguuuuaugu

SEQ ID NO: 384289 - RNA, 19 nt, Artificial Sequence
  Description of Artificial Sequence: Synthetic oligonucleotide
cagauuugugcuuaaauac

SEQ ID NO: 384290 - RNA, 19 nt, Artificial Sequence
  Description of Artificial Sequence: Synthetic oligonucleotide
cugaauaucguuuggcacc

SEQ ID NO: 384291 - RNA, 19 nt, Artificial Sequence
  Description of Artificial Sequence: Synthetic oligonucleotide
agaaacuuccuuuauuucu

SEQ ID NO: 384292 - RNA, 19 nt, Artificial Sequence
  Description of Artificial Sequence: Synthetic oligonucleotide
aaaaccugugagcaccagg

SEQ ID NO: 384293 - RNA, 19 nt, Artificial Sequence
  Description of Artificial Sequence: Synthetic oligonucleotide
acuaauggugucuucugac

SEQ ID NO: 384294 - RNA, 19 nt, Artificial Sequence
  Description of Artificial Sequence: Synthetic oligonucleotide
ggaaacacaggacuaaugg

SEQ ID NO: 384295 - RNA, 19 nt, Artificial Sequence
  Description of Artificial Sequence: Synthetic oligonucleotide
uacauuugcacccaagaaa

SEQ ID NO: 384296 - RNA, 19 nt, Artificial Sequence
  Description of Artificial Sequence: Synthetic oligonucleotide
ucagcaauauacauuugca

SEQ ID NO: 384297 - RNA, 19 nt, Artificial Sequence
  Description of Artificial Sequence: Synthetic oligonucleotide
ugugcuuaaauacugccuc

SEQ ID NO: 384298 - RNA, 19 nt, Artificial Sequence
  Description of Artificial Sequence: Synthetic oligonucleotide
uuccguaggaaacacagga

SEQ ID NO: 384299 - RNA, 19 nt, Artificial Sequence
  Description of Artificial Sequence: Synthetic oligonucleotide
acccauaaaaccugugagc

SEQ ID NO: 384300 - RNA, 19 nt, Artificial Sequence
  Description of Artificial Sequence: Synthetic oligonucleotide
cagugcaacacuuauuucc

SEQ ID NO: 384301 - RNA, 19 nt, Artificial Sequence
  Description of Artificial Sequence: Synthetic oligonucleotide
uuauagagcuggaauaaga

SEQ ID NO: 384302 - RNA, 19 nt, Artificial Sequence
  Description of Artificial Sequence: Synthetic oligonucleotide
acuauuuuccuuuauggau

SEQ ID NO: 384303 - RNA, 19 nt, Artificial Sequence
  Description of Artificial Sequence: Synthetic oligonucleotide
uguagugacugaauuggag

SEQ ID NO: 384304 - RNA, 19 nt, Artificial Sequence
  Description of Artificial Sequence: Synthetic oligonucleotide
ugagcuauagcuucccuug

SEQ ID NO: 384305 - RNA, 19 nt, Artificial Sequence
  Description of Artificial Sequence: Synthetic oligonucleotide
uguugugugguacaguuuc

SEQ ID NO: 384306 - RNA, 19 nt, Artificial Sequence
  Description of Artificial Sequence: Synthetic oligonucleotide
aguacucucuuuaacgugc

SEQ ID NO: 384307 - RNA, 19 nt, Artificial Sequence
  Description of Artificial Sequence: Synthetic oligonucleotide
aaugccgcagaaguucucc

SEQ ID NO: 384308 - RNA, 19 nt, Artificial Sequence
  Description of Artificial Sequence: Synthetic oligonucleotide
ucauuagacgccgugauug

SEQ ID NO: 384309 - RNA, 19 nt, Artificial Sequence
  Description of Artificial Sequence: Synthetic oligonucleotide
uccauuucgugucuaauac

SEQ ID NO: 384310 - RNA, 19 nt, Artificial Sequence
  Description of Artificial Sequence: Synthetic oligonucleotide
aauuaauaauguccugacu

SEQ ID NO: 384311 - RNA, 19 nt, Artificial Sequence
  Description of Artificial Sequence: Synthetic oligonucleotide
agugaagcuuguuguaggc

SEQ ID NO: 384312 - RNA, 19 nt, Artificial Sequence
  Description of Artificial Sequence: Synthetic oligonucleotide
aguuuguugugucucccgc

SEQ ID NO: 384313 - RNA, 19 nt, Artificial Sequence
  Description of Artificial Sequence: Synthetic oligonucleotide
auaacaagaucuuuauaga

SEQ ID NO: 384314 - RNA, 19 nt, Artificial Sequence
  Description of Artificial Sequence: Synthetic oligonucleotide
uaacgugaaucaaaagcag

SEQ ID NO: 384315 - RNA, 19 nt, Artificial Sequence
  Description of Artificial Sequence: Synthetic oligonucleotide
ucuuuauagagcuggaaua

SEQ ID NO: 384316 - RNA, 19 nt, Artificial Sequence
  Description of Artificial Sequence: Synthetic oligonucleotide
gucccugugaaaauaaugg

SEQ ID NO: 384317 - RNA, 19 nt, Artificial Sequence
  Description of Artificial Sequence: Synthetic oligonucleotide
aaaccuuuugaugauggca

SEQ ID NO: 384318 - RNA, 19 nt, Artificial Sequence
  Description of Artificial Sequence: Synthetic oligonucleotide
ugugcaaguacaauagcau

SEQ ID NO: 384319 - RNA, 19 nt, Artificial Sequence
  Description of Artificial Sequence: Synthetic oligonucleotide
uguugcauacuguagugac

SEQ ID NO: 384320 - RNA, 19 nt, Artificial Sequence
  Description of Artificial Sequence: Synthetic oligonucleotide
aaguacucucuuuaacgug

SEQ ID NO: 384321 - RNA, 19 nt, Artificial Sequence
  Description of Artificial Sequence: Synthetic oligonucleotide
accugaguuaacuugggug

SEQ ID NO: 384322 - RNA, 19 nt, Artificial Sequence
  Description of Artificial Sequence: Synthetic oligonucleotide
auuggaaguagauggcaag

SEQ ID NO: 384323 - RNA, 19 nt, Artificial Sequence
  Description of Artificial Sequence: Synthetic oligonucleotide
agaacuaucuguugcauuu

SEQ ID NO: 384324 - RNA, 19 nt, Artificial Sequence
  Description of Artificial Sequence: Synthetic oligonucleotide
ugugccuuuuacuugggga

SEQ ID NO: 384325 - RNA, 19 nt, Artificial Sequence
  Description of Artificial Sequence: Synthetic oligonucleotide
uuugauccuguauuuaguc

SEQ ID NO: 384326 - RNA, 19 nt, Artificial Sequence
  Description of Artificial Sequence: Synthetic oligonucleotide
ucccaaaucuucauauuca

SEQ ID NO: 384327 - RNA, 19 nt, Artificial Sequence
  Description of Artificial Sequence: Synthetic oligonucleotide
uuugcacccaagaaauaca

SEQ ID NO: 384328 - RNA, 19 nt, Artificial Sequence
  Description of Artificial Sequence: Synthetic oligonucleotide
auaauguccugacuuguug

SEQ ID NO: 384329 - RNA, 19 nt, Artificial Sequence
  Description of Artificial Sequence: Synthetic oligonucleotide
ugagauucagugcaaucgu

SEQ ID NO: 384330 - RNA, 19 nt, Artificial Sequence
  Description of Artificial Sequence: Synthetic oligonucleotide
uuggccuuauguaaaguac

SEQ ID NO: 384331 - RNA, 19 nt, Artificial Sequence
  Description of Artificial Sequence: Synthetic oligonucleotide
agcacugaucacuuggcuc

SEQ ID NO: 384332 - RNA, 19 nt, Artificial Sequence
  Description of Artificial Sequence: Synthetic oligonucleotide
ccuaaauauagauucaaug

SEQ ID NO: 384333 - RNA, 19 nt, Artificial Sequence
  Description of Artificial Sequence: Synthetic oligonucleotide
uaacgugcugauguaaggg

SEQ ID NO: 384334 - RNA, 19 nt, Artificial Sequence
  Description of Artificial Sequence: Synthetic oligonucleotide
uaacuuggguguauaagcu

SEQ ID NO: 384335 - RNA, 19 nt, Artificial Sequence
  Description of Artificial Sequence: Synthetic oligonucleotide
aagcagcuuaacgugaauc

SEQ ID NO: 384336 - RNA, 19 nt, Artificial Sequence
  Description of Artificial Sequence: Synthetic oligonucleotide
auauagauucaaugauauc

SEQ ID NO: 384337 - RNA, 19 nt, Artificial Sequence
  Description of Artificial Sequence: Synthetic oligonucleotide
uacuuugaaaagaauuaau

SEQ ID NO: 384338 - RNA, 19 nt, Artificial Sequence
  Description of Artificial Sequence: Synthetic oligonucleotide
uucaauggacuccuguaac

SEQ ID NO: 384339 - RNA, 19 nt, Artificial Sequence
  Description of Artificial Sequence: Synthetic oligonucleotide
acuaccuuuucuucuagga

SEQ ID NO: 384340 - RNA, 19 nt, Artificial Sequence
  Description of Artificial Sequence: Synthetic oligonucleotide
cagaguuaggugaaucccg

SEQ ID NO: 384341 - RNA, 19 nt, Artificial Sequence
  Description of Artificial Sequence: Synthetic oligonucleotide
aauaagacgggaucuucuu

SEQ ID NO: 384342 - RNA, 19 nt, Artificial Sequence
  Description of Artificial Sequence: Synthetic oligonucleotide
uguaaaguacucucuuuaa

SEQ ID NO: 384343 - RNA, 19 nt, Artificial Sequence
  Description of Artificial Sequence: Synthetic oligonucleotide
agcuauagcuucccuuggc

SEQ ID NO: 384344 - RNA, 19 nt, Artificial Sequence
  Description of Artificial Sequence: Synthetic oligonucleotide
cuaggaacgguguauuaac

SEQ ID NO: 384345 - RNA, 19 nt, Artificial Sequence
  Description of Artificial Sequence: Synthetic oligonucleotide
ucauauucaauggacuccu

SEQ ID NO: 384346 - RNA, 19 nt, Artificial Sequence
  Description of Artificial Sequence: Synthetic oligonucleotide
auauuugaggauccuggug

SEQ ID NO: 384347 - RNA, 19 nt, Artificial Sequence
  Description of Artificial Sequence: Synthetic oligonucleotide
agcagcuuaacgugaauca

SEQ ID NO: 384348 - RNA, 19 nt, Artificial Sequence
  Description of Artificial Sequence: Synthetic oligonucleotide
uuuauagagcuggaauaag

SEQ ID NO: 384349 - RNA, 19 nt, Artificial Sequence
  Description of Artificial Sequence: Synthetic oligonucleotide
agugcaacacuuauuuccg

SEQ ID NO: 384350 - RNA, 19 nt, Artificial Sequence
  Description of Artificial Sequence: Synthetic oligonucleotide
ucgguuucgguuuuaugug

SEQ ID NO: 384351 - RNA, 19 nt, Artificial Sequence
  Description of Artificial Sequence: Synthetic oligonucleotide
ucaaugauaucagaaguua

SEQ ID NO: 384352 - RNA, 19 nt, Artificial Sequence
  Description of Artificial Sequence: Synthetic oligonucleotide
uguuccucccugcauaagu

SEQ ID NO: 384353 - RNA, 19 nt, Artificial Sequence
  Description of Artificial Sequence: Synthetic oligonucleotide
aacgauuggcccagaauuc

SEQ ID NO: 384354 - RNA, 19 nt, Artificial Sequence
  Description of Artificial Sequence: Synthetic oligonucleotide
cugaauuggaguaggacca

SEQ ID NO: 384355 - RNA, 19 nt, Artificial Sequence
  Description of Artificial Sequence: Synthetic oligonucleotide
uucgguuuuaugugcaagu

SEQ ID NO: 384356 - RNA, 19 nt, Artificial Sequence
  Description of Artificial Sequence: Synthetic oligonucleotide
uauaagcuuccauuucgug

SEQ ID NO: 384357 - RNA, 19 nt, Artificial Sequence
  Description of Artificial Sequence: Synthetic oligonucleotide
auuuaaacgauuggcccag

SEQ ID NO: 384358 - RNA, 19 nt, Artificial Sequence
  Description of Artificial Sequence: Synthetic oligonucleotide
aaaucuagcauuggguuuu

SEQ ID NO: 384359 - RNA, 19 nt, Artificial Sequence
  Description of Artificial Sequence: Synthetic oligonucleotide
uuuaucaaugcacccuuua

SEQ ID NO: 384360 - RNA, 19 nt, Artificial Sequence
  Description of Artificial Sequence: Synthetic oligonucleotide
uccggaauuuccaucugug

SEQ ID NO: 384361 - RNA, 19 nt, Artificial Sequence
  Description of Artificial Sequence: Synthetic oligonucleotide
uuuacuuggggacgcgaga

SEQ ID NO: 384362 - RNA, 19 nt, Artificial Sequence
  Description of Artificial Sequence: Synthetic oligonucleotide
auuuuaucaaugcacccuu

SEQ ID NO: 384363 - RNA, 19 nt, Artificial Sequence
  Description of Artificial Sequence: Synthetic oligonucleotide
uuagacgccgugauugcca

SEQ ID NO: 384364 - RNA, 19 nt, Artificial Sequence
  Description of Artificial Sequence: Synthetic oligonucleotide
ugcauaagugcuccuccag

SEQ ID NO: 384365 - RNA, 19 nt, Artificial Sequence
  Description of Artificial Sequence: Synthetic oligonucleotide
uucuucauuagacgccgug

SEQ ID NO: 384366 - RNA, 19 nt, Artificial Sequence
  Description of Artificial Sequence: Synthetic oligonucleotide
ucguuuggcaccaucuggu

SEQ ID NO: 384367 - RNA, 19 nt, Artificial Sequence
  Description of Artificial Sequence: Synthetic oligonucleotide
uaaacgauuggcccagaau

SEQ ID NO: 384368 - RNA, 19 nt, Artificial Sequence
  Description of Artificial Sequence: Synthetic oligonucleotide
cagcaauauacauuugcac

SEQ ID NO: 384369 - RNA, 19 nt, Artificial Sequence
  Description of Artificial Sequence: Synthetic oligonucleotide
aucguuuucacggaauugu

SEQ ID NO: 384370 - RNA, 19 nt, Artificial Sequence
  Description of Artificial Sequence: Synthetic oligonucleotide
ccugugaaaauaaugggac

SEQ ID NO: 384371 - RNA, 19 nt, Artificial Sequence
  Description of Artificial Sequence: Synthetic oligonucleotide
ucuaugugacuuaccagau

SEQ ID NO: 384372 - RNA, 19 nt, Artificial Sequence
  Description of Artificial Sequence: Synthetic oligonucleotide
aauuggaguaggaccauga

SEQ ID NO: 384373 - RNA, 19 nt, Artificial Sequence
  Description of Artificial Sequence: Synthetic oligonucleotide
acgauuggcccagaauucc

SEQ ID NO: 384374 - RNA, 19 nt, Artificial Sequence
  Description of Artificial Sequence: Synthetic oligonucleotide
uuacuuggggacgcgagag

SEQ ID NO: 384375 - RNA, 19 nt, Artificial Sequence
  Description of Artificial Sequence: Synthetic oligonucleotide
uguugggccggacaucagc

SEQ ID NO: 384376 - RNA, 19 nt, Artificial Sequence
  Description of Artificial Sequence: Synthetic oligonucleotide
ucucaaaccauugcagcca

SEQ ID NO: 384377 - RNA, 19 nt, Artificial Sequence
  Description of Artificial Sequence: Synthetic oligonucleotide
uuccgcuugaacuugggua

SEQ ID NO: 384378 - RNA, 19 nt, Artificial Sequence
  Description of Artificial Sequence: Synthetic oligonucleotide
uccugcuugugacuggaug

SEQ ID NO: 384379 - RNA, 19 nt, Artificial Sequence
  Description of Artificial Sequence: Synthetic oligonucleotide
auaagacgggaucuucuug

SEQ ID NO: 384380 - RNA, 19 nt, Artificial Sequence
  Description of Artificial Sequence: Synthetic oligonucleotide
ugacuuguugcauacugua

SEQ ID NO: 384381 - RNA, 19 nt, Artificial Sequence
  Description of Artificial Sequence: Synthetic oligonucleotide
guaauauuugaggauccug

SEQ ID NO: 384382 - RNA, 19 nt, Artificial Sequence
  Description of Artificial Sequence: Synthetic oligonucleotide
cuuuucgucuauuuuggca

SEQ ID NO: 384383 - RNA, 19 nt, Artificial Sequence
  Description of Artificial Sequence: Synthetic oligonucleotide
auuuagucggucccuguga

SEQ ID NO: 384384 - RNA, 19 nt, Artificial Sequence
  Description of Artificial Sequence: Synthetic oligonucleotide
cuacuagcagcacugcuug

SEQ ID NO: 384385 - RNA, 19 nt, Artificial Sequence
  Description of Artificial Sequence: Synthetic oligonucleotide
uaauaauguccugacuugu

SEQ ID NO: 384386 - RNA, 19 nt, Artificial Sequence
  Description of Artificial Sequence: Synthetic oligonucleotide
uuuagucggucccugugaa

SEQ ID NO: 384387 - RNA, 19 nt, Artificial Sequence
  Description of Artificial Sequence: Synthetic oligonucleotide
aacgugaaucaaaagcagu

SEQ ID NO: 384388 - RNA, 19 nt, Artificial Sequence
  Description of Artificial Sequence: Synthetic oligonucleotide
aauucagacugaauaucgu

SEQ ID NO: 384389 - RNA, 19 nt, Artificial Sequence
  Description of Artificial Sequence: Synthetic oligonucleotide
ugaauaucguuuggcacca

SEQ ID NO: 384390 - RNA, 19 nt, Artificial Sequence
  Description of Artificial Sequence: Synthetic oligonucleotide
auuagacgccgugauugcc

SEQ ID NO: 384391 - RNA, 19 nt, Artificial Sequence
  Description of Artificial Sequence: Synthetic oligonucleotide
uccuaaggaaaccauuguu

SEQ ID NO: 384392 - RNA, 19 nt, Artificial Sequence
  Description of Artificial Sequence: Synthetic oligonucleotide
agauucaaugauaucagaa

SEQ ID NO: 384393 - RNA, 19 nt, Artificial Sequence
  Description of Artificial Sequence: Synthetic oligonucleotide
uguauuuagucggucccug

SEQ ID NO: 384394 - RNA, 19 nt, Artificial Sequence
  Description of Artificial Sequence: Synthetic oligonucleotide
auacaugcagcaucauugu

SEQ ID NO: 384395 - RNA, 19 nt, Artificial Sequence
  Description of Artificial Sequence: Synthetic oligonucleotide
uuuguaacuuggaaccguu

SEQ ID NO: 384396 - RNA, 19 nt, Artificial Sequence
  Description of Artificial Sequence: Synthetic oligonucleotide
ucuaggaacgguguauuaa

SEQ ID NO: 384397 - RNA, 19 nt, Artificial Sequence
  Description of Artificial Sequence: Synthetic oligonucleotide
uagugacugaauuggagua

SEQ ID NO: 384398 - RNA, 19 nt, Artificial Sequence
  Description of Artificial Sequence: Synthetic oligonucleotide
ugauaauaccugucugacu

SEQ ID NO: 384399 - RNA, 19 nt, Artificial Sequence
  Description of Artificial Sequence: Synthetic oligonucleotide
accagauuugugcuuaaau

SEQ ID NO: 384400 - RNA, 19 nt, Artificial Sequence
  Description of Artificial Sequence: Synthetic oligonucleotide
ugcuggauagguccuaaau

SEQ ID NO: 384401 - RNA, 19 nt, Artificial Sequence
  Description of Artificial Sequence: Synthetic oligonucleotide
uauuuccguaggaaacaca

SEQ ID NO: 384402 - RNA, 19 nt, Artificial Sequence
  Description of Artificial Sequence: Synthetic oligonucleotide
caaggaggaaaugccauag

SEQ ID NO: 384403 - RNA, 19 nt, Artificial Sequence
  Description of Artificial Sequence: Synthetic oligonucleotide
uuggaaccguuccaaauua

SEQ ID NO: 384404 - RNA, 19 nt, Artificial Sequence
  Description of Artificial Sequence: Synthetic oligonucleotide
gauuuuaucaaugcacccu

SEQ ID NO: 384405 - RNA, 19 nt, Artificial Sequence
  Description of Artificial Sequence: Synthetic oligonucleotide
cacuaucccacugaucucc

SEQ ID NO: 384406 - RNA, 19 nt, Artificial Sequence
  Description of Artificial Sequence: Synthetic oligonucleotide
uucacggaauuguuguuuc

SEQ ID NO: 384407 - RNA, 19 nt, Artificial Sequence
  Description of Artificial Sequence: Synthetic oligonucleotide
aggugaaaauaagcaauuc

SEQ ID NO: 384408 - RNA, 19 nt, Artificial Sequence
  Description of Artificial Sequence: Synthetic oligonucleotide
uugagagaaccugaguuaa

SEQ ID NO: 384409 - RNA, 19 nt, Artificial Sequence
  Description of Artificial Sequence: Synthetic oligonucleotide
cuugagauucagugcaauc

SEQ ID NO: 384410 - RNA, 19 nt, Artificial Sequence
  Description of Artificial Sequence: Synthetic oligonucleotide
gugacugaauuggaguagg

SEQ ID NO: 384411 - RNA, 19 nt, Artificial Sequence
  Description of Artificial Sequence: Synthetic oligonucleotide
ucaacccauaaaaccugug

SEQ ID NO: 384412 - RNA, 19 nt, Artificial Sequence
  Description of Artificial Sequence: Synthetic oligonucleotide
cagugcaaucguuuucacg

SEQ ID NO: 384413 - RNA, 19 nt, Artificial Sequence
  Description of Artificial Sequence: Synthetic oligonucleotide
caaagcugucaaaucuagc

SEQ ID NO: 384414 - RNA, 19 nt, Artificial Sequence
  Description of Artificial Sequence: Synthetic oligonucleotide
ucgugucuaauacuuugaa

SEQ ID NO: 384415 - RNA, 19 nt, Artificial Sequence
  Description of Artificial Sequence: Synthetic oligonucleotide
augugcaaguacaauagca

SEQ ID NO: 384416 - RNA, 19 nt, Artificial Sequence
  Description of Artificial Sequence: Synthetic oligonucleotide
uuuacagcuugcuguguuc

SEQ ID NO: 384417 - RNA, 19 nt, Artificial Sequence
  Description of Artificial Sequence: Synthetic oligonucleotide
uuaaacgauuggcccagaa

SEQ ID NO: 384418 - RNA, 19 nt, Artificial Sequence
  Description of Artificial Sequence: Synthetic oligonucleotide
cagacugaauaucguuugg

SEQ ID NO: 384419 - RNA, 19 nt, Artificial Sequence
  Description of Artificial Sequence: Synthetic oligonucleotide
ccuuauguaaaguacucuc

SEQ ID NO: 384420 - RNA, 19 nt, Artificial Sequence
  Description of Artificial Sequence: Synthetic oligonucleotide
auaaguguuucaauucaga

SEQ ID NO: 384421 - RNA, 19 nt, Artificial Sequence
  Description of Artificial Sequence: Synthetic oligonucleotide
gagcuauagcuucccuugg

SEQ ID NO: 384422 - RNA, 19 nt, Artificial Sequence
  Description of Artificial Sequence: Synthetic oligonucleotide
cucuuuaacgugcugaugu

SEQ ID NO: 384423 - RNA, 19 nt, Artificial Sequence
  Description of Artificial Sequence: Synthetic oligonucleotide
cugugauggugcuacuagc

SEQ ID NO: 384424 - RNA, 19 nt, Artificial Sequence
  Description of Artificial Sequence: Synthetic oligonucleotide
cauuagacgccgugauugc

SEQ ID NO: 384425 - RNA, 19 nt, Artificial Sequence
  Description of Artificial Sequence: Synthetic oligonucleotide
cuuuauggauuuggaauug

SEQ ID NO: 384426 - RNA, 19 nt, Artificial Sequence
  Description of Artificial Sequence: Synthetic oligonucleotide
aaaugccgcagaaaugcca

SEQ ID NO: 384427 - RNA, 19 nt, Artificial Sequence
  Description of Artificial Sequence: Synthetic oligonucleotide
gacugaauuggaguaggac

SEQ ID NO: 384428 - RNA, 19 nt, Artificial Sequence
  Description of Artificial Sequence: Synthetic oligonucleotide
gaaacacaggacuaauggu

SEQ ID NO: 384429 - RNA, 19 nt, Artificial Sequence
  Description of Artificial Sequence: Synthetic oligonucleotide
auaucguuuggcaccaucu

SEQ ID NO: 384430 - RNA, 19 nt, Artificial Sequence
  Description of Artificial Sequence: Synthetic oligonucleotide
uuucgucuauuuuggcaca

SEQ ID NO: 384431 - RNA, 19 nt, Artificial Sequence
  Description of Artificial Sequence: Synthetic oligonucleotide
aagacgggaucuucuugga

SEQ ID NO: 384432 - RNA, 19 nt, Artificial Sequence
  Description of Artificial Sequence: Synthetic oligonucleotide
cacggaauuguuguuuccc

SEQ ID NO: 384433 - RNA, 19 nt, Artificial Sequence
  Description of Artificial Sequence: Synthetic oligonucleotide
agggaucuuagggcuaccc

SEQ ID NO: 384434 - RNA, 19 nt, Artificial Sequence
  Description of Artificial Sequence: Synthetic oligonucleotide
uagucggucccugugaaaa

SEQ ID NO: 384435 - RNA, 19 nt, Artificial Sequence
  Description of Artificial Sequence: Synthetic oligonucleotide
uuaggugaaucccgucccu

SEQ ID NO: 384436 - RNA, 19 nt, Artificial Sequence
  Description of Artificial Sequence: Synthetic oligonucleotide
uuucgguuucgguuuuaug

SEQ ID NO: 384437 - RNA, 19 nt, Artificial Sequence
  Description of Artificial Sequence: Synthetic oligonucleotide
cugguuuacagcuugcugu

SEQ ID NO: 384438 - RNA, 19 nt, Artificial Sequence
  Description of Artificial Sequence: Synthetic oligonucleotide
guagugacugaauuggagu

SEQ ID NO: 384439 - RNA, 19 nt, Artificial Sequence
  Description of Artificial Sequence: Synthetic oligonucleotide
cuuuauagagcuggaauaa

SEQ ID NO: 384440 - RNA, 19 nt, Artificial Sequence
  Description of Artificial Sequence: Synthetic oligonucleotide
acacaggacuaaugguguc

SEQ ID NO: 384441 - RNA, 19 nt, Artificial Sequence
  Description of Artificial Sequence: Synthetic oligonucleotide
cuguaaacagucuuuaaau

SEQ ID NO: 384442 - RNA, 19 nt, Artificial Sequence
  Description of Artificial Sequence: Synthetic oligonucleotide
ugcaaucguuuucacggaa

SEQ ID NO: 384443 - RNA, 19 nt, Artificial Sequence
  Description of Artificial Sequence: Synthetic oligonucleotide
ugauugccacgagugaagc

SEQ ID NO: 384444 - RNA, 19 nt, Artificial Sequence
  Description of Artificial Sequence: Synthetic oligonucleotide
aauaauguccugacuuguu

SEQ ID NO: 384445 - RNA, 19 nt, Artificial Sequence
  Description of Artificial Sequence: Synthetic oligonucleotide
caacccauaaaaccuguga

SEQ ID NO: 384446 - RNA, 19 nt, Artificial Sequence
  Description of Artificial Sequence: Synthetic oligonucleotide
aaugcacccuuuaaguauu

SEQ ID NO: 384447 - RNA, 19 nt, Artificial Sequence
  Description of Artificial Sequence: Synthetic oligonucleotide
ugcuacuagcagcacugcu

SEQ ID NO: 384448 - RNA, 19 nt, Artificial Sequence
  Description of Artificial Sequence: Synthetic oligonucleotide
uggauagguccuaaauaua

SEQ ID NO: 384449 - RNA, 19 nt, Artificial Sequence
  Description of Artificial Sequence: Synthetic oligonucleotide
ugacugaauuggaguagga

SEQ ID NO: 384450 - RNA, 19 nt, Artificial Sequence
  Description of Artificial Sequence: Synthetic oligonucleotide
uguaagggacaaguagaac

SEQ ID NO: 384451 - RNA, 19 nt, Artificial Sequence
  Description of Artificial Sequence: Synthetic oligonucleotide
ggugaaaauaagcaauucu

SEQ ID NO: 384452 - RNA, 19 nt, Artificial Sequence
  Description of Artificial Sequence: Synthetic oligonucleotide
aucccgucccuucuuucgg

SEQ ID NO: 384453 - RNA, 19 nt, Artificial Sequence
  Description of Artificial Sequence: Synthetic oligonucleotide
ucuuuaacgugcugaugua

SEQ ID NO: 384454 - RNA, 19 nt, Artificial Sequence
  Description of Artificial Sequence: Synthetic oligonucleotide
ucacggaauuguuguuucc

SEQ ID NO: 384455 - RNA, 19 nt, Artificial Sequence
  Description of Artificial Sequence: Synthetic oligonucleotide
agauguuucccugggguga

SEQ ID NO: 384456 - RNA, 19 nt, Artificial Sequence
  Description of Artificial Sequence: Synthetic oligonucleotide
cugcuugagagaaccugag

SEQ ID NO: 384457 - RNA, 19 nt, Artificial Sequence
  Description of Artificial Sequence: Synthetic oligonucleotide
auuggaguaggaccaugau

SEQ ID NO: 384458 - RNA, 19 nt, Artificial Sequence
  Description of Artificial Sequence: Synthetic oligonucleotide
aagggacaaguagaacuca

SEQ ID NO: 384459 - RNA, 19 nt, Artificial Sequence
  Description of Artificial Sequence: Synthetic oligonucleotide
ggugcuacuagcagcacug

SEQ ID NO: 384460 - RNA, 19 nt, Artificial Sequence
  Description of Artificial Sequence: Synthetic oligonucleotide
uggaaccguuccaaauuac

SEQ ID NO: 384461 - RNA, 19 nt, Artificial Sequence
  Description of Artificial Sequence: Synthetic oligonucleotide
cuuuccgcuugaacuuggg

SEQ ID NO: 384462 - RNA, 19 nt, Artificial Sequence
  Description of Artificial Sequence: Synthetic oligonucleotide
uguguuccucccugcauaa

SEQ ID NO: 384463 - RNA, 19 nt, Artificial Sequence
  Description of Artificial Sequence: Synthetic oligonucleotide
gugauugccacgagugaag

SEQ ID NO: 384464 - RNA, 19 nt, Artificial Sequence
  Description of Artificial Sequence: Synthetic oligonucleotide
acugcuugagagaaccuga

SEQ ID NO: 384465 - RNA, 19 nt, Artificial Sequence
  Description of Artificial Sequence: Synthetic oligonucleotide
guggugguuaaaccuuuug

SEQ ID NO: 384466 - RNA, 19 nt, Artificial Sequence
  Description of Artificial Sequence: Synthetic oligonucleotide
gaaaugccgcagaaaugcc

SEQ ID NO: 384467 - RNA, 19 nt, Artificial Sequence
  Description of Artificial Sequence: Synthetic oligonucleotide
ccuguauuuagucgguccc

SEQ ID NO: 384468 - RNA, 19 nt, Artificial Sequence
  Description of Artificial Sequence: Synthetic oligonucleotide
uuguaacuuggaaccguuc

SEQ ID NO: 384469 - RNA, 19 nt, Artificial Sequence
  Description of Artificial Sequence: Synthetic oligonucleotide
agagaaccugaguuaacuu

SEQ ID NO: 384470 - RNA, 19 nt, Artificial Sequence
  Description of Artificial Sequence: Synthetic oligonucleotide
uuuuaccuccccagaguua

SEQ ID NO: 384471 - RNA, 19 nt, Artificial Sequence
  Description of Artificial Sequence: Synthetic oligonucleotide
ucagugcaacacuuauuuc

SEQ ID NO: 384472 - RNA, 19 nt, Artificial Sequence
  Description of Artificial Sequence: Synthetic oligonucleotide
acgguguauuaacaggaaa

SEQ ID NO: 384473 - RNA, 19 nt, Artificial Sequence
  Description of Artificial Sequence: Synthetic oligonucleotide
agcuuaacgugaaucaaaa

SEQ ID NO: 384474 - RNA, 19 nt, Artificial Sequence
  Description of Artificial Sequence: Synthetic oligonucleotide
acacauauauuugcaacuu

SEQ ID NO: 384475 - RNA, 19 nt, Artificial Sequence
  Description of Artificial Sequence: Synthetic oligonucleotide
uggguguauaagcuuccau

SEQ ID NO: 384476 - RNA, 19 nt, Artificial Sequence
  Description of Artificial Sequence: Synthetic oligonucleotide
gcacugaucacuuggcuca

SEQ ID NO: 384477 - RNA, 19 nt, Artificial Sequence
  Description of Artificial Sequence: Synthetic oligonucleotide
gugacuuaccagauuugug

SEQ ID NO: 384478 - RNA, 19 nt, Artificial Sequence
  Description of Artificial Sequence: Synthetic oligonucleotide
gacuuaccagauuugugcu

SEQ ID NO: 384479 - RNA, 19 nt, Artificial Sequence
  Description of Artificial Sequence: Synthetic oligonucleotide
gaauuggaguaggaccaug

SEQ ID NO: 384480 - RNA, 19 nt, Artificial Sequence
  Description of Artificial Sequence: Synthetic oligonucleotide
ucguuuucacggaauuguu

SEQ ID NO: 384481 - RNA, 19 nt, Artificial Sequence
  Description of Artificial Sequence: Synthetic oligonucleotide
guugggccggacaucagcc

SEQ ID NO: 384482 - RNA, 19 nt, Artificial Sequence
  Description of Artificial Sequence: Synthetic oligonucleotide
cuuggguagcaacugcuga

SEQ ID NO: 384483 - RNA, 19 nt, Artificial Sequence
  Description of Artificial Sequence: Synthetic oligonucleotide
uggcucauaacaagaucuu

SEQ ID NO: 384484 - RNA, 19 nt, Artificial Sequence
  Description of Artificial Sequence: Synthetic oligonucleotide
uggcugagcuauagcuucc

SEQ ID NO: 384485 - RNA, 19 nt, Artificial Sequence
  Description of Artificial Sequence: Synthetic oligonucleotide
guuuguugugucucccgca

SEQ ID NO: 384486 - RNA, 19 nt, Artificial Sequence
  Description of Artificial Sequence: Synthetic oligonucleotide
acgugaaucaaaagcaguu

SEQ ID NO: 384487 - RNA, 19 nt, Artificial Sequence
  Description of Artificial Sequence: Synthetic oligonucleotide
ccaacagccacauauaagu

SEQ ID NO: 384488 - RNA, 19 nt, Artificial Sequence
  Description of Artificial Sequence: Synthetic oligonucleotide
aaaugccgcagaaguucuc

SEQ ID NO: 384489 - RNA, 19 nt, Artificial Sequence
  Description of Artificial Sequence: Synthetic oligonucleotide
cauuucgugucuaauacuu

SEQ ID NO: 384490 - RNA, 19 nt, Artificial Sequence
  Description of Artificial Sequence: Synthetic oligonucleotide
agggcuacccugugcauaa

SEQ ID NO: 384491 - RNA, 19 nt, Artificial Sequence
  Description of Artificial Sequence: Synthetic oligonucleotide
uguuuccugauggcugagc

SEQ ID NO: 384492 - RNA, 19 nt, Artificial Sequence
  Description of Artificial Sequence: Synthetic oligonucleotide
uuggggacgcgagagcaca

SEQ ID NO: 384493 - RNA, 19 nt, Artificial Sequence
  Description of Artificial Sequence: Synthetic oligonucleotide
ucgguuuuaugugcaagua

SEQ ID NO: 384494 - RNA, 19 nt, Artificial Sequence
  Description of Artificial Sequence: Synthetic oligonucleotide
gaauaagacgggaucuucu

SEQ ID NO: 384495 - RNA, 19 nt, Artificial Sequence
  Description of Artificial Sequence: Synthetic oligonucleotide
aacgguguauuaacaggaa

SEQ ID NO: 384496 - RNA, 19 nt, Artificial Sequence
  Description of Artificial Sequence: Synthetic oligonucleotide
caggacuagcugaaguuga

SEQ ID NO: 384497 - RNA, 19 nt, Artificial Sequence
  Description of Artificial Sequence: Synthetic oligonucleotide
auguaagggacaaguagaa

SEQ ID NO: 384498 - RNA, 19 nt, Artificial Sequence
  Description of Artificial Sequence: Synthetic oligonucleotide
gcuuaacgugaaucaaaag

SEQ ID NO: 384499 - RNA, 19 nt, Artificial Sequence
  Description of Artificial Sequence: Synthetic oligonucleotide
gaugugccuuuuacuuggg

SEQ ID NO: 384500 - RNA, 19 nt, Artificial Sequence
  Description of Artificial Sequence: Synthetic oligonucleotide
ugaguuaacuuggguguau

SEQ ID NO: 384501 - RNA, 19 nt, Artificial Sequence
  Description of Artificial Sequence: Synthetic oligonucleotide
gaccaugauaauaccuguc

SEQ ID NO: 384502 - RNA, 19 nt, Artificial Sequence
  Description of Artificial Sequence: Synthetic oligonucleotide
uucuaggaacgguguauua

SEQ ID NO: 384503 - RNA, 19 nt, Artificial Sequence
  Description of Artificial Sequence: Synthetic oligonucleotide
acuuaccagauuugugcuu

SEQ ID NO: 384504 - RNA, 19 nt, Artificial Sequence
  Description of Artificial Sequence: Synthetic oligonucleotide
ugcauacuguagugacuga

SEQ ID NO: 384505 - RNA, 19 nt, Artificial Sequence
  Description of Artificial Sequence: Synthetic oligonucleotide
guuuccugauggcugagcu

SEQ ID NO: 384506 - RNA, 19 nt, Artificial Sequence
  Description of Artificial Sequence: Synthetic oligonucleotide
accauucuguccauuuugu

SEQ ID NO: 384507 - RNA, 19 nt, Artificial Sequence
  Description of Artificial Sequence: Synthetic oligonucleotide
cacgagugaagcuuguugu

SEQ ID NO: 384508 - RNA, 19 nt, Artificial Sequence
  Description of Artificial Sequence: Synthetic oligonucleotide
uggaauaagacgggaucuu

SEQ ID NO: 384509 - RNA, 19 nt, Artificial Sequence
  Description of Artificial Sequence: Synthetic oligonucleotide
augccgcagaaaugccaac

SEQ ID NO: 384510 - RNA, 19 nt, Artificial Sequence
  Description of Artificial Sequence: Synthetic oligonucleotide
cuuaccagauuugugcuua

SEQ ID NO: 384511 - RNA, 19 nt, Artificial Sequence
  Description of Artificial Sequence: Synthetic oligonucleotide
caaugcacccuuuaaguau

SEQ ID NO: 384512 - RNA, 19 nt, Artificial Sequence
  Description of Artificial Sequence: Synthetic oligonucleotide
ggacaucagccagaaaugc

SEQ ID NO: 384513 - RNA, 19 nt, Artificial Sequence
  Description of Artificial Sequence: Synthetic oligonucleotide
aucagccagaaaugccgca

SEQ ID NO: 384514 - RNA, 19 nt, Artificial Sequence
  Description of Artificial Sequence: Synthetic oligonucleotide
ccagaguuaggugaauccc

SEQ ID NO: 384515 - RNA, 19 nt, Artificial Sequence
  Description of Artificial Sequence: Synthetic oligonucleotide
gcuuuguaacuuggaaccg

SEQ ID NO: 384516 - RNA, 19 nt, Artificial Sequence
  Description of Artificial Sequence: Synthetic oligonucleotide
auccuguauuuagucgguc

SEQ ID NO: 384517 - RNA, 19 nt, Artificial Sequence
  Description of Artificial Sequence: Synthetic oligonucleotide
acgagugaagcuuguugua

SEQ ID NO: 384518 - RNA, 19 nt, Artificial Sequence
  Description of Artificial Sequence: Synthetic oligonucleotide
uguggugguuaaaccuuuu

SEQ ID NO: 384519 - RNA, 19 nt, Artificial Sequence
  Description of Artificial Sequence: Synthetic oligonucleotide
uugcaacuuagcucauuuu

SEQ ID NO: 384520 - RNA, 19 nt, Artificial Sequence
  Description of Artificial Sequence: Synthetic oligonucleotide
caaguagaacucaguaaua

SEQ ID NO: 384521 - RNA, 19 nt, Artificial Sequence
  Description of Artificial Sequence: Synthetic oligonucleotide
gcuggauagguccuaaaua

SEQ ID NO: 384522 - RNA, 19 nt, Artificial Sequence
  Description of Artificial Sequence: Synthetic oligonucleotide
uauuugcaacuuagcucau

SEQ ID NO: 384523 - RNA, 19 nt, Artificial Sequence
  Description of Artificial Sequence: Synthetic oligonucleotide
ugaauuggaguaggaccau

SEQ ID NO: 384524 - RNA, 19 nt, Artificial Sequence
  Description of Artificial Sequence: Synthetic oligonucleotide
caucagcucugggagucgg

SEQ ID NO: 384525 - RNA, 19 nt, Artificial Sequence
  Description of Artificial Sequence: Synthetic oligonucleotide
gguguauaagcuuccauuu

SEQ ID NO: 384526 - RNA, 19 nt, Artificial Sequence
  Description of Artificial Sequence: Synthetic oligonucleotide
uguaggcugucugcaacau

SEQ ID NO: 384527 - RNA, 19 nt, Artificial Sequence
  Description of Artificial Sequence: Synthetic oligonucleotide
gccgugauugccacgagug

SEQ ID NO: 384528 - RNA, 19 nt, Artificial Sequence
  Description of Artificial Sequence: Synthetic oligonucleotide
uugggccggacaucagcca

SEQ ID NO: 384529 - RNA, 19 nt, Artificial Sequence
  Description of Artificial Sequence: Synthetic oligonucleotide
uggggacgcgagagcacag

SEQ ID NO: 384530 - RNA, 19 nt, Artificial Sequence
  Description of Artificial Sequence: Synthetic oligonucleotide
gacgcgagagcacaggcuu

SEQ ID NO: 384531 - RNA, 19 nt, Artificial Sequence
  Description of Artificial Sequence: Synthetic oligonucleotide
aucuguugggccggacauc

SEQ ID NO: 384532 - RNA, 19 nt, Artificial Sequence
  Description of Artificial Sequence: Synthetic oligonucleotide
cuuuaacgugcugauguaa

SEQ ID NO: 384533 - RNA, 19 nt, Artificial Sequence
  Description of Artificial Sequence: Synthetic oligonucleotide
ugcugauguaagggacaag

SEQ ID NO: 384534 - RNA, 19 nt, Artificial Sequence
  Description of Artificial Sequence: Synthetic oligonucleotide
cauacuguagugacugaau

SEQ ID NO: 384535 - RNA, 19 nt, Artificial Sequence
  Description of Artificial Sequence: Synthetic oligonucleotide
cacauauauuugcaacuua

SEQ ID NO: 384536 - RNA, 19 nt, Artificial Sequence
  Description of Artificial Sequence: Synthetic oligonucleotide
ucccgcaugcaggacuagc

SEQ ID NO: 384537 - RNA, 19 nt, Artificial Sequence
  Description of Artificial Sequence: Synthetic oligonucleotide
caucugugcugcugggcuc

SEQ ID NO: 384538 - RNA, 19 nt, Artificial Sequence
  Description of Artificial Sequence: Synthetic oligonucleotide
uuagggcuacccugugcau

SEQ ID NO: 384539 - RNA, 19 nt, Artificial Sequence
  Description of Artificial Sequence: Synthetic oligonucleotide
ggaauaagacgggaucuuc

SEQ ID NO: 384540 - RNA, 19 nt, Artificial Sequence
  Description of Artificial Sequence: Synthetic oligonucleotide
uucgucuauuuuggcacau

SEQ ID NO: 384541 - RNA, 19 nt, Artificial Sequence
  Description of Artificial Sequence: Synthetic oligonucleotide
cuggaauaagacgggaucu

SEQ ID NO: 384542 - RNA, 19 nt, Artificial Sequence
  Description of Artificial Sequence: Synthetic oligonucleotide
ccugaguuaacuugggugu

SEQ ID NO: 384543 - RNA, 19 nt, Artificial Sequence
  Description of Artificial Sequence: Synthetic oligonucleotide
gugcaaucguuuucacgga

SEQ ID NO: 384544 - RNA, 19 nt, Artificial Sequence
  Description of Artificial Sequence: Synthetic oligonucleotide
gauugccacgagugaagcu

SEQ ID NO: 384545 - RNA, 19 nt, Artificial Sequence
  Description of Artificial Sequence: Synthetic oligonucleotide
gucccuucuuucgguuucg

SEQ ID NO: 384546 - RNA, 19 nt, Artificial Sequence
  Description of Artificial Sequence: Synthetic oligonucleotide
ucccgucccuucuuucggu

SEQ ID NO: 384547 - RNA, 19 nt, Artificial Sequence
  Description of Artificial Sequence: Synthetic oligonucleotide
gucuauuuuggcacauucu

SEQ ID NO: 384548 - RNA, 19 nt, Artificial Sequence
  Description of Artificial Sequence: Synthetic oligonucleotide
ggguguauaagcuuccauu

SEQ ID NO: 384549 - RNA, 19 nt, Artificial Sequence
  Description of Artificial Sequence: Synthetic oligonucleotide
guuuacagcuugcuguguu

SEQ ID NO: 384550 - RNA, 19 nt, Artificial Sequence
  Description of Artificial Sequence: Synthetic oligonucleotide
cuuuuacuuggggacgcga

SEQ ID NO: 384551 - RNA, 19 nt, Artificial Sequence
  Description of Artificial Sequence: Synthetic oligonucleotide
ugccacgagugaagcuugu

SEQ ID NO: 384552 - RNA, 19 nt, Artificial Sequence
  Description of Artificial Sequence: Synthetic oligonucleotide
ccuuuucgucuauuuuggc

SEQ ID NO: 384553 - RNA, 19 nt, Artificial Sequence
  Description of Artificial Sequence: Synthetic oligonucleotide
agagauccuuugauccugu

SEQ ID NO: 384554 - RNA, 19 nt, Artificial Sequence
  Description of Artificial Sequence: Synthetic oligonucleotide
cuacccugugcauaaacuu

SEQ ID NO: 384555 - RNA, 19 nt, Artificial Sequence
  Description of Artificial Sequence: Synthetic oligonucleotide
gaagcuuguuguaggcugu

SEQ ID NO: 384556 - RNA, 19 nt, Artificial Sequence
  Description of Artificial Sequence: Synthetic oligonucleotide
uaccagauuugugcuuaaa

SEQ ID NO: 384557 - RNA, 19 nt, Artificial Sequence
  Description of Artificial Sequence: Synthetic oligonucleotide
cuuuguaacuuggaaccgu

SEQ ID NO: 384558 - RNA, 19 nt, Artificial Sequence
  Description of Artificial Sequence: Synthetic oligonucleotide
gaguuaacuuggguguaua

SEQ ID NO: 384559 - RNA, 19 nt, Artificial Sequence
  Description of Artificial Sequence: Synthetic oligonucleotide
acguguccagaacuccuuu

SEQ ID NO: 384560 - RNA, 19 nt, Artificial Sequence
  Description of Artificial Sequence: Synthetic oligonucleotide
ggauuuggaauuggaagua

SEQ ID NO: 384561 - RNA, 19 nt, Artificial Sequence
  Description of Artificial Sequence: Synthetic oligonucleotide
uuuugacugcuggcugaaa

SEQ ID NO: 384562 - RNA, 19 nt, Artificial Sequence
  Description of Artificial Sequence: Synthetic oligonucleotide
ccugauggcugagcuauag

SEQ ID NO: 384563 - RNA, 19 nt, Artificial Sequence
  Description of Artificial Sequence: Synthetic oligonucleotide
uaggugaaucccgucccuu

SEQ ID NO: 384564 - RNA, 19 nt, Artificial Sequence
  Description of Artificial Sequence: Synthetic oligonucleotide
ggaccaugauaauaccugu

SEQ ID NO: 384565 - RNA, 19 nt, Artificial Sequence
  Description of Artificial Sequence: Synthetic oligonucleotide
cgguuuuaugugcaaguac

SEQ ID NO: 384566 - RNA, 19 nt, Artificial Sequence
  Description of Artificial Sequence: Synthetic oligonucleotide
ccuaaggaaaccauuguuu

SEQ ID NO: 384567 - RNA, 19 nt, Artificial Sequence
  Description of Artificial Sequence: Synthetic oligonucleotide
cuuuauuggcuuuccgcuu

SEQ ID NO: 384568 - RNA, 19 nt, Artificial Sequence
  Description of Artificial Sequence: Synthetic oligonucleotide
ggagggaucuuagggcuac

SEQ ID NO: 384569 - RNA, 19 nt, Artificial Sequence
  Description of Artificial Sequence: Synthetic oligonucleotide
uccugacuuguugcauacu

SEQ ID NO: 384570 - RNA, 19 nt, Artificial Sequence
  Description of Artificial Sequence: Synthetic oligonucleotide
cuuucacggcugugcuuuc

SEQ ID NO: 384571 - RNA, 19 nt, Artificial Sequence
  Description of Artificial Sequence: Synthetic oligonucleotide
ucacggcugugcuuucguu

SEQ ID NO: 384572 - RNA, 19 nt, Artificial Sequence
  Description of Artificial Sequence: Synthetic oligonucleotide
gccuuuuacuuggggacgc

SEQ ID NO: 384573 - RNA, 19 nt, Artificial Sequence
  Description of Artificial Sequence: Synthetic oligonucleotide
agucugcaucuccggaauu

SEQ ID NO: 384574 - RNA, 19 nt, Artificial Sequence
  Description of Artificial Sequence: Synthetic oligonucleotide
caucuguugggccggacau

SEQ ID NO: 384575 - RNA, 19 nt, Artificial Sequence
  Description of Artificial Sequence: Synthetic oligonucleotide
cgugaaucaaaagcaguuc

SEQ ID NO: 384576 - RNA, 19 nt, Artificial Sequence
  Description of Artificial Sequence: Synthetic oligonucleotide
ccuuuauggauuuggaauu

SEQ ID NO: 384577 - RNA, 19 nt, Artificial Sequence
  Description of Artificial Sequence: Synthetic oligonucleotide
ucgucuauuuuggcacauu

SEQ ID NO: 384578 - RNA, 19 nt, Artificial Sequence
  Description of Artificial Sequence: Synthetic oligonucleotide
caggaccagaaaugccgca

SEQ ID NO: 384579 - RNA, 19 nt, Artificial Sequence
  Description of Artificial Sequence: Synthetic oligonucleotide
acgcgagagcacaggcuuc

SEQ ID NO: 384580 - RNA, 19 nt, Artificial Sequence
  Description of Artificial Sequence: Synthetic oligonucleotide
cacugaucuccagcagaug

SEQ ID NO: 384581 - RNA, 19 nt, Artificial Sequence
  Description of Artificial Sequence: Synthetic oligonucleotide
cuguugggccggacaucag

SEQ ID NO: 384582 - RNA, 19 nt, Artificial Sequence
  Description of Artificial Sequence: Synthetic oligonucleotide
cauuacuauuuuccuuuau

SEQ ID NO: 384583 - RNA, 19 nt, Artificial Sequence
  Description of Artificial Sequence: Synthetic oligonucleotide
ggcuuuccgcuugaacuug

SEQ ID NO: 384584 - RNA, 19 nt, Artificial Sequence
  Description of Artificial Sequence: Synthetic oligonucleotide
cccagaauuccucagcacu

SEQ ID NO: 384585 - RNA, 19 nt, Artificial Sequence
  Description of Artificial Sequence: Synthetic oligonucleotide
cagcauuacuauuuuccuu

SEQ ID NO: 384586 - RNA, 19 nt, Artificial Sequence
  Description of Artificial Sequence: Synthetic oligonucleotide
cccugugcauaaacuugag

SEQ ID NO: 384587 - RNA, 19 nt, Artificial Sequence
  Description of Artificial Sequence: Synthetic oligonucleotide
ccguaggaaacacaggacu

SEQ ID NO: 384588 - RNA, 19 nt, Artificial Sequence
  Description of Artificial Sequence: Synthetic oligonucleotide
ugacaacauccugcacuau

SEQ ID NO: 384589 - RNA, 19 nt, Artificial Sequence
  Description of Artificial Sequence: Synthetic oligonucleotide
ggggacgcgagagcacagg

SEQ ID NO: 384590 - RNA, 19 nt, Artificial Sequence
  Description of Artificial Sequence: Synthetic oligonucleotide
gagauucagugcaaucguu

SEQ ID NO: 384591 - RNA, 19 nt, Artificial Sequence
  Description of Artificial Sequence: Synthetic oligonucleotide
acgccgugauugccacgag

SEQ ID NO: 384592 - RNA, 19 nt, Artificial Sequence
  Description of Artificial Sequence: Synthetic oligonucleotide
cuccggaauuuccaucugu

SEQ ID NO: 384593 - RNA, 19 nt, Artificial Sequence
  Description of Artificial Sequence: Synthetic oligonucleotide
cugaguuaacuugggugua

SEQ ID NO: 384594 - RNA, 19 nt, Artificial Sequence
  Description of Artificial Sequence: Synthetic oligonucleotide
ccuuuuacuuggggacgcg

SEQ ID NO: 384595 - RNA, 19 nt, Artificial Sequence
  Description of Artificial Sequence: Synthetic oligonucleotide
ccgcaugcaggacuagcug

SEQ ID NO: 384596 - RNA, 19 nt, Artificial Sequence
  Description of Artificial Sequence: Synthetic oligonucleotide
gaaauacaugcagcaucau

SEQ ID NO: 384597 - RNA, 19 nt, Artificial Sequence
  Description of Artificial Sequence: Synthetic oligonucleotide
cgugucuaauacuuugaaa

SEQ ID NO: 384598 - RNA, 19 nt, Artificial Sequence
  Description of Artificial Sequence: Synthetic oligonucleotide
cguaggaaacacaggacua

SEQ ID NO: 384599 - RNA, 19 nt, Artificial Sequence
  Description of Artificial Sequence: Synthetic oligonucleotide
gcacuaucccacugaucuc

SEQ ID NO: 384600 - RNA, 19 nt, Artificial Sequence
  Description of Artificial Sequence: Synthetic oligonucleotide
ccgcagaaaugccaacauc

SEQ ID NO: 384601 - RNA, 19 nt, Artificial Sequence
  Description of Artificial Sequence: Synthetic oligonucleotide
ccguuccaaauuacucuuc

SEQ ID NO: 384602 - RNA, 19 nt, Artificial Sequence
  Description of Artificial Sequence: Synthetic oligonucleotide
cuaugugacuuaccagauu

SEQ ID NO: 384603 - RNA, 19 nt, Artificial Sequence
  Description of Artificial Sequence: Synthetic oligonucleotide
gcuacuagcagcacugcuu

SEQ ID NO: 384604 - RNA, 19 nt, Artificial Sequence
  Description of Artificial Sequence: Synthetic oligonucleotide
guacucucuuuaacgugcu

SEQ ID NO: 384605 - RNA, 19 nt, Artificial Sequence
  Description of Artificial Sequence: Synthetic oligonucleotide
cgcaugcaggacuagcuga

SEQ ID NO: 384606 - RNA, 19 nt, Artificial Sequence
  Description of Artificial Sequence: Synthetic oligonucleotide
gccuuauguaaaguacucu

SEQ ID NO: 384607 - RNA, 19 nt, Artificial Sequence
  Description of Artificial Sequence: Synthetic oligonucleotide
cuguggugguuaaaccuuu

SEQ ID NO: 384608 - RNA, 19 nt, Artificial Sequence
  Description of Artificial Sequence: Synthetic oligonucleotide
gaaaugccauagcccucau

SEQ ID NO: 384609 - RNA, 19 nt, Artificial Sequence
  Description of Artificial Sequence: Synthetic oligonucleotide
gggacaaguagaacucagu

SEQ ID NO: 384610 - RNA, 19 nt, Artificial Sequence
  Description of Artificial Sequence: Synthetic oligonucleotide
aggagggaucuuagggcua

SEQ ID NO: 384611 - RNA, 19 nt, Artificial Sequence
  Description of Artificial Sequence: Synthetic oligonucleotide
caggaaugcuucacgucuu

SEQ ID NO: 384612 - RNA, 19 nt, Artificial Sequence
  Description of Artificial Sequence: Synthetic oligonucleotide
cuuucgguuucgguuuuau

SEQ ID NO: 384613 - RNA, 19 nt, Artificial Sequence
  Description of Artificial Sequence: Synthetic oligonucleotide
ccauuucgugucuaauacu

SEQ ID NO: 384614 - RNA, 19 nt, Artificial Sequence
  Description of Artificial Sequence: Synthetic oligonucleotide
ggagaacuaucuguugcau

SEQ ID NO: 384615 - RNA, 19 nt, Artificial Sequence
  Description of Artificial Sequence: Synthetic oligonucleotide
gcaucuccggaauuuccau

SEQ ID NO: 384616 - RNA, 19 nt, Artificial Sequence
  Description of Artificial Sequence: Synthetic oligonucleotide
ccgaaucuuuucuuggaau

SEQ ID NO: 384617 - RNA, 19 nt, Artificial Sequence
  Description of Artificial Sequence: Synthetic oligonucleotide
gcaaucguuuucacggaau

SEQ ID NO: 384618 - RNA, 19 nt, Artificial Sequence
  Description of Artificial Sequence: Synthetic oligonucleotide
cucccgcaugcaggacuag

SEQ ID NO: 384619 - RNA, 19 nt, Artificial Sequence
  Description of Artificial Sequence: Synthetic oligonucleotide
ccgugauugccacgaguga

SEQ ID NO: 384620 - RNA, 19 nt, Artificial Sequence
  Description of Artificial Sequence: Synthetic oligonucleotide
cccgcaugcaggacuagcu

SEQ ID NO: 384621 - RNA, 19 nt, Artificial Sequence
  Description of Artificial Sequence: Synthetic oligonucleotide
ggacuagcugaaguugaau

SEQ ID NO: 384622 - RNA, 19 nt, Artificial Sequence
  Description of Artificial Sequence: Synthetic oligonucleotide
ggacgcgagagcacaggcu

SEQ ID NO: 384623 - RNA, 19 nt, Artificial Sequence
  Description of Artificial Sequence: Synthetic oligonucleotide
ccugcacuaucccacugau

SEQ ID NO: 384624 - RNA, 19 nt, Artificial Sequence
  Description of Artificial Sequence: Synthetic oligonucleotide
ccuuggccuuauguaaagu

SEQ ID NO: 384625 - RNA, 19 nt, Artificial Sequence
  Description of Artificial Sequence: Synthetic oligonucleotide
ccgcucuuucacggcugug

SEQ ID NO: 384626 - RNA, 19 nt, Artificial Sequence
  Description of Artificial Sequence: Synthetic oligonucleotide
cccgcucuuucacggcugu

SEQ ID NO: 384627 - RNA, 19 nt, Artificial Sequence
  Description of Artificial Sequence: Synthetic oligonucleotide
cgccgugauugccacgagu

SEQ ID NO: 384628 - RNA, 19 nt, Artificial Sequence
  Description of Artificial Sequence: Synthetic oligonucleotide
ccgucccuucuuucgguuu

SEQ ID NO: 384629 - RNA, 19 nt, Artificial Sequence
  Description of Artificial Sequence: Synthetic oligonucleotide
cccgucccuucuuucgguu

SEQ ID NO: 384630 - RNA, 19 nt, Artificial Sequence
  Description of Artificial Sequence: Synthetic oligonucleotide
augaaagacauuuaacucc

SEQ ID NO: 384631 - RNA, 19 nt, Artificial Sequence
  Description of Artificial Sequence: Synthetic oligonucleotide
auugcgauaucauugaaac

SEQ ID NO: 384632 - RNA, 19 nt, Artificial Sequence
  Description of Artificial Sequence: Synthetic oligonucleotide
aagcaauugaguuccagcc

SEQ ID NO: 384633 - RNA, 19 nt, Artificial Sequence
  Description of Artificial Sequence: Synthetic oligonucleotide
agcuuuguaaaaucaaugc

SEQ ID NO: 384634 - RNA, 19 nt, Artificial Sequence
  Description of Artificial Sequence: Synthetic oligonucleotide
ucuaugauauuaaaugaag

SEQ ID NO: 384635 - RNA, 19 nt, Artificial Sequence
  Description of Artificial Sequence: Synthetic oligonucleotide
auuauggugauaauuaaac

SEQ ID NO: 384636 - RNA, 19 nt, Artificial Sequence
  Description of Artificial Sequence: Synthetic oligonucleotide
aaaacgaaggccagcaagc

SEQ ID NO: 384637 - RNA, 19 nt, Artificial Sequence
  Description of Artificial Sequence: Synthetic oligonucleotide
uaaggaaacucuaugauau

SEQ ID NO: 384638 - RNA, 19 nt, Artificial Sequence
  Description of Artificial Sequence: Synthetic oligonucleotide
ugaaccuauucauaaagag

SEQ ID NO: 384639 - RNA, 19 nt, Artificial Sequence
  Description of Artificial Sequence: Synthetic oligonucleotide
aaugcuaggguacacuuca

SEQ ID NO: 384640 - RNA, 19 nt, Artificial Sequence
  Description of Artificial Sequence: Synthetic oligonucleotide
ugaaguaaauguaaucuga

SEQ ID NO: 384641 - RNA, 19 nt, Artificial Sequence
  Description of Artificial Sequence: Synthetic oligonucleotide
ugugaaguaaauguaaucu

SEQ ID NO: 384642 - RNA, 19 nt, Artificial Sequence
  Description of Artificial Sequence: Synthetic oligonucleotide
uuauaagacacaacugggc

SEQ ID NO: 384643 - RNA, 19 nt, Artificial Sequence
  Description of Artificial Sequence: Synthetic oligonucleotide
gauagcucgauccacacca

SEQ ID NO: 384644 - RNA, 19 nt, Artificial Sequence
  Description of Artificial Sequence: Synthetic oligonucleotide
aucgaugucguaaugaagg

SEQ ID NO: 384645 - RNA, 19 nt, Artificial Sequence
  Description of Artificial Sequence: Synthetic oligonucleotide
uggaauuggaagaaagaug

SEQ ID NO: 384646 - RNA, 19 nt, Artificial Sequence
  Description of Artificial Sequence: Synthetic oligonucleotide
uaccaaaacagccaguaac

SEQ ID NO: 384647 - RNA, 19 nt, Artificial Sequence
  Description of Artificial Sequence: Synthetic oligonucleotide
ucuuaauucucaaaggguu

SEQ ID NO: 384648 - RNA, 19 nt, Artificial Sequence
  Description of Artificial Sequence: Synthetic oligonucleotide
aaggacgacaguuagguuu

SEQ ID NO: 384649 - RNA, 19 nt, Artificial Sequence
  Description of Artificial Sequence: Synthetic oligonucleotide
aaauccccuguccaucagc

SEQ ID NO: 384650 - RNA, 19 nt, Artificial Sequence
  Description of Artificial Sequence: Synthetic oligonucleotide
aagauagcucgauccacac

SEQ ID NO: 384651 - RNA, 19 nt, Artificial Sequence
  Description of Artificial Sequence: Synthetic oligonucleotide
uuuucggguaucuuaauuc

SEQ ID NO: 384652 - RNA, 19 nt, Artificial Sequence
  Description of Artificial Sequence: Synthetic oligonucleotide
gaugugcugaacaacaggc

SEQ ID NO: 384653 - RNA, 19 nt, Artificial Sequence
  Description of Artificial Sequence: Synthetic oligonucleotide
uccaagucucccaaaggcg

SEQ ID NO: 384654 - RNA, 19 nt, Artificial Sequence
  Description of Artificial Sequence: Synthetic oligonucleotide
agauuuaggauugccuugc

SEQ ID NO: 384655 - RNA, 19 nt, Artificial Sequence
  Description of Artificial Sequence: Synthetic oligonucleotide
uuguaaggaaacucuauga

SEQ ID NO: 384656 - RNA, 19 nt, Artificial Sequence
  Description of Artificial Sequence: Synthetic oligonucleotide
ugacauacaggauugcacu

SEQ ID NO: 384657 - RNA, 19 nt, Artificial Sequence
  Description of Artificial Sequence: Synthetic oligonucleotide
uguaugugaaguaaaugua

SEQ ID NO: 384658 - RNA, 19 nt, Artificial Sequence
  Description of Artificial Sequence: Synthetic oligonucleotide
aagaaaucaguaucagcgu

SEQ ID NO: 384659 - RNA, 19 nt, Artificial Sequence
  Description of Artificial Sequence: Synthetic oligonucleotide
uuauggugauaauuaaaca

SEQ ID NO: 384660 - RNA, 19 nt, Artificial Sequence
  Description of Artificial Sequence: Synthetic oligonucleotide
uucauaaagagaaguugac

SEQ ID NO: 384661 - RNA, 19 nt, Artificial Sequence
  Description of Artificial Sequence: Synthetic oligonucleotide
augggugccgguugaaugc

SEQ ID NO: 384662 - RNA, 19 nt, Artificial Sequence
  Description of Artificial Sequence: Synthetic oligonucleotide
uugaauagccgaagcuugg

SEQ ID NO: 384663 - RNA, 19 nt, Artificial Sequence
  Description of Artificial Sequence: Synthetic oligonucleotide
ugguaaauuuagagaaucc

SEQ ID NO: 384664 - RNA, 19 nt, Artificial Sequence
  Description of Artificial Sequence: Synthetic oligonucleotide
aaaaugcuaggguacacuu

SEQ ID NO: 384665 - RNA, 19 nt, Artificial Sequence
  Description of Artificial Sequence: Synthetic oligonucleotide
gauuugacauacaggauug

SEQ ID NO: 384666 - RNA, 19 nt, Artificial Sequence
  Description of Artificial Sequence: Synthetic oligonucleotide
uaagauagcucgauccaca

SEQ ID NO: 384667 - RNA, 19 nt, Artificial Sequence
  Description of Artificial Sequence: Synthetic oligonucleotide
ucguaaugaaggauguaca

SEQ ID NO: 384668 - RNA, 19 nt, Artificial Sequence
  Description of Artificial Sequence: Synthetic oligonucleotide
acugaacaaggauuaucac

SEQ ID NO: 384669 - RNA, 19 nt, Artificial Sequence
  Description of Artificial Sequence: Synthetic oligonucleotide
aauccguucagucuuugua

SEQ ID NO: 384670 - RNA, 19 nt, Artificial Sequence
  Description of Artificial Sequence: Synthetic oligonucleotide
accucaaauccguucaguc

SEQ ID NO: 384671 - RNA, 19 nt, Artificial Sequence
  Description of Artificial Sequence: Synthetic oligonucleotide
ugucagcuuuguaaaauca

SEQ ID NO: 384672 - RNA, 19 nt, Artificial Sequence
  Description of Artificial Sequence: Synthetic oligonucleotide
auaagauagcucgauccac

SEQ ID NO: 384673 - RNA, 19 nt, Artificial Sequence
  Description of Artificial Sequence: Synthetic oligonucleotide
uuucggguaucuuaauucu

SEQ ID NO: 384674 - RNA, 19 nt, Artificial Sequence
  Description of Artificial Sequence: Synthetic oligonucleotide
ucccaaaggcgcuauggcg

SEQ ID NO: 384675 - RNA, 19 nt, Artificial Sequence
  Description of Artificial Sequence: Synthetic oligonucleotide
gaauagccgaagcuugggg

SEQ ID NO: 384676 - RNA, 19 nt, Artificial Sequence
  Description of Artificial Sequence: Synthetic oligonucleotide
ucauaaagagaaguugaca

SEQ ID NO: 384677 - RNA, 19 nt, Artificial Sequence
  Description of Artificial Sequence: Synthetic oligonucleotide
aaucucgauuaccuguuga

SEQ ID NO: 384678 - RNA, 19 nt, Artificial Sequence
  Description of Artificial Sequence: Synthetic oligonucleotide
auaagacacaacugggcug

SEQ ID NO: 384679 - RNA, 19 nt, Artificial Sequence
  Description of Artificial Sequence: Synthetic oligonucleotide
aucucgauuaccuguugag

SEQ ID NO: 384680 - RNA, 19 nt, Artificial Sequence
  Description of Artificial Sequence: Synthetic oligonucleotide
cucgauuaccuguugaguc

SEQ ID NO: 384681 - RNA, 19 nt, Artificial Sequence
  Description of Artificial Sequence: Synthetic oligonucleotide
aggauugccuugcugaaug

SEQ ID NO: 384682 - RNA, 19 nt, Artificial Sequence
  Description of Artificial Sequence: Synthetic oligonucleotide
aguuagguuucagaguuuc

SEQ ID NO: 384683 - RNA, 19 nt, Artificial Sequence
  Description of Artificial Sequence: Synthetic oligonucleotide
uccuucgccguucucauga

SEQ ID NO: 384684 - RNA, 19 nt, Artificial Sequence
  Description of Artificial Sequence: Synthetic oligonucleotide
guguaugugaaguaaaugu

SEQ ID NO: 384685 - RNA, 19 nt, Artificial Sequence
  Description of Artificial Sequence: Synthetic oligonucleotide
guccaagucucccaaaggc

SEQ ID NO: 384686 - RNA, 19 nt, Artificial Sequence
  Description of Artificial Sequence: Synthetic oligonucleotide
agauagcucgauccacacc

SEQ ID NO: 384687 - RNA, 19 nt, Artificial Sequence
  Description of Artificial Sequence: Synthetic oligonucleotide
acuacuggguacccucagc

SEQ ID NO: 384688 - RNA, 19 nt, Artificial Sequence
  Description of Artificial Sequence: Synthetic oligonucleotide
aagcccauccuguacauua

SEQ ID NO: 384689 - RNA, 19 nt, Artificial Sequence
  Description of Artificial Sequence: Synthetic oligonucleotide
ucgauuaccuguugaguca

SEQ ID NO: 384690 - RNA, 19 nt, Artificial Sequence
  Description of Artificial Sequence: Synthetic oligonucleotide
ugauguuggugguaacgag

SEQ ID NO: 384691 - RNA, 19 nt, Artificial Sequence
  Description of Artificial Sequence: Synthetic oligonucleotide
uagaugugcugaacaacag

SEQ ID NO: 384692 - RNA, 19 nt, Artificial Sequence
  Description of Artificial Sequence: Synthetic oligonucleotide
aucagcgucaauauuucuc

SEQ ID NO: 384693 - RNA, 19 nt, Artificial Sequence
  Description of Artificial Sequence: Synthetic oligonucleotide
cccaauuuggaauuggaag

SEQ ID NO: 384694 - RNA, 19 nt, Artificial Sequence
  Description of Artificial Sequence: Synthetic oligonucleotide
ucuggaagucucccaacgc

SEQ ID NO: 384695 - RNA, 19 nt, Artificial Sequence
  Description of Artificial Sequence: Synthetic oligonucleotide
uagcgggcagauuuuauug

SEQ ID NO: 384696 - RNA, 19 nt, Artificial Sequence
  Description of Artificial Sequence: Synthetic oligonucleotide
cugaauucaagccugucga

SEQ ID NO: 384697 - RNA, 19 nt, Artificial Sequence
  Description of Artificial Sequence: Synthetic oligonucleotide
ucacgcuuggugaugagau

SEQ ID NO: 384698 - RNA, 19 nt, Artificial Sequence
  Description of Artificial Sequence: Synthetic oligonucleotide
gucguaaugaaggauguac

SEQ ID NO: 384699 - RNA, 19 nt, Artificial Sequence
  Description of Artificial Sequence: Synthetic oligonucleotide
ugaguuccagccuucauuu

SEQ ID NO: 384700 - RNA, 19 nt, Artificial Sequence
  Description of Artificial Sequence: Synthetic oligonucleotide
aggauguacaacaaagugu

SEQ ID NO: 384701 - RNA, 19 nt, Artificial Sequence
  Description of Artificial Sequence: Synthetic oligonucleotide
uaaaaugcuaggguacacu

SEQ ID NO: 384702 - RNA, 19 nt, Artificial Sequence
  Description of Artificial Sequence: Synthetic oligonucleotide
ugaauagccgaagcuuggg

SEQ ID NO: 384703 - RNA, 19 nt, Artificial Sequence
  Description of Artificial Sequence: Synthetic oligonucleotide
uaguguaugugaaguaaau

SEQ ID NO: 384704 - RNA, 19 nt, Artificial Sequence
  Description of Artificial Sequence: Synthetic oligonucleotide
ugaugcacgcuaaaacgaa

SEQ ID NO: 384705 - RNA, 19 nt, Artificial Sequence
  Description of Artificial Sequence: Synthetic oligonucleotide
cacaacugggcugacauug

SEQ ID NO: 384706 - RNA, 19 nt, Artificial Sequence
  Description of Artificial Sequence: Synthetic oligonucleotide
auuuaggauugccuugcug

SEQ ID NO: 384707 - RNA, 19 nt, Artificial Sequence
  Description of Artificial Sequence: Synthetic oligonucleotide
agcgucaauauuucucaug

SEQ ID NO: 384708 - RNA, 19 nt, Artificial Sequence
  Description of Artificial Sequence: Synthetic oligonucleotide
aagccugucgaucuuccau

SEQ ID NO: 384709 - RNA, 19 nt, Artificial Sequence
  Description of Artificial Sequence: Synthetic oligonucleotide
gcuccuacaacuaagucug

SEQ ID NO: 384710 - RNA, 19 nt, Artificial Sequence
  Description of Artificial Sequence: Synthetic oligonucleotide
aaauccguucagucuuugu

SEQ ID NO: 384711 - RNA, 19 nt, Artificial Sequence
  Description of Artificial Sequence: Synthetic oligonucleotide
aucuuaauucucaaagggu

SEQ ID NO: 384712 - RNA, 19 nt, Artificial Sequence
  Description of Artificial Sequence: Synthetic oligonucleotide
ucccaauuuggaauuggaa

SEQ ID NO: 384713 - RNA, 19 nt, Artificial Sequence
  Description of Artificial Sequence: Synthetic oligonucleotide
agcaauugaguuccagccu

SEQ ID NO: 384714 - RNA, 19 nt, Artificial Sequence
  Description of Artificial Sequence: Synthetic oligonucleotide
cuucaccuccguauggagc

SEQ ID NO: 384715 - RNA, 19 nt, Artificial Sequence
  Description of Artificial Sequence: Synthetic oligonucleotide
agguuaguguaugugaagu

SEQ ID NO: 384716 - RNA, 19 nt, Artificial Sequence
  Description of Artificial Sequence: Synthetic oligonucleotide
cauuggcccaucgaugucg

SEQ ID NO: 384717 - RNA, 19 nt, Artificial Sequence
  Description of Artificial Sequence: Synthetic oligonucleotide
guaaggaaacucuaugaua

SEQ ID NO: 384718 - RNA, 19 nt, Artificial Sequence
  Description of Artificial Sequence: Synthetic oligonucleotide
uugcgauaucauugaaacc

SEQ ID NO: 384719 - RNA, 19 nt, Artificial Sequence
  Description of Artificial Sequence: Synthetic oligonucleotide
ucgaucuuccauugaagau

SEQ ID NO: 384720 - RNA, 19 nt, Artificial Sequence
  Description of Artificial Sequence: Synthetic oligonucleotide
caucgaugucguaaugaag

SEQ ID NO: 384721 - RNA, 19 nt, Artificial Sequence
  Description of Artificial Sequence: Synthetic oligonucleotide
ucgaugucguaaugaagga

SEQ ID NO: 384722 - RNA, 19 nt, Artificial Sequence
  Description of Artificial Sequence: Synthetic oligonucleotide
uuguacucccaauuuggaa

SEQ ID NO: 384723 - RNA, 19 nt, Artificial Sequence
  Description of Artificial Sequence: Synthetic oligonucleotide
uuaaaaugcuaggguacac

SEQ ID NO: 384724 - RNA, 19 nt, Artificial Sequence
  Description of Artificial Sequence: Synthetic oligonucleotide
augugaucaggacuugaga

SEQ ID NO: 384725 - RNA, 19 nt, Artificial Sequence
  Description of Artificial Sequence: Synthetic oligonucleotide
cauggcgcauacucaacag

SEQ ID NO: 384726 - RNA, 19 nt, Artificial Sequence
  Description of Artificial Sequence: Synthetic oligonucleotide
auugcacucuuccccucgg

SEQ ID NO: 384727 - RNA, 19 nt, Artificial Sequence
  Description of Artificial Sequence: Synthetic oligonucleotide
uaaucucgauuaccuguug

SEQ ID NO: 384728 - RNA, 19 nt, Artificial Sequence
  Description of Artificial Sequence: Synthetic oligonucleotide
gaugcacgcuaaaacgaag

SEQ ID NO: 384729 - RNA, 19 nt, Artificial Sequence
  Description of Artificial Sequence: Synthetic oligonucleotide
aaaucaguaucagcgucaa

SEQ ID NO: 384730 - RNA, 19 nt, Artificial Sequence
  Description of Artificial Sequence: Synthetic oligonucleotide
caaaagaauuagagcuuug

SEQ ID NO: 384731 - RNA, 19 nt, Artificial Sequence
  Description of Artificial Sequence: Synthetic oligonucleotide
uagacgauuggggucauau

SEQ ID NO: 384732 - RNA, 19 nt, Artificial Sequence
  Description of Artificial Sequence: Synthetic oligonucleotide
aguauccagucuaaaauaa

SEQ ID NO: 384733 - RNA, 19 nt, Artificial Sequence
  Description of Artificial Sequence: Synthetic oligonucleotide
gaauucaagccugucgauc

SEQ ID NO: 384734 - RNA, 19 nt, Artificial Sequence
  Description of Artificial Sequence: Synthetic oligonucleotide
aggacgacaguuagguuuc

SEQ ID NO: 384735 - RNA, 19 nt, Artificial Sequence
  Description of Artificial Sequence: Synthetic oligonucleotide
ggugauguuggugguaacg

SEQ ID NO: 384736 - RNA, 19 nt, Artificial Sequence
  Description of Artificial Sequence: Synthetic oligonucleotide
aacuaagucuggauaucca

SEQ ID NO: 384737 - RNA, 19 nt, Artificial Sequence
  Description of Artificial Sequence: Synthetic oligonucleotide
ggcgauugcgauaucauug

SEQ ID NO: 384738 - RNA, 19 nt, Artificial Sequence
  Description of Artificial Sequence: Synthetic oligonucleotide
ucucgauuaccuguugagu

SEQ ID NO: 384739 - RNA, 19 nt, Artificial Sequence
  Description of Artificial Sequence: Synthetic oligonucleotide
cugaaccuauucauaaaga

SEQ ID NO: 384740 - RNA, 19 nt, Artificial Sequence
  Description of Artificial Sequence: Synthetic oligonucleotide
uucggguaucuuaauucuc

SEQ ID NO: 384741 - RNA, 19 nt, Artificial Sequence
  Description of Artificial Sequence: Synthetic oligonucleotide
cagcaauacaaucuuggga

SEQ ID NO: 384742 - RNA, 19 nt, Artificial Sequence
  Description of Artificial Sequence: Synthetic oligonucleotide
gauugcgauaucauugaaa

SEQ ID NO: 384743 - RNA, 19 nt, Artificial Sequence
  Description of Artificial Sequence: Synthetic oligonucleotide
aaggcgcuauggcgcuucc

SEQ ID NO: 384744 - RNA, 19 nt, Artificial Sequence
  Description of Artificial Sequence: Synthetic oligonucleotide
ugaauucaagccugucgau

SEQ ID NO: 384745 - RNA, 19 nt, Artificial Sequence
  Description of Artificial Sequence: Synthetic oligonucleotide
guucauuggcccaucgaug

SEQ ID NO: 384746 - RNA, 19 nt, Artificial Sequence
  Description of Artificial Sequence: Synthetic oligonucleotide
aggaaacucuaugauauua

SEQ ID NO: 384747 - RNA, 19 nt, Artificial Sequence
  Description of Artificial Sequence: Synthetic oligonucleotide
agcgggcagauuuuauugu

SEQ ID NO: 384748 - RNA, 19 nt, Artificial Sequence
  Description of Artificial Sequence: Synthetic oligonucleotide
cuacuggguacccucagca

SEQ ID NO: 384749 - RNA, 19 nt, Artificial Sequence
  Description of Artificial Sequence: Synthetic oligonucleotide
aacgggucuggcucuguau

SEQ ID NO: 384750 - RNA, 19 nt, Artificial Sequence
  Description of Artificial Sequence: Synthetic oligonucleotide
guaacgaguguggaguuga

SEQ ID NO: 384751 - RNA, 19 nt, Artificial Sequence
  Description of Artificial Sequence: Synthetic oligonucleotide
uaucagcgucaauauuucu

SEQ ID NO: 384752 - RNA, 19 nt, Artificial Sequence
  Description of Artificial Sequence: Synthetic oligonucleotide
agcccaaagugugaacauc

SEQ ID NO: 384753 - RNA, 19 nt, Artificial Sequence
  Description of Artificial Sequence: Synthetic oligonucleotide
ggucaacuuuauaagacac

SEQ ID NO: 384754 - RNA, 19 nt, Artificial Sequence
  Description of Artificial Sequence: Synthetic oligonucleotide
cuuguacucccaauuugga

SEQ ID NO: 384755 - RNA, 19 nt, Artificial Sequence
  Description of Artificial Sequence: Synthetic oligonucleotide
uucagggaauaagaauggu

SEQ ID NO: 384756 - RNA, 19 nt, Artificial Sequence
  Description of Artificial Sequence: Synthetic oligonucleotide
caaugggcuggcaccggcg

SEQ ID NO: 384757 - RNA, 19 nt, Artificial Sequence
  Description of Artificial Sequence: Synthetic oligonucleotide
auaccaaaacagccaguaa

SEQ ID NO: 384758 - RNA, 19 nt, Artificial Sequence
  Description of Artificial Sequence: Synthetic oligonucleotide
uccugcgagaacugccaug

SEQ ID NO: 384759 - RNA, 19 nt, Artificial Sequence
  Description of Artificial Sequence: Synthetic oligonucleotide
guaucagcgucaauauuuc

SEQ ID NO: 384760 - RNA, 19 nt, Artificial Sequence
  Description of Artificial Sequence: Synthetic oligonucleotide
aagucucccaacgcucucu

SEQ ID NO: 384761 - RNA, 19 nt, Artificial Sequence
  Description of Artificial Sequence: Synthetic oligonucleotide
gcgagaacugccaugauga

SEQ ID NO: 384762 - RNA, 19 nt, Artificial Sequence
  Description of Artificial Sequence: Synthetic oligonucleotide
acagguuaguguaugugaa

SEQ ID NO: 384763 - RNA, 19 nt, Artificial Sequence
  Description of Artificial Sequence: Synthetic oligonucleotide
cacuaagggugagaucacg

SEQ ID NO: 384764 - RNA, 19 nt, Artificial Sequence
  Description of Artificial Sequence: Synthetic oligonucleotide
auugcugaugcacgcuaaa

SEQ ID NO: 384765 - RNA, 19 nt, Artificial Sequence
  Description of Artificial Sequence: Synthetic oligonucleotide
gauaacugguuauuauauu

SEQ ID NO: 384766 - RNA, 19 nt, Artificial Sequence
  Description of Artificial Sequence: Synthetic oligonucleotide
agauuuuauccugcuuuga

SEQ ID NO: 384767 - RNA, 19 nt, Artificial Sequence
  Description of Artificial Sequence: Synthetic oligonucleotide
gguacccucagcaauacaa

SEQ ID NO: 384768 - RNA, 19 nt, Artificial Sequence
  Description of Artificial Sequence: Synthetic oligonucleotide
ucaaauccguucagucuuu

SEQ ID NO: 384769 - RNA, 19 nt, Artificial Sequence
  Description of Artificial Sequence: Synthetic oligonucleotide
ggauuugacauacaggauu

SEQ ID NO: 384770 - RNA, 19 nt, Artificial Sequence
  Description of Artificial Sequence: Synthetic oligonucleotide
gguuauuauauuugaugcu

SEQ ID NO: 384771 - RNA, 19 nt, Artificial Sequence
  Description of Artificial Sequence: Synthetic oligonucleotide
gugaucaggacuugagacu

SEQ ID NO: 384772 - RNA, 19 nt, Artificial Sequence
  Description of Artificial Sequence: Synthetic oligonucleotide
gugguaacgaguguggagu

SEQ ID NO: 384773 - RNA, 19 nt, Artificial Sequence
  Description of Artificial Sequence: Synthetic oligonucleotide
uauccugcuuugaccucac

SEQ ID NO: 384774 - RNA, 19 nt, Artificial Sequence
  Description of Artificial Sequence: Synthetic oligonucleotide
ucgaugugucauucuuuuc

SEQ ID NO: 384775 - RNA, 19 nt, Artificial Sequence
  Description of Artificial Sequence: Synthetic oligonucleotide
ucacuucgaugaccuaaaa

SEQ ID NO: 384776 - RNA, 19 nt, Artificial Sequence
  Description of Artificial Sequence: Synthetic oligonucleotide
agccugucgaucuuccauu

SEQ ID NO: 384777 - RNA, 19 nt, Artificial Sequence
  Description of Artificial Sequence: Synthetic oligonucleotide
ccccucaaggaucugagac

SEQ ID NO: 384778 - RNA, 19 nt, Artificial Sequence
  Description of Artificial Sequence: Synthetic oligonucleotide
cucccaauuuggaauugga

SEQ ID NO: 384779 - RNA, 19 nt, Artificial Sequence
  Description of Artificial Sequence: Synthetic oligonucleotide
gacgacaguuagguuucag

SEQ ID NO: 384780 - RNA, 19 nt, Artificial Sequence
  Description of Artificial Sequence: Synthetic oligonucleotide
uccagucgaugugucauuc

SEQ ID NO: 384781 - RNA, 19 nt, Artificial Sequence
  Description of Artificial Sequence: Synthetic oligonucleotide
ugagacuacuggguacccu

SEQ ID NO: 384782 - RNA, 19 nt, Artificial Sequence
  Description of Artificial Sequence: Synthetic oligonucleotide
gcuguagacgauugggguc

SEQ ID NO: 384783 - RNA, 19 nt, Artificial Sequence
  Description of Artificial Sequence: Synthetic oligonucleotide
gaucugagacggcacugaa

SEQ ID NO: 384784 - RNA, 19 nt, Artificial Sequence
  Description of Artificial Sequence: Synthetic oligonucleotide
aucacuucgaugaccuaaa

SEQ ID NO: 384785 - RNA, 19 nt, Artificial Sequence
  Description of Artificial Sequence: Synthetic oligonucleotide
uacucccaauuuggaauug

SEQ ID NO: 384786 - RNA, 19 nt, Artificial Sequence
  Description of Artificial Sequence: Synthetic oligonucleotide
gauuggggucauauuuaga

SEQ ID NO: 384787 - RNA, 19 nt, Artificial Sequence
  Description of Artificial Sequence: Synthetic oligonucleotide
ucccaacgcucucugcaaa

SEQ ID NO: 384788 - RNA, 19 nt, Artificial Sequence
  Description of Artificial Sequence: Synthetic oligonucleotide
cacgcuuggugaugagaug

SEQ ID NO: 384789 - RNA, 19 nt, Artificial Sequence
  Description of Artificial Sequence: Synthetic oligonucleotide
gcgauugcgauaucauuga

SEQ ID NO: 384790 - RNA, 19 nt, Artificial Sequence
  Description of Artificial Sequence: Synthetic oligonucleotide
cuccuacaacuaagucugg

SEQ ID NO: 384791 - RNA, 19 nt, Artificial Sequence
  Description of Artificial Sequence: Synthetic oligonucleotide
ucgguccacaacagggauu

SEQ ID NO: 384792 - RNA, 19 nt, Artificial Sequence
  Description of Artificial Sequence: Synthetic oligonucleotide
gcuauggcgcuuccaauuc

SEQ ID NO: 384793 - RNA, 19 nt, Artificial Sequence
  Description of Artificial Sequence: Synthetic oligonucleotide
ucaccuccguauggagcgg

SEQ ID NO: 384794 - RNA, 19 nt, Artificial Sequence
  Description of Artificial Sequence: Synthetic oligonucleotide
uggguacccucagcaauac

SEQ ID NO: 384795 - RNA, 19 nt, Artificial Sequence
  Description of Artificial Sequence: Synthetic oligonucleotide
accggcggcuagaagagca

SEQ ID NO: 384796 - RNA, 19 nt, Artificial Sequence
  Description of Artificial Sequence: Synthetic oligonucleotide
gauuuaggauugccuugcu

SEQ ID NO: 384797 - RNA, 19 nt, Artificial Sequence
  Description of Artificial Sequence: Synthetic oligonucleotide
uuccuucgccguucucaug

SEQ ID NO: 384798 - RNA, 19 nt, Artificial Sequence
  Description of Artificial Sequence: Synthetic oligonucleotide
cuaaaacgaaggccagcaa

SEQ ID NO: 384799 - RNA, 19 nt, Artificial Sequence
  Description of Artificial Sequence: Synthetic oligonucleotide
caaauccguucagucuuug

SEQ ID NO: 384800 - RNA, 19 nt, Artificial Sequence
  Description of Artificial Sequence: Synthetic oligonucleotide
caguucauuggcccaucga

SEQ ID NO: 384801 - RNA, 19 nt, Artificial Sequence
  Description of Artificial Sequence: Synthetic oligonucleotide
aaagcccauccuguacauu

SEQ ID NO: 384802 - RNA, 19 nt, Artificial Sequence
  Description of Artificial Sequence: Synthetic oligonucleotide
gguaacgaguguggaguug

SEQ ID NO: 384803 - RNA, 19 nt, Artificial Sequence
  Description of Artificial Sequence: Synthetic oligonucleotide
gccgguugaaugccccagg

SEQ ID NO: 384804 - RNA, 19 nt, Artificial Sequence
  Description of Artificial Sequence: Synthetic oligonucleotide
agucgaugugucauucuuu

SEQ ID NO: 384805 - RNA, 19 nt, Artificial Sequence
  Description of Artificial Sequence: Synthetic oligonucleotide
ggcgcuauggcgcuuccaa

SEQ ID NO: 384806 - RNA, 19 nt, Artificial Sequence
  Description of Artificial Sequence: Synthetic oligonucleotide
cuuuucggguaucuuaauu

SEQ ID NO: 384807 - RNA, 19 nt, Artificial Sequence
  Description of Artificial Sequence: Synthetic oligonucleotide
agacuacuggguacccuca

SEQ ID NO: 384808 - RNA, 19 nt, Artificial Sequence
  Description of Artificial Sequence: Synthetic oligonucleotide
guacucccaauuuggaauu

SEQ ID NO: 384809 - RNA, 19 nt, Artificial Sequence
  Description of Artificial Sequence: Synthetic oligonucleotide
agacacaacugggcugaca

SEQ ID NO: 384810 - RNA, 19 nt, Artificial Sequence
  Description of Artificial Sequence: Synthetic oligonucleotide
uuugaccugcauggcgcau

SEQ ID NO: 384811 - RNA, 19 nt, Artificial Sequence
  Description of Artificial Sequence: Synthetic oligonucleotide
gcgggcagauuuuauuguc

SEQ ID NO: 384812 - RNA, 19 nt, Artificial Sequence
  Description of Artificial Sequence: Synthetic oligonucleotide
gccugucgaucuuccauug

SEQ ID NO: 384813 - RNA, 19 nt, Artificial Sequence
  Description of Artificial Sequence: Synthetic oligonucleotide
ccaucgaugucguaaugaa

SEQ ID NO: 384814 - RNA, 19 nt, Artificial Sequence
  Description of Artificial Sequence: Synthetic oligonucleotide
accuccguauggagcggcg

SEQ ID NO: 384815 - RNA, 19 nt, Artificial Sequence
  Description of Artificial Sequence: Synthetic oligonucleotide
ccugcgagaacugccauga

SEQ ID NO: 384816 - RNA, 19 nt, Artificial Sequence
  Description of Artificial Sequence: Synthetic oligonucleotide
uccguauggagcggcgauu

SEQ ID NO: 384817 - RNA, 19 nt, Artificial Sequence
  Description of Artificial Sequence: Synthetic oligonucleotide
cuguauaagauagcucgau

SEQ ID NO: 384818 - RNA, 19 nt, Artificial Sequence
  Description of Artificial Sequence: Synthetic oligonucleotide
cccaaagugugaacaucuc

SEQ ID NO: 384819 - RNA, 19 nt, Artificial Sequence
  Description of Artificial Sequence: Synthetic oligonucleotide
caccuccguauggagcggc

SEQ ID NO: 384820 - RNA, 19 nt, Artificial Sequence
  Description of Artificial Sequence: Synthetic oligonucleotide
ccagugguacaguggagca

SEQ ID NO: 384821 - RNA, 19 nt, Artificial Sequence
  Description of Artificial Sequence: Synthetic oligonucleotide
ugagguggucggacacguu

SEQ ID NO: 384822 - RNA, 19 nt, Artificial Sequence
  Description of Artificial Sequence: Synthetic oligonucleotide
guugaaugccccaggugau

SEQ ID NO: 384823 - RNA, 19 nt, Artificial Sequence
  Description of Artificial Sequence: Synthetic oligonucleotide
ucgcccaaccuggcagaug

SEQ ID NO: 384824 - RNA, 19 nt, Artificial Sequence
  Description of Artificial Sequence: Synthetic oligonucleotide
agguggucggacacguuua

SEQ ID NO: 384825 - RNA, 19 nt, Artificial Sequence
  Description of Artificial Sequence: Synthetic oligonucleotide
ccucaaauccguucagucu

SEQ ID NO: 384826 - RNA, 19 nt, Artificial Sequence
  Description of Artificial Sequence: Synthetic oligonucleotide
gcggcuagaagagcaguca

SEQ ID NO: 384827 - RNA, 19 nt, Artificial Sequence
  Description of Artificial Sequence: Synthetic oligonucleotide
ccguucagucuuuguaguc

SEQ ID NO: 384828 - RNA, 19 nt, Artificial Sequence
  Description of Artificial Sequence: Synthetic oligonucleotide
uguagacgauuggggucau

SEQ ID NO: 384829 - RNA, 19 nt, Artificial Sequence
  Description of Artificial Sequence: Synthetic oligonucleotide
agucucccaaaggcgcuau

SEQ ID NO: 384830 - RNA, 19 nt, Artificial Sequence
  Description of Artificial Sequence: Synthetic oligonucleotide
ccguauggagcggcgauug

SEQ ID NO: 384831 - RNA, 19 nt, Artificial Sequence
  Description of Artificial Sequence: Synthetic oligonucleotide
auagcucgauccacaccaa

SEQ ID NO: 384832 - RNA, 19 nt, Artificial Sequence
  Description of Artificial Sequence: Synthetic oligonucleotide
cuauggcgcuuccaauucu

SEQ ID NO: 384833 - RNA, 19 nt, Artificial Sequence
  Description of Artificial Sequence: Synthetic oligonucleotide
cccaucgaugucguaauga

SEQ ID NO: 384834 - RNA, 19 nt, Artificial Sequence
  Description of Artificial Sequence: Synthetic oligonucleotide
gcccaaagugugaacaucu

SEQ ID NO: 384835 - RNA, 19 nt, Artificial Sequence
  Description of Artificial Sequence: Synthetic oligonucleotide
gguggucggacacguuuaa

SEQ ID NO: 384836 - RNA, 19 nt, Artificial Sequence
  Description of Artificial Sequence: Synthetic oligonucleotide
ccacugccccucaaggauc

SEQ ID NO: 384837 - RNA, 19 nt, Artificial Sequence
  Description of Artificial Sequence: Synthetic oligonucleotide
cagcccaaagugugaacau

SEQ ID NO: 384838 - RNA, 19 nt, Artificial Sequence
  Description of Artificial Sequence: Synthetic oligonucleotide
gcccaucgaugucguaaug

SEQ ID NO: 384839 - RNA, 19 nt, Artificial Sequence
  Description of Artificial Sequence: Synthetic oligonucleotide
guggucggacacguuuaaa

SEQ ID NO: 384840 - RNA, 19 nt, Artificial Sequence
  Description of Artificial Sequence: Synthetic oligonucleotide
caacgggucuggcucugua

SEQ ID NO: 384841 - RNA, 19 nt, Artificial Sequence
  Description of Artificial Sequence: Synthetic oligonucleotide
cuccguauggagcggcgau

SEQ ID NO: 384842 - RNA, 19 nt, Artificial Sequence
  Description of Artificial Sequence: Synthetic oligonucleotide
cguauggagcggcgauugc

SEQ ID NO: 384843 - RNA, 19 nt, Artificial Sequence
  Description of Artificial Sequence: Synthetic oligonucleotide
ggcccaucgaugucguaau

SEQ ID NO: 384844 - RNA, 19 nt, Artificial Sequence
  Description of Artificial Sequence: Synthetic oligonucleotide
aggcgcuauggcgcuucca

SEQ ID NO: 384845 - RNA, 19 nt, Artificial Sequence
  Description of Artificial Sequence: Synthetic oligonucleotide
guccagucgaugugucauu

SEQ ID NO: 384846 - RNA, 19 nt, Artificial Sequence
  Description of Artificial Sequence: Synthetic oligonucleotide
guccugcgagaacugccau

SEQ ID NO: 384847 - RNA, 19 nt, Artificial Sequence
  Description of Artificial Sequence: Synthetic oligonucleotide
ccaaaggcgcuauggcgcu

SEQ ID NO: 384848 - RNA, 19 nt, Artificial Sequence
  Description of Artificial Sequence: Synthetic oligonucleotide
cuggcaccggcggcuagaa

SEQ ID NO: 384849 - RNA, 19 nt, Artificial Sequence
  Description of Artificial Sequence: Synthetic oligonucleotide
cggguaucuuaauucucaa

SEQ ID NO: 384850 - RNA, 19 nt, Artificial Sequence
  Description of Artificial Sequence: Synthetic oligonucleotide
gguagcgggcagauuuuau

SEQ ID NO: 384851 - RNA, 19 nt, Artificial Sequence
  Description of Artificial Sequence: Synthetic oligonucleotide
guagacgauuggggucaua

SEQ ID NO: 384852 - RNA, 19 nt, Artificial Sequence
  Description of Artificial Sequence: Synthetic oligonucleotide
ccgaugacuucagggaaua

SEQ ID NO: 384853 - RNA, 19 nt, Artificial Sequence
  Description of Artificial Sequence: Synthetic oligonucleotide
cgauuaccuguugagucaa

SEQ ID NO: 384854 - RNA, 19 nt, Artificial Sequence
  Description of Artificial Sequence: Synthetic oligonucleotide
gagcggcgauugcgauauc

SEQ ID NO: 384855 - RNA, 19 nt, Artificial Sequence
  Description of Artificial Sequence: Synthetic oligonucleotide
cccugacacagauguuuua

SEQ ID NO: 384856 - RNA, 19 nt, Artificial Sequence
  Description of Artificial Sequence: Synthetic oligonucleotide
ccuccguauggagcggcga

SEQ ID NO: 384857 - RNA, 19 nt, Artificial Sequence
  Description of Artificial Sequence: Synthetic oligonucleotide
gcgcuauggcgcuuccaau

SEQ ID NO: 384858 - RNA, 19 nt, Artificial Sequence
  Description of Artificial Sequence: Synthetic oligonucleotide
gucgcccaaccuggcagau

SEQ ID NO: 384859 - RNA, 19 nt, Artificial Sequence
  Description of Artificial Sequence: Synthetic oligonucleotide
cugcgagaacugccaugau

SEQ ID NO: 384860 - RNA, 19 nt, Artificial Sequence
  Description of Artificial Sequence: Synthetic oligonucleotide
cgaugucguaaugaaggau

SEQ ID NO: 384861 - RNA, 19 nt, Artificial Sequence
  Description of Artificial Sequence: Synthetic oligonucleotide
cgagaacugccaugaugau

SEQ ID NO: 384862 - RNA, 19 nt, Artificial Sequence
  Description of Artificial Sequence: Synthetic oligonucleotide
caaaggcgcuauggcgcuu

SEQ ID NO: 384863 - RNA, 19 nt, Artificial Sequence
  Description of Artificial Sequence: Synthetic oligonucleotide
cggcgauugcgauaucauu

SEQ ID NO: 384864 - RNA, 19 nt, Artificial Sequence
  Description of Artificial Sequence: Synthetic oligonucleotide
gcccaaccuggcagaugau

SEQ ID NO: 384865 - RNA, 19 nt, Artificial Sequence
  Description of Artificial Sequence: Synthetic oligonucleotide
aagugugcaacucuggucc

SEQ ID NO: 384866 - RNA, 19 nt, Artificial Sequence
  Description of Artificial Sequence: Synthetic oligonucleotide
agauaacugggcuagaagc

SEQ ID NO: 384867 - RNA, 19 nt, Artificial Sequence
  Description of Artificial Sequence: Synthetic oligonucleotide
acaugugucuccuugaccc

SEQ ID NO: 384868 - RNA, 19 nt, Artificial Sequence
  Description of Artificial Sequence: Synthetic oligonucleotide
ucuaguucuaguaaguucu

SEQ ID NO: 384869 - RNA, 19 nt, Artificial Sequence
  Description of Artificial Sequence: Synthetic oligonucleotide
ugaacugugguucuugagg

SEQ ID NO: 384870 - RNA, 19 nt, Artificial Sequence
  Description of Artificial Sequence: Synthetic oligonucleotide
ucuaauuccaaauuaucca

SEQ ID NO: 384871 - RNA, 19 nt, Artificial Sequence
  Description of Artificial Sequence: Synthetic oligonucleotide
acuuuugagagauucuccc

SEQ ID NO: 384872 - RNA, 19 nt, Artificial Sequence
  Description of Artificial Sequence: Synthetic oligonucleotide
cauacuagcauuuccagag

SEQ ID NO: 384873 - RNA, 19 nt, Artificial Sequence
  Description of Artificial Sequence: Synthetic oligonucleotide
aaggcuaagccauucacag

SEQ ID NO: 384874 - RNA, 19 nt, Artificial Sequence
  Description of Artificial Sequence: Synthetic oligonucleotide
ugaauuucaauucuucgga

SEQ ID NO: 384875 - RNA, 19 nt, Artificial Sequence
  Description of Artificial Sequence: Synthetic oligonucleotide
aauauagcccagaagguac

SEQ ID NO: 384876 - RNA, 19 nt, Artificial Sequence
  Description of Artificial Sequence: Synthetic oligonucleotide
aguucuuaaauaucuuuac

SEQ ID NO: 384877 - RNA, 19 nt, Artificial Sequence
  Description of Artificial Sequence: Synthetic oligonucleotide
uccaucuuuaauuucagca

SEQ ID NO: 384878 - RNA, 19 nt, Artificial Sequence
  Description of Artificial Sequence: Synthetic oligonucleotide
cugauuguuaucuuugggg

SEQ ID NO: 384879 - RNA, 19 nt, Artificial Sequence
  Description of Artificial Sequence: Synthetic oligonucleotide
cauuccauaauucagugug

SEQ ID NO: 384880 - RNA, 19 nt, Artificial Sequence
  Description of Artificial Sequence: Synthetic oligonucleotide
aucugcauaacguaaugcg

SEQ ID NO: 384881 - RNA, 19 nt, Artificial Sequence
  Description of Artificial Sequence: Synthetic oligonucleotide
aagccuauugucuuuagga

SEQ ID NO: 384882 - RNA, 19 nt, Artificial Sequence
  Description of Artificial Sequence: Synthetic oligonucleotide
aauuucaauucuucggaug

SEQ ID NO: 384883 - RNA, 19 nt, Artificial Sequence
  Description of Artificial Sequence: Synthetic oligonucleotide
uuauugcauacucugaaga

SEQ ID NO: 384884 - RNA, 19 nt, Artificial Sequence
  Description of Artificial Sequence: Synthetic oligonucleotide
aaucugcauaacguaaugc

SEQ ID NO: 384885 - RNA, 19 nt, Artificial Sequence
  Description of Artificial Sequence: Synthetic oligonucleotide
agauuaucuuuccauuggc

SEQ ID NO: 384886 - RNA, 19 nt, Artificial Sequence
  Description of Artificial Sequence: Synthetic oligonucleotide
gaaugccaaauucucaccg

SEQ ID NO: 384887 - RNA, 19 nt, Artificial Sequence
  Description of Artificial Sequence: Synthetic oligonucleotide
agagcgacauuguuggacc

SEQ ID NO: 384888 - RNA, 19 nt, Artificial Sequence
  Description of Artificial Sequence: Synthetic oligonucleotide
uuuaauccagggaaaaggu

SEQ ID NO: 384889 - RNA, 19 nt, Artificial Sequence
  Description of Artificial Sequence: Synthetic oligonucleotide
cugacucccagcaagaagc

SEQ ID NO: 384890 - RNA, 19 nt, Artificial Sequence
  Description of Artificial Sequence: Synthetic oligonucleotide
uuaucagccaugcugaaau

SEQ ID NO: 384891 - RNA, 19 nt, Artificial Sequence
  Description of Artificial Sequence: Synthetic oligonucleotide
aagauaacugggcuagaag

SEQ ID NO: 384892 - RNA, 19 nt, Artificial Sequence
  Description of Artificial Sequence: Synthetic oligonucleotide
uaguaaucaaugcaauuca

SEQ ID NO: 384893 - RNA, 19 nt, Artificial Sequence
  Description of Artificial Sequence: Synthetic oligonucleotide
uuaggauugugcugaauag

SEQ ID NO: 384894 - RNA, 19 nt, Artificial Sequence
  Description of Artificial Sequence: Synthetic oligonucleotide
uuuccgacagauauuuaag

SEQ ID NO: 384895 - RNA, 19 nt, Artificial Sequence
  Description of Artificial Sequence: Synthetic oligonucleotide
auuucaauucuucggauga

SEQ ID NO: 384896 - RNA, 19 nt, Artificial Sequence
  Description of Artificial Sequence: Synthetic oligonucleotide
ugaucaagagcucuaggca

SEQ ID NO: 384897 - RNA, 19 nt, Artificial Sequence
  Description of Artificial Sequence: Synthetic oligonucleotide
ugauuguuaucuuuggggu

SEQ ID NO: 384898 - RNA, 19 nt, Artificial Sequence
  Description of Artificial Sequence: Synthetic oligonucleotide
aaauucucaccguuccauc

SEQ ID NO: 384899 - RNA, 19 nt, Artificial Sequence
  Description of Artificial Sequence: Synthetic oligonucleotide
uuaacaaugaugcucccuu

SEQ ID NO: 384900 - RNA, 19 nt, Artificial Sequence
  Description of Artificial Sequence: Synthetic oligonucleotide
aauaucgucuaauuccaaa

SEQ ID NO: 384901 - RNA, 19 nt, Artificial Sequence
  Description of Artificial Sequence: Synthetic oligonucleotide
uagaaugccaaauucucac

SEQ ID NO: 384902 - RNA, 19 nt, Artificial Sequence
  Description of Artificial Sequence: Synthetic oligonucleotide
uguggauacuguaagugcu

SEQ ID NO: 384903 - RNA, 19 nt, Artificial Sequence
  Description of Artificial Sequence: Synthetic oligonucleotide
agaaugccaaauucucacc

SEQ ID NO: 384904 - RNA, 19 nt, Artificial Sequence
  Description of Artificial Sequence: Synthetic oligonucleotide
cacguaauaguuuaaucug

SEQ ID NO: 384905 - RNA, 19 nt, Artificial Sequence
  Description of Artificial Sequence: Synthetic oligonucleotide
ucacccauugcuuuuaggu

SEQ ID NO: 384906 - RNA, 19 nt, Artificial Sequence
  Description of Artificial Sequence: Synthetic oligonucleotide
acuaauggcgaguucagca

SEQ ID NO: 384907 - RNA, 19 nt, Artificial Sequence
  Description of Artificial Sequence: Synthetic oligonucleotide
ucucccauuaggauugugc

SEQ ID NO: 384908 - RNA, 19 nt, Artificial Sequence
  Description of Artificial Sequence: Synthetic oligonucleotide
agaaggcuaagccauucac

SEQ ID NO: 384909 - RNA, 19 nt, Artificial Sequence
  Description of Artificial Sequence: Synthetic oligonucleotide
guaagugcgggccaggaag

SEQ ID NO: 384910 - RNA, 19 nt, Artificial Sequence
  Description of Artificial Sequence: Synthetic oligonucleotide
cucaaaacgauguucagga

SEQ ID NO: 384911 - RNA, 19 nt, Artificial Sequence
  Description of Artificial Sequence: Synthetic oligonucleotide
aagaaucgugggcccaugc

SEQ ID NO: 384912 - RNA, 19 nt, Artificial Sequence
  Description of Artificial Sequence: Synthetic oligonucleotide
uacucugaagaaucguggg

SEQ ID NO: 384913 - RNA, 19 nt, Artificial Sequence
  Description of Artificial Sequence: Synthetic oligonucleotide
cucuaggcaagcaucaagc

SEQ ID NO: 384914 - RNA, 19 nt, Artificial Sequence
  Description of Artificial Sequence: Synthetic oligonucleotide
aauucucaccguuccaucu

SEQ ID NO: 384915 - RNA, 19 nt, Artificial Sequence
  Description of Artificial Sequence: Synthetic oligonucleotide
ucugcauaacguaaugcgu

SEQ ID NO: 384916 - RNA, 19 nt, Artificial Sequence
  Description of Artificial Sequence: Synthetic oligonucleotide
auauccuuuacagccaggg

SEQ ID NO: 384917 - RNA, 19 nt, Artificial Sequence
  Description of Artificial Sequence: Synthetic oligonucleotide
gaaguuuggugaugaagag

SEQ ID NO: 384918 - RNA, 19 nt, Artificial Sequence
  Description of Artificial Sequence: Synthetic oligonucleotide
uauuucuccucccacguaa

SEQ ID NO: 384919 - RNA, 19 nt, Artificial Sequence
  Description of Artificial Sequence: Synthetic oligonucleotide
ggauauauuucacaacugc

SEQ ID NO: 384920 - RNA, 19 nt, Artificial Sequence
  Description of Artificial Sequence: Synthetic oligonucleotide
augagguacggcuugucuc

SEQ ID NO: 384921 - RNA, 19 nt, Artificial Sequence
  Description of Artificial Sequence: Synthetic oligonucleotide
uugauaguccuguccagag

SEQ ID NO: 384922 - RNA, 19 nt, Artificial Sequence
  Description of Artificial Sequence: Synthetic oligonucleotide
ugagguacggcuugucucc

SEQ ID NO: 384923 - RNA, 19 nt, Artificial Sequence
  Description of Artificial Sequence: Synthetic oligonucleotide
uuacuaauggcgaguucag

SEQ ID NO: 384924 - RNA, 19 nt, Artificial Sequence
  Description of Artificial Sequence: Synthetic oligonucleotide
uccgcuaacuuguucacca

SEQ ID NO: 384925 - RNA, 19 nt, Artificial Sequence
  Description of Artificial Sequence: Synthetic oligonucleotide
uacuagcauuuccagaggc

SEQ ID NO: 384926 - RNA, 19 nt, Artificial Sequence
  Description of Artificial Sequence: Synthetic oligonucleotide
uccuuuacagccaggggca

SEQ ID NO: 384927 - RNA, 19 nt, Artificial Sequence
  Description of Artificial Sequence: Synthetic oligonucleotide
uccuuaaaguucuuaaaua

SEQ ID NO: 384928 - RNA, 19 nt, Artificial Sequence
  Description of Artificial Sequence: Synthetic oligonucleotide
aaaucccuccgcaugacag

SEQ ID NO: 384929 - RNA, 19 nt, Artificial Sequence
  Description of Artificial Sequence: Synthetic oligonucleotide
cauuguuggacccucucag

SEQ ID NO: 384930 - RNA, 19 nt, Artificial Sequence
  Description of Artificial Sequence: Synthetic oligonucleotide
uauugcauacucugaagaa

SEQ ID NO: 384931 - RNA, 19 nt, Artificial Sequence
  Description of Artificial Sequence: Synthetic oligonucleotide
ugggguuuaucacaaucug

SEQ ID NO: 384932 - RNA, 19 nt, Artificial Sequence
  Description of Artificial Sequence: Synthetic oligonucleotide
uaacgagccggucaucugc

SEQ ID NO: 384933 - RNA, 19 nt, Artificial Sequence
  Description of Artificial Sequence: Synthetic oligonucleotide
agaacuuguguaaaugaag

SEQ ID NO: 384934 - RNA, 19 nt, Artificial Sequence
  Description of Artificial Sequence: Synthetic oligonucleotide
caugcaaacuccugggcag

SEQ ID NO: 384935 - RNA, 19 nt, Artificial Sequence
  Description of Artificial Sequence: Synthetic oligonucleotide
cugcauaacguaaugcgug

SEQ ID NO: 384936 - RNA, 19 nt, Artificial Sequence
  Description of Artificial Sequence: Synthetic oligonucleotide
aguuuaaucuguucacaga

SEQ ID NO: 384937 - RNA, 19 nt, Artificial Sequence
  Description of Artificial Sequence: Synthetic oligonucleotide
auaucgucuaauuccaaau

SEQ ID NO: 384938 - RNA, 19 nt, Artificial Sequence
  Description of Artificial Sequence: Synthetic oligonucleotide
uguggauauauuucacaac

SEQ ID NO: 384939 - RNA, 19 nt, Artificial Sequence
  Description of Artificial Sequence: Synthetic oligonucleotide
ucauuuggcgugacaagug

SEQ ID NO: 384940 - RNA, 19 nt, Artificial Sequence
  Description of Artificial Sequence: Synthetic oligonucleotide
uaauggcgaguucagcaag

SEQ ID NO: 384941 - RNA, 19 nt, Artificial Sequence
  Description of Artificial Sequence: Synthetic oligonucleotide
uucuaguucuaguaaguuc

SEQ ID NO: 384942 - RNA, 19 nt, Artificial Sequence
  Description of Artificial Sequence: Synthetic oligonucleotide
auacagaccagcucuccag

SEQ ID NO: 384943 - RNA, 19 nt, Artificial Sequence
  Description of Artificial Sequence: Synthetic oligonucleotide
ucugacccugugaugauga

SEQ ID NO: 384944 - RNA, 19 nt, Artificial Sequence
  Description of Artificial Sequence: Synthetic oligonucleotide
aacguaaugcguguguccu

SEQ ID NO: 384945 - RNA, 19 nt, Artificial Sequence
  Description of Artificial Sequence: Synthetic oligonucleotide
aguaaucaaugcaauucac

SEQ ID NO: 384946 - RNA, 19 nt, Artificial Sequence
  Description of Artificial Sequence: Synthetic oligonucleotide
aagagccuagcugccauac

SEQ ID NO: 384947 - RNA, 19 nt, Artificial Sequence
  Description of Artificial Sequence: Synthetic oligonucleotide
cuguggauacuguaagugc

SEQ ID NO: 384948 - RNA, 19 nt, Artificial Sequence
  Description of Artificial Sequence: Synthetic oligonucleotide
uccgacagauauuuaagaa

SEQ ID NO: 384949 - RNA, 19 nt, Artificial Sequence
  Description of Artificial Sequence: Synthetic oligonucleotide
aggauugugcugaauaguc

SEQ ID NO: 384950 - RNA, 19 nt, Artificial Sequence
  Description of Artificial Sequence: Synthetic oligonucleotide
auuuuaacgagccggucau

SEQ ID NO: 384951 - RNA, 19 nt, Artificial Sequence
  Description of Artificial Sequence: Synthetic oligonucleotide
ucgucuaauuccaaauuau

SEQ ID NO: 384952 - RNA, 19 nt, Artificial Sequence
  Description of Artificial Sequence: Synthetic oligonucleotide
uguacuccccaucaccaca

SEQ ID NO: 384953 - RNA, 19 nt, Artificial Sequence
  Description of Artificial Sequence: Synthetic oligonucleotide
cauuuggcgugacaagugg

SEQ ID NO: 384954 - RNA, 19 nt, Artificial Sequence
  Description of Artificial Sequence: Synthetic oligonucleotide
aggaccuuaucagccaugc

SEQ ID NO: 384955 - RNA, 19 nt, Artificial Sequence
  Description of Artificial Sequence: Synthetic oligonucleotide
cauccauggacauggcagg

SEQ ID NO: 384956 - RNA, 19 nt, Artificial Sequence
  Description of Artificial Sequence: Synthetic oligonucleotide
auaacguaaugcguguguc

SEQ ID NO: 384957 - RNA, 19 nt, Artificial Sequence
  Description of Artificial Sequence: Synthetic oligonucleotide
uuuggcgugacaagugggu

SEQ ID NO: 384958 - RNA, 19 nt, Artificial Sequence
  Description of Artificial Sequence: Synthetic oligonucleotide
uuuaacgagccggucaucu

SEQ ID NO: 384959 - RNA, 19 nt, Artificial Sequence
  Description of Artificial Sequence: Synthetic oligonucleotide
uuccgacagauauuuaaga

SEQ ID NO: 384960 - RNA, 19 nt, Artificial Sequence
  Description of Artificial Sequence: Synthetic oligonucleotide
agguacauuguccugucca

SEQ ID NO: 384961 - RNA, 19 nt, Artificial Sequence
  Description of Artificial Sequence: Synthetic oligonucleotide
cacauucugggcaugcccc

SEQ ID NO: 384962 - RNA, 19 nt, Artificial Sequence
  Description of Artificial Sequence: Synthetic oligonucleotide
uaacguaaugcgugugucc

SEQ ID NO: 384963 - RNA, 19 nt, Artificial Sequence
  Description of Artificial Sequence: Synthetic oligonucleotide
uacauuguccuguccaagu

SEQ ID NO: 384964 - RNA, 19 nt, Artificial Sequence
  Description of Artificial Sequence: Synthetic oligonucleotide
agcuaacaauguucaauuc

SEQ ID NO: 384965 - RNA, 19 nt, Artificial Sequence
  Description of Artificial Sequence: Synthetic oligonucleotide
ugacccauucuucaacaac

SEQ ID NO: 384966 - RNA, 19 nt, Artificial Sequence
  Description of Artificial Sequence: Synthetic oligonucleotide
uugggcugaauuucaauuc

SEQ ID NO: 384967 - RNA, 19 nt, Artificial Sequence
  Description of Artificial Sequence: Synthetic oligonucleotide
ccauauuuuaacgagccgg

SEQ ID NO: 384968 - RNA, 19 nt, Artificial Sequence
  Description of Artificial Sequence: Synthetic oligonucleotide
ggcuaagccauucacagac

SEQ ID NO: 384969 - RNA, 19 nt, Artificial Sequence
  Description of Artificial Sequence: Synthetic oligonucleotide
agcuucacuacccuugaga

SEQ ID NO: 384970 - RNA, 19 nt, Artificial Sequence
  Description of Artificial Sequence: Synthetic oligonucleotide
ugacuuuugagagauucuc

SEQ ID NO: 384971 - RNA, 19 nt, Artificial Sequence
  Description of Artificial Sequence: Synthetic oligonucleotide
auacuagcauuuccagagg

SEQ ID NO: 384972 - RNA, 19 nt, Artificial Sequence
  Description of Artificial Sequence: Synthetic oligonucleotide
cagucaccuacccacagcc

SEQ ID NO: 384973 - RNA, 19 nt, Artificial Sequence
  Description of Artificial Sequence: Synthetic oligonucleotide
acugcuaacugguaagcaa

SEQ ID NO: 384974 - RNA, 19 nt, Artificial Sequence
  Description of Artificial Sequence: Synthetic oligonucleotide
auuccauaauucagugugc

SEQ ID NO: 384975 - RNA, 19 nt, Artificial Sequence
  Description of Artificial Sequence: Synthetic oligonucleotide
uuguguaaaugaagcaguc

SEQ ID NO: 384976 - RNA, 19 nt, Artificial Sequence
  Description of Artificial Sequence: Synthetic oligonucleotide
acaaaucucccauuaggau

SEQ ID NO: 384977 - RNA, 19 nt, Artificial Sequence
  Description of Artificial Sequence: Synthetic oligonucleotide
auuuacuaauggcgaguuc

SEQ ID NO: 384978 - RNA, 19 nt, Artificial Sequence
  Description of Artificial Sequence: Synthetic oligonucleotide
aaugacuccucaguggcaa

SEQ ID NO: 384979 - RNA, 19 nt, Artificial Sequence
  Description of Artificial Sequence: Synthetic oligonucleotide
uaucgucuaauuccaaauu

SEQ ID NO: 384980 - RNA, 19 nt, Artificial Sequence
  Description of Artificial Sequence: Synthetic oligonucleotide
aucgucuaauuccaaauua

SEQ ID NO: 384981 - RNA, 19 nt, Artificial Sequence
  Description of Artificial Sequence: Synthetic oligonucleotide
ucaccguuccaucuucuga

SEQ ID NO: 384982 - RNA, 19 nt, Artificial Sequence
  Description of Artificial Sequence: Synthetic oligonucleotide
aaugcguguguccuucaaa

SEQ ID NO: 384983 - RNA, 19 nt, Artificial Sequence
  Description of Artificial Sequence: Synthetic oligonucleotide
ugcauaacguaaugcgugu

SEQ ID NO: 384984 - RNA, 19 nt, Artificial Sequence
  Description of Artificial Sequence: Synthetic oligonucleotide
ugggcaugccccuccaggg

SEQ ID NO: 384985 - RNA, 19 nt, Artificial Sequence
  Description of Artificial Sequence: Synthetic oligonucleotide
agaagguacauuguccugu

SEQ ID NO: 384986 - RNA, 19 nt, Artificial Sequence
  Description of Artificial Sequence: Synthetic oligonucleotide
ucuaggcaagcaucaagcu

SEQ ID NO: 384987 - RNA, 19 nt, Artificial Sequence
  Description of Artificial Sequence: Synthetic oligonucleotide
gcaagcaucaagcuugccc

SEQ ID NO: 384988 - RNA, 19 nt, Artificial Sequence
  Description of Artificial Sequence: Synthetic oligonucleotide
cugggcagaaccaaagcuc

SEQ ID NO: 384989 - RNA, 19 nt, Artificial Sequence
  Description of Artificial Sequence: Synthetic oligonucleotide
uuaauccagggaaaagguu

SEQ ID NO: 384990 - RNA, 19 nt, Artificial Sequence
  Description of Artificial Sequence: Synthetic oligonucleotide
uuuccagaggcaguggcca

SEQ ID NO: 384991 - RNA, 19 nt, Artificial Sequence
  Description of Artificial Sequence: Synthetic oligonucleotide
acauaccacaacaaaucuc

SEQ ID NO: 384992 - RNA, 19 nt, Artificial Sequence
  Description of Artificial Sequence: Synthetic oligonucleotide
uccugaugaacugugguuc

SEQ ID NO: 384993 - RNA, 19 nt, Artificial Sequence
  Description of Artificial Sequence: Synthetic oligonucleotide
accguuccaucuucugacc

SEQ ID NO: 384994 - RNA, 19 nt, Artificial Sequence
  Description of Artificial Sequence: Synthetic oligonucleotide
guuuaucacaaucugcaua

SEQ ID NO: 384995 - RNA, 19 nt, Artificial Sequence
  Description of Artificial Sequence: Synthetic oligonucleotide
uagggaggaccuuaucagc

SEQ ID NO: 384996 - RNA, 19 nt, Artificial Sequence
  Description of Artificial Sequence: Synthetic oligonucleotide
cccagagcgacauuguugg

SEQ ID NO: 384997 - RNA, 19 nt, Artificial Sequence
  Description of Artificial Sequence: Synthetic oligonucleotide
guaaucaaugcaauucaca

SEQ ID NO: 384998 - RNA, 19 nt, Artificial Sequence
  Description of Artificial Sequence: Synthetic oligonucleotide
acauuguuggacccucuca

SEQ ID NO: 384999 - RNA, 19 nt, Artificial Sequence
  Description of Artificial Sequence: Synthetic oligonucleotide
cuggguaaguaagugcggg

SEQ ID NO: 385000 - RNA, 19 nt, Artificial Sequence
  Description of Artificial Sequence: Synthetic oligonucleotide
auguacuccccaucaccac

SEQ ID NO: 385001 - RNA, 19 nt, Artificial Sequence
  Description of Artificial Sequence: Synthetic oligonucleotide
ugaugaacugugguucuug

SEQ ID NO: 385002 - RNA, 19 nt, Artificial Sequence
  Description of Artificial Sequence: Synthetic oligonucleotide
auugcauacucugaagaau

SEQ ID NO: 385003 - RNA, 19 nt, Artificial Sequence
  Description of Artificial Sequence: Synthetic oligonucleotide
ucccauuaggauugugcug

SEQ ID NO: 385004 - RNA, 19 nt, Artificial Sequence
  Description of Artificial Sequence: Synthetic oligonucleotide
ucucaagccgguaggugcu

SEQ ID NO: 385005 - RNA, 19 nt, Artificial Sequence
  Description of Artificial Sequence: Synthetic oligonucleotide
uuucauacucugugggguc

SEQ ID NO: 385006 - RNA, 19 nt, Artificial Sequence
  Description of Artificial Sequence: Synthetic oligonucleotide
uccgcaugacagcagucug

SEQ ID NO: 385007 - RNA, 19 nt, Artificial Sequence
  Description of Artificial Sequence: Synthetic oligonucleotide
agagccuagcugccauacc

SEQ ID NO: 385008 - RNA, 19 nt, Artificial Sequence
  Description of Artificial Sequence: Synthetic oligonucleotide
caagcucaaaacgauguuc

SEQ ID NO: 385009 - RNA, 19 nt, Artificial Sequence
  Description of Artificial Sequence: Synthetic oligonucleotide
ugcugaauagucuguggau

SEQ ID NO: 385010 - RNA, 19 nt, Artificial Sequence
  Description of Artificial Sequence: Synthetic oligonucleotide
uggguaaguaagugcgggc

SEQ ID NO: 385011 - RNA, 19 nt, Artificial Sequence
  Description of Artificial Sequence: Synthetic oligonucleotide
caucauagcccagagcgac

SEQ ID NO: 385012 - RNA, 19 nt, Artificial Sequence
  Description of Artificial Sequence: Synthetic oligonucleotide
cuuguguaaaugaagcagu

SEQ ID NO: 385013 - RNA, 19 nt, Artificial Sequence
  Description of Artificial Sequence: Synthetic oligonucleotide
accugaaaugagguacggc

SEQ ID NO: 385014 - RNA, 19 nt, Artificial Sequence
  Description of Artificial Sequence: Synthetic oligonucleotide
uggcuggguaaguaagugc

SEQ ID NO: 385015 - RNA, 19 nt, Artificial Sequence
  Description of Artificial Sequence: Synthetic oligonucleotide
agccuauugucuuuaggaa

SEQ ID NO: 385016 - RNA, 19 nt, Artificial Sequence
  Description of Artificial Sequence: Synthetic oligonucleotide
ugcccauauccuuuacagc

SEQ ID NO: 385017 - RNA, 19 nt, Artificial Sequence
  Description of Artificial Sequence: Synthetic oligonucleotide
aucacccauugcuuuuagg

SEQ ID NO: 385018 - RNA, 19 nt, Artificial Sequence
  Description of Artificial Sequence: Synthetic oligonucleotide
ggaagcuugcacaugacac

SEQ ID NO: 385019 - RNA, 19 nt, Artificial Sequence
  Description of Artificial Sequence: Synthetic oligonucleotide
gguagggaggaccuuauca

SEQ ID NO: 385020 - RNA, 19 nt, Artificial Sequence
  Description of Artificial Sequence: Synthetic oligonucleotide
uuaacgagccggucaucug

SEQ ID NO: 385021 - RNA, 19 nt, Artificial Sequence
  Description of Artificial Sequence: Synthetic oligonucleotide
ucacaacugcccauauccu

SEQ ID NO: 385022 - RNA, 19 nt, Artificial Sequence
  Description of Artificial Sequence: Synthetic oligonucleotide
auaccuugauaguccuguc

SEQ ID NO: 385023 - RNA, 19 nt, Artificial Sequence
  Description of Artificial Sequence: Synthetic oligonucleotide
gaaucgugggcccaugcaa

SEQ ID NO: 385024 - RNA, 19 nt, Artificial Sequence
  Description of Artificial Sequence: Synthetic oligonucleotide
agaaucgugggcccaugca

SEQ ID NO: 385025 - RNA, 19 nt, Artificial Sequence
  Description of Artificial Sequence: Synthetic oligonucleotide
ugaugcucccuucaucaua

SEQ ID NO: 385026 - RNA, 19 nt, Artificial Sequence
  Description of Artificial Sequence: Synthetic oligonucleotide
uggauacuguaagugcuug

SEQ ID NO: 385027 - RNA, 19 nt, Artificial Sequence
  Description of Artificial Sequence: Synthetic oligonucleotide
gaagguacauuguccuguc

SEQ ID NO: 385028 - RNA, 19 nt, Artificial Sequence
  Description of Artificial Sequence: Synthetic oligonucleotide
aagccauugcuguguagau

SEQ ID NO: 385029 - RNA, 19 nt, Artificial Sequence
  Description of Artificial Sequence: Synthetic oligonucleotide
auuguuggacccucucaga

SEQ ID NO: 385030 - RNA, 19 nt, Artificial Sequence
  Description of Artificial Sequence: Synthetic oligonucleotide
ugacucccagcaagaagcc

SEQ ID NO: 385031 - RNA, 19 nt, Artificial Sequence
  Description of Artificial Sequence: Synthetic oligonucleotide
guaaguaagugcgggccag

SEQ ID NO: 385032 - RNA, 19 nt, Artificial Sequence
  Description of Artificial Sequence: Synthetic oligonucleotide
cuugacccauucuucaaca

SEQ ID NO: 385033 - RNA, 19 nt, Artificial Sequence
  Description of Artificial Sequence: Synthetic oligonucleotide
ggguuuaucacaaucugca

SEQ ID NO: 385034 - RNA, 19 nt, Artificial Sequence
  Description of Artificial Sequence: Synthetic oligonucleotide
auuuggcgugacaaguggg

SEQ ID NO: 385035 - RNA, 19 nt, Artificial Sequence
  Description of Artificial Sequence: Synthetic oligonucleotide
uaaguaagugcgggccagg

SEQ ID NO: 385036 - RNA, 19 nt, Artificial Sequence
  Description of Artificial Sequence: Synthetic oligonucleotide
acguaauaguuuaaucugu

SEQ ID NO: 385037 - RNA, 19 nt, Artificial Sequence
  Description of Artificial Sequence: Synthetic oligonucleotide
uagcucaugaaugccacau

SEQ ID NO: 385038 - RNA, 19 nt, Artificial Sequence
  Description of Artificial Sequence: Synthetic oligonucleotide
gccaaauucucaccguucc

SEQ ID NO: 385039 - RNA, 19 nt, Artificial Sequence
  Description of Artificial Sequence: Synthetic oligonucleotide
gauagguugggaggccaag

SEQ ID NO: 385040 - RNA, 19 nt, Artificial Sequence
  Description of Artificial Sequence: Synthetic oligonucleotide
aauggcgaguucagcaagu

SEQ ID NO: 385041 - RNA, 19 nt, Artificial Sequence
  Description of Artificial Sequence: Synthetic oligonucleotide
uggcgaguucagcaaguug

SEQ ID NO: 385042 - RNA, 19 nt, Artificial Sequence
  Description of Artificial Sequence: Synthetic oligonucleotide
cauauuuuaacgagccggu

SEQ ID NO: 385043 - RNA, 19 nt, Artificial Sequence
  Description of Artificial Sequence: Synthetic oligonucleotide
cagaacuuguguaaaugaa

SEQ ID NO: 385044 - RNA, 19 nt, Artificial Sequence
  Description of Artificial Sequence: Synthetic oligonucleotide
cucagacuggccacacacc

SEQ ID NO: 385045 - RNA, 19 nt, Artificial Sequence
  Description of Artificial Sequence: Synthetic oligonucleotide
ucccgaccaagcuuaacaa

SEQ ID NO: 385046 - RNA, 19 nt, Artificial Sequence
  Description of Artificial Sequence: Synthetic oligonucleotide
uaacaaugaugcucccuuc

SEQ ID NO: 385047 - RNA, 19 nt, Artificial Sequence
  Description of Artificial Sequence: Synthetic oligonucleotide
ccgaccaagcuuaacaaug

SEQ ID NO: 385048 - RNA, 19 nt, Artificial Sequence
  Description of Artificial Sequence: Synthetic oligonucleotide
gugcucucaagccgguagg

SEQ ID NO: 385049 - RNA, 19 nt, Artificial Sequence
  Description of Artificial Sequence: Synthetic oligonucleotide
agcagucaccuacccacag

SEQ ID NO: 385050 - RNA, 19 nt, Artificial Sequence
  Description of Artificial Sequence: Synthetic oligonucleotide
gcuugcacaugacacauuc

SEQ ID NO: 385051 - RNA, 19 nt, Artificial Sequence
  Description of Artificial Sequence: Synthetic oligonucleotide
ucaugucccuccagaguga

SEQ ID NO: 385052 - RNA, 19 nt, Artificial Sequence
  Description of Artificial Sequence: Synthetic oligonucleotide
cuaauggcgaguucagcaa

SEQ ID NO: 385053 - RNA, 19 nt, Artificial Sequence
  Description of Artificial Sequence: Synthetic oligonucleotide
uuccauuggcauccaugga

SEQ ID NO: 385054 - RNA, 19 nt, Artificial Sequence
  Description of Artificial Sequence: Synthetic oligonucleotide
cagagcgacauuguuggac

SEQ ID NO: 385055 - RNA, 19 nt, Artificial Sequence
  Description of Artificial Sequence: Synthetic oligonucleotide
cucccgaccaagcuuaaca

SEQ ID NO: 385056 - RNA, 19 nt, Artificial Sequence
  Description of Artificial Sequence: Synthetic oligonucleotide
uacuaauggcgaguucagc

SEQ ID NO: 385057 - RNA, 19 nt, Artificial Sequence
  Description of Artificial Sequence: Synthetic oligonucleotide
gcugaacugacauuuacua

SEQ ID NO: 385058 - RNA, 19 nt, Artificial Sequence
  Description of Artificial Sequence: Synthetic oligonucleotide
cuuccgcuaacuuguucac

SEQ ID NO: 385059 - RNA, 19 nt, Artificial Sequence
  Description of Artificial Sequence: Synthetic oligonucleotide
cccagaagguacauugucc

SEQ ID NO: 385060 - RNA, 19 nt, Artificial Sequence
  Description of Artificial Sequence: Synthetic oligonucleotide
gcuaacuuguucaccauac

SEQ ID NO: 385061 - RNA, 19 nt, Artificial Sequence
  Description of Artificial Sequence: Synthetic oligonucleotide
agauacuuucagcuccaaa

SEQ ID NO: 385062 - RNA, 19 nt, Artificial Sequence
  Description of Artificial Sequence: Synthetic oligonucleotide
ugcuaacugguaagcaauu

SEQ ID NO: 385063 - RNA, 19 nt, Artificial Sequence
  Description of Artificial Sequence: Synthetic oligonucleotide
ugagaccuggcuggguaag

SEQ ID NO: 385064 - RNA, 19 nt, Artificial Sequence
  Description of Artificial Sequence: Synthetic oligonucleotide
gagccuagcugccauaccu

SEQ ID NO: 385065 - RNA, 19 nt, Artificial Sequence
  Description of Artificial Sequence: Synthetic oligonucleotide
aguagcuaacaauguucaa

SEQ ID NO: 385066 - RNA, 19 nt, Artificial Sequence
  Description of Artificial Sequence: Synthetic oligonucleotide
guagcuaacaauguucaau

SEQ ID NO: 385067 - RNA, 19 nt, Artificial Sequence
  Description of Artificial Sequence: Synthetic oligonucleotide
cugccauaccuugauaguc

SEQ ID NO: 385068 - RNA, 19 nt, Artificial Sequence
  Description of Artificial Sequence: Synthetic oligonucleotide
gaaaucccuccgcaugaca

SEQ ID NO: 385069 - RNA, 19 nt, Artificial Sequence
  Description of Artificial Sequence: Synthetic oligonucleotide
cagucccagaguuuaauaa

SEQ ID NO: 385070 - RNA, 19 nt, Artificial Sequence
  Description of Artificial Sequence: Synthetic oligonucleotide
gcguguguccuucaaacac

SEQ ID NO: 385071 - RNA, 19 nt, Artificial Sequence
  Description of Artificial Sequence: Synthetic oligonucleotide
aaaugacuccucaguggca

SEQ ID NO: 385072 - RNA, 19 nt, Artificial Sequence
  Description of Artificial Sequence: Synthetic oligonucleotide
gaauuucaauucuucggau

SEQ ID NO: 385073 - RNA, 19 nt, Artificial Sequence
  Description of Artificial Sequence: Synthetic oligonucleotide
acuagcauuuccagaggca

SEQ ID NO: 385074 - RNA, 19 nt, Artificial Sequence
  Description of Artificial Sequence: Synthetic oligonucleotide
cugaacugacauuuacuaa

SEQ ID NO: 385075 - RNA, 19 nt, Artificial Sequence
  Description of Artificial Sequence: Synthetic oligonucleotide
gaauuucaccaagaaccuc

SEQ ID NO: 385076 - RNA, 19 nt, Artificial Sequence
  Description of Artificial Sequence: Synthetic oligonucleotide
cuugugaacaagaccauuu

SEQ ID NO: 385077 - RNA, 19 nt, Artificial Sequence
  Description of Artificial Sequence: Synthetic oligonucleotide
ggguaaguaagugcgggcc

SEQ ID NO: 385078 - RNA, 19 nt, Artificial Sequence
  Description of Artificial Sequence: Synthetic oligonucleotide
gcuccauuccauaauucag

SEQ ID NO: 385079 - RNA, 19 nt, Artificial Sequence
  Description of Artificial Sequence: Synthetic oligonucleotide
cuguugugucaauaucguc

SEQ ID NO: 385080 - RNA, 19 nt, Artificial Sequence
  Description of Artificial Sequence: Synthetic oligonucleotide
ucauagcccagagcgacau

SEQ ID NO: 385081 - RNA, 19 nt, Artificial Sequence
  Description of Artificial Sequence: Synthetic oligonucleotide
gcucuaggcaagcaucaag

SEQ ID NO: 385082 - RNA, 19 nt, Artificial Sequence
  Description of Artificial Sequence: Synthetic oligonucleotide
gagcgacauuguuggaccc

SEQ ID NO: 385083 - RNA, 19 nt, Artificial Sequence
  Description of Artificial Sequence: Synthetic oligonucleotide
agucaccuacccacagccc

SEQ ID NO: 385084 - RNA, 19 nt, Artificial Sequence
  Description of Artificial Sequence: Synthetic oligonucleotide
auucucaccguuccaucuu

SEQ ID NO: 385085 - RNA, 19 nt, Artificial Sequence
  Description of Artificial Sequence: Synthetic oligonucleotide
acuacccuugagaccuggc

SEQ ID NO: 385086 - RNA, 19 nt, Artificial Sequence
  Description of Artificial Sequence: Synthetic oligonucleotide
uggauagguugggaggcca

SEQ ID NO: 385087 - RNA, 19 nt, Artificial Sequence
  Description of Artificial Sequence: Synthetic oligonucleotide
ggauacuguaagugcuugc

SEQ ID NO: 385088 - RNA, 19 nt, Artificial Sequence
  Description of Artificial Sequence: Synthetic oligonucleotide
cuugauaguccuguccaga

SEQ ID NO: 385089 - RNA, 19 nt, Artificial Sequence
  Description of Artificial Sequence: Synthetic oligonucleotide
ucucaccguuccaucuucu

SEQ ID NO: 385090 - RNA, 19 nt, Artificial Sequence
  Description of Artificial Sequence: Synthetic oligonucleotide
agagaugcacuggcaaacu

SEQ ID NO: 385091 - RNA, 19 nt, Artificial Sequence
  Description of Artificial Sequence: Synthetic oligonucleotide
ucccacguaauaguuuaau

SEQ ID NO: 385092 - RNA, 19 nt, Artificial Sequence
  Description of Artificial Sequence: Synthetic oligonucleotide
caucugcaccugaaaugag

SEQ ID NO: 385093 - RNA, 19 nt, Artificial Sequence
  Description of Artificial Sequence: Synthetic oligonucleotide
acaacugcccauauccuuu

SEQ ID NO: 385094 - RNA, 19 nt, Artificial Sequence
  Description of Artificial Sequence: Synthetic oligonucleotide
uuccgcuaacuuguucacc

SEQ ID NO: 385095 - RNA, 19 nt, Artificial Sequence
  Description of Artificial Sequence: Synthetic oligonucleotide
ggugacuauuucuccuccc

SEQ ID NO: 385096 - RNA, 19 nt, Artificial Sequence
  Description of Artificial Sequence: Synthetic oligonucleotide
aaauaugcuugggcugaau

SEQ ID NO: 385097 - RNA, 19 nt, Artificial Sequence
  Description of Artificial Sequence: Synthetic oligonucleotide
uggcagguuccucccgacc

SEQ ID NO: 385098 - RNA, 19 nt, Artificial Sequence
  Description of Artificial Sequence: Synthetic oligonucleotide
ccugaaaugagguacggcu

SEQ ID NO: 385099 - RNA, 19 nt, Artificial Sequence
  Description of Artificial Sequence: Synthetic oligonucleotide
ccacguaauaguuuaaucu

SEQ ID NO: 385100 - RNA, 19 nt, Artificial Sequence
  Description of Artificial Sequence: Synthetic oligonucleotide
cauaacguaaugcgugugu

SEQ ID NO: 385101 - RNA, 19 nt, Artificial Sequence
  Description of Artificial Sequence: Synthetic oligonucleotide
uccucccacguaauaguuu

SEQ ID NO: 385102 - RNA, 19 nt, Artificial Sequence
  Description of Artificial Sequence: Synthetic oligonucleotide
gguaaguaagugcgggcca

SEQ ID NO: 385103 - RNA, 19 nt, Artificial Sequence
  Description of Artificial Sequence: Synthetic oligonucleotide
gucugguauuccaggacug

SEQ ID NO: 385104 - RNA, 19 nt, Artificial Sequence
  Description of Artificial Sequence: Synthetic oligonucleotide
auauagcccagaagguaca

SEQ ID NO: 385105 - RNA, 19 nt, Artificial Sequence
  Description of Artificial Sequence: Synthetic oligonucleotide
ggcagaaccaaagcucuug

SEQ ID NO: 385106 - RNA, 19 nt, Artificial Sequence
  Description of Artificial Sequence: Synthetic oligonucleotide
agugugcaacucugguccu

SEQ ID NO: 385107 - RNA, 19 nt, Artificial Sequence
  Description of Artificial Sequence: Synthetic oligonucleotide
aggugcuagaaugccaaau

SEQ ID NO: 385108 - RNA, 19 nt, Artificial Sequence
  Description of Artificial Sequence: Synthetic oligonucleotide
ccuauugucuuuaggaaua

SEQ ID NO: 385109 - RNA, 19 nt, Artificial Sequence
  Description of Artificial Sequence: Synthetic oligonucleotide
agggaguagcuaacaaugu

SEQ ID NO: 385110 - RNA, 19 nt, Artificial Sequence
  Description of Artificial Sequence: Synthetic oligonucleotide
caucacccauugcuuuuag

SEQ ID NO: 385111 - RNA, 19 nt, Artificial Sequence
  Description of Artificial Sequence: Synthetic oligonucleotide
gaagaaucgugggcccaug

SEQ ID NO: 385112 - RNA, 19 nt, Artificial Sequence
  Description of Artificial Sequence: Synthetic oligonucleotide
uauagcccagaagguacau

SEQ ID NO: 385113 - RNA, 19 nt, Artificial Sequence
  Description of Artificial Sequence: Synthetic oligonucleotide
caagauaacugggcuagaa

SEQ ID NO: 385114 - RNA, 19 nt, Artificial Sequence
  Description of Artificial Sequence: Synthetic oligonucleotide
caccacauaccacaacaaa

SEQ ID NO: 385115 - RNA, 19 nt, Artificial Sequence
  Description of Artificial Sequence: Synthetic oligonucleotide
cccacguaauaguuuaauc

SEQ ID NO: 385116 - RNA, 19 nt, Artificial Sequence
  Description of Artificial Sequence: Synthetic oligonucleotide
cccauuaggauugugcuga

SEQ ID NO: 385117 - RNA, 19 nt, Artificial Sequence
  Description of Artificial Sequence: Synthetic oligonucleotide
aucccuccgcaugacagca

SEQ ID NO: 385118 - RNA, 19 nt, Artificial Sequence
  Description of Artificial Sequence: Synthetic oligonucleotide
ccucauuuggcgugacaag

SEQ ID NO: 385119 - RNA, 19 nt, Artificial Sequence
  Description of Artificial Sequence: Synthetic oligonucleotide
cucauuuggcgugacaagu

SEQ ID NO: 385120 - RNA, 19 nt, Artificial Sequence
  Description of Artificial Sequence: Synthetic oligonucleotide
guagcucaugaaugccaca

SEQ ID NO: 385121 - RNA, 19 nt, Artificial Sequence
  Description of Artificial Sequence: Synthetic oligonucleotide
gugucaauaucgucuaauu

SEQ ID NO: 385122 - RNA, 19 nt, Artificial Sequence
  Description of Artificial Sequence: Synthetic oligonucleotide
agcucaugaaugccacauu

SEQ ID NO: 385123 - RNA, 19 nt, Artificial Sequence
  Description of Artificial Sequence: Synthetic oligonucleotide
cugcuaacugguaagcaau

SEQ ID NO: 385124 - RNA, 19 nt, Artificial Sequence
  Description of Artificial Sequence: Synthetic oligonucleotide
uuggcgugacaagugggua

SEQ ID NO: 385125 - RNA, 19 nt, Artificial Sequence
  Description of Artificial Sequence: Synthetic oligonucleotide
uaggugcuagaaugccaaa

SEQ ID NO: 385126 - RNA, 19 nt, Artificial Sequence
  Description of Artificial Sequence: Synthetic oligonucleotide
agcgacauuguuggacccu

SEQ ID NO: 385127 - RNA, 19 nt, Artificial Sequence
  Description of Artificial Sequence: Synthetic oligonucleotide
ccgguaggugcuagaaugc

SEQ ID NO: 385128 - RNA, 19 nt, Artificial Sequence
  Description of Artificial Sequence: Synthetic oligonucleotide
auaguccuguccagagaug

SEQ ID NO: 385129 - RNA, 19 nt, Artificial Sequence
  Description of Artificial Sequence: Synthetic oligonucleotide
gcuggguaaguaagugcgg

SEQ ID NO: 385130 - RNA, 19 nt, Artificial Sequence
  Description of Artificial Sequence: Synthetic oligonucleotide
cugggcuaggcugaacuga

SEQ ID NO: 385131 - RNA, 19 nt, Artificial Sequence
  Description of Artificial Sequence: Synthetic oligonucleotide
cuuaucagccaugcugaaa

SEQ ID NO: 385132 - RNA, 19 nt, Artificial Sequence
  Description of Artificial Sequence: Synthetic oligonucleotide
acccgcuccauuccauaau

SEQ ID NO: 385133 - RNA, 19 nt, Artificial Sequence
  Description of Artificial Sequence: Synthetic oligonucleotide
caauaucgucuaauuccaa

SEQ ID NO: 385134 - RNA, 19 nt, Artificial Sequence
  Description of Artificial Sequence: Synthetic oligonucleotide
cucaugaaugccacauuau

SEQ ID NO: 385135 - RNA, 19 nt, Artificial Sequence
  Description of Artificial Sequence: Synthetic oligonucleotide
aggggcaaucuuucuccau

SEQ ID NO: 385136 - RNA, 19 nt, Artificial Sequence
  Description of Artificial Sequence: Synthetic oligonucleotide
guaaugcguguguccuuca

SEQ ID NO: 385137 - RNA, 19 nt, Artificial Sequence
  Description of Artificial Sequence: Synthetic oligonucleotide
cuaacuuguucaccauacu

SEQ ID NO: 385138 - RNA, 19 nt, Artificial Sequence
  Description of Artificial Sequence: Synthetic oligonucleotide
ggugcuagaaugccaaauu

SEQ ID NO: 385139 - RNA, 19 nt, Artificial Sequence
  Description of Artificial Sequence: Synthetic oligonucleotide
ccaugcaaacuccugggca

SEQ ID NO: 385140 - RNA, 19 nt, Artificial Sequence
  Description of Artificial Sequence: Synthetic oligonucleotide
agugcgggccaggaaggca

SEQ ID NO: 385141 - RNA, 19 nt, Artificial Sequence
  Description of Artificial Sequence: Synthetic oligonucleotide
gguaggugcuagaaugcca

SEQ ID NO: 385142 - RNA, 19 nt, Artificial Sequence
  Description of Artificial Sequence: Synthetic oligonucleotide
guguuuccugugcagccaa

SEQ ID NO: 385143 - RNA, 19 nt, Artificial Sequence
  Description of Artificial Sequence: Synthetic oligonucleotide
uagcugccauaccuugaua

SEQ ID NO: 385144 - RNA, 19 nt, Artificial Sequence
  Description of Artificial Sequence: Synthetic oligonucleotide
cuacccuugagaccuggcu

SEQ ID NO: 385145 - RNA, 19 nt, Artificial Sequence
  Description of Artificial Sequence: Synthetic oligonucleotide
cugaaaugagguacggcuu

SEQ ID NO: 385146 - RNA, 19 nt, Artificial Sequence
  Description of Artificial Sequence: Synthetic oligonucleotide
cuaggcaagcaucaagcuu

SEQ ID NO: 385147 - RNA, 19 nt, Artificial Sequence
  Description of Artificial Sequence: Synthetic oligonucleotide
uagauacuuucagcuccaa

SEQ ID NO: 385148 - RNA, 19 nt, Artificial Sequence
  Description of Artificial Sequence: Synthetic oligonucleotide
cccaugcaaacuccugggc

SEQ ID NO: 385149 - RNA, 19 nt, Artificial Sequence
  Description of Artificial Sequence: Synthetic oligonucleotide
gccuauugucuuuaggaau

SEQ ID NO: 385150 - RNA, 19 nt, Artificial Sequence
  Description of Artificial Sequence: Synthetic oligonucleotide
gcauaacguaaugcgugug

SEQ ID NO: 385151 - RNA, 19 nt, Artificial Sequence
  Description of Artificial Sequence: Synthetic oligonucleotide
ccaagaaccucaaaugcau

SEQ ID NO: 385152 - RNA, 19 nt, Artificial Sequence
  Description of Artificial Sequence: Synthetic oligonucleotide
ggcaugccccuccaggguc

SEQ ID NO: 385153 - RNA, 19 nt, Artificial Sequence
  Description of Artificial Sequence: Synthetic oligonucleotide
cauuuacuaauggcgaguu

SEQ ID NO: 385154 - RNA, 19 nt, Artificial Sequence
  Description of Artificial Sequence: Synthetic oligonucleotide
ccucccacguaauaguuua

SEQ ID NO: 385155 - RNA, 19 nt, Artificial Sequence
  Description of Artificial Sequence: Synthetic oligonucleotide
gcuaagccauucacagacc

SEQ ID NO: 385156 - RNA, 19 nt, Artificial Sequence
  Description of Artificial Sequence: Synthetic oligonucleotide
cuauuucuccucccacgua

SEQ ID NO: 385157 - RNA, 19 nt, Artificial Sequence
  Description of Artificial Sequence: Synthetic oligonucleotide
ggcuaggcugaacugacau

SEQ ID NO: 385158 - RNA, 19 nt, Artificial Sequence
  Description of Artificial Sequence: Synthetic oligonucleotide
caagccgguaggugcuaga

SEQ ID NO: 385159 - RNA, 19 nt, Artificial Sequence
  Description of Artificial Sequence: Synthetic oligonucleotide
uacuccccaucaccacaua

SEQ ID NO: 385160 - RNA, 19 nt, Artificial Sequence
  Description of Artificial Sequence: Synthetic oligonucleotide
ccgacagauauuuaagaau

SEQ ID NO: 385161 - RNA, 19 nt, Artificial Sequence
  Description of Artificial Sequence: Synthetic oligonucleotide
auggcgaguucagcaaguu

SEQ ID NO: 385162 - RNA, 19 nt, Artificial Sequence
  Description of Artificial Sequence: Synthetic oligonucleotide
agcucuaggcaagcaucaa

SEQ ID NO: 385163 - RNA, 19 nt, Artificial Sequence
  Description of Artificial Sequence: Synthetic oligonucleotide
cgcgccuuccgcuaacuug

SEQ ID NO: 385164 - RNA, 19 nt, Artificial Sequence
  Description of Artificial Sequence: Synthetic oligonucleotide
cacccauugcuuuuagguu

SEQ ID NO: 385165 - RNA, 19 nt, Artificial Sequence
  Description of Artificial Sequence: Synthetic oligonucleotide
ggcauggugcagacacucc

SEQ ID NO: 385166 - RNA, 19 nt, Artificial Sequence
  Description of Artificial Sequence: Synthetic oligonucleotide
agugugcucucaagccggu

SEQ ID NO: 385167 - RNA, 19 nt, Artificial Sequence
  Description of Artificial Sequence: Synthetic oligonucleotide
gcugccauaccuugauagu

SEQ ID NO: 385168 - RNA, 19 nt, Artificial Sequence
  Description of Artificial Sequence: Synthetic oligonucleotide
cguaaugcguguguccuuc

SEQ ID NO: 385169 - RNA, 19 nt, Artificial Sequence
  Description of Artificial Sequence: Synthetic oligonucleotide
cauagaaggcuaagccauu

SEQ ID NO: 385170 - RNA, 19 nt, Artificial Sequence
  Description of Artificial Sequence: Synthetic oligonucleotide
cucucagacuggccacaca

SEQ ID NO: 385171 - RNA, 19 nt, Artificial Sequence
  Description of Artificial Sequence: Synthetic oligonucleotide
cuccgcaugacagcagucu

SEQ ID NO: 385172 - RNA, 19 nt, Artificial Sequence
  Description of Artificial Sequence: Synthetic oligonucleotide
uccgcgccuuccgcuaacu

SEQ ID NO: 385173 - RNA, 19 nt, Artificial Sequence
  Description of Artificial Sequence: Synthetic oligonucleotide
gcgacauuguuggacccuc

SEQ ID NO: 385174 - RNA, 19 nt, Artificial Sequence
  Description of Artificial Sequence: Synthetic oligonucleotide
caugucccuccagagugaa

SEQ ID NO: 385175 - RNA, 19 nt, Artificial Sequence
  Description of Artificial Sequence: Synthetic oligonucleotide
cgugggcccaugcaaacuc

SEQ ID NO: 385176 - RNA, 19 nt, Artificial Sequence
  Description of Artificial Sequence: Synthetic oligonucleotide
cacuugugaacaagaccau

SEQ ID NO: 385177 - RNA, 19 nt, Artificial Sequence
  Description of Artificial Sequence: Synthetic oligonucleotide
cuauugucuuuaggaauau

SEQ ID NO: 385178 - RNA, 19 nt, Artificial Sequence
  Description of Artificial Sequence: Synthetic oligonucleotide
agccggucaucugcaccug

SEQ ID NO: 385179 - RNA, 19 nt, Artificial Sequence
  Description of Artificial Sequence: Synthetic oligonucleotide
guggauacuguaagugcuu

SEQ ID NO: 385180 - RNA, 19 nt, Artificial Sequence
  Description of Artificial Sequence: Synthetic oligonucleotide
cgguaggugcuagaaugcc

SEQ ID NO: 385181 - RNA, 19 nt, Artificial Sequence
  Description of Artificial Sequence: Synthetic oligonucleotide
ccagggaaaagguuuucau

SEQ ID NO: 385182 - RNA, 19 nt, Artificial Sequence
  Description of Artificial Sequence: Synthetic oligonucleotide
ccagucccagaguuuaaua

SEQ ID NO: 385183 - RNA, 19 nt, Artificial Sequence
  Description of Artificial Sequence: Synthetic oligonucleotide
gcgccuuccgcuaacuugu

SEQ ID NO: 385184 - RNA, 19 nt, Artificial Sequence
  Description of Artificial Sequence: Synthetic oligonucleotide
ggcgugacaaguggguacu

SEQ ID NO: 385185 - RNA, 19 nt, Artificial Sequence
  Description of Artificial Sequence: Synthetic oligonucleotide
cccagaguuuaauaagcau

SEQ ID NO: 385186 - RNA, 19 nt, Artificial Sequence
  Description of Artificial Sequence: Synthetic oligonucleotide
gccuuccgcuaacuuguuc

SEQ ID NO: 385187 - RNA, 19 nt, Artificial Sequence
  Description of Artificial Sequence: Synthetic oligonucleotide
cguaauaguuuaaucuguu

SEQ ID NO: 385188 - RNA, 19 nt, Artificial Sequence
  Description of Artificial Sequence: Synthetic oligonucleotide
augcacuggcaaacugauu

SEQ ID NO: 385189 - RNA, 19 nt, Artificial Sequence
  Description of Artificial Sequence: Synthetic oligonucleotide
ccuccgcaugacagcaguc

SEQ ID NO: 385190 - RNA, 19 nt, Artificial Sequence
  Description of Artificial Sequence: Synthetic oligonucleotide
cguguguccuucaaacacu

SEQ ID NO: 385191 - RNA, 19 nt, Artificial Sequence
  Description of Artificial Sequence: Synthetic oligonucleotide
ggcaagcaucaagcuugcc

SEQ ID NO: 385192 - RNA, 19 nt, Artificial Sequence
  Description of Artificial Sequence: Synthetic oligonucleotide
gcuaggcugaacugacauu

SEQ ID NO: 385193 - RNA, 19 nt, Artificial Sequence
  Description of Artificial Sequence: Synthetic oligonucleotide
gccggucaucugcaccuga

SEQ ID NO: 385194 - RNA, 19 nt, Artificial Sequence
  Description of Artificial Sequence: Synthetic oligonucleotide
cacacccgcuccauuccau

SEQ ID NO: 385195 - RNA, 19 nt, Artificial Sequence
  Description of Artificial Sequence: Synthetic oligonucleotide
gcgugacaaguggguacug

SEQ ID NO: 385196 - RNA, 19 nt, Artificial Sequence
  Description of Artificial Sequence: Synthetic oligonucleotide
gggcaugccccuccagggu

SEQ ID NO: 385197 - RNA, 19 nt, Artificial Sequence
  Description of Artificial Sequence: Synthetic oligonucleotide
cucaagccgguaggugcua

SEQ ID NO: 385198 - RNA, 19 nt, Artificial Sequence
  Description of Artificial Sequence: Synthetic oligonucleotide
ccacacccgcuccauucca

SEQ ID NO: 385199 - RNA, 19 nt, Artificial Sequence
  Description of Artificial Sequence: Synthetic oligonucleotide
ccaagauaacugggcuaga

SEQ ID NO: 385200 - RNA, 19 nt, Artificial Sequence
  Description of Artificial Sequence: Synthetic oligonucleotide
cccgaccaagcuuaacaau

SEQ ID NO: 385201 - RNA, 19 nt, Artificial Sequence
  Description of Artificial Sequence: Synthetic oligonucleotide
ccagagcgacauuguugga

SEQ ID NO: 385202 - RNA, 19 nt, Artificial Sequence
  Description of Artificial Sequence: Synthetic oligonucleotide
ccucccgaccaagcuuaac

SEQ ID NO: 385203 - RNA, 19 nt, Artificial Sequence
  Description of Artificial Sequence: Synthetic oligonucleotide
cccuccgcaugacagcagu

SEQ ID NO: 385204 - RNA, 19 nt, Artificial Sequence
  Description of Artificial Sequence: Synthetic oligonucleotide
cccgcuccauuccauaauu

SEQ ID NO: 385205 - RNA, 19 nt, Artificial Sequence
  Description of Artificial Sequence: Synthetic oligonucleotide
gcgaguucagcaaguuguu

SEQ ID NO: 385206 - RNA, 19 nt, Artificial Sequence
  Description of Artificial Sequence: Synthetic oligonucleotide
ccuuuacagccaggggcaa

SEQ ID NO: 385207 - RNA, 19 nt, Artificial Sequence
  Description of Artificial Sequence: Synthetic oligonucleotide
cccagucccagaguuuaau

SEQ ID NO: 385208 - RNA, 19 nt, Artificial Sequence
  Description of Artificial Sequence: Synthetic oligonucleotide
ccgcuaacuuguucaccau

SEQ ID NO: 385209 - RNA, 19 nt, Artificial Sequence
  Description of Artificial Sequence: Synthetic oligonucleotide
cgacauuguuggacccucu

SEQ ID NO: 385210 - RNA, 19 nt, Artificial Sequence
  Description of Artificial Sequence: Synthetic oligonucleotide
ccgcgccuuccgcuaacuu

SEQ ID NO: 385211 - RNA, 19 nt, Artificial Sequence
  Description of Artificial Sequence: Synthetic oligonucleotide
cgccuuccgcuaacuuguu

SEQ ID NO: 385212 - RNA, 19 nt, Artificial Sequence
  Description of Artificial Sequence: Synthetic oligonucleotide
acuacaucaagguagaguc

SEQ ID NO: 385213 - RNA, 19 nt, Artificial Sequence
  Description of Artificial Sequence: Synthetic oligonucleotide
acaaucuaaacacaagggc

SEQ ID NO: 385214 - RNA, 19 nt, Artificial Sequence
  Description of Artificial Sequence: Synthetic oligonucleotide
ugcaguaaauauuagacag

SEQ ID NO: 385215 - RNA, 19 nt, Artificial Sequence
  Description of Artificial Sequence: Synthetic oligonucleotide
aaucauaacggaauuacac

SEQ ID NO: 385216 - RNA, 19 nt, Artificial Sequence
  Description of Artificial Sequence: Synthetic oligonucleotide
uaaggguuaagucugauac

SEQ ID NO: 385217 - RNA, 19 nt, Artificial Sequence
  Description of Artificial Sequence: Synthetic oligonucleotide
aacccuaucaggcauuucg

SEQ ID NO: 385218 - RNA, 19 nt, Artificial Sequence
  Description of Artificial Sequence: Synthetic oligonucleotide
uacaaucuaaacacaaggg

SEQ ID NO: 385219 - RNA, 19 nt, Artificial Sequence
  Description of Artificial Sequence: Synthetic oligonucleotide
ugguaaauaacaguggugg

SEQ ID NO: 385220 - RNA, 19 nt, Artificial Sequence
  Description of Artificial Sequence: Synthetic oligonucleotide
auauuagacaggcaacucc

SEQ ID NO: 385221 - RNA, 19 nt, Artificial Sequence
  Description of Artificial Sequence: Synthetic oligonucleotide
gguaacucaacauugaugc

SEQ ID NO: 385222 - RNA, 19 nt, Artificial Sequence
  Description of Artificial Sequence: Synthetic oligonucleotide
aacggaauuacacuuuuca

SEQ ID NO: 385223 - RNA, 19 nt, Artificial Sequence
  Description of Artificial Sequence: Synthetic oligonucleotide
aaacacguaguguacaugu

SEQ ID NO: 385224 - RNA, 19 nt, Artificial Sequence
  Description of Artificial Sequence: Synthetic oligonucleotide
uuaagucugauacagguau

SEQ ID NO: 385225 - RNA, 19 nt, Artificial Sequence
  Description of Artificial Sequence: Synthetic oligonucleotide
ugugaaagaaguuucuucu

SEQ ID NO: 385226 - RNA, 19 nt, Artificial Sequence
  Description of Artificial Sequence: Synthetic oligonucleotide
uugauacaggguuuaaacg

SEQ ID NO: 385227 - RNA, 19 nt, Artificial Sequence
  Description of Artificial Sequence: Synthetic oligonucleotide
ugcaccuuagaccaguucc

SEQ ID NO: 385228 - RNA, 19 nt, Artificial Sequence
  Description of Artificial Sequence: Synthetic oligonucleotide
uguaaccuaacaaaaccug

SEQ ID NO: 385229 - RNA, 19 nt, Artificial Sequence
  Description of Artificial Sequence: Synthetic oligonucleotide
ucccauaaccauaagaagu

SEQ ID NO: 385230 - RNA, 19 nt, Artificial Sequence
  Description of Artificial Sequence: Synthetic oligonucleotide
ugugacucucauuuaaucc

SEQ ID NO: 385231 - RNA, 19 nt, Artificial Sequence
  Description of Artificial Sequence: Synthetic oligonucleotide
aaauugcuuaguaaccuac

SEQ ID NO: 385232 - RNA, 19 nt, Artificial Sequence
  Description of Artificial Sequence: Synthetic oligonucleotide
uuaucauugaaggaaguca

SEQ ID NO: 385233 - RNA, 19 nt, Artificial Sequence
  Description of Artificial Sequence: Synthetic oligonucleotide
aguuaaugcaacccuauca

SEQ ID NO: 385234 - RNA, 19 nt, Artificial Sequence
  Description of Artificial Sequence: Synthetic oligonucleotide
auuaaugugagauucugua

SEQ ID NO: 385235 - RNA, 19 nt, Artificial Sequence
  Description of Artificial Sequence: Synthetic oligonucleotide
aauauuagacaggcaacuc

SEQ ID NO: 385236 - RNA, 19 nt, Artificial Sequence
  Description of Artificial Sequence: Synthetic oligonucleotide
uguuguagagagguaaggg

SEQ ID NO: 385237 - RNA, 19 nt, Artificial Sequence
  Description of Artificial Sequence: Synthetic oligonucleotide
augaggagaagacugagca

SEQ ID NO: 385238 - RNA, 19 nt, Artificial Sequence
  Description of Artificial Sequence: Synthetic oligonucleotide
uauggcauacgcuaaggca

SEQ ID NO: 385239 - RNA, 19 nt, Artificial Sequence
  Description of Artificial Sequence: Synthetic oligonucleotide
agguaugcaccuuagacca

SEQ ID NO: 385240 - RNA, 19 nt, Artificial Sequence
  Description of Artificial Sequence: Synthetic oligonucleotide
agacaggucagggugaacc

SEQ ID NO: 385241 - RNA, 19 nt, Artificial Sequence
  Description of Artificial Sequence: Synthetic oligonucleotide
cugcauauaacacagucuc

SEQ ID NO: 385242 - RNA, 19 nt, Artificial Sequence
  Description of Artificial Sequence: Synthetic oligonucleotide
caaaucauaacggaauuac

SEQ ID NO: 385243 - RNA, 19 nt, Artificial Sequence
  Description of Artificial Sequence: Synthetic oligonucleotide
aucauaacggaauuacacu

SEQ ID NO: 385244 - RNA, 19 nt, Artificial Sequence
  Description of Artificial Sequence: Synthetic oligonucleotide
accuacaaaagcugcgucg

SEQ ID NO: 385245 - RNA, 19 nt, Artificial Sequence
  Description of Artificial Sequence: Synthetic oligonucleotide
ugucgucaaaggcaagugg

SEQ ID NO: 385246 - RNA, 19 nt, Artificial Sequence
  Description of Artificial Sequence: Synthetic oligonucleotide
acggaauuacacuuuucac

SEQ ID NO: 385247 - RNA, 19 nt, Artificial Sequence
  Description of Artificial Sequence: Synthetic oligonucleotide
aaccucgccauagcuaucc

SEQ ID NO: 385248 - RNA, 19 nt, Artificial Sequence
  Description of Artificial Sequence: Synthetic oligonucleotide
auauaacacagucucgaug

SEQ ID NO: 385249 - RNA, 19 nt, Artificial Sequence
  Description of Artificial Sequence: Synthetic oligonucleotide
auuaaaccgagacgacuac

SEQ ID NO: 385250 - RNA, 19 nt, Artificial Sequence
  Description of Artificial Sequence: Synthetic oligonucleotide
agcacggucacccgcaaac

SEQ ID NO: 385251 - RNA, 19 nt, Artificial Sequence
  Description of Artificial Sequence: Synthetic oligonucleotide
ucggcuauuuuaauuaaaa

SEQ ID NO: 385252 - RNA, 19 nt, Artificial Sequence
  Description of Artificial Sequence: Synthetic oligonucleotide
ucaagaacacucccaggag

SEQ ID NO: 385253 - RNA, 19 nt, Artificial Sequence
  Description of Artificial Sequence: Synthetic oligonucleotide
agaauuaguuucagcauac

SEQ ID NO: 385254 - RNA, 19 nt, Artificial Sequence
  Description of Artificial Sequence: Synthetic oligonucleotide
ugcacugguguuaaaauua

SEQ ID NO: 385255 - RNA, 19 nt, Artificial Sequence
  Description of Artificial Sequence: Synthetic oligonucleotide
aauguuauacacuguucuu

SEQ ID NO: 385256 - RNA, 19 nt, Artificial Sequence
  Description of Artificial Sequence: Synthetic oligonucleotide
aaagcugcgucgguaacuc

SEQ ID NO: 385257 - RNA, 19 nt, Artificial Sequence
  Description of Artificial Sequence: Synthetic oligonucleotide
ggagucauauaagaaaugg

SEQ ID NO: 385258 - RNA, 19 nt, Artificial Sequence
  Description of Artificial Sequence: Synthetic oligonucleotide
auuguuacccaguagucau

SEQ ID NO: 385259 - RNA, 19 nt, Artificial Sequence
  Description of Artificial Sequence: Synthetic oligonucleotide
aagugccaaaucauaacgg

SEQ ID NO: 385260 - RNA, 19 nt, Artificial Sequence
  Description of Artificial Sequence: Synthetic oligonucleotide
uaguaaccuacaaaagcug

SEQ ID NO: 385261 - RNA, 19 nt, Artificial Sequence
  Description of Artificial Sequence: Synthetic oligonucleotide
ucauaacggaauuacacuu

SEQ ID NO: 385262 - RNA, 19 nt, Artificial Sequence
  Description of Artificial Sequence: Synthetic oligonucleotide
cauaaccauaagaagugac

SEQ ID NO: 385263 - RNA, 19 nt, Artificial Sequence
  Description of Artificial Sequence: Synthetic oligonucleotide
aguugaaccaagacaacuc

SEQ ID NO: 385264 - RNA, 19 nt, Artificial Sequence
  Description of Artificial Sequence: Synthetic oligonucleotide
guggcauuaaaccgagacg

SEQ ID NO: 385265 - RNA, 19 nt, Artificial Sequence
  Description of Artificial Sequence: Synthetic oligonucleotide
uuaaacgucuuuagaaguu

SEQ ID NO: 385266 - RNA, 19 nt, Artificial Sequence
  Description of Artificial Sequence: Synthetic oligonucleotide
auacaaucuaagcugguaa

SEQ ID NO: 385267 - RNA, 19 nt, Artificial Sequence
  Description of Artificial Sequence: Synthetic oligonucleotide
uuguagagagguaaggguu

SEQ ID NO: 385268 - RNA, 19 nt, Artificial Sequence
  Description of Artificial Sequence: Synthetic oligonucleotide
auacagaaaucacgcacag

SEQ ID NO: 385269 - RNA, 19 nt, Artificial Sequence
  Description of Artificial Sequence: Synthetic oligonucleotide
ucaauacagaaaucacgca

SEQ ID NO: 385270 - RNA, 19 nt, Artificial Sequence
  Description of Artificial Sequence: Synthetic oligonucleotide
agcgcgaugucccaaccgg

SEQ ID NO: 385271 - RNA, 19 nt, Artificial Sequence
  Description of Artificial Sequence: Synthetic oligonucleotide
uuacacgugugcuacuaca

SEQ ID NO: 385272 - RNA, 19 nt, Artificial Sequence
  Description of Artificial Sequence: Synthetic oligonucleotide
agugacgucagaagcacgg

SEQ ID NO: 385273 - RNA, 19 nt, Artificial Sequence
  Description of Artificial Sequence: Synthetic oligonucleotide
aaguuaguggcgugagaug

SEQ ID NO: 385274 - RNA, 19 nt, Artificial Sequence
  Description of Artificial Sequence: Synthetic oligonucleotide
gaugcggucuuugauauga

SEQ ID NO: 385275 - RNA, 19 nt, Artificial Sequence
  Description of Artificial Sequence: Synthetic oligonucleotide
auaggaacgcugcuguuca

SEQ ID NO: 385276 - RNA, 19 nt, Artificial Sequence
  Description of Artificial Sequence: Synthetic oligonucleotide
aaaucauaacggaauuaca

SEQ ID NO: 385277 - RNA, 19 nt, Artificial Sequence
  Description of Artificial Sequence: Synthetic oligonucleotide
acgucuuuagaaguuagug

SEQ ID NO: 385278 - RNA, 19 nt, Artificial Sequence
  Description of Artificial Sequence: Synthetic oligonucleotide
uguagagagguaaggguua

SEQ ID NO: 385279 - RNA, 19 nt, Artificial Sequence
  Description of Artificial Sequence: Synthetic oligonucleotide
uugcuuaguaaccuacaaa

SEQ ID NO: 385280 - RNA, 19 nt, Artificial Sequence
  Description of Artificial Sequence: Synthetic oligonucleotide
auugcuuaguaaccuacaa

SEQ ID NO: 385281 - RNA, 19 nt, Artificial Sequence
  Description of Artificial Sequence: Synthetic oligonucleotide
cuuugaagucccgagaguc

SEQ ID NO: 385282 - RNA, 19 nt, Artificial Sequence
  Description of Artificial Sequence: Synthetic oligonucleotide
ucaaacucccacgacacuc

SEQ ID NO: 385283 - RNA, 19 nt, Artificial Sequence
  Description of Artificial Sequence: Synthetic oligonucleotide
auaacacagucucgaugcg

SEQ ID NO: 385284 - RNA, 19 nt, Artificial Sequence
  Description of Artificial Sequence: Synthetic oligonucleotide
caaucuaaacacaagggcu

SEQ ID NO: 385285 - RNA, 19 nt, Artificial Sequence
  Description of Artificial Sequence: Synthetic oligonucleotide
uaagucugauacagguaug

SEQ ID NO: 385286 - RNA, 19 nt, Artificial Sequence
  Description of Artificial Sequence: Synthetic oligonucleotide
gacuuuacacgugugcuac

SEQ ID NO: 385287 - RNA, 19 nt, Artificial Sequence
  Description of Artificial Sequence: Synthetic oligonucleotide
ccgacaagaacgcacaugc

SEQ ID NO: 385288 - RNA, 19 nt, Artificial Sequence
  Description of Artificial Sequence: Synthetic oligonucleotide
uacuuggcugacaugcacu

SEQ ID NO: 385289 - RNA, 19 nt, Artificial Sequence
  Description of Artificial Sequence: Synthetic oligonucleotide
acucuuuaucauugaagga

SEQ ID NO: 385290 - RNA, 19 nt, Artificial Sequence
  Description of Artificial Sequence: Synthetic oligonucleotide
ugacaacuccacaaguaau

SEQ ID NO: 385291 - RNA, 19 nt, Artificial Sequence
  Description of Artificial Sequence: Synthetic oligonucleotide
uaaccuacaaaagcugcgu

SEQ ID NO: 385292 - RNA, 19 nt, Artificial Sequence
  Description of Artificial Sequence: Synthetic oligonucleotide
uagcuaucccaacaacaca

SEQ ID NO: 385293 - RNA, 19 nt, Artificial Sequence
  Description of Artificial Sequence: Synthetic oligonucleotide
uuuacacgugugcuacuac

SEQ ID NO: 385294 - RNA, 19 nt, Artificial Sequence
  Description of Artificial Sequence: Synthetic oligonucleotide
auaacggaauuacacuuuu

SEQ ID NO: 385295 - RNA, 19 nt, Artificial Sequence
  Description of Artificial Sequence: Synthetic oligonucleotide
gagacgacuacaucaaggu

SEQ ID NO: 385296 - RNA, 19 nt, Artificial Sequence
  Description of Artificial Sequence: Synthetic oligonucleotide
uagaaguuaguggcgugag

SEQ ID NO: 385297 - RNA, 19 nt, Artificial Sequence
  Description of Artificial Sequence: Synthetic oligonucleotide
cauuaaaccgagacgacua

SEQ ID NO: 385298 - RNA, 19 nt, Artificial Sequence
  Description of Artificial Sequence: Synthetic oligonucleotide
uugaagucccgagagucug

SEQ ID NO: 385299 - RNA, 19 nt, Artificial Sequence
  Description of Artificial Sequence: Synthetic oligonucleotide
agacacucaugcuucgugu

SEQ ID NO: 385300 - RNA, 19 nt, Artificial Sequence
  Description of Artificial Sequence: Synthetic oligonucleotide
aguggcgugagaugugcug

SEQ ID NO: 385301 - RNA, 19 nt, Artificial Sequence
  Description of Artificial Sequence: Synthetic oligonucleotide
acgucagaagcacggucac

SEQ ID NO: 385302 - RNA, 19 nt, Artificial Sequence
  Description of Artificial Sequence: Synthetic oligonucleotide
ugucccaaccggagaagcc

SEQ ID NO: 385303 - RNA, 19 nt, Artificial Sequence
  Description of Artificial Sequence: Synthetic oligonucleotide
caauguuauacacuguucu

SEQ ID NO: 385304 - RNA, 19 nt, Artificial Sequence
  Description of Artificial Sequence: Synthetic oligonucleotide
agucugucauaggauuccc

SEQ ID NO: 385305 - RNA, 19 nt, Artificial Sequence
  Description of Artificial Sequence: Synthetic oligonucleotide
accuaacaaaaccugugaa

SEQ ID NO: 385306 - RNA, 19 nt, Artificial Sequence
  Description of Artificial Sequence: Synthetic oligonucleotide
ucgaugcggucuuugauau

SEQ ID NO: 385307 - RNA, 19 nt, Artificial Sequence
  Description of Artificial Sequence: Synthetic oligonucleotide
ugcggucuuugauaugagc

SEQ ID NO: 385308 - RNA, 19 nt, Artificial Sequence
  Description of Artificial Sequence: Synthetic oligonucleotide
uuaaaccgagacgacuaca

SEQ ID NO: 385309 - RNA, 19 nt, Artificial Sequence
  Description of Artificial Sequence: Synthetic oligonucleotide
aucugaaaccuucaauguu

SEQ ID NO: 385310 - RNA, 19 nt, Artificial Sequence
  Description of Artificial Sequence: Synthetic oligonucleotide
aacucaacauugaugcaau

SEQ ID NO: 385311 - RNA, 19 nt, Artificial Sequence
  Description of Artificial Sequence: Synthetic oligonucleotide
aagucccgagagucugugg

SEQ ID NO: 385312 - RNA, 19 nt, Artificial Sequence
  Description of Artificial Sequence: Synthetic oligonucleotide
auacgcuaaggcaaucauc

SEQ ID NO: 385313 - RNA, 19 nt, Artificial Sequence
  Description of Artificial Sequence: Synthetic oligonucleotide
guuguagagagguaagggu

SEQ ID NO: 385314 - RNA, 19 nt, Artificial Sequence
  Description of Artificial Sequence: Synthetic oligonucleotide
agguaacucaacauugaug

SEQ ID NO: 385315 - RNA, 19 nt, Artificial Sequence
  Description of Artificial Sequence: Synthetic oligonucleotide
cccauaaccauaagaagug

SEQ ID NO: 385316 - RNA, 19 nt, Artificial Sequence
  Description of Artificial Sequence: Synthetic oligonucleotide
uaccccggauaaaaucugc

SEQ ID NO: 385317 - RNA, 19 nt, Artificial Sequence
  Description of Artificial Sequence: Synthetic oligonucleotide
ccggauaaaaucugcaaac

SEQ ID NO: 385318 - RNA, 19 nt, Artificial Sequence
  Description of Artificial Sequence: Synthetic oligonucleotide
gguugcaguaaauauuaga

SEQ ID NO: 385319 - RNA, 19 nt, Artificial Sequence
  Description of Artificial Sequence: Synthetic oligonucleotide
accaagugguauggcauac

SEQ ID NO: 385320 - RNA, 19 nt, Artificial Sequence
  Description of Artificial Sequence: Synthetic oligonucleotide
gacgucagaagcacgguca

SEQ ID NO: 385321 - RNA, 19 nt, Artificial Sequence
  Description of Artificial Sequence: Synthetic oligonucleotide
ccuaucacugguauacagc

SEQ ID NO: 385322 - RNA, 19 nt, Artificial Sequence
  Description of Artificial Sequence: Synthetic oligonucleotide
gguuaagucugauacaggu

SEQ ID NO: 385323 - RNA, 19 nt, Artificial Sequence
  Description of Artificial Sequence: Synthetic oligonucleotide
ccaaaaggcaaauugggga

SEQ ID NO: 385324 - RNA, 19 nt, Artificial Sequence
  Description of Artificial Sequence: Synthetic oligonucleotide
aggagcgcgaugucccaac

SEQ ID NO: 385325 - RNA, 19 nt, Artificial Sequence
  Description of Artificial Sequence: Synthetic oligonucleotide
acugucgucaaaggcaagu

SEQ ID NO: 385326 - RNA, 19 nt, Artificial Sequence
  Description of Artificial Sequence: Synthetic oligonucleotide
ggggcgaugucccauuggg

SEQ ID NO: 385327 - RNA, 19 nt, Artificial Sequence
  Description of Artificial Sequence: Synthetic oligonucleotide
acgugcagucccuuugaag

SEQ ID NO: 385328 - RNA, 19 nt, Artificial Sequence
  Description of Artificial Sequence: Synthetic oligonucleotide
gaaguuaguggcgugagau

SEQ ID NO: 385329 - RNA, 19 nt, Artificial Sequence
  Description of Artificial Sequence: Synthetic oligonucleotide
gggguggaaaauaagcgag

SEQ ID NO: 385330 - RNA, 19 nt, Artificial Sequence
  Description of Artificial Sequence: Synthetic oligonucleotide
aauuugauacaggguuuaa

SEQ ID NO: 385331 - RNA, 19 nt, Artificial Sequence
  Description of Artificial Sequence: Synthetic oligonucleotide
aacgucuuuagaaguuagu

SEQ ID NO: 385332 - RNA, 19 nt, Artificial Sequence
  Description of Artificial Sequence: Synthetic oligonucleotide
aggguugcaguaaauauua

SEQ ID NO: 385333 - RNA, 19 nt, Artificial Sequence
  Description of Artificial Sequence: Synthetic oligonucleotide
aacacguaguguacaugug

SEQ ID NO: 385334 - RNA, 19 nt, Artificial Sequence
  Description of Artificial Sequence: Synthetic oligonucleotide
cuauagaccaaaauccaau

SEQ ID NO: 385335 - RNA, 19 nt, Artificial Sequence
  Description of Artificial Sequence: Synthetic oligonucleotide
uaacggaauuacacuuuuc

SEQ ID NO: 385336 - RNA, 19 nt, Artificial Sequence
  Description of Artificial Sequence: Synthetic oligonucleotide
gagcgcgaugucccaaccg

SEQ ID NO: 385337 - RNA, 19 nt, Artificial Sequence
  Description of Artificial Sequence: Synthetic oligonucleotide
acaugacccgggaaggcac

SEQ ID NO: 385338 - RNA, 19 nt, Artificial Sequence
  Description of Artificial Sequence: Synthetic oligonucleotide
gcggucuuugauaugagcc

SEQ ID NO: 385339 - RNA, 19 nt, Artificial Sequence
  Description of Artificial Sequence: Synthetic oligonucleotide
cacugguguuaaaauuaag

SEQ ID NO: 385340 - RNA, 19 nt, Artificial Sequence
  Description of Artificial Sequence: Synthetic oligonucleotide
agugggugaugcuguuuag

SEQ ID NO: 385341 - RNA, 19 nt, Artificial Sequence
  Description of Artificial Sequence: Synthetic oligonucleotide
uacaaaagcugcgucggua

SEQ ID NO: 385342 - RNA, 19 nt, Artificial Sequence
  Description of Artificial Sequence: Synthetic oligonucleotide
uguuacccaguagucauua

SEQ ID NO: 385343 - RNA, 19 nt, Artificial Sequence
  Description of Artificial Sequence: Synthetic oligonucleotide
aagugacgucagaagcacg

SEQ ID NO: 385344 - RNA, 19 nt, Artificial Sequence
  Description of Artificial Sequence: Synthetic oligonucleotide
agaaguuaguggcgugaga

SEQ ID NO: 385345 - RNA, 19 nt, Artificial Sequence
  Description of Artificial Sequence: Synthetic oligonucleotide
cauuguuacccaguaguca

SEQ ID NO: 385346 - RNA, 19 nt, Artificial Sequence
  Description of Artificial Sequence: Synthetic oligonucleotide
ucacccgcaaaccucucuu

SEQ ID NO: 385347 - RNA, 19 nt, Artificial Sequence
  Description of Artificial Sequence: Synthetic oligonucleotide
gaugugcaauuccaagcaa

SEQ ID NO: 385348 - RNA, 19 nt, Artificial Sequence
  Description of Artificial Sequence: Synthetic oligonucleotide
uuagaccaguucccauaac

SEQ ID NO: 385349 - RNA, 19 nt, Artificial Sequence
  Description of Artificial Sequence: Synthetic oligonucleotide
gcuguucaagaacacuccc

SEQ ID NO: 385350 - RNA, 19 nt, Artificial Sequence
  Description of Artificial Sequence: Synthetic oligonucleotide
aaggggcgaugucccauug

SEQ ID NO: 385351 - RNA, 19 nt, Artificial Sequence
  Description of Artificial Sequence: Synthetic oligonucleotide
aaguccuaucacugguaua

SEQ ID NO: 385352 - RNA, 19 nt, Artificial Sequence
  Description of Artificial Sequence: Synthetic oligonucleotide
agcugcgucgguaacucag

SEQ ID NO: 385353 - RNA, 19 nt, Artificial Sequence
  Description of Artificial Sequence: Synthetic oligonucleotide
agcgagaaggggcgauguc

SEQ ID NO: 385354 - RNA, 19 nt, Artificial Sequence
  Description of Artificial Sequence: Synthetic oligonucleotide
guaacucaacauugaugca

SEQ ID NO: 385355 - RNA, 19 nt, Artificial Sequence
  Description of Artificial Sequence: Synthetic oligonucleotide
caguuaaugcaacccuauc

SEQ ID NO: 385356 - RNA, 19 nt, Artificial Sequence
  Description of Artificial Sequence: Synthetic oligonucleotide
aggagucauauaagaaaug

SEQ ID NO: 385357 - RNA, 19 nt, Artificial Sequence
  Description of Artificial Sequence: Synthetic oligonucleotide
cccaaucaaauacaaugac

SEQ ID NO: 385358 - RNA, 19 nt, Artificial Sequence
  Description of Artificial Sequence: Synthetic oligonucleotide
caugacccgggaaggcacc

SEQ ID NO: 385359 - RNA, 19 nt, Artificial Sequence
  Description of Artificial Sequence: Synthetic oligonucleotide
gacaacucuguaugauaaa

SEQ ID NO: 385360 - RNA, 19 nt, Artificial Sequence
  Description of Artificial Sequence: Synthetic oligonucleotide
cauguggcuaaguccuauc

SEQ ID NO: 385361 - RNA, 19 nt, Artificial Sequence
  Description of Artificial Sequence: Synthetic oligonucleotide
aggggcgaugucccauugg

SEQ ID NO: 385362 - RNA, 19 nt, Artificial Sequence
  Description of Artificial Sequence: Synthetic oligonucleotide
caugcuccaccaagguaac

SEQ ID NO: 385363 - RNA, 19 nt, Artificial Sequence
  Description of Artificial Sequence: Synthetic oligonucleotide
caaauugcuuaguaaccua

SEQ ID NO: 385364 - RNA, 19 nt, Artificial Sequence
  Description of Artificial Sequence: Synthetic oligonucleotide
uggcgugagaugugcugcc

SEQ ID NO: 385365 - RNA, 19 nt, Artificial Sequence
  Description of Artificial Sequence: Synthetic oligonucleotide
ugacgcgccgaguucugga

SEQ ID NO: 385366 - RNA, 19 nt, Artificial Sequence
  Description of Artificial Sequence: Synthetic oligonucleotide
caaaagcugcgucgguaac

SEQ ID NO: 385367 - RNA, 19 nt, Artificial Sequence
  Description of Artificial Sequence: Synthetic oligonucleotide
auaggccugacgcgccgag

SEQ ID NO: 385368 - RNA, 19 nt, Artificial Sequence
  Description of Artificial Sequence: Synthetic oligonucleotide
cacaguaccaggagcgcga

SEQ ID NO: 385369 - RNA, 19 nt, Artificial Sequence
  Description of Artificial Sequence: Synthetic oligonucleotide
guggcuggacuuuacacgu

SEQ ID NO: 385370 - RNA, 19 nt, Artificial Sequence
  Description of Artificial Sequence: Synthetic oligonucleotide
acggucacccgcaaaccuc

SEQ ID NO: 385371 - RNA, 19 nt, Artificial Sequence
  Description of Artificial Sequence: Synthetic oligonucleotide
augugcaauuccaagcaaa

SEQ ID NO: 385372 - RNA, 19 nt, Artificial Sequence
  Description of Artificial Sequence: Synthetic oligonucleotide
cugucgucaaaggcaagug

SEQ ID NO: 385373 - RNA, 19 nt, Artificial Sequence
  Description of Artificial Sequence: Synthetic oligonucleotide
cggaauuacacuuuucaca

SEQ ID NO: 385374 - RNA, 19 nt, Artificial Sequence
  Description of Artificial Sequence: Synthetic oligonucleotide
cacgacacucaaguccugc

SEQ ID NO: 385375 - RNA, 19 nt, Artificial Sequence
  Description of Artificial Sequence: Synthetic oligonucleotide
agacgacuacaucaaggua

SEQ ID NO: 385376 - RNA, 19 nt, Artificial Sequence
  Description of Artificial Sequence: Synthetic oligonucleotide
cacucaugcuucgugugac

SEQ ID NO: 385377 - RNA, 19 nt, Artificial Sequence
  Description of Artificial Sequence: Synthetic oligonucleotide
agaagcacggucacccgca

SEQ ID NO: 385378 - RNA, 19 nt, Artificial Sequence
  Description of Artificial Sequence: Synthetic oligonucleotide
aggggcccgacaagaacgc

SEQ ID NO: 385379 - RNA, 19 nt, Artificial Sequence
  Description of Artificial Sequence: Synthetic oligonucleotide
caaucuaagcugguaaaua

SEQ ID NO: 385380 - RNA, 19 nt, Artificial Sequence
  Description of Artificial Sequence: Synthetic oligonucleotide
cugcgucgguaacucagcc

SEQ ID NO: 385381 - RNA, 19 nt, Artificial Sequence
  Description of Artificial Sequence: Synthetic oligonucleotide
ccgcaaaccucucuugucc

SEQ ID NO: 385382 - RNA, 19 nt, Artificial Sequence
  Description of Artificial Sequence: Synthetic oligonucleotide
aaaccucgccauagcuauc

SEQ ID NO: 385383 - RNA, 19 nt, Artificial Sequence
  Description of Artificial Sequence: Synthetic oligonucleotide
aaucacgcacagaucugaa

SEQ ID NO: 385384 - RNA, 19 nt, Artificial Sequence
  Description of Artificial Sequence: Synthetic oligonucleotide
auaccccggauaaaaucug

SEQ ID NO: 385385 - RNA, 19 nt, Artificial Sequence
  Description of Artificial Sequence: Synthetic oligonucleotide
uggcuggacuuuacacgug

SEQ ID NO: 385386 - RNA, 19 nt, Artificial Sequence
  Description of Artificial Sequence: Synthetic oligonucleotide
gccgggguggaaaauaagc

SEQ ID NO: 385387 - RNA, 19 nt, Artificial Sequence
  Description of Artificial Sequence: Synthetic oligonucleotide
ucccaaccggagaagccau

SEQ ID NO: 385388 - RNA, 19 nt, Artificial Sequence
  Description of Artificial Sequence: Synthetic oligonucleotide
uucgugugacucucauuua

SEQ ID NO: 385389 - RNA, 19 nt, Artificial Sequence
  Description of Artificial Sequence: Synthetic oligonucleotide
gacgaggggcccgacaaga

SEQ ID NO: 385390 - RNA, 19 nt, Artificial Sequence
  Description of Artificial Sequence: Synthetic oligonucleotide
cuaaguccuaucacuggua

SEQ ID NO: 385391 - RNA, 19 nt, Artificial Sequence
  Description of Artificial Sequence: Synthetic oligonucleotide
gcgagaaggggcgaugucc

SEQ ID NO: 385392 - RNA, 19 nt, Artificial Sequence
  Description of Artificial Sequence: Synthetic oligonucleotide
uaguggcgugagaugugcu

SEQ ID NO: 385393 - RNA, 19 nt, Artificial Sequence
  Description of Artificial Sequence: Synthetic oligonucleotide
gugcagucccuuugaaguc

SEQ ID NO: 385394 - RNA, 19 nt, Artificial Sequence
  Description of Artificial Sequence: Synthetic oligonucleotide
cacugguauacagcucggc

SEQ ID NO: 385395 - RNA, 19 nt, Artificial Sequence
  Description of Artificial Sequence: Synthetic oligonucleotide
ucgccauagcuaucccaac

SEQ ID NO: 385396 - RNA, 19 nt, Artificial Sequence
  Description of Artificial Sequence: Synthetic oligonucleotide
gucccaaccggagaagcca

SEQ ID NO: 385397 - RNA, 19 nt, Artificial Sequence
  Description of Artificial Sequence: Synthetic oligonucleotide
gaaccacccacagugggcu

SEQ ID NO: 385398 - RNA, 19 nt, Artificial Sequence
  Description of Artificial Sequence: Synthetic oligonucleotide
ccaaucaaauacaaugacu

SEQ ID NO: 385399 - RNA, 19 nt, Artificial Sequence
  Description of Artificial Sequence: Synthetic oligonucleotide
gcguacagcgucacugucg

SEQ ID NO: 385400 - RNA, 19 nt, Artificial Sequence
  Description of Artificial Sequence: Synthetic oligonucleotide
aagcugcgucgguaacuca

SEQ ID NO: 385401 - RNA, 19 nt, Artificial Sequence
  Description of Artificial Sequence: Synthetic oligonucleotide
cauaacggaauuacacuuu

SEQ ID NO: 385402 - RNA, 19 nt, Artificial Sequence
  Description of Artificial Sequence: Synthetic oligonucleotide
caagcagcacugacgugca

SEQ ID NO: 385403 - RNA, 19 nt, Artificial Sequence
  Description of Artificial Sequence: Synthetic oligonucleotide
agucucgaugcggucuuug

SEQ ID NO: 385404 - RNA, 19 nt, Artificial Sequence
  Description of Artificial Sequence: Synthetic oligonucleotide
gaggguugcaguaaauauu

SEQ ID NO: 385405 - RNA, 19 nt, Artificial Sequence
  Description of Artificial Sequence: Synthetic oligonucleotide
gcgaugucccauugggagc

SEQ ID NO: 385406 - RNA, 19 nt, Artificial Sequence
  Description of Artificial Sequence: Synthetic oligonucleotide
aggccugacgcgccgaguu

SEQ ID NO: 385407 - RNA, 19 nt, Artificial Sequence
  Description of Artificial Sequence: Synthetic oligonucleotide
cuuuacacgugugcuacua

SEQ ID NO: 385408 - RNA, 19 nt, Artificial Sequence
  Description of Artificial Sequence: Synthetic oligonucleotide
acccuaucaggcauuucgu

SEQ ID NO: 385409 - RNA, 19 nt, Artificial Sequence
  Description of Artificial Sequence: Synthetic oligonucleotide
gcuaaguccuaucacuggu

SEQ ID NO: 385410 - RNA, 19 nt, Artificial Sequence
  Description of Artificial Sequence: Synthetic oligonucleotide
cgagaaggggcgauguccc

SEQ ID NO: 385411 - RNA, 19 nt, Artificial Sequence
  Description of Artificial Sequence: Synthetic oligonucleotide
auuagacaggcaacuccaa

SEQ ID NO: 385412 - RNA, 19 nt, Artificial Sequence
  Description of Artificial Sequence: Synthetic oligonucleotide
aagcacggucacccgcaaa

SEQ ID NO: 385413 - RNA, 19 nt, Artificial Sequence
  Description of Artificial Sequence: Synthetic oligonucleotide
acgcgccgaguucuggaug

SEQ ID NO: 385414 - RNA, 19 nt, Artificial Sequence
  Description of Artificial Sequence: Synthetic oligonucleotide
ccauagcuaucccaacaac

SEQ ID NO: 385415 - RNA, 19 nt, Artificial Sequence
  Description of Artificial Sequence: Synthetic oligonucleotide
aggucagggugaaccaugu

SEQ ID NO: 385416 - RNA, 19 nt, Artificial Sequence
  Description of Artificial Sequence: Synthetic oligonucleotide
cagucccuuugaagucccg

SEQ ID NO: 385417 - RNA, 19 nt, Artificial Sequence
  Description of Artificial Sequence: Synthetic oligonucleotide
cauacgcuaaggcaaucau

SEQ ID NO: 385418 - RNA, 19 nt, Artificial Sequence
  Description of Artificial Sequence: Synthetic oligonucleotide
aacggacgaggggcccgac

SEQ ID NO: 385419 - RNA, 19 nt, Artificial Sequence
  Description of Artificial Sequence: Synthetic oligonucleotide
guaugcaccuuagaccagu

SEQ ID NO: 385420 - RNA, 19 nt, Artificial Sequence
  Description of Artificial Sequence: Synthetic oligonucleotide
ggaacggacgaggggcccg

SEQ ID NO: 385421 - RNA, 19 nt, Artificial Sequence
  Description of Artificial Sequence: Synthetic oligonucleotide
agaccaggcccugugcgaa

SEQ ID NO: 385422 - RNA, 19 nt, Artificial Sequence
  Description of Artificial Sequence: Synthetic oligonucleotide
cccauuagaugugcaauuc

SEQ ID NO: 385423 - RNA, 19 nt, Artificial Sequence
  Description of Artificial Sequence: Synthetic oligonucleotide
caccaagugguauggcaua

SEQ ID NO: 385424 - RNA, 19 nt, Artificial Sequence
  Description of Artificial Sequence: Synthetic oligonucleotide
ggcauuaaaccgagacgac

SEQ ID NO: 385425 - RNA, 19 nt, Artificial Sequence
  Description of Artificial Sequence: Synthetic oligonucleotide
cugacgcgccgaguucugg

SEQ ID NO: 385426 - RNA, 19 nt, Artificial Sequence
  Description of Artificial Sequence: Synthetic oligonucleotide
cgcgccgaguucuggaugg

SEQ ID NO: 385427 - RNA, 19 nt, Artificial Sequence
  Description of Artificial Sequence: Synthetic oligonucleotide
ccaagugguauggcauacg

SEQ ID NO: 385428 - RNA, 19 nt, Artificial Sequence
  Description of Artificial Sequence: Synthetic oligonucleotide
cccuaucaggcauuucguc

SEQ ID NO: 385429 - RNA, 19 nt, Artificial Sequence
  Description of Artificial Sequence: Synthetic oligonucleotide
gaagcacggucacccgcaa

SEQ ID NO: 385430 - RNA, 19 nt, Artificial Sequence
  Description of Artificial Sequence: Synthetic oligonucleotide
gaggccgggguggaaaaua

SEQ ID NO: 385431 - RNA, 19 nt, Artificial Sequence
  Description of Artificial Sequence: Synthetic oligonucleotide
caccuuagaccaguuccca

SEQ ID NO: 385432 - RNA, 19 nt, Artificial Sequence
  Description of Artificial Sequence: Synthetic oligonucleotide
cagcacugacgugcagucc

SEQ ID NO: 385433 - RNA, 19 nt, Artificial Sequence
  Description of Artificial Sequence: Synthetic oligonucleotide
ggguugcaguaaauauuag

SEQ ID NO: 385434 - RNA, 19 nt, Artificial Sequence
  Description of Artificial Sequence: Synthetic oligonucleotide
gcauuaaaccgagacgacu

SEQ ID NO: 385435 - RNA, 19 nt, Artificial Sequence
  Description of Artificial Sequence: Synthetic oligonucleotide
gguaugcaccuuagaccag

SEQ ID NO: 385436 - RNA, 19 nt, Artificial Sequence
  Description of Artificial Sequence: Synthetic oligonucleotide
gcugcgucgguaacucagc

SEQ ID NO: 385437 - RNA, 19 nt, Artificial Sequence
  Description of Artificial Sequence: Synthetic oligonucleotide
gcucggcuauuuuaauuaa

SEQ ID NO: 385438 - RNA, 19 nt, Artificial Sequence
  Description of Artificial Sequence: Synthetic oligonucleotide
cgcgaugucccaaccggag

SEQ ID NO: 385439 - RNA, 19 nt, Artificial Sequence
  Description of Artificial Sequence: Synthetic oligonucleotide
gaaggggcgaugucccauu

SEQ ID NO: 385440 - RNA, 19 nt, Artificial Sequence
  Description of Artificial Sequence: Synthetic oligonucleotide
gcuaucccaacaacacauc

SEQ ID NO: 385441 - RNA, 19 nt, Artificial Sequence
  Description of Artificial Sequence: Synthetic oligonucleotide
cgggguggaaaauaagcga

SEQ ID NO: 385442 - RNA, 19 nt, Artificial Sequence
  Description of Artificial Sequence: Synthetic oligonucleotide
ggcuggacuuuacacgugu

SEQ ID NO: 385443 - RNA, 19 nt, Artificial Sequence
  Description of Artificial Sequence: Synthetic oligonucleotide
gggcccgacaagaacgcac

SEQ ID NO: 385444 - RNA, 19 nt, Artificial Sequence
  Description of Artificial Sequence: Synthetic oligonucleotide
gcgaugucccaaccggaga

SEQ ID NO: 385445 - RNA, 19 nt, Artificial Sequence
  Description of Artificial Sequence: Synthetic oligonucleotide
gcacugguguuaaaauuaa

SEQ ID NO: 385446 - RNA, 19 nt, Artificial Sequence
  Description of Artificial Sequence: Synthetic oligonucleotide
uaggccugacgcgccgagu

SEQ ID NO: 385447 - RNA, 19 nt, Artificial Sequence
  Description of Artificial Sequence: Synthetic oligonucleotide
ggcguacagcgucacuguc

SEQ ID NO: 385448 - RNA, 19 nt, Artificial Sequence
  Description of Artificial Sequence: Synthetic oligonucleotide
aggccgggguggaaaauaa

SEQ ID NO: 385449 - RNA, 19 nt, Artificial Sequence
  Description of Artificial Sequence: Synthetic oligonucleotide
gucacccgcaaaccucucu

SEQ ID NO: 385450 - RNA, 19 nt, Artificial Sequence
  Description of Artificial Sequence: Synthetic oligonucleotide
cccgacaagaacgcacaug

SEQ ID NO: 385451 - RNA, 19 nt, Artificial Sequence
  Description of Artificial Sequence: Synthetic oligonucleotide
gacgcgccgaguucuggau

SEQ ID NO: 385452 - RNA, 19 nt, Artificial Sequence
  Description of Artificial Sequence: Synthetic oligonucleotide
gcgcccguacacccgcccg

SEQ ID NO: 385453 - RNA, 19 nt, Artificial Sequence
  Description of Artificial Sequence: Synthetic oligonucleotide
ccgagacgacuacaucaag

SEQ ID NO: 385454 - RNA, 19 nt, Artificial Sequence
  Description of Artificial Sequence: Synthetic oligonucleotide
guacacccgcccggggccc

SEQ ID NO: 385455 - RNA, 19 nt, Artificial Sequence
  Description of Artificial Sequence: Synthetic oligonucleotide
cuguggcauuaaaccgaga

SEQ ID NO: 385456 - RNA, 19 nt, Artificial Sequence
  Description of Artificial Sequence: Synthetic oligonucleotide
guacagcgucacugucguc

SEQ ID NO: 385457 - RNA, 19 nt, Artificial Sequence
  Description of Artificial Sequence: Synthetic oligonucleotide
cgaugucccaaccggagaa

SEQ ID NO: 385458 - RNA, 19 nt, Artificial Sequence
  Description of Artificial Sequence: Synthetic oligonucleotide
gcccguacacccgcccggg

SEQ ID NO: 385459 - RNA, 19 nt, Artificial Sequence
  Description of Artificial Sequence: Synthetic oligonucleotide
cgaggguugcaguaaauau

SEQ ID NO: 385460 - RNA, 19 nt, Artificial Sequence
  Description of Artificial Sequence: Synthetic oligonucleotide
ccugacgcgccgaguucug

SEQ ID NO: 385461 - RNA, 19 nt, Artificial Sequence
  Description of Artificial Sequence: Synthetic oligonucleotide
ggccugacgcgccgaguuc

SEQ ID NO: 385462 - RNA, 19 nt, Artificial Sequence
  Description of Artificial Sequence: Synthetic oligonucleotide
cguacagcgucacugucgu

SEQ ID NO: 385463 - RNA, 19 nt, Artificial Sequence
  Description of Artificial Sequence: Synthetic oligonucleotide
ggcgugagaugugcugcca

SEQ ID NO: 385464 - RNA, 19 nt, Artificial Sequence
  Description of Artificial Sequence: Synthetic oligonucleotide
gggcgaugucccauuggga

SEQ ID NO: 385465 - RNA, 19 nt, Artificial Sequence
  Description of Artificial Sequence: Synthetic oligonucleotide
gcccugugcgaacgccagc

SEQ ID NO: 385466 - RNA, 19 nt, Artificial Sequence
  Description of Artificial Sequence: Synthetic oligonucleotide
cgcccguacacccgcccgg

SEQ ID NO: 385467 - RNA, 19 nt, Artificial Sequence
  Description of Artificial Sequence: Synthetic oligonucleotide
cggcuauuuuaauuaaaau

SEQ ID NO: 385468 - RNA, 19 nt, Artificial Sequence
  Description of Artificial Sequence: Synthetic oligonucleotide
cccguacacccgcccgggg

SEQ ID NO: 385469 - RNA, 19 nt, Artificial Sequence
  Description of Artificial Sequence: Synthetic oligonucleotide
gcgcgaugucccaaccgga

SEQ ID NO: 385470 - RNA, 19 nt, Artificial Sequence
  Description of Artificial Sequence: Synthetic oligonucleotide
gccugacgcgccgaguucu

SEQ ID NO: 385471 - RNA, 19 nt, Artificial Sequence
  Description of Artificial Sequence: Synthetic oligonucleotide
ccgagagucuguggcauua

SEQ ID NO: 385472 - RNA, 19 nt, Artificial Sequence
  Description of Artificial Sequence: Synthetic oligonucleotide
cgaugucccauugggagcu

SEQ ID NO: 385473 - RNA, 19 nt, Artificial Sequence
  Description of Artificial Sequence: Synthetic oligonucleotide
gcaacccuaucaggcauuu

SEQ ID NO: 385474 - RNA, 19 nt, Artificial Sequence
  Description of Artificial Sequence: Synthetic oligonucleotide
ggggcccgacaagaacgca

SEQ ID NO: 385475 - RNA, 19 nt, Artificial Sequence
  Description of Artificial Sequence: Synthetic oligonucleotide
cggucacccgcaaaccucu

SEQ ID NO: 385476 - RNA, 19 nt, Artificial Sequence
  Description of Artificial Sequence: Synthetic oligonucleotide
gguauacagcucggcuauu

SEQ ID NO: 385477 - RNA, 19 nt, Artificial Sequence
  Description of Artificial Sequence: Synthetic oligonucleotide
gcccgacaagaacgcacau

SEQ ID NO: 385478 - RNA, 19 nt, Artificial Sequence
  Description of Artificial Sequence: Synthetic oligonucleotide
ggaggccgggguggaaaau

SEQ ID NO: 385479 - RNA, 19 nt, Artificial Sequence
  Description of Artificial Sequence: Synthetic oligonucleotide
cgucgguaacucagccgcu

SEQ ID NO: 385480 - RNA, 19 nt, Artificial Sequence
  Description of Artificial Sequence: Synthetic oligonucleotide
cagucucgaugcggucuuu

SEQ ID NO: 385481 - RNA, 19 nt, Artificial Sequence
  Description of Artificial Sequence: Synthetic oligonucleotide
aguaauguccucuugaucc

SEQ ID NO: 385482 - RNA, 19 nt, Artificial Sequence
  Description of Artificial Sequence: Synthetic oligonucleotide
gaugcguaugcucugaucc

SEQ ID NO: 385483 - RNA, 19 nt, Artificial Sequence
  Description of Artificial Sequence: Synthetic oligonucleotide
auaauguugcacaaugucc

SEQ ID NO: 385484 - RNA, 19 nt, Artificial Sequence
  Description of Artificial Sequence: Synthetic oligonucleotide
uguuaagaaguguaggccc

SEQ ID NO: 385485 - RNA, 19 nt, Artificial Sequence
  Description of Artificial Sequence: Synthetic oligonucleotide
aggaaugugccucauagag

SEQ ID NO: 385486 - RNA, 19 nt, Artificial Sequence
  Description of Artificial Sequence: Synthetic oligonucleotide
agugcccagagcuugaugg

SEQ ID NO: 385487 - RNA, 19 nt, Artificial Sequence
  Description of Artificial Sequence: Synthetic oligonucleotide
aguauagggcagcagggcc

SEQ ID NO: 385488 - RNA, 19 nt, Artificial Sequence
  Description of Artificial Sequence: Synthetic oligonucleotide
auuaucaggacugagguca

SEQ ID NO: 385489 - RNA, 19 nt, Artificial Sequence
  Description of Artificial Sequence: Synthetic oligonucleotide
aaagucugcagcucaaaca

SEQ ID NO: 385490 - RNA, 19 nt, Artificial Sequence
  Description of Artificial Sequence: Synthetic oligonucleotide
gagauagcgcuucucaugg

SEQ ID NO: 385491 - RNA, 19 nt, Artificial Sequence
  Description of Artificial Sequence: Synthetic oligonucleotide
aguucuugcugcuugauca

SEQ ID NO: 385492 - RNA, 19 nt, Artificial Sequence
  Description of Artificial Sequence: Synthetic oligonucleotide
aacgucuugagacaacuga

SEQ ID NO: 385493 - RNA, 19 nt, Artificial Sequence
  Description of Artificial Sequence: Synthetic oligonucleotide
aaugauucgggagucacug

SEQ ID NO: 385494 - RNA, 19 nt, Artificial Sequence
  Description of Artificial Sequence: Synthetic oligonucleotide
gauuugacaggccaaaguc

SEQ ID NO: 385495 - RNA, 19 nt, Artificial Sequence
  Description of Artificial Sequence: Synthetic oligonucleotide
uguaguguccggcuaagcc

SEQ ID NO: 385496 - RNA, 19 nt, Artificial Sequence
  Description of Artificial Sequence: Synthetic oligonucleotide
guagcuaacaguguagagg

SEQ ID NO: 385497 - RNA, 19 nt, Artificial Sequence
  Description of Artificial Sequence: Synthetic oligonucleotide
aacaccuccucgcuauagc

SEQ ID NO: 385498 - RNA, 19 nt, Artificial Sequence
  Description of Artificial Sequence: Synthetic oligonucleotide
uggauaacagucagcacag

SEQ ID NO: 385499 - RNA, 19 nt, Artificial Sequence
  Description of Artificial Sequence: Synthetic oligonucleotide
gaaccgaacauccaacacc

SEQ ID NO: 385500 - RNA, 19 nt, Artificial Sequence
  Description of Artificial Sequence: Synthetic oligonucleotide
guggggacgauccagagag

SEQ ID NO: 385501 - RNA, 19 nt, Artificial Sequence
  Description of Artificial Sequence: Synthetic oligonucleotide
uaacagucagcacagugug

SEQ ID NO: 385502 - RNA, 19 nt, Artificial Sequence
  Description of Artificial Sequence: Synthetic oligonucleotide
uuuagccuagaacagcaga

SEQ ID NO: 385503 - RNA, 19 nt, Artificial Sequence
  Description of Artificial Sequence: Synthetic oligonucleotide
auagcuuuacagugcaguc

SEQ ID NO: 385504 - RNA, 19 nt, Artificial Sequence
  Description of Artificial Sequence: Synthetic oligonucleotide
aaaacacccaacaguuggc

SEQ ID NO: 385505 - RNA, 19 nt, Artificial Sequence
  Description of Artificial Sequence: Synthetic oligonucleotide
uguguaucgccuuccacag

SEQ ID NO: 385506 - RNA, 19 nt, Artificial Sequence
  Description of Artificial Sequence: Synthetic oligonucleotide
agcuacacaggucaccugg

SEQ ID NO: 385507 - RNA, 19 nt, Artificial Sequence
  Description of Artificial Sequence: Synthetic oligonucleotide
gaaagauucuuuuagccua

SEQ ID NO: 385508 - RNA, 19 nt, Artificial Sequence
  Description of Artificial Sequence: Synthetic oligonucleotide
ugauucgggagucacugcc

SEQ ID NO: 385509 - RNA, 19 nt, Artificial Sequence
  Description of Artificial Sequence: Synthetic oligonucleotide
aagugaacgacgccgggug

SEQ ID NO: 385510 - RNA, 19 nt, Artificial Sequence
  Description of Artificial Sequence: Synthetic oligonucleotide
acagccaaacuguugaugu

SEQ ID NO: 385511 - RNA, 19 nt, Artificial Sequence
  Description of Artificial Sequence: Synthetic oligonucleotide
cauccagucggcuacagug

SEQ ID NO: 385512 - RNA, 19 nt, Artificial Sequence
  Description of Artificial Sequence: Synthetic oligonucleotide
cuuaucacggccagaacug

SEQ ID NO: 385513 - RNA, 19 nt, Artificial Sequence
  Description of Artificial Sequence: Synthetic oligonucleotide
gauagcgcuucucauggag

SEQ ID NO: 385514 - RNA, 19 nt, Artificial Sequence
  Description of Artificial Sequence: Synthetic oligonucleotide
gaaugugccucauagagua

SEQ ID NO: 385515 - RNA, 19 nt, Artificial Sequence
  Description of Artificial Sequence: Synthetic oligonucleotide
uggguguauacacacugcc

SEQ ID NO: 385516 - RNA, 19 nt, Artificial Sequence
  Description of Artificial Sequence: Synthetic oligonucleotide
ucacuaaaggacagagaag

SEQ ID NO: 385517 - RNA, 19 nt, Artificial Sequence
  Description of Artificial Sequence: Synthetic oligonucleotide
acaggcgagugacagugcc

SEQ ID NO: 385518 - RNA, 19 nt, Artificial Sequence
  Description of Artificial Sequence: Synthetic oligonucleotide
agucaguacagccacacau

SEQ ID NO: 385519 - RNA, 19 nt, Artificial Sequence
  Description of Artificial Sequence: Synthetic oligonucleotide
uuagccuagaacagcagau

SEQ ID NO: 385520 - RNA, 19 nt, Artificial Sequence
  Description of Artificial Sequence: Synthetic oligonucleotide
cucgcuauagccagcaaac

SEQ ID NO: 385521 - RNA, 19 nt, Artificial Sequence
  Description of Artificial Sequence: Synthetic oligonucleotide
cacaguguggggacgaucc

SEQ ID NO: 385522 - RNA, 19 nt, Artificial Sequence
  Description of Artificial Sequence: Synthetic oligonucleotide
acacguauagccccaucac

SEQ ID NO: 385523 - RNA, 19 nt, Artificial Sequence
  Description of Artificial Sequence: Synthetic oligonucleotide
uguagcuaacaguguagag

SEQ ID NO: 385524 - RNA, 19 nt, Artificial Sequence
  Description of Artificial Sequence: Synthetic oligonucleotide
uggcaaguccuacugcccg

SEQ ID NO: 385525 - RNA, 19 nt, Artificial Sequence
  Description of Artificial Sequence: Synthetic oligonucleotide
agaaugauucgggagucac

SEQ ID NO: 385526 - RNA, 19 nt, Artificial Sequence
  Description of Artificial Sequence: Synthetic oligonucleotide
augcagaucuuaucacggc

SEQ ID NO: 385527 - RNA, 19 nt, Artificial Sequence
  Description of Artificial Sequence: Synthetic oligonucleotide
aaggaaccgaacauccaac

SEQ ID NO: 385528 - RNA, 19 nt, Artificial Sequence
  Description of Artificial Sequence: Synthetic oligonucleotide
ugcucucaaacacuggcac

SEQ ID NO: 385529 - RNA, 19 nt, Artificial Sequence
  Description of Artificial Sequence: Synthetic oligonucleotide
gaaagugccgcucaguaua

SEQ ID NO: 385530 - RNA, 19 nt, Artificial Sequence
  Description of Artificial Sequence: Synthetic oligonucleotide
ucuuuuagccuagaacagc

SEQ ID NO: 385531 - RNA, 19 nt, Artificial Sequence
  Description of Artificial Sequence: Synthetic oligonucleotide
aaagauucuuuuagccuag

SEQ ID NO: 385532 - RNA, 19 nt, Artificial Sequence
  Description of Artificial Sequence: Synthetic oligonucleotide
aaccgaacauccaacaccu

SEQ ID NO: 385533 - RNA, 19 nt, Artificial Sequence
  Description of Artificial Sequence: Synthetic oligonucleotide
cuguuaagaaguguaggcc

SEQ ID NO: 385534 - RNA, 19 nt, Artificial Sequence
  Description of Artificial Sequence: Synthetic oligonucleotide
guagugugcagucaguaca

SEQ ID NO: 385535 - RNA, 19 nt, Artificial Sequence
  Description of Artificial Sequence: Synthetic oligonucleotide
uuuuagccuagaacagcag

SEQ ID NO: 385536 - RNA, 19 nt, Artificial Sequence
  Description of Artificial Sequence: Synthetic oligonucleotide
agaaguguaggcccgaguu

SEQ ID NO: 385537 - RNA, 19 nt, Artificial Sequence
  Description of Artificial Sequence: Synthetic oligonucleotide
aggcccgaguucuugacac

SEQ ID NO: 385538 - RNA, 19 nt, Artificial Sequence
  Description of Artificial Sequence: Synthetic oligonucleotide
agaguagcagguugugauc

SEQ ID NO: 385539 - RNA, 19 nt, Artificial Sequence
  Description of Artificial Sequence: Synthetic oligonucleotide
ucauugggcccaaggaacc

SEQ ID NO: 385540 - RNA, 19 nt, Artificial Sequence
  Description of Artificial Sequence: Synthetic oligonucleotide
aggcccaaagcuuagcugu

SEQ ID NO: 385541 - RNA, 19 nt, Artificial Sequence
  Description of Artificial Sequence: Synthetic oligonucleotide
ugaucaguggugacaguga

SEQ ID NO: 385542 - RNA, 19 nt, Artificial Sequence
  Description of Artificial Sequence: Synthetic oligonucleotide
aagcauggggccacugucc

SEQ ID NO: 385543 - RNA, 19 nt, Artificial Sequence
  Description of Artificial Sequence: Synthetic oligonucleotide
agcuguuaagaaguguagg

SEQ ID NO: 385544 - RNA, 19 nt, Artificial Sequence
  Description of Artificial Sequence: Synthetic oligonucleotide
auaacagucagcacagugu

SEQ ID NO: 385545 - RNA, 19 nt, Artificial Sequence
  Description of Artificial Sequence: Synthetic oligonucleotide
cuaacaguguagagguggc

SEQ ID NO: 385546 - RNA, 19 nt, Artificial Sequence
  Description of Artificial Sequence: Synthetic oligonucleotide
gacacguauagccccauca

SEQ ID NO: 385547 - RNA, 19 nt, Artificial Sequence
  Description of Artificial Sequence: Synthetic oligonucleotide
uaagccgcugaaagugccg

SEQ ID NO: 385548 - RNA, 19 nt, Artificial Sequence
  Description of Artificial Sequence: Synthetic oligonucleotide
guauagccccaucacagcc

SEQ ID NO: 385549 - RNA, 19 nt, Artificial Sequence
  Description of Artificial Sequence: Synthetic oligonucleotide
uguagugugcagucaguac

SEQ ID NO: 385550 - RNA, 19 nt, Artificial Sequence
  Description of Artificial Sequence: Synthetic oligonucleotide
uuguagaaagguucuaauu

SEQ ID NO: 385551 - RNA, 19 nt, Artificial Sequence
  Description of Artificial Sequence: Synthetic oligonucleotide
auucgggagucacugccac

SEQ ID NO: 385552 - RNA, 19 nt, Artificial Sequence
  Description of Artificial Sequence: Synthetic oligonucleotide
caguguaccccgcacaccc

SEQ ID NO: 385553 - RNA, 19 nt, Artificial Sequence
  Description of Artificial Sequence: Synthetic oligonucleotide
ucagucggagcacaguauc

SEQ ID NO: 385554 - RNA, 19 nt, Artificial Sequence
  Description of Artificial Sequence: Synthetic oligonucleotide
cacccuuguagaaagguuc

SEQ ID NO: 385555 - RNA, 19 nt, Artificial Sequence
  Description of Artificial Sequence: Synthetic oligonucleotide
cugacugccugucaccagg

SEQ ID NO: 385556 - RNA, 19 nt, Artificial Sequence
  Description of Artificial Sequence: Synthetic oligonucleotide
caccaagugaacgacgccg

SEQ ID NO: 385557 - RNA, 19 nt, Artificial Sequence
  Description of Artificial Sequence: Synthetic oligonucleotide
aguugguauuccaugugac

SEQ ID NO: 385558 - RNA, 19 nt, Artificial Sequence
  Description of Artificial Sequence: Synthetic oligonucleotide
aaggaaugugccucauaga

SEQ ID NO: 385559 - RNA, 19 nt, Artificial Sequence
  Description of Artificial Sequence: Synthetic oligonucleotide
guguguaucgccuuccaca

SEQ ID NO: 385560 - RNA, 19 nt, Artificial Sequence
  Description of Artificial Sequence: Synthetic oligonucleotide
uggcauuuguggcugggug

SEQ ID NO: 385561 - RNA, 19 nt, Artificial Sequence
  Description of Artificial Sequence: Synthetic oligonucleotide
agagaaugauucgggaguc

SEQ ID NO: 385562 - RNA, 19 nt, Artificial Sequence
  Description of Artificial Sequence: Synthetic oligonucleotide
gacgaguggggucuggaug

SEQ ID NO: 385563 - RNA, 19 nt, Artificial Sequence
  Description of Artificial Sequence: Synthetic oligonucleotide
agucauugggcccaaggaa

SEQ ID NO: 385564 - RNA, 19 nt, Artificial Sequence
  Description of Artificial Sequence: Synthetic oligonucleotide
agcugugcgguccugugag

SEQ ID NO: 385565 - RNA, 19 nt, Artificial Sequence
  Description of Artificial Sequence: Synthetic oligonucleotide
uaugugucucacagggcug

SEQ ID NO: 385566 - RNA, 19 nt, Artificial Sequence
  Description of Artificial Sequence: Synthetic oligonucleotide
acguauagccccaucacag

SEQ ID NO: 385567 - RNA, 19 nt, Artificial Sequence
  Description of Artificial Sequence: Synthetic oligonucleotide
ucucagucggagcacagua

SEQ ID NO: 385568 - RNA, 19 nt, Artificial Sequence
  Description of Artificial Sequence: Synthetic oligonucleotide
ucgccaggcccauugagcc

SEQ ID NO: 385569 - RNA, 19 nt, Artificial Sequence
  Description of Artificial Sequence: Synthetic oligonucleotide
uccagagaaugauucggga

SEQ ID NO: 385570 - RNA, 19 nt, Artificial Sequence
  Description of Artificial Sequence: Synthetic oligonucleotide
augauucgggagucacugc

SEQ ID NO: 385571 - RNA, 19 nt, Artificial Sequence
  Description of Artificial Sequence: Synthetic oligonucleotide
gaucuuaucacggccagaa

SEQ ID NO: 385572 - RNA, 19 nt, Artificial Sequence
  Description of Artificial Sequence: Synthetic oligonucleotide
guguauacacacugcccgg

SEQ ID NO: 385573 - RNA, 19 nt, Artificial Sequence
  Description of Artificial Sequence: Synthetic oligonucleotide
gaguugguauuccauguga

SEQ ID NO: 385574 - RNA, 19 nt, Artificial Sequence
  Description of Artificial Sequence: Synthetic oligonucleotide
uaucacggccagaacugag

SEQ ID NO: 385575 - RNA, 19 nt, Artificial Sequence
  Description of Artificial Sequence: Synthetic oligonucleotide
auagcgcuucucauggagc

SEQ ID NO: 385576 - RNA, 19 nt, Artificial Sequence
  Description of Artificial Sequence: Synthetic oligonucleotide
guagaaagguucuaauucu

SEQ ID NO: 385577 - RNA, 19 nt, Artificial Sequence
  Description of Artificial Sequence: Synthetic oligonucleotide
aagguggugugucccauaa

SEQ ID NO: 385578 - RNA, 19 nt, Artificial Sequence
  Description of Artificial Sequence: Synthetic oligonucleotide
uucccguuuggccugcucu

SEQ ID NO: 385579 - RNA, 19 nt, Artificial Sequence
  Description of Artificial Sequence: Synthetic oligonucleotide
uccaguguaccccgcacac

SEQ ID NO: 385580 - RNA, 19 nt, Artificial Sequence
  Description of Artificial Sequence: Synthetic oligonucleotide
aucacggccagaacugagc

SEQ ID NO: 385581 - RNA, 19 nt, Artificial Sequence
  Description of Artificial Sequence: Synthetic oligonucleotide
cuaagccgcugaaagugcc

SEQ ID NO: 385582 - RNA, 19 nt, Artificial Sequence
  Description of Artificial Sequence: Synthetic oligonucleotide
acaugagcgguccugcagu

SEQ ID NO: 385583 - RNA, 19 nt, Artificial Sequence
  Description of Artificial Sequence: Synthetic oligonucleotide
guacagccacacaugagcg

SEQ ID NO: 385584 - RNA, 19 nt, Artificial Sequence
  Description of Artificial Sequence: Synthetic oligonucleotide
uagaaagguucuaauucuu

SEQ ID NO: 385585 - RNA, 19 nt, Artificial Sequence
  Description of Artificial Sequence: Synthetic oligonucleotide
aaacacccaacaguuggca

SEQ ID NO: 385586 - RNA, 19 nt, Artificial Sequence
  Description of Artificial Sequence: Synthetic oligonucleotide
aggaaccgaacauccaaca

SEQ ID NO: 385587 - RNA, 19 nt, Artificial Sequence
  Description of Artificial Sequence: Synthetic oligonucleotide
cuaugcucucaaacacugg

SEQ ID NO: 385588 - RNA, 19 nt, Artificial Sequence
  Description of Artificial Sequence: Synthetic oligonucleotide
uguguguaucgccuuccac

SEQ ID NO: 385589 - RNA, 19 nt, Artificial Sequence
  Description of Artificial Sequence: Synthetic oligonucleotide
cuucauguugugccacagg

SEQ ID NO: 385590 - RNA, 19 nt, Artificial Sequence
  Description of Artificial Sequence: Synthetic oligonucleotide
uguggggacgauccagaga

SEQ ID NO: 385591 - RNA, 19 nt, Artificial Sequence
  Description of Artificial Sequence: Synthetic oligonucleotide
ggagauagcgcuucucaug

SEQ ID NO: 385592 - RNA, 19 nt, Artificial Sequence
  Description of Artificial Sequence: Synthetic oligonucleotide
uuagcugugcgguccugug

SEQ ID NO: 385593 - RNA, 19 nt, Artificial Sequence
  Description of Artificial Sequence: Synthetic oligonucleotide
cuggguguauacacacugc

SEQ ID NO: 385594 - RNA, 19 nt, Artificial Sequence
  Description of Artificial Sequence: Synthetic oligonucleotide
augucuggaguugguauuc

SEQ ID NO: 385595 - RNA, 19 nt, Artificial Sequence
  Description of Artificial Sequence: Synthetic oligonucleotide
uggcauggucauccagucg

SEQ ID NO: 385596 - RNA, 19 nt, Artificial Sequence
  Description of Artificial Sequence: Synthetic oligonucleotide
uguauacacacugcccgga

SEQ ID NO: 385597 - RNA, 19 nt, Artificial Sequence
  Description of Artificial Sequence: Synthetic oligonucleotide
gaaguguaggcccgaguuc

SEQ ID NO: 385598 - RNA, 19 nt, Artificial Sequence
  Description of Artificial Sequence: Synthetic oligonucleotide
uaucgccuuccacaggcga

SEQ ID NO: 385599 - RNA, 19 nt, Artificial Sequence
  Description of Artificial Sequence: Synthetic oligonucleotide
uccgaagcaaagccccuga

SEQ ID NO: 385600 - RNA, 19 nt, Artificial Sequence
  Description of Artificial Sequence: Synthetic oligonucleotide
ggcccauugagccagcagc

SEQ ID NO: 385601 - RNA, 19 nt, Artificial Sequence
  Description of Artificial Sequence: Synthetic oligonucleotide
cacuaaaggacagagaagu

SEQ ID NO: 385602 - RNA, 19 nt, Artificial Sequence
  Description of Artificial Sequence: Synthetic oligonucleotide
cucgccaggcccauugagc

SEQ ID NO: 385603 - RNA, 19 nt, Artificial Sequence
  Description of Artificial Sequence: Synthetic oligonucleotide
aaccacuagacagcagcug

SEQ ID NO: 385604 - RNA, 19 nt, Artificial Sequence
  Description of Artificial Sequence: Synthetic oligonucleotide
agccaaacuguugaugucu

SEQ ID NO: 385605 - RNA, 19 nt, Artificial Sequence
  Description of Artificial Sequence: Synthetic oligonucleotide
aaagugccgcucaguauag

SEQ ID NO: 385606 - RNA, 19 nt, Artificial Sequence
  Description of Artificial Sequence: Synthetic oligonucleotide
cacgcuguguguguguccg

SEQ ID NO: 385607 - RNA, 19 nt, Artificial Sequence
  Description of Artificial Sequence: Synthetic oligonucleotide
gacagccaaacuguugaug

SEQ ID NO: 385608 - RNA, 19 nt, Artificial Sequence
  Description of Artificial Sequence: Synthetic oligonucleotide
uggacauuccagaggccac

SEQ ID NO: 385609 - RNA, 19 nt, Artificial Sequence
  Description of Artificial Sequence: Synthetic oligonucleotide
uggugugucccauaauguu

SEQ ID NO: 385610 - RNA, 19 nt, Artificial Sequence
  Description of Artificial Sequence: Synthetic oligonucleotide
cagaucuuaucacggccag

SEQ ID NO: 385611 - RNA, 19 nt, Artificial Sequence
  Description of Artificial Sequence: Synthetic oligonucleotide
cacacggaggaucccuugg

SEQ ID NO: 385612 - RNA, 19 nt, Artificial Sequence
  Description of Artificial Sequence: Synthetic oligonucleotide
caaacacuuucaggcaagg

SEQ ID NO: 385613 - RNA, 19 nt, Artificial Sequence
  Description of Artificial Sequence: Synthetic oligonucleotide
cacaaaagaggugguggcc

SEQ ID NO: 385614 - RNA, 19 nt, Artificial Sequence
  Description of Artificial Sequence: Synthetic oligonucleotide
caucaugucccucaaacgu

SEQ ID NO: 385615 - RNA, 19 nt, Artificial Sequence
  Description of Artificial Sequence: Synthetic oligonucleotide
gcuaacagcuugucauugg

SEQ ID NO: 385616 - RNA, 19 nt, Artificial Sequence
  Description of Artificial Sequence: Synthetic oligonucleotide
cuacugcccggagauagcg

SEQ ID NO: 385617 - RNA, 19 nt, Artificial Sequence
  Description of Artificial Sequence: Synthetic oligonucleotide
accaagugaacgacgccgg

SEQ ID NO: 385618 - RNA, 19 nt, Artificial Sequence
  Description of Artificial Sequence: Synthetic oligonucleotide
aaacgucuugagacaacug

SEQ ID NO: 385619 - RNA, 19 nt, Artificial Sequence
  Description of Artificial Sequence: Synthetic oligonucleotide
cacaugagcgguccugcag

SEQ ID NO: 385620 - RNA, 19 nt, Artificial Sequence
  Description of Artificial Sequence: Synthetic oligonucleotide
gguauggccauccucacua

SEQ ID NO: 385621 - RNA, 19 nt, Artificial Sequence
  Description of Artificial Sequence: Synthetic oligonucleotide
ccgaacauccaacaccucc

SEQ ID NO: 385622 - RNA, 19 nt, Artificial Sequence
  Description of Artificial Sequence: Synthetic oligonucleotide
uguccggcuaagccgcuga

SEQ ID NO: 385623 - RNA, 19 nt, Artificial Sequence
  Description of Artificial Sequence: Synthetic oligonucleotide
uggcuccucaggcaauagc

SEQ ID NO: 385624 - RNA, 19 nt, Artificial Sequence
  Description of Artificial Sequence: Synthetic oligonucleotide
agacacaaaagagguggug

SEQ ID NO: 385625 - RNA, 19 nt, Artificial Sequence
  Description of Artificial Sequence: Synthetic oligonucleotide
ggaaagauucuuuuagccu

SEQ ID NO: 385626 - RNA, 19 nt, Artificial Sequence
  Description of Artificial Sequence: Synthetic oligonucleotide
ggauguugacuuugguacc

SEQ ID NO: 385627 - RNA, 19 nt, Artificial Sequence
  Description of Artificial Sequence: Synthetic oligonucleotide
ugugcgguccugugagccc

SEQ ID NO: 385628 - RNA, 19 nt, Artificial Sequence
  Description of Artificial Sequence: Synthetic oligonucleotide
gagcaugguauggccaucc

SEQ ID NO: 385629 - RNA, 19 nt, Artificial Sequence
  Description of Artificial Sequence: Synthetic oligonucleotide
uuguggccugguaacucug

SEQ ID NO: 385630 - RNA, 19 nt, Artificial Sequence
  Description of Artificial Sequence: Synthetic oligonucleotide
uaggcccgaguucuugaca

SEQ ID NO: 385631 - RNA, 19 nt, Artificial Sequence
  Description of Artificial Sequence: Synthetic oligonucleotide
aaugugccucauagaguag

SEQ ID NO: 385632 - RNA, 19 nt, Artificial Sequence
  Description of Artificial Sequence: Synthetic oligonucleotide
cugaaggucccagacuaug

SEQ ID NO: 385633 - RNA, 19 nt, Artificial Sequence
  Description of Artificial Sequence: Synthetic oligonucleotide
caguaauguccucuugauc

SEQ ID NO: 385634 - RNA, 19 nt, Artificial Sequence
  Description of Artificial Sequence: Synthetic oligonucleotide
guucuugcugcuugaucac

SEQ ID NO: 385635 - RNA, 19 nt, Artificial Sequence
  Description of Artificial Sequence: Synthetic oligonucleotide
cagagaaugauucgggagu

SEQ ID NO: 385636 - RNA, 19 nt, Artificial Sequence
  Description of Artificial Sequence: Synthetic oligonucleotide
aacgacgccgggugagccu

SEQ ID NO: 385637 - RNA, 19 nt, Artificial Sequence
  Description of Artificial Sequence: Synthetic oligonucleotide
aguccgguccagcugugcu

SEQ ID NO: 385638 - RNA, 19 nt, Artificial Sequence
  Description of Artificial Sequence: Synthetic oligonucleotide
cacacaugagcgguccugc

SEQ ID NO: 385639 - RNA, 19 nt, Artificial Sequence
  Description of Artificial Sequence: Synthetic oligonucleotide
augcguaugcucugauccu

SEQ ID NO: 385640 - RNA, 19 nt, Artificial Sequence
  Description of Artificial Sequence: Synthetic oligonucleotide
agacacguauagccccauc

SEQ ID NO: 385641 - RNA, 19 nt, Artificial Sequence
  Description of Artificial Sequence: Synthetic oligonucleotide
aggauuugacaggccaaag

SEQ ID NO: 385642 - RNA, 19 nt, Artificial Sequence
  Description of Artificial Sequence: Synthetic oligonucleotide
ugugagccacggcucacaa

SEQ ID NO: 385643 - RNA, 19 nt, Artificial Sequence
  Description of Artificial Sequence: Synthetic oligonucleotide
cacggcuggaggagaagag

SEQ ID NO: 385644 - RNA, 19 nt, Artificial Sequence
  Description of Artificial Sequence: Synthetic oligonucleotide
ggaguugguauuccaugug

SEQ ID NO: 385645 - RNA, 19 nt, Artificial Sequence
  Description of Artificial Sequence: Synthetic oligonucleotide
cagcugacaaagagccacc

SEQ ID NO: 385646 - RNA, 19 nt, Artificial Sequence
  Description of Artificial Sequence: Synthetic oligonucleotide
acauuccagaggccacguc

SEQ ID NO: 385647 - RNA, 19 nt, Artificial Sequence
  Description of Artificial Sequence: Synthetic oligonucleotide
cugagcuacacaggucacc

SEQ ID NO: 385648 - RNA, 19 nt, Artificial Sequence
  Description of Artificial Sequence: Synthetic oligonucleotide
cacagaagcgcagcagggc

SEQ ID NO: 385649 - RNA, 19 nt, Artificial Sequence
  Description of Artificial Sequence: Synthetic oligonucleotide
aggccaccaagugaacgac

SEQ ID NO: 385650 - RNA, 19 nt, Artificial Sequence
  Description of Artificial Sequence: Synthetic oligonucleotide
ggaaccgaacauccaacac

SEQ ID NO: 385651 - RNA, 19 nt, Artificial Sequence
  Description of Artificial Sequence: Synthetic oligonucleotide
uacugcccggagauagcgc

SEQ ID NO: 385652 - RNA, 19 nt, Artificial Sequence
  Description of Artificial Sequence: Synthetic oligonucleotide
acacggaggaucccuuggu

SEQ ID NO: 385653 - RNA, 19 nt, Artificial Sequence
  Description of Artificial Sequence: Synthetic oligonucleotide
cacguauagccccaucaca

SEQ ID NO: 385654 - RNA, 19 nt, Artificial Sequence
  Description of Artificial Sequence: Synthetic oligonucleotide
ugucuggaguugguauucc

SEQ ID NO: 385655 - RNA, 19 nt, Artificial Sequence
  Description of Artificial Sequence: Synthetic oligonucleotide
gccgggugagccucgaagg

SEQ ID NO: 385656 - RNA, 19 nt, Artificial Sequence
  Description of Artificial Sequence: Synthetic oligonucleotide
ugcuuguaguguccggcua

SEQ ID NO: 385657 - RNA, 19 nt, Artificial Sequence
  Description of Artificial Sequence: Synthetic oligonucleotide
gaggauuugacaggccaaa

SEQ ID NO: 385658 - RNA, 19 nt, Artificial Sequence
  Description of Artificial Sequence: Synthetic oligonucleotide
agaaagguucuaauucuuu

SEQ ID NO: 385659 - RNA, 19 nt, Artificial Sequence
  Description of Artificial Sequence: Synthetic oligonucleotide
ugugucccauaauguugca

SEQ ID NO: 385660 - RNA, 19 nt, Artificial Sequence
  Description of Artificial Sequence: Synthetic oligonucleotide
cuuguagaaagguucuaau

SEQ ID NO: 385661 - RNA, 19 nt, Artificial Sequence
  Description of Artificial Sequence: Synthetic oligonucleotide
ugaacgacgccgggugagc

SEQ ID NO: 385662 - RNA, 19 nt, Artificial Sequence
  Description of Artificial Sequence: Synthetic oligonucleotide
ccaaagcuuagcugugcgg

SEQ ID NO: 385663 - RNA, 19 nt, Artificial Sequence
  Description of Artificial Sequence: Synthetic oligonucleotide
caugagcgguccugcagug

SEQ ID NO: 385664 - RNA, 19 nt, Artificial Sequence
  Description of Artificial Sequence: Synthetic oligonucleotide
uucgggagucacugccacc

SEQ ID NO: 385665 - RNA, 19 nt, Artificial Sequence
  Description of Artificial Sequence: Synthetic oligonucleotide
acgauccagagagauggca

SEQ ID NO: 385666 - RNA, 19 nt, Artificial Sequence
  Description of Artificial Sequence: Synthetic oligonucleotide
gaucccuuggucaccagcu

SEQ ID NO: 385667 - RNA, 19 nt, Artificial Sequence
  Description of Artificial Sequence: Synthetic oligonucleotide
agugaacgacgccggguga

SEQ ID NO: 385668 - RNA, 19 nt, Artificial Sequence
  Description of Artificial Sequence: Synthetic oligonucleotide
gugaacgacgccgggugag

SEQ ID NO: 385669 - RNA, 19 nt, Artificial Sequence
  Description of Artificial Sequence: Synthetic oligonucleotide
ggacauuccagaggccacg

SEQ ID NO: 385670 - RNA, 19 nt, Artificial Sequence
  Description of Artificial Sequence: Synthetic oligonucleotide
gcggauagagguguccacg

SEQ ID NO: 385671 - RNA, 19 nt, Artificial Sequence
  Description of Artificial Sequence: Synthetic oligonucleotide
gauucgggagucacugcca

SEQ ID NO: 385672 - RNA, 19 nt, Artificial Sequence
  Description of Artificial Sequence: Synthetic oligonucleotide
ggcaaguccuacugcccgg

SEQ ID NO: 385673 - RNA, 19 nt, Artificial Sequence
  Description of Artificial Sequence: Synthetic oligonucleotide
caaagcuuagcugugcggu

SEQ ID NO: 385674 - RNA, 19 nt, Artificial Sequence
  Description of Artificial Sequence: Synthetic oligonucleotide
uuguaguguccggcuaagc

SEQ ID NO: 385675 - RNA, 19 nt, Artificial Sequence
  Description of Artificial Sequence: Synthetic oligonucleotide
aguguggggacgauccaga

SEQ ID NO: 385676 - RNA, 19 nt, Artificial Sequence
  Description of Artificial Sequence: Synthetic oligonucleotide
ucgcuauagccagcaaacu

SEQ ID NO: 385677 - RNA, 19 nt, Artificial Sequence
  Description of Artificial Sequence: Synthetic oligonucleotide
augcggauagaggugucca

SEQ ID NO: 385678 - RNA, 19 nt, Artificial Sequence
  Description of Artificial Sequence: Synthetic oligonucleotide
guaggcccgaguucuugac

SEQ ID NO: 385679 - RNA, 19 nt, Artificial Sequence
  Description of Artificial Sequence: Synthetic oligonucleotide
aucgccuuccacaggcgag

SEQ ID NO: 385680 - RNA, 19 nt, Artificial Sequence
  Description of Artificial Sequence: Synthetic oligonucleotide
acccuuguagaaagguucu

SEQ ID NO: 385681 - RNA, 19 nt, Artificial Sequence
  Description of Artificial Sequence: Synthetic oligonucleotide
agcgguccugcagugacca

SEQ ID NO: 385682 - RNA, 19 nt, Artificial Sequence
  Description of Artificial Sequence: Synthetic oligonucleotide
guguccggagcccugagcu

SEQ ID NO: 385683 - RNA, 19 nt, Artificial Sequence
  Description of Artificial Sequence: Synthetic oligonucleotide
ugugagcccguggcuaaca

SEQ ID NO: 385684 - RNA, 19 nt, Artificial Sequence
  Description of Artificial Sequence: Synthetic oligonucleotide
gugagcccguggcuaacag

SEQ ID NO: 385685 - RNA, 19 nt, Artificial Sequence
  Description of Artificial Sequence: Synthetic oligonucleotide
gugcgguccugugagcccg

SEQ ID NO: 385686 - RNA, 19 nt, Artificial Sequence
  Description of Artificial Sequence: Synthetic oligonucleotide
caacaccuccucgcuauag

SEQ ID NO: 385687 - RNA, 19 nt, Artificial Sequence
  Description of Artificial Sequence: Synthetic oligonucleotide
gaacgacgccgggugagcc

SEQ ID NO: 385688 - RNA, 19 nt, Artificial Sequence
  Description of Artificial Sequence: Synthetic oligonucleotide
gcuauagccagcaaacugu

SEQ ID NO: 385689 - RNA, 19 nt, Artificial Sequence
  Description of Artificial Sequence: Synthetic oligonucleotide
ucgucucagucggagcaca

SEQ ID NO: 385690 - RNA, 19 nt, Artificial Sequence
  Description of Artificial Sequence: Synthetic oligonucleotide
cagccaaacuguugauguc

SEQ ID NO: 385691 - RNA, 19 nt, Artificial Sequence
  Description of Artificial Sequence: Synthetic oligonucleotide
agacgaguggggucuggau

SEQ ID NO: 385692 - RNA, 19 nt, Artificial Sequence
  Description of Artificial Sequence: Synthetic oligonucleotide
acgacgccgggugagccuc

SEQ ID NO: 385693 - RNA, 19 nt, Artificial Sequence
  Description of Artificial Sequence: Synthetic oligonucleotide
agauagcgcuucucaugga

SEQ ID NO: 385694 - RNA, 19 nt, Artificial Sequence
  Description of Artificial Sequence: Synthetic oligonucleotide
ugcguaugcucugauccuu

SEQ ID NO: 385695 - RNA, 19 nt, Artificial Sequence
  Description of Artificial Sequence: Synthetic oligonucleotide
ggauuugacaggccaaagu

SEQ ID NO: 385696 - RNA, 19 nt, Artificial Sequence
  Description of Artificial Sequence: Synthetic oligonucleotide
aggguccgcacacacucau

SEQ ID NO: 385697 - RNA, 19 nt, Artificial Sequence
  Description of Artificial Sequence: Synthetic oligonucleotide
uccuuguggccugguaacu

SEQ ID NO: 385698 - RNA, 19 nt, Artificial Sequence
  Description of Artificial Sequence: Synthetic oligonucleotide
auugggcccaaggaaccga

SEQ ID NO: 385699 - RNA, 19 nt, Artificial Sequence
  Description of Artificial Sequence: Synthetic oligonucleotide
cucaaacgucuugagacaa

SEQ ID NO: 385700 - RNA, 19 nt, Artificial Sequence
  Description of Artificial Sequence: Synthetic oligonucleotide
cuugacacccagugcaggu

SEQ ID NO: 385701 - RNA, 19 nt, Artificial Sequence
  Description of Artificial Sequence: Synthetic oligonucleotide
ucgccuuccacaggcgagu

SEQ ID NO: 385702 - RNA, 19 nt, Artificial Sequence
  Description of Artificial Sequence: Synthetic oligonucleotide
ccccuuccggaacacaucc

SEQ ID NO: 385703 - RNA, 19 nt, Artificial Sequence
  Description of Artificial Sequence: Synthetic oligonucleotide
ggcuaacagcuugucauug

SEQ ID NO: 385704 - RNA, 19 nt, Artificial Sequence
  Description of Artificial Sequence: Synthetic oligonucleotide
auccagucggcuacagugu

SEQ ID NO: 385705 - RNA, 19 nt, Artificial Sequence
  Description of Artificial Sequence: Synthetic oligonucleotide
caaacgucuugagacaacu

SEQ ID NO: 385706 - RNA, 19 nt, Artificial Sequence
  Description of Artificial Sequence: Synthetic oligonucleotide
augugacacagaagcgcag

SEQ ID NO: 385707 - RNA, 19 nt, Artificial Sequence
  Description of Artificial Sequence: Synthetic oligonucleotide
aggcaauagcacagcagcu

SEQ ID NO: 385708 - RNA, 19 nt, Artificial Sequence
  Description of Artificial Sequence: Synthetic oligonucleotide
ggagcagguugucuaguuc

SEQ ID NO: 385709 - RNA, 19 nt, Artificial Sequence
  Description of Artificial Sequence: Synthetic oligonucleotide
gacgauccagagagauggc

SEQ ID NO: 385710 - RNA, 19 nt, Artificial Sequence
  Description of Artificial Sequence: Synthetic oligonucleotide
cacgucgguggccugaaaa

SEQ ID NO: 385711 - RNA, 19 nt, Artificial Sequence
  Description of Artificial Sequence: Synthetic oligonucleotide
cacggcucacaaaggccac

SEQ ID NO: 385712 - RNA, 19 nt, Artificial Sequence
  Description of Artificial Sequence: Synthetic oligonucleotide
cacaggcgagugacagugc

SEQ ID NO: 385713 - RNA, 19 nt, Artificial Sequence
  Description of Artificial Sequence: Synthetic oligonucleotide
cuuguggccugguaacucu

SEQ ID NO: 385714 - RNA, 19 nt, Artificial Sequence
  Description of Artificial Sequence: Synthetic oligonucleotide
ccguggaggauuugacagg

SEQ ID NO: 385715 - RNA, 19 nt, Artificial Sequence
  Description of Artificial Sequence: Synthetic oligonucleotide
caaguccuacugcccggag

SEQ ID NO: 385716 - RNA, 19 nt, Artificial Sequence
  Description of Artificial Sequence: Synthetic oligonucleotide
guccggagcccugagcuac

SEQ ID NO: 385717 - RNA, 19 nt, Artificial Sequence
  Description of Artificial Sequence: Synthetic oligonucleotide
gugucccauaauguugcac

SEQ ID NO: 385718 - RNA, 19 nt, Artificial Sequence
  Description of Artificial Sequence: Synthetic oligonucleotide
cccgcacacccucauaggc

SEQ ID NO: 385719 - RNA, 19 nt, Artificial Sequence
  Description of Artificial Sequence: Synthetic oligonucleotide
gaaccacuagacagcagcu

SEQ ID NO: 385720 - RNA, 19 nt, Artificial Sequence
  Description of Artificial Sequence: Synthetic oligonucleotide
accccuuccggaacacauc

SEQ ID NO: 385721 - RNA, 19 nt, Artificial Sequence
  Description of Artificial Sequence: Synthetic oligonucleotide
aggcgagugacagugccuu

SEQ ID NO: 385722 - RNA, 19 nt, Artificial Sequence
  Description of Artificial Sequence: Synthetic oligonucleotide
gaaugauucgggagucacu

SEQ ID NO: 385723 - RNA, 19 nt, Artificial Sequence
  Description of Artificial Sequence: Synthetic oligonucleotide
cuggcuguuaccaguacuu

SEQ ID NO: 385724 - RNA, 19 nt, Artificial Sequence
  Description of Artificial Sequence: Synthetic oligonucleotide
agccaccccuuccggaaca

SEQ ID NO: 385725 - RNA, 19 nt, Artificial Sequence
  Description of Artificial Sequence: Synthetic oligonucleotide
cguauagccccaucacagc

SEQ ID NO: 385726 - RNA, 19 nt, Artificial Sequence
  Description of Artificial Sequence: Synthetic oligonucleotide
agagguguccacggcugga

SEQ ID NO: 385727 - RNA, 19 nt, Artificial Sequence
  Description of Artificial Sequence: Synthetic oligonucleotide
gcuucauguugugccacag

SEQ ID NO: 385728 - RNA, 19 nt, Artificial Sequence
  Description of Artificial Sequence: Synthetic oligonucleotide
caaggcccaaagcuuagcu

SEQ ID NO: 385729 - RNA, 19 nt, Artificial Sequence
  Description of Artificial Sequence: Synthetic oligonucleotide
gcuaagccgcugaaagugc

SEQ ID NO: 385730 - RNA, 19 nt, Artificial Sequence
  Description of Artificial Sequence: Synthetic oligonucleotide
gagccaccccuuccggaac

SEQ ID NO: 385731 - RNA, 19 nt, Artificial Sequence
  Description of Artificial Sequence: Synthetic oligonucleotide
ggacaaugucugugugacc

SEQ ID NO: 385732 - RNA, 19 nt, Artificial Sequence
  Description of Artificial Sequence: Synthetic oligonucleotide
uccggcuaagccgcugaaa

SEQ ID NO: 385733 - RNA, 19 nt, Artificial Sequence
  Description of Artificial Sequence: Synthetic oligonucleotide
uguccggagcccugagcua

SEQ ID NO: 385734 - RNA, 19 nt, Artificial Sequence
  Description of Artificial Sequence: Synthetic oligonucleotide
cugagcaugguauggccau

SEQ ID NO: 385735 - RNA, 19 nt, Artificial Sequence
  Description of Artificial Sequence: Synthetic oligonucleotide
cacaacaaugugggaguca

SEQ ID NO: 385736 - RNA, 19 nt, Artificial Sequence
  Description of Artificial Sequence: Synthetic oligonucleotide
cucgucucagucggagcac

SEQ ID NO: 385737 - RNA, 19 nt, Artificial Sequence
  Description of Artificial Sequence: Synthetic oligonucleotide
gcuguguguaucgccuucc

SEQ ID NO: 385738 - RNA, 19 nt, Artificial Sequence
  Description of Artificial Sequence: Synthetic oligonucleotide
gcuuguaguguccggcuaa

SEQ ID NO: 385739 - RNA, 19 nt, Artificial Sequence
  Description of Artificial Sequence: Synthetic oligonucleotide
cuguguguaucgccuucca

SEQ ID NO: 385740 - RNA, 19 nt, Artificial Sequence
  Description of Artificial Sequence: Synthetic oligonucleotide
ccuggauaacagucagcac

SEQ ID NO: 385741 - RNA, 19 nt, Artificial Sequence
  Description of Artificial Sequence: Synthetic oligonucleotide
gcccgaguucuugacaccc

SEQ ID NO: 385742 - RNA, 19 nt, Artificial Sequence
  Description of Artificial Sequence: Synthetic oligonucleotide
ccucaaacgucuugagaca

SEQ ID NO: 385743 - RNA, 19 nt, Artificial Sequence
  Description of Artificial Sequence: Synthetic oligonucleotide
ugcccacgcugugugugug

SEQ ID NO: 385744 - RNA, 19 nt, Artificial Sequence
  Description of Artificial Sequence: Synthetic oligonucleotide
gauggugcccacgcugugu

SEQ ID NO: 385745 - RNA, 19 nt, Artificial Sequence
  Description of Artificial Sequence: Synthetic oligonucleotide
gaguggcgacagcuucaug

SEQ ID NO: 385746 - RNA, 19 nt, Artificial Sequence
  Description of Artificial Sequence: Synthetic oligonucleotide
ggccaccaagugaacgacg

SEQ ID NO: 385747 - RNA, 19 nt, Artificial Sequence
  Description of Artificial Sequence: Synthetic oligonucleotide
agcuaacaguguagaggug

SEQ ID NO: 385748 - RNA, 19 nt, Artificial Sequence
  Description of Artificial Sequence: Synthetic oligonucleotide
ccuacugcccggagauagc

SEQ ID NO: 385749 - RNA, 19 nt, Artificial Sequence
  Description of Artificial Sequence: Synthetic oligonucleotide
gcuacacaggucaccuggc

SEQ ID NO: 385750 - RNA, 19 nt, Artificial Sequence
  Description of Artificial Sequence: Synthetic oligonucleotide
gccaccggugauggcaugg

SEQ ID NO: 385751 - RNA, 19 nt, Artificial Sequence
  Description of Artificial Sequence: Synthetic oligonucleotide
cuaggauguugacuuuggu

SEQ ID NO: 385752 - RNA, 19 nt, Artificial Sequence
  Description of Artificial Sequence: Synthetic oligonucleotide
ccaggcuccgaagcaaagc

SEQ ID NO: 385753 - RNA, 19 nt, Artificial Sequence
  Description of Artificial Sequence: Synthetic oligonucleotide
gcaguaauguccucuugau

SEQ ID NO: 385754 - RNA, 19 nt, Artificial Sequence
  Description of Artificial Sequence: Synthetic oligonucleotide
ggauggaaggccaccaagu

SEQ ID NO: 385755 - RNA, 19 nt, Artificial Sequence
  Description of Artificial Sequence: Synthetic oligonucleotide
ccagucggcuacaguguag

SEQ ID NO: 385756 - RNA, 19 nt, Artificial Sequence
  Description of Artificial Sequence: Synthetic oligonucleotide
cuccucgcuauagccagca

SEQ ID NO: 385757 - RNA, 19 nt, Artificial Sequence
  Description of Artificial Sequence: Synthetic oligonucleotide
accgaacauccaacaccuc

SEQ ID NO: 385758 - RNA, 19 nt, Artificial Sequence
  Description of Artificial Sequence: Synthetic oligonucleotide
ccggagauagcgcuucuca

SEQ ID NO: 385759 - RNA, 19 nt, Artificial Sequence
  Description of Artificial Sequence: Synthetic oligonucleotide
ggaggauuugacaggccaa

SEQ ID NO: 385760 - RNA, 19 nt, Artificial Sequence
  Description of Artificial Sequence: Synthetic oligonucleotide
caccggugauggcaugguc

SEQ ID NO: 385761 - RNA, 19 nt, Artificial Sequence
  Description of Artificial Sequence: Synthetic oligonucleotide
caccaggaaagauucuuuu

SEQ ID NO: 385762 - RNA, 19 nt, Artificial Sequence
  Description of Artificial Sequence: Synthetic oligonucleotide
ccuaggccuggcauuugug

SEQ ID NO: 385763 - RNA, 19 nt, Artificial Sequence
  Description of Artificial Sequence: Synthetic oligonucleotide
ggaggaucccuuggucacc

SEQ ID NO: 385764 - RNA, 19 nt, Artificial Sequence
  Description of Artificial Sequence: Synthetic oligonucleotide
cagucggagcacaguaucu

SEQ ID NO: 385765 - RNA, 19 nt, Artificial Sequence
  Description of Artificial Sequence: Synthetic oligonucleotide
ggaaugugccucauagagu

SEQ ID NO: 385766 - RNA, 19 nt, Artificial Sequence
  Description of Artificial Sequence: Synthetic oligonucleotide
gcucaguauagggcagcag

SEQ ID NO: 385767 - RNA, 19 nt, Artificial Sequence
  Description of Artificial Sequence: Synthetic oligonucleotide
ccucacuaaaggacagaga

SEQ ID NO: 385768 - RNA, 19 nt, Artificial Sequence
  Description of Artificial Sequence: Synthetic oligonucleotide
ccucgcuauagccagcaaa

SEQ ID NO: 385769 - RNA, 19 nt, Artificial Sequence
  Description of Artificial Sequence: Synthetic oligonucleotide
guggcgacagcuucauguu

SEQ ID NO: 385770 - RNA, 19 nt, Artificial Sequence
  Description of Artificial Sequence: Synthetic oligonucleotide
agccucgaagguggugugu

SEQ ID NO: 385771 - RNA, 19 nt, Artificial Sequence
  Description of Artificial Sequence: Synthetic oligonucleotide
gccaggguacaguggguca

SEQ ID NO: 385772 - RNA, 19 nt, Artificial Sequence
  Description of Artificial Sequence: Synthetic oligonucleotide
cucagucggagcacaguau

SEQ ID NO: 385773 - RNA, 19 nt, Artificial Sequence
  Description of Artificial Sequence: Synthetic oligonucleotide
gcccaaggaaccgaacauc

SEQ ID NO: 385774 - RNA, 19 nt, Artificial Sequence
  Description of Artificial Sequence: Synthetic oligonucleotide
ggcccgaguucuugacacc

SEQ ID NO: 385775 - RNA, 19 nt, Artificial Sequence
  Description of Artificial Sequence: Synthetic oligonucleotide
caccccuuccggaacacau

SEQ ID NO: 385776 - RNA, 19 nt, Artificial Sequence
  Description of Artificial Sequence: Synthetic oligonucleotide
caguccgguccagcugugc

SEQ ID NO: 385777 - RNA, 19 nt, Artificial Sequence
  Description of Artificial Sequence: Synthetic oligonucleotide
gcuggcuguuaccaguacu

SEQ ID NO: 385778 - RNA, 19 nt, Artificial Sequence
  Description of Artificial Sequence: Synthetic oligonucleotide
ccgaagcaaagccccugag

SEQ ID NO: 385779 - RNA, 19 nt, Artificial Sequence
  Description of Artificial Sequence: Synthetic oligonucleotide
ccuggcauuuguggcuggg

SEQ ID NO: 385780 - RNA, 19 nt, Artificial Sequence
  Description of Artificial Sequence: Synthetic oligonucleotide
ccacacaugagcgguccug

SEQ ID NO: 385781 - RNA, 19 nt, Artificial Sequence
  Description of Artificial Sequence: Synthetic oligonucleotide
ggugguggccaguccgguc

SEQ ID NO: 385782 - RNA, 19 nt, Artificial Sequence
  Description of Artificial Sequence: Synthetic oligonucleotide
ccccgcacacccucauagg

SEQ ID NO: 385783 - RNA, 19 nt, Artificial Sequence
  Description of Artificial Sequence: Synthetic oligonucleotide
ggcccaaagcuuagcugug

SEQ ID NO: 385784 - RNA, 19 nt, Artificial Sequence
  Description of Artificial Sequence: Synthetic oligonucleotide
caguccugacugccuguca

SEQ ID NO: 385785 - RNA, 19 nt, Artificial Sequence
  Description of Artificial Sequence: Synthetic oligonucleotide
gccaguccgguccagcugu

SEQ ID NO: 385786 - RNA, 19 nt, Artificial Sequence
  Description of Artificial Sequence: Synthetic oligonucleotide
ggcccaaggaaccgaacau

SEQ ID NO: 385787 - RNA, 19 nt, Artificial Sequence
  Description of Artificial Sequence: Synthetic oligonucleotide
cagcuucuaugcucucaaa

SEQ ID NO: 385788 - RNA, 19 nt, Artificial Sequence
  Description of Artificial Sequence: Synthetic oligonucleotide
gggaguggcgacagcuuca

SEQ ID NO: 385789 - RNA, 19 nt, Artificial Sequence
  Description of Artificial Sequence: Synthetic oligonucleotide
guguccggcuaagccgcug

SEQ ID NO: 385790 - RNA, 19 nt, Artificial Sequence
  Description of Artificial Sequence: Synthetic oligonucleotide
gucucagucggagcacagu

SEQ ID NO: 385791 - RNA, 19 nt, Artificial Sequence
  Description of Artificial Sequence: Synthetic oligonucleotide
gggcuguuagaagccacaa

SEQ ID NO: 385792 - RNA, 19 nt, Artificial Sequence
  Description of Artificial Sequence: Synthetic oligonucleotide
ggggacgauccagagagau

SEQ ID NO: 385793 - RNA, 19 nt, Artificial Sequence
  Description of Artificial Sequence: Synthetic oligonucleotide
guccggcuaagccgcugaa

SEQ ID NO: 385794 - RNA, 19 nt, Artificial Sequence
  Description of Artificial Sequence: Synthetic oligonucleotide
cgucucagucggagcacag

SEQ ID NO: 385795 - RNA, 19 nt, Artificial Sequence
  Description of Artificial Sequence: Synthetic oligonucleotide
gcacuguagugugcaguca

SEQ ID NO: 385796 - RNA, 19 nt, Artificial Sequence
  Description of Artificial Sequence: Synthetic oligonucleotide
ccagaugcguaugcucuga

SEQ ID NO: 385797 - RNA, 19 nt, Artificial Sequence
  Description of Artificial Sequence: Synthetic oligonucleotide
cacacacggaggaucccuu

SEQ ID NO: 385798 - RNA, 19 nt, Artificial Sequence
  Description of Artificial Sequence: Synthetic oligonucleotide
cuggcauuuguggcugggu

SEQ ID NO: 385799 - RNA, 19 nt, Artificial Sequence
  Description of Artificial Sequence: Synthetic oligonucleotide
gacgccgggugagccucga

SEQ ID NO: 385800 - RNA, 19 nt, Artificial Sequence
  Description of Artificial Sequence: Synthetic oligonucleotide
ccacggcuggaggagaaga

SEQ ID NO: 385801 - RNA, 19 nt, Artificial Sequence
  Description of Artificial Sequence: Synthetic oligonucleotide
cagaugcguaugcucugau

SEQ ID NO: 385802 - RNA, 19 nt, Artificial Sequence
  Description of Artificial Sequence: Synthetic oligonucleotide
cgguccugugagcccgugg

SEQ ID NO: 385803 - RNA, 19 nt, Artificial Sequence
  Description of Artificial Sequence: Synthetic oligonucleotide
gcaaagccccugaggccac

SEQ ID NO: 385804 - RNA, 19 nt, Artificial Sequence
  Description of Artificial Sequence: Synthetic oligonucleotide
caacaaugugggagucauu

SEQ ID NO: 385805 - RNA, 19 nt, Artificial Sequence
  Description of Artificial Sequence: Synthetic oligonucleotide
acgccgggugagccucgaa

SEQ ID NO: 385806 - RNA, 19 nt, Artificial Sequence
  Description of Artificial Sequence: Synthetic oligonucleotide
ggaguggcgacagcuucau

SEQ ID NO: 385807 - RNA, 19 nt, Artificial Sequence
  Description of Artificial Sequence: Synthetic oligonucleotide
gggagucauugggcccaag

SEQ ID NO: 385808 - RNA, 19 nt, Artificial Sequence
  Description of Artificial Sequence: Synthetic oligonucleotide
cccggagauagcgcuucuc

SEQ ID NO: 385809 - RNA, 19 nt, Artificial Sequence
  Description of Artificial Sequence: Synthetic oligonucleotide
cccagaccuuguccucgug

SEQ ID NO: 385810 - RNA, 19 nt, Artificial Sequence
  Description of Artificial Sequence: Synthetic oligonucleotide
ggauaacagucagcacagu

SEQ ID NO: 385811 - RNA, 19 nt, Artificial Sequence
  Description of Artificial Sequence: Synthetic oligonucleotide
ccguggcuaacagcuuguc

SEQ ID NO: 385812 - RNA, 19 nt, Artificial Sequence
  Description of Artificial Sequence: Synthetic oligonucleotide
cccguggcuaacagcuugu

SEQ ID NO: 385813 - RNA, 19 nt, Artificial Sequence
  Description of Artificial Sequence: Synthetic oligonucleotide
cccuaggccuggcauuugu

SEQ ID NO: 385814 - RNA, 19 nt, Artificial Sequence
  Description of Artificial Sequence: Synthetic oligonucleotide
ccgggugagccucgaaggu

SEQ ID NO: 385815 - RNA, 19 nt, Artificial Sequence
  Description of Artificial Sequence: Synthetic oligonucleotide
cagacacguauagccccau

SEQ ID NO: 385816 - RNA, 19 nt, Artificial Sequence
  Description of Artificial Sequence: Synthetic oligonucleotide
gcccuaggccuggcauuug

SEQ ID NO: 385817 - RNA, 19 nt, Artificial Sequence
  Description of Artificial Sequence: Synthetic oligonucleotide
gccacgucgguggccugaa

SEQ ID NO: 385818 - RNA, 19 nt, Artificial Sequence
  Description of Artificial Sequence: Synthetic oligonucleotide
gcccacgcugugugugugu

SEQ ID NO: 385819 - RNA, 19 nt, Artificial Sequence
  Description of Artificial Sequence: Synthetic oligonucleotide
ccaccccuuccggaacaca

SEQ ID NO: 385820 - RNA, 19 nt, Artificial Sequence
  Description of Artificial Sequence: Synthetic oligonucleotide
ccacgucgguggccugaaa

SEQ ID NO: 385821 - RNA, 19 nt, Artificial Sequence
  Description of Artificial Sequence: Synthetic oligonucleotide
ccuucucgccaggcccauu

SEQ ID NO: 385822 - RNA, 19 nt, Artificial Sequence
  Description of Artificial Sequence: Synthetic oligonucleotide
aacacacacacacacacac

SEQ ID NO: 385823 - RNA, 19 nt, Artificial Sequence
  Description of Artificial Sequence: Synthetic oligonucleotide
aauaagaaauacuaccaug

SEQ ID NO: 385824 - RNA, 19 nt, Artificial Sequence
  Description of Artificial Sequence: Synthetic oligonucleotide
agacacaacacacacacac

SEQ ID NO: 385825 - RNA, 19 nt, Artificial Sequence
  Description of Artificial Sequence: Synthetic oligonucleotide
uacauagacacguauuugg

SEQ ID NO: 385826 - RNA, 19 nt, Artificial Sequence
  Description of Artificial Sequence: Synthetic oligonucleotide
acaacacacacacacacac

SEQ ID NO: 385827 - RNA, 19 nt, Artificial Sequence
  Description of Artificial Sequence: Synthetic oligonucleotide
gaccgauacacguagaacc

SEQ ID NO: 385828 - RNA, 19 nt, Artificial Sequence
  Description of Artificial Sequence: Synthetic oligonucleotide
aaauaagaaauacuaccau

SEQ ID NO: 385829 - RNA, 19 nt, Artificial Sequence
  Description of Artificial Sequence: Synthetic oligonucleotide
acacaacacacacacacac

SEQ ID NO: 385830 - RNA, 19 nt, Artificial Sequence
  Description of Artificial Sequence: Synthetic oligonucleotide
aagcacaccagguagggca

SEQ ID NO: 385831 - RNA, 19 nt, Artificial Sequence
  Description of Artificial Sequence: Synthetic oligonucleotide
acaaaaucuggguccgugc

SEQ ID NO: 385832 - RNA, 19 nt, Artificial Sequence
  Description of Artificial Sequence: Synthetic oligonucleotide
augagcuugaccauggaac

SEQ ID NO: 385833 - RNA, 19 nt, Artificial Sequence
  Description of Artificial Sequence: Synthetic oligonucleotide
uuuuacgugccuccgagcu

SEQ ID NO: 385834 - RNA, 19 nt, Artificial Sequence
  Description of Artificial Sequence: Synthetic oligonucleotide
cacuaugcccauaagggcg

SEQ ID NO: 385835 - RNA, 19 nt, Artificial Sequence
  Description of Artificial Sequence: Synthetic oligonucleotide
ucuacauagacacguauuu

SEQ ID NO: 385836 - RNA, 19 nt, Artificial Sequence
  Description of Artificial Sequence: Synthetic oligonucleotide
  modified_base (16)..(16): a, c, u, g, unknown or other
agagugcggaaguucnccc

SEQ ID NO: 385837 - RNA, 19 nt, Artificial Sequence
  Description of Artificial Sequence: Synthetic oligonucleotide
auuucggcugccuuaggac

SEQ ID NO: 385838 - RNA, 19 nt, Artificial Sequence
  Description of Artificial Sequence: Synthetic oligonucleotide
uccaccaacggacaagcag

SEQ ID NO: 385839 - RNA, 19 nt, Artificial Sequence
  Description of Artificial Sequence: Synthetic oligonucleotide
ucgaagacaggccacuugc

SEQ ID NO: 385840 - RNA, 19 nt, Artificial Sequence
  Description of Artificial Sequence: Synthetic oligonucleotide
aaauacuaccaugaagucu

SEQ ID NO: 385841 - RNA, 19 nt, Artificial Sequence
  Description of Artificial Sequence: Synthetic oligonucleotide
aagcccguggcccacacag

SEQ ID NO: 385842 - RNA, 19 nt, Artificial Sequence
  Description of Artificial Sequence: Synthetic oligonucleotide
uguguauugaaagggacac

SEQ ID NO: 385843 - RNA, 19 nt, Artificial Sequence
  Description of Artificial Sequence: Synthetic oligonucleotide
ugggccauucgaaagaaga

SEQ ID NO: 385844 - RNA, 19 nt, Artificial Sequence
  Description of Artificial Sequence: Synthetic oligonucleotide
uguauugaaagggacacuc

SEQ ID NO: 385845 - RNA, 19 nt, Artificial Sequence
  Description of Artificial Sequence: Synthetic oligonucleotide
aagaugacgaagacgacug

SEQ ID NO: 385846 - RNA, 19 nt, Artificial Sequence
  Description of Artificial Sequence: Synthetic oligonucleotide
agcgcuuuauuucggcugc

SEQ ID NO: 385847 - RNA, 19 nt, Artificial Sequence
  Description of Artificial Sequence: Synthetic oligonucleotide
aagaggcgcccucacaaac

SEQ ID NO: 385848 - RNA, 19 nt, Artificial Sequence
  Description of Artificial Sequence: Synthetic oligonucleotide
cguagaaccaacaaaagag

SEQ ID NO: 385849 - RNA, 19 nt, Artificial Sequence
  Description of Artificial Sequence: Synthetic oligonucleotide
uucugaccgauacacguag

SEQ ID NO: 385850 - RNA, 19 nt, Artificial Sequence
  Description of Artificial Sequence: Synthetic oligonucleotide
ugugagccacaccagaaug

SEQ ID NO: 385851 - RNA, 19 nt, Artificial Sequence
  Description of Artificial Sequence: Synthetic oligonucleotide
auagacacguauuuggaaa

SEQ ID NO: 385852 - RNA, 19 nt, Artificial Sequence
  Description of Artificial Sequence: Synthetic oligonucleotide
cuaaagagagccacccucc

SEQ ID NO: 385853 - RNA, 19 nt, Artificial Sequence
  Description of Artificial Sequence: Synthetic oligonucleotide
uacacguagaaccaacaaa

SEQ ID NO: 385854 - RNA, 19 nt, Artificial Sequence
  Description of Artificial Sequence: Synthetic oligonucleotide
cacacacacacacacacgc

SEQ ID NO: 385855 - RNA, 19 nt, Artificial Sequence
  Description of Artificial Sequence: Synthetic oligonucleotide
uggugcugaacucaaugag

SEQ ID NO: 385856 - RNA, 19 nt, Artificial Sequence
  Description of Artificial Sequence: Synthetic oligonucleotide
aaugggcacgguaaaguac

SEQ ID NO: 385857 - RNA, 19 nt, Artificial Sequence
  Description of Artificial Sequence: Synthetic oligonucleotide
guagacguagagcaggcag

SEQ ID NO: 385858 - RNA, 19 nt, Artificial Sequence
  Description of Artificial Sequence: Synthetic oligonucleotide
aagcgcuuuauuucggcug

SEQ ID NO: 385859 - RNA, 19 nt, Artificial Sequence
  Description of Artificial Sequence: Synthetic oligonucleotide
aaggauuaccacugucaag

SEQ ID NO: 385860 - RNA, 19 nt, Artificial Sequence
  Description of Artificial Sequence: Synthetic oligonucleotide
cacgcuacagauuacugug

SEQ ID NO: 385861 - RNA, 19 nt, Artificial Sequence
  Description of Artificial Sequence: Synthetic oligonucleotide
gaagggacaacaauccagc

SEQ ID NO: 385862 - RNA, 19 nt, Artificial Sequence
  Description of Artificial Sequence: Synthetic oligonucleotide
agaccggagagcucuaagg

SEQ ID NO: 385863 - RNA, 19 nt, Artificial Sequence
  Description of Artificial Sequence: Synthetic oligonucleotide
gagacuccuaucuguaaag

SEQ ID NO: 385864 - RNA, 19 nt, Artificial Sequence
  Description of Artificial Sequence: Synthetic oligonucleotide
cugcacuaugcccauaagg

SEQ ID NO: 385865 - RNA, 19 nt, Artificial Sequence
  Description of Artificial Sequence: Synthetic oligonucleotide
uuacgugccuccgagcugg

SEQ ID NO: 385866 - RNA, 19 nt, Artificial Sequence
  Description of Artificial Sequence: Synthetic oligonucleotide
cacacacacacacacacac

SEQ ID NO: 385867 - RNA, 19 nt, Artificial Sequence
  Description of Artificial Sequence: Synthetic oligonucleotide
acguagaaccaacaaaaga

SEQ ID NO: 385868 - RNA, 19 nt, Artificial Sequence
  Description of Artificial Sequence: Synthetic oligonucleotide
  modified_base (7)..(7): a, c, u, g, unknown or other
aaguucncccaagcuuugc

SEQ ID NO: 385869 - RNA, 19 nt, Artificial Sequence
  Description of Artificial Sequence: Synthetic oligonucleotide
gcagacacaacacacacac

SEQ ID NO: 385870 - RNA, 19 nt, Artificial Sequence
  Description of Artificial Sequence: Synthetic oligonucleotide
ggaaccaucgggcaaacug

SEQ ID NO: 385871 - RNA, 19 nt, Artificial Sequence
  Description of Artificial Sequence: Synthetic oligonucleotide
guagaaccaacaaaagagc

SEQ ID NO: 385872 - RNA, 19 nt, Artificial Sequence
  Description of Artificial Sequence: Synthetic oligonucleotide
agacagcgcauccagucac

SEQ ID NO: 385873 - RNA, 19 nt, Artificial Sequence
  Description of Artificial Sequence: Synthetic oligonucleotide
guagaagagguagacguag

SEQ ID NO: 385874 - RNA, 19 nt, Artificial Sequence
  Description of Artificial Sequence: Synthetic oligonucleotide
auugugagugaagauagca

SEQ ID NO: 385875 - RNA, 19 nt, Artificial Sequence
  Description of Artificial Sequence: Synthetic oligonucleotide
ucacaaacucccuaccacu

SEQ ID NO: 385876 - RNA, 19 nt, Artificial Sequence
  Description of Artificial Sequence: Synthetic oligonucleotide
gacuccuaucuguaaagug

SEQ ID NO: 385877 - RNA, 19 nt, Artificial Sequence
  Description of Artificial Sequence: Synthetic oligonucleotide
gaaauacuaccaugaaguc

SEQ ID NO: 385878 - RNA, 19 nt, Artificial Sequence
  Description of Artificial Sequence: Synthetic oligonucleotide
augcccauaagggcgaggc

SEQ ID NO: 385879 - RNA, 19 nt, Artificial Sequence
  Description of Artificial Sequence: Synthetic oligonucleotide
uaagugcccuugaaguucc

SEQ ID NO: 385880 - RNA, 19 nt, Artificial Sequence
  Description of Artificial Sequence: Synthetic oligonucleotide
aagauagcaugcaauuucu

SEQ ID NO: 385881 - RNA, 19 nt, Artificial Sequence
  Description of Artificial Sequence: Synthetic oligonucleotide
  modified_base (4)..(4): a, c, u, g, unknown or other
uucncccaagcuuugcugu

SEQ ID NO: 385882 - RNA, 19 nt, Artificial Sequence
  Description of Artificial Sequence: Synthetic oligonucleotide
gaugacugccaacucugag

SEQ ID NO: 385883 - RNA, 19 nt, Artificial Sequence
  Description of Artificial Sequence: Synthetic oligonucleotide
ugaagcacaccagguaggg

SEQ ID NO: 385884 - RNA, 19 nt, Artificial Sequence
  Description of Artificial Sequence: Synthetic oligonucleotide
aaauggcaugcccacugug

SEQ ID NO: 385885 - RNA, 19 nt, Artificial Sequence
  Description of Artificial Sequence: Synthetic oligonucleotide
acuugaagcggccugucca

SEQ ID NO: 385886 - RNA, 19 nt, Artificial Sequence
  Description of Artificial Sequence: Synthetic oligonucleotide
aacugcacuaugcccauaa

SEQ ID NO: 385887 - RNA, 19 nt, Artificial Sequence
  Description of Artificial Sequence: Synthetic oligonucleotide
ugggaucuacccacaagag

SEQ ID NO: 385888 - RNA, 19 nt, Artificial Sequence
  Description of Artificial Sequence: Synthetic oligonucleotide
cuugagcucgaagacaggc

SEQ ID NO: 385889 - RNA, 19 nt, Artificial Sequence
  Description of Artificial Sequence: Synthetic oligonucleotide
ugacuaugaucuuggugag

SEQ ID NO: 385890 - RNA, 19 nt, Artificial Sequence
  Description of Artificial Sequence: Synthetic oligonucleotide
gauguguugccggagcugc

SEQ ID NO: 385891 - RNA, 19 nt, Artificial Sequence
  Description of Artificial Sequence: Synthetic oligonucleotide
uuggccuugguccaccaac

SEQ ID NO: 385892 - RNA, 19 nt, Artificial Sequence
  Description of Artificial Sequence: Synthetic oligonucleotide
gaaccaucgggcaaacugc

SEQ ID NO: 385893 - RNA, 19 nt, Artificial Sequence
  Description of Artificial Sequence: Synthetic oligonucleotide
agcucacaccacaugaagc

SEQ ID NO: 385894 - RNA, 19 nt, Artificial Sequence
  Description of Artificial Sequence: Synthetic oligonucleotide
aaggauuagcagcaaccaa

SEQ ID NO: 385895 - RNA, 19 nt, Artificial Sequence
  Description of Artificial Sequence: Synthetic oligonucleotide
uaccuucugaccgauacac

SEQ ID NO: 385896 - RNA, 19 nt, Artificial Sequence
  Description of Artificial Sequence: Synthetic oligonucleotide
uaaaguacgucuggccaag

SEQ ID NO: 385897 - RNA, 19 nt, Artificial Sequence
  Description of Artificial Sequence: Synthetic oligonucleotide
gaagaagucgaaggcaaac

SEQ ID NO: 385898 - RNA, 19 nt, Artificial Sequence
  Description of Artificial Sequence: Synthetic oligonucleotide
acgguaaaguacgucuggc

SEQ ID NO: 385899 - RNA, 19 nt, Artificial Sequence
  Description of Artificial Sequence: Synthetic oligonucleotide
uagcggucaaacuucuuga

SEQ ID NO: 385900 - RNA, 19 nt, Artificial Sequence
  Description of Artificial Sequence: Synthetic oligonucleotide
acguagagcaggcagggga

SEQ ID NO: 385901 - RNA, 19 nt, Artificial Sequence
  Description of Artificial Sequence: Synthetic oligonucleotide
auuaccacugucaaggauu

SEQ ID NO: 385902 - RNA, 19 nt, Artificial Sequence
  Description of Artificial Sequence: Synthetic oligonucleotide
guagccaauagaggcacgg

SEQ ID NO: 385903 - RNA, 19 nt, Artificial Sequence
  Description of Artificial Sequence: Synthetic oligonucleotide
agggacuugaccacucccc

SEQ ID NO: 385904 - RNA, 19 nt, Artificial Sequence
  Description of Artificial Sequence: Synthetic oligonucleotide
uagcaugcaauuucuugac

SEQ ID NO: 385905 - RNA, 19 nt, Artificial Sequence
  Description of Artificial Sequence: Synthetic oligonucleotide
uagacacguauuuggaaaa

SEQ ID NO: 385906 - RNA, 19 nt, Artificial Sequence
  Description of Artificial Sequence: Synthetic oligonucleotide
auaggguuccaggugguuc

SEQ ID NO: 385907 - RNA, 19 nt, Artificial Sequence
  Description of Artificial Sequence: Synthetic oligonucleotide
gguaaaguacgucuggcca

SEQ ID NO: 385908 - RNA, 19 nt, Artificial Sequence
  Description of Artificial Sequence: Synthetic oligonucleotide
uucagccuguuccacgucu

SEQ ID NO: 385909 - RNA, 19 nt, Artificial Sequence
  Description of Artificial Sequence: Synthetic oligonucleotide
cacguagaaccaacaaaag

SEQ ID NO: 385910 - RNA, 19 nt, Artificial Sequence
  Description of Artificial Sequence: Synthetic oligonucleotide
gauuacuguggugacuaug

SEQ ID NO: 385911 - RNA, 19 nt, Artificial Sequence
  Description of Artificial Sequence: Synthetic oligonucleotide
cauggggagggccucacag

SEQ ID NO: 385912 - RNA, 19 nt, Artificial Sequence
  Description of Artificial Sequence: Synthetic oligonucleotide
ccaacaaaagagcaggaug

SEQ ID NO: 385913 - RNA, 19 nt, Artificial Sequence
  Description of Artificial Sequence: Synthetic oligonucleotide
uuuacgugccuccgagcug

SEQ ID NO: 385914 - RNA, 19 nt, Artificial Sequence
  Description of Artificial Sequence: Synthetic oligonucleotide
cacgguaaaguacgucugg

SEQ ID NO: 385915 - RNA, 19 nt, Artificial Sequence
  Description of Artificial Sequence: Synthetic oligonucleotide
gugacaggaaccaucgggc

SEQ ID NO: 385916 - RNA, 19 nt, Artificial Sequence
  Description of Artificial Sequence: Synthetic oligonucleotide
agaugcagaagaggcgccc

SEQ ID NO: 385917 - RNA, 19 nt, Artificial Sequence
  Description of Artificial Sequence: Synthetic oligonucleotide
uggccaaugggcacgguaa

SEQ ID NO: 385918 - RNA, 19 nt, Artificial Sequence
  Description of Artificial Sequence: Synthetic oligonucleotide
guuuggacaugcuauccuc

SEQ ID NO: 385919 - RNA, 19 nt, Artificial Sequence
  Description of Artificial Sequence: Synthetic oligonucleotide
  modified_base (6)..(6): a, c, u, g, unknown or other
aguucncccaagcuuugcu

SEQ ID NO: 385920 - RNA, 19 nt, Artificial Sequence
  Description of Artificial Sequence: Synthetic oligonucleotide
  modified_base (5)..(5): a, c, u, g, unknown or other
guucncccaagcuuugcug

SEQ ID NO: 385921 - RNA, 19 nt, Artificial Sequence
  Description of Artificial Sequence: Synthetic oligonucleotide
ccaccaacggacaagcagg

SEQ ID NO: 385922 - RNA, 19 nt, Artificial Sequence
  Description of Artificial Sequence: Synthetic oligonucleotide
gucacucggacauacuuga

SEQ ID NO: 385923 - RNA, 19 nt, Artificial Sequence
  Description of Artificial Sequence: Synthetic oligonucleotide
auacacguagaaccaacaa

SEQ ID NO: 385924 - RNA, 19 nt, Artificial Sequence
  Description of Artificial Sequence: Synthetic oligonucleotide
aaaguacgucuggccaagc

SEQ ID NO: 385925 - RNA, 19 nt, Artificial Sequence
  Description of Artificial Sequence: Synthetic oligonucleotide
cucaccauacagacagcgc

SEQ ID NO: 385926 - RNA, 19 nt, Artificial Sequence
  Description of Artificial Sequence: Synthetic oligonucleotide
acaagcaggggcacgcuac

SEQ ID NO: 385927 - RNA, 19 nt, Artificial Sequence
  Description of Artificial Sequence: Synthetic oligonucleotide
agugaagauagcaugcaau

SEQ ID NO: 385928 - RNA, 19 nt, Artificial Sequence
  Description of Artificial Sequence: Synthetic oligonucleotide
agccgaaguugacuucagc

SEQ ID NO: 385929 - RNA, 19 nt, Artificial Sequence
  Description of Artificial Sequence: Synthetic oligonucleotide
caagcuugccuguguauug

SEQ ID NO: 385930 - RNA, 19 nt, Artificial Sequence
  Description of Artificial Sequence: Synthetic oligonucleotide
  modified_base (17)..(17): a, c, u, g, unknown or other
gagagugcggaaguucncc

SEQ ID NO: 385931 - RNA, 19 nt, Artificial Sequence
  Description of Artificial Sequence: Synthetic oligonucleotide
agacguagagcaggcaggg

SEQ ID NO: 385932 - RNA, 19 nt, Artificial Sequence
  Description of Artificial Sequence: Synthetic oligonucleotide
  modified_base (14)..(14): a, c, u, g, unknown or other
agugcggaaguucncccaa

SEQ ID NO: 385933 - RNA, 19 nt, Artificial Sequence
  Description of Artificial Sequence: Synthetic oligonucleotide
gacaugcuauccucaagca

SEQ ID NO: 385934 - RNA, 19 nt, Artificial Sequence
  Description of Artificial Sequence: Synthetic oligonucleotide
cugguauagggcucagcag

SEQ ID NO: 385935 - RNA, 19 nt, Artificial Sequence
  Description of Artificial Sequence: Synthetic oligonucleotide
agucuacauagacacguau

SEQ ID NO: 385936 - RNA, 19 nt, Artificial Sequence
  Description of Artificial Sequence: Synthetic oligonucleotide
cacacacacacacacgcuc

SEQ ID NO: 385937 - RNA, 19 nt, Artificial Sequence
  Description of Artificial Sequence: Synthetic oligonucleotide
uacuugaagcggccugucc

SEQ ID NO: 385938 - RNA, 19 nt, Artificial Sequence
  Description of Artificial Sequence: Synthetic oligonucleotide
gaagugggcauaggguucc

SEQ ID NO: 385939 - RNA, 19 nt, Artificial Sequence
  Description of Artificial Sequence: Synthetic oligonucleotide
auggaacuccgagucaggg

SEQ ID NO: 385940 - RNA, 19 nt, Artificial Sequence
  Description of Artificial Sequence: Synthetic oligonucleotide
caugggaucuacccacaag

SEQ ID NO: 385941 - RNA, 19 nt, Artificial Sequence
  Description of Artificial Sequence: Synthetic oligonucleotide
aggcucauguagcugguca

SEQ ID NO: 385942 - RNA, 19 nt, Artificial Sequence
  Description of Artificial Sequence: Synthetic oligonucleotide
ugcagucuacaggugagca

SEQ ID NO: 385943 - RNA, 19 nt, Artificial Sequence
  Description of Artificial Sequence: Synthetic oligonucleotide
cuguguauugaaagggaca

SEQ ID NO: 385944 - RNA, 19 nt, Artificial Sequence
  Description of Artificial Sequence: Synthetic oligonucleotide
gauacacguagaaccaaca

SEQ ID NO: 385945 - RNA, 19 nt, Artificial Sequence
  Description of Artificial Sequence: Synthetic oligonucleotide
guaagugcccuugaaguuc

SEQ ID NO: 385946 - RNA, 19 nt, Artificial Sequence
  Description of Artificial Sequence: Synthetic oligonucleotide
guagcaguaagugcccuug

SEQ ID NO: 385947 - RNA, 19 nt, Artificial Sequence
  Description of Artificial Sequence: Synthetic oligonucleotide
ugaagauagcaugcaauuu

SEQ ID NO: 385948 - RNA, 19 nt, Artificial Sequence
  Description of Artificial Sequence: Synthetic oligonucleotide
aggauggguaggccucacc

SEQ ID NO: 385949 - RNA, 19 nt, Artificial Sequence
  Description of Artificial Sequence: Synthetic oligonucleotide
guaaaguacgucuggccaa

SEQ ID NO: 385950 - RNA, 19 nt, Artificial Sequence
  Description of Artificial Sequence: Synthetic oligonucleotide
guagagaugacugccaacu

SEQ ID NO: 385951 - RNA, 19 nt, Artificial Sequence
  Description of Artificial Sequence: Synthetic oligonucleotide
ccaacggacaagcaggggc

SEQ ID NO: 385952 - RNA, 19 nt, Artificial Sequence
  Description of Artificial Sequence: Synthetic oligonucleotide
cacaaacucccuaccacuc

SEQ ID NO: 385953 - RNA, 19 nt, Artificial Sequence
  Description of Artificial Sequence: Synthetic oligonucleotide
uggauguguugccggagcu

SEQ ID NO: 385954 - RNA, 19 nt, Artificial Sequence
  Description of Artificial Sequence: Synthetic oligonucleotide
ugaccgauacacguagaac

SEQ ID NO: 385955 - RNA, 19 nt, Artificial Sequence
  Description of Artificial Sequence: Synthetic oligonucleotide
uggaacuccgagucaggga

SEQ ID NO: 385956 - RNA, 19 nt, Artificial Sequence
  Description of Artificial Sequence: Synthetic oligonucleotide
aacggacaagcaggggcac

SEQ ID NO: 385957 - RNA, 19 nt, Artificial Sequence
  Description of Artificial Sequence: Synthetic oligonucleotide
caccaacggacaagcaggg

SEQ ID NO: 385958 - RNA, 19 nt, Artificial Sequence
  Description of Artificial Sequence: Synthetic oligonucleotide
cauggaacuccgagucagg

SEQ ID NO: 385959 - RNA, 19 nt, Artificial Sequence
  Description of Artificial Sequence: Synthetic oligonucleotide
gaagggcugacagggagac

SEQ ID NO: 385960 - RNA, 19 nt, Artificial Sequence
  Description of Artificial Sequence: Synthetic oligonucleotide
caccagaaugagcuugacc

SEQ ID NO: 385961 - RNA, 19 nt, Artificial Sequence
  Description of Artificial Sequence: Synthetic oligonucleotide
gacacguauuuggaaaaca

SEQ ID NO: 385962 - RNA, 19 nt, Artificial Sequence
  Description of Artificial Sequence: Synthetic oligonucleotide
gaucuacccacaagagcag

SEQ ID NO: 385963 - RNA, 19 nt, Artificial Sequence
  Description of Artificial Sequence: Synthetic oligonucleotide
acagcgcauccagucaccc

SEQ ID NO: 385964 - RNA, 19 nt, Artificial Sequence
  Description of Artificial Sequence: Synthetic oligonucleotide
ucgagauggagggucuuug

SEQ ID NO: 385965 - RNA, 19 nt, Artificial Sequence
  Description of Artificial Sequence: Synthetic oligonucleotide
ugaagcggccuguccaugu

SEQ ID NO: 385966 - RNA, 19 nt, Artificial Sequence
  Description of Artificial Sequence: Synthetic oligonucleotide
gucaaggauuagcagcaac

SEQ ID NO: 385967 - RNA, 19 nt, Artificial Sequence
  Description of Artificial Sequence: Synthetic oligonucleotide
ccuugguccaccaacggac

SEQ ID NO: 385968 - RNA, 19 nt, Artificial Sequence
  Description of Artificial Sequence: Synthetic oligonucleotide
cacacgcucagcacagcgc

SEQ ID NO: 385969 - RNA, 19 nt, Artificial Sequence
  Description of Artificial Sequence: Synthetic oligonucleotide
cagugcuaaagagagccac

SEQ ID NO: 385970 - RNA, 19 nt, Artificial Sequence
  Description of Artificial Sequence: Synthetic oligonucleotide
uguggauguguugccggag

SEQ ID NO: 385971 - RNA, 19 nt, Artificial Sequence
  Description of Artificial Sequence: Synthetic oligonucleotide
ugacauugaggaugauaaa

SEQ ID NO: 385972 - RNA, 19 nt, Artificial Sequence
  Description of Artificial Sequence: Synthetic oligonucleotide
acauagacacguauuugga

SEQ ID NO: 385973 - RNA, 19 nt, Artificial Sequence
  Description of Artificial Sequence: Synthetic oligonucleotide
uguugucgaucuccgucac

SEQ ID NO: 385974 - RNA, 19 nt, Artificial Sequence
  Description of Artificial Sequence: Synthetic oligonucleotide
auaccuucugaccgauaca

SEQ ID NO: 385975 - RNA, 19 nt, Artificial Sequence
  Description of Artificial Sequence: Synthetic oligonucleotide
uggcccguagaacaauguc

SEQ ID NO: 385976 - RNA, 19 nt, Artificial Sequence
  Description of Artificial Sequence: Synthetic oligonucleotide
caaggauuaccacugucaa

SEQ ID NO: 385977 - RNA, 19 nt, Artificial Sequence
  Description of Artificial Sequence: Synthetic oligonucleotide
guagcuggucacugugaag

SEQ ID NO: 385978 - RNA, 19 nt, Artificial Sequence
  Description of Artificial Sequence: Synthetic oligonucleotide
cuguugucgaucuccguca

SEQ ID NO: 385979 - RNA, 19 nt, Artificial Sequence
  Description of Artificial Sequence: Synthetic oligonucleotide
ccaagcacuuucaggaagc

SEQ ID NO: 385980 - RNA, 19 nt, Artificial Sequence
  Description of Artificial Sequence: Synthetic oligonucleotide
acacacacacacgcucagc

SEQ ID NO: 385981 - RNA, 19 nt, Artificial Sequence
  Description of Artificial Sequence: Synthetic oligonucleotide
gcgggcauuccucaggcgg

SEQ ID NO: 385982 - RNA, 19 nt, Artificial Sequence
  Description of Artificial Sequence: Synthetic oligonucleotide
ugcuccgccaguccuguuc

SEQ ID NO: 385983 - RNA, 19 nt, Artificial Sequence
  Description of Artificial Sequence: Synthetic oligonucleotide
acugcacuaugcccauaag

SEQ ID NO: 385984 - RNA, 19 nt, Artificial Sequence
  Description of Artificial Sequence: Synthetic oligonucleotide
cacguauuuggaaaacaaa

SEQ ID NO: 385985 - RNA, 19 nt, Artificial Sequence
  Description of Artificial Sequence: Synthetic oligonucleotide
augacgaagacgacugaca

SEQ ID NO: 385986 - RNA, 19 nt, Artificial Sequence
  Description of Artificial Sequence: Synthetic oligonucleotide
ucugaccgauacacguaga

SEQ ID NO: 385987 - RNA, 19 nt, Artificial Sequence
  Description of Artificial Sequence: Synthetic oligonucleotide
ugguccaccaacggacaag

SEQ ID NO: 385988 - RNA, 19 nt, Artificial Sequence
  Description of Artificial Sequence: Synthetic oligonucleotide
cucuucgagauggaggguc

SEQ ID NO: 385989 - RNA, 19 nt, Artificial Sequence
  Description of Artificial Sequence: Synthetic oligonucleotide
gacacaacacacacacaca

SEQ ID NO: 385990 - RNA, 19 nt, Artificial Sequence
  Description of Artificial Sequence: Synthetic oligonucleotide
cucgaagacaggccacuug

SEQ ID NO: 385991 - RNA, 19 nt, Artificial Sequence
  Description of Artificial Sequence: Synthetic oligonucleotide
aaggcaugaagggcugaca

SEQ ID NO: 385992 - RNA, 19 nt, Artificial Sequence
  Description of Artificial Sequence: Synthetic oligonucleotide
caacggacaagcaggggca

SEQ ID NO: 385993 - RNA, 19 nt, Artificial Sequence
  Description of Artificial Sequence: Synthetic oligonucleotide
agaaugggagcauguugau

SEQ ID NO: 385994 - RNA, 19 nt, Artificial Sequence
  Description of Artificial Sequence: Synthetic oligonucleotide
aagcggccuguccauguga

SEQ ID NO: 385995 - RNA, 19 nt, Artificial Sequence
  Description of Artificial Sequence: Synthetic oligonucleotide
gcacuaugcccauaagggc

SEQ ID NO: 385996 - RNA, 19 nt, Artificial Sequence
  Description of Artificial Sequence: Synthetic oligonucleotide
acacacacacacacacacg

SEQ ID NO: 385997 - RNA, 19 nt, Artificial Sequence
  Description of Artificial Sequence: Synthetic oligonucleotide
aaccaucgggcaaacugca

SEQ ID NO: 385998 - RNA, 19 nt, Artificial Sequence
  Description of Artificial Sequence: Synthetic oligonucleotide
agcaguaagugcccuugaa

SEQ ID NO: 385999 - RNA, 19 nt, Artificial Sequence
  Description of Artificial Sequence: Synthetic oligonucleotide
ggcccguagaacaaugucc

SEQ ID NO: 386000 - RNA, 19 nt, Artificial Sequence
  Description of Artificial Sequence: Synthetic oligonucleotide
gaagcggccuguccaugug

SEQ ID NO: 386001 - RNA, 19 nt, Artificial Sequence
  Description of Artificial Sequence: Synthetic oligonucleotide
  modified_base (8)..(8): a, c, u, g, unknown or other
gaaguucncccaagcuuug

SEQ ID NO: 386002 - RNA, 19 nt, Artificial Sequence
  Description of Artificial Sequence: Synthetic oligonucleotide
gcauguugauggcagacuc

SEQ ID NO: 386003 - RNA, 19 nt, Artificial Sequence
  Description of Artificial Sequence: Synthetic oligonucleotide
cacacacacacacgcucag

SEQ ID NO: 386004 - RNA, 19 nt, Artificial Sequence
  Description of Artificial Sequence: Synthetic oligonucleotide
ccggagagcucuaaggcag

SEQ ID NO: 386005 - RNA, 19 nt, Artificial Sequence
  Description of Artificial Sequence: Synthetic oligonucleotide
gggcaaacugcacuaugcc

SEQ ID NO: 386006 - RNA, 19 nt, Artificial Sequence
  Description of Artificial Sequence: Synthetic oligonucleotide
auacuugaagcggccuguc

SEQ ID NO: 386007 - RNA, 19 nt, Artificial Sequence
  Description of Artificial Sequence: Synthetic oligonucleotide
acagauuacuguggugacu

SEQ ID NO: 386008 - RNA, 19 nt, Artificial Sequence
  Description of Artificial Sequence: Synthetic oligonucleotide
ugcacggaagcguccucca

SEQ ID NO: 386009 - RNA, 19 nt, Artificial Sequence
  Description of Artificial Sequence: Synthetic oligonucleotide
gccaagcacuuucaggaag

SEQ ID NO: 386010 - RNA, 19 nt, Artificial Sequence
  Description of Artificial Sequence: Synthetic oligonucleotide
uccuggaauccuugagggu

SEQ ID NO: 386011 - RNA, 19 nt, Artificial Sequence
  Description of Artificial Sequence: Synthetic oligonucleotide
ggggaugcaguccuugcug

SEQ ID NO: 386012 - RNA, 19 nt, Artificial Sequence
  Description of Artificial Sequence: Synthetic oligonucleotide
gaggcgcccucacaaacuc

SEQ ID NO: 386013 - RNA, 19 nt, Artificial Sequence
  Description of Artificial Sequence: Synthetic oligonucleotide
  modified_base (3)..(3): a, c, u, g, unknown or other
ucncccaagcuuugcuguc

SEQ ID NO: 386014 - RNA, 19 nt, Artificial Sequence
  Description of Artificial Sequence: Synthetic oligonucleotide
agacuccuaucuguaaagu

SEQ ID NO: 386015 - RNA, 19 nt, Artificial Sequence
  Description of Artificial Sequence: Synthetic oligonucleotide
ggucccaaauggcaugccc

SEQ ID NO: 386016 - RNA, 19 nt, Artificial Sequence
  Description of Artificial Sequence: Synthetic oligonucleotide
ugcccauaagggcgaggcc

SEQ ID NO: 386017 - RNA, 19 nt, Artificial Sequence
  Description of Artificial Sequence: Synthetic oligonucleotide
cagauuacuguggugacua

SEQ ID NO: 386018 - RNA, 19 nt, Artificial Sequence
  Description of Artificial Sequence: Synthetic oligonucleotide
cacaacacacacacacaca

SEQ ID NO: 386019 - RNA, 19 nt, Artificial Sequence
  Description of Artificial Sequence: Synthetic oligonucleotide
acgcuacagauuacugugg

SEQ ID NO: 386020 - RNA, 19 nt, Artificial Sequence
  Description of Artificial Sequence: Synthetic oligonucleotide
accauggaacuccgaguca

SEQ ID NO: 386021 - RNA, 19 nt, Artificial Sequence
  Description of Artificial Sequence: Synthetic oligonucleotide
ggcacgguaaaguacgucu

SEQ ID NO: 386022 - RNA, 19 nt, Artificial Sequence
  Description of Artificial Sequence: Synthetic oligonucleotide
ccuuaggaccuuuuggcuc

SEQ ID NO: 386023 - RNA, 19 nt, Artificial Sequence
  Description of Artificial Sequence: Synthetic oligonucleotide
uugguccaccaacggacaa

SEQ ID NO: 386024 - RNA, 19 nt, Artificial Sequence
  Description of Artificial Sequence: Synthetic oligonucleotide
guaggccucaccauacaga

SEQ ID NO: 386025 - RNA, 19 nt, Artificial Sequence
  Description of Artificial Sequence: Synthetic oligonucleotide
acccaccgaaaguuggccu

SEQ ID NO: 386026 - RNA, 19 nt, Artificial Sequence
  Description of Artificial Sequence: Synthetic oligonucleotide
ggaguuguagaccuucaua

SEQ ID NO: 386027 - RNA, 19 nt, Artificial Sequence
  Description of Artificial Sequence: Synthetic oligonucleotide
agcggccuguccaugugac

SEQ ID NO: 386028 - RNA, 19 nt, Artificial Sequence
  Description of Artificial Sequence: Synthetic oligonucleotide
ggugaguguggaguuguag

SEQ ID NO: 386029 - RNA, 19 nt, Artificial Sequence
  Description of Artificial Sequence: Synthetic oligonucleotide
acacacacacacacgcuca

SEQ ID NO: 386030 - RNA, 19 nt, Artificial Sequence
  Description of Artificial Sequence: Synthetic oligonucleotide
agccacuaggacggggagg

SEQ ID NO: 386031 - RNA, 19 nt, Artificial Sequence
  Description of Artificial Sequence: Synthetic oligonucleotide
gacguagagcaggcagggg

SEQ ID NO: 386032 - RNA, 19 nt, Artificial Sequence
  Description of Artificial Sequence: Synthetic oligonucleotide
uagccaauagaggcacgga

SEQ ID NO: 386033 - RNA, 19 nt, Artificial Sequence
  Description of Artificial Sequence: Synthetic oligonucleotide
cugaccgauacacguagaa

SEQ ID NO: 386034 - RNA, 19 nt, Artificial Sequence
  Description of Artificial Sequence: Synthetic oligonucleotide
cuugacacuuggcauucaa

SEQ ID NO: 386035 - RNA, 19 nt, Artificial Sequence
  Description of Artificial Sequence: Synthetic oligonucleotide
accuucugaccgauacacg

SEQ ID NO: 386036 - RNA, 19 nt, Artificial Sequence
  Description of Artificial Sequence: Synthetic oligonucleotide
  modified_base (2)..(2): a, c, u, g, unknown or other
cncccaagcuuugcugucc

SEQ ID NO: 386037 - RNA, 19 nt, Artificial Sequence
  Description of Artificial Sequence: Synthetic oligonucleotide
uccgugccauguuugucuc

SEQ ID NO: 386038 - RNA, 19 nt, Artificial Sequence
  Description of Artificial Sequence: Synthetic oligonucleotide
gaagaggcgcccucacaaa

SEQ ID NO: 386039 - RNA, 19 nt, Artificial Sequence
  Description of Artificial Sequence: Synthetic oligonucleotide
agucgaaggcaaacuugag

SEQ ID NO: 386040 - RNA, 19 nt, Artificial Sequence
  Description of Artificial Sequence: Synthetic oligonucleotide
uacuaccaugaagucuaca

SEQ ID NO: 386041 - RNA, 19 nt, Artificial Sequence
  Description of Artificial Sequence: Synthetic oligonucleotide
caacacacacacacacaca

SEQ ID NO: 386042 - RNA, 19 nt, Artificial Sequence
  Description of Artificial Sequence: Synthetic oligonucleotide
aacuccgagucagggacuu

SEQ ID NO: 386043 - RNA, 19 nt, Artificial Sequence
  Description of Artificial Sequence: Synthetic oligonucleotide
gcugccuuaggaccuuuug

SEQ ID NO: 386044 - RNA, 19 nt, Artificial Sequence
  Description of Artificial Sequence: Synthetic oligonucleotide
aagucuacauagacacgua

SEQ ID NO: 386045 - RNA, 19 nt, Artificial Sequence
  Description of Artificial Sequence: Synthetic oligonucleotide
gggccauucgaaagaagag

SEQ ID NO: 386046 - RNA, 19 nt, Artificial Sequence
  Description of Artificial Sequence: Synthetic oligonucleotide
caaugggcacgguaaagua

SEQ ID NO: 386047 - RNA, 19 nt, Artificial Sequence
  Description of Artificial Sequence: Synthetic oligonucleotide
acaugggaucuacccacaa

SEQ ID NO: 386048 - RNA, 19 nt, Artificial Sequence
  Description of Artificial Sequence: Synthetic oligonucleotide
cgaaguugacuucagccug

SEQ ID NO: 386049 - RNA, 19 nt, Artificial Sequence
  Description of Artificial Sequence: Synthetic oligonucleotide
gggcccgccugguauaggg

SEQ ID NO: 386050 - RNA, 19 nt, Artificial Sequence
  Description of Artificial Sequence: Synthetic oligonucleotide
cggacauacuugaagcggc

SEQ ID NO: 386051 - RNA, 19 nt, Artificial Sequence
  Description of Artificial Sequence: Synthetic oligonucleotide
gugcacugugcuccgccag

SEQ ID NO: 386052 - RNA, 19 nt, Artificial Sequence
  Description of Artificial Sequence: Synthetic oligonucleotide
cacccaccgaaaguuggcc

SEQ ID NO: 386053 - RNA, 19 nt, Artificial Sequence
  Description of Artificial Sequence: Synthetic oligonucleotide
uggugacuaugaucuuggu

SEQ ID NO: 386054 - RNA, 19 nt, Artificial Sequence
  Description of Artificial Sequence: Synthetic oligonucleotide
cugggccauucgaaagaag

SEQ ID NO: 386055 - RNA, 19 nt, Artificial Sequence
  Description of Artificial Sequence: Synthetic oligonucleotide
ugggcacgguaaaguacgu

SEQ ID NO: 386056 - RNA, 19 nt, Artificial Sequence
  Description of Artificial Sequence: Synthetic oligonucleotide
cuagcugcuugagacggca

SEQ ID NO: 386057 - RNA, 19 nt, Artificial Sequence
  Description of Artificial Sequence: Synthetic oligonucleotide
cagcaagaagugggcauag

SEQ ID NO: 386058 - RNA, 19 nt, Artificial Sequence
  Description of Artificial Sequence: Synthetic oligonucleotide
ggaccuuuuggcucugcca

SEQ ID NO: 386059 - RNA, 19 nt, Artificial Sequence
  Description of Artificial Sequence: Synthetic oligonucleotide
ccguagaacaauguccuug

SEQ ID NO: 386060 - RNA, 19 nt, Artificial Sequence
  Description of Artificial Sequence: Synthetic oligonucleotide
uccagccgaaguugacuuc

SEQ ID NO: 386061 - RNA, 19 nt, Artificial Sequence
  Description of Artificial Sequence: Synthetic oligonucleotide
ccuuccaagcccguggccc

SEQ ID NO: 386062 - RNA, 19 nt, Artificial Sequence
  Description of Artificial Sequence: Synthetic oligonucleotide
uccgucacucggacauacu

SEQ ID NO: 386063 - RNA, 19 nt, Artificial Sequence
  Description of Artificial Sequence: Synthetic oligonucleotide
guauagggcucagcagagc

SEQ ID NO: 386064 - RNA, 19 nt, Artificial Sequence
  Description of Artificial Sequence: Synthetic oligonucleotide
ggucccugcacaugggauc

SEQ ID NO: 386065 - RNA, 19 nt, Artificial Sequence
  Description of Artificial Sequence: Synthetic oligonucleotide
cuucugaccgauacacgua

SEQ ID NO: 386066 - RNA, 19 nt, Artificial Sequence
  Description of Artificial Sequence: Synthetic oligonucleotide
uugaagcggccuguccaug

SEQ ID NO: 386067 - RNA, 19 nt, Artificial Sequence
  Description of Artificial Sequence: Synthetic oligonucleotide
uggcaugcccacugugauc

SEQ ID NO: 386068 - RNA, 19 nt, Artificial Sequence
  Description of Artificial Sequence: Synthetic oligonucleotide
cugcagucuacaggugagc

SEQ ID NO: 386069 - RNA, 19 nt, Artificial Sequence
  Description of Artificial Sequence: Synthetic oligonucleotide
acggacaagcaggggcacg

SEQ ID NO: 386070 - RNA, 19 nt, Artificial Sequence
  Description of Artificial Sequence: Synthetic oligonucleotide
agaggcgcccucacaaacu

SEQ ID NO: 386071 - RNA, 19 nt, Artificial Sequence
  Description of Artificial Sequence: Synthetic oligonucleotide
ugggcucgaagcgcagcag

SEQ ID NO: 386072 - RNA, 19 nt, Artificial Sequence
  Description of Artificial Sequence: Synthetic oligonucleotide
cccaagaagaaugggagca

SEQ ID NO: 386073 - RNA, 19 nt, Artificial Sequence
  Description of Artificial Sequence: Synthetic oligonucleotide
guggccgcgguugccauug

SEQ ID NO: 386074 - RNA, 19 nt, Artificial Sequence
  Description of Artificial Sequence: Synthetic oligonucleotide
cuccgucacucggacauac

SEQ ID NO: 386075 - RNA, 19 nt, Artificial Sequence
  Description of Artificial Sequence: Synthetic oligonucleotide
gauggguaggccucaccau

SEQ ID NO: 386076 - RNA, 19 nt, Artificial Sequence
  Description of Artificial Sequence: Synthetic oligonucleotide
cauuccucaggcggcggac

SEQ ID NO: 386077 - RNA, 19 nt, Artificial Sequence
  Description of Artificial Sequence: Synthetic oligonucleotide
gaaguugacuucagccugu

SEQ ID NO: 386078 - RNA, 19 nt, Artificial Sequence
  Description of Artificial Sequence: Synthetic oligonucleotide
gcagucuacaggugagcac

SEQ ID NO: 386079 - RNA, 19 nt, Artificial Sequence
  Description of Artificial Sequence: Synthetic oligonucleotide
uucgagauggagggucuuu

SEQ ID NO: 386080 - RNA, 19 nt, Artificial Sequence
  Description of Artificial Sequence: Synthetic oligonucleotide
ccgaaaguuggccuugguc

SEQ ID NO: 386081 - RNA, 19 nt, Artificial Sequence
  Description of Artificial Sequence: Synthetic oligonucleotide
cagccgaaguugacuucag

SEQ ID NO: 386082 - RNA, 19 nt, Artificial Sequence
  Description of Artificial Sequence: Synthetic oligonucleotide
acacacacacacacacaca

SEQ ID NO: 386083 - RNA, 19 nt, Artificial Sequence
  Description of Artificial Sequence: Synthetic oligonucleotide
ucauaccuucugaccgaua

SEQ ID NO: 386084 - RNA, 19 nt, Artificial Sequence
  Description of Artificial Sequence: Synthetic oligonucleotide
accgaaaguuggccuuggu

SEQ ID NO: 386085 - RNA, 19 nt, Artificial Sequence
  Description of Artificial Sequence: Synthetic oligonucleotide
guugggcucgaagcgcagc

SEQ ID NO: 386086 - RNA, 19 nt, Artificial Sequence
  Description of Artificial Sequence: Synthetic oligonucleotide
acacacacacacacacgcu

SEQ ID NO: 386087 - RNA, 19 nt, Artificial Sequence
  Description of Artificial Sequence: Synthetic oligonucleotide
cgguaaaguacgucuggcc

SEQ ID NO: 386088 - RNA, 19 nt, Artificial Sequence
  Description of Artificial Sequence: Synthetic oligonucleotide
ggaugcaguccuugcuggc

SEQ ID NO: 386089 - RNA, 19 nt, Artificial Sequence
  Description of Artificial Sequence: Synthetic oligonucleotide
cgauacacguagaaccaac

SEQ ID NO: 386090 - RNA, 19 nt, Artificial Sequence
  Description of Artificial Sequence: Synthetic oligonucleotide
cagccacuaggacggggag

SEQ ID NO: 386091 - RNA, 19 nt, Artificial Sequence
  Description of Artificial Sequence: Synthetic oligonucleotide
gacaagcaggggcacgcua

SEQ ID NO: 386092 - RNA, 19 nt, Artificial Sequence
  Description of Artificial Sequence: Synthetic oligonucleotide
ggccuugguccaccaacgg

SEQ ID NO: 386093 - RNA, 19 nt, Artificial Sequence
  Description of Artificial Sequence: Synthetic oligonucleotide
auggccaagcuugccugug

SEQ ID NO: 386094 - RNA, 19 nt, Artificial Sequence
  Description of Artificial Sequence: Synthetic oligonucleotide
acuaggacggggagggcaa

SEQ ID NO: 386095 - RNA, 19 nt, Artificial Sequence
  Description of Artificial Sequence: Synthetic oligonucleotide
gucuacaggugagcacaag

SEQ ID NO: 386096 - RNA, 19 nt, Artificial Sequence
  Description of Artificial Sequence: Synthetic oligonucleotide
uacgugccuccgagcuggg

SEQ ID NO: 386097 - RNA, 19 nt, Artificial Sequence
  Description of Artificial Sequence: Synthetic oligonucleotide
  modified_base (9)..(9): a, c, u, g, unknown or other
ggaaguucncccaagcuuu

SEQ ID NO: 386098 - RNA, 19 nt, Artificial Sequence
  Description of Artificial Sequence: Synthetic oligonucleotide
gggacuugaccacucccca

SEQ ID NO: 386099 - RNA, 19 nt, Artificial Sequence
  Description of Artificial Sequence: Synthetic oligonucleotide
ccauacugcugccagguga

SEQ ID NO: 386100 - RNA, 19 nt, Artificial Sequence
  Description of Artificial Sequence: Synthetic oligonucleotide
caccgaaaguuggccuugg

SEQ ID NO: 386101 - RNA, 19 nt, Artificial Sequence
  Description of Artificial Sequence: Synthetic oligonucleotide
cacuaggacggggagggca

SEQ ID NO: 386102 - RNA, 19 nt, Artificial Sequence
  Description of Artificial Sequence: Synthetic oligonucleotide
gcuggucacugugaagaag

SEQ ID NO: 386103 - RNA, 19 nt, Artificial Sequence
  Description of Artificial Sequence: Synthetic oligonucleotide
gcccauaagggcgaggcca

SEQ ID NO: 386104 - RNA, 19 nt, Artificial Sequence
  Description of Artificial Sequence: Synthetic oligonucleotide
gcacgguaaaguacgucug

SEQ ID NO: 386105 - RNA, 19 nt, Artificial Sequence
  Description of Artificial Sequence: Synthetic oligonucleotide
cgagauggagggucuuugg

SEQ ID NO: 386106 - RNA, 19 nt, Artificial Sequence
  Description of Artificial Sequence: Synthetic oligonucleotide
guggccaaugggcacggua

SEQ ID NO: 386107 - RNA, 19 nt, Artificial Sequence
  Description of Artificial Sequence: Synthetic oligonucleotide
  modified_base (13)..(13): a, c, u, g, unknown or other
gugcggaaguucncccaag

SEQ ID NO: 386108 - RNA, 19 nt, Artificial Sequence
  Description of Artificial Sequence: Synthetic oligonucleotide
gccauucgaaagaagaggu

SEQ ID NO: 386109 - RNA, 19 nt, Artificial Sequence
  Description of Artificial Sequence: Synthetic oligonucleotide
ccguggcccacacaggaag

SEQ ID NO: 386110 - RNA, 19 nt, Artificial Sequence
  Description of Artificial Sequence: Synthetic oligonucleotide
gacauacuugaagcggccu

SEQ ID NO: 386111 - RNA, 19 nt, Artificial Sequence
  Description of Artificial Sequence: Synthetic oligonucleotide
ggcacgcuacagauuacug

SEQ ID NO: 386112 - RNA, 19 nt, Artificial Sequence
  Description of Artificial Sequence: Synthetic oligonucleotide
ggaauccuugaggguacag

SEQ ID NO: 386113 - RNA, 19 nt, Artificial Sequence
  Description of Artificial Sequence: Synthetic oligonucleotide
ggauguguugccggagcug

SEQ ID NO: 386114 - RNA, 19 nt, Artificial Sequence
  Description of Artificial Sequence: Synthetic oligonucleotide
ccuucugaccgauacacgu

SEQ ID NO: 386115 - RNA, 19 nt, Artificial Sequence
  Description of Artificial Sequence: Synthetic oligonucleotide
gucuacauagacacguauu

SEQ ID NO: 386116 - RNA, 19 nt, Artificial Sequence
  Description of Artificial Sequence: Synthetic oligonucleotide
agauagcaugcaauuucuu

SEQ ID NO: 386117 - RNA, 19 nt, Artificial Sequence
  Description of Artificial Sequence: Synthetic oligonucleotide
cagacacaacacacacaca

SEQ ID NO: 386118 - RNA, 19 nt, Artificial Sequence
  Description of Artificial Sequence: Synthetic oligonucleotide
agguagcaguaagugcccu

SEQ ID NO: 386119 - RNA, 19 nt, Artificial Sequence
  Description of Artificial Sequence: Synthetic oligonucleotide
ccacccaccgaaaguuggc

SEQ ID NO: 386120 - RNA, 19 nt, Artificial Sequence
  Description of Artificial Sequence: Synthetic oligonucleotide
cuugaagcggccuguccau

SEQ ID NO: 386121 - RNA, 19 nt, Artificial Sequence
  Description of Artificial Sequence: Synthetic oligonucleotide
gcacgcuacagauuacugu

SEQ ID NO: 386122 - RNA, 19 nt, Artificial Sequence
  Description of Artificial Sequence: Synthetic oligonucleotide
cuaugcccauaagggcgag

SEQ ID NO: 386123 - RNA, 19 nt, Artificial Sequence
  Description of Artificial Sequence: Synthetic oligonucleotide
gcugacauugaggaugaua

SEQ ID NO: 386124 - RNA, 19 nt, Artificial Sequence
  Description of Artificial Sequence: Synthetic oligonucleotide
ggagagcucuaaggcaggc

SEQ ID NO: 386125 - RNA, 19 nt, Artificial Sequence
  Description of Artificial Sequence: Synthetic oligonucleotide
guagaacaauguccuuggu

SEQ ID NO: 386126 - RNA, 19 nt, Artificial Sequence
  Description of Artificial Sequence: Synthetic oligonucleotide
gccuugguccaccaacgga

SEQ ID NO: 386127 - RNA, 19 nt, Artificial Sequence
  Description of Artificial Sequence: Synthetic oligonucleotide
ccucacaaacucccuacca

SEQ ID NO: 386128 - RNA, 19 nt, Artificial Sequence
  Description of Artificial Sequence: Synthetic oligonucleotide
cacggaagcguccuccagu

SEQ ID NO: 386129 - RNA, 19 nt, Artificial Sequence
  Description of Artificial Sequence: Synthetic oligonucleotide
ccgaaguugacuucagccu

SEQ ID NO: 386130 - RNA, 19 nt, Artificial Sequence
  Description of Artificial Sequence: Synthetic oligonucleotide
aagugggcauaggguucca

SEQ ID NO: 386131 - RNA, 19 nt, Artificial Sequence
  Description of Artificial Sequence: Synthetic oligonucleotide
gcucgaagcgcagcagcag

SEQ ID NO: 386132 - RNA, 19 nt, Artificial Sequence
  Description of Artificial Sequence: Synthetic oligonucleotide
ccaguggcgggcauuccuc

SEQ ID NO: 386133 - RNA, 19 nt, Artificial Sequence
  Description of Artificial Sequence: Synthetic oligonucleotide
aaacugcacuaugcccaua

SEQ ID NO: 386134 - RNA, 19 nt, Artificial Sequence
  Description of Artificial Sequence: Synthetic oligonucleotide
agagaccggagagcucuaa

SEQ ID NO: 386135 - RNA, 19 nt, Artificial Sequence
  Description of Artificial Sequence: Synthetic oligonucleotide
gagagcucuaaggcaggcu

SEQ ID NO: 386136 - RNA, 19 nt, Artificial Sequence
  Description of Artificial Sequence: Synthetic oligonucleotide
gcacggaagcguccuccag

SEQ ID NO: 386137 - RNA, 19 nt, Artificial Sequence
  Description of Artificial Sequence: Synthetic oligonucleotide
ggcgggcauuccucaggcg

SEQ ID NO: 386138 - RNA, 19 nt, Artificial Sequence
  Description of Artificial Sequence: Synthetic oligonucleotide
guguauugaaagggacacu

SEQ ID NO: 386139 - RNA, 19 nt, Artificial Sequence
  Description of Artificial Sequence: Synthetic oligonucleotide
cgggcauuccucaggcggc

SEQ ID NO: 386140 - RNA, 19 nt, Artificial Sequence
  Description of Artificial Sequence: Synthetic oligonucleotide
ccagccgaaguugacuuca

SEQ ID NO: 386141 - RNA, 19 nt, Artificial Sequence
  Description of Artificial Sequence: Synthetic oligonucleotide
acgugccuccgagcugggg

SEQ ID NO: 386142 - RNA, 19 nt, Artificial Sequence
  Description of Artificial Sequence: Synthetic oligonucleotide
ucguggccgcgguugccau

SEQ ID NO: 386143 - RNA, 19 nt, Artificial Sequence
  Description of Artificial Sequence: Synthetic oligonucleotide
cuggcccguagaacaaugu

SEQ ID NO: 386144 - RNA, 19 nt, Artificial Sequence
  Description of Artificial Sequence: Synthetic oligonucleotide
cugcuggcccguagaacaa

SEQ ID NO: 386145 - RNA, 19 nt, Artificial Sequence
  Description of Artificial Sequence: Synthetic oligonucleotide
caggugaguguggaguugu

SEQ ID NO: 386146 - RNA, 19 nt, Artificial Sequence
  Description of Artificial Sequence: Synthetic oligonucleotide
  modified_base (11)..(11): a, c, u, g, unknown or other
gcggaaguucncccaagcu

SEQ ID NO: 386147 - RNA, 19 nt, Artificial Sequence
  Description of Artificial Sequence: Synthetic oligonucleotide
gguagacguagagcaggca

SEQ ID NO: 386148 - RNA, 19 nt, Artificial Sequence
  Description of Artificial Sequence: Synthetic oligonucleotide
acgucuagguugggcucga

SEQ ID NO: 386149 - RNA, 19 nt, Artificial Sequence
  Description of Artificial Sequence: Synthetic oligonucleotide
cgcgguugccauugguccc

SEQ ID NO: 386150 - RNA, 19 nt, Artificial Sequence
  Description of Artificial Sequence: Synthetic oligonucleotide
caggcucauguagcugguc

SEQ ID NO: 386151 - RNA, 19 nt, Artificial Sequence
  Description of Artificial Sequence: Synthetic oligonucleotide
cggacaagcaggggcacgc

SEQ ID NO: 386152 - RNA, 19 nt, Artificial Sequence
  Description of Artificial Sequence: Synthetic oligonucleotide
cggagagcucuaaggcagg

SEQ ID NO: 386153 - RNA, 19 nt, Artificial Sequence
  Description of Artificial Sequence: Synthetic oligonucleotide
aggccucaccauacagaca

SEQ ID NO: 386154 - RNA, 19 nt, Artificial Sequence
  Description of Artificial Sequence: Synthetic oligonucleotide
caggauggguaggccucac

SEQ ID NO: 386155 - RNA, 19 nt, Artificial Sequence
  Description of Artificial Sequence: Synthetic oligonucleotide
gcggcggacaggaauggga

SEQ ID NO: 386156 - RNA, 19 nt, Artificial Sequence
  Description of Artificial Sequence: Synthetic oligonucleotide
agggcccgccugguauagg

SEQ ID NO: 386157 - RNA, 19 nt, Artificial Sequence
  Description of Artificial Sequence: Synthetic oligonucleotide
gaacuccgagucagggacu

SEQ ID NO: 386158 - RNA, 19 nt, Artificial Sequence
  Description of Artificial Sequence: Synthetic oligonucleotide
ccauucgaaagaagaggua

SEQ ID NO: 386159 - RNA, 19 nt, Artificial Sequence
  Description of Artificial Sequence: Synthetic oligonucleotide
cagcacuguugucgaucuc

SEQ ID NO: 386160 - RNA, 19 nt, Artificial Sequence
  Description of Artificial Sequence: Synthetic oligonucleotide
cacccuccagcagggucug

SEQ ID NO: 386161 - RNA, 19 nt, Artificial Sequence
  Description of Artificial Sequence: Synthetic oligonucleotide
gguccgugccauguuuguc

SEQ ID NO: 386162 - RNA, 19 nt, Artificial Sequence
  Description of Artificial Sequence: Synthetic oligonucleotide
gcggccuguccaugugacc

SEQ ID NO: 386163 - RNA, 19 nt, Artificial Sequence
  Description of Artificial Sequence: Synthetic oligonucleotide
ccaccgaaaguuggccuug

SEQ ID NO: 386164 - RNA, 19 nt, Artificial Sequence
  Description of Artificial Sequence: Synthetic oligonucleotide
ccaaugggcacgguaaagu

SEQ ID NO: 386165 - RNA, 19 nt, Artificial Sequence
  Description of Artificial Sequence: Synthetic oligonucleotide
  modified_base (10)..(10): a, c, u, g, unknown or other
cggaaguucncccaagcuu

SEQ ID NO: 386166 - RNA, 19 nt, Artificial Sequence
  Description of Artificial Sequence: Synthetic oligonucleotide
ccgugccauguuugucucc

SEQ ID NO: 386167 - RNA, 19 nt, Artificial Sequence
  Description of Artificial Sequence: Synthetic oligonucleotide
gcgguugccauugguccca

SEQ ID NO: 386168 - RNA, 19 nt, Artificial Sequence
  Description of Artificial Sequence: Synthetic oligonucleotide
gggcacgguaaaguacguc

SEQ ID NO: 386169 - RNA, 19 nt, Artificial Sequence
  Description of Artificial Sequence: Synthetic oligonucleotide
cccgccugguauagggcuc

SEQ ID NO: 386170 - RNA, 19 nt, Artificial Sequence
  Description of Artificial Sequence: Synthetic oligonucleotide
caagcccguggcccacaca

SEQ ID NO: 386171 - RNA, 19 nt, Artificial Sequence
  Description of Artificial Sequence: Synthetic oligonucleotide
cacuccccacccaccgaaa

SEQ ID NO: 386172 - RNA, 19 nt, Artificial Sequence
  Description of Artificial Sequence: Synthetic oligonucleotide
gcgccaguccacaggcaug

SEQ ID NO: 386173 - RNA, 19 nt, Artificial Sequence
  Description of Artificial Sequence: Synthetic oligonucleotide
gcccgccugguauagggcu

SEQ ID NO: 386174 - RNA, 19 nt, Artificial Sequence
  Description of Artificial Sequence: Synthetic oligonucleotide
ggcccgccugguauagggc

SEQ ID NO: 386175 - RNA, 19 nt, Artificial Sequence
  Description of Artificial Sequence: Synthetic oligonucleotide
gcgcuuuauuucggcugcc

SEQ ID NO: 386176 - RNA, 19 nt, Artificial Sequence
  Description of Artificial Sequence: Synthetic oligonucleotide
gggcgaggccagccacuag

SEQ ID NO: 386177 - RNA, 19 nt, Artificial Sequence
  Description of Artificial Sequence: Synthetic oligonucleotide
gcaugcacggaagcguccu

SEQ ID NO: 386178 - RNA, 19 nt, Artificial Sequence
  Description of Artificial Sequence: Synthetic oligonucleotide
cagagaccggagagcucua

SEQ ID NO: 386179 - RNA, 19 nt, Artificial Sequence
  Description of Artificial Sequence: Synthetic oligonucleotide
cuaggacggggagggcaaa

SEQ ID NO: 386180 - RNA, 19 nt, Artificial Sequence
  Description of Artificial Sequence: Synthetic oligonucleotide
gccaagcuugccuguguau

SEQ ID NO: 386181 - RNA, 19 nt, Artificial Sequence
  Description of Artificial Sequence: Synthetic oligonucleotide
ccgauacacguagaaccaa

SEQ ID NO: 386182 - RNA, 19 nt, Artificial Sequence
  Description of Artificial Sequence: Synthetic oligonucleotide
ccagguggcugcacaaaau

SEQ ID NO: 386183 - RNA, 19 nt, Artificial Sequence
  Description of Artificial Sequence: Synthetic oligonucleotide
cauaggguuccaggugguu

SEQ ID NO: 386184 - RNA, 19 nt, Artificial Sequence
  Description of Artificial Sequence: Synthetic oligonucleotide
ccgucacucggacauacuu

SEQ ID NO: 386185 - RNA, 19 nt, Artificial Sequence
  Description of Artificial Sequence: Synthetic oligonucleotide
cccaccgaaaguuggccuu

SEQ ID NO: 386186 - RNA, 19 nt, Artificial Sequence
  Description of Artificial Sequence: Synthetic oligonucleotide
cuucgagauggagggucuu

SEQ ID NO: 386187 - RNA, 19 nt, Artificial Sequence
  Description of Artificial Sequence: Synthetic oligonucleotide
ggcccucgaggauggugcu

SEQ ID NO: 386188 - RNA, 19 nt, Artificial Sequence
  Description of Artificial Sequence: Synthetic oligonucleotide
ccacuaggacggggagggc

SEQ ID NO: 386189 - RNA, 19 nt, Artificial Sequence
  Description of Artificial Sequence: Synthetic oligonucleotide
ggacaagcaggggcacgcu

SEQ ID NO: 386190 - RNA, 19 nt, Artificial Sequence
  Description of Artificial Sequence: Synthetic oligonucleotide
ccgccaguccuguucaauu

SEQ ID NO: 386191 - RNA, 19 nt, Artificial Sequence
  Description of Artificial Sequence: Synthetic oligonucleotide
ggccgcgguugccauuggu

SEQ ID NO: 386192 - RNA, 19 nt, Artificial Sequence
  Description of Artificial Sequence: Synthetic oligonucleotide
cccaaauggcaugcccacu

SEQ ID NO: 386193 - RNA, 19 nt, Artificial Sequence
  Description of Artificial Sequence: Synthetic oligonucleotide
cgaagacgacugacagcaa

SEQ ID NO: 386194 - RNA, 19 nt, Artificial Sequence
  Description of Artificial Sequence: Synthetic oligonucleotide
cgcuuuauuucggcugccu

SEQ ID NO: 386195 - RNA, 19 nt, Artificial Sequence
  Description of Artificial Sequence: Synthetic oligonucleotide
cgccugguauagggcucag

SEQ ID NO: 386196 - RNA, 19 nt, Artificial Sequence
  Description of Artificial Sequence: Synthetic oligonucleotide
gcgcccucacaaacucccu

SEQ ID NO: 386197 - RNA, 19 nt, Artificial Sequence
  Description of Artificial Sequence: Synthetic oligonucleotide
gugcuccgccaguccuguu

SEQ ID NO: 386198 - RNA, 19 nt, Artificial Sequence
  Description of Artificial Sequence: Synthetic oligonucleotide
cgucuagguugggcucgaa

SEQ ID NO: 386199 - RNA, 19 nt, Artificial Sequence
  Description of Artificial Sequence: Synthetic oligonucleotide
cggcugccuuaggaccuuu

SEQ ID NO: 386200 - RNA, 19 nt, Artificial Sequence
  Description of Artificial Sequence: Synthetic oligonucleotide
auaauagucaucugggcac

SEQ ID NO: 386201 - RNA, 19 nt, Artificial Sequence
  Description of Artificial Sequence: Synthetic oligonucleotide
ucaacgaaggcuuucacag

SEQ ID NO: 386202 - RNA, 19 nt, Artificial Sequence
  Description of Artificial Sequence: Synthetic oligonucleotide
ucuucgaguauugagaagg

SEQ ID NO: 386203 - RNA, 19 nt, Artificial Sequence
  Description of Artificial Sequence: Synthetic oligonucleotide
ucaacauuuugcuugcagg

SEQ ID NO: 386204 - RNA, 19 nt, Artificial Sequence
  Description of Artificial Sequence: Synthetic oligonucleotide
ugauguuacaccuuucugc

SEQ ID NO: 386205 - RNA, 19 nt, Artificial Sequence
  Description of Artificial Sequence: Synthetic oligonucleotide
cucauaauagucaucuggg

SEQ ID NO: 386206 - RNA, 19 nt, Artificial Sequence
  Description of Artificial Sequence: Synthetic oligonucleotide
ugaaauuuucuacaucuga

SEQ ID NO: 386207 - RNA, 19 nt, Artificial Sequence
  Description of Artificial Sequence: Synthetic oligonucleotide
uguucuucgaguauugaga

SEQ ID NO: 386208 - RNA, 19 nt, Artificial Sequence
  Description of Artificial Sequence: Synthetic oligonucleotide
aaggcuuucacagggugcc

SEQ ID NO: 386209 - RNA, 19 nt, Artificial Sequence
  Description of Artificial Sequence: Synthetic oligonucleotide
uguuccaaccugcagagca

SEQ ID NO: 386210 - RNA, 19 nt, Artificial Sequence
  Description of Artificial Sequence: Synthetic oligonucleotide
aguuccauaugccaagcgg

SEQ ID NO: 386211 - RNA, 19 nt, Artificial Sequence
  Description of Artificial Sequence: Synthetic oligonucleotide
ugcaucauggcuucugacg

SEQ ID NO: 386212 - RNA, 19 nt, Artificial Sequence
  Description of Artificial Sequence: Synthetic oligonucleotide
aaugguccaaaauuaccug

SEQ ID NO: 386213 - RNA, 19 nt, Artificial Sequence
  Description of Artificial Sequence: Synthetic oligonucleotide
gucaaucgaacacugaugc

SEQ ID NO: 386214 - RNA, 19 nt, Artificial Sequence
  Description of Artificial Sequence: Synthetic oligonucleotide
ucgaguauugagaaggaac

SEQ ID NO: 386215 - RNA, 19 nt, Artificial Sequence
  Description of Artificial Sequence: Synthetic oligonucleotide
aaaugguccaaaauuaccu

SEQ ID NO: 386216 - RNA, 19 nt, Artificial Sequence
  Description of Artificial Sequence: Synthetic oligonucleotide
uguuacaccuuucugcaca

SEQ ID NO: 386217 - RNA, 19 nt, Artificial Sequence
  Description of Artificial Sequence: Synthetic oligonucleotide
aagucaaucgaacacugau

SEQ ID NO: 386218 - RNA, 19 nt, Artificial Sequence
  Description of Artificial Sequence: Synthetic oligonucleotide
gucagcagaaaauagacga

SEQ ID NO: 386219 - RNA, 19 nt, Artificial Sequence
  Description of Artificial Sequence: Synthetic oligonucleotide
agugagguagauucuuuac

SEQ ID NO: 386220 - RNA, 19 nt, Artificial Sequence
  Description of Artificial Sequence: Synthetic oligonucleotide
caaucgaacacugaugccg

SEQ ID NO: 386221 - RNA, 19 nt, Artificial Sequence
  Description of Artificial Sequence: Synthetic oligonucleotide
gauggaauguuccaaccug

SEQ ID NO: 386222 - RNA, 19 nt, Artificial Sequence
  Description of Artificial Sequence: Synthetic oligonucleotide
cuaguacacaaaaccaucc

SEQ ID NO: 386223 - RNA, 19 nt, Artificial Sequence
  Description of Artificial Sequence: Synthetic oligonucleotide
guugucuaagccuugagga

SEQ ID NO: 386224 - RNA, 19 nt, Artificial Sequence
  Description of Artificial Sequence: Synthetic oligonucleotide
gaauguuccaaccugcaga

SEQ ID NO: 386225 - RNA, 19 nt, Artificial Sequence
  Description of Artificial Sequence: Synthetic oligonucleotide
auagcuaucgucauguucu

SEQ ID NO: 386226 - RNA, 19 nt, Artificial Sequence
  Description of Artificial Sequence: Synthetic oligonucleotide
uggcucaacauuuugcuug

SEQ ID NO: 386227 - RNA, 19 nt, Artificial Sequence
  Description of Artificial Sequence: Synthetic oligonucleotide
guauugagaaggaacaugc

SEQ ID NO: 386228 - RNA, 19 nt, Artificial Sequence
  Description of Artificial Sequence: Synthetic oligonucleotide
gauguuacaccuuucugca

SEQ ID NO: 386229 - RNA, 19 nt, Artificial Sequence
  Description of Artificial Sequence: Synthetic oligonucleotide
ucuuucugaucagaggugg

SEQ ID NO: 386230 - RNA, 19 nt, Artificial Sequence
  Description of Artificial Sequence: Synthetic oligonucleotide
acugaagucaauccggggu

SEQ ID NO: 386231 - RNA, 19 nt, Artificial Sequence
  Description of Artificial Sequence: Synthetic oligonucleotide
ucaagucaaucgaacacug

SEQ ID NO: 386232 - RNA, 19 nt, Artificial Sequence
  Description of Artificial Sequence: Synthetic oligonucleotide
uggaugauugaauccaucu

SEQ ID NO: 386233 - RNA, 19 nt, Artificial Sequence
  Description of Artificial Sequence: Synthetic oligonucleotide
ucgagaucuccacugagca

SEQ ID NO: 386234 - RNA, 19 nt, Artificial Sequence
  Description of Artificial Sequence: Synthetic oligonucleotide
ucuggcucaacauuuugcu

SEQ ID NO: 386235 - RNA, 19 nt, Artificial Sequence
  Description of Artificial Sequence: Synthetic oligonucleotide
aagucaauccgggguaagc

SEQ ID NO: 386236 - RNA, 19 nt, Artificial Sequence
  Description of Artificial Sequence: Synthetic oligonucleotide
uccgggguaagcuugagaa

SEQ ID NO: 386237 - RNA, 19 nt, Artificial Sequence
  Description of Artificial Sequence: Synthetic oligonucleotide
cagguuucuacauauugug

SEQ ID NO: 386238 - RNA, 19 nt, Artificial Sequence
  Description of Artificial Sequence: Synthetic oligonucleotide
uaucgucauguucuccucg

SEQ ID NO: 386239 - RNA, 19 nt, Artificial Sequence
  Description of Artificial Sequence: Synthetic oligonucleotide
agcuugagaacugaacugg

SEQ ID NO: 386240 - RNA, 19 nt, Artificial Sequence
  Description of Artificial Sequence: Synthetic oligonucleotide
uaauucuuggucugcaauc

SEQ ID NO: 386241 - RNA, 19 nt, Artificial Sequence
  Description of Artificial Sequence: Synthetic oligonucleotide
auagacgaauucuuucuug

SEQ ID NO: 386242 - RNA, 19 nt, Artificial Sequence
  Description of Artificial Sequence: Synthetic oligonucleotide
ucaauccgggguaagcuug

SEQ ID NO: 386243 - RNA, 19 nt, Artificial Sequence
  Description of Artificial Sequence: Synthetic oligonucleotide
agagaaucucucgagaucu

SEQ ID NO: 386244 - RNA, 19 nt, Artificial Sequence
  Description of Artificial Sequence: Synthetic oligonucleotide
ucuaccaggacccgagaga

SEQ ID NO: 386245 - RNA, 19 nt, Artificial Sequence
  Description of Artificial Sequence: Synthetic oligonucleotide
guuccauaugccaagcggg

SEQ ID NO: 386246 - RNA, 19 nt, Artificial Sequence
  Description of Artificial Sequence: Synthetic oligonucleotide
uucuucaagucaaucgaac

SEQ ID NO: 386247 - RNA, 19 nt, Artificial Sequence
  Description of Artificial Sequence: Synthetic oligonucleotide
uauugagaaggaacaugcc

SEQ ID NO: 386248 - RNA, 19 nt, Artificial Sequence
  Description of Artificial Sequence: Synthetic oligonucleotide
uacauauugugugugugug

SEQ ID NO: 386249 - RNA, 19 nt, Artificial Sequence
  Description of Artificial Sequence: Synthetic oligonucleotide
aauagacgaauucuuucuu

SEQ ID NO: 386250 - RNA, 19 nt, Artificial Sequence
  Description of Artificial Sequence: Synthetic oligonucleotide
ugcuaguacacaaaaccau

SEQ ID NO: 386251 - RNA, 19 nt, Artificial Sequence
  Description of Artificial Sequence: Synthetic oligonucleotide
ugcuauuuccccaggagau

SEQ ID NO: 386252 - RNA, 19 nt, Artificial Sequence
  Description of Artificial Sequence: Synthetic oligonucleotide
uucaagucaaucgaacacu

SEQ ID NO: 386253 - RNA, 19 nt, Artificial Sequence
  Description of Artificial Sequence: Synthetic oligonucleotide
uggcucauaauagucaucu

SEQ ID NO: 386254 - RNA, 19 nt, Artificial Sequence
  Description of Artificial Sequence: Synthetic oligonucleotide
agaaucucucgagaucucc

SEQ ID NO: 386255 - RNA, 19 nt, Artificial Sequence
  Description of Artificial Sequence: Synthetic oligonucleotide
gaaaucaccuucaaucuga

SEQ ID NO: 386256 - RNA, 19 nt, Artificial Sequence
  Description of Artificial Sequence: Synthetic oligonucleotide
agcucgguccuguugcugc

SEQ ID NO: 386257 - RNA, 19 nt, Artificial Sequence
  Description of Artificial Sequence: Synthetic oligonucleotide
gagcauggcgaccuggccg

SEQ ID NO: 386258 - RNA, 19 nt, Artificial Sequence
  Description of Artificial Sequence: Synthetic oligonucleotide
uagacgaauucuuucuugu

SEQ ID NO: 386259 - RNA, 19 nt, Artificial Sequence
  Description of Artificial Sequence: Synthetic oligonucleotide
ucucucgagaucuccacug

SEQ ID NO: 386260 - RNA, 19 nt, Artificial Sequence
  Description of Artificial Sequence: Synthetic oligonucleotide
uauugugugugugugugug

SEQ ID NO: 386261 - RNA, 19 nt, Artificial Sequence
  Description of Artificial Sequence: Synthetic oligonucleotide
gagguagauucuuuacugc

SEQ ID NO: 386262 - RNA, 19 nt, Artificial Sequence
  Description of Artificial Sequence: Synthetic oligonucleotide
cuguucuucgaguauugag

SEQ ID NO: 386263 - RNA, 19 nt, Artificial Sequence
  Description of Artificial Sequence: Synthetic oligonucleotide
ugauguagagcauggcgac

SEQ ID NO: 386264 - RNA, 19 nt, Artificial Sequence
  Description of Artificial Sequence: Synthetic oligonucleotide
cuaucuuugccugagcuuc

SEQ ID NO: 386265 - RNA, 19 nt, Artificial Sequence
  Description of Artificial Sequence: Synthetic oligonucleotide
ugcuauuggggucgacugg

SEQ ID NO: 386266 - RNA, 19 nt, Artificial Sequence
  Description of Artificial Sequence: Synthetic oligonucleotide
gcaaggacagcucaugcgg

SEQ ID NO: 386267 - RNA, 19 nt, Artificial Sequence
  Description of Artificial Sequence: Synthetic oligonucleotide
cauauugugugugugugug

SEQ ID NO: 386268 - RNA, 19 nt, Artificial Sequence
  Description of Artificial Sequence: Synthetic oligonucleotide
uuccauaugccaagcgggc

SEQ ID NO: 386269 - RNA, 19 nt, Artificial Sequence
  Description of Artificial Sequence: Synthetic oligonucleotide
ggugaaauuuucuacaucu

SEQ ID NO: 386270 - RNA, 19 nt, Artificial Sequence
  Description of Artificial Sequence: Synthetic oligonucleotide
augauguuacaccuuucug

SEQ ID NO: 386271 - RNA, 19 nt, Artificial Sequence
  Description of Artificial Sequence: Synthetic oligonucleotide
caguugauguagagcaugg

SEQ ID NO: 386272 - RNA, 19 nt, Artificial Sequence
  Description of Artificial Sequence: Synthetic oligonucleotide
uuccugucuaucuuucuga

SEQ ID NO: 386273 - RNA, 19 nt, Artificial Sequence
  Description of Artificial Sequence: Synthetic oligonucleotide
cuaagccuugaggagaugc

SEQ ID NO: 386274 - RNA, 19 nt, Artificial Sequence
  Description of Artificial Sequence: Synthetic oligonucleotide
augcggguuggccagcagc

SEQ ID NO: 386275 - RNA, 19 nt, Artificial Sequence
  Description of Artificial Sequence: Synthetic oligonucleotide
accaggacccgagagaauc

SEQ ID NO: 386276 - RNA, 19 nt, Artificial Sequence
  Description of Artificial Sequence: Synthetic oligonucleotide
ugaaccugagcuagaugca

SEQ ID NO: 386277 - RNA, 19 nt, Artificial Sequence
  Description of Artificial Sequence: Synthetic oligonucleotide
auugugugugugugugugg

SEQ ID NO: 386278 - RNA, 19 nt, Artificial Sequence
  Description of Artificial Sequence: Synthetic oligonucleotide
agagcauggcgaccuggcc

SEQ ID NO: 386279 - RNA, 19 nt, Artificial Sequence
  Description of Artificial Sequence: Synthetic oligonucleotide
cucgagaucuccacugagc

SEQ ID NO: 386280 - RNA, 19 nt, Artificial Sequence
  Description of Artificial Sequence: Synthetic oligonucleotide
augcuauuggggucgacug

SEQ ID NO: 386281 - RNA, 19 nt, Artificial Sequence
  Description of Artificial Sequence: Synthetic oligonucleotide
ucucgagaucuccacugag

SEQ ID NO: 386282 - RNA, 19 nt, Artificial Sequence
  Description of Artificial Sequence: Synthetic oligonucleotide
aguccuagaagcaugucca

SEQ ID NO: 386283 - RNA, 19 nt, Artificial Sequence
  Description of Artificial Sequence: Synthetic oligonucleotide
ucaaucgaacacugaugcc

SEQ ID NO: 386284 - RNA, 19 nt, Artificial Sequence
  Description of Artificial Sequence: Synthetic oligonucleotide
uguguguguguggugagug

SEQ ID NO: 386285 - RNA, 19 nt, Artificial Sequence
  Description of Artificial Sequence: Synthetic oligonucleotide
gacccgagagaaucucucg

SEQ ID NO: 386286 - RNA, 19 nt, Artificial Sequence
  Description of Artificial Sequence: Synthetic oligonucleotide
gcuacugaagucaauccgg

SEQ ID NO: 386287 - RNA, 19 nt, Artificial Sequence
  Description of Artificial Sequence: Synthetic oligonucleotide
acagggugcccguucacuc

SEQ ID NO: 386288 - RNA, 19 nt, Artificial Sequence
  Description of Artificial Sequence: Synthetic oligonucleotide
ucaaucugaaccugagcua

SEQ ID NO: 386289 - RNA, 19 nt, Artificial Sequence
  Description of Artificial Sequence: Synthetic oligonucleotide
gugggugaaauuuucuaca

SEQ ID NO: 386290 - RNA, 19 nt, Artificial Sequence
  Description of Artificial Sequence: Synthetic oligonucleotide
agucaacgaaggcuuucac

SEQ ID NO: 386291 - RNA, 19 nt, Artificial Sequence
  Description of Artificial Sequence: Synthetic oligonucleotide
acuacaugcaucauggcuu

SEQ ID NO: 386292 - RNA, 19 nt, Artificial Sequence
  Description of Artificial Sequence: Synthetic oligonucleotide
gagagaaucucucgagauc

SEQ ID NO: 386293 - RNA, 19 nt, Artificial Sequence
  Description of Artificial Sequence: Synthetic oligonucleotide
ucugaaccugagcuagaug

SEQ ID NO: 386294 - RNA, 19 nt, Artificial Sequence
  Description of Artificial Sequence: Synthetic oligonucleotide
gagcuagaugcacucuucc

SEQ ID NO: 386295 - RNA, 19 nt, Artificial Sequence
  Description of Artificial Sequence: Synthetic oligonucleotide
ugagcuagaugcacucuuc

SEQ ID NO: 386296 - RNA, 19 nt, Artificial Sequence
  Description of Artificial Sequence: Synthetic oligonucleotide
uagaugcacucuuccaaug

SEQ ID NO: 386297 - RNA, 19 nt, Artificial Sequence
  Description of Artificial Sequence: Synthetic oligonucleotide
agccuugaggagaugcugc

SEQ ID NO: 386298 - RNA, 19 nt, Artificial Sequence
  Description of Artificial Sequence: Synthetic oligonucleotide
uucuucgaguauugagaag

SEQ ID NO: 386299 - RNA, 19 nt, Artificial Sequence
  Description of Artificial Sequence: Synthetic oligonucleotide
aaucgaacacugaugccgu

SEQ ID NO: 386300 - RNA, 19 nt, Artificial Sequence
  Description of Artificial Sequence: Synthetic oligonucleotide
augcaucauggcuucugac

SEQ ID NO: 386301 - RNA, 19 nt, Artificial Sequence
  Description of Artificial Sequence: Synthetic oligonucleotide
ugcggguuggccagcagca

SEQ ID NO: 386302 - RNA, 19 nt, Artificial Sequence
  Description of Artificial Sequence: Synthetic oligonucleotide
agcgggcacacucugggag

SEQ ID NO: 386303 - RNA, 19 nt, Artificial Sequence
  Description of Artificial Sequence: Synthetic oligonucleotide
uaauagucaucugggcacc

SEQ ID NO: 386304 - RNA, 19 nt, Artificial Sequence
  Description of Artificial Sequence: Synthetic oligonucleotide
ccuuauaucuucuucuauc

SEQ ID NO: 386305 - RNA, 19 nt, Artificial Sequence
  Description of Artificial Sequence: Synthetic oligonucleotide
uucacagggugcccguuca

SEQ ID NO: 386306 - RNA, 19 nt, Artificial Sequence
  Description of Artificial Sequence: Synthetic oligonucleotide
ucuaucuuugccugagcuu

SEQ ID NO: 386307 - RNA, 19 nt, Artificial Sequence
  Description of Artificial Sequence: Synthetic oligonucleotide
ggaugauugaauccaucug

SEQ ID NO: 386308 - RNA, 19 nt, Artificial Sequence
  Description of Artificial Sequence: Synthetic oligonucleotide
guucuucgaguauugagaa

SEQ ID NO: 386309 - RNA, 19 nt, Artificial Sequence
  Description of Artificial Sequence: Synthetic oligonucleotide
uguguguguguguggugag

SEQ ID NO: 386310 - RNA, 19 nt, Artificial Sequence
  Description of Artificial Sequence: Synthetic oligonucleotide
uauuuccccaggagaugag

SEQ ID NO: 386311 - RNA, 19 nt, Artificial Sequence
  Description of Artificial Sequence: Synthetic oligonucleotide
agucaaucgaacacugaug

SEQ ID NO: 386312 - RNA, 19 nt, Artificial Sequence
  Description of Artificial Sequence: Synthetic oligonucleotide
acauauugugugugugugu

SEQ ID NO: 386313 - RNA, 19 nt, Artificial Sequence
  Description of Artificial Sequence: Synthetic oligonucleotide
gaaggcuuucacagggugc

SEQ ID NO: 386314 - RNA, 19 nt, Artificial Sequence
  Description of Artificial Sequence: Synthetic oligonucleotide
cacagcuaugcuacugaag

SEQ ID NO: 386315 - RNA, 19 nt, Artificial Sequence
  Description of Artificial Sequence: Synthetic oligonucleotide
aacugaacuggagggcgag

SEQ ID NO: 386316 - RNA, 19 nt, Artificial Sequence
  Description of Artificial Sequence: Synthetic oligonucleotide
caacgaaggcuuucacagg

SEQ ID NO: 386317 - RNA, 19 nt, Artificial Sequence
  Description of Artificial Sequence: Synthetic oligonucleotide
cucgcccaguuccauaugc

SEQ ID NO: 386318 - RNA, 19 nt, Artificial Sequence
  Description of Artificial Sequence: Synthetic oligonucleotide
ugguccaaaauuaccuguu

SEQ ID NO: 386319 - RNA, 19 nt, Artificial Sequence
  Description of Artificial Sequence: Synthetic oligonucleotide
acugaugccguuugagcau

SEQ ID NO: 386320 - RNA, 19 nt, Artificial Sequence
  Description of Artificial Sequence: Synthetic oligonucleotide
ugagcauguccaguccuag

SEQ ID NO: 386321 - RNA, 19 nt, Artificial Sequence
  Description of Artificial Sequence: Synthetic oligonucleotide
gaugagugcugagacugug

SEQ ID NO: 386322 - RNA, 19 nt, Artificial Sequence
  Description of Artificial Sequence: Synthetic oligonucleotide
cuacaugcaucauggcuuc

SEQ ID NO: 386323 - RNA, 19 nt, Artificial Sequence
  Description of Artificial Sequence: Synthetic oligonucleotide
uucgagcucgguccuguug

SEQ ID NO: 386324 - RNA, 19 nt, Artificial Sequence
  Description of Artificial Sequence: Synthetic oligonucleotide
ggaaaucaccuucaaucug

SEQ ID NO: 386325 - RNA, 19 nt, Artificial Sequence
  Description of Artificial Sequence: Synthetic oligonucleotide
uguccauaggcuguucuuc

SEQ ID NO: 386326 - RNA, 19 nt, Artificial Sequence
  Description of Artificial Sequence: Synthetic oligonucleotide
uccggggccuccuccauag

SEQ ID NO: 386327 - RNA, 19 nt, Artificial Sequence
  Description of Artificial Sequence: Synthetic oligonucleotide
aucauggcuucugacgcuc

SEQ ID NO: 386328 - RNA, 19 nt, Artificial Sequence
  Description of Artificial Sequence: Synthetic oligonucleotide
uuguguguguguguguggu

SEQ ID NO: 386329 - RNA, 19 nt, Artificial Sequence
  Description of Artificial Sequence: Synthetic oligonucleotide
agucaauccgggguaagcu

SEQ ID NO: 386330 - RNA, 19 nt, Artificial Sequence
  Description of Artificial Sequence: Synthetic oligonucleotide
uggcuaugccagcccaccg

SEQ ID NO: 386331 - RNA, 19 nt, Artificial Sequence
  Description of Artificial Sequence: Synthetic oligonucleotide
auaggcuguucuucgagua

SEQ ID NO: 386332 - RNA, 19 nt, Artificial Sequence
  Description of Artificial Sequence: Synthetic oligonucleotide
ugcuaauucuuggucugca

SEQ ID NO: 386333 - RNA, 19 nt, Artificial Sequence
  Description of Artificial Sequence: Synthetic oligonucleotide
ugccuuauaucuucuucua

SEQ ID NO: 386334 - RNA, 19 nt, Artificial Sequence
  Description of Artificial Sequence: Synthetic oligonucleotide
agcauggcgaccuggccga

SEQ ID NO: 386335 - RNA, 19 nt, Artificial Sequence
  Description of Artificial Sequence: Synthetic oligonucleotide
uuucacagggugcccguuc

SEQ ID NO: 386336 - RNA, 19 nt, Artificial Sequence
  Description of Artificial Sequence: Synthetic oligonucleotide
cucuaccaggacccgagag

SEQ ID NO: 386337 - RNA, 19 nt, Artificial Sequence
  Description of Artificial Sequence: Synthetic oligonucleotide
ggaauguuccaaccugcag

SEQ ID NO: 386338 - RNA, 19 nt, Artificial Sequence
  Description of Artificial Sequence: Synthetic oligonucleotide
ucaugauguuacaccuuuc

SEQ ID NO: 386339 - RNA, 19 nt, Artificial Sequence
  Description of Artificial Sequence: Synthetic oligonucleotide
auauugugugugugugugu

SEQ ID NO: 386340 - RNA, 19 nt, Artificial Sequence
  Description of Artificial Sequence: Synthetic oligonucleotide
agcuaucgucauguucucc

SEQ ID NO: 386341 - RNA, 19 nt, Artificial Sequence
  Description of Artificial Sequence: Synthetic oligonucleotide
gcuauuggggucgacuggg

SEQ ID NO: 386342 - RNA, 19 nt, Artificial Sequence
  Description of Artificial Sequence: Synthetic oligonucleotide
ucgcccaguuccauaugcc

SEQ ID NO: 386343 - RNA, 19 nt, Artificial Sequence
  Description of Artificial Sequence: Synthetic oligonucleotide
uguguguguguguguggug

SEQ ID NO: 386344 - RNA, 19 nt, Artificial Sequence
  Description of Artificial Sequence: Synthetic oligonucleotide
uugagcauguccaguccua

SEQ ID NO: 386345 - RNA, 19 nt, Artificial Sequence
  Description of Artificial Sequence: Synthetic oligonucleotide
acccgagagaaucucucga

SEQ ID NO: 386346 - RNA, 19 nt, Artificial Sequence
  Description of Artificial Sequence: Synthetic oligonucleotide
uuggggucgacugggcuug

SEQ ID NO: 386347 - RNA, 19 nt, Artificial Sequence
  Description of Artificial Sequence: Synthetic oligonucleotide
cuccuucugccguaaauca

SEQ ID NO: 386348 - RNA, 19 nt, Artificial Sequence
  Description of Artificial Sequence: Synthetic oligonucleotide
aucucucgagaucuccacu

SEQ ID NO: 386349 - RNA, 19 nt, Artificial Sequence
  Description of Artificial Sequence: Synthetic oligonucleotide
cugcuauuuccccaggaga

SEQ ID NO: 386350 - RNA, 19 nt, Artificial Sequence
  Description of Artificial Sequence: Synthetic oligonucleotide
uugaauggcuucugcuaau

SEQ ID NO: 386351 - RNA, 19 nt, Artificial Sequence
  Description of Artificial Sequence: Synthetic oligonucleotide
gcuucugacgcucugcauc

SEQ ID NO: 386352 - RNA, 19 nt, Artificial Sequence
  Description of Artificial Sequence: Synthetic oligonucleotide
cuauuuccccaggagauga

SEQ ID NO: 386353 - RNA, 19 nt, Artificial Sequence
  Description of Artificial Sequence: Synthetic oligonucleotide
aaucuccuccggccguaug

SEQ ID NO: 386354 - RNA, 19 nt, Artificial Sequence
  Description of Artificial Sequence: Synthetic oligonucleotide
uaggcuguucuucgaguau

SEQ ID NO: 386355 - RNA, 19 nt, Artificial Sequence
  Description of Artificial Sequence: Synthetic oligonucleotide
aauagucaucugggcaccu

SEQ ID NO: 386356 - RNA, 19 nt, Artificial Sequence
  Description of Artificial Sequence: Synthetic oligonucleotide
uggguuccgcuccuucagc

SEQ ID NO: 386357 - RNA, 19 nt, Artificial Sequence
  Description of Artificial Sequence: Synthetic oligonucleotide
cuaucgucauguucuccuc

SEQ ID NO: 386358 - RNA, 19 nt, Artificial Sequence
  Description of Artificial Sequence: Synthetic oligonucleotide
uucgaguauugagaaggaa

SEQ ID NO: 386359 - RNA, 19 nt, Artificial Sequence
  Description of Artificial Sequence: Synthetic oligonucleotide
cuugcagguuucuacauau

SEQ ID NO: 386360 - RNA, 19 nt, Artificial Sequence
  Description of Artificial Sequence: Synthetic oligonucleotide
cugaucagagguggccugg

SEQ ID NO: 386361 - RNA, 19 nt, Artificial Sequence
  Description of Artificial Sequence: Synthetic oligonucleotide
agacgaauucuuucuuguu

SEQ ID NO: 386362 - RNA, 19 nt, Artificial Sequence
  Description of Artificial Sequence: Synthetic oligonucleotide
acgcccuuggcuaugccag

SEQ ID NO: 386363 - RNA, 19 nt, Artificial Sequence
  Description of Artificial Sequence: Synthetic oligonucleotide
gcuagaugcacucuuccaa

SEQ ID NO: 386364 - RNA, 19 nt, Artificial Sequence
  Description of Artificial Sequence: Synthetic oligonucleotide
gcuaguacacaaaaccauc

SEQ ID NO: 386365 - RNA, 19 nt, Artificial Sequence
  Description of Artificial Sequence: Synthetic oligonucleotide
ugccaagcgggcacacucu

SEQ ID NO: 386366 - RNA, 19 nt, Artificial Sequence
  Description of Artificial Sequence: Synthetic oligonucleotide
ucuucgagcucgguccugu

SEQ ID NO: 386367 - RNA, 19 nt, Artificial Sequence
  Description of Artificial Sequence: Synthetic oligonucleotide
ugaagucaauccgggguaa

SEQ ID NO: 386368 - RNA, 19 nt, Artificial Sequence
  Description of Artificial Sequence: Synthetic oligonucleotide
cacuacaugcaucauggcu

SEQ ID NO: 386369 - RNA, 19 nt, Artificial Sequence
  Description of Artificial Sequence: Synthetic oligonucleotide
cgaguauugagaaggaaca

SEQ ID NO: 386370 - RNA, 19 nt, Artificial Sequence
  Description of Artificial Sequence: Synthetic oligonucleotide
gugugugugugugugguga

SEQ ID NO: 386371 - RNA, 19 nt, Artificial Sequence
  Description of Artificial Sequence: Synthetic oligonucleotide
uauguccucucgcccaguu

SEQ ID NO: 386372 - RNA, 19 nt, Artificial Sequence
  Description of Artificial Sequence: Synthetic oligonucleotide
cuucgaguauugagaagga

SEQ ID NO: 386373 - RNA, 19 nt, Artificial Sequence
  Description of Artificial Sequence: Synthetic oligonucleotide
guagauucuuuacugcuuu

SEQ ID NO: 386374 - RNA, 19 nt, Artificial Sequence
  Description of Artificial Sequence: Synthetic oligonucleotide
gcaguugauguagagcaug

SEQ ID NO: 386375 - RNA, 19 nt, Artificial Sequence
  Description of Artificial Sequence: Synthetic oligonucleotide
gaugcacucuuccaaugau

SEQ ID NO: 386376 - RNA, 19 nt, Artificial Sequence
  Description of Artificial Sequence: Synthetic oligonucleotide
caucugggcaccugaguca

SEQ ID NO: 386377 - RNA, 19 nt, Artificial Sequence
  Description of Artificial Sequence: Synthetic oligonucleotide
auaugccaagcgggcacac

SEQ ID NO: 386378 - RNA, 19 nt, Artificial Sequence
  Description of Artificial Sequence: Synthetic oligonucleotide
agggugcccguucacucug

SEQ ID NO: 386379 - RNA, 19 nt, Artificial Sequence
  Description of Artificial Sequence: Synthetic oligonucleotide
cuccauagcuaucgucaug

SEQ ID NO: 386380 - RNA, 19 nt, Artificial Sequence
  Description of Artificial Sequence: Synthetic oligonucleotide
aauccgggguaagcuugag

SEQ ID NO: 386381 - RNA, 19 nt, Artificial Sequence
  Description of Artificial Sequence: Synthetic oligonucleotide
aagcgggcacacucuggga

SEQ ID NO: 386382 - RNA, 19 nt, Artificial Sequence
  Description of Artificial Sequence: Synthetic oligonucleotide
ccaccgacggucuaccagc

SEQ ID NO: 386383 - RNA, 19 nt, Artificial Sequence
  Description of Artificial Sequence: Synthetic oligonucleotide
caagucaaucgaacacuga

SEQ ID NO: 386384 - RNA, 19 nt, Artificial Sequence
  Description of Artificial Sequence: Synthetic oligonucleotide
auagucaucugggcaccug

SEQ ID NO: 386385 - RNA, 19 nt, Artificial Sequence
  Description of Artificial Sequence: Synthetic oligonucleotide
agcccaccgacggucuacc

SEQ ID NO: 386386 - RNA, 19 nt, Artificial Sequence
  Description of Artificial Sequence: Synthetic oligonucleotide
aggcucuguuccuuagagu

SEQ ID NO: 386387 - RNA, 19 nt, Artificial Sequence
  Description of Artificial Sequence: Synthetic oligonucleotide
uggggcccacugcagcugc

SEQ ID NO: 386388 - RNA, 19 nt, Artificial Sequence
  Description of Artificial Sequence: Synthetic oligonucleotide
uccuagaagcauguccaua

SEQ ID NO: 386389 - RNA, 19 nt, Artificial Sequence
  Description of Artificial Sequence: Synthetic oligonucleotide
cuugaggagaugcugcuau

SEQ ID NO: 386390 - RNA, 19 nt, Artificial Sequence
  Description of Artificial Sequence: Synthetic oligonucleotide
caucugaagucagcaauga

SEQ ID NO: 386391 - RNA, 19 nt, Artificial Sequence
  Description of Artificial Sequence: Synthetic oligonucleotide
ucgaacacugaugccguuu

SEQ ID NO: 386392 - RNA, 19 nt, Artificial Sequence
  Description of Artificial Sequence: Synthetic oligonucleotide
ucucgcccaguuccauaug

SEQ ID NO: 386393 - RNA, 19 nt, Artificial Sequence
  Description of Artificial Sequence: Synthetic oligonucleotide
guuugaugugccaggcaca

SEQ ID NO: 386394 - RNA, 19 nt, Artificial Sequence
  Description of Artificial Sequence: Synthetic oligonucleotide
cuaccaggacccgagagaa

SEQ ID NO: 386395 - RNA, 19 nt, Artificial Sequence
  Description of Artificial Sequence: Synthetic oligonucleotide
gaacacugaugccguuuga

SEQ ID NO: 386396 - RNA, 19 nt, Artificial Sequence
  Description of Artificial Sequence: Synthetic oligonucleotide
gcucaugcggguuggccag

SEQ ID NO: 386397 - RNA, 19 nt, Artificial Sequence
  Description of Artificial Sequence: Synthetic oligonucleotide
uagcuaucgucauguucuc

SEQ ID NO: 386398 - RNA, 19 nt, Artificial Sequence
  Description of Artificial Sequence: Synthetic oligonucleotide
uucugccguaaaucacaac

SEQ ID NO: 386399 - RNA, 19 nt, Artificial Sequence
  Description of Artificial Sequence: Synthetic oligonucleotide
gcuaucgucauguucuccu

SEQ ID NO: 386400 - RNA, 19 nt, Artificial Sequence
  Description of Artificial Sequence: Synthetic oligonucleotide
ggcucuguuccuuagaguu

SEQ ID NO: 386401 - RNA, 19 nt, Artificial Sequence
  Description of Artificial Sequence: Synthetic oligonucleotide
auccgggguaagcuugaga

SEQ ID NO: 386402 - RNA, 19 nt, Artificial Sequence
  Description of Artificial Sequence: Synthetic oligonucleotide
cccgagagaaucucucgag

SEQ ID NO: 386403 - RNA, 19 nt, Artificial Sequence
  Description of Artificial Sequence: Synthetic oligonucleotide
ccauaugccaagcgggcac

SEQ ID NO: 386404 - RNA, 19 nt, Artificial Sequence
  Description of Artificial Sequence: Synthetic oligonucleotide
cuagaugcacucuuccaau

SEQ ID NO: 386405 - RNA, 19 nt, Artificial Sequence
  Description of Artificial Sequence: Synthetic oligonucleotide
cucaugauguuacaccuuu

SEQ ID NO: 386406 - RNA, 19 nt, Artificial Sequence
  Description of Artificial Sequence: Synthetic oligonucleotide
ccauaggcuguucuucgag

SEQ ID NO: 386407 - RNA, 19 nt, Artificial Sequence
  Description of Artificial Sequence: Synthetic oligonucleotide
cagccucaugauguuacac

SEQ ID NO: 386408 - RNA, 19 nt, Artificial Sequence
  Description of Artificial Sequence: Synthetic oligonucleotide
gaacugaacuggagggcga

SEQ ID NO: 386409 - RNA, 19 nt, Artificial Sequence
  Description of Artificial Sequence: Synthetic oligonucleotide
cguuugagcauguccaguc

SEQ ID NO: 386410 - RNA, 19 nt, Artificial Sequence
  Description of Artificial Sequence: Synthetic oligonucleotide
cggucuaccagccucauga

SEQ ID NO: 386411 - RNA, 19 nt, Artificial Sequence
  Description of Artificial Sequence: Synthetic oligonucleotide
caccgacggucuaccagcc

SEQ ID NO: 386412 - RNA, 19 nt, Artificial Sequence
  Description of Artificial Sequence: Synthetic oligonucleotide
cuucugccguaaaucacaa

SEQ ID NO: 386413 - RNA, 19 nt, Artificial Sequence
  Description of Artificial Sequence: Synthetic oligonucleotide
gcuaugccagcccaccgac

SEQ ID NO: 386414 - RNA, 19 nt, Artificial Sequence
  Description of Artificial Sequence: Synthetic oligonucleotide
cagugagguagauucuuua

SEQ ID NO: 386415 - RNA, 19 nt, Artificial Sequence
  Description of Artificial Sequence: Synthetic oligonucleotide
agggguuugggagccugug

SEQ ID NO: 386416 - RNA, 19 nt, Artificial Sequence
  Description of Artificial Sequence: Synthetic oligonucleotide
uucugccaaggguggguuc

SEQ ID NO: 386417 - RNA, 19 nt, Artificial Sequence
  Description of Artificial Sequence: Synthetic oligonucleotide
gccguuugagcauguccag

SEQ ID NO: 386418 - RNA, 19 nt, Artificial Sequence
  Description of Artificial Sequence: Synthetic oligonucleotide
cauaggcuguucuucgagu

SEQ ID NO: 386419 - RNA, 19 nt, Artificial Sequence
  Description of Artificial Sequence: Synthetic oligonucleotide
ucuccuccggccguauguc

SEQ ID NO: 386420 - RNA, 19 nt, Artificial Sequence
  Description of Artificial Sequence: Synthetic oligonucleotide
ucuaagccuugaggagaug

SEQ ID NO: 386421 - RNA, 19 nt, Artificial Sequence
  Description of Artificial Sequence: Synthetic oligonucleotide
cucucgagaucuccacuga

SEQ ID NO: 386422 - RNA, 19 nt, Artificial Sequence
  Description of Artificial Sequence: Synthetic oligonucleotide
ucaugcggguuggccagca

SEQ ID NO: 386423 - RNA, 19 nt, Artificial Sequence
  Description of Artificial Sequence: Synthetic oligonucleotide
caauccgggguaagcuuga

SEQ ID NO: 386424 - RNA, 19 nt, Artificial Sequence
  Description of Artificial Sequence: Synthetic oligonucleotide
gcuauuuccccaggagaug

SEQ ID NO: 386425 - RNA, 19 nt, Artificial Sequence
  Description of Artificial Sequence: Synthetic oligonucleotide
gccucaugauguuacaccu

SEQ ID NO: 386426 - RNA, 19 nt, Artificial Sequence
  Description of Artificial Sequence: Synthetic oligonucleotide
gccguauguccucucgccc

SEQ ID NO: 386427 - RNA, 19 nt, Artificial Sequence
  Description of Artificial Sequence: Synthetic oligonucleotide
aagggguuugggagccugu

SEQ ID NO: 386428 - RNA, 19 nt, Artificial Sequence
  Description of Artificial Sequence: Synthetic oligonucleotide
cucuuccaaugaucuucug

SEQ ID NO: 386429 - RNA, 19 nt, Artificial Sequence
  Description of Artificial Sequence: Synthetic oligonucleotide
cuguuccuuagaguucguc

SEQ ID NO: 386430 - RNA, 19 nt, Artificial Sequence
  Description of Artificial Sequence: Synthetic oligonucleotide
gaugccguuugagcauguc

SEQ ID NO: 386431 - RNA, 19 nt, Artificial Sequence
  Description of Artificial Sequence: Synthetic oligonucleotide
gaccuggccgaagcucucc

SEQ ID NO: 386432 - RNA, 19 nt, Artificial Sequence
  Description of Artificial Sequence: Synthetic oligonucleotide
uguucucuucgagcucggu

SEQ ID NO: 386433 - RNA, 19 nt, Artificial Sequence
  Description of Artificial Sequence: Synthetic oligonucleotide
gugcccacgcccuuggcua

SEQ ID NO: 386434 - RNA, 19 nt, Artificial Sequence
  Description of Artificial Sequence: Synthetic oligonucleotide
gaguauugagaaggaacau

SEQ ID NO: 386435 - RNA, 19 nt, Artificial Sequence
  Description of Artificial Sequence: Synthetic oligonucleotide
ggcacacucugggagcucc

SEQ ID NO: 386436 - RNA, 19 nt, Artificial Sequence
  Description of Artificial Sequence: Synthetic oligonucleotide
agaugagugcugagacugu

SEQ ID NO: 386437 - RNA, 19 nt, Artificial Sequence
  Description of Artificial Sequence: Synthetic oligonucleotide
cauguccauaggcuguucu

SEQ ID NO: 386438 - RNA, 19 nt, Artificial Sequence
  Description of Artificial Sequence: Synthetic oligonucleotide
cauaugccaagcgggcaca

SEQ ID NO: 386439 - RNA, 19 nt, Artificial Sequence
  Description of Artificial Sequence: Synthetic oligonucleotide
ggcuaugccagcccaccga

SEQ ID NO: 386440 - RNA, 19 nt, Artificial Sequence
  Description of Artificial Sequence: Synthetic oligonucleotide
auucccagugagguagauu

SEQ ID NO: 386441 - RNA, 19 nt, Artificial Sequence
  Description of Artificial Sequence: Synthetic oligonucleotide
ggcuguucuucgaguauug

SEQ ID NO: 386442 - RNA, 19 nt, Artificial Sequence
  Description of Artificial Sequence: Synthetic oligonucleotide
caggacccgagagaaucuc

SEQ ID NO: 386443 - RNA, 19 nt, Artificial Sequence
  Description of Artificial Sequence: Synthetic oligonucleotide
aggacccgagagaaucucu

SEQ ID NO: 386444 - RNA, 19 nt, Artificial Sequence
  Description of Artificial Sequence: Synthetic oligonucleotide
auauucccagugagguaga

SEQ ID NO: 386445 - RNA, 19 nt, Artificial Sequence
  Description of Artificial Sequence: Synthetic oligonucleotide
gcgagggucugcauucucc

SEQ ID NO: 386446 - RNA, 19 nt, Artificial Sequence
  Description of Artificial Sequence: Synthetic oligonucleotide
gcuuccagaucaaaggggu

SEQ ID NO: 386447 - RNA, 19 nt, Artificial Sequence
  Description of Artificial Sequence: Synthetic oligonucleotide
cccaccgacggucuaccag

SEQ ID NO: 386448 - RNA, 19 nt, Artificial Sequence
  Description of Artificial Sequence: Synthetic oligonucleotide
gggguaagcuugagaacug

SEQ ID NO: 386449 - RNA, 19 nt, Artificial Sequence
  Description of Artificial Sequence: Synthetic oligonucleotide
caugcggguuggccagcag

SEQ ID NO: 386450 - RNA, 19 nt, Artificial Sequence
  Description of Artificial Sequence: Synthetic oligonucleotide
gguaagcuugagaacugaa

SEQ ID NO: 386451 - RNA, 19 nt, Artificial Sequence
  Description of Artificial Sequence: Synthetic oligonucleotide
gucaauccgggguaagcuu

SEQ ID NO: 386452 - RNA, 19 nt, Artificial Sequence
  Description of Artificial Sequence: Synthetic oligonucleotide
acgaaggcuuucacagggu

SEQ ID NO: 386453 - RNA, 19 nt, Artificial Sequence
  Description of Artificial Sequence: Synthetic oligonucleotide
accgacggucuaccagccu

SEQ ID NO: 386454 - RNA, 19 nt, Artificial Sequence
  Description of Artificial Sequence: Synthetic oligonucleotide
ggcuggguugucuaagccu

SEQ ID NO: 386455 - RNA, 19 nt, Artificial Sequence
  Description of Artificial Sequence: Synthetic oligonucleotide
ggacccgagagaaucucuc

SEQ ID NO: 386456 - RNA, 19 nt, Artificial Sequence
  Description of Artificial Sequence: Synthetic oligonucleotide
aucgaacacugaugccguu

SEQ ID NO: 386457 - RNA, 19 nt, Artificial Sequence
  Description of Artificial Sequence: Synthetic oligonucleotide
acucugcaguugauguaga

SEQ ID NO: 386458 - RNA, 19 nt, Artificial Sequence
  Description of Artificial Sequence: Synthetic oligonucleotide
cauggcgaccuggccgaag

SEQ ID NO: 386459 - RNA, 19 nt, Artificial Sequence
  Description of Artificial Sequence: Synthetic oligonucleotide
cugagcuagaugcacucuu

SEQ ID NO: 386460 - RNA, 19 nt, Artificial Sequence
  Description of Artificial Sequence: Synthetic oligonucleotide
cucucgcccaguuccauau

SEQ ID NO: 386461 - RNA, 19 nt, Artificial Sequence
  Description of Artificial Sequence: Synthetic oligonucleotide
gcuugagaacugaacugga

SEQ ID NO: 386462 - RNA, 19 nt, Artificial Sequence
  Description of Artificial Sequence: Synthetic oligonucleotide
uucugacgcucugcauccu

SEQ ID NO: 386463 - RNA, 19 nt, Artificial Sequence
  Description of Artificial Sequence: Synthetic oligonucleotide
ggguuugaugugccaggca

SEQ ID NO: 386464 - RNA, 19 nt, Artificial Sequence
  Description of Artificial Sequence: Synthetic oligonucleotide
ccgggguaagcuugagaac

SEQ ID NO: 386465 - RNA, 19 nt, Artificial Sequence
  Description of Artificial Sequence: Synthetic oligonucleotide
cagcccaccgacggucuac

SEQ ID NO: 386466 - RNA, 19 nt, Artificial Sequence
  Description of Artificial Sequence: Synthetic oligonucleotide
ccggccguauguccucucg

SEQ ID NO: 386467 - RNA, 19 nt, Artificial Sequence
  Description of Artificial Sequence: Synthetic oligonucleotide
ggguaagcuugagaacuga

SEQ ID NO: 386468 - RNA, 19 nt, Artificial Sequence
  Description of Artificial Sequence: Synthetic oligonucleotide
ccguauguccucucgccca

SEQ ID NO: 386469 - RNA, 19 nt, Artificial Sequence
  Description of Artificial Sequence: Synthetic oligonucleotide
ccgagagaaucucucgaga

SEQ ID NO: 386470 - RNA, 19 nt, Artificial Sequence
  Description of Artificial Sequence: Synthetic oligonucleotide
cucaugcggguuggccagc

SEQ ID NO: 386471 - RNA, 19 nt, Artificial Sequence
  Description of Artificial Sequence: Synthetic oligonucleotide
cguauguccucucgcccag

SEQ ID NO: 386472 - RNA, 19 nt, Artificial Sequence
  Description of Artificial Sequence: Synthetic oligonucleotide
gguuccgcuccuucagcaa

SEQ ID NO: 386473 - RNA, 19 nt, Artificial Sequence
  Description of Artificial Sequence: Synthetic oligonucleotide
gcucuguuccuuagaguuc

SEQ ID NO: 386474 - RNA, 19 nt, Artificial Sequence
  Description of Artificial Sequence: Synthetic oligonucleotide
gguccaaaauuaccuguuu

SEQ ID NO: 386475 - RNA, 19 nt, Artificial Sequence
  Description of Artificial Sequence: Synthetic oligonucleotide
uccggccguauguccucuc

SEQ ID NO: 386476 - RNA, 19 nt, Artificial Sequence
  Description of Artificial Sequence: Synthetic oligonucleotide
cuggcucaacauuuugcuu

SEQ ID NO: 386477 - RNA, 19 nt, Artificial Sequence
  Description of Artificial Sequence: Synthetic oligonucleotide
guccuagaagcauguccau

SEQ ID NO: 386478 - RNA, 19 nt, Artificial Sequence
  Description of Artificial Sequence: Synthetic oligonucleotide
ggucuggggcccacugcag

SEQ ID NO: 386479 - RNA, 19 nt, Artificial Sequence
  Description of Artificial Sequence: Synthetic oligonucleotide
cagggugcccguucacucu

SEQ ID NO: 386480 - RNA, 19 nt, Artificial Sequence
  Description of Artificial Sequence: Synthetic oligonucleotide
gccuuauaucuucuucuau

SEQ ID NO: 386481 - RNA, 19 nt, Artificial Sequence
  Description of Artificial Sequence: Synthetic oligonucleotide
gcccaguuccauaugccaa

SEQ ID NO: 386482 - RNA, 19 nt, Artificial Sequence
  Description of Artificial Sequence: Synthetic oligonucleotide
guguguguguguggugagu

SEQ ID NO: 386483 - RNA, 19 nt, Artificial Sequence
  Description of Artificial Sequence: Synthetic oligonucleotide
cgagagaaucucucgagau

SEQ ID NO: 386484 - RNA, 19 nt, Artificial Sequence
  Description of Artificial Sequence: Synthetic oligonucleotide
cgggguaagcuugagaacu

SEQ ID NO: 386485 - RNA, 19 nt, Artificial Sequence
  Description of Artificial Sequence: Synthetic oligonucleotide
gcucuaccaggacccgaga

SEQ ID NO: 386486 - RNA, 19 nt, Artificial Sequence
  Description of Artificial Sequence: Synthetic oligonucleotide
cgcccaguuccauaugcca

SEQ ID NO: 386487 - RNA, 19 nt, Artificial Sequence
  Description of Artificial Sequence: Synthetic oligonucleotide
ccuccggccguauguccuc

SEQ ID NO: 386488 - RNA, 19 nt, Artificial Sequence
  Description of Artificial Sequence: Synthetic oligonucleotide
cgacggucuaccagccuca

SEQ ID NO: 386489 - RNA, 19 nt, Artificial Sequence
  Description of Artificial Sequence: Synthetic oligonucleotide
gacggucuaccagccucau

SEQ ID NO: 386490 - RNA, 19 nt, Artificial Sequence
  Description of Artificial Sequence: Synthetic oligonucleotide
cuccggggccuccuccaua

SEQ ID NO: 386491 - RNA, 19 nt, Artificial Sequence
  Description of Artificial Sequence: Synthetic oligonucleotide
cacacacuacaugcaucau

SEQ ID NO: 386492 - RNA, 19 nt, Artificial Sequence
  Description of Artificial Sequence: Synthetic oligonucleotide
guauguccucucgcccagu

SEQ ID NO: 386493 - RNA, 19 nt, Artificial Sequence
  Description of Artificial Sequence: Synthetic oligonucleotide
ccucucgcccaguuccaua

SEQ ID NO: 386494 - RNA, 19 nt, Artificial Sequence
  Description of Artificial Sequence: Synthetic oligonucleotide
cuucgagcucgguccuguu

SEQ ID NO: 386495 - RNA, 19 nt, Artificial Sequence
  Description of Artificial Sequence: Synthetic oligonucleotide
cgaccuggccgaagcucuc

SEQ ID NO: 386496 - RNA, 19 nt, Artificial Sequence
  Description of Artificial Sequence: Synthetic oligonucleotide
ccugagcuagaugcacucu

SEQ ID NO: 386497 - RNA, 19 nt, Artificial Sequence
  Description of Artificial Sequence: Synthetic oligonucleotide
cccagugagguagauucuu

SEQ ID NO: 386498 - RNA, 19 nt, Artificial Sequence
  Description of Artificial Sequence: Synthetic oligonucleotide
caaucuccuccggccguau

SEQ ID NO: 386499 - RNA, 19 nt, Artificial Sequence
  Description of Artificial Sequence: Synthetic oligonucleotide
ccguuugagcauguccagu

SEQ ID NO: 386500 - RNA, 19 nt, Artificial Sequence
  Description of Artificial Sequence: Synthetic oligonucleotide
cuccggccguauguccucu

SEQ ID NO: 386501 - RNA, 19 nt, Artificial Sequence
  Description of Artificial Sequence: Synthetic oligonucleotide
ggggcccacugcagcugca

SEQ ID NO: 386502 - RNA, 19 nt, Artificial Sequence
  Description of Artificial Sequence: Synthetic oligonucleotide
ggagggcgagggucugcau

SEQ ID NO: 386503 - RNA, 19 nt, Artificial Sequence
  Description of Artificial Sequence: Synthetic oligonucleotide
ccucgauguucugcugccu

SEQ ID NO: 386504 - RNA, 19 nt, Artificial Sequence
  Description of Artificial Sequence: Synthetic oligonucleotide
ccagcccaccgacggucua

SEQ ID NO: 386505 - RNA, 19 nt, Artificial Sequence
  Description of Artificial Sequence: Synthetic oligonucleotide
acggauacaacuuacaacc

SEQ ID NO: 386506 - RNA, 19 nt, Artificial Sequence
  Description of Artificial Sequence: Synthetic oligonucleotide
aaauaaacuauacuugggg

SEQ ID NO: 386507 - RNA, 19 nt, Artificial Sequence
  Description of Artificial Sequence: Synthetic oligonucleotide
cuuucuaaaauccaggugc

SEQ ID NO: 386508 - RNA, 19 nt, Artificial Sequence
  Description of Artificial Sequence: Synthetic oligonucleotide
auacaaagggacuugacac

SEQ ID NO: 386509 - RNA, 19 nt, Artificial Sequence
  Description of Artificial Sequence: Synthetic oligonucleotide
uuuaaugaguuuaucagca

SEQ ID NO: 386510 - RNA, 19 nt, Artificial Sequence
  Description of Artificial Sequence: Synthetic oligonucleotide
gauacuauuacagguaggg

SEQ ID NO: 386511 - RNA, 19 nt, Artificial Sequence
  Description of Artificial Sequence: Synthetic oligonucleotide
aaauuugcugccucugagc

SEQ ID NO: 386512 - RNA, 19 nt, Artificial Sequence
  Description of Artificial Sequence: Synthetic oligonucleotide
aggauugucauacuggguc

SEQ ID NO: 386513 - RNA, 19 nt, Artificial Sequence
  Description of Artificial Sequence: Synthetic oligonucleotide
uacgcuacaguauagggcc

SEQ ID NO: 386514 - RNA, 19 nt, Artificial Sequence
  Description of Artificial Sequence: Synthetic oligonucleotide
guguauauagcuuacugag

SEQ ID NO: 386515 - RNA, 19 nt, Artificial Sequence
  Description of Artificial Sequence: Synthetic oligonucleotide
ugaguuuaucagcagauga

SEQ ID NO: 386516 - RNA, 19 nt, Artificial Sequence
  Description of Artificial Sequence: Synthetic oligonucleotide
guauauagcuuacugagug

SEQ ID NO: 386517 - RNA, 19 nt, Artificial Sequence
  Description of Artificial Sequence: Synthetic oligonucleotide
uuucuaaaauccaggugcg

SEQ ID NO: 386518 - RNA, 19 nt, Artificial Sequence
  Description of Artificial Sequence: Synthetic oligonucleotide
agggacuugacacggauac

SEQ ID NO: 386519 - RNA, 19 nt, Artificial Sequence
  Description of Artificial Sequence: Synthetic oligonucleotide
gacuaagagaggcuggugg

SEQ ID NO: 386520 - RNA, 19 nt, Artificial Sequence
  Description of Artificial Sequence: Synthetic oligonucleotide
acaacuuacaaccuuucug

SEQ ID NO: 386521 - RNA, 19 nt, Artificial Sequence
  Description of Artificial Sequence: Synthetic oligonucleotide
uggaggauugucauacugg

SEQ ID NO: 386522 - RNA, 19 nt, Artificial Sequence
  Description of Artificial Sequence: Synthetic oligonucleotide
ugaacaagcaggccaaggc

SEQ ID NO: 386523 - RNA, 19 nt, Artificial Sequence
  Description of Artificial Sequence: Synthetic oligonucleotide
aaaacuugguagugugcac

SEQ ID NO: 386524 - RNA, 19 nt, Artificial Sequence
  Description of Artificial Sequence: Synthetic oligonucleotide
aagccacccucuuuaaccc

SEQ ID NO: 386525 - RNA, 19 nt, Artificial Sequence
  Description of Artificial Sequence: Synthetic oligonucleotide
aacccugagacgaugaggg

SEQ ID NO: 386526 - RNA, 19 nt, Artificial Sequence
  Description of Artificial Sequence: Synthetic oligonucleotide
uggauacuauuacagguag

SEQ ID NO: 386527 - RNA, 19 nt, Artificial Sequence
  Description of Artificial Sequence: Synthetic oligonucleotide
ugaccuaugaacuccaaaa

SEQ ID NO: 386528 - RNA, 19 nt, Artificial Sequence
  Description of Artificial Sequence: Synthetic oligonucleotide
uuggcaagaaaugucacag

SEQ ID NO: 386529 - RNA, 19 nt, Artificial Sequence
  Description of Artificial Sequence: Synthetic oligonucleotide
acuggauacuauuacaggu

SEQ ID NO: 386530 - RNA, 19 nt, Artificial Sequence
  Description of Artificial Sequence: Synthetic oligonucleotide
ugaugcuuguccaagauuu

SEQ ID NO: 386531 - RNA, 19 nt, Artificial Sequence
  Description of Artificial Sequence: Synthetic oligonucleotide
aaccucccuaacaugaugc

SEQ ID NO: 386532 - RNA, 19 nt, Artificial Sequence
  Description of Artificial Sequence: Synthetic oligonucleotide
cuuacaaccuuucuguuuc

SEQ ID NO: 386533 - RNA, 19 nt, Artificial Sequence
  Description of Artificial Sequence: Synthetic oligonucleotide
uauccaaaagaugccaggg

SEQ ID NO: 386534 - RNA, 19 nt, Artificial Sequence
  Description of Artificial Sequence: Synthetic oligonucleotide
aguuuaucagcagaugaac

SEQ ID NO: 386535 - RNA, 19 nt, Artificial Sequence
  Description of Artificial Sequence: Synthetic oligonucleotide
agaggcauagcaaggaccc

SEQ ID NO: 386536 - RNA, 19 nt, Artificial Sequence
  Description of Artificial Sequence: Synthetic oligonucleotide
aguguauauagcuuacuga

SEQ ID NO: 386537 - RNA, 19 nt, Artificial Sequence
  Description of Artificial Sequence: Synthetic oligonucleotide
uaaaucuacaacagaguuc

SEQ ID NO: 386538 - RNA, 19 nt, Artificial Sequence
  Description of Artificial Sequence: Synthetic oligonucleotide
gaacuuucuaaaauccagg

SEQ ID NO: 386539 - RNA, 19 nt, Artificial Sequence
  Description of Artificial Sequence: Synthetic oligonucleotide
acaguauagggccugccgg

SEQ ID NO: 386540 - RNA, 19 nt, Artificial Sequence
  Description of Artificial Sequence: Synthetic oligonucleotide
auaaacuauacuuggggau

SEQ ID NO: 386541 - RNA, 19 nt, Artificial Sequence
  Description of Artificial Sequence: Synthetic oligonucleotide
acacgauccacuucccacc

SEQ ID NO: 386542 - RNA, 19 nt, Artificial Sequence
  Description of Artificial Sequence: Synthetic oligonucleotide
uguuaccccagucuggccc

SEQ ID NO: 386543 - RNA, 19 nt, Artificial Sequence
  Description of Artificial Sequence: Synthetic oligonucleotide
uuuggcuuaacaggugugg

SEQ ID NO: 386544 - RNA, 19 nt, Artificial Sequence
  Description of Artificial Sequence: Synthetic oligonucleotide
uguguacugggcaauacaa

SEQ ID NO: 386545 - RNA, 19 nt, Artificial Sequence
  Description of Artificial Sequence: Synthetic oligonucleotide
agugacaccagugagacaa

SEQ ID NO: 386546 - RNA, 19 nt, Artificial Sequence
  Description of Artificial Sequence: Synthetic oligonucleotide
ugccguggaaaucacaaca

SEQ ID NO: 386547 - RNA, 19 nt, Artificial Sequence
  Description of Artificial Sequence: Synthetic oligonucleotide
agaacaauuacugggaaaa

SEQ ID NO: 386548 - RNA, 19 nt, Artificial Sequence
  Description of Artificial Sequence: Synthetic oligonucleotide
ugaugaguugaacucacuc

SEQ ID NO: 386549 - RNA, 19 nt, Artificial Sequence
  Description of Artificial Sequence: Synthetic oligonucleotide
aaaguugcggccaggaugu

SEQ ID NO: 386550 - RNA, 19 nt, Artificial Sequence
  Description of Artificial Sequence: Synthetic oligonucleotide
uguacugggcaauacaaua

SEQ ID NO: 386551 - RNA, 19 nt, Artificial Sequence
  Description of Artificial Sequence: Synthetic oligonucleotide
uuaaugaguuuaucagcag

SEQ ID NO: 386552 - RNA, 19 nt, Artificial Sequence
  Description of Artificial Sequence: Synthetic oligonucleotide
uaaagcguacgcuacagua

SEQ ID NO: 386553 - RNA, 19 nt, Artificial Sequence
  Description of Artificial Sequence: Synthetic oligonucleotide
ucauaugcuccccauauuu

SEQ ID NO: 386554 - RNA, 19 nt, Artificial Sequence
  Description of Artificial Sequence: Synthetic oligonucleotide
aacaugaugcuuguccaag

SEQ ID NO: 386555 - RNA, 19 nt, Artificial Sequence
  Description of Artificial Sequence: Synthetic oligonucleotide
uguauauagcuuacugagu

SEQ ID NO: 386556 - RNA, 19 nt, Artificial Sequence
  Description of Artificial Sequence: Synthetic oligonucleotide
agcaacaugcccacaacgc

SEQ ID NO: 386557 - RNA, 19 nt, Artificial Sequence
  Description of Artificial Sequence: Synthetic oligonucleotide
acuuucuaaaauccaggug

SEQ ID NO: 386558 - RNA, 19 nt, Artificial Sequence
  Description of Artificial Sequence: Synthetic oligonucleotide
ucagcuaaagcguacgcua

SEQ ID NO: 386559 - RNA, 19 nt, Artificial Sequence
  Description of Artificial Sequence: Synthetic oligonucleotide
acaucagauauucccagcu

SEQ ID NO: 386560 - RNA, 19 nt, Artificial Sequence
  Description of Artificial Sequence: Synthetic oligonucleotide
uuuccucucaaaacacuca

SEQ ID NO: 386561 - RNA, 19 nt, Artificial Sequence
  Description of Artificial Sequence: Synthetic oligonucleotide
aagcccaccuuuuauuaca

SEQ ID NO: 386562 - RNA, 19 nt, Artificial Sequence
  Description of Artificial Sequence: Synthetic oligonucleotide
uauauagcuuacugaguga

SEQ ID NO: 386563 - RNA, 19 nt, Artificial Sequence
  Description of Artificial Sequence: Synthetic oligonucleotide
aaacacacuggauacuauu

SEQ ID NO: 386564 - RNA, 19 nt, Artificial Sequence
  Description of Artificial Sequence: Synthetic oligonucleotide
acuugacacggauacaacu

SEQ ID NO: 386565 - RNA, 19 nt, Artificial Sequence
  Description of Artificial Sequence: Synthetic oligonucleotide
ggaggauugucauacuggg

SEQ ID NO: 386566 - RNA, 19 nt, Artificial Sequence
  Description of Artificial Sequence: Synthetic oligonucleotide
aaaggauacuggaggauug

SEQ ID NO: 386567 - RNA, 19 nt, Artificial Sequence
  Description of Artificial Sequence: Synthetic oligonucleotide
aagcaccauauugaacccc

SEQ ID NO: 386568 - RNA, 19 nt, Artificial Sequence
  Description of Artificial Sequence: Synthetic oligonucleotide
auaguuuggcuuaacaggu

SEQ ID NO: 386569 - RNA, 19 nt, Artificial Sequence
  Description of Artificial Sequence: Synthetic oligonucleotide
ucucugucgggugacaugc

SEQ ID NO: 386570 - RNA, 19 nt, Artificial Sequence
  Description of Artificial Sequence: Synthetic oligonucleotide
gacacgauccacuucccac

SEQ ID NO: 386571 - RNA, 19 nt, Artificial Sequence
  Description of Artificial Sequence: Synthetic oligonucleotide
cacggauacaacuuacaac

SEQ ID NO: 386572 - RNA, 19 nt, Artificial Sequence
  Description of Artificial Sequence: Synthetic oligonucleotide
uagggaacaugaacaagca

SEQ ID NO: 386573 - RNA, 19 nt, Artificial Sequence
  Description of Artificial Sequence: Synthetic oligonucleotide
aaagggacuugacacggau

SEQ ID NO: 386574 - RNA, 19 nt, Artificial Sequence
  Description of Artificial Sequence: Synthetic oligonucleotide
ucugaugcccaccgggcag

SEQ ID NO: 386575 - RNA, 19 nt, Artificial Sequence
  Description of Artificial Sequence: Synthetic oligonucleotide
caguguauauagcuuacug

SEQ ID NO: 386576 - RNA, 19 nt, Artificial Sequence
  Description of Artificial Sequence: Synthetic oligonucleotide
acccucuuuaacccucugc

SEQ ID NO: 386577 - RNA, 19 nt, Artificial Sequence
  Description of Artificial Sequence: Synthetic oligonucleotide
ugggcaauacaauaccaaa

SEQ ID NO: 386578 - RNA, 19 nt, Artificial Sequence
  Description of Artificial Sequence: Synthetic oligonucleotide
cagguagggaacaugaaca

SEQ ID NO: 386579 - RNA, 19 nt, Artificial Sequence
  Description of Artificial Sequence: Synthetic oligonucleotide
agcuggaaggaccucaaca

SEQ ID NO: 386580 - RNA, 19 nt, Artificial Sequence
  Description of Artificial Sequence: Synthetic oligonucleotide
uuaacccucugcauucugu

SEQ ID NO: 386581 - RNA, 19 nt, Artificial Sequence
  Description of Artificial Sequence: Synthetic oligonucleotide
uacaguguauauagcuuac

SEQ ID NO: 386582 - RNA, 19 nt, Artificial Sequence
  Description of Artificial Sequence: Synthetic oligonucleotide
cucacgaagaauggggagg

SEQ ID NO: 386583 - RNA, 19 nt, Artificial Sequence
  Description of Artificial Sequence: Synthetic oligonucleotide
uccaugucaggccacccug

SEQ ID NO: 386584 - RNA, 19 nt, Artificial Sequence
  Description of Artificial Sequence: Synthetic oligonucleotide
ggaacuuucuaaaauccag

SEQ ID NO: 386585 - RNA, 19 nt, Artificial Sequence
  Description of Artificial Sequence: Synthetic oligonucleotide
gaugaguugaacucacucu

SEQ ID NO: 386586 - RNA, 19 nt, Artificial Sequence
  Description of Artificial Sequence: Synthetic oligonucleotide
uaaacuauacuuggggaua

SEQ ID NO: 386587 - RNA, 19 nt, Artificial Sequence
  Description of Artificial Sequence: Synthetic oligonucleotide
uauugaaccccucccuccu

SEQ ID NO: 386588 - RNA, 19 nt, Artificial Sequence
  Description of Artificial Sequence: Synthetic oligonucleotide
agcuugugaccagauaugg

SEQ ID NO: 386589 - RNA, 19 nt, Artificial Sequence
  Description of Artificial Sequence: Synthetic oligonucleotide
aaccccacagcaacaugcc

SEQ ID NO: 386590 - RNA, 19 nt, Artificial Sequence
  Description of Artificial Sequence: Synthetic oligonucleotide
ugcaccagaccuguuaccc

SEQ ID NO: 386591 - RNA, 19 nt, Artificial Sequence
  Description of Artificial Sequence: Synthetic oligonucleotide
augucagugacaagccacc

SEQ ID NO: 386592 - RNA, 19 nt, Artificial Sequence
  Description of Artificial Sequence: Synthetic oligonucleotide
uuggcuuaacagguguggg

SEQ ID NO: 386593 - RNA, 19 nt, Artificial Sequence
  Description of Artificial Sequence: Synthetic oligonucleotide
gaacucacgucccauaucu

SEQ ID NO: 386594 - RNA, 19 nt, Artificial Sequence
  Description of Artificial Sequence: Synthetic oligonucleotide
gaacccugagacgaugagg

SEQ ID NO: 386595 - RNA, 19 nt, Artificial Sequence
  Description of Artificial Sequence: Synthetic oligonucleotide
agaacucacgucccauauc

SEQ ID NO: 386596 - RNA, 19 nt, Artificial Sequence
  Description of Artificial Sequence: Synthetic oligonucleotide
ugucagcuaaagcguacgc

SEQ ID NO: 386597 - RNA, 19 nt, Artificial Sequence
  Description of Artificial Sequence: Synthetic oligonucleotide
uucagagcauaguuuggcu

SEQ ID NO: 386598 - RNA, 19 nt, Artificial Sequence
  Description of Artificial Sequence: Synthetic oligonucleotide
aagcguacgcuacaguaua

SEQ ID NO: 386599 - RNA, 19 nt, Artificial Sequence
  Description of Artificial Sequence: Synthetic oligonucleotide
uauagggccugccggggcc

SEQ ID NO: 386600 - RNA, 19 nt, Artificial Sequence
  Description of Artificial Sequence: Synthetic oligonucleotide
caggcuacaucagauauuc

SEQ ID NO: 386601 - RNA, 19 nt, Artificial Sequence
  Description of Artificial Sequence: Synthetic oligonucleotide
uccccauauuuuaaugagu

SEQ ID NO: 386602 - RNA, 19 nt, Artificial Sequence
  Description of Artificial Sequence: Synthetic oligonucleotide
caguauagggccugccggg

SEQ ID NO: 386603 - RNA, 19 nt, Artificial Sequence
  Description of Artificial Sequence: Synthetic oligonucleotide
accaggcuacaucagauau

SEQ ID NO: 386604 - RNA, 19 nt, Artificial Sequence
  Description of Artificial Sequence: Synthetic oligonucleotide
uggcuuaacaggugugggc

SEQ ID NO: 386605 - RNA, 19 nt, Artificial Sequence
  Description of Artificial Sequence: Synthetic oligonucleotide
uugaccuaugaacuccaaa

SEQ ID NO: 386606 - RNA, 19 nt, Artificial Sequence
  Description of Artificial Sequence: Synthetic oligonucleotide
caacuuacaaccuuucugu

SEQ ID NO: 386607 - RNA, 19 nt, Artificial Sequence
  Description of Artificial Sequence: Synthetic oligonucleotide
aagggguaggcugugcucu

SEQ ID NO: 386608 - RNA, 19 nt, Artificial Sequence
  Description of Artificial Sequence: Synthetic oligonucleotide
acacggauacaacuuacaa

SEQ ID NO: 386609 - RNA, 19 nt, Artificial Sequence
  Description of Artificial Sequence: Synthetic oligonucleotide
ugcuccccauauuuuaaug

SEQ ID NO: 386610 - RNA, 19 nt, Artificial Sequence
  Description of Artificial Sequence: Synthetic oligonucleotide
agugugcacuccccugacc

SEQ ID NO: 386611 - RNA, 19 nt, Artificial Sequence
  Description of Artificial Sequence: Synthetic oligonucleotide
ucaaaacacucagugccca

SEQ ID NO: 386612 - RNA, 19 nt, Artificial Sequence
  Description of Artificial Sequence: Synthetic oligonucleotide
guacgcuacaguauagggc

SEQ ID NO: 386613 - RNA, 19 nt, Artificial Sequence
  Description of Artificial Sequence: Synthetic oligonucleotide
aggagguuggaaucugaug

SEQ ID NO: 386614 - RNA, 19 nt, Artificial Sequence
  Description of Artificial Sequence: Synthetic oligonucleotide
agccucacgaagaaugggg

SEQ ID NO: 386615 - RNA, 19 nt, Artificial Sequence
  Description of Artificial Sequence: Synthetic oligonucleotide
aggcaaagucuugaggcac

SEQ ID NO: 386616 - RNA, 19 nt, Artificial Sequence
  Description of Artificial Sequence: Synthetic oligonucleotide
auaugcuccccauauuuua

SEQ ID NO: 386617 - RNA, 19 nt, Artificial Sequence
  Description of Artificial Sequence: Synthetic oligonucleotide
gaaccucccuaacaugaug

SEQ ID NO: 386618 - RNA, 19 nt, Artificial Sequence
  Description of Artificial Sequence: Synthetic oligonucleotide
agggaacaugaacaagcag

SEQ ID NO: 386619 - RNA, 19 nt, Artificial Sequence
  Description of Artificial Sequence: Synthetic oligonucleotide
cagaaccucccuaacauga

SEQ ID NO: 386620 - RNA, 19 nt, Artificial Sequence
  Description of Artificial Sequence: Synthetic oligonucleotide
aaagcguacgcuacaguau

SEQ ID NO: 386621 - RNA, 19 nt, Artificial Sequence
  Description of Artificial Sequence: Synthetic oligonucleotide
agaggggucaagcccaccu

SEQ ID NO: 386622 - RNA, 19 nt, Artificial Sequence
  Description of Artificial Sequence: Synthetic oligonucleotide
ucagagcauaguuuggcuu

SEQ ID NO: 386623 - RNA, 19 nt, Artificial Sequence
  Description of Artificial Sequence: Synthetic oligonucleotide
acuuacaaccuuucuguuu

SEQ ID NO: 386624 - RNA, 19 nt, Artificial Sequence
  Description of Artificial Sequence: Synthetic oligonucleotide
cuggaaggaccucaacacc

SEQ ID NO: 386625 - RNA, 19 nt, Artificial Sequence
  Description of Artificial Sequence: Synthetic oligonucleotide
gagguuggaaucugaugac

SEQ ID NO: 386626 - RNA, 19 nt, Artificial Sequence
  Description of Artificial Sequence: Synthetic oligonucleotide
ccacaugucagugacaagc

SEQ ID NO: 386627 - RNA, 19 nt, Artificial Sequence
  Description of Artificial Sequence: Synthetic oligonucleotide
augccguggaaaucacaac

SEQ ID NO: 386628 - RNA, 19 nt, Artificial Sequence
  Description of Artificial Sequence: Synthetic oligonucleotide
aucuauccaaaagaugcca

SEQ ID NO: 386629 - RNA, 19 nt, Artificial Sequence
  Description of Artificial Sequence: Synthetic oligonucleotide
caugccguggaaaucacaa

SEQ ID NO: 386630 - RNA, 19 nt, Artificial Sequence
  Description of Artificial Sequence: Synthetic oligonucleotide
gguauggccagcaauugug

SEQ ID NO: 386631 - RNA, 19 nt, Artificial Sequence
  Description of Artificial Sequence: Synthetic oligonucleotide
agaacccacaugucaguga

SEQ ID NO: 386632 - RNA, 19 nt, Artificial Sequence
  Description of Artificial Sequence: Synthetic oligonucleotide
uaacaugaugcuuguccaa

SEQ ID NO: 386633 - RNA, 19 nt, Artificial Sequence
  Description of Artificial Sequence: Synthetic oligonucleotide
cacacuggauacuauuaca

SEQ ID NO: 386634 - RNA, 19 nt, Artificial Sequence
  Description of Artificial Sequence: Synthetic oligonucleotide
aaggauacuggaggauugu

SEQ ID NO: 386635 - RNA, 19 nt, Artificial Sequence
  Description of Artificial Sequence: Synthetic oligonucleotide
guacugggcaauacaauac

SEQ ID NO: 386636 - RNA, 19 nt, Artificial Sequence
  Description of Artificial Sequence: Synthetic oligonucleotide
gaccccgagccucacgaag

SEQ ID NO: 386637 - RNA, 19 nt, Artificial Sequence
  Description of Artificial Sequence: Synthetic oligonucleotide
aguauagggccugccgggg

SEQ ID NO: 386638 - RNA, 19 nt, Artificial Sequence
  Description of Artificial Sequence: Synthetic oligonucleotide
cugucagcuaaagcguacg

SEQ ID NO: 386639 - RNA, 19 nt, Artificial Sequence
  Description of Artificial Sequence: Synthetic oligonucleotide
augaguuuaucagcagaug

SEQ ID NO: 386640 - RNA, 19 nt, Artificial Sequence
  Description of Artificial Sequence: Synthetic oligonucleotide
uagcuuacugagugacacc

SEQ ID NO: 386641 - RNA, 19 nt, Artificial Sequence
  Description of Artificial Sequence: Synthetic oligonucleotide
caccagguuaucuucagaa

SEQ ID NO: 386642 - RNA, 19 nt, Artificial Sequence
  Description of Artificial Sequence: Synthetic oligonucleotide
gaccagauaugguuuucuc

SEQ ID NO: 386643 - RNA, 19 nt, Artificial Sequence
  Description of Artificial Sequence: Synthetic oligonucleotide
uuacaaccuuucuguuucc

SEQ ID NO: 386644 - RNA, 19 nt, Artificial Sequence
  Description of Artificial Sequence: Synthetic oligonucleotide
cuugugaccagauaugguu

SEQ ID NO: 386645 - RNA, 19 nt, Artificial Sequence
  Description of Artificial Sequence: Synthetic oligonucleotide
gaccagaaccucccuaaca

SEQ ID NO: 386646 - RNA, 19 nt, Artificial Sequence
  Description of Artificial Sequence: Synthetic oligonucleotide
gaacucacucuuguaauaa

SEQ ID NO: 386647 - RNA, 19 nt, Artificial Sequence
  Description of Artificial Sequence: Synthetic oligonucleotide
cuuaacaggugugggcuug

SEQ ID NO: 386648 - RNA, 19 nt, Artificial Sequence
  Description of Artificial Sequence: Synthetic oligonucleotide
acuccccugaccugacauc

SEQ ID NO: 386649 - RNA, 19 nt, Artificial Sequence
  Description of Artificial Sequence: Synthetic oligonucleotide
uuuagaggucaaggcagga

SEQ ID NO: 386650 - RNA, 19 nt, Artificial Sequence
  Description of Artificial Sequence: Synthetic oligonucleotide
agcagcuauugggaaagag

SEQ ID NO: 386651 - RNA, 19 nt, Artificial Sequence
  Description of Artificial Sequence: Synthetic oligonucleotide
aggacuuagcagucacucu

SEQ ID NO: 386652 - RNA, 19 nt, Artificial Sequence
  Description of Artificial Sequence: Synthetic oligonucleotide
agcuaaagcguacgcuaca

SEQ ID NO: 386653 - RNA, 19 nt, Artificial Sequence
  Description of Artificial Sequence: Synthetic oligonucleotide
caagcucccucccugagga

SEQ ID NO: 386654 - RNA, 19 nt, Artificial Sequence
  Description of Artificial Sequence: Synthetic oligonucleotide
cagcuaaagcguacgcuac

SEQ ID NO: 386655 - RNA, 19 nt, Artificial Sequence
  Description of Artificial Sequence: Synthetic oligonucleotide
uucguguggccagccaggg

SEQ ID NO: 386656 - RNA, 19 nt, Artificial Sequence
  Description of Artificial Sequence: Synthetic oligonucleotide
cuucagacacuuuccagaa

SEQ ID NO: 386657 - RNA, 19 nt, Artificial Sequence
  Description of Artificial Sequence: Synthetic oligonucleotide
uucuuguggccaguguaug

SEQ ID NO: 386658 - RNA, 19 nt, Artificial Sequence
  Description of Artificial Sequence: Synthetic oligonucleotide
gagccucacgaagaauggg

SEQ ID NO: 386659 - RNA, 19 nt, Artificial Sequence
  Description of Artificial Sequence: Synthetic oligonucleotide
uguguguacugggcaauac

SEQ ID NO: 386660 - RNA, 19 nt, Artificial Sequence
  Description of Artificial Sequence: Synthetic oligonucleotide
aaaagaacccugagacgau

SEQ ID NO: 386661 - RNA, 19 nt, Artificial Sequence
  Description of Artificial Sequence: Synthetic oligonucleotide
caguguugaccuaugaacu

SEQ ID NO: 386662 - RNA, 19 nt, Artificial Sequence
  Description of Artificial Sequence: Synthetic oligonucleotide
guguguacugggcaauaca

SEQ ID NO: 386663 - RNA, 19 nt, Artificial Sequence
  Description of Artificial Sequence: Synthetic oligonucleotide
acaccucugccccucgugu

SEQ ID NO: 386664 - RNA, 19 nt, Artificial Sequence
  Description of Artificial Sequence: Synthetic oligonucleotide
gcuccuaucagagcucagg

SEQ ID NO: 386665 - RNA, 19 nt, Artificial Sequence
  Description of Artificial Sequence: Synthetic oligonucleotide
uucacggaggacacagcuu

SEQ ID NO: 386666 - RNA, 19 nt, Artificial Sequence
  Description of Artificial Sequence: Synthetic oligonucleotide
uuaacaggugugggcuugc

SEQ ID NO: 386667 - RNA, 19 nt, Artificial Sequence
  Description of Artificial Sequence: Synthetic oligonucleotide
cguacgcuacaguauaggg

SEQ ID NO: 386668 - RNA, 19 nt, Artificial Sequence
  Description of Artificial Sequence: Synthetic oligonucleotide
gcggccaggauguauuugc

SEQ ID NO: 386669 - RNA, 19 nt, Artificial Sequence
  Description of Artificial Sequence: Synthetic oligonucleotide
gacacggauacaacuuaca

SEQ ID NO: 386670 - RNA, 19 nt, Artificial Sequence
  Description of Artificial Sequence: Synthetic oligonucleotide
cagagacguuuccagcccc

SEQ ID NO: 386671 - RNA, 19 nt, Artificial Sequence
  Description of Artificial Sequence: Synthetic oligonucleotide
uggaaacacacuggauacu

SEQ ID NO: 386672 - RNA, 19 nt, Artificial Sequence
  Description of Artificial Sequence: Synthetic oligonucleotide
cagagcauaguuuggcuua

SEQ ID NO: 386673 - RNA, 19 nt, Artificial Sequence
  Description of Artificial Sequence: Synthetic oligonucleotide
agaaaccccacagcaacau

SEQ ID NO: 386674 - RNA, 19 nt, Artificial Sequence
  Description of Artificial Sequence: Synthetic oligonucleotide
ggauacuauuacagguagg

SEQ ID NO: 386675 - RNA, 19 nt, Artificial Sequence
  Description of Artificial Sequence: Synthetic oligonucleotide
ugucuucacgucccauauc

SEQ ID NO: 386676 - RNA, 19 nt, Artificial Sequence
  Description of Artificial Sequence: Synthetic oligonucleotide
gugaccccgagccucacga

SEQ ID NO: 386677 - RNA, 19 nt, Artificial Sequence
  Description of Artificial Sequence: Synthetic oligonucleotide
agacacgauccacuuccca

SEQ ID NO: 386678 - RNA, 19 nt, Artificial Sequence
  Description of Artificial Sequence: Synthetic oligonucleotide
acaguguauauagcuuacu

SEQ ID NO: 386679 - RNA, 19 nt, Artificial Sequence
  Description of Artificial Sequence: Synthetic oligonucleotide
aggauguauuugccauuug

SEQ ID NO: 386680 - RNA, 19 nt, Artificial Sequence
  Description of Artificial Sequence: Synthetic oligonucleotide
gguagggaacaugaacaag

SEQ ID NO: 386681 - RNA, 19 nt, Artificial Sequence
  Description of Artificial Sequence: Synthetic oligonucleotide
uaagagaggcugguggguu

SEQ ID NO: 386682 - RNA, 19 nt, Artificial Sequence
  Description of Artificial Sequence: Synthetic oligonucleotide
gcuaaagcguacgcuacag

SEQ ID NO: 386683 - RNA, 19 nt, Artificial Sequence
  Description of Artificial Sequence: Synthetic oligonucleotide
accucccuaacaugaugcu

SEQ ID NO: 386684 - RNA, 19 nt, Artificial Sequence
  Description of Artificial Sequence: Synthetic oligonucleotide
accuguuaccccagucugg

SEQ ID NO: 386685 - RNA, 19 nt, Artificial Sequence
  Description of Artificial Sequence: Synthetic oligonucleotide
cucaaacuuuccaucauau

SEQ ID NO: 386686 - RNA, 19 nt, Artificial Sequence
  Description of Artificial Sequence: Synthetic oligonucleotide
cuugacacggauacaacuu

SEQ ID NO: 386687 - RNA, 19 nt, Artificial Sequence
  Description of Artificial Sequence: Synthetic oligonucleotide
cugcacaaucuccuugguc

SEQ ID NO: 386688 - RNA, 19 nt, Artificial Sequence
  Description of Artificial Sequence: Synthetic oligonucleotide
guauagggccugccggggc

SEQ ID NO: 386689 - RNA, 19 nt, Artificial Sequence
  Description of Artificial Sequence: Synthetic oligonucleotide
acgccagaggauccauuug

SEQ ID NO: 386690 - RNA, 19 nt, Artificial Sequence
  Description of Artificial Sequence: Synthetic oligonucleotide
acugcgcuuagcauggcaa

SEQ ID NO: 386691 - RNA, 19 nt, Artificial Sequence
  Description of Artificial Sequence: Synthetic oligonucleotide
cuauuacagguagggaaca

SEQ ID NO: 386692 - RNA, 19 nt, Artificial Sequence
  Description of Artificial Sequence: Synthetic oligonucleotide
caggcgguuuccugaaguc

SEQ ID NO: 386693 - RNA, 19 nt, Artificial Sequence
  Description of Artificial Sequence: Synthetic oligonucleotide
gccagcaauugugaaaaug

SEQ ID NO: 386694 - RNA, 19 nt, Artificial Sequence
  Description of Artificial Sequence: Synthetic oligonucleotide
ugaaccccucccuccugca

SEQ ID NO: 386695 - RNA, 19 nt, Artificial Sequence
  Description of Artificial Sequence: Synthetic oligonucleotide
agacacaaggagguuggaa

SEQ ID NO: 386696 - RNA, 19 nt, Artificial Sequence
  Description of Artificial Sequence: Synthetic oligonucleotide
ggacuugacacggauacaa

SEQ ID NO: 386697 - RNA, 19 nt, Artificial Sequence
  Description of Artificial Sequence: Synthetic oligonucleotide
gugugcacuccccugaccu

SEQ ID NO: 386698 - RNA, 19 nt, Artificial Sequence
  Description of Artificial Sequence: Synthetic oligonucleotide
ugcccaccgggcaggacac

SEQ ID NO: 386699 - RNA, 19 nt, Artificial Sequence
  Description of Artificial Sequence: Synthetic oligonucleotide
aguguguguacugggcaau

SEQ ID NO: 386700 - RNA, 19 nt, Artificial Sequence
  Description of Artificial Sequence: Synthetic oligonucleotide
cacauaccaggccacagcu

SEQ ID NO: 386701 - RNA, 19 nt, Artificial Sequence
  Description of Artificial Sequence: Synthetic oligonucleotide
guauggccagcaauuguga

SEQ ID NO: 386702 - RNA, 19 nt, Artificial Sequence
  Description of Artificial Sequence: Synthetic oligonucleotide
gugcaccagaccuguuacc

SEQ ID NO: 386703 - RNA, 19 nt, Artificial Sequence
  Description of Artificial Sequence: Synthetic oligonucleotide
cuguuaccccagucuggcc

SEQ ID NO: 386704 - RNA, 19 nt, Artificial Sequence
  Description of Artificial Sequence: Synthetic oligonucleotide
agcccaccuuuuauuacag

SEQ ID NO: 386705 - RNA, 19 nt, Artificial Sequence
  Description of Artificial Sequence: Synthetic oligonucleotide
agcagaagacauaguuacu

SEQ ID NO: 386706 - RNA, 19 nt, Artificial Sequence
  Description of Artificial Sequence: Synthetic oligonucleotide
ggaaggaccucaacacccc

SEQ ID NO: 386707 - RNA, 19 nt, Artificial Sequence
  Description of Artificial Sequence: Synthetic oligonucleotide
ugcggccaggauguauuug

SEQ ID NO: 386708 - RNA, 19 nt, Artificial Sequence
  Description of Artificial Sequence: Synthetic oligonucleotide
ccucacgaagaauggggag

SEQ ID NO: 386709 - RNA, 19 nt, Artificial Sequence
  Description of Artificial Sequence: Synthetic oligonucleotide
gcacuucccugucuucacg

SEQ ID NO: 386710 - RNA, 19 nt, Artificial Sequence
  Description of Artificial Sequence: Synthetic oligonucleotide
agcguacgcuacaguauag

SEQ ID NO: 386711 - RNA, 19 nt, Artificial Sequence
  Description of Artificial Sequence: Synthetic oligonucleotide
cagagcagcuauugggaaa

SEQ ID NO: 386712 - RNA, 19 nt, Artificial Sequence
  Description of Artificial Sequence: Synthetic oligonucleotide
gcguacgcuacaguauagg

SEQ ID NO: 386713 - RNA, 19 nt, Artificial Sequence
  Description of Artificial Sequence: Synthetic oligonucleotide
ugcacuccccugaccugac

SEQ ID NO: 386714 - RNA, 19 nt, Artificial Sequence
  Description of Artificial Sequence: Synthetic oligonucleotide
aagggacuugacacggaua

SEQ ID NO: 386715 - RNA, 19 nt, Artificial Sequence
  Description of Artificial Sequence: Synthetic oligonucleotide
caguguguguacugggcaa

SEQ ID NO: 386716 - RNA, 19 nt, Artificial Sequence
  Description of Artificial Sequence: Synthetic oligonucleotide
uugccaauccaggcgguuu

SEQ ID NO: 386717 - RNA, 19 nt, Artificial Sequence
  Description of Artificial Sequence: Synthetic oligonucleotide
ggcagggaacaggaguggg

SEQ ID NO: 386718 - RNA, 19 nt, Artificial Sequence
  Description of Artificial Sequence: Synthetic oligonucleotide
cuggguauggccagcaauu

SEQ ID NO: 386719 - RNA, 19 nt, Artificial Sequence
  Description of Artificial Sequence: Synthetic oligonucleotide
gacaugccguggaaaucac

SEQ ID NO: 386720 - RNA, 19 nt, Artificial Sequence
  Description of Artificial Sequence: Synthetic oligonucleotide
agccacccucuuuaacccu

SEQ ID NO: 386721 - RNA, 19 nt, Artificial Sequence
  Description of Artificial Sequence: Synthetic oligonucleotide
auacugcgcuuagcauggc

SEQ ID NO: 386722 - RNA, 19 nt, Artificial Sequence
  Description of Artificial Sequence: Synthetic oligonucleotide
guuccaugucaggccaccc

SEQ ID NO: 386723 - RNA, 19 nt, Artificial Sequence
  Description of Artificial Sequence: Synthetic oligonucleotide
ugagacgaugaggguugga

SEQ ID NO: 386724 - RNA, 19 nt, Artificial Sequence
  Description of Artificial Sequence: Synthetic oligonucleotide
agaaccucccuaacaugau

SEQ ID NO: 386725 - RNA, 19 nt, Artificial Sequence
  Description of Artificial Sequence: Synthetic oligonucleotide
gucagcuaaagcguacgcu

SEQ ID NO: 386726 - RNA, 19 nt, Artificial Sequence
  Description of Artificial Sequence: Synthetic oligonucleotide
gugacaugccguggaaauc

SEQ ID NO: 386727 - RNA, 19 nt, Artificial Sequence
  Description of Artificial Sequence: Synthetic oligonucleotide
ucguguggccagccagggu

SEQ ID NO: 386728 - RNA, 19 nt, Artificial Sequence
  Description of Artificial Sequence: Synthetic oligonucleotide
ggcgguuuccugaagucuc

SEQ ID NO: 386729 - RNA, 19 nt, Artificial Sequence
  Description of Artificial Sequence: Synthetic oligonucleotide
agagacguuuccagccccu

SEQ ID NO: 386730 - RNA, 19 nt, Artificial Sequence
  Description of Artificial Sequence: Synthetic oligonucleotide
gccagaggauccauuugag

SEQ ID NO: 386731 - RNA, 19 nt, Artificial Sequence
  Description of Artificial Sequence: Synthetic oligonucleotide
uaacaggugugggcuugcu

SEQ ID NO: 386732 - RNA, 19 nt, Artificial Sequence
  Description of Artificial Sequence: Synthetic oligonucleotide
caccgggcaggacaccgug

SEQ ID NO: 386733 - RNA, 19 nt, Artificial Sequence
  Description of Artificial Sequence: Synthetic oligonucleotide
aguugcggccaggauguau

SEQ ID NO: 386734 - RNA, 19 nt, Artificial Sequence
  Description of Artificial Sequence: Synthetic oligonucleotide
gcaggacaccgugaagggg

SEQ ID NO: 386735 - RNA, 19 nt, Artificial Sequence
  Description of Artificial Sequence: Synthetic oligonucleotide
cauaugcuccccauauuuu

SEQ ID NO: 386736 - RNA, 19 nt, Artificial Sequence
  Description of Artificial Sequence: Synthetic oligonucleotide
ggcuuaacaggugugggcu

SEQ ID NO: 386737 - RNA, 19 nt, Artificial Sequence
  Description of Artificial Sequence: Synthetic oligonucleotide
ggugaccccgagccucacg

SEQ ID NO: 386738 - RNA, 19 nt, Artificial Sequence
  Description of Artificial Sequence: Synthetic oligonucleotide
uggggaggaccagaaccuc

SEQ ID NO: 386739 - RNA, 19 nt, Artificial Sequence
  Description of Artificial Sequence: Synthetic oligonucleotide
ccccucguguguuucuugc

SEQ ID NO: 386740 - RNA, 19 nt, Artificial Sequence
  Description of Artificial Sequence: Synthetic oligonucleotide
ggauacaacuuacaaccuu

SEQ ID NO: 386741 - RNA, 19 nt, Artificial Sequence
  Description of Artificial Sequence: Synthetic oligonucleotide
gagcauaguuuggcuuaac

SEQ ID NO: 386742 - RNA, 19 nt, Artificial Sequence
  Description of Artificial Sequence: Synthetic oligonucleotide
cuaaagcguacgcuacagu

SEQ ID NO: 386743 - RNA, 19 nt, Artificial Sequence
  Description of Artificial Sequence: Synthetic oligonucleotide
ugaccccgagccucacgaa

SEQ ID NO: 386744 - RNA, 19 nt, Artificial Sequence
  Description of Artificial Sequence: Synthetic oligonucleotide
ggaccagaaccucccuaac

SEQ ID NO: 386745 - RNA, 19 nt, Artificial Sequence
  Description of Artificial Sequence: Synthetic oligonucleotide
uugcggccaggauguauuu

SEQ ID NO: 386746 - RNA, 19 nt, Artificial Sequence
  Description of Artificial Sequence: Synthetic oligonucleotide
gcuuacugagugacaccag

SEQ ID NO: 386747 - RNA, 19 nt, Artificial Sequence
  Description of Artificial Sequence: Synthetic oligonucleotide
ccguggaaaucacaacauc

SEQ ID NO: 386748 - RNA, 19 nt, Artificial Sequence
  Description of Artificial Sequence: Synthetic oligonucleotide
cagaacucacgucccauau

SEQ ID NO: 386749 - RNA, 19 nt, Artificial Sequence
  Description of Artificial Sequence: Synthetic oligonucleotide
aucugaugaccaggcuaca

SEQ ID NO: 386750 - RNA, 19 nt, Artificial Sequence
  Description of Artificial Sequence: Synthetic oligonucleotide
gaggcauagcaaggaccca

SEQ ID NO: 386751 - RNA, 19 nt, Artificial Sequence
  Description of Artificial Sequence: Synthetic oligonucleotide
cacuucccugucuucacgu

SEQ ID NO: 386752 - RNA, 19 nt, Artificial Sequence
  Description of Artificial Sequence: Synthetic oligonucleotide
ccaggacgccagaggaucc

SEQ ID NO: 386753 - RNA, 19 nt, Artificial Sequence
  Description of Artificial Sequence: Synthetic oligonucleotide
gcugucagcuaaagcguac

SEQ ID NO: 386754 - RNA, 19 nt, Artificial Sequence
  Description of Artificial Sequence: Synthetic oligonucleotide
cagcuuucguguggccagc

SEQ ID NO: 386755 - RNA, 19 nt, Artificial Sequence
  Description of Artificial Sequence: Synthetic oligonucleotide
gaggucaaggcaggaggcu

SEQ ID NO: 386756 - RNA, 19 nt, Artificial Sequence
  Description of Artificial Sequence: Synthetic oligonucleotide
guugcggccaggauguauu

SEQ ID NO: 386757 - RNA, 19 nt, Artificial Sequence
  Description of Artificial Sequence: Synthetic oligonucleotide
gcugggacaagcaccauau

SEQ ID NO: 386758 - RNA, 19 nt, Artificial Sequence
  Description of Artificial Sequence: Synthetic oligonucleotide
cugucgggugacaugccgu

SEQ ID NO: 386759 - RNA, 19 nt, Artificial Sequence
  Description of Artificial Sequence: Synthetic oligonucleotide
caacgcugaccagaaccca

SEQ ID NO: 386760 - RNA, 19 nt, Artificial Sequence
  Description of Artificial Sequence: Synthetic oligonucleotide
gccucacgaagaaugggga

SEQ ID NO: 386761 - RNA, 19 nt, Artificial Sequence
  Description of Artificial Sequence: Synthetic oligonucleotide
agggguaggcugugcucuu

SEQ ID NO: 386762 - RNA, 19 nt, Artificial Sequence
  Description of Artificial Sequence: Synthetic oligonucleotide
ggaaucugaugaccaggcu

SEQ ID NO: 386763 - RNA, 19 nt, Artificial Sequence
  Description of Artificial Sequence: Synthetic oligonucleotide
agcuccuaucagagcucag

SEQ ID NO: 386764 - RNA, 19 nt, Artificial Sequence
  Description of Artificial Sequence: Synthetic oligonucleotide
gcgcuuagcauggcaagca

SEQ ID NO: 386765 - RNA, 19 nt, Artificial Sequence
  Description of Artificial Sequence: Synthetic oligonucleotide
cccaccgggcaggacaccg

SEQ ID NO: 386766 - RNA, 19 nt, Artificial Sequence
  Description of Artificial Sequence: Synthetic oligonucleotide
ggucaagcccaccuuuuau

SEQ ID NO: 386767 - RNA, 19 nt, Artificial Sequence
  Description of Artificial Sequence: Synthetic oligonucleotide
ccggaaugggcaggcaaag

SEQ ID NO: 386768 - RNA, 19 nt, Artificial Sequence
  Description of Artificial Sequence: Synthetic oligonucleotide
ccauauugaaccccucccu

SEQ ID NO: 386769 - RNA, 19 nt, Artificial Sequence
  Description of Artificial Sequence: Synthetic oligonucleotide
cacgauccacuucccaccu

SEQ ID NO: 386770 - RNA, 19 nt, Artificial Sequence
  Description of Artificial Sequence: Synthetic oligonucleotide
cuucagaaccagacacgau

SEQ ID NO: 386771 - RNA, 19 nt, Artificial Sequence
  Description of Artificial Sequence: Synthetic oligonucleotide
ggguccggaaugggcaggc

SEQ ID NO: 386772 - RNA, 19 nt, Artificial Sequence
  Description of Artificial Sequence: Synthetic oligonucleotide
ugccccucguguguuucuu

SEQ ID NO: 386773 - RNA, 19 nt, Artificial Sequence
  Description of Artificial Sequence: Synthetic oligonucleotide
acgcuacaguauagggccu

SEQ ID NO: 386774 - RNA, 19 nt, Artificial Sequence
  Description of Artificial Sequence: Synthetic oligonucleotide
gagcagcuauugggaaaga

SEQ ID NO: 386775 - RNA, 19 nt, Artificial Sequence
  Description of Artificial Sequence: Synthetic oligonucleotide
cccacaacgcugaccagaa

SEQ ID NO: 386776 - RNA, 19 nt, Artificial Sequence
  Description of Artificial Sequence: Synthetic oligonucleotide
cccacaugucagugacaag

SEQ ID NO: 386777 - RNA, 19 nt, Artificial Sequence
  Description of Artificial Sequence: Synthetic oligonucleotide
caggacgccagaggaucca

SEQ ID NO: 386778 - RNA, 19 nt, Artificial Sequence
  Description of Artificial Sequence: Synthetic oligonucleotide
gcacuuccccuugcuguag

SEQ ID NO: 386779 - RNA, 19 nt, Artificial Sequence
  Description of Artificial Sequence: Synthetic oligonucleotide
cguguguuucuugccaauc

SEQ ID NO: 386780 - RNA, 19 nt, Artificial Sequence
  Description of Artificial Sequence: Synthetic oligonucleotide
gcaagcaagcucccucccu

SEQ ID NO: 386781 - RNA, 19 nt, Artificial Sequence
  Description of Artificial Sequence: Synthetic oligonucleotide
accgggcaggacaccguga

SEQ ID NO: 386782 - RNA, 19 nt, Artificial Sequence
  Description of Artificial Sequence: Synthetic oligonucleotide
gggacuugacacggauaca

SEQ ID NO: 386783 - RNA, 19 nt, Artificial Sequence
  Description of Artificial Sequence: Synthetic oligonucleotide
ggaccucaacaccccucca

SEQ ID NO: 386784 - RNA, 19 nt, Artificial Sequence
  Description of Artificial Sequence: Synthetic oligonucleotide
ccccagucuggccccacac

SEQ ID NO: 386785 - RNA, 19 nt, Artificial Sequence
  Description of Artificial Sequence: Synthetic oligonucleotide
gggguaggcugugcucuug

SEQ ID NO: 386786 - RNA, 19 nt, Artificial Sequence
  Description of Artificial Sequence: Synthetic oligonucleotide
ccaucauaugcuccccaua

SEQ ID NO: 386787 - RNA, 19 nt, Artificial Sequence
  Description of Artificial Sequence: Synthetic oligonucleotide
uaccccagucuggccccac

SEQ ID NO: 386788 - RNA, 19 nt, Artificial Sequence
  Description of Artificial Sequence: Synthetic oligonucleotide
gugacaccagugagacaaa

SEQ ID NO: 386789 - RNA, 19 nt, Artificial Sequence
  Description of Artificial Sequence: Synthetic oligonucleotide
gccguggaaaucacaacau

SEQ ID NO: 386790 - RNA, 19 nt, Artificial Sequence
  Description of Artificial Sequence: Synthetic oligonucleotide
aaguugcggccaggaugua

SEQ ID NO: 386791 - RNA, 19 nt, Artificial Sequence
  Description of Artificial Sequence: Synthetic oligonucleotide
ccaggcgguuuccugaagu

SEQ ID NO: 386792 - RNA, 19 nt, Artificial Sequence
  Description of Artificial Sequence: Synthetic oligonucleotide
gcaccauauugaaccccuc

SEQ ID NO: 386793 - RNA, 19 nt, Artificial Sequence
  Description of Artificial Sequence: Synthetic oligonucleotide
ccgggcaggacaccgugaa

SEQ ID NO: 386794 - RNA, 19 nt, Artificial Sequence
  Description of Artificial Sequence: Synthetic oligonucleotide
ccaggcuacaucagauauu

SEQ ID NO: 386795 - RNA, 19 nt, Artificial Sequence
  Description of Artificial Sequence: Synthetic oligonucleotide
gcacuccccugaccugaca

SEQ ID NO: 386796 - RNA, 19 nt, Artificial Sequence
  Description of Artificial Sequence: Synthetic oligonucleotide
cggauacaacuuacaaccu

SEQ ID NO: 386797 - RNA, 19 nt, Artificial Sequence
  Description of Artificial Sequence: Synthetic oligonucleotide
gcccaccuuuuauuacagu

SEQ ID NO: 386798 - RNA, 19 nt, Artificial Sequence
  Description of Artificial Sequence: Synthetic oligonucleotide
gcgguuuccugaagucucu

SEQ ID NO: 386799 - RNA, 19 nt, Artificial Sequence
  Description of Artificial Sequence: Synthetic oligonucleotide
cugggacaagcaccauauu

SEQ ID NO: 386800 - RNA, 19 nt, Artificial Sequence
  Description of Artificial Sequence: Synthetic oligonucleotide
cccugagacgaugaggguu

SEQ ID NO: 386801 - RNA, 19 nt, Artificial Sequence
  Description of Artificial Sequence: Synthetic oligonucleotide
ccuccguggccauggcucu

SEQ ID NO: 386802 - RNA, 19 nt, Artificial Sequence
  Description of Artificial Sequence: Synthetic oligonucleotide
ccaccgggcaggacaccgu

SEQ ID NO: 386803 - RNA, 19 nt, Artificial Sequence
  Description of Artificial Sequence: Synthetic oligonucleotide
aauaauaguacuuaagugg

SEQ ID NO: 386804 - RNA, 19 nt, Artificial Sequence
  Description of Artificial Sequence: Synthetic oligonucleotide
ucuaacuccaucuagaaca

SEQ ID NO: 386805 - RNA, 19 nt, Artificial Sequence
  Description of Artificial Sequence: Synthetic oligonucleotide
uacauuacccucaaaagag

SEQ ID NO: 386806 - RNA, 19 nt, Artificial Sequence
  Description of Artificial Sequence: Synthetic oligonucleotide
aauaacaccuucuaaauua

SEQ ID NO: 386807 - RNA, 19 nt, Artificial Sequence
  Description of Artificial Sequence: Synthetic oligonucleotide
cauacuacggcuuuguucc

SEQ ID NO: 386808 - RNA, 19 nt, Artificial Sequence
  Description of Artificial Sequence: Synthetic oligonucleotide
aagaagacuuaacauugcc

SEQ ID NO: 386809 - RNA, 19 nt, Artificial Sequence
  Description of Artificial Sequence: Synthetic oligonucleotide
aauaccuuguuuucagaac

SEQ ID NO: 386810 - RNA, 19 nt, Artificial Sequence
  Description of Artificial Sequence: Synthetic oligonucleotide
aguaagaucaauacggccc

SEQ ID NO: 386811 - RNA, 19 nt, Artificial Sequence
  Description of Artificial Sequence: Synthetic oligonucleotide
uuauaaauuaacaggcagc

SEQ ID NO: 386812 - RNA, 19 nt, Artificial Sequence
  Description of Artificial Sequence: Synthetic oligonucleotide
aaguaagaucaauacggcc

SEQ ID NO: 386813 - RNA, 19 nt, Artificial Sequence
  Description of Artificial Sequence: Synthetic oligonucleotide
gacgcucuuacauauaugg

SEQ ID NO: 386814 - RNA, 19 nt, Artificial Sequence
  Description of Artificial Sequence: Synthetic oligonucleotide
ucauguaagaaaaggacgc

SEQ ID NO: 386815 - RNA, 19 nt, Artificial Sequence
  Description of Artificial Sequence: Synthetic oligonucleotide
ugcacuaucuuuaaguuga

SEQ ID NO: 386816 - RNA, 19 nt, Artificial Sequence
  Description of Artificial Sequence: Synthetic oligonucleotide
ucaaguuagcauuauaucu

SEQ ID NO: 386817 - RNA, 19 nt, Artificial Sequence
  Description of Artificial Sequence: Synthetic oligonucleotide
auaauaguacuuaaguggc

SEQ ID NO: 386818 - RNA, 19 nt, Artificial Sequence
  Description of Artificial Sequence: Synthetic oligonucleotide
auaaucuucugcuuacagc

SEQ ID NO: 386819 - RNA, 19 nt, Artificial Sequence
  Description of Artificial Sequence: Synthetic oligonucleotide
uaucuaagaagacuuaaca

SEQ ID NO: 386820 - RNA, 19 nt, Artificial Sequence
  Description of Artificial Sequence: Synthetic oligonucleotide
uauaccauacuacauuacc

SEQ ID NO: 386821 - RNA, 19 nt, Artificial Sequence
  Description of Artificial Sequence: Synthetic oligonucleotide
uuaaccaacuccaaucaag

SEQ ID NO: 386822 - RNA, 19 nt, Artificial Sequence
  Description of Artificial Sequence: Synthetic oligonucleotide
uuugagacuauaauuacaa

SEQ ID NO: 386823 - RNA, 19 nt, Artificial Sequence
  Description of Artificial Sequence: Synthetic oligonucleotide
agaaagguaauucagugca

SEQ ID NO: 386824 - RNA, 19 nt, Artificial Sequence
  Description of Artificial Sequence: Synthetic oligonucleotide
uuugaaacuuguaugacaa

SEQ ID NO: 386825 - RNA, 19 nt, Artificial Sequence
  Description of Artificial Sequence: Synthetic oligonucleotide
gauuguuuaaacaagucac

SEQ ID NO: 386826 - RNA, 19 nt, Artificial Sequence
  Description of Artificial Sequence: Synthetic oligonucleotide
uccaauuuagcuuugaguu

SEQ ID NO: 386827 - RNA, 19 nt, Artificial Sequence
  Description of Artificial Sequence: Synthetic oligonucleotide
uugaauaugugcaggaaca

SEQ ID NO: 386828 - RNA, 19 nt, Artificial Sequence
  Description of Artificial Sequence: Synthetic oligonucleotide
aauuuugaauaugugcagg

SEQ ID NO: 386829 - RNA, 19 nt, Artificial Sequence
  Description of Artificial Sequence: Synthetic oligonucleotide
aaaguaagaucaauacggc

SEQ ID NO: 386830 - RNA, 19 nt, Artificial Sequence
  Description of Artificial Sequence: Synthetic oligonucleotide
uccaaugacaccaaccuca

SEQ ID NO: 386831 - RNA, 19 nt, Artificial Sequence
  Description of Artificial Sequence: Synthetic oligonucleotide
auagagaucaauggcacgc

SEQ ID NO: 386832 - RNA, 19 nt, Artificial Sequence
  Description of Artificial Sequence: Synthetic oligonucleotide
cucauguaagaaaaggacg

SEQ ID NO: 386833 - RNA, 19 nt, Artificial Sequence
  Description of Artificial Sequence: Synthetic oligonucleotide
aauucuaucuguucagagu

SEQ ID NO: 386834 - RNA, 19 nt, Artificial Sequence
  Description of Artificial Sequence: Synthetic oligonucleotide
uauaugguuaaacauggaa

SEQ ID NO: 386835 - RNA, 19 nt, Artificial Sequence
  Description of Artificial Sequence: Synthetic oligonucleotide
uguuaaucccucauguaag

SEQ ID NO: 386836 - RNA, 19 nt, Artificial Sequence
  Description of Artificial Sequence: Synthetic oligonucleotide
uauccaaugacaccaaccu

SEQ ID NO: 386837 - RNA, 19 nt, Artificial Sequence
  Description of Artificial Sequence: Synthetic oligonucleotide
aauaugugcaggaacaaug

SEQ ID NO: 386838 - RNA, 19 nt, Artificial Sequence
  Description of Artificial Sequence: Synthetic oligonucleotide
agcacaauucauuacgguc

SEQ ID NO: 386839 - RNA, 19 nt, Artificial Sequence
  Description of Artificial Sequence: Synthetic oligonucleotide
gaagauaucccguaaguca

SEQ ID NO: 386840 - RNA, 19 nt, Artificial Sequence
  Description of Artificial Sequence: Synthetic oligonucleotide
ucuaagaagacuuaacauu

SEQ ID NO: 386841 - RNA, 19 nt, Artificial Sequence
  Description of Artificial Sequence: Synthetic oligonucleotide
gauccuacaagagagcggg

SEQ ID NO: 386842 - RNA, 19 nt, Artificial Sequence
  Description of Artificial Sequence: Synthetic oligonucleotide
uuaguccagauacauagug

SEQ ID NO: 386843 - RNA, 19 nt, Artificial Sequence
  Description of Artificial Sequence: Synthetic oligonucleotide
uuuaggaugugcacuaucu

SEQ ID NO: 386844 - RNA, 19 nt, Artificial Sequence
  Description of Artificial Sequence: Synthetic oligonucleotide
uguuucacgcucaauacga

SEQ ID NO: 386845 - RNA, 19 nt, Artificial Sequence
  Description of Artificial Sequence: Synthetic oligonucleotide
auuacggucagcugagaac

SEQ ID NO: 386846 - RNA, 19 nt, Artificial Sequence
  Description of Artificial Sequence: Synthetic oligonucleotide
aggucugugcuuuaacugc

SEQ ID NO: 386847 - RNA, 19 nt, Artificial Sequence
  Description of Artificial Sequence: Synthetic oligonucleotide
uuaggcuucaggaagcaca

SEQ ID NO: 386848 - RNA, 19 nt, Artificial Sequence
  Description of Artificial Sequence: Synthetic oligonucleotide
agauuguuuaaacaaguca

SEQ ID NO: 386849 - RNA, 19 nt, Artificial Sequence
  Description of Artificial Sequence: Synthetic oligonucleotide
auacauagugcacugcuuc

SEQ ID NO: 386850 - RNA, 19 nt, Artificial Sequence
  Description of Artificial Sequence: Synthetic oligonucleotide
aauuggaagcuguaucuug

SEQ ID NO: 386851 - RNA, 19 nt, Artificial Sequence
  Description of Artificial Sequence: Synthetic oligonucleotide
gaagaguagcuucagggag

SEQ ID NO: 386852 - RNA, 19 nt, Artificial Sequence
  Description of Artificial Sequence: Synthetic oligonucleotide
uuuugaaacuuguaugaca

SEQ ID NO: 386853 - RNA, 19 nt, Artificial Sequence
  Description of Artificial Sequence: Synthetic oligonucleotide
ucagacaaacuucuggaug

SEQ ID NO: 386854 - RNA, 19 nt, Artificial Sequence
  Description of Artificial Sequence: Synthetic oligonucleotide
ucacuaauuuguaauagaa

SEQ ID NO: 386855 - RNA, 19 nt, Artificial Sequence
  Description of Artificial Sequence: Synthetic oligonucleotide
cuagaacacacugagaggc

SEQ ID NO: 386856 - RNA, 19 nt, Artificial Sequence
  Description of Artificial Sequence: Synthetic oligonucleotide
aaccauguagcuaucacag

SEQ ID NO: 386857 - RNA, 19 nt, Artificial Sequence
  Description of Artificial Sequence: Synthetic oligonucleotide
auucauuacggucagcuga

SEQ ID NO: 386858 - RNA, 19 nt, Artificial Sequence
  Description of Artificial Sequence: Synthetic oligonucleotide
aaaccauguagcuaucaca

SEQ ID NO: 386859 - RNA, 19 nt, Artificial Sequence
  Description of Artificial Sequence: Synthetic oligonucleotide
uuuugagacuauaauuaca

SEQ ID NO: 386860 - RNA, 19 nt, Artificial Sequence
  Description of Artificial Sequence: Synthetic oligonucleotide
ucacggucugcuaacauag

SEQ ID NO: 386861 - RNA, 19 nt, Artificial Sequence
  Description of Artificial Sequence: Synthetic oligonucleotide
uacaaaacaucuuggcugc

SEQ ID NO: 386862 - RNA, 19 nt, Artificial Sequence
  Description of Artificial Sequence: Synthetic oligonucleotide
aauacgagacuguagugaa

SEQ ID NO: 386863 - RNA, 19 nt, Artificial Sequence
  Description of Artificial Sequence: Synthetic oligonucleotide
uaugguuaaacauggaauu

SEQ ID NO: 386864 - RNA, 19 nt, Artificial Sequence
  Description of Artificial Sequence: Synthetic oligonucleotide
agucauauuuaggaugugc

SEQ ID NO: 386865 - RNA, 19 nt, Artificial Sequence
  Description of Artificial Sequence: Synthetic oligonucleotide
ucuagaacacacugagagg

SEQ ID NO: 386866 - RNA, 19 nt, Artificial Sequence
  Description of Artificial Sequence: Synthetic oligonucleotide
uagugaaugaaaacuuuca

SEQ ID NO: 386867 - RNA, 19 nt, Artificial Sequence
  Description of Artificial Sequence: Synthetic oligonucleotide
caaucaagacucaucauac

SEQ ID NO: 386868 - RNA, 19 nt, Artificial Sequence
  Description of Artificial Sequence: Synthetic oligonucleotide
uccaagucaagcugaaugc

SEQ ID NO: 386869 - RNA, 19 nt, Artificial Sequence
  Description of Artificial Sequence: Synthetic oligonucleotide
aaacccuuaaguccagaug

SEQ ID NO: 386870 - RNA, 19 nt, Artificial Sequence
  Description of Artificial Sequence: Synthetic oligonucleotide
cuagaguacccacugagag

SEQ ID NO: 386871 - RNA, 19 nt, Artificial Sequence
  Description of Artificial Sequence: Synthetic oligonucleotide
uagacuggauccuacaaga

SEQ ID NO: 386872 - RNA, 19 nt, Artificial Sequence
  Description of Artificial Sequence: Synthetic oligonucleotide
uacuuauuccuguuucacg

SEQ ID NO: 386873 - RNA, 19 nt, Artificial Sequence
  Description of Artificial Sequence: Synthetic oligonucleotide
aagacauaauuugauccuc

SEQ ID NO: 386874 - RNA, 19 nt, Artificial Sequence
  Description of Artificial Sequence: Synthetic oligonucleotide
cuuggcgucuuccauaggg

SEQ ID NO: 386875 - RNA, 19 nt, Artificial Sequence
  Description of Artificial Sequence: Synthetic oligonucleotide
caagacucaucauacuacg

SEQ ID NO: 386876 - RNA, 19 nt, Artificial Sequence
  Description of Artificial Sequence: Synthetic oligonucleotide
uaaccaacuccaaucaaga

SEQ ID NO: 386877 - RNA, 19 nt, Artificial Sequence
  Description of Artificial Sequence: Synthetic oligonucleotide
aagaguagcuucagggagc

SEQ ID NO: 386878 - RNA, 19 nt, Artificial Sequence
  Description of Artificial Sequence: Synthetic oligonucleotide
acauguuaaucccucaugu

SEQ ID NO: 386879 - RNA, 19 nt, Artificial Sequence
  Description of Artificial Sequence: Synthetic oligonucleotide
auaccuuguuuucagaacu

SEQ ID NO: 386880 - RNA, 19 nt, Artificial Sequence
  Description of Artificial Sequence: Synthetic oligonucleotide
uacgcagcuguacaauugg

SEQ ID NO: 386881 - RNA, 19 nt, Artificial Sequence
  Description of Artificial Sequence: Synthetic oligonucleotide
gaguagaucaauaaucuuc

SEQ ID NO: 386882 - RNA, 19 nt, Artificial Sequence
  Description of Artificial Sequence: Synthetic oligonucleotide
aaccaacuccaaucaagac

SEQ ID NO: 386883 - RNA, 19 nt, Artificial Sequence
  Description of Artificial Sequence: Synthetic oligonucleotide
ucugcuuacagcccaacaa

SEQ ID NO: 386884 - RNA, 19 nt, Artificial Sequence
  Description of Artificial Sequence: Synthetic oligonucleotide
uaccacacgugucagagga

SEQ ID NO: 386885 - RNA, 19 nt, Artificial Sequence
  Description of Artificial Sequence: Synthetic oligonucleotide
caauuuagcuuugaguugc

SEQ ID NO: 386886 - RNA, 19 nt, Artificial Sequence
  Description of Artificial Sequence: Synthetic oligonucleotide
uugcagaagucauauuuag

SEQ ID NO: 386887 - RNA, 19 nt, Artificial Sequence
  Description of Artificial Sequence: Synthetic oligonucleotide
uuaaggaggugccauauuu

SEQ ID NO: 386888 - RNA, 19 nt, Artificial Sequence
  Description of Artificial Sequence: Synthetic oligonucleotide
uucacuaauuuguaauaga

SEQ ID NO: 386889 - RNA, 19 nt, Artificial Sequence
  Description of Artificial Sequence: Synthetic oligonucleotide
uccuuaugaugccagcuag

SEQ ID NO: 386890 - RNA, 19 nt, Artificial Sequence
  Description of Artificial Sequence: Synthetic oligonucleotide
acuauaucucuccaaguca

SEQ ID NO: 386891 - RNA, 19 nt, Artificial Sequence
  Description of Artificial Sequence: Synthetic oligonucleotide
aauuuuacuugugagcaau

SEQ ID NO: 386892 - RNA, 19 nt, Artificial Sequence
  Description of Artificial Sequence: Synthetic oligonucleotide
acuggauccuacaagagag

SEQ ID NO: 386893 - RNA, 19 nt, Artificial Sequence
  Description of Artificial Sequence: Synthetic oligonucleotide
uaaaccauguagcuaucac

SEQ ID NO: 386894 - RNA, 19 nt, Artificial Sequence
  Description of Artificial Sequence: Synthetic oligonucleotide
uacuuaaguggccaagaca

SEQ ID NO: 386895 - RNA, 19 nt, Artificial Sequence
  Description of Artificial Sequence: Synthetic oligonucleotide
auguuaaucccucauguaa

SEQ ID NO: 386896 - RNA, 19 nt, Artificial Sequence
  Description of Artificial Sequence: Synthetic oligonucleotide
auaucuaagaagacuuaac

SEQ ID NO: 386897 - RNA, 19 nt, Artificial Sequence
  Description of Artificial Sequence: Synthetic oligonucleotide
cuguuaaccaacuccaauc

SEQ ID NO: 386898 - RNA, 19 nt, Artificial Sequence
  Description of Artificial Sequence: Synthetic oligonucleotide
uaagaagacuuaacauugc

SEQ ID NO: 386899 - RNA, 19 nt, Artificial Sequence
  Description of Artificial Sequence: Synthetic oligonucleotide
aacacagacucacauguua

SEQ ID NO: 386900 - RNA, 19 nt, Artificial Sequence
  Description of Artificial Sequence: Synthetic oligonucleotide
uuacggucagcugagaaca

SEQ ID NO: 386901 - RNA, 19 nt, Artificial Sequence
  Description of Artificial Sequence: Synthetic oligonucleotide
cauggaauucaucuaacuc

SEQ ID NO: 386902 - RNA, 19 nt, Artificial Sequence
  Description of Artificial Sequence: Synthetic oligonucleotide
agcuagaguacccacugag

SEQ ID NO: 386903 - RNA, 19 nt, Artificial Sequence
  Description of Artificial Sequence: Synthetic oligonucleotide
guaagaucaauacggcccc

SEQ ID NO: 386904 - RNA, 19 nt, Artificial Sequence
  Description of Artificial Sequence: Synthetic oligonucleotide
uggauccuacaagagagcg

SEQ ID NO: 386905 - RNA, 19 nt, Artificial Sequence
  Description of Artificial Sequence: Synthetic oligonucleotide
ucauacuacggcuuuguuc

SEQ ID NO: 386906 - RNA, 19 nt, Artificial Sequence
  Description of Artificial Sequence: Synthetic oligonucleotide
aucuugaggaguuaccaca

SEQ ID NO: 386907 - RNA, 19 nt, Artificial Sequence
  Description of Artificial Sequence: Synthetic oligonucleotide
uauagcacacagcacaauu

SEQ ID NO: 386908 - RNA, 19 nt, Artificial Sequence
  Description of Artificial Sequence: Synthetic oligonucleotide
uaguccagauacauagugc

SEQ ID NO: 386909 - RNA, 19 nt, Artificial Sequence
  Description of Artificial Sequence: Synthetic oligonucleotide
uaauaguacuuaaguggcc

SEQ ID NO: 386910 - RNA, 19 nt, Artificial Sequence
  Description of Artificial Sequence: Synthetic oligonucleotide
ucauucauaguuucugauc

SEQ ID NO: 386911 - RNA, 19 nt, Artificial Sequence
  Description of Artificial Sequence: Synthetic oligonucleotide
uacuuuacgcagcuguaca

SEQ ID NO: 386912 - RNA, 19 nt, Artificial Sequence
  Description of Artificial Sequence: Synthetic oligonucleotide
uaggucugugcuuuaacug

SEQ ID NO: 386913 - RNA, 19 nt, Artificial Sequence
  Description of Artificial Sequence: Synthetic oligonucleotide
uacgagacuguagugaaug

SEQ ID NO: 386914 - RNA, 19 nt, Artificial Sequence
  Description of Artificial Sequence: Synthetic oligonucleotide
gaaacuuguaugacaagac

SEQ ID NO: 386915 - RNA, 19 nt, Artificial Sequence
  Description of Artificial Sequence: Synthetic oligonucleotide
ugaccaaacagcuccuuga

SEQ ID NO: 386916 - RNA, 19 nt, Artificial Sequence
  Description of Artificial Sequence: Synthetic oligonucleotide
agaguacccacugagagca

SEQ ID NO: 386917 - RNA, 19 nt, Artificial Sequence
  Description of Artificial Sequence: Synthetic oligonucleotide
uugaggaguuaccacacgu

SEQ ID NO: 386918 - RNA, 19 nt, Artificial Sequence
  Description of Artificial Sequence: Synthetic oligonucleotide
aagacuuaacauugccgcu

SEQ ID NO: 386919 - RNA, 19 nt, Artificial Sequence
  Description of Artificial Sequence: Synthetic oligonucleotide
uccaucauuugugcuaacg

SEQ ID NO: 386920 - RNA, 19 nt, Artificial Sequence
  Description of Artificial Sequence: Synthetic oligonucleotide
aaucaagacucaucauacu

SEQ ID NO: 386921 - RNA, 19 nt, Artificial Sequence
  Description of Artificial Sequence: Synthetic oligonucleotide
ugagaaccgguacuuauuc

SEQ ID NO: 386922 - RNA, 19 nt, Artificial Sequence
  Description of Artificial Sequence: Synthetic oligonucleotide
acauugccgcucuuugucc

SEQ ID NO: 386923 - RNA, 19 nt, Artificial Sequence
  Description of Artificial Sequence: Synthetic oligonucleotide
ugaggaguuaccacacgug

SEQ ID NO: 386924 - RNA, 19 nt, Artificial Sequence
  Description of Artificial Sequence: Synthetic oligonucleotide
acggucugcuaacauaggg

SEQ ID NO: 386925 - RNA, 19 nt, Artificial Sequence
  Description of Artificial Sequence: Synthetic oligonucleotide
aaucccucauguaagaaaa

SEQ ID NO: 386926 - RNA, 19 nt, Artificial Sequence
  Description of Artificial Sequence: Synthetic oligonucleotide
uccaucuagaacacacuga

SEQ ID NO: 386927 - RNA, 19 nt, Artificial Sequence
  Description of Artificial Sequence: Synthetic oligonucleotide
agccaauacuuccacugac

SEQ ID NO: 386928 - RNA, 19 nt, Artificial Sequence
  Description of Artificial Sequence: Synthetic oligonucleotide
accauacuacauuacccuc

SEQ ID NO: 386929 - RNA, 19 nt, Artificial Sequence
  Description of Artificial Sequence: Synthetic oligonucleotide
cugcuucaaaguaagauca

SEQ ID NO: 386930 - RNA, 19 nt, Artificial Sequence
  Description of Artificial Sequence: Synthetic oligonucleotide
cuuacagcccaacaacuug

SEQ ID NO: 386931 - RNA, 19 nt, Artificial Sequence
  Description of Artificial Sequence: Synthetic oligonucleotide
cacuauaucucuccaaguc

SEQ ID NO: 386932 - RNA, 19 nt, Artificial Sequence
  Description of Artificial Sequence: Synthetic oligonucleotide
cuacauuacccucaaaaga

SEQ ID NO: 386933 - RNA, 19 nt, Artificial Sequence
  Description of Artificial Sequence: Synthetic oligonucleotide
caucauuugugcuaacguc

SEQ ID NO: 386934 - RNA, 19 nt, Artificial Sequence
  Description of Artificial Sequence: Synthetic oligonucleotide
gcuuauagagaucaauggc

SEQ ID NO: 386935 - RNA, 19 nt, Artificial Sequence
  Description of Artificial Sequence: Synthetic oligonucleotide
uuacgcagcuguacaauug

SEQ ID NO: 386936 - RNA, 19 nt, Artificial Sequence
  Description of Artificial Sequence: Synthetic oligonucleotide
ucuugaggaguuaccacac

SEQ ID NO: 386937 - RNA, 19 nt, Artificial Sequence
  Description of Artificial Sequence: Synthetic oligonucleotide
guucacuaauuuguaauag

SEQ ID NO: 386938 - RNA, 19 nt, Artificial Sequence
  Description of Artificial Sequence: Synthetic oligonucleotide
acuggauuaaguucacuaa

SEQ ID NO: 386939 - RNA, 19 nt, Artificial Sequence
  Description of Artificial Sequence: Synthetic oligonucleotide
auaugguuaaacauggaau

SEQ ID NO: 386940 - RNA, 19 nt, Artificial Sequence
  Description of Artificial Sequence: Synthetic oligonucleotide
ucaauacgagacuguagug

SEQ ID NO: 386941 - RNA, 19 nt, Artificial Sequence
  Description of Artificial Sequence: Synthetic oligonucleotide
ggcaauuuuaaggaggugc

SEQ ID NO: 386942 - RNA, 19 nt, Artificial Sequence
  Description of Artificial Sequence: Synthetic oligonucleotide
uaaucccucauguaagaaa

SEQ ID NO: 386943 - RNA, 19 nt, Artificial Sequence
  Description of Artificial Sequence: Synthetic oligonucleotide
aucaagacucaucauacua

SEQ ID NO: 386944 - RNA, 19 nt, Artificial Sequence
  Description of Artificial Sequence: Synthetic oligonucleotide
aacaacuugcucagaugac

SEQ ID NO: 386945 - RNA, 19 nt, Artificial Sequence
  Description of Artificial Sequence: Synthetic oligonucleotide
ugccuucuagacuggaucc

SEQ ID NO: 386946 - RNA, 19 nt, Artificial Sequence
  Description of Artificial Sequence: Synthetic oligonucleotide
ucuggaugcaaaugguccu

SEQ ID NO: 386947 - RNA, 19 nt, Artificial Sequence
  Description of Artificial Sequence: Synthetic oligonucleotide
ugcauauaccauacuacau

SEQ ID NO: 386948 - RNA, 19 nt, Artificial Sequence
  Description of Artificial Sequence: Synthetic oligonucleotide
gucaaguuagcauuauauc

SEQ ID NO: 386949 - RNA, 19 nt, Artificial Sequence
  Description of Artificial Sequence: Synthetic oligonucleotide
aaagagccugcuguaaucu

SEQ ID NO: 386950 - RNA, 19 nt, Artificial Sequence
  Description of Artificial Sequence: Synthetic oligonucleotide
agacuuaacauugccgcuc

SEQ ID NO: 386951 - RNA, 19 nt, Artificial Sequence
  Description of Artificial Sequence: Synthetic oligonucleotide
cuguuucacgcucaauacg

SEQ ID NO: 386952 - RNA, 19 nt, Artificial Sequence
  Description of Artificial Sequence: Synthetic oligonucleotide
uaaguucacuaauuuguaa

SEQ ID NO: 386953 - RNA, 19 nt, Artificial Sequence
  Description of Artificial Sequence: Synthetic oligonucleotide
uuauaucuaagaagacuua

SEQ ID NO: 386954 - RNA, 19 nt, Artificial Sequence
  Description of Artificial Sequence: Synthetic oligonucleotide
auacuuuacgcagcuguac

SEQ ID NO: 386955 - RNA, 19 nt, Artificial Sequence
  Description of Artificial Sequence: Synthetic oligonucleotide
ugugcacuaucuuuaaguu

SEQ ID NO: 386956 - RNA, 19 nt, Artificial Sequence
  Description of Artificial Sequence: Synthetic oligonucleotide
uaguuucugaucacagcca

SEQ ID NO: 386957 - RNA, 19 nt, Artificial Sequence
  Description of Artificial Sequence: Synthetic oligonucleotide
aagucaucugcucacuaua

SEQ ID NO: 386958 - RNA, 19 nt, Artificial Sequence
  Description of Artificial Sequence: Synthetic oligonucleotide
aaaucaagauacugugcuu

SEQ ID NO: 386959 - RNA, 19 nt, Artificial Sequence
  Description of Artificial Sequence: Synthetic oligonucleotide
uuaauaccuuguuuucaga

SEQ ID NO: 386960 - RNA, 19 nt, Artificial Sequence
  Description of Artificial Sequence: Synthetic oligonucleotide
uuuugucaaguuagcauua

SEQ ID NO: 386961 - RNA, 19 nt, Artificial Sequence
  Description of Artificial Sequence: Synthetic oligonucleotide
uguacaauuggaagcugua

SEQ ID NO: 386962 - RNA, 19 nt, Artificial Sequence
  Description of Artificial Sequence: Synthetic oligonucleotide
uuuaguccagauacauagu

SEQ ID NO: 386963 - RNA, 19 nt, Artificial Sequence
  Description of Artificial Sequence: Synthetic oligonucleotide
auguagcuaucacagccuc

SEQ ID NO: 386964 - RNA, 19 nt, Artificial Sequence
  Description of Artificial Sequence: Synthetic oligonucleotide
ugcuuacagcccaacaacu

SEQ ID NO: 386965 - RNA, 19 nt, Artificial Sequence
  Description of Artificial Sequence: Synthetic oligonucleotide
acuccaauuuagcuuugag

SEQ ID NO: 386966 - RNA, 19 nt, Artificial Sequence
  Description of Artificial Sequence: Synthetic oligonucleotide
aagacucaucauacuacgg

SEQ ID NO: 386967 - RNA, 19 nt, Artificial Sequence
  Description of Artificial Sequence: Synthetic oligonucleotide
uuacacaaucagacaaacu

SEQ ID NO: 386968 - RNA, 19 nt, Artificial Sequence
  Description of Artificial Sequence: Synthetic oligonucleotide
uguguacaggcaauuuuaa

SEQ ID NO: 386969 - RNA, 19 nt, Artificial Sequence
  Description of Artificial Sequence: Synthetic oligonucleotide
aguucacuaauuuguaaua

SEQ ID NO: 386970 - RNA, 19 nt, Artificial Sequence
  Description of Artificial Sequence: Synthetic oligonucleotide
ugaaagagccugcuguaau

SEQ ID NO: 386971 - RNA, 19 nt, Artificial Sequence
  Description of Artificial Sequence: Synthetic oligonucleotide
uccaucaagucuccuuggc

SEQ ID NO: 386972 - RNA, 19 nt, Artificial Sequence
  Description of Artificial Sequence: Synthetic oligonucleotide
agaaguucuugagaaccgg

SEQ ID NO: 386973 - RNA, 19 nt, Artificial Sequence
  Description of Artificial Sequence: Synthetic oligonucleotide
ugugcuaacgucucuccau

SEQ ID NO: 386974 - RNA, 19 nt, Artificial Sequence
  Description of Artificial Sequence: Synthetic oligonucleotide
ccaacuccaaucaagacuc

SEQ ID NO: 386975 - RNA, 19 nt, Artificial Sequence
  Description of Artificial Sequence: Synthetic oligonucleotide
cuccaaucaagacucauca

SEQ ID NO: 386976 - RNA, 19 nt, Artificial Sequence
  Description of Artificial Sequence: Synthetic oligonucleotide
uuauuccuguuucacgcuc

SEQ ID NO: 386977 - RNA, 19 nt, Artificial Sequence
  Description of Artificial Sequence: Synthetic oligonucleotide
guauccaaugacaccaacc

SEQ ID NO: 386978 - RNA, 19 nt, Artificial Sequence
  Description of Artificial Sequence: Synthetic oligonucleotide
gugcauauaccauacuaca

SEQ ID NO: 386979 - RNA, 19 nt, Artificial Sequence
  Description of Artificial Sequence: Synthetic oligonucleotide
uuucacgcucaauacgaga

SEQ ID NO: 386980 - RNA, 19 nt, Artificial Sequence
  Description of Artificial Sequence: Synthetic oligonucleotide
cacagugugcacaaugauc

SEQ ID NO: 386981 - RNA, 19 nt, Artificial Sequence
  Description of Artificial Sequence: Synthetic oligonucleotide
uaaggaggugccauauuuc

SEQ ID NO: 386982 - RNA, 19 nt, Artificial Sequence
  Description of Artificial Sequence: Synthetic oligonucleotide
cuugcucagaugaccaaac

SEQ ID NO: 386983 - RNA, 19 nt, Artificial Sequence
  Description of Artificial Sequence: Synthetic oligonucleotide
gaaagagccugcuguaauc

SEQ ID NO: 386984 - RNA, 19 nt, Artificial Sequence
  Description of Artificial Sequence: Synthetic oligonucleotide
aaagguaauucagugcaua

SEQ ID NO: 386985 - RNA, 19 nt, Artificial Sequence
  Description of Artificial Sequence: Synthetic oligonucleotide
guuuaaacaagucacccau

SEQ ID NO: 386986 - RNA, 19 nt, Artificial Sequence
  Description of Artificial Sequence: Synthetic oligonucleotide
ucagcccauacuuuacgca

SEQ ID NO: 386987 - RNA, 19 nt, Artificial Sequence
  Description of Artificial Sequence: Synthetic oligonucleotide
ucacgaauaauaguacuua

SEQ ID NO: 386988 - RNA, 19 nt, Artificial Sequence
  Description of Artificial Sequence: Synthetic oligonucleotide
agagaaauuccugucucug

SEQ ID NO: 386989 - RNA, 19 nt, Artificial Sequence
  Description of Artificial Sequence: Synthetic oligonucleotide
guugcugugaugcugagau

SEQ ID NO: 386990 - RNA, 19 nt, Artificial Sequence
  Description of Artificial Sequence: Synthetic oligonucleotide
cagcccauacuuuacgcag

SEQ ID NO: 386991 - RNA, 19 nt, Artificial Sequence
  Description of Artificial Sequence: Synthetic oligonucleotide
uugauguuacugagggcca

SEQ ID NO: 386992 - RNA, 19 nt, Artificial Sequence
  Description of Artificial Sequence: Synthetic oligonucleotide
ccauguagcuaucacagcc

SEQ ID NO: 386993 - RNA, 19 nt, Artificial Sequence
  Description of Artificial Sequence: Synthetic oligonucleotide
uggggaguagaucaauaau

SEQ ID NO: 386994 - RNA, 19 nt, Artificial Sequence
  Description of Artificial Sequence: Synthetic oligonucleotide
guaauagaauucuaucugu

SEQ ID NO: 386995 - RNA, 19 nt, Artificial Sequence
  Description of Artificial Sequence: Synthetic oligonucleotide
cugcuuacagcccaacaac

SEQ ID NO: 386996 - RNA, 19 nt, Artificial Sequence
  Description of Artificial Sequence: Synthetic oligonucleotide
gauacugugcuuguaaagu

SEQ ID NO: 386997 - RNA, 19 nt, Artificial Sequence
  Description of Artificial Sequence: Synthetic oligonucleotide
gacuggauccuacaagaga

SEQ ID NO: 386998 - RNA, 19 nt, Artificial Sequence
  Description of Artificial Sequence: Synthetic oligonucleotide
gucauauuuaggaugugca

SEQ ID NO: 386999 - RNA, 19 nt, Artificial Sequence
  Description of Artificial Sequence: Synthetic oligonucleotide
acuuguaugacaagacaca

SEQ ID NO: 387000 - RNA, 19 nt, Artificial Sequence
  Description of Artificial Sequence: Synthetic oligonucleotide
acagcacaauucauuacgg

SEQ ID NO: 387001 - RNA, 19 nt, Artificial Sequence
  Description of Artificial Sequence: Synthetic oligonucleotide
gauguucacggucugcuaa

SEQ ID NO: 387002 - RNA, 19 nt, Artificial Sequence
  Description of Artificial Sequence: Synthetic oligonucleotide
aaccgguacuuauuccugu

SEQ ID NO: 387003 - RNA, 19 nt, Artificial Sequence
  Description of Artificial Sequence: Synthetic oligonucleotide
gaagcuguaucuugcuguc

SEQ ID NO: 387004 - RNA, 19 nt, Artificial Sequence
  Description of Artificial Sequence: Synthetic oligonucleotide
uuuuaaggaggugccauau

SEQ ID NO: 387005 - RNA, 19 nt, Artificial Sequence
  Description of Artificial Sequence: Synthetic oligonucleotide
cacaauucauuacggucag

SEQ ID NO: 387006 - RNA, 19 nt, Artificial Sequence
  Description of Artificial Sequence: Synthetic oligonucleotide
gcacaauuuuacuugugag

SEQ ID NO: 387007 - RNA, 19 nt, Artificial Sequence
  Description of Artificial Sequence: Synthetic oligonucleotide
uuccuuaugaugccagcua

SEQ ID NO: 387008 - RNA, 19 nt, Artificial Sequence
  Description of Artificial Sequence: Synthetic oligonucleotide
guagugaaugaaaacuuuc

SEQ ID NO: 387009 - RNA, 19 nt, Artificial Sequence
  Description of Artificial Sequence: Synthetic oligonucleotide
cucaauacgagacuguagu

SEQ ID NO: 387010 - RNA, 19 nt, Artificial Sequence
  Description of Artificial Sequence: Synthetic oligonucleotide
aguagcuucagggagcaaa

SEQ ID NO: 387011 - RNA, 19 nt, Artificial Sequence
  Description of Artificial Sequence: Synthetic oligonucleotide
uaguacuuaaguggccaag

SEQ ID NO: 387012 - RNA, 19 nt, Artificial Sequence
  Description of Artificial Sequence: Synthetic oligonucleotide
agguuaggcuucaggaagc

SEQ ID NO: 387013 - RNA, 19 nt, Artificial Sequence
  Description of Artificial Sequence: Synthetic oligonucleotide
gacagaaguucuugagaac

SEQ ID NO: 387014 - RNA, 19 nt, Artificial Sequence
  Description of Artificial Sequence: Synthetic oligonucleotide
uccuacaagagagcgggca

SEQ ID NO: 387015 - RNA, 19 nt, Artificial Sequence
  Description of Artificial Sequence: Synthetic oligonucleotide
uucuagacuggauccuaca

SEQ ID NO: 387016 - RNA, 19 nt, Artificial Sequence
  Description of Artificial Sequence: Synthetic oligonucleotide
uuuacgcagcuguacaauu

SEQ ID NO: 387017 - RNA, 19 nt, Artificial Sequence
  Description of Artificial Sequence: Synthetic oligonucleotide
gugcacuaucuuuaaguug

SEQ ID NO: 387018 - RNA, 19 nt, Artificial Sequence
  Description of Artificial Sequence: Synthetic oligonucleotide
acugguaugugaagaguag

SEQ ID NO: 387019 - RNA, 19 nt, Artificial Sequence
  Description of Artificial Sequence: Synthetic oligonucleotide
agcaggucauucuguuaac

SEQ ID NO: 387020 - RNA, 19 nt, Artificial Sequence
  Description of Artificial Sequence: Synthetic oligonucleotide
gcucagaugaccaaacagc

SEQ ID NO: 387021 - RNA, 19 nt, Artificial Sequence
  Description of Artificial Sequence: Synthetic oligonucleotide
cuaucacagccucuaacuc

SEQ ID NO: 387022 - RNA, 19 nt, Artificial Sequence
  Description of Artificial Sequence: Synthetic oligonucleotide
augcagaccuuuugaaacu

SEQ ID NO: 387023 - RNA, 19 nt, Artificial Sequence
  Description of Artificial Sequence: Synthetic oligonucleotide
caccuuggggaguagauca

SEQ ID NO: 387024 - RNA, 19 nt, Artificial Sequence
  Description of Artificial Sequence: Synthetic oligonucleotide
uuaggaugugcacuaucuu

SEQ ID NO: 387025 - RNA, 19 nt, Artificial Sequence
  Description of Artificial Sequence: Synthetic oligonucleotide
uugagacuauaauuacaaa

SEQ ID NO: 387026 - RNA, 19 nt, Artificial Sequence
  Description of Artificial Sequence: Synthetic oligonucleotide
agauuuuagaaagguaauu

SEQ ID NO: 387027 - RNA, 19 nt, Artificial Sequence
  Description of Artificial Sequence: Synthetic oligonucleotide
cuugaggaguuaccacacg

SEQ ID NO: 387028 - RNA, 19 nt, Artificial Sequence
  Description of Artificial Sequence: Synthetic oligonucleotide
aaugagcacuggauuaagu

SEQ ID NO: 387029 - RNA, 19 nt, Artificial Sequence
  Description of Artificial Sequence: Synthetic oligonucleotide
acaauguucauaggcuuga

SEQ ID NO: 387030 - RNA, 19 nt, Artificial Sequence
  Description of Artificial Sequence: Synthetic oligonucleotide
augcaaaugguccuucaua

SEQ ID NO: 387031 - RNA, 19 nt, Artificial Sequence
  Description of Artificial Sequence: Synthetic oligonucleotide
guacuuaaguggccaagac

SEQ ID NO: 387032 - RNA, 19 nt, Artificial Sequence
  Description of Artificial Sequence: Synthetic oligonucleotide
ugaucacagccaauacuuc

SEQ ID NO: 387033 - RNA, 19 nt, Artificial Sequence
  Description of Artificial Sequence: Synthetic oligonucleotide
cugguaugugaagaguagc

SEQ ID NO: 387034 - RNA, 19 nt, Artificial Sequence
  Description of Artificial Sequence: Synthetic oligonucleotide
ggaguuaccacacguguca

SEQ ID NO: 387035 - RNA, 19 nt, Artificial Sequence
  Description of Artificial Sequence: Synthetic oligonucleotide
uagaacacacugagaggcu

SEQ ID NO: 387036 - RNA, 19 nt, Artificial Sequence
  Description of Artificial Sequence: Synthetic oligonucleotide
cauugccgcucuuuguccc

SEQ ID NO: 387037 - RNA, 19 nt, Artificial Sequence
  Description of Artificial Sequence: Synthetic oligonucleotide
gacauaauuugauccucaa

SEQ ID NO: 387038 - RNA, 19 nt, Artificial Sequence
  Description of Artificial Sequence: Synthetic oligonucleotide
gaugccagcuagaguaccc

SEQ ID NO: 387039 - RNA, 19 nt, Artificial Sequence
  Description of Artificial Sequence: Synthetic oligonucleotide
caauacgagacuguaguga

SEQ ID NO: 387040 - RNA, 19 nt, Artificial Sequence
  Description of Artificial Sequence: Synthetic oligonucleotide
auuuuaaggaggugccaua

SEQ ID NO: 387041 - RNA, 19 nt, Artificial Sequence
  Description of Artificial Sequence: Synthetic oligonucleotide
cuucuagacuggauccuac

SEQ ID NO: 387042 - RNA, 19 nt, Artificial Sequence
  Description of Artificial Sequence: Synthetic oligonucleotide
agguuacugugccuucuag

SEQ ID NO: 387043 - RNA, 19 nt, Artificial Sequence
  Description of Artificial Sequence: Synthetic oligonucleotide
acauagugcacugcuucag

SEQ ID NO: 387044 - RNA, 19 nt, Artificial Sequence
  Description of Artificial Sequence: Synthetic oligonucleotide
acuacggcuuuguuccuca

SEQ ID NO: 387045 - RNA, 19 nt, Artificial Sequence
  Description of Artificial Sequence: Synthetic oligonucleotide
acuuuacgcagcuguacaa

SEQ ID NO: 387046 - RNA, 19 nt, Artificial Sequence
  Description of Artificial Sequence: Synthetic oligonucleotide
ugcuucaaaguaagaucaa

SEQ ID NO: 387047 - RNA, 19 nt, Artificial Sequence
  Description of Artificial Sequence: Synthetic oligonucleotide
gaagcacaauuuuacuugu

SEQ ID NO: 387048 - RNA, 19 nt, Artificial Sequence
  Description of Artificial Sequence: Synthetic oligonucleotide
cuggauccuacaagagagc

SEQ ID NO: 387049 - RNA, 19 nt, Artificial Sequence
  Description of Artificial Sequence: Synthetic oligonucleotide
uuuaaggaggugccauauu

SEQ ID NO: 387050 - RNA, 19 nt, Artificial Sequence
  Description of Artificial Sequence: Synthetic oligonucleotide
agcaucaauuguagccagc

SEQ ID NO: 387051 - RNA, 19 nt, Artificial Sequence
  Description of Artificial Sequence: Synthetic oligonucleotide
auaaaccauguagcuauca

SEQ ID NO: 387052 - RNA, 19 nt, Artificial Sequence
  Description of Artificial Sequence: Synthetic oligonucleotide
agcccauacuuuacgcagc

SEQ ID NO: 387053 - RNA, 19 nt, Artificial Sequence
  Description of Artificial Sequence: Synthetic oligonucleotide
aggaguuaccacacguguc

SEQ ID NO: 387054 - RNA, 19 nt, Artificial Sequence
  Description of Artificial Sequence: Synthetic oligonucleotide
ggggaguagaucaauaauc

SEQ ID NO: 387055 - RNA, 19 nt, Artificial Sequence
  Description of Artificial Sequence: Synthetic oligonucleotide
gaggaguuaccacacgugu

SEQ ID NO: 387056 - RNA, 19 nt, Artificial Sequence
  Description of Artificial Sequence: Synthetic oligonucleotide
uacuugugagcaaucucuu

SEQ ID NO: 387057 - RNA, 19 nt, Artificial Sequence
  Description of Artificial Sequence: Synthetic oligonucleotide
ucaucauacuacggcuuug

SEQ ID NO: 387058 - RNA, 19 nt, Artificial Sequence
  Description of Artificial Sequence: Synthetic oligonucleotide
agacauaauuugauccuca

SEQ ID NO: 387059 - RNA, 19 nt, Artificial Sequence
  Description of Artificial Sequence: Synthetic oligonucleotide
cucagaugaccaaacagcu

SEQ ID NO: 387060 - RNA, 19 nt, Artificial Sequence
  Description of Artificial Sequence: Synthetic oligonucleotide
accaaccucagcauaguga

SEQ ID NO: 387061 - RNA, 19 nt, Artificial Sequence
  Description of Artificial Sequence: Synthetic oligonucleotide
aaguucuugagaaccggua

SEQ ID NO: 387062 - RNA, 19 nt, Artificial Sequence
  Description of Artificial Sequence: Synthetic oligonucleotide
gcacaauucauuacgguca

SEQ ID NO: 387063 - RNA, 19 nt, Artificial Sequence
  Description of Artificial Sequence: Synthetic oligonucleotide
cacgaauaauaguacuuaa

SEQ ID NO: 387064 - RNA, 19 nt, Artificial Sequence
  Description of Artificial Sequence: Synthetic oligonucleotide
cuuguaugacaagacacaa

SEQ ID NO: 387065 - RNA, 19 nt, Artificial Sequence
  Description of Artificial Sequence: Synthetic oligonucleotide
auggcacgcuguuccagag

SEQ ID NO: 387066 - RNA, 19 nt, Artificial Sequence
  Description of Artificial Sequence: Synthetic oligonucleotide
gacugguaugugaagagua

SEQ ID NO: 387067 - RNA, 19 nt, Artificial Sequence
  Description of Artificial Sequence: Synthetic oligonucleotide
aguuaccacacgugucaga

SEQ ID NO: 387068 - RNA, 19 nt, Artificial Sequence
  Description of Artificial Sequence: Synthetic oligonucleotide
ugcuaacgucucuccaucu

SEQ ID NO: 387069 - RNA, 19 nt, Artificial Sequence
  Description of Artificial Sequence: Synthetic oligonucleotide
aagucauauuuaggaugug

SEQ ID NO: 387070 - RNA, 19 nt, Artificial Sequence
  Description of Artificial Sequence: Synthetic oligonucleotide
cauacuacauuacccucaa

SEQ ID NO: 387071 - RNA, 19 nt, Artificial Sequence
  Description of Artificial Sequence: Synthetic oligonucleotide
caauuguagccagcuuucc

SEQ ID NO: 387072 - RNA, 19 nt, Artificial Sequence
  Description of Artificial Sequence: Synthetic oligonucleotide
cuucacgaauaauaguacu

SEQ ID NO: 387073 - RNA, 19 nt, Artificial Sequence
  Description of Artificial Sequence: Synthetic oligonucleotide
uacaagagagcgggcagaa

SEQ ID NO: 387074 - RNA, 19 nt, Artificial Sequence
  Description of Artificial Sequence: Synthetic oligonucleotide
guuaaccaacuccaaucaa

SEQ ID NO: 387075 - RNA, 19 nt, Artificial Sequence
  Description of Artificial Sequence: Synthetic oligonucleotide
gaguuaccacacgugucag

SEQ ID NO: 387076 - RNA, 19 nt, Artificial Sequence
  Description of Artificial Sequence: Synthetic oligonucleotide
gaaacccuuaaguccagau

SEQ ID NO: 387077 - RNA, 19 nt, Artificial Sequence
  Description of Artificial Sequence: Synthetic oligonucleotide
ucuccgugcugucacugua

SEQ ID NO: 387078 - RNA, 19 nt, Artificial Sequence
  Description of Artificial Sequence: Synthetic oligonucleotide
gucaagcugaaugcuuuug

SEQ ID NO: 387079 - RNA, 19 nt, Artificial Sequence
  Description of Artificial Sequence: Synthetic oligonucleotide
acgagacuguagugaauga

SEQ ID NO: 387080 - RNA, 19 nt, Artificial Sequence
  Description of Artificial Sequence: Synthetic oligonucleotide
acaaucagacaaacuucug

SEQ ID NO: 387081 - RNA, 19 nt, Artificial Sequence
  Description of Artificial Sequence: Synthetic oligonucleotide
agauaucccguaagucauc

SEQ ID NO: 387082 - RNA, 19 nt, Artificial Sequence
  Description of Artificial Sequence: Synthetic oligonucleotide
ggcagaacucuguguacag

SEQ ID NO: 387083 - RNA, 19 nt, Artificial Sequence
  Description of Artificial Sequence: Synthetic oligonucleotide
ucaagucuccuuggcgucu

SEQ ID NO: 387084 - RNA, 19 nt, Artificial Sequence
  Description of Artificial Sequence: Synthetic oligonucleotide
ggauccuacaagagagcgg

SEQ ID NO: 387085 - RNA, 19 nt, Artificial Sequence
  Description of Artificial Sequence: Synthetic oligonucleotide
gugcuaacgucucuccauc

SEQ ID NO: 387086 - RNA, 19 nt, Artificial Sequence
  Description of Artificial Sequence: Synthetic oligonucleotide
acaagacacaaaagauugu

SEQ ID NO: 387087 - RNA, 19 nt, Artificial Sequence
  Description of Artificial Sequence: Synthetic oligonucleotide
agacuggauccuacaagag

SEQ ID NO: 387088 - RNA, 19 nt, Artificial Sequence
  Description of Artificial Sequence: Synthetic oligonucleotide
cauguuaaucccucaugua

SEQ ID NO: 387089 - RNA, 19 nt, Artificial Sequence
  Description of Artificial Sequence: Synthetic oligonucleotide
gguuacugugccuucuaga

SEQ ID NO: 387090 - RNA, 19 nt, Artificial Sequence
  Description of Artificial Sequence: Synthetic oligonucleotide
cacggucugcuaacauagg

SEQ ID NO: 387091 - RNA, 19 nt, Artificial Sequence
  Description of Artificial Sequence: Synthetic oligonucleotide
auaucccguaagucaucug

SEQ ID NO: 387092 - RNA, 19 nt, Artificial Sequence
  Description of Artificial Sequence: Synthetic oligonucleotide
ugguauugucagcuucuuu

SEQ ID NO: 387093 - RNA, 19 nt, Artificial Sequence
  Description of Artificial Sequence: Synthetic oligonucleotide
cauacuuuacgcagcugua

SEQ ID NO: 387094 - RNA, 19 nt, Artificial Sequence
  Description of Artificial Sequence: Synthetic oligonucleotide
gauaucccguaagucaucu

SEQ ID NO: 387095 - RNA, 19 nt, Artificial Sequence
  Description of Artificial Sequence: Synthetic oligonucleotide
gauauuaaauguacaccuu

SEQ ID NO: 387096 - RNA, 19 nt, Artificial Sequence
  Description of Artificial Sequence: Synthetic oligonucleotide
gacuuaacauugccgcucu

SEQ ID NO: 387097 - RNA, 19 nt, Artificial Sequence
  Description of Artificial Sequence: Synthetic oligonucleotide
auuacccucaaaagaguuu

SEQ ID NO: 387098 - RNA, 19 nt, Artificial Sequence
  Description of Artificial Sequence: Synthetic oligonucleotide
cugaaacccuuaaguccag

SEQ ID NO: 387099 - RNA, 19 nt, Artificial Sequence
  Description of Artificial Sequence: Synthetic oligonucleotide
gaugcaaaugguccuucau

SEQ ID NO: 387100 - RNA, 19 nt, Artificial Sequence
  Description of Artificial Sequence: Synthetic oligonucleotide
acacagguagacaacuuuu

SEQ ID NO: 387101 - RNA, 19 nt, Artificial Sequence
  Description of Artificial Sequence: Synthetic oligonucleotide
gagagguuacugugccuuc

SEQ ID NO: 387102 - RNA, 19 nt, Artificial Sequence
  Description of Artificial Sequence: Synthetic oligonucleotide
acacagacucacauguuaa

SEQ ID NO: 387103 - RNA, 19 nt, Artificial Sequence
  Description of Artificial Sequence: Synthetic oligonucleotide
ccaaucaagacucaucaua

SEQ ID NO: 387104 - RNA, 19 nt, Artificial Sequence
  Description of Artificial Sequence: Synthetic oligonucleotide
cauuacggucagcugagaa

SEQ ID NO: 387105 - RNA, 19 nt, Artificial Sequence
  Description of Artificial Sequence: Synthetic oligonucleotide
uucccugcauaaacaugau

SEQ ID NO: 387106 - RNA, 19 nt, Artificial Sequence
  Description of Artificial Sequence: Synthetic oligonucleotide
agucaagcugaaugcuuuu

SEQ ID NO: 387107 - RNA, 19 nt, Artificial Sequence
  Description of Artificial Sequence: Synthetic oligonucleotide
uacggcuuuguuccucauu

SEQ ID NO: 387108 - RNA, 19 nt, Artificial Sequence
  Description of Artificial Sequence: Synthetic oligonucleotide
ccuacaagagagcgggcag

SEQ ID NO: 387109 - RNA, 19 nt, Artificial Sequence
  Description of Artificial Sequence: Synthetic oligonucleotide
uacggucagcugagaacac

SEQ ID NO: 387110 - RNA, 19 nt, Artificial Sequence
  Description of Artificial Sequence: Synthetic oligonucleotide
cacgugucagaggauguuc

SEQ ID NO: 387111 - RNA, 19 nt, Artificial Sequence
  Description of Artificial Sequence: Synthetic oligonucleotide
uggcacgcuguuccagaga

SEQ ID NO: 387112 - RNA, 19 nt, Artificial Sequence
  Description of Artificial Sequence: Synthetic oligonucleotide
gcuucacgaauaauaguac

SEQ ID NO: 387113 - RNA, 19 nt, Artificial Sequence
  Description of Artificial Sequence: Synthetic oligonucleotide
cuguacaauuggaagcugu

SEQ ID NO: 387114 - RNA, 19 nt, Artificial Sequence
  Description of Artificial Sequence: Synthetic oligonucleotide
agcauagugaauagcccuu

SEQ ID NO: 387115 - RNA, 19 nt, Artificial Sequence
  Description of Artificial Sequence: Synthetic oligonucleotide
ccauacuacauuacccuca

SEQ ID NO: 387116 - RNA, 19 nt, Artificial Sequence
  Description of Artificial Sequence: Synthetic oligonucleotide
gggaguagaucaauaaucu

SEQ ID NO: 387117 - RNA, 19 nt, Artificial Sequence
  Description of Artificial Sequence: Synthetic oligonucleotide
ugcagaccuuuugaaacuu

SEQ ID NO: 387118 - RNA, 19 nt, Artificial Sequence
  Description of Artificial Sequence: Synthetic oligonucleotide
aucauacuacggcuuuguu

SEQ ID NO: 387119 - RNA, 19 nt, Artificial Sequence
  Description of Artificial Sequence: Synthetic oligonucleotide
uggaugcaaaugguccuuc

SEQ ID NO: 387120 - RNA, 19 nt, Artificial Sequence
  Description of Artificial Sequence: Synthetic oligonucleotide
caauggcacgcuguuccag

SEQ ID NO: 387121 - RNA, 19 nt, Artificial Sequence
  Description of Artificial Sequence: Synthetic oligonucleotide
gcucuuacauauaugguua

SEQ ID NO: 387122 - RNA, 19 nt, Artificial Sequence
  Description of Artificial Sequence: Synthetic oligonucleotide
accgguacuuauuccuguu

SEQ ID NO: 387123 - RNA, 19 nt, Artificial Sequence
  Description of Artificial Sequence: Synthetic oligonucleotide
cagaagucauauuuaggau

SEQ ID NO: 387124 - RNA, 19 nt, Artificial Sequence
  Description of Artificial Sequence: Synthetic oligonucleotide
agcacucgguccugacucu

SEQ ID NO: 387125 - RNA, 19 nt, Artificial Sequence
  Description of Artificial Sequence: Synthetic oligonucleotide
acuguaugagugaucugua

SEQ ID NO: 387126 - RNA, 19 nt, Artificial Sequence
  Description of Artificial Sequence: Synthetic oligonucleotide
cuuauuccuguuucacgcu

SEQ ID NO: 387127 - RNA, 19 nt, Artificial Sequence
  Description of Artificial Sequence: Synthetic oligonucleotide
gagagcgggcagaacucug

SEQ ID NO: 387128 - RNA, 19 nt, Artificial Sequence
  Description of Artificial Sequence: Synthetic oligonucleotide
uacuacggcuuuguuccuc

SEQ ID NO: 387129 - RNA, 19 nt, Artificial Sequence
  Description of Artificial Sequence: Synthetic oligonucleotide
cagccaauacuuccacuga

SEQ ID NO: 387130 - RNA, 19 nt, Artificial Sequence
  Description of Artificial Sequence: Synthetic oligonucleotide
acgcucuuacauauauggu

SEQ ID NO: 387131 - RNA, 19 nt, Artificial Sequence
  Description of Artificial Sequence: Synthetic oligonucleotide
agagcgggcagaacucugu

SEQ ID NO: 387132 - RNA, 19 nt, Artificial Sequence
  Description of Artificial Sequence: Synthetic oligonucleotide
agaugaccaaacagcuccu

SEQ ID NO: 387133 - RNA, 19 nt, Artificial Sequence
  Description of Artificial Sequence: Synthetic oligonucleotide
augccagcuagaguaccca

SEQ ID NO: 387134 - RNA, 19 nt, Artificial Sequence
  Description of Artificial Sequence: Synthetic oligonucleotide
cauuacccucaaaagaguu

SEQ ID NO: 387135 - RNA, 19 nt, Artificial Sequence
  Description of Artificial Sequence: Synthetic oligonucleotide
cuacaagagagcgggcaga

SEQ ID NO: 387136 - RNA, 19 nt, Artificial Sequence
  Description of Artificial Sequence: Synthetic oligonucleotide
guuaggcuucaggaagcac

SEQ ID NO: 387137 - RNA, 19 nt, Artificial Sequence
  Description of Artificial Sequence: Synthetic oligonucleotide
ucauuacggucagcugaga

SEQ ID NO: 387138 - RNA, 19 nt, Artificial Sequence
  Description of Artificial Sequence: Synthetic oligonucleotide
gauacauagugcacugcuu

SEQ ID NO: 387139 - RNA, 19 nt, Artificial Sequence
  Description of Artificial Sequence: Synthetic oligonucleotide
aacugcuuauagagaucaa

SEQ ID NO: 387140 - RNA, 19 nt, Artificial Sequence
  Description of Artificial Sequence: Synthetic oligonucleotide
ccauacuuuacgcagcugu

SEQ ID NO: 387141 - RNA, 19 nt, Artificial Sequence
  Description of Artificial Sequence: Synthetic oligonucleotide
ggaugcaaaugguccuuca

SEQ ID NO: 387142 - RNA, 19 nt, Artificial Sequence
  Description of Artificial Sequence: Synthetic oligonucleotide
cuuccuuaugaugccagcu

SEQ ID NO: 387143 - RNA, 19 nt, Artificial Sequence
  Description of Artificial Sequence: Synthetic oligonucleotide
agcacacagcacaauucau

SEQ ID NO: 387144 - RNA, 19 nt, Artificial Sequence
  Description of Artificial Sequence: Synthetic oligonucleotide
acaaaacaucuuggcugcu

SEQ ID NO: 387145 - RNA, 19 nt, Artificial Sequence
  Description of Artificial Sequence: Synthetic oligonucleotide
gccucuaacuccaucuaga

SEQ ID NO: 387146 - RNA, 19 nt, Artificial Sequence
  Description of Artificial Sequence: Synthetic oligonucleotide
cuuaaguggccaagacagu

SEQ ID NO: 387147 - RNA, 19 nt, Artificial Sequence
  Description of Artificial Sequence: Synthetic oligonucleotide
gaaagguaauucagugcau

SEQ ID NO: 387148 - RNA, 19 nt, Artificial Sequence
  Description of Artificial Sequence: Synthetic oligonucleotide
ggcuucaggaagcacaauu

SEQ ID NO: 387149 - RNA, 19 nt, Artificial Sequence
  Description of Artificial Sequence: Synthetic oligonucleotide
gagccugcuguaaucuucu

SEQ ID NO: 387150 - RNA, 19 nt, Artificial Sequence
  Description of Artificial Sequence: Synthetic oligonucleotide
caucuaacuccuuccuuau

SEQ ID NO: 387151 - RNA, 19 nt, Artificial Sequence
  Description of Artificial Sequence: Synthetic oligonucleotide
caucauacuacggcuuugu

SEQ ID NO: 387152 - RNA, 19 nt, Artificial Sequence
  Description of Artificial Sequence: Synthetic oligonucleotide
acacgugucagaggauguu

SEQ ID NO: 387153 - RNA, 19 nt, Artificial Sequence
  Description of Artificial Sequence: Synthetic oligonucleotide
gcaucaauuguagccagcu

SEQ ID NO: 387154 - RNA, 19 nt, Artificial Sequence
  Description of Artificial Sequence: Synthetic oligonucleotide
gcucacuauaucucuccaa

SEQ ID NO: 387155 - RNA, 19 nt, Artificial Sequence
  Description of Artificial Sequence: Synthetic oligonucleotide
cagcacaauucauuacggu

SEQ ID NO: 387156 - RNA, 19 nt, Artificial Sequence
  Description of Artificial Sequence: Synthetic oligonucleotide
auacgagacuguagugaau

SEQ ID NO: 387157 - RNA, 19 nt, Artificial Sequence
  Description of Artificial Sequence: Synthetic oligonucleotide
acgcucaauacgagacugu

SEQ ID NO: 387158 - RNA, 19 nt, Artificial Sequence
  Description of Artificial Sequence: Synthetic oligonucleotide
acuuaacauugccgcucuu

SEQ ID NO: 387159 - RNA, 19 nt, Artificial Sequence
  Description of Artificial Sequence: Synthetic oligonucleotide
cuuuacgcagcuguacaau

SEQ ID NO: 387160 - RNA, 19 nt, Artificial Sequence
  Description of Artificial Sequence: Synthetic oligonucleotide
caacuccaaucaagacuca

SEQ ID NO: 387161 - RNA, 19 nt, Artificial Sequence
  Description of Artificial Sequence: Synthetic oligonucleotide
cacagacucacauguuaau

SEQ ID NO: 387162 - RNA, 19 nt, Artificial Sequence
  Description of Artificial Sequence: Synthetic oligonucleotide
cacacgugucagaggaugu

SEQ ID NO: 387163 - RNA, 19 nt, Artificial Sequence
  Description of Artificial Sequence: Synthetic oligonucleotide
ggaguagaucaauaaucuu

SEQ ID NO: 387164 - RNA, 19 nt, Artificial Sequence
  Description of Artificial Sequence: Synthetic oligonucleotide
ccugcauaaacaugauggu

SEQ ID NO: 387165 - RNA, 19 nt, Artificial Sequence
  Description of Artificial Sequence: Synthetic oligonucleotide
gcgucuuccauaggggcuc

SEQ ID NO: 387166 - RNA, 19 nt, Artificial Sequence
  Description of Artificial Sequence: Synthetic oligonucleotide
cgugucagaggauguucac

SEQ ID NO: 387167 - RNA, 19 nt, Artificial Sequence
  Description of Artificial Sequence: Synthetic oligonucleotide
ggagagguuacugugccuu

SEQ ID NO: 387168 - RNA, 19 nt, Artificial Sequence
  Description of Artificial Sequence: Synthetic oligonucleotide
guucacggucugcuaacau

SEQ ID NO: 387169 - RNA, 19 nt, Artificial Sequence
  Description of Artificial Sequence: Synthetic oligonucleotide
gguaugugaagaguagcuu

SEQ ID NO: 387170 - RNA, 19 nt, Artificial Sequence
  Description of Artificial Sequence: Synthetic oligonucleotide
gcauaaacaugaugguauu

SEQ ID NO: 387171 - RNA, 19 nt, Artificial Sequence
  Description of Artificial Sequence: Synthetic oligonucleotide
agacuccaucaagucuccu

SEQ ID NO: 387172 - RNA, 19 nt, Artificial Sequence
  Description of Artificial Sequence: Synthetic oligonucleotide
cacagccaauacuuccacu

SEQ ID NO: 387173 - RNA, 19 nt, Artificial Sequence
  Description of Artificial Sequence: Synthetic oligonucleotide
gaugaccaaacagcuccuu

SEQ ID NO: 387174 - RNA, 19 nt, Artificial Sequence
  Description of Artificial Sequence: Synthetic oligonucleotide
gccaauacuuccacugacu

SEQ ID NO: 387175 - RNA, 19 nt, Artificial Sequence
  Description of Artificial Sequence: Synthetic oligonucleotide
caaaacaucuuggcugcuu

SEQ ID NO: 387176 - RNA, 19 nt, Artificial Sequence
  Description of Artificial Sequence: Synthetic oligonucleotide
cgcucuuacauauaugguu

SEQ ID NO: 387177 - RNA, 19 nt, Artificial Sequence
  Description of Artificial Sequence: Synthetic oligonucleotide
gcccauacuuuacgcagcu

SEQ ID NO: 387178 - RNA, 19 nt, Artificial Sequence
  Description of Artificial Sequence: Synthetic oligonucleotide
gcuaacgucucuccaucuu

SEQ ID NO: 387179 - RNA, 19 nt, Artificial Sequence
  Description of Artificial Sequence: Synthetic oligonucleotide
gggucccaauucagcauca

SEQ ID NO: 387180 - RNA, 19 nt, Artificial Sequence
  Description of Artificial Sequence: Synthetic oligonucleotide
cuggaugcaaaugguccuu

SEQ ID NO: 387181 - RNA, 19 nt, Artificial Sequence
  Description of Artificial Sequence: Synthetic oligonucleotide
gcuuacagcccaacaacuu

SEQ ID NO: 387182 - RNA, 19 nt, Artificial Sequence
  Description of Artificial Sequence: Synthetic oligonucleotide
cgagacuguagugaaugaa

SEQ ID NO: 387183 - RNA, 19 nt, Artificial Sequence
  Description of Artificial Sequence: Synthetic oligonucleotide
gaguacccacugagagcaa

SEQ ID NO: 387184 - RNA, 19 nt, Artificial Sequence
  Description of Artificial Sequence: Synthetic oligonucleotide
gccuucuagacuggauccu

SEQ ID NO: 387185 - RNA, 19 nt, Artificial Sequence
  Description of Artificial Sequence: Synthetic oligonucleotide
cuacggcuuuguuccucau

SEQ ID NO: 387186 - RNA, 19 nt, Artificial Sequence
  Description of Artificial Sequence: Synthetic oligonucleotide
ccgaggauccagagaaauu

SEQ ID NO: 387187 - RNA, 19 nt, Artificial Sequence
  Description of Artificial Sequence: Synthetic oligonucleotide
auugacgaaaguaagaacc

SEQ ID NO: 387188 - RNA, 19 nt, Artificial Sequence
  Description of Artificial Sequence: Synthetic oligonucleotide
guagucaucacacagagug

SEQ ID NO: 387189 - RNA, 19 nt, Artificial Sequence
  Description of Artificial Sequence: Synthetic oligonucleotide
uaaguaauuacacacccca

SEQ ID NO: 387190 - RNA, 19 nt, Artificial Sequence
  Description of Artificial Sequence: Synthetic oligonucleotide
ucaacaucaguauugacga

SEQ ID NO: 387191 - RNA, 19 nt, Artificial Sequence
  Description of Artificial Sequence: Synthetic oligonucleotide
ucagauuggaucuaggcug

SEQ ID NO: 387192 - RNA, 19 nt, Artificial Sequence
  Description of Artificial Sequence: Synthetic oligonucleotide
auagagucgaacuggauuc

SEQ ID NO: 387193 - RNA, 19 nt, Artificial Sequence
  Description of Artificial Sequence: Synthetic oligonucleotide
aauaacuguggcucaaaag

SEQ ID NO: 387194 - RNA, 19 nt, Artificial Sequence
  Description of Artificial Sequence: Synthetic oligonucleotide
acacuauugagacuuuacc

SEQ ID NO: 387195 - RNA, 19 nt, Artificial Sequence
  Description of Artificial Sequence: Synthetic oligonucleotide
aagaguaagcuuugaucgc

SEQ ID NO: 387196 - RNA, 19 nt, Artificial Sequence
  Description of Artificial Sequence: Synthetic oligonucleotide
uuucgugauauaaaguuca

SEQ ID NO: 387197 - RNA, 19 nt, Artificial Sequence
  Description of Artificial Sequence: Synthetic oligonucleotide
uuuguguuauggaugacgc

SEQ ID NO: 387198 - RNA, 19 nt, Artificial Sequence
  Description of Artificial Sequence: Synthetic oligonucleotide
ucauaugcucguaagguag

SEQ ID NO: 387199 - RNA, 19 nt, Artificial Sequence
  Description of Artificial Sequence: Synthetic oligonucleotide
uugaucgccauucaacagg

SEQ ID NO: 387200 - RNA, 19 nt, Artificial Sequence
  Description of Artificial Sequence: Synthetic oligonucleotide
uugacgaaaguaagaaccg

SEQ ID NO: 387201 - RNA, 19 nt, Artificial Sequence
  Description of Artificial Sequence: Synthetic oligonucleotide
  modified_base (2)..(2): a, c, u, g, unknown or other
unuaaagugggcuaguaua

SEQ ID NO: 387202 - RNA, 19 nt, Artificial Sequence
  Description of Artificial Sequence: Synthetic oligonucleotide
uuaguaagcgguuacaaau

SEQ ID NO: 387203 - RNA, 19 nt, Artificial Sequence
  Description of Artificial Sequence: Synthetic oligonucleotide
ugacggcugaccaauagcg

SEQ ID NO: 387204 - RNA, 19 nt, Artificial Sequence
  Description of Artificial Sequence: Synthetic oligonucleotide
uguauauuacuuuaguaua

SEQ ID NO: 387205 - RNA, 19 nt, Artificial Sequence
  Description of Artificial Sequence: Synthetic oligonucleotide
ucguguuuguacaugaaug

SEQ ID NO: 387206 - RNA, 19 nt, Artificial Sequence
  Description of Artificial Sequence: Synthetic oligonucleotide
aguaagaaccggcaacagc

SEQ ID NO: 387207 - RNA, 19 nt, Artificial Sequence
  Description of Artificial Sequence: Synthetic oligonucleotide
aaugaccugaguucacagg

SEQ ID NO: 387208 - RNA, 19 nt, Artificial Sequence
  Description of Artificial Sequence: Synthetic oligonucleotide
aaacuggaaucuugaaauc

SEQ ID NO: 387209 - RNA, 19 nt, Artificial Sequence
  Description of Artificial Sequence: Synthetic oligonucleotide
agccauacaacauggguuc

SEQ ID NO: 387210 - RNA, 19 nt, Artificial Sequence
  Description of Artificial Sequence: Synthetic oligonucleotide
cucucuagguaaaaugugg

SEQ ID NO: 387211 - RNA, 19 nt, Artificial Sequence
  Description of Artificial Sequence: Synthetic oligonucleotide
acccacuaaauaaauaggc

SEQ ID NO: 387212 - RNA, 19 nt, Artificial Sequence
  Description of Artificial Sequence: Synthetic oligonucleotide
ucacgucagaauuacauac

SEQ ID NO: 387213 - RNA, 19 nt, Artificial Sequence
  Description of Artificial Sequence: Synthetic oligonucleotide
gucuuuucgugauauaaag

SEQ ID NO: 387214 - RNA, 19 nt, Artificial Sequence
  Description of Artificial Sequence: Synthetic oligonucleotide
uucuccgaaacugagguag

SEQ ID NO: 387215 - RNA, 19 nt, Artificial Sequence
  Description of Artificial Sequence: Synthetic oligonucleotide
acuauugagacuuuaccaa

SEQ ID NO: 387216 - RNA, 19 nt, Artificial Sequence
  Description of Artificial Sequence: Synthetic oligonucleotide
aaaacugcuagcggggauc

SEQ ID NO: 387217 - RNA, 19 nt, Artificial Sequence
  Description of Artificial Sequence: Synthetic oligonucleotide
acggcugaccaauagcggc

SEQ ID NO: 387218 - RNA, 19 nt, Artificial Sequence
  Description of Artificial Sequence: Synthetic oligonucleotide
  modified_base (13)..(13): a, c, u, g, unknown or other
uagcucaucccunuaaagu

SEQ ID NO: 387219 - RNA, 19 nt, Artificial Sequence
  Description of Artificial Sequence: Synthetic oligonucleotide
uggaugacgccuucaaucc

SEQ ID NO: 387220 - RNA, 19 nt, Artificial Sequence
  Description of Artificial Sequence: Synthetic oligonucleotide
aaaucaacaucaguauuga

SEQ ID NO: 387221 - RNA, 19 nt, Artificial Sequence
  Description of Artificial Sequence: Synthetic oligonucleotide
  modified_base (10)..(10): a, c, u, g, unknown or other
cucaucccunuaaaguggg

SEQ ID NO: 387222 - RNA, 19 nt, Artificial Sequence
  Description of Artificial Sequence: Synthetic oligonucleotide
  modified_base (14)..(14): a, c, u, g, unknown or other
cuagcucaucccunuaaag

SEQ ID NO: 387223 - RNA, 19 nt, Artificial Sequence
  Description of Artificial Sequence: Synthetic oligonucleotide
aaucacgucagaauuacau

SEQ ID NO: 387224 - RNA, 19 nt, Artificial Sequence
  Description of Artificial Sequence: Synthetic oligonucleotide
auaaguaauuacacacccc

SEQ ID NO: 387225 - RNA, 19 nt, Artificial Sequence
  Description of Artificial Sequence: Synthetic oligonucleotide
ucuuuucgugauauaaagu

SEQ ID NO: 387226 - RNA, 19 nt, Artificial Sequence
  Description of Artificial Sequence: Synthetic oligonucleotide
ucucucuagguaaaaugug

SEQ ID NO: 387227 - RNA, 19 nt, Artificial Sequence
  Description of Artificial Sequence: Synthetic oligonucleotide
uucuaaaucacgucagaau

SEQ ID NO: 387228 - RNA, 19 nt, Artificial Sequence
  Description of Artificial Sequence: Synthetic oligonucleotide
aacucaugcaaugaaaauu

SEQ ID NO: 387229 - RNA, 19 nt, Artificial Sequence
  Description of Artificial Sequence: Synthetic oligonucleotide
aucgccauucaacaggcag

SEQ ID NO: 387230 - RNA, 19 nt, Artificial Sequence
  Description of Artificial Sequence: Synthetic oligonucleotide
ucggaugccacgcaaugcc

SEQ ID NO: 387231 - RNA, 19 nt, Artificial Sequence
  Description of Artificial Sequence: Synthetic oligonucleotide
cauggguucaacauuccug

SEQ ID NO: 387232 - RNA, 19 nt, Artificial Sequence
  Description of Artificial Sequence: Synthetic oligonucleotide
uuaccaacuagcucauccc

SEQ ID NO: 387233 - RNA, 19 nt, Artificial Sequence
  Description of Artificial Sequence: Synthetic oligonucleotide
aaaucuccguaucuugaca

SEQ ID NO: 387234 - RNA, 19 nt, Artificial Sequence
  Description of Artificial Sequence: Synthetic oligonucleotide
auggaaucaacagugucuc

SEQ ID NO: 387235 - RNA, 19 nt, Artificial Sequence
  Description of Artificial Sequence: Synthetic oligonucleotide
ucuugcccuaaacaaaacu

SEQ ID NO: 387236 - RNA, 19 nt, Artificial Sequence
  Description of Artificial Sequence: Synthetic oligonucleotide
  modified_base (16)..(16): a, c, u, g, unknown or other
aacuagcucaucccunuaa

SEQ ID NO: 387237 - RNA, 19 nt, Artificial Sequence
  Description of Artificial Sequence: Synthetic oligonucleotide
uuugaucgccauucaacag

SEQ ID NO: 387238 - RNA, 19 nt, Artificial Sequence
  Description of Artificial Sequence: Synthetic oligonucleotide
auggguucaacauuccuga

SEQ ID NO: 387239 - RNA, 19 nt, Artificial Sequence
  Description of Artificial Sequence: Synthetic oligonucleotide
uaaaucacgucagaauuac

SEQ ID NO: 387240 - RNA, 19 nt, Artificial Sequence
  Description of Artificial Sequence: Synthetic oligonucleotide
agaagcgacaggcuucuuc

SEQ ID NO: 387241 - RNA, 19 nt, Artificial Sequence
  Description of Artificial Sequence: Synthetic oligonucleotide
accaauagcggcucuccac

SEQ ID NO: 387242 - RNA, 19 nt, Artificial Sequence
  Description of Artificial Sequence: Synthetic oligonucleotide
uuccugagaauuaaaugaa

SEQ ID NO: 387243 - RNA, 19 nt, Artificial Sequence
  Description of Artificial Sequence: Synthetic oligonucleotide
aguauaguucaaacauugc

SEQ ID NO: 387244 - RNA, 19 nt, Artificial Sequence
  Description of Artificial Sequence: Synthetic oligonucleotide
ugaucgccauucaacaggc

SEQ ID NO: 387245 - RNA, 19 nt, Artificial Sequence
  Description of Artificial Sequence: Synthetic oligonucleotide
aacaucaguauugacgaaa

SEQ ID NO: 387246 - RNA, 19 nt, Artificial Sequence
  Description of Artificial Sequence: Synthetic oligonucleotide
uauugacgaaaguaagaac

SEQ ID NO: 387247 - RNA, 19 nt, Artificial Sequence
  Description of Artificial Sequence: Synthetic oligonucleotide
uacuuuaguauauggcagu

SEQ ID NO: 387248 - RNA, 19 nt, Artificial Sequence
  Description of Artificial Sequence: Synthetic oligonucleotide
gguuacaaaucucucuagg

SEQ ID NO: 387249 - RNA, 19 nt, Artificial Sequence
  Description of Artificial Sequence: Synthetic oligonucleotide
aguaagcgguuacaaaucu

SEQ ID NO: 387250 - RNA, 19 nt, Artificial Sequence
  Description of Artificial Sequence: Synthetic oligonucleotide
gaaaucuccguaucuugac

SEQ ID NO: 387251 - RNA, 19 nt, Artificial Sequence
  Description of Artificial Sequence: Synthetic oligonucleotide
aauagcggcucuccacgag

SEQ ID NO: 387252 - RNA, 19 nt, Artificial Sequence
  Description of Artificial Sequence: Synthetic oligonucleotide
cacuauugagacuuuacca

SEQ ID NO: 387253 - RNA, 19 nt, Artificial Sequence
  Description of Artificial Sequence: Synthetic oligonucleotide
ugacgaaaguaagaaccgg

SEQ ID NO: 387254 - RNA, 19 nt, Artificial Sequence
  Description of Artificial Sequence: Synthetic oligonucleotide
auugcacuacuguucagca

SEQ ID NO: 387255 - RNA, 19 nt, Artificial Sequence
  Description of Artificial Sequence: Synthetic oligonucleotide
ugcccuaaacaaaacugga

SEQ ID NO: 387256 - RNA, 19 nt, Artificial Sequence
  Description of Artificial Sequence: Synthetic oligonucleotide
cuuugaucgccauucaaca

SEQ ID NO: 387257 - RNA, 19 nt, Artificial Sequence
  Description of Artificial Sequence: Synthetic oligonucleotide
uaguaagcgguuacaaauc

SEQ ID NO: 387258 - RNA, 19 nt, Artificial Sequence
  Description of Artificial Sequence: Synthetic oligonucleotide
cagggguccaauuuaguac

SEQ ID NO: 387259 - RNA, 19 nt, Artificial Sequence
  Description of Artificial Sequence: Synthetic oligonucleotide
cauagcucauccaucguuc

SEQ ID NO: 387260 - RNA, 19 nt, Artificial Sequence
  Description of Artificial Sequence: Synthetic oligonucleotide
agggguccaauuuaguacu

SEQ ID NO: 387261 - RNA, 19 nt, Artificial Sequence
  Description of Artificial Sequence: Synthetic oligonucleotide
caaugguucuaaucuguag

SEQ ID NO: 387262 - RNA, 19 nt, Artificial Sequence
  Description of Artificial Sequence: Synthetic oligonucleotide
agugggcuaguauaguaca

SEQ ID NO: 387263 - RNA, 19 nt, Artificial Sequence
  Description of Artificial Sequence: Synthetic oligonucleotide
uucaguugauauucaacau

SEQ ID NO: 387264 - RNA, 19 nt, Artificial Sequence
  Description of Artificial Sequence: Synthetic oligonucleotide
acuaaauaaauaggcuaug

SEQ ID NO: 387265 - RNA, 19 nt, Artificial Sequence
  Description of Artificial Sequence: Synthetic oligonucleotide
caacauaugcucagccacc

SEQ ID NO: 387266 - RNA, 19 nt, Artificial Sequence
  Description of Artificial Sequence: Synthetic oligonucleotide
cauccaucguucaucgggc

SEQ ID NO: 387267 - RNA, 19 nt, Artificial Sequence
  Description of Artificial Sequence: Synthetic oligonucleotide
ugugcgaugugacggcuga

SEQ ID NO: 387268 - RNA, 19 nt, Artificial Sequence
  Description of Artificial Sequence: Synthetic oligonucleotide
agcgguuacaaaucucucu

SEQ ID NO: 387269 - RNA, 19 nt, Artificial Sequence
  Description of Artificial Sequence: Synthetic oligonucleotide
agagcgacauccaaggaug

SEQ ID NO: 387270 - RNA, 19 nt, Artificial Sequence
  Description of Artificial Sequence: Synthetic oligonucleotide
ucauagcucauccaucguu

SEQ ID NO: 387271 - RNA, 19 nt, Artificial Sequence
  Description of Artificial Sequence: Synthetic oligonucleotide
aagaaccggcaacagcugu

SEQ ID NO: 387272 - RNA, 19 nt, Artificial Sequence
  Description of Artificial Sequence: Synthetic oligonucleotide
aguauugacgaaaguaaga

SEQ ID NO: 387273 - RNA, 19 nt, Artificial Sequence
  Description of Artificial Sequence: Synthetic oligonucleotide
ucuccgaaacugagguagg

SEQ ID NO: 387274 - RNA, 19 nt, Artificial Sequence
  Description of Artificial Sequence: Synthetic oligonucleotide
uucauaugcucguaaggua

SEQ ID NO: 387275 - RNA, 19 nt, Artificial Sequence
  Description of Artificial Sequence: Synthetic oligonucleotide
ucgccauucaacaggcaga

SEQ ID NO: 387276 - RNA, 19 nt, Artificial Sequence
  Description of Artificial Sequence: Synthetic oligonucleotide
guauugacgaaaguaagaa

SEQ ID NO: 387277 - RNA, 19 nt, Artificial Sequence
  Description of Artificial Sequence: Synthetic oligonucleotide
cuucagggguccaauuuag

SEQ ID NO: 387278 - RNA, 19 nt, Artificial Sequence
  Description of Artificial Sequence: Synthetic oligonucleotide
uaugcucguaagguagagg

SEQ ID NO: 387279 - RNA, 19 nt, Artificial Sequence
  Description of Artificial Sequence: Synthetic oligonucleotide
aguacaucccaugauuaca

SEQ ID NO: 387280 - RNA, 19 nt, Artificial Sequence
  Description of Artificial Sequence: Synthetic oligonucleotide
aacauaugcucagccaccu

SEQ ID NO: 387281 - RNA, 19 nt, Artificial Sequence
  Description of Artificial Sequence: Synthetic oligonucleotide
uaagaaccggcaacagcug

SEQ ID NO: 387282 - RNA, 19 nt, Artificial Sequence
  Description of Artificial Sequence: Synthetic oligonucleotide
uccugagaauuaaaugaaa

SEQ ID NO: 387283 - RNA, 19 nt, Artificial Sequence
  Description of Artificial Sequence: Synthetic oligonucleotide
uccguaucuugacacauuu

SEQ ID NO: 387284 - RNA, 19 nt, Artificial Sequence
  Description of Artificial Sequence: Synthetic oligonucleotide
aaagagcgacauccaagga

SEQ ID NO: 387285 - RNA, 19 nt, Artificial Sequence
  Description of Artificial Sequence: Synthetic oligonucleotide
agcacgccccaauauggac

SEQ ID NO: 387286 - RNA, 19 nt, Artificial Sequence
  Description of Artificial Sequence: Synthetic oligonucleotide
ucccaugauuacaugcaga

SEQ ID NO: 387287 - RNA, 19 nt, Artificial Sequence
  Description of Artificial Sequence: Synthetic oligonucleotide
uuugcuggguugagaaagu

SEQ ID NO: 387288 - RNA, 19 nt, Artificial Sequence
  Description of Artificial Sequence: Synthetic oligonucleotide
aauuuaguacuugcuggaa

SEQ ID NO: 387289 - RNA, 19 nt, Artificial Sequence
  Description of Artificial Sequence: Synthetic oligonucleotide
agaguugacauaaacucau

SEQ ID NO: 387290 - RNA, 19 nt, Artificial Sequence
  Description of Artificial Sequence: Synthetic oligonucleotide
uguccauugcacuacuguu

SEQ ID NO: 387291 - RNA, 19 nt, Artificial Sequence
  Description of Artificial Sequence: Synthetic oligonucleotide
guuacaaaucucucuaggu

SEQ ID NO: 387292 - RNA, 19 nt, Artificial Sequence
  Description of Artificial Sequence: Synthetic oligonucleotide
guuacuugguacuugacuu

SEQ ID NO: 387293 - RNA, 19 nt, Artificial Sequence
  Description of Artificial Sequence: Synthetic oligonucleotide
  modified_base (6)..(6): a, c, u, g, unknown or other
ucccunuaaagugggcuag

SEQ ID NO: 387294 - RNA, 19 nt, Artificial Sequence
  Description of Artificial Sequence: Synthetic oligonucleotide
  modified_base (7)..(7): a, c, u, g, unknown or other
aucccunuaaagugggcua

SEQ ID NO: 387295 - RNA, 19 nt, Artificial Sequence
  Description of Artificial Sequence: Synthetic oligonucleotide
uuguguuauggaugacgcc

SEQ ID NO: 387296 - RNA, 19 nt, Artificial Sequence
  Description of Artificial Sequence: Synthetic oligonucleotide
cccaugauuacaugcagag

SEQ ID NO: 387297 - RNA, 19 nt, Artificial Sequence
  Description of Artificial Sequence: Synthetic oligonucleotide
ggaaaugggccucaacaug

SEQ ID NO: 387298 - RNA, 19 nt, Artificial Sequence
  Description of Artificial Sequence: Synthetic oligonucleotide
uugcuuacggaagcaaacu

SEQ ID NO: 387299 - RNA, 19 nt, Artificial Sequence
  Description of Artificial Sequence: Synthetic oligonucleotide
uuaucaugcucguguuugu

SEQ ID NO: 387300 - RNA, 19 nt, Artificial Sequence
  Description of Artificial Sequence: Synthetic oligonucleotide
ugaccaauagcggcucucc

SEQ ID NO: 387301 - RNA, 19 nt, Artificial Sequence
  Description of Artificial Sequence: Synthetic oligonucleotide
  modified_base (9)..(9): a, c, u, g, unknown or other
ucaucccunuaaagugggc

SEQ ID NO: 387302 - RNA, 19 nt, Artificial Sequence
  Description of Artificial Sequence: Synthetic oligonucleotide
ugcgaugugacggcugacc

SEQ ID NO: 387303 - RNA, 19 nt, Artificial Sequence
  Description of Artificial Sequence: Synthetic oligonucleotide
ucauuaucaugcucguguu

SEQ ID NO: 387304 - RNA, 19 nt, Artificial Sequence
  Description of Artificial Sequence: Synthetic oligonucleotide
aucacgucagaauuacaua

SEQ ID NO: 387305 - RNA, 19 nt, Artificial Sequence
  Description of Artificial Sequence: Synthetic oligonucleotide
aagcgguuacaaaucucuc

SEQ ID NO: 387306 - RNA, 19 nt, Artificial Sequence
  Description of Artificial Sequence: Synthetic oligonucleotide
ugggccucaacaugauaca

SEQ ID NO: 387307 - RNA, 19 nt, Artificial Sequence
  Description of Artificial Sequence: Synthetic oligonucleotide
acauggguucaacauuccu

SEQ ID NO: 387308 - RNA, 19 nt, Artificial Sequence
  Description of Artificial Sequence: Synthetic oligonucleotide
gacauacuccuuugcuuac

SEQ ID NO: 387309 - RNA, 19 nt, Artificial Sequence
  Description of Artificial Sequence: Synthetic oligonucleotide
gcagugugcgaugugacgg

SEQ ID NO: 387310 - RNA, 19 nt, Artificial Sequence
  Description of Artificial Sequence: Synthetic oligonucleotide
cuaaaucacgucagaauua

SEQ ID NO: 387311 - RNA, 19 nt, Artificial Sequence
  Description of Artificial Sequence: Synthetic oligonucleotide
uucgugauauaaaguucau

SEQ ID NO: 387312 - RNA, 19 nt, Artificial Sequence
  Description of Artificial Sequence: Synthetic oligonucleotide
cauucuccgaaacugaggu

SEQ ID NO: 387313 - RNA, 19 nt, Artificial Sequence
  Description of Artificial Sequence: Synthetic oligonucleotide
uaaagugggcuaguauagu

SEQ ID NO: 387314 - RNA, 19 nt, Artificial Sequence
  Description of Artificial Sequence: Synthetic oligonucleotide
gauuggaucuaggcugggc

SEQ ID NO: 387315 - RNA, 19 nt, Artificial Sequence
  Description of Artificial Sequence: Synthetic oligonucleotide
aagcuuugaucgccauuca

SEQ ID NO: 387316 - RNA, 19 nt, Artificial Sequence
  Description of Artificial Sequence: Synthetic oligonucleotide
gacggcugaccaauagcgg

SEQ ID NO: 387317 - RNA, 19 nt, Artificial Sequence
  Description of Artificial Sequence: Synthetic oligonucleotide
uguuauggaugacgccuuc

SEQ ID NO: 387318 - RNA, 19 nt, Artificial Sequence
  Description of Artificial Sequence: Synthetic oligonucleotide
aggugucgcucuucauagc

SEQ ID NO: 387319 - RNA, 19 nt, Artificial Sequence
  Description of Artificial Sequence: Synthetic oligonucleotide
gaaccggcaacagcugucc

SEQ ID NO: 387320 - RNA, 19 nt, Artificial Sequence
  Description of Artificial Sequence: Synthetic oligonucleotide
aguucagauuggaucuagg

SEQ ID NO: 387321 - RNA, 19 nt, Artificial Sequence
  Description of Artificial Sequence: Synthetic oligonucleotide
acugcuagcacgccccaau

SEQ ID NO: 387322 - RNA, 19 nt, Artificial Sequence
  Description of Artificial Sequence: Synthetic oligonucleotide
auaugcucguaagguagag

SEQ ID NO: 387323 - RNA, 19 nt, Artificial Sequence
  Description of Artificial Sequence: Synthetic oligonucleotide
ggcuucauaugcucguaag

SEQ ID NO: 387324 - RNA, 19 nt, Artificial Sequence
  Description of Artificial Sequence: Synthetic oligonucleotide
aaguaauuacacaccccaa

SEQ ID NO: 387325 - RNA, 19 nt, Artificial Sequence
  Description of Artificial Sequence: Synthetic oligonucleotide
uggguucaacauuccugag

SEQ ID NO: 387326 - RNA, 19 nt, Artificial Sequence
  Description of Artificial Sequence: Synthetic oligonucleotide
accugaguucacaggaauc

SEQ ID NO: 387327 - RNA, 19 nt, Artificial Sequence
  Description of Artificial Sequence: Synthetic oligonucleotide
uagagucgaacuggauucc

SEQ ID NO: 387328 - RNA, 19 nt, Artificial Sequence
  Description of Artificial Sequence: Synthetic oligonucleotide
uuacggaagcaaacuucuc

SEQ ID NO: 387329 - RNA, 19 nt, Artificial Sequence
  Description of Artificial Sequence: Synthetic oligonucleotide
uagcacgccccaauaugga

SEQ ID NO: 387330 - RNA, 19 nt, Artificial Sequence
  Description of Artificial Sequence: Synthetic oligonucleotide
ccaacugcuagcacgcccc

SEQ ID NO: 387331 - RNA, 19 nt, Artificial Sequence
  Description of Artificial Sequence: Synthetic oligonucleotide
gcuagcacgccccaauaug

SEQ ID NO: 387332 - RNA, 19 nt, Artificial Sequence
  Description of Artificial Sequence: Synthetic oligonucleotide
gccguuguaagacugggga

SEQ ID NO: 387333 - RNA, 19 nt, Artificial Sequence
  Description of Artificial Sequence: Synthetic oligonucleotide
gcucagaugacugugaugu

SEQ ID NO: 387334 - RNA, 19 nt, Artificial Sequence
  Description of Artificial Sequence: Synthetic oligonucleotide
cucagccaccuuuaacgac

SEQ ID NO: 387335 - RNA, 19 nt, Artificial Sequence
  Description of Artificial Sequence: Synthetic oligonucleotide
ucuccguaucuugacacau

SEQ ID NO: 387336 - RNA, 19 nt, Artificial Sequence
  Description of Artificial Sequence: Synthetic oligonucleotide
cuucauaugcucguaaggu

SEQ ID NO: 387337 - RNA, 19 nt, Artificial Sequence
  Description of Artificial Sequence: Synthetic oligonucleotide
ugcuagcacgccccaauau

SEQ ID NO: 387338 - RNA, 19 nt, Artificial Sequence
  Description of Artificial Sequence: Synthetic oligonucleotide
gcuuugaucgccauucaac

SEQ ID NO: 387339 - RNA, 19 nt, Artificial Sequence
  Description of Artificial Sequence: Synthetic oligonucleotide
ccgaaacugagguagguuc

SEQ ID NO: 387340 - RNA, 19 nt, Artificial Sequence
  Description of Artificial Sequence: Synthetic oligonucleotide
cagugugcgaugugacggc

SEQ ID NO: 387341 - RNA, 19 nt, Artificial Sequence
  Description of Artificial Sequence: Synthetic oligonucleotide
gaagaccguccaaaucuug

SEQ ID NO: 387342 - RNA, 19 nt, Artificial Sequence
  Description of Artificial Sequence: Synthetic oligonucleotide
cauaugcucguaagguaga

SEQ ID NO: 387343 - RNA, 19 nt, Artificial Sequence
  Description of Artificial Sequence: Synthetic oligonucleotide
agcuuugaucgccauucaa

SEQ ID NO: 387344 - RNA, 19 nt, Artificial Sequence
  Description of Artificial Sequence: Synthetic oligonucleotide
caucaagaaggugucgcuc

SEQ ID NO: 387345 - RNA, 19 nt, Artificial Sequence
  Description of Artificial Sequence: Synthetic oligonucleotide
guaagguagaggauuugaa

SEQ ID NO: 387346 - RNA, 19 nt, Artificial Sequence
  Description of Artificial Sequence: Synthetic oligonucleotide
ugcucguaagguagaggau

SEQ ID NO: 387347 - RNA, 19 nt, Artificial Sequence
  Description of Artificial Sequence: Synthetic oligonucleotide
cacgccccaauauggacuc

SEQ ID NO: 387348 - RNA, 19 nt, Artificial Sequence
  Description of Artificial Sequence: Synthetic oligonucleotide
acuuuaguauauggcagua

SEQ ID NO: 387349 - RNA, 19 nt, Artificial Sequence
  Description of Artificial Sequence: Synthetic oligonucleotide
auacuccuuugcuuacgga

SEQ ID NO: 387350 - RNA, 19 nt, Artificial Sequence
  Description of Artificial Sequence: Synthetic oligonucleotide
ugggcuaguauaguacauu

SEQ ID NO: 387351 - RNA, 19 nt, Artificial Sequence
  Description of Artificial Sequence: Synthetic oligonucleotide
ggugaaauguugcuguagu

SEQ ID NO: 387352 - RNA, 19 nt, Artificial Sequence
  Description of Artificial Sequence: Synthetic oligonucleotide
aguaggcagugugcgaugu

SEQ ID NO: 387353 - RNA, 19 nt, Artificial Sequence
  Description of Artificial Sequence: Synthetic oligonucleotide
ucguaagguagaggauuug

SEQ ID NO: 387354 - RNA, 19 nt, Artificial Sequence
  Description of Artificial Sequence: Synthetic oligonucleotide
accaguaggcagugugcga

SEQ ID NO: 387355 - RNA, 19 nt, Artificial Sequence
  Description of Artificial Sequence: Synthetic oligonucleotide
gacucuccguaguggcgcc

SEQ ID NO: 387356 - RNA, 19 nt, Artificial Sequence
  Description of Artificial Sequence: Synthetic oligonucleotide
uggucggaugccacgcaau

SEQ ID NO: 387357 - RNA, 19 nt, Artificial Sequence
  Description of Artificial Sequence: Synthetic oligonucleotide
guaagcgguuacaaaucuc

SEQ ID NO: 387358 - RNA, 19 nt, Artificial Sequence
  Description of Artificial Sequence: Synthetic oligonucleotide
ggucggaugccacgcaaug

SEQ ID NO: 387359 - RNA, 19 nt, Artificial Sequence
  Description of Artificial Sequence: Synthetic oligonucleotide
gcuagcggggaucccauac

SEQ ID NO: 387360 - RNA, 19 nt, Artificial Sequence
  Description of Artificial Sequence: Synthetic oligonucleotide
  modified_base (3)..(3): a, c, u, g, unknown or other
cunuaaagugggcuaguau

SEQ ID NO: 387361 - RNA, 19 nt, Artificial Sequence
  Description of Artificial Sequence: Synthetic oligonucleotide
auccaucguucaucgggca

SEQ ID NO: 387362 - RNA, 19 nt, Artificial Sequence
  Description of Artificial Sequence: Synthetic oligonucleotide
agagucgaacuggauucca

SEQ ID NO: 387363 - RNA, 19 nt, Artificial Sequence
  Description of Artificial Sequence: Synthetic oligonucleotide
gcgguuacaaaucucucua

SEQ ID NO: 387364 - RNA, 19 nt, Artificial Sequence
  Description of Artificial Sequence: Synthetic oligonucleotide
cuagcggggaucccauaca

SEQ ID NO: 387365 - RNA, 19 nt, Artificial Sequence
  Description of Artificial Sequence: Synthetic oligonucleotide
augcucguguuuguacaug

SEQ ID NO: 387366 - RNA, 19 nt, Artificial Sequence
  Description of Artificial Sequence: Synthetic oligonucleotide
gggcuaguauaguacauua

SEQ ID NO: 387367 - RNA, 19 nt, Artificial Sequence
  Description of Artificial Sequence: Synthetic oligonucleotide
gcuucuaaaucacgucaga

SEQ ID NO: 387368 - RNA, 19 nt, Artificial Sequence
  Description of Artificial Sequence: Synthetic oligonucleotide
  modified_base (8)..(8): a, c, u, g, unknown or other
caucccunuaaagugggcu

SEQ ID NO: 387369 - RNA, 19 nt, Artificial Sequence
  Description of Artificial Sequence: Synthetic oligonucleotide
ggugucgcucuucauagcu

SEQ ID NO: 387370 - RNA, 19 nt, Artificial Sequence
  Description of Artificial Sequence: Synthetic oligonucleotide
aggcagguguuuguguuau

SEQ ID NO: 387371 - RNA, 19 nt, Artificial Sequence
  Description of Artificial Sequence: Synthetic oligonucleotide
ugcagccguucuucuauuu

SEQ ID NO: 387372 - RNA, 19 nt, Artificial Sequence
  Description of Artificial Sequence: Synthetic oligonucleotide
agugugcgaugugacggcu

SEQ ID NO: 387373 - RNA, 19 nt, Artificial Sequence
  Description of Artificial Sequence: Synthetic oligonucleotide
caauccaugcagccguucu

SEQ ID NO: 387374 - RNA, 19 nt, Artificial Sequence
  Description of Artificial Sequence: Synthetic oligonucleotide
gcagccguucuucuauuuc

SEQ ID NO: 387375 - RNA, 19 nt, Artificial Sequence
  Description of Artificial Sequence: Synthetic oligonucleotide
gcgaugugacggcugacca

SEQ ID NO: 387376 - RNA, 19 nt, Artificial Sequence
  Description of Artificial Sequence: Synthetic oligonucleotide
ggcaguacaucccaugauu

SEQ ID NO: 387377 - RNA, 19 nt, Artificial Sequence
  Description of Artificial Sequence: Synthetic oligonucleotide
ggguccaauuuaguacuug

SEQ ID NO: 387378 - RNA, 19 nt, Artificial Sequence
  Description of Artificial Sequence: Synthetic oligonucleotide
cacggggcucgggauauug

SEQ ID NO: 387379 - RNA, 19 nt, Artificial Sequence
  Description of Artificial Sequence: Synthetic oligonucleotide
gggaaaugggccucaacau

SEQ ID NO: 387380 - RNA, 19 nt, Artificial Sequence
  Description of Artificial Sequence: Synthetic oligonucleotide
cccuaaacaaaacuggaau

SEQ ID NO: 387381 - RNA, 19 nt, Artificial Sequence
  Description of Artificial Sequence: Synthetic oligonucleotide
augacgccuucaauccaug

SEQ ID NO: 387382 - RNA, 19 nt, Artificial Sequence
  Description of Artificial Sequence: Synthetic oligonucleotide
cauguguugcaugguugga

SEQ ID NO: 387383 - RNA, 19 nt, Artificial Sequence
  Description of Artificial Sequence: Synthetic oligonucleotide
cucguaagguagaggauuu

SEQ ID NO: 387384 - RNA, 19 nt, Artificial Sequence
  Description of Artificial Sequence: Synthetic oligonucleotide
ccguccaaaucuugagaac

SEQ ID NO: 387385 - RNA, 19 nt, Artificial Sequence
  Description of Artificial Sequence: Synthetic oligonucleotide
ggaugacgccuucaaucca

SEQ ID NO: 387386 - RNA, 19 nt, Artificial Sequence
  Description of Artificial Sequence: Synthetic oligonucleotide
cagaguguacuggaaucaa

SEQ ID NO: 387387 - RNA, 19 nt, Artificial Sequence
  Description of Artificial Sequence: Synthetic oligonucleotide
augccacgcaaugccaaaa

SEQ ID NO: 387388 - RNA, 19 nt, Artificial Sequence
  Description of Artificial Sequence: Synthetic oligonucleotide
gugugcgaugugacggcug

SEQ ID NO: 387389 - RNA, 19 nt, Artificial Sequence
  Description of Artificial Sequence: Synthetic oligonucleotide
auauggcaguacaucccau

SEQ ID NO: 387390 - RNA, 19 nt, Artificial Sequence
  Description of Artificial Sequence: Synthetic oligonucleotide
cuuuaacgacagccauaca

SEQ ID NO: 387391 - RNA, 19 nt, Artificial Sequence
  Description of Artificial Sequence: Synthetic oligonucleotide
cgguuacaaaucucucuag

SEQ ID NO: 387392 - RNA, 19 nt, Artificial Sequence
  Description of Artificial Sequence: Synthetic oligonucleotide
cccaauauggacucuccgu

SEQ ID NO: 387393 - RNA, 19 nt, Artificial Sequence
  Description of Artificial Sequence: Synthetic oligonucleotide
cuggucggaugccacgcaa

SEQ ID NO: 387394 - RNA, 19 nt, Artificial Sequence
  Description of Artificial Sequence: Synthetic oligonucleotide
ccgucuuuucgugauauaa

SEQ ID NO: 387395 - RNA, 19 nt, Artificial Sequence
  Description of Artificial Sequence: Synthetic oligonucleotide
agcggggaucccauacaga

SEQ ID NO: 387396 - RNA, 19 nt, Artificial Sequence
  Description of Artificial Sequence: Synthetic oligonucleotide
gaucgccauucaacaggca

SEQ ID NO: 387397 - RNA, 19 nt, Artificial Sequence
  Description of Artificial Sequence: Synthetic oligonucleotide
caugucccucaagccgcgc

SEQ ID NO: 387398 - RNA, 19 nt, Artificial Sequence
  Description of Artificial Sequence: Synthetic oligonucleotide
cguaagguagaggauuuga

SEQ ID NO: 387399 - RNA, 19 nt, Artificial Sequence
  Description of Artificial Sequence: Synthetic oligonucleotide
ucuccguaguggcgccguu

SEQ ID NO: 387400 - RNA, 19 nt, Artificial Sequence
  Description of Artificial Sequence: Synthetic oligonucleotide
cauuaucaugcucguguuu

SEQ ID NO: 387401 - RNA, 19 nt, Artificial Sequence
  Description of Artificial Sequence: Synthetic oligonucleotide
caacugcuagcacgcccca

SEQ ID NO: 387402 - RNA, 19 nt, Artificial Sequence
  Description of Artificial Sequence: Synthetic oligonucleotide
ggagaagcgacaggcuucu

SEQ ID NO: 387403 - RNA, 19 nt, Artificial Sequence
  Description of Artificial Sequence: Synthetic oligonucleotide
cgccguuguaagacugggg

SEQ ID NO: 387404 - RNA, 19 nt, Artificial Sequence
  Description of Artificial Sequence: Synthetic oligonucleotide
ggaugccacgcaaugccaa

SEQ ID NO: 387405 - RNA, 19 nt, Artificial Sequence
  Description of Artificial Sequence: Synthetic oligonucleotide
cugcuagcacgccccaaua

SEQ ID NO: 387406 - RNA, 19 nt, Artificial Sequence
  Description of Artificial Sequence: Synthetic oligonucleotide
  modified_base (4)..(4): a, c, u, g, unknown or other
ccunuaaagugggcuagua

SEQ ID NO: 387407 - RNA, 19 nt, Artificial Sequence
  Description of Artificial Sequence: Synthetic oligonucleotide
ccgucaugaugucauaagu

SEQ ID NO: 387408 - RNA, 19 nt, Artificial Sequence
  Description of Artificial Sequence: Synthetic oligonucleotide
gcgacaggcuucuucucgu

SEQ ID NO: 387409 - RNA, 19 nt, Artificial Sequence
  Description of Artificial Sequence: Synthetic oligonucleotide
gugggcuaguauaguacau

SEQ ID NO: 387410 - RNA, 19 nt, Artificial Sequence
  Description of Artificial Sequence: Synthetic oligonucleotide
ggcuaguauaguacauuau

SEQ ID NO: 387411 - RNA, 19 nt, Artificial Sequence
  Description of Artificial Sequence: Synthetic oligonucleotide
ccggcaacagcuguccaga

SEQ ID NO: 387412 - RNA, 19 nt, Artificial Sequence
  Description of Artificial Sequence: Synthetic oligonucleotide
cuccgaaacugagguaggu

SEQ ID NO: 387413 - RNA, 19 nt, Artificial Sequence
  Description of Artificial Sequence: Synthetic oligonucleotide
gugcgaugugacggcugac

SEQ ID NO: 387414 - RNA, 19 nt, Artificial Sequence
  Description of Artificial Sequence: Synthetic oligonucleotide
cuccguaucuugacacauu

SEQ ID NO: 387415 - RNA, 19 nt, Artificial Sequence
  Description of Artificial Sequence: Synthetic oligonucleotide
gucacggggcucgggauau

SEQ ID NO: 387416 - RNA, 19 nt, Artificial Sequence
  Description of Artificial Sequence: Synthetic oligonucleotide
cugcuagcggggaucccau

SEQ ID NO: 387417 - RNA, 19 nt, Artificial Sequence
  Description of Artificial Sequence: Synthetic oligonucleotide
gcucguguuuguacaugaa

SEQ ID NO: 387418 - RNA, 19 nt, Artificial Sequence
  Description of Artificial Sequence: Synthetic oligonucleotide
cucagaugacugugauguu

SEQ ID NO: 387419 - RNA, 19 nt, Artificial Sequence
  Description of Artificial Sequence: Synthetic oligonucleotide
acgccccaauauggacucu

SEQ ID NO: 387420 - RNA, 19 nt, Artificial Sequence
  Description of Artificial Sequence: Synthetic oligonucleotide
cucuccguaguggcgccgu

SEQ ID NO: 387421 - RNA, 19 nt, Artificial Sequence
  Description of Artificial Sequence: Synthetic oligonucleotide
gccgucuuuucgugauaua

SEQ ID NO: 387422 - RNA, 19 nt, Artificial Sequence
  Description of Artificial Sequence: Synthetic oligonucleotide
cggaugccacgcaaugcca

SEQ ID NO: 387423 - RNA, 19 nt, Artificial Sequence
  Description of Artificial Sequence: Synthetic oligonucleotide
ccuggucggaugccacgca

SEQ ID NO: 387424 - RNA, 19 nt, Artificial Sequence
  Description of Artificial Sequence: Synthetic oligonucleotide
ucacggggcucgggauauu

SEQ ID NO: 387425 - RNA, 19 nt, Artificial Sequence
  Description of Artificial Sequence: Synthetic oligonucleotide
cggcugaccaauagcggcu

SEQ ID NO: 387426 - RNA, 19 nt, Artificial Sequence
  Description of Artificial Sequence: Synthetic oligonucleotide
  modified_base (5)..(5): a, c, u, g, unknown or other
cccunuaaagugggcuagu

SEQ ID NO: 387427 - RNA, 19 nt, Artificial Sequence
  Description of Artificial Sequence: Synthetic oligonucleotide
cgcgcacuuugucaggagu

SEQ ID NO: 387428 - RNA, 19 nt, Artificial Sequence
  Description of Artificial Sequence: Synthetic oligonucleotide
ccguaucuugacacauuuu

SEQ ID NO: 387429 - RNA, 19 nt, Artificial Sequence
  Description of Artificial Sequence: Synthetic oligonucleotide
gggguccaauuuaguacuu

SEQ ID NO: 387430 - RNA, 19 nt, Artificial Sequence
  Description of Artificial Sequence: Synthetic oligonucleotide
  modified_base (1)..(1): a, c, u, g, unknown or other
nuaaagugggcuaguauag

SEQ ID NO: 387431 - RNA, 19 nt, Artificial Sequence
  Description of Artificial Sequence: Synthetic oligonucleotide
augaaugagggucaugucc

SEQ ID NO: 387432 - RNA, 19 nt, Artificial Sequence
  Description of Artificial Sequence: Synthetic oligonucleotide
ugucaagcaacucagagac

SEQ ID NO: 387433 - RNA, 19 nt, Artificial Sequence
  Description of Artificial Sequence: Synthetic oligonucleotide
cacaguaaagacaugaggc

SEQ ID NO: 387434 - RNA, 19 nt, Artificial Sequence
  Description of Artificial Sequence: Synthetic oligonucleotide
uuuaauucuggcgaagucg

SEQ ID NO: 387435 - RNA, 19 nt, Artificial Sequence
  Description of Artificial Sequence: Synthetic oligonucleotide
cuagguaaagcagagaagg

SEQ ID NO: 387436 - RNA, 19 nt, Artificial Sequence
  Description of Artificial Sequence: Synthetic oligonucleotide
guuugaagagaguagaggc

SEQ ID NO: 387437 - RNA, 19 nt, Artificial Sequence
  Description of Artificial Sequence: Synthetic oligonucleotide
aguguagucugguaguagc

SEQ ID NO: 387438 - RNA, 19 nt, Artificial Sequence
  Description of Artificial Sequence: Synthetic oligonucleotide
auaguuagggcuugcuugc

SEQ ID NO: 387439 - RNA, 19 nt, Artificial Sequence
  Description of Artificial Sequence: Synthetic oligonucleotide
uucuagguaaagcagagaa

SEQ ID NO: 387440 - RNA, 19 nt, Artificial Sequence
  Description of Artificial Sequence: Synthetic oligonucleotide
cauaucaugccacagguac

SEQ ID NO: 387441 - RNA, 19 nt, Artificial Sequence
  Description of Artificial Sequence: Synthetic oligonucleotide
acuucgaaaggagauacgc

SEQ ID NO: 387442 - RNA, 19 nt, Artificial Sequence
  Description of Artificial Sequence: Synthetic oligonucleotide
uggauugcggccuuuagcc

SEQ ID NO: 387443 - RNA, 19 nt, Artificial Sequence
  Description of Artificial Sequence: Synthetic oligonucleotide
aguguugacauguaugugu

SEQ ID NO: 387444 - RNA, 19 nt, Artificial Sequence
  Description of Artificial Sequence: Synthetic oligonucleotide
gguauagguauuuaggacc

SEQ ID NO: 387445 - RNA, 19 nt, Artificial Sequence
  Description of Artificial Sequence: Synthetic oligonucleotide
guauuuaggacccacguca

SEQ ID NO: 387446 - RNA, 19 nt, Artificial Sequence
  Description of Artificial Sequence: Synthetic oligonucleotide
uuuucgaucuaguauccgc

SEQ ID NO: 387447 - RNA, 19 nt, Artificial Sequence
  Description of Artificial Sequence: Synthetic oligonucleotide
uuaauucuggcgaagucgu

SEQ ID NO: 387448 - RNA, 19 nt, Artificial Sequence
  Description of Artificial Sequence: Synthetic oligonucleotide
augauagucuguuucaugu

SEQ ID NO: 387449 - RNA, 19 nt, Artificial Sequence
  Description of Artificial Sequence: Synthetic oligonucleotide
gagacuucuagguaaagca

SEQ ID NO: 387450 - RNA, 19 nt, Artificial Sequence
  Description of Artificial Sequence: Synthetic oligonucleotide
agaguugagacuucuaggu

SEQ ID NO: 387451 - RNA, 19 nt, Artificial Sequence
  Description of Artificial Sequence: Synthetic oligonucleotide
agcauuggacccuaacagc

SEQ ID NO: 387452 - RNA, 19 nt, Artificial Sequence
  Description of Artificial Sequence: Synthetic oligonucleotide
acuaacguccacuucuggg

SEQ ID NO: 387453 - RNA, 19 nt, Artificial Sequence
  Description of Artificial Sequence: Synthetic oligonucleotide
uucuaguugucacaguucu

SEQ ID NO: 387454 - RNA, 19 nt, Artificial Sequence
  Description of Artificial Sequence: Synthetic oligonucleotide
ucaagcaacucagagacca

SEQ ID NO: 387455 - RNA, 19 nt, Artificial Sequence
  Description of Artificial Sequence: Synthetic oligonucleotide
uuuagguacuuccuuuuca

SEQ ID NO: 387456 - RNA, 19 nt, Artificial Sequence
  Description of Artificial Sequence: Synthetic oligonucleotide
uuucgaucuaguauccgcc

SEQ ID NO: 387457 - RNA, 19 nt, Artificial Sequence
  Description of Artificial Sequence: Synthetic oligonucleotide
ucuagguaaagcagagaag

SEQ ID NO: 387458 - RNA, 19 nt, Artificial Sequence
  Description of Artificial Sequence: Synthetic oligonucleotide
uuuuacaucuuugaggcuc

SEQ ID NO: 387459 - RNA, 19 nt, Artificial Sequence
  Description of Artificial Sequence: Synthetic oligonucleotide
ugauccugaccacagagac

SEQ ID NO: 387460 - RNA, 19 nt, Artificial Sequence
  Description of Artificial Sequence: Synthetic oligonucleotide
ugcugaagacacaaaacca

SEQ ID NO: 387461 - RNA, 19 nt, Artificial Sequence
  Description of Artificial Sequence: Synthetic oligonucleotide
ugugagcuuaauaaccucu

SEQ ID NO: 387462 - RNA, 19 nt, Artificial Sequence
  Description of Artificial Sequence: Synthetic oligonucleotide
acugguauagguauuuagg

SEQ ID NO: 387463 - RNA, 19 nt, Artificial Sequence
  Description of Artificial Sequence: Synthetic oligonucleotide
ugugcuaccaaaguagcca

SEQ ID NO: 387464 - RNA, 19 nt, Artificial Sequence
  Description of Artificial Sequence: Synthetic oligonucleotide
agugcucaaggccuggugg

SEQ ID NO: 387465 - RNA, 19 nt, Artificial Sequence
  Description of Artificial Sequence: Synthetic oligonucleotide
acgccugugugcuucagcc

SEQ ID NO: 387466 - RNA, 19 nt, Artificial Sequence
  Description of Artificial Sequence: Synthetic oligonucleotide
guaccuucgauucuaguug

SEQ ID NO: 387467 - RNA, 19 nt, Artificial Sequence
  Description of Artificial Sequence: Synthetic oligonucleotide
ugaagaucucauagugggg

SEQ ID NO: 387468 - RNA, 19 nt, Artificial Sequence
  Description of Artificial Sequence: Synthetic oligonucleotide
uggcacaacaaucuccuug

SEQ ID NO: 387469 - RNA, 19 nt, Artificial Sequence
  Description of Artificial Sequence: Synthetic oligonucleotide
acugacaauggauucuuug

SEQ ID NO: 387470 - RNA, 19 nt, Artificial Sequence
  Description of Artificial Sequence: Synthetic oligonucleotide
aguaguccucuacagugac

SEQ ID NO: 387471 - RNA, 19 nt, Artificial Sequence
  Description of Artificial Sequence: Synthetic oligonucleotide
uucagcacuucgaaaggag

SEQ ID NO: 387472 - RNA, 19 nt, Artificial Sequence
  Description of Artificial Sequence: Synthetic oligonucleotide
gaauucauuugcugaagac

SEQ ID NO: 387473 - RNA, 19 nt, Artificial Sequence
  Description of Artificial Sequence: Synthetic oligonucleotide
acaagccacaucuugucag

SEQ ID NO: 387474 - RNA, 19 nt, Artificial Sequence
  Description of Artificial Sequence: Synthetic oligonucleotide
ugguauagguauuuaggac

SEQ ID NO: 387475 - RNA, 19 nt, Artificial Sequence
  Description of Artificial Sequence: Synthetic oligonucleotide
ugcucuagauccaggaaga

SEQ ID NO: 387476 - RNA, 19 nt, Artificial Sequence
  Description of Artificial Sequence: Synthetic oligonucleotide
auuggacccuaacagccac

SEQ ID NO: 387477 - RNA, 19 nt, Artificial Sequence
  Description of Artificial Sequence: Synthetic oligonucleotide
uucgaaaggagauacgcuu

SEQ ID NO: 387478 - RNA, 19 nt, Artificial Sequence
  Description of Artificial Sequence: Synthetic oligonucleotide
ucaugucccguuuauuccc

SEQ ID NO: 387479 - RNA, 19 nt, Artificial Sequence
  Description of Artificial Sequence: Synthetic oligonucleotide
guaugugucaagcaacuca

SEQ ID NO: 387480 - RNA, 19 nt, Artificial Sequence
  Description of Artificial Sequence: Synthetic oligonucleotide
ugugcguacuccaucuagc

SEQ ID NO: 387481 - RNA, 19 nt, Artificial Sequence
  Description of Artificial Sequence: Synthetic oligonucleotide
ucgauucuaguugucacag

SEQ ID NO: 387482 - RNA, 19 nt, Artificial Sequence
  Description of Artificial Sequence: Synthetic oligonucleotide
caggcgaugauguuggaug

SEQ ID NO: 387483 - RNA, 19 nt, Artificial Sequence
  Description of Artificial Sequence: Synthetic oligonucleotide
acuuggcacaacaaucucc

SEQ ID NO: 387484 - RNA, 19 nt, Artificial Sequence
  Description of Artificial Sequence: Synthetic oligonucleotide
cagcauuggacccuaacag

SEQ ID NO: 387485 - RNA, 19 nt, Artificial Sequence
  Description of Artificial Sequence: Synthetic oligonucleotide
aggacccacgucaagaggc

SEQ ID NO: 387486 - RNA, 19 nt, Artificial Sequence
  Description of Artificial Sequence: Synthetic oligonucleotide
cuucauggucaaaaggcag

SEQ ID NO: 387487 - RNA, 19 nt, Artificial Sequence
  Description of Artificial Sequence: Synthetic oligonucleotide
ucgaacugccaacagggca

SEQ ID NO: 387488 - RNA, 19 nt, Artificial Sequence
  Description of Artificial Sequence: Synthetic oligonucleotide
auagguauuuaggacccac

SEQ ID NO: 387489 - RNA, 19 nt, Artificial Sequence
  Description of Artificial Sequence: Synthetic oligonucleotide
aggcucacaaucucauugg

SEQ ID NO: 387490 - RNA, 19 nt, Artificial Sequence
  Description of Artificial Sequence: Synthetic oligonucleotide
gaagaucucauagugggga

SEQ ID NO: 387491 - RNA, 19 nt, Artificial Sequence
  Description of Artificial Sequence: Synthetic oligonucleotide
uucgauucuaguugucaca

SEQ ID NO: 387492 - RNA, 19 nt, Artificial Sequence
  Description of Artificial Sequence: Synthetic oligonucleotide
ucccuuucaaugauccuga

SEQ ID NO: 387493 - RNA, 19 nt, Artificial Sequence
  Description of Artificial Sequence: Synthetic oligonucleotide
guauagguauuuaggaccc

SEQ ID NO: 387494 - RNA, 19 nt, Artificial Sequence
  Description of Artificial Sequence: Synthetic oligonucleotide
uccggaauaggaagcggag

SEQ ID NO: 387495 - RNA, 19 nt, Artificial Sequence
  Description of Artificial Sequence: Synthetic oligonucleotide
caaaguagccaugaaugag

SEQ ID NO: 387496 - RNA, 19 nt, Artificial Sequence
  Description of Artificial Sequence: Synthetic oligonucleotide
gaagucguugaaguagucc

SEQ ID NO: 387497 - RNA, 19 nt, Artificial Sequence
  Description of Artificial Sequence: Synthetic oligonucleotide
agguauuuaggacccacgu

SEQ ID NO: 387498 - RNA, 19 nt, Artificial Sequence
  Description of Artificial Sequence: Synthetic oligonucleotide
uuccggaauaggaagcgga

SEQ ID NO: 387499 - RNA, 19 nt, Artificial Sequence
  Description of Artificial Sequence: Synthetic oligonucleotide
ugggcacauaguuagggcu

SEQ ID NO: 387500 - RNA, 19 nt, Artificial Sequence
  Description of Artificial Sequence: Synthetic oligonucleotide
cuucgauucuaguugucac

SEQ ID NO: 387501 - RNA, 19 nt, Artificial Sequence
  Description of Artificial Sequence: Synthetic oligonucleotide
auacgcuucugcaugacag

SEQ ID NO: 387502 - RNA, 19 nt, Artificial Sequence
  Description of Artificial Sequence: Synthetic oligonucleotide
uggaugugaguguugacau

SEQ ID NO: 387503 - RNA, 19 nt, Artificial Sequence
  Description of Artificial Sequence: Synthetic oligonucleotide
cacuuauuugagcagcaac

SEQ ID NO: 387504 - RNA, 19 nt, Artificial Sequence
  Description of Artificial Sequence: Synthetic oligonucleotide
uccgagucucccuucugcg

SEQ ID NO: 387505 - RNA, 19 nt, Artificial Sequence
  Description of Artificial Sequence: Synthetic oligonucleotide
cacugguauagguauuuag

SEQ ID NO: 387506 - RNA, 19 nt, Artificial Sequence
  Description of Artificial Sequence: Synthetic oligonucleotide
uaucaugccacagguacac

SEQ ID NO: 387507 - RNA, 19 nt, Artificial Sequence
  Description of Artificial Sequence: Synthetic oligonucleotide
uaacguccacuucuggggc

SEQ ID NO: 387508 - RNA, 19 nt, Artificial Sequence
  Description of Artificial Sequence: Synthetic oligonucleotide
uuugcugaccagaguugag

SEQ ID NO: 387509 - RNA, 19 nt, Artificial Sequence
  Description of Artificial Sequence: Synthetic oligonucleotide
ugacaucagccagugauug

SEQ ID NO: 387510 - RNA, 19 nt, Artificial Sequence
  Description of Artificial Sequence: Synthetic oligonucleotide
uuccgagucucccuucugc

SEQ ID NO: 387511 - RNA, 19 nt, Artificial Sequence
  Description of Artificial Sequence: Synthetic oligonucleotide
ccucgaacugccaacaggg

SEQ ID NO: 387512 - RNA, 19 nt, Artificial Sequence
  Description of Artificial Sequence: Synthetic oligonucleotide
uaggacccacgucaagagg

SEQ ID NO: 387513 - RNA, 19 nt, Artificial Sequence
  Description of Artificial Sequence: Synthetic oligonucleotide
aggaacaaacccaguuugc

SEQ ID NO: 387514 - RNA, 19 nt, Artificial Sequence
  Description of Artificial Sequence: Synthetic oligonucleotide
uguguaccuucgauucuag

SEQ ID NO: 387515 - RNA, 19 nt, Artificial Sequence
  Description of Artificial Sequence: Synthetic oligonucleotide
gauguugcucuagauccag

SEQ ID NO: 387516 - RNA, 19 nt, Artificial Sequence
  Description of Artificial Sequence: Synthetic oligonucleotide
cagugauugcuggauaucc

SEQ ID NO: 387517 - RNA, 19 nt, Artificial Sequence
  Description of Artificial Sequence: Synthetic oligonucleotide
uucgccaaauccagaugcc

SEQ ID NO: 387518 - RNA, 19 nt, Artificial Sequence
  Description of Artificial Sequence: Synthetic oligonucleotide
agacacaaaaccaguaccu

SEQ ID NO: 387519 - RNA, 19 nt, Artificial Sequence
  Description of Artificial Sequence: Synthetic oligonucleotide
uagccaugaaugaggguca

SEQ ID NO: 387520 - RNA, 19 nt, Artificial Sequence
  Description of Artificial Sequence: Synthetic oligonucleotide
cuacuuaggaaagaauuca

SEQ ID NO: 387521 - RNA, 19 nt, Artificial Sequence
  Description of Artificial Sequence: Synthetic oligonucleotide
aucuucgccaaauccagau

SEQ ID NO: 387522 - RNA, 19 nt, Artificial Sequence
  Description of Artificial Sequence: Synthetic oligonucleotide
ccuucugcgauacugcucc

SEQ ID NO: 387523 - RNA, 19 nt, Artificial Sequence
  Description of Artificial Sequence: Synthetic oligonucleotide
ucgaucuaguauccgccug

SEQ ID NO: 387524 - RNA, 19 nt, Artificial Sequence
  Description of Artificial Sequence: Synthetic oligonucleotide
guuagggcuugcuugcaug

SEQ ID NO: 387525 - RNA, 19 nt, Artificial Sequence
  Description of Artificial Sequence: Synthetic oligonucleotide
auucuaguugucacaguuc

SEQ ID NO: 387526 - RNA, 19 nt, Artificial Sequence
  Description of Artificial Sequence: Synthetic oligonucleotide
cuggauugcggccuuuagc

SEQ ID NO: 387527 - RNA, 19 nt, Artificial Sequence
  Description of Artificial Sequence: Synthetic oligonucleotide
gcugaagacacaaaaccag

SEQ ID NO: 387528 - RNA, 19 nt, Artificial Sequence
  Description of Artificial Sequence: Synthetic oligonucleotide
agugucuccaugauagucu

SEQ ID NO: 387529 - RNA, 19 nt, Artificial Sequence
  Description of Artificial Sequence: Synthetic oligonucleotide
ugcacauaucaugccacag

SEQ ID NO: 387530 - RNA, 19 nt, Artificial Sequence
  Description of Artificial Sequence: Synthetic oligonucleotide
cuggauauuugcugaccag

SEQ ID NO: 387531 - RNA, 19 nt, Artificial Sequence
  Description of Artificial Sequence: Synthetic oligonucleotide
gauucuaguugucacaguu

SEQ ID NO: 387532 - RNA, 19 nt, Artificial Sequence
  Description of Artificial Sequence: Synthetic oligonucleotide
gcuggcuuaggccugugcg

SEQ ID NO: 387533 - RNA, 19 nt, Artificial Sequence
  Description of Artificial Sequence: Synthetic oligonucleotide
ugcguacuccaucuagcug

SEQ ID NO: 387534 - RNA, 19 nt, Artificial Sequence
  Description of Artificial Sequence: Synthetic oligonucleotide
auucuggcgaagucguuga

SEQ ID NO: 387535 - RNA, 19 nt, Artificial Sequence
  Description of Artificial Sequence: Synthetic oligonucleotide
uucgaucuaguauccgccu

SEQ ID NO: 387536 - RNA, 19 nt, Artificial Sequence
  Description of Artificial Sequence: Synthetic oligonucleotide
aucccauccaugcuuggcu

SEQ ID NO: 387537 - RNA, 19 nt, Artificial Sequence
  Description of Artificial Sequence: Synthetic oligonucleotide
agacuuggcacaacaaucu

SEQ ID NO: 387538 - RNA, 19 nt, Artificial Sequence
  Description of Artificial Sequence: Synthetic oligonucleotide
auaggaagcggagcuguuc

SEQ ID NO: 387539 - RNA, 19 nt, Artificial Sequence
  Description of Artificial Sequence: Synthetic oligonucleotide
caugucccguuuauucccg

SEQ ID NO: 387540 - RNA, 19 nt, Artificial Sequence
  Description of Artificial Sequence: Synthetic oligonucleotide
aauauguucuugagguuuu

SEQ ID NO: 387541 - RNA, 19 nt, Artificial Sequence
  Description of Artificial Sequence: Synthetic oligonucleotide
cuccaucuagcugugacug

SEQ ID NO: 387542 - RNA, 19 nt, Artificial Sequence
  Description of Artificial Sequence: Synthetic oligonucleotide
uuauucccgcuguccaugc

SEQ ID NO: 387543 - RNA, 19 nt, Artificial Sequence
  Description of Artificial Sequence: Synthetic oligonucleotide
ggucaugucccguuuauuc

SEQ ID NO: 387544 - RNA, 19 nt, Artificial Sequence
  Description of Artificial Sequence: Synthetic oligonucleotide
acuccaucuagcugugacu

SEQ ID NO: 387545 - RNA, 19 nt, Artificial Sequence
  Description of Artificial Sequence: Synthetic oligonucleotide
uugcacauaucaugccaca

SEQ ID NO: 387546 - RNA, 19 nt, Artificial Sequence
  Description of Artificial Sequence: Synthetic oligonucleotide
cucuagcagacuacugcag

SEQ ID NO: 387547 - RNA, 19 nt, Artificial Sequence
  Description of Artificial Sequence: Synthetic oligonucleotide
acuggauugcggccuuuag

SEQ ID NO: 387548 - RNA, 19 nt, Artificial Sequence
  Description of Artificial Sequence: Synthetic oligonucleotide
ucccguuuauucccgcugu

SEQ ID NO: 387549 - RNA, 19 nt, Artificial Sequence
  Description of Artificial Sequence: Synthetic oligonucleotide
acagugaccagugaucuuu

SEQ ID NO: 387550 - RNA, 19 nt, Artificial Sequence
  Description of Artificial Sequence: Synthetic oligonucleotide
ucuuugcagcaccauccac

SEQ ID NO: 387551 - RNA, 19 nt, Artificial Sequence
  Description of Artificial Sequence: Synthetic oligonucleotide
agcccgcagguauucuacc

SEQ ID NO: 387552 - RNA, 19 nt, Artificial Sequence
  Description of Artificial Sequence: Synthetic oligonucleotide
gaucgcggcggacagugac

SEQ ID NO: 387553 - RNA, 19 nt, Artificial Sequence
  Description of Artificial Sequence: Synthetic oligonucleotide
guguugaugcucugccucc

SEQ ID NO: 387554 - RNA, 19 nt, Artificial Sequence
  Description of Artificial Sequence: Synthetic oligonucleotide
cacuucgaaaggagauacg

SEQ ID NO: 387555 - RNA, 19 nt, Artificial Sequence
  Description of Artificial Sequence: Synthetic oligonucleotide
gauacgcuucugcaugaca

SEQ ID NO: 387556 - RNA, 19 nt, Artificial Sequence
  Description of Artificial Sequence: Synthetic oligonucleotide
gcugugacuggauugcggc

SEQ ID NO: 387557 - RNA, 19 nt, Artificial Sequence
  Description of Artificial Sequence: Synthetic oligonucleotide
ucgaugagaucuuggguuu

SEQ ID NO: 387558 - RNA, 19 nt, Artificial Sequence
  Description of Artificial Sequence: Synthetic oligonucleotide
cucuacagugacacagaug

SEQ ID NO: 387559 - RNA, 19 nt, Artificial Sequence
  Description of Artificial Sequence: Synthetic oligonucleotide
cagcaagguaggaucgcgg

SEQ ID NO: 387560 - RNA, 19 nt, Artificial Sequence
  Description of Artificial Sequence: Synthetic oligonucleotide
cacaugagcucaucccgag

SEQ ID NO: 387561 - RNA, 19 nt, Artificial Sequence
  Description of Artificial Sequence: Synthetic oligonucleotide
ugcuucagccgucauccuc

SEQ ID NO: 387562 - RNA, 19 nt, Artificial Sequence
  Description of Artificial Sequence: Synthetic oligonucleotide
uccggcagcugcuuccacc

SEQ ID NO: 387563 - RNA, 19 nt, Artificial Sequence
  Description of Artificial Sequence: Synthetic oligonucleotide
ugggcgcugaagcauccca

SEQ ID NO: 387564 - RNA, 19 nt, Artificial Sequence
  Description of Artificial Sequence: Synthetic oligonucleotide
ugcacauaacagugugggu

SEQ ID NO: 387565 - RNA, 19 nt, Artificial Sequence
  Description of Artificial Sequence: Synthetic oligonucleotide
augucccguuuauucccgc

SEQ ID NO: 387566 - RNA, 19 nt, Artificial Sequence
  Description of Artificial Sequence: Synthetic oligonucleotide
uacacguccggcagcugcu

SEQ ID NO: 387567 - RNA, 19 nt, Artificial Sequence
  Description of Artificial Sequence: Synthetic oligonucleotide
uaauaaccucugccacugc

SEQ ID NO: 387568 - RNA, 19 nt, Artificial Sequence
  Description of Artificial Sequence: Synthetic oligonucleotide
cauucagauguugcucuag

SEQ ID NO: 387569 - RNA, 19 nt, Artificial Sequence
  Description of Artificial Sequence: Synthetic oligonucleotide
cacguuugaagagaguaga

SEQ ID NO: 387570 - RNA, 19 nt, Artificial Sequence
  Description of Artificial Sequence: Synthetic oligonucleotide
gguauuuaggacccacguc

SEQ ID NO: 387571 - RNA, 19 nt, Artificial Sequence
  Description of Artificial Sequence: Synthetic oligonucleotide
cuccuugcgcucuucagca

SEQ ID NO: 387572 - RNA, 19 nt, Artificial Sequence
  Description of Artificial Sequence: Synthetic oligonucleotide
aggaucgcggcggacagug

SEQ ID NO: 387573 - RNA, 19 nt, Artificial Sequence
  Description of Artificial Sequence: Synthetic oligonucleotide
acguuugaagagaguagag

SEQ ID NO: 387574 - RNA, 19 nt, Artificial Sequence
  Description of Artificial Sequence: Synthetic oligonucleotide
ugccacauucagacuuggc

SEQ ID NO: 387575 - RNA, 19 nt, Artificial Sequence
  Description of Artificial Sequence: Synthetic oligonucleotide
gagcacuccaaguccauua

SEQ ID NO: 387576 - RNA, 19 nt, Artificial Sequence
  Description of Artificial Sequence: Synthetic oligonucleotide
agauacgcuucugcaugac

SEQ ID NO: 387577 - RNA, 19 nt, Artificial Sequence
  Description of Artificial Sequence: Synthetic oligonucleotide
uugccacauucagacuugg

SEQ ID NO: 387578 - RNA, 19 nt, Artificial Sequence
  Description of Artificial Sequence: Synthetic oligonucleotide
agagccccuugcucgauga

SEQ ID NO: 387579 - RNA, 19 nt, Artificial Sequence
  Description of Artificial Sequence: Synthetic oligonucleotide
ucgccaaauccagaugcca

SEQ ID NO: 387580 - RNA, 19 nt, Artificial Sequence
  Description of Artificial Sequence: Synthetic oligonucleotide
aagguaggaucgcggcgga

SEQ ID NO: 387581 - RNA, 19 nt, Artificial Sequence
  Description of Artificial Sequence: Synthetic oligonucleotide
gaauaggaagcggagcugu

SEQ ID NO: 387582 - RNA, 19 nt, Artificial Sequence
  Description of Artificial Sequence: Synthetic oligonucleotide
cacuaacguccacuucugg

SEQ ID NO: 387583 - RNA, 19 nt, Artificial Sequence
  Description of Artificial Sequence: Synthetic oligonucleotide
cugcuuagccagcucauca

SEQ ID NO: 387584 - RNA, 19 nt, Artificial Sequence
  Description of Artificial Sequence: Synthetic oligonucleotide
uagcagacuacugcagccu

SEQ ID NO: 387585 - RNA, 19 nt, Artificial Sequence
  Description of Artificial Sequence: Synthetic oligonucleotide
gagggcagggcuacuuaag

SEQ ID NO: 387586 - RNA, 19 nt, Artificial Sequence
  Description of Artificial Sequence: Synthetic oligonucleotide
agaccacguuugaagagag

SEQ ID NO: 387587 - RNA, 19 nt, Artificial Sequence
  Description of Artificial Sequence: Synthetic oligonucleotide
ugccuguguaccuucgauu

SEQ ID NO: 387588 - RNA, 19 nt, Artificial Sequence
  Description of Artificial Sequence: Synthetic oligonucleotide
uauagguauuuaggaccca

SEQ ID NO: 387589 - RNA, 19 nt, Artificial Sequence
  Description of Artificial Sequence: Synthetic oligonucleotide
cauuguggagcuggcuuag

SEQ ID NO: 387590 - RNA, 19 nt, Artificial Sequence
  Description of Artificial Sequence: Synthetic oligonucleotide
cauuagcuuccggugggcc

SEQ ID NO: 387591 - RNA, 19 nt, Artificial Sequence
  Description of Artificial Sequence: Synthetic oligonucleotide
aucgcggcggacagugacc

SEQ ID NO: 387592 - RNA, 19 nt, Artificial Sequence
  Description of Artificial Sequence: Synthetic oligonucleotide
auaucaugccacagguaca

SEQ ID NO: 387593 - RNA, 19 nt, Artificial Sequence
  Description of Artificial Sequence: Synthetic oligonucleotide
accucugccacugcaacaa

SEQ ID NO: 387594 - RNA, 19 nt, Artificial Sequence
  Description of Artificial Sequence: Synthetic oligonucleotide
cguuugaagagaguagagg

SEQ ID NO: 387595 - RNA, 19 nt, Artificial Sequence
  Description of Artificial Sequence: Synthetic oligonucleotide
aguuagggcuugcuugcau

SEQ ID NO: 387596 - RNA, 19 nt, Artificial Sequence
  Description of Artificial Sequence: Synthetic oligonucleotide
uugugucacaguguccauc

SEQ ID NO: 387597 - RNA, 19 nt, Artificial Sequence
  Description of Artificial Sequence: Synthetic oligonucleotide
ccacguuugaagagaguag

SEQ ID NO: 387598 - RNA, 19 nt, Artificial Sequence
  Description of Artificial Sequence: Synthetic oligonucleotide
cauuggacccuaacagcca

SEQ ID NO: 387599 - RNA, 19 nt, Artificial Sequence
  Description of Artificial Sequence: Synthetic oligonucleotide
guguugccgguuucucagg

SEQ ID NO: 387600 - RNA, 19 nt, Artificial Sequence
  Description of Artificial Sequence: Synthetic oligonucleotide
cuugcucgaugagaucuug

SEQ ID NO: 387601 - RNA, 19 nt, Artificial Sequence
  Description of Artificial Sequence: Synthetic oligonucleotide
gugugcuaccaaaguagcc

SEQ ID NO: 387602 - RNA, 19 nt, Artificial Sequence
  Description of Artificial Sequence: Synthetic oligonucleotide
agacugacaauggauucuu

SEQ ID NO: 387603 - RNA, 19 nt, Artificial Sequence
  Description of Artificial Sequence: Synthetic oligonucleotide
agugaucuuugcagcacca

SEQ ID NO: 387604 - RNA, 19 nt, Artificial Sequence
  Description of Artificial Sequence: Synthetic oligonucleotide
cuuggcugacucagacaug

SEQ ID NO: 387605 - RNA, 19 nt, Artificial Sequence
  Description of Artificial Sequence: Synthetic oligonucleotide
gguuucccucacaaucucg

SEQ ID NO: 387606 - RNA, 19 nt, Artificial Sequence
  Description of Artificial Sequence: Synthetic oligonucleotide
auuguggagcuggcuuagg

SEQ ID NO: 387607 - RNA, 19 nt, Artificial Sequence
  Description of Artificial Sequence: Synthetic oligonucleotide
gcacuucgaaaggagauac

SEQ ID NO: 387608 - RNA, 19 nt, Artificial Sequence
  Description of Artificial Sequence: Synthetic oligonucleotide
cagugaccagugaucuuug

SEQ ID NO: 387609 - RNA, 19 nt, Artificial Sequence
  Description of Artificial Sequence: Synthetic oligonucleotide
cuucgaaaggagauacgcu

SEQ ID NO: 387610 - RNA, 19 nt, Artificial Sequence
  Description of Artificial Sequence: Synthetic oligonucleotide
gcguacuccaucuagcugu

SEQ ID NO: 387611 - RNA, 19 nt, Artificial Sequence
  Description of Artificial Sequence: Synthetic oligonucleotide
ggcucacaaucucauuggc

SEQ ID NO: 387612 - RNA, 19 nt, Artificial Sequence
  Description of Artificial Sequence: Synthetic oligonucleotide
ccgagagcacuccaagucc

SEQ ID NO: 387613 - RNA, 19 nt, Artificial Sequence
  Description of Artificial Sequence: Synthetic oligonucleotide
aguauccgccugucaauuu

SEQ ID NO: 387614 - RNA, 19 nt, Artificial Sequence
  Description of Artificial Sequence: Synthetic oligonucleotide
cuggacugcuguugcaaca

SEQ ID NO: 387615 - RNA, 19 nt, Artificial Sequence
  Description of Artificial Sequence: Synthetic oligonucleotide
agcagacuacugcagccuu

SEQ ID NO: 387616 - RNA, 19 nt, Artificial Sequence
  Description of Artificial Sequence: Synthetic oligonucleotide
agauguugcucuagaucca

SEQ ID NO: 387617 - RNA, 19 nt, Artificial Sequence
  Description of Artificial Sequence: Synthetic oligonucleotide
agguacacguccggcagcu

SEQ ID NO: 387618 - RNA, 19 nt, Artificial Sequence
  Description of Artificial Sequence: Synthetic oligonucleotide
aucaugccacagguacacg

SEQ ID NO: 387619 - RNA, 19 nt, Artificial Sequence
  Description of Artificial Sequence: Synthetic oligonucleotide
aauaggaagcggagcuguu

SEQ ID NO: 387620 - RNA, 19 nt, Artificial Sequence
  Description of Artificial Sequence: Synthetic oligonucleotide
gcgauacugcuccacuuug

SEQ ID NO: 387621 - RNA, 19 nt, Artificial Sequence
  Description of Artificial Sequence: Synthetic oligonucleotide
gagagccccuugcucgaug

SEQ ID NO: 387622 - RNA, 19 nt, Artificial Sequence
  Description of Artificial Sequence: Synthetic oligonucleotide
cagguacacguccggcagc

SEQ ID NO: 387623 - RNA, 19 nt, Artificial Sequence
  Description of Artificial Sequence: Synthetic oligonucleotide
uggcuuaggccugugcgua

SEQ ID NO: 387624 - RNA, 19 nt, Artificial Sequence
  Description of Artificial Sequence: Synthetic oligonucleotide
ggcgcugaagcaucccagc

SEQ ID NO: 387625 - RNA, 19 nt, Artificial Sequence
  Description of Artificial Sequence: Synthetic oligonucleotide
ggaauaggaagcggagcug

SEQ ID NO: 387626 - RNA, 19 nt, Artificial Sequence
  Description of Artificial Sequence: Synthetic oligonucleotide
ucucugauaucuggauauu

SEQ ID NO: 387627 - RNA, 19 nt, Artificial Sequence
  Description of Artificial Sequence: Synthetic oligonucleotide
agaggcucacaaucucauu

SEQ ID NO: 387628 - RNA, 19 nt, Artificial Sequence
  Description of Artificial Sequence: Synthetic oligonucleotide
caaugguguugaugcucug

SEQ ID NO: 387629 - RNA, 19 nt, Artificial Sequence
  Description of Artificial Sequence: Synthetic oligonucleotide
cagcaacuugaagauucug

SEQ ID NO: 387630 - RNA, 19 nt, Artificial Sequence
  Description of Artificial Sequence: Synthetic oligonucleotide
caugcuuggcugacucaga

SEQ ID NO: 387631 - RNA, 19 nt, Artificial Sequence
  Description of Artificial Sequence: Synthetic oligonucleotide
ccagcaagguaggaucgcg

SEQ ID NO: 387632 - RNA, 19 nt, Artificial Sequence
  Description of Artificial Sequence: Synthetic oligonucleotide
gcuuagccagcucaucaga

SEQ ID NO: 387633 - RNA, 19 nt, Artificial Sequence
  Description of Artificial Sequence: Synthetic oligonucleotide
gucaagcaacucagagacc

SEQ ID NO: 387634 - RNA, 19 nt, Artificial Sequence
  Description of Artificial Sequence: Synthetic oligonucleotide
accuucgauucuaguuguc

SEQ ID NO: 387635 - RNA, 19 nt, Artificial Sequence
  Description of Artificial Sequence: Synthetic oligonucleotide
cuaguauccgccugucaau

SEQ ID NO: 387636 - RNA, 19 nt, Artificial Sequence
  Description of Artificial Sequence: Synthetic oligonucleotide
uggguguugccgguuucuc

SEQ ID NO: 387637 - RNA, 19 nt, Artificial Sequence
  Description of Artificial Sequence: Synthetic oligonucleotide
cagcacuucgaaaggagau

SEQ ID NO: 387638 - RNA, 19 nt, Artificial Sequence
  Description of Artificial Sequence: Synthetic oligonucleotide
guauccgccugucaauuuu

SEQ ID NO: 387639 - RNA, 19 nt, Artificial Sequence
  Description of Artificial Sequence: Synthetic oligonucleotide
ccguuuauucccgcugucc

SEQ ID NO: 387640 - RNA, 19 nt, Artificial Sequence
  Description of Artificial Sequence: Synthetic oligonucleotide
cuguguaccuucgauucua

SEQ ID NO: 387641 - RNA, 19 nt, Artificial Sequence
  Description of Artificial Sequence: Synthetic oligonucleotide
cugcauccgagugcucaag

SEQ ID NO: 387642 - RNA, 19 nt, Artificial Sequence
  Description of Artificial Sequence: Synthetic oligonucleotide
gggcagggcuacuuaagga

SEQ ID NO: 387643 - RNA, 19 nt, Artificial Sequence
  Description of Artificial Sequence: Synthetic oligonucleotide
caccaauguggucaucucu

SEQ ID NO: 387644 - RNA, 19 nt, Artificial Sequence
  Description of Artificial Sequence: Synthetic oligonucleotide
agguaggaucgcggcggac

SEQ ID NO: 387645 - RNA, 19 nt, Artificial Sequence
  Description of Artificial Sequence: Synthetic oligonucleotide
cuggcuuaggccugugcgu

SEQ ID NO: 387646 - RNA, 19 nt, Artificial Sequence
  Description of Artificial Sequence: Synthetic oligonucleotide
guaguccucuacagugaca

SEQ ID NO: 387647 - RNA, 19 nt, Artificial Sequence
  Description of Artificial Sequence: Synthetic oligonucleotide
gcauuguggagcuggcuua

SEQ ID NO: 387648 - RNA, 19 nt, Artificial Sequence
  Description of Artificial Sequence: Synthetic oligonucleotide
cucagagaccacguuugaa

SEQ ID NO: 387649 - RNA, 19 nt, Artificial Sequence
  Description of Artificial Sequence: Synthetic oligonucleotide
ccggaauaggaagcggagc

SEQ ID NO: 387650 - RNA, 19 nt, Artificial Sequence
  Description of Artificial Sequence: Synthetic oligonucleotide
gcacuaacguccacuucug

SEQ ID NO: 387651 - RNA, 19 nt, Artificial Sequence
  Description of Artificial Sequence: Synthetic oligonucleotide
cuuccucuagcagacuacu

SEQ ID NO: 387652 - RNA, 19 nt, Artificial Sequence
  Description of Artificial Sequence: Synthetic oligonucleotide
ggguguugccgguuucuca

SEQ ID NO: 387653 - RNA, 19 nt, Artificial Sequence
  Description of Artificial Sequence: Synthetic oligonucleotide
ggcaccaauguggucaucu

SEQ ID NO: 387654 - RNA, 19 nt, Artificial Sequence
  Description of Artificial Sequence: Synthetic oligonucleotide
ccuucgauucuaguuguca

SEQ ID NO: 387655 - RNA, 19 nt, Artificial Sequence
  Description of Artificial Sequence: Synthetic oligonucleotide
gcggccuuuagccuggccu

SEQ ID NO: 387656 - RNA, 19 nt, Artificial Sequence
  Description of Artificial Sequence: Synthetic oligonucleotide
gggcgcugaagcaucccag

SEQ ID NO: 387657 - RNA, 19 nt, Artificial Sequence
  Description of Artificial Sequence: Synthetic oligonucleotide
gacuggauugcggccuuua

SEQ ID NO: 387658 - RNA, 19 nt, Artificial Sequence
  Description of Artificial Sequence: Synthetic oligonucleotide
cugggcgcugaagcauccc

SEQ ID NO: 387659 - RNA, 19 nt, Artificial Sequence
  Description of Artificial Sequence: Synthetic oligonucleotide
guacugcacauaacagugu

SEQ ID NO: 387660 - RNA, 19 nt, Artificial Sequence
  Description of Artificial Sequence: Synthetic oligonucleotide
uaggaucgcggcggacagu

SEQ ID NO: 387661 - RNA, 19 nt, Artificial Sequence
  Description of Artificial Sequence: Synthetic oligonucleotide
gagggaagcacuggaccau

SEQ ID NO: 387662 - RNA, 19 nt, Artificial Sequence
  Description of Artificial Sequence: Synthetic oligonucleotide
cacguccggcagcugcuuc

SEQ ID NO: 387663 - RNA, 19 nt, Artificial Sequence
  Description of Artificial Sequence: Synthetic oligonucleotide
cgguacugcucacacauga

SEQ ID NO: 387664 - RNA, 19 nt, Artificial Sequence
  Description of Artificial Sequence: Synthetic oligonucleotide
ccacagguacacguccggc

SEQ ID NO: 387665 - RNA, 19 nt, Artificial Sequence
  Description of Artificial Sequence: Synthetic oligonucleotide
cccuucugcgauacugcuc

SEQ ID NO: 387666 - RNA, 19 nt, Artificial Sequence
  Description of Artificial Sequence: Synthetic oligonucleotide
cugugugcuucagccguca

SEQ ID NO: 387667 - RNA, 19 nt, Artificial Sequence
  Description of Artificial Sequence: Synthetic oligonucleotide
ccagugauugcuggauauc

SEQ ID NO: 387668 - RNA, 19 nt, Artificial Sequence
  Description of Artificial Sequence: Synthetic oligonucleotide
cccgcuguccaugcgguac

SEQ ID NO: 387669 - RNA, 19 nt, Artificial Sequence
  Description of Artificial Sequence: Synthetic oligonucleotide
cucugauaucuggauauuu

SEQ ID NO: 387670 - RNA, 19 nt, Artificial Sequence
  Description of Artificial Sequence: Synthetic oligonucleotide
uugcgcucuucagcacuuc

SEQ ID NO: 387671 - RNA, 19 nt, Artificial Sequence
  Description of Artificial Sequence: Synthetic oligonucleotide
cuucugcgauacugcucca

SEQ ID NO: 387672 - RNA, 19 nt, Artificial Sequence
  Description of Artificial Sequence: Synthetic oligonucleotide
cagggcuacuuaaggaguu

SEQ ID NO: 387673 - RNA, 19 nt, Artificial Sequence
  Description of Artificial Sequence: Synthetic oligonucleotide
ggugucugccuguguaccu

SEQ ID NO: 387674 - RNA, 19 nt, Artificial Sequence
  Description of Artificial Sequence: Synthetic oligonucleotide
ugcuugcauggggcccugc

SEQ ID NO: 387675 - RNA, 19 nt, Artificial Sequence
  Description of Artificial Sequence: Synthetic oligonucleotide
cugccaacagggcaccaau

SEQ ID NO: 387676 - RNA, 19 nt, Artificial Sequence
  Description of Artificial Sequence: Synthetic oligonucleotide
cugccuguguaccuucgau

SEQ ID NO: 387677 - RNA, 19 nt, Artificial Sequence
  Description of Artificial Sequence: Synthetic oligonucleotide
gggcacuaacguccacuuc

SEQ ID NO: 387678 - RNA, 19 nt, Artificial Sequence
  Description of Artificial Sequence: Synthetic oligonucleotide
caucuagcugugacuggau

SEQ ID NO: 387679 - RNA, 19 nt, Artificial Sequence
  Description of Artificial Sequence: Synthetic oligonucleotide
gcagacuacugcagccuuc

SEQ ID NO: 387680 - RNA, 19 nt, Artificial Sequence
  Description of Artificial Sequence: Synthetic oligonucleotide
ucccgcuguccaugcggua

SEQ ID NO: 387681 - RNA, 19 nt, Artificial Sequence
  Description of Artificial Sequence: Synthetic oligonucleotide
gcgaagucguugaaguagu

SEQ ID NO: 387682 - RNA, 19 nt, Artificial Sequence
  Description of Artificial Sequence: Synthetic oligonucleotide
gugaucuuugcagcaccau

SEQ ID NO: 387683 - RNA, 19 nt, Artificial Sequence
  Description of Artificial Sequence: Synthetic oligonucleotide
ugacuggauugcggccuuu

SEQ ID NO: 387684 - RNA, 19 nt, Artificial Sequence
  Description of Artificial Sequence: Synthetic oligonucleotide
cccucacaaucucgggcac

SEQ ID NO: 387685 - RNA, 19 nt, Artificial Sequence
  Description of Artificial Sequence: Synthetic oligonucleotide
gaccacguuugaagagagu

SEQ ID NO: 387686 - RNA, 19 nt, Artificial Sequence
  Description of Artificial Sequence: Synthetic oligonucleotide
cccguuuauucccgcuguc

SEQ ID NO: 387687 - RNA, 19 nt, Artificial Sequence
  Description of Artificial Sequence: Synthetic oligonucleotide
cccacgucaagaggcucac

SEQ ID NO: 387688 - RNA, 19 nt, Artificial Sequence
  Description of Artificial Sequence: Synthetic oligonucleotide
guagaggcuccagggcacu

SEQ ID NO: 387689 - RNA, 19 nt, Artificial Sequence
  Description of Artificial Sequence: Synthetic oligonucleotide
ccgagugcucaaggccugg

SEQ ID NO: 387690 - RNA, 19 nt, Artificial Sequence
  Description of Artificial Sequence: Synthetic oligonucleotide
gugucugccuguguaccuu

SEQ ID NO: 387691 - RNA, 19 nt, Artificial Sequence
  Description of Artificial Sequence: Synthetic oligonucleotide
cgaucuaguauccgccugu

SEQ ID NO: 387692 - RNA, 19 nt, Artificial Sequence
  Description of Artificial Sequence: Synthetic oligonucleotide
ccucuggacugcuguugca

SEQ ID NO: 387693 - RNA, 19 nt, Artificial Sequence
  Description of Artificial Sequence: Synthetic oligonucleotide
gugcuucagccgucauccu

SEQ ID NO: 387694 - RNA, 19 nt, Artificial Sequence
  Description of Artificial Sequence: Synthetic oligonucleotide
ggacccacgucaagaggcu

SEQ ID NO: 387695 - RNA, 19 nt, Artificial Sequence
  Description of Artificial Sequence: Synthetic oligonucleotide
gcggcggacagugaccagu

SEQ ID NO: 387696 - RNA, 19 nt, Artificial Sequence
  Description of Artificial Sequence: Synthetic oligonucleotide
ccucuacagugacacagau

SEQ ID NO: 387697 - RNA, 19 nt, Artificial Sequence
  Description of Artificial Sequence: Synthetic oligonucleotide
cauccgcaucuucgccaaa

SEQ ID NO: 387698 - RNA, 19 nt, Artificial Sequence
  Description of Artificial Sequence: Synthetic oligonucleotide
gggcuacuuaaggaguuuu

SEQ ID NO: 387699 - RNA, 19 nt, Artificial Sequence
  Description of Artificial Sequence: Synthetic oligonucleotide
ccugugcguacuccaucua

SEQ ID NO: 387700 - RNA, 19 nt, Artificial Sequence
  Description of Artificial Sequence: Synthetic oligonucleotide
ggaucgcggcggacaguga

SEQ ID NO: 387701 - RNA, 19 nt, Artificial Sequence
  Description of Artificial Sequence: Synthetic oligonucleotide
ccuugcucgaugagaucuu

SEQ ID NO: 387702 - RNA, 19 nt, Artificial Sequence
  Description of Artificial Sequence: Synthetic oligonucleotide
gggucaugucccguuuauu

SEQ ID NO: 387703 - RNA, 19 nt, Artificial Sequence
  Description of Artificial Sequence: Synthetic oligonucleotide
ggccucccaggaggaacaa

SEQ ID NO: 387704 - RNA, 19 nt, Artificial Sequence
  Description of Artificial Sequence: Synthetic oligonucleotide
ccacgucaagaggcucaca

SEQ ID NO: 387705 - RNA, 19 nt, Artificial Sequence
  Description of Artificial Sequence: Synthetic oligonucleotide
cgguuucucaggugcucuu

SEQ ID NO: 387706 - RNA, 19 nt, Artificial Sequence
  Description of Artificial Sequence: Synthetic oligonucleotide
auuaguauaagaaucauac

SEQ ID NO: 387707 - RNA, 19 nt, Artificial Sequence
  Description of Artificial Sequence: Synthetic oligonucleotide
auaagcaagagauagggac

SEQ ID NO: 387708 - RNA, 19 nt, Artificial Sequence
  Description of Artificial Sequence: Synthetic oligonucleotide
aaaaggacaucauaaagug

SEQ ID NO: 387709 - RNA, 19 nt, Artificial Sequence
  Description of Artificial Sequence: Synthetic oligonucleotide
uuaucuguggaguagagag

SEQ ID NO: 387710 - RNA, 19 nt, Artificial Sequence
  Description of Artificial Sequence: Synthetic oligonucleotide
cauuagaggaacuuggugg

SEQ ID NO: 387711 - RNA, 19 nt, Artificial Sequence
  Description of Artificial Sequence: Synthetic oligonucleotide
aauaacguuuaauacaaau

SEQ ID NO: 387712 - RNA, 19 nt, Artificial Sequence
  Description of Artificial Sequence: Synthetic oligonucleotide
auugauaagcaagagauag

SEQ ID NO: 387713 - RNA, 19 nt, Artificial Sequence
  Description of Artificial Sequence: Synthetic oligonucleotide
ugauaagcaagagauaggg

SEQ ID NO: 387714 - RNA, 19 nt, Artificial Sequence
  Description of Artificial Sequence: Synthetic oligonucleotide
uuaccagauguauuuaugg

SEQ ID NO: 387715 - RNA, 19 nt, Artificial Sequence
  Description of Artificial Sequence: Synthetic oligonucleotide
uacaucucaccauuuaugg

SEQ ID NO: 387716 - RNA, 19 nt, Artificial Sequence
  Description of Artificial Sequence: Synthetic oligonucleotide
aucaguauguccuuaaaug

SEQ ID NO: 387717 - RNA, 19 nt, Artificial Sequence
  Description of Artificial Sequence: Synthetic oligonucleotide
uugcauaaggaaacaagcg

SEQ ID NO: 387718 - RNA, 19 nt, Artificial Sequence
  Description of Artificial Sequence: Synthetic oligonucleotide
aaaauaacguuuaauacaa

SEQ ID NO: 387719 - RNA, 19 nt, Artificial Sequence
  Description of Artificial Sequence: Synthetic oligonucleotide
aacggcacccgucugacac

SEQ ID NO: 387720 - RNA, 19 nt, Artificial Sequence
  Description of Artificial Sequence: Synthetic oligonucleotide
uaagugagaaguccaauug

SEQ ID NO: 387721 - RNA, 19 nt, Artificial Sequence
  Description of Artificial Sequence: Synthetic oligonucleotide
guuacuauggggcuugggg

SEQ ID NO: 387722 - RNA, 19 nt, Artificial Sequence
  Description of Artificial Sequence: Synthetic oligonucleotide
gaaacaagcgaucuucaag

SEQ ID NO: 387723 - RNA, 19 nt, Artificial Sequence
  Description of Artificial Sequence: Synthetic oligonucleotide
auuagaggaacuugguggg

SEQ ID NO: 387724 - RNA, 19 nt, Artificial Sequence
  Description of Artificial Sequence: Synthetic oligonucleotide
agaguauagaaccauguca

SEQ ID NO: 387725 - RNA, 19 nt, Artificial Sequence
  Description of Artificial Sequence: Synthetic oligonucleotide
ugcauaaggaaacaagcga

SEQ ID NO: 387726 - RNA, 19 nt, Artificial Sequence
  Description of Artificial Sequence: Synthetic oligonucleotide
uccacuuugugaaacauaa

SEQ ID NO: 387727 - RNA, 19 nt, Artificial Sequence
  Description of Artificial Sequence: Synthetic oligonucleotide
gaguauagaaccaugucag

SEQ ID NO: 387728 - RNA, 19 nt, Artificial Sequence
  Description of Artificial Sequence: Synthetic oligonucleotide
aaacggauccuugugagag

SEQ ID NO: 387729 - RNA, 19 nt, Artificial Sequence
  Description of Artificial Sequence: Synthetic oligonucleotide
uuuauggacucuucuaggc

SEQ ID NO: 387730 - RNA, 19 nt, Artificial Sequence
  Description of Artificial Sequence: Synthetic oligonucleotide
ugccauuagaggaacuugg

SEQ ID NO: 387731 - RNA, 19 nt, Artificial Sequence
  Description of Artificial Sequence: Synthetic oligonucleotide
gaucccaacauccaauccc

SEQ ID NO: 387732 - RNA, 19 nt, Artificial Sequence
  Description of Artificial Sequence: Synthetic oligonucleotide
ugaauauuaagcuucuguu

SEQ ID NO: 387733 - RNA, 19 nt, Artificial Sequence
  Description of Artificial Sequence: Synthetic oligonucleotide
uugauaagcaagagauagg

SEQ ID NO: 387734 - RNA, 19 nt, Artificial Sequence
  Description of Artificial Sequence: Synthetic oligonucleotide
caucucaccauuuauggac

SEQ ID NO: 387735 - RNA, 19 nt, Artificial Sequence
  Description of Artificial Sequence: Synthetic oligonucleotide
cauaacaggugcaagauga

SEQ ID NO: 387736 - RNA, 19 nt, Artificial Sequence
  Description of Artificial Sequence: Synthetic oligonucleotide
uauccguugguccaggcug

SEQ ID NO: 387737 - RNA, 19 nt, Artificial Sequence
  Description of Artificial Sequence: Synthetic oligonucleotide
gagucguagauucauguug

SEQ ID NO: 387738 - RNA, 19 nt, Artificial Sequence
  Description of Artificial Sequence: Synthetic oligonucleotide
aaacucuccaaguggccgg

SEQ ID NO: 387739 - RNA, 19 nt, Artificial Sequence
  Description of Artificial Sequence: Synthetic oligonucleotide
agcaauuccuccucauccc

SEQ ID NO: 387740 - RNA, 19 nt, Artificial Sequence
  Description of Artificial Sequence: Synthetic oligonucleotide
aguagagagaacggcaccc

SEQ ID NO: 387741 - RNA, 19 nt, Artificial Sequence
  Description of Artificial Sequence: Synthetic oligonucleotide
uguagaguauagaaccaug

SEQ ID NO: 387742 - RNA, 19 nt, Artificial Sequence
  Description of Artificial Sequence: Synthetic oligonucleotide
gaagcugggucuccaaugg

SEQ ID NO: 387743 - RNA, 19 nt, Artificial Sequence
  Description of Artificial Sequence: Synthetic oligonucleotide
auaagggucucccuucacg

SEQ ID NO: 387744 - RNA, 19 nt, Artificial Sequence
  Description of Artificial Sequence: Synthetic oligonucleotide
uguuugugcaagcuuuugc

SEQ ID NO: 387745 - RNA, 19 nt, Artificial Sequence
  Description of Artificial Sequence: Synthetic oligonucleotide
uuugaaaggacaucaucaa

SEQ ID NO: 387746 - RNA, 19 nt, Artificial Sequence
  Description of Artificial Sequence: Synthetic oligonucleotide
uccaauggcaguccaagga

SEQ ID NO: 387747 - RNA, 19 nt, Artificial Sequence
  Description of Artificial Sequence: Synthetic oligonucleotide
auagaaccaugucaggcuc

SEQ ID NO: 387748 - RNA, 19 nt, Artificial Sequence
  Description of Artificial Sequence: Synthetic oligonucleotide
cacuuuaaauaagacagcc

SEQ ID NO: 387749 - RNA, 19 nt, Artificial Sequence
  Description of Artificial Sequence: Synthetic oligonucleotide
auauuaagcuucuguuuuc

SEQ ID NO: 387750 - RNA, 19 nt, Artificial Sequence
  Description of Artificial Sequence: Synthetic oligonucleotide
uauggacucuucuaggcca

SEQ ID NO: 387751 - RNA, 19 nt, Artificial Sequence
  Description of Artificial Sequence: Synthetic oligonucleotide
uguacucccuucuaaguga

SEQ ID NO: 387752 - RNA, 19 nt, Artificial Sequence
  Description of Artificial Sequence: Synthetic oligonucleotide
aguccaauugauaagcaag

SEQ ID NO: 387753 - RNA, 19 nt, Artificial Sequence
  Description of Artificial Sequence: Synthetic oligonucleotide
agucguagauucauguugc

SEQ ID NO: 387754 - RNA, 19 nt, Artificial Sequence
  Description of Artificial Sequence: Synthetic oligonucleotide
guuacuucccucuccgagg

SEQ ID NO: 387755 - RNA, 19 nt, Artificial Sequence
  Description of Artificial Sequence: Synthetic oligonucleotide
caaaagauaagggucuccc

SEQ ID NO: 387756 - RNA, 19 nt, Artificial Sequence
  Description of Artificial Sequence: Synthetic oligonucleotide
gaaucauacacacuuuaaa

SEQ ID NO: 387757 - RNA, 19 nt, Artificial Sequence
  Description of Artificial Sequence: Synthetic oligonucleotide
aguauagaaccaugucagg

SEQ ID NO: 387758 - RNA, 19 nt, Artificial Sequence
  Description of Artificial Sequence: Synthetic oligonucleotide
uggauaggcaauccuggag

SEQ ID NO: 387759 - RNA, 19 nt, Artificial Sequence
  Description of Artificial Sequence: Synthetic oligonucleotide
uaccagauguauuuauggc

SEQ ID NO: 387760 - RNA, 19 nt, Artificial Sequence
  Description of Artificial Sequence: Synthetic oligonucleotide
caggcuaucucauucauca

SEQ ID NO: 387761 - RNA, 19 nt, Artificial Sequence
  Description of Artificial Sequence: Synthetic oligonucleotide
aguagagaggacaaggaug

SEQ ID NO: 387762 - RNA, 19 nt, Artificial Sequence
  Description of Artificial Sequence: Synthetic oligonucleotide
aaggccuuaauaucuuuau

SEQ ID NO: 387763 - RNA, 19 nt, Artificial Sequence
  Description of Artificial Sequence: Synthetic oligonucleotide
aaaggcacuucauuuguuu

SEQ ID NO: 387764 - RNA, 19 nt, Artificial Sequence
  Description of Artificial Sequence: Synthetic oligonucleotide
ugugcaagcuuuugcauaa

SEQ ID NO: 387765 - RNA, 19 nt, Artificial Sequence
  Description of Artificial Sequence: Synthetic oligonucleotide
aggauguuaggagacacag

SEQ ID NO: 387766 - RNA, 19 nt, Artificial Sequence
  Description of Artificial Sequence: Synthetic oligonucleotide
uccaaucccacucauccaa

SEQ ID NO: 387767 - RNA, 19 nt, Artificial Sequence
  Description of Artificial Sequence: Synthetic oligonucleotide
uuacuucccucuccgaggc

SEQ ID NO: 387768 - RNA, 19 nt, Artificial Sequence
  Description of Artificial Sequence: Synthetic oligonucleotide
aucuguacucccuucuaag

SEQ ID NO: 387769 - RNA, 19 nt, Artificial Sequence
  Description of Artificial Sequence: Synthetic oligonucleotide
aaguccaauugauaagcaa

SEQ ID NO: 387770 - RNA, 19 nt, Artificial Sequence
  Description of Artificial Sequence: Synthetic oligonucleotide
ccuagaaagagacugugcc

SEQ ID NO: 387771 - RNA, 19 nt, Artificial Sequence
  Description of Artificial Sequence: Synthetic oligonucleotide
uacccucugcacuaaaccc

SEQ ID NO: 387772 - RNA, 19 nt, Artificial Sequence
  Description of Artificial Sequence: Synthetic oligonucleotide
acggaguucgcguggcucc

SEQ ID NO: 387773 - RNA, 19 nt, Artificial Sequence
  Description of Artificial Sequence: Synthetic oligonucleotide
ucucccuucacggaggggc

SEQ ID NO: 387774 - RNA, 19 nt, Artificial Sequence
  Description of Artificial Sequence: Synthetic oligonucleotide
auaaggaaacaagcgaucu

SEQ ID NO: 387775 - RNA, 19 nt, Artificial Sequence
  Description of Artificial Sequence: Synthetic oligonucleotide
ugcaaaaggcuccuagaaa

SEQ ID NO: 387776 - RNA, 19 nt, Artificial Sequence
  Description of Artificial Sequence: Synthetic oligonucleotide
auggaugugaggguuaucu

SEQ ID NO: 387777 - RNA, 19 nt, Artificial Sequence
  Description of Artificial Sequence: Synthetic oligonucleotide
gaugugaggguuaucugug

SEQ ID NO: 387778 - RNA, 19 nt, Artificial Sequence
  Description of Artificial Sequence: Synthetic oligonucleotide
acucgcaacuauccguugg

SEQ ID NO: 387779 - RNA, 19 nt, Artificial Sequence
  Description of Artificial Sequence: Synthetic oligonucleotide
aauuaguauaagaaucaua

SEQ ID NO: 387780 - RNA, 19 nt, Artificial Sequence
  Description of Artificial Sequence: Synthetic oligonucleotide
agaggaacuuggugggugg

SEQ ID NO: 387781 - RNA, 19 nt, Artificial Sequence
  Description of Artificial Sequence: Synthetic oligonucleotide
ucccuucuaagugagaagu

SEQ ID NO: 387782 - RNA, 19 nt, Artificial Sequence
  Description of Artificial Sequence: Synthetic oligonucleotide
aagucauuaccagauguau

SEQ ID NO: 387783 - RNA, 19 nt, Artificial Sequence
  Description of Artificial Sequence: Synthetic oligonucleotide
caagcuuuugcauaaggaa

SEQ ID NO: 387784 - RNA, 19 nt, Artificial Sequence
  Description of Artificial Sequence: Synthetic oligonucleotide
acauaucuguacucccuuc

SEQ ID NO: 387785 - RNA, 19 nt, Artificial Sequence
  Description of Artificial Sequence: Synthetic oligonucleotide
ucuguacucccuucuaagu

SEQ ID NO: 387786 - RNA, 19 nt, Artificial Sequence
  Description of Artificial Sequence: Synthetic oligonucleotide
guacccucugcacuaaacc

SEQ ID NO: 387787 - RNA, 19 nt, Artificial Sequence
  Description of Artificial Sequence: Synthetic oligonucleotide
ugugaggguuaucugugga

SEQ ID NO: 387788 - RNA, 19 nt, Artificial Sequence
  Description of Artificial Sequence: Synthetic oligonucleotide
aggaggacgugccaugcuc

SEQ ID NO: 387789 - RNA, 19 nt, Artificial Sequence
  Description of Artificial Sequence: Synthetic oligonucleotide
ugauucagaaaggcauggg

SEQ ID NO: 387790 - RNA, 19 nt, Artificial Sequence
  Description of Artificial Sequence: Synthetic oligonucleotide
agucaaggagagccagagc

SEQ ID NO: 387791 - RNA, 19 nt, Artificial Sequence
  Description of Artificial Sequence: Synthetic oligonucleotide
uucuaagugagaaguccaa

SEQ ID NO: 387792 - RNA, 19 nt, Artificial Sequence
  Description of Artificial Sequence: Synthetic oligonucleotide
auagggacuagaaugggga

SEQ ID NO: 387793 - RNA, 19 nt, Artificial Sequence
  Description of Artificial Sequence: Synthetic oligonucleotide
ucuggaucccaacauccaa

SEQ ID NO: 387794 - RNA, 19 nt, Artificial Sequence
  Description of Artificial Sequence: Synthetic oligonucleotide
aaucccaccuuugaucagu

SEQ ID NO: 387795 - RNA, 19 nt, Artificial Sequence
  Description of Artificial Sequence: Synthetic oligonucleotide
uguuuugaaaggacaucau

SEQ ID NO: 387796 - RNA, 19 nt, Artificial Sequence
  Description of Artificial Sequence: Synthetic oligonucleotide
cugcacuaaacccagaaaa

SEQ ID NO: 387797 - RNA, 19 nt, Artificial Sequence
  Description of Artificial Sequence: Synthetic oligonucleotide
cugauucagaaaggcaugg

SEQ ID NO: 387798 - RNA, 19 nt, Artificial Sequence
  Description of Artificial Sequence: Synthetic oligonucleotide
acaaagucauuaccagaug

SEQ ID NO: 387799 - RNA, 19 nt, Artificial Sequence
  Description of Artificial Sequence: Synthetic oligonucleotide
cuguacucccuucuaagug

SEQ ID NO: 387800 - RNA, 19 nt, Artificial Sequence
  Description of Artificial Sequence: Synthetic oligonucleotide
uuugugcaagcuuuugcau

SEQ ID NO: 387801 - RNA, 19 nt, Artificial Sequence
  Description of Artificial Sequence: Synthetic oligonucleotide
uaguccgcgacucgcaacu

SEQ ID NO: 387802 - RNA, 19 nt, Artificial Sequence
  Description of Artificial Sequence: Synthetic oligonucleotide
ugaggguuaucuguggagu

SEQ ID NO: 387803 - RNA, 19 nt, Artificial Sequence
  Description of Artificial Sequence: Synthetic oligonucleotide
gacuagaauggggaacagg

SEQ ID NO: 387804 - RNA, 19 nt, Artificial Sequence
  Description of Artificial Sequence: Synthetic oligonucleotide
aaggcaugggacccuuaug

SEQ ID NO: 387805 - RNA, 19 nt, Artificial Sequence
  Description of Artificial Sequence: Synthetic oligonucleotide
aaagucauuaccagaugua

SEQ ID NO: 387806 - RNA, 19 nt, Artificial Sequence
  Description of Artificial Sequence: Synthetic oligonucleotide
agggacuagaauggggaac

SEQ ID NO: 387807 - RNA, 19 nt, Artificial Sequence
  Description of Artificial Sequence: Synthetic oligonucleotide
cuucuaagugagaagucca

SEQ ID NO: 387808 - RNA, 19 nt, Artificial Sequence
  Description of Artificial Sequence: Synthetic oligonucleotide
gaauauuaagcuucuguuu

SEQ ID NO: 387809 - RNA, 19 nt, Artificial Sequence
  Description of Artificial Sequence: Synthetic oligonucleotide
gugaggguuaucuguggag

SEQ ID NO: 387810 - RNA, 19 nt, Artificial Sequence
  Description of Artificial Sequence: Synthetic oligonucleotide
gguuacuucccucuccgag

SEQ ID NO: 387811 - RNA, 19 nt, Artificial Sequence
  Description of Artificial Sequence: Synthetic oligonucleotide
agggucucccuucacggag

SEQ ID NO: 387812 - RNA, 19 nt, Artificial Sequence
  Description of Artificial Sequence: Synthetic oligonucleotide
acuauccguugguccaggc

SEQ ID NO: 387813 - RNA, 19 nt, Artificial Sequence
  Description of Artificial Sequence: Synthetic oligonucleotide
uucccagguacccucugca

SEQ ID NO: 387814 - RNA, 19 nt, Artificial Sequence
  Description of Artificial Sequence: Synthetic oligonucleotide
uugaucaguauguccuuaa

SEQ ID NO: 387815 - RNA, 19 nt, Artificial Sequence
  Description of Artificial Sequence: Synthetic oligonucleotide
uugugcaagcuuuugcaua

SEQ ID NO: 387816 - RNA, 19 nt, Artificial Sequence
  Description of Artificial Sequence: Synthetic oligonucleotide
ugaucaguauguccuuaaa

SEQ ID NO: 387817 - RNA, 19 nt, Artificial Sequence
  Description of Artificial Sequence: Synthetic oligonucleotide
uggagagcucuucaauccu

SEQ ID NO: 387818 - RNA, 19 nt, Artificial Sequence
  Description of Artificial Sequence: Synthetic oligonucleotide
gguggauaggcaauccugg

SEQ ID NO: 387819 - RNA, 19 nt, Artificial Sequence
  Description of Artificial Sequence: Synthetic oligonucleotide
agcgugggcagagaggccg

SEQ ID NO: 387820 - RNA, 19 nt, Artificial Sequence
  Description of Artificial Sequence: Synthetic oligonucleotide
acggaggggcugcaaaagg

SEQ ID NO: 387821 - RNA, 19 nt, Artificial Sequence
  Description of Artificial Sequence: Synthetic oligonucleotide
acccgucugacacuuggag

SEQ ID NO: 387822 - RNA, 19 nt, Artificial Sequence
  Description of Artificial Sequence: Synthetic oligonucleotide
cguagauucauguugcaac

SEQ ID NO: 387823 - RNA, 19 nt, Artificial Sequence
  Description of Artificial Sequence: Synthetic oligonucleotide
aggcccauuuaucucucuc

SEQ ID NO: 387824 - RNA, 19 nt, Artificial Sequence
  Description of Artificial Sequence: Synthetic oligonucleotide
ggaccaugccauuagagga

SEQ ID NO: 387825 - RNA, 19 nt, Artificial Sequence
  Description of Artificial Sequence: Synthetic oligonucleotide
agauagggacuagaauggg

SEQ ID NO: 387826 - RNA, 19 nt, Artificial Sequence
  Description of Artificial Sequence: Synthetic oligonucleotide
gcuaucucauucaucaagc

SEQ ID NO: 387827 - RNA, 19 nt, Artificial Sequence
  Description of Artificial Sequence: Synthetic oligonucleotide
cauugagacucugcagugg

SEQ ID NO: 387828 - RNA, 19 nt, Artificial Sequence
  Description of Artificial Sequence: Synthetic oligonucleotide
guagagagaacggcacccg

SEQ ID NO: 387829 - RNA, 19 nt, Artificial Sequence
  Description of Artificial Sequence: Synthetic oligonucleotide
acgugccaugcucacacag

SEQ ID NO: 387830 - RNA, 19 nt, Artificial Sequence
  Description of Artificial Sequence: Synthetic oligonucleotide
agugagaaguccaauugau

SEQ ID NO: 387831 - RNA, 19 nt, Artificial Sequence
  Description of Artificial Sequence: Synthetic oligonucleotide
ccgucugacacuuggagag

SEQ ID NO: 387832 - RNA, 19 nt, Artificial Sequence
  Description of Artificial Sequence: Synthetic oligonucleotide
caaucccacucauccaaag

SEQ ID NO: 387833 - RNA, 19 nt, Artificial Sequence
  Description of Artificial Sequence: Synthetic oligonucleotide
uagacacccaccagggaua

SEQ ID NO: 387834 - RNA, 19 nt, Artificial Sequence
  Description of Artificial Sequence: Synthetic oligonucleotide
cagucaaggagagccagag

SEQ ID NO: 387835 - RNA, 19 nt, Artificial Sequence
  Description of Artificial Sequence: Synthetic oligonucleotide
aacggauccuugugagaga

SEQ ID NO: 387836 - RNA, 19 nt, Artificial Sequence
  Description of Artificial Sequence: Synthetic oligonucleotide
aacuauccguugguccagg

SEQ ID NO: 387837 - RNA, 19 nt, Artificial Sequence
  Description of Artificial Sequence: Synthetic oligonucleotide
augauacauacaaagucau

SEQ ID NO: 387838 - RNA, 19 nt, Artificial Sequence
  Description of Artificial Sequence: Synthetic oligonucleotide
aggguuaucuguggaguag

SEQ ID NO: 387839 - RNA, 19 nt, Artificial Sequence
  Description of Artificial Sequence: Synthetic oligonucleotide
guagauucauguugcaacu

SEQ ID NO: 387840 - RNA, 19 nt, Artificial Sequence
  Description of Artificial Sequence: Synthetic oligonucleotide
gaucaguauguccuuaaau

SEQ ID NO: 387841 - RNA, 19 nt, Artificial Sequence
  Description of Artificial Sequence: Synthetic oligonucleotide
gguagcgcggcgaagcugg

SEQ ID NO: 387842 - RNA, 19 nt, Artificial Sequence
  Description of Artificial Sequence: Synthetic oligonucleotide
accaugccauuagaggaac

SEQ ID NO: 387843 - RNA, 19 nt, Artificial Sequence
  Description of Artificial Sequence: Synthetic oligonucleotide
cuagguggcuccgggauag

SEQ ID NO: 387844 - RNA, 19 nt, Artificial Sequence
  Description of Artificial Sequence: Synthetic oligonucleotide
gauaagcaagagauaggga

SEQ ID NO: 387845 - RNA, 19 nt, Artificial Sequence
  Description of Artificial Sequence: Synthetic oligonucleotide
uagagagaacggcacccgu

SEQ ID NO: 387846 - RNA, 19 nt, Artificial Sequence
  Description of Artificial Sequence: Synthetic oligonucleotide
agagagaacggcacccguc

SEQ ID NO: 387847 - RNA, 19 nt, Artificial Sequence
  Description of Artificial Sequence: Synthetic oligonucleotide
caaagucauuaccagaugu

SEQ ID NO: 387848 - RNA, 19 nt, Artificial Sequence
  Description of Artificial Sequence: Synthetic oligonucleotide
ugcuuaguccgcgacucgc

SEQ ID NO: 387849 - RNA, 19 nt, Artificial Sequence
  Description of Artificial Sequence: Synthetic oligonucleotide
accccggacgccgagaaag

SEQ ID NO: 387850 - RNA, 19 nt, Artificial Sequence
  Description of Artificial Sequence: Synthetic oligonucleotide
cucccuucuaagugagaag

SEQ ID NO: 387851 - RNA, 19 nt, Artificial Sequence
  Description of Artificial Sequence: Synthetic oligonucleotide
uucgcguggcucccggacc

SEQ ID NO: 387852 - RNA, 19 nt, Artificial Sequence
  Description of Artificial Sequence: Synthetic oligonucleotide
agagucguagauucauguu

SEQ ID NO: 387853 - RNA, 19 nt, Artificial Sequence
  Description of Artificial Sequence: Synthetic oligonucleotide
augccauuagaggaacuug

SEQ ID NO: 387854 - RNA, 19 nt, Artificial Sequence
  Description of Artificial Sequence: Synthetic oligonucleotide
caaaaggcuccuagaaaga

SEQ ID NO: 387855 - RNA, 19 nt, Artificial Sequence
  Description of Artificial Sequence: Synthetic oligonucleotide
cuaucucauucaucaagca

SEQ ID NO: 387856 - RNA, 19 nt, Artificial Sequence
  Description of Artificial Sequence: Synthetic oligonucleotide
auaacaggugcaagaugag

SEQ ID NO: 387857 - RNA, 19 nt, Artificial Sequence
  Description of Artificial Sequence: Synthetic oligonucleotide
ccaaacggauccuugugag

SEQ ID NO: 387858 - RNA, 19 nt, Artificial Sequence
  Description of Artificial Sequence: Synthetic oligonucleotide
ucguagauucauguugcaa

SEQ ID NO: 387859 - RNA, 19 nt, Artificial Sequence
  Description of Artificial Sequence: Synthetic oligonucleotide
uuaguccgcgacucgcaac

SEQ ID NO: 387860 - RNA, 19 nt, Artificial Sequence
  Description of Artificial Sequence: Synthetic oligonucleotide
gagaaaggcgcgagacggg

SEQ ID NO: 387861 - RNA, 19 nt, Artificial Sequence
  Description of Artificial Sequence: Synthetic oligonucleotide
auaucuguacucccuucua

SEQ ID NO: 387862 - RNA, 19 nt, Artificial Sequence
  Description of Artificial Sequence: Synthetic oligonucleotide
acacccaccagggauacaa

SEQ ID NO: 387863 - RNA, 19 nt, Artificial Sequence
  Description of Artificial Sequence: Synthetic oligonucleotide
gagaacggcacccgucuga

SEQ ID NO: 387864 - RNA, 19 nt, Artificial Sequence
  Description of Artificial Sequence: Synthetic oligonucleotide
ggggugaggacccuaugcc

SEQ ID NO: 387865 - RNA, 19 nt, Artificial Sequence
  Description of Artificial Sequence: Synthetic oligonucleotide
guagacacccaccagggau

SEQ ID NO: 387866 - RNA, 19 nt, Artificial Sequence
  Description of Artificial Sequence: Synthetic oligonucleotide
uccgcgacucgcaacuauc

SEQ ID NO: 387867 - RNA, 19 nt, Artificial Sequence
  Description of Artificial Sequence: Synthetic oligonucleotide
aagugggaguugggagacc

SEQ ID NO: 387868 - RNA, 19 nt, Artificial Sequence
  Description of Artificial Sequence: Synthetic oligonucleotide
ugccaugcucacacagggc

SEQ ID NO: 387869 - RNA, 19 nt, Artificial Sequence
  Description of Artificial Sequence: Synthetic oligonucleotide
ucuguggaguagagagaac

SEQ ID NO: 387870 - RNA, 19 nt, Artificial Sequence
  Description of Artificial Sequence: Synthetic oligonucleotide
ggacaucauaaagugggag

SEQ ID NO: 387871 - RNA, 19 nt, Artificial Sequence
  Description of Artificial Sequence: Synthetic oligonucleotide
ggcaugggacccuuauggg

SEQ ID NO: 387872 - RNA, 19 nt, Artificial Sequence
  Description of Artificial Sequence: Synthetic oligonucleotide
ucacggaggggcugcaaaa

SEQ ID NO: 387873 - RNA, 19 nt, Artificial Sequence
  Description of Artificial Sequence: Synthetic oligonucleotide
caacugaggggcaggacca

SEQ ID NO: 387874 - RNA, 19 nt, Artificial Sequence
  Description of Artificial Sequence: Synthetic oligonucleotide
aguuacuauggggcuuggg

SEQ ID NO: 387875 - RNA, 19 nt, Artificial Sequence
  Description of Artificial Sequence: Synthetic oligonucleotide
gagagaacggcacccgucu

SEQ ID NO: 387876 - RNA, 19 nt, Artificial Sequence
  Description of Artificial Sequence: Synthetic oligonucleotide
gaucgaucagcagccauaa

SEQ ID NO: 387877 - RNA, 19 nt, Artificial Sequence
  Description of Artificial Sequence: Synthetic oligonucleotide
agcagcagcagcagcagca

SEQ ID NO: 387878 - RNA, 19 nt, Artificial Sequence
  Description of Artificial Sequence: Synthetic oligonucleotide
auccaaucccacucaucca

SEQ ID NO: 387879 - RNA, 19 nt, Artificial Sequence
  Description of Artificial Sequence: Synthetic oligonucleotide
gaguucgcguggcucccgg

SEQ ID NO: 387880 - RNA, 19 nt, Artificial Sequence
  Description of Artificial Sequence: Synthetic oligonucleotide
caggugcaagaugagaguc

SEQ ID NO: 387881 - RNA, 19 nt, Artificial Sequence
  Description of Artificial Sequence: Synthetic oligonucleotide
agccccuucccauccgaag

SEQ ID NO: 387882 - RNA, 19 nt, Artificial Sequence
  Description of Artificial Sequence: Synthetic oligonucleotide
ccugauucagaaaggcaug

SEQ ID NO: 387883 - RNA, 19 nt, Artificial Sequence
  Description of Artificial Sequence: Synthetic oligonucleotide
guagcagcagcagcagcag

SEQ ID NO: 387884 - RNA, 19 nt, Artificial Sequence
  Description of Artificial Sequence: Synthetic oligonucleotide
agcaucaguggcacuccac

SEQ ID NO: 387885 - RNA, 19 nt, Artificial Sequence
  Description of Artificial Sequence: Synthetic oligonucleotide
guuaucuguggaguagaga

SEQ ID NO: 387886 - RNA, 19 nt, Artificial Sequence
  Description of Artificial Sequence: Synthetic oligonucleotide
ucgcguggcucccggacca

SEQ ID NO: 387887 - RNA, 19 nt, Artificial Sequence
  Description of Artificial Sequence: Synthetic oligonucleotide
uuagaggaacuuggugggu

SEQ ID NO: 387888 - RNA, 19 nt, Artificial Sequence
  Description of Artificial Sequence: Synthetic oligonucleotide
ccaauugauaagcaagaga

SEQ ID NO: 387889 - RNA, 19 nt, Artificial Sequence
  Description of Artificial Sequence: Synthetic oligonucleotide
uagcagcagcagcagcagc

SEQ ID NO: 387890 - RNA, 19 nt, Artificial Sequence
  Description of Artificial Sequence: Synthetic oligonucleotide
ggagaccugguccccauug

SEQ ID NO: 387891 - RNA, 19 nt, Artificial Sequence
  Description of Artificial Sequence: Synthetic oligonucleotide
gacccuaugccugguccag

SEQ ID NO: 387892 - RNA, 19 nt, Artificial Sequence
  Description of Artificial Sequence: Synthetic oligonucleotide
ggauacaaaauaacguuua

SEQ ID NO: 387893 - RNA, 19 nt, Artificial Sequence
  Description of Artificial Sequence: Synthetic oligonucleotide
gcacccgucugacacuugg

SEQ ID NO: 387894 - RNA, 19 nt, Artificial Sequence
  Description of Artificial Sequence: Synthetic oligonucleotide
gccuuaauaucuuuauuua

SEQ ID NO: 387895 - RNA, 19 nt, Artificial Sequence
  Description of Artificial Sequence: Synthetic oligonucleotide
ggaguuacuauggggcuug

SEQ ID NO: 387896 - RNA, 19 nt, Artificial Sequence
  Description of Artificial Sequence: Synthetic oligonucleotide
aggccuuaauaucuuuauu

SEQ ID NO: 387897 - RNA, 19 nt, Artificial Sequence
  Description of Artificial Sequence: Synthetic oligonucleotide
auccgaaggcagcaucagu

SEQ ID NO: 387898 - RNA, 19 nt, Artificial Sequence
  Description of Artificial Sequence: Synthetic oligonucleotide
gacucgcaacuauccguug

SEQ ID NO: 387899 - RNA, 19 nt, Artificial Sequence
  Description of Artificial Sequence: Synthetic oligonucleotide
guggauaggcaauccugga

SEQ ID NO: 387900 - RNA, 19 nt, Artificial Sequence
  Description of Artificial Sequence: Synthetic oligonucleotide
agagaacggcacccgucug

SEQ ID NO: 387901 - RNA, 19 nt, Artificial Sequence
  Description of Artificial Sequence: Synthetic oligonucleotide
ggaugugaggguuaucugu

SEQ ID NO: 387902 - RNA, 19 nt, Artificial Sequence
  Description of Artificial Sequence: Synthetic oligonucleotide
ccuuaaaugaauugcuucu

SEQ ID NO: 387903 - RNA, 19 nt, Artificial Sequence
  Description of Artificial Sequence: Synthetic oligonucleotide
cagagucguagauucaugu

SEQ ID NO: 387904 - RNA, 19 nt, Artificial Sequence
  Description of Artificial Sequence: Synthetic oligonucleotide
gagaccugguccccauuga

SEQ ID NO: 387905 - RNA, 19 nt, Artificial Sequence
  Description of Artificial Sequence: Synthetic oligonucleotide
ccuacacauauacaaguga

SEQ ID NO: 387906 - RNA, 19 nt, Artificial Sequence
  Description of Artificial Sequence: Synthetic oligonucleotide
guucgcguggcucccggac

SEQ ID NO: 387907 - RNA, 19 nt, Artificial Sequence
  Description of Artificial Sequence: Synthetic oligonucleotide
gaccaugccauuagaggaa

SEQ ID NO: 387908 - RNA, 19 nt, Artificial Sequence
  Description of Artificial Sequence: Synthetic oligonucleotide
cauccgaaggcagcaucag

SEQ ID NO: 387909 - RNA, 19 nt, Artificial Sequence
  Description of Artificial Sequence: Synthetic oligonucleotide
uccaaguggccggcggugc

SEQ ID NO: 387910 - RNA, 19 nt, Artificial Sequence
  Description of Artificial Sequence: Synthetic oligonucleotide
caacuauccguugguccag

SEQ ID NO: 387911 - RNA, 19 nt, Artificial Sequence
  Description of Artificial Sequence: Synthetic oligonucleotide
gugcuuaguccgcgacucg

SEQ ID NO: 387912 - RNA, 19 nt, Artificial Sequence
  Description of Artificial Sequence: Synthetic oligonucleotide
gaaaggcgcgagacggggc

SEQ ID NO: 387913 - RNA, 19 nt, Artificial Sequence
  Description of Artificial Sequence: Synthetic oligonucleotide
ggacccuuaugggagagac

SEQ ID NO: 387914 - RNA, 19 nt, Artificial Sequence
  Description of Artificial Sequence: Synthetic oligonucleotide
gcugauaaggcaggagaug

SEQ ID NO: 387915 - RNA, 19 nt, Artificial Sequence
  Description of Artificial Sequence: Synthetic oligonucleotide
ccagguugggaggaggacg

SEQ ID NO: 387916 - RNA, 19 nt, Artificial Sequence
  Description of Artificial Sequence: Synthetic oligonucleotide
uggcucccggaccacggga

SEQ ID NO: 387917 - RNA, 19 nt, Artificial Sequence
  Description of Artificial Sequence: Synthetic oligonucleotide
ugacacuuggagagcucuu

SEQ ID NO: 387918 - RNA, 19 nt, Artificial Sequence
  Description of Artificial Sequence: Synthetic oligonucleotide
cacggaggggcugcaaaag

SEQ ID NO: 387919 - RNA, 19 nt, Artificial Sequence
  Description of Artificial Sequence: Synthetic oligonucleotide
ggugcuuaguccgcgacuc

SEQ ID NO: 387920 - RNA, 19 nt, Artificial Sequence
  Description of Artificial Sequence: Synthetic oligonucleotide
guugcaacuggguccucaa

SEQ ID NO: 387921 - RNA, 19 nt, Artificial Sequence
  Description of Artificial Sequence: Synthetic oligonucleotide
gguuaucuguggaguagag

SEQ ID NO: 387922 - RNA, 19 nt, Artificial Sequence
  Description of Artificial Sequence: Synthetic oligonucleotide
auggacucuucuaggccag

SEQ ID NO: 387923 - RNA, 19 nt, Artificial Sequence
  Description of Artificial Sequence: Synthetic oligonucleotide
gauaggcaauccuggaguu

SEQ ID NO: 387924 - RNA, 19 nt, Artificial Sequence
  Description of Artificial Sequence: Synthetic oligonucleotide
agauggaugugaggguuau

SEQ ID NO: 387925 - RNA, 19 nt, Artificial Sequence
  Description of Artificial Sequence: Synthetic oligonucleotide
ggugcgugccccagcaacg

SEQ ID NO: 387926 - RNA, 19 nt, Artificial Sequence
  Description of Artificial Sequence: Synthetic oligonucleotide
agcuaaggaagaagccaug

SEQ ID NO: 387927 - RNA, 19 nt, Artificial Sequence
  Description of Artificial Sequence: Synthetic oligonucleotide
uggaguuacuauggggcuu

SEQ ID NO: 387928 - RNA, 19 nt, Artificial Sequence
  Description of Artificial Sequence: Synthetic oligonucleotide
aagcgaucuucaagguccu

SEQ ID NO: 387929 - RNA, 19 nt, Artificial Sequence
  Description of Artificial Sequence: Synthetic oligonucleotide
ccgggauagcagcagaaac

SEQ ID NO: 387930 - RNA, 19 nt, Artificial Sequence
  Description of Artificial Sequence: Synthetic oligonucleotide
gccaaacggauccuuguga

SEQ ID NO: 387931 - RNA, 19 nt, Artificial Sequence
  Description of Artificial Sequence: Synthetic oligonucleotide
ccggacgccgagaaaggcg

SEQ ID NO: 387932 - RNA, 19 nt, Artificial Sequence
  Description of Artificial Sequence: Synthetic oligonucleotide
gaguuacuauggggcuugg

SEQ ID NO: 387933 - RNA, 19 nt, Artificial Sequence
  Description of Artificial Sequence: Synthetic oligonucleotide
uacuucccucuccgaggcc

SEQ ID NO: 387934 - RNA, 19 nt, Artificial Sequence
  Description of Artificial Sequence: Synthetic oligonucleotide
ggagagcucuucaauccug

SEQ ID NO: 387935 - RNA, 19 nt, Artificial Sequence
  Description of Artificial Sequence: Synthetic oligonucleotide
gacggggcuggcgcgugcg

SEQ ID NO: 387936 - RNA, 19 nt, Artificial Sequence
  Description of Artificial Sequence: Synthetic oligonucleotide
gcagcaauuccuccucauc

SEQ ID NO: 387937 - RNA, 19 nt, Artificial Sequence
  Description of Artificial Sequence: Synthetic oligonucleotide
gggugcgugccccagcaac

SEQ ID NO: 387938 - RNA, 19 nt, Artificial Sequence
  Description of Artificial Sequence: Synthetic oligonucleotide
cuuaguccgcgacucgcaa

SEQ ID NO: 387939 - RNA, 19 nt, Artificial Sequence
  Description of Artificial Sequence: Synthetic oligonucleotide
ccgagaaaggcgcgagacg

SEQ ID NO: 387940 - RNA, 19 nt, Artificial Sequence
  Description of Artificial Sequence: Synthetic oligonucleotide
ucgcaacuauccguugguc

SEQ ID NO: 387941 - RNA, 19 nt, Artificial Sequence
  Description of Artificial Sequence: Synthetic oligonucleotide
aggcuaucucauucaucaa

SEQ ID NO: 387942 - RNA, 19 nt, Artificial Sequence
  Description of Artificial Sequence: Synthetic oligonucleotide
gcauaaggaaacaagcgau

SEQ ID NO: 387943 - RNA, 19 nt, Artificial Sequence
  Description of Artificial Sequence: Synthetic oligonucleotide
cacggaguucgcguggcuc

SEQ ID NO: 387944 - RNA, 19 nt, Artificial Sequence
  Description of Artificial Sequence: Synthetic oligonucleotide
auaggcaauccuggaguua

SEQ ID NO: 387945 - RNA, 19 nt, Artificial Sequence
  Description of Artificial Sequence: Synthetic oligonucleotide
acgccgagaaaggcgcgag

SEQ ID NO: 387946 - RNA, 19 nt, Artificial Sequence
  Description of Artificial Sequence: Synthetic oligonucleotide
gccgagaaaggcgcgagac

SEQ ID NO: 387947 - RNA, 19 nt, Artificial Sequence
  Description of Artificial Sequence: Synthetic oligonucleotide
cacgggagggugcgugccc

SEQ ID NO: 387948 - RNA, 19 nt, Artificial Sequence
  Description of Artificial Sequence: Synthetic oligonucleotide
gauggaugugaggguuauc

SEQ ID NO: 387949 - RNA, 19 nt, Artificial Sequence
  Description of Artificial Sequence: Synthetic oligonucleotide
cggacgccgagaaaggcgc

SEQ ID NO: 387950 - RNA, 19 nt, Artificial Sequence
  Description of Artificial Sequence: Synthetic oligonucleotide
ggaggaggacgugccaugc

SEQ ID NO: 387951 - RNA, 19 nt, Artificial Sequence
  Description of Artificial Sequence: Synthetic oligonucleotide
aaggcgcgagacggggcug

SEQ ID NO: 387952 - RNA, 19 nt, Artificial Sequence
  Description of Artificial Sequence: Synthetic oligonucleotide
cagcagaaacucuccaagu

SEQ ID NO: 387953 - RNA, 19 nt, Artificial Sequence
  Description of Artificial Sequence: Synthetic oligonucleotide
ccugcacccagagucguag

SEQ ID NO: 387954 - RNA, 19 nt, Artificial Sequence
  Description of Artificial Sequence: Synthetic oligonucleotide
gaggaacuuggugggugga

SEQ ID NO: 387955 - RNA, 19 nt, Artificial Sequence
  Description of Artificial Sequence: Synthetic oligonucleotide
ccgcgacucgcaacuaucc

SEQ ID NO: 387956 - RNA, 19 nt, Artificial Sequence
  Description of Artificial Sequence: Synthetic oligonucleotide
cccauugagacucugcagu

SEQ ID NO: 387957 - RNA, 19 nt, Artificial Sequence
  Description of Artificial Sequence: Synthetic oligonucleotide
acggcacccgucugacacu

SEQ ID NO: 387958 - RNA, 19 nt, Artificial Sequence
  Description of Artificial Sequence: Synthetic oligonucleotide
aguucgcguggcucccgga

SEQ ID NO: 387959 - RNA, 19 nt, Artificial Sequence
  Description of Artificial Sequence: Synthetic oligonucleotide
cucgcaacuauccguuggu

SEQ ID NO: 387960 - RNA, 19 nt, Artificial Sequence
  Description of Artificial Sequence: Synthetic oligonucleotide
cguaguccuccucucuucc

SEQ ID NO: 387961 - RNA, 19 nt, Artificial Sequence
  Description of Artificial Sequence: Synthetic oligonucleotide
cuauccguugguccaggcu

SEQ ID NO: 387962 - RNA, 19 nt, Artificial Sequence
  Description of Artificial Sequence: Synthetic oligonucleotide
gggcacggaguucgcgugg

SEQ ID NO: 387963 - RNA, 19 nt, Artificial Sequence
  Description of Artificial Sequence: Synthetic oligonucleotide
ggacccuaugccuggucca

SEQ ID NO: 387964 - RNA, 19 nt, Artificial Sequence
  Description of Artificial Sequence: Synthetic oligonucleotide
ggguuaucuguggaguaga

SEQ ID NO: 387965 - RNA, 19 nt, Artificial Sequence
  Description of Artificial Sequence: Synthetic oligonucleotide
cugggccccucuccuuugc

SEQ ID NO: 387966 - RNA, 19 nt, Artificial Sequence
  Description of Artificial Sequence: Synthetic oligonucleotide
gugcgugccccagcaacgc

SEQ ID NO: 387967 - RNA, 19 nt, Artificial Sequence
  Description of Artificial Sequence: Synthetic oligonucleotide
ggcccauuuaucucucucu

SEQ ID NO: 387968 - RNA, 19 nt, Artificial Sequence
  Description of Artificial Sequence: Synthetic oligonucleotide
gucugcggaacuuccuccu

SEQ ID NO: 387969 - RNA, 19 nt, Artificial Sequence
  Description of Artificial Sequence: Synthetic oligonucleotide
ccauccgaaggcagcauca

SEQ ID NO: 387970 - RNA, 19 nt, Artificial Sequence
  Description of Artificial Sequence: Synthetic oligonucleotide
ggguacaucucaccauuua

SEQ ID NO: 387971 - RNA, 19 nt, Artificial Sequence
  Description of Artificial Sequence: Synthetic oligonucleotide
cccuucuaagugagaaguc

SEQ ID NO: 387972 - RNA, 19 nt, Artificial Sequence
  Description of Artificial Sequence: Synthetic oligonucleotide
ggaucgaucagcagccaua

SEQ ID NO: 387973 - RNA, 19 nt, Artificial Sequence
  Description of Artificial Sequence: Synthetic oligonucleotide
ggacuagaauggggaacag

SEQ ID NO: 387974 - RNA, 19 nt, Artificial Sequence
  Description of Artificial Sequence: Synthetic oligonucleotide
gggauacaaaauaacguuu

SEQ ID NO: 387975 - RNA, 19 nt, Artificial Sequence
  Description of Artificial Sequence: Synthetic oligonucleotide
caugccauuagaggaacuu

SEQ ID NO: 387976 - RNA, 19 nt, Artificial Sequence
  Description of Artificial Sequence: Synthetic oligonucleotide
cugagcagguuacuucccu

SEQ ID NO: 387977 - RNA, 19 nt, Artificial Sequence
  Description of Artificial Sequence: Synthetic oligonucleotide
cccuuaugggagagacggg

SEQ ID NO: 387978 - RNA, 19 nt, Artificial Sequence
  Description of Artificial Sequence: Synthetic oligonucleotide
gaacggcacccgucugaca

SEQ ID NO: 387979 - RNA, 19 nt, Artificial Sequence
  Description of Artificial Sequence: Synthetic oligonucleotide
cuguagaguauagaaccau

SEQ ID NO: 387980 - RNA, 19 nt, Artificial Sequence
  Description of Artificial Sequence: Synthetic oligonucleotide
cucagccguaguccuccuc

SEQ ID NO: 387981 - RNA, 19 nt, Artificial Sequence
  Description of Artificial Sequence: Synthetic oligonucleotide
gcgcauguugccuucuucu

SEQ ID NO: 387982 - RNA, 19 nt, Artificial Sequence
  Description of Artificial Sequence: Synthetic oligonucleotide
cacauaucuguacucccuu

SEQ ID NO: 387983 - RNA, 19 nt, Artificial Sequence
  Description of Artificial Sequence: Synthetic oligonucleotide
uucucccuccugggaggcc

SEQ ID NO: 387984 - RNA, 19 nt, Artificial Sequence
  Description of Artificial Sequence: Synthetic oligonucleotide
gcgacucgcaacuauccgu

SEQ ID NO: 387985 - RNA, 19 nt, Artificial Sequence
  Description of Artificial Sequence: Synthetic oligonucleotide
gcgagacggggcuggcgcg

SEQ ID NO: 387986 - RNA, 19 nt, Artificial Sequence
  Description of Artificial Sequence: Synthetic oligonucleotide
agaggccgggcaccccgga

SEQ ID NO: 387987 - RNA, 19 nt, Artificial Sequence
  Description of Artificial Sequence: Synthetic oligonucleotide
cgcgacucgcaacuauccg

SEQ ID NO: 387988 - RNA, 19 nt, Artificial Sequence
  Description of Artificial Sequence: Synthetic oligonucleotide
cacccgucugacacuugga

SEQ ID NO: 387989 - RNA, 19 nt, Artificial Sequence
  Description of Artificial Sequence: Synthetic oligonucleotide
gggucuccaauggcagucc

SEQ ID NO: 387990 - RNA, 19 nt, Artificial Sequence
  Description of Artificial Sequence: Synthetic oligonucleotide
ucgaagcucugggcugcac

SEQ ID NO: 387991 - RNA, 19 nt, Artificial Sequence
  Description of Artificial Sequence: Synthetic oligonucleotide
cccgucugacacuuggaga

SEQ ID NO: 387992 - RNA, 19 nt, Artificial Sequence
  Description of Artificial Sequence: Synthetic oligonucleotide
gaagcuggccuagguggcu

SEQ ID NO: 387993 - RNA, 19 nt, Artificial Sequence
  Description of Artificial Sequence: Synthetic oligonucleotide
caaggggugaggacccuau

SEQ ID NO: 387994 - RNA, 19 nt, Artificial Sequence
  Description of Artificial Sequence: Synthetic oligonucleotide
ccucgaagcucugggcugc

SEQ ID NO: 387995 - RNA, 19 nt, Artificial Sequence
  Description of Artificial Sequence: Synthetic oligonucleotide
ggcuccgggauagcagcag

SEQ ID NO: 387996 - RNA, 19 nt, Artificial Sequence
  Description of Artificial Sequence: Synthetic oligonucleotide
ccggagcgugggcagagag

SEQ ID NO: 387997 - RNA, 19 nt, Artificial Sequence
  Description of Artificial Sequence: Synthetic oligonucleotide
ccagguacccucugcacua

SEQ ID NO: 387998 - RNA, 19 nt, Artificial Sequence
  Description of Artificial Sequence: Synthetic oligonucleotide
ucccauccgaaggcagcau

SEQ ID NO: 387999 - RNA, 19 nt, Artificial Sequence
  Description of Artificial Sequence: Synthetic oligonucleotide
ggaguucgcguggcucccg

SEQ ID NO: 388000 - RNA, 19 nt, Artificial Sequence
  Description of Artificial Sequence: Synthetic oligonucleotide
acccagagucguagauuca

SEQ ID NO: 388001 - RNA, 19 nt, Artificial Sequence
  Description of Artificial Sequence: Synthetic oligonucleotide
ccccggacgccgagaaagg

SEQ ID NO: 388002 - RNA, 19 nt, Artificial Sequence
  Description of Artificial Sequence: Synthetic oligonucleotide
gcuuaguccgcgacucgca

SEQ ID NO: 388003 - RNA, 19 nt, Artificial Sequence
  Description of Artificial Sequence: Synthetic oligonucleotide
gccauaacaggugcaagau

SEQ ID NO: 388004 - RNA, 19 nt, Artificial Sequence
  Description of Artificial Sequence: Synthetic oligonucleotide
aggcuccuagaaagagacu

SEQ ID NO: 388005 - RNA, 19 nt, Artificial Sequence
  Description of Artificial Sequence: Synthetic oligonucleotide
cugcacccagagucguaga

SEQ ID NO: 388006 - RNA, 19 nt, Artificial Sequence
  Description of Artificial Sequence: Synthetic oligonucleotide
auguugcaacuggguccuc

SEQ ID NO: 388007 - RNA, 19 nt, Artificial Sequence
  Description of Artificial Sequence: Synthetic oligonucleotide
ggcaguucacagcuggcuu

SEQ ID NO: 388008 - RNA, 19 nt, Artificial Sequence
  Description of Artificial Sequence: Synthetic oligonucleotide
cgggauagcagcagaaacu

SEQ ID NO: 388009 - RNA, 19 nt, Artificial Sequence
  Description of Artificial Sequence: Synthetic oligonucleotide
agggugcgugccccagcaa

SEQ ID NO: 388010 - RNA, 19 nt, Artificial Sequence
  Description of Artificial Sequence: Synthetic oligonucleotide
cgggguagcgcggcgaagc

SEQ ID NO: 388011 - RNA, 19 nt, Artificial Sequence
  Description of Artificial Sequence: Synthetic oligonucleotide
gcagucaaggagagccaga

SEQ ID NO: 388012 - RNA, 19 nt, Artificial Sequence
  Description of Artificial Sequence: Synthetic oligonucleotide
ccuaugccugguccagauc

SEQ ID NO: 388013 - RNA, 19 nt, Artificial Sequence
  Description of Artificial Sequence: Synthetic oligonucleotide
ggguagcgcggcgaagcug

SEQ ID NO: 388014 - RNA, 19 nt, Artificial Sequence
  Description of Artificial Sequence: Synthetic oligonucleotide
gcuggcgcgugcgggcacg

SEQ ID NO: 388015 - RNA, 19 nt, Artificial Sequence
  Description of Artificial Sequence: Synthetic oligonucleotide
cuggcgcgugcgggcacgg

SEQ ID NO: 388016 - RNA, 19 nt, Artificial Sequence
  Description of Artificial Sequence: Synthetic oligonucleotide
guagcgcggcgaagcuggc

SEQ ID NO: 388017 - RNA, 19 nt, Artificial Sequence
  Description of Artificial Sequence: Synthetic oligonucleotide
ccggaccacgggagggugc

SEQ ID NO: 388018 - RNA, 19 nt, Artificial Sequence
  Description of Artificial Sequence: Synthetic oligonucleotide
gggagggugcgugccccag

SEQ ID NO: 388019 - RNA, 19 nt, Artificial Sequence
  Description of Artificial Sequence: Synthetic oligonucleotide
ggcggugcuuaguccgcga

SEQ ID NO: 388020 - RNA, 19 nt, Artificial Sequence
  Description of Artificial Sequence: Synthetic oligonucleotide
cccggacgccgagaaaggc

SEQ ID NO: 388021 - RNA, 19 nt, Artificial Sequence
  Description of Artificial Sequence: Synthetic oligonucleotide
guccgcgacucgcaacuau

SEQ ID NO: 388022 - RNA, 19 nt, Artificial Sequence
  Description of Artificial Sequence: Synthetic oligonucleotide
gggcaguucacagcuggcu

SEQ ID NO: 388023 - RNA, 19 nt, Artificial Sequence
  Description of Artificial Sequence: Synthetic oligonucleotide
gcggcgaagcuggccuagg

SEQ ID NO: 388024 - RNA, 19 nt, Artificial Sequence
  Description of Artificial Sequence: Synthetic oligonucleotide
gccccacgccugcucgccg

SEQ ID NO: 388025 - RNA, 19 nt, Artificial Sequence
  Description of Artificial Sequence: Synthetic oligonucleotide
agcgaucuucaagguccuu

SEQ ID NO: 388026 - RNA, 19 nt, Artificial Sequence
  Description of Artificial Sequence: Synthetic oligonucleotide
gcaccccggacgccgagaa

SEQ ID NO: 388027 - RNA, 19 nt, Artificial Sequence
  Description of Artificial Sequence: Synthetic oligonucleotide
aguccgcgacucgcaacua

SEQ ID NO: 388028 - RNA, 19 nt, Artificial Sequence
  Description of Artificial Sequence: Synthetic oligonucleotide
cgggcacggaguucgcgug

SEQ ID NO: 388029 - RNA, 19 nt, Artificial Sequence
  Description of Artificial Sequence: Synthetic oligonucleotide
cuucacggaggggcugcaa

SEQ ID NO: 388030 - RNA, 19 nt, Artificial Sequence
  Description of Artificial Sequence: Synthetic oligonucleotide
cucgaagcucugggcugca

SEQ ID NO: 388031 - RNA, 19 nt, Artificial Sequence
  Description of Artificial Sequence: Synthetic oligonucleotide
gggacccuuaugggagaga

SEQ ID NO: 388032 - RNA, 19 nt, Artificial Sequence
  Description of Artificial Sequence: Synthetic oligonucleotide
gcgcugucugcggaacuuc

SEQ ID NO: 388033 - RNA, 19 nt, Artificial Sequence
  Description of Artificial Sequence: Synthetic oligonucleotide
gggguagcgcggcgaagcu

SEQ ID NO: 388034 - RNA, 19 nt, Artificial Sequence
  Description of Artificial Sequence: Synthetic oligonucleotide
cggaguucgcguggcuccc

SEQ ID NO: 388035 - RNA, 19 nt, Artificial Sequence
  Description of Artificial Sequence: Synthetic oligonucleotide
gcgggguagcgcggcgaag

SEQ ID NO: 388036 - RNA, 19 nt, Artificial Sequence
  Description of Artificial Sequence: Synthetic oligonucleotide
ggcuggcgcgugcgggcac

SEQ ID NO: 388037 - RNA, 19 nt, Artificial Sequence
  Description of Artificial Sequence: Synthetic oligonucleotide
gcacccagagucguagauu

SEQ ID NO: 388038 - RNA, 19 nt, Artificial Sequence
  Description of Artificial Sequence: Synthetic oligonucleotide
cccuaugccugguccagau

SEQ ID NO: 388039 - RNA, 19 nt, Artificial Sequence
  Description of Artificial Sequence: Synthetic oligonucleotide
cgacucgcaacuauccguu

SEQ ID NO: 388040 - RNA, 19 nt, Artificial Sequence
  Description of Artificial Sequence: Synthetic oligonucleotide
ggcaccccggacgccgaga

SEQ ID NO: 388041 - RNA, 19 nt, Artificial Sequence
  Description of Artificial Sequence: Synthetic oligonucleotide
ggcacccgucugacacuug

SEQ ID NO: 388042 - RNA, 19 nt, Artificial Sequence
  Description of Artificial Sequence: Synthetic oligonucleotide
gcagcagcagcagcagcau

SEQ ID NO: 388043 - RNA, 19 nt, Artificial Sequence
  Description of Artificial Sequence: Synthetic oligonucleotide
ccaugccauuagaggaacu

SEQ ID NO: 388044 - RNA, 19 nt, Artificial Sequence
  Description of Artificial Sequence: Synthetic oligonucleotide
ggcgcugucugcggaacuu

SEQ ID NO: 388045 - RNA, 19 nt, Artificial Sequence
  Description of Artificial Sequence: Synthetic oligonucleotide
cgcggcgaagcuggccuag

SEQ ID NO: 388046 - RNA, 19 nt, Artificial Sequence
  Description of Artificial Sequence: Synthetic oligonucleotide
caaguggccggcggugcuu

SEQ ID NO: 388047 - RNA, 19 nt, Artificial Sequence
  Description of Artificial Sequence: Synthetic oligonucleotide
cagcagcagcagcagcauu

SEQ ID NO: 388048 - RNA, 19 nt, Artificial Sequence
  Description of Artificial Sequence: Synthetic oligonucleotide
gggguacaucucaccauuu

SEQ ID NO: 388049 - RNA, 19 nt, Artificial Sequence
  Description of Artificial Sequence: Synthetic oligonucleotide
gccuccugguggagugauc

SEQ ID NO: 388050 - RNA, 19 nt, Artificial Sequence
  Description of Artificial Sequence: Synthetic oligonucleotide
ccaaguggccggcggugcu

SEQ ID NO: 388051 - RNA, 19 nt, Artificial Sequence
  Description of Artificial Sequence: Synthetic oligonucleotide
ccaaggggugaggacccua

SEQ ID NO: 388052 - RNA, 19 nt, Artificial Sequence
  Description of Artificial Sequence: Synthetic oligonucleotide
gcgugcgggcacggaguuc

SEQ ID NO: 388053 - RNA, 19 nt, Artificial Sequence
  Description of Artificial Sequence: Synthetic oligonucleotide
gccugcacccagagucgua

SEQ ID NO: 388054 - RNA, 19 nt, Artificial Sequence
  Description of Artificial Sequence: Synthetic oligonucleotide
gcgcggcgaagcuggccua

SEQ ID NO: 388055 - RNA, 19 nt, Artificial Sequence
  Description of Artificial Sequence: Synthetic oligonucleotide
cgcgggguagcgcggcgaa

SEQ ID NO: 388056 - RNA, 19 nt, Artificial Sequence
  Description of Artificial Sequence: Synthetic oligonucleotide
cgggagggugcgugcccca

SEQ ID NO: 388057 - RNA, 19 nt, Artificial Sequence
  Description of Artificial Sequence: Synthetic oligonucleotide
cgcgugcgggcacggaguu

SEQ ID NO: 388058 - RNA, 19 nt, Artificial Sequence
  Description of Artificial Sequence: Synthetic oligonucleotide
cggcacccgucugacacuu

SEQ ID NO: 388059 - RNA, 19 nt, Artificial Sequence
  Description of Artificial Sequence: Synthetic oligonucleotide
  modified_base (3)..(3): a, c, u, g, unknown or other
  modified_base (7)..(7): a, c, u, g, unknown or other
aanaaanaaaaguaauuag

SEQ ID NO: 388060 - RNA, 19 nt, Artificial Sequence
  Description of Artificial Sequence: Synthetic oligonucleotide
  modified_base (2)..(2): a, c, u, g, unknown or other
  modified_base (6)..(6): a, c, u, g, unknown or other
  modified_base (10)..(10): a, c, u, g, unknown or other
  modified_base (14)..(14): a, c, u, g, unknown or other
anaaanaaanaaanaaaag

SEQ ID NO: 388061 - RNA, 19 nt, Artificial Sequence
  Description of Artificial Sequence: Synthetic oligonucleotide
  modified_base (3)..(3): a, c, u, g, unknown or other
aanaaaaguaauuaggggu

SEQ ID NO: 388062 - RNA, 19 nt, Artificial Sequence
  Description of Artificial Sequence: Synthetic oligonucleotide
  modified_base (4)..(4): a, c, u, g, unknown or other
aaanaaaaguaauuagggg

SEQ ID NO: 388063 - RNA, 19 nt, Artificial Sequence
  Description of Artificial Sequence: Synthetic oligonucleotide
  modified_base (2)..(2): a, c, u, g, unknown or other
  modified_base (6)..(6): a, c, u, g, unknown or other
anaaanaaaaguaauuagg

SEQ ID NO: 388064 - RNA, 19 nt, Artificial Sequence
  Description of Artificial Sequence: Synthetic oligonucleotide
  modified_base (3)..(3): a, c, u, g, unknown or other
  modified_base (7)..(7): a, c, u, g, unknown or other
  modified_base (11)..(11): a, c, u, g, unknown or other
  modified_base (15)..(15): a, c, u, g, unknown or other
  modified_base (19)..(19): a, c, u, g, unknown or other
aanaaanaaanaaanaaan

SEQ ID NO: 388065 - RNA, 19 nt, Artificial Sequence
  Description of Artificial Sequence: Synthetic oligonucleotide
  modified_base (2)..(2): a, c, u, g, unknown or other
  modified_base (6)..(6): a, c, u, g, unknown or other
  modified_base (10)..(10): a, c, u, g, unknown or other
  modified_base (14)..(14): a, c, u, g, unknown or other
  modified_base (18)..(18): a, c, u, g, unknown or other
anaaanaaanaaanaaana

SEQ ID NO: 388066 - RNA, 19 nt, Artificial Sequence
  Description of Artificial Sequence: Synthetic oligonucleotide
  modified_base (4)..(4): a, c, u, g, unknown or other
  modified_base (8)..(8): a, c, u, g, unknown or other
  modified_base (12)..(12): a, c, u, g, unknown or other
  modified_base (16)..(16): a, c, u, g, unknown or other
aaanaaanaaanaaanaaa

SEQ ID NO: 388067 - RNA, 19 nt, Artificial Sequence
  Description of Artificial Sequence: Synthetic oligonucleotide
  modified_base (3)..(3): a, c, u, g, unknown or other
  modified_base (7)..(7): a, c, u, g, unknown or other
  modified_base (11)..(11): a, c, u, g, unknown or other
  modified_base (15)..(15): a, c, u, g, unknown or other
aanaaanaaanaaanaaaa

SEQ ID NO: 388068 - RNA, 19 nt, Artificial Sequence
  Description of Artificial Sequence: Synthetic oligonucleotide
aaacaggucuuuuaauucc

SEQ ID NO: 388069 - RNA, 19 nt, Artificial Sequence
  Description of Artificial Sequence: Synthetic oligonucleotide
ugugcuguaacaauaaagc

SEQ ID NO: 388070 - RNA, 19 nt, Artificial Sequence
  Description of Artificial Sequence: Synthetic oligonucleotide
  modified_base (3)..(3): a, c, u, g, unknown or other
  modified_base (7)..(7): a, c, u, g, unknown or other
  modified_base (11)..(11): a, c, u, g, unknown or other
aanaaanaaanaaaaguaa

SEQ ID NO: 388071 - RNA, 19 nt, Artificial Sequence
  Description of Artificial Sequence: Synthetic oligonucleotide
aguaauuagggguaacugc

SEQ ID NO: 388072 - RNA, 19 nt, Artificial Sequence
  Description of Artificial Sequence: Synthetic oligonucleotide
  modified_base (2)..(2): a, c, u, g, unknown or other
  modified_base (6)..(6): a, c, u, g, unknown or other
  modified_base (10)..(10): a, c, u, g, unknown or other
anaaanaaanaaaaguaau

SEQ ID NO: 388073 - RNA, 19 nt, Artificial Sequence
  Description of Artificial Sequence: Synthetic oligonucleotide
aacaauaaagcccugucug

SEQ ID NO: 388074 - RNA, 19 nt, Artificial Sequence
  Description of Artificial Sequence: Synthetic oligonucleotide
  modified_base (4)..(4): a, c, u, g, unknown or other
  modified_base (8)..(8): a, c, u, g, unknown or other
aaanaaanaaaaguaauua

SEQ ID NO: 388075 - RNA, 19 nt, Artificial Sequence
  Description of Artificial Sequence: Synthetic oligonucleotide
ucugaaggcaaccaaagag

SEQ ID NO: 388076 - RNA, 19 nt, Artificial Sequence
  Description of Artificial Sequence: Synthetic oligonucleotide
aaguucaggucuucuagcc

SEQ ID NO: 388077 - RNA, 19 nt, Artificial Sequence
  Description of Artificial Sequence: Synthetic oligonucleotide
gaauuuguagaacucgggg

SEQ ID NO: 388078 - RNA, 19 nt, Artificial Sequence
  Description of Artificial Sequence: Synthetic oligonucleotide
ugaauuacuagcauccucu

SEQ ID NO: 388079 - RNA, 19 nt, Artificial Sequence
  Description of Artificial Sequence: Synthetic oligonucleotide
acaguuguuggccucaagc

SEQ ID NO: 388080 - RNA, 19 nt, Artificial Sequence
  Description of Artificial Sequence: Synthetic oligonucleotide
ucuauugaaguccaccugc

SEQ ID NO: 388081 - RNA, 19 nt, Artificial Sequence
  Description of Artificial Sequence: Synthetic oligonucleotide
aacaacuugauacagccaa

SEQ ID NO: 388082 - RNA, 19 nt, Artificial Sequence
  Description of Artificial Sequence: Synthetic oligonucleotide
aauuuguagaacucggggu

SEQ ID NO: 388083 - RNA, 19 nt, Artificial Sequence
  Description of Artificial Sequence: Synthetic oligonucleotide
uguacaacugcacucaggu

SEQ ID NO: 388084 - RNA, 19 nt, Artificial Sequence
  Description of Artificial Sequence: Synthetic oligonucleotide
agucagauaaaguggagag

SEQ ID NO: 388085 - RNA, 19 nt, Artificial Sequence
  Description of Artificial Sequence: Synthetic oligonucleotide
ucuugaguaacauucggca

SEQ ID NO: 388086 - RNA, 19 nt, Artificial Sequence
  Description of Artificial Sequence: Synthetic oligonucleotide
ucagguauuccucucuggg

SEQ ID NO: 388087 - RNA, 19 nt, Artificial Sequence
  Description of Artificial Sequence: Synthetic oligonucleotide
ugaacuugcaauuucucac

SEQ ID NO: 388088 - RNA, 19 nt, Artificial Sequence
  Description of Artificial Sequence: Synthetic oligonucleotide
uuugcuuuaggaugggacc

SEQ ID NO: 388089 - RNA, 19 nt, Artificial Sequence
  Description of Artificial Sequence: Synthetic oligonucleotide
aaggcaaccaaagaggucu

SEQ ID NO: 388090 - RNA, 19 nt, Artificial Sequence
  Description of Artificial Sequence: Synthetic oligonucleotide
aagucagguaguaaggaac

SEQ ID NO: 388091 - RNA, 19 nt, Artificial Sequence
  Description of Artificial Sequence: Synthetic oligonucleotide
gacucuaaugaguaccagg

SEQ ID NO: 388092 - RNA, 19 nt, Artificial Sequence
  Description of Artificial Sequence: Synthetic oligonucleotide
guaguaaggaaccaagcug

SEQ ID NO: 388093 - RNA, 19 nt, Artificial Sequence
  Description of Artificial Sequence: Synthetic oligonucleotide
uguagaaccucgauggaac

SEQ ID NO: 388094 - RNA, 19 nt, Artificial Sequence
  Description of Artificial Sequence: Synthetic oligonucleotide
caacucuuagcacaguugg

SEQ ID NO: 388095 - RNA, 19 nt, Artificial Sequence
  Description of Artificial Sequence: Synthetic oligonucleotide
uugaguaacauucggcacu

SEQ ID NO: 388096 - RNA, 19 nt, Artificial Sequence
  Description of Artificial Sequence: Synthetic oligonucleotide
aggauaaggucauacagcu

SEQ ID NO: 388097 - RNA, 19 nt, Artificial Sequence
  Description of Artificial Sequence: Synthetic oligonucleotide
cauacugccaguuguacac

SEQ ID NO: 388098 - RNA, 19 nt, Artificial Sequence
  Description of Artificial Sequence: Synthetic oligonucleotide
uuagcuacuuugcacuccc

SEQ ID NO: 388099 - RNA, 19 nt, Artificial Sequence
  Description of Artificial Sequence: Synthetic oligonucleotide
cugucuucgacuuuccgcc

SEQ ID NO: 388100 - RNA, 19 nt, Artificial Sequence
  Description of Artificial Sequence: Synthetic oligonucleotide
cagaaggcuaugcagaacc

SEQ ID NO: 388101 - RNA, 19 nt, Artificial Sequence
  Description of Artificial Sequence: Synthetic oligonucleotide
uaacaauaaagcccugucu

SEQ ID NO: 388102 - RNA, 19 nt, Artificial Sequence
  Description of Artificial Sequence: Synthetic oligonucleotide
accugcaauucucagcagc

SEQ ID NO: 388103 - RNA, 19 nt, Artificial Sequence
  Description of Artificial Sequence: Synthetic oligonucleotide
auaaaagcgagcagugggc

SEQ ID NO: 388104 - RNA, 19 nt, Artificial Sequence
  Description of Artificial Sequence: Synthetic oligonucleotide
aauaaagcccugucugcug

SEQ ID NO: 388105 - RNA, 19 nt, Artificial Sequence
  Description of Artificial Sequence: Synthetic oligonucleotide
aaggauucggauauguucu

SEQ ID NO: 388106 - RNA, 19 nt, Artificial Sequence
  Description of Artificial Sequence: Synthetic oligonucleotide
aagcuuaugagggguaggg

SEQ ID NO: 388107 - RNA, 19 nt, Artificial Sequence
  Description of Artificial Sequence: Synthetic oligonucleotide
agguauuccucucugggag

SEQ ID NO: 388108 - RNA, 19 nt, Artificial Sequence
  Description of Artificial Sequence: Synthetic oligonucleotide
acgcacacaaugcaugcgc

SEQ ID NO: 388109 - RNA, 19 nt, Artificial Sequence
  Description of Artificial Sequence: Synthetic oligonucleotide
acacaguacuaucugugac

SEQ ID NO: 388110 - RNA, 19 nt, Artificial Sequence
  Description of Artificial Sequence: Synthetic oligonucleotide
auaggagauacuggguucc

SEQ ID NO: 388111 - RNA, 19 nt, Artificial Sequence
  Description of Artificial Sequence: Synthetic oligonucleotide
gaaaguaaucacagcauug

SEQ ID NO: 388112 - RNA, 19 nt, Artificial Sequence
  Description of Artificial Sequence: Synthetic oligonucleotide
agccagacaggcuaccagc

SEQ ID NO: 388113 - RNA, 19 nt, Artificial Sequence
  Description of Artificial Sequence: Synthetic oligonucleotide
aauuagggguaacugcaga

SEQ ID NO: 388114 - RNA, 19 nt, Artificial Sequence
  Description of Artificial Sequence: Synthetic oligonucleotide
aaagucagguaguaaggaa

SEQ ID NO: 388115 - RNA, 19 nt, Artificial Sequence
  Description of Artificial Sequence: Synthetic oligonucleotide
gaaggcaaugcaaugggcc

SEQ ID NO: 388116 - RNA, 19 nt, Artificial Sequence
  Description of Artificial Sequence: Synthetic oligonucleotide
ugugcuauccucucccuca

SEQ ID NO: 388117 - RNA, 19 nt, Artificial Sequence
  Description of Artificial Sequence: Synthetic oligonucleotide
gaaaagauuucagcuguag

SEQ ID NO: 388118 - RNA, 19 nt, Artificial Sequence
  Description of Artificial Sequence: Synthetic oligonucleotide
uaauuagggguaacugcag

SEQ ID NO: 388119 - RNA, 19 nt, Artificial Sequence
  Description of Artificial Sequence: Synthetic oligonucleotide
cuuaugagggguaggguac

SEQ ID NO: 388120 - RNA, 19 nt, Artificial Sequence
  Description of Artificial Sequence: Synthetic oligonucleotide
ucuuucacuucuuggugag

SEQ ID NO: 388121 - RNA, 19 nt, Artificial Sequence
  Description of Artificial Sequence: Synthetic oligonucleotide
ugaaggucacucucuggcg

SEQ ID NO: 388122 - RNA, 19 nt, Artificial Sequence
  Description of Artificial Sequence: Synthetic oligonucleotide
guaguuagcuacuuugcac

SEQ ID NO: 388123 - RNA, 19 nt, Artificial Sequence
  Description of Artificial Sequence: Synthetic oligonucleotide
agcucaugcggccuggacg

SEQ ID NO: 388124 - RNA, 19 nt, Artificial Sequence
  Description of Artificial Sequence: Synthetic oligonucleotide
uggacgucuauugaagucc

SEQ ID NO: 388125 - RNA, 19 nt, Artificial Sequence
  Description of Artificial Sequence: Synthetic oligonucleotide
acgucuauugaaguccacc

SEQ ID NO: 388126 - RNA, 19 nt, Artificial Sequence
  Description of Artificial Sequence: Synthetic oligonucleotide
agaacggcugcagacaccg

SEQ ID NO: 388127 - RNA, 19 nt, Artificial Sequence
  Description of Artificial Sequence: Synthetic oligonucleotide
aguaguuagcuacuuugca

SEQ ID NO: 388128 - RNA, 19 nt, Artificial Sequence
  Description of Artificial Sequence: Synthetic oligonucleotide
ucggauauguucugcauuc

SEQ ID NO: 388129 - RNA, 19 nt, Artificial Sequence
  Description of Artificial Sequence: Synthetic oligonucleotide
ugaucugugagagagggua

SEQ ID NO: 388130 - RNA, 19 nt, Artificial Sequence
  Description of Artificial Sequence: Synthetic oligonucleotide
uugcaauccucucuggacu

SEQ ID NO: 388131 - RNA, 19 nt, Artificial Sequence
  Description of Artificial Sequence: Synthetic oligonucleotide
acugcuuagggaaagucag

SEQ ID NO: 388132 - RNA, 19 nt, Artificial Sequence
  Description of Artificial Sequence: Synthetic oligonucleotide
cauaaguagaggcagugca

SEQ ID NO: 388133 - RNA, 19 nt, Artificial Sequence
  Description of Artificial Sequence: Synthetic oligonucleotide
guaacaauaaagcccuguc

SEQ ID NO: 388134 - RNA, 19 nt, Artificial Sequence
  Description of Artificial Sequence: Synthetic oligonucleotide
aaccaaggguacucaggac

SEQ ID NO: 388135 - RNA, 19 nt, Artificial Sequence
  Description of Artificial Sequence: Synthetic oligonucleotide
aguaacauucggcacugcu

SEQ ID NO: 388136 - RNA, 19 nt, Artificial Sequence
  Description of Artificial Sequence: Synthetic oligonucleotide
ugaacacaguacuaucugu

SEQ ID NO: 388137 - RNA, 19 nt, Artificial Sequence
  Description of Artificial Sequence: Synthetic oligonucleotide
agcuacuuugcacucccgg

SEQ ID NO: 388138 - RNA, 19 nt, Artificial Sequence
  Description of Artificial Sequence: Synthetic oligonucleotide
gaggucugcagacaaacca

SEQ ID NO: 388139 - RNA, 19 nt, Artificial Sequence
  Description of Artificial Sequence: Synthetic oligonucleotide
cagguaguaaggaaccaag

SEQ ID NO: 388140 - RNA, 19 nt, Artificial Sequence
  Description of Artificial Sequence: Synthetic oligonucleotide
guaauuagggguaacugca

SEQ ID NO: 388141 - RNA, 19 nt, Artificial Sequence
  Description of Artificial Sequence: Synthetic oligonucleotide
gauaggagauacuggguuc

SEQ ID NO: 388142 - RNA, 19 nt, Artificial Sequence
  Description of Artificial Sequence: Synthetic oligonucleotide
guagaggcagugcacauac

SEQ ID NO: 388143 - RNA, 19 nt, Artificial Sequence
  Description of Artificial Sequence: Synthetic oligonucleotide
cuugaguaacauucggcac

SEQ ID NO: 388144 - RNA, 19 nt, Artificial Sequence
  Description of Artificial Sequence: Synthetic oligonucleotide
gugcuguaacaauaaagcc

SEQ ID NO: 388145 - RNA, 19 nt, Artificial Sequence
  Description of Artificial Sequence: Synthetic oligonucleotide
aucucaagaaugaagggca

SEQ ID NO: 388146 - RNA, 19 nt, Artificial Sequence
  Description of Artificial Sequence: Synthetic oligonucleotide
uguaacaauaaagcccugu

SEQ ID NO: 388147 - RNA, 19 nt, Artificial Sequence
  Description of Artificial Sequence: Synthetic oligonucleotide
caguaguuagcuacuuugc

SEQ ID NO: 388148 - RNA, 19 nt, Artificial Sequence
  Description of Artificial Sequence: Synthetic oligonucleotide
agauuaggggcuguagaac

SEQ ID NO: 388149 - RNA, 19 nt, Artificial Sequence
  Description of Artificial Sequence: Synthetic oligonucleotide
aaugcaugcgcaauggaua

SEQ ID NO: 388150 - RNA, 19 nt, Artificial Sequence
  Description of Artificial Sequence: Synthetic oligonucleotide
cuucuagccguucuuugcc

SEQ ID NO: 388151 - RNA, 19 nt, Artificial Sequence
  Description of Artificial Sequence: Synthetic oligonucleotide
caagcuggcgaauguagag

SEQ ID NO: 388152 - RNA, 19 nt, Artificial Sequence
  Description of Artificial Sequence: Synthetic oligonucleotide
ggugccaacggucugagac

SEQ ID NO: 388153 - RNA, 19 nt, Artificial Sequence
  Description of Artificial Sequence: Synthetic oligonucleotide
gaacuugcaauuucucaca

SEQ ID NO: 388154 - RNA, 19 nt, Artificial Sequence
  Description of Artificial Sequence: Synthetic oligonucleotide
cuuucagggucaaaacaac

SEQ ID NO: 388155 - RNA, 19 nt, Artificial Sequence
  Description of Artificial Sequence: Synthetic oligonucleotide
ggucaaaacaacucuuagc

SEQ ID NO: 388156 - RNA, 19 nt, Artificial Sequence
  Description of Artificial Sequence: Synthetic oligonucleotide
uguacacagacugguaugu

SEQ ID NO: 388157 - RNA, 19 nt, Artificial Sequence
  Description of Artificial Sequence: Synthetic oligonucleotide
gauucggauauguucugca

SEQ ID NO: 388158 - RNA, 19 nt, Artificial Sequence
  Description of Artificial Sequence: Synthetic oligonucleotide
agacugguaugucuccuuc

SEQ ID NO: 388159 - RNA, 19 nt, Artificial Sequence
  Description of Artificial Sequence: Synthetic oligonucleotide
agguaguaaggaaccaagc

SEQ ID NO: 388160 - RNA, 19 nt, Artificial Sequence
  Description of Artificial Sequence: Synthetic oligonucleotide
caauggauaaaagcgagca

SEQ ID NO: 388161 - RNA, 19 nt, Artificial Sequence
  Description of Artificial Sequence: Synthetic oligonucleotide
uuugugcucagaagcacau

SEQ ID NO: 388162 - RNA, 19 nt, Artificial Sequence
  Description of Artificial Sequence: Synthetic oligonucleotide
uggcgaaggauucggauau

SEQ ID NO: 388163 - RNA, 19 nt, Artificial Sequence
  Description of Artificial Sequence: Synthetic oligonucleotide
uacgcagguggacugcaag

SEQ ID NO: 388164 - RNA, 19 nt, Artificial Sequence
  Description of Artificial Sequence: Synthetic oligonucleotide
ugaagcuuaugagggguag

SEQ ID NO: 388165 - RNA, 19 nt, Artificial Sequence
  Description of Artificial Sequence: Synthetic oligonucleotide
cugcacaacuucauggaac

SEQ ID NO: 388166 - RNA, 19 nt, Artificial Sequence
  Description of Artificial Sequence: Synthetic oligonucleotide
aaggguacucaggacucgg

SEQ ID NO: 388167 - RNA, 19 nt, Artificial Sequence
  Description of Artificial Sequence: Synthetic oligonucleotide
ucacccgugcuccacagaa

SEQ ID NO: 388168 - RNA, 19 nt, Artificial Sequence
  Description of Artificial Sequence: Synthetic oligonucleotide
cucccaacugugaacuggg

SEQ ID NO: 388169 - RNA, 19 nt, Artificial Sequence
  Description of Artificial Sequence: Synthetic oligonucleotide
aacuugcaauuucucacau

SEQ ID NO: 388170 - RNA, 19 nt, Artificial Sequence
  Description of Artificial Sequence: Synthetic oligonucleotide
accgguauaggcucauucu

SEQ ID NO: 388171 - RNA, 19 nt, Artificial Sequence
  Description of Artificial Sequence: Synthetic oligonucleotide
agcgucagggcacgcacac

SEQ ID NO: 388172 - RNA, 19 nt, Artificial Sequence
  Description of Artificial Sequence: Synthetic oligonucleotide
acacaaugcaugcgcaaug

SEQ ID NO: 388173 - RNA, 19 nt, Artificial Sequence
  Description of Artificial Sequence: Synthetic oligonucleotide
uuugcacucccggagaaaa

SEQ ID NO: 388174 - RNA, 19 nt, Artificial Sequence
  Description of Artificial Sequence: Synthetic oligonucleotide
ugccggcagacucuaauga

SEQ ID NO: 388175 - RNA, 19 nt, Artificial Sequence
  Description of Artificial Sequence: Synthetic oligonucleotide
uaaaagcgagcagugggca

SEQ ID NO: 388176 - RNA, 19 nt, Artificial Sequence
  Description of Artificial Sequence: Synthetic oligonucleotide
ucucuggcgaaggauucgg

SEQ ID NO: 388177 - RNA, 19 nt, Artificial Sequence
  Description of Artificial Sequence: Synthetic oligonucleotide
gaaggcuaugcagaaccag

SEQ ID NO: 388178 - RNA, 19 nt, Artificial Sequence
  Description of Artificial Sequence: Synthetic oligonucleotide
agggaugaaggugccaacg

SEQ ID NO: 388179 - RNA, 19 nt, Artificial Sequence
  Description of Artificial Sequence: Synthetic oligonucleotide
uucggauauguucugcauu

SEQ ID NO: 388180 - RNA, 19 nt, Artificial Sequence
  Description of Artificial Sequence: Synthetic oligonucleotide
cucgauggaaccaagggua

SEQ ID NO: 388181 - RNA, 19 nt, Artificial Sequence
  Description of Artificial Sequence: Synthetic oligonucleotide
ucaggacucggcaccauaa

SEQ ID NO: 388182 - RNA, 19 nt, Artificial Sequence
  Description of Artificial Sequence: Synthetic oligonucleotide
acauacugccaguuguaca

SEQ ID NO: 388183 - RNA, 19 nt, Artificial Sequence
  Description of Artificial Sequence: Synthetic oligonucleotide
ccaggauaaggucauacag

SEQ ID NO: 388184 - RNA, 19 nt, Artificial Sequence
  Description of Artificial Sequence: Synthetic oligonucleotide
aacugggacuacucugcug

SEQ ID NO: 388185 - RNA, 19 nt, Artificial Sequence
  Description of Artificial Sequence: Synthetic oligonucleotide
gucuauugaaguccaccug

SEQ ID NO: 388186 - RNA, 19 nt, Artificial Sequence
  Description of Artificial Sequence: Synthetic oligonucleotide
aguugguucuguugugcug

SEQ ID NO: 388187 - RNA, 19 nt, Artificial Sequence
  Description of Artificial Sequence: Synthetic oligonucleotide
cuugacauccacacgaagu

SEQ ID NO: 388188 - RNA, 19 nt, Artificial Sequence
  Description of Artificial Sequence: Synthetic oligonucleotide
cagauaaaguggagaggcc

SEQ ID NO: 388189 - RNA, 19 nt, Artificial Sequence
  Description of Artificial Sequence: Synthetic oligonucleotide
uggaaccaaggguacucag

SEQ ID NO: 388190 - RNA, 19 nt, Artificial Sequence
  Description of Artificial Sequence: Synthetic oligonucleotide
gcuacuagauggcagcagc

SEQ ID NO: 388191 - RNA, 19 nt, Artificial Sequence
  Description of Artificial Sequence: Synthetic oligonucleotide
aguuggcgcaccugccggc

SEQ ID NO: 388192 - RNA, 19 nt, Artificial Sequence
  Description of Artificial Sequence: Synthetic oligonucleotide
ucgauggaaccaaggguac

SEQ ID NO: 388193 - RNA, 19 nt, Artificial Sequence
  Description of Artificial Sequence: Synthetic oligonucleotide
acagccaaugaugaucugu

SEQ ID NO: 388194 - RNA, 19 nt, Artificial Sequence
  Description of Artificial Sequence: Synthetic oligonucleotide
ugaccuggaaccugcaauu

SEQ ID NO: 388195 - RNA, 19 nt, Artificial Sequence
  Description of Artificial Sequence: Synthetic oligonucleotide
guauuccaggauaagguca

SEQ ID NO: 388196 - RNA, 19 nt, Artificial Sequence
  Description of Artificial Sequence: Synthetic oligonucleotide
agaggucugcagacaaacc

SEQ ID NO: 388197 - RNA, 19 nt, Artificial Sequence
  Description of Artificial Sequence: Synthetic oligonucleotide
ugugccggcagacucuaau

SEQ ID NO: 388198 - RNA, 19 nt, Artificial Sequence
  Description of Artificial Sequence: Synthetic oligonucleotide
accauaaguagaggcagug

SEQ ID NO: 388199 - RNA, 19 nt, Artificial Sequence
  Description of Artificial Sequence: Synthetic oligonucleotide
acaacucuuagcacaguug

SEQ ID NO: 388200 - RNA, 19 nt, Artificial Sequence
  Description of Artificial Sequence: Synthetic oligonucleotide
aggauuccuucuugugccg

SEQ ID NO: 388201 - RNA, 19 nt, Artificial Sequence
  Description of Artificial Sequence: Synthetic oligonucleotide
aggacucggcaccauaagu

SEQ ID NO: 388202 - RNA, 19 nt, Artificial Sequence
  Description of Artificial Sequence: Synthetic oligonucleotide
acugcaagcuggcgaaugu

SEQ ID NO: 388203 - RNA, 19 nt, Artificial Sequence
  Description of Artificial Sequence: Synthetic oligonucleotide
gggucaaaacaacucuuag

SEQ ID NO: 388204 - RNA, 19 nt, Artificial Sequence
  Description of Artificial Sequence: Synthetic oligonucleotide
cuggacgucuauugaaguc

SEQ ID NO: 388205 - RNA, 19 nt, Artificial Sequence
  Description of Artificial Sequence: Synthetic oligonucleotide
aaugccugcacaacuucau

SEQ ID NO: 388206 - RNA, 19 nt, Artificial Sequence
  Description of Artificial Sequence: Synthetic oligonucleotide
ugccaacggucugagacag

SEQ ID NO: 388207 - RNA, 19 nt, Artificial Sequence
  Description of Artificial Sequence: Synthetic oligonucleotide
agcuguacaacugcacuca

SEQ ID NO: 388208 - RNA, 19 nt, Artificial Sequence
  Description of Artificial Sequence: Synthetic oligonucleotide
acauucggcacugcuuagg

SEQ ID NO: 388209 - RNA, 19 nt, Artificial Sequence
  Description of Artificial Sequence: Synthetic oligonucleotide
aagaggucucuaaugcaga

SEQ ID NO: 388210 - RNA, 19 nt, Artificial Sequence
  Description of Artificial Sequence: Synthetic oligonucleotide
ggucauggcauuacgcagg

SEQ ID NO: 388211 - RNA, 19 nt, Artificial Sequence
  Description of Artificial Sequence: Synthetic oligonucleotide
auucggauauguucugcau

SEQ ID NO: 388212 - RNA, 19 nt, Artificial Sequence
  Description of Artificial Sequence: Synthetic oligonucleotide
augcaugcgcaauggauaa

SEQ ID NO: 388213 - RNA, 19 nt, Artificial Sequence
  Description of Artificial Sequence: Synthetic oligonucleotide
ucuagccguucuuugccac

SEQ ID NO: 388214 - RNA, 19 nt, Artificial Sequence
  Description of Artificial Sequence: Synthetic oligonucleotide
gaucugugagagaggguag

SEQ ID NO: 388215 - RNA, 19 nt, Artificial Sequence
  Description of Artificial Sequence: Synthetic oligonucleotide
uucuagccguucuuugcca

SEQ ID NO: 388216 - RNA, 19 nt, Artificial Sequence
  Description of Artificial Sequence: Synthetic oligonucleotide
ccugucuucgacuuuccgc

SEQ ID NO: 388217 - RNA, 19 nt, Artificial Sequence
  Description of Artificial Sequence: Synthetic oligonucleotide
uggacaguuucaagaucac

SEQ ID NO: 388218 - RNA, 19 nt, Artificial Sequence
  Description of Artificial Sequence: Synthetic oligonucleotide
ccggagaaaagauuucagc

SEQ ID NO: 388219 - RNA, 19 nt, Artificial Sequence
  Description of Artificial Sequence: Synthetic oligonucleotide
uugcacucccggagaaaag

SEQ ID NO: 388220 - RNA, 19 nt, Artificial Sequence
  Description of Artificial Sequence: Synthetic oligonucleotide
cacugcuuagggaaaguca

SEQ ID NO: 388221 - RNA, 19 nt, Artificial Sequence
  Description of Artificial Sequence: Synthetic oligonucleotide
guuagcuacuuugcacucc

SEQ ID NO: 388222 - RNA, 19 nt, Artificial Sequence
  Description of Artificial Sequence: Synthetic oligonucleotide
ggaaccaaggguacucagg

SEQ ID NO: 388223 - RNA, 19 nt, Artificial Sequence
  Description of Artificial Sequence: Synthetic oligonucleotide
guuguuggccucaagccuc

SEQ ID NO: 388224 - RNA, 19 nt, Artificial Sequence
  Description of Artificial Sequence: Synthetic oligonucleotide
gguaguaaggaaccaagcu

SEQ ID NO: 388225 - RNA, 19 nt, Artificial Sequence
  Description of Artificial Sequence: Synthetic oligonucleotide
aggauucggauauguucug

SEQ ID NO: 388226 - RNA, 19 nt, Artificial Sequence
  Description of Artificial Sequence: Synthetic oligonucleotide
cagacucuaaugaguacca

SEQ ID NO: 388227 - RNA, 19 nt, Artificial Sequence
  Description of Artificial Sequence: Synthetic oligonucleotide
ugggaccaaggaaggauuc

SEQ ID NO: 388228 - RNA, 19 nt, Artificial Sequence
  Description of Artificial Sequence: Synthetic oligonucleotide
ugucugcuucucccaagca

SEQ ID NO: 388229 - RNA, 19 nt, Artificial Sequence
  Description of Artificial Sequence: Synthetic oligonucleotide
ugugaccuggaaccugcaa

SEQ ID NO: 388230 - RNA, 19 nt, Artificial Sequence
  Description of Artificial Sequence: Synthetic oligonucleotide
gcaagggucaccgguauag

SEQ ID NO: 388231 - RNA, 19 nt, Artificial Sequence
  Description of Artificial Sequence: Synthetic oligonucleotide
aaggugccaacggucugag

SEQ ID NO: 388232 - RNA, 19 nt, Artificial Sequence
  Description of Artificial Sequence: Synthetic oligonucleotide
uagcuacuuugcacucccg

SEQ ID NO: 388233 - RNA, 19 nt, Artificial Sequence
  Description of Artificial Sequence: Synthetic oligonucleotide
cacugaaggucacucucug

SEQ ID NO: 388234 - RNA, 19 nt, Artificial Sequence
  Description of Artificial Sequence: Synthetic oligonucleotide
ugggagaggugaacuugca

SEQ ID NO: 388235 - RNA, 19 nt, Artificial Sequence
  Description of Artificial Sequence: Synthetic oligonucleotide
gcaccauaaguagaggcag

SEQ ID NO: 388236 - RNA, 19 nt, Artificial Sequence
  Description of Artificial Sequence: Synthetic oligonucleotide
cagagugggcuacuagaug

SEQ ID NO: 388237 - RNA, 19 nt, Artificial Sequence
  Description of Artificial Sequence: Synthetic oligonucleotide
acggucugagacagcagcg

SEQ ID NO: 388238 - RNA, 19 nt, Artificial Sequence
  Description of Artificial Sequence: Synthetic oligonucleotide
uuaugagggguaggguacu

SEQ ID NO: 388239 - RNA, 19 nt, Artificial Sequence
  Description of Artificial Sequence: Synthetic oligonucleotide
caccgguauaggcucauuc

SEQ ID NO: 388240 - RNA, 19 nt, Artificial Sequence
  Description of Artificial Sequence: Synthetic oligonucleotide
ccaguuguacacagacugg

SEQ ID NO: 388241 - RNA, 19 nt, Artificial Sequence
  Description of Artificial Sequence: Synthetic oligonucleotide
gacaaaccaaagucagaua

SEQ ID NO: 388242 - RNA, 19 nt, Artificial Sequence
  Description of Artificial Sequence: Synthetic oligonucleotide
agccaaugaugaucuguga

SEQ ID NO: 388243 - RNA, 19 nt, Artificial Sequence
  Description of Artificial Sequence: Synthetic oligonucleotide
cacauacugccaguuguac

SEQ ID NO: 388244 - RNA, 19 nt, Artificial Sequence
  Description of Artificial Sequence: Synthetic oligonucleotide
cuucacccgugcuccacag

SEQ ID NO: 388245 - RNA, 19 nt, Artificial Sequence
  Description of Artificial Sequence: Synthetic oligonucleotide
uagccguucuuugccacug

SEQ ID NO: 388246 - RNA, 19 nt, Artificial Sequence
  Description of Artificial Sequence: Synthetic oligonucleotide
agauugguacuggacaguu

SEQ ID NO: 388247 - RNA, 19 nt, Artificial Sequence
  Description of Artificial Sequence: Synthetic oligonucleotide
agacucuaaugaguaccag

SEQ ID NO: 388248 - RNA, 19 nt, Artificial Sequence
  Description of Artificial Sequence: Synthetic oligonucleotide
acccucccaacugugaacu

SEQ ID NO: 388249 - RNA, 19 nt, Artificial Sequence
  Description of Artificial Sequence: Synthetic oligonucleotide
cagcucauccugugguccc

SEQ ID NO: 388250 - RNA, 19 nt, Artificial Sequence
  Description of Artificial Sequence: Synthetic oligonucleotide
uggaucucacggucccuca

SEQ ID NO: 388251 - RNA, 19 nt, Artificial Sequence
  Description of Artificial Sequence: Synthetic oligonucleotide
gacccgcagagauucuuca

SEQ ID NO: 388252 - RNA, 19 nt, Artificial Sequence
  Description of Artificial Sequence: Synthetic oligonucleotide
cauuacgcagguggacugc

SEQ ID NO: 388253 - RNA, 19 nt, Artificial Sequence
  Description of Artificial Sequence: Synthetic oligonucleotide
aaacaacucuuagcacagu

SEQ ID NO: 388254 - RNA, 19 nt, Artificial Sequence
  Description of Artificial Sequence: Synthetic oligonucleotide
cacucagguaugucuugac

SEQ ID NO: 388255 - RNA, 19 nt, Artificial Sequence
  Description of Artificial Sequence: Synthetic oligonucleotide
gcaguuggcgcaccugccg

SEQ ID NO: 388256 - RNA, 19 nt, Artificial Sequence
  Description of Artificial Sequence: Synthetic oligonucleotide
gaaggcaaccaaagagguc

SEQ ID NO: 388257 - RNA, 19 nt, Artificial Sequence
  Description of Artificial Sequence: Synthetic oligonucleotide
uucucacauacaugaugua

SEQ ID NO: 388258 - RNA, 19 nt, Artificial Sequence
  Description of Artificial Sequence: Synthetic oligonucleotide
auucggcacugcuuaggga

SEQ ID NO: 388259 - RNA, 19 nt, Artificial Sequence
  Description of Artificial Sequence: Synthetic oligonucleotide
gagaggugaacuugcaauu

SEQ ID NO: 388260 - RNA, 19 nt, Artificial Sequence
  Description of Artificial Sequence: Synthetic oligonucleotide
cagguauuccucucuggga

SEQ ID NO: 388261 - RNA, 19 nt, Artificial Sequence
  Description of Artificial Sequence: Synthetic oligonucleotide
gaugggaccaaggaaggau

SEQ ID NO: 388262 - RNA, 19 nt, Artificial Sequence
  Description of Artificial Sequence: Synthetic oligonucleotide
cucucuggcgaaggauucg

SEQ ID NO: 388263 - RNA, 19 nt, Artificial Sequence
  Description of Artificial Sequence: Synthetic oligonucleotide
caaggguacucaggacucg

SEQ ID NO: 388264 - RNA, 19 nt, Artificial Sequence
  Description of Artificial Sequence: Synthetic oligonucleotide
cacgcacacaaugcaugcg

SEQ ID NO: 388265 - RNA, 19 nt, Artificial Sequence
  Description of Artificial Sequence: Synthetic oligonucleotide
aggcauguugauaggagau

SEQ ID NO: 388266 - RNA, 19 nt, Artificial Sequence
  Description of Artificial Sequence: Synthetic oligonucleotide
cagacaaaccaaagucaga

SEQ ID NO: 388267 - RNA, 19 nt, Artificial Sequence
  Description of Artificial Sequence: Synthetic oligonucleotide
ugucuucgacuuuccgccu

SEQ ID NO: 388268 - RNA, 19 nt, Artificial Sequence
  Description of Artificial Sequence: Synthetic oligonucleotide
cccgcagagauucuucacc

SEQ ID NO: 388269 - RNA, 19 nt, Artificial Sequence
  Description of Artificial Sequence: Synthetic oligonucleotide
ugggaaguucaggucuucu

SEQ ID NO: 388270 - RNA, 19 nt, Artificial Sequence
  Description of Artificial Sequence: Synthetic oligonucleotide
gcuacuuugcacucccgga

SEQ ID NO: 388271 - RNA, 19 nt, Artificial Sequence
  Description of Artificial Sequence: Synthetic oligonucleotide
ccgcagagauucuucaccc

SEQ ID NO: 388272 - RNA, 19 nt, Artificial Sequence
  Description of Artificial Sequence: Synthetic oligonucleotide
caacaacuugauacagcca

SEQ ID NO: 388273 - RNA, 19 nt, Artificial Sequence
  Description of Artificial Sequence: Synthetic oligonucleotide
auggaacagcuugggagug

SEQ ID NO: 388274 - RNA, 19 nt, Artificial Sequence
  Description of Artificial Sequence: Synthetic oligonucleotide
ggcaccauaaguagaggca

SEQ ID NO: 388275 - RNA, 19 nt, Artificial Sequence
  Description of Artificial Sequence: Synthetic oligonucleotide
uggccucaagccucugaga

SEQ ID NO: 388276 - RNA, 19 nt, Artificial Sequence
  Description of Artificial Sequence: Synthetic oligonucleotide
gcauuacgcagguggacug

SEQ ID NO: 388277 - RNA, 19 nt, Artificial Sequence
  Description of Artificial Sequence: Synthetic oligonucleotide
guagaacucggggucucug

SEQ ID NO: 388278 - RNA, 19 nt, Artificial Sequence
  Description of Artificial Sequence: Synthetic oligonucleotide
gugccaacggucugagaca

SEQ ID NO: 388279 - RNA, 19 nt, Artificial Sequence
  Description of Artificial Sequence: Synthetic oligonucleotide
cuggcgaaggauucggaua

SEQ ID NO: 388280 - RNA, 19 nt, Artificial Sequence
  Description of Artificial Sequence: Synthetic oligonucleotide
uucacccgugcuccacaga

SEQ ID NO: 388281 - RNA, 19 nt, Artificial Sequence
  Description of Artificial Sequence: Synthetic oligonucleotide
agugcacauacugccaguu

SEQ ID NO: 388282 - RNA, 19 nt, Artificial Sequence
  Description of Artificial Sequence: Synthetic oligonucleotide
cucggaaugccugcacaac

SEQ ID NO: 388283 - RNA, 19 nt, Artificial Sequence
  Description of Artificial Sequence: Synthetic oligonucleotide
ugcuuuaggaugggaccaa

SEQ ID NO: 388284 - RNA, 19 nt, Artificial Sequence
  Description of Artificial Sequence: Synthetic oligonucleotide
uacagccaaugaugaucug

SEQ ID NO: 388285 - RNA, 19 nt, Artificial Sequence
  Description of Artificial Sequence: Synthetic oligonucleotide
ucaugcggccuggacgucu

SEQ ID NO: 388286 - RNA, 19 nt, Artificial Sequence
  Description of Artificial Sequence: Synthetic oligonucleotide
ggcacgcacacaaugcaug

SEQ ID NO: 388287 - RNA, 19 nt, Artificial Sequence
  Description of Artificial Sequence: Synthetic oligonucleotide
ugguuacagcugcucggaa

SEQ ID NO: 388288 - RNA, 19 nt, Artificial Sequence
  Description of Artificial Sequence: Synthetic oligonucleotide
ugcuauccucucccucaga

SEQ ID NO: 388289 - RNA, 19 nt, Artificial Sequence
  Description of Artificial Sequence: Synthetic oligonucleotide
cauggcaagggucaccggu

SEQ ID NO: 388290 - RNA, 19 nt, Artificial Sequence
  Description of Artificial Sequence: Synthetic oligonucleotide
ccaaggguacucaggacuc

SEQ ID NO: 388291 - RNA, 19 nt, Artificial Sequence
  Description of Artificial Sequence: Synthetic oligonucleotide
cuauugaaguccaccugcu

SEQ ID NO: 388292 - RNA, 19 nt, Artificial Sequence
  Description of Artificial Sequence: Synthetic oligonucleotide
agcuuaugagggguagggu

SEQ ID NO: 388293 - RNA, 19 nt, Artificial Sequence
  Description of Artificial Sequence: Synthetic oligonucleotide
gucugagacagcagcguca

SEQ ID NO: 388294 - RNA, 19 nt, Artificial Sequence
  Description of Artificial Sequence: Synthetic oligonucleotide
agaaggcuaugcagaacca

SEQ ID NO: 388295 - RNA, 19 nt, Artificial Sequence
  Description of Artificial Sequence: Synthetic oligonucleotide
caguguccgcugcaugaag

SEQ ID NO: 388296 - RNA, 19 nt, Artificial Sequence
  Description of Artificial Sequence: Synthetic oligonucleotide
cuguaacaauaaagcccug

SEQ ID NO: 388297 - RNA, 19 nt, Artificial Sequence
  Description of Artificial Sequence: Synthetic oligonucleotide
aagcgagcagugggcaaca

SEQ ID NO: 388298 - RNA, 19 nt, Artificial Sequence
  Description of Artificial Sequence: Synthetic oligonucleotide
ggauuccuucuugugccgg

SEQ ID NO: 388299 - RNA, 19 nt, Artificial Sequence
  Description of Artificial Sequence: Synthetic oligonucleotide
gcucagguauuccucucug

SEQ ID NO: 388300 - RNA, 19 nt, Artificial Sequence
  Description of Artificial Sequence: Synthetic oligonucleotide
cccaacugugaacugggac

SEQ ID NO: 388301 - RNA, 19 nt, Artificial Sequence
  Description of Artificial Sequence: Synthetic oligonucleotide
ucacggucccucagcuuuc

SEQ ID NO: 388302 - RNA, 19 nt, Artificial Sequence
  Description of Artificial Sequence: Synthetic oligonucleotide
cugugcuauccucucccuc

SEQ ID NO: 388303 - RNA, 19 nt, Artificial Sequence
  Description of Artificial Sequence: Synthetic oligonucleotide
ccaacugugaacugggacu

SEQ ID NO: 388304 - RNA, 19 nt, Artificial Sequence
  Description of Artificial Sequence: Synthetic oligonucleotide
ccucccaacugugaacugg

SEQ ID NO: 388305 - RNA, 19 nt, Artificial Sequence
  Description of Artificial Sequence: Synthetic oligonucleotide
gcgaauguagaggaaggca

SEQ ID NO: 388306 - RNA, 19 nt, Artificial Sequence
  Description of Artificial Sequence: Synthetic oligonucleotide
gcagugggcaacaacuuga

SEQ ID NO: 388307 - RNA, 19 nt, Artificial Sequence
  Description of Artificial Sequence: Synthetic oligonucleotide
agcgugucuggcaggggag

SEQ ID NO: 388308 - RNA, 19 nt, Artificial Sequence
  Description of Artificial Sequence: Synthetic oligonucleotide
agugggcaacaacuugaua

SEQ ID NO: 388309 - RNA, 19 nt, Artificial Sequence
  Description of Artificial Sequence: Synthetic oligonucleotide
ggugaacuugcaauuucuc

SEQ ID NO: 388310 - RNA, 19 nt, Artificial Sequence
  Description of Artificial Sequence: Synthetic oligonucleotide
auacugccaguuguacaca

SEQ ID NO: 388311 - RNA, 19 nt, Artificial Sequence
  Description of Artificial Sequence: Synthetic oligonucleotide
ccauaaguagaggcagugc

SEQ ID NO: 388312 - RNA, 19 nt, Artificial Sequence
  Description of Artificial Sequence: Synthetic oligonucleotide
caguucacuuggguccacc

SEQ ID NO: 388313 - RNA, 19 nt, Artificial Sequence
  Description of Artificial Sequence: Synthetic oligonucleotide
guaccugguaagagggguc

SEQ ID NO: 388314 - RNA, 19 nt, Artificial Sequence
  Description of Artificial Sequence: Synthetic oligonucleotide
agaaaagauuucagcugua

SEQ ID NO: 388315 - RNA, 19 nt, Artificial Sequence
  Description of Artificial Sequence: Synthetic oligonucleotide
augggaccaaggaaggauu

SEQ ID NO: 388316 - RNA, 19 nt, Artificial Sequence
  Description of Artificial Sequence: Synthetic oligonucleotide
gagggguaggguacuggga

SEQ ID NO: 388317 - RNA, 19 nt, Artificial Sequence
  Description of Artificial Sequence: Synthetic oligonucleotide
caacugugaacugggacua

SEQ ID NO: 388318 - RNA, 19 nt, Artificial Sequence
  Description of Artificial Sequence: Synthetic oligonucleotide
acaguucacuuggguccac

SEQ ID NO: 388319 - RNA, 19 nt, Artificial Sequence
  Description of Artificial Sequence: Synthetic oligonucleotide
guaacauucggcacugcuu

SEQ ID NO: 388320 - RNA, 19 nt, Artificial Sequence
  Description of Artificial Sequence: Synthetic oligonucleotide
aggaaccaagcugcugaca

SEQ ID NO: 388321 - RNA, 19 nt, Artificial Sequence
  Description of Artificial Sequence: Synthetic oligonucleotide
gggaccaaggaaggauucc

SEQ ID NO: 388322 - RNA, 19 nt, Artificial Sequence
  Description of Artificial Sequence: Synthetic oligonucleotide
cucacggucccucagcuuu

SEQ ID NO: 388323 - RNA, 19 nt, Artificial Sequence
  Description of Artificial Sequence: Synthetic oligonucleotide
ggauaaggucauacagcug

SEQ ID NO: 388324 - RNA, 19 nt, Artificial Sequence
  Description of Artificial Sequence: Synthetic oligonucleotide
ccugccggcaguaguuagc

SEQ ID NO: 388325 - RNA, 19 nt, Artificial Sequence
  Description of Artificial Sequence: Synthetic oligonucleotide
cacccgugcuccacagaac

SEQ ID NO: 388326 - RNA, 19 nt, Artificial Sequence
  Description of Artificial Sequence: Synthetic oligonucleotide
cuggacuaugucacugucu

SEQ ID NO: 388327 - RNA, 19 nt, Artificial Sequence
  Description of Artificial Sequence: Synthetic oligonucleotide
ggcuacuagauggcagcag

SEQ ID NO: 388328 - RNA, 19 nt, Artificial Sequence
  Description of Artificial Sequence: Synthetic oligonucleotide
caguuguacacagacuggu

SEQ ID NO: 388329 - RNA, 19 nt, Artificial Sequence
  Description of Artificial Sequence: Synthetic oligonucleotide
gcagagauucuucacccgu

SEQ ID NO: 388330 - RNA, 19 nt, Artificial Sequence
  Description of Artificial Sequence: Synthetic oligonucleotide
gacgucuauugaaguccac

SEQ ID NO: 388331 - RNA, 19 nt, Artificial Sequence
  Description of Artificial Sequence: Synthetic oligonucleotide
gcgcaauggauaaaagcga

SEQ ID NO: 388332 - RNA, 19 nt, Artificial Sequence
  Description of Artificial Sequence: Synthetic oligonucleotide
ggacucggcaccauaagua

SEQ ID NO: 388333 - RNA, 19 nt, Artificial Sequence
  Description of Artificial Sequence: Synthetic oligonucleotide
guacacagacugguauguc

SEQ ID NO: 388334 - RNA, 19 nt, Artificial Sequence
  Description of Artificial Sequence: Synthetic oligonucleotide
gcaugcgcaauggauaaaa

SEQ ID NO: 388335 - RNA, 19 nt, Artificial Sequence
  Description of Artificial Sequence: Synthetic oligonucleotide
guacaacugcacucaggua

SEQ ID NO: 388336 - RNA, 19 nt, Artificial Sequence
  Description of Artificial Sequence: Synthetic oligonucleotide
cugcucggaaugccugcac

SEQ ID NO: 388337 - RNA, 19 nt, Artificial Sequence
  Description of Artificial Sequence: Synthetic oligonucleotide
cacaguucacuugggucca

SEQ ID NO: 388338 - RNA, 19 nt, Artificial Sequence
  Description of Artificial Sequence: Synthetic oligonucleotide
gaguaacauucggcacugc

SEQ ID NO: 388339 - RNA, 19 nt, Artificial Sequence
  Description of Artificial Sequence: Synthetic oligonucleotide
gggaaguucaggucuucua

SEQ ID NO: 388340 - RNA, 19 nt, Artificial Sequence
  Description of Artificial Sequence: Synthetic oligonucleotide
caagcauccacugccugcu

SEQ ID NO: 388341 - RNA, 19 nt, Artificial Sequence
  Description of Artificial Sequence: Synthetic oligonucleotide
ugcaugcgcaauggauaaa

SEQ ID NO: 388342 - RNA, 19 nt, Artificial Sequence
  Description of Artificial Sequence: Synthetic oligonucleotide
gguggacugcaagcuggcg

SEQ ID NO: 388343 - RNA, 19 nt, Artificial Sequence
  Description of Artificial Sequence: Synthetic oligonucleotide
gcucaugcggccuggacgu

SEQ ID NO: 388344 - RNA, 19 nt, Artificial Sequence
  Description of Artificial Sequence: Synthetic oligonucleotide
auggcaagggucaccggua

SEQ ID NO: 388345 - RNA, 19 nt, Artificial Sequence
  Description of Artificial Sequence: Synthetic oligonucleotide
agccguucuuugccacuga

SEQ ID NO: 388346 - RNA, 19 nt, Artificial Sequence
  Description of Artificial Sequence: Synthetic oligonucleotide
gggaguggaauugcucuuc

SEQ ID NO: 388347 - RNA, 19 nt, Artificial Sequence
  Description of Artificial Sequence: Synthetic oligonucleotide
ggacgucuauugaagucca

SEQ ID NO: 388348 - RNA, 19 nt, Artificial Sequence
  Description of Artificial Sequence: Synthetic oligonucleotide
cucuggcgaaggauucgga

SEQ ID NO: 388349 - RNA, 19 nt, Artificial Sequence
  Description of Artificial Sequence: Synthetic oligonucleotide
gcgagcagugggcaacaac

SEQ ID NO: 388350 - RNA, 19 nt, Artificial Sequence
  Description of Artificial Sequence: Synthetic oligonucleotide
ggcauuacgcagguggacu

SEQ ID NO: 388351 - RNA, 19 nt, Artificial Sequence
  Description of Artificial Sequence: Synthetic oligonucleotide
caccauaaguagaggcagu

SEQ ID NO: 388352 - RNA, 19 nt, Artificial Sequence
  Description of Artificial Sequence: Synthetic oligonucleotide
caguucccuuucaggguca

SEQ ID NO: 388353 - RNA, 19 nt, Artificial Sequence
  Description of Artificial Sequence: Synthetic oligonucleotide
aggacccgcagagauucuu

SEQ ID NO: 388354 - RNA, 19 nt, Artificial Sequence
  Description of Artificial Sequence: Synthetic oligonucleotide
cuagccguucuuugccacu

SEQ ID NO: 388355 - RNA, 19 nt, Artificial Sequence
  Description of Artificial Sequence: Synthetic oligonucleotide
ggaccaaggaaggauuccu

SEQ ID NO: 388356 - RNA, 19 nt, Artificial Sequence
  Description of Artificial Sequence: Synthetic oligonucleotide
guuggcgcaccugccggca

SEQ ID NO: 388357 - RNA, 19 nt, Artificial Sequence
  Description of Artificial Sequence: Synthetic oligonucleotide
cgaauguagaggaaggcau

SEQ ID NO: 388358 - RNA, 19 nt, Artificial Sequence
  Description of Artificial Sequence: Synthetic oligonucleotide
uugugccggcagacucuaa

SEQ ID NO: 388359 - RNA, 19 nt, Artificial Sequence
  Description of Artificial Sequence: Synthetic oligonucleotide
cgucuauugaaguccaccu

SEQ ID NO: 388360 - RNA, 19 nt, Artificial Sequence
  Description of Artificial Sequence: Synthetic oligonucleotide
guaagagggguccccucuu

SEQ ID NO: 388361 - RNA, 19 nt, Artificial Sequence
  Description of Artificial Sequence: Synthetic oligonucleotide
gauugguacuggacaguuu

SEQ ID NO: 388362 - RNA, 19 nt, Artificial Sequence
  Description of Artificial Sequence: Synthetic oligonucleotide
cagcgucagggcacgcaca

SEQ ID NO: 388363 - RNA, 19 nt, Artificial Sequence
  Description of Artificial Sequence: Synthetic oligonucleotide
ggacccgcagagauucuuc

SEQ ID NO: 388364 - RNA, 19 nt, Artificial Sequence
  Description of Artificial Sequence: Synthetic oligonucleotide
ugccggcaguaguuagcua

SEQ ID NO: 388365 - RNA, 19 nt, Artificial Sequence
  Description of Artificial Sequence: Synthetic oligonucleotide
ccucgauggaaccaagggu

SEQ ID NO: 388366 - RNA, 19 nt, Artificial Sequence
  Description of Artificial Sequence: Synthetic oligonucleotide
ggaugggaccaaggaagga

SEQ ID NO: 388367 - RNA, 19 nt, Artificial Sequence
  Description of Artificial Sequence: Synthetic oligonucleotide
ucaccgguauaggcucauu

SEQ ID NO: 388368 - RNA, 19 nt, Artificial Sequence
  Description of Artificial Sequence: Synthetic oligonucleotide
cugccggcaguaguuagcu

SEQ ID NO: 388369 - RNA, 19 nt, Artificial Sequence
  Description of Artificial Sequence: Synthetic oligonucleotide
gagcagugggcaacaacuu

SEQ ID NO: 388370 - RNA, 19 nt, Artificial Sequence
  Description of Artificial Sequence: Synthetic oligonucleotide
cacucccggagaaaagauu

SEQ ID NO: 388371 - RNA, 19 nt, Artificial Sequence
  Description of Artificial Sequence: Synthetic oligonucleotide
ccaccauccucuugaguaa

SEQ ID NO: 388372 - RNA, 19 nt, Artificial Sequence
  Description of Artificial Sequence: Synthetic oligonucleotide
gcgaaggauucggauaugu

SEQ ID NO: 388373 - RNA, 19 nt, Artificial Sequence
  Description of Artificial Sequence: Synthetic oligonucleotide
caccguggcuucagccaga

SEQ ID NO: 388374 - RNA, 19 nt, Artificial Sequence
  Description of Artificial Sequence: Synthetic oligonucleotide
gucuucgacuuuccgccuu

SEQ ID NO: 388375 - RNA, 19 nt, Artificial Sequence
  Description of Artificial Sequence: Synthetic oligonucleotide
ccggcagacucuaaugagu

SEQ ID NO: 388376 - RNA, 19 nt, Artificial Sequence
  Description of Artificial Sequence: Synthetic oligonucleotide
ggcgaaggauucggauaug

SEQ ID NO: 388377 - RNA, 19 nt, Artificial Sequence
  Description of Artificial Sequence: Synthetic oligonucleotide
ccuggacgucuauugaagu

SEQ ID NO: 388378 - RNA, 19 nt, Artificial Sequence
  Description of Artificial Sequence: Synthetic oligonucleotide
gccaucccgguaugccuuc

SEQ ID NO: 388379 - RNA, 19 nt, Artificial Sequence
  Description of Artificial Sequence: Synthetic oligonucleotide
ccgagagagcuggucuuug

SEQ ID NO: 388380 - RNA, 19 nt, Artificial Sequence
  Description of Artificial Sequence: Synthetic oligonucleotide
agggcagaacagggaugaa

SEQ ID NO: 388381 - RNA, 19 nt, Artificial Sequence
  Description of Artificial Sequence: Synthetic oligonucleotide
cggcagacucuaaugagua

SEQ ID NO: 388382 - RNA, 19 nt, Artificial Sequence
  Description of Artificial Sequence: Synthetic oligonucleotide
cugugagagaggguagauu

SEQ ID NO: 388383 - RNA, 19 nt, Artificial Sequence
  Description of Artificial Sequence: Synthetic oligonucleotide
agcgagcagugggcaacaa

SEQ ID NO: 388384 - RNA, 19 nt, Artificial Sequence
  Description of Artificial Sequence: Synthetic oligonucleotide
gcauccuguugcuauccuu

SEQ ID NO: 388385 - RNA, 19 nt, Artificial Sequence
  Description of Artificial Sequence: Synthetic oligonucleotide
ggucaccgguauaggcuca

SEQ ID NO: 388386 - RNA, 19 nt, Artificial Sequence
  Description of Artificial Sequence: Synthetic oligonucleotide
augcggccuggacgucuau

SEQ ID NO: 388387 - RNA, 19 nt, Artificial Sequence
  Description of Artificial Sequence: Synthetic oligonucleotide
ggcaagggucaccgguaua

SEQ ID NO: 388388 - RNA, 19 nt, Artificial Sequence
  Description of Artificial Sequence: Synthetic oligonucleotide
ccgguauaggcucauucuu

SEQ ID NO: 388389 - RNA, 19 nt, Artificial Sequence
  Description of Artificial Sequence: Synthetic oligonucleotide
caccugccggcaguaguua

SEQ ID NO: 388390 - RNA, 19 nt, Artificial Sequence
  Description of Artificial Sequence: Synthetic oligonucleotide
gucaccgguauaggcucau

SEQ ID NO: 388391 - RNA, 19 nt, Artificial Sequence
  Description of Artificial Sequence: Synthetic oligonucleotide
gccaacggucugagacagc

SEQ ID NO: 388392 - RNA, 19 nt, Artificial Sequence
  Description of Artificial Sequence: Synthetic oligonucleotide
gucagggcacgcacacaau

SEQ ID NO: 388393 - RNA, 19 nt, Artificial Sequence
  Description of Artificial Sequence: Synthetic oligonucleotide
gaacggcugcagacaccgu

SEQ ID NO: 388394 - RNA, 19 nt, Artificial Sequence
  Description of Artificial Sequence: Synthetic oligonucleotide
gggcacgcacacaaugcau

SEQ ID NO: 388395 - RNA, 19 nt, Artificial Sequence
  Description of Artificial Sequence: Synthetic oligonucleotide
cgaaggauucggauauguu

SEQ ID NO: 388396 - RNA, 19 nt, Artificial Sequence
  Description of Artificial Sequence: Synthetic oligonucleotide
cggaaugccugcacaacuu

SEQ ID NO: 388397 - RNA, 19 nt, Artificial Sequence
  Description of Artificial Sequence: Synthetic oligonucleotide
gcgcaccugccggcaguag

SEQ ID NO: 388398 - RNA, 19 nt, Artificial Sequence
  Description of Artificial Sequence: Synthetic oligonucleotide
cgcaccugccggcaguagu

SEQ ID NO: 388399 - RNA, 19 nt, Artificial Sequence
  Description of Artificial Sequence: Synthetic oligonucleotide
cgauggaaccaaggguacu

SEQ ID NO: 388400 - RNA, 19 nt, Artificial Sequence
  Description of Artificial Sequence: Synthetic oligonucleotide
ccgcugcaugaagcuuaug

SEQ ID NO: 388401 - RNA, 19 nt, Artificial Sequence
  Description of Artificial Sequence: Synthetic oligonucleotide
  modified_base (1)..(1): a, c, u, g, unknown or other
  modified_base (5)..(5): a, c, u, g, unknown or other
naaanaaaaguaauuaggg

SEQ ID NO: 388402 - RNA, 19 nt, Artificial Sequence
  Description of Artificial Sequence: Synthetic oligonucleotide
  modified_base (1)..(1): a, c, u, g, unknown or other
  modified_base (5)..(5): a, c, u, g, unknown or other
  modified_base (9)..(9): a, c, u, g, unknown or other
  modified_base (13)..(13): a, c, u, g, unknown or other
naaanaaanaaanaaaagu

SEQ ID NO: 388403 - RNA, 19 nt, Artificial Sequence
  Description of Artificial Sequence: Synthetic oligonucleotide
  modified_base (1)..(1): a, c, u, g, unknown or other
  modified_base (5)..(5): a, c, u, g, unknown or other
  modified_base (9)..(9): a, c, u, g, unknown or other
  modified_base (13)..(13): a, c, u, g, unknown or other
  modified_base (17)..(17): a, c, u, g, unknown or other
naaanaaanaaanaaanaa

SEQ ID NO: 388404 - RNA, 19 nt, Artificial Sequence
  Description of Artificial Sequence: Synthetic oligonucleotide
  modified_base (1)..(1): a, c, u, g, unknown or other
  modified_base (5)..(5): a, c, u, g, unknown or other
  modified_base (9)..(9): a, c, u, g, unknown or other
naaanaaanaaaaguaauu

SEQ ID NO: 388405 - RNA, 19 nt, Artificial Sequence
  Description of Artificial Sequence: Synthetic oligonucleotide
aauggcauguuccacagug

SEQ ID NO: 388406 - RNA, 19 nt, Artificial Sequence
  Description of Artificial Sequence: Synthetic oligonucleotide
uucucgaaaagaaucaaug

SEQ ID NO: 388407 - RNA, 19 nt, Artificial Sequence
  Description of Artificial Sequence: Synthetic oligonucleotide
ucucgaaaagaaucaaugg

SEQ ID NO: 388408 - RNA, 19 nt, Artificial Sequence
  Description of Artificial Sequence: Synthetic oligonucleotide
ugcggcaaaacucagaagu

SEQ ID NO: 388409 - RNA, 19 nt, Artificial Sequence
  Description of Artificial Sequence: Synthetic oligonucleotide
aucgauggccaucuuaucc

SEQ ID NO: 388410 - RNA, 19 nt, Artificial Sequence
  Description of Artificial Sequence: Synthetic oligonucleotide
aacgcuuuuccuuggcagc

SEQ ID NO: 388411 - RNA, 19 nt, Artificial Sequence
  Description of Artificial Sequence: Synthetic oligonucleotide
ucaaucuuaacaucgggcu

SEQ ID NO: 388412 - RNA, 19 nt, Artificial Sequence
  Description of Artificial Sequence: Synthetic oligonucleotide
agaaucaauggcauguucc

SEQ ID NO: 388413 - RNA, 19 nt, Artificial Sequence
  Description of Artificial Sequence: Synthetic oligonucleotide
auauccauguucucuacuc

SEQ ID NO: 388414 - RNA, 19 nt, Artificial Sequence
  Description of Artificial Sequence: Synthetic oligonucleotide
uuaacaucgggcuuguaac

SEQ ID NO: 388415 - RNA, 19 nt, Artificial Sequence
  Description of Artificial Sequence: Synthetic oligonucleotide
aaacgcuuuuccuuggcag

SEQ ID NO: 388416 - RNA, 19 nt, Artificial Sequence
  Description of Artificial Sequence: Synthetic oligonucleotide
acuauacagguccugucgc

SEQ ID NO: 388417 - RNA, 19 nt, Artificial Sequence
  Description of Artificial Sequence: Synthetic oligonucleotide
cuguacuuaucaucgaugg

SEQ ID NO: 388418 - RNA, 19 nt, Artificial Sequence
  Description of Artificial Sequence: Synthetic oligonucleotide
aguaucaucugaugguggg

SEQ ID NO: 388419 - RNA, 19 nt, Artificial Sequence
  Description of Artificial Sequence: Synthetic oligonucleotide
uuauugggagccuucaccc

SEQ ID NO: 388420 - RNA, 19 nt, Artificial Sequence
  Description of Artificial Sequence: Synthetic oligonucleotide
guacuuaucaucgauggcc

SEQ ID NO: 388421 - RNA, 19 nt, Artificial Sequence
  Description of Artificial Sequence: Synthetic oligonucleotide
aaucuuaacaucgggcuug

SEQ ID NO: 388422 - RNA, 19 nt, Artificial Sequence
  Description of Artificial Sequence: Synthetic oligonucleotide
cuuauugggagccuucacc

SEQ ID NO: 388423 - RNA, 19 nt, Artificial Sequence
  Description of Artificial Sequence: Synthetic oligonucleotide
cucgaguaucaucugaugg

SEQ ID NO: 388424 - RNA, 19 nt, Artificial Sequence
  Description of Artificial Sequence: Synthetic oligonucleotide
guagccguaacuuggcccg

SEQ ID NO: 388425 - RNA, 19 nt, Artificial Sequence
  Description of Artificial Sequence: Synthetic oligonucleotide
aauguacggcgucuucugg

SEQ ID NO: 388426 - RNA, 19 nt, Artificial Sequence
  Description of Artificial Sequence: Synthetic oligonucleotide
gaggguaaggaccacaguc

SEQ ID NO: 388427 - RNA, 19 nt, Artificial Sequence
  Description of Artificial Sequence: Synthetic oligonucleotide
gaaggaauguggccgcucg

SEQ ID NO: 388428 - RNA, 19 nt, Artificial Sequence
  Description of Artificial Sequence: Synthetic oligonucleotide
uugacuucguucgcgaccg

SEQ ID NO: 388429 - RNA, 19 nt, Artificial Sequence
  Description of Artificial Sequence: Synthetic oligonucleotide
caaacggaaggaauguggc

SEQ ID NO: 388430 - RNA, 19 nt, Artificial Sequence
  Description of Artificial Sequence: Synthetic oligonucleotide
agucccgugcacuauacag

SEQ ID NO: 388431 - RNA, 19 nt, Artificial Sequence
  Description of Artificial Sequence: Synthetic oligonucleotide
cacuauacagguccugucg

SEQ ID NO: 388432 - RNA, 19 nt, Artificial Sequence
  Description of Artificial Sequence: Synthetic oligonucleotide
uacuuaucaucgauggcca

SEQ ID NO: 388433 - RNA, 19 nt, Artificial Sequence
  Description of Artificial Sequence: Synthetic oligonucleotide
uguagccguaacuuggccc

SEQ ID NO: 388434 - RNA, 19 nt, Artificial Sequence
  Description of Artificial Sequence: Synthetic oligonucleotide
auugggagccuucacccgg

SEQ ID NO: 388435 - RNA, 19 nt, Artificial Sequence
  Description of Artificial Sequence: Synthetic oligonucleotide
ugacgaggcaucuccagag

SEQ ID NO: 388436 - RNA, 19 nt, Artificial Sequence
  Description of Artificial Sequence: Synthetic oligonucleotide
aggggcguaucacuggagc

SEQ ID NO: 388437 - RNA, 19 nt, Artificial Sequence
  Description of Artificial Sequence: Synthetic oligonucleotide
ugcaacacuccuuuguccu

SEQ ID NO: 388438 - RNA, 19 nt, Artificial Sequence
  Description of Artificial Sequence: Synthetic oligonucleotide
ucucgucuucugcauacgg

SEQ ID NO: 388439 - RNA, 19 nt, Artificial Sequence
  Description of Artificial Sequence: Synthetic oligonucleotide
gcucacaccaaauucuugg

SEQ ID NO: 388440 - RNA, 19 nt, Artificial Sequence
  Description of Artificial Sequence: Synthetic oligonucleotide
uauacagguccugucgccg

SEQ ID NO: 388441 - RNA, 19 nt, Artificial Sequence
  Description of Artificial Sequence: Synthetic oligonucleotide
ggcuuagguacucagaggc

SEQ ID NO: 388442 - RNA, 19 nt, Artificial Sequence
  Description of Artificial Sequence: Synthetic oligonucleotide
ucgaugcuaagugacgagg

SEQ ID NO: 388443 - RNA, 19 nt, Artificial Sequence
  Description of Artificial Sequence: Synthetic oligonucleotide
ggagcaaugccacagugcc

SEQ ID NO: 388444 - RNA, 19 nt, Artificial Sequence
  Description of Artificial Sequence: Synthetic oligonucleotide
ucagagacugagccuguag

SEQ ID NO: 388445 - RNA, 19 nt, Artificial Sequence
  Description of Artificial Sequence: Synthetic oligonucleotide
uuagguacucagaggcaag

SEQ ID NO: 388446 - RNA, 19 nt, Artificial Sequence
  Description of Artificial Sequence: Synthetic oligonucleotide
cauugaacacaauggcccc

SEQ ID NO: 388447 - RNA, 19 nt, Artificial Sequence
  Description of Artificial Sequence: Synthetic oligonucleotide
aauucuugguccaucuccu

SEQ ID NO: 388448 - RNA, 19 nt, Artificial Sequence
  Description of Artificial Sequence: Synthetic oligonucleotide
guaaggaccacagucuccc

SEQ ID NO: 388449 - RNA, 19 nt, Artificial Sequence
  Description of Artificial Sequence: Synthetic oligonucleotide
auauuuggccaggauagag

SEQ ID NO: 388450 - RNA, 19 nt, Artificial Sequence
  Description of Artificial Sequence: Synthetic oligonucleotide
aaguccauaagcuccucuu

SEQ ID NO: 388451 - RNA, 19 nt, Artificial Sequence
  Description of Artificial Sequence: Synthetic oligonucleotide
agguugacggugcuccagc

SEQ ID NO: 388452 - RNA, 19 nt, Artificial Sequence
  Description of Artificial Sequence: Synthetic oligonucleotide
auguacggcgucuucuggg

SEQ ID NO: 388453 - RNA, 19 nt, Artificial Sequence
  Description of Artificial Sequence: Synthetic oligonucleotide
uauugggagccuucacccg

SEQ ID NO: 388454 - RNA, 19 nt, Artificial Sequence
  Description of Artificial Sequence: Synthetic oligonucleotide
uaacaucgggcuuguaacc

SEQ ID NO: 388455 - RNA, 19 nt, Artificial Sequence
  Description of Artificial Sequence: Synthetic oligonucleotide
gaacccuucccguggaagc

SEQ ID NO: 388456 - RNA, 19 nt, Artificial Sequence
  Description of Artificial Sequence: Synthetic oligonucleotide
ucguccacauacucaaucu

SEQ ID NO: 388457 - RNA, 19 nt, Artificial Sequence
  Description of Artificial Sequence: Synthetic oligonucleotide
gcauugaacacaauggccc

SEQ ID NO: 388458 - RNA, 19 nt, Artificial Sequence
  Description of Artificial Sequence: Synthetic oligonucleotide
cacgaugggcuccucaucc

SEQ ID NO: 388459 - RNA, 19 nt, Artificial Sequence
  Description of Artificial Sequence: Synthetic oligonucleotide
ucggauuuucuucacccuc

SEQ ID NO: 388460 - RNA, 19 nt, Artificial Sequence
  Description of Artificial Sequence: Synthetic oligonucleotide
uacucgaguaucaucugau

SEQ ID NO: 388461 - RNA, 19 nt, Artificial Sequence
  Description of Artificial Sequence: Synthetic oligonucleotide
caacuuugcacggaguuug

SEQ ID NO: 388462 - RNA, 19 nt, Artificial Sequence
  Description of Artificial Sequence: Synthetic oligonucleotide
cauagguagggaucucccc

SEQ ID NO: 388463 - RNA, 19 nt, Artificial Sequence
  Description of Artificial Sequence: Synthetic oligonucleotide
ugagggcagugacuuauug

SEQ ID NO: 388464 - RNA, 19 nt, Artificial Sequence
  Description of Artificial Sequence: Synthetic oligonucleotide
aucgcguuucucucgcuuc

SEQ ID NO: 388465 - RNA, 19 nt, Artificial Sequence
  Description of Artificial Sequence: Synthetic oligonucleotide
ccaaacggaaggaaugugg

SEQ ID NO: 388466 - RNA, 19 nt, Artificial Sequence
  Description of Artificial Sequence: Synthetic oligonucleotide
cuauacagguccugucgcc

SEQ ID NO: 388467 - RNA, 19 nt, Artificial Sequence
  Description of Artificial Sequence: Synthetic oligonucleotide
aacaucgggcuuguaacca

SEQ ID NO: 388468 - RNA, 19 nt, Artificial Sequence
  Description of Artificial Sequence: Synthetic oligonucleotide
guccccaagaggcagcaag

SEQ ID NO: 388469 - RNA, 19 nt, Artificial Sequence
  Description of Artificial Sequence: Synthetic oligonucleotide
gaguaucaucugauggugg

SEQ ID NO: 388470 - RNA, 19 nt, Artificial Sequence
  Description of Artificial Sequence: Synthetic oligonucleotide
gaugcuaagugacgaggca

SEQ ID NO: 388471 - RNA, 19 nt, Artificial Sequence
  Description of Artificial Sequence: Synthetic oligonucleotide
gucuucugcauacggcagg

SEQ ID NO: 388472 - RNA, 19 nt, Artificial Sequence
  Description of Artificial Sequence: Synthetic oligonucleotide
ucccgugcacuauacaggu

SEQ ID NO: 388473 - RNA, 19 nt, Artificial Sequence
  Description of Artificial Sequence: Synthetic oligonucleotide
ucuacucgaguaucaucug

SEQ ID NO: 388474 - RNA, 19 nt, Artificial Sequence
  Description of Artificial Sequence: Synthetic oligonucleotide
cucuacucgaguaucaucu

SEQ ID NO: 388475 - RNA, 19 nt, Artificial Sequence
  Description of Artificial Sequence: Synthetic oligonucleotide
gcauucaugcucuugccgc

SEQ ID NO: 388476 - RNA, 19 nt, Artificial Sequence
  Description of Artificial Sequence: Synthetic oligonucleotide
agcaaacgcuuuuccuugg

SEQ ID NO: 388477 - RNA, 19 nt, Artificial Sequence
  Description of Artificial Sequence: Synthetic oligonucleotide
ugcacuauacagguccugu

SEQ ID NO: 388478 - RNA, 19 nt, Artificial Sequence
  Description of Artificial Sequence: Synthetic oligonucleotide
cagcaaacgcuuuuccuug

SEQ ID NO: 388479 - RNA, 19 nt, Artificial Sequence
  Description of Artificial Sequence: Synthetic oligonucleotide
cuucauuuggugauggugu

SEQ ID NO: 388480 - RNA, 19 nt, Artificial Sequence
  Description of Artificial Sequence: Synthetic oligonucleotide
cacuagagugcucacacca

SEQ ID NO: 388481 - RNA, 19 nt, Artificial Sequence
  Description of Artificial Sequence: Synthetic oligonucleotide
acgcuggcgagacuccagc

SEQ ID NO: 388482 - RNA, 19 nt, Artificial Sequence
  Description of Artificial Sequence: Synthetic oligonucleotide
cuccucgaugcuaagugac

SEQ ID NO: 388483 - RNA, 19 nt, Artificial Sequence
  Description of Artificial Sequence: Synthetic oligonucleotide
ucuccucgaugcuaaguga

SEQ ID NO: 388484 - RNA, 19 nt, Artificial Sequence
  Description of Artificial Sequence: Synthetic oligonucleotide
gaugcaguacacagcugag

SEQ ID NO: 388485 - RNA, 19 nt, Artificial Sequence
  Description of Artificial Sequence: Synthetic oligonucleotide
uucgcgaccgugcgcgccg

SEQ ID NO: 388486 - RNA, 19 nt, Artificial Sequence
  Description of Artificial Sequence: Synthetic oligonucleotide
ugauauccauguucucuac

SEQ ID NO: 388487 - RNA, 19 nt, Artificial Sequence
  Description of Artificial Sequence: Synthetic oligonucleotide
acucgaguaucaucugaug

SEQ ID NO: 388488 - RNA, 19 nt, Artificial Sequence
  Description of Artificial Sequence: Synthetic oligonucleotide
aaagaaucaauggcauguu

SEQ ID NO: 388489 - RNA, 19 nt, Artificial Sequence
  Description of Artificial Sequence: Synthetic oligonucleotide
cucaccgcugucucggagc

SEQ ID NO: 388490 - RNA, 19 nt, Artificial Sequence
  Description of Artificial Sequence: Synthetic oligonucleotide
uauaucugggagggacagg

SEQ ID NO: 388491 - RNA, 19 nt, Artificial Sequence
  Description of Artificial Sequence: Synthetic oligonucleotide
guaucaucugauggugggg

SEQ ID NO: 388492 - RNA, 19 nt, Artificial Sequence
  Description of Artificial Sequence: Synthetic oligonucleotide
ugacuuauugggagccuuc

SEQ ID NO: 388493 - RNA, 19 nt, Artificial Sequence
  Description of Artificial Sequence: Synthetic oligonucleotide
ucacgcugucgcaaggcca

SEQ ID NO: 388494 - RNA, 19 nt, Artificial Sequence
  Description of Artificial Sequence: Synthetic oligonucleotide
ucucuacucgaguaucauc

SEQ ID NO: 388495 - RNA, 19 nt, Artificial Sequence
  Description of Artificial Sequence: Synthetic oligonucleotide
uagagugcucacaccaaau

SEQ ID NO: 388496 - RNA, 19 nt, Artificial Sequence
  Description of Artificial Sequence: Synthetic oligonucleotide
cuucguucgcgaccgugcg

SEQ ID NO: 388497 - RNA, 19 nt, Artificial Sequence
  Description of Artificial Sequence: Synthetic oligonucleotide
ugagcacaauguacggcgu

SEQ ID NO: 388498 - RNA, 19 nt, Artificial Sequence
  Description of Artificial Sequence: Synthetic oligonucleotide
cucgaugcuaagugacgag

SEQ ID NO: 388499 - RNA, 19 nt, Artificial Sequence
  Description of Artificial Sequence: Synthetic oligonucleotide
uccgcuuccgucguucgcc

SEQ ID NO: 388500 - RNA, 19 nt, Artificial Sequence
  Description of Artificial Sequence: Synthetic oligonucleotide
acggaguuuguuggucucc

SEQ ID NO: 388501 - RNA, 19 nt, Artificial Sequence
  Description of Artificial Sequence: Synthetic oligonucleotide
agagugcucacaccaaauu

SEQ ID NO: 388502 - RNA, 19 nt, Artificial Sequence
  Description of Artificial Sequence: Synthetic oligonucleotide
cuaguuccgcuucaucuuc

SEQ ID NO: 388503 - RNA, 19 nt, Artificial Sequence
  Description of Artificial Sequence: Synthetic oligonucleotide
gucccgugcacuauacagg

SEQ ID NO: 388504 - RNA, 19 nt, Artificial Sequence
  Description of Artificial Sequence: Synthetic oligonucleotide
ccgugcacuauacaggucc

SEQ ID NO: 388505 - RNA, 19 nt, Artificial Sequence
  Description of Artificial Sequence: Synthetic oligonucleotide
gaacucggcgccgaccccg

SEQ ID NO: 388506 - RNA, 19 nt, Artificial Sequence
  Description of Artificial Sequence: Synthetic oligonucleotide
cuucccguggaagcggugg

SEQ ID NO: 388507 - RNA, 19 nt, Artificial Sequence
  Description of Artificial Sequence: Synthetic oligonucleotide
ugggcuacaggguccuucu

SEQ ID NO: 388508 - RNA, 19 nt, Artificial Sequence
  Description of Artificial Sequence: Synthetic oligonucleotide
agccuggauccaaaguccc

SEQ ID NO: 388509 - RNA, 19 nt, Artificial Sequence
  Description of Artificial Sequence: Synthetic oligonucleotide
gucaucgcguuucucucgc

SEQ ID NO: 388510 - RNA, 19 nt, Artificial Sequence
  Description of Artificial Sequence: Synthetic oligonucleotide
gacgaggcaucuccagagc

SEQ ID NO: 388511 - RNA, 19 nt, Artificial Sequence
  Description of Artificial Sequence: Synthetic oligonucleotide
uucauuuggugaugguguu

SEQ ID NO: 388512 - RNA, 19 nt, Artificial Sequence
  Description of Artificial Sequence: Synthetic oligonucleotide
cugucgcaaggccaugggg

SEQ ID NO: 388513 - RNA, 19 nt, Artificial Sequence
  Description of Artificial Sequence: Synthetic oligonucleotide
ucgcguuucucucgcuuca

SEQ ID NO: 388514 - RNA, 19 nt, Artificial Sequence
  Description of Artificial Sequence: Synthetic oligonucleotide
cacacucucgucuucugca

SEQ ID NO: 388515 - RNA, 19 nt, Artificial Sequence
  Description of Artificial Sequence: Synthetic oligonucleotide
ucucaccgcugucucggag

SEQ ID NO: 388516 - RNA, 19 nt, Artificial Sequence
  Description of Artificial Sequence: Synthetic oligonucleotide
cuggcgagacuccagcuuc

SEQ ID NO: 388517 - RNA, 19 nt, Artificial Sequence
  Description of Artificial Sequence: Synthetic oligonucleotide
cuuauccucgaugcaguac

SEQ ID NO: 388518 - RNA, 19 nt, Artificial Sequence
  Description of Artificial Sequence: Synthetic oligonucleotide
ugguguucgcauucaugcu

SEQ ID NO: 388519 - RNA, 19 nt, Artificial Sequence
  Description of Artificial Sequence: Synthetic oligonucleotide
cucgaugcaguacacagcu

SEQ ID NO: 388520 - RNA, 19 nt, Artificial Sequence
  Description of Artificial Sequence: Synthetic oligonucleotide
gguguucgcauucaugcuc

SEQ ID NO: 388521 - RNA, 19 nt, Artificial Sequence
  Description of Artificial Sequence: Synthetic oligonucleotide
agccuguagccguaacuug

SEQ ID NO: 388522 - RNA, 19 nt, Artificial Sequence
  Description of Artificial Sequence: Synthetic oligonucleotide
ccaacgugcggcaaaacuc

SEQ ID NO: 388523 - RNA, 19 nt, Artificial Sequence
  Description of Artificial Sequence: Synthetic oligonucleotide
uccccuucucgaaaagaau

SEQ ID NO: 388524 - RNA, 19 nt, Artificial Sequence
  Description of Artificial Sequence: Synthetic oligonucleotide
uccgcuugacuucguucgc

SEQ ID NO: 388525 - RNA, 19 nt, Artificial Sequence
  Description of Artificial Sequence: Synthetic oligonucleotide
uaucacuggagcucaucuu

SEQ ID NO: 388526 - RNA, 19 nt, Artificial Sequence
  Description of Artificial Sequence: Synthetic oligonucleotide
ggcuacaggguccuucucc

SEQ ID NO: 388527 - RNA, 19 nt, Artificial Sequence
  Description of Artificial Sequence: Synthetic oligonucleotide
agguggcuucauuugguga

SEQ ID NO: 388528 - RNA, 19 nt, Artificial Sequence
  Description of Artificial Sequence: Synthetic oligonucleotide
aagucccgugcacuauaca

SEQ ID NO: 388529 - RNA, 19 nt, Artificial Sequence
  Description of Artificial Sequence: Synthetic oligonucleotide
agcacaauguacggcgucu

SEQ ID NO: 388530 - RNA, 19 nt, Artificial Sequence
  Description of Artificial Sequence: Synthetic oligonucleotide
gguuucagccccaacuuug

SEQ ID NO: 388531 - RNA, 19 nt, Artificial Sequence
  Description of Artificial Sequence: Synthetic oligonucleotide
ccucuaguagcuuggcccg

SEQ ID NO: 388532 - RNA, 19 nt, Artificial Sequence
  Description of Artificial Sequence: Synthetic oligonucleotide
ugcauacggcagguagucg

SEQ ID NO: 388533 - RNA, 19 nt, Artificial Sequence
  Description of Artificial Sequence: Synthetic oligonucleotide
cuuagguacucagaggcaa

SEQ ID NO: 388534 - RNA, 19 nt, Artificial Sequence
  Description of Artificial Sequence: Synthetic oligonucleotide
uacggcgucuucugggccu

SEQ ID NO: 388535 - RNA, 19 nt, Artificial Sequence
  Description of Artificial Sequence: Synthetic oligonucleotide
auacggcagguagucgggc

SEQ ID NO: 388536 - RNA, 19 nt, Artificial Sequence
  Description of Artificial Sequence: Synthetic oligonucleotide
auugaccuccaaggguuuc

SEQ ID NO: 388537 - RNA, 19 nt, Artificial Sequence
  Description of Artificial Sequence: Synthetic oligonucleotide
guagccgucaucgcguuuc

SEQ ID NO: 388538 - RNA, 19 nt, Artificial Sequence
  Description of Artificial Sequence: Synthetic oligonucleotide
caagucccgugcacuauac

SEQ ID NO: 388539 - RNA, 19 nt, Artificial Sequence
  Description of Artificial Sequence: Synthetic oligonucleotide
cucggcuucggcccggcgc

SEQ ID NO: 388540 - RNA, 19 nt, Artificial Sequence
  Description of Artificial Sequence: Synthetic oligonucleotide
cauaagcuccucuugcucu

SEQ ID NO: 388541 - RNA, 19 nt, Artificial Sequence
  Description of Artificial Sequence: Synthetic oligonucleotide
agucaucugcccgcauuac

SEQ ID NO: 388542 - RNA, 19 nt, Artificial Sequence
  Description of Artificial Sequence: Synthetic oligonucleotide
ugccugaacccuucccgug

SEQ ID NO: 388543 - RNA, 19 nt, Artificial Sequence
  Description of Artificial Sequence: Synthetic oligonucleotide
uucguucgcgaccgugcgc

SEQ ID NO: 388544 - RNA, 19 nt, Artificial Sequence
  Description of Artificial Sequence: Synthetic oligonucleotide
cuccucuaguagcuuggcc

SEQ ID NO: 388545 - RNA, 19 nt, Artificial Sequence
  Description of Artificial Sequence: Synthetic oligonucleotide
cuacucgaguaucaucuga

SEQ ID NO: 388546 - RNA, 19 nt, Artificial Sequence
  Description of Artificial Sequence: Synthetic oligonucleotide
ggagucaguuuccugccug

SEQ ID NO: 388547 - RNA, 19 nt, Artificial Sequence
  Description of Artificial Sequence: Synthetic oligonucleotide
gucuucaucuugccugaac

SEQ ID NO: 388548 - RNA, 19 nt, Artificial Sequence
  Description of Artificial Sequence: Synthetic oligonucleotide
uggccgagcgcucuucauc

SEQ ID NO: 388549 - RNA, 19 nt, Artificial Sequence
  Description of Artificial Sequence: Synthetic oligonucleotide
uacggcagguagucgggcu

SEQ ID NO: 388550 - RNA, 19 nt, Artificial Sequence
  Description of Artificial Sequence: Synthetic oligonucleotide
gggacuuuauuuaauauau

SEQ ID NO: 388551 - RNA, 19 nt, Artificial Sequence
  Description of Artificial Sequence: Synthetic oligonucleotide
cuguagccguaacuuggcc

SEQ ID NO: 388552 - RNA, 19 nt, Artificial Sequence
  Description of Artificial Sequence: Synthetic oligonucleotide
ucuaguagcuuggcccgcu

SEQ ID NO: 388553 - RNA, 19 nt, Artificial Sequence
  Description of Artificial Sequence: Synthetic oligonucleotide
agcccuuuguucugacaca

SEQ ID NO: 388554 - RNA, 19 nt, Artificial Sequence
  Description of Artificial Sequence: Synthetic oligonucleotide
guagucgggcuucuucuuc

SEQ ID NO: 388555 - RNA, 19 nt, Artificial Sequence
  Description of Artificial Sequence: Synthetic oligonucleotide
caucugcccgcauuaccac

SEQ ID NO: 388556 - RNA, 19 nt, Artificial Sequence
  Description of Artificial Sequence: Synthetic oligonucleotide
cugucucguccacauacuc

SEQ ID NO: 388557 - RNA, 19 nt, Artificial Sequence
  Description of Artificial Sequence: Synthetic oligonucleotide
uggggacccugauggaaga

SEQ ID NO: 388558 - RNA, 19 nt, Artificial Sequence
  Description of Artificial Sequence: Synthetic oligonucleotide
aacgugcggcaaaacucag

SEQ ID NO: 388559 - RNA, 19 nt, Artificial Sequence
  Description of Artificial Sequence: Synthetic oligonucleotide
agagcuaguuuuggagcug

SEQ ID NO: 388560 - RNA, 19 nt, Artificial Sequence
  Description of Artificial Sequence: Synthetic oligonucleotide
gagcacaauguacggcguc

SEQ ID NO: 388561 - RNA, 19 nt, Artificial Sequence
  Description of Artificial Sequence: Synthetic oligonucleotide
gugacgaggcaucuccaga

SEQ ID NO: 388562 - RNA, 19 nt, Artificial Sequence
  Description of Artificial Sequence: Synthetic oligonucleotide
gacuucguucgcgaccgug

SEQ ID NO: 388563 - RNA, 19 nt, Artificial Sequence
  Description of Artificial Sequence: Synthetic oligonucleotide
auuggccgagcgcucuuca

SEQ ID NO: 388564 - RNA, 19 nt, Artificial Sequence
  Description of Artificial Sequence: Synthetic oligonucleotide
cuagagugcucacaccaaa

SEQ ID NO: 388565 - RNA, 19 nt, Artificial Sequence
  Description of Artificial Sequence: Synthetic oligonucleotide
gacggcgccccuucuccag

SEQ ID NO: 388566 - RNA, 19 nt, Artificial Sequence
  Description of Artificial Sequence: Synthetic oligonucleotide
ugcccgcauuaccaccucc

SEQ ID NO: 388567 - RNA, 19 nt, Artificial Sequence
  Description of Artificial Sequence: Synthetic oligonucleotide
ccucguagccgucaucgcg

SEQ ID NO: 388568 - RNA, 19 nt, Artificial Sequence
  Description of Artificial Sequence: Synthetic oligonucleotide
cugagucugguccccaaga

SEQ ID NO: 388569 - RNA, 19 nt, Artificial Sequence
  Description of Artificial Sequence: Synthetic oligonucleotide
gccugaacccuucccgugg

SEQ ID NO: 388570 - RNA, 19 nt, Artificial Sequence
  Description of Artificial Sequence: Synthetic oligonucleotide
uugcacggaguuuguuggu

SEQ ID NO: 388571 - RNA, 19 nt, Artificial Sequence
  Description of Artificial Sequence: Synthetic oligonucleotide
cuucacgcgccgcuccgag

SEQ ID NO: 388572 - RNA, 19 nt, Artificial Sequence
  Description of Artificial Sequence: Synthetic oligonucleotide
gugcggcaaaacucagaag

SEQ ID NO: 388573 - RNA, 19 nt, Artificial Sequence
  Description of Artificial Sequence: Synthetic oligonucleotide
aagugacgaggcaucucca

SEQ ID NO: 388574 - RNA, 19 nt, Artificial Sequence
  Description of Artificial Sequence: Synthetic oligonucleotide
caucgauggccaucuuauc

SEQ ID NO: 388575 - RNA, 19 nt, Artificial Sequence
  Description of Artificial Sequence: Synthetic oligonucleotide
guucgcauucaugcucuug

SEQ ID NO: 388576 - RNA, 19 nt, Artificial Sequence
  Description of Artificial Sequence: Synthetic oligonucleotide
acgcuuuuccuuggcagcu

SEQ ID NO: 388577 - RNA, 19 nt, Artificial Sequence
  Description of Artificial Sequence: Synthetic oligonucleotide
gguaaggaccacagucucc

SEQ ID NO: 388578 - RNA, 19 nt, Artificial Sequence
  Description of Artificial Sequence: Synthetic oligonucleotide
cuugaggguaaggaccaca

SEQ ID NO: 388579 - RNA, 19 nt, Artificial Sequence
  Description of Artificial Sequence: Synthetic oligonucleotide
uggcgagacuccagcuucu

SEQ ID NO: 388580 - RNA, 19 nt, Artificial Sequence
  Description of Artificial Sequence: Synthetic oligonucleotide
cacgcuggcgagacuccag

SEQ ID NO: 388581 - RNA, 19 nt, Artificial Sequence
  Description of Artificial Sequence: Synthetic oligonucleotide
cuucucgaaaagaaucaau

SEQ ID NO: 388582 - RNA, 19 nt, Artificial Sequence
  Description of Artificial Sequence: Synthetic oligonucleotide
ggguaaggaccacagucuc

SEQ ID NO: 388583 - RNA, 19 nt, Artificial Sequence
  Description of Artificial Sequence: Synthetic oligonucleotide
cuuccgucguucgccgccg

SEQ ID NO: 388584 - RNA, 19 nt, Artificial Sequence
  Description of Artificial Sequence: Synthetic oligonucleotide
acgcucucucaguccauca

SEQ ID NO: 388585 - RNA, 19 nt, Artificial Sequence
  Description of Artificial Sequence: Synthetic oligonucleotide
aucuuaacaucgggcuugu

SEQ ID NO: 388586 - RNA, 19 nt, Artificial Sequence
  Description of Artificial Sequence: Synthetic oligonucleotide
guacggcgucuucugggcc

SEQ ID NO: 388587 - RNA, 19 nt, Artificial Sequence
  Description of Artificial Sequence: Synthetic oligonucleotide
ccucgaugcaguacacagc

SEQ ID NO: 388588 - RNA, 19 nt, Artificial Sequence
  Description of Artificial Sequence: Synthetic oligonucleotide
gguugacggugcuccagcc

SEQ ID NO: 388589 - RNA, 19 nt, Artificial Sequence
  Description of Artificial Sequence: Synthetic oligonucleotide
ucaucuagccaggggucau

SEQ ID NO: 388590 - RNA, 19 nt, Artificial Sequence
  Description of Artificial Sequence: Synthetic oligonucleotide
gcguuucucucgcuucacg

SEQ ID NO: 388591 - RNA, 19 nt, Artificial Sequence
  Description of Artificial Sequence: Synthetic oligonucleotide
acuagagugcucacaccaa

SEQ ID NO: 388592 - RNA, 19 nt, Artificial Sequence
  Description of Artificial Sequence: Synthetic oligonucleotide
aggcugcggugucaucuag

SEQ ID NO: 388593 - RNA, 19 nt, Artificial Sequence
  Description of Artificial Sequence: Synthetic oligonucleotide
cugccggcuccucucaauc

SEQ ID NO: 388594 - RNA, 19 nt, Artificial Sequence
  Description of Artificial Sequence: Synthetic oligonucleotide
uucggcccggcgccucccg

SEQ ID NO: 388595 - RNA, 19 nt, Artificial Sequence
  Description of Artificial Sequence: Synthetic oligonucleotide
gucaucuagccagggguca

SEQ ID NO: 388596 - RNA, 19 nt, Artificial Sequence
  Description of Artificial Sequence: Synthetic oligonucleotide
cagguugacggugcuccag

SEQ ID NO: 388597 - RNA, 19 nt, Artificial Sequence
  Description of Artificial Sequence: Synthetic oligonucleotide
gcccuuuguucugacacag

SEQ ID NO: 388598 - RNA, 19 nt, Artificial Sequence
  Description of Artificial Sequence: Synthetic oligonucleotide
ccccuuacgcucagggucc

SEQ ID NO: 388599 - RNA, 19 nt, Artificial Sequence
  Description of Artificial Sequence: Synthetic oligonucleotide
auccauagguagggaucuc

SEQ ID NO: 388600 - RNA, 19 nt, Artificial Sequence
  Description of Artificial Sequence: Synthetic oligonucleotide
cacccgggccaccuuuugc

SEQ ID NO: 388601 - RNA, 19 nt, Artificial Sequence
  Description of Artificial Sequence: Synthetic oligonucleotide
uagccguaacuuggcccgg

SEQ ID NO: 388602 - RNA, 19 nt, Artificial Sequence
  Description of Artificial Sequence: Synthetic oligonucleotide
caagccggggcccuacaga

SEQ ID NO: 388603 - RNA, 19 nt, Artificial Sequence
  Description of Artificial Sequence: Synthetic oligonucleotide
cccuucucgaaaagaauca

SEQ ID NO: 388604 - RNA, 19 nt, Artificial Sequence
  Description of Artificial Sequence: Synthetic oligonucleotide
gcuuccgucguucgccgcc

SEQ ID NO: 388605 - RNA, 19 nt, Artificial Sequence
  Description of Artificial Sequence: Synthetic oligonucleotide
cucacaccaaauucuuggu

SEQ ID NO: 388606 - RNA, 19 nt, Artificial Sequence
  Description of Artificial Sequence: Synthetic oligonucleotide
cgcauucaugcucuugccg

SEQ ID NO: 388607 - RNA, 19 nt, Artificial Sequence
  Description of Artificial Sequence: Synthetic oligonucleotide
cugggcuacaggguccuuc

SEQ ID NO: 388608 - RNA, 19 nt, Artificial Sequence
  Description of Artificial Sequence: Synthetic oligonucleotide
uucacccgggccaccuuuu

SEQ ID NO: 388609 - RNA, 19 nt, Artificial Sequence
  Description of Artificial Sequence: Synthetic oligonucleotide
ucaucgcguuucucucgcu

SEQ ID NO: 388610 - RNA, 19 nt, Artificial Sequence
  Description of Artificial Sequence: Synthetic oligonucleotide
cggcaaaacucagaagugg

SEQ ID NO: 388611 - RNA, 19 nt, Artificial Sequence
  Description of Artificial Sequence: Synthetic oligonucleotide
cgaugcaguacacagcuga

SEQ ID NO: 388612 - RNA, 19 nt, Artificial Sequence
  Description of Artificial Sequence: Synthetic oligonucleotide
gcggcaaaacucagaagug

SEQ ID NO: 388613 - RNA, 19 nt, Artificial Sequence
  Description of Artificial Sequence: Synthetic oligonucleotide
gccgcugagcacaauguac

SEQ ID NO: 388614 - RNA, 19 nt, Artificial Sequence
  Description of Artificial Sequence: Synthetic oligonucleotide
gagccuguagccguaacuu

SEQ ID NO: 388615 - RNA, 19 nt, Artificial Sequence
  Description of Artificial Sequence: Synthetic oligonucleotide
cuccgcuuccgucguucgc

SEQ ID NO: 388616 - RNA, 19 nt, Artificial Sequence
  Description of Artificial Sequence: Synthetic oligonucleotide
cgaguaucaucugauggug

SEQ ID NO: 388617 - RNA, 19 nt, Artificial Sequence
  Description of Artificial Sequence: Synthetic oligonucleotide
uuggccgagcgcucuucau

SEQ ID NO: 388618 - RNA, 19 nt, Artificial Sequence
  Description of Artificial Sequence: Synthetic oligonucleotide
cacccugcuccaaacggaa

SEQ ID NO: 388619 - RNA, 19 nt, Artificial Sequence
  Description of Artificial Sequence: Synthetic oligonucleotide
ugacggugcuccagccaau

SEQ ID NO: 388620 - RNA, 19 nt, Artificial Sequence
  Description of Artificial Sequence: Synthetic oligonucleotide
gugcacuauacagguccug

SEQ ID NO: 388621 - RNA, 19 nt, Artificial Sequence
  Description of Artificial Sequence: Synthetic oligonucleotide
guguucgcauucaugcucu

SEQ ID NO: 388622 - RNA, 19 nt, Artificial Sequence
  Description of Artificial Sequence: Synthetic oligonucleotide
agacggcgccccuucucca

SEQ ID NO: 388623 - RNA, 19 nt, Artificial Sequence
  Description of Artificial Sequence: Synthetic oligonucleotide
aggcaagccggggcccuac

SEQ ID NO: 388624 - RNA, 19 nt, Artificial Sequence
  Description of Artificial Sequence: Synthetic oligonucleotide
ucacgcucucucaguccau

SEQ ID NO: 388625 - RNA, 19 nt, Artificial Sequence
  Description of Artificial Sequence: Synthetic oligonucleotide
cugauucagagccaccauu

SEQ ID NO: 388626 - RNA, 19 nt, Artificial Sequence
  Description of Artificial Sequence: Synthetic oligonucleotide
cacgcucucucaguccauc

SEQ ID NO: 388627 - RNA, 19 nt, Artificial Sequence
  Description of Artificial Sequence: Synthetic oligonucleotide
cugucucggagcugcugca

SEQ ID NO: 388628 - RNA, 19 nt, Artificial Sequence
  Description of Artificial Sequence: Synthetic oligonucleotide
ggcguaucacuggagcuca

SEQ ID NO: 388629 - RNA, 19 nt, Artificial Sequence
  Description of Artificial Sequence: Synthetic oligonucleotide
gcuugacuucguucgcgac

SEQ ID NO: 388630 - RNA, 19 nt, Artificial Sequence
  Description of Artificial Sequence: Synthetic oligonucleotide
gccgucaucgcguuucucu

SEQ ID NO: 388631 - RNA, 19 nt, Artificial Sequence
  Description of Artificial Sequence: Synthetic oligonucleotide
guucgcgaccgugcgcgcc

SEQ ID NO: 388632 - RNA, 19 nt, Artificial Sequence
  Description of Artificial Sequence: Synthetic oligonucleotide
ccgguugccagccaaucca

SEQ ID NO: 388633 - RNA, 19 nt, Artificial Sequence
  Description of Artificial Sequence: Synthetic oligonucleotide
cuccaaacggaaggaaugu

SEQ ID NO: 388634 - RNA, 19 nt, Artificial Sequence
  Description of Artificial Sequence: Synthetic oligonucleotide
gggcguaucacuggagcuc

SEQ ID NO: 388635 - RNA, 19 nt, Artificial Sequence
  Description of Artificial Sequence: Synthetic oligonucleotide
ucguagccgucaucgcguu

SEQ ID NO: 388636 - RNA, 19 nt, Artificial Sequence
  Description of Artificial Sequence: Synthetic oligonucleotide
gcuccgcuuccgucguucg

SEQ ID NO: 388637 - RNA, 19 nt, Artificial Sequence
  Description of Artificial Sequence: Synthetic oligonucleotide
acuuugcacggaguuuguu

SEQ ID NO: 388638 - RNA, 19 nt, Artificial Sequence
  Description of Artificial Sequence: Synthetic oligonucleotide
cauuggccgagcgcucuuc

SEQ ID NO: 388639 - RNA, 19 nt, Artificial Sequence
  Description of Artificial Sequence: Synthetic oligonucleotide
cgugcggcaaaacucagaa

SEQ ID NO: 388640 - RNA, 19 nt, Artificial Sequence
  Description of Artificial Sequence: Synthetic oligonucleotide
acgugcggcaaaacucaga

SEQ ID NO: 388641 - RNA, 19 nt, Artificial Sequence
  Description of Artificial Sequence: Synthetic oligonucleotide
ccgucaucgcguuucucuc

SEQ ID NO: 388642 - RNA, 19 nt, Artificial Sequence
  Description of Artificial Sequence: Synthetic oligonucleotide
ccgcauuaccaccuccuuc

SEQ ID NO: 388643 - RNA, 19 nt, Artificial Sequence
  Description of Artificial Sequence: Synthetic oligonucleotide
gcgggccucggcuucggcc

SEQ ID NO: 388644 - RNA, 19 nt, Artificial Sequence
  Description of Artificial Sequence: Synthetic oligonucleotide
ggccgagcgcucuucaucu

SEQ ID NO: 388645 - RNA, 19 nt, Artificial Sequence
  Description of Artificial Sequence: Synthetic oligonucleotide
gucgcaaggccaugggguu

SEQ ID NO: 388646 - RNA, 19 nt, Artificial Sequence
  Description of Artificial Sequence: Synthetic oligonucleotide
ccucgaugcuaagugacga

SEQ ID NO: 388647 - RNA, 19 nt, Artificial Sequence
  Description of Artificial Sequence: Synthetic oligonucleotide
ccgcuugacuucguucgcg

SEQ ID NO: 388648 - RNA, 19 nt, Artificial Sequence
  Description of Artificial Sequence: Synthetic oligonucleotide
gcccggaucucuucaagcu

SEQ ID NO: 388649 - RNA, 19 nt, Artificial Sequence
  Description of Artificial Sequence: Synthetic oligonucleotide
agccguaacuuggcccgga

SEQ ID NO: 388650 - RNA, 19 nt, Artificial Sequence
  Description of Artificial Sequence: Synthetic oligonucleotide
ugcccgccucuuucuugac

SEQ ID NO: 388651 - RNA, 19 nt, Artificial Sequence
  Description of Artificial Sequence: Synthetic oligonucleotide
ucuuaacaucgggcuugua

SEQ ID NO: 388652 - RNA, 19 nt, Artificial Sequence
  Description of Artificial Sequence: Synthetic oligonucleotide
cgcucucucaguccaucag

SEQ ID NO: 388653 - RNA, 19 nt, Artificial Sequence
  Description of Artificial Sequence: Synthetic oligonucleotide
cacucucgucuucugcaua

SEQ ID NO: 388654 - RNA, 19 nt, Artificial Sequence
  Description of Artificial Sequence: Synthetic oligonucleotide
gccggggcccuacagagcu

SEQ ID NO: 388655 - RNA, 19 nt, Artificial Sequence
  Description of Artificial Sequence: Synthetic oligonucleotide
ccgcuuccgucguucgccg

SEQ ID NO: 388656 - RNA, 19 nt, Artificial Sequence
  Description of Artificial Sequence: Synthetic oligonucleotide
ucccgccggcuguacuuau

SEQ ID NO: 388657 - RNA, 19 nt, Artificial Sequence
  Description of Artificial Sequence: Synthetic oligonucleotide
cugcccgcauuaccaccuc

SEQ ID NO: 388658 - RNA, 19 nt, Artificial Sequence
  Description of Artificial Sequence: Synthetic oligonucleotide
gcagacggcgccccuucuc

SEQ ID NO: 388659 - RNA, 19 nt, Artificial Sequence
  Description of Artificial Sequence: Synthetic oligonucleotide
ccucucaauccaggcugcg

SEQ ID NO: 388660 - RNA, 19 nt, Artificial Sequence
  Description of Artificial Sequence: Synthetic oligonucleotide
ccuucucgaaaagaaucaa

SEQ ID NO: 388661 - RNA, 19 nt, Artificial Sequence
  Description of Artificial Sequence: Synthetic oligonucleotide
ccaggggcguaucacugga

SEQ ID NO: 388662 - RNA, 19 nt, Artificial Sequence
  Description of Artificial Sequence: Synthetic oligonucleotide
ccguaacuuggcccggauc

SEQ ID NO: 388663 - RNA, 19 nt, Artificial Sequence
  Description of Artificial Sequence: Synthetic oligonucleotide
cuucggcccggcgccuccc

SEQ ID NO: 388664 - RNA, 19 nt, Artificial Sequence
  Description of Artificial Sequence: Synthetic oligonucleotide
cccaacgugcggcaaaacu

SEQ ID NO: 388665 - RNA, 19 nt, Artificial Sequence
  Description of Artificial Sequence: Synthetic oligonucleotide
caucgcguuucucucgcuu

SEQ ID NO: 388666 - RNA, 19 nt, Artificial Sequence
  Description of Artificial Sequence: Synthetic oligonucleotide
cgucguucgccgccgcugc

SEQ ID NO: 388667 - RNA, 19 nt, Artificial Sequence
  Description of Artificial Sequence: Synthetic oligonucleotide
guacacagcugagggcagu

SEQ ID NO: 388668 - RNA, 19 nt, Artificial Sequence
  Description of Artificial Sequence: Synthetic oligonucleotide
cauugaccuccaaggguuu

SEQ ID NO: 388669 - RNA, 19 nt, Artificial Sequence
  Description of Artificial Sequence: Synthetic oligonucleotide
gcuucggcccggcgccucc

SEQ ID NO: 388670 - RNA, 19 nt, Artificial Sequence
  Description of Artificial Sequence: Synthetic oligonucleotide
cuucacccgggccaccuuu

SEQ ID NO: 388671 - RNA, 19 nt, Artificial Sequence
  Description of Artificial Sequence: Synthetic oligonucleotide
ccugaacccuucccgugga

SEQ ID NO: 388672 - RNA, 19 nt, Artificial Sequence
  Description of Artificial Sequence: Synthetic oligonucleotide
ccgccgcucagucuucauc

SEQ ID NO: 388673 - RNA, 19 nt, Artificial Sequence
  Description of Artificial Sequence: Synthetic oligonucleotide
ggcgccccuucuccagcug

SEQ ID NO: 388674 - RNA, 19 nt, Artificial Sequence
  Description of Artificial Sequence: Synthetic oligonucleotide
cgcuugacuucguucgcga

SEQ ID NO: 388675 - RNA, 19 nt, Artificial Sequence
  Description of Artificial Sequence: Synthetic oligonucleotide
ccgucguucgccgccgcug

SEQ ID NO: 388676 - RNA, 19 nt, Artificial Sequence
  Description of Artificial Sequence: Synthetic oligonucleotide
cccgugcacuauacagguc

SEQ ID NO: 388677 - RNA, 19 nt, Artificial Sequence
  Description of Artificial Sequence: Synthetic oligonucleotide
ccuucccguggaagcggug

SEQ ID NO: 388678 - RNA, 19 nt, Artificial Sequence
  Description of Artificial Sequence: Synthetic oligonucleotide
ggcaagccggggcccuaca

SEQ ID NO: 388679 - RNA, 19 nt, Artificial Sequence
  Description of Artificial Sequence: Synthetic oligonucleotide
cuaguagcuuggcccgcuu

SEQ ID NO: 388680 - RNA, 19 nt, Artificial Sequence
  Description of Artificial Sequence: Synthetic oligonucleotide
cacagugcccaggggcgua

SEQ ID NO: 388681 - RNA, 19 nt, Artificial Sequence
  Description of Artificial Sequence: Synthetic oligonucleotide
gccgagcgcucuucaucuc

SEQ ID NO: 388682 - RNA, 19 nt, Artificial Sequence
  Description of Artificial Sequence: Synthetic oligonucleotide
ccgcagacggcgccccuuc

SEQ ID NO: 388683 - RNA, 19 nt, Artificial Sequence
  Description of Artificial Sequence: Synthetic oligonucleotide
gcccgcauuaccaccuccu

SEQ ID NO: 388684 - RNA, 19 nt, Artificial Sequence
  Description of Artificial Sequence: Synthetic oligonucleotide
cucccgccggcuguacuua

SEQ ID NO: 388685 - RNA, 19 nt, Artificial Sequence
  Description of Artificial Sequence: Synthetic oligonucleotide
ccgagcgcucuucaucucu

SEQ ID NO: 388686 - RNA, 19 nt, Artificial Sequence
  Description of Artificial Sequence: Synthetic oligonucleotide
ccaacuuugcacggaguuu

SEQ ID NO: 388687 - RNA, 19 nt, Artificial Sequence
  Description of Artificial Sequence: Synthetic oligonucleotide
ccucggcuucggcccggcg

SEQ ID NO: 388688 - RNA, 19 nt, Artificial Sequence
  Description of Artificial Sequence: Synthetic oligonucleotide
cggccccgaagccuggauc

SEQ ID NO: 388689 - RNA, 19 nt, Artificial Sequence
  Description of Artificial Sequence: Synthetic oligonucleotide
cgcguuucucucgcuucac

SEQ ID NO: 388690 - RNA, 19 nt, Artificial Sequence
  Description of Artificial Sequence: Synthetic oligonucleotide
cgcuuccgucguucgccgc

SEQ ID NO: 388691 - RNA, 19 nt, Artificial Sequence
  Description of Artificial Sequence: Synthetic oligonucleotide
gccguaacuuggcccggau

SEQ ID NO: 388692 - RNA, 19 nt, Artificial Sequence
  Description of Artificial Sequence: Synthetic oligonucleotide
gcacaauguacggcgucuu

SEQ ID NO: 388693 - RNA, 19 nt, Artificial Sequence
  Description of Artificial Sequence: Synthetic oligonucleotide
cggcuguacuuaucaucga

SEQ ID NO: 388694 - RNA, 19 nt, Artificial Sequence
  Description of Artificial Sequence: Synthetic oligonucleotide
cgagggcuccgcuugacuu

SEQ ID NO: 388695 - RNA, 19 nt, Artificial Sequence
  Description of Artificial Sequence: Synthetic oligonucleotide
ccaaggguuucagccccaa

SEQ ID NO: 388696 - RNA, 19 nt, Artificial Sequence
  Description of Artificial Sequence: Synthetic oligonucleotide
ccccaacgugcggcaaaac

SEQ ID NO: 388697 - RNA, 19 nt, Artificial Sequence
  Description of Artificial Sequence: Synthetic oligonucleotide
gcucagagacugagccugu

SEQ ID NO: 388698 - RNA, 19 nt, Artificial Sequence
  Description of Artificial Sequence: Synthetic oligonucleotide
ggcuucggcccggcgccuc

SEQ ID NO: 388699 - RNA, 19 nt, Artificial Sequence
  Description of Artificial Sequence: Synthetic oligonucleotide
gcgccgcuccgagggcucc

SEQ ID NO: 388700 - RNA, 19 nt, Artificial Sequence
  Description of Artificial Sequence: Synthetic oligonucleotide
cccuucccguggaagcggu

SEQ ID NO: 388701 - RNA, 19 nt, Artificial Sequence
  Description of Artificial Sequence: Synthetic oligonucleotide
gcggccucguagccgucau

SEQ ID NO: 388702 - RNA, 19 nt, Artificial Sequence
  Description of Artificial Sequence: Synthetic oligonucleotide
ggcgagacuccagcuucuu

SEQ ID NO: 388703 - RNA, 19 nt, Artificial Sequence
  Description of Artificial Sequence: Synthetic oligonucleotide
cgccgcuccgagggcuccg

SEQ ID NO: 388704 - RNA, 19 nt, Artificial Sequence
  Description of Artificial Sequence: Synthetic oligonucleotide
ccauuggccgagcgcucuu

SEQ ID NO: 388705 - RNA, 19 nt, Artificial Sequence
  Description of Artificial Sequence: Synthetic oligonucleotide
gcguaucacuggagcucau

SEQ ID NO: 388706 - RNA, 19 nt, Artificial Sequence
  Description of Artificial Sequence: Synthetic oligonucleotide
gccgcagacggcgccccuu

SEQ ID NO: 388707 - RNA, 19 nt, Artificial Sequence
  Description of Artificial Sequence: Synthetic oligonucleotide
cccuuacgcucaggguccu

SEQ ID NO: 388708 - RNA, 19 nt, Artificial Sequence
  Description of Artificial Sequence: Synthetic oligonucleotide
cgccggcuguacuuaucau

SEQ ID NO: 388709 - RNA, 19 nt, Artificial Sequence
  Description of Artificial Sequence: Synthetic oligonucleotide
cguagccgucaucgcguuu

SEQ ID NO: 388710 - RNA, 19 nt, Artificial Sequence
  Description of Artificial Sequence: Synthetic oligonucleotide
ccgcuccgagggcuccgcu

SEQ ID NO: 388711 - RNA, 19 nt, Artificial Sequence
  Description of Artificial Sequence: Synthetic oligonucleotide
cggcuccgcuuccgucguu

SEQ ID NO: 388712 - RNA, 19 nt, Artificial Sequence
  Description of Artificial Sequence: Synthetic oligonucleotide
agaucgauaaaccaagccc

SEQ ID NO: 388713 - RNA, 19 nt, Artificial Sequence
  Description of Artificial Sequence: Synthetic oligonucleotide
ugucuuaugaugaaacacg

SEQ ID NO: 388714 - RNA, 19 nt, Artificial Sequence
  Description of Artificial Sequence: Synthetic oligonucleotide
cuuaugaugaaacacgggg

SEQ ID NO: 388715 - RNA, 19 nt, Artificial Sequence
  Description of Artificial Sequence: Synthetic oligonucleotide
ucaaccaugccauucagcg

SEQ ID NO: 388716 - RNA, 19 nt, Artificial Sequence
  Description of Artificial Sequence: Synthetic oligonucleotide
uuuaucgggaauuaauggg

SEQ ID NO: 388717 - RNA, 19 nt, Artificial Sequence
  Description of Artificial Sequence: Synthetic oligonucleotide
aagaucgauaaaccaagcc

SEQ ID NO: 388718 - RNA, 19 nt, Artificial Sequence
  Description of Artificial Sequence: Synthetic oligonucleotide
aguaaggaagacuggaacc

SEQ ID NO: 388719 - RNA, 19 nt, Artificial Sequence
  Description of Artificial Sequence: Synthetic oligonucleotide
uuaagugcagcauauacug

SEQ ID NO: 388720 - RNA, 19 nt, Artificial Sequence
  Description of Artificial Sequence: Synthetic oligonucleotide
acgacaaugacuuuauagg

SEQ ID NO: 388721 - RNA, 19 nt, Artificial Sequence
  Description of Artificial Sequence: Synthetic oligonucleotide
uuagugauaugcucaaugg

SEQ ID NO: 388722 - RNA, 19 nt, Artificial Sequence
  Description of Artificial Sequence: Synthetic oligonucleotide
uauaggaagacuccucacg

SEQ ID NO: 388723 - RNA, 19 nt, Artificial Sequence
  Description of Artificial Sequence: Synthetic oligonucleotide
uuuguaagaucgauaaacc

SEQ ID NO: 388724 - RNA, 19 nt, Artificial Sequence
  Description of Artificial Sequence: Synthetic oligonucleotide
uguagauaucuccagaaga

SEQ ID NO: 388725 - RNA, 19 nt, Artificial Sequence
  Description of Artificial Sequence: Synthetic oligonucleotide
uacgacaaugacuuuauag

SEQ ID NO: 388726 - RNA, 19 nt, Artificial Sequence
  Description of Artificial Sequence: Synthetic oligonucleotide
uuuauaggaagacuccuca

SEQ ID NO: 388727 - RNA, 19 nt, Artificial Sequence
  Description of Artificial Sequence: Synthetic oligonucleotide
gauagugucaggauuaaug

SEQ ID NO: 388728 - RNA, 19 nt, Artificial Sequence
  Description of Artificial Sequence: Synthetic oligonucleotide
ucuggcauauagcaaacag

SEQ ID NO: 388729 - RNA, 19 nt, Artificial Sequence
  Description of Artificial Sequence: Synthetic oligonucleotide
ucaacaaaugcuuugcagu

SEQ ID NO: 388730 - RNA, 19 nt, Artificial Sequence
  Description of Artificial Sequence: Synthetic oligonucleotide
cuuuaucgggaauuaaugg

SEQ ID NO: 388731 - RNA, 19 nt, Artificial Sequence
  Description of Artificial Sequence: Synthetic oligonucleotide
uuucccaagagaaagcgga

SEQ ID NO: 388732 - RNA, 19 nt, Artificial Sequence
  Description of Artificial Sequence: Synthetic oligonucleotide
cauaucuuugacaggaacc

SEQ ID NO: 388733 - RNA, 19 nt, Artificial Sequence
  Description of Artificial Sequence: Synthetic oligonucleotide
acaaguaccaccuucuaga

SEQ ID NO: 388734 - RNA, 19 nt, Artificial Sequence
  Description of Artificial Sequence: Synthetic oligonucleotide
uugacuaugcugaaguaga

SEQ ID NO: 388735 - RNA, 19 nt, Artificial Sequence
  Description of Artificial Sequence: Synthetic oligonucleotide
ucacuuucgcaguagagcc

SEQ ID NO: 388736 - RNA, 19 nt, Artificial Sequence
  Description of Artificial Sequence: Synthetic oligonucleotide
uuaugaugaaacacgggga

SEQ ID NO: 388737 - RNA, 19 nt, Artificial Sequence
  Description of Artificial Sequence: Synthetic oligonucleotide
uuaaugggugacuacaagu

SEQ ID NO: 388738 - RNA, 19 nt, Artificial Sequence
  Description of Artificial Sequence: Synthetic oligonucleotide
uuaucgggaauuaaugggu

SEQ ID NO: 388739 - RNA, 19 nt, Artificial Sequence
  Description of Artificial Sequence: Synthetic oligonucleotide
aaccgaaucugucucuggg

SEQ ID NO: 388740 - RNA, 19 nt, Artificial Sequence
  Description of Artificial Sequence: Synthetic oligonucleotide
auagugucaggauuaauga

SEQ ID NO: 388741 - RNA, 19 nt, Artificial Sequence
  Description of Artificial Sequence: Synthetic oligonucleotide
gauucagcuauccaccagc

SEQ ID NO: 388742 - RNA, 19 nt, Artificial Sequence
  Description of Artificial Sequence: Synthetic oligonucleotide
auagcugugcaccaccuuc

SEQ ID NO: 388743 - RNA, 19 nt, Artificial Sequence
  Description of Artificial Sequence: Synthetic oligonucleotide
ucuuaugaugaaacacggg

SEQ ID NO: 388744 - RNA, 19 nt, Artificial Sequence
  Description of Artificial Sequence: Synthetic oligonucleotide
aacaccccaagcucucugc

SEQ ID NO: 388745 - RNA, 19 nt, Artificial Sequence
  Description of Artificial Sequence: Synthetic oligonucleotide
agaacgcaccagcacaucc

SEQ ID NO: 388746 - RNA, 19 nt, Artificial Sequence
  Description of Artificial Sequence: Synthetic oligonucleotide
uccacuaaacaguccauag

SEQ ID NO: 388747 - RNA, 19 nt, Artificial Sequence
  Description of Artificial Sequence: Synthetic oligonucleotide
auaaaccaagcccuuauca

SEQ ID NO: 388748 - RNA, 19 nt, Artificial Sequence
  Description of Artificial Sequence: Synthetic oligonucleotide
auacugguuuguaagaucg

SEQ ID NO: 388749 - RNA, 19 nt, Artificial Sequence
  Description of Artificial Sequence: Synthetic oligonucleotide
guaagaucgauaaaccaag

SEQ ID NO: 388750 - RNA, 19 nt, Artificial Sequence
  Description of Artificial Sequence: Synthetic oligonucleotide
cuuacauauaucgaccggc

SEQ ID NO: 388751 - RNA, 19 nt, Artificial Sequence
  Description of Artificial Sequence: Synthetic oligonucleotide
aaaauauccugcccuggca

SEQ ID NO: 388752 - RNA, 19 nt, Artificial Sequence
  Description of Artificial Sequence: Synthetic oligonucleotide
acaaugguaaccucguacu

SEQ ID NO: 388753 - RNA, 19 nt, Artificial Sequence
  Description of Artificial Sequence: Synthetic oligonucleotide
uguaaucuuccauaccgug

SEQ ID NO: 388754 - RNA, 19 nt, Artificial Sequence
  Description of Artificial Sequence: Synthetic oligonucleotide
guagauaucuccagaagag

SEQ ID NO: 388755 - RNA, 19 nt, Artificial Sequence
  Description of Artificial Sequence: Synthetic oligonucleotide
acauauaucgaccggcuga

SEQ ID NO: 388756 - RNA, 19 nt, Artificial Sequence
  Description of Artificial Sequence: Synthetic oligonucleotide
aaucccguuccuuuggcca

SEQ ID NO: 388757 - RNA, 19 nt, Artificial Sequence
  Description of Artificial Sequence: Synthetic oligonucleotide
uauaucgaccggcugacgu

SEQ ID NO: 388758 - RNA, 19 nt, Artificial Sequence
  Description of Artificial Sequence: Synthetic oligonucleotide
gguucuuugacauauggga

SEQ ID NO: 388759 - RNA, 19 nt, Artificial Sequence
  Description of Artificial Sequence: Synthetic oligonucleotide
uaaugggugacuacaagua

SEQ ID NO: 388760 - RNA, 19 nt, Artificial Sequence
  Description of Artificial Sequence: Synthetic oligonucleotide
uuuaacagccugauaacuu

SEQ ID NO: 388761 - RNA, 19 nt, Artificial Sequence
  Description of Artificial Sequence: Synthetic oligonucleotide
aagucaaccaugccauuca

SEQ ID NO: 388762 - RNA, 19 nt, Artificial Sequence
  Description of Artificial Sequence: Synthetic oligonucleotide
ugguauagaaagcuuuuaa

SEQ ID NO: 388763 - RNA, 19 nt, Artificial Sequence
  Description of Artificial Sequence: Synthetic oligonucleotide
aaucucgcauggcacaugu

SEQ ID NO: 388764 - RNA, 19 nt, Artificial Sequence
  Description of Artificial Sequence: Synthetic oligonucleotide
ugauguugauaaaccacug

SEQ ID NO: 388765 - RNA, 19 nt, Artificial Sequence
  Description of Artificial Sequence: Synthetic oligonucleotide
ucacugucuugaaaggugc

SEQ ID NO: 388766 - RNA, 19 nt, Artificial Sequence
  Description of Artificial Sequence: Synthetic oligonucleotide
gaauccaugaaccaucacu

SEQ ID NO: 388767 - RNA, 19 nt, Artificial Sequence
  Description of Artificial Sequence: Synthetic oligonucleotide
aggauuaaugacauucccg

SEQ ID NO: 388768 - RNA, 19 nt, Artificial Sequence
  Description of Artificial Sequence: Synthetic oligonucleotide
uagauaucuccagaagagg

SEQ ID NO: 388769 - RNA, 19 nt, Artificial Sequence
  Description of Artificial Sequence: Synthetic oligonucleotide
aacacggggauuggaacac

SEQ ID NO: 388770 - RNA, 19 nt, Artificial Sequence
  Description of Artificial Sequence: Synthetic oligonucleotide
ugugcugagacgcuacgcu

SEQ ID NO: 388771 - RNA, 19 nt, Artificial Sequence
  Description of Artificial Sequence: Synthetic oligonucleotide
uuucuuaguucuccaguca

SEQ ID NO: 388772 - RNA, 19 nt, Artificial Sequence
  Description of Artificial Sequence: Synthetic oligonucleotide
aaaccaagcccuuaucaua

SEQ ID NO: 388773 - RNA, 19 nt, Artificial Sequence
  Description of Artificial Sequence: Synthetic oligonucleotide
acaacuccuuagcuguagc

SEQ ID NO: 388774 - RNA, 19 nt, Artificial Sequence
  Description of Artificial Sequence: Synthetic oligonucleotide
cuugacuaugcugaaguag

SEQ ID NO: 388775 - RNA, 19 nt, Artificial Sequence
  Description of Artificial Sequence: Synthetic oligonucleotide
uguacucgaguucugcuuc

SEQ ID NO: 388776 - RNA, 19 nt, Artificial Sequence
  Description of Artificial Sequence: Synthetic oligonucleotide
uaagaucgauaaaccaagc

SEQ ID NO: 388777 - RNA, 19 nt, Artificial Sequence
  Description of Artificial Sequence: Synthetic oligonucleotide
agacguuggauucagcuau

SEQ ID NO: 388778 - RNA, 19 nt, Artificial Sequence
  Description of Artificial Sequence: Synthetic oligonucleotide
gguauagaaagcuuuuaac

SEQ ID NO: 388779 - RNA, 19 nt, Artificial Sequence
  Description of Artificial Sequence: Synthetic oligonucleotide
gucuuaugaugaaacacgg

SEQ ID NO: 388780 - RNA, 19 nt, Artificial Sequence
  Description of Artificial Sequence: Synthetic oligonucleotide
caaaauauccugcccuggc

SEQ ID NO: 388781 - RNA, 19 nt, Artificial Sequence
  Description of Artificial Sequence: Synthetic oligonucleotide
ggauuaaugacauucccga

SEQ ID NO: 388782 - RNA, 19 nt, Artificial Sequence
  Description of Artificial Sequence: Synthetic oligonucleotide
cacaaugguaaccucguac

SEQ ID NO: 388783 - RNA, 19 nt, Artificial Sequence
  Description of Artificial Sequence: Synthetic oligonucleotide
ugggugacuacaaguacca

SEQ ID NO: 388784 - RNA, 19 nt, Artificial Sequence
  Description of Artificial Sequence: Synthetic oligonucleotide
uuaacagccugauaacuuu

SEQ ID NO: 388785 - RNA, 19 nt, Artificial Sequence
  Description of Artificial Sequence: Synthetic oligonucleotide
auacuggucuaugacguac

SEQ ID NO: 388786 - RNA, 19 nt, Artificial Sequence
  Description of Artificial Sequence: Synthetic oligonucleotide
gugcggaaaacacucuugg

SEQ ID NO: 388787 - RNA, 19 nt, Artificial Sequence
  Description of Artificial Sequence: Synthetic oligonucleotide
cuuuauaggaagacuccuc

SEQ ID NO: 388788 - RNA, 19 nt, Artificial Sequence
  Description of Artificial Sequence: Synthetic oligonucleotide
aguuucggcagugugcuuc

SEQ ID NO: 388789 - RNA, 19 nt, Artificial Sequence
  Description of Artificial Sequence: Synthetic oligonucleotide
uccaugaaccaucacuguc

SEQ ID NO: 388790 - RNA, 19 nt, Artificial Sequence
  Description of Artificial Sequence: Synthetic oligonucleotide
auauacuggucuaugacgu

SEQ ID NO: 388791 - RNA, 19 nt, Artificial Sequence
  Description of Artificial Sequence: Synthetic oligonucleotide
acgcuguaaucuuccauac

SEQ ID NO: 388792 - RNA, 19 nt, Artificial Sequence
  Description of Artificial Sequence: Synthetic oligonucleotide
ugcggaaaacacucuuggg

SEQ ID NO: 388793 - RNA, 19 nt, Artificial Sequence
  Description of Artificial Sequence: Synthetic oligonucleotide
acaggaaccgaaucugucu

SEQ ID NO: 388794 - RNA, 19 nt, Artificial Sequence
  Description of Artificial Sequence: Synthetic oligonucleotide
aguagagccuguccuugac

SEQ ID NO: 388795 - RNA, 19 nt, Artificial Sequence
  Description of Artificial Sequence: Synthetic oligonucleotide
aacuccuuagcuguagccu

SEQ ID NO: 388796 - RNA, 19 nt, Artificial Sequence
  Description of Artificial Sequence: Synthetic oligonucleotide
uauacaccaguauggccgc

SEQ ID NO: 388797 - RNA, 19 nt, Artificial Sequence
  Description of Artificial Sequence: Synthetic oligonucleotide
uuaggaggagguugcaaga

SEQ ID NO: 388798 - RNA, 19 nt, Artificial Sequence
  Description of Artificial Sequence: Synthetic oligonucleotide
uucgcaguagagccugucc

SEQ ID NO: 388799 - RNA, 19 nt, Artificial Sequence
  Description of Artificial Sequence: Synthetic oligonucleotide
agggcgaccaaaauacugg

SEQ ID NO: 388800 - RNA, 19 nt, Artificial Sequence
  Description of Artificial Sequence: Synthetic oligonucleotide
agaaagcggaguguguuuc

SEQ ID NO: 388801 - RNA, 19 nt, Artificial Sequence
  Description of Artificial Sequence: Synthetic oligonucleotide
agugugaauccaugaacca

SEQ ID NO: 388802 - RNA, 19 nt, Artificial Sequence
  Description of Artificial Sequence: Synthetic oligonucleotide
uuauaggaagacuccucac

SEQ ID NO: 388803 - RNA, 19 nt, Artificial Sequence
  Description of Artificial Sequence: Synthetic oligonucleotide
agcauauacuggucuauga

SEQ ID NO: 388804 - RNA, 19 nt, Artificial Sequence
  Description of Artificial Sequence: Synthetic oligonucleotide
aguuuagugauaugcucaa

SEQ ID NO: 388805 - RNA, 19 nt, Artificial Sequence
  Description of Artificial Sequence: Synthetic oligonucleotide
ggcuacuucagugaagacg

SEQ ID NO: 388806 - RNA, 19 nt, Artificial Sequence
  Description of Artificial Sequence: Synthetic oligonucleotide
ugucaaaccagauguccaa

SEQ ID NO: 388807 - RNA, 19 nt, Artificial Sequence
  Description of Artificial Sequence: Synthetic oligonucleotide
aauuaaugggugacuacaa

SEQ ID NO: 388808 - RNA, 19 nt, Artificial Sequence
  Description of Artificial Sequence: Synthetic oligonucleotide
gguaaccucguacucggcg

SEQ ID NO: 388809 - RNA, 19 nt, Artificial Sequence
  Description of Artificial Sequence: Synthetic oligonucleotide
ugagacgcuacgcuguaau

SEQ ID NO: 388810 - RNA, 19 nt, Artificial Sequence
  Description of Artificial Sequence: Synthetic oligonucleotide
gauaaaccaagcccuuauc

SEQ ID NO: 388811 - RNA, 19 nt, Artificial Sequence
  Description of Artificial Sequence: Synthetic oligonucleotide
uucccaagagaaagcggag

SEQ ID NO: 388812 - RNA, 19 nt, Artificial Sequence
  Description of Artificial Sequence: Synthetic oligonucleotide
ucgcaguagagccuguccu

SEQ ID NO: 388813 - RNA, 19 nt, Artificial Sequence
  Description of Artificial Sequence: Synthetic oligonucleotide
aucggugaacacuccaucu

SEQ ID NO: 388814 - RNA, 19 nt, Artificial Sequence
  Description of Artificial Sequence: Synthetic oligonucleotide
gaucgauaaaccaagcccu

SEQ ID NO: 388815 - RNA, 19 nt, Artificial Sequence
  Description of Artificial Sequence: Synthetic oligonucleotide
acuuuauaggaagacuccu

SEQ ID NO: 388816 - RNA, 19 nt, Artificial Sequence
  Description of Artificial Sequence: Synthetic oligonucleotide
uugucgagaaauccugaau

SEQ ID NO: 388817 - RNA, 19 nt, Artificial Sequence
  Description of Artificial Sequence: Synthetic oligonucleotide
cagggaucguccaaggcug

SEQ ID NO: 388818 - RNA, 19 nt, Artificial Sequence
  Description of Artificial Sequence: Synthetic oligonucleotide
gaaccgaaucugucucugg

SEQ ID NO: 388819 - RNA, 19 nt, Artificial Sequence
  Description of Artificial Sequence: Synthetic oligonucleotide
auaucgaccggcugacgug

SEQ ID NO: 388820 - RNA, 19 nt, Artificial Sequence
  Description of Artificial Sequence: Synthetic oligonucleotide
caacuccuuagcuguagcc

SEQ ID NO: 388821 - RNA, 19 nt, Artificial Sequence
  Description of Artificial Sequence: Synthetic oligonucleotide
ggaagaauuggagcaaaag

SEQ ID NO: 388822 - RNA, 19 nt, Artificial Sequence
  Description of Artificial Sequence: Synthetic oligonucleotide
uacuggucuaugacguaca

SEQ ID NO: 388823 - RNA, 19 nt, Artificial Sequence
  Description of Artificial Sequence: Synthetic oligonucleotide
aggagcgccguuugggauc

SEQ ID NO: 388824 - RNA, 19 nt, Artificial Sequence
  Description of Artificial Sequence: Synthetic oligonucleotide
ugcccuggcacguauucca

SEQ ID NO: 388825 - RNA, 19 nt, Artificial Sequence
  Description of Artificial Sequence: Synthetic oligonucleotide
ucucuggguuaaaaccagc

SEQ ID NO: 388826 - RNA, 19 nt, Artificial Sequence
  Description of Artificial Sequence: Synthetic oligonucleotide
cauauaucgaccggcugac

SEQ ID NO: 388827 - RNA, 19 nt, Artificial Sequence
  Description of Artificial Sequence: Synthetic oligonucleotide
gugugaaccaaucccguuc

SEQ ID NO: 388828 - RNA, 19 nt, Artificial Sequence
  Description of Artificial Sequence: Synthetic oligonucleotide
aggaacgacccugugagcu

SEQ ID NO: 388829 - RNA, 19 nt, Artificial Sequence
  Description of Artificial Sequence: Synthetic oligonucleotide
agacgcuacgcuguaaucu

SEQ ID NO: 388830 - RNA, 19 nt, Artificial Sequence
  Description of Artificial Sequence: Synthetic oligonucleotide
cucgaucacaaugguaacc

SEQ ID NO: 388831 - RNA, 19 nt, Artificial Sequence
  Description of Artificial Sequence: Synthetic oligonucleotide
ucgagaaauccugaauuaa

SEQ ID NO: 388832 - RNA, 19 nt, Artificial Sequence
  Description of Artificial Sequence: Synthetic oligonucleotide
uuggcagggaucguccaag

SEQ ID NO: 388833 - RNA, 19 nt, Artificial Sequence
  Description of Artificial Sequence: Synthetic oligonucleotide
acaccgaggacagagagua

SEQ ID NO: 388834 - RNA, 19 nt, Artificial Sequence
  Description of Artificial Sequence: Synthetic oligonucleotide
ucgggaauuaaugggugac

SEQ ID NO: 388835 - RNA, 19 nt, Artificial Sequence
  Description of Artificial Sequence: Synthetic oligonucleotide
acuuucgcaguagagccug

SEQ ID NO: 388836 - RNA, 19 nt, Artificial Sequence
  Description of Artificial Sequence: Synthetic oligonucleotide
aggguuguacucgaguucu

SEQ ID NO: 388837 - RNA, 19 nt, Artificial Sequence
  Description of Artificial Sequence: Synthetic oligonucleotide
ugagcucgauuccaucuuc

SEQ ID NO: 388838 - RNA, 19 nt, Artificial Sequence
  Description of Artificial Sequence: Synthetic oligonucleotide
uucagcuauccaccagcgc

SEQ ID NO: 388839 - RNA, 19 nt, Artificial Sequence
  Description of Artificial Sequence: Synthetic oligonucleotide
gagggcgaccaaaauacug

SEQ ID NO: 388840 - RNA, 19 nt, Artificial Sequence
  Description of Artificial Sequence: Synthetic oligonucleotide
gagggcacuuuucucuggc

SEQ ID NO: 388841 - RNA, 19 nt, Artificial Sequence
  Description of Artificial Sequence: Synthetic oligonucleotide
acguuggauucagcuaucc

SEQ ID NO: 388842 - RNA, 19 nt, Artificial Sequence
  Description of Artificial Sequence: Synthetic oligonucleotide
gcauauacuggucuaugac

SEQ ID NO: 388843 - RNA, 19 nt, Artificial Sequence
  Description of Artificial Sequence: Synthetic oligonucleotide
uaucgaccggcugacgugc

SEQ ID NO: 388844 - RNA, 19 nt, Artificial Sequence
  Description of Artificial Sequence: Synthetic oligonucleotide
uucagcgccgcuccgggaa

SEQ ID NO: 388845 - RNA, 19 nt, Artificial Sequence
  Description of Artificial Sequence: Synthetic oligonucleotide
uuguacucgaguucugcuu

SEQ ID NO: 388846 - RNA, 19 nt, Artificial Sequence
  Description of Artificial Sequence: Synthetic oligonucleotide
uauagcaaacagccugauu

SEQ ID NO: 388847 - RNA, 19 nt, Artificial Sequence
  Description of Artificial Sequence: Synthetic oligonucleotide
aucgggaauuaauggguga

SEQ ID NO: 388848 - RNA, 19 nt, Artificial Sequence
  Description of Artificial Sequence: Synthetic oligonucleotide
ugguacgacaaugacuuua

SEQ ID NO: 388849 - RNA, 19 nt, Artificial Sequence
  Description of Artificial Sequence: Synthetic oligonucleotide
acguauuccaaagcaucag

SEQ ID NO: 388850 - RNA, 19 nt, Artificial Sequence
  Description of Artificial Sequence: Synthetic oligonucleotide
agggcgucagcuccauagg

SEQ ID NO: 388851 - RNA, 19 nt, Artificial Sequence
  Description of Artificial Sequence: Synthetic oligonucleotide
cauucagcgccgcuccggg

SEQ ID NO: 388852 - RNA, 19 nt, Artificial Sequence
  Description of Artificial Sequence: Synthetic oligonucleotide
uaacagccugauaacuuua

SEQ ID NO: 388853 - RNA, 19 nt, Artificial Sequence
  Description of Artificial Sequence: Synthetic oligonucleotide
agggaaucuuacauauauc

SEQ ID NO: 388854 - RNA, 19 nt, Artificial Sequence
  Description of Artificial Sequence: Synthetic oligonucleotide
caggaaccgaaucugucuc

SEQ ID NO: 388855 - RNA, 19 nt, Artificial Sequence
  Description of Artificial Sequence: Synthetic oligonucleotide
agugcggaaaacacucuug

SEQ ID NO: 388856 - RNA, 19 nt, Artificial Sequence
  Description of Artificial Sequence: Synthetic oligonucleotide
acugguuuguaagaucgau

SEQ ID NO: 388857 - RNA, 19 nt, Artificial Sequence
  Description of Artificial Sequence: Synthetic oligonucleotide
caaucccguuccuuuggcc

SEQ ID NO: 388858 - RNA, 19 nt, Artificial Sequence
  Description of Artificial Sequence: Synthetic oligonucleotide
caaugguaaccucguacuc

SEQ ID NO: 388859 - RNA, 19 nt, Artificial Sequence
  Description of Artificial Sequence: Synthetic oligonucleotide
augaaguuccacugucaaa

SEQ ID NO: 388860 - RNA, 19 nt, Artificial Sequence
  Description of Artificial Sequence: Synthetic oligonucleotide
ccacuaaacaguccauagg

SEQ ID NO: 388861 - RNA, 19 nt, Artificial Sequence
  Description of Artificial Sequence: Synthetic oligonucleotide
aagcggaguguguuucuaa

SEQ ID NO: 388862 - RNA, 19 nt, Artificial Sequence
  Description of Artificial Sequence: Synthetic oligonucleotide
accuuugucgagaaauccu

SEQ ID NO: 388863 - RNA, 19 nt, Artificial Sequence
  Description of Artificial Sequence: Synthetic oligonucleotide
uggcagggaucguccaagg

SEQ ID NO: 388864 - RNA, 19 nt, Artificial Sequence
  Description of Artificial Sequence: Synthetic oligonucleotide
ucugccaaugcggucugac

SEQ ID NO: 388865 - RNA, 19 nt, Artificial Sequence
  Description of Artificial Sequence: Synthetic oligonucleotide
ugugugaaccaaucccguu

SEQ ID NO: 388866 - RNA, 19 nt, Artificial Sequence
  Description of Artificial Sequence: Synthetic oligonucleotide
gucgagaaauccugaauua

SEQ ID NO: 388867 - RNA, 19 nt, Artificial Sequence
  Description of Artificial Sequence: Synthetic oligonucleotide
agacacuuuaucgggaauu

SEQ ID NO: 388868 - RNA, 19 nt, Artificial Sequence
  Description of Artificial Sequence: Synthetic oligonucleotide
uugugcugagacgcuacgc

SEQ ID NO: 388869 - RNA, 19 nt, Artificial Sequence
  Description of Artificial Sequence: Synthetic oligonucleotide
gccugauuggcagggaucg

SEQ ID NO: 388870 - RNA, 19 nt, Artificial Sequence
  Description of Artificial Sequence: Synthetic oligonucleotide
uauacuggucuaugacgua

SEQ ID NO: 388871 - RNA, 19 nt, Artificial Sequence
  Description of Artificial Sequence: Synthetic oligonucleotide
cauaccgugagcuggggcu

SEQ ID NO: 388872 - RNA, 19 nt, Artificial Sequence
  Description of Artificial Sequence: Synthetic oligonucleotide
ccagauagaacuuguauua

SEQ ID NO: 388873 - RNA, 19 nt, Artificial Sequence
  Description of Artificial Sequence: Synthetic oligonucleotide
cuggcccgaaucaccacag

SEQ ID NO: 388874 - RNA, 19 nt, Artificial Sequence
  Description of Artificial Sequence: Synthetic oligonucleotide
gggauuggaacaccccaag

SEQ ID NO: 388875 - RNA, 19 nt, Artificial Sequence
  Description of Artificial Sequence: Synthetic oligonucleotide
cccggcucgaucacaaugg

SEQ ID NO: 388876 - RNA, 19 nt, Artificial Sequence
  Description of Artificial Sequence: Synthetic oligonucleotide
cguauuccaaagcaucagg

SEQ ID NO: 388877 - RNA, 19 nt, Artificial Sequence
  Description of Artificial Sequence: Synthetic oligonucleotide
aggaaccgaaucugucucu

SEQ ID NO: 388878 - RNA, 19 nt, Artificial Sequence
  Description of Artificial Sequence: Synthetic oligonucleotide
augcggucugacaggagcg

SEQ ID NO: 388879 - RNA, 19 nt, Artificial Sequence
  Description of Artificial Sequence: Synthetic oligonucleotide
ggauuggaacaccccaagc

SEQ ID NO: 388880 - RNA, 19 nt, Artificial Sequence
  Description of Artificial Sequence: Synthetic oligonucleotide
ggcuguugaucaaauauuc

SEQ ID NO: 388881 - RNA, 19 nt, Artificial Sequence
  Description of Artificial Sequence: Synthetic oligonucleotide
gagacgcuacgcuguaauc

SEQ ID NO: 388882 - RNA, 19 nt, Artificial Sequence
  Description of Artificial Sequence: Synthetic oligonucleotide
gauuggcagggaucgucca

SEQ ID NO: 388883 - RNA, 19 nt, Artificial Sequence
  Description of Artificial Sequence: Synthetic oligonucleotide
auauaucgaccggcugacg

SEQ ID NO: 388884 - RNA, 19 nt, Artificial Sequence
  Description of Artificial Sequence: Synthetic oligonucleotide
cacuuuaucgggaauuaau

SEQ ID NO: 388885 - RNA, 19 nt, Artificial Sequence
  Description of Artificial Sequence: Synthetic oligonucleotide
aaagcggaguguguuucua

SEQ ID NO: 388886 - RNA, 19 nt, Artificial Sequence
  Description of Artificial Sequence: Synthetic oligonucleotide
ggauucagcuauccaccag

SEQ ID NO: 388887 - RNA, 19 nt, Artificial Sequence
  Description of Artificial Sequence: Synthetic oligonucleotide
uacaccaguauggccgccu

SEQ ID NO: 388888 - RNA, 19 nt, Artificial Sequence
  Description of Artificial Sequence: Synthetic oligonucleotide
gguuguacucgaguucugc

SEQ ID NO: 388889 - RNA, 19 nt, Artificial Sequence
  Description of Artificial Sequence: Synthetic oligonucleotide
gaggaacgacccugugagc

SEQ ID NO: 388890 - RNA, 19 nt, Artificial Sequence
  Description of Artificial Sequence: Synthetic oligonucleotide
cugguuuguaagaucgaua

SEQ ID NO: 388891 - RNA, 19 nt, Artificial Sequence
  Description of Artificial Sequence: Synthetic oligonucleotide
gugcggaggggccaauggc

SEQ ID NO: 388892 - RNA, 19 nt, Artificial Sequence
  Description of Artificial Sequence: Synthetic oligonucleotide
acacggggauuggaacacc

SEQ ID NO: 388893 - RNA, 19 nt, Artificial Sequence
  Description of Artificial Sequence: Synthetic oligonucleotide
gcggaaaacacucuugggu

SEQ ID NO: 388894 - RNA, 19 nt, Artificial Sequence
  Description of Artificial Sequence: Synthetic oligonucleotide
gugaauccaugaaccauca

SEQ ID NO: 388895 - RNA, 19 nt, Artificial Sequence
  Description of Artificial Sequence: Synthetic oligonucleotide
cagcugguacgacaaugac

SEQ ID NO: 388896 - RNA, 19 nt, Artificial Sequence
  Description of Artificial Sequence: Synthetic oligonucleotide
gaaucucgcauggcacaug

SEQ ID NO: 388897 - RNA, 19 nt, Artificial Sequence
  Description of Artificial Sequence: Synthetic oligonucleotide
acgacauccuccgggagaa

SEQ ID NO: 388898 - RNA, 19 nt, Artificial Sequence
  Description of Artificial Sequence: Synthetic oligonucleotide
auacaccaguauggccgcc

SEQ ID NO: 388899 - RNA, 19 nt, Artificial Sequence
  Description of Artificial Sequence: Synthetic oligonucleotide
cuacgacauccuccgggag

SEQ ID NO: 388900 - RNA, 19 nt, Artificial Sequence
  Description of Artificial Sequence: Synthetic oligonucleotide
gcggaguguguuucuaagc

SEQ ID NO: 388901 - RNA, 19 nt, Artificial Sequence
  Description of Artificial Sequence: Synthetic oligonucleotide
gccagugcggaaaacacuc

SEQ ID NO: 388902 - RNA, 19 nt, Artificial Sequence
  Description of Artificial Sequence: Synthetic oligonucleotide
auccacuaaacaguccaua

SEQ ID NO: 388903 - RNA, 19 nt, Artificial Sequence
  Description of Artificial Sequence: Synthetic oligonucleotide
agggcacuuuucucuggca

SEQ ID NO: 388904 - RNA, 19 nt, Artificial Sequence
  Description of Artificial Sequence: Synthetic oligonucleotide
caguauggccgccugucca

SEQ ID NO: 388905 - RNA, 19 nt, Artificial Sequence
  Description of Artificial Sequence: Synthetic oligonucleotide
guugaugaggaacgacccu

SEQ ID NO: 388906 - RNA, 19 nt, Artificial Sequence
  Description of Artificial Sequence: Synthetic oligonucleotide
uuucgcaguagagccuguc

SEQ ID NO: 388907 - RNA, 19 nt, Artificial Sequence
  Description of Artificial Sequence: Synthetic oligonucleotide
ccuucuagauccacaccug

SEQ ID NO: 388908 - RNA, 19 nt, Artificial Sequence
  Description of Artificial Sequence: Synthetic oligonucleotide
ggaaccgaaucugucucug

SEQ ID NO: 388909 - RNA, 19 nt, Artificial Sequence
  Description of Artificial Sequence: Synthetic oligonucleotide
guucuuugacauaugggau

SEQ ID NO: 388910 - RNA, 19 nt, Artificial Sequence
  Description of Artificial Sequence: Synthetic oligonucleotide
gacgcuacgcuguaaucuu

SEQ ID NO: 388911 - RNA, 19 nt, Artificial Sequence
  Description of Artificial Sequence: Synthetic oligonucleotide
gcaaaagaacgcaccagca

SEQ ID NO: 388912 - RNA, 19 nt, Artificial Sequence
  Description of Artificial Sequence: Synthetic oligonucleotide
aguccauagggagguugug

SEQ ID NO: 388913 - RNA, 19 nt, Artificial Sequence
  Description of Artificial Sequence: Synthetic oligonucleotide
gaaagcggaguguguuucu

SEQ ID NO: 388914 - RNA, 19 nt, Artificial Sequence
  Description of Artificial Sequence: Synthetic oligonucleotide
guugcaagagagggaaucu

SEQ ID NO: 388915 - RNA, 19 nt, Artificial Sequence
  Description of Artificial Sequence: Synthetic oligonucleotide
guacucgaguucugcuuca

SEQ ID NO: 388916 - RNA, 19 nt, Artificial Sequence
  Description of Artificial Sequence: Synthetic oligonucleotide
gcuguugaucaaauauuca

SEQ ID NO: 388917 - RNA, 19 nt, Artificial Sequence
  Description of Artificial Sequence: Synthetic oligonucleotide
gggaauuaaugggugacua

SEQ ID NO: 388918 - RNA, 19 nt, Artificial Sequence
  Description of Artificial Sequence: Synthetic oligonucleotide
acgcuacgcuguaaucuuc

SEQ ID NO: 388919 - RNA, 19 nt, Artificial Sequence
  Description of Artificial Sequence: Synthetic oligonucleotide
gugcagcauauacuggucu

SEQ ID NO: 388920 - RNA, 19 nt, Artificial Sequence
  Description of Artificial Sequence: Synthetic oligonucleotide
cugccaaugcggucugaca

SEQ ID NO: 388921 - RNA, 19 nt, Artificial Sequence
  Description of Artificial Sequence: Synthetic oligonucleotide
gagaaagcggaguguguuu

SEQ ID NO: 388922 - RNA, 19 nt, Artificial Sequence
  Description of Artificial Sequence: Synthetic oligonucleotide
gccugauaacuuuaccaaa

SEQ ID NO: 388923 - RNA, 19 nt, Artificial Sequence
  Description of Artificial Sequence: Synthetic oligonucleotide
gacguuggauucagcuauc

SEQ ID NO: 388924 - RNA, 19 nt, Artificial Sequence
  Description of Artificial Sequence: Synthetic oligonucleotide
cuuugacauaugggaugug

SEQ ID NO: 388925 - RNA, 19 nt, Artificial Sequence
  Description of Artificial Sequence: Synthetic oligonucleotide
agggaucguccaaggcugg

SEQ ID NO: 388926 - RNA, 19 nt, Artificial Sequence
  Description of Artificial Sequence: Synthetic oligonucleotide
gcagcugguacgacaauga

SEQ ID NO: 388927 - RNA, 19 nt, Artificial Sequence
  Description of Artificial Sequence: Synthetic oligonucleotide
aggguccaccaaacaucgc

SEQ ID NO: 388928 - RNA, 19 nt, Artificial Sequence
  Description of Artificial Sequence: Synthetic oligonucleotide
caguagagccuguccuuga

SEQ ID NO: 388929 - RNA, 19 nt, Artificial Sequence
  Description of Artificial Sequence: Synthetic oligonucleotide
cugugugaaccaaucccgu

SEQ ID NO: 388930 - RNA, 19 nt, Artificial Sequence
  Description of Artificial Sequence: Synthetic oligonucleotide
cgcuccgggaauaaacuuc

SEQ ID NO: 388931 - RNA, 19 nt, Artificial Sequence
  Description of Artificial Sequence: Synthetic oligonucleotide
gcugagacgugcuggaaau

SEQ ID NO: 388932 - RNA, 19 nt, Artificial Sequence
  Description of Artificial Sequence: Synthetic oligonucleotide
gggaggguccaccaaacau

SEQ ID NO: 388933 - RNA, 19 nt, Artificial Sequence
  Description of Artificial Sequence: Synthetic oligonucleotide
ccagcgcgguccuugauga

SEQ ID NO: 388934 - RNA, 19 nt, Artificial Sequence
  Description of Artificial Sequence: Synthetic oligonucleotide
gguacgacaaugacuuuau

SEQ ID NO: 388935 - RNA, 19 nt, Artificial Sequence
  Description of Artificial Sequence: Synthetic oligonucleotide
accggcugacgugcucagg

SEQ ID NO: 388936 - RNA, 19 nt, Artificial Sequence
  Description of Artificial Sequence: Synthetic oligonucleotide
ucguacucggcggcauuuu

SEQ ID NO: 388937 - RNA, 19 nt, Artificial Sequence
  Description of Artificial Sequence: Synthetic oligonucleotide
cacuuucgcaguagagccu

SEQ ID NO: 388938 - RNA, 19 nt, Artificial Sequence
  Description of Artificial Sequence: Synthetic oligonucleotide
cauccacuaaacaguccau

SEQ ID NO: 388939 - RNA, 19 nt, Artificial Sequence
  Description of Artificial Sequence: Synthetic oligonucleotide
gccuugauauacaccagua

SEQ ID NO: 388940 - RNA, 19 nt, Artificial Sequence
  Description of Artificial Sequence: Synthetic oligonucleotide
uccugcccuggcacguauu

SEQ ID NO: 388941 - RNA, 19 nt, Artificial Sequence
  Description of Artificial Sequence: Synthetic oligonucleotide
cagcgcgguccuugaugag

SEQ ID NO: 388942 - RNA, 19 nt, Artificial Sequence
  Description of Artificial Sequence: Synthetic oligonucleotide
aucucgcauggcacaugug

SEQ ID NO: 388943 - RNA, 19 nt, Artificial Sequence
  Description of Artificial Sequence: Synthetic oligonucleotide
cuggucuaugacguacaua

SEQ ID NO: 388944 - RNA, 19 nt, Artificial Sequence
  Description of Artificial Sequence: Synthetic oligonucleotide
gucacaugaguggcaggua

SEQ ID NO: 388945 - RNA, 19 nt, Artificial Sequence
  Description of Artificial Sequence: Synthetic oligonucleotide
cgccgcuccgggaauaaac

SEQ ID NO: 388946 - RNA, 19 nt, Artificial Sequence
  Description of Artificial Sequence: Synthetic oligonucleotide
cagugcggaaaacacucuu

SEQ ID NO: 388947 - RNA, 19 nt, Artificial Sequence
  Description of Artificial Sequence: Synthetic oligonucleotide
cggaguguguuucuaagcu

SEQ ID NO: 388948 - RNA, 19 nt, Artificial Sequence
  Description of Artificial Sequence: Synthetic oligonucleotide
gggugacuacaaguaccac

SEQ ID NO: 388949 - RNA, 19 nt, Artificial Sequence
  Description of Artificial Sequence: Synthetic oligonucleotide
ggguuguacucgaguucug

SEQ ID NO: 388950 - RNA, 19 nt, Artificial Sequence
  Description of Artificial Sequence: Synthetic oligonucleotide
agcgccguuugggauccuu

SEQ ID NO: 388951 - RNA, 19 nt, Artificial Sequence
  Description of Artificial Sequence: Synthetic oligonucleotide
cguuggauucagcuaucca

SEQ ID NO: 388952 - RNA, 19 nt, Artificial Sequence
  Description of Artificial Sequence: Synthetic oligonucleotide
gcugagacgcuacgcugua

SEQ ID NO: 388953 - RNA, 19 nt, Artificial Sequence
  Description of Artificial Sequence: Synthetic oligonucleotide
ggaaucucgcauggcacau

SEQ ID NO: 388954 - RNA, 19 nt, Artificial Sequence
  Description of Artificial Sequence: Synthetic oligonucleotide
aucgaccggcugacgugcu

SEQ ID NO: 388955 - RNA, 19 nt, Artificial Sequence
  Description of Artificial Sequence: Synthetic oligonucleotide
caggagcgccguuugggau

SEQ ID NO: 388956 - RNA, 19 nt, Artificial Sequence
  Description of Artificial Sequence: Synthetic oligonucleotide
cccguuccuuuggccaugg

SEQ ID NO: 388957 - RNA, 19 nt, Artificial Sequence
  Description of Artificial Sequence: Synthetic oligonucleotide
gccgcuccgggaauaaacu

SEQ ID NO: 388958 - RNA, 19 nt, Artificial Sequence
  Description of Artificial Sequence: Synthetic oligonucleotide
cugagacgcuacgcuguaa

SEQ ID NO: 388959 - RNA, 19 nt, Artificial Sequence
  Description of Artificial Sequence: Synthetic oligonucleotide
ccaagagaaagcggagugu

SEQ ID NO: 388960 - RNA, 19 nt, Artificial Sequence
  Description of Artificial Sequence: Synthetic oligonucleotide
gcgccguuugggauccuuc

SEQ ID NO: 388961 - RNA, 19 nt, Artificial Sequence
  Description of Artificial Sequence: Synthetic oligonucleotide
cucguacucggcggcauuu

SEQ ID NO: 388962 - RNA, 19 nt, Artificial Sequence
  Description of Artificial Sequence: Synthetic oligonucleotide
uucagccagcgcgguccuu

SEQ ID NO: 388963 - RNA, 19 nt, Artificial Sequence
  Description of Artificial Sequence: Synthetic oligonucleotide
cccuggcacguauuccaaa

SEQ ID NO: 388964 - RNA, 19 nt, Artificial Sequence
  Description of Artificial Sequence: Synthetic oligonucleotide
ccgagggauuuggacaucu

SEQ ID NO: 388965 - RNA, 19 nt, Artificial Sequence
  Description of Artificial Sequence: Synthetic oligonucleotide
gcccuggcacguauuccaa

SEQ ID NO: 388966 - RNA, 19 nt, Artificial Sequence
  Description of Artificial Sequence: Synthetic oligonucleotide
cgggaauuaaugggugacu

SEQ ID NO: 388967 - RNA, 19 nt, Artificial Sequence
  Description of Artificial Sequence: Synthetic oligonucleotide
cggcucgaucacaauggua

SEQ ID NO: 388968 - RNA, 19 nt, Artificial Sequence
  Description of Artificial Sequence: Synthetic oligonucleotide
ccggcucgaucacaauggu

SEQ ID NO: 388969 - RNA, 19 nt, Artificial Sequence
  Description of Artificial Sequence: Synthetic oligonucleotide
ccgcuccgggaauaaacuu

SEQ ID NO: 388970 - RNA, 19 nt, Artificial Sequence
  Description of Artificial Sequence: Synthetic oligonucleotide
cagcgccgcuccgggaaua

SEQ ID NO: 388971 - RNA, 19 nt, Artificial Sequence
  Description of Artificial Sequence: Synthetic oligonucleotide
gcgccgcuccgggaauaaa

SEQ ID NO: 388972 - RNA, 19 nt, Artificial Sequence
  Description of Artificial Sequence: Synthetic oligonucleotide
gccccggcucgaucacaau

SEQ ID NO: 388973 - RNA, 19 nt, Artificial Sequence
  Description of Artificial Sequence: Synthetic oligonucleotide
cgacccugugagcucgauu

SEQ ID NO: 388974 - RNA, 19 nt, Artificial Sequence
  Description of Artificial Sequence: Synthetic oligonucleotide
ccguuccuuuggccauggu

SEQ ID NO: 388975 - RNA, 19 nt, Artificial Sequence
  Description of Artificial Sequence: Synthetic oligonucleotide
aaagaucuaacauuaaggg

SEQ ID NO: 388976 - RNA, 19 nt, Artificial Sequence
  Description of Artificial Sequence: Synthetic oligonucleotide
aauaaugagaccucgauga

SEQ ID NO: 388977 - RNA, 19 nt, Artificial Sequence
  Description of Artificial Sequence: Synthetic oligonucleotide
aagcacauaacccuuaagg

SEQ ID NO: 388978 - RNA, 19 nt, Artificial Sequence
  Description of Artificial Sequence: Synthetic oligonucleotide
aauauaccaaauauugggc

SEQ ID NO: 388979 - RNA, 19 nt, Artificial Sequence
  Description of Artificial Sequence: Synthetic oligonucleotide
auauaccaaauauugggcc

SEQ ID NO: 388980 - RNA, 19 nt, Artificial Sequence
  Description of Artificial Sequence: Synthetic oligonucleotide
  modified_base (14)..(14): a, c, u, g, unknown or other
aacuacacauuucngcuuc

SEQ ID NO: 388981 - RNA, 19 nt, Artificial Sequence
  Description of Artificial Sequence: Synthetic oligonucleotide
aaaauuuagguaagguugc

SEQ ID NO: 388982 - RNA, 19 nt, Artificial Sequence
  Description of Artificial Sequence: Synthetic oligonucleotide
auuaacucaguguauacag

SEQ ID NO: 388983 - RNA, 19 nt, Artificial Sequence
  Description of Artificial Sequence: Synthetic oligonucleotide
uuagcugugaaacuaauau

SEQ ID NO: 388984 - RNA, 19 nt, Artificial Sequence
  Description of Artificial Sequence: Synthetic oligonucleotide
aaagcauggacugauaucu

SEQ ID NO: 388985 - RNA, 19 nt, Artificial Sequence
  Description of Artificial Sequence: Synthetic oligonucleotide
ucaucauucggcuauaaga

SEQ ID NO: 388986 - RNA, 19 nt, Artificial Sequence
  Description of Artificial Sequence: Synthetic oligonucleotide
aacuacucaacguccacac

SEQ ID NO: 388987 - RNA, 19 nt, Artificial Sequence
  Description of Artificial Sequence: Synthetic oligonucleotide
augaaaucccucuuauucc

SEQ ID NO: 388988 - RNA, 19 nt, Artificial Sequence
  Description of Artificial Sequence: Synthetic oligonucleotide
uguuauacguauagaaaag

SEQ ID NO: 388989 - RNA, 19 nt, Artificial Sequence
  Description of Artificial Sequence: Synthetic oligonucleotide
uuuaucuaagagaggagag

SEQ ID NO: 388990 - RNA, 19 nt, Artificial Sequence
  Description of Artificial Sequence: Synthetic oligonucleotide
aaguaugcaacacacauua

SEQ ID NO: 388991 - RNA, 19 nt, Artificial Sequence
  Description of Artificial Sequence: Synthetic oligonucleotide
acuaaauugagauuggcaa

SEQ ID NO: 388992 - RNA, 19 nt, Artificial Sequence
  Description of Artificial Sequence: Synthetic oligonucleotide
gaauauaacuggcuuacag

SEQ ID NO: 388993 - RNA, 19 nt, Artificial Sequence
  Description of Artificial Sequence: Synthetic oligonucleotide
aaauaaugagaccucgaug

SEQ ID NO: 388994 - RNA, 19 nt, Artificial Sequence
  Description of Artificial Sequence: Synthetic oligonucleotide
cagacaauaccaaaggugc

SEQ ID NO: 388995 - RNA, 19 nt, Artificial Sequence
  Description of Artificial Sequence: Synthetic oligonucleotide
auugagauuggcaaguagc

SEQ ID NO: 388996 - RNA, 19 nt, Artificial Sequence
  Description of Artificial Sequence: Synthetic oligonucleotide
cauugauaagcacauaacc

SEQ ID NO: 388997 - RNA, 19 nt, Artificial Sequence
  Description of Artificial Sequence: Synthetic oligonucleotide
ucaaggaauaggaaccggg

SEQ ID NO: 388998 - RNA, 19 nt, Artificial Sequence
  Description of Artificial Sequence: Synthetic oligonucleotide
uguauaugaucaaaagcug

SEQ ID NO: 388999 - RNA, 19 nt, Artificial Sequence
  Description of Artificial Sequence: Synthetic oligonucleotide
uugauaagcacauaacccu

SEQ ID NO: 389000 - RNA, 19 nt, Artificial Sequence
  Description of Artificial Sequence: Synthetic oligonucleotide
uuauacguauagaaaagga

SEQ ID NO: 389001 - RNA, 19 nt, Artificial Sequence
  Description of Artificial Sequence: Synthetic oligonucleotide
ugcaaaacuaauccacagg

SEQ ID NO: 389002 - RNA, 19 nt, Artificial Sequence
  Description of Artificial Sequence: Synthetic oligonucleotide
uguuaaagugcaauaguga

SEQ ID NO: 389003 - RNA, 19 nt, Artificial Sequence
  Description of Artificial Sequence: Synthetic oligonucleotide
auauaacuggcuuacaggu

SEQ ID NO: 389004 - RNA, 19 nt, Artificial Sequence
  Description of Artificial Sequence: Synthetic oligonucleotide
agaucuaacauuaagggca

SEQ ID NO: 389005 - RNA, 19 nt, Artificial Sequence
  Description of Artificial Sequence: Synthetic oligonucleotide
agaagauuaacucagugua

SEQ ID NO: 389006 - RNA, 19 nt, Artificial Sequence
  Description of Artificial Sequence: Synthetic oligonucleotide
  modified_base (9)..(9): a, c, u, g, unknown or other
cacauuucngcuucaaugc

SEQ ID NO: 389007 - RNA, 19 nt, Artificial Sequence
  Description of Artificial Sequence: Synthetic oligonucleotide
uauacguauagaaaaggaa

SEQ ID NO: 389008 - RNA, 19 nt, Artificial Sequence
  Description of Artificial Sequence: Synthetic oligonucleotide
uuaacuucaucauucggcu

SEQ ID NO: 389009 - RNA, 19 nt, Artificial Sequence
  Description of Artificial Sequence: Synthetic oligonucleotide
guuaaagugcaauagugac

SEQ ID NO: 389010 - RNA, 19 nt, Artificial Sequence
  Description of Artificial Sequence: Synthetic oligonucleotide
uguuguaacuaaauugaga

SEQ ID NO: 389011 - RNA, 19 nt, Artificial Sequence
  Description of Artificial Sequence: Synthetic oligonucleotide
uaauuuuaagucacuguga

SEQ ID NO: 389012 - RNA, 19 nt, Artificial Sequence
  Description of Artificial Sequence: Synthetic oligonucleotide
uuuuaucuaagagaggaga

SEQ ID NO: 389013 - RNA, 19 nt, Artificial Sequence
  Description of Artificial Sequence: Synthetic oligonucleotide
aauaggagguuucuugaca

SEQ ID NO: 389014 - RNA, 19 nt, Artificial Sequence
  Description of Artificial Sequence: Synthetic oligonucleotide
uaaaaggugggacauuaga

SEQ ID NO: 389015 - RNA, 19 nt, Artificial Sequence
  Description of Artificial Sequence: Synthetic oligonucleotide
aauuaucauccuuagguuu

SEQ ID NO: 389016 - RNA, 19 nt, Artificial Sequence
  Description of Artificial Sequence: Synthetic oligonucleotide
aauucuaauuaucauccuu

SEQ ID NO: 389017 - RNA, 19 nt, Artificial Sequence
  Description of Artificial Sequence: Synthetic oligonucleotide
cuuacuugggaaagcauag

SEQ ID NO: 389018 - RNA, 19 nt, Artificial Sequence
  Description of Artificial Sequence: Synthetic oligonucleotide
uaugcaacacacauuaaua

SEQ ID NO: 389019 - RNA, 19 nt, Artificial Sequence
  Description of Artificial Sequence: Synthetic oligonucleotide
ugcauguuuaaugacuagg

SEQ ID NO: 389020 - RNA, 19 nt, Artificial Sequence
  Description of Artificial Sequence: Synthetic oligonucleotide
cuaaauugagauuggcaag

SEQ ID NO: 389021 - RNA, 19 nt, Artificial Sequence
  Description of Artificial Sequence: Synthetic oligonucleotide
  modified_base (8)..(8): a, c, u, g, unknown or other
cuuaaggnuagcaucauga

SEQ ID NO: 389022 - RNA, 19 nt, Artificial Sequence
  Description of Artificial Sequence: Synthetic oligonucleotide
  modified_base (19)..(19): a, c, u, g, unknown or other
uacccaacuacacauuucn

SEQ ID NO: 389023 - RNA, 19 nt, Artificial Sequence
  Description of Artificial Sequence: Synthetic oligonucleotide
  modified_base (8)..(8): a, c, u, g, unknown or other
acauuucngcuucaaugcc

SEQ ID NO: 389024 - RNA, 19 nt, Artificial Sequence
  Description of Artificial Sequence: Synthetic oligonucleotide
uucguaaaauuuacuaaga

SEQ ID NO: 389025 - RNA, 19 nt, Artificial Sequence
  Description of Artificial Sequence: Synthetic oligonucleotide
uuuagguaagguugcauac

SEQ ID NO: 389026 - RNA, 19 nt, Artificial Sequence
  Description of Artificial Sequence: Synthetic oligonucleotide
auuaggacacaaguuuucc

SEQ ID NO: 389027 - RNA, 19 nt, Artificial Sequence
  Description of Artificial Sequence: Synthetic oligonucleotide
cucccuacaaccuugcagc

SEQ ID NO: 389028 - RNA, 19 nt, Artificial Sequence
  Description of Artificial Sequence: Synthetic oligonucleotide
uuugucaacagugacuaca

SEQ ID NO: 389029 - RNA, 19 nt, Artificial Sequence
  Description of Artificial Sequence: Synthetic oligonucleotide
cuguuaaagugcaauagug

SEQ ID NO: 389030 - RNA, 19 nt, Artificial Sequence
  Description of Artificial Sequence: Synthetic oligonucleotide
aagguugcauacuaauugu

SEQ ID NO: 389031 - RNA, 19 nt, Artificial Sequence
  Description of Artificial Sequence: Synthetic oligonucleotide
agaagguuacucuuacuag

SEQ ID NO: 389032 - RNA, 19 nt, Artificial Sequence
  Description of Artificial Sequence: Synthetic oligonucleotide
aaauuaauuaggacacaag

SEQ ID NO: 389033 - RNA, 19 nt, Artificial Sequence
  Description of Artificial Sequence: Synthetic oligonucleotide
  modified_base (6)..(6): a, c, u, g, unknown or other
uaaggnuagcaucaugaac

SEQ ID NO: 389034 - RNA, 19 nt, Artificial Sequence
  Description of Artificial Sequence: Synthetic oligonucleotide
  modified_base (7)..(7): a, c, u, g, unknown or other
cauuucngcuucaaugccc

SEQ ID NO: 389035 - RNA, 19 nt, Artificial Sequence
  Description of Artificial Sequence: Synthetic oligonucleotide
guuauacguauagaaaagg

SEQ ID NO: 389036 - RNA, 19 nt, Artificial Sequence
  Description of Artificial Sequence: Synthetic oligonucleotide
ucucccuacaaccuugcag

SEQ ID NO: 389037 - RNA, 19 nt, Artificial Sequence
  Description of Artificial Sequence: Synthetic oligonucleotide
uucuaauuaucauccuuag

SEQ ID NO: 389038 - RNA, 19 nt, Artificial Sequence
  Description of Artificial Sequence: Synthetic oligonucleotide
auucccuacaaagugcccc

SEQ ID NO: 389039 - RNA, 19 nt, Artificial Sequence
  Description of Artificial Sequence: Synthetic oligonucleotide
uguauacagaagcaggcuc

SEQ ID NO: 389040 - RNA, 19 nt, Artificial Sequence
  Description of Artificial Sequence: Synthetic oligonucleotide
  modified_base (19)..(19): a, c, u, g, unknown or other
agcacauaacccuuaaggn

SEQ ID NO: 389041 - RNA, 19 nt, Artificial Sequence
  Description of Artificial Sequence: Synthetic oligonucleotide
gguagaaucaaauggccag

SEQ ID NO: 389042 - RNA, 19 nt, Artificial Sequence
  Description of Artificial Sequence: Synthetic oligonucleotide
cuaagauuuacuccuuuug

SEQ ID NO: 389043 - RNA, 19 nt, Artificial Sequence
  Description of Artificial Sequence: Synthetic oligonucleotide
ucauucggcuauaagauua

SEQ ID NO: 389044 - RNA, 19 nt, Artificial Sequence
  Description of Artificial Sequence: Synthetic oligonucleotide
aauaggaaccgggaagguc

SEQ ID NO: 389045 - RNA, 19 nt, Artificial Sequence
  Description of Artificial Sequence: Synthetic oligonucleotide
uauugggccuacuaaaagu

SEQ ID NO: 389046 - RNA, 19 nt, Artificial Sequence
  Description of Artificial Sequence: Synthetic oligonucleotide
  modified_base (7)..(7): a, c, u, g, unknown or other
uuaaggnuagcaucaugaa

SEQ ID NO: 389047 - RNA, 19 nt, Artificial Sequence
  Description of Artificial Sequence: Synthetic oligonucleotide
uucggcuauaagauuaaga

SEQ ID NO: 389048 - RNA, 19 nt, Artificial Sequence
  Description of Artificial Sequence: Synthetic oligonucleotide
uacucaacguccacacugg

SEQ ID NO: 389049 - RNA, 19 nt, Artificial Sequence
  Description of Artificial Sequence: Synthetic oligonucleotide
agauuuacuccuuuuguaa

SEQ ID NO: 389050 - RNA, 19 nt, Artificial Sequence
  Description of Artificial Sequence: Synthetic oligonucleotide
cuacucaacguccacacug

SEQ ID NO: 389051 - RNA, 19 nt, Artificial Sequence
  Description of Artificial Sequence: Synthetic oligonucleotide
uguauccuagggaaaacaa

SEQ ID NO: 389052 - RNA, 19 nt, Artificial Sequence
  Description of Artificial Sequence: Synthetic oligonucleotide
guuuaacuucaucauucgg

SEQ ID NO: 389053 - RNA, 19 nt, Artificial Sequence
  Description of Artificial Sequence: Synthetic oligonucleotide
ucagaaauaaugagaccuc

SEQ ID NO: 389054 - RNA, 19 nt, Artificial Sequence
  Description of Artificial Sequence: Synthetic oligonucleotide
ucguaaaauuuacuaagau

SEQ ID NO: 389055 - RNA, 19 nt, Artificial Sequence
  Description of Artificial Sequence: Synthetic oligonucleotide
uguauuucuacagcccaag

SEQ ID NO: 389056 - RNA, 19 nt, Artificial Sequence
  Description of Artificial Sequence: Synthetic oligonucleotide
uuguuuuaucuaagagagg

SEQ ID NO: 389057 - RNA, 19 nt, Artificial Sequence
  Description of Artificial Sequence: Synthetic oligonucleotide
gauaucuugagcagguuuc

SEQ ID NO: 389058 - RNA, 19 nt, Artificial Sequence
  Description of Artificial Sequence: Synthetic oligonucleotide
aaaaggugggacauuagaa

SEQ ID NO: 389059 - RNA, 19 nt, Artificial Sequence
  Description of Artificial Sequence: Synthetic oligonucleotide
agcaccauucuuaaacuac

SEQ ID NO: 389060 - RNA, 19 nt, Artificial Sequence
  Description of Artificial Sequence: Synthetic oligonucleotide
auuuagguaagguugcaua

SEQ ID NO: 389061 - RNA, 19 nt, Artificial Sequence
  Description of Artificial Sequence: Synthetic oligonucleotide
aucuuacccaacuacacau

SEQ ID NO: 389062 - RNA, 19 nt, Artificial Sequence
  Description of Artificial Sequence: Synthetic oligonucleotide
cuagauaacacuguuuaca

SEQ ID NO: 389063 - RNA, 19 nt, Artificial Sequence
  Description of Artificial Sequence: Synthetic oligonucleotide
uucuacagcccaagaggcg

SEQ ID NO: 389064 - RNA, 19 nt, Artificial Sequence
  Description of Artificial Sequence: Synthetic oligonucleotide
uggcuuacagguuauuuuc

SEQ ID NO: 389065 - RNA, 19 nt, Artificial Sequence
  Description of Artificial Sequence: Synthetic oligonucleotide
aagauuaacucaguguaua

SEQ ID NO: 389066 - RNA, 19 nt, Artificial Sequence
  Description of Artificial Sequence: Synthetic oligonucleotide
auuaagggcaacagcuuac

SEQ ID NO: 389067 - RNA, 19 nt, Artificial Sequence
  Description of Artificial Sequence: Synthetic oligonucleotide
agcauucccuacaaagugc

SEQ ID NO: 389068 - RNA, 19 nt, Artificial Sequence
  Description of Artificial Sequence: Synthetic oligonucleotide
uaagcacauaacccuuaag

SEQ ID NO: 389069 - RNA, 19 nt, Artificial Sequence
  Description of Artificial Sequence: Synthetic oligonucleotide
uuaacaggauaaacuguaa

SEQ ID NO: 389070 - RNA, 19 nt, Artificial Sequence
  Description of Artificial Sequence: Synthetic oligonucleotide
aacacacucacgcuccaau

SEQ ID NO: 389071 - RNA, 19 nt, Artificial Sequence
  Description of Artificial Sequence: Synthetic oligonucleotide
uccugaauauaacuggcuu

SEQ ID NO: 389072 - RNA, 19 nt, Artificial Sequence
  Description of Artificial Sequence: Synthetic oligonucleotide
uaaacuacucaacguccac

SEQ ID NO: 389073 - RNA, 19 nt, Artificial Sequence
  Description of Artificial Sequence: Synthetic oligonucleotide
gugcaaaacuaauccacag

SEQ ID NO: 389074 - RNA, 19 nt, Artificial Sequence
  Description of Artificial Sequence: Synthetic oligonucleotide
cucuuauuccagacaauac

SEQ ID NO: 389075 - RNA, 19 nt, Artificial Sequence
  Description of Artificial Sequence: Synthetic oligonucleotide
uacuagacuccccuuaaua

SEQ ID NO: 389076 - RNA, 19 nt, Artificial Sequence
  Description of Artificial Sequence: Synthetic oligonucleotide
caugaaguauccucuugac

SEQ ID NO: 389077 - RNA, 19 nt, Artificial Sequence
  Description of Artificial Sequence: Synthetic oligonucleotide
uuaauagcacuuugacuaa

SEQ ID NO: 389078 - RNA, 19 nt, Artificial Sequence
  Description of Artificial Sequence: Synthetic oligonucleotide
augacuagggcaugaacaa

SEQ ID NO: 389079 - RNA, 19 nt, Artificial Sequence
  Description of Artificial Sequence: Synthetic oligonucleotide
auuaggucauuuagauagc

SEQ ID NO: 389080 - RNA, 19 nt, Artificial Sequence
  Description of Artificial Sequence: Synthetic oligonucleotide
gaaauaaugagaccucgau

SEQ ID NO: 389081 - RNA, 19 nt, Artificial Sequence
  Description of Artificial Sequence: Synthetic oligonucleotide
auucuaauuaucauccuua

SEQ ID NO: 389082 - RNA, 19 nt, Artificial Sequence
  Description of Artificial Sequence: Synthetic oligonucleotide
acguauagaaaaggaauca

SEQ ID NO: 389083 - RNA, 19 nt, Artificial Sequence
  Description of Artificial Sequence: Synthetic oligonucleotide
cacagguacuauuucucag

SEQ ID NO: 389084 - RNA, 19 nt, Artificial Sequence
  Description of Artificial Sequence: Synthetic oligonucleotide
aacuaauccacagguacua

SEQ ID NO: 389085 - RNA, 19 nt, Artificial Sequence
  Description of Artificial Sequence: Synthetic oligonucleotide
aggggcuucucccuacaac

SEQ ID NO: 389086 - RNA, 19 nt, Artificial Sequence
  Description of Artificial Sequence: Synthetic oligonucleotide
aauuuagguaagguugcau

SEQ ID NO: 389087 - RNA, 19 nt, Artificial Sequence
  Description of Artificial Sequence: Synthetic oligonucleotide
uuguauccuagggaaaaca

SEQ ID NO: 389088 - RNA, 19 nt, Artificial Sequence
  Description of Artificial Sequence: Synthetic oligonucleotide
gucauuuagauagcagggc

SEQ ID NO: 389089 - RNA, 19 nt, Artificial Sequence
  Description of Artificial Sequence: Synthetic oligonucleotide
gaaccgggaagguccagag

SEQ ID NO: 389090 - RNA, 19 nt, Artificial Sequence
  Description of Artificial Sequence: Synthetic oligonucleotide
ugaaauuaauuaggacaca

SEQ ID NO: 389091 - RNA, 19 nt, Artificial Sequence
  Description of Artificial Sequence: Synthetic oligonucleotide
caagaggcgcaauagucuc

SEQ ID NO: 389092 - RNA, 19 nt, Artificial Sequence
  Description of Artificial Sequence: Synthetic oligonucleotide
uaggauuauguuacaggua

SEQ ID NO: 389093 - RNA, 19 nt, Artificial Sequence
  Description of Artificial Sequence: Synthetic oligonucleotide
ugggccuacuaaaaguaau

SEQ ID NO: 389094 - RNA, 19 nt, Artificial Sequence
  Description of Artificial Sequence: Synthetic oligonucleotide
uauaacuggcuuacagguu

SEQ ID NO: 389095 - RNA, 19 nt, Artificial Sequence
  Description of Artificial Sequence: Synthetic oligonucleotide
cucacgcuccaauuucugc

SEQ ID NO: 389096 - RNA, 19 nt, Artificial Sequence
  Description of Artificial Sequence: Synthetic oligonucleotide
  modified_base (16)..(16): a, c, u, g, unknown or other
acauaacccuuaaggnuag

SEQ ID NO: 389097 - RNA, 19 nt, Artificial Sequence
  Description of Artificial Sequence: Synthetic oligonucleotide
auaagcacauaacccuuaa

SEQ ID NO: 389098 - RNA, 19 nt, Artificial Sequence
  Description of Artificial Sequence: Synthetic oligonucleotide
cagaagguuacucuuacua

SEQ ID NO: 389099 - RNA, 19 nt, Artificial Sequence
  Description of Artificial Sequence: Synthetic oligonucleotide
aggcgcaauagucucaaau

SEQ ID NO: 389100 - RNA, 19 nt, Artificial Sequence
  Description of Artificial Sequence: Synthetic oligonucleotide
caauaccaaaggugccugg

SEQ ID NO: 389101 - RNA, 19 nt, Artificial Sequence
  Description of Artificial Sequence: Synthetic oligonucleotide
ucuugacacguucaucauu

SEQ ID NO: 389102 - RNA, 19 nt, Artificial Sequence
  Description of Artificial Sequence: Synthetic oligonucleotide
  modified_base (6)..(6): a, c, u, g, unknown or other
auuucngcuucaaugcccu

SEQ ID NO: 389103 - RNA, 19 nt, Artificial Sequence
  Description of Artificial Sequence: Synthetic oligonucleotide
  modified_base (4)..(4): a, c, u, g, unknown or other
aggnuagcaucaugaacaa

SEQ ID NO: 389104 - RNA, 19 nt, Artificial Sequence
  Description of Artificial Sequence: Synthetic oligonucleotide
uguaaagcauggacugaua

SEQ ID NO: 389105 - RNA, 19 nt, Artificial Sequence
  Description of Artificial Sequence: Synthetic oligonucleotide
guaugcaacacacauuaau

SEQ ID NO: 389106 - RNA, 19 nt, Artificial Sequence
  Description of Artificial Sequence: Synthetic oligonucleotide
uauaaccaauugacauacu

SEQ ID NO: 389107 - RNA, 19 nt, Artificial Sequence
  Description of Artificial Sequence: Synthetic oligonucleotide
caucauucggcuauaagau

SEQ ID NO: 389108 - RNA, 19 nt, Artificial Sequence
  Description of Artificial Sequence: Synthetic oligonucleotide
agaaauaaugagaccucga

SEQ ID NO: 389109 - RNA, 19 nt, Artificial Sequence
  Description of Artificial Sequence: Synthetic oligonucleotide
acauacuagauaacacugu

SEQ ID NO: 389110 - RNA, 19 nt, Artificial Sequence
  Description of Artificial Sequence: Synthetic oligonucleotide
uugggccuacuaaaaguaa

SEQ ID NO: 389111 - RNA, 19 nt, Artificial Sequence
  Description of Artificial Sequence: Synthetic oligonucleotide
gaugugcucagcauuuuaa

SEQ ID NO: 389112 - RNA, 19 nt, Artificial Sequence
  Description of Artificial Sequence: Synthetic oligonucleotide
uuacuugggaaagcauaga

SEQ ID NO: 389113 - RNA, 19 nt, Artificial Sequence
  Description of Artificial Sequence: Synthetic oligonucleotide
ugaucucagcauucccuac

SEQ ID NO: 389114 - RNA, 19 nt, Artificial Sequence
  Description of Artificial Sequence: Synthetic oligonucleotide
ucuuacccaacuacacauu

SEQ ID NO: 389115 - RNA, 19 nt, Artificial Sequence
  Description of Artificial Sequence: Synthetic oligonucleotide
ggacugauaucuugagcag

SEQ ID NO: 389116 - RNA, 19 nt, Artificial Sequence
  Description of Artificial Sequence: Synthetic oligonucleotide
uuacuagacuccccuuaau

SEQ ID NO: 389117 - RNA, 19 nt, Artificial Sequence
  Description of Artificial Sequence: Synthetic oligonucleotide
gacaauaccaaaggugccu

SEQ ID NO: 389118 - RNA, 19 nt, Artificial Sequence
  Description of Artificial Sequence: Synthetic oligonucleotide
auaucuugagcagguuucu

SEQ ID NO: 389119 - RNA, 19 nt, Artificial Sequence
  Description of Artificial Sequence: Synthetic oligonucleotide
aaagugcaauagugacaca

SEQ ID NO: 389120 - RNA, 19 nt, Artificial Sequence
  Description of Artificial Sequence: Synthetic oligonucleotide
auugggccuacuaaaagua

SEQ ID NO: 389121 - RNA, 19 nt, Artificial Sequence
  Description of Artificial Sequence: Synthetic oligonucleotide
ccuacuaaaaguaauuuau

SEQ ID NO: 389122 - RNA, 19 nt, Artificial Sequence
  Description of Artificial Sequence: Synthetic oligonucleotide
gaaguauccucuugacugu

SEQ ID NO: 389123 - RNA, 19 nt, Artificial Sequence
  Description of Artificial Sequence: Synthetic oligonucleotide
uuuagauagcagggcauuu

SEQ ID NO: 389124 - RNA, 19 nt, Artificial Sequence
  Description of Artificial Sequence: Synthetic oligonucleotide
uuccuaucuuacccaacua

SEQ ID NO: 389125 - RNA, 19 nt, Artificial Sequence
  Description of Artificial Sequence: Synthetic oligonucleotide
aucauucggcuauaagauu

SEQ ID NO: 389126 - RNA, 19 nt, Artificial Sequence
  Description of Artificial Sequence: Synthetic oligonucleotide
cauucccuacaaagugccc

SEQ ID NO: 389127 - RNA, 19 nt, Artificial Sequence
  Description of Artificial Sequence: Synthetic oligonucleotide
cccuuaauagcacuuugac

SEQ ID NO: 389128 - RNA, 19 nt, Artificial Sequence
  Description of Artificial Sequence: Synthetic oligonucleotide
accauguuauacguauaga

SEQ ID NO: 389129 - RNA, 19 nt, Artificial Sequence
  Description of Artificial Sequence: Synthetic oligonucleotide
cuuacuccuguugguuggg

SEQ ID NO: 389130 - RNA, 19 nt, Artificial Sequence
  Description of Artificial Sequence: Synthetic oligonucleotide
accaauugacauacuagau

SEQ ID NO: 389131 - RNA, 19 nt, Artificial Sequence
  Description of Artificial Sequence: Synthetic oligonucleotide
  modified_base (16)..(16): a, c, u, g, unknown or other
ccaacuacacauuucngcu

SEQ ID NO: 389132 - RNA, 19 nt, Artificial Sequence
  Description of Artificial Sequence: Synthetic oligonucleotide
gcgcaauagucucaaauuc

SEQ ID NO: 389133 - RNA, 19 nt, Artificial Sequence
  Description of Artificial Sequence: Synthetic oligonucleotide
agcuaguacaagggaacca

SEQ ID NO: 389134 - RNA, 19 nt, Artificial Sequence
  Description of Artificial Sequence: Synthetic oligonucleotide
auucggcuauaagauuaag

SEQ ID NO: 389135 - RNA, 19 nt, Artificial Sequence
  Description of Artificial Sequence: Synthetic oligonucleotide
uaacuucaucauucggcua

SEQ ID NO: 389136 - RNA, 19 nt, Artificial Sequence
  Description of Artificial Sequence: Synthetic oligonucleotide
gaccucgaugacauuuuac

SEQ ID NO: 389137 - RNA, 19 nt, Artificial Sequence
  Description of Artificial Sequence: Synthetic oligonucleotide
ccuacaaccuugcagcuca

SEQ ID NO: 389138 - RNA, 19 nt, Artificial Sequence
  Description of Artificial Sequence: Synthetic oligonucleotide
cucaacguccacacuggga

SEQ ID NO: 389139 - RNA, 19 nt, Artificial Sequence
  Description of Artificial Sequence: Synthetic oligonucleotide
ggaaggagugacauguaca

SEQ ID NO: 389140 - RNA, 19 nt, Artificial Sequence
  Description of Artificial Sequence: Synthetic oligonucleotide
ucccuacaaccuugcagcu

SEQ ID NO: 389141 - RNA, 19 nt, Artificial Sequence
  Description of Artificial Sequence: Synthetic oligonucleotide
gcuagcacaauuccccaga

SEQ ID NO: 389142 - RNA, 19 nt, Artificial Sequence
  Description of Artificial Sequence: Synthetic oligonucleotide
aagaggcgcaauagucuca

SEQ ID NO: 389143 - RNA, 19 nt, Artificial Sequence
  Description of Artificial Sequence: Synthetic oligonucleotide
ucccuuacugaggcaaggu

SEQ ID NO: 389144 - RNA, 19 nt, Artificial Sequence
  Description of Artificial Sequence: Synthetic oligonucleotide
acacacucacgcuccaauu

SEQ ID NO: 389145 - RNA, 19 nt, Artificial Sequence
  Description of Artificial Sequence: Synthetic oligonucleotide
ugacuccaaucuuguauuu

SEQ ID NO: 389146 - RNA, 19 nt, Artificial Sequence
  Description of Artificial Sequence: Synthetic oligonucleotide
cagccugagaagauuaacu

SEQ ID NO: 389147 - RNA, 19 nt, Artificial Sequence
  Description of Artificial Sequence: Synthetic oligonucleotide
auacaccacguuucuugau

SEQ ID NO: 389148 - RNA, 19 nt, Artificial Sequence
  Description of Artificial Sequence: Synthetic oligonucleotide
aucuaagagaggagaggga

SEQ ID NO: 389149 - RNA, 19 nt, Artificial Sequence
  Description of Artificial Sequence: Synthetic oligonucleotide
cauucggcuauaagauuaa

SEQ ID NO: 389150 - RNA, 19 nt, Artificial Sequence
  Description of Artificial Sequence: Synthetic oligonucleotide
caccacguuucuugauuug

SEQ ID NO: 389151 - RNA, 19 nt, Artificial Sequence
  Description of Artificial Sequence: Synthetic oligonucleotide
gggcaugaacaaguaaacc

SEQ ID NO: 389152 - RNA, 19 nt, Artificial Sequence
  Description of Artificial Sequence: Synthetic oligonucleotide
aggcucauagcuaguacaa

SEQ ID NO: 389153 - RNA, 19 nt, Artificial Sequence
  Description of Artificial Sequence: Synthetic oligonucleotide
agaggcgcaauagucucaa

SEQ ID NO: 389154 - RNA, 19 nt, Artificial Sequence
  Description of Artificial Sequence: Synthetic oligonucleotide
  modified_base (18)..(18): a, c, u, g, unknown or other
gcacauaacccuuaaggnu

SEQ ID NO: 389155 - RNA, 19 nt, Artificial Sequence
  Description of Artificial Sequence: Synthetic oligonucleotide
ggcuuacagguuauuuucc

SEQ ID NO: 389156 - RNA, 19 nt, Artificial Sequence
  Description of Artificial Sequence: Synthetic oligonucleotide
  modified_base (18)..(18): a, c, u, g, unknown or other
acccaacuacacauuucng

SEQ ID NO: 389157 - RNA, 19 nt, Artificial Sequence
  Description of Artificial Sequence: Synthetic oligonucleotide
cugacuccaaucuuguauu

SEQ ID NO: 389158 - RNA, 19 nt, Artificial Sequence
  Description of Artificial Sequence: Synthetic oligonucleotide
ggugcauguuuaaugacua

SEQ ID NO: 389159 - RNA, 19 nt, Artificial Sequence
  Description of Artificial Sequence: Synthetic oligonucleotide
  modified_base (9)..(9): a, c, u, g, unknown or other
ccuuaaggnuagcaucaug

SEQ ID NO: 389160 - RNA, 19 nt, Artificial Sequence
  Description of Artificial Sequence: Synthetic oligonucleotide
accuccugacagcuaguaa

SEQ ID NO: 389161 - RNA, 19 nt, Artificial Sequence
  Description of Artificial Sequence: Synthetic oligonucleotide
aaguagcaaauaggagguu

SEQ ID NO: 389162 - RNA, 19 nt, Artificial Sequence
  Description of Artificial Sequence: Synthetic oligonucleotide
acucacgcuccaauuucug

SEQ ID NO: 389163 - RNA, 19 nt, Artificial Sequence
  Description of Artificial Sequence: Synthetic oligonucleotide
  modified_base (15)..(15): a, c, u, g, unknown or other
cauaacccuuaaggnuagc

SEQ ID NO: 389164 - RNA, 19 nt, Artificial Sequence
  Description of Artificial Sequence: Synthetic oligonucleotide
gcuccaaaagguagcagga

SEQ ID NO: 389165 - RNA, 19 nt, Artificial Sequence
  Description of Artificial Sequence: Synthetic oligonucleotide
cagcuagcacaauucccca

SEQ ID NO: 389166 - RNA, 19 nt, Artificial Sequence
  Description of Artificial Sequence: Synthetic oligonucleotide
ggcgcaauagucucaaauu

SEQ ID NO: 389167 - RNA, 19 nt, Artificial Sequence
  Description of Artificial Sequence: Synthetic oligonucleotide
agguugcauacuaauuguu

SEQ ID NO: 389168 - RNA, 19 nt, Artificial Sequence
  Description of Artificial Sequence: Synthetic oligonucleotide
aagcauggacugauaucuu

SEQ ID NO: 389169 - RNA, 19 nt, Artificial Sequence
  Description of Artificial Sequence: Synthetic oligonucleotide
cacgcuccaauuucugcua

SEQ ID NO: 389170 - RNA, 19 nt, Artificial Sequence
  Description of Artificial Sequence: Synthetic oligonucleotide
  modified_base (5)..(5): a, c, u, g, unknown or other
uuucngcuucaaugcccuu

SEQ ID NO: 389171 - RNA, 19 nt, Artificial Sequence
  Description of Artificial Sequence: Synthetic oligonucleotide
cagguuauuuucccuuacu

SEQ ID NO: 389172 - RNA, 19 nt, Artificial Sequence
  Description of Artificial Sequence: Synthetic oligonucleotide
cauccaguggugcauguuu

SEQ ID NO: 389173 - RNA, 19 nt, Artificial Sequence
  Description of Artificial Sequence: Synthetic oligonucleotide
ccccuuaauagcacuuuga

SEQ ID NO: 389174 - RNA, 19 nt, Artificial Sequence
  Description of Artificial Sequence: Synthetic oligonucleotide
cacucacgcuccaauuucu

SEQ ID NO: 389175 - RNA, 19 nt, Artificial Sequence
  Description of Artificial Sequence: Synthetic oligonucleotide
ccaguuagcugugaaacua

SEQ ID NO: 389176 - RNA, 19 nt, Artificial Sequence
  Description of Artificial Sequence: Synthetic oligonucleotide
gaacacacucacgcuccaa

SEQ ID NO: 389177 - RNA, 19 nt, Artificial Sequence
  Description of Artificial Sequence: Synthetic oligonucleotide
acugagccuucaaggaaua

SEQ ID NO: 389178 - RNA, 19 nt, Artificial Sequence
  Description of Artificial Sequence: Synthetic oligonucleotide
ggaaccgggaagguccaga

SEQ ID NO: 389179 - RNA, 19 nt, Artificial Sequence
  Description of Artificial Sequence: Synthetic oligonucleotide
gccuauucucuuacuccug

SEQ ID NO: 389180 - RNA, 19 nt, Artificial Sequence
  Description of Artificial Sequence: Synthetic oligonucleotide
ucccuacaaagugccccau

SEQ ID NO: 389181 - RNA, 19 nt, Artificial Sequence
  Description of Artificial Sequence: Synthetic oligonucleotide
gaggcgcaauagucucaaa

SEQ ID NO: 389182 - RNA, 19 nt, Artificial Sequence
  Description of Artificial Sequence: Synthetic oligonucleotide
cucuuacuagacuccccuu

SEQ ID NO: 389183 - RNA, 19 nt, Artificial Sequence
  Description of Artificial Sequence: Synthetic oligonucleotide
caggaccuacagccugaga

SEQ ID NO: 389184 - RNA, 19 nt, Artificial Sequence
  Description of Artificial Sequence: Synthetic oligonucleotide
ccuuacuccucuggguuau

SEQ ID NO: 389185 - RNA, 19 nt, Artificial Sequence
  Description of Artificial Sequence: Synthetic oligonucleotide
cccucuuauuccagacaau

SEQ ID NO: 389186 - RNA, 19 nt, Artificial Sequence
  Description of Artificial Sequence: Synthetic oligonucleotide
cauaaagucauccugaugg

SEQ ID NO: 389187 - RNA, 19 nt, Artificial Sequence
  Description of Artificial Sequence: Synthetic oligonucleotide
ucuuugacgaucaaucugg

SEQ ID NO: 389188 - RNA, 19 nt, Artificial Sequence
  Description of Artificial Sequence: Synthetic oligonucleotide
aagauuuugcacucaacgg

SEQ ID NO: 389189 - RNA, 19 nt, Artificial Sequence
  Description of Artificial Sequence: Synthetic oligonucleotide
uuaaauugggcaaugucag

SEQ ID NO: 389190 - RNA, 19 nt, Artificial Sequence
  Description of Artificial Sequence: Synthetic oligonucleotide
uugacgaucaaucuggagc

SEQ ID NO: 389191 - RNA, 19 nt, Artificial Sequence
  Description of Artificial Sequence: Synthetic oligonucleotide
auuaccagggucuuucucc

SEQ ID NO: 389192 - RNA, 19 nt, Artificial Sequence
  Description of Artificial Sequence: Synthetic oligonucleotide
ucugaaauaggccggaugc

SEQ ID NO: 389193 - RNA, 19 nt, Artificial Sequence
  Description of Artificial Sequence: Synthetic oligonucleotide
ugaaagaaagucauguccc

SEQ ID NO: 389194 - RNA, 19 nt, Artificial Sequence
  Description of Artificial Sequence: Synthetic oligonucleotide
aaagucaugucccucuggg

SEQ ID NO: 389195 - RNA, 19 nt, Artificial Sequence
  Description of Artificial Sequence: Synthetic oligonucleotide
agauuuugcacucaacggg

SEQ ID NO: 389196 - RNA, 19 nt, Artificial Sequence
  Description of Artificial Sequence: Synthetic oligonucleotide
aaaguucuagcccuuagug

SEQ ID NO: 389197 - RNA, 19 nt, Artificial Sequence
  Description of Artificial Sequence: Synthetic oligonucleotide
aacaagucaagcugugaac

SEQ ID NO: 389198 - RNA, 19 nt, Artificial Sequence
  Description of Artificial Sequence: Synthetic oligonucleotide
aacacuagcauggagagga

SEQ ID NO: 389199 - RNA, 19 nt, Artificial Sequence
  Description of Artificial Sequence: Synthetic oligonucleotide
uguaaagaauucaucacac

SEQ ID NO: 389200 - RNA, 19 nt, Artificial Sequence
  Description of Artificial Sequence: Synthetic oligonucleotide
gaaaguuccaacaucauca

SEQ ID NO: 389201 - RNA, 19 nt, Artificial Sequence
  Description of Artificial Sequence: Synthetic oligonucleotide
aaguacauuccccagagau

SEQ ID NO: 389202 - RNA, 19 nt, Artificial Sequence
  Description of Artificial Sequence: Synthetic oligonucleotide
auucaucacaccauuagcc

SEQ ID NO: 389203 - RNA, 19 nt, Artificial Sequence
  Description of Artificial Sequence: Synthetic oligonucleotide
aucaguaggaaccguagcg

SEQ ID NO: 389204 - RNA, 19 nt, Artificial Sequence
  Description of Artificial Sequence: Synthetic oligonucleotide
accauuagccaacacugcc

SEQ ID NO: 389205 - RNA, 19 nt, Artificial Sequence
  Description of Artificial Sequence: Synthetic oligonucleotide
ucacacaccacacacagaa

SEQ ID NO: 389206 - RNA, 19 nt, Artificial Sequence
  Description of Artificial Sequence: Synthetic oligonucleotide
uucgacaccacuuuguuuc

SEQ ID NO: 389207 - RNA, 19 nt, Artificial Sequence
  Description of Artificial Sequence: Synthetic oligonucleotide
cucucagacaccuaggcag

SEQ ID NO: 389208 - RNA, 19 nt, Artificial Sequence
  Description of Artificial Sequence: Synthetic oligonucleotide
cauaagaggccacugacag

SEQ ID NO: 389209 - RNA, 19 nt, Artificial Sequence
  Description of Artificial Sequence: Synthetic oligonucleotide
aaacaagucaagcugugaa

SEQ ID NO: 389210 - RNA, 19 nt, Artificial Sequence
  Description of Artificial Sequence: Synthetic oligonucleotide
agaguauggggccugcagc

SEQ ID NO: 389211 - RNA, 19 nt, Artificial Sequence
  Description of Artificial Sequence: Synthetic oligonucleotide
aacaaauccccagauccac

SEQ ID NO: 389212 - RNA, 19 nt, Artificial Sequence
  Description of Artificial Sequence: Synthetic oligonucleotide
agaacacuagcauggagag

SEQ ID NO: 389213 - RNA, 19 nt, Artificial Sequence
  Description of Artificial Sequence: Synthetic oligonucleotide
uagugaauuaccagggucu

SEQ ID NO: 389214 - RNA, 19 nt, Artificial Sequence
  Description of Artificial Sequence: Synthetic oligonucleotide
aauaaacccuuuaggugcc

SEQ ID NO: 389215 - RNA, 19 nt, Artificial Sequence
  Description of Artificial Sequence: Synthetic oligonucleotide
cucaagcauagacagaggg

SEQ ID NO: 389216 - RNA, 19 nt, Artificial Sequence
  Description of Artificial Sequence: Synthetic oligonucleotide
cagauaaaggcucucagac

SEQ ID NO: 389217 - RNA, 19 nt, Artificial Sequence
  Description of Artificial Sequence: Synthetic oligonucleotide
gacgaggaggcccagacag

SEQ ID NO: 389218 - RNA, 19 nt, Artificial Sequence
  Description of Artificial Sequence: Synthetic oligonucleotide
uucuuugacgaucaaucug

SEQ ID NO: 389219 - RNA, 19 nt, Artificial Sequence
  Description of Artificial Sequence: Synthetic oligonucleotide
uuagugaauuaccaggguc

SEQ ID NO: 389220 - RNA, 19 nt, Artificial Sequence
  Description of Artificial Sequence: Synthetic oligonucleotide
uauuaucuauccaaagauc

SEQ ID NO: 389221 - RNA, 19 nt, Artificial Sequence
  Description of Artificial Sequence: Synthetic oligonucleotide
acaagucaagcugugaacg

SEQ ID NO: 389222 - RNA, 19 nt, Artificial Sequence
  Description of Artificial Sequence: Synthetic oligonucleotide
aauuaccagggucuuucuc

SEQ ID NO: 389223 - RNA, 19 nt, Artificial Sequence
  Description of Artificial Sequence: Synthetic oligonucleotide
uuuauuucgacaccacuuu

SEQ ID NO: 389224 - RNA, 19 nt, Artificial Sequence
  Description of Artificial Sequence: Synthetic oligonucleotide
acucacacaccacacacag

SEQ ID NO: 389225 - RNA, 19 nt, Artificial Sequence
  Description of Artificial Sequence: Synthetic oligonucleotide
uaaagccugcaaaagacuc

SEQ ID NO: 389226 - RNA, 19 nt, Artificial Sequence
  Description of Artificial Sequence: Synthetic oligonucleotide
aguucuagcccuuagugaa

SEQ ID NO: 389227 - RNA, 19 nt, Artificial Sequence
  Description of Artificial Sequence: Synthetic oligonucleotide
ugacgaucaaucuggagcu

SEQ ID NO: 389228 - RNA, 19 nt, Artificial Sequence
  Description of Artificial Sequence: Synthetic oligonucleotide
cauauuaucuauccaaaga

SEQ ID NO: 389229 - RNA, 19 nt, Artificial Sequence
  Description of Artificial Sequence: Synthetic oligonucleotide
cauagaggcaaccauggac

SEQ ID NO: 389230 - RNA, 19 nt, Artificial Sequence
  Description of Artificial Sequence: Synthetic oligonucleotide
aaagaucagugccaugccu

SEQ ID NO: 389231 - RNA, 19 nt, Artificial Sequence
  Description of Artificial Sequence: Synthetic oligonucleotide
cugaguaugcucuguaaag

SEQ ID NO: 389232 - RNA, 19 nt, Artificial Sequence
  Description of Artificial Sequence: Synthetic oligonucleotide
aaguucuagcccuuaguga

SEQ ID NO: 389233 - RNA, 19 nt, Artificial Sequence
  Description of Artificial Sequence: Synthetic oligonucleotide
uccccuggaacccauaaga

SEQ ID NO: 389234 - RNA, 19 nt, Artificial Sequence
  Description of Artificial Sequence: Synthetic oligonucleotide
agcuucgggacaccaagcc

SEQ ID NO: 389235 - RNA, 19 nt, Artificial Sequence
  Description of Artificial Sequence: Synthetic oligonucleotide
ccuaaacccagaaugaugc

SEQ ID NO: 389236 - RNA, 19 nt, Artificial Sequence
  Description of Artificial Sequence: Synthetic oligonucleotide
caagcauagacagagggug

SEQ ID NO: 389237 - RNA, 19 nt, Artificial Sequence
  Description of Artificial Sequence: Synthetic oligonucleotide
aacuagacccauaaaguca

SEQ ID NO: 389238 - RNA, 19 nt, Artificial Sequence
  Description of Artificial Sequence: Synthetic oligonucleotide
aggagcauugcucauauua

SEQ ID NO: 389239 - RNA, 19 nt, Artificial Sequence
  Description of Artificial Sequence: Synthetic oligonucleotide
gcugaucccaaauaaaccc

SEQ ID NO: 389240 - RNA, 19 nt, Artificial Sequence
  Description of Artificial Sequence: Synthetic oligonucleotide
ucaaugcgcaggcaaagga

SEQ ID NO: 389241 - RNA, 19 nt, Artificial Sequence
  Description of Artificial Sequence: Synthetic oligonucleotide
ugacacccugcuuaaauug

SEQ ID NO: 389242 - RNA, 19 nt, Artificial Sequence
  Description of Artificial Sequence: Synthetic oligonucleotide
ucucgaccaaagaacaugu

SEQ ID NO: 389243 - RNA, 19 nt, Artificial Sequence
  Description of Artificial Sequence: Synthetic oligonucleotide
uuauuucgacaccacuuug

SEQ ID NO: 389244 - RNA, 19 nt, Artificial Sequence
  Description of Artificial Sequence: Synthetic oligonucleotide
uguccaggaccccuaaacc

SEQ ID NO: 389245 - RNA, 19 nt, Artificial Sequence
  Description of Artificial Sequence: Synthetic oligonucleotide
uacagcacgacucuugcua

SEQ ID NO: 389246 - RNA, 19 nt, Artificial Sequence
  Description of Artificial Sequence: Synthetic oligonucleotide
ggugcuaugacccacaaua

SEQ ID NO: 389247 - RNA, 19 nt, Artificial Sequence
  Description of Artificial Sequence: Synthetic oligonucleotide
aagucaugucccucugggg

SEQ ID NO: 389248 - RNA, 19 nt, Artificial Sequence
  Description of Artificial Sequence: Synthetic oligonucleotide
agucaugucccucugggga

SEQ ID NO: 389249 - RNA, 19 nt, Artificial Sequence
  Description of Artificial Sequence: Synthetic oligonucleotide
agacucaugccuucccuac

SEQ ID NO: 389250 - RNA, 19 nt, Artificial Sequence
  Description of Artificial Sequence: Synthetic oligonucleotide
ugguucuuucugaaauagg

SEQ ID NO: 389251 - RNA, 19 nt, Artificial Sequence
  Description of Artificial Sequence: Synthetic oligonucleotide
ccuggaacccauaagaggc

SEQ ID NO: 389252 - RNA, 19 nt, Artificial Sequence
  Description of Artificial Sequence: Synthetic oligonucleotide
ucaguaaagcucugguuac

SEQ ID NO: 389253 - RNA, 19 nt, Artificial Sequence
  Description of Artificial Sequence: Synthetic oligonucleotide
gacucaagaccugaguucc

SEQ ID NO: 389254 - RNA, 19 nt, Artificial Sequence
  Description of Artificial Sequence: Synthetic oligonucleotide
auaauggagcuuuucaguu

SEQ ID NO: 389255 - RNA, 19 nt, Artificial Sequence
  Description of Artificial Sequence: Synthetic oligonucleotide
augaugcaaagaaugaaag

SEQ ID NO: 389256 - RNA, 19 nt, Artificial Sequence
  Description of Artificial Sequence: Synthetic oligonucleotide
aguguuagggccauguuca

SEQ ID NO: 389257 - RNA, 19 nt, Artificial Sequence
  Description of Artificial Sequence: Synthetic oligonucleotide
ugaaauaggccggaugcug

SEQ ID NO: 389258 - RNA, 19 nt, Artificial Sequence
  Description of Artificial Sequence: Synthetic oligonucleotide
guaggaaccguagcgaucc

SEQ ID NO: 389259 - RNA, 19 nt, Artificial Sequence
  Description of Artificial Sequence: Synthetic oligonucleotide
agaagauugcucaggcccc

SEQ ID NO: 389260 - RNA, 19 nt, Artificial Sequence
  Description of Artificial Sequence: Synthetic oligonucleotide
uacauggauccuaaagccu

SEQ ID NO: 389261 - RNA, 19 nt, Artificial Sequence
  Description of Artificial Sequence: Synthetic oligonucleotide
aagcauagacagagggugc

SEQ ID NO: 389262 - RNA, 19 nt, Artificial Sequence
  Description of Artificial Sequence: Synthetic oligonucleotide
guaucucuagaagacgagg

SEQ ID NO: 389263 - RNA, 19 nt, Artificial Sequence
  Description of Artificial Sequence: Synthetic oligonucleotide
uccuaagccauccuccccu

SEQ ID NO: 389264 - RNA, 19 nt, Artificial Sequence
  Description of Artificial Sequence: Synthetic oligonucleotide
uuugacgaucaaucuggag

SEQ ID NO: 389265 - RNA, 19 nt, Artificial Sequence
  Description of Artificial Sequence: Synthetic oligonucleotide
aaccaaaaguuucucccaa

SEQ ID NO: 389266 - RNA, 19 nt, Artificial Sequence
  Description of Artificial Sequence: Synthetic oligonucleotide
acaaacagugcugaaagaa

SEQ ID NO: 389267 - RNA, 19 nt, Artificial Sequence
  Description of Artificial Sequence: Synthetic oligonucleotide
ugcuaugacccacaauagu

SEQ ID NO: 389268 - RNA, 19 nt, Artificial Sequence
  Description of Artificial Sequence: Synthetic oligonucleotide
caauccacagguaggguug

SEQ ID NO: 389269 - RNA, 19 nt, Artificial Sequence
  Description of Artificial Sequence: Synthetic oligonucleotide
agacuugacacccugcuua

SEQ ID NO: 389270 - RNA, 19 nt, Artificial Sequence
  Description of Artificial Sequence: Synthetic oligonucleotide
guaggccagacgcauagag

SEQ ID NO: 389271 - RNA, 19 nt, Artificial Sequence
  Description of Artificial Sequence: Synthetic oligonucleotide
aguaaagcucugguuacuc

SEQ ID NO: 389272 - RNA, 19 nt, Artificial Sequence
  Description of Artificial Sequence: Synthetic oligonucleotide
gaucaguaggaaccguagc

SEQ ID NO: 389273 - RNA, 19 nt, Artificial Sequence
  Description of Artificial Sequence: Synthetic oligonucleotide
ugcaacaggcuaaguagca

SEQ ID NO: 389274 - RNA, 19 nt, Artificial Sequence
  Description of Artificial Sequence: Synthetic oligonucleotide
agugacuaggagcauugcu

SEQ ID NO: 389275 - RNA, 19 nt, Artificial Sequence
  Description of Artificial Sequence: Synthetic oligonucleotide
guagcgauccuguaaagaa

SEQ ID NO: 389276 - RNA, 19 nt, Artificial Sequence
  Description of Artificial Sequence: Synthetic oligonucleotide
ugcaaaagacucaugccuu

SEQ ID NO: 389277 - RNA, 19 nt, Artificial Sequence
  Description of Artificial Sequence: Synthetic oligonucleotide
aaugcgcaggcaaaggaca

SEQ ID NO: 389278 - RNA, 19 nt, Artificial Sequence
  Description of Artificial Sequence: Synthetic oligonucleotide
ugcucauauuaucuaucca

SEQ ID NO: 389279 - RNA, 19 nt, Artificial Sequence
  Description of Artificial Sequence: Synthetic oligonucleotide
gaaccaaaaguuucuccca

SEQ ID NO: 389280 - RNA, 19 nt, Artificial Sequence
  Description of Artificial Sequence: Synthetic oligonucleotide
aaauaggccggaugcugga

SEQ ID NO: 389281 - RNA, 19 nt, Artificial Sequence
  Description of Artificial Sequence: Synthetic oligonucleotide
ucaguaggaaccguagcga

SEQ ID NO: 389282 - RNA, 19 nt, Artificial Sequence
  Description of Artificial Sequence: Synthetic oligonucleotide
agaaugaugcaaagaauga

SEQ ID NO: 389283 - RNA, 19 nt, Artificial Sequence
  Description of Artificial Sequence: Synthetic oligonucleotide
agcacggagugggagaugg

SEQ ID NO: 389284 - RNA, 19 nt, Artificial Sequence
  Description of Artificial Sequence: Synthetic oligonucleotide
aggcgaaaguuccaacauc

SEQ ID NO: 389285 - RNA, 19 nt, Artificial Sequence
  Description of Artificial Sequence: Synthetic oligonucleotide
ucgggaagaacuagaccca

SEQ ID NO: 389286 - RNA, 19 nt, Artificial Sequence
  Description of Artificial Sequence: Synthetic oligonucleotide
gaugguuacuucggguucc

SEQ ID NO: 389287 - RNA, 19 nt, Artificial Sequence
  Description of Artificial Sequence: Synthetic oligonucleotide
acauggauccuaaagccug

SEQ ID NO: 389288 - RNA, 19 nt, Artificial Sequence
  Description of Artificial Sequence: Synthetic oligonucleotide
agacccauaaagucauccu

SEQ ID NO: 389289 - RNA, 19 nt, Artificial Sequence
  Description of Artificial Sequence: Synthetic oligonucleotide
agaauccaccucucgacca

SEQ ID NO: 389290 - RNA, 19 nt, Artificial Sequence
  Description of Artificial Sequence: Synthetic oligonucleotide
gaguggucuguguuguuug

SEQ ID NO: 389291 - RNA, 19 nt, Artificial Sequence
  Description of Artificial Sequence: Synthetic oligonucleotide
gcuaugacccacaauagug

SEQ ID NO: 389292 - RNA, 19 nt, Artificial Sequence
  Description of Artificial Sequence: Synthetic oligonucleotide
acagcacgacucuugcuag

SEQ ID NO: 389293 - RNA, 19 nt, Artificial Sequence
  Description of Artificial Sequence: Synthetic oligonucleotide
gccugcaaaagacucaugc

SEQ ID NO: 389294 - RNA, 19 nt, Artificial Sequence
  Description of Artificial Sequence: Synthetic oligonucleotide
uguuagggccauguucagg

SEQ ID NO: 389295 - RNA, 19 nt, Artificial Sequence
  Description of Artificial Sequence: Synthetic oligonucleotide
auaguggcagauaaaggcu

SEQ ID NO: 389296 - RNA, 19 nt, Artificial Sequence
  Description of Artificial Sequence: Synthetic oligonucleotide
gaguaugcucuguaaagaa

SEQ ID NO: 389297 - RNA, 19 nt, Artificial Sequence
  Description of Artificial Sequence: Synthetic oligonucleotide
aaagccugcaaaagacuca

SEQ ID NO: 389298 - RNA, 19 nt, Artificial Sequence
  Description of Artificial Sequence: Synthetic oligonucleotide
acuucccuccggcuggugg

SEQ ID NO: 389299 - RNA, 19 nt, Artificial Sequence
  Description of Artificial Sequence: Synthetic oligonucleotide
gugacaaagaagauugcuc

SEQ ID NO: 389300 - RNA, 19 nt, Artificial Sequence
  Description of Artificial Sequence: Synthetic oligonucleotide
gagcauugcucauauuauc

SEQ ID NO: 389301 - RNA, 19 nt, Artificial Sequence
  Description of Artificial Sequence: Synthetic oligonucleotide
ugacgagcuucacuggacu

SEQ ID NO: 389302 - RNA, 19 nt, Artificial Sequence
  Description of Artificial Sequence: Synthetic oligonucleotide
cucauauuaucuauccaaa

SEQ ID NO: 389303 - RNA, 19 nt, Artificial Sequence
  Description of Artificial Sequence: Synthetic oligonucleotide
guuacucaccuucugagcu

SEQ ID NO: 389304 - RNA, 19 nt, Artificial Sequence
  Description of Artificial Sequence: Synthetic oligonucleotide
gcucauauuaucuauccaa

SEQ ID NO: 389305 - RNA, 19 nt, Artificial Sequence
  Description of Artificial Sequence: Synthetic oligonucleotide
cuucgggacaccaagccca

SEQ ID NO: 389306 - RNA, 19 nt, Artificial Sequence
  Description of Artificial Sequence: Synthetic oligonucleotide
uuaccagggucuuucuccu

SEQ ID NO: 389307 - RNA, 19 nt, Artificial Sequence
  Description of Artificial Sequence: Synthetic oligonucleotide
cugaaucccagcgggaacc

SEQ ID NO: 389308 - RNA, 19 nt, Artificial Sequence
  Description of Artificial Sequence: Synthetic oligonucleotide
gacaccuaggcagaaguca

SEQ ID NO: 389309 - RNA, 19 nt, Artificial Sequence
  Description of Artificial Sequence: Synthetic oligonucleotide
gugacuaggagcauugcuc

SEQ ID NO: 389310 - RNA, 19 nt, Artificial Sequence
  Description of Artificial Sequence: Synthetic oligonucleotide
uggaucaguaggaaccgua

SEQ ID NO: 389311 - RNA, 19 nt, Artificial Sequence
  Description of Artificial Sequence: Synthetic oligonucleotide
acaaggacucaaugcgcag

SEQ ID NO: 389312 - RNA, 19 nt, Artificial Sequence
  Description of Artificial Sequence: Synthetic oligonucleotide
aagacucaugccuucccua

SEQ ID NO: 389313 - RNA, 19 nt, Artificial Sequence
  Description of Artificial Sequence: Synthetic oligonucleotide
ugugaacgggaagauuuug

SEQ ID NO: 389314 - RNA, 19 nt, Artificial Sequence
  Description of Artificial Sequence: Synthetic oligonucleotide
uguaaccgagaccuggcuu

SEQ ID NO: 389315 - RNA, 19 nt, Artificial Sequence
  Description of Artificial Sequence: Synthetic oligonucleotide
cucucgaccaaagaacaug

SEQ ID NO: 389316 - RNA, 19 nt, Artificial Sequence
  Description of Artificial Sequence: Synthetic oligonucleotide
augcugaccauuccccuug

SEQ ID NO: 389317 - RNA, 19 nt, Artificial Sequence
  Description of Artificial Sequence: Synthetic oligonucleotide
uucucuggagagugacuag

SEQ ID NO: 389318 - RNA, 19 nt, Artificial Sequence
  Description of Artificial Sequence: Synthetic oligonucleotide
gucaugucccucuggggag

SEQ ID NO: 389319 - RNA, 19 nt, Artificial Sequence
  Description of Artificial Sequence: Synthetic oligonucleotide
aauaggccggaugcuggag

SEQ ID NO: 389320 - RNA, 19 nt, Artificial Sequence
  Description of Artificial Sequence: Synthetic oligonucleotide
gaccauuccccuugccaag

SEQ ID NO: 389321 - RNA, 19 nt, Artificial Sequence
  Description of Artificial Sequence: Synthetic oligonucleotide
ugcuaggccucccguaucu

SEQ ID NO: 389322 - RNA, 19 nt, Artificial Sequence
  Description of Artificial Sequence: Synthetic oligonucleotide
aagaucagugccaugccua

SEQ ID NO: 389323 - RNA, 19 nt, Artificial Sequence
  Description of Artificial Sequence: Synthetic oligonucleotide
acuagacccauaaagucau

SEQ ID NO: 389324 - RNA, 19 nt, Artificial Sequence
  Description of Artificial Sequence: Synthetic oligonucleotide
cagaguauggggccugcag

SEQ ID NO: 389325 - RNA, 19 nt, Artificial Sequence
  Description of Artificial Sequence: Synthetic oligonucleotide
aguuccggcucuccacuuc

SEQ ID NO: 389326 - RNA, 19 nt, Artificial Sequence
  Description of Artificial Sequence: Synthetic oligonucleotide
cuggaacccauaagaggcc

SEQ ID NO: 389327 - RNA, 19 nt, Artificial Sequence
  Description of Artificial Sequence: Synthetic oligonucleotide
acccugcuuaaauugggca

SEQ ID NO: 389328 - RNA, 19 nt, Artificial Sequence
  Description of Artificial Sequence: Synthetic oligonucleotide
cuuuauuucgacaccacuu

SEQ ID NO: 389329 - RNA, 19 nt, Artificial Sequence
  Description of Artificial Sequence: Synthetic oligonucleotide
guuacuucggguuccuucu

SEQ ID NO: 389330 - RNA, 19 nt, Artificial Sequence
  Description of Artificial Sequence: Synthetic oligonucleotide
cucccguaucucuagaaga

SEQ ID NO: 389331 - RNA, 19 nt, Artificial Sequence
  Description of Artificial Sequence: Synthetic oligonucleotide
ggaaucucaagcauagaca

SEQ ID NO: 389332 - RNA, 19 nt, Artificial Sequence
  Description of Artificial Sequence: Synthetic oligonucleotide
uuacucaccuucugagcuc

SEQ ID NO: 389333 - RNA, 19 nt, Artificial Sequence
  Description of Artificial Sequence: Synthetic oligonucleotide
uguuguuugggagcccaac

SEQ ID NO: 389334 - RNA, 19 nt, Artificial Sequence
  Description of Artificial Sequence: Synthetic oligonucleotide
auaagaggccacugacagu

SEQ ID NO: 389335 - RNA, 19 nt, Artificial Sequence
  Description of Artificial Sequence: Synthetic oligonucleotide
aacucacacaccacacaca

SEQ ID NO: 389336 - RNA, 19 nt, Artificial Sequence
  Description of Artificial Sequence: Synthetic oligonucleotide
ucuugccggccacagacuu

SEQ ID NO: 389337 - RNA, 19 nt, Artificial Sequence
  Description of Artificial Sequence: Synthetic oligonucleotide
acacccugcuuaaauuggg

SEQ ID NO: 389338 - RNA, 19 nt, Artificial Sequence
  Description of Artificial Sequence: Synthetic oligonucleotide
gagccguggagccuggauc

SEQ ID NO: 389339 - RNA, 19 nt, Artificial Sequence
  Description of Artificial Sequence: Synthetic oligonucleotide
agggcugauacagcacgac

SEQ ID NO: 389340 - RNA, 19 nt, Artificial Sequence
  Description of Artificial Sequence: Synthetic oligonucleotide
caacaaauccccagaucca

SEQ ID NO: 389341 - RNA, 19 nt, Artificial Sequence
  Description of Artificial Sequence: Synthetic oligonucleotide
cacggagugggagauggag

SEQ ID NO: 389342 - RNA, 19 nt, Artificial Sequence
  Description of Artificial Sequence: Synthetic oligonucleotide
cuuuaggugccaagcaaaa

SEQ ID NO: 389343 - RNA, 19 nt, Artificial Sequence
  Description of Artificial Sequence: Synthetic oligonucleotide
caaagaggucugaagagcu

SEQ ID NO: 389344 - RNA, 19 nt, Artificial Sequence
  Description of Artificial Sequence: Synthetic oligonucleotide
ugcuuaaauugggcaaugu

SEQ ID NO: 389345 - RNA, 19 nt, Artificial Sequence
  Description of Artificial Sequence: Synthetic oligonucleotide
ugccgcucaaucucaguaa

SEQ ID NO: 389346 - RNA, 19 nt, Artificial Sequence
  Description of Artificial Sequence: Synthetic oligonucleotide
uggcagauaaaggcucuca

SEQ ID NO: 389347 - RNA, 19 nt, Artificial Sequence
  Description of Artificial Sequence: Synthetic oligonucleotide
ggcgaaaguuccaacauca

SEQ ID NO: 389348 - RNA, 19 nt, Artificial Sequence
  Description of Artificial Sequence: Synthetic oligonucleotide
agcauagacagagggugcu

SEQ ID NO: 389349 - RNA, 19 nt, Artificial Sequence
  Description of Artificial Sequence: Synthetic oligonucleotide
ggaucaguaggaaccguag

SEQ ID NO: 389350 - RNA, 19 nt, Artificial Sequence
  Description of Artificial Sequence: Synthetic oligonucleotide
gugcuaugacccacaauag

SEQ ID NO: 389351 - RNA, 19 nt, Artificial Sequence
  Description of Artificial Sequence: Synthetic oligonucleotide
aggguacugcucucugaag

SEQ ID NO: 389352 - RNA, 19 nt, Artificial Sequence
  Description of Artificial Sequence: Synthetic oligonucleotide
ucuugcuaggccucccgua

SEQ ID NO: 389353 - RNA, 19 nt, Artificial Sequence
  Description of Artificial Sequence: Synthetic oligonucleotide
ggaaaagggguuguccuug

SEQ ID NO: 389354 - RNA, 19 nt, Artificial Sequence
  Description of Artificial Sequence: Synthetic oligonucleotide
cccagaaugaugcaaagaa

SEQ ID NO: 389355 - RNA, 19 nt, Artificial Sequence
  Description of Artificial Sequence: Synthetic oligonucleotide
cgcauagaggcaaccaugg

SEQ ID NO: 389356 - RNA, 19 nt, Artificial Sequence
  Description of Artificial Sequence: Synthetic oligonucleotide
acucaugccuucccuacuu

SEQ ID NO: 389357 - RNA, 19 nt, Artificial Sequence
  Description of Artificial Sequence: Synthetic oligonucleotide
cuacuucgggaagaacuag

SEQ ID NO: 389358 - RNA, 19 nt, Artificial Sequence
  Description of Artificial Sequence: Synthetic oligonucleotide
ggcucucagacaccuaggc

SEQ ID NO: 389359 - RNA, 19 nt, Artificial Sequence
  Description of Artificial Sequence: Synthetic oligonucleotide
gaguauggggccugcagcu

SEQ ID NO: 389360 - RNA, 19 nt, Artificial Sequence
  Description of Artificial Sequence: Synthetic oligonucleotide
gacgagcuucacuggacuc

SEQ ID NO: 389361 - RNA, 19 nt, Artificial Sequence
  Description of Artificial Sequence: Synthetic oligonucleotide
acgagcuucacuggacuca

SEQ ID NO: 389362 - RNA, 19 nt, Artificial Sequence
  Description of Artificial Sequence: Synthetic oligonucleotide
aacgggguuucuugcucaa

SEQ ID NO: 389363 - RNA, 19 nt, Artificial Sequence
  Description of Artificial Sequence: Synthetic oligonucleotide
agacaccuaggcagaaguc

SEQ ID NO: 389364 - RNA, 19 nt, Artificial Sequence
  Description of Artificial Sequence: Synthetic oligonucleotide
agcgauccuguaaagaauu

SEQ ID NO: 389365 - RNA, 19 nt, Artificial Sequence
  Description of Artificial Sequence: Synthetic oligonucleotide
cacacaccacacacagaag

SEQ ID NO: 389366 - RNA, 19 nt, Artificial Sequence
  Description of Artificial Sequence: Synthetic oligonucleotide
gaauccaccucucgaccaa

SEQ ID NO: 389367 - RNA, 19 nt, Artificial Sequence
  Description of Artificial Sequence: Synthetic oligonucleotide
agacgcauagaggcaacca

SEQ ID NO: 389368 - RNA, 19 nt, Artificial Sequence
  Description of Artificial Sequence: Synthetic oligonucleotide
gacuugacacccugcuuaa

SEQ ID NO: 389369 - RNA, 19 nt, Artificial Sequence
  Description of Artificial Sequence: Synthetic oligonucleotide
gaaguacauuccccagaga

SEQ ID NO: 389370 - RNA, 19 nt, Artificial Sequence
  Description of Artificial Sequence: Synthetic oligonucleotide
uuacuucggguuccuucuc

SEQ ID NO: 389371 - RNA, 19 nt, Artificial Sequence
  Description of Artificial Sequence: Synthetic oligonucleotide
cagugcaacaggcuaagua

SEQ ID NO: 389372 - RNA, 19 nt, Artificial Sequence
  Description of Artificial Sequence: Synthetic oligonucleotide
gaggcgaaaguuccaacau

SEQ ID NO: 389373 - RNA, 19 nt, Artificial Sequence
  Description of Artificial Sequence: Synthetic oligonucleotide
cccuaaacccagaaugaug

SEQ ID NO: 389374 - RNA, 19 nt, Artificial Sequence
  Description of Artificial Sequence: Synthetic oligonucleotide
cagcacgacucuugcuagg

SEQ ID NO: 389375 - RNA, 19 nt, Artificial Sequence
  Description of Artificial Sequence: Synthetic oligonucleotide
gacgcauagaggcaaccau

SEQ ID NO: 389376 - RNA, 19 nt, Artificial Sequence
  Description of Artificial Sequence: Synthetic oligonucleotide
cuuucugaaauaggccgga

SEQ ID NO: 389377 - RNA, 19 nt, Artificial Sequence
  Description of Artificial Sequence: Synthetic oligonucleotide
ugaaucccagcgggaacca

SEQ ID NO: 389378 - RNA, 19 nt, Artificial Sequence
  Description of Artificial Sequence: Synthetic oligonucleotide
aggcuaaguagcagcagcu

SEQ ID NO: 389379 - RNA, 19 nt, Artificial Sequence
  Description of Artificial Sequence: Synthetic oligonucleotide
agugaauuaccagggucuu

SEQ ID NO: 389380 - RNA, 19 nt, Artificial Sequence
  Description of Artificial Sequence: Synthetic oligonucleotide
guguuagggccauguucag

SEQ ID NO: 389381 - RNA, 19 nt, Artificial Sequence
  Description of Artificial Sequence: Synthetic oligonucleotide
cuuugacgaucaaucugga

SEQ ID NO: 389382 - RNA, 19 nt, Artificial Sequence
  Description of Artificial Sequence: Synthetic oligonucleotide
uggaacuccuccccucauu

SEQ ID NO: 389383 - RNA, 19 nt, Artificial Sequence
  Description of Artificial Sequence: Synthetic oligonucleotide
cucgaccaaagaacauguc

SEQ ID NO: 389384 - RNA, 19 nt, Artificial Sequence
  Description of Artificial Sequence: Synthetic oligonucleotide
cucucguuucuuuccuuca

SEQ ID NO: 389385 - RNA, 19 nt, Artificial Sequence
  Description of Artificial Sequence: Synthetic oligonucleotide
cuugccggccacagacuug

SEQ ID NO: 389386 - RNA, 19 nt, Artificial Sequence
  Description of Artificial Sequence: Synthetic oligonucleotide
uucgggacaccaagcccaa

SEQ ID NO: 389387 - RNA, 19 nt, Artificial Sequence
  Description of Artificial Sequence: Synthetic oligonucleotide
gacucaaugcgcaggcaaa

SEQ ID NO: 389388 - RNA, 19 nt, Artificial Sequence
  Description of Artificial Sequence: Synthetic oligonucleotide
gacaggggccugaguaugc

SEQ ID NO: 389389 - RNA, 19 nt, Artificial Sequence
  Description of Artificial Sequence: Synthetic oligonucleotide
ggggcuuuauuucgacacc

SEQ ID NO: 389390 - RNA, 19 nt, Artificial Sequence
  Description of Artificial Sequence: Synthetic oligonucleotide
gaucagugccaugccuagc

SEQ ID NO: 389391 - RNA, 19 nt, Artificial Sequence
  Description of Artificial Sequence: Synthetic oligonucleotide
cuugacacccugcuuaaau

SEQ ID NO: 389392 - RNA, 19 nt, Artificial Sequence
  Description of Artificial Sequence: Synthetic oligonucleotide
ggacaaggacucaaugcgc

SEQ ID NO: 389393 - RNA, 19 nt, Artificial Sequence
  Description of Artificial Sequence: Synthetic oligonucleotide
agacgaggaggcccagaca

SEQ ID NO: 389394 - RNA, 19 nt, Artificial Sequence
  Description of Artificial Sequence: Synthetic oligonucleotide
gagcuucgggacaccaagc

SEQ ID NO: 389395 - RNA, 19 nt, Artificial Sequence
  Description of Artificial Sequence: Synthetic oligonucleotide
gcuucgggacaccaagccc

SEQ ID NO: 389396 - RNA, 19 nt, Artificial Sequence
  Description of Artificial Sequence: Synthetic oligonucleotide
cgcucaaucucaguaaagc

SEQ ID NO: 389397 - RNA, 19 nt, Artificial Sequence
  Description of Artificial Sequence: Synthetic oligonucleotide
gagugacuaggagcauugc

SEQ ID NO: 389398 - RNA, 19 nt, Artificial Sequence
  Description of Artificial Sequence: Synthetic oligonucleotide
gcgcaggcaaaggacaagg

SEQ ID NO: 389399 - RNA, 19 nt, Artificial Sequence
  Description of Artificial Sequence: Synthetic oligonucleotide
uugcuaggccucccguauc

SEQ ID NO: 389400 - RNA, 19 nt, Artificial Sequence
  Description of Artificial Sequence: Synthetic oligonucleotide
cagacgcauagaggcaacc

SEQ ID NO: 389401 - RNA, 19 nt, Artificial Sequence
  Description of Artificial Sequence: Synthetic oligonucleotide
uuucugaaauaggccggau

SEQ ID NO: 389402 - RNA, 19 nt, Artificial Sequence
  Description of Artificial Sequence: Synthetic oligonucleotide
cuuagugaauuaccagggu

SEQ ID NO: 389403 - RNA, 19 nt, Artificial Sequence
  Description of Artificial Sequence: Synthetic oligonucleotide
cgaaaguuccaacaucauc

SEQ ID NO: 389404 - RNA, 19 nt, Artificial Sequence
  Description of Artificial Sequence: Synthetic oligonucleotide
caacgggguuucuugcuca

SEQ ID NO: 389405 - RNA, 19 nt, Artificial Sequence
  Description of Artificial Sequence: Synthetic oligonucleotide
aguggcaaguccagaacuu

SEQ ID NO: 389406 - RNA, 19 nt, Artificial Sequence
  Description of Artificial Sequence: Synthetic oligonucleotide
cacccaacucacacaccac

SEQ ID NO: 389407 - RNA, 19 nt, Artificial Sequence
  Description of Artificial Sequence: Synthetic oligonucleotide
caagcucucacugacuggu

SEQ ID NO: 389408 - RNA, 19 nt, Artificial Sequence
  Description of Artificial Sequence: Synthetic oligonucleotide
guggcaaguccagaacuuc

SEQ ID NO: 389409 - RNA, 19 nt, Artificial Sequence
  Description of Artificial Sequence: Synthetic oligonucleotide
cucaugccuucccuacuuc

SEQ ID NO: 389410 - RNA, 19 nt, Artificial Sequence
  Description of Artificial Sequence: Synthetic oligonucleotide
acccacaauaguggcagau

SEQ ID NO: 389411 - RNA, 19 nt, Artificial Sequence
  Description of Artificial Sequence: Synthetic oligonucleotide
ccucccguaucucuagaag

SEQ ID NO: 389412 - RNA, 19 nt, Artificial Sequence
  Description of Artificial Sequence: Synthetic oligonucleotide
uucccuacuucgggaagaa

SEQ ID NO: 389413 - RNA, 19 nt, Artificial Sequence
  Description of Artificial Sequence: Synthetic oligonucleotide
cuagacccauaaagucauc

SEQ ID NO: 389414 - RNA, 19 nt, Artificial Sequence
  Description of Artificial Sequence: Synthetic oligonucleotide
cguaucucuagaagacgag

SEQ ID NO: 389415 - RNA, 19 nt, Artificial Sequence
  Description of Artificial Sequence: Synthetic oligonucleotide
cuucccuacuucgggaaga

SEQ ID NO: 389416 - RNA, 19 nt, Artificial Sequence
  Description of Artificial Sequence: Synthetic oligonucleotide
ccguaucucuagaagacga

SEQ ID NO: 389417 - RNA, 19 nt, Artificial Sequence
  Description of Artificial Sequence: Synthetic oligonucleotide
ccacaauaguggcagauaa

SEQ ID NO: 389418 - RNA, 19 nt, Artificial Sequence
  Description of Artificial Sequence: Synthetic oligonucleotide
gcuguaaccgagaccuggc

SEQ ID NO: 389419 - RNA, 19 nt, Artificial Sequence
  Description of Artificial Sequence: Synthetic oligonucleotide
gaacccauaagaggccacu

SEQ ID NO: 389420 - RNA, 19 nt, Artificial Sequence
  Description of Artificial Sequence: Synthetic oligonucleotide
agacccaccaugggugcca

SEQ ID NO: 389421 - RNA, 19 nt, Artificial Sequence
  Description of Artificial Sequence: Synthetic oligonucleotide
gaugcugaccauuccccuu

SEQ ID NO: 389422 - RNA, 19 nt, Artificial Sequence
  Description of Artificial Sequence: Synthetic oligonucleotide
gucaguguuagggccaugu

SEQ ID NO: 389423 - RNA, 19 nt, Artificial Sequence
  Description of Artificial Sequence: Synthetic oligonucleotide
auggauccuaaagccugca

SEQ ID NO: 389424 - RNA, 19 nt, Artificial Sequence
  Description of Artificial Sequence: Synthetic oligonucleotide
ugcugccaccacaggccug

SEQ ID NO: 389425 - RNA, 19 nt, Artificial Sequence
  Description of Artificial Sequence: Synthetic oligonucleotide
ccauaagaggccacugaca

SEQ ID NO: 389426 - RNA, 19 nt, Artificial Sequence
  Description of Artificial Sequence: Synthetic oligonucleotide
cccguaucucuagaagacg

SEQ ID NO: 389427 - RNA, 19 nt, Artificial Sequence
  Description of Artificial Sequence: Synthetic oligonucleotide
gcugugaacgggaagauuu

SEQ ID NO: 389428 - RNA, 19 nt, Artificial Sequence
  Description of Artificial Sequence: Synthetic oligonucleotide
cuccgagggacaguaguga

SEQ ID NO: 389429 - RNA, 19 nt, Artificial Sequence
  Description of Artificial Sequence: Synthetic oligonucleotide
gcucucagacaccuaggca

SEQ ID NO: 389430 - RNA, 19 nt, Artificial Sequence
  Description of Artificial Sequence: Synthetic oligonucleotide
cuugcuaggccucccguau

SEQ ID NO: 389431 - RNA, 19 nt, Artificial Sequence
  Description of Artificial Sequence: Synthetic oligonucleotide
auaaacccuuuaggugcca

SEQ ID NO: 389432 - RNA, 19 nt, Artificial Sequence
  Description of Artificial Sequence: Synthetic oligonucleotide
gaaccguagcgauccugua

SEQ ID NO: 389433 - RNA, 19 nt, Artificial Sequence
  Description of Artificial Sequence: Synthetic oligonucleotide
cucacacaccacacacaga

SEQ ID NO: 389434 - RNA, 19 nt, Artificial Sequence
  Description of Artificial Sequence: Synthetic oligonucleotide
gacgaucaaucuggagcuc

SEQ ID NO: 389435 - RNA, 19 nt, Artificial Sequence
  Description of Artificial Sequence: Synthetic oligonucleotide
cucccugagggcugauaca

SEQ ID NO: 389436 - RNA, 19 nt, Artificial Sequence
  Description of Artificial Sequence: Synthetic oligonucleotide
ccuacuucgggaagaacua

SEQ ID NO: 389437 - RNA, 19 nt, Artificial Sequence
  Description of Artificial Sequence: Synthetic oligonucleotide
cccgcgagcugcuguaacc

SEQ ID NO: 389438 - RNA, 19 nt, Artificial Sequence
  Description of Artificial Sequence: Synthetic oligonucleotide
agcucucguuucuuuccuu

SEQ ID NO: 389439 - RNA, 19 nt, Artificial Sequence
  Description of Artificial Sequence: Synthetic oligonucleotide
cucaacgggguuucuugcu

SEQ ID NO: 389440 - RNA, 19 nt, Artificial Sequence
  Description of Artificial Sequence: Synthetic oligonucleotide
ggcuuuauuucgacaccac

SEQ ID NO: 389441 - RNA, 19 nt, Artificial Sequence
  Description of Artificial Sequence: Synthetic oligonucleotide
ccgcucaaucucaguaaag

SEQ ID NO: 389442 - RNA, 19 nt, Artificial Sequence
  Description of Artificial Sequence: Synthetic oligonucleotide
ucccuacuucgggaagaac

SEQ ID NO: 389443 - RNA, 19 nt, Artificial Sequence
  Description of Artificial Sequence: Synthetic oligonucleotide
cccugcuuaaauugggcaa

SEQ ID NO: 389444 - RNA, 19 nt, Artificial Sequence
  Description of Artificial Sequence: Synthetic oligonucleotide
agguugugccaggguacug

SEQ ID NO: 389445 - RNA, 19 nt, Artificial Sequence
  Description of Artificial Sequence: Synthetic oligonucleotide
gucaagcugugaacgggaa

SEQ ID NO: 389446 - RNA, 19 nt, Artificial Sequence
  Description of Artificial Sequence: Synthetic oligonucleotide
ccgcgagcugcuguaaccg

SEQ ID NO: 389447 - RNA, 19 nt, Artificial Sequence
  Description of Artificial Sequence: Synthetic oligonucleotide
ccuucccuacuucgggaag

SEQ ID NO: 389448 - RNA, 19 nt, Artificial Sequence
  Description of Artificial Sequence: Synthetic oligonucleotide
ccagccuuucagaccuagc

SEQ ID NO: 389449 - RNA, 19 nt, Artificial Sequence
  Description of Artificial Sequence: Synthetic oligonucleotide
gcauagaggcaaccaugga

SEQ ID NO: 389450 - RNA, 19 nt, Artificial Sequence
  Description of Artificial Sequence: Synthetic oligonucleotide
aucuugccggccacagacu

SEQ ID NO: 389451 - RNA, 19 nt, Artificial Sequence
  Description of Artificial Sequence: Synthetic oligonucleotide
gccgcucaaucucaguaaa

SEQ ID NO: 389452 - RNA, 19 nt, Artificial Sequence
  Description of Artificial Sequence: Synthetic oligonucleotide
cauagacagagggugcuau

SEQ ID NO: 389453 - RNA, 19 nt, Artificial Sequence
  Description of Artificial Sequence: Synthetic oligonucleotide
augcgcaggcaaaggacaa

SEQ ID NO: 389454 - RNA, 19 nt, Artificial Sequence
  Description of Artificial Sequence: Synthetic oligonucleotide
uugacccacagggccccgu

SEQ ID NO: 389455 - RNA, 19 nt, Artificial Sequence
  Description of Artificial Sequence: Synthetic oligonucleotide
cuucccuccggcugguggu

SEQ ID NO: 389456 - RNA, 19 nt, Artificial Sequence
  Description of Artificial Sequence: Synthetic oligonucleotide
ugcacucaacgggguuucu

SEQ ID NO: 389457 - RNA, 19 nt, Artificial Sequence
  Description of Artificial Sequence: Synthetic oligonucleotide
ccauaccccaggcugcauc

SEQ ID NO: 389458 - RNA, 19 nt, Artificial Sequence
  Description of Artificial Sequence: Synthetic oligonucleotide
cugaaauaggccggaugcu

SEQ ID NO: 389459 - RNA, 19 nt, Artificial Sequence
  Description of Artificial Sequence: Synthetic oligonucleotide
cuagcauggagaggagagu

SEQ ID NO: 389460 - RNA, 19 nt, Artificial Sequence
  Description of Artificial Sequence: Synthetic oligonucleotide
ggaacccauaagaggccac

SEQ ID NO: 389461 - RNA, 19 nt, Artificial Sequence
  Description of Artificial Sequence: Synthetic oligonucleotide
ccagcgggaaccaaaaguu

SEQ ID NO: 389462 - RNA, 19 nt, Artificial Sequence
  Description of Artificial Sequence: Synthetic oligonucleotide
gcugaccauuccccuugcc

SEQ ID NO: 389463 - RNA, 19 nt, Artificial Sequence
  Description of Artificial Sequence: Synthetic oligonucleotide
acuugacacccugcuuaaa

SEQ ID NO: 389464 - RNA, 19 nt, Artificial Sequence
  Description of Artificial Sequence: Synthetic oligonucleotide
cuguaaccgagaccuggcu

SEQ ID NO: 389465 - RNA, 19 nt, Artificial Sequence
  Description of Artificial Sequence: Synthetic oligonucleotide
ccagacgcauagaggcaac

SEQ ID NO: 389466 - RNA, 19 nt, Artificial Sequence
  Description of Artificial Sequence: Synthetic oligonucleotide
cccuuuaggugccaagcaa

SEQ ID NO: 389467 - RNA, 19 nt, Artificial Sequence
  Description of Artificial Sequence: Synthetic oligonucleotide
aaccugcaauccacaggua

SEQ ID NO: 389468 - RNA, 19 nt, Artificial Sequence
  Description of Artificial Sequence: Synthetic oligonucleotide
ccguagcgauccuguaaag

SEQ ID NO: 389469 - RNA, 19 nt, Artificial Sequence
  Description of Artificial Sequence: Synthetic oligonucleotide
ccaccuacauggauccuaa

SEQ ID NO: 389470 - RNA, 19 nt, Artificial Sequence
  Description of Artificial Sequence: Synthetic oligonucleotide
gggcugauacagcacgacu

SEQ ID NO: 389471 - RNA, 19 nt, Artificial Sequence
  Description of Artificial Sequence: Synthetic oligonucleotide
gccagacgcauagaggcaa

SEQ ID NO: 389472 - RNA, 19 nt, Artificial Sequence
  Description of Artificial Sequence: Synthetic oligonucleotide
cugugaacgggaagauuuu

SEQ ID NO: 389473 - RNA, 19 nt, Artificial Sequence
  Description of Artificial Sequence: Synthetic oligonucleotide
aggccggaugcuggagaug

SEQ ID NO: 389474 - RNA, 19 nt, Artificial Sequence
  Description of Artificial Sequence: Synthetic oligonucleotide
ccgagggacaguagugaca

SEQ ID NO: 389475 - RNA, 19 nt, Artificial Sequence
  Description of Artificial Sequence: Synthetic oligonucleotide
gcgauccuguaaagaauuc

SEQ ID NO: 389476 - RNA, 19 nt, Artificial Sequence
  Description of Artificial Sequence: Synthetic oligonucleotide
gccaccuacauggauccua

SEQ ID NO: 389477 - RNA, 19 nt, Artificial Sequence
  Description of Artificial Sequence: Synthetic oligonucleotide
cauccuccccuggaaccca

SEQ ID NO: 389478 - RNA, 19 nt, Artificial Sequence
  Description of Artificial Sequence: Synthetic oligonucleotide
caguaaagcucugguuacu

SEQ ID NO: 389479 - RNA, 19 nt, Artificial Sequence
  Description of Artificial Sequence: Synthetic oligonucleotide
ugguuacuucggguuccuu

SEQ ID NO: 389480 - RNA, 19 nt, Artificial Sequence
  Description of Artificial Sequence: Synthetic oligonucleotide
gcaaaaguucuagcccuua

SEQ ID NO: 389481 - RNA, 19 nt, Artificial Sequence
  Description of Artificial Sequence: Synthetic oligonucleotide
uucccuccggcuggugguu

SEQ ID NO: 389482 - RNA, 19 nt, Artificial Sequence
  Description of Artificial Sequence: Synthetic oligonucleotide
guucuagcccuuagugaau

SEQ ID NO: 389483 - RNA, 19 nt, Artificial Sequence
  Description of Artificial Sequence: Synthetic oligonucleotide
gcgggaaccaaaaguuucu

SEQ ID NO: 389484 - RNA, 19 nt, Artificial Sequence
  Description of Artificial Sequence: Synthetic oligonucleotide
cccagccuuucagaccuag

SEQ ID NO: 389485 - RNA, 19 nt, Artificial Sequence
  Description of Artificial Sequence: Synthetic oligonucleotide
cguagcgauccuguaaaga

SEQ ID NO: 389486 - RNA, 19 nt, Artificial Sequence
  Description of Artificial Sequence: Synthetic oligonucleotide
cagcgggaaccaaaaguuu

SEQ ID NO: 389487 - RNA, 19 nt, Artificial Sequence
  Description of Artificial Sequence: Synthetic oligonucleotide
guguuguuugggagcccaa

SEQ ID NO: 389488 - RNA, 19 nt, Artificial Sequence
  Description of Artificial Sequence: Synthetic oligonucleotide
ugcccgcgagcugcuguaa

SEQ ID NO: 389489 - RNA, 19 nt, Artificial Sequence
  Description of Artificial Sequence: Synthetic oligonucleotide
ucccuccggcuggugguuc

SEQ ID NO: 389490 - RNA, 19 nt, Artificial Sequence
  Description of Artificial Sequence: Synthetic oligonucleotide
ccugagccguggagccugg

SEQ ID NO: 389491 - RNA, 19 nt, Artificial Sequence
  Description of Artificial Sequence: Synthetic oligonucleotide
agcuuggggugagguucca

SEQ ID NO: 389492 - RNA, 19 nt, Artificial Sequence
  Description of Artificial Sequence: Synthetic oligonucleotide
agccuccgagggacaguag

SEQ ID NO: 389493 - RNA, 19 nt, Artificial Sequence
  Description of Artificial Sequence: Synthetic oligonucleotide
cugcccgcgagcugcugua

SEQ ID NO: 389494 - RNA, 19 nt, Artificial Sequence
  Description of Artificial Sequence: Synthetic oligonucleotide
cagcacggagugggagaug

SEQ ID NO: 389495 - RNA, 19 nt, Artificial Sequence
  Description of Artificial Sequence: Synthetic oligonucleotide
gcccgcgagcugcuguaac

SEQ ID NO: 389496 - RNA, 19 nt, Artificial Sequence
  Description of Artificial Sequence: Synthetic oligonucleotide
cuggaucaguaggaaccgu

SEQ ID NO: 389497 - RNA, 19 nt, Artificial Sequence
  Description of Artificial Sequence: Synthetic oligonucleotide
gcauagacagagggugcua

SEQ ID NO: 389498 - RNA, 19 nt, Artificial Sequence
  Description of Artificial Sequence: Synthetic oligonucleotide
gaccuagcucucguuucuu

SEQ ID NO: 389499 - RNA, 19 nt, Artificial Sequence
  Description of Artificial Sequence: Synthetic oligonucleotide
cccacaauaguggcagaua

SEQ ID NO: 389500 - RNA, 19 nt, Artificial Sequence
  Description of Artificial Sequence: Synthetic oligonucleotide
gcccaaccugcaauccaca

SEQ ID NO: 389501 - RNA, 19 nt, Artificial Sequence
  Description of Artificial Sequence: Synthetic oligonucleotide
gcuaggccucccguaucuc

SEQ ID NO: 389502 - RNA, 19 nt, Artificial Sequence
  Description of Artificial Sequence: Synthetic oligonucleotide
gcugcccgcgagcugcugu

SEQ ID NO: 389503 - RNA, 19 nt, Artificial Sequence
  Description of Artificial Sequence: Synthetic oligonucleotide
gcgaaaguuccaacaucau

SEQ ID NO: 389504 - RNA, 19 nt, Artificial Sequence
  Description of Artificial Sequence: Synthetic oligonucleotide
cccaauagccccagccuuu

SEQ ID NO: 389505 - RNA, 19 nt, Artificial Sequence
  Description of Artificial Sequence: Synthetic oligonucleotide
cgagaccuggcuucauacu

SEQ ID NO: 389506 - RNA, 19 nt, Artificial Sequence
  Description of Artificial Sequence: Synthetic oligonucleotide
cugagccguggagccugga

SEQ ID NO: 389507 - RNA, 19 nt, Artificial Sequence
  Description of Artificial Sequence: Synthetic oligonucleotide
gcacggagugggagaugga

SEQ ID NO: 389508 - RNA, 19 nt, Artificial Sequence
  Description of Artificial Sequence: Synthetic oligonucleotide
ccccuaaacccagaaugau

SEQ ID NO: 389509 - RNA, 19 nt, Artificial Sequence
  Description of Artificial Sequence: Synthetic oligonucleotide
ccagugcaacaggcuaagu

SEQ ID NO: 389510 - RNA, 19 nt, Artificial Sequence
  Description of Artificial Sequence: Synthetic oligonucleotide
ccguggagccuggaucagu

SEQ ID NO: 389511 - RNA, 19 nt, Artificial Sequence
  Description of Artificial Sequence: Synthetic oligonucleotide
auugcaagaaaacacaucc

SEQ ID NO: 389512 - RNA, 19 nt, Artificial Sequence
  Description of Artificial Sequence: Synthetic oligonucleotide
aauauauccucuuuugcac

SEQ ID NO: 389513 - RNA, 19 nt, Artificial Sequence
  Description of Artificial Sequence: Synthetic oligonucleotide
aauaaguaagcuugguggc

SEQ ID NO: 389514 - RNA, 19 nt, Artificial Sequence
  Description of Artificial Sequence: Synthetic oligonucleotide
aaacuaucuggcuucaugc

SEQ ID NO: 389515 - RNA, 19 nt, Artificial Sequence
  Description of Artificial Sequence: Synthetic oligonucleotide
gaaucaacgauuuugcagc

SEQ ID NO: 389516 - RNA, 19 nt, Artificial Sequence
  Description of Artificial Sequence: Synthetic oligonucleotide
uaccaaaugagaaacaucu

SEQ ID NO: 389517 - RNA, 19 nt, Artificial Sequence
  Description of Artificial Sequence: Synthetic oligonucleotide
uggaauaucccuaugaguc

SEQ ID NO: 389518 - RNA, 19 nt, Artificial Sequence
  Description of Artificial Sequence: Synthetic oligonucleotide
cuuccaauaaguaagcuug

SEQ ID NO: 389519 - RNA, 19 nt, Artificial Sequence
  Description of Artificial Sequence: Synthetic oligonucleotide
caugauuaaucucugaccc

SEQ ID NO: 389520 - RNA, 19 nt, Artificial Sequence
  Description of Artificial Sequence: Synthetic oligonucleotide
ugaaucaacgauuuugcag

SEQ ID NO: 389521 - RNA, 19 nt, Artificial Sequence
  Description of Artificial Sequence: Synthetic oligonucleotide
aaaugugucacuaacuucu

SEQ ID NO: 389522 - RNA, 19 nt, Artificial Sequence
  Description of Artificial Sequence: Synthetic oligonucleotide
caauauugcaagaaaacac

SEQ ID NO: 389523 - RNA, 19 nt, Artificial Sequence
  Description of Artificial Sequence: Synthetic oligonucleotide
uccuguacauaccucagcg

SEQ ID NO: 389524 - RNA, 19 nt, Artificial Sequence
  Description of Artificial Sequence: Synthetic oligonucleotide
cuuauagcugcuaugggcc

SEQ ID NO: 389525 - RNA, 19 nt, Artificial Sequence
  Description of Artificial Sequence: Synthetic oligonucleotide
cauugaacaguuuagagca

SEQ ID NO: 389526 - RNA, 19 nt, Artificial Sequence
  Description of Artificial Sequence: Synthetic oligonucleotide
ucuuauagcugcuaugggc

SEQ ID NO: 389527 - RNA, 19 nt, Artificial Sequence
  Description of Artificial Sequence: Synthetic oligonucleotide
agcaugguaaccaacagac

SEQ ID NO: 389528 - RNA, 19 nt, Artificial Sequence
  Description of Artificial Sequence: Synthetic oligonucleotide
acuaucuggcuucaugccc

SEQ ID NO: 389529 - RNA, 19 nt, Artificial Sequence
  Description of Artificial Sequence: Synthetic oligonucleotide
ucuggauagaagcucacca

SEQ ID NO: 389530 - RNA, 19 nt, Artificial Sequence
  Description of Artificial Sequence: Synthetic oligonucleotide
gauugcugggaguacauag

SEQ ID NO: 389531 - RNA, 19 nt, Artificial Sequence
  Description of Artificial Sequence: Synthetic oligonucleotide
cauacuuccagagcgaucc

SEQ ID NO: 389532 - RNA, 19 nt, Artificial Sequence
  Description of Artificial Sequence: Synthetic oligonucleotide
caaagaguugcaaaggaug

SEQ ID NO: 389533 - RNA, 19 nt, Artificial Sequence
  Description of Artificial Sequence: Synthetic oligonucleotide
ugauaaacucugcagugcc

SEQ ID NO: 389534 - RNA, 19 nt, Artificial Sequence
  Description of Artificial Sequence: Synthetic oligonucleotide
guuucaagauuucaguacc

SEQ ID NO: 389535 - RNA, 19 nt, Artificial Sequence
  Description of Artificial Sequence: Synthetic oligonucleotide
gauggaguguaucuggcag

SEQ ID NO: 389536 - RNA, 19 nt, Artificial Sequence
  Description of Artificial Sequence: Synthetic oligonucleotide
gauucaagauugcugggag

SEQ ID NO: 389537 - RNA, 19 nt, Artificial Sequence
  Description of Artificial Sequence: Synthetic oligonucleotide
uccauugaacaguuuagag

SEQ ID NO: 389538 - RNA, 19 nt, Artificial Sequence
  Description of Artificial Sequence: Synthetic oligonucleotide
cucccaucaaacuaucugg

SEQ ID NO: 389539 - RNA, 19 nt, Artificial Sequence
  Description of Artificial Sequence: Synthetic oligonucleotide
acaagcauggggaugaagg

SEQ ID NO: 389540 - RNA, 19 nt, Artificial Sequence
  Description of Artificial Sequence: Synthetic oligonucleotide
uuggagggaaaccagcugc

SEQ ID NO: 389541 - RNA, 19 nt, Artificial Sequence
  Description of Artificial Sequence: Synthetic oligonucleotide
ugauuaaacugguggaggc

SEQ ID NO: 389542 - RNA, 19 nt, Artificial Sequence
  Description of Artificial Sequence: Synthetic oligonucleotide
gguagauccaaauccauag

SEQ ID NO: 389543 - RNA, 19 nt, Artificial Sequence
  Description of Artificial Sequence: Synthetic oligonucleotide
ugaccccuaaagaugacag

SEQ ID NO: 389544 - RNA, 19 nt, Artificial Sequence
  Description of Artificial Sequence: Synthetic oligonucleotide
cauaccucagcguaacucc

SEQ ID NO: 389545 - RNA, 19 nt, Artificial Sequence
  Description of Artificial Sequence: Synthetic oligonucleotide
ucauccauugaacaguuua

SEQ ID NO: 389546 - RNA, 19 nt, Artificial Sequence
  Description of Artificial Sequence: Synthetic oligonucleotide
ugggauaucuggauagaag

SEQ ID NO: 389547 - RNA, 19 nt, Artificial Sequence
  Description of Artificial Sequence: Synthetic oligonucleotide
gauuggacccucucaaugc

SEQ ID NO: 389548 - RNA, 19 nt, Artificial Sequence
  Description of Artificial Sequence: Synthetic oligonucleotide
agagcgauccaugaggaac

SEQ ID NO: 389549 - RNA, 19 nt, Artificial Sequence
  Description of Artificial Sequence: Synthetic oligonucleotide
cacaaauuccucaauggac

SEQ ID NO: 389550 - RNA, 19 nt, Artificial Sequence
  Description of Artificial Sequence: Synthetic oligonucleotide
guaacucccaccuuagccc

SEQ ID NO: 389551 - RNA, 19 nt, Artificial Sequence
  Description of Artificial Sequence: Synthetic oligonucleotide
aaauuagugcccaggaucu

SEQ ID NO: 389552 - RNA, 19 nt, Artificial Sequence
  Description of Artificial Sequence: Synthetic oligonucleotide
ucauaauuuaaggccacag

SEQ ID NO: 389553 - RNA, 19 nt, Artificial Sequence
  Description of Artificial Sequence: Synthetic oligonucleotide
agauugaaugcugauguuc

SEQ ID NO: 389554 - RNA, 19 nt, Artificial Sequence
  Description of Artificial Sequence: Synthetic oligonucleotide
acugaauaggacucaagga

SEQ ID NO: 389555 - RNA, 19 nt, Artificial Sequence
  Description of Artificial Sequence: Synthetic oligonucleotide
aaugcugauguucaauaua

SEQ ID NO: 389556 - RNA, 19 nt, Artificial Sequence
  Description of Artificial Sequence: Synthetic oligonucleotide
uucauuaaugacuguaaau

SEQ ID NO: 389557 - RNA, 19 nt, Artificial Sequence
  Description of Artificial Sequence: Synthetic oligonucleotide
uuuugaagucucaugggaa

SEQ ID NO: 389558 - RNA, 19 nt, Artificial Sequence
  Description of Artificial Sequence: Synthetic oligonucleotide
uaucccuaugagucaaugg

SEQ ID NO: 389559 - RNA, 19 nt, Artificial Sequence
  Description of Artificial Sequence: Synthetic oligonucleotide
auaaguaagcuugguggcc

SEQ ID NO: 389560 - RNA, 19 nt, Artificial Sequence
  Description of Artificial Sequence: Synthetic oligonucleotide
uggacaaggcuacugauau

SEQ ID NO: 389561 - RNA, 19 nt, Artificial Sequence
  Description of Artificial Sequence: Synthetic oligonucleotide
uaucuggcagcagagauug

SEQ ID NO: 389562 - RNA, 19 nt, Artificial Sequence
  Description of Artificial Sequence: Synthetic oligonucleotide
cauagucccagugaguugg

SEQ ID NO: 389563 - RNA, 19 nt, Artificial Sequence
  Description of Artificial Sequence: Synthetic oligonucleotide
agacccaagagccuugguc

SEQ ID NO: 389564 - RNA, 19 nt, Artificial Sequence
  Description of Artificial Sequence: Synthetic oligonucleotide
caugguaaccaacagacca

SEQ ID NO: 389565 - RNA, 19 nt, Artificial Sequence
  Description of Artificial Sequence: Synthetic oligonucleotide
aaggcuacugauauguucu

SEQ ID NO: 389566 - RNA, 19 nt, Artificial Sequence
  Description of Artificial Sequence: Synthetic oligonucleotide
uucuuauagcugcuauggg

SEQ ID NO: 389567 - RNA, 19 nt, Artificial Sequence
  Description of Artificial Sequence: Synthetic oligonucleotide
ugagcacuccacuucaggc

SEQ ID NO: 389568 - RNA, 19 nt, Artificial Sequence
  Description of Artificial Sequence: Synthetic oligonucleotide
gggauaucuggauagaagc

SEQ ID NO: 389569 - RNA, 19 nt, Artificial Sequence
  Description of Artificial Sequence: Synthetic oligonucleotide
uuucaagauuucaguaccc

SEQ ID NO: 389570 - RNA, 19 nt, Artificial Sequence
  Description of Artificial Sequence: Synthetic oligonucleotide
ugauuaaucucugaccccu

SEQ ID NO: 389571 - RNA, 19 nt, Artificial Sequence
  Description of Artificial Sequence: Synthetic oligonucleotide
acgauuuugcagccaaccg

SEQ ID NO: 389572 - RNA, 19 nt, Artificial Sequence
  Description of Artificial Sequence: Synthetic oligonucleotide
gagcaguuggauuggaccc

SEQ ID NO: 389573 - RNA, 19 nt, Artificial Sequence
  Description of Artificial Sequence: Synthetic oligonucleotide
ucaacgauuuugcagccaa

SEQ ID NO: 389574 - RNA, 19 nt, Artificial Sequence
  Description of Artificial Sequence: Synthetic oligonucleotide
cagagaguugguaucuugg

SEQ ID NO: 389575 - RNA, 19 nt, Artificial Sequence
  Description of Artificial Sequence: Synthetic oligonucleotide
ugauuagaccacagcaaug

SEQ ID NO: 389576 - RNA, 19 nt, Artificial Sequence
  Description of Artificial Sequence: Synthetic oligonucleotide
accccuaaagaugacaguc

SEQ ID NO: 389577 - RNA, 19 nt, Artificial Sequence
  Description of Artificial Sequence: Synthetic oligonucleotide
aucccgaucaaacuugugu

SEQ ID NO: 389578 - RNA, 19 nt, Artificial Sequence
  Description of Artificial Sequence: Synthetic oligonucleotide
aaaggauggccaggaaugg

SEQ ID NO: 389579 - RNA, 19 nt, Artificial Sequence
  Description of Artificial Sequence: Synthetic oligonucleotide
uguaaaucuuccggagugg

SEQ ID NO: 389580 - RNA, 19 nt, Artificial Sequence
  Description of Artificial Sequence: Synthetic oligonucleotide
uuccagaucccgaucaaac

SEQ ID NO: 389581 - RNA, 19 nt, Artificial Sequence
  Description of Artificial Sequence: Synthetic oligonucleotide
caaacuuguguccuucagc

SEQ ID NO: 389582 - RNA, 19 nt, Artificial Sequence
  Description of Artificial Sequence: Synthetic oligonucleotide
ucuuccaauaaguaagcuu

SEQ ID NO: 389583 - RNA, 19 nt, Artificial Sequence
  Description of Artificial Sequence: Synthetic oligonucleotide
uuggauuggacccucucaa

SEQ ID NO: 389584 - RNA, 19 nt, Artificial Sequence
  Description of Artificial Sequence: Synthetic oligonucleotide
caaacuaucuggcuucaug

SEQ ID NO: 389585 - RNA, 19 nt, Artificial Sequence
  Description of Artificial Sequence: Synthetic oligonucleotide
uugcaagaaaacacauccc

SEQ ID NO: 389586 - RNA, 19 nt, Artificial Sequence
  Description of Artificial Sequence: Synthetic oligonucleotide
gauaucuggauagaagcuc

SEQ ID NO: 389587 - RNA, 19 nt, Artificial Sequence
  Description of Artificial Sequence: Synthetic oligonucleotide
gauugaaugcugauguuca

SEQ ID NO: 389588 - RNA, 19 nt, Artificial Sequence
  Description of Artificial Sequence: Synthetic oligonucleotide
cauacaugauuaaucucug

SEQ ID NO: 389589 - RNA, 19 nt, Artificial Sequence
  Description of Artificial Sequence: Synthetic oligonucleotide
ucccaucaaacuaucuggc

SEQ ID NO: 389590 - RNA, 19 nt, Artificial Sequence
  Description of Artificial Sequence: Synthetic oligonucleotide
ucuuugcuuucaugggugg

SEQ ID NO: 389591 - RNA, 19 nt, Artificial Sequence
  Description of Artificial Sequence: Synthetic oligonucleotide
gauauuauuggcagcuuga

SEQ ID NO: 389592 - RNA, 19 nt, Artificial Sequence
  Description of Artificial Sequence: Synthetic oligonucleotide
uucaagauuucaguacccc

SEQ ID NO: 389593 - RNA, 19 nt, Artificial Sequence
  Description of Artificial Sequence: Synthetic oligonucleotide
uaaguaagcuugguggccc

SEQ ID NO: 389594 - RNA, 19 nt, Artificial Sequence
  Description of Artificial Sequence: Synthetic oligonucleotide
ucaugggaacccaaguccu

SEQ ID NO: 389595 - RNA, 19 nt, Artificial Sequence
  Description of Artificial Sequence: Synthetic oligonucleotide
caggagguucccaauauug

SEQ ID NO: 389596 - RNA, 19 nt, Artificial Sequence
  Description of Artificial Sequence: Synthetic oligonucleotide
uuaaacugguggaggcucc

SEQ ID NO: 389597 - RNA, 19 nt, Artificial Sequence
  Description of Artificial Sequence: Synthetic oligonucleotide
aguugcaaaggauggccag

SEQ ID NO: 389598 - RNA, 19 nt, Artificial Sequence
  Description of Artificial Sequence: Synthetic oligonucleotide
cagaaguucccacucacac

SEQ ID NO: 389599 - RNA, 19 nt, Artificial Sequence
  Description of Artificial Sequence: Synthetic oligonucleotide
gaggacuucacuucuggga

SEQ ID NO: 389600 - RNA, 19 nt, Artificial Sequence
  Description of Artificial Sequence: Synthetic oligonucleotide
uguacauaccucagcguaa

SEQ ID NO: 389601 - RNA, 19 nt, Artificial Sequence
  Description of Artificial Sequence: Synthetic oligonucleotide
ugaggcacacuucuccuga

SEQ ID NO: 389602 - RNA, 19 nt, Artificial Sequence
  Description of Artificial Sequence: Synthetic oligonucleotide
uauacguagcugagaauuc

SEQ ID NO: 389603 - RNA, 19 nt, Artificial Sequence
  Description of Artificial Sequence: Synthetic oligonucleotide
acugcacguuuccaggaac

SEQ ID NO: 389604 - RNA, 19 nt, Artificial Sequence
  Description of Artificial Sequence: Synthetic oligonucleotide
gguuucaagauuucaguac

SEQ ID NO: 389605 - RNA, 19 nt, Artificial Sequence
  Description of Artificial Sequence: Synthetic oligonucleotide
uguaggggaaaugccaccc

SEQ ID NO: 389606 - RNA, 19 nt, Artificial Sequence
  Description of Artificial Sequence: Synthetic oligonucleotide
gugacugcacguuuccagg

SEQ ID NO: 389607 - RNA, 19 nt, Artificial Sequence
  Description of Artificial Sequence: Synthetic oligonucleotide
uuuucauagguagauccaa

SEQ ID NO: 389608 - RNA, 19 nt, Artificial Sequence
  Description of Artificial Sequence: Synthetic oligonucleotide
uacugauauguucuucagu

SEQ ID NO: 389609 - RNA, 19 nt, Artificial Sequence
  Description of Artificial Sequence: Synthetic oligonucleotide
uccagauugaaugcugaug

SEQ ID NO: 389610 - RNA, 19 nt, Artificial Sequence
  Description of Artificial Sequence: Synthetic oligonucleotide
uuggucugaaucaacgauu

SEQ ID NO: 389611 - RNA, 19 nt, Artificial Sequence
  Description of Artificial Sequence: Synthetic oligonucleotide
agcaccaucuguuuccaga

SEQ ID NO: 389612 - RNA, 19 nt, Artificial Sequence
  Description of Artificial Sequence: Synthetic oligonucleotide
uccccggaagguaccaugg

SEQ ID NO: 389613 - RNA, 19 nt, Artificial Sequence
  Description of Artificial Sequence: Synthetic oligonucleotide
agguucccaauauugcaag

SEQ ID NO: 389614 - RNA, 19 nt, Artificial Sequence
  Description of Artificial Sequence: Synthetic oligonucleotide
ucccgaucaaacuuguguc

SEQ ID NO: 389615 - RNA, 19 nt, Artificial Sequence
  Description of Artificial Sequence: Synthetic oligonucleotide
ggacucaaggagcaguugg

SEQ ID NO: 389616 - RNA, 19 nt, Artificial Sequence
  Description of Artificial Sequence: Synthetic oligonucleotide
ggagcaguuggauuggacc

SEQ ID NO: 389617 - RNA, 19 nt, Artificial Sequence
  Description of Artificial Sequence: Synthetic oligonucleotide
auaccaaaugagaaacauc

SEQ ID NO: 389618 - RNA, 19 nt, Artificial Sequence
  Description of Artificial Sequence: Synthetic oligonucleotide
agggaaaccagcugcacaa

SEQ ID NO: 389619 - RNA, 19 nt, Artificial Sequence
  Description of Artificial Sequence: Synthetic oligonucleotide
uccagaaguucccacucac

SEQ ID NO: 389620 - RNA, 19 nt, Artificial Sequence
  Description of Artificial Sequence: Synthetic oligonucleotide
uggauagaagcucaccauu

SEQ ID NO: 389621 - RNA, 19 nt, Artificial Sequence
  Description of Artificial Sequence: Synthetic oligonucleotide
aaugccaugcugggaagug

SEQ ID NO: 389622 - RNA, 19 nt, Artificial Sequence
  Description of Artificial Sequence: Synthetic oligonucleotide
aguuggauuggacccucuc

SEQ ID NO: 389623 - RNA, 19 nt, Artificial Sequence
  Description of Artificial Sequence: Synthetic oligonucleotide
ugaagucucaugggaaccc

SEQ ID NO: 389624 - RNA, 19 nt, Artificial Sequence
  Description of Artificial Sequence: Synthetic oligonucleotide
cuguauguucaaacaacug

SEQ ID NO: 389625 - RNA, 19 nt, Artificial Sequence
  Description of Artificial Sequence: Synthetic oligonucleotide
uugucaccagugauuagac

SEQ ID NO: 389626 - RNA, 19 nt, Artificial Sequence
  Description of Artificial Sequence: Synthetic oligonucleotide
uugguaucuuggauucaag

SEQ ID NO: 389627 - RNA, 19 nt, Artificial Sequence
  Description of Artificial Sequence: Synthetic oligonucleotide
uucagccaaggaaaucuga

SEQ ID NO: 389628 - RNA, 19 nt, Artificial Sequence
  Description of Artificial Sequence: Synthetic oligonucleotide
caaccgaugaauggcaaag

SEQ ID NO: 389629 - RNA, 19 nt, Artificial Sequence
  Description of Artificial Sequence: Synthetic oligonucleotide
uuccggagugguuucaaga

SEQ ID NO: 389630 - RNA, 19 nt, Artificial Sequence
  Description of Artificial Sequence: Synthetic oligonucleotide
uaacucccaccuuagcccc

SEQ ID NO: 389631 - RNA, 19 nt, Artificial Sequence
  Description of Artificial Sequence: Synthetic oligonucleotide
acaacccauuggcaaacuc

SEQ ID NO: 389632 - RNA, 19 nt, Artificial Sequence
  Description of Artificial Sequence: Synthetic oligonucleotide
uugaagucucaugggaacc

SEQ ID NO: 389633 - RNA, 19 nt, Artificial Sequence
  Description of Artificial Sequence: Synthetic oligonucleotide
auagguagauccaaaucca

SEQ ID NO: 389634 - RNA, 19 nt, Artificial Sequence
  Description of Artificial Sequence: Synthetic oligonucleotide
uaagcuugguggcccuggg

SEQ ID NO: 389635 - RNA, 19 nt, Artificial Sequence
  Description of Artificial Sequence: Synthetic oligonucleotide
gaggaacacaaauucucca

SEQ ID NO: 389636 - RNA, 19 nt, Artificial Sequence
  Description of Artificial Sequence: Synthetic oligonucleotide
uccagaucccgaucaaacu

SEQ ID NO: 389637 - RNA, 19 nt, Artificial Sequence
  Description of Artificial Sequence: Synthetic oligonucleotide
cagaucccgaucaaacuug

SEQ ID NO: 389638 - RNA, 19 nt, Artificial Sequence
  Description of Artificial Sequence: Synthetic oligonucleotide
ggauauuauuggcagcuug

SEQ ID NO: 389639 - RNA, 19 nt, Artificial Sequence
  Description of Artificial Sequence: Synthetic oligonucleotide
aggaacaacucagcuaaag

SEQ ID NO: 389640 - RNA, 19 nt, Artificial Sequence
  Description of Artificial Sequence: Synthetic oligonucleotide
gucuguauguucaaacaac

SEQ ID NO: 389641 - RNA, 19 nt, Artificial Sequence
  Description of Artificial Sequence: Synthetic oligonucleotide
cauuguuuccugaguguac

SEQ ID NO: 389642 - RNA, 19 nt, Artificial Sequence
  Description of Artificial Sequence: Synthetic oligonucleotide
gucaauggcccuugcacug

SEQ ID NO: 389643 - RNA, 19 nt, Artificial Sequence
  Description of Artificial Sequence: Synthetic oligonucleotide
uacauagcgcagagcacca

SEQ ID NO: 389644 - RNA, 19 nt, Artificial Sequence
  Description of Artificial Sequence: Synthetic oligonucleotide
uggagugugccuuguaaau

SEQ ID NO: 389645 - RNA, 19 nt, Artificial Sequence
  Description of Artificial Sequence: Synthetic oligonucleotide
cucuauacguagcugagaa

SEQ ID NO: 389646 - RNA, 19 nt, Artificial Sequence
  Description of Artificial Sequence: Synthetic oligonucleotide
uacacuggggcugugcacu

SEQ ID NO: 389647 - RNA, 19 nt, Artificial Sequence
  Description of Artificial Sequence: Synthetic oligonucleotide
ccaauaccaaaugagaaac

SEQ ID NO: 389648 - RNA, 19 nt, Artificial Sequence
  Description of Artificial Sequence: Synthetic oligonucleotide
auuagugcccaggaucuug

SEQ ID NO: 389649 - RNA, 19 nt, Artificial Sequence
  Description of Artificial Sequence: Synthetic oligonucleotide
guaacaacccauuggcaaa

SEQ ID NO: 389650 - RNA, 19 nt, Artificial Sequence
  Description of Artificial Sequence: Synthetic oligonucleotide
auaccucagcguaacuccc

SEQ ID NO: 389651 - RNA, 19 nt, Artificial Sequence
  Description of Artificial Sequence: Synthetic oligonucleotide
auacaugauuaaucucuga

SEQ ID NO: 389652 - RNA, 19 nt, Artificial Sequence
  Description of Artificial Sequence: Synthetic oligonucleotide
gacccucucaaugccaugc

SEQ ID NO: 389653 - RNA, 19 nt, Artificial Sequence
  Description of Artificial Sequence: Synthetic oligonucleotide
augguaaccaacagaccag

SEQ ID NO: 389654 - RNA, 19 nt, Artificial Sequence
  Description of Artificial Sequence: Synthetic oligonucleotide
auaggacucaaggagcagu

SEQ ID NO: 389655 - RNA, 19 nt, Artificial Sequence
  Description of Artificial Sequence: Synthetic oligonucleotide
auucaagauugcugggagu

SEQ ID NO: 389656 - RNA, 19 nt, Artificial Sequence
  Description of Artificial Sequence: Synthetic oligonucleotide
gagugugccuuguaaaucu

SEQ ID NO: 389657 - RNA, 19 nt, Artificial Sequence
  Description of Artificial Sequence: Synthetic oligonucleotide
aacaagcauggggaugaag

SEQ ID NO: 389658 - RNA, 19 nt, Artificial Sequence
  Description of Artificial Sequence: Synthetic oligonucleotide
uggaguguaucuggcagca

SEQ ID NO: 389659 - RNA, 19 nt, Artificial Sequence
  Description of Artificial Sequence: Synthetic oligonucleotide
cacguuuccaggaacaacu

SEQ ID NO: 389660 - RNA, 19 nt, Artificial Sequence
  Description of Artificial Sequence: Synthetic oligonucleotide
cugagaauucuucugguua

SEQ ID NO: 389661 - RNA, 19 nt, Artificial Sequence
  Description of Artificial Sequence: Synthetic oligonucleotide
gcugcuaugggccuguguc

SEQ ID NO: 389662 - RNA, 19 nt, Artificial Sequence
  Description of Artificial Sequence: Synthetic oligonucleotide
gagggaaaccagcugcaca

SEQ ID NO: 389663 - RNA, 19 nt, Artificial Sequence
  Description of Artificial Sequence: Synthetic oligonucleotide
ugacugcacguuuccagga

SEQ ID NO: 389664 - RNA, 19 nt, Artificial Sequence
  Description of Artificial Sequence: Synthetic oligonucleotide
cuucauuaaugacuguaaa

SEQ ID NO: 389665 - RNA, 19 nt, Artificial Sequence
  Description of Artificial Sequence: Synthetic oligonucleotide
ggaggcaaaucccagcuca

SEQ ID NO: 389666 - RNA, 19 nt, Artificial Sequence
  Description of Artificial Sequence: Synthetic oligonucleotide
guagauccaaauccauaga

SEQ ID NO: 389667 - RNA, 19 nt, Artificial Sequence
  Description of Artificial Sequence: Synthetic oligonucleotide
cagauacccgagcaaugcc

SEQ ID NO: 389668 - RNA, 19 nt, Artificial Sequence
  Description of Artificial Sequence: Synthetic oligonucleotide
gcugggaguacauagcgca

SEQ ID NO: 389669 - RNA, 19 nt, Artificial Sequence
  Description of Artificial Sequence: Synthetic oligonucleotide
ucuauacguagcugagaau

SEQ ID NO: 389670 - RNA, 19 nt, Artificial Sequence
  Description of Artificial Sequence: Synthetic oligonucleotide
ucccaccuuagccccaggc

SEQ ID NO: 389671 - RNA, 19 nt, Artificial Sequence
  Description of Artificial Sequence: Synthetic oligonucleotide
uuggacccucucaaugcca

SEQ ID NO: 389672 - RNA, 19 nt, Artificial Sequence
  Description of Artificial Sequence: Synthetic oligonucleotide
cuguacauaccucagcgua

SEQ ID NO: 389673 - RNA, 19 nt, Artificial Sequence
  Description of Artificial Sequence: Synthetic oligonucleotide
agcuaaaggauggagugua

SEQ ID NO: 389674 - RNA, 19 nt, Artificial Sequence
  Description of Artificial Sequence: Synthetic oligonucleotide
ggauagaagcucaccauug

SEQ ID NO: 389675 - RNA, 19 nt, Artificial Sequence
  Description of Artificial Sequence: Synthetic oligonucleotide
gugguuucaagauuucagu

SEQ ID NO: 389676 - RNA, 19 nt, Artificial Sequence
  Description of Artificial Sequence: Synthetic oligonucleotide
auugaaugcugauguucaa

SEQ ID NO: 389677 - RNA, 19 nt, Artificial Sequence
  Description of Artificial Sequence: Synthetic oligonucleotide
ugccaugcugggaagugau

SEQ ID NO: 389678 - RNA, 19 nt, Artificial Sequence
  Description of Artificial Sequence: Synthetic oligonucleotide
ugggaguacauagcgcaga

SEQ ID NO: 389679 - RNA, 19 nt, Artificial Sequence
  Description of Artificial Sequence: Synthetic oligonucleotide
cauagcgcagagcaccauc

SEQ ID NO: 389680 - RNA, 19 nt, Artificial Sequence
  Description of Artificial Sequence: Synthetic oligonucleotide
cuuggcagccucuauacgu

SEQ ID NO: 389681 - RNA, 19 nt, Artificial Sequence
  Description of Artificial Sequence: Synthetic oligonucleotide
agauacccgagcaaugccu

SEQ ID NO: 389682 - RNA, 19 nt, Artificial Sequence
  Description of Artificial Sequence: Synthetic oligonucleotide
ucugggauaucuggauaga

SEQ ID NO: 389683 - RNA, 19 nt, Artificial Sequence
  Description of Artificial Sequence: Synthetic oligonucleotide
agcuacacuggggcugugc

SEQ ID NO: 389684 - RNA, 19 nt, Artificial Sequence
  Description of Artificial Sequence: Synthetic oligonucleotide
gauuuugcagccaaccgau

SEQ ID NO: 389685 - RNA, 19 nt, Artificial Sequence
  Description of Artificial Sequence: Synthetic oligonucleotide
uaccucagcguaacuccca

SEQ ID NO: 389686 - RNA, 19 nt, Artificial Sequence
  Description of Artificial Sequence: Synthetic oligonucleotide
acacucuccggaaagaauu

SEQ ID NO: 389687 - RNA, 19 nt, Artificial Sequence
  Description of Artificial Sequence: Synthetic oligonucleotide
uggacccucucaaugccau

SEQ ID NO: 389688 - RNA, 19 nt, Artificial Sequence
  Description of Artificial Sequence: Synthetic oligonucleotide
guuccuguacauaccucag

SEQ ID NO: 389689 - RNA, 19 nt, Artificial Sequence
  Description of Artificial Sequence: Synthetic oligonucleotide
agguaauuucaggauauua

SEQ ID NO: 389690 - RNA, 19 nt, Artificial Sequence
  Description of Artificial Sequence: Synthetic oligonucleotide
ccaggaacaacucagcuaa

SEQ ID NO: 389691 - RNA, 19 nt, Artificial Sequence
  Description of Artificial Sequence: Synthetic oligonucleotide
cugggaguacauagcgcag

SEQ ID NO: 389692 - RNA, 19 nt, Artificial Sequence
  Description of Artificial Sequence: Synthetic oligonucleotide
guacauaccucagcguaac

SEQ ID NO: 389693 - RNA, 19 nt, Artificial Sequence
  Description of Artificial Sequence: Synthetic oligonucleotide
ugccucguccauuguuucc

SEQ ID NO: 389694 - RNA, 19 nt, Artificial Sequence
  Description of Artificial Sequence: Synthetic oligonucleotide
ggaauaucccuaugaguca

SEQ ID NO: 389695 - RNA, 19 nt, Artificial Sequence
  Description of Artificial Sequence: Synthetic oligonucleotide
auagcgcagagcaccaucu

SEQ ID NO: 389696 - RNA, 19 nt, Artificial Sequence
  Description of Artificial Sequence: Synthetic oligonucleotide
gagcgauccaugaggaaca

SEQ ID NO: 389697 - RNA, 19 nt, Artificial Sequence
  Description of Artificial Sequence: Synthetic oligonucleotide
guugguaucuuggauucaa

SEQ ID NO: 389698 - RNA, 19 nt, Artificial Sequence
  Description of Artificial Sequence: Synthetic oligonucleotide
cugaaucaacgauuuugca

SEQ ID NO: 389699 - RNA, 19 nt, Artificial Sequence
  Description of Artificial Sequence: Synthetic oligonucleotide
acuuccagagcgauccaug

SEQ ID NO: 389700 - RNA, 19 nt, Artificial Sequence
  Description of Artificial Sequence: Synthetic oligonucleotide
cacagcuacacuggggcug

SEQ ID NO: 389701 - RNA, 19 nt, Artificial Sequence
  Description of Artificial Sequence: Synthetic oligonucleotide
guacugaauaggacucaag

SEQ ID NO: 389702 - RNA, 19 nt, Artificial Sequence
  Description of Artificial Sequence: Synthetic oligonucleotide
gggaguacauagcgcagag

SEQ ID NO: 389703 - RNA, 19 nt, Artificial Sequence
  Description of Artificial Sequence: Synthetic oligonucleotide
cauuugucuuggguuguag

SEQ ID NO: 389704 - RNA, 19 nt, Artificial Sequence
  Description of Artificial Sequence: Synthetic oligonucleotide
uacccgagcaaugccuuug

SEQ ID NO: 389705 - RNA, 19 nt, Artificial Sequence
  Description of Artificial Sequence: Synthetic oligonucleotide
gguaauuucaggauauuau

SEQ ID NO: 389706 - RNA, 19 nt, Artificial Sequence
  Description of Artificial Sequence: Synthetic oligonucleotide
auuagaccacagcaauguu

SEQ ID NO: 389707 - RNA, 19 nt, Artificial Sequence
  Description of Artificial Sequence: Synthetic oligonucleotide
ccaauauugcaagaaaaca

SEQ ID NO: 389708 - RNA, 19 nt, Artificial Sequence
  Description of Artificial Sequence: Synthetic oligonucleotide
gaaugcugauguucaauau

SEQ ID NO: 389709 - RNA, 19 nt, Artificial Sequence
  Description of Artificial Sequence: Synthetic oligonucleotide
uagcgcagagcaccaucug

SEQ ID NO: 389710 - RNA, 19 nt, Artificial Sequence
  Description of Artificial Sequence: Synthetic oligonucleotide
ccgaugaauggcaaagcug

SEQ ID NO: 389711 - RNA, 19 nt, Artificial Sequence
  Description of Artificial Sequence: Synthetic oligonucleotide
uggauuggacccucucaau

SEQ ID NO: 389712 - RNA, 19 nt, Artificial Sequence
  Description of Artificial Sequence: Synthetic oligonucleotide
aacaacccauuggcaaacu

SEQ ID NO: 389713 - RNA, 19 nt, Artificial Sequence
  Description of Artificial Sequence: Synthetic oligonucleotide
cgagcaaugccuuugauua

SEQ ID NO: 389714 - RNA, 19 nt, Artificial Sequence
  Description of Artificial Sequence: Synthetic oligonucleotide
gaguugcaaaggauggcca

SEQ ID NO: 389715 - RNA, 19 nt, Artificial Sequence
  Description of Artificial Sequence: Synthetic oligonucleotide
cuuguaaaucuuccggagu

SEQ ID NO: 389716 - RNA, 19 nt, Artificial Sequence
  Description of Artificial Sequence: Synthetic oligonucleotide
caagauugcugggaguaca

SEQ ID NO: 389717 - RNA, 19 nt, Artificial Sequence
  Description of Artificial Sequence: Synthetic oligonucleotide
ccagugauuagaccacagc

SEQ ID NO: 389718 - RNA, 19 nt, Artificial Sequence
  Description of Artificial Sequence: Synthetic oligonucleotide
agcguaacucccaccuuag

SEQ ID NO: 389719 - RNA, 19 nt, Artificial Sequence
  Description of Artificial Sequence: Synthetic oligonucleotide
gauuaaacugguggaggcu

SEQ ID NO: 389720 - RNA, 19 nt, Artificial Sequence
  Description of Artificial Sequence: Synthetic oligonucleotide
ugucaucagcaagguacug

SEQ ID NO: 389721 - RNA, 19 nt, Artificial Sequence
  Description of Artificial Sequence: Synthetic oligonucleotide
gggcauacaugauuaaucu

SEQ ID NO: 389722 - RNA, 19 nt, Artificial Sequence
  Description of Artificial Sequence: Synthetic oligonucleotide
caacgauuuugcagccaac

SEQ ID NO: 389723 - RNA, 19 nt, Artificial Sequence
  Description of Artificial Sequence: Synthetic oligonucleotide
cuuggucugaaucaacgau

SEQ ID NO: 389724 - RNA, 19 nt, Artificial Sequence
  Description of Artificial Sequence: Synthetic oligonucleotide
gaagucucaugggaaccca

SEQ ID NO: 389725 - RNA, 19 nt, Artificial Sequence
  Description of Artificial Sequence: Synthetic oligonucleotide
aguuccagaucccgaucaa

SEQ ID NO: 389726 - RNA, 19 nt, Artificial Sequence
  Description of Artificial Sequence: Synthetic oligonucleotide
gccuuguaaaucuuccgga

SEQ ID NO: 389727 - RNA, 19 nt, Artificial Sequence
  Description of Artificial Sequence: Synthetic oligonucleotide
ccagauugaaugcugaugu

SEQ ID NO: 389728 - RNA, 19 nt, Artificial Sequence
  Description of Artificial Sequence: Synthetic oligonucleotide
guagguccccggaagguac

SEQ ID NO: 389729 - RNA, 19 nt, Artificial Sequence
  Description of Artificial Sequence: Synthetic oligonucleotide
agcgauccaugaggaacac

SEQ ID NO: 389730 - RNA, 19 nt, Artificial Sequence
  Description of Artificial Sequence: Synthetic oligonucleotide
agcaguuggauuggacccu

SEQ ID NO: 389731 - RNA, 19 nt, Artificial Sequence
  Description of Artificial Sequence: Synthetic oligonucleotide
aucaaacuaucuggcuuca

SEQ ID NO: 389732 - RNA, 19 nt, Artificial Sequence
  Description of Artificial Sequence: Synthetic oligonucleotide
ugcacguuuccaggaacaa

SEQ ID NO: 389733 - RNA, 19 nt, Artificial Sequence
  Description of Artificial Sequence: Synthetic oligonucleotide
acagcuacacuggggcugu

SEQ ID NO: 389734 - RNA, 19 nt, Artificial Sequence
  Description of Artificial Sequence: Synthetic oligonucleotide
gaguugggcauacaugauu

SEQ ID NO: 389735 - RNA, 19 nt, Artificial Sequence
  Description of Artificial Sequence: Synthetic oligonucleotide
agaguuuccuuggcagccu

SEQ ID NO: 389736 - RNA, 19 nt, Artificial Sequence
  Description of Artificial Sequence: Synthetic oligonucleotide
aauuagugcccaggaucuu

SEQ ID NO: 389737 - RNA, 19 nt, Artificial Sequence
  Description of Artificial Sequence: Synthetic oligonucleotide
uuaaggccacagacacauc

SEQ ID NO: 389738 - RNA, 19 nt, Artificial Sequence
  Description of Artificial Sequence: Synthetic oligonucleotide
aucaacgauuuugcagcca

SEQ ID NO: 389739 - RNA, 19 nt, Artificial Sequence
  Description of Artificial Sequence: Synthetic oligonucleotide
agucauccauugaacaguu

SEQ ID NO: 389740 - RNA, 19 nt, Artificial Sequence
  Description of Artificial Sequence: Synthetic oligonucleotide
cacuucaagucuuugccau

SEQ ID NO: 389741 - RNA, 19 nt, Artificial Sequence
  Description of Artificial Sequence: Synthetic oligonucleotide
agccaaccgaugaauggca

SEQ ID NO: 389742 - RNA, 19 nt, Artificial Sequence
  Description of Artificial Sequence: Synthetic oligonucleotide
ccuuggaggguauacuuga

SEQ ID NO: 389743 - RNA, 19 nt, Artificial Sequence
  Description of Artificial Sequence: Synthetic oligonucleotide
gaucccgaucaaacuugug

SEQ ID NO: 389744 - RNA, 19 nt, Artificial Sequence
  Description of Artificial Sequence: Synthetic oligonucleotide
acccgagcaaugccuuuga

SEQ ID NO: 389745 - RNA, 19 nt, Artificial Sequence
  Description of Artificial Sequence: Synthetic oligonucleotide
auacuuccagagcgaucca

SEQ ID NO: 389746 - RNA, 19 nt, Artificial Sequence
  Description of Artificial Sequence: Synthetic oligonucleotide
agaucccgaucaaacuugu

SEQ ID NO: 389747 - RNA, 19 nt, Artificial Sequence
  Description of Artificial Sequence: Synthetic oligonucleotide
guugaaguaacaacccauu

SEQ ID NO: 389748 - RNA, 19 nt, Artificial Sequence
  Description of Artificial Sequence: Synthetic oligonucleotide
guaaaucuuccggaguggu

SEQ ID NO: 389749 - RNA, 19 nt, Artificial Sequence
  Description of Artificial Sequence: Synthetic oligonucleotide
gccugugauaaacucugca

SEQ ID NO: 389750 - RNA, 19 nt, Artificial Sequence
  Description of Artificial Sequence: Synthetic oligonucleotide
caaugccuuugauuaaacu

SEQ ID NO: 389751 - RNA, 19 nt, Artificial Sequence
  Description of Artificial Sequence: Synthetic oligonucleotide
guaggguagguccccggaa

SEQ ID NO: 389752 - RNA, 19 nt, Artificial Sequence
  Description of Artificial Sequence: Synthetic oligonucleotide
cugccucguccauuguuuc

SEQ ID NO: 389753 - RNA, 19 nt, Artificial Sequence
  Description of Artificial Sequence: Synthetic oligonucleotide
ggauggaguguaucuggca

SEQ ID NO: 389754 - RNA, 19 nt, Artificial Sequence
  Description of Artificial Sequence: Synthetic oligonucleotide
auagucccagugaguuggg

SEQ ID NO: 389755 - RNA, 19 nt, Artificial Sequence
  Description of Artificial Sequence: Synthetic oligonucleotide
ggagugugccuuguaaauc

SEQ ID NO: 389756 - RNA, 19 nt, Artificial Sequence
  Description of Artificial Sequence: Synthetic oligonucleotide
ggaagguaccaugggaguc

SEQ ID NO: 389757 - RNA, 19 nt, Artificial Sequence
  Description of Artificial Sequence: Synthetic oligonucleotide
cuggauagaagcucaccau

SEQ ID NO: 389758 - RNA, 19 nt, Artificial Sequence
  Description of Artificial Sequence: Synthetic oligonucleotide
cagcguaacucccaccuua

SEQ ID NO: 389759 - RNA, 19 nt, Artificial Sequence
  Description of Artificial Sequence: Synthetic oligonucleotide
ggcaaccaugcugagugug

SEQ ID NO: 389760 - RNA, 19 nt, Artificial Sequence
  Description of Artificial Sequence: Synthetic oligonucleotide
cugaccccuaaagaugaca

SEQ ID NO: 389761 - RNA, 19 nt, Artificial Sequence
  Description of Artificial Sequence: Synthetic oligonucleotide
accaacagaccaggaggca

SEQ ID NO: 389762 - RNA, 19 nt, Artificial Sequence
  Description of Artificial Sequence: Synthetic oligonucleotide
ugguggcaaccaugcugag

SEQ ID NO: 389763 - RNA, 19 nt, Artificial Sequence
  Description of Artificial Sequence: Synthetic oligonucleotide
gguucccaauauugcaaga

SEQ ID NO: 389764 - RNA, 19 nt, Artificial Sequence
  Description of Artificial Sequence: Synthetic oligonucleotide
gccucuauacguagcugag

SEQ ID NO: 389765 - RNA, 19 nt, Artificial Sequence
  Description of Artificial Sequence: Synthetic oligonucleotide
uggcaaccaugcugagugu

SEQ ID NO: 389766 - RNA, 19 nt, Artificial Sequence
  Description of Artificial Sequence: Synthetic oligonucleotide
augccaugcugggaaguga

SEQ ID NO: 389767 - RNA, 19 nt, Artificial Sequence
  Description of Artificial Sequence: Synthetic oligonucleotide
aggcuacugauauguucuu

SEQ ID NO: 389768 - RNA, 19 nt, Artificial Sequence
  Description of Artificial Sequence: Synthetic oligonucleotide
gcagagcaccaucuguuuc

SEQ ID NO: 389769 - RNA, 19 nt, Artificial Sequence
  Description of Artificial Sequence: Synthetic oligonucleotide
cgauuuugcagccaaccga

SEQ ID NO: 389770 - RNA, 19 nt, Artificial Sequence
  Description of Artificial Sequence: Synthetic oligonucleotide
aggguauacuugaggcaca

SEQ ID NO: 389771 - RNA, 19 nt, Artificial Sequence
  Description of Artificial Sequence: Synthetic oligonucleotide
gauuaaucucugaccccua

SEQ ID NO: 389772 - RNA, 19 nt, Artificial Sequence
  Description of Artificial Sequence: Synthetic oligonucleotide
gucccagugaguugggcau

SEQ ID NO: 389773 - RNA, 19 nt, Artificial Sequence
  Description of Artificial Sequence: Synthetic oligonucleotide
gguacugaauaggacucaa

SEQ ID NO: 389774 - RNA, 19 nt, Artificial Sequence
  Description of Artificial Sequence: Synthetic oligonucleotide
auacccgagcaaugccuuu

SEQ ID NO: 389775 - RNA, 19 nt, Artificial Sequence
  Description of Artificial Sequence: Synthetic oligonucleotide
aggauauuauuggcagcuu

SEQ ID NO: 389776 - RNA, 19 nt, Artificial Sequence
  Description of Artificial Sequence: Synthetic oligonucleotide
cugggauaucuggauagaa

SEQ ID NO: 389777 - RNA, 19 nt, Artificial Sequence
  Description of Artificial Sequence: Synthetic oligonucleotide
ggauaucuggauagaagcu

SEQ ID NO: 389778 - RNA, 19 nt, Artificial Sequence
  Description of Artificial Sequence: Synthetic oligonucleotide
guuccagaucccgaucaaa

SEQ ID NO: 389779 - RNA, 19 nt, Artificial Sequence
  Description of Artificial Sequence: Synthetic oligonucleotide
ggaguacauagcgcagagc

SEQ ID NO: 389780 - RNA, 19 nt, Artificial Sequence
  Description of Artificial Sequence: Synthetic oligonucleotide
agauugcaggcuggcugug

SEQ ID NO: 389781 - RNA, 19 nt, Artificial Sequence
  Description of Artificial Sequence: Synthetic oligonucleotide
gcaugguaaccaacagacc

SEQ ID NO: 389782 - RNA, 19 nt, Artificial Sequence
  Description of Artificial Sequence: Synthetic oligonucleotide
ggguauacuugaggcacac

SEQ ID NO: 389783 - RNA, 19 nt, Artificial Sequence
  Description of Artificial Sequence: Synthetic oligonucleotide
agauugcugggaguacaua

SEQ ID NO: 389784 - RNA, 19 nt, Artificial Sequence
  Description of Artificial Sequence: Synthetic oligonucleotide
ggccugugucuucucuugc

SEQ ID NO: 389785 - RNA, 19 nt, Artificial Sequence
  Description of Artificial Sequence: Synthetic oligonucleotide
gagcucccaucaaacuauc

SEQ ID NO: 389786 - RNA, 19 nt, Artificial Sequence
  Description of Artificial Sequence: Synthetic oligonucleotide
cucaaggagcaguuggauu

SEQ ID NO: 389787 - RNA, 19 nt, Artificial Sequence
  Description of Artificial Sequence: Synthetic oligonucleotide
gcaaugccuuugauuaaac

SEQ ID NO: 389788 - RNA, 19 nt, Artificial Sequence
  Description of Artificial Sequence: Synthetic oligonucleotide
agcucccaucaaacuaucu

SEQ ID NO: 389789 - RNA, 19 nt, Artificial Sequence
  Description of Artificial Sequence: Synthetic oligonucleotide
ggggaacacaaagcuugcc

SEQ ID NO: 389790 - RNA, 19 nt, Artificial Sequence
  Description of Artificial Sequence: Synthetic oligonucleotide
ggcauagucccagugaguu

SEQ ID NO: 389791 - RNA, 19 nt, Artificial Sequence
  Description of Artificial Sequence: Synthetic oligonucleotide
ggcuacugauauguucuuc

SEQ ID NO: 389792 - RNA, 19 nt, Artificial Sequence
  Description of Artificial Sequence: Synthetic oligonucleotide
gguaaccaacagaccagga

SEQ ID NO: 389793 - RNA, 19 nt, Artificial Sequence
  Description of Artificial Sequence: Synthetic oligonucleotide
gccuuugauuaaacuggug

SEQ ID NO: 389794 - RNA, 19 nt, Artificial Sequence
  Description of Artificial Sequence: Synthetic oligonucleotide
ccugagcacuccacuucag

SEQ ID NO: 389795 - RNA, 19 nt, Artificial Sequence
  Description of Artificial Sequence: Synthetic oligonucleotide
ggagugguuucaagauuuc

SEQ ID NO: 389796 - RNA, 19 nt, Artificial Sequence
  Description of Artificial Sequence: Synthetic oligonucleotide
caaccaugcugagugugua

SEQ ID NO: 389797 - RNA, 19 nt, Artificial Sequence
  Description of Artificial Sequence: Synthetic oligonucleotide
ggacccucucaaugccaug

SEQ ID NO: 389798 - RNA, 19 nt, Artificial Sequence
  Description of Artificial Sequence: Synthetic oligonucleotide
ccaucaaacuaucuggcuu

SEQ ID NO: 389799 - RNA, 19 nt, Artificial Sequence
  Description of Artificial Sequence: Synthetic oligonucleotide
cacuggcaccuugucacca

SEQ ID NO: 389800 - RNA, 19 nt, Artificial Sequence
  Description of Artificial Sequence: Synthetic oligonucleotide
cagagcgauccaugaggaa

SEQ ID NO: 389801 - RNA, 19 nt, Artificial Sequence
  Description of Artificial Sequence: Synthetic oligonucleotide
gagaauucuucugguuauu

SEQ ID NO: 389802 - RNA, 19 nt, Artificial Sequence
  Description of Artificial Sequence: Synthetic oligonucleotide
acauagcgcagagcaccau

SEQ ID NO: 389803 - RNA, 19 nt, Artificial Sequence
  Description of Artificial Sequence: Synthetic oligonucleotide
cagauugaaugcugauguu

SEQ ID NO: 389804 - RNA, 19 nt, Artificial Sequence
  Description of Artificial Sequence: Synthetic oligonucleotide
gguagguccccggaaggua

SEQ ID NO: 389805 - RNA, 19 nt, Artificial Sequence
  Description of Artificial Sequence: Synthetic oligonucleotide
ccaaccgaugaauggcaaa

SEQ ID NO: 389806 - RNA, 19 nt, Artificial Sequence
  Description of Artificial Sequence: Synthetic oligonucleotide
caggaacaacucagcuaaa

SEQ ID NO: 389807 - RNA, 19 nt, Artificial Sequence
  Description of Artificial Sequence: Synthetic oligonucleotide
caaugccaugcugggaagu

SEQ ID NO: 389808 - RNA, 19 nt, Artificial Sequence
  Description of Artificial Sequence: Synthetic oligonucleotide
gcaauguuccauggugacu

SEQ ID NO: 389809 - RNA, 19 nt, Artificial Sequence
  Description of Artificial Sequence: Synthetic oligonucleotide
ggcaggguuugcagccaug

SEQ ID NO: 389810 - RNA, 19 nt, Artificial Sequence
  Description of Artificial Sequence: Synthetic oligonucleotide
ccaaauuagugcccaggau

SEQ ID NO: 389811 - RNA, 19 nt, Artificial Sequence
  Description of Artificial Sequence: Synthetic oligonucleotide
ggauccuguccuugccugu

SEQ ID NO: 389812 - RNA, 19 nt, Artificial Sequence
  Description of Artificial Sequence: Synthetic oligonucleotide
ccuaugagucaauggcccu

SEQ ID NO: 389813 - RNA, 19 nt, Artificial Sequence
  Description of Artificial Sequence: Synthetic oligonucleotide
cucaauggacaaggcuacu

SEQ ID NO: 389814 - RNA, 19 nt, Artificial Sequence
  Description of Artificial Sequence: Synthetic oligonucleotide
ccucuauacguagcugaga

SEQ ID NO: 389815 - RNA, 19 nt, Artificial Sequence
  Description of Artificial Sequence: Synthetic oligonucleotide
gcuugccucuacugggacu

SEQ ID NO: 389816 - RNA, 19 nt, Artificial Sequence
  Description of Artificial Sequence: Synthetic oligonucleotide
ccacaagccuuugaggacu

SEQ ID NO: 389817 - RNA, 19 nt, Artificial Sequence
  Description of Artificial Sequence: Synthetic oligonucleotide
ggccaggaauggagugugc

SEQ ID NO: 389818 - RNA, 19 nt, Artificial Sequence
  Description of Artificial Sequence: Synthetic oligonucleotide
agguaccaugggagucugu

SEQ ID NO: 389819 - RNA, 19 nt, Artificial Sequence
  Description of Artificial Sequence: Synthetic oligonucleotide
caguuggauuggacccucu

SEQ ID NO: 389820 - RNA, 19 nt, Artificial Sequence
  Description of Artificial Sequence: Synthetic oligonucleotide
cacaagccuuugaggacuu

SEQ ID NO: 389821 - RNA, 19 nt, Artificial Sequence
  Description of Artificial Sequence: Synthetic oligonucleotide
gcaggagguucccaauauu

SEQ ID NO: 389822 - RNA, 19 nt, Artificial Sequence
  Description of Artificial Sequence: Synthetic oligonucleotide
gcuaaaggauggaguguau

SEQ ID NO: 389823 - RNA, 19 nt, Artificial Sequence
  Description of Artificial Sequence: Synthetic oligonucleotide
cuccugccuuggaggguau

SEQ ID NO: 389824 - RNA, 19 nt, Artificial Sequence
  Description of Artificial Sequence: Synthetic oligonucleotide
cccgagcaaugccuuugau

SEQ ID NO: 389825 - RNA, 19 nt, Artificial Sequence
  Description of Artificial Sequence: Synthetic oligonucleotide
accauguuuauuuaggucc

SEQ ID NO: 389826 - RNA, 19 nt, Artificial Sequence
  Description of Artificial Sequence: Synthetic oligonucleotide
uauauuaacuuuccuaagg

SEQ ID NO: 389827 - RNA, 19 nt, Artificial Sequence
  Description of Artificial Sequence: Synthetic oligonucleotide
auauuaacuuuccuaaggc

SEQ ID NO: 389828 - RNA, 19 nt, Artificial Sequence
  Description of Artificial Sequence: Synthetic oligonucleotide
agaguuuccugcuaggugg

SEQ ID NO: 389829 - RNA, 19 nt, Artificial Sequence
  Description of Artificial Sequence: Synthetic oligonucleotide
ucucacgacaucuuggugg

SEQ ID NO: 389830 - RNA, 19 nt, Artificial Sequence
  Description of Artificial Sequence: Synthetic oligonucleotide
acacuguuaacacugcccc

SEQ ID NO: 389831 - RNA, 19 nt, Artificial Sequence
  Description of Artificial Sequence: Synthetic oligonucleotide
auuuccuacacaugcacac

SEQ ID NO: 389832 - RNA, 19 nt, Artificial Sequence
  Description of Artificial Sequence: Synthetic oligonucleotide
gacaauacugacuucacac

SEQ ID NO: 389833 - RNA, 19 nt, Artificial Sequence
  Description of Artificial Sequence: Synthetic oligonucleotide
cuuaccauguuuauuuagg

SEQ ID NO: 389834 - RNA, 19 nt, Artificial Sequence
  Description of Artificial Sequence: Synthetic oligonucleotide
agugcuaggacuugguacg

SEQ ID NO: 389835 - RNA, 19 nt, Artificial Sequence
  Description of Artificial Sequence: Synthetic oligonucleotide
ucuucuaauggccagggga

SEQ ID NO: 389836 - RNA, 19 nt, Artificial Sequence
  Description of Artificial Sequence: Synthetic oligonucleotide
ugcuagaaaguccuguacg

SEQ ID NO: 389837 - RNA, 19 nt, Artificial Sequence
  Description of Artificial Sequence: Synthetic oligonucleotide
uuaacacugccccuuaaag

SEQ ID NO: 389838 - RNA, 19 nt, Artificial Sequence
  Description of Artificial Sequence: Synthetic oligonucleotide
aauaugaugcugauaaaug

SEQ ID NO: 389839 - RNA, 19 nt, Artificial Sequence
  Description of Artificial Sequence: Synthetic oligonucleotide
uuuuauuacccagacaaca

SEQ ID NO: 389840 - RNA, 19 nt, Artificial Sequence
  Description of Artificial Sequence: Synthetic oligonucleotide
gaugcagagaccaaaauca

SEQ ID NO: 389841 - RNA, 19 nt, Artificial Sequence
  Description of Artificial Sequence: Synthetic oligonucleotide
ucccacauaaucacgcugg

SEQ ID NO: 389842 - RNA, 19 nt, Artificial Sequence
  Description of Artificial Sequence: Synthetic oligonucleotide
aacuucaaaccaugcaguc

SEQ ID NO: 389843 - RNA, 19 nt, Artificial Sequence
  Description of Artificial Sequence: Synthetic oligonucleotide
uguaccuuaauaucugcug

SEQ ID NO: 389844 - RNA, 19 nt, Artificial Sequence
  Description of Artificial Sequence: Synthetic oligonucleotide
uugaauagguagcuguugc

SEQ ID NO: 389845 - RNA, 19 nt, Artificial Sequence
  Description of Artificial Sequence: Synthetic oligonucleotide
aacgugaccaucucucguc

SEQ ID NO: 389846 - RNA, 19 nt, Artificial Sequence
  Description of Artificial Sequence: Synthetic oligonucleotide
acacaaucugaccacaguc

SEQ ID NO: 389847 - RNA, 19 nt, Artificial Sequence
  Description of Artificial Sequence: Synthetic oligonucleotide
aaacacacgcacaugacag

SEQ ID NO: 389848 - RNA, 19 nt, Artificial Sequence
  Description of Artificial Sequence: Synthetic oligonucleotide
ugauagaggagacucuuug

SEQ ID NO: 389849 - RNA, 19 nt, Artificial Sequence
  Description of Artificial Sequence: Synthetic oligonucleotide
ucacaauggacaacgacga

SEQ ID NO: 389850 - RNA, 19 nt, Artificial Sequence
  Description of Artificial Sequence: Synthetic oligonucleotide
aguauugguguauugguga

SEQ ID NO: 389851 - RNA, 19 nt, Artificial Sequence
  Description of Artificial Sequence: Synthetic oligonucleotide
agaaucaggagagaaauca

SEQ ID NO: 389852 - RNA, 19 nt, Artificial Sequence
  Description of Artificial Sequence: Synthetic oligonucleotide
aagacaacuagaccaacaa

SEQ ID NO: 389853 - RNA, 19 nt, Artificial Sequence
  Description of Artificial Sequence: Synthetic oligonucleotide
ucuagcuuccggauuagug

SEQ ID NO: 389854 - RNA, 19 nt, Artificial Sequence
  Description of Artificial Sequence: Synthetic oligonucleotide
uguggcaauaacuccacca

SEQ ID NO: 389855 - RNA, 19 nt, Artificial Sequence
  Description of Artificial Sequence: Synthetic oligonucleotide
uaagaagccgugacgagca

SEQ ID NO: 389856 - RNA, 19 nt, Artificial Sequence
  Description of Artificial Sequence: Synthetic oligonucleotide
uuuauuacccagacaacau

SEQ ID NO: 389857 - RNA, 19 nt, Artificial Sequence
  Description of Artificial Sequence: Synthetic oligonucleotide
acugacuucacacaacuaa

SEQ ID NO: 389858 - RNA, 19 nt, Artificial Sequence
  Description of Artificial Sequence: Synthetic oligonucleotide
aaauggacaucugaccguc

SEQ ID NO: 389859 - RNA, 19 nt, Artificial Sequence
  Description of Artificial Sequence: Synthetic oligonucleotide
acaacgacgagguaaggcu

SEQ ID NO: 389860 - RNA, 19 nt, Artificial Sequence
  Description of Artificial Sequence: Synthetic oligonucleotide
uaaaagccaguauuggugu

SEQ ID NO: 389861 - RNA, 19 nt, Artificial Sequence
  Description of Artificial Sequence: Synthetic oligonucleotide
aaaucuugaucuguccauc

SEQ ID NO: 389862 - RNA, 19 nt, Artificial Sequence
  Description of Artificial Sequence: Synthetic oligonucleotide
uuaggucccagauucgaag

SEQ ID NO: 389863 - RNA, 19 nt, Artificial Sequence
  Description of Artificial Sequence: Synthetic oligonucleotide
uguccuugagaccaggcga

SEQ ID NO: 389864 - RNA, 19 nt, Artificial Sequence
  Description of Artificial Sequence: Synthetic oligonucleotide
acaauggacaacgacgagg

SEQ ID NO: 389865 - RNA, 19 nt, Artificial Sequence
  Description of Artificial Sequence: Synthetic oligonucleotide
uaucccgggaugcagagac

SEQ ID NO: 389866 - RNA, 19 nt, Artificial Sequence
  Description of Artificial Sequence: Synthetic oligonucleotide
uaagacauggcuucacaac

SEQ ID NO: 389867 - RNA, 19 nt, Artificial Sequence
  Description of Artificial Sequence: Synthetic oligonucleotide
auagaggagacucuuugca

SEQ ID NO: 389868 - RNA, 19 nt, Artificial Sequence
  Description of Artificial Sequence: Synthetic oligonucleotide
gaagcacacagaucgcagg

SEQ ID NO: 389869 - RNA, 19 nt, Artificial Sequence
  Description of Artificial Sequence: Synthetic oligonucleotide
uccagucaaacugaugggg

SEQ ID NO: 389870 - RNA, 19 nt, Artificial Sequence
  Description of Artificial Sequence: Synthetic oligonucleotide
ucaagcaguagagacaaac

SEQ ID NO: 389871 - RNA, 19 nt, Artificial Sequence
  Description of Artificial Sequence: Synthetic oligonucleotide
auaaaugcuucagugagga

SEQ ID NO: 389872 - RNA, 19 nt, Artificial Sequence
  Description of Artificial Sequence: Synthetic oligonucleotide
gauagaggagacucuuugc

SEQ ID NO: 389873 - RNA, 19 nt, Artificial Sequence
  Description of Artificial Sequence: Synthetic oligonucleotide
cauaaaugcuucagugagg

SEQ ID NO: 389874 - RNA, 19 nt, Artificial Sequence
  Description of Artificial Sequence: Synthetic oligonucleotide
uuucucccuucaaugaaag

SEQ ID NO: 389875 - RNA, 19 nt, Artificial Sequence
  Description of Artificial Sequence: Synthetic oligonucleotide
acaacuagaccaacaaagg

SEQ ID NO: 389876 - RNA, 19 nt, Artificial Sequence
  Description of Artificial Sequence: Synthetic oligonucleotide
gcaucaauuaagaaaagcc

SEQ ID NO: 389877 - RNA, 19 nt, Artificial Sequence
  Description of Artificial Sequence: Synthetic oligonucleotide
cacgcaguguccuugagac

SEQ ID NO: 389878 - RNA, 19 nt, Artificial Sequence
  Description of Artificial Sequence: Synthetic oligonucleotide
cuucuaauggccaggggac

SEQ ID NO: 389879 - RNA, 19 nt, Artificial Sequence
  Description of Artificial Sequence: Synthetic oligonucleotide
ugcagcaaagaccauuggu

SEQ ID NO: 389880 - RNA, 19 nt, Artificial Sequence
  Description of Artificial Sequence: Synthetic oligonucleotide
uuccggauuaguguguagg

SEQ ID NO: 389881 - RNA, 19 nt, Artificial Sequence
  Description of Artificial Sequence: Synthetic oligonucleotide
ugaugcugauaaauggaca

SEQ ID NO: 389882 - RNA, 19 nt, Artificial Sequence
  Description of Artificial Sequence: Synthetic oligonucleotide
ugaacgugaccaucucucg

SEQ ID NO: 389883 - RNA, 19 nt, Artificial Sequence
  Description of Artificial Sequence: Synthetic oligonucleotide
acaucugaccgucaugcag

SEQ ID NO: 389884 - RNA, 19 nt, Artificial Sequence
  Description of Artificial Sequence: Synthetic oligonucleotide
auccaugggagguuccagc

SEQ ID NO: 389885 - RNA, 19 nt, Artificial Sequence
  Description of Artificial Sequence: Synthetic oligonucleotide
uuauuacccagacaacauc

SEQ ID NO: 389886 - RNA, 19 nt, Artificial Sequence
  Description of Artificial Sequence: Synthetic oligonucleotide
aguccuguacgugaggaac

SEQ ID NO: 389887 - RNA, 19 nt, Artificial Sequence
  Description of Artificial Sequence: Synthetic oligonucleotide
uccuaaggcagauuuugug

SEQ ID NO: 389888 - RNA, 19 nt, Artificial Sequence
  Description of Artificial Sequence: Synthetic oligonucleotide
agaccuacuugcaugugcc

SEQ ID NO: 389889 - RNA, 19 nt, Artificial Sequence
  Description of Artificial Sequence: Synthetic oligonucleotide
aggggucccacauaaucac

SEQ ID NO: 389890 - RNA, 19 nt, Artificial Sequence
  Description of Artificial Sequence: Synthetic oligonucleotide
guggacgucacugucaucc

SEQ ID NO: 389891 - RNA, 19 nt, Artificial Sequence
  Description of Artificial Sequence: Synthetic oligonucleotide
aaucugaccacaguccagu

SEQ ID NO: 389892 - RNA, 19 nt, Artificial Sequence
  Description of Artificial Sequence: Synthetic oligonucleotide
acaauacugacuucacaca

SEQ ID NO: 389893 - RNA, 19 nt, Artificial Sequence
  Description of Artificial Sequence: Synthetic oligonucleotide
acuuaagaacucuugguuu

SEQ ID NO: 389894 - RNA, 19 nt, Artificial Sequence
  Description of Artificial Sequence: Synthetic oligonucleotide
acauaaucacgcugguguc

SEQ ID NO: 389895 - RNA, 19 nt, Artificial Sequence
  Description of Artificial Sequence: Synthetic oligonucleotide
cagauuuugugugagugag

SEQ ID NO: 389896 - RNA, 19 nt, Artificial Sequence
  Description of Artificial Sequence: Synthetic oligonucleotide
ucguaagaagccgugacga

SEQ ID NO: 389897 - RNA, 19 nt, Artificial Sequence
  Description of Artificial Sequence: Synthetic oligonucleotide
accgucaugcaguugagga

SEQ ID NO: 389898 - RNA, 19 nt, Artificial Sequence
  Description of Artificial Sequence: Synthetic oligonucleotide
acacaacuaagacauggcu

SEQ ID NO: 389899 - RNA, 19 nt, Artificial Sequence
  Description of Artificial Sequence: Synthetic oligonucleotide
gucaggaaacuucgaaggg

SEQ ID NO: 389900 - RNA, 19 nt, Artificial Sequence
  Description of Artificial Sequence: Synthetic oligonucleotide
ugacaauacugacuucaca

SEQ ID NO: 389901 - RNA, 19 nt, Artificial Sequence
  Description of Artificial Sequence: Synthetic oligonucleotide
uguacacuguuaacacugc

SEQ ID NO: 389902 - RNA, 19 nt, Artificial Sequence
  Description of Artificial Sequence: Synthetic oligonucleotide
uacgugaggaacucuuuca

SEQ ID NO: 389903 - RNA, 19 nt, Artificial Sequence
  Description of Artificial Sequence: Synthetic oligonucleotide
ugguacguggucaggaaac

SEQ ID NO: 389904 - RNA, 19 nt, Artificial Sequence
  Description of Artificial Sequence: Synthetic oligonucleotide
gguaaagguccacagcagg

SEQ ID NO: 389905 - RNA, 19 nt, Artificial Sequence
  Description of Artificial Sequence: Synthetic oligonucleotide
uuuagggcaguuggaauug

SEQ ID NO: 389906 - RNA, 19 nt, Artificial Sequence
  Description of Artificial Sequence: Synthetic oligonucleotide
aauaaauaugaugcugaua

SEQ ID NO: 389907 - RNA, 19 nt, Artificial Sequence
  Description of Artificial Sequence: Synthetic oligonucleotide
aggaacuucaaaccaugca

SEQ ID NO: 389908 - RNA, 19 nt, Artificial Sequence
  Description of Artificial Sequence: Synthetic oligonucleotide
ugaucugauguacuuguuu

SEQ ID NO: 389909 - RNA, 19 nt, Artificial Sequence
  Description of Artificial Sequence: Synthetic oligonucleotide
acgggcagcagguacuacg

SEQ ID NO: 389910 - RNA, 19 nt, Artificial Sequence
  Description of Artificial Sequence: Synthetic oligonucleotide
ugcacaccacuguuuaaag

SEQ ID NO: 389911 - RNA, 19 nt, Artificial Sequence
  Description of Artificial Sequence: Synthetic oligonucleotide
uguauuggugaggagcaca

SEQ ID NO: 389912 - RNA, 19 nt, Artificial Sequence
  Description of Artificial Sequence: Synthetic oligonucleotide
uauaggagucgggaugccg

SEQ ID NO: 389913 - RNA, 19 nt, Artificial Sequence
  Description of Artificial Sequence: Synthetic oligonucleotide
ugaauagguagcuguugcu

SEQ ID NO: 389914 - RNA, 19 nt, Artificial Sequence
  Description of Artificial Sequence: Synthetic oligonucleotide
cuugcaugugccagugggg

SEQ ID NO: 389915 - RNA, 19 nt, Artificial Sequence
  Description of Artificial Sequence: Synthetic oligonucleotide
ucucucacgacaucuuggu

SEQ ID NO: 389916 - RNA, 19 nt, Artificial Sequence
  Description of Artificial Sequence: Synthetic oligonucleotide
ugcauugcuucugcuauag

SEQ ID NO: 389917 - RNA, 19 nt, Artificial Sequence
  Description of Artificial Sequence: Synthetic oligonucleotide
uagcuuccggauuagugug

SEQ ID NO: 389918 - RNA, 19 nt, Artificial Sequence
  Description of Artificial Sequence: Synthetic oligonucleotide
uguaggaccgcaugcucca

SEQ ID NO: 389919 - RNA, 19 nt, Artificial Sequence
  Description of Artificial Sequence: Synthetic oligonucleotide
acgugaccaucucucgucc

SEQ ID NO: 389920 - RNA, 19 nt, Artificial Sequence
  Description of Artificial Sequence: Synthetic oligonucleotide
acuaagacauggcuucaca

SEQ ID NO: 389921 - RNA, 19 nt, Artificial Sequence
  Description of Artificial Sequence: Synthetic oligonucleotide
guaccuuaauaucugcuga

SEQ ID NO: 389922 - RNA, 19 nt, Artificial Sequence
  Description of Artificial Sequence: Synthetic oligonucleotide
gacaacgacgagguaaggc

SEQ ID NO: 389923 - RNA, 19 nt, Artificial Sequence
  Description of Artificial Sequence: Synthetic oligonucleotide
uacuacgcugcauggcagg

SEQ ID NO: 389924 - RNA, 19 nt, Artificial Sequence
  Description of Artificial Sequence: Synthetic oligonucleotide
cacauaaucacgcuggugu

SEQ ID NO: 389925 - RNA, 19 nt, Artificial Sequence
  Description of Artificial Sequence: Synthetic oligonucleotide
augccgggcugcuagaaag

SEQ ID NO: 389926 - RNA, 19 nt, Artificial Sequence
  Description of Artificial Sequence: Synthetic oligonucleotide
uccacaacugcaccuggcu

SEQ ID NO: 389927 - RNA, 19 nt, Artificial Sequence
  Description of Artificial Sequence: Synthetic oligonucleotide
aacgacgagguaaggcugg

SEQ ID NO: 389928 - RNA, 19 nt, Artificial Sequence
  Description of Artificial Sequence: Synthetic oligonucleotide
aauuggagggugaauccca

SEQ ID NO: 389929 - RNA, 19 nt, Artificial Sequence
  Description of Artificial Sequence: Synthetic oligonucleotide
ggcuucgaauccuuuaggg

SEQ ID NO: 389930 - RNA, 19 nt, Artificial Sequence
  Description of Artificial Sequence: Synthetic oligonucleotide
cucauaugaucugauguac

SEQ ID NO: 389931 - RNA, 19 nt, Artificial Sequence
  Description of Artificial Sequence: Synthetic oligonucleotide
cauaaucacgcuggugucg

SEQ ID NO: 389932 - RNA, 19 nt, Artificial Sequence
  Description of Artificial Sequence: Synthetic oligonucleotide
gguacaagccuucaggaga

SEQ ID NO: 389933 - RNA, 19 nt, Artificial Sequence
  Description of Artificial Sequence: Synthetic oligonucleotide
ugggguaaagguccacagc

SEQ ID NO: 389934 - RNA, 19 nt, Artificial Sequence
  Description of Artificial Sequence: Synthetic oligonucleotide
uagaggagacucuuugcac

SEQ ID NO: 389935 - RNA, 19 nt, Artificial Sequence
  Description of Artificial Sequence: Synthetic oligonucleotide
uuuaggucccagauucgaa

SEQ ID NO: 389936 - RNA, 19 nt, Artificial Sequence
  Description of Artificial Sequence: Synthetic oligonucleotide
aaaugauagaggagacucu

SEQ ID NO: 389937 - RNA, 19 nt, Artificial Sequence
  Description of Artificial Sequence: Synthetic oligonucleotide
guaagaagccgugacgagc

SEQ ID NO: 389938 - RNA, 19 nt, Artificial Sequence
  Description of Artificial Sequence: Synthetic oligonucleotide
aggucucacagcuugacuu

SEQ ID NO: 389939 - RNA, 19 nt, Artificial Sequence
  Description of Artificial Sequence: Synthetic oligonucleotide
uuagggaugaacugcucuu

SEQ ID NO: 389940 - RNA, 19 nt, Artificial Sequence
  Description of Artificial Sequence: Synthetic oligonucleotide
ucaaaccaugcagucacug

SEQ ID NO: 389941 - RNA, 19 nt, Artificial Sequence
  Description of Artificial Sequence: Synthetic oligonucleotide
guaggggucccacauaauc

SEQ ID NO: 389942 - RNA, 19 nt, Artificial Sequence
  Description of Artificial Sequence: Synthetic oligonucleotide
ggauuaguguguaggaccg

SEQ ID NO: 389943 - RNA, 19 nt, Artificial Sequence
  Description of Artificial Sequence: Synthetic oligonucleotide
caguauugguguauuggug

SEQ ID NO: 389944 - RNA, 19 nt, Artificial Sequence
  Description of Artificial Sequence: Synthetic oligonucleotide
acgggcugaaggccaaccc

SEQ ID NO: 389945 - RNA, 19 nt, Artificial Sequence
  Description of Artificial Sequence: Synthetic oligonucleotide
cagaccuacuugcaugugc

SEQ ID NO: 389946 - RNA, 19 nt, Artificial Sequence
  Description of Artificial Sequence: Synthetic oligonucleotide
aggacaccuccucauauga

SEQ ID NO: 389947 - RNA, 19 nt, Artificial Sequence
  Description of Artificial Sequence: Synthetic oligonucleotide
cuuaucccgggaugcagag

SEQ ID NO: 389948 - RNA, 19 nt, Artificial Sequence
  Description of Artificial Sequence: Synthetic oligonucleotide
acacgcacaugacagcaug

SEQ ID NO: 389949 - RNA, 19 nt, Artificial Sequence
  Description of Artificial Sequence: Synthetic oligonucleotide
uguuuagggcaguuggaau

SEQ ID NO: 389950 - RNA, 19 nt, Artificial Sequence
  Description of Artificial Sequence: Synthetic oligonucleotide
cagucuggggagauggagc

SEQ ID NO: 389951 - RNA, 19 nt, Artificial Sequence
  Description of Artificial Sequence: Synthetic oligonucleotide
gaccgcaugcuccacagga

SEQ ID NO: 389952 - RNA, 19 nt, Artificial Sequence
  Description of Artificial Sequence: Synthetic oligonucleotide
acacaguuguaccuuaaua

SEQ ID NO: 389953 - RNA, 19 nt, Artificial Sequence
  Description of Artificial Sequence: Synthetic oligonucleotide
ggaauuggagggugaaucc

SEQ ID NO: 389954 - RNA, 19 nt, Artificial Sequence
  Description of Artificial Sequence: Synthetic oligonucleotide
ucguccuuuugaaucauuu

SEQ ID NO: 389955 - RNA, 19 nt, Artificial Sequence
  Description of Artificial Sequence: Synthetic oligonucleotide
gcuaggacuugguacgugg

SEQ ID NO: 389956 - RNA, 19 nt, Artificial Sequence
  Description of Artificial Sequence: Synthetic oligonucleotide
cuugaauagguagcuguug

SEQ ID NO: 389957 - RNA, 19 nt, Artificial Sequence
  Description of Artificial Sequence: Synthetic oligonucleotide
ucccaaaucuugaucuguc

SEQ ID NO: 389958 - RNA, 19 nt, Artificial Sequence
  Description of Artificial Sequence: Synthetic oligonucleotide
guauuggugaggagcacag

SEQ ID NO: 389959 - RNA, 19 nt, Artificial Sequence
  Description of Artificial Sequence: Synthetic oligonucleotide
agauucgaagggucuuauc

SEQ ID NO: 389960 - RNA, 19 nt, Artificial Sequence
  Description of Artificial Sequence: Synthetic oligonucleotide
gaaucaggagagaaaucac

SEQ ID NO: 389961 - RNA, 19 nt, Artificial Sequence
  Description of Artificial Sequence: Synthetic oligonucleotide
aacaaaggcugcucacaau

SEQ ID NO: 389962 - RNA, 19 nt, Artificial Sequence
  Description of Artificial Sequence: Synthetic oligonucleotide
caagcaguagagacaaaca

SEQ ID NO: 389963 - RNA, 19 nt, Artificial Sequence
  Description of Artificial Sequence: Synthetic oligonucleotide
guacaagccuucaggagag

SEQ ID NO: 389964 - RNA, 19 nt, Artificial Sequence
  Description of Artificial Sequence: Synthetic oligonucleotide
cacaaguggcaucacucag

SEQ ID NO: 389965 - RNA, 19 nt, Artificial Sequence
  Description of Artificial Sequence: Synthetic oligonucleotide
uuccuaaggcagauuuugu

SEQ ID NO: 389966 - RNA, 19 nt, Artificial Sequence
  Description of Artificial Sequence: Synthetic oligonucleotide
uaaagaccacugagaaaac

SEQ ID NO: 389967 - RNA, 19 nt, Artificial Sequence
  Description of Artificial Sequence: Synthetic oligonucleotide
auuuaggucccagauucga

SEQ ID NO: 389968 - RNA, 19 nt, Artificial Sequence
  Description of Artificial Sequence: Synthetic oligonucleotide
ugccccuuaaagcaucaau

SEQ ID NO: 389969 - RNA, 19 nt, Artificial Sequence
  Description of Artificial Sequence: Synthetic oligonucleotide
acuacgcugcauggcaggc

SEQ ID NO: 389970 - RNA, 19 nt, Artificial Sequence
  Description of Artificial Sequence: Synthetic oligonucleotide
cagaguuuccugcuaggug

SEQ ID NO: 389971 - RNA, 19 nt, Artificial Sequence
  Description of Artificial Sequence: Synthetic oligonucleotide
cagguacuacgcugcaugg

SEQ ID NO: 389972 - RNA, 19 nt, Artificial Sequence
  Description of Artificial Sequence: Synthetic oligonucleotide
ucauuccgcgcccgcgucg

SEQ ID NO: 389973 - RNA, 19 nt, Artificial Sequence
  Description of Artificial Sequence: Synthetic oligonucleotide
ccaugugggaagaaugugc

SEQ ID NO: 389974 - RNA, 19 nt, Artificial Sequence
  Description of Artificial Sequence: Synthetic oligonucleotide
ucacucagaccuacuugca

SEQ ID NO: 389975 - RNA, 19 nt, Artificial Sequence
  Description of Artificial Sequence: Synthetic oligonucleotide
uugguacguggucaggaaa

SEQ ID NO: 389976 - RNA, 19 nt, Artificial Sequence
  Description of Artificial Sequence: Synthetic oligonucleotide
caagacaacuagaccaaca

SEQ ID NO: 389977 - RNA, 19 nt, Artificial Sequence
  Description of Artificial Sequence: Synthetic oligonucleotide
cuucgaauccuuuagggau

SEQ ID NO: 389978 - RNA, 19 nt, Artificial Sequence
  Description of Artificial Sequence: Synthetic oligonucleotide
cuagaaaguccuguacgug

SEQ ID NO: 389979 - RNA, 19 nt, Artificial Sequence
  Description of Artificial Sequence: Synthetic oligonucleotide
auaaucacgcuggugucgu

SEQ ID NO: 389980 - RNA, 19 nt, Artificial Sequence
  Description of Artificial Sequence: Synthetic oligonucleotide
acguggucaggaaacuucg

SEQ ID NO: 389981 - RNA, 19 nt, Artificial Sequence
  Description of Artificial Sequence: Synthetic oligonucleotide
auaacuccaccauguggga

SEQ ID NO: 389982 - RNA, 19 nt, Artificial Sequence
  Description of Artificial Sequence: Synthetic oligonucleotide
aaacuucgaagggcuuuuc

SEQ ID NO: 389983 - RNA, 19 nt, Artificial Sequence
  Description of Artificial Sequence: Synthetic oligonucleotide
gcuuaccauguuuauuuag

SEQ ID NO: 389984 - RNA, 19 nt, Artificial Sequence
  Description of Artificial Sequence: Synthetic oligonucleotide
accuacuugcaugugccag

SEQ ID NO: 389985 - RNA, 19 nt, Artificial Sequence
  Description of Artificial Sequence: Synthetic oligonucleotide
cugauguacuuguuuguca

SEQ ID NO: 389986 - RNA, 19 nt, Artificial Sequence
  Description of Artificial Sequence: Synthetic oligonucleotide
cugcuagaaaguccuguac

SEQ ID NO: 389987 - RNA, 19 nt, Artificial Sequence
  Description of Artificial Sequence: Synthetic oligonucleotide
ugccagugggguaaagguc

SEQ ID NO: 389988 - RNA, 19 nt, Artificial Sequence
  Description of Artificial Sequence: Synthetic oligonucleotide
ggcacuucccagugaaggg

SEQ ID NO: 389989 - RNA, 19 nt, Artificial Sequence
  Description of Artificial Sequence: Synthetic oligonucleotide
caacgacgagguaaggcug

SEQ ID NO: 389990 - RNA, 19 nt, Artificial Sequence
  Description of Artificial Sequence: Synthetic oligonucleotide
uguacgugaggaacucuuu

SEQ ID NO: 389991 - RNA, 19 nt, Artificial Sequence
  Description of Artificial Sequence: Synthetic oligonucleotide
cuagcuuccggauuagugu

SEQ ID NO: 389992 - RNA, 19 nt, Artificial Sequence
  Description of Artificial Sequence: Synthetic oligonucleotide
uccugcuagguggggaagg

SEQ ID NO: 389993 - RNA, 19 nt, Artificial Sequence
  Description of Artificial Sequence: Synthetic oligonucleotide
agggucuuaucccgggaug

SEQ ID NO: 389994 - RNA, 19 nt, Artificial Sequence
  Description of Artificial Sequence: Synthetic oligonucleotide
caauggacaacgacgaggu

SEQ ID NO: 389995 - RNA, 19 nt, Artificial Sequence
  Description of Artificial Sequence: Synthetic oligonucleotide
uuaguguguaggaccgcau

SEQ ID NO: 389996 - RNA, 19 nt, Artificial Sequence
  Description of Artificial Sequence: Synthetic oligonucleotide
uucacaacugggccacuua

SEQ ID NO: 389997 - RNA, 19 nt, Artificial Sequence
  Description of Artificial Sequence: Synthetic oligonucleotide
ugaccgucaugcaguugag

SEQ ID NO: 389998 - RNA, 19 nt, Artificial Sequence
  Description of Artificial Sequence: Synthetic oligonucleotide
agucccuugcauugcuucu

SEQ ID NO: 389999 - RNA, 19 nt, Artificial Sequence
  Description of Artificial Sequence: Synthetic oligonucleotide
uuugcaccucccaaaucuu

SEQ ID NO: 390000 - RNA, 19 nt, Artificial Sequence
  Description of Artificial Sequence: Synthetic oligonucleotide
acgugaggaacucuuucau

SEQ ID NO: 390001 - RNA, 19 nt, Artificial Sequence
  Description of Artificial Sequence: Synthetic oligonucleotide
aggcgaaccaggaaccauc

SEQ ID NO: 390002 - RNA, 19 nt, Artificial Sequence
  Description of Artificial Sequence: Synthetic oligonucleotide
caaaccaugcagucacuga

SEQ ID NO: 390003 - RNA, 19 nt, Artificial Sequence
  Description of Artificial Sequence: Synthetic oligonucleotide
acagaucgcagggagcuca

SEQ ID NO: 390004 - RNA, 19 nt, Artificial Sequence
  Description of Artificial Sequence: Synthetic oligonucleotide
agagacaaacacacgcaca

SEQ ID NO: 390005 - RNA, 19 nt, Artificial Sequence
  Description of Artificial Sequence: Synthetic oligonucleotide
acgcaguguccuugagacc

SEQ ID NO: 390006 - RNA, 19 nt, Artificial Sequence
  Description of Artificial Sequence: Synthetic oligonucleotide
cggauuaguguguaggacc

SEQ ID NO: 390007 - RNA, 19 nt, Artificial Sequence
  Description of Artificial Sequence: Synthetic oligonucleotide
agagcggugcucggaaggg

SEQ ID NO: 390008 - RNA, 19 nt, Artificial Sequence
  Description of Artificial Sequence: Synthetic oligonucleotide
cauccacaacugcaccugg

SEQ ID NO: 390009 - RNA, 19 nt, Artificial Sequence
  Description of Artificial Sequence: Synthetic oligonucleotide
gccgugacgagcaaggcag

SEQ ID NO: 390010 - RNA, 19 nt, Artificial Sequence
  Description of Artificial Sequence: Synthetic oligonucleotide
agcgguuccucuccggccu

SEQ ID NO: 390011 - RNA, 19 nt, Artificial Sequence
  Description of Artificial Sequence: Synthetic oligonucleotide
ggcuucaagacaacuagac

SEQ ID NO: 390012 - RNA, 19 nt, Artificial Sequence
  Description of Artificial Sequence: Synthetic oligonucleotide
ucccagugaagggagugug

SEQ ID NO: 390013 - RNA, 19 nt, Artificial Sequence
  Description of Artificial Sequence: Synthetic oligonucleotide
ucaagacaacuagaccaac

SEQ ID NO: 390014 - RNA, 19 nt, Artificial Sequence
  Description of Artificial Sequence: Synthetic oligonucleotide
accuuaauaucugcugaga

SEQ ID NO: 390015 - RNA, 19 nt, Artificial Sequence
  Description of Artificial Sequence: Synthetic oligonucleotide
ucagaucucucacgacauc

SEQ ID NO: 390016 - RNA, 19 nt, Artificial Sequence
  Description of Artificial Sequence: Synthetic oligonucleotide
ucccgggaugcagagacca

SEQ ID NO: 390017 - RNA, 19 nt, Artificial Sequence
  Description of Artificial Sequence: Synthetic oligonucleotide
gcuauaggagucgggaugc

SEQ ID NO: 390018 - RNA, 19 nt, Artificial Sequence
  Description of Artificial Sequence: Synthetic oligonucleotide
guguaggaccgcaugcucc

SEQ ID NO: 390019 - RNA, 19 nt, Artificial Sequence
  Description of Artificial Sequence: Synthetic oligonucleotide
ucgaauccuuuagggauga

SEQ ID NO: 390020 - RNA, 19 nt, Artificial Sequence
  Description of Artificial Sequence: Synthetic oligonucleotide
ggaaacgggcagcagguac

SEQ ID NO: 390021 - RNA, 19 nt, Artificial Sequence
  Description of Artificial Sequence: Synthetic oligonucleotide
gaucgcagggagcucaugu

SEQ ID NO: 390022 - RNA, 19 nt, Artificial Sequence
  Description of Artificial Sequence: Synthetic oligonucleotide
acacaugcacaccacuguu

SEQ ID NO: 390023 - RNA, 19 nt, Artificial Sequence
  Description of Artificial Sequence: Synthetic oligonucleotide
acgcacaugacagcaugag

SEQ ID NO: 390024 - RNA, 19 nt, Artificial Sequence
  Description of Artificial Sequence: Synthetic oligonucleotide
agccgugacgagcaaggca

SEQ ID NO: 390025 - RNA, 19 nt, Artificial Sequence
  Description of Artificial Sequence: Synthetic oligonucleotide
ucacgcuggugucguaaga

SEQ ID NO: 390026 - RNA, 19 nt, Artificial Sequence
  Description of Artificial Sequence: Synthetic oligonucleotide
cugcuuaccauguuuauuu

SEQ ID NO: 390027 - RNA, 19 nt, Artificial Sequence
  Description of Artificial Sequence: Synthetic oligonucleotide
gccagugggguaaaggucc

SEQ ID NO: 390028 - RNA, 19 nt, Artificial Sequence
  Description of Artificial Sequence: Synthetic oligonucleotide
uaggaccgcaugcuccaca

SEQ ID NO: 390029 - RNA, 19 nt, Artificial Sequence
  Description of Artificial Sequence: Synthetic oligonucleotide
cuuaagaacucuugguuuu

SEQ ID NO: 390030 - RNA, 19 nt, Artificial Sequence
  Description of Artificial Sequence: Synthetic oligonucleotide
guuuagggcaguuggaauu

SEQ ID NO: 390031 - RNA, 19 nt, Artificial Sequence
  Description of Artificial Sequence: Synthetic oligonucleotide
caccacuguuuaaagaaaa

SEQ ID NO: 390032 - RNA, 19 nt, Artificial Sequence
  Description of Artificial Sequence: Synthetic oligonucleotide
ugaccacgcaguguccuug

SEQ ID NO: 390033 - RNA, 19 nt, Artificial Sequence
  Description of Artificial Sequence: Synthetic oligonucleotide
cucugaccagagcagagga

SEQ ID NO: 390034 - RNA, 19 nt, Artificial Sequence
  Description of Artificial Sequence: Synthetic oligonucleotide
cacaauggacaacgacgag

SEQ ID NO: 390035 - RNA, 19 nt, Artificial Sequence
  Description of Artificial Sequence: Synthetic oligonucleotide
ugcuuaccauguuuauuua

SEQ ID NO: 390036 - RNA, 19 nt, Artificial Sequence
  Description of Artificial Sequence: Synthetic oligonucleotide
cagugaggacaggacacgg

SEQ ID NO: 390037 - RNA, 19 nt, Artificial Sequence
  Description of Artificial Sequence: Synthetic oligonucleotide
gauuaguguguaggaccgc

SEQ ID NO: 390038 - RNA, 19 nt, Artificial Sequence
  Description of Artificial Sequence: Synthetic oligonucleotide
ugcucacaauggacaacga

SEQ ID NO: 390039 - RNA, 19 nt, Artificial Sequence
  Description of Artificial Sequence: Synthetic oligonucleotide
gaugaacugcucuucuaau

SEQ ID NO: 390040 - RNA, 19 nt, Artificial Sequence
  Description of Artificial Sequence: Synthetic oligonucleotide
uacugacuucacacaacua

SEQ ID NO: 390041 - RNA, 19 nt, Artificial Sequence
  Description of Artificial Sequence: Synthetic oligonucleotide
ucuguccaucguugaggcc

SEQ ID NO: 390042 - RNA, 19 nt, Artificial Sequence
  Description of Artificial Sequence: Synthetic oligonucleotide
gcuucgaauccuuuaggga

SEQ ID NO: 390043 - RNA, 19 nt, Artificial Sequence
  Description of Artificial Sequence: Synthetic oligonucleotide
caucugaccgucaugcagu

SEQ ID NO: 390044 - RNA, 19 nt, Artificial Sequence
  Description of Artificial Sequence: Synthetic oligonucleotide
agcagcgguuccucuccgg

SEQ ID NO: 390045 - RNA, 19 nt, Artificial Sequence
  Description of Artificial Sequence: Synthetic oligonucleotide
gaagggucuuaucccggga

SEQ ID NO: 390046 - RNA, 19 nt, Artificial Sequence
  Description of Artificial Sequence: Synthetic oligonucleotide
caggaaacuucgaagggcu

SEQ ID NO: 390047 - RNA, 19 nt, Artificial Sequence
  Description of Artificial Sequence: Synthetic oligonucleotide
uggccggauaacaccugga

SEQ ID NO: 390048 - RNA, 19 nt, Artificial Sequence
  Description of Artificial Sequence: Synthetic oligonucleotide
ugguggcgugcccagaguu

SEQ ID NO: 390049 - RNA, 19 nt, Artificial Sequence
  Description of Artificial Sequence: Synthetic oligonucleotide
gacaucugaccgucaugca

SEQ ID NO: 390050 - RNA, 19 nt, Artificial Sequence
  Description of Artificial Sequence: Synthetic oligonucleotide
gcucacaauggacaacgac

SEQ ID NO: 390051 - RNA, 19 nt, Artificial Sequence
  Description of Artificial Sequence: Synthetic oligonucleotide
acgacgagguaaggcuggc

SEQ ID NO: 390052 - RNA, 19 nt, Artificial Sequence
  Description of Artificial Sequence: Synthetic oligonucleotide
ccggauaacaccuggaucu

SEQ ID NO: 390053 - RNA, 19 nt, Artificial Sequence
  Description of Artificial Sequence: Synthetic oligonucleotide
cacaacuaagacauggcuu

SEQ ID NO: 390054 - RNA, 19 nt, Artificial Sequence
  Description of Artificial Sequence: Synthetic oligonucleotide
augcaguugaggacaccuc

SEQ ID NO: 390055 - RNA, 19 nt, Artificial Sequence
  Description of Artificial Sequence: Synthetic oligonucleotide
ugccgggcugcuagaaagu

SEQ ID NO: 390056 - RNA, 19 nt, Artificial Sequence
  Description of Artificial Sequence: Synthetic oligonucleotide
gucucacagcuugacuucc

SEQ ID NO: 390057 - RNA, 19 nt, Artificial Sequence
  Description of Artificial Sequence: Synthetic oligonucleotide
cucucacgacaucuuggug

SEQ ID NO: 390058 - RNA, 19 nt, Artificial Sequence
  Description of Artificial Sequence: Synthetic oligonucleotide
aggcagaaucaggagagaa

SEQ ID NO: 390059 - RNA, 19 nt, Artificial Sequence
  Description of Artificial Sequence: Synthetic oligonucleotide
gugccagugggguaaaggu

SEQ ID NO: 390060 - RNA, 19 nt, Artificial Sequence
  Description of Artificial Sequence: Synthetic oligonucleotide
caguuggaauuggagggug

SEQ ID NO: 390061 - RNA, 19 nt, Artificial Sequence
  Description of Artificial Sequence: Synthetic oligonucleotide
uccuguacgugaggaacuc

SEQ ID NO: 390062 - RNA, 19 nt, Artificial Sequence
  Description of Artificial Sequence: Synthetic oligonucleotide
cuugguacguggucaggaa

SEQ ID NO: 390063 - RNA, 19 nt, Artificial Sequence
  Description of Artificial Sequence: Synthetic oligonucleotide
ggauuggcagugcuaggac

SEQ ID NO: 390064 - RNA, 19 nt, Artificial Sequence
  Description of Artificial Sequence: Synthetic oligonucleotide
gaacgugaccaucucucgu

SEQ ID NO: 390065 - RNA, 19 nt, Artificial Sequence
  Description of Artificial Sequence: Synthetic oligonucleotide
ucagaccuacuugcaugug

SEQ ID NO: 390066 - RNA, 19 nt, Artificial Sequence
  Description of Artificial Sequence: Synthetic oligonucleotide
uucucaccagccgcagagc

SEQ ID NO: 390067 - RNA, 19 nt, Artificial Sequence
  Description of Artificial Sequence: Synthetic oligonucleotide
aggagcccuguuugcaccu

SEQ ID NO: 390068 - RNA, 19 nt, Artificial Sequence
  Description of Artificial Sequence: Synthetic oligonucleotide
ggucucacagcuugacuuc

SEQ ID NO: 390069 - RNA, 19 nt, Artificial Sequence
  Description of Artificial Sequence: Synthetic oligonucleotide
cuguggcaauaacuccacc

SEQ ID NO: 390070 - RNA, 19 nt, Artificial Sequence
  Description of Artificial Sequence: Synthetic oligonucleotide
gaaacgggcagcagguacu

SEQ ID NO: 390071 - RNA, 19 nt, Artificial Sequence
  Description of Artificial Sequence: Synthetic oligonucleotide
uccggcuuuuggcuucgaa

SEQ ID NO: 390072 - RNA, 19 nt, Artificial Sequence
  Description of Artificial Sequence: Synthetic oligonucleotide
cuguuuagggcaguuggaa

SEQ ID NO: 390073 - RNA, 19 nt, Artificial Sequence
  Description of Artificial Sequence: Synthetic oligonucleotide
guaaagguccacagcaggu

SEQ ID NO: 390074 - RNA, 19 nt, Artificial Sequence
  Description of Artificial Sequence: Synthetic oligonucleotide
cacugccccuuaaagcauc

SEQ ID NO: 390075 - RNA, 19 nt, Artificial Sequence
  Description of Artificial Sequence: Synthetic oligonucleotide
ggugaagagcggugcucgg

SEQ ID NO: 390076 - RNA, 19 nt, Artificial Sequence
  Description of Artificial Sequence: Synthetic oligonucleotide
guuggaauuggagggugaa

SEQ ID NO: 390077 - RNA, 19 nt, Artificial Sequence
  Description of Artificial Sequence: Synthetic oligonucleotide
aggcagauuuugugugagu

SEQ ID NO: 390078 - RNA, 19 nt, Artificial Sequence
  Description of Artificial Sequence: Synthetic oligonucleotide
gacgagcaaggcagaauca

SEQ ID NO: 390079 - RNA, 19 nt, Artificial Sequence
  Description of Artificial Sequence: Synthetic oligonucleotide
ccagaaagauucagaagca

SEQ ID NO: 390080 - RNA, 19 nt, Artificial Sequence
  Description of Artificial Sequence: Synthetic oligonucleotide
aagaagccgugacgagcaa

SEQ ID NO: 390081 - RNA, 19 nt, Artificial Sequence
  Description of Artificial Sequence: Synthetic oligonucleotide
gagcggugcucggaagggg

SEQ ID NO: 390082 - RNA, 19 nt, Artificial Sequence
  Description of Artificial Sequence: Synthetic oligonucleotide
aggacgcgccggucgcgcc

SEQ ID NO: 390083 - RNA, 19 nt, Artificial Sequence
  Description of Artificial Sequence: Synthetic oligonucleotide
caugcaguugaggacaccu

SEQ ID NO: 390084 - RNA, 19 nt, Artificial Sequence
  Description of Artificial Sequence: Synthetic oligonucleotide
agguggccggauaacaccu

SEQ ID NO: 390085 - RNA, 19 nt, Artificial Sequence
  Description of Artificial Sequence: Synthetic oligonucleotide
gggucuuaucccgggaugc

SEQ ID NO: 390086 - RNA, 19 nt, Artificial Sequence
  Description of Artificial Sequence: Synthetic oligonucleotide
ggugucguaagaagccgug

SEQ ID NO: 390087 - RNA, 19 nt, Artificial Sequence
  Description of Artificial Sequence: Synthetic oligonucleotide
acaccacuguuuaaagaaa

SEQ ID NO: 390088 - RNA, 19 nt, Artificial Sequence
  Description of Artificial Sequence: Synthetic oligonucleotide
gaccgacuucucaccagcc

SEQ ID NO: 390089 - RNA, 19 nt, Artificial Sequence
  Description of Artificial Sequence: Synthetic oligonucleotide
uggcgugcccagaguuucc

SEQ ID NO: 390090 - RNA, 19 nt, Artificial Sequence
  Description of Artificial Sequence: Synthetic oligonucleotide
cuauaggagucgggaugcc

SEQ ID NO: 390091 - RNA, 19 nt, Artificial Sequence
  Description of Artificial Sequence: Synthetic oligonucleotide
ccuuaauaucugcugagaa

SEQ ID NO: 390092 - RNA, 19 nt, Artificial Sequence
  Description of Artificial Sequence: Synthetic oligonucleotide
ggagccugucaucugccac

SEQ ID NO: 390093 - RNA, 19 nt, Artificial Sequence
  Description of Artificial Sequence: Synthetic oligonucleotide
ccuguggcaauaacuccac

SEQ ID NO: 390094 - RNA, 19 nt, Artificial Sequence
  Description of Artificial Sequence: Synthetic oligonucleotide
ggccacuuaagaacucuug

SEQ ID NO: 390095 - RNA, 19 nt, Artificial Sequence
  Description of Artificial Sequence: Synthetic oligonucleotide
cacgcacaugacagcauga

SEQ ID NO: 390096 - RNA, 19 nt, Artificial Sequence
  Description of Artificial Sequence: Synthetic oligonucleotide
gggugaaucccaugagguc

SEQ ID NO: 390097 - RNA, 19 nt, Artificial Sequence
  Description of Artificial Sequence: Synthetic oligonucleotide
cauuccgcgcccgcgucgc

SEQ ID NO: 390098 - RNA, 19 nt, Artificial Sequence
  Description of Artificial Sequence: Synthetic oligonucleotide
cacgggcugaaggccaacc

SEQ ID NO: 390099 - RNA, 19 nt, Artificial Sequence
  Description of Artificial Sequence: Synthetic oligonucleotide
gccggauaacaccuggauc

SEQ ID NO: 390100 - RNA, 19 nt, Artificial Sequence
  Description of Artificial Sequence: Synthetic oligonucleotide
gcagcgguuccucuccggc

SEQ ID NO: 390101 - RNA, 19 nt, Artificial Sequence
  Description of Artificial Sequence: Synthetic oligonucleotide
ugcugccggugaagagcgg

SEQ ID NO: 390102 - RNA, 19 nt, Artificial Sequence
  Description of Artificial Sequence: Synthetic oligonucleotide
gcuucauuccgcgcccgcg

SEQ ID NO: 390103 - RNA, 19 nt, Artificial Sequence
  Description of Artificial Sequence: Synthetic oligonucleotide
gaaacuucgaagggcuuuu

SEQ ID NO: 390104 - RNA, 19 nt, Artificial Sequence
  Description of Artificial Sequence: Synthetic oligonucleotide
ggauaacaccuggaucugc

SEQ ID NO: 390105 - RNA, 19 nt, Artificial Sequence
  Description of Artificial Sequence: Synthetic oligonucleotide
cagaggaacuucaaaccau

SEQ ID NO: 390106 - RNA, 19 nt, Artificial Sequence
  Description of Artificial Sequence: Synthetic oligonucleotide
gcucggaaggggcugucug

SEQ ID NO: 390107 - RNA, 19 nt, Artificial Sequence
  Description of Artificial Sequence: Synthetic oligonucleotide
auuggagggugaaucccau

SEQ ID NO: 390108 - RNA, 19 nt, Artificial Sequence
  Description of Artificial Sequence: Synthetic oligonucleotide
cugcuagguggggaaggcc

SEQ ID NO: 390109 - RNA, 19 nt, Artificial Sequence
  Description of Artificial Sequence: Synthetic oligonucleotide
guggcgugcccagaguuuc

SEQ ID NO: 390110 - RNA, 19 nt, Artificial Sequence
  Description of Artificial Sequence: Synthetic oligonucleotide
cagaucucucacgacaucu

SEQ ID NO: 390111 - RNA, 19 nt, Artificial Sequence
  Description of Artificial Sequence: Synthetic oligonucleotide
cccagaguuuccugcuagg

SEQ ID NO: 390112 - RNA, 19 nt, Artificial Sequence
  Description of Artificial Sequence: Synthetic oligonucleotide
caguguccuugagaccagg

SEQ ID NO: 390113 - RNA, 19 nt, Artificial Sequence
  Description of Artificial Sequence: Synthetic oligonucleotide
gcugcuagaaaguccugua

SEQ ID NO: 390114 - RNA, 19 nt, Artificial Sequence
  Description of Artificial Sequence: Synthetic oligonucleotide
agaucucucacgacaucuu

SEQ ID NO: 390115 - RNA, 19 nt, Artificial Sequence
  Description of Artificial Sequence: Synthetic oligonucleotide
gccucguccuuuugaauca

SEQ ID NO: 390116 - RNA, 19 nt, Artificial Sequence
  Description of Artificial Sequence: Synthetic oligonucleotide
cauuggucauaggagcaaa

SEQ ID NO: 390117 - RNA, 19 nt, Artificial Sequence
  Description of Artificial Sequence: Synthetic oligonucleotide
uccuugagaccaggcgaac

SEQ ID NO: 390118 - RNA, 19 nt, Artificial Sequence
  Description of Artificial Sequence: Synthetic oligonucleotide
guccuugagaccaggcgaa

SEQ ID NO: 390119 - RNA, 19 nt, Artificial Sequence
  Description of Artificial Sequence: Synthetic oligonucleotide
caguuccagagcccagauc

SEQ ID NO: 390120 - RNA, 19 nt, Artificial Sequence
  Description of Artificial Sequence: Synthetic oligonucleotide
caaagaguaagguguuguu

SEQ ID NO: 390121 - RNA, 19 nt, Artificial Sequence
  Description of Artificial Sequence: Synthetic oligonucleotide
gacgcccgggcuugaguuc

SEQ ID NO: 390122 - RNA, 19 nt, Artificial Sequence
  Description of Artificial Sequence: Synthetic oligonucleotide
cgaagggucuuaucccggg

SEQ ID NO: 390123 - RNA, 19 nt, Artificial Sequence
  Description of Artificial Sequence: Synthetic oligonucleotide
cucgccgguguaggggucc

SEQ ID NO: 390124 - RNA, 19 nt, Artificial Sequence
  Description of Artificial Sequence: Synthetic oligonucleotide
gccgcggggcuucauuccg

SEQ ID NO: 390125 - RNA, 19 nt, Artificial Sequence
  Description of Artificial Sequence: Synthetic oligonucleotide
cacgcuggugucguaagaa

SEQ ID NO: 390126 - RNA, 19 nt, Artificial Sequence
  Description of Artificial Sequence: Synthetic oligonucleotide
cccuuaaagcaucaauuaa

SEQ ID NO: 390127 - RNA, 19 nt, Artificial Sequence
  Description of Artificial Sequence: Synthetic oligonucleotide
cugggccacuuaagaacuc

SEQ ID NO: 390128 - RNA, 19 nt, Artificial Sequence
  Description of Artificial Sequence: Synthetic oligonucleotide
augggagguuccagcuggg

SEQ ID NO: 390129 - RNA, 19 nt, Artificial Sequence
  Description of Artificial Sequence: Synthetic oligonucleotide
gcuugacuuccagucaaac

SEQ ID NO: 390130 - RNA, 19 nt, Artificial Sequence
  Description of Artificial Sequence: Synthetic oligonucleotide
caacuaagacauggcuuca

SEQ ID NO: 390131 - RNA, 19 nt, Artificial Sequence
  Description of Artificial Sequence: Synthetic oligonucleotide
ccgggcugcuagaaagucc

SEQ ID NO: 390132 - RNA, 19 nt, Artificial Sequence
  Description of Artificial Sequence: Synthetic oligonucleotide
cuguacgugaggaacucuu

SEQ ID NO: 390133 - RNA, 19 nt, Artificial Sequence
  Description of Artificial Sequence: Synthetic oligonucleotide
ugcucggaaggggcugucu

SEQ ID NO: 390134 - RNA, 19 nt, Artificial Sequence
  Description of Artificial Sequence: Synthetic oligonucleotide
acugccccuuaaagcauca

SEQ ID NO: 390135 - RNA, 19 nt, Artificial Sequence
  Description of Artificial Sequence: Synthetic oligonucleotide
uguggacgucacugucauc

SEQ ID NO: 390136 - RNA, 19 nt, Artificial Sequence
  Description of Artificial Sequence: Synthetic oligonucleotide
guguauuggugaggagcac

SEQ ID NO: 390137 - RNA, 19 nt, Artificial Sequence
  Description of Artificial Sequence: Synthetic oligonucleotide
ccccacacaaucugaccac

SEQ ID NO: 390138 - RNA, 19 nt, Artificial Sequence
  Description of Artificial Sequence: Synthetic oligonucleotide
gugaagggaguguggaguu

SEQ ID NO: 390139 - RNA, 19 nt, Artificial Sequence
  Description of Artificial Sequence: Synthetic oligonucleotide
acgcccgggcuugaguuca

SEQ ID NO: 390140 - RNA, 19 nt, Artificial Sequence
  Description of Artificial Sequence: Synthetic oligonucleotide
caccuggcuucaagacaac

SEQ ID NO: 390141 - RNA, 19 nt, Artificial Sequence
  Description of Artificial Sequence: Synthetic oligonucleotide
agaucgcagggagcucaug

SEQ ID NO: 390142 - RNA, 19 nt, Artificial Sequence
  Description of Artificial Sequence: Synthetic oligonucleotide
cggugaagagcggugcucg

SEQ ID NO: 390143 - RNA, 19 nt, Artificial Sequence
  Description of Artificial Sequence: Synthetic oligonucleotide
gacgcgccggucgcgccag

SEQ ID NO: 390144 - RNA, 19 nt, Artificial Sequence
  Description of Artificial Sequence: Synthetic oligonucleotide
ggacaacgacgagguaagg

SEQ ID NO: 390145 - RNA, 19 nt, Artificial Sequence
  Description of Artificial Sequence: Synthetic oligonucleotide
cucggaaggggcugucugu

SEQ ID NO: 390146 - RNA, 19 nt, Artificial Sequence
  Description of Artificial Sequence: Synthetic oligonucleotide
cucucgccgguguaggggu

SEQ ID NO: 390147 - RNA, 19 nt, Artificial Sequence
  Description of Artificial Sequence: Synthetic oligonucleotide
cugcuauaggagucgggau

SEQ ID NO: 390148 - RNA, 19 nt, Artificial Sequence
  Description of Artificial Sequence: Synthetic oligonucleotide
ggucuuaucccgggaugca

SEQ ID NO: 390149 - RNA, 19 nt, Artificial Sequence
  Description of Artificial Sequence: Synthetic oligonucleotide
agggccgcggggcuucauu

SEQ ID NO: 390150 - RNA, 19 nt, Artificial Sequence
  Description of Artificial Sequence: Synthetic oligonucleotide
gagacucuuugcacacacu

SEQ ID NO: 390151 - RNA, 19 nt, Artificial Sequence
  Description of Artificial Sequence: Synthetic oligonucleotide
cuacgcugcauggcaggca

SEQ ID NO: 390152 - RNA, 19 nt, Artificial Sequence
  Description of Artificial Sequence: Synthetic oligonucleotide
ccaaagaguaagguguugu

SEQ ID NO: 390153 - RNA, 19 nt, Artificial Sequence
  Description of Artificial Sequence: Synthetic oligonucleotide
augugccagugggguaaag

SEQ ID NO: 390154 - RNA, 19 nt, Artificial Sequence
  Description of Artificial Sequence: Synthetic oligonucleotide
ucgccgguguagggguccc

SEQ ID NO: 390155 - RNA, 19 nt, Artificial Sequence
  Description of Artificial Sequence: Synthetic oligonucleotide
cacucagaccuacuugcau

SEQ ID NO: 390156 - RNA, 19 nt, Artificial Sequence
  Description of Artificial Sequence: Synthetic oligonucleotide
aggaaacuucgaagggcuu

SEQ ID NO: 390157 - RNA, 19 nt, Artificial Sequence
  Description of Artificial Sequence: Synthetic oligonucleotide
cacagaucgcagggagcuc

SEQ ID NO: 390158 - RNA, 19 nt, Artificial Sequence
  Description of Artificial Sequence: Synthetic oligonucleotide
gacuuccagucaaacugau

SEQ ID NO: 390159 - RNA, 19 nt, Artificial Sequence
  Description of Artificial Sequence: Synthetic oligonucleotide
gcgaaccaggaaccaucug

SEQ ID NO: 390160 - RNA, 19 nt, Artificial Sequence
  Description of Artificial Sequence: Synthetic oligonucleotide
guaggaccgcaugcuccac

SEQ ID NO: 390161 - RNA, 19 nt, Artificial Sequence
  Description of Artificial Sequence: Synthetic oligonucleotide
caggucucacagcuugacu

SEQ ID NO: 390162 - RNA, 19 nt, Artificial Sequence
  Description of Artificial Sequence: Synthetic oligonucleotide
ggcugcuagaaaguccugu

SEQ ID NO: 390163 - RNA, 19 nt, Artificial Sequence
  Description of Artificial Sequence: Synthetic oligonucleotide
gggccgcggggcuucauuc

SEQ ID NO: 390164 - RNA, 19 nt, Artificial Sequence
  Description of Artificial Sequence: Synthetic oligonucleotide
gguggccggauaacaccug

SEQ ID NO: 390165 - RNA, 19 nt, Artificial Sequence
  Description of Artificial Sequence: Synthetic oligonucleotide
gguacguggucaggaaacu

SEQ ID NO: 390166 - RNA, 19 nt, Artificial Sequence
  Description of Artificial Sequence: Synthetic oligonucleotide
gcgugcccagaguuuccug

SEQ ID NO: 390167 - RNA, 19 nt, Artificial Sequence
  Description of Artificial Sequence: Synthetic oligonucleotide
gccgguguaggggucccac

SEQ ID NO: 390168 - RNA, 19 nt, Artificial Sequence
  Description of Artificial Sequence: Synthetic oligonucleotide
guacguggucaggaaacuu

SEQ ID NO: 390169 - RNA, 19 nt, Artificial Sequence
  Description of Artificial Sequence: Synthetic oligonucleotide
cgggcugcuagaaaguccu

SEQ ID NO: 390170 - RNA, 19 nt, Artificial Sequence
  Description of Artificial Sequence: Synthetic oligonucleotide
cagauucgaagggucuuau

SEQ ID NO: 390171 - RNA, 19 nt, Artificial Sequence
  Description of Artificial Sequence: Synthetic oligonucleotide
ggcgaaccaggaaccaucu

SEQ ID NO: 390172 - RNA, 19 nt, Artificial Sequence
  Description of Artificial Sequence: Synthetic oligonucleotide
ccggcuuuuggcuucgaau

SEQ ID NO: 390173 - RNA, 19 nt, Artificial Sequence
  Description of Artificial Sequence: Synthetic oligonucleotide
ggacgcccgggcuugaguu

SEQ ID NO: 390174 - RNA, 19 nt, Artificial Sequence
  Description of Artificial Sequence: Synthetic oligonucleotide
cggauaacaccuggaucug

SEQ ID NO: 390175 - RNA, 19 nt, Artificial Sequence
  Description of Artificial Sequence: Synthetic oligonucleotide
gcggggcuucauuccgcgc

SEQ ID NO: 390176 - RNA, 19 nt, Artificial Sequence
  Description of Artificial Sequence: Synthetic oligonucleotide
ggacgcgccggucgcgcca

SEQ ID NO: 390177 - RNA, 19 nt, Artificial Sequence
  Description of Artificial Sequence: Synthetic oligonucleotide
ucgggaugccgggcugcua

SEQ ID NO: 390178 - RNA, 19 nt, Artificial Sequence
  Description of Artificial Sequence: Synthetic oligonucleotide
gugcuaggacuugguacgu

SEQ ID NO: 390179 - RNA, 19 nt, Artificial Sequence
  Description of Artificial Sequence: Synthetic oligonucleotide
caugugccagugggguaaa

SEQ ID NO: 390180 - RNA, 19 nt, Artificial Sequence
  Description of Artificial Sequence: Synthetic oligonucleotide
ccagauucgaagggucuua

SEQ ID NO: 390181 - RNA, 19 nt, Artificial Sequence
  Description of Artificial Sequence: Synthetic oligonucleotide
gguuccagcugggugugau

SEQ ID NO: 390182 - RNA, 19 nt, Artificial Sequence
  Description of Artificial Sequence: Synthetic oligonucleotide
gggcugcuagaaaguccug

SEQ ID NO: 390183 - RNA, 19 nt, Artificial Sequence
  Description of Artificial Sequence: Synthetic oligonucleotide
ccgggaugcagagaccaaa

SEQ ID NO: 390184 - RNA, 19 nt, Artificial Sequence
  Description of Artificial Sequence: Synthetic oligonucleotide
cagcuugaccacgcagugu

SEQ ID NO: 390185 - RNA, 19 nt, Artificial Sequence
  Description of Artificial Sequence: Synthetic oligonucleotide
acgcgccggucgcgccagg

SEQ ID NO: 390186 - RNA, 19 nt, Artificial Sequence
  Description of Artificial Sequence: Synthetic oligonucleotide
cagaucgcagggagcucau

SEQ ID NO: 390187 - RNA, 19 nt, Artificial Sequence
  Description of Artificial Sequence: Synthetic oligonucleotide
caggcgaaccaggaaccau

SEQ ID NO: 390188 - RNA, 19 nt, Artificial Sequence
  Description of Artificial Sequence: Synthetic oligonucleotide
cugccccuuaaagcaucaa

SEQ ID NO: 390189 - RNA, 19 nt, Artificial Sequence
  Description of Artificial Sequence: Synthetic oligonucleotide
gccggucgcgccaggcggc

SEQ ID NO: 390190 - RNA, 19 nt, Artificial Sequence
  Description of Artificial Sequence: Synthetic oligonucleotide
ggccacacuccaggucuca

SEQ ID NO: 390191 - RNA, 19 nt, Artificial Sequence
  Description of Artificial Sequence: Synthetic oligonucleotide
ccaggcgaaccaggaacca

SEQ ID NO: 390192 - RNA, 19 nt, Artificial Sequence
  Description of Artificial Sequence: Synthetic oligonucleotide
ccgguguaggggucccaca

SEQ ID NO: 390193 - RNA, 19 nt, Artificial Sequence
  Description of Artificial Sequence: Synthetic oligonucleotide
gggacgcccgggcuugagu

SEQ ID NO: 390194 - RNA, 19 nt, Artificial Sequence
  Description of Artificial Sequence: Synthetic oligonucleotide
ggcgugcccagaguuuccu

SEQ ID NO: 390195 - RNA, 19 nt, Artificial Sequence
  Description of Artificial Sequence: Synthetic oligonucleotide
ccggucgcgccaggcggcg

SEQ ID NO: 390196 - RNA, 19 nt, Artificial Sequence
  Description of Artificial Sequence: Synthetic oligonucleotide
gguggcgugcccagaguuu

SEQ ID NO: 390197 - RNA, 19 nt, Artificial Sequence
  Description of Artificial Sequence: Synthetic oligonucleotide
cccgggaugcagagaccaa

SEQ ID NO: 390198 - RNA, 19 nt, Artificial Sequence
  Description of Artificial Sequence: Synthetic oligonucleotide
ccuguacgugaggaacucu

SEQ ID NO: 390199 - RNA, 19 nt, Artificial Sequence
  Description of Artificial Sequence: Synthetic oligonucleotide
guccaucguugaggccugu

SEQ ID NO: 390200 - RNA, 19 nt, Artificial Sequence
  Description of Artificial Sequence: Synthetic oligonucleotide
cggucgcgccaggcggcgg

SEQ ID NO: 390201 - RNA, 19 nt, Artificial Sequence
  Description of Artificial Sequence: Synthetic oligonucleotide
cgaauccuuuagggaugaa

SEQ ID NO: 390202 - RNA, 19 nt, Artificial Sequence
  Description of Artificial Sequence: Synthetic oligonucleotide
ccacccuagccagucccuu

SEQ ID NO: 390203 - RNA, 19 nt, Artificial Sequence
  Description of Artificial Sequence: Synthetic oligonucleotide
cagggccgcggggcuucau

SEQ ID NO: 390204 - RNA, 19 nt, Artificial Sequence
  Description of Artificial Sequence: Synthetic oligonucleotide
cgccgguguagggguccca

SEQ ID NO: 390205 - RNA, 19 nt, Artificial Sequence
  Description of Artificial Sequence: Synthetic oligonucleotide
uugaaaguuaaucacaacg

SEQ ID NO: 390206 - RNA, 19 nt, Artificial Sequence
  Description of Artificial Sequence: Synthetic oligonucleotide
aauuacuagaaacauauca

SEQ ID NO: 390207 - RNA, 19 nt, Artificial Sequence
  Description of Artificial Sequence: Synthetic oligonucleotide
uuaaguaaaacuuaugaca

SEQ ID NO: 390208 - RNA, 19 nt, Artificial Sequence
  Description of Artificial Sequence: Synthetic oligonucleotide
ugcacuaugagacagagga

SEQ ID NO: 390209 - RNA, 19 nt, Artificial Sequence
  Description of Artificial Sequence: Synthetic oligonucleotide
auuaccccaaguuugaggc

SEQ ID NO: 390210 - RNA, 19 nt, Artificial Sequence
  Description of Artificial Sequence: Synthetic oligonucleotide
ucuacuaacacgcuaguag

SEQ ID NO: 390211 - RNA, 19 nt, Artificial Sequence
  Description of Artificial Sequence: Synthetic oligonucleotide
uguuaagacaaagaaaggg

SEQ ID NO: 390212 - RNA, 19 nt, Artificial Sequence
  Description of Artificial Sequence: Synthetic oligonucleotide
  modified_base (14)..(14): a, c, u, g, unknown or other
uacauugacaaacncuuag

SEQ ID NO: 390213 - RNA, 19 nt, Artificial Sequence
  Description of Artificial Sequence: Synthetic oligonucleotide
aauuaguugaauuacgauu

SEQ ID NO: 390214 - RNA, 19 nt, Artificial Sequence
  Description of Artificial Sequence: Synthetic oligonucleotide
aacgacauauaauagagau

SEQ ID NO: 390215 - RNA, 19 nt, Artificial Sequence
  Description of Artificial Sequence: Synthetic oligonucleotide
aauccuagaacuucagaag

SEQ ID NO: 390216 - RNA, 19 nt, Artificial Sequence
  Description of Artificial Sequence: Synthetic oligonucleotide
auaguagacaauugaacac

SEQ ID NO: 390217 - RNA, 19 nt, Artificial Sequence
  Description of Artificial Sequence: Synthetic oligonucleotide
ugaaaguuaaucacaacga

SEQ ID NO: 390218 - RNA, 19 nt, Artificial Sequence
  Description of Artificial Sequence: Synthetic oligonucleotide
auuacuagaaacauaucac

SEQ ID NO: 390219 - RNA, 19 nt, Artificial Sequence
  Description of Artificial Sequence: Synthetic oligonucleotide
uucacuaaggcaucgacug

SEQ ID NO: 390220 - RNA, 19 nt, Artificial Sequence
  Description of Artificial Sequence: Synthetic oligonucleotide
aauuaccccaaguuugagg

SEQ ID NO: 390221 - RNA, 19 nt, Artificial Sequence
  Description of Artificial Sequence: Synthetic oligonucleotide
aaguuaaucacaacgaaca

SEQ ID NO: 390222 - RNA, 19 nt, Artificial Sequence
  Description of Artificial Sequence: Synthetic oligonucleotide
aggacaaagaaauuacuag

SEQ ID NO: 390223 - RNA, 19 nt, Artificial Sequence
  Description of Artificial Sequence: Synthetic oligonucleotide
auuacgauuaacauuugac

SEQ ID NO: 390224 - RNA, 19 nt, Artificial Sequence
  Description of Artificial Sequence: Synthetic oligonucleotide
uuacuagaaacauaucacc

SEQ ID NO: 390225 - RNA, 19 nt, Artificial Sequence
  Description of Artificial Sequence: Synthetic oligonucleotide
auugacgucauuugacagc

SEQ ID NO: 390226 - RNA, 19 nt, Artificial Sequence
  Description of Artificial Sequence: Synthetic oligonucleotide
auagugacacacuugcugg

SEQ ID NO: 390227 - RNA, 19 nt, Artificial Sequence
  Description of Artificial Sequence: Synthetic oligonucleotide
uuacgauuaacauuugaca

SEQ ID NO: 390228 - RNA, 19 nt, Artificial Sequence
  Description of Artificial Sequence: Synthetic oligonucleotide
ugugaauccaucuacuaac

SEQ ID NO: 390229 - RNA, 19 nt, Artificial Sequence
  Description of Artificial Sequence: Synthetic oligonucleotide
ugauuguugaaaaucuuga

SEQ ID NO: 390230 - RNA, 19 nt, Artificial Sequence
  Description of Artificial Sequence: Synthetic oligonucleotide
ucaauuaguugaauuacga

SEQ ID NO: 390231 - RNA, 19 nt, Artificial Sequence
  Description of Artificial Sequence: Synthetic oligonucleotide
uucgcaaauauccaauggc

SEQ ID NO: 390232 - RNA, 19 nt, Artificial Sequence
  Description of Artificial Sequence: Synthetic oligonucleotide
uguaaaucuggccaacgcc

SEQ ID NO: 390233 - RNA, 19 nt, Artificial Sequence
  Description of Artificial Sequence: Synthetic oligonucleotide
acaaacuugaguaaacgac

SEQ ID NO: 390234 - RNA, 19 nt, Artificial Sequence
  Description of Artificial Sequence: Synthetic oligonucleotide
ugaguaaggacuuuaucca

SEQ ID NO: 390235 - RNA, 19 nt, Artificial Sequence
  Description of Artificial Sequence: Synthetic oligonucleotide
ugcacauuaaaauuagagu

SEQ ID NO: 390236 - RNA, 19 nt, Artificial Sequence
  Description of Artificial Sequence: Synthetic oligonucleotide
acgauuaacauuugacaac

SEQ ID NO: 390237 - RNA, 19 nt, Artificial Sequence
  Description of Artificial Sequence: Synthetic oligonucleotide
aaggugauaggacaaagaa

SEQ ID NO: 390238 - RNA, 19 nt, Artificial Sequence
  Description of Artificial Sequence: Synthetic oligonucleotide
auugauacaaacuuccuuu

SEQ ID NO: 390239 - RNA, 19 nt, Artificial Sequence
  Description of Artificial Sequence: Synthetic oligonucleotide
uuggucacaauuauguaga

SEQ ID NO: 390240 - RNA, 19 nt, Artificial Sequence
  Description of Artificial Sequence: Synthetic oligonucleotide
uacgauuaacauuugacaa

SEQ ID NO: 390241 - RNA, 19 nt, Artificial Sequence
  Description of Artificial Sequence: Synthetic oligonucleotide
aauucgcaaauauccaaug

SEQ ID NO: 390242 - RNA, 19 nt, Artificial Sequence
  Description of Artificial Sequence: Synthetic oligonucleotide
uuuguuauuugaagggucu

SEQ ID NO: 390243 - RNA, 19 nt, Artificial Sequence
  Description of Artificial Sequence: Synthetic oligonucleotide
auucgaauggugcacaucu

SEQ ID NO: 390244 - RNA, 19 nt, Artificial Sequence
  Description of Artificial Sequence: Synthetic oligonucleotide
agcuauauuaaaaugucuc

SEQ ID NO: 390245 - RNA, 19 nt, Artificial Sequence
  Description of Artificial Sequence: Synthetic oligonucleotide
cuuauagugguacggauug

SEQ ID NO: 390246 - RNA, 19 nt, Artificial Sequence
  Description of Artificial Sequence: Synthetic oligonucleotide
aaauaagccauaauaucug

SEQ ID NO: 390247 - RNA, 19 nt, Artificial Sequence
  Description of Artificial Sequence: Synthetic oligonucleotide
uacuagaaacauaucaccu

SEQ ID NO: 390248 - RNA, 19 nt, Artificial Sequence
  Description of Artificial Sequence: Synthetic oligonucleotide
gaaacauaucaccuaggag

SEQ ID NO: 390249 - RNA, 19 nt, Artificial Sequence
  Description of Artificial Sequence: Synthetic oligonucleotide
uugcuuagauccaaaagga

SEQ ID NO: 390250 - RNA, 19 nt, Artificial Sequence
  Description of Artificial Sequence: Synthetic oligonucleotide
ugucuuugcaaaacaaugu

SEQ ID NO: 390251 - RNA, 19 nt, Artificial Sequence
  Description of Artificial Sequence: Synthetic oligonucleotide
aauuacgauuaacauuuga

SEQ ID NO: 390252 - RNA, 19 nt, Artificial Sequence
  Description of Artificial Sequence: Synthetic oligonucleotide
acuuaugacaaacuugagu

SEQ ID NO: 390253 - RNA, 19 nt, Artificial Sequence
  Description of Artificial Sequence: Synthetic oligonucleotide
uuacaaaccagcagagagc

SEQ ID NO: 390254 - RNA, 19 nt, Artificial Sequence
  Description of Artificial Sequence: Synthetic oligonucleotide
uagacaauugaacaccagu

SEQ ID NO: 390255 - RNA, 19 nt, Artificial Sequence
  Description of Artificial Sequence: Synthetic oligonucleotide
ucuacuauguugucuuugc

SEQ ID NO: 390256 - RNA, 19 nt, Artificial Sequence
  Description of Artificial Sequence: Synthetic oligonucleotide
  modified_base (4)..(4): a, c, u, g, unknown or other
aacncuuagcuauauuaaa

SEQ ID NO: 390257 - RNA, 19 nt, Artificial Sequence
  Description of Artificial Sequence: Synthetic oligonucleotide
uacggauugauacaaacuu

SEQ ID NO: 390258 - RNA, 19 nt, Artificial Sequence
  Description of Artificial Sequence: Synthetic oligonucleotide
gagaauuaccccaaguuug

SEQ ID NO: 390259 - RNA, 19 nt, Artificial Sequence
  Description of Artificial Sequence: Synthetic oligonucleotide
aagauagaguugaagagug

SEQ ID NO: 390260 - RNA, 19 nt, Artificial Sequence
  Description of Artificial Sequence: Synthetic oligonucleotide
uuugcaaaacaauguacga

SEQ ID NO: 390261 - RNA, 19 nt, Artificial Sequence
  Description of Artificial Sequence: Synthetic oligonucleotide
agaaacauaucaccuagga

SEQ ID NO: 390262 - RNA, 19 nt, Artificial Sequence
  Description of Artificial Sequence: Synthetic oligonucleotide
aaacguggcguuguguggc

SEQ ID NO: 390263 - RNA, 19 nt, Artificial Sequence
  Description of Artificial Sequence: Synthetic oligonucleotide
guucggagcacuucaaagg

SEQ ID NO: 390264 - RNA, 19 nt, Artificial Sequence
  Description of Artificial Sequence: Synthetic oligonucleotide
uccaaaaggaaauucgcaa

SEQ ID NO: 390265 - RNA, 19 nt, Artificial Sequence
  Description of Artificial Sequence: Synthetic oligonucleotide
uugaggcuagccuacacag

SEQ ID NO: 390266 - RNA, 19 nt, Artificial Sequence
  Description of Artificial Sequence: Synthetic oligonucleotide
uuaaggucaaugccaaacu

SEQ ID NO: 390267 - RNA, 19 nt, Artificial Sequence
  Description of Artificial Sequence: Synthetic oligonucleotide
ugaugcacuacuuuguaaa

SEQ ID NO: 390268 - RNA, 19 nt, Artificial Sequence
  Description of Artificial Sequence: Synthetic oligonucleotide
uuucaauuaguugaauuac

SEQ ID NO: 390269 - RNA, 19 nt, Artificial Sequence
  Description of Artificial Sequence: Synthetic oligonucleotide
uuuuguuauuugaaggguc

SEQ ID NO: 390270 - RNA, 19 nt, Artificial Sequence
  Description of Artificial Sequence: Synthetic oligonucleotide
gauauauagcacaaaguca

SEQ ID NO: 390271 - RNA, 19 nt, Artificial Sequence
  Description of Artificial Sequence: Synthetic oligonucleotide
aguugaauuacgauuaaca

SEQ ID NO: 390272 - RNA, 19 nt, Artificial Sequence
  Description of Artificial Sequence: Synthetic oligonucleotide
guaaacgacauauaauaga

SEQ ID NO: 390273 - RNA, 19 nt, Artificial Sequence
  Description of Artificial Sequence: Synthetic oligonucleotide
ugugacgaggcacuaacac

SEQ ID NO: 390274 - RNA, 19 nt, Artificial Sequence
  Description of Artificial Sequence: Synthetic oligonucleotide
uugaauuacgauuaacauu

SEQ ID NO: 390275 - RNA, 19 nt, Artificial Sequence
  Description of Artificial Sequence: Synthetic oligonucleotide
ugaacgucacguuaggagu

SEQ ID NO: 390276 - RNA, 19 nt, Artificial Sequence
  Description of Artificial Sequence: Synthetic oligonucleotide
uccgcuaagauagaguuga

SEQ ID NO: 390277 - RNA, 19 nt, Artificial Sequence
  Description of Artificial Sequence: Synthetic oligonucleotide
ugaguaaacgacauauaau

SEQ ID NO: 390278 - RNA, 19 nt, Artificial Sequence
  Description of Artificial Sequence: Synthetic oligonucleotide
  modified_base (18)..(18): a, c, u, g, unknown or other
acauuacauugacaaacnc

SEQ ID NO: 390279 - RNA, 19 nt, Artificial Sequence
  Description of Artificial Sequence: Synthetic oligonucleotide
uguaugacaucuagaaauc

SEQ ID NO: 390280 - RNA, 19 nt, Artificial Sequence
  Description of Artificial Sequence: Synthetic oligonucleotide
uaguagacaauugaacacc

SEQ ID NO: 390281 - RNA, 19 nt, Artificial Sequence
  Description of Artificial Sequence: Synthetic oligonucleotide
ucgcaaauauccaauggcu

SEQ ID NO: 390282 - RNA, 19 nt, Artificial Sequence
  Description of Artificial Sequence: Synthetic oligonucleotide
cugaacgucacguuaggag

SEQ ID NO: 390283 - RNA, 19 nt, Artificial Sequence
  Description of Artificial Sequence: Synthetic oligonucleotide
uaaaaugucucuguaugac

SEQ ID NO: 390284 - RNA, 19 nt, Artificial Sequence
  Description of Artificial Sequence: Synthetic oligonucleotide
uuuucacuaaggcaucgac

SEQ ID NO: 390285 - RNA, 19 nt, Artificial Sequence
  Description of Artificial Sequence: Synthetic oligonucleotide
cuauauuaaaaugucucug

SEQ ID NO: 390286 - RNA, 19 nt, Artificial Sequence
  Description of Artificial Sequence: Synthetic oligonucleotide
uguggguugaacucguugu

SEQ ID NO: 390287 - RNA, 19 nt, Artificial Sequence
  Description of Artificial Sequence: Synthetic oligonucleotide
gaaagaaucuggaaacgug

SEQ ID NO: 390288 - RNA, 19 nt, Artificial Sequence
  Description of Artificial Sequence: Synthetic oligonucleotide
uagaaacauaucaccuagg

SEQ ID NO: 390289 - RNA, 19 nt, Artificial Sequence
  Description of Artificial Sequence: Synthetic oligonucleotide
aaacuuguaggcguccauc

SEQ ID NO: 390290 - RNA, 19 nt, Artificial Sequence
  Description of Artificial Sequence: Synthetic oligonucleotide
uuucacuaaggcaucgacu

SEQ ID NO: 390291 - RNA, 19 nt, Artificial Sequence
  Description of Artificial Sequence: Synthetic oligonucleotide
gaaguugcaguuccgacuc

SEQ ID NO: 390292 - RNA, 19 nt, Artificial Sequence
  Description of Artificial Sequence: Synthetic oligonucleotide
aucacaacgaacaugaaua

SEQ ID NO: 390293 - RNA, 19 nt, Artificial Sequence
  Description of Artificial Sequence: Synthetic oligonucleotide
auagcacaaagucacauua

SEQ ID NO: 390294 - RNA, 19 nt, Artificial Sequence
  Description of Artificial Sequence: Synthetic oligonucleotide
auuaguugaauuacgauua

SEQ ID NO: 390295 - RNA, 19 nt, Artificial Sequence
  Description of Artificial Sequence: Synthetic oligonucleotide
auuguuuacaauacuuuug

SEQ ID NO: 390296 - RNA, 19 nt, Artificial Sequence
  Description of Artificial Sequence: Synthetic oligonucleotide
gagagcacuauaccugggg

SEQ ID NO: 390297 - RNA, 19 nt, Artificial Sequence
  Description of Artificial Sequence: Synthetic oligonucleotide
aaacucuugggacaauaaa

SEQ ID NO: 390298 - RNA, 19 nt, Artificial Sequence
  Description of Artificial Sequence: Synthetic oligonucleotide
ugacaucuagaaauccacc

SEQ ID NO: 390299 - RNA, 19 nt, Artificial Sequence
  Description of Artificial Sequence: Synthetic oligonucleotide
gaggcaagagaauuacccc

SEQ ID NO: 390300 - RNA, 19 nt, Artificial Sequence
  Description of Artificial Sequence: Synthetic oligonucleotide
uguguuggucacaauuaug

SEQ ID NO: 390301 - RNA, 19 nt, Artificial Sequence
  Description of Artificial Sequence: Synthetic oligonucleotide
uucggagcacuucaaaggu

SEQ ID NO: 390302 - RNA, 19 nt, Artificial Sequence
  Description of Artificial Sequence: Synthetic oligonucleotide
caaacuugaguaaacgaca

SEQ ID NO: 390303 - RNA, 19 nt, Artificial Sequence
  Description of Artificial Sequence: Synthetic oligonucleotide
cagguuccuaaacugaacc

SEQ ID NO: 390304 - RNA, 19 nt, Artificial Sequence
  Description of Artificial Sequence: Synthetic oligonucleotide
uguguuguggguugaacuc

SEQ ID NO: 390305 - RNA, 19 nt, Artificial Sequence
  Description of Artificial Sequence: Synthetic oligonucleotide
uacuauguugucuuugcaa

SEQ ID NO: 390306 - RNA, 19 nt, Artificial Sequence
  Description of Artificial Sequence: Synthetic oligonucleotide
gaguaaggacuuuauccag

SEQ ID NO: 390307 - RNA, 19 nt, Artificial Sequence
  Description of Artificial Sequence: Synthetic oligonucleotide
uguugucuuugcaaaacaa

SEQ ID NO: 390308 - RNA, 19 nt, Artificial Sequence
  Description of Artificial Sequence: Synthetic oligonucleotide
  modified_base (6)..(6): a, c, u, g, unknown or other
caaacncuuagcuauauua

SEQ ID NO: 390309 - RNA, 19 nt, Artificial Sequence
  Description of Artificial Sequence: Synthetic oligonucleotide
  modified_base (5)..(5): a, c, u, g, unknown or other
aaacncuuagcuauauuaa

SEQ ID NO: 390310 - RNA, 19 nt, Artificial Sequence
  Description of Artificial Sequence: Synthetic oligonucleotide
gaaauucgcaaauauccaa

SEQ ID NO: 390311 - RNA, 19 nt, Artificial Sequence
  Description of Artificial Sequence: Synthetic oligonucleotide
gaaacguggcguugugugg

SEQ ID NO: 390312 - RNA, 19 nt, Artificial Sequence
  Description of Artificial Sequence: Synthetic oligonucleotide
acaacgaacaugaauacaa

SEQ ID NO: 390313 - RNA, 19 nt, Artificial Sequence
  Description of Artificial Sequence: Synthetic oligonucleotide
aguaaacgacauauaauag

SEQ ID NO: 390314 - RNA, 19 nt, Artificial Sequence
  Description of Artificial Sequence: Synthetic oligonucleotide
ggaaaugggguugagaggc

SEQ ID NO: 390315 - RNA, 19 nt, Artificial Sequence
  Description of Artificial Sequence: Synthetic oligonucleotide
acgaacaugaauacaaaca

SEQ ID NO: 390316 - RNA, 19 nt, Artificial Sequence
  Description of Artificial Sequence: Synthetic oligonucleotide
uuuuacggagaccccaggu

SEQ ID NO: 390317 - RNA, 19 nt, Artificial Sequence
  Description of Artificial Sequence: Synthetic oligonucleotide
cuauaccuggggcacaugc

SEQ ID NO: 390318 - RNA, 19 nt, Artificial Sequence
  Description of Artificial Sequence: Synthetic oligonucleotide
uccaauaugucgccuagua

SEQ ID NO: 390319 - RNA, 19 nt, Artificial Sequence
  Description of Artificial Sequence: Synthetic oligonucleotide
uugacgucauuugacagca

SEQ ID NO: 390320 - RNA, 19 nt, Artificial Sequence
  Description of Artificial Sequence: Synthetic oligonucleotide
aggaaaugggguugagagg

SEQ ID NO: 390321 - RNA, 19 nt, Artificial Sequence
  Description of Artificial Sequence: Synthetic oligonucleotide
aucacaaaauacaaaugug

SEQ ID NO: 390322 - RNA, 19 nt, Artificial Sequence
  Description of Artificial Sequence: Synthetic oligonucleotide
ucuuauagugguacggauu

SEQ ID NO: 390323 - RNA, 19 nt, Artificial Sequence
  Description of Artificial Sequence: Synthetic oligonucleotide
augcaaaccaucagcaggg

SEQ ID NO: 390324 - RNA, 19 nt, Artificial Sequence
  Description of Artificial Sequence: Synthetic oligonucleotide
cucuguaugacaucuagaa

SEQ ID NO: 390325 - RNA, 19 nt, Artificial Sequence
  Description of Artificial Sequence: Synthetic oligonucleotide
agcacuauaccuggggcac

SEQ ID NO: 390326 - RNA, 19 nt, Artificial Sequence
  Description of Artificial Sequence: Synthetic oligonucleotide
uccuguaaccaaagucagg

SEQ ID NO: 390327 - RNA, 19 nt, Artificial Sequence
  Description of Artificial Sequence: Synthetic oligonucleotide
acuagaaacauaucaccua

SEQ ID NO: 390328 - RNA, 19 nt, Artificial Sequence
  Description of Artificial Sequence: Synthetic oligonucleotide
aacgucacguuaggagugc

SEQ ID NO: 390329 - RNA, 19 nt, Artificial Sequence
  Description of Artificial Sequence: Synthetic oligonucleotide
cauugacgucauuugacag

SEQ ID NO: 390330 - RNA, 19 nt, Artificial Sequence
  Description of Artificial Sequence: Synthetic oligonucleotide
aguccgcuaagauagaguu

SEQ ID NO: 390331 - RNA, 19 nt, Artificial Sequence
  Description of Artificial Sequence: Synthetic oligonucleotide
caguuuaaggucaaugcca

SEQ ID NO: 390332 - RNA, 19 nt, Artificial Sequence
  Description of Artificial Sequence: Synthetic oligonucleotide
uuuacggagaccccaggua

SEQ ID NO: 390333 - RNA, 19 nt, Artificial Sequence
  Description of Artificial Sequence: Synthetic oligonucleotide
guuaggagugcacaguguc

SEQ ID NO: 390334 - RNA, 19 nt, Artificial Sequence
  Description of Artificial Sequence: Synthetic oligonucleotide
aggcaagagaauuacccca

SEQ ID NO: 390335 - RNA, 19 nt, Artificial Sequence
  Description of Artificial Sequence: Synthetic oligonucleotide
uuguggguugaacucguug

SEQ ID NO: 390336 - RNA, 19 nt, Artificial Sequence
  Description of Artificial Sequence: Synthetic oligonucleotide
guugugacgaggcacuaac

SEQ ID NO: 390337 - RNA, 19 nt, Artificial Sequence
  Description of Artificial Sequence: Synthetic oligonucleotide
gcuacuggggaucuuacag

SEQ ID NO: 390338 - RNA, 19 nt, Artificial Sequence
  Description of Artificial Sequence: Synthetic oligonucleotide
ucgccuaguauuuucaauu

SEQ ID NO: 390339 - RNA, 19 nt, Artificial Sequence
  Description of Artificial Sequence: Synthetic oligonucleotide
aaaggugauaggacaaaga

SEQ ID NO: 390340 - RNA, 19 nt, Artificial Sequence
  Description of Artificial Sequence: Synthetic oligonucleotide
agugguacggauugauaca

SEQ ID NO: 390341 - RNA, 19 nt, Artificial Sequence
  Description of Artificial Sequence: Synthetic oligonucleotide
uuuccuuuaagcagcucua

SEQ ID NO: 390342 - RNA, 19 nt, Artificial Sequence
  Description of Artificial Sequence: Synthetic oligonucleotide
acuaacacgcuaguagaag

SEQ ID NO: 390343 - RNA, 19 nt, Artificial Sequence
  Description of Artificial Sequence: Synthetic oligonucleotide
ucacguuaggagugcacag

SEQ ID NO: 390344 - RNA, 19 nt, Artificial Sequence
  Description of Artificial Sequence: Synthetic oligonucleotide
acaguaucuguacuggaaa

SEQ ID NO: 390345 - RNA, 19 nt, Artificial Sequence
  Description of Artificial Sequence: Synthetic oligonucleotide
uuuuccaauaugucgccua

SEQ ID NO: 390346 - RNA, 19 nt, Artificial Sequence
  Description of Artificial Sequence: Synthetic oligonucleotide
ucacaacgaacaugaauac

SEQ ID NO: 390347 - RNA, 19 nt, Artificial Sequence
  Description of Artificial Sequence: Synthetic oligonucleotide
aacaauguacgaugcuuuu

SEQ ID NO: 390348 - RNA, 19 nt, Artificial Sequence
  Description of Artificial Sequence: Synthetic oligonucleotide
uguuauuugaagggucugu

SEQ ID NO: 390349 - RNA, 19 nt, Artificial Sequence
  Description of Artificial Sequence: Synthetic oligonucleotide
cuacuaacacgcuaguaga

SEQ ID NO: 390350 - RNA, 19 nt, Artificial Sequence
  Description of Artificial Sequence: Synthetic oligonucleotide
ucucuuauagugguacgga

SEQ ID NO: 390351 - RNA, 19 nt, Artificial Sequence
  Description of Artificial Sequence: Synthetic oligonucleotide
acucguugugacgaggcac

SEQ ID NO: 390352 - RNA, 19 nt, Artificial Sequence
  Description of Artificial Sequence: Synthetic oligonucleotide
ucuguacuggaaauuccuc

SEQ ID NO: 390353 - RNA, 19 nt, Artificial Sequence
  Description of Artificial Sequence: Synthetic oligonucleotide
guuccgacucugcacaaag

SEQ ID NO: 390354 - RNA, 19 nt, Artificial Sequence
  Description of Artificial Sequence: Synthetic oligonucleotide
ggucacauccugccgaugg

SEQ ID NO: 390355 - RNA, 19 nt, Artificial Sequence
  Description of Artificial Sequence: Synthetic oligonucleotide
uuccuaaacugaaccagaa

SEQ ID NO: 390356 - RNA, 19 nt, Artificial Sequence
  Description of Artificial Sequence: Synthetic oligonucleotide
aauaugucgccuaguauuu

SEQ ID NO: 390357 - RNA, 19 nt, Artificial Sequence
  Description of Artificial Sequence: Synthetic oligonucleotide
aacauaucaccuaggaguu

SEQ ID NO: 390358 - RNA, 19 nt, Artificial Sequence
  Description of Artificial Sequence: Synthetic oligonucleotide
uaugucgccuaguauuuuc

SEQ ID NO: 390359 - RNA, 19 nt, Artificial Sequence
  Description of Artificial Sequence: Synthetic oligonucleotide
acguuaggagugcacagug

SEQ ID NO: 390360 - RNA, 19 nt, Artificial Sequence
  Description of Artificial Sequence: Synthetic oligonucleotide
ugugaugcacuacuuugua

SEQ ID NO: 390361 - RNA, 19 nt, Artificial Sequence
  Description of Artificial Sequence: Synthetic oligonucleotide
ggaaacguggcguugugug

SEQ ID NO: 390362 - RNA, 19 nt, Artificial Sequence
  Description of Artificial Sequence: Synthetic oligonucleotide
uuuagcucaugaugacucu

SEQ ID NO: 390363 - RNA, 19 nt, Artificial Sequence
  Description of Artificial Sequence: Synthetic oligonucleotide
cuaacacgcuaguagaaga

SEQ ID NO: 390364 - RNA, 19 nt, Artificial Sequence
  Description of Artificial Sequence: Synthetic oligonucleotide
uaacacgcuaguagaagau

SEQ ID NO: 390365 - RNA, 19 nt, Artificial Sequence
  Description of Artificial Sequence: Synthetic oligonucleotide
ugucacuaaggcacucggc

SEQ ID NO: 390366 - RNA, 19 nt, Artificial Sequence
  Description of Artificial Sequence: Synthetic oligonucleotide
ucgacugccuuuucugccc

SEQ ID NO: 390367 - RNA, 19 nt, Artificial Sequence
  Description of Artificial Sequence: Synthetic oligonucleotide
aguuaaucacaacgaacau

SEQ ID NO: 390368 - RNA, 19 nt, Artificial Sequence
  Description of Artificial Sequence: Synthetic oligonucleotide
ugaacucguugugacgagg

SEQ ID NO: 390369 - RNA, 19 nt, Artificial Sequence
  Description of Artificial Sequence: Synthetic oligonucleotide
  modified_base (17)..(17): a, c, u, g, unknown or other
cauuacauugacaaacncu

SEQ ID NO: 390370 - RNA, 19 nt, Artificial Sequence
  Description of Artificial Sequence: Synthetic oligonucleotide
gacaauugaacaccagugu

SEQ ID NO: 390371 - RNA, 19 nt, Artificial Sequence
  Description of Artificial Sequence: Synthetic oligonucleotide
  modified_base (19)..(19): a, c, u, g, unknown or other
cacauuacauugacaaacn

SEQ ID NO: 390372 - RNA, 19 nt, Artificial Sequence
  Description of Artificial Sequence: Synthetic oligonucleotide
uggccauugacgucauuug

SEQ ID NO: 390373 - RNA, 19 nt, Artificial Sequence
  Description of Artificial Sequence: Synthetic oligonucleotide
gguucggagcacuucaaag

SEQ ID NO: 390374 - RNA, 19 nt, Artificial Sequence
  Description of Artificial Sequence: Synthetic oligonucleotide
aacgccaaacacgacaaua

SEQ ID NO: 390375 - RNA, 19 nt, Artificial Sequence
  Description of Artificial Sequence: Synthetic oligonucleotide
cugccgaugguacucugcg

SEQ ID NO: 390376 - RNA, 19 nt, Artificial Sequence
  Description of Artificial Sequence: Synthetic oligonucleotide
uccaucuacuaacacgcua

SEQ ID NO: 390377 - RNA, 19 nt, Artificial Sequence
  Description of Artificial Sequence: Synthetic oligonucleotide
cugucacuaaggcacucgg

SEQ ID NO: 390378 - RNA, 19 nt, Artificial Sequence
  Description of Artificial Sequence: Synthetic oligonucleotide
acggauugauacaaacuuc

SEQ ID NO: 390379 - RNA, 19 nt, Artificial Sequence
  Description of Artificial Sequence: Synthetic oligonucleotide
aaaugauauauagcacaaa

SEQ ID NO: 390380 - RNA, 19 nt, Artificial Sequence
  Description of Artificial Sequence: Synthetic oligonucleotide
gguacggauugauacaaac

SEQ ID NO: 390381 - RNA, 19 nt, Artificial Sequence
  Description of Artificial Sequence: Synthetic oligonucleotide
cacuaaggcaucgacugcc

SEQ ID NO: 390382 - RNA, 19 nt, Artificial Sequence
  Description of Artificial Sequence: Synthetic oligonucleotide
augggguaagccuuuccug

SEQ ID NO: 390383 - RNA, 19 nt, Artificial Sequence
  Description of Artificial Sequence: Synthetic oligonucleotide
uguuguggguugaacucgu

SEQ ID NO: 390384 - RNA, 19 nt, Artificial Sequence
  Description of Artificial Sequence: Synthetic oligonucleotide
gguuccuaaacugaaccag

SEQ ID NO: 390385 - RNA, 19 nt, Artificial Sequence
  Description of Artificial Sequence: Synthetic oligonucleotide
gggacaauaaacacaagca

SEQ ID NO: 390386 - RNA, 19 nt, Artificial Sequence
  Description of Artificial Sequence: Synthetic oligonucleotide
agauagaguugaagagugc

SEQ ID NO: 390387 - RNA, 19 nt, Artificial Sequence
  Description of Artificial Sequence: Synthetic oligonucleotide
aguguuugggcucuucaua

SEQ ID NO: 390388 - RNA, 19 nt, Artificial Sequence
  Description of Artificial Sequence: Synthetic oligonucleotide
gaacucguugugacgaggc

SEQ ID NO: 390389 - RNA, 19 nt, Artificial Sequence
  Description of Artificial Sequence: Synthetic oligonucleotide
agguuccuaaacugaacca

SEQ ID NO: 390390 - RNA, 19 nt, Artificial Sequence
  Description of Artificial Sequence: Synthetic oligonucleotide
ucacuaaggcacucggcgu

SEQ ID NO: 390391 - RNA, 19 nt, Artificial Sequence
  Description of Artificial Sequence: Synthetic oligonucleotide
  modified_base (3)..(3): a, c, u, g, unknown or other
acncuuagcuauauuaaaa

SEQ ID NO: 390392 - RNA, 19 nt, Artificial Sequence
  Description of Artificial Sequence: Synthetic oligonucleotide
aacucguugugacgaggca

SEQ ID NO: 390393 - RNA, 19 nt, Artificial Sequence
  Description of Artificial Sequence: Synthetic oligonucleotide
guaugacaucuagaaaucc

SEQ ID NO: 390394 - RNA, 19 nt, Artificial Sequence
  Description of Artificial Sequence: Synthetic oligonucleotide
guguuguggguugaacucg

SEQ ID NO: 390395 - RNA, 19 nt, Artificial Sequence
  Description of Artificial Sequence: Synthetic oligonucleotide
cuaugagacagaggaaaug

SEQ ID NO: 390396 - RNA, 19 nt, Artificial Sequence
  Description of Artificial Sequence: Synthetic oligonucleotide
uccccaccaacguaguaca

SEQ ID NO: 390397 - RNA, 19 nt, Artificial Sequence
  Description of Artificial Sequence: Synthetic oligonucleotide
  modified_base (15)..(15): a, c, u, g, unknown or other
uuacauugacaaacncuua

SEQ ID NO: 390398 - RNA, 19 nt, Artificial Sequence
  Description of Artificial Sequence: Synthetic oligonucleotide
aggcacucggcguacaccu

SEQ ID NO: 390399 - RNA, 19 nt, Artificial Sequence
  Description of Artificial Sequence: Synthetic oligonucleotide
cacucucuuauagugguac

SEQ ID NO: 390400 - RNA, 19 nt, Artificial Sequence
  Description of Artificial Sequence: Synthetic oligonucleotide
auaggacaaagaaauuacu

SEQ ID NO: 390401 - RNA, 19 nt, Artificial Sequence
  Description of Artificial Sequence: Synthetic oligonucleotide
caauaugucgccuaguauu

SEQ ID NO: 390402 - RNA, 19 nt, Artificial Sequence
  Description of Artificial Sequence: Synthetic oligonucleotide
ggggcugaacuuuacaaac

SEQ ID NO: 390403 - RNA, 19 nt, Artificial Sequence
  Description of Artificial Sequence: Synthetic oligonucleotide
aucgcuucacggcuggacu

SEQ ID NO: 390404 - RNA, 19 nt, Artificial Sequence
  Description of Artificial Sequence: Synthetic oligonucleotide
acgucauuugacagcaauc

SEQ ID NO: 390405 - RNA, 19 nt, Artificial Sequence
  Description of Artificial Sequence: Synthetic oligonucleotide
agaauuaccccaaguuuga

SEQ ID NO: 390406 - RNA, 19 nt, Artificial Sequence
  Description of Artificial Sequence: Synthetic oligonucleotide
ugggcaaacuccugauugu

SEQ ID NO: 390407 - RNA, 19 nt, Artificial Sequence
  Description of Artificial Sequence: Synthetic oligonucleotide
gauugauacaaacuuccuu

SEQ ID NO: 390408 - RNA, 19 nt, Artificial Sequence
  Description of Artificial Sequence: Synthetic oligonucleotide
cggauugauacaaacuucc

SEQ ID NO: 390409 - RNA, 19 nt, Artificial Sequence
  Description of Artificial Sequence: Synthetic oligonucleotide
uggcaugugagggucguug

SEQ ID NO: 390410 - RNA, 19 nt, Artificial Sequence
  Description of Artificial Sequence: Synthetic oligonucleotide
uaguugaauuacgauuaac

SEQ ID NO: 390411 - RNA, 19 nt, Artificial Sequence
  Description of Artificial Sequence: Synthetic oligonucleotide
guaauccuagaacuucaga

SEQ ID NO: 390412 - RNA, 19 nt, Artificial Sequence
  Description of Artificial Sequence: Synthetic oligonucleotide
aguagacaauugaacacca

SEQ ID NO: 390413 - RNA, 19 nt, Artificial Sequence
  Description of Artificial Sequence: Synthetic oligonucleotide
auuugacagcaaucuucag

SEQ ID NO: 390414 - RNA, 19 nt, Artificial Sequence
  Description of Artificial Sequence: Synthetic oligonucleotide
aaaugggguugagaggcga

SEQ ID NO: 390415 - RNA, 19 nt, Artificial Sequence
  Description of Artificial Sequence: Synthetic oligonucleotide
acauuguuuacaauacuuu

SEQ ID NO: 390416 - RNA, 19 nt, Artificial Sequence
  Description of Artificial Sequence: Synthetic oligonucleotide
acuaacacuggcgguaaga

SEQ ID NO: 390417 - RNA, 19 nt, Artificial Sequence
  Description of Artificial Sequence: Synthetic oligonucleotide
  modified_base (9)..(9): a, c, u, g, unknown or other
ugacaaacncuuagcuaua

SEQ ID NO: 390418 - RNA, 19 nt, Artificial Sequence
  Description of Artificial Sequence: Synthetic oligonucleotide
agcacuucaaaggucucca

SEQ ID NO: 390419 - RNA, 19 nt, Artificial Sequence
  Description of Artificial Sequence: Synthetic oligonucleotide
guguccuucaaauuagagu

SEQ ID NO: 390420 - RNA, 19 nt, Artificial Sequence
  Description of Artificial Sequence: Synthetic oligonucleotide
uugugacgaggcacuaaca

SEQ ID NO: 390421 - RNA, 19 nt, Artificial Sequence
  Description of Artificial Sequence: Synthetic oligonucleotide
cacuaugagacagaggaaa

SEQ ID NO: 390422 - RNA, 19 nt, Artificial Sequence
  Description of Artificial Sequence: Synthetic oligonucleotide
acggcuggacuagugaaag

SEQ ID NO: 390423 - RNA, 19 nt, Artificial Sequence
  Description of Artificial Sequence: Synthetic oligonucleotide
gaauuaccccaaguuugag

SEQ ID NO: 390424 - RNA, 19 nt, Artificial Sequence
  Description of Artificial Sequence: Synthetic oligonucleotide
uccaaggaccuggggauag

SEQ ID NO: 390425 - RNA, 19 nt, Artificial Sequence
  Description of Artificial Sequence: Synthetic oligonucleotide
  modified_base (7)..(7): a, c, u, g, unknown or other
acaaacncuuagcuauauu

SEQ ID NO: 390426 - RNA, 19 nt, Artificial Sequence
  Description of Artificial Sequence: Synthetic oligonucleotide
guaagacuggacucuccac

SEQ ID NO: 390427 - RNA, 19 nt, Artificial Sequence
  Description of Artificial Sequence: Synthetic oligonucleotide
ccagaagauauaaauaaaa

SEQ ID NO: 390428 - RNA, 19 nt, Artificial Sequence
  Description of Artificial Sequence: Synthetic oligonucleotide
gaaucuacuuuuguuauuu

SEQ ID NO: 390429 - RNA, 19 nt, Artificial Sequence
  Description of Artificial Sequence: Synthetic oligonucleotide
uggguugaacucguuguga

SEQ ID NO: 390430 - RNA, 19 nt, Artificial Sequence
  Description of Artificial Sequence: Synthetic oligonucleotide
ucauuaugugaugcacuac

SEQ ID NO: 390431 - RNA, 19 nt, Artificial Sequence
  Description of Artificial Sequence: Synthetic oligonucleotide
agaaucuacuuuuguuauu

SEQ ID NO: 390432 - RNA, 19 nt, Artificial Sequence
  Description of Artificial Sequence: Synthetic oligonucleotide
acacuguaacuguuaagua

SEQ ID NO: 390433 - RNA, 19 nt, Artificial Sequence
  Description of Artificial Sequence: Synthetic oligonucleotide
cacugaacgucacguuagg

SEQ ID NO: 390434 - RNA, 19 nt, Artificial Sequence
  Description of Artificial Sequence: Synthetic oligonucleotide
gcuauauuaaaaugucucu

SEQ ID NO: 390435 - RNA, 19 nt, Artificial Sequence
  Description of Artificial Sequence: Synthetic oligonucleotide
ucggcguacaccuccccac

SEQ ID NO: 390436 - RNA, 19 nt, Artificial Sequence
  Description of Artificial Sequence: Synthetic oligonucleotide
gccgaugguacucugcgcc

SEQ ID NO: 390437 - RNA, 19 nt, Artificial Sequence
  Description of Artificial Sequence: Synthetic oligonucleotide
aaggcaucgacugccuuuu

SEQ ID NO: 390438 - RNA, 19 nt, Artificial Sequence
  Description of Artificial Sequence: Synthetic oligonucleotide
cccucuuacaggauaaauc

SEQ ID NO: 390439 - RNA, 19 nt, Artificial Sequence
  Description of Artificial Sequence: Synthetic oligonucleotide
gggcauguugggcuguugg

SEQ ID NO: 390440 - RNA, 19 nt, Artificial Sequence
  Description of Artificial Sequence: Synthetic oligonucleotide
guagacaauugaacaccag

SEQ ID NO: 390441 - RNA, 19 nt, Artificial Sequence
  Description of Artificial Sequence: Synthetic oligonucleotide
  modified_base (2)..(2): a, c, u, g, unknown or other
cncuuagcuauauuaaaau

SEQ ID NO: 390442 - RNA, 19 nt, Artificial Sequence
  Description of Artificial Sequence: Synthetic oligonucleotide
cuggagcggcccauggagg

SEQ ID NO: 390443 - RNA, 19 nt, Artificial Sequence
  Description of Artificial Sequence: Synthetic oligonucleotide
cuacuggggaucuuacaga

SEQ ID NO: 390444 - RNA, 19 nt, Artificial Sequence
  Description of Artificial Sequence: Synthetic oligonucleotide
caaguccgcuaagauagag

SEQ ID NO: 390445 - RNA, 19 nt, Artificial Sequence
  Description of Artificial Sequence: Synthetic oligonucleotide
gccuaguauuuucaauuag

SEQ ID NO: 390446 - RNA, 19 nt, Artificial Sequence
  Description of Artificial Sequence: Synthetic oligonucleotide
gacuggacucuccacucuc

SEQ ID NO: 390447 - RNA, 19 nt, Artificial Sequence
  Description of Artificial Sequence: Synthetic oligonucleotide
gguaagccuuuccugugag

SEQ ID NO: 390448 - RNA, 19 nt, Artificial Sequence
  Description of Artificial Sequence: Synthetic oligonucleotide
agaaacuuguaggcgucca

SEQ ID NO: 390449 - RNA, 19 nt, Artificial Sequence
  Description of Artificial Sequence: Synthetic oligonucleotide
augugaugcacuacuuugu

SEQ ID NO: 390450 - RNA, 19 nt, Artificial Sequence
  Description of Artificial Sequence: Synthetic oligonucleotide
ugucgccuaguauuuucaa

SEQ ID NO: 390451 - RNA, 19 nt, Artificial Sequence
  Description of Artificial Sequence: Synthetic oligonucleotide
gucacguuaggagugcaca

SEQ ID NO: 390452 - RNA, 19 nt, Artificial Sequence
  Description of Artificial Sequence: Synthetic oligonucleotide
cugcacuaugagacagagg

SEQ ID NO: 390453 - RNA, 19 nt, Artificial Sequence
  Description of Artificial Sequence: Synthetic oligonucleotide
uggagcggcccauggaggu

SEQ ID NO: 390454 - RNA, 19 nt, Artificial Sequence
  Description of Artificial Sequence: Synthetic oligonucleotide
ucggagcacuucaaagguc

SEQ ID NO: 390455 - RNA, 19 nt, Artificial Sequence
  Description of Artificial Sequence: Synthetic oligonucleotide
uuauagugguacggauuga

SEQ ID NO: 390456 - RNA, 19 nt, Artificial Sequence
  Description of Artificial Sequence: Synthetic oligonucleotide
uccaauggcuuuagcucau

SEQ ID NO: 390457 - RNA, 19 nt, Artificial Sequence
  Description of Artificial Sequence: Synthetic oligonucleotide
aacguggcguuguguggca

SEQ ID NO: 390458 - RNA, 19 nt, Artificial Sequence
  Description of Artificial Sequence: Synthetic oligonucleotide
gaauuacgauuaacauuug

SEQ ID NO: 390459 - RNA, 19 nt, Artificial Sequence
  Description of Artificial Sequence: Synthetic oligonucleotide
gucacauuacauugacaaa

SEQ ID NO: 390460 - RNA, 19 nt, Artificial Sequence
  Description of Artificial Sequence: Synthetic oligonucleotide
gaucuuacagacaguggua

SEQ ID NO: 390461 - RNA, 19 nt, Artificial Sequence
  Description of Artificial Sequence: Synthetic oligonucleotide
uuaccccaaguuugaggcu

SEQ ID NO: 390462 - RNA, 19 nt, Artificial Sequence
  Description of Artificial Sequence: Synthetic oligonucleotide
acuaugagacagaggaaau

SEQ ID NO: 390463 - RNA, 19 nt, Artificial Sequence
  Description of Artificial Sequence: Synthetic oligonucleotide
agagugcuucugcacuaug

SEQ ID NO: 390464 - RNA, 19 nt, Artificial Sequence
  Description of Artificial Sequence: Synthetic oligonucleotide
acucggcguacaccucccc

SEQ ID NO: 390465 - RNA, 19 nt, Artificial Sequence
  Description of Artificial Sequence: Synthetic oligonucleotide
augggguugagaggcgauc

SEQ ID NO: 390466 - RNA, 19 nt, Artificial Sequence
  Description of Artificial Sequence: Synthetic oligonucleotide
agcuacuggggaucuuaca

SEQ ID NO: 390467 - RNA, 19 nt, Artificial Sequence
  Description of Artificial Sequence: Synthetic oligonucleotide
gccaacgccaaacacgaca

SEQ ID NO: 390468 - RNA, 19 nt, Artificial Sequence
  Description of Artificial Sequence: Synthetic oligonucleotide
ggguugaacucguugugac

SEQ ID NO: 390469 - RNA, 19 nt, Artificial Sequence
  Description of Artificial Sequence: Synthetic oligonucleotide
ugucacugaacgucacguu

SEQ ID NO: 390470 - RNA, 19 nt, Artificial Sequence
  Description of Artificial Sequence: Synthetic oligonucleotide
accuuguuuccagcccagc

SEQ ID NO: 390471 - RNA, 19 nt, Artificial Sequence
  Description of Artificial Sequence: Synthetic oligonucleotide
cuucacggcuggacuagug

SEQ ID NO: 390472 - RNA, 19 nt, Artificial Sequence
  Description of Artificial Sequence: Synthetic oligonucleotide
caauuaguugaauuacgau

SEQ ID NO: 390473 - RNA, 19 nt, Artificial Sequence
  Description of Artificial Sequence: Synthetic oligonucleotide
ggcccaaagcagcaaacac

SEQ ID NO: 390474 - RNA, 19 nt, Artificial Sequence
  Description of Artificial Sequence: Synthetic oligonucleotide
ugccgaugguacucugcgc

SEQ ID NO: 390475 - RNA, 19 nt, Artificial Sequence
  Description of Artificial Sequence: Synthetic oligonucleotide
ugguacggauugauacaaa

SEQ ID NO: 390476 - RNA, 19 nt, Artificial Sequence
  Description of Artificial Sequence: Synthetic oligonucleotide
auagaguugaagagugcuu

SEQ ID NO: 390477 - RNA, 19 nt, Artificial Sequence
  Description of Artificial Sequence: Synthetic oligonucleotide
gcaaucgcuucacggcugg

SEQ ID NO: 390478 - RNA, 19 nt, Artificial Sequence
  Description of Artificial Sequence: Synthetic oligonucleotide
cuguguuguggguugaacu

SEQ ID NO: 390479 - RNA, 19 nt, Artificial Sequence
  Description of Artificial Sequence: Synthetic oligonucleotide
cuacuauguugucuuugca

SEQ ID NO: 390480 - RNA, 19 nt, Artificial Sequence
  Description of Artificial Sequence: Synthetic oligonucleotide
cagaaucuacuuuuguuau

SEQ ID NO: 390481 - RNA, 19 nt, Artificial Sequence
  Description of Artificial Sequence: Synthetic oligonucleotide
uucgaauggugcacaucuu

SEQ ID NO: 390482 - RNA, 19 nt, Artificial Sequence
  Description of Artificial Sequence: Synthetic oligonucleotide
acugaacgucacguuagga

SEQ ID NO: 390483 - RNA, 19 nt, Artificial Sequence
  Description of Artificial Sequence: Synthetic oligonucleotide
aaugggguugagaggcgau

SEQ ID NO: 390484 - RNA, 19 nt, Artificial Sequence
  Description of Artificial Sequence: Synthetic oligonucleotide
gaugguacucugcgcccca

SEQ ID NO: 390485 - RNA, 19 nt, Artificial Sequence
  Description of Artificial Sequence: Synthetic oligonucleotide
cacacacuguaacuguuaa

SEQ ID NO: 390486 - RNA, 19 nt, Artificial Sequence
  Description of Artificial Sequence: Synthetic oligonucleotide
gugaugcacuacuuuguaa

SEQ ID NO: 390487 - RNA, 19 nt, Artificial Sequence
  Description of Artificial Sequence: Synthetic oligonucleotide
agaggcgaucccaucugag

SEQ ID NO: 390488 - RNA, 19 nt, Artificial Sequence
  Description of Artificial Sequence: Synthetic oligonucleotide
uaguacagaugcacaccuu

SEQ ID NO: 390489 - RNA, 19 nt, Artificial Sequence
  Description of Artificial Sequence: Synthetic oligonucleotide
agacugugucucaaaacaa

SEQ ID NO: 390490 - RNA, 19 nt, Artificial Sequence
  Description of Artificial Sequence: Synthetic oligonucleotide
uggaaacguggcguugugu

SEQ ID NO: 390491 - RNA, 19 nt, Artificial Sequence
  Description of Artificial Sequence: Synthetic oligonucleotide
gagaggcgaucccaucuga

SEQ ID NO: 390492 - RNA, 19 nt, Artificial Sequence
  Description of Artificial Sequence: Synthetic oligonucleotide
ccaaaaggaaauucgcaaa

SEQ ID NO: 390493 - RNA, 19 nt, Artificial Sequence
  Description of Artificial Sequence: Synthetic oligonucleotide
caugggguaagccuuuccu

SEQ ID NO: 390494 - RNA, 19 nt, Artificial Sequence
  Description of Artificial Sequence: Synthetic oligonucleotide
cacaacgaacaugaauaca

SEQ ID NO: 390495 - RNA, 19 nt, Artificial Sequence
  Description of Artificial Sequence: Synthetic oligonucleotide
guacggauugauacaaacu

SEQ ID NO: 390496 - RNA, 19 nt, Artificial Sequence
  Description of Artificial Sequence: Synthetic oligonucleotide
cagcuacuggggaucuuac

SEQ ID NO: 390497 - RNA, 19 nt, Artificial Sequence
  Description of Artificial Sequence: Synthetic oligonucleotide
ucgcuucacggcuggacua

SEQ ID NO: 390498 - RNA, 19 nt, Artificial Sequence
  Description of Artificial Sequence: Synthetic oligonucleotide
gccauugacgucauuugac

SEQ ID NO: 390499 - RNA, 19 nt, Artificial Sequence
  Description of Artificial Sequence: Synthetic oligonucleotide
gguagcagaggacugacuu

SEQ ID NO: 390500 - RNA, 19 nt, Artificial Sequence
  Description of Artificial Sequence: Synthetic oligonucleotide
augucgccuaguauuuuca

SEQ ID NO: 390501 - RNA, 19 nt, Artificial Sequence
  Description of Artificial Sequence: Synthetic oligonucleotide
acacuggcgguaagacugg

SEQ ID NO: 390502 - RNA, 19 nt, Artificial Sequence
  Description of Artificial Sequence: Synthetic oligonucleotide
ggcuuuagcucaugaugac

SEQ ID NO: 390503 - RNA, 19 nt, Artificial Sequence
  Description of Artificial Sequence: Synthetic oligonucleotide
ccauugacgucauuugaca

SEQ ID NO: 390504 - RNA, 19 nt, Artificial Sequence
  Description of Artificial Sequence: Synthetic oligonucleotide
acuaaggcaucgacugccu

SEQ ID NO: 390505 - RNA, 19 nt, Artificial Sequence
  Description of Artificial Sequence: Synthetic oligonucleotide
ccuggggauagugacacac

SEQ ID NO: 390506 - RNA, 19 nt, Artificial Sequence
  Description of Artificial Sequence: Synthetic oligonucleotide
ggcguuguguggcauguga

SEQ ID NO: 390507 - RNA, 19 nt, Artificial Sequence
  Description of Artificial Sequence: Synthetic oligonucleotide
ggcuggacuagugaaagaa

SEQ ID NO: 390508 - RNA, 19 nt, Artificial Sequence
  Description of Artificial Sequence: Synthetic oligonucleotide
cuggaaacguggcguugug

SEQ ID NO: 390509 - RNA, 19 nt, Artificial Sequence
  Description of Artificial Sequence: Synthetic oligonucleotide
cucguugugacgaggcacu

SEQ ID NO: 390510 - RNA, 19 nt, Artificial Sequence
  Description of Artificial Sequence: Synthetic oligonucleotide
aucuacuaacacgcuagua

SEQ ID NO: 390511 - RNA, 19 nt, Artificial Sequence
  Description of Artificial Sequence: Synthetic oligonucleotide
agcaaucgcuucacggcug

SEQ ID NO: 390512 - RNA, 19 nt, Artificial Sequence
  Description of Artificial Sequence: Synthetic oligonucleotide
gggguaagccuuuccugug

SEQ ID NO: 390513 - RNA, 19 nt, Artificial Sequence
  Description of Artificial Sequence: Synthetic oligonucleotide
guccgcuaagauagaguug

SEQ ID NO: 390514 - RNA, 19 nt, Artificial Sequence
  Description of Artificial Sequence: Synthetic oligonucleotide
ggccauugacgucauuuga

SEQ ID NO: 390515 - RNA, 19 nt, Artificial Sequence
  Description of Artificial Sequence: Synthetic oligonucleotide
acugaaccagaaggcugug

SEQ ID NO: 390516 - RNA, 19 nt, Artificial Sequence
  Description of Artificial Sequence: Synthetic oligonucleotide
cacuaaggcacucggcgua

SEQ ID NO: 390517 - RNA, 19 nt, Artificial Sequence
  Description of Artificial Sequence: Synthetic oligonucleotide
ggcauguugggcuguugga

SEQ ID NO: 390518 - RNA, 19 nt, Artificial Sequence
  Description of Artificial Sequence: Synthetic oligonucleotide
cacuaacacuggcgguaag

SEQ ID NO: 390519 - RNA, 19 nt, Artificial Sequence
  Description of Artificial Sequence: Synthetic oligonucleotide
cucuuauagugguacggau

SEQ ID NO: 390520 - RNA, 19 nt, Artificial Sequence
  Description of Artificial Sequence: Synthetic oligonucleotide
gccgugcacacacuguaac

SEQ ID NO: 390521 - RNA, 19 nt, Artificial Sequence
  Description of Artificial Sequence: Synthetic oligonucleotide
cgugcacacacuguaacug

SEQ ID NO: 390522 - RNA, 19 nt, Artificial Sequence
  Description of Artificial Sequence: Synthetic oligonucleotide
cugucacugaacgucacgu

SEQ ID NO: 390523 - RNA, 19 nt, Artificial Sequence
  Description of Artificial Sequence: Synthetic oligonucleotide
  modified_base (8)..(8): a, c, u, g, unknown or other
gacaaacncuuagcuauau

SEQ ID NO: 390524 - RNA, 19 nt, Artificial Sequence
  Description of Artificial Sequence: Synthetic oligonucleotide
ugggcuacucaaggcuuuc

SEQ ID NO: 390525 - RNA, 19 nt, Artificial Sequence
  Description of Artificial Sequence: Synthetic oligonucleotide
ccugccgaugguacucugc

SEQ ID NO: 390526 - RNA, 19 nt, Artificial Sequence
  Description of Artificial Sequence: Synthetic oligonucleotide
aggcaucgacugccuuuuc

SEQ ID NO: 390527 - RNA, 19 nt, Artificial Sequence
  Description of Artificial Sequence: Synthetic oligonucleotide
cacggcuggacuagugaaa

SEQ ID NO: 390528 - RNA, 19 nt, Artificial Sequence
  Description of Artificial Sequence: Synthetic oligonucleotide
ggguaagccuuuccuguga

SEQ ID NO: 390529 - RNA, 19 nt, Artificial Sequence
  Description of Artificial Sequence: Synthetic oligonucleotide
ccaacgccaaacacgacaa

SEQ ID NO: 390530 - RNA, 19 nt, Artificial Sequence
  Description of Artificial Sequence: Synthetic oligonucleotide
gucgccuaguauuuucaau

SEQ ID NO: 390531 - RNA, 19 nt, Artificial Sequence
  Description of Artificial Sequence: Synthetic oligonucleotide
cucggcguacaccucccca

SEQ ID NO: 390532 - RNA, 19 nt, Artificial Sequence
  Description of Artificial Sequence: Synthetic oligonucleotide
gacaucccugcuggauaug

SEQ ID NO: 390533 - RNA, 19 nt, Artificial Sequence
  Description of Artificial Sequence: Synthetic oligonucleotide
ggcacuaacacuggcggua

SEQ ID NO: 390534 - RNA, 19 nt, Artificial Sequence
  Description of Artificial Sequence: Synthetic oligonucleotide
ggcaagagaauuaccccaa

SEQ ID NO: 390535 - RNA, 19 nt, Artificial Sequence
  Description of Artificial Sequence: Synthetic oligonucleotide
gcguuguguggcaugugag

SEQ ID NO: 390536 - RNA, 19 nt, Artificial Sequence
  Description of Artificial Sequence: Synthetic oligonucleotide
aguuccgacucugcacaaa

SEQ ID NO: 390537 - RNA, 19 nt, Artificial Sequence
  Description of Artificial Sequence: Synthetic oligonucleotide
auaugucgccuaguauuuu

SEQ ID NO: 390538 - RNA, 19 nt, Artificial Sequence
  Description of Artificial Sequence: Synthetic oligonucleotide
cagcaaucgcuucacggcu

SEQ ID NO: 390539 - RNA, 19 nt, Artificial Sequence
  Description of Artificial Sequence: Synthetic oligonucleotide
caucagcaggggcugaacu

SEQ ID NO: 390540 - RNA, 19 nt, Artificial Sequence
  Description of Artificial Sequence: Synthetic oligonucleotide
ggucacaauuauguagaaa

SEQ ID NO: 390541 - RNA, 19 nt, Artificial Sequence
  Description of Artificial Sequence: Synthetic oligonucleotide
cgcuaagauagaguugaag

SEQ ID NO: 390542 - RNA, 19 nt, Artificial Sequence
  Description of Artificial Sequence: Synthetic oligonucleotide
acaaguccgcuaagauaga

SEQ ID NO: 390543 - RNA, 19 nt, Artificial Sequence
  Description of Artificial Sequence: Synthetic oligonucleotide
acauaucaccuaggaguuu

SEQ ID NO: 390544 - RNA, 19 nt, Artificial Sequence
  Description of Artificial Sequence: Synthetic oligonucleotide
accuggggauagugacaca

SEQ ID NO: 390545 - RNA, 19 nt, Artificial Sequence
  Description of Artificial Sequence: Synthetic oligonucleotide
ggcaucgacugccuuuucu

SEQ ID NO: 390546 - RNA, 19 nt, Artificial Sequence
  Description of Artificial Sequence: Synthetic oligonucleotide
ucguugugacgaggcacua

SEQ ID NO: 390547 - RNA, 19 nt, Artificial Sequence
  Description of Artificial Sequence: Synthetic oligonucleotide
acgucacguuaggagugca

SEQ ID NO: 390548 - RNA, 19 nt, Artificial Sequence
  Description of Artificial Sequence: Synthetic oligonucleotide
uggcguuguguggcaugug

SEQ ID NO: 390549 - RNA, 19 nt, Artificial Sequence
  Description of Artificial Sequence: Synthetic oligonucleotide
cacguuaggagugcacagu

SEQ ID NO: 390550 - RNA, 19 nt, Artificial Sequence
  Description of Artificial Sequence: Synthetic oligonucleotide
cuuuuccaauaugucgccu

SEQ ID NO: 390551 - RNA, 19 nt, Artificial Sequence
  Description of Artificial Sequence: Synthetic oligonucleotide
ggguucggagcacuucaaa

SEQ ID NO: 390552 - RNA, 19 nt, Artificial Sequence
  Description of Artificial Sequence: Synthetic oligonucleotide
gcagcuacuggggaucuua

SEQ ID NO: 390553 - RNA, 19 nt, Artificial Sequence
  Description of Artificial Sequence: Synthetic oligonucleotide
ggcuagccuacacaguaau

SEQ ID NO: 390554 - RNA, 19 nt, Artificial Sequence
  Description of Artificial Sequence: Synthetic oligonucleotide
ggcgguaagacuggacucu

SEQ ID NO: 390555 - RNA, 19 nt, Artificial Sequence
  Description of Artificial Sequence: Synthetic oligonucleotide
cugcgccccagcccuugac

SEQ ID NO: 390556 - RNA, 19 nt, Artificial Sequence
  Description of Artificial Sequence: Synthetic oligonucleotide
cucugcgccccagcccuug

SEQ ID NO: 390557 - RNA, 19 nt, Artificial Sequence
  Description of Artificial Sequence: Synthetic oligonucleotide
cgguaagacuggacucucc

SEQ ID NO: 390558 - RNA, 19 nt, Artificial Sequence
  Description of Artificial Sequence: Synthetic oligonucleotide
ccaacucgguuguuuagcu

SEQ ID NO: 390559 - RNA, 19 nt, Artificial Sequence
  Description of Artificial Sequence: Synthetic oligonucleotide
cgucacguuaggagugcac

SEQ ID NO: 390560 - RNA, 19 nt, Artificial Sequence
  Description of Artificial Sequence: Synthetic oligonucleotide
cccaccaacguaguacaga

SEQ ID NO: 390561 - RNA, 19 nt, Artificial Sequence
  Description of Artificial Sequence: Synthetic oligonucleotide
caguuccgacucugcacaa

SEQ ID NO: 390562 - RNA, 19 nt, Artificial Sequence
  Description of Artificial Sequence: Synthetic oligonucleotide
ggagcggcccauggaggug

SEQ ID NO: 390563 - RNA, 19 nt, Artificial Sequence
  Description of Artificial Sequence: Synthetic oligonucleotide
cgaugguacucugcgcccc

SEQ ID NO: 390564 - RNA, 19 nt, Artificial Sequence
  Description of Artificial Sequence: Synthetic oligonucleotide
gcacuaacacuggcgguaa

SEQ ID NO: 390565 - RNA, 19 nt, Artificial Sequence
  Description of Artificial Sequence: Synthetic oligonucleotide
gcgguaagacuggacucuc

SEQ ID NO: 390566 - RNA, 19 nt, Artificial Sequence
  Description of Artificial Sequence: Synthetic oligonucleotide
gcacuaugagacagaggaa

SEQ ID NO: 390567 - RNA, 19 nt, Artificial Sequence
  Description of Artificial Sequence: Synthetic oligonucleotide
ugcagcuacuggggaucuu

SEQ ID NO: 390568 - RNA, 19 nt, Artificial Sequence
  Description of Artificial Sequence: Synthetic oligonucleotide
ccaauaugucgccuaguau

SEQ ID NO: 390569 - RNA, 19 nt, Artificial Sequence
  Description of Artificial Sequence: Synthetic oligonucleotide
cacuauaccuggggcacau

SEQ ID NO: 390570 - RNA, 19 nt, Artificial Sequence
  Description of Artificial Sequence: Synthetic oligonucleotide
gcgccccagcccuugacaa

SEQ ID NO: 390571 - RNA, 19 nt, Artificial Sequence
  Description of Artificial Sequence: Synthetic oligonucleotide
cgccuaguauuuucaauua

SEQ ID NO: 390572 - RNA, 19 nt, Artificial Sequence
  Description of Artificial Sequence: Synthetic oligonucleotide
cggcguacaccuccccacc

SEQ ID NO: 390573 - RNA, 19 nt, Artificial Sequence
  Description of Artificial Sequence: Synthetic oligonucleotide
gcacaguguccuucaaauu

SEQ ID NO: 390574 - RNA, 19 nt, Artificial Sequence
  Description of Artificial Sequence: Synthetic oligonucleotide
gcacuauaccuggggcaca

SEQ ID NO: 390575 - RNA, 19 nt, Artificial Sequence
  Description of Artificial Sequence: Synthetic oligonucleotide
ccgugcacacacuguaacu

SEQ ID NO: 390576 - RNA, 19 nt, Artificial Sequence
  Description of Artificial Sequence: Synthetic oligonucleotide
ccccagcccuugacaaaac

SEQ ID NO: 390577 - RNA, 19 nt, Artificial Sequence
  Description of Artificial Sequence: Synthetic oligonucleotide
cagguuagccagggauaua

SEQ ID NO: 390578 - RNA, 19 nt, Artificial Sequence
  Description of Artificial Sequence: Synthetic oligonucleotide
ggccgugcacacacuguaa

SEQ ID NO: 390579 - RNA, 19 nt, Artificial Sequence
  Description of Artificial Sequence: Synthetic oligonucleotide
caacgccaaacacgacaau

SEQ ID NO: 390580 - RNA, 19 nt, Artificial Sequence
  Description of Artificial Sequence: Synthetic oligonucleotide
gcccucuuacaggauaaau

SEQ ID NO: 390581 - RNA, 19 nt, Artificial Sequence
  Description of Artificial Sequence: Synthetic oligonucleotide
ccccaaguuugaggcuagc

SEQ ID NO: 390582 - RNA, 19 nt, Artificial Sequence
  Description of Artificial Sequence: Synthetic oligonucleotide
ggcacucggcguacaccuc

SEQ ID NO: 390583 - RNA, 19 nt, Artificial Sequence
  Description of Artificial Sequence: Synthetic oligonucleotide
ccacucucuuauaguggua

SEQ ID NO: 390584 - RNA, 19 nt, Artificial Sequence
  Description of Artificial Sequence: Synthetic oligonucleotide
guuguggguugaacucguu

SEQ ID NO: 390585 - RNA, 19 nt, Artificial Sequence
  Description of Artificial Sequence: Synthetic oligonucleotide
gcuagccuacacaguaauu

SEQ ID NO: 390586 - RNA, 19 nt, Artificial Sequence
  Description of Artificial Sequence: Synthetic oligonucleotide
gggcuguccugggcuacuc

SEQ ID NO: 390587 - RNA, 19 nt, Artificial Sequence
  Description of Artificial Sequence: Synthetic oligonucleotide
ggccaacgccaaacacgac

SEQ ID NO: 390588 - RNA, 19 nt, Artificial Sequence
  Description of Artificial Sequence: Synthetic oligonucleotide
ccgcuaagauagaguugaa

SEQ ID NO: 390589 - RNA, 19 nt, Artificial Sequence
  Description of Artificial Sequence: Synthetic oligonucleotide
cggcuggacuagugaaaga

SEQ ID NO: 390590 - RNA, 19 nt, Artificial Sequence
  Description of Artificial Sequence: Synthetic oligonucleotide
gcuucacggcuggacuagu

SEQ ID NO: 390591 - RNA, 19 nt, Artificial Sequence
  Description of Artificial Sequence: Synthetic oligonucleotide
ccaaggaccuggggauagu

SEQ ID NO: 390592 - RNA, 19 nt, Artificial Sequence
  Description of Artificial Sequence: Synthetic oligonucleotide
aaauauaucaaauauauac

SEQ ID NO: 390593 - RNA, 19 nt, Artificial Sequence
  Description of Artificial Sequence: Synthetic oligonucleotide
aauguuaguuaccauaagc

SEQ ID NO: 390594 - RNA, 19 nt, Artificial Sequence
  Description of Artificial Sequence: Synthetic oligonucleotide
cuuaaaaugguauauagcc

SEQ ID NO: 390595 - RNA, 19 nt, Artificial Sequence
  Description of Artificial Sequence: Synthetic oligonucleotide
aauuguuuaggucuaacac

SEQ ID NO: 390596 - RNA, 19 nt, Artificial Sequence
  Description of Artificial Sequence: Synthetic oligonucleotide
aagguaucuauucacauac

SEQ ID NO: 390597 - RNA, 19 nt, Artificial Sequence
  Description of Artificial Sequence: Synthetic oligonucleotide
uuaauucuauuaaagauca

SEQ ID NO: 390598 - RNA, 19 nt, Artificial Sequence
  Description of Artificial Sequence: Synthetic oligonucleotide
accauaagcauuuuaauuc

SEQ ID NO: 390599 - RNA, 19 nt, Artificial Sequence
  Description of Artificial Sequence: Synthetic oligonucleotide
acaagagucacuuaaaaug

SEQ ID NO: 390600 - RNA, 19 nt, Artificial Sequence
  Description of Artificial Sequence: Synthetic oligonucleotide
accuccaacauauagaagg

SEQ ID NO: 390601 - RNA, 19 nt, Artificial Sequence
  Description of Artificial Sequence: Synthetic oligonucleotide
uccaauguguaaaagacag

SEQ ID NO: 390602 - RNA, 19 nt, Artificial Sequence
  Description of Artificial Sequence: Synthetic oligonucleotide
uaacuugggaacaacaggg

SEQ ID NO: 390603 - RNA, 19 nt, Artificial Sequence
  Description of Artificial Sequence: Synthetic oligonucleotide
uaucuuaagucgaaaaucc

SEQ ID NO: 390604 - RNA, 19 nt, Artificial Sequence
  Description of Artificial Sequence: Synthetic oligonucleotide
uguuuaaugugcauaauac

SEQ ID NO: 390605 - RNA, 19 nt, Artificial Sequence
  Description of Artificial Sequence: Synthetic oligonucleotide
uguguuaugucaaauaaaa

SEQ ID NO: 390606 - RNA, 19 nt, Artificial Sequence
  Description of Artificial Sequence: Synthetic oligonucleotide
uuucauauaugucagggac

SEQ ID NO: 390607 - RNA, 19 nt, Artificial Sequence
  Description of Artificial Sequence: Synthetic oligonucleotide
gauacuuucgcuucugucc

SEQ ID NO: 390608 - RNA, 19 nt, Artificial Sequence
  Description of Artificial Sequence: Synthetic oligonucleotide
ucuaauauuuugcuugucc

SEQ ID NO: 390609 - RNA, 19 nt, Artificial Sequence
  Description of Artificial Sequence: Synthetic oligonucleotide
aauaauuaugauguuacca

SEQ ID NO: 390610 - RNA, 19 nt, Artificial Sequence
  Description of Artificial Sequence: Synthetic oligonucleotide
uucuuguuaucuuaagucg

SEQ ID NO: 390611 - RNA, 19 nt, Artificial Sequence
  Description of Artificial Sequence: Synthetic oligonucleotide
aagucgaaaauccacggag

SEQ ID NO: 390612 - RNA, 19 nt, Artificial Sequence
  Description of Artificial Sequence: Synthetic oligonucleotide
augugcauaauacuugacc

SEQ ID NO: 390613 - RNA, 19 nt, Artificial Sequence
  Description of Artificial Sequence: Synthetic oligonucleotide
ugugcauugaauuuaauua

SEQ ID NO: 390614 - RNA, 19 nt, Artificial Sequence
  Description of Artificial Sequence: Synthetic oligonucleotide
ucaacaaucacuguagcag

SEQ ID NO: 390615 - RNA, 19 nt, Artificial Sequence
  Description of Artificial Sequence: Synthetic oligonucleotide
uuuaagugcccaaauauac

SEQ ID NO: 390616 - RNA, 19 nt, Artificial Sequence
  Description of Artificial Sequence: Synthetic oligonucleotide
aauauauacagguuggcua

SEQ ID NO: 390617 - RNA, 19 nt, Artificial Sequence
  Description of Artificial Sequence: Synthetic oligonucleotide
ugcuagguaacacauuugg

SEQ ID NO: 390618 - RNA, 19 nt, Artificial Sequence
  Description of Artificial Sequence: Synthetic oligonucleotide
cuuaagucgaaaauccacg

SEQ ID NO: 390619 - RNA, 19 nt, Artificial Sequence
  Description of Artificial Sequence: Synthetic oligonucleotide
uuaggucuaacacuaaaug

SEQ ID NO: 390620 - RNA, 19 nt, Artificial Sequence
  Description of Artificial Sequence: Synthetic oligonucleotide
uaggucuaacacuaaaugg

SEQ ID NO: 390621 - RNA, 19 nt, Artificial Sequence
  Description of Artificial Sequence: Synthetic oligonucleotide
ucuaacacuaaaugguucc

SEQ ID NO: 390622 - RNA, 19 nt, Artificial Sequence
  Description of Artificial Sequence: Synthetic oligonucleotide
uuuacgaaauggaaauucc

SEQ ID NO: 390623 - RNA, 19 nt, Artificial Sequence
  Description of Artificial Sequence: Synthetic oligonucleotide
agaacaguuucauauaugu

SEQ ID NO: 390624 - RNA, 19 nt, Artificial Sequence
  Description of Artificial Sequence: Synthetic oligonucleotide
aacaucauguaacgaguac

SEQ ID NO: 390625 - RNA, 19 nt, Artificial Sequence
  Description of Artificial Sequence: Synthetic oligonucleotide
aaaccauuaaaacagcauu

SEQ ID NO: 390626 - RNA, 19 nt, Artificial Sequence
  Description of Artificial Sequence: Synthetic oligonucleotide
ugugcauaauacuugaccu

SEQ ID NO: 390627 - RNA, 19 nt, Artificial Sequence
  Description of Artificial Sequence: Synthetic oligonucleotide
uacgaaauggaaauuccag

SEQ ID NO: 390628 - RNA, 19 nt, Artificial Sequence
  Description of Artificial Sequence: Synthetic oligonucleotide
aaauuguuuaggucuaaca

SEQ ID NO: 390629 - RNA, 19 nt, Artificial Sequence
  Description of Artificial Sequence: Synthetic oligonucleotide
uuaagucgaaaauccacgg

SEQ ID NO: 390630 - RNA, 19 nt, Artificial Sequence
  Description of Artificial Sequence: Synthetic oligonucleotide
uuaaaaugguauauagcca

SEQ ID NO: 390631 - RNA, 19 nt, Artificial Sequence
  Description of Artificial Sequence: Synthetic oligonucleotide
ucaaauuugcauucuauaa

SEQ ID NO: 390632 - RNA, 19 nt, Artificial Sequence
  Description of Artificial Sequence: Synthetic oligonucleotide
aaaauucagaucaugaaaa

SEQ ID NO: 390633 - RNA, 19 nt, Artificial Sequence
  Description of Artificial Sequence: Synthetic oligonucleotide
augauuucgcguucaauac

SEQ ID NO: 390634 - RNA, 19 nt, Artificial Sequence
  Description of Artificial Sequence: Synthetic oligonucleotide
uaugauuucgcguucaaua

SEQ ID NO: 390635 - RNA, 19 nt, Artificial Sequence
  Description of Artificial Sequence: Synthetic oligonucleotide
ucuguguuaugucaaauaa

SEQ ID NO: 390636 - RNA, 19 nt, Artificial Sequence
  Description of Artificial Sequence: Synthetic oligonucleotide
aguuucauauaugucaggg

SEQ ID NO: 390637 - RNA, 19 nt, Artificial Sequence
  Description of Artificial Sequence: Synthetic oligonucleotide
uucaauacacugcaggcga

SEQ ID NO: 390638 - RNA, 19 nt, Artificial Sequence
  Description of Artificial Sequence: Synthetic oligonucleotide
uuaguuaccauaagcauuu

SEQ ID NO: 390639 - RNA, 19 nt, Artificial Sequence
  Description of Artificial Sequence: Synthetic oligonucleotide
ucuuaagucgaaaauccac

SEQ ID NO: 390640 - RNA, 19 nt, Artificial Sequence
  Description of Artificial Sequence: Synthetic oligonucleotide
uugucaauaaucauuucuc

SEQ ID NO: 390641 - RNA, 19 nt, Artificial Sequence
  Description of Artificial Sequence: Synthetic oligonucleotide
auuguuuaggucuaacacu

SEQ ID NO: 390642 - RNA, 19 nt, Artificial Sequence
  Description of Artificial Sequence: Synthetic oligonucleotide
uccaacauauagaaggcca

SEQ ID NO: 390643 - RNA, 19 nt, Artificial Sequence
  Description of Artificial Sequence: Synthetic oligonucleotide
acaucauguaacgaguacc

SEQ ID NO: 390644 - RNA, 19 nt, Artificial Sequence
  Description of Artificial Sequence: Synthetic oligonucleotide
uacauuaagcuguuguuug

SEQ ID NO: 390645 - RNA, 19 nt, Artificial Sequence
  Description of Artificial Sequence: Synthetic oligonucleotide
agaucaugaaaauuugucu

SEQ ID NO: 390646 - RNA, 19 nt, Artificial Sequence
  Description of Artificial Sequence: Synthetic oligonucleotide
guaacuugggaacaacagg

SEQ ID NO: 390647 - RNA, 19 nt, Artificial Sequence
  Description of Artificial Sequence: Synthetic oligonucleotide
aguccauccauuucauggc

SEQ ID NO: 390648 - RNA, 19 nt, Artificial Sequence
  Description of Artificial Sequence: Synthetic oligonucleotide
uauacacuguugcauauac

SEQ ID NO: 390649 - RNA, 19 nt, Artificial Sequence
  Description of Artificial Sequence: Synthetic oligonucleotide
aguaaguccuauacaaugc

SEQ ID NO: 390650 - RNA, 19 nt, Artificial Sequence
  Description of Artificial Sequence: Synthetic oligonucleotide
aaaauuguuuaggucuaac

SEQ ID NO: 390651 - RNA, 19 nt, Artificial Sequence
  Description of Artificial Sequence: Synthetic oligonucleotide
cuagcuaugaaucaaaugu

SEQ ID NO: 390652 - RNA, 19 nt, Artificial Sequence
  Description of Artificial Sequence: Synthetic oligonucleotide
aacacuaaaugguuccugu

SEQ ID NO: 390653 - RNA, 19 nt, Artificial Sequence
  Description of Artificial Sequence: Synthetic oligonucleotide
ucuuguuaucuuaagucga

SEQ ID NO: 390654 - RNA, 19 nt, Artificial Sequence
  Description of Artificial Sequence: Synthetic oligonucleotide
acuugggaacaacaggggc

SEQ ID NO: 390655 - RNA, 19 nt, Artificial Sequence
  Description of Artificial Sequence: Synthetic oligonucleotide
ucauauaugucagggaccc

SEQ ID NO: 390656 - RNA, 19 nt, Artificial Sequence
  Description of Artificial Sequence: Synthetic oligonucleotide
cuuuauauggcuucugcuc

SEQ ID NO: 390657 - RNA, 19 nt, Artificial Sequence
  Description of Artificial Sequence: Synthetic oligonucleotide
ugucaauaaucauuucucc

SEQ ID NO: 390658 - RNA, 19 nt, Artificial Sequence
  Description of Artificial Sequence: Synthetic oligonucleotide
aaauauauacagguuggcu

SEQ ID NO: 390659 - RNA, 19 nt, Artificial Sequence
  Description of Artificial Sequence: Synthetic oligonucleotide
uucagaucaugaaaauuug

SEQ ID NO: 390660 - RNA, 19 nt, Artificial Sequence
  Description of Artificial Sequence: Synthetic oligonucleotide
uucauauaugucagggacc

SEQ ID NO: 390661 - RNA, 19 nt, Artificial Sequence
  Description of Artificial Sequence: Synthetic oligonucleotide
augguauauagccagacaa

SEQ ID NO: 390662 - RNA, 19 nt, Artificial Sequence
  Description of Artificial Sequence: Synthetic oligonucleotide
cauaaccuccaacauauag

SEQ ID NO: 390663 - RNA, 19 nt, Artificial Sequence
  Description of Artificial Sequence: Synthetic oligonucleotide
aaugguauauagccagaca

SEQ ID NO: 390664 - RNA, 19 nt, Artificial Sequence
  Description of Artificial Sequence: Synthetic oligonucleotide
caugauaagugacaaugag

SEQ ID NO: 390665 - RNA, 19 nt, Artificial Sequence
  Description of Artificial Sequence: Synthetic oligonucleotide
uaaaugcauucguagaucu

SEQ ID NO: 390666 - RNA, 19 nt, Artificial Sequence
  Description of Artificial Sequence: Synthetic oligonucleotide
uacacuguugcauauacuu

SEQ ID NO: 390667 - RNA, 19 nt, Artificial Sequence
  Description of Artificial Sequence: Synthetic oligonucleotide
ucugcuagguaacacauuu

SEQ ID NO: 390668 - RNA, 19 nt, Artificial Sequence
  Description of Artificial Sequence: Synthetic oligonucleotide
uuaagugcccaaauauaca

SEQ ID NO: 390669 - RNA, 19 nt, Artificial Sequence
  Description of Artificial Sequence: Synthetic oligonucleotide
uguugcauauacuuucaca

SEQ ID NO: 390670 - RNA, 19 nt, Artificial Sequence
  Description of Artificial Sequence: Synthetic oligonucleotide
auacagguuggcuacaugu

SEQ ID NO: 390671 - RNA, 19 nt, Artificial Sequence
  Description of Artificial Sequence: Synthetic oligonucleotide
uuugaauaaaugugcugca

SEQ ID NO: 390672 - RNA, 19 nt, Artificial Sequence
  Description of Artificial Sequence: Synthetic oligonucleotide
aauuaucucugucaaucau

SEQ ID NO: 390673 - RNA, 19 nt, Artificial Sequence
  Description of Artificial Sequence: Synthetic oligonucleotide
gauaugcuguugcacacag

SEQ ID NO: 390674 - RNA, 19 nt, Artificial Sequence
  Description of Artificial Sequence: Synthetic oligonucleotide
auauagaaaagcacugcac

SEQ ID NO: 390675 - RNA, 19 nt, Artificial Sequence
  Description of Artificial Sequence: Synthetic oligonucleotide
aaaagcaauauagggagaa

SEQ ID NO: 390676 - RNA, 19 nt, Artificial Sequence
  Description of Artificial Sequence: Synthetic oligonucleotide
uucgcguucaauacacugc

SEQ ID NO: 390677 - RNA, 19 nt, Artificial Sequence
  Description of Artificial Sequence: Synthetic oligonucleotide
uaagugcccaaauauacaa

SEQ ID NO: 390678 - RNA, 19 nt, Artificial Sequence
  Description of Artificial Sequence: Synthetic oligonucleotide
acgaguaccaucugcuuuc

SEQ ID NO: 390679 - RNA, 19 nt, Artificial Sequence
  Description of Artificial Sequence: Synthetic oligonucleotide
cagaucaugaaaauuuguc

SEQ ID NO: 390680 - RNA, 19 nt, Artificial Sequence
  Description of Artificial Sequence: Synthetic oligonucleotide
uuuaguucuuuugucaccu

SEQ ID NO: 390681 - RNA, 19 nt, Artificial Sequence
  Description of Artificial Sequence: Synthetic oligonucleotide
ugcauaauacuugaccuug

SEQ ID NO: 390682 - RNA, 19 nt, Artificial Sequence
  Description of Artificial Sequence: Synthetic oligonucleotide
uguuaguuaccauaagcau

SEQ ID NO: 390683 - RNA, 19 nt, Artificial Sequence
  Description of Artificial Sequence: Synthetic oligonucleotide
caggcgaauauuaaaauca

SEQ ID NO: 390684 - RNA, 19 nt, Artificial Sequence
  Description of Artificial Sequence: Synthetic oligonucleotide
aaagguaucuauucacaua

SEQ ID NO: 390685 - RNA, 19 nt, Artificial Sequence
  Description of Artificial Sequence: Synthetic oligonucleotide
auaaaugcauucguagauc

SEQ ID NO: 390686 - RNA, 19 nt, Artificial Sequence
  Description of Artificial Sequence: Synthetic oligonucleotide
augagaauuucuaauacca

SEQ ID NO: 390687 - RNA, 19 nt, Artificial Sequence
  Description of Artificial Sequence: Synthetic oligonucleotide
agauugcuagcuaugaauc

SEQ ID NO: 390688 - RNA, 19 nt, Artificial Sequence
  Description of Artificial Sequence: Synthetic oligonucleotide
uaccaagucauguuugucu

SEQ ID NO: 390689 - RNA, 19 nt, Artificial Sequence
  Description of Artificial Sequence: Synthetic oligonucleotide
uacucagucugcuagguaa

SEQ ID NO: 390690 - RNA, 19 nt, Artificial Sequence
  Description of Artificial Sequence: Synthetic oligonucleotide
uuucgcguucaauacacug

SEQ ID NO: 390691 - RNA, 19 nt, Artificial Sequence
  Description of Artificial Sequence: Synthetic oligonucleotide
ugauuugugcaaagggucu

SEQ ID NO: 390692 - RNA, 19 nt, Artificial Sequence
  Description of Artificial Sequence: Synthetic oligonucleotide
uaguagcuaauucugaauu

SEQ ID NO: 390693 - RNA, 19 nt, Artificial Sequence
  Description of Artificial Sequence: Synthetic oligonucleotide
uuuggauccaauguguaaa

SEQ ID NO: 390694 - RNA, 19 nt, Artificial Sequence
  Description of Artificial Sequence: Synthetic oligonucleotide
ccaauaauuaugauguuac

SEQ ID NO: 390695 - RNA, 19 nt, Artificial Sequence
  Description of Artificial Sequence: Synthetic oligonucleotide
uauagaaggccaacauucu

SEQ ID NO: 390696 - RNA, 19 nt, Artificial Sequence
  Description of Artificial Sequence: Synthetic oligonucleotide
cuaauauuuugcuugucca

SEQ ID NO: 390697 - RNA, 19 nt, Artificial Sequence
  Description of Artificial Sequence: Synthetic oligonucleotide
agauguuuaaauccuuuaa

SEQ ID NO: 390698 - RNA, 19 nt, Artificial Sequence
  Description of Artificial Sequence: Synthetic oligonucleotide
aaugcauucguagaucuuu

SEQ ID NO: 390699 - RNA, 19 nt, Artificial Sequence
  Description of Artificial Sequence: Synthetic oligonucleotide
uggacuuaugauuucgcgu

SEQ ID NO: 390700 - RNA, 19 nt, Artificial Sequence
  Description of Artificial Sequence: Synthetic oligonucleotide
ugugcugcacaucacguaa

SEQ ID NO: 390701 - RNA, 19 nt, Artificial Sequence
  Description of Artificial Sequence: Synthetic oligonucleotide
uaauuaugauguuaccaaa

SEQ ID NO: 390702 - RNA, 19 nt, Artificial Sequence
  Description of Artificial Sequence: Synthetic oligonucleotide
uaagugacaaugagaauuu

SEQ ID NO: 390703 - RNA, 19 nt, Artificial Sequence
  Description of Artificial Sequence: Synthetic oligonucleotide
cuuuacgaaauggaaauuc

SEQ ID NO: 390704 - RNA, 19 nt, Artificial Sequence
  Description of Artificial Sequence: Synthetic oligonucleotide
aauuaugauguuaccaaaa

SEQ ID NO: 390705 - RNA, 19 nt, Artificial Sequence
  Description of Artificial Sequence: Synthetic oligonucleotide
aaguccuauacaaugcucu

SEQ ID NO: 390706 - RNA, 19 nt, Artificial Sequence
  Description of Artificial Sequence: Synthetic oligonucleotide
auguuaguuaccauaagca

SEQ ID NO: 390707 - RNA, 19 nt, Artificial Sequence
  Description of Artificial Sequence: Synthetic oligonucleotide
acgaaauggaaauuccaga

SEQ ID NO: 390708 - RNA, 19 nt, Artificial Sequence
  Description of Artificial Sequence: Synthetic oligonucleotide
gagucacuuaaaauguuag

SEQ ID NO: 390709 - RNA, 19 nt, Artificial Sequence
  Description of Artificial Sequence: Synthetic oligonucleotide
guucaauacacugcaggcg

SEQ ID NO: 390710 - RNA, 19 nt, Artificial Sequence
  Description of Artificial Sequence: Synthetic oligonucleotide
ugauuucgcguucaauaca

SEQ ID NO: 390711 - RNA, 19 nt, Artificial Sequence
  Description of Artificial Sequence: Synthetic oligonucleotide
auuucagucuucagacucc

SEQ ID NO: 390712 - RNA, 19 nt, Artificial Sequence
  Description of Artificial Sequence: Synthetic oligonucleotide
uaauauuuugcuuguccau

SEQ ID NO: 390713 - RNA, 19 nt, Artificial Sequence
  Description of Artificial Sequence: Synthetic oligonucleotide
guggacuuaugauuucgcg

SEQ ID NO: 390714 - RNA, 19 nt, Artificial Sequence
  Description of Artificial Sequence: Synthetic oligonucleotide
acaauuuccccucaacaau

SEQ ID NO: 390715 - RNA, 19 nt, Artificial Sequence
  Description of Artificial Sequence: Synthetic oligonucleotide
uccuauacaaugcucuuuu

SEQ ID NO: 390716 - RNA, 19 nt, Artificial Sequence
  Description of Artificial Sequence: Synthetic oligonucleotide
gauuucgcguucaauacac

SEQ ID NO: 390717 - RNA, 19 nt, Artificial Sequence
  Description of Artificial Sequence: Synthetic oligonucleotide
gaaacaccgaauuaucucu

SEQ ID NO: 390718 - RNA, 19 nt, Artificial Sequence
  Description of Artificial Sequence: Synthetic oligonucleotide
uccaaaaggguauuugaua

SEQ ID NO: 390719 - RNA, 19 nt, Artificial Sequence
  Description of Artificial Sequence: Synthetic oligonucleotide
auccacggaguucagacug

SEQ ID NO: 390720 - RNA, 19 nt, Artificial Sequence
  Description of Artificial Sequence: Synthetic oligonucleotide
aggucuaacacuaaauggu

SEQ ID NO: 390721 - RNA, 19 nt, Artificial Sequence
  Description of Artificial Sequence: Synthetic oligonucleotide
cauauagaaaagcacugca

SEQ ID NO: 390722 - RNA, 19 nt, Artificial Sequence
  Description of Artificial Sequence: Synthetic oligonucleotide
acuacaugggaucuguuua

SEQ ID NO: 390723 - RNA, 19 nt, Artificial Sequence
  Description of Artificial Sequence: Synthetic oligonucleotide
ucgcguucaauacacugca

SEQ ID NO: 390724 - RNA, 19 nt, Artificial Sequence
  Description of Artificial Sequence: Synthetic oligonucleotide
ucuaauaccacugccuaua

SEQ ID NO: 390725 - RNA, 19 nt, Artificial Sequence
  Description of Artificial Sequence: Synthetic oligonucleotide
uaugucguggacuuaugau

SEQ ID NO: 390726 - RNA, 19 nt, Artificial Sequence
  Description of Artificial Sequence: Synthetic oligonucleotide
ucccuuaagacaagugcca

SEQ ID NO: 390727 - RNA, 19 nt, Artificial Sequence
  Description of Artificial Sequence: Synthetic oligonucleotide
agcuuguuauuauaucuga

SEQ ID NO: 390728 - RNA, 19 nt, Artificial Sequence
  Description of Artificial Sequence: Synthetic oligonucleotide
ugacaaugagaauuucuaa

SEQ ID NO: 390729 - RNA, 19 nt, Artificial Sequence
  Description of Artificial Sequence: Synthetic oligonucleotide
acaccgaccagguuuauau

SEQ ID NO: 390730 - RNA, 19 nt, Artificial Sequence
  Description of Artificial Sequence: Synthetic oligonucleotide
uuggcuacaugucuucccu

SEQ ID NO: 390731 - RNA, 19 nt, Artificial Sequence
  Description of Artificial Sequence: Synthetic oligonucleotide
ugucguggacuuaugauuu

SEQ ID NO: 390732 - RNA, 19 nt, Artificial Sequence
  Description of Artificial Sequence: Synthetic oligonucleotide
caguuuuggauccaaugug

SEQ ID NO: 390733 - RNA, 19 nt, Artificial Sequence
  Description of Artificial Sequence: Synthetic oligonucleotide
ugguauauagccagacaaa

SEQ ID NO: 390734 - RNA, 19 nt, Artificial Sequence
  Description of Artificial Sequence: Synthetic oligonucleotide
uugacaauuuccccucaac

SEQ ID NO: 390735 - RNA, 19 nt, Artificial Sequence
  Description of Artificial Sequence: Synthetic oligonucleotide
ucaaauguaaagguaucua

SEQ ID NO: 390736 - RNA, 19 nt, Artificial Sequence
  Description of Artificial Sequence: Synthetic oligonucleotide
auaaccuccaacauauaga

SEQ ID NO: 390737 - RNA, 19 nt, Artificial Sequence
  Description of Artificial Sequence: Synthetic oligonucleotide
guugcauauacuuucacau

SEQ ID NO: 390738 - RNA, 19 nt, Artificial Sequence
  Description of Artificial Sequence: Synthetic oligonucleotide
uggaaauuccagauuugaa

SEQ ID NO: 390739 - RNA, 19 nt, Artificial Sequence
  Description of Artificial Sequence: Synthetic oligonucleotide
auuaugucauauaucaaau

SEQ ID NO: 390740 - RNA, 19 nt, Artificial Sequence
  Description of Artificial Sequence: Synthetic oligonucleotide
ggaaauuccagauuugaaa

SEQ ID NO: 390741 - RNA, 19 nt, Artificial Sequence
  Description of Artificial Sequence: Synthetic oligonucleotide
uuaugucauauaucaaaua

SEQ ID NO: 390742 - RNA, 19 nt, Artificial Sequence
  Description of Artificial Sequence: Synthetic oligonucleotide
ugucaccuugauuugugca

SEQ ID NO: 390743 - RNA, 19 nt, Artificial Sequence
  Description of Artificial Sequence: Synthetic oligonucleotide
aauggaaauuccagauuug

SEQ ID NO: 390744 - RNA, 19 nt, Artificial Sequence
  Description of Artificial Sequence: Synthetic oligonucleotide
uagcuaugaaucaaaugua

SEQ ID NO: 390745 - RNA, 19 nt, Artificial Sequence
  Description of Artificial Sequence: Synthetic oligonucleotide
ugugaaagugaggcaacag

SEQ ID NO: 390746 - RNA, 19 nt, Artificial Sequence
  Description of Artificial Sequence: Synthetic oligonucleotide
ggauuuaucagguauaaau

SEQ ID NO: 390747 - RNA, 19 nt, Artificial Sequence
  Description of Artificial Sequence: Synthetic oligonucleotide
gauguuaccaaaauugaau

SEQ ID NO: 390748 - RNA, 19 nt, Artificial Sequence
  Description of Artificial Sequence: Synthetic oligonucleotide
gaucaugaaaauuugucuu

SEQ ID NO: 390749 - RNA, 19 nt, Artificial Sequence
  Description of Artificial Sequence: Synthetic oligonucleotide
acagguuggcuacaugucu

SEQ ID NO: 390750 - RNA, 19 nt, Artificial Sequence
  Description of Artificial Sequence: Synthetic oligonucleotide
ggaaccuugacaauuuccc

SEQ ID NO: 390751 - RNA, 19 nt, Artificial Sequence
  Description of Artificial Sequence: Synthetic oligonucleotide
aucaaauguaaagguaucu

SEQ ID NO: 390752 - RNA, 19 nt, Artificial Sequence
  Description of Artificial Sequence: Synthetic oligonucleotide
accgaauuaucucugucaa

SEQ ID NO: 390753 - RNA, 19 nt, Artificial Sequence
  Description of Artificial Sequence: Synthetic oligonucleotide
uguugucguacuguuuuag

SEQ ID NO: 390754 - RNA, 19 nt, Artificial Sequence
  Description of Artificial Sequence: Synthetic oligonucleotide
ucguggacuuaugauuucg

SEQ ID NO: 390755 - RNA, 19 nt, Artificial Sequence
  Description of Artificial Sequence: Synthetic oligonucleotide
ccuuaaaaugguauauagc

SEQ ID NO: 390756 - RNA, 19 nt, Artificial Sequence
  Description of Artificial Sequence: Synthetic oligonucleotide
cuugggaacaacaggggca

SEQ ID NO: 390757 - RNA, 19 nt, Artificial Sequence
  Description of Artificial Sequence: Synthetic oligonucleotide
aauccuuuaagugcccaaa

SEQ ID NO: 390758 - RNA, 19 nt, Artificial Sequence
  Description of Artificial Sequence: Synthetic oligonucleotide
augauaagugacaaugaga

SEQ ID NO: 390759 - RNA, 19 nt, Artificial Sequence
  Description of Artificial Sequence: Synthetic oligonucleotide
aaugugcugcacaucacgu

SEQ ID NO: 390760 - RNA, 19 nt, Artificial Sequence
  Description of Artificial Sequence: Synthetic oligonucleotide
uuuugucuauucucugccu

SEQ ID NO: 390761 - RNA, 19 nt, Artificial Sequence
  Description of Artificial Sequence: Synthetic oligonucleotide
guuguuugcuaguagcuaa

SEQ ID NO: 390762 - RNA, 19 nt, Artificial Sequence
  Description of Artificial Sequence: Synthetic oligonucleotide
gcauucguagaucuuuacg

SEQ ID NO: 390763 - RNA, 19 nt, Artificial Sequence
  Description of Artificial Sequence: Synthetic oligonucleotide
ugaauuuaauuaugucaua

SEQ ID NO: 390764 - RNA, 19 nt, Artificial Sequence
  Description of Artificial Sequence: Synthetic oligonucleotide
gaaggccaacauucugugg

SEQ ID NO: 390765 - RNA, 19 nt, Artificial Sequence
  Description of Artificial Sequence: Synthetic oligonucleotide
augucguggacuuaugauu

SEQ ID NO: 390766 - RNA, 19 nt, Artificial Sequence
  Description of Artificial Sequence: Synthetic oligonucleotide
uccuuuaagugcccaaaua

SEQ ID NO: 390767 - RNA, 19 nt, Artificial Sequence
  Description of Artificial Sequence: Synthetic oligonucleotide
aggcgaauauuaaaaucac

SEQ ID NO: 390768 - RNA, 19 nt, Artificial Sequence
  Description of Artificial Sequence: Synthetic oligonucleotide
uggauauuucagucuucag

SEQ ID NO: 390769 - RNA, 19 nt, Artificial Sequence
  Description of Artificial Sequence: Synthetic oligonucleotide
gcguucaauacacugcagg

SEQ ID NO: 390770 - RNA, 19 nt, Artificial Sequence
  Description of Artificial Sequence: Synthetic oligonucleotide
acacuaaaugguuccugug

SEQ ID NO: 390771 - RNA, 19 nt, Artificial Sequence
  Description of Artificial Sequence: Synthetic oligonucleotide
cuugauuugugcaaagggu

SEQ ID NO: 390772 - RNA, 19 nt, Artificial Sequence
  Description of Artificial Sequence: Synthetic oligonucleotide
acuagacugucuggagucc

SEQ ID NO: 390773 - RNA, 19 nt, Artificial Sequence
  Description of Artificial Sequence: Synthetic oligonucleotide
aaaaugguauauagccaga

SEQ ID NO: 390774 - RNA, 19 nt, Artificial Sequence
  Description of Artificial Sequence: Synthetic oligonucleotide
guaaagguaucuauucaca

SEQ ID NO: 390775 - RNA, 19 nt, Artificial Sequence
  Description of Artificial Sequence: Synthetic oligonucleotide
uuuggauauuucagucuuc

SEQ ID NO: 390776 - RNA, 19 nt, Artificial Sequence
  Description of Artificial Sequence: Synthetic oligonucleotide
cagaacaguuucauauaug

SEQ ID NO: 390777 - RNA, 19 nt, Artificial Sequence
  Description of Artificial Sequence: Synthetic oligonucleotide
cucacaagccaaucagaac

SEQ ID NO: 390778 - RNA, 19 nt, Artificial Sequence
  Description of Artificial Sequence: Synthetic oligonucleotide
ucuaugucguggacuuaug

SEQ ID NO: 390779 - RNA, 19 nt, Artificial Sequence
  Description of Artificial Sequence: Synthetic oligonucleotide
agaucuuuacgaaauggaa

SEQ ID NO: 390780 - RNA, 19 nt, Artificial Sequence
  Description of Artificial Sequence: Synthetic oligonucleotide
uugcuagcuaugaaucaaa

SEQ ID NO: 390781 - RNA, 19 nt, Artificial Sequence
  Description of Artificial Sequence: Synthetic oligonucleotide
cuacaugucuucccuuaag

SEQ ID NO: 390782 - RNA, 19 nt, Artificial Sequence
  Description of Artificial Sequence: Synthetic oligonucleotide
aggguauuugauaaaugca

SEQ ID NO: 390783 - RNA, 19 nt, Artificial Sequence
  Description of Artificial Sequence: Synthetic oligonucleotide
uucuaugucguggacuuau

SEQ ID NO: 390784 - RNA, 19 nt, Artificial Sequence
  Description of Artificial Sequence: Synthetic oligonucleotide
accaauaauuaugauguua

SEQ ID NO: 390785 - RNA, 19 nt, Artificial Sequence
  Description of Artificial Sequence: Synthetic oligonucleotide
gcgaauauuaaaaucacaa

SEQ ID NO: 390786 - RNA, 19 nt, Artificial Sequence
  Description of Artificial Sequence: Synthetic oligonucleotide
uuggauccaauguguaaaa

SEQ ID NO: 390787 - RNA, 19 nt, Artificial Sequence
  Description of Artificial Sequence: Synthetic oligonucleotide
auugcuagcuaugaaucaa

SEQ ID NO: 390788 - RNA, 19 nt, Artificial Sequence
  Description of Artificial Sequence: Synthetic oligonucleotide
uauaugucagggacccuua

SEQ ID NO: 390789 - RNA, 19 nt, Artificial Sequence
  Description of Artificial Sequence: Synthetic oligonucleotide
cucuuuucacaagagucac

SEQ ID NO: 390790 - RNA, 19 nt, Artificial Sequence
  Description of Artificial Sequence: Synthetic oligonucleotide
gcccuaguauuacauauag

SEQ ID NO: 390791 - RNA, 19 nt, Artificial Sequence
  Description of Artificial Sequence: Synthetic oligonucleotide
uugcauauacuuucacaua

SEQ ID NO: 390792 - RNA, 19 nt, Artificial Sequence
  Description of Artificial Sequence: Synthetic oligonucleotide
ccaucaaucaacaucaugu

SEQ ID NO: 390793 - RNA, 19 nt, Artificial Sequence
  Description of Artificial Sequence: Synthetic oligonucleotide
cucaacaaucacuguagca

SEQ ID NO: 390794 - RNA, 19 nt, Artificial Sequence
  Description of Artificial Sequence: Synthetic oligonucleotide
ugcuagcuaugaaucaaau

SEQ ID NO: 390795 - RNA, 19 nt, Artificial Sequence
  Description of Artificial Sequence: Synthetic oligonucleotide
uggcuguaucaguacaaga

SEQ ID NO: 390796 - RNA, 19 nt, Artificial Sequence
  Description of Artificial Sequence: Synthetic oligonucleotide
gaccagguuuauauuuucc

SEQ ID NO: 390797 - RNA, 19 nt, Artificial Sequence
  Description of Artificial Sequence: Synthetic oligonucleotide
gguaucuauucacauacaa

SEQ ID NO: 390798 - RNA, 19 nt, Artificial Sequence
  Description of Artificial Sequence: Synthetic oligonucleotide
auacuuucacauauaugcu

SEQ ID NO: 390799 - RNA, 19 nt, Artificial Sequence
  Description of Artificial Sequence: Synthetic oligonucleotide
accgaccagguuuauauuu

SEQ ID NO: 390800 - RNA, 19 nt, Artificial Sequence
  Description of Artificial Sequence: Synthetic oligonucleotide
uuguuugcuaguagcuaau

SEQ ID NO: 390801 - RNA, 19 nt, Artificial Sequence
  Description of Artificial Sequence: Synthetic oligonucleotide
cuuguuaucuuaagucgaa

SEQ ID NO: 390802 - RNA, 19 nt, Artificial Sequence
  Description of Artificial Sequence: Synthetic oligonucleotide
gcuaauucugaauucccuc

SEQ ID NO: 390803 - RNA, 19 nt, Artificial Sequence
  Description of Artificial Sequence: Synthetic oligonucleotide
gguucauauaaauacaguu

SEQ ID NO: 390804 - RNA, 19 nt, Artificial Sequence
  Description of Artificial Sequence: Synthetic oligonucleotide
caccgaauuaucucuguca

SEQ ID NO: 390805 - RNA, 19 nt, Artificial Sequence
  Description of Artificial Sequence: Synthetic oligonucleotide
auaucuuggaacagccugu

SEQ ID NO: 390806 - RNA, 19 nt, Artificial Sequence
  Description of Artificial Sequence: Synthetic oligonucleotide
uucuaauaccacugccuau

SEQ ID NO: 390807 - RNA, 19 nt, Artificial Sequence
  Description of Artificial Sequence: Synthetic oligonucleotide
gugacaaugagaauuucua

SEQ ID NO: 390808 - RNA, 19 nt, Artificial Sequence
  Description of Artificial Sequence: Synthetic oligonucleotide
gaccauccaugacauaguc

SEQ ID NO: 390809 - RNA, 19 nt, Artificial Sequence
  Description of Artificial Sequence: Synthetic oligonucleotide
ugcauucguagaucuuuac

SEQ ID NO: 390810 - RNA, 19 nt, Artificial Sequence
  Description of Artificial Sequence: Synthetic oligonucleotide
ccagcuuacuuuauauggc

SEQ ID NO: 390811 - RNA, 19 nt, Artificial Sequence
  Description of Artificial Sequence: Synthetic oligonucleotide
agucauguuugucucuuua

SEQ ID NO: 390812 - RNA, 19 nt, Artificial Sequence
  Description of Artificial Sequence: Synthetic oligonucleotide
aauacacugcaggcgaaua

SEQ ID NO: 390813 - RNA, 19 nt, Artificial Sequence
  Description of Artificial Sequence: Synthetic oligonucleotide
aaaacucaaugugcucaca

SEQ ID NO: 390814 - RNA, 19 nt, Artificial Sequence
  Description of Artificial Sequence: Synthetic oligonucleotide
auacacugcaggcgaauau

SEQ ID NO: 390815 - RNA, 19 nt, Artificial Sequence
  Description of Artificial Sequence: Synthetic oligonucleotide
cacauacaaacaaggccuc

SEQ ID NO: 390816 - RNA, 19 nt, Artificial Sequence
  Description of Artificial Sequence: Synthetic oligonucleotide
auuaucucugucaaucaua

SEQ ID NO: 390817 - RNA, 19 nt, Artificial Sequence
  Description of Artificial Sequence: Synthetic oligonucleotide
caaauguaaagguaucuau

SEQ ID NO: 390818 - RNA, 19 nt, Artificial Sequence
  Description of Artificial Sequence: Synthetic oligonucleotide
caaauuugcauucuauaau

SEQ ID NO: 390819 - RNA, 19 nt, Artificial Sequence
  Description of Artificial Sequence: Synthetic oligonucleotide
auuaaagaccccagcuugu

SEQ ID NO: 390820 - RNA, 19 nt, Artificial Sequence
  Description of Artificial Sequence: Synthetic oligonucleotide
agguaacacauuuggguuu

SEQ ID NO: 390821 - RNA, 19 nt, Artificial Sequence
  Description of Artificial Sequence: Synthetic oligonucleotide
cucuagaagucuaauauuu

SEQ ID NO: 390822 - RNA, 19 nt, Artificial Sequence
  Description of Artificial Sequence: Synthetic oligonucleotide
caggggauacuuucgcuuc

SEQ ID NO: 390823 - RNA, 19 nt, Artificial Sequence
  Description of Artificial Sequence: Synthetic oligonucleotide
uauauacagguuggcuaca

SEQ ID NO: 390824 - RNA, 19 nt, Artificial Sequence
  Description of Artificial Sequence: Synthetic oligonucleotide
ccaaaaggguauuugauaa

SEQ ID NO: 390825 - RNA, 19 nt, Artificial Sequence
  Description of Artificial Sequence: Synthetic oligonucleotide
cuccaacauauagaaggcc

SEQ ID NO: 390826 - RNA, 19 nt, Artificial Sequence
  Description of Artificial Sequence: Synthetic oligonucleotide
uuauauggcuucugcucua

SEQ ID NO: 390827 - RNA, 19 nt, Artificial Sequence
  Description of Artificial Sequence: Synthetic oligonucleotide
cguucaauacacugcaggc

SEQ ID NO: 390828 - RNA, 19 nt, Artificial Sequence
  Description of Artificial Sequence: Synthetic oligonucleotide
cguaacuugggaacaacag

SEQ ID NO: 390829 - RNA, 19 nt, Artificial Sequence
  Description of Artificial Sequence: Synthetic oligonucleotide
gugcauugaauuuaauuau

SEQ ID NO: 390830 - RNA, 19 nt, Artificial Sequence
  Description of Artificial Sequence: Synthetic oligonucleotide
acuuaugauuucgcguuca

SEQ ID NO: 390831 - RNA, 19 nt, Artificial Sequence
  Description of Artificial Sequence: Synthetic oligonucleotide
auccuuuaagugcccaaau

SEQ ID NO: 390832 - RNA, 19 nt, Artificial Sequence
  Description of Artificial Sequence: Synthetic oligonucleotide
guaaguccuauacaaugcu

SEQ ID NO: 390833 - RNA, 19 nt, Artificial Sequence
  Description of Artificial Sequence: Synthetic oligonucleotide
gacuuaugauuucgcguuc

SEQ ID NO: 390834 - RNA, 19 nt, Artificial Sequence
  Description of Artificial Sequence: Synthetic oligonucleotide
gguauauagccagacaaaa

SEQ ID NO: 390835 - RNA, 19 nt, Artificial Sequence
  Description of Artificial Sequence: Synthetic oligonucleotide
cuguguuaugucaaauaaa

SEQ ID NO: 390836 - RNA, 19 nt, Artificial Sequence
  Description of Artificial Sequence: Synthetic oligonucleotide
agguucauauaaauacagu

SEQ ID NO: 390837 - RNA, 19 nt, Artificial Sequence
  Description of Artificial Sequence: Synthetic oligonucleotide
aguuucagauugcuagcua

SEQ ID NO: 390838 - RNA, 19 nt, Artificial Sequence
  Description of Artificial Sequence: Synthetic oligonucleotide
gcaggcacuagacugucug

SEQ ID NO: 390839 - RNA, 19 nt, Artificial Sequence
  Description of Artificial Sequence: Synthetic oligonucleotide
guuuaugaacaccaauaau

SEQ ID NO: 390840 - RNA, 19 nt, Artificial Sequence
  Description of Artificial Sequence: Synthetic oligonucleotide
guuucagauugcuagcuau

SEQ ID NO: 390841 - RNA, 19 nt, Artificial Sequence
  Description of Artificial Sequence: Synthetic oligonucleotide
aguccuauacaaugcucuu

SEQ ID NO: 390842 - RNA, 19 nt, Artificial Sequence
  Description of Artificial Sequence: Synthetic oligonucleotide
uacacugcaggcgaauauu

SEQ ID NO: 390843 - RNA, 19 nt, Artificial Sequence
  Description of Artificial Sequence: Synthetic oligonucleotide
caucaaucaacaucaugua

SEQ ID NO: 390844 - RNA, 19 nt, Artificial Sequence
  Description of Artificial Sequence: Synthetic oligonucleotide
uggcaugagcucuguguca

SEQ ID NO: 390845 - RNA, 19 nt, Artificial Sequence
  Description of Artificial Sequence: Synthetic oligonucleotide
cuaugucguggacuuauga

SEQ ID NO: 390846 - RNA, 19 nt, Artificial Sequence
  Description of Artificial Sequence: Synthetic oligonucleotide
uuguuaucuuaagucgaaa

SEQ ID NO: 390847 - RNA, 19 nt, Artificial Sequence
  Description of Artificial Sequence: Synthetic oligonucleotide
ugacuucaaucugauuuaa

SEQ ID NO: 390848 - RNA, 19 nt, Artificial Sequence
  Description of Artificial Sequence: Synthetic oligonucleotide
aucuuaagucgaaaaucca

SEQ ID NO: 390849 - RNA, 19 nt, Artificial Sequence
  Description of Artificial Sequence: Synthetic oligonucleotide
gucguacuguuuuaguucu

SEQ ID NO: 390850 - RNA, 19 nt, Artificial Sequence
  Description of Artificial Sequence: Synthetic oligonucleotide
auaugcuguugcacacagc

SEQ ID NO: 390851 - RNA, 19 nt, Artificial Sequence
  Description of Artificial Sequence: Synthetic oligonucleotide
cagggacuagguuggccgg

SEQ ID NO: 390852 - RNA, 19 nt, Artificial Sequence
  Description of Artificial Sequence: Synthetic oligonucleotide
guuaguuaccauaagcauu

SEQ ID NO: 390853 - RNA, 19 nt, Artificial Sequence
  Description of Artificial Sequence: Synthetic oligonucleotide
ggcuguaucaguacaagaa

SEQ ID NO: 390854 - RNA, 19 nt, Artificial Sequence
  Description of Artificial Sequence: Synthetic oligonucleotide
ucuuuacgaaauggaaauu

SEQ ID NO: 390855 - RNA, 19 nt, Artificial Sequence
  Description of Artificial Sequence: Synthetic oligonucleotide
cagauugcuagcuaugaau

SEQ ID NO: 390856 - RNA, 19 nt, Artificial Sequence
  Description of Artificial Sequence: Synthetic oligonucleotide
gucuaacacuaaaugguuc

SEQ ID NO: 390857 - RNA, 19 nt, Artificial Sequence
  Description of Artificial Sequence: Synthetic oligonucleotide
cuguugcauauacuuucac

SEQ ID NO: 390858 - RNA, 19 nt, Artificial Sequence
  Description of Artificial Sequence: Synthetic oligonucleotide
caccuugauuugugcaaag

SEQ ID NO: 390859 - RNA, 19 nt, Artificial Sequence
  Description of Artificial Sequence: Synthetic oligonucleotide
agucugcuagguaacacau

SEQ ID NO: 390860 - RNA, 19 nt, Artificial Sequence
  Description of Artificial Sequence: Synthetic oligonucleotide
cccaaauauacaaaagcaa

SEQ ID NO: 390861 - RNA, 19 nt, Artificial Sequence
  Description of Artificial Sequence: Synthetic oligonucleotide
acuuucgcuucuguccuug

SEQ ID NO: 390862 - RNA, 19 nt, Artificial Sequence
  Description of Artificial Sequence: Synthetic oligonucleotide
ggcauaagcccaaagcaca

SEQ ID NO: 390863 - RNA, 19 nt, Artificial Sequence
  Description of Artificial Sequence: Synthetic oligonucleotide
caacaggggcauaagccca

SEQ ID NO: 390864 - RNA, 19 nt, Artificial Sequence
  Description of Artificial Sequence: Synthetic oligonucleotide
gcaguuuuggauccaaugu

SEQ ID NO: 390865 - RNA, 19 nt, Artificial Sequence
  Description of Artificial Sequence: Synthetic oligonucleotide
acguaacuugggaacaaca

SEQ ID NO: 390866 - RNA, 19 nt, Artificial Sequence
  Description of Artificial Sequence: Synthetic oligonucleotide
ggauacuuucgcuucuguc

SEQ ID NO: 390867 - RNA, 19 nt, Artificial Sequence
  Description of Artificial Sequence: Synthetic oligonucleotide
ggcacuagacugucuggag

SEQ ID NO: 390868 - RNA, 19 nt, Artificial Sequence
  Description of Artificial Sequence: Synthetic oligonucleotide
aggggauacuuucgcuucu

SEQ ID NO: 390869 - RNA, 19 nt, Artificial Sequence
  Description of Artificial Sequence: Synthetic oligonucleotide
uggauuuaucagguauaaa

SEQ ID NO: 390870 - RNA, 19 nt, Artificial Sequence
  Description of Artificial Sequence: Synthetic oligonucleotide
gacuacaugggaucuguuu

SEQ ID NO: 390871 - RNA, 19 nt, Artificial Sequence
  Description of Artificial Sequence: Synthetic oligonucleotide
uggcugugcauugaauuua

SEQ ID NO: 390872 - RNA, 19 nt, Artificial Sequence
  Description of Artificial Sequence: Synthetic oligonucleotide
uuguugucguacuguuuua

SEQ ID NO: 390873 - RNA, 19 nt, Artificial Sequence
  Description of Artificial Sequence: Synthetic oligonucleotide
auaugucagggacccuuaa

SEQ ID NO: 390874 - RNA, 19 nt, Artificial Sequence
  Description of Artificial Sequence: Synthetic oligonucleotide
acauacaaacaaggccucu

SEQ ID NO: 390875 - RNA, 19 nt, Artificial Sequence
  Description of Artificial Sequence: Synthetic oligonucleotide
aaaugcauucguagaucuu

SEQ ID NO: 390876 - RNA, 19 nt, Artificial Sequence
  Description of Artificial Sequence: Synthetic oligonucleotide
ugucuauucucugccucau

SEQ ID NO: 390877 - RNA, 19 nt, Artificial Sequence
  Description of Artificial Sequence: Synthetic oligonucleotide
auaaguccauccauuucau

SEQ ID NO: 390878 - RNA, 19 nt, Artificial Sequence
  Description of Artificial Sequence: Synthetic oligonucleotide
ucacguaacuugggaacaa

SEQ ID NO: 390879 - RNA, 19 nt, Artificial Sequence
  Description of Artificial Sequence: Synthetic oligonucleotide
uguuugcuaguagcuaauu

SEQ ID NO: 390880 - RNA, 19 nt, Artificial Sequence
  Description of Artificial Sequence: Synthetic oligonucleotide
cugugcauugaauuuaauu

SEQ ID NO: 390881 - RNA, 19 nt, Artificial Sequence
  Description of Artificial Sequence: Synthetic oligonucleotide
caacaaucacuguagcagu

SEQ ID NO: 390882 - RNA, 19 nt, Artificial Sequence
  Description of Artificial Sequence: Synthetic oligonucleotide
cugcaguucugagaaacca

SEQ ID NO: 390883 - RNA, 19 nt, Artificial Sequence
  Description of Artificial Sequence: Synthetic oligonucleotide
ggacuuaugauuucgcguu

SEQ ID NO: 390884 - RNA, 19 nt, Artificial Sequence
  Description of Artificial Sequence: Synthetic oligonucleotide
caacaucauguaacgagua

SEQ ID NO: 390885 - RNA, 19 nt, Artificial Sequence
  Description of Artificial Sequence: Synthetic oligonucleotide
ggaacaacaggggcauaag

SEQ ID NO: 390886 - RNA, 19 nt, Artificial Sequence
  Description of Artificial Sequence: Synthetic oligonucleotide
ggacucuacuuuuguacca

SEQ ID NO: 390887 - RNA, 19 nt, Artificial Sequence
  Description of Artificial Sequence: Synthetic oligonucleotide
agaccauccaugacauagu

SEQ ID NO: 390888 - RNA, 19 nt, Artificial Sequence
  Description of Artificial Sequence: Synthetic oligonucleotide
cacguaacuugggaacaac

SEQ ID NO: 390889 - RNA, 19 nt, Artificial Sequence
  Description of Artificial Sequence: Synthetic oligonucleotide
auacacuguugcauauacu

SEQ ID NO: 390890 - RNA, 19 nt, Artificial Sequence
  Description of Artificial Sequence: Synthetic oligonucleotide
auacucagucugcuaggua

SEQ ID NO: 390891 - RNA, 19 nt, Artificial Sequence
  Description of Artificial Sequence: Synthetic oligonucleotide
gcauaagcccaaagcacag

SEQ ID NO: 390892 - RNA, 19 nt, Artificial Sequence
  Description of Artificial Sequence: Synthetic oligonucleotide
aacaggggcauaagcccaa

SEQ ID NO: 390893 - RNA, 19 nt, Artificial Sequence
  Description of Artificial Sequence: Synthetic oligonucleotide
gccucuauuucauugacuu

SEQ ID NO: 390894 - RNA, 19 nt, Artificial Sequence
  Description of Artificial Sequence: Synthetic oligonucleotide
ggcugugaaagugaggcaa

SEQ ID NO: 390895 - RNA, 19 nt, Artificial Sequence
  Description of Artificial Sequence: Synthetic oligonucleotide
caagccaaucagaacaguu

SEQ ID NO: 390896 - RNA, 19 nt, Artificial Sequence
  Description of Artificial Sequence: Synthetic oligonucleotide
cugcucuagaagucuaaua

SEQ ID NO: 390897 - RNA, 19 nt, Artificial Sequence
  Description of Artificial Sequence: Synthetic oligonucleotide
ggacccuuaaaaugguaua

SEQ ID NO: 390898 - RNA, 19 nt, Artificial Sequence
  Description of Artificial Sequence: Synthetic oligonucleotide
ggcgaauauuaaaaucaca

SEQ ID NO: 390899 - RNA, 19 nt, Artificial Sequence
  Description of Artificial Sequence: Synthetic oligonucleotide
caucugcuuuccagcuuac

SEQ ID NO: 390900 - RNA, 19 nt, Artificial Sequence
  Description of Artificial Sequence: Synthetic oligonucleotide
gucguggacuuaugauuuc

SEQ ID NO: 390901 - RNA, 19 nt, Artificial Sequence
  Description of Artificial Sequence: Synthetic oligonucleotide
uccauccaaaaggguauuu

SEQ ID NO: 390902 - RNA, 19 nt, Artificial Sequence
  Description of Artificial Sequence: Synthetic oligonucleotide
ccuuuaagugcccaaauau

SEQ ID NO: 390903 - RNA, 19 nt, Artificial Sequence
  Description of Artificial Sequence: Synthetic oligonucleotide
aucacaccgaccagguuua

SEQ ID NO: 390904 - RNA, 19 nt, Artificial Sequence
  Description of Artificial Sequence: Synthetic oligonucleotide
agacugucuggaguccaca

SEQ ID NO: 390905 - RNA, 19 nt, Artificial Sequence
  Description of Artificial Sequence: Synthetic oligonucleotide
gcuuaggagcagaccaucc

SEQ ID NO: 390906 - RNA, 19 nt, Artificial Sequence
  Description of Artificial Sequence: Synthetic oligonucleotide
gucuaauauuuugcuuguc

SEQ ID NO: 390907 - RNA, 19 nt, Artificial Sequence
  Description of Artificial Sequence: Synthetic oligonucleotide
agguaucuauucacauaca

SEQ ID NO: 390908 - RNA, 19 nt, Artificial Sequence
  Description of Artificial Sequence: Synthetic oligonucleotide
cuacaugggaucuguuuau

SEQ ID NO: 390909 - RNA, 19 nt, Artificial Sequence
  Description of Artificial Sequence: Synthetic oligonucleotide
uggccggugcagucucuug

SEQ ID NO: 390910 - RNA, 19 nt, Artificial Sequence
  Description of Artificial Sequence: Synthetic oligonucleotide
cugugaaagugaggcaaca

SEQ ID NO: 390911 - RNA, 19 nt, Artificial Sequence
  Description of Artificial Sequence: Synthetic oligonucleotide
cguggacuuaugauuucgc

SEQ ID NO: 390912 - RNA, 19 nt, Artificial Sequence
  Description of Artificial Sequence: Synthetic oligonucleotide
acacugcaggcgaauauua

SEQ ID NO: 390913 - RNA, 19 nt, Artificial Sequence
  Description of Artificial Sequence: Synthetic oligonucleotide
cacugcaggcgaauauuaa

SEQ ID NO: 390914 - RNA, 19 nt, Artificial Sequence
  Description of Artificial Sequence: Synthetic oligonucleotide
gguuggcuacaugucuucc

SEQ ID NO: 390915 - RNA, 19 nt, Artificial Sequence
  Description of Artificial Sequence: Synthetic oligonucleotide
auuucgcguucaauacacu

SEQ ID NO: 390916 - RNA, 19 nt, Artificial Sequence
  Description of Artificial Sequence: Synthetic oligonucleotide
ccaacauauagaaggccaa

SEQ ID NO: 390917 - RNA, 19 nt, Artificial Sequence
  Description of Artificial Sequence: Synthetic oligonucleotide
ggaacagccuguccauuaa

SEQ ID NO: 390918 - RNA, 19 nt, Artificial Sequence
  Description of Artificial Sequence: Synthetic oligonucleotide
ggcuacaugucuucccuua

SEQ ID NO: 390919 - RNA, 19 nt, Artificial Sequence
  Description of Artificial Sequence: Synthetic oligonucleotide
cuaacacuaaaugguuccu

SEQ ID NO: 390920 - RNA, 19 nt, Artificial Sequence
  Description of Artificial Sequence: Synthetic oligonucleotide
uggcuacaugucuucccuu

SEQ ID NO: 390921 - RNA, 19 nt, Artificial Sequence
  Description of Artificial Sequence: Synthetic oligonucleotide
gcacaucacguaacuuggg

SEQ ID NO: 390922 - RNA, 19 nt, Artificial Sequence
  Description of Artificial Sequence: Synthetic oligonucleotide
agcccuaguauuacauaua

SEQ ID NO: 390923 - RNA, 19 nt, Artificial Sequence
  Description of Artificial Sequence: Synthetic oligonucleotide
uuucuaugucguggacuua

SEQ ID NO: 390924 - RNA, 19 nt, Artificial Sequence
  Description of Artificial Sequence: Synthetic oligonucleotide
cccuuaagacaagugccag

SEQ ID NO: 390925 - RNA, 19 nt, Artificial Sequence
  Description of Artificial Sequence: Synthetic oligonucleotide
gcugugaaagugaggcaac

SEQ ID NO: 390926 - RNA, 19 nt, Artificial Sequence
  Description of Artificial Sequence: Synthetic oligonucleotide
cucagucugcuagguaaca

SEQ ID NO: 390927 - RNA, 19 nt, Artificial Sequence
  Description of Artificial Sequence: Synthetic oligonucleotide
gcuggauuuaucagguaua

SEQ ID NO: 390928 - RNA, 19 nt, Artificial Sequence
  Description of Artificial Sequence: Synthetic oligonucleotide
agggacuagguuggccggu

SEQ ID NO: 390929 - RNA, 19 nt, Artificial Sequence
  Description of Artificial Sequence: Synthetic oligonucleotide
caguuucagauugcuagcu

SEQ ID NO: 390930 - RNA, 19 nt, Artificial Sequence
  Description of Artificial Sequence: Synthetic oligonucleotide
cuaauaccacugccuauau

SEQ ID NO: 390931 - RNA, 19 nt, Artificial Sequence
  Description of Artificial Sequence: Synthetic oligonucleotide
gcuacaugucuucccuuaa

SEQ ID NO: 390932 - RNA, 19 nt, Artificial Sequence
  Description of Artificial Sequence: Synthetic oligonucleotide
cacggaguucagacuggga

SEQ ID NO: 390933 - RNA, 19 nt, Artificial Sequence
  Description of Artificial Sequence: Synthetic oligonucleotide
gguuggccggugcagucuc

SEQ ID NO: 390934 - RNA, 19 nt, Artificial Sequence
  Description of Artificial Sequence: Synthetic oligonucleotide
ggggauacuuucgcuucug

SEQ ID NO: 390935 - RNA, 19 nt, Artificial Sequence
  Description of Artificial Sequence: Synthetic oligonucleotide
gcucuagaagucuaauauu

SEQ ID NO: 390936 - RNA, 19 nt, Artificial Sequence
  Description of Artificial Sequence: Synthetic oligonucleotide
gcuguugcacacagccaug

SEQ ID NO: 390937 - RNA, 19 nt, Artificial Sequence
  Description of Artificial Sequence: Synthetic oligonucleotide
uaguuaccauaagcauuuu

SEQ ID NO: 390938 - RNA, 19 nt, Artificial Sequence
  Description of Artificial Sequence: Synthetic oligonucleotide
cagguuggcuacaugucuu

SEQ ID NO: 390939 - RNA, 19 nt, Artificial Sequence
  Description of Artificial Sequence: Synthetic oligonucleotide
uuggccggugcagucucuu

SEQ ID NO: 390940 - RNA, 19 nt, Artificial Sequence
  Description of Artificial Sequence: Synthetic oligonucleotide
ccacggaguucagacuggg

SEQ ID NO: 390941 - RNA, 19 nt, Artificial Sequence
  Description of Artificial Sequence: Synthetic oligonucleotide
gggacccuuaaaaugguau

SEQ ID NO: 390942 - RNA, 19 nt, Artificial Sequence
  Description of Artificial Sequence: Synthetic oligonucleotide
ggcugugcauugaauuuaa

SEQ ID NO: 390943 - RNA, 19 nt, Artificial Sequence
  Description of Artificial Sequence: Synthetic oligonucleotide
ggcaacaggcagggacuag

SEQ ID NO: 390944 - RNA, 19 nt, Artificial Sequence
  Description of Artificial Sequence: Synthetic oligonucleotide
gguaacacauuuggguuuu

SEQ ID NO: 390945 - RNA, 19 nt, Artificial Sequence
  Description of Artificial Sequence: Synthetic oligonucleotide
cuagguuggccggugcagu

SEQ ID NO: 390946 - RNA, 19 nt, Artificial Sequence
  Description of Artificial Sequence: Synthetic oligonucleotide
agggacccuuaaaauggua

SEQ ID NO: 390947 - RNA, 19 nt, Artificial Sequence
  Description of Artificial Sequence: Synthetic oligonucleotide
ccuuaagacaagugccagu

SEQ ID NO: 390948 - RNA, 19 nt, Artificial Sequence
  Description of Artificial Sequence: Synthetic oligonucleotide
ccucccauucuuguuaucu

SEQ ID NO: 390949 - RNA, 19 nt, Artificial Sequence
  Description of Artificial Sequence: Synthetic oligonucleotide
caauacacugcaggcgaau

SEQ ID NO: 390950 - RNA, 19 nt, Artificial Sequence
  Description of Artificial Sequence: Synthetic oligonucleotide
gcauaauacuugaccuugu

SEQ ID NO: 390951 - RNA, 19 nt, Artificial Sequence
  Description of Artificial Sequence: Synthetic oligonucleotide
ugggaacaacaggggcaua

SEQ ID NO: 390952 - RNA, 19 nt, Artificial Sequence
  Description of Artificial Sequence: Synthetic oligonucleotide
ucacaccgaccagguuuau

SEQ ID NO: 390953 - RNA, 19 nt, Artificial Sequence
  Description of Artificial Sequence: Synthetic oligonucleotide
cacaccgaccagguuuaua

SEQ ID NO: 390954 - RNA, 19 nt, Artificial Sequence
  Description of Artificial Sequence: Synthetic oligonucleotide
cauauaugucagggacccu

SEQ ID NO: 390955 - RNA, 19 nt, Artificial Sequence
  Description of Artificial Sequence: Synthetic oligonucleotide
gucugcuagguaacacauu

SEQ ID NO: 390956 - RNA, 19 nt, Artificial Sequence
  Description of Artificial Sequence: Synthetic oligonucleotide
caccgaccagguuuauauu

SEQ ID NO: 390957 - RNA, 19 nt, Artificial Sequence
  Description of Artificial Sequence: Synthetic oligonucleotide
ccgaccagguuuauauuuu

SEQ ID NO: 390958 - RNA, 19 nt, Artificial Sequence
  Description of Artificial Sequence: Synthetic oligonucleotide
gcugcacaucacguaacuu

SEQ ID NO: 390959 - RNA, 19 nt, Artificial Sequence
  Description of Artificial Sequence: Synthetic oligonucleotide
ggacuacaugggaucuguu

SEQ ID NO: 390960 - RNA, 19 nt, Artificial Sequence
  Description of Artificial Sequence: Synthetic oligonucleotide
aaauguaagaggcuggugg

SEQ ID NO: 390961 - RNA, 19 nt, Artificial Sequence
  Description of Artificial Sequence: Synthetic oligonucleotide
uuaucgaagggccagaccg

SEQ ID NO: 390962 - RNA, 19 nt, Artificial Sequence
  Description of Artificial Sequence: Synthetic oligonucleotide
aacugauuccaccaagugc

SEQ ID NO: 390963 - RNA, 19 nt, Artificial Sequence
  Description of Artificial Sequence: Synthetic oligonucleotide
aguaaaagcaacugauccc

SEQ ID NO: 390964 - RNA, 19 nt, Artificial Sequence
  Description of Artificial Sequence: Synthetic oligonucleotide
ucuuaugaggacaggaagg

SEQ ID NO: 390965 - RNA, 19 nt, Artificial Sequence
  Description of Artificial Sequence: Synthetic oligonucleotide
gacacuuagaaucuuuggg

SEQ ID NO: 390966 - RNA, 19 nt, Artificial Sequence
  Description of Artificial Sequence: Synthetic oligonucleotide
aaaggucauggccucaggc

SEQ ID NO: 390967 - RNA, 19 nt, Artificial Sequence
  Description of Artificial Sequence: Synthetic oligonucleotide
uaagugacaacuuugccca

SEQ ID NO: 390968 - RNA, 19 nt, Artificial Sequence
  Description of Artificial Sequence: Synthetic oligonucleotide
ugguccuagaguaagaccc

SEQ ID NO: 390969 - RNA, 19 nt, Artificial Sequence
  Description of Artificial Sequence: Synthetic oligonucleotide
acacuuagaaucuuugggg

SEQ ID NO: 390970 - RNA, 19 nt, Artificial Sequence
  Description of Artificial Sequence: Synthetic oligonucleotide
aaucgcacuuccuacgugg

SEQ ID NO: 390971 - RNA, 19 nt, Artificial Sequence
  Description of Artificial Sequence: Synthetic oligonucleotide
aagggaaugugcucugugc

SEQ ID NO: 390972 - RNA, 19 nt, Artificial Sequence
  Description of Artificial Sequence: Synthetic oligonucleotide
uguaacuaccccauuagcu

SEQ ID NO: 390973 - RNA, 19 nt, Artificial Sequence
  Description of Artificial Sequence: Synthetic oligonucleotide
aucagguuccucuuggggc

SEQ ID NO: 390974 - RNA, 19 nt, Artificial Sequence
  Description of Artificial Sequence: Synthetic oligonucleotide
guaagugacaacuuugccc

SEQ ID NO: 390975 - RNA, 19 nt, Artificial Sequence
  Description of Artificial Sequence: Synthetic oligonucleotide
aaguugagcccacaggcuc

SEQ ID NO: 390976 - RNA, 19 nt, Artificial Sequence
  Description of Artificial Sequence: Synthetic oligonucleotide
agucacgcugaacugauuc

SEQ ID NO: 390977 - RNA, 19 nt, Artificial Sequence
  Description of Artificial Sequence: Synthetic oligonucleotide
uacugaucaaguccagggg

SEQ ID NO: 390978 - RNA, 19 nt, Artificial Sequence
  Description of Artificial Sequence: Synthetic oligonucleotide
accgaaaccggugaguacc

SEQ ID NO: 390979 - RNA, 19 nt, Artificial Sequence
  Description of Artificial Sequence: Synthetic oligonucleotide
acagagacgggauagggca

SEQ ID NO: 390980 - RNA, 19 nt, Artificial Sequence
  Description of Artificial Sequence: Synthetic oligonucleotide
aagggugcccaguaggaag

SEQ ID NO: 390981 - RNA, 19 nt, Artificial Sequence
  Description of Artificial Sequence: Synthetic oligonucleotide
cugagacaaauccagagac

SEQ ID NO: 390982 - RNA, 19 nt, Artificial Sequence
  Description of Artificial Sequence: Synthetic oligonucleotide
aguguuguaggacugggga

SEQ ID NO: 390983 - RNA, 19 nt, Artificial Sequence
  Description of Artificial Sequence: Synthetic oligonucleotide
agcucgguuagccugcagc

SEQ ID NO: 390984 - RNA, 19 nt, Artificial Sequence
  Description of Artificial Sequence: Synthetic oligonucleotide
cuuguaacuaccccauuag

SEQ ID NO: 390985 - RNA, 19 nt, Artificial Sequence
  Description of Artificial Sequence: Synthetic oligonucleotide
cuuacggucgccgacaccc

SEQ ID NO: 390986 - RNA, 19 nt, Artificial Sequence
  Description of Artificial Sequence: Synthetic oligonucleotide
cuuaugaggacaggaaggg

SEQ ID NO: 390987 - RNA, 19 nt, Artificial Sequence
  Description of Artificial Sequence: Synthetic oligonucleotide
gucguagccaccgaaaccg

SEQ ID NO: 390988 - RNA, 19 nt, Artificial Sequence
  Description of Artificial Sequence: Synthetic oligonucleotide
caccuuacugaucaguucc

SEQ ID NO: 390989 - RNA, 19 nt, Artificial Sequence
  Description of Artificial Sequence: Synthetic oligonucleotide
cauggguuuaaggaggugg

SEQ ID NO: 390990 - RNA, 19 nt, Artificial Sequence
  Description of Artificial Sequence: Synthetic oligonucleotide
caagguuagguacugauca

SEQ ID NO: 390991 - RNA, 19 nt, Artificial Sequence
  Description of Artificial Sequence: Synthetic oligonucleotide
aaagggaaugugcucugug

SEQ ID NO: 390992 - RNA, 19 nt, Artificial Sequence
  Description of Artificial Sequence: Synthetic oligonucleotide
aaagcaacugauccccaga

SEQ ID NO: 390993 - RNA, 19 nt, Artificial Sequence
  Description of Artificial Sequence: Synthetic oligonucleotide
ccucauuuagacaacagag

SEQ ID NO: 390994 - RNA, 19 nt, Artificial Sequence
  Description of Artificial Sequence: Synthetic oligonucleotide
guaacuaccccauuagcuc

SEQ ID NO: 390995 - RNA, 19 nt, Artificial Sequence
  Description of Artificial Sequence: Synthetic oligonucleotide
uaacuaccccauuagcucc

SEQ ID NO: 390996 - RNA, 19 nt, Artificial Sequence
  Description of Artificial Sequence: Synthetic oligonucleotide
gauuccaccaagugcgggc

SEQ ID NO: 390997 - RNA, 19 nt, Artificial Sequence
  Description of Artificial Sequence: Synthetic oligonucleotide
acgguuaccuccuccugcc

SEQ ID NO: 390998 - RNA, 19 nt, Artificial Sequence
  Description of Artificial Sequence: Synthetic oligonucleotide
ucucccuaauccaaacuca

SEQ ID NO: 390999 - RNA, 19 nt, Artificial Sequence
  Description of Artificial Sequence: Synthetic oligonucleotide
cacugagacaaauccagag

SEQ ID NO: 391000 - RNA, 19 nt, Artificial Sequence
  Description of Artificial Sequence: Synthetic oligonucleotide
gacucacacagauuagccc

SEQ ID NO: 391001 - RNA, 19 nt, Artificial Sequence
  Description of Artificial Sequence: Synthetic oligonucleotide
gaagucaaagagaaccaug

SEQ ID NO: 391002 - RNA, 19 nt, Artificial Sequence
  Description of Artificial Sequence: Synthetic oligonucleotide
guaccaagcagcgaagcgg

SEQ ID NO: 391003 - RNA, 19 nt, Artificial Sequence
  Description of Artificial Sequence: Synthetic oligonucleotide
uaccaagcagcgaagcggc

SEQ ID NO: 391004 - RNA, 19 nt, Artificial Sequence
  Description of Artificial Sequence: Synthetic oligonucleotide
acuuugacuccaguagccc

SEQ ID NO: 391005 - RNA, 19 nt, Artificial Sequence
  Description of Artificial Sequence: Synthetic oligonucleotide
uagucgauagcauguguga

SEQ ID NO: 391006 - RNA, 19 nt, Artificial Sequence
  Description of Artificial Sequence: Synthetic oligonucleotide
auaguugaccagcaaggca

SEQ ID NO: 391007 - RNA, 19 nt, Artificial Sequence
  Description of Artificial Sequence: Synthetic oligonucleotide
uuuaaggaggugguagccc

SEQ ID NO: 391008 - RNA, 19 nt, Artificial Sequence
  Description of Artificial Sequence: Synthetic oligonucleotide
ugucguagccaccgaaacc

SEQ ID NO: 391009 - RNA, 19 nt, Artificial Sequence
  Description of Artificial Sequence: Synthetic oligonucleotide
accccauuagcuccccugc

SEQ ID NO: 391010 - RNA, 19 nt, Artificial Sequence
  Description of Artificial Sequence: Synthetic oligonucleotide
aacugauccccagaggcug

SEQ ID NO: 391011 - RNA, 19 nt, Artificial Sequence
  Description of Artificial Sequence: Synthetic oligonucleotide
ucgguuagccugcagcagc

SEQ ID NO: 391012 - RNA, 19 nt, Artificial Sequence
  Description of Artificial Sequence: Synthetic oligonucleotide
ugugugaccccauucuccu

SEQ ID NO: 391013 - RNA, 19 nt, Artificial Sequence
  Description of Artificial Sequence: Synthetic oligonucleotide
acgcugaacugauuccacc

SEQ ID NO: 391014 - RNA, 19 nt, Artificial Sequence
  Description of Artificial Sequence: Synthetic oligonucleotide
uccaugacgauguccacuc

SEQ ID NO: 391015 - RNA, 19 nt, Artificial Sequence
  Description of Artificial Sequence: Synthetic oligonucleotide
uagcccuucgcccuaggcc

SEQ ID NO: 391016 - RNA, 19 nt, Artificial Sequence
  Description of Artificial Sequence: Synthetic oligonucleotide
agauuagccccacauccug

SEQ ID NO: 391017 - RNA, 19 nt, Artificial Sequence
  Description of Artificial Sequence: Synthetic oligonucleotide
ugauuguacagagccagga

SEQ ID NO: 391018 - RNA, 19 nt, Artificial Sequence
  Description of Artificial Sequence: Synthetic oligonucleotide
ucagucgugugguagucga

SEQ ID NO: 391019 - RNA, 19 nt, Artificial Sequence
  Description of Artificial Sequence: Synthetic oligonucleotide
aaaucgcacuuccuacgug

SEQ ID NO: 391020 - RNA, 19 nt, Artificial Sequence
  Description of Artificial Sequence: Synthetic oligonucleotide
auuagccccacauccugag

SEQ ID NO: 391021 - RNA, 19 nt, Artificial Sequence
  Description of Artificial Sequence: Synthetic oligonucleotide
uuugguccuagaguaagac

SEQ ID NO: 391022 - RNA, 19 nt, Artificial Sequence
  Description of Artificial Sequence: Synthetic oligonucleotide
uugguccuagaguaagacc

SEQ ID NO: 391023 - RNA, 19 nt, Artificial Sequence
  Description of Artificial Sequence: Synthetic oligonucleotide
caguguaaacaaaguuugg

SEQ ID NO: 391024 - RNA, 19 nt, Artificial Sequence
  Description of Artificial Sequence: Synthetic oligonucleotide
uccgaacacugucacauuc

SEQ ID NO: 391025 - RNA, 19 nt, Artificial Sequence
  Description of Artificial Sequence: Synthetic oligonucleotide
aacuaccccauuagcuccc

SEQ ID NO: 391026 - RNA, 19 nt, Artificial Sequence
  Description of Artificial Sequence: Synthetic oligonucleotide
agaacagguuuccaaugcu

SEQ ID NO: 391027 - RNA, 19 nt, Artificial Sequence
  Description of Artificial Sequence: Synthetic oligonucleotide
cucucccuaauccaaacuc

SEQ ID NO: 391028 - RNA, 19 nt, Artificial Sequence
  Description of Artificial Sequence: Synthetic oligonucleotide
agucgauagcaugugugac

SEQ ID NO: 391029 - RNA, 19 nt, Artificial Sequence
  Description of Artificial Sequence: Synthetic oligonucleotide
auagucagucgugugguag

SEQ ID NO: 391030 - RNA, 19 nt, Artificial Sequence
  Description of Artificial Sequence: Synthetic oligonucleotide
caaccucuuaugaggacag

SEQ ID NO: 391031 - RNA, 19 nt, Artificial Sequence
  Description of Artificial Sequence: Synthetic oligonucleotide
cuagaguaagacccagcag

SEQ ID NO: 391032 - RNA, 19 nt, Artificial Sequence
  Description of Artificial Sequence: Synthetic oligonucleotide
agcaucaugacaggggaug

SEQ ID NO: 391033 - RNA, 19 nt, Artificial Sequence
  Description of Artificial Sequence: Synthetic oligonucleotide
acacagauuagccccacau

SEQ ID NO: 391034 - RNA, 19 nt, Artificial Sequence
  Description of Artificial Sequence: Synthetic oligonucleotide
cacggugcggcacagcugc

SEQ ID NO: 391035 - RNA, 19 nt, Artificial Sequence
  Description of Artificial Sequence: Synthetic oligonucleotide
guagucgauagcaugugug

SEQ ID NO: 391036 - RNA, 19 nt, Artificial Sequence
  Description of Artificial Sequence: Synthetic oligonucleotide
cucggguccaggaaccagg

SEQ ID NO: 391037 - RNA, 19 nt, Artificial Sequence
  Description of Artificial Sequence: Synthetic oligonucleotide
uugcggggacacuacagag

SEQ ID NO: 391038 - RNA, 19 nt, Artificial Sequence
  Description of Artificial Sequence: Synthetic oligonucleotide
guuagguacugaucaaguc

SEQ ID NO: 391039 - RNA, 19 nt, Artificial Sequence
  Description of Artificial Sequence: Synthetic oligonucleotide
agcaacugauccccagagg

SEQ ID NO: 391040 - RNA, 19 nt, Artificial Sequence
  Description of Artificial Sequence: Synthetic oligonucleotide
uggucuagcuuccugccuc

SEQ ID NO: 391041 - RNA, 19 nt, Artificial Sequence
  Description of Artificial Sequence: Synthetic oligonucleotide
gccaugugcaccaagacgc

SEQ ID NO: 391042 - RNA, 19 nt, Artificial Sequence
  Description of Artificial Sequence: Synthetic oligonucleotide
auguaagaggcuggugggc

SEQ ID NO: 391043 - RNA, 19 nt, Artificial Sequence
  Description of Artificial Sequence: Synthetic oligonucleotide
gucaaugcgugguuugaug

SEQ ID NO: 391044 - RNA, 19 nt, Artificial Sequence
  Description of Artificial Sequence: Synthetic oligonucleotide
cagacauccaaguggucac

SEQ ID NO: 391045 - RNA, 19 nt, Artificial Sequence
  Description of Artificial Sequence: Synthetic oligonucleotide
ucguacagccccuggcggg

SEQ ID NO: 391046 - RNA, 19 nt, Artificial Sequence
  Description of Artificial Sequence: Synthetic oligonucleotide
caccccuggaacaucacac

SEQ ID NO: 391047 - RNA, 19 nt, Artificial Sequence
  Description of Artificial Sequence: Synthetic oligonucleotide
gagacaaauccagagaccu

SEQ ID NO: 391048 - RNA, 19 nt, Artificial Sequence
  Description of Artificial Sequence: Synthetic oligonucleotide
uggccaucccguaagugac

SEQ ID NO: 391049 - RNA, 19 nt, Artificial Sequence
  Description of Artificial Sequence: Synthetic oligonucleotide
cacuuagaaucuuugggga

SEQ ID NO: 391050 - RNA, 19 nt, Artificial Sequence
  Description of Artificial Sequence: Synthetic oligonucleotide
gguugccgaagucaaagag

SEQ ID NO: 391051 - RNA, 19 nt, Artificial Sequence
  Description of Artificial Sequence: Synthetic oligonucleotide
acguggaggccucauuuag

SEQ ID NO: 391052 - RNA, 19 nt, Artificial Sequence
  Description of Artificial Sequence: Synthetic oligonucleotide
ugaucaaguccaggggcgg

SEQ ID NO: 391053 - RNA, 19 nt, Artificial Sequence
  Description of Artificial Sequence: Synthetic oligonucleotide
cuucucggguccaggaacc

SEQ ID NO: 391054 - RNA, 19 nt, Artificial Sequence
  Description of Artificial Sequence: Synthetic oligonucleotide
agcccuucgcccuaggccu

SEQ ID NO: 391055 - RNA, 19 nt, Artificial Sequence
  Description of Artificial Sequence: Synthetic oligonucleotide
cuuaucgaagggccagacc

SEQ ID NO: 391056 - RNA, 19 nt, Artificial Sequence
  Description of Artificial Sequence: Synthetic oligonucleotide
uccuagaguaagacccagc

SEQ ID NO: 391057 - RNA, 19 nt, Artificial Sequence
  Description of Artificial Sequence: Synthetic oligonucleotide
ggaggccucauuuagacaa

SEQ ID NO: 391058 - RNA, 19 nt, Artificial Sequence
  Description of Artificial Sequence: Synthetic oligonucleotide
gucgugugguagucgauag

SEQ ID NO: 391059 - RNA, 19 nt, Artificial Sequence
  Description of Artificial Sequence: Synthetic oligonucleotide
agguuagguacugaucaag

SEQ ID NO: 391060 - RNA, 19 nt, Artificial Sequence
  Description of Artificial Sequence: Synthetic oligonucleotide
caagcagcgaagcggcggg

SEQ ID NO: 391061 - RNA, 19 nt, Artificial Sequence
  Description of Artificial Sequence: Synthetic oligonucleotide
uaccccauuagcuccccug

SEQ ID NO: 391062 - RNA, 19 nt, Artificial Sequence
  Description of Artificial Sequence: Synthetic oligonucleotide
uaucgaagggccagaccga

SEQ ID NO: 391063 - RNA, 19 nt, Artificial Sequence
  Description of Artificial Sequence: Synthetic oligonucleotide
caggggaugaaauguaaga

SEQ ID NO: 391064 - RNA, 19 nt, Artificial Sequence
  Description of Artificial Sequence: Synthetic oligonucleotide
agcgucagcugaccgggac

SEQ ID NO: 391065 - RNA, 19 nt, Artificial Sequence
  Description of Artificial Sequence: Synthetic oligonucleotide
ucccuaauccaaacucaga

SEQ ID NO: 391066 - RNA, 19 nt, Artificial Sequence
  Description of Artificial Sequence: Synthetic oligonucleotide
gucgccgacacccucgccc

SEQ ID NO: 391067 - RNA, 19 nt, Artificial Sequence
  Description of Artificial Sequence: Synthetic oligonucleotide
ugacaacuuugcccauggg

SEQ ID NO: 391068 - RNA, 19 nt, Artificial Sequence
  Description of Artificial Sequence: Synthetic oligonucleotide
ugauuccaccaagugcggg

SEQ ID NO: 391069 - RNA, 19 nt, Artificial Sequence
  Description of Artificial Sequence: Synthetic oligonucleotide
cacgguuaccuccuccugc

SEQ ID NO: 391070 - RNA, 19 nt, Artificial Sequence
  Description of Artificial Sequence: Synthetic oligonucleotide
cagaccgagucaaugcgug

SEQ ID NO: 391071 - RNA, 19 nt, Artificial Sequence
  Description of Artificial Sequence: Synthetic oligonucleotide
accaagugcgggccauggc

SEQ ID NO: 391072 - RNA, 19 nt, Artificial Sequence
  Description of Artificial Sequence: Synthetic oligonucleotide
aaaguuuggggcggagccu

SEQ ID NO: 391073 - RNA, 19 nt, Artificial Sequence
  Description of Artificial Sequence: Synthetic oligonucleotide
ugugccugggauucucacu

SEQ ID NO: 391074 - RNA, 19 nt, Artificial Sequence
  Description of Artificial Sequence: Synthetic oligonucleotide
caguguuguaggacugggg

SEQ ID NO: 391075 - RNA, 19 nt, Artificial Sequence
  Description of Artificial Sequence: Synthetic oligonucleotide
aaucuuuggggagguggug

SEQ ID NO: 391076 - RNA, 19 nt, Artificial Sequence
  Description of Artificial Sequence: Synthetic oligonucleotide
uagucagucgugugguagu

SEQ ID NO: 391077 - RNA, 19 nt, Artificial Sequence
  Description of Artificial Sequence: Synthetic oligonucleotide
agaccgagucaaugcgugg

SEQ ID NO: 391078 - RNA, 19 nt, Artificial Sequence
  Description of Artificial Sequence: Synthetic oligonucleotide
guaacagcucucccuaauc

SEQ ID NO: 391079 - RNA, 19 nt, Artificial Sequence
  Description of Artificial Sequence: Synthetic oligonucleotide
ccuaauccaaacucagaag

SEQ ID NO: 391080 - RNA, 19 nt, Artificial Sequence
  Description of Artificial Sequence: Synthetic oligonucleotide
acuuccuacguggaggccu

SEQ ID NO: 391081 - RNA, 19 nt, Artificial Sequence
  Description of Artificial Sequence: Synthetic oligonucleotide
gcuggacucacacagauua

SEQ ID NO: 391082 - RNA, 19 nt, Artificial Sequence
  Description of Artificial Sequence: Synthetic oligonucleotide
caaugcgugguuugaugug

SEQ ID NO: 391083 - RNA, 19 nt, Artificial Sequence
  Description of Artificial Sequence: Synthetic oligonucleotide
acuggcuaaccuuggcaca

SEQ ID NO: 391084 - RNA, 19 nt, Artificial Sequence
  Description of Artificial Sequence: Synthetic oligonucleotide
accucuuaugaggacagga

SEQ ID NO: 391085 - RNA, 19 nt, Artificial Sequence
  Description of Artificial Sequence: Synthetic oligonucleotide
ucguagccaccgaaaccgg

SEQ ID NO: 391086 - RNA, 19 nt, Artificial Sequence
  Description of Artificial Sequence: Synthetic oligonucleotide
acugacgauggcuggagua

SEQ ID NO: 391087 - RNA, 19 nt, Artificial Sequence
  Description of Artificial Sequence: Synthetic oligonucleotide
guugccgaagucaaagaga

SEQ ID NO: 391088 - RNA, 19 nt, Artificial Sequence
  Description of Artificial Sequence: Synthetic oligonucleotide
ucacugacgauggcuggag

SEQ ID NO: 391089 - RNA, 19 nt, Artificial Sequence
  Description of Artificial Sequence: Synthetic oligonucleotide
ugccaugccuaccccaccu

SEQ ID NO: 391090 - RNA, 19 nt, Artificial Sequence
  Description of Artificial Sequence: Synthetic oligonucleotide
cucauuuagacaacagagu

SEQ ID NO: 391091 - RNA, 19 nt, Artificial Sequence
  Description of Artificial Sequence: Synthetic oligonucleotide
caccuugucguagccaccg

SEQ ID NO: 391092 - RNA, 19 nt, Artificial Sequence
  Description of Artificial Sequence: Synthetic oligonucleotide
uguuccgaacacugucaca

SEQ ID NO: 391093 - RNA, 19 nt, Artificial Sequence
  Description of Artificial Sequence: Synthetic oligonucleotide
ucgugugguagucgauagc

SEQ ID NO: 391094 - RNA, 19 nt, Artificial Sequence
  Description of Artificial Sequence: Synthetic oligonucleotide
augccuaccccaccugcag

SEQ ID NO: 391095 - RNA, 19 nt, Artificial Sequence
  Description of Artificial Sequence: Synthetic oligonucleotide
acgggauagggcacagacc

SEQ ID NO: 391096 - RNA, 19 nt, Artificial Sequence
  Description of Artificial Sequence: Synthetic oligonucleotide
guugcggggacacuacaga

SEQ ID NO: 391097 - RNA, 19 nt, Artificial Sequence
  Description of Artificial Sequence: Synthetic oligonucleotide
cacuacagagacacagguc

SEQ ID NO: 391098 - RNA, 19 nt, Artificial Sequence
  Description of Artificial Sequence: Synthetic oligonucleotide
gaaaucgcacuuccuacgu

SEQ ID NO: 391099 - RNA, 19 nt, Artificial Sequence
  Description of Artificial Sequence: Synthetic oligonucleotide
agucggagacaggaagaac

SEQ ID NO: 391100 - RNA, 19 nt, Artificial Sequence
  Description of Artificial Sequence: Synthetic oligonucleotide
gaguaccaagcagcgaagc

SEQ ID NO: 391101 - RNA, 19 nt, Artificial Sequence
  Description of Artificial Sequence: Synthetic oligonucleotide
gugggcaacacaacagggc

SEQ ID NO: 391102 - RNA, 19 nt, Artificial Sequence
  Description of Artificial Sequence: Synthetic oligonucleotide
ucgcacuuccuacguggag

SEQ ID NO: 391103 - RNA, 19 nt, Artificial Sequence
  Description of Artificial Sequence: Synthetic oligonucleotide
agggcccuuagcccuucgc

SEQ ID NO: 391104 - RNA, 19 nt, Artificial Sequence
  Description of Artificial Sequence: Synthetic oligonucleotide
aaccucuuaugaggacagg

SEQ ID NO: 391105 - RNA, 19 nt, Artificial Sequence
  Description of Artificial Sequence: Synthetic oligonucleotide
gaaguggacaggacaggac

SEQ ID NO: 391106 - RNA, 19 nt, Artificial Sequence
  Description of Artificial Sequence: Synthetic oligonucleotide
gccagaccgagucaaugcg

SEQ ID NO: 391107 - RNA, 19 nt, Artificial Sequence
  Description of Artificial Sequence: Synthetic oligonucleotide
ccguaagugacaacuuugc

SEQ ID NO: 391108 - RNA, 19 nt, Artificial Sequence
  Description of Artificial Sequence: Synthetic oligonucleotide
guaggcggugauauaguug

SEQ ID NO: 391109 - RNA, 19 nt, Artificial Sequence
  Description of Artificial Sequence: Synthetic oligonucleotide
cuguuccgaacacugucac

SEQ ID NO: 391110 - RNA, 19 nt, Artificial Sequence
  Description of Artificial Sequence: Synthetic oligonucleotide
ccaagugcgggccauggcc

SEQ ID NO: 391111 - RNA, 19 nt, Artificial Sequence
  Description of Artificial Sequence: Synthetic oligonucleotide
ucccaccccuggaacauca

SEQ ID NO: 391112 - RNA, 19 nt, Artificial Sequence
  Description of Artificial Sequence: Synthetic oligonucleotide
auuagcuccccugcccaag

SEQ ID NO: 391113 - RNA, 19 nt, Artificial Sequence
  Description of Artificial Sequence: Synthetic oligonucleotide
cagcaacuucccuggacag

SEQ ID NO: 391114 - RNA, 19 nt, Artificial Sequence
  Description of Artificial Sequence: Synthetic oligonucleotide
ucggguccaggaaccagga

SEQ ID NO: 391115 - RNA, 19 nt, Artificial Sequence
  Description of Artificial Sequence: Synthetic oligonucleotide
caccuuaucgaagggccag

SEQ ID NO: 391116 - RNA, 19 nt, Artificial Sequence
  Description of Artificial Sequence: Synthetic oligonucleotide
uggcgggccaugaggucgg

SEQ ID NO: 391117 - RNA, 19 nt, Artificial Sequence
  Description of Artificial Sequence: Synthetic oligonucleotide
gucagcaaguuggccaucc

SEQ ID NO: 391118 - RNA, 19 nt, Artificial Sequence
  Description of Artificial Sequence: Synthetic oligonucleotide
ugccuaccccaccugcagc

SEQ ID NO: 391119 - RNA, 19 nt, Artificial Sequence
  Description of Artificial Sequence: Synthetic oligonucleotide
cacgcugaacugauuccac

SEQ ID NO: 391120 - RNA, 19 nt, Artificial Sequence
  Description of Artificial Sequence: Synthetic oligonucleotide
cuugucguagccaccgaaa

SEQ ID NO: 391121 - RNA, 19 nt, Artificial Sequence
  Description of Artificial Sequence: Synthetic oligonucleotide
ggacucacacagauuagcc

SEQ ID NO: 391122 - RNA, 19 nt, Artificial Sequence
  Description of Artificial Sequence: Synthetic oligonucleotide
auggguuuaaggagguggu

SEQ ID NO: 391123 - RNA, 19 nt, Artificial Sequence
  Description of Artificial Sequence: Synthetic oligonucleotide
accccuggaacaucacaca

SEQ ID NO: 391124 - RNA, 19 nt, Artificial Sequence
  Description of Artificial Sequence: Synthetic oligonucleotide
aucgaagggccagaccgag

SEQ ID NO: 391125 - RNA, 19 nt, Artificial Sequence
  Description of Artificial Sequence: Synthetic oligonucleotide
agguugccgaagucaaaga

SEQ ID NO: 391126 - RNA, 19 nt, Artificial Sequence
  Description of Artificial Sequence: Synthetic oligonucleotide
augcgugguuugauguggc

SEQ ID NO: 391127 - RNA, 19 nt, Artificial Sequence
  Description of Artificial Sequence: Synthetic oligonucleotide
guuccgaacacugucacau

SEQ ID NO: 391128 - RNA, 19 nt, Artificial Sequence
  Description of Artificial Sequence: Synthetic oligonucleotide
aggggcgggcacucguugg

SEQ ID NO: 391129 - RNA, 19 nt, Artificial Sequence
  Description of Artificial Sequence: Synthetic oligonucleotide
uacguggaggccucauuua

SEQ ID NO: 391130 - RNA, 19 nt, Artificial Sequence
  Description of Artificial Sequence: Synthetic oligonucleotide
ggccagaccgagucaaugc

SEQ ID NO: 391131 - RNA, 19 nt, Artificial Sequence
  Description of Artificial Sequence: Synthetic oligonucleotide
gaggucggcgaaguugagc

SEQ ID NO: 391132 - RNA, 19 nt, Artificial Sequence
  Description of Artificial Sequence: Synthetic oligonucleotide
auucuccacggugcggcac

SEQ ID NO: 391133 - RNA, 19 nt, Artificial Sequence
  Description of Artificial Sequence: Synthetic oligonucleotide
uuaccccuacccagccuca

SEQ ID NO: 391134 - RNA, 19 nt, Artificial Sequence
  Description of Artificial Sequence: Synthetic oligonucleotide
cacuucccaaccucuuaug

SEQ ID NO: 391135 - RNA, 19 nt, Artificial Sequence
  Description of Artificial Sequence: Synthetic oligonucleotide
cuuugguccuagaguaaga

SEQ ID NO: 391136 - RNA, 19 nt, Artificial Sequence
  Description of Artificial Sequence: Synthetic oligonucleotide
cccguaagugacaacuuug

SEQ ID NO: 391137 - RNA, 19 nt, Artificial Sequence
  Description of Artificial Sequence: Synthetic oligonucleotide
caucccguaagugacaacu

SEQ ID NO: 391138 - RNA, 19 nt, Artificial Sequence
  Description of Artificial Sequence: Synthetic oligonucleotide
cuuccuacguggaggccuc

SEQ ID NO: 391139 - RNA, 19 nt, Artificial Sequence
  Description of Artificial Sequence: Synthetic oligonucleotide
ggcgaaguugagcccacag

SEQ ID NO: 391140 - RNA, 19 nt, Artificial Sequence
  Description of Artificial Sequence: Synthetic oligonucleotide
ugaggcuguuccgaacacu

SEQ ID NO: 391141 - RNA, 19 nt, Artificial Sequence
  Description of Artificial Sequence: Synthetic oligonucleotide
ggaguaacagcucucccua

SEQ ID NO: 391142 - RNA, 19 nt, Artificial Sequence
  Description of Artificial Sequence: Synthetic oligonucleotide
ugacgauggcuggaguaac

SEQ ID NO: 391143 - RNA, 19 nt, Artificial Sequence
  Description of Artificial Sequence: Synthetic oligonucleotide
gucagucgugugguagucg

SEQ ID NO: 391144 - RNA, 19 nt, Artificial Sequence
  Description of Artificial Sequence: Synthetic oligonucleotide
gcccauggguuuaaggagg

SEQ ID NO: 391145 - RNA, 19 nt, Artificial Sequence
  Description of Artificial Sequence: Synthetic oligonucleotide
cuggcuuacggucgccgac

SEQ ID NO: 391146 - RNA, 19 nt, Artificial Sequence
  Description of Artificial Sequence: Synthetic oligonucleotide
uggcuuacggucgccgaca

SEQ ID NO: 391147 - RNA, 19 nt, Artificial Sequence
  Description of Artificial Sequence: Synthetic oligonucleotide
ucgccgacacccucgccca

SEQ ID NO: 391148 - RNA, 19 nt, Artificial Sequence
  Description of Artificial Sequence: Synthetic oligonucleotide
ggcccuuagcccuucgccc

SEQ ID NO: 391149 - RNA, 19 nt, Artificial Sequence
  Description of Artificial Sequence: Synthetic oligonucleotide
ggcggugauauaguugacc

SEQ ID NO: 391150 - RNA, 19 nt, Artificial Sequence
  Description of Artificial Sequence: Synthetic oligonucleotide
ggcuguuccgaacacuguc

SEQ ID NO: 391151 - RNA, 19 nt, Artificial Sequence
  Description of Artificial Sequence: Synthetic oligonucleotide
caagacgcuguggccaggc

SEQ ID NO: 391152 - RNA, 19 nt, Artificial Sequence
  Description of Artificial Sequence: Synthetic oligonucleotide
gagucaaugcgugguuuga

SEQ ID NO: 391153 - RNA, 19 nt, Artificial Sequence
  Description of Artificial Sequence: Synthetic oligonucleotide
agagacgggauagggcaca

SEQ ID NO: 391154 - RNA, 19 nt, Artificial Sequence
  Description of Artificial Sequence: Synthetic oligonucleotide
guccuagaguaagacccag

SEQ ID NO: 391155 - RNA, 19 nt, Artificial Sequence
  Description of Artificial Sequence: Synthetic oligonucleotide
cagagacgggauagggcac

SEQ ID NO: 391156 - RNA, 19 nt, Artificial Sequence
  Description of Artificial Sequence: Synthetic oligonucleotide
uuuggggcggagccuccaa

SEQ ID NO: 391157 - RNA, 19 nt, Artificial Sequence
  Description of Artificial Sequence: Synthetic oligonucleotide
gcaguguuguaggacuggg

SEQ ID NO: 391158 - RNA, 19 nt, Artificial Sequence
  Description of Artificial Sequence: Synthetic oligonucleotide
guccccuggcuuacggucg

SEQ ID NO: 391159 - RNA, 19 nt, Artificial Sequence
  Description of Artificial Sequence: Synthetic oligonucleotide
agcccagguccuuguaacu

SEQ ID NO: 391160 - RNA, 19 nt, Artificial Sequence
  Description of Artificial Sequence: Synthetic oligonucleotide
agcugaccgggacccgggg

SEQ ID NO: 391161 - RNA, 19 nt, Artificial Sequence
  Description of Artificial Sequence: Synthetic oligonucleotide
caccaagugcgggccaugg

SEQ ID NO: 391162 - RNA, 19 nt, Artificial Sequence
  Description of Artificial Sequence: Synthetic oligonucleotide
agucgugugguagucgaua

SEQ ID NO: 391163 - RNA, 19 nt, Artificial Sequence
  Description of Artificial Sequence: Synthetic oligonucleotide
caugccuaccccaccugca

SEQ ID NO: 391164 - RNA, 19 nt, Artificial Sequence
  Description of Artificial Sequence: Synthetic oligonucleotide
cucgguuagccugcagcag

SEQ ID NO: 391165 - RNA, 19 nt, Artificial Sequence
  Description of Artificial Sequence: Synthetic oligonucleotide
uuacggucgccgacacccu

SEQ ID NO: 391166 - RNA, 19 nt, Artificial Sequence
  Description of Artificial Sequence: Synthetic oligonucleotide
gagucggagacaggaagaa

SEQ ID NO: 391167 - RNA, 19 nt, Artificial Sequence
  Description of Artificial Sequence: Synthetic oligonucleotide
ucgaagggccagaccgagu

SEQ ID NO: 391168 - RNA, 19 nt, Artificial Sequence
  Description of Artificial Sequence: Synthetic oligonucleotide
caugcuggacucacacaga

SEQ ID NO: 391169 - RNA, 19 nt, Artificial Sequence
  Description of Artificial Sequence: Synthetic oligonucleotide
gggcccuuagcccuucgcc

SEQ ID NO: 391170 - RNA, 19 nt, Artificial Sequence
  Description of Artificial Sequence: Synthetic oligonucleotide
gagccgacccucccacccc

SEQ ID NO: 391171 - RNA, 19 nt, Artificial Sequence
  Description of Artificial Sequence: Synthetic oligonucleotide
gugguagucgauagcaugu

SEQ ID NO: 391172 - RNA, 19 nt, Artificial Sequence
  Description of Artificial Sequence: Synthetic oligonucleotide
caugugcaccaagacgcug

SEQ ID NO: 391173 - RNA, 19 nt, Artificial Sequence
  Description of Artificial Sequence: Synthetic oligonucleotide
cgggauagggcacagacca

SEQ ID NO: 391174 - RNA, 19 nt, Artificial Sequence
  Description of Artificial Sequence: Synthetic oligonucleotide
caccgaaaccggugaguac

SEQ ID NO: 391175 - RNA, 19 nt, Artificial Sequence
  Description of Artificial Sequence: Synthetic oligonucleotide
gacgauggcuggaguaaca

SEQ ID NO: 391176 - RNA, 19 nt, Artificial Sequence
  Description of Artificial Sequence: Synthetic oligonucleotide
gucggcgaaguugagccca

SEQ ID NO: 391177 - RNA, 19 nt, Artificial Sequence
  Description of Artificial Sequence: Synthetic oligonucleotide
cccauuagcuccccugccc

SEQ ID NO: 391178 - RNA, 19 nt, Artificial Sequence
  Description of Artificial Sequence: Synthetic oligonucleotide
gguccccuggcuuacgguc

SEQ ID NO: 391179 - RNA, 19 nt, Artificial Sequence
  Description of Artificial Sequence: Synthetic oligonucleotide
ggaaguggacaggacagga

SEQ ID NO: 391180 - RNA, 19 nt, Artificial Sequence
  Description of Artificial Sequence: Synthetic oligonucleotide
cuuagcccuucgcccuagg

SEQ ID NO: 391181 - RNA, 19 nt, Artificial Sequence
  Description of Artificial Sequence: Synthetic oligonucleotide
ugaccggcagcggcggcag

SEQ ID NO: 391182 - RNA, 19 nt, Artificial Sequence
  Description of Artificial Sequence: Synthetic oligonucleotide
gcucgguuagccugcagca

SEQ ID NO: 391183 - RNA, 19 nt, Artificial Sequence
  Description of Artificial Sequence: Synthetic oligonucleotide
gucacuucccaaccucuua

SEQ ID NO: 391184 - RNA, 19 nt, Artificial Sequence
  Description of Artificial Sequence: Synthetic oligonucleotide
gauggcacgguuaccuccu

SEQ ID NO: 391185 - RNA, 19 nt, Artificial Sequence
  Description of Artificial Sequence: Synthetic oligonucleotide
ggcggagccuccaagcagc

SEQ ID NO: 391186 - RNA, 19 nt, Artificial Sequence
  Description of Artificial Sequence: Synthetic oligonucleotide
accgagucaaugcgugguu

SEQ ID NO: 391187 - RNA, 19 nt, Artificial Sequence
  Description of Artificial Sequence: Synthetic oligonucleotide
cugacgauggcuggaguaa

SEQ ID NO: 391188 - RNA, 19 nt, Artificial Sequence
  Description of Artificial Sequence: Synthetic oligonucleotide
gaggccucauuuagacaac

SEQ ID NO: 391189 - RNA, 19 nt, Artificial Sequence
  Description of Artificial Sequence: Synthetic oligonucleotide
ccagacauccaagugguca

SEQ ID NO: 391190 - RNA, 19 nt, Artificial Sequence
  Description of Artificial Sequence: Synthetic oligonucleotide
gaagggugcccaguaggaa

SEQ ID NO: 391191 - RNA, 19 nt, Artificial Sequence
  Description of Artificial Sequence: Synthetic oligonucleotide
caucagccaccuuaucgaa

SEQ ID NO: 391192 - RNA, 19 nt, Artificial Sequence
  Description of Artificial Sequence: Synthetic oligonucleotide
gagcugacacuuagaaucu

SEQ ID NO: 391193 - RNA, 19 nt, Artificial Sequence
  Description of Artificial Sequence: Synthetic oligonucleotide
ccaagcagcgaagcggcgg

SEQ ID NO: 391194 - RNA, 19 nt, Artificial Sequence
  Description of Artificial Sequence: Synthetic oligonucleotide
caucacccgguccccuggc

SEQ ID NO: 391195 - RNA, 19 nt, Artificial Sequence
  Description of Artificial Sequence: Synthetic oligonucleotide
acgcccgcggcccuccaug

SEQ ID NO: 391196 - RNA, 19 nt, Artificial Sequence
  Description of Artificial Sequence: Synthetic oligonucleotide
ccaacagagacgggauagg

SEQ ID NO: 391197 - RNA, 19 nt, Artificial Sequence
  Description of Artificial Sequence: Synthetic oligonucleotide
cccgucagcaaguuggcca

SEQ ID NO: 391198 - RNA, 19 nt, Artificial Sequence
  Description of Artificial Sequence: Synthetic oligonucleotide
accccuacccagccucaca

SEQ ID NO: 391199 - RNA, 19 nt, Artificial Sequence
  Description of Artificial Sequence: Synthetic oligonucleotide
agagaaccauguaggcggu

SEQ ID NO: 391200 - RNA, 19 nt, Artificial Sequence
  Description of Artificial Sequence: Synthetic oligonucleotide
gaccgagucaaugcguggu

SEQ ID NO: 391201 - RNA, 19 nt, Artificial Sequence
  Description of Artificial Sequence: Synthetic oligonucleotide
accuuaucgaagggccaga

SEQ ID NO: 391202 - RNA, 19 nt, Artificial Sequence
  Description of Artificial Sequence: Synthetic oligonucleotide
gcggcagccggucguacag

SEQ ID NO: 391203 - RNA, 19 nt, Artificial Sequence
  Description of Artificial Sequence: Synthetic oligonucleotide
caacugauccccagaggcu

SEQ ID NO: 391204 - RNA, 19 nt, Artificial Sequence
  Description of Artificial Sequence: Synthetic oligonucleotide
ucuccacggugcggcacag

SEQ ID NO: 391205 - RNA, 19 nt, Artificial Sequence
  Description of Artificial Sequence: Synthetic oligonucleotide
gggcggagccuccaagcag

SEQ ID NO: 391206 - RNA, 19 nt, Artificial Sequence
  Description of Artificial Sequence: Synthetic oligonucleotide
cuggcuaaccuuggcacaa

SEQ ID NO: 391207 - RNA, 19 nt, Artificial Sequence
  Description of Artificial Sequence: Synthetic oligonucleotide
guaggacuggggaggagaa

SEQ ID NO: 391208 - RNA, 19 nt, Artificial Sequence
  Description of Artificial Sequence: Synthetic oligonucleotide
guggcccugauuguacaga

SEQ ID NO: 391209 - RNA, 19 nt, Artificial Sequence
  Description of Artificial Sequence: Synthetic oligonucleotide
cucacugacgauggcugga

SEQ ID NO: 391210 - RNA, 19 nt, Artificial Sequence
  Description of Artificial Sequence: Synthetic oligonucleotide
gcuguuccgaacacuguca

SEQ ID NO: 391211 - RNA, 19 nt, Artificial Sequence
  Description of Artificial Sequence: Synthetic oligonucleotide
cucuaggcucugggaaggc

SEQ ID NO: 391212 - RNA, 19 nt, Artificial Sequence
  Description of Artificial Sequence: Synthetic oligonucleotide
aucgcacuuccuacgugga

SEQ ID NO: 391213 - RNA, 19 nt, Artificial Sequence
  Description of Artificial Sequence: Synthetic oligonucleotide
ggguuaccccuacccagcc

SEQ ID NO: 391214 - RNA, 19 nt, Artificial Sequence
  Description of Artificial Sequence: Synthetic oligonucleotide
ccccuacccagccucacag

SEQ ID NO: 391215 - RNA, 19 nt, Artificial Sequence
  Description of Artificial Sequence: Synthetic oligonucleotide
cacuuugguccuagaguaa

SEQ ID NO: 391216 - RNA, 19 nt, Artificial Sequence
  Description of Artificial Sequence: Synthetic oligonucleotide
ggggugaccggcagcggcg

SEQ ID NO: 391217 - RNA, 19 nt, Artificial Sequence
  Description of Artificial Sequence: Synthetic oligonucleotide
cuacguggaggccucauuu

SEQ ID NO: 391218 - RNA, 19 nt, Artificial Sequence
  Description of Artificial Sequence: Synthetic oligonucleotide
gaaccauguaggcggugau

SEQ ID NO: 391219 - RNA, 19 nt, Artificial Sequence
  Description of Artificial Sequence: Synthetic oligonucleotide
caggccuuagguugccgaa

SEQ ID NO: 391220 - RNA, 19 nt, Artificial Sequence
  Description of Artificial Sequence: Synthetic oligonucleotide
aggcuggagccgacccucc

SEQ ID NO: 391221 - RNA, 19 nt, Artificial Sequence
  Description of Artificial Sequence: Synthetic oligonucleotide
aggcggugauauaguugac

SEQ ID NO: 391222 - RNA, 19 nt, Artificial Sequence
  Description of Artificial Sequence: Synthetic oligonucleotide
ggagacaagguuagguacu

SEQ ID NO: 391223 - RNA, 19 nt, Artificial Sequence
  Description of Artificial Sequence: Synthetic oligonucleotide
cgugugguagucgauagca

SEQ ID NO: 391224 - RNA, 19 nt, Artificial Sequence
  Description of Artificial Sequence: Synthetic oligonucleotide
cugugguaauggggugggg

SEQ ID NO: 391225 - RNA, 19 nt, Artificial Sequence
  Description of Artificial Sequence: Synthetic oligonucleotide
gcgucagcugaccgggacc

SEQ ID NO: 391226 - RNA, 19 nt, Artificial Sequence
  Description of Artificial Sequence: Synthetic oligonucleotide
gguagucgauagcaugugu

SEQ ID NO: 391227 - RNA, 19 nt, Artificial Sequence
  Description of Artificial Sequence: Synthetic oligonucleotide
gguccuagaguaagaccca

SEQ ID NO: 391228 - RNA, 19 nt, Artificial Sequence
  Description of Artificial Sequence: Synthetic oligonucleotide
agguuccucuuggggcccg

SEQ ID NO: 391229 - RNA, 19 nt, Artificial Sequence
  Description of Artificial Sequence: Synthetic oligonucleotide
cucgcacgcgcagcgucag

SEQ ID NO: 391230 - RNA, 19 nt, Artificial Sequence
  Description of Artificial Sequence: Synthetic oligonucleotide
acccgguccccuggcuuac

SEQ ID NO: 391231 - RNA, 19 nt, Artificial Sequence
  Description of Artificial Sequence: Synthetic oligonucleotide
uccuacguggaggccucau

SEQ ID NO: 391232 - RNA, 19 nt, Artificial Sequence
  Description of Artificial Sequence: Synthetic oligonucleotide
ugccugggauucucacuuu

SEQ ID NO: 391233 - RNA, 19 nt, Artificial Sequence
  Description of Artificial Sequence: Synthetic oligonucleotide
aucccguaagugacaacuu

SEQ ID NO: 391234 - RNA, 19 nt, Artificial Sequence
  Description of Artificial Sequence: Synthetic oligonucleotide
gcacgguuaccuccuccug

SEQ ID NO: 391235 - RNA, 19 nt, Artificial Sequence
  Description of Artificial Sequence: Synthetic oligonucleotide
gggccagaccgagucaaug

SEQ ID NO: 391236 - RNA, 19 nt, Artificial Sequence
  Description of Artificial Sequence: Synthetic oligonucleotide
uaccccuacccagccucac

SEQ ID NO: 391237 - RNA, 19 nt, Artificial Sequence
  Description of Artificial Sequence: Synthetic oligonucleotide
gcaucaugacaggggauga

SEQ ID NO: 391238 - RNA, 19 nt, Artificial Sequence
  Description of Artificial Sequence: Synthetic oligonucleotide
ccuuaucgaagggccagac

SEQ ID NO: 391239 - RNA, 19 nt, Artificial Sequence
  Description of Artificial Sequence: Synthetic oligonucleotide
ccuaggccuccuucucggg

SEQ ID NO: 391240 - RNA, 19 nt, Artificial Sequence
  Description of Artificial Sequence: Synthetic oligonucleotide
agcgaagcggcggggccga

SEQ ID NO: 391241 - RNA, 19 nt, Artificial Sequence
  Description of Artificial Sequence: Synthetic oligonucleotide
ggcuuacggucgccgacac

SEQ ID NO: 391242 - RNA, 19 nt, Artificial Sequence
  Description of Artificial Sequence: Synthetic oligonucleotide
agcugacacuuagaaucuu

SEQ ID NO: 391243 - RNA, 19 nt, Artificial Sequence
  Description of Artificial Sequence: Synthetic oligonucleotide
ccugcugacccucccuguc

SEQ ID NO: 391244 - RNA, 19 nt, Artificial Sequence
  Description of Artificial Sequence: Synthetic oligonucleotide
gacgcuguggccaggccuu

SEQ ID NO: 391245 - RNA, 19 nt, Artificial Sequence
  Description of Artificial Sequence: Synthetic oligonucleotide
ccccauuagcuccccugcc

SEQ ID NO: 391246 - RNA, 19 nt, Artificial Sequence
  Description of Artificial Sequence: Synthetic oligonucleotide
acagcucgguuagccugca

SEQ ID NO: 391247 - RNA, 19 nt, Artificial Sequence
  Description of Artificial Sequence: Synthetic oligonucleotide
agacgggauagggcacaga

SEQ ID NO: 391248 - RNA, 19 nt, Artificial Sequence
  Description of Artificial Sequence: Synthetic oligonucleotide
gccgacacccucgcccacg

SEQ ID NO: 391249 - RNA, 19 nt, Artificial Sequence
  Description of Artificial Sequence: Synthetic oligonucleotide
ggccuuagguugccgaagu

SEQ ID NO: 391250 - RNA, 19 nt, Artificial Sequence
  Description of Artificial Sequence: Synthetic oligonucleotide
gaccgggacccggggccgg

SEQ ID NO: 391251 - RNA, 19 nt, Artificial Sequence
  Description of Artificial Sequence: Synthetic oligonucleotide
guuuggggcggagccucca

SEQ ID NO: 391252 - RNA, 19 nt, Artificial Sequence
  Description of Artificial Sequence: Synthetic oligonucleotide
gcuuacggucgccgacacc

SEQ ID NO: 391253 - RNA, 19 nt, Artificial Sequence
  Description of Artificial Sequence: Synthetic oligonucleotide
ccgacacccucgcccacgg

SEQ ID NO: 391254 - RNA, 19 nt, Artificial Sequence
  Description of Artificial Sequence: Synthetic oligonucleotide
gggugaccggcagcggcgg

SEQ ID NO: 391255 - RNA, 19 nt, Artificial Sequence
  Description of Artificial Sequence: Synthetic oligonucleotide
uuccuacguggaggccuca

SEQ ID NO: 391256 - RNA, 19 nt, Artificial Sequence
  Description of Artificial Sequence: Synthetic oligonucleotide
cccugauuguacagagcca

SEQ ID NO: 391257 - RNA, 19 nt, Artificial Sequence
  Description of Artificial Sequence: Synthetic oligonucleotide
cagcucgguuagccugcag

SEQ ID NO: 391258 - RNA, 19 nt, Artificial Sequence
  Description of Artificial Sequence: Synthetic oligonucleotide
gccuuagguugccgaaguc

SEQ ID NO: 391259 - RNA, 19 nt, Artificial Sequence
  Description of Artificial Sequence: Synthetic oligonucleotide
cggucguacagccccuggc

SEQ ID NO: 391260 - RNA, 19 nt, Artificial Sequence
  Description of Artificial Sequence: Synthetic oligonucleotide
cccugccucucacugacga

SEQ ID NO: 391261 - RNA, 19 nt, Artificial Sequence
  Description of Artificial Sequence: Synthetic oligonucleotide
ccgucccggcucucaaggg

SEQ ID NO: 391262 - RNA, 19 nt, Artificial Sequence
  Description of Artificial Sequence: Synthetic oligonucleotide
ccgguccccuggcuuacgg

SEQ ID NO: 391263 - RNA, 19 nt, Artificial Sequence
  Description of Artificial Sequence: Synthetic oligonucleotide
ccaccuuaucgaagggcca

SEQ ID NO: 391264 - RNA, 19 nt, Artificial Sequence
  Description of Artificial Sequence: Synthetic oligonucleotide
cacccgguccccuggcuua

SEQ ID NO: 391265 - RNA, 19 nt, Artificial Sequence
  Description of Artificial Sequence: Synthetic oligonucleotide
ccggucguacagccccugg

SEQ ID NO: 391266 - RNA, 19 nt, Artificial Sequence
  Description of Artificial Sequence: Synthetic oligonucleotide
cgugguuugauguggcccu

SEQ ID NO: 391267 - RNA, 19 nt, Artificial Sequence
  Description of Artificial Sequence: Synthetic oligonucleotide
ccuugucguagccaccgaa

SEQ ID NO: 391268 - RNA, 19 nt, Artificial Sequence
  Description of Artificial Sequence: Synthetic oligonucleotide
aggcgaggcagagguggaa

SEQ ID NO: 391269 - RNA, 19 nt, Artificial Sequence
  Description of Artificial Sequence: Synthetic oligonucleotide
gccaucccguaagugacaa

SEQ ID NO: 391270 - RNA, 19 nt, Artificial Sequence
  Description of Artificial Sequence: Synthetic oligonucleotide
ccgaaaccggugaguacca

SEQ ID NO: 391271 - RNA, 19 nt, Artificial Sequence
  Description of Artificial Sequence: Synthetic oligonucleotide
ggggcccgucagcaaguug

SEQ ID NO: 391272 - RNA, 19 nt, Artificial Sequence
  Description of Artificial Sequence: Synthetic oligonucleotide
ccuggcuuacggucgccga

SEQ ID NO: 391273 - RNA, 19 nt, Artificial Sequence
  Description of Artificial Sequence: Synthetic oligonucleotide
cguggaggccucauuuaga

SEQ ID NO: 391274 - RNA, 19 nt, Artificial Sequence
  Description of Artificial Sequence: Synthetic oligonucleotide
gcccuuagcccuucgcccu

SEQ ID NO: 391275 - RNA, 19 nt, Artificial Sequence
  Description of Artificial Sequence: Synthetic oligonucleotide
cucccaccccuggaacauc

SEQ ID NO: 391276 - RNA, 19 nt, Artificial Sequence
  Description of Artificial Sequence: Synthetic oligonucleotide
gugugguagucgauagcau

SEQ ID NO: 391277 - RNA, 19 nt, Artificial Sequence
  Description of Artificial Sequence: Synthetic oligonucleotide
ccaucccguaagugacaac

SEQ ID NO: 391278 - RNA, 19 nt, Artificial Sequence
  Description of Artificial Sequence: Synthetic oligonucleotide
ccaccgaaaccggugagua

SEQ ID NO: 391279 - RNA, 19 nt, Artificial Sequence
  Description of Artificial Sequence: Synthetic oligonucleotide
ccagaccgagucaaugcgu

SEQ ID NO: 391280 - RNA, 19 nt, Artificial Sequence
  Description of Artificial Sequence: Synthetic oligonucleotide
cccagacauccaagugguc

SEQ ID NO: 391281 - RNA, 19 nt, Artificial Sequence
  Description of Artificial Sequence: Synthetic oligonucleotide
ggccaucccguaagugaca

SEQ ID NO: 391282 - RNA, 19 nt, Artificial Sequence
  Description of Artificial Sequence: Synthetic oligonucleotide
ccaagacgcuguggccagg

SEQ ID NO: 391283 - RNA, 19 nt, Artificial Sequence
  Description of Artificial Sequence: Synthetic oligonucleotide
cuaccccaccugcagccau

SEQ ID NO: 391284 - RNA, 19 nt, Artificial Sequence
  Description of Artificial Sequence: Synthetic oligonucleotide
gcucgcacgcgcagcguca

SEQ ID NO: 391285 - RNA, 19 nt, Artificial Sequence
  Description of Artificial Sequence: Synthetic oligonucleotide
gcggagccuccaagcagcc

SEQ ID NO: 391286 - RNA, 19 nt, Artificial Sequence
  Description of Artificial Sequence: Synthetic oligonucleotide
cagucgugugguagucgau

SEQ ID NO: 391287 - RNA, 19 nt, Artificial Sequence
  Description of Artificial Sequence: Synthetic oligonucleotide
gccaccgaaaccggugagu

SEQ ID NO: 391288 - RNA, 19 nt, Artificial Sequence
  Description of Artificial Sequence: Synthetic oligonucleotide
cuaccccauuagcuccccu

SEQ ID NO: 391289 - RNA, 19 nt, Artificial Sequence
  Description of Artificial Sequence: Synthetic oligonucleotide
ccgucagcaaguuggccau

SEQ ID NO: 391290 - RNA, 19 nt, Artificial Sequence
  Description of Artificial Sequence: Synthetic oligonucleotide
ccaugugcaccaagacgcu

SEQ ID NO: 391291 - RNA, 19 nt, Artificial Sequence
  Description of Artificial Sequence: Synthetic oligonucleotide
gcccgcggcccuccaugcc

SEQ ID NO: 391292 - RNA, 19 nt, Artificial Sequence
  Description of Artificial Sequence: Synthetic oligonucleotide
acggugcggcacagcugca

SEQ ID NO: 391293 - RNA, 19 nt, Artificial Sequence
  Description of Artificial Sequence: Synthetic oligonucleotide
ggucacuucccaaccucuu

SEQ ID NO: 391294 - RNA, 19 nt, Artificial Sequence
  Description of Artificial Sequence: Synthetic oligonucleotide
gccggucguacagccccug

SEQ ID NO: 391295 - RNA, 19 nt, Artificial Sequence
  Description of Artificial Sequence: Synthetic oligonucleotide
cgcccgcggcccuccaugc

SEQ ID NO: 391296 - RNA, 19 nt, Artificial Sequence
  Description of Artificial Sequence: Synthetic oligonucleotide
cagucacgcugaacugauu

SEQ ID NO: 391297 - RNA, 19 nt, Artificial Sequence
  Description of Artificial Sequence: Synthetic oligonucleotide
cguagccaccgaaaccggu

SEQ ID NO: 391298 - RNA, 19 nt, Artificial Sequence
  Description of Artificial Sequence: Synthetic oligonucleotide
cccgguccccuggcuuacg

SEQ ID NO: 391299 - RNA, 19 nt, Artificial Sequence
  Description of Artificial Sequence: Synthetic oligonucleotide
ggacgggcagggacuggcu

SEQ ID NO: 391300 - RNA, 19 nt, Artificial Sequence
  Description of Artificial Sequence: Synthetic oligonucleotide
gcccuucgcccuaggccuc

SEQ ID NO: 391301 - RNA, 19 nt, Artificial Sequence
  Description of Artificial Sequence: Synthetic oligonucleotide
cggcagccggucguacagc

SEQ ID NO: 391302 - RNA, 19 nt, Artificial Sequence
  Description of Artificial Sequence: Synthetic oligonucleotide
ccccuggcuuacggucgcc

SEQ ID NO: 391303 - RNA, 19 nt, Artificial Sequence
  Description of Artificial Sequence: Synthetic oligonucleotide
cgcggcccuccaugccggg

SEQ ID NO: 391304 - RNA, 19 nt, Artificial Sequence
  Description of Artificial Sequence: Synthetic oligonucleotide
cuucgcccuaggccuccuu

SEQ ID NO: 391305 - RNA, 19 nt, Artificial Sequence
  Description of Artificial Sequence: Synthetic oligonucleotide
ccgagucaaugcgugguuu

SEQ ID NO: 391306 - RNA, 19 nt, Artificial Sequence
  Description of Artificial Sequence: Synthetic oligonucleotide
cgguuaccuccuccugcca

SEQ ID NO: 391307 - RNA, 19 nt, Artificial Sequence
  Description of Artificial Sequence: Synthetic oligonucleotide
cgaaaccggugaguaccaa

SEQ ID NO: 391308 - RNA, 19 nt, Artificial Sequence
  Description of Artificial Sequence: Synthetic oligonucleotide
gcggcggcagccggucgua

SEQ ID NO: 391309 - RNA, 19 nt, Artificial Sequence
  Description of Artificial Sequence: Synthetic oligonucleotide
cgguccccuggcuuacggu

SEQ ID NO: 391310 - RNA, 19 nt, Artificial Sequence
  Description of Artificial Sequence: Synthetic oligonucleotide
gcgcggccggccggcucug

SEQ ID NO: 391311 - RNA, 19 nt, Artificial Sequence
  Description of Artificial Sequence: Synthetic oligonucleotide
cggcgaaguugagcccaca

SEQ ID NO: 391312 - RNA, 19 nt, Artificial Sequence
  Description of Artificial Sequence: Synthetic oligonucleotide
ccggccggcucugcagcuu

SEQ ID NO: 391313 - RNA, 19 nt, Artificial Sequence
  Description of Artificial Sequence: Synthetic oligonucleotide
uccaauagaagauaaaaug

SEQ ID NO: 391314 - RNA, 19 nt, Artificial Sequence
  Description of Artificial Sequence: Synthetic oligonucleotide
uuugguaucauucaaaauu

SEQ ID NO: 391315 - RNA, 19 nt, Artificial Sequence
  Description of Artificial Sequence: Synthetic oligonucleotide
auugcaacgagcuugaggu

SEQ ID NO: 391316 - RNA, 19 nt, Artificial Sequence
  Description of Artificial Sequence: Synthetic oligonucleotide
ucuguuguaacucuucaag

SEQ ID NO: 391317 - RNA, 19 nt, Artificial Sequence
  Description of Artificial Sequence: Synthetic oligonucleotide
auuauguaccucuuucugc

SEQ ID NO: 391318 - RNA, 19 nt, Artificial Sequence
  Description of Artificial Sequence: Synthetic oligonucleotide
guagauuccaacuuguccc

SEQ ID NO: 391319 - RNA, 19 nt, Artificial Sequence
  Description of Artificial Sequence: Synthetic oligonucleotide
acuuccaauauaaagauag

SEQ ID NO: 391320 - RNA, 19 nt, Artificial Sequence
  Description of Artificial Sequence: Synthetic oligonucleotide
uuaauauucuccaucucug

SEQ ID NO: 391321 - RNA, 19 nt, Artificial Sequence
  Description of Artificial Sequence: Synthetic oligonucleotide
aacugaugcucauagucac

SEQ ID NO: 391322 - RNA, 19 nt, Artificial Sequence
  Description of Artificial Sequence: Synthetic oligonucleotide
ucucucuuaacguagauuc

SEQ ID NO: 391323 - RNA, 19 nt, Artificial Sequence
  Description of Artificial Sequence: Synthetic oligonucleotide
uugcuuaguauucucagag

SEQ ID NO: 391324 - RNA, 19 nt, Artificial Sequence
  Description of Artificial Sequence: Synthetic oligonucleotide
auaugcagucuccauaccc

SEQ ID NO: 391325 - RNA, 19 nt, Artificial Sequence
  Description of Artificial Sequence: Synthetic oligonucleotide
aagugcagauaucuggugg

SEQ ID NO: 391326 - RNA, 19 nt, Artificial Sequence
  Description of Artificial Sequence: Synthetic oligonucleotide
uuugguuaacauaaagcca

SEQ ID NO: 391327 - RNA, 19 nt, Artificial Sequence
  Description of Artificial Sequence: Synthetic oligonucleotide
  modified_base (5)..(5): a, c, u, g, unknown or other
ugucncuuucauuacagcc

SEQ ID NO: 391328 - RNA, 19 nt, Artificial Sequence
  Description of Artificial Sequence: Synthetic oligonucleotide
aacaauguucucucgauau

SEQ ID NO: 391329 - RNA, 19 nt, Artificial Sequence
  Description of Artificial Sequence: Synthetic oligonucleotide
uaucacaacgucuaccaag

SEQ ID NO: 391330 - RNA, 19 nt, Artificial Sequence
  Description of Artificial Sequence: Synthetic oligonucleotide
agccuaaugcuuuugauug

SEQ ID NO: 391331 - RNA, 19 nt, Artificial Sequence
  Description of Artificial Sequence: Synthetic oligonucleotide
uuggaaucgagucuggugu

SEQ ID NO: 391332 - RNA, 19 nt, Artificial Sequence
  Description of Artificial Sequence: Synthetic oligonucleotide
uguaugaacagaaaacgua

SEQ ID NO: 391333 - RNA, 19 nt, Artificial Sequence
  Description of Artificial Sequence: Synthetic oligonucleotide
uuauguaccucuuucugca

SEQ ID NO: 391334 - RNA, 19 nt, Artificial Sequence
  Description of Artificial Sequence: Synthetic oligonucleotide
ggaaauacagucaacagcc

SEQ ID NO: 391335 - RNA, 19 nt, Artificial Sequence
  Description of Artificial Sequence: Synthetic oligonucleotide
uuuaagguccuccaauaga

SEQ ID NO: 391336 - RNA, 19 nt, Artificial Sequence
  Description of Artificial Sequence: Synthetic oligonucleotide
ucugcuagcuguaaugaca

SEQ ID NO: 391337 - RNA, 19 nt, Artificial Sequence
  Description of Artificial Sequence: Synthetic oligonucleotide
gauugcaacgagcuugagg

SEQ ID NO: 391338 - RNA, 19 nt, Artificial Sequence
  Description of Artificial Sequence: Synthetic oligonucleotide
acucauauagcacacuaca

SEQ ID NO: 391339 - RNA, 19 nt, Artificial Sequence
  Description of Artificial Sequence: Synthetic oligonucleotide
accaaucugaucccuacac

SEQ ID NO: 391340 - RNA, 19 nt, Artificial Sequence
  Description of Artificial Sequence: Synthetic oligonucleotide
aaucgguaaccacugggag

SEQ ID NO: 391341 - RNA, 19 nt, Artificial Sequence
  Description of Artificial Sequence: Synthetic oligonucleotide
uccagauuugcauuucucc

SEQ ID NO: 391342 - RNA, 19 nt, Artificial Sequence
  Description of Artificial Sequence: Synthetic oligonucleotide
acugaugagcccuagacaa

SEQ ID NO: 391343 - RNA, 19 nt, Artificial Sequence
  Description of Artificial Sequence: Synthetic oligonucleotide
ucucgauauuuuaacacca

SEQ ID NO: 391344 - RNA, 19 nt, Artificial Sequence
  Description of Artificial Sequence: Synthetic oligonucleotide
uaaagauagcccuagccaa

SEQ ID NO: 391345 - RNA, 19 nt, Artificial Sequence
  Description of Artificial Sequence: Synthetic oligonucleotide
gaauccguguuagagaaag

SEQ ID NO: 391346 - RNA, 19 nt, Artificial Sequence
  Description of Artificial Sequence: Synthetic oligonucleotide
ucuaccaagcuuauuucca

SEQ ID NO: 391347 - RNA, 19 nt, Artificial Sequence
  Description of Artificial Sequence: Synthetic oligonucleotide
guuaacauaaagccacuug

SEQ ID NO: 391348 - RNA, 19 nt, Artificial Sequence
  Description of Artificial Sequence: Synthetic oligonucleotide
aguuuguaugaacagaaaa

SEQ ID NO: 391349 - RNA, 19 nt, Artificial Sequence
  Description of Artificial Sequence: Synthetic oligonucleotide
uaucauucaaaauugccuu

SEQ ID NO: 391350 - RNA, 19 nt, Artificial Sequence
  Description of Artificial Sequence: Synthetic oligonucleotide
cagucaacagccaauggcc

SEQ ID NO: 391351 - RNA, 19 nt, Artificial Sequence
  Description of Artificial Sequence: Synthetic oligonucleotide
  modified_base (3)..(3): a, c, u, g, unknown or other
ucncuuucauuacagccug

SEQ ID NO: 391352 - RNA, 19 nt, Artificial Sequence
  Description of Artificial Sequence: Synthetic oligonucleotide
uuaacuucaucuauagcuu

SEQ ID NO: 391353 - RNA, 19 nt, Artificial Sequence
  Description of Artificial Sequence: Synthetic oligonucleotide
uuugccacgguccuguagu

SEQ ID NO: 391354 - RNA, 19 nt, Artificial Sequence
  Description of Artificial Sequence: Synthetic oligonucleotide
uuaacguagauuccaacuu

SEQ ID NO: 391355 - RNA, 19 nt, Artificial Sequence
  Description of Artificial Sequence: Synthetic oligonucleotide
guuuguaugaacagaaaac

SEQ ID NO: 391356 - RNA, 19 nt, Artificial Sequence
  Description of Artificial Sequence: Synthetic oligonucleotide
cuaaucgguaaccacuggg

SEQ ID NO: 391357 - RNA, 19 nt, Artificial Sequence
  Description of Artificial Sequence: Synthetic oligonucleotide
ucugcuauccgaacacugc

SEQ ID NO: 391358 - RNA, 19 nt, Artificial Sequence
  Description of Artificial Sequence: Synthetic oligonucleotide
uccgauucauccaaguuuc

SEQ ID NO: 391359 - RNA, 19 nt, Artificial Sequence
  Description of Artificial Sequence: Synthetic oligonucleotide
ugaucccuacaccuguugg

SEQ ID NO: 391360 - RNA, 19 nt, Artificial Sequence
  Description of Artificial Sequence: Synthetic oligonucleotide
acauaucacaacgucuacc

SEQ ID NO: 391361 - RNA, 19 nt, Artificial Sequence
  Description of Artificial Sequence: Synthetic oligonucleotide
uuagcuugccuuagcauga

SEQ ID NO: 391362 - RNA, 19 nt, Artificial Sequence
  Description of Artificial Sequence: Synthetic oligonucleotide
uccguguuagagaaagcag

SEQ ID NO: 391363 - RNA, 19 nt, Artificial Sequence
  Description of Artificial Sequence: Synthetic oligonucleotide
uauagccuaaugcuuuuga

SEQ ID NO: 391364 - RNA, 19 nt, Artificial Sequence
  Description of Artificial Sequence: Synthetic oligonucleotide
ggugucaugucucagggag

SEQ ID NO: 391365 - RNA, 19 nt, Artificial Sequence
  Description of Artificial Sequence: Synthetic oligonucleotide
aaaguauuucagccuucag

SEQ ID NO: 391366 - RNA, 19 nt, Artificial Sequence
  Description of Artificial Sequence: Synthetic oligonucleotide
guaguuauagccuaaugcu

SEQ ID NO: 391367 - RNA, 19 nt, Artificial Sequence
  Description of Artificial Sequence: Synthetic oligonucleotide
uguucucucgauauuuuaa

SEQ ID NO: 391368 - RNA, 19 nt, Artificial Sequence
  Description of Artificial Sequence: Synthetic oligonucleotide
aaauccgauucauccaagu

SEQ ID NO: 391369 - RNA, 19 nt, Artificial Sequence
  Description of Artificial Sequence: Synthetic oligonucleotide
cauaucacaacgucuacca

SEQ ID NO: 391370 - RNA, 19 nt, Artificial Sequence
  Description of Artificial Sequence: Synthetic oligonucleotide
ugauucagcuauuucccgc

SEQ ID NO: 391371 - RNA, 19 nt, Artificial Sequence
  Description of Artificial Sequence: Synthetic oligonucleotide
aacacauaucacaacgucu

SEQ ID NO: 391372 - RNA, 19 nt, Artificial Sequence
  Description of Artificial Sequence: Synthetic oligonucleotide
  modified_base (6)..(6): a, c, u, g, unknown or other
uccugnuccagccucagau

SEQ ID NO: 391373 - RNA, 19 nt, Artificial Sequence
  Description of Artificial Sequence: Synthetic oligonucleotide
aaguuguugugacuucucu

SEQ ID NO: 391374 - RNA, 19 nt, Artificial Sequence
  Description of Artificial Sequence: Synthetic oligonucleotide
ucgauauuuuaacaccagu

SEQ ID NO: 391375 - RNA, 19 nt, Artificial Sequence
  Description of Artificial Sequence: Synthetic oligonucleotide
uauccgaacacugcuacug

SEQ ID NO: 391376 - RNA, 19 nt, Artificial Sequence
  Description of Artificial Sequence: Synthetic oligonucleotide
ugagcccuagacaacagaa

SEQ ID NO: 391377 - RNA, 19 nt, Artificial Sequence
  Description of Artificial Sequence: Synthetic oligonucleotide
acaagggaaauacagucaa

SEQ ID NO: 391378 - RNA, 19 nt, Artificial Sequence
  Description of Artificial Sequence: Synthetic oligonucleotide
augcaagcuaugcuuuccc

SEQ ID NO: 391379 - RNA, 19 nt, Artificial Sequence
  Description of Artificial Sequence: Synthetic oligonucleotide
ucugaaaccuguucacgug

SEQ ID NO: 391380 - RNA, 19 nt, Artificial Sequence
  Description of Artificial Sequence: Synthetic oligonucleotide
gaacacauaucacaacguc

SEQ ID NO: 391381 - RNA, 19 nt, Artificial Sequence
  Description of Artificial Sequence: Synthetic oligonucleotide
aaccagcgguccaaaaucc

SEQ ID NO: 391382 - RNA, 19 nt, Artificial Sequence
  Description of Artificial Sequence: Synthetic oligonucleotide
uguccgcacaugaacaaug

SEQ ID NO: 391383 - RNA, 19 nt, Artificial Sequence
  Description of Artificial Sequence: Synthetic oligonucleotide
ucacgugacugcaucagca

SEQ ID NO: 391384 - RNA, 19 nt, Artificial Sequence
  Description of Artificial Sequence: Synthetic oligonucleotide
  modified_base (17)..(17): a, c, u, g, unknown or other
auagucacgaacugucncu

SEQ ID NO: 391385 - RNA, 19 nt, Artificial Sequence
  Description of Artificial Sequence: Synthetic oligonucleotide
ucucuuaacguagauucca

SEQ ID NO: 391386 - RNA, 19 nt, Artificial Sequence
  Description of Artificial Sequence: Synthetic oligonucleotide
uuacaaaaucucucuguac

SEQ ID NO: 391387 - RNA, 19 nt, Artificial Sequence
  Description of Artificial Sequence: Synthetic oligonucleotide
ugaacaauguucucucgau

SEQ ID NO: 391388 - RNA, 19 nt, Artificial Sequence
  Description of Artificial Sequence: Synthetic oligonucleotide
acgucuaccaagcuuauuu

SEQ ID NO: 391389 - RNA, 19 nt, Artificial Sequence
  Description of Artificial Sequence: Synthetic oligonucleotide
  modified_base (8)..(8): a, c, u, g, unknown or other
aacugucncuuucauuaca

SEQ ID NO: 391390 - RNA, 19 nt, Artificial Sequence
  Description of Artificial Sequence: Synthetic oligonucleotide
uguucaggugucauugccu

SEQ ID NO: 391391 - RNA, 19 nt, Artificial Sequence
  Description of Artificial Sequence: Synthetic oligonucleotide
cucauauagcacacuacac

SEQ ID NO: 391392 - RNA, 19 nt, Artificial Sequence
  Description of Artificial Sequence: Synthetic oligonucleotide
uugaucuuugguuaacaua

SEQ ID NO: 391393 - RNA, 19 nt, Artificial Sequence
  Description of Artificial Sequence: Synthetic oligonucleotide
uacucauauagcacacuac

SEQ ID NO: 391394 - RNA, 19 nt, Artificial Sequence
  Description of Artificial Sequence: Synthetic oligonucleotide
guuggaaucgagucuggug

SEQ ID NO: 391395 - RNA, 19 nt, Artificial Sequence
  Description of Artificial Sequence: Synthetic oligonucleotide
  modified_base (7)..(7): a, c, u, g, unknown or other
acugucncuuucauuacag

SEQ ID NO: 391396 - RNA, 19 nt, Artificial Sequence
  Description of Artificial Sequence: Synthetic oligonucleotide
aauccgauucauccaaguu

SEQ ID NO: 391397 - RNA, 19 nt, Artificial Sequence
  Description of Artificial Sequence: Synthetic oligonucleotide
uguaccucuuucugcagga

SEQ ID NO: 391398 - RNA, 19 nt, Artificial Sequence
  Description of Artificial Sequence: Synthetic oligonucleotide
ucagcuauuucccgcucug

SEQ ID NO: 391399 - RNA, 19 nt, Artificial Sequence
  Description of Artificial Sequence: Synthetic oligonucleotide
  modified_base (19)..(19): a, c, u, g, unknown or other
ucauagucacgaacugucn

SEQ ID NO: 391400 - RNA, 19 nt, Artificial Sequence
  Description of Artificial Sequence: Synthetic oligonucleotide
auccgauucauccaaguuu

SEQ ID NO: 391401 - RNA, 19 nt, Artificial Sequence
  Description of Artificial Sequence: Synthetic oligonucleotide
uucauaauuggaacacaua

SEQ ID NO: 391402 - RNA, 19 nt, Artificial Sequence
  Description of Artificial Sequence: Synthetic oligonucleotide
auacucauauagcacacua

SEQ ID NO: 391403 - RNA, 19 nt, Artificial Sequence
  Description of Artificial Sequence: Synthetic oligonucleotide
gucuaccaagcuuauuucc

SEQ ID NO: 391404 - RNA, 19 nt, Artificial Sequence
  Description of Artificial Sequence: Synthetic oligonucleotide
gcuuaguauucucagagac

SEQ ID NO: 391405 - RNA, 19 nt, Artificial Sequence
  Description of Artificial Sequence: Synthetic oligonucleotide
ugcuguccgcacaugaaca

SEQ ID NO: 391406 - RNA, 19 nt, Artificial Sequence
  Description of Artificial Sequence: Synthetic oligonucleotide
ucuuaggacaagugcagau

SEQ ID NO: 391407 - RNA, 19 nt, Artificial Sequence
  Description of Artificial Sequence: Synthetic oligonucleotide
auagcccuagccaaguauc

SEQ ID NO: 391408 - RNA, 19 nt, Artificial Sequence
  Description of Artificial Sequence: Synthetic oligonucleotide
  modified_base (13)..(13): a, c, u, g, unknown or other
ucacgaacugucncuuuca

SEQ ID NO: 391409 - RNA, 19 nt, Artificial Sequence
  Description of Artificial Sequence: Synthetic oligonucleotide
agaagauaaaaugguaaaa

SEQ ID NO: 391410 - RNA, 19 nt, Artificial Sequence
  Description of Artificial Sequence: Synthetic oligonucleotide
cugcuagcuguaaugacac

SEQ ID NO: 391411 - RNA, 19 nt, Artificial Sequence
  Description of Artificial Sequence: Synthetic oligonucleotide
aaacguaguuccaaacacu

SEQ ID NO: 391412 - RNA, 19 nt, Artificial Sequence
  Description of Artificial Sequence: Synthetic oligonucleotide
cacuaaucgguaaccacug

SEQ ID NO: 391413 - RNA, 19 nt, Artificial Sequence
  Description of Artificial Sequence: Synthetic oligonucleotide
ucuuaacguagauuccaac

SEQ ID NO: 391414 - RNA, 19 nt, Artificial Sequence
  Description of Artificial Sequence: Synthetic oligonucleotide
auagcacugaacaagggaa

SEQ ID NO: 391415 - RNA, 19 nt, Artificial Sequence
  Description of Artificial Sequence: Synthetic oligonucleotide
aguauccagauucuccuaa

SEQ ID NO: 391416 - RNA, 19 nt, Artificial Sequence
  Description of Artificial Sequence: Synthetic oligonucleotide
aaaugcagguuagaauccu

SEQ ID NO: 391417 - RNA, 19 nt, Artificial Sequence
  Description of Artificial Sequence: Synthetic oligonucleotide
ugaacaucccucuucgcuu

SEQ ID NO: 391418 - RNA, 19 nt, Artificial Sequence
  Description of Artificial Sequence: Synthetic oligonucleotide
uagcauuuaagguccucca

SEQ ID NO: 391419 - RNA, 19 nt, Artificial Sequence
  Description of Artificial Sequence: Synthetic oligonucleotide
acuaaucgguaaccacugg

SEQ ID NO: 391420 - RNA, 19 nt, Artificial Sequence
  Description of Artificial Sequence: Synthetic oligonucleotide
gagucugcuugccggaucc

SEQ ID NO: 391421 - RNA, 19 nt, Artificial Sequence
  Description of Artificial Sequence: Synthetic oligonucleotide
aauccguguuagagaaagc

SEQ ID NO: 391422 - RNA, 19 nt, Artificial Sequence
  Description of Artificial Sequence: Synthetic oligonucleotide
ugaaaccuguucacgugac

SEQ ID NO: 391423 - RNA, 19 nt, Artificial Sequence
  Description of Artificial Sequence: Synthetic oligonucleotide
uucacgugacugcaucagc

SEQ ID NO: 391424 - RNA, 19 nt, Artificial Sequence
  Description of Artificial Sequence: Synthetic oligonucleotide
cuuaacguagauuccaacu

SEQ ID NO: 391425 - RNA, 19 nt, Artificial Sequence
  Description of Artificial Sequence: Synthetic oligonucleotide
ucgguaaccacugggagau

SEQ ID NO: 391426 - RNA, 19 nt, Artificial Sequence
  Description of Artificial Sequence: Synthetic oligonucleotide
ucagucuuuuagacuagaa

SEQ ID NO: 391427 - RNA, 19 nt, Artificial Sequence
  Description of Artificial Sequence: Synthetic oligonucleotide
ugguuaaugucugucaauu

SEQ ID NO: 391428 - RNA, 19 nt, Artificial Sequence
  Description of Artificial Sequence: Synthetic oligonucleotide
ugcuuaguauucucagaga

SEQ ID NO: 391429 - RNA, 19 nt, Artificial Sequence
  Description of Artificial Sequence: Synthetic oligonucleotide
aacguaguuccaaacacua

SEQ ID NO: 391430 - RNA, 19 nt, Artificial Sequence
  Description of Artificial Sequence: Synthetic oligonucleotide
  modified_base (14)..(14): a, c, u, g, unknown or other
gucacgaacugucncuuuc

SEQ ID NO: 391431 - RNA, 19 nt, Artificial Sequence
  Description of Artificial Sequence: Synthetic oligonucleotide
agcucuuaggacaagugca

SEQ ID NO: 391432 - RNA, 19 nt, Artificial Sequence
  Description of Artificial Sequence: Synthetic oligonucleotide
cucucuuaacguagauucc

SEQ ID NO: 391433 - RNA, 19 nt, Artificial Sequence
  Description of Artificial Sequence: Synthetic oligonucleotide
uagccuaaugcuuuugauu

SEQ ID NO: 391434 - RNA, 19 nt, Artificial Sequence
  Description of Artificial Sequence: Synthetic oligonucleotide
cugccuuuuaacuucaucu

SEQ ID NO: 391435 - RNA, 19 nt, Artificial Sequence
  Description of Artificial Sequence: Synthetic oligonucleotide
aguaagaccucagaggcuu

SEQ ID NO: 391436 - RNA, 19 nt, Artificial Sequence
  Description of Artificial Sequence: Synthetic oligonucleotide
aucgguaaccacugggaga

SEQ ID NO: 391437 - RNA, 19 nt, Artificial Sequence
  Description of Artificial Sequence: Synthetic oligonucleotide
uaccaagcuuauuuccagc

SEQ ID NO: 391438 - RNA, 19 nt, Artificial Sequence
  Description of Artificial Sequence: Synthetic oligonucleotide
uagcacacuacaccucucu

SEQ ID NO: 391439 - RNA, 19 nt, Artificial Sequence
  Description of Artificial Sequence: Synthetic oligonucleotide
agacucucaaguuguugug

SEQ ID NO: 391440 - RNA, 19 nt, Artificial Sequence
  Description of Artificial Sequence: Synthetic oligonucleotide
auagccuaaugcuuuugau

SEQ ID NO: 391441 - RNA, 19 nt, Artificial Sequence
  Description of Artificial Sequence: Synthetic oligonucleotide
uagcccuagccaaguaucc

SEQ ID NO: 391442 - RNA, 19 nt, Artificial Sequence
  Description of Artificial Sequence: Synthetic oligonucleotide
caaaauccgauucauccaa

SEQ ID NO: 391443 - RNA, 19 nt, Artificial Sequence
  Description of Artificial Sequence: Synthetic oligonucleotide
agugacccaagggacacag

SEQ ID NO: 391444 - RNA, 19 nt, Artificial Sequence
  Description of Artificial Sequence: Synthetic oligonucleotide
  modified_base (9)..(9): a, c, u, g, unknown or other
gaacugucncuuucauuac

SEQ ID NO: 391445 - RNA, 19 nt, Artificial Sequence
  Description of Artificial Sequence: Synthetic oligonucleotide
ucauuacagccugaaguga

SEQ ID NO: 391446 - RNA, 19 nt, Artificial Sequence
  Description of Artificial Sequence: Synthetic oligonucleotide
agucuggugucccauuagu

SEQ ID NO: 391447 - RNA, 19 nt, Artificial Sequence
  Description of Artificial Sequence: Synthetic oligonucleotide
gaucccuacaccuguugga

SEQ ID NO: 391448 - RNA, 19 nt, Artificial Sequence
  Description of Artificial Sequence: Synthetic oligonucleotide
aagauagcccuagccaagu

SEQ ID NO: 391449 - RNA, 19 nt, Artificial Sequence
  Description of Artificial Sequence: Synthetic oligonucleotide
accuguuggaaucgagucu

SEQ ID NO: 391450 - RNA, 19 nt, Artificial Sequence
  Description of Artificial Sequence: Synthetic oligonucleotide
cucccaguuuguaugaaca

SEQ ID NO: 391451 - RNA, 19 nt, Artificial Sequence
  Description of Artificial Sequence: Synthetic oligonucleotide
ucucccaguuuguaugaac

SEQ ID NO: 391452 - RNA, 19 nt, Artificial Sequence
  Description of Artificial Sequence: Synthetic oligonucleotide
  modified_base (4)..(4): a, c, u, g, unknown or other
cugnuccagccucagauga

SEQ ID NO: 391453 - RNA, 19 nt, Artificial Sequence
  Description of Artificial Sequence: Synthetic oligonucleotide
auucucgauacugugccca

SEQ ID NO: 391454 - RNA, 19 nt, Artificial Sequence
  Description of Artificial Sequence: Synthetic oligonucleotide
  modified_base (6)..(6): a, c, u, g, unknown or other
cugucncuuucauuacagc

SEQ ID NO: 391455 - RNA, 19 nt, Artificial Sequence
  Description of Artificial Sequence: Synthetic oligonucleotide
uuguuugccacgguccugu

SEQ ID NO: 391456 - RNA, 19 nt, Artificial Sequence
  Description of Artificial Sequence: Synthetic oligonucleotide
auauagcacacuacaccuc

SEQ ID NO: 391457 - RNA, 19 nt, Artificial Sequence
  Description of Artificial Sequence: Synthetic oligonucleotide
uggggaaguugcuuucaug

SEQ ID NO: 391458 - RNA, 19 nt, Artificial Sequence
  Description of Artificial Sequence: Synthetic oligonucleotide
auacauaugcagucuccau

SEQ ID NO: 391459 - RNA, 19 nt, Artificial Sequence
  Description of Artificial Sequence: Synthetic oligonucleotide
uauccagauucuccuaauu

SEQ ID NO: 391460 - RNA, 19 nt, Artificial Sequence
  Description of Artificial Sequence: Synthetic oligonucleotide
gagucuggugucccauuag

SEQ ID NO: 391461 - RNA, 19 nt, Artificial Sequence
  Description of Artificial Sequence: Synthetic oligonucleotide
uggucauuagcuugccuua

SEQ ID NO: 391462 - RNA, 19 nt, Artificial Sequence
  Description of Artificial Sequence: Synthetic oligonucleotide
gauucagcuauuucccgcu

SEQ ID NO: 391463 - RNA, 19 nt, Artificial Sequence
  Description of Artificial Sequence: Synthetic oligonucleotide
aaucgagucugguguccca

SEQ ID NO: 391464 - RNA, 19 nt, Artificial Sequence
  Description of Artificial Sequence: Synthetic oligonucleotide
caaucugaucccuacaccu

SEQ ID NO: 391465 - RNA, 19 nt, Artificial Sequence
  Description of Artificial Sequence: Synthetic oligonucleotide
uuauagccuaaugcuuuug

SEQ ID NO: 391466 - RNA, 19 nt, Artificial Sequence
  Description of Artificial Sequence: Synthetic oligonucleotide
ggggugucaugucucaggg

SEQ ID NO: 391467 - RNA, 19 nt, Artificial Sequence
  Description of Artificial Sequence: Synthetic oligonucleotide
agcauuuaagguccuccaa

SEQ ID NO: 391468 - RNA, 19 nt, Artificial Sequence
  Description of Artificial Sequence: Synthetic oligonucleotide
ccggaguccaucuuuaaac

SEQ ID NO: 391469 - RNA, 19 nt, Artificial Sequence
  Description of Artificial Sequence: Synthetic oligonucleotide
gggagauacauaugcaguc

SEQ ID NO: 391470 - RNA, 19 nt, Artificial Sequence
  Description of Artificial Sequence: Synthetic oligonucleotide
cacucacuaaucgguaacc

SEQ ID NO: 391471 - RNA, 19 nt, Artificial Sequence
  Description of Artificial Sequence: Synthetic oligonucleotide
aagcuaugcuuucccugga

SEQ ID NO: 391472 - RNA, 19 nt, Artificial Sequence
  Description of Artificial Sequence: Synthetic oligonucleotide
cucuucgcuugagaaaagc

SEQ ID NO: 391473 - RNA, 19 nt, Artificial Sequence
  Description of Artificial Sequence: Synthetic oligonucleotide
cuauggggaaguugcuuuc

SEQ ID NO: 391474 - RNA, 19 nt, Artificial Sequence
  Description of Artificial Sequence: Synthetic oligonucleotide
  modified_base (4)..(4): a, c, u, g, unknown or other
gucncuuucauuacagccu

SEQ ID NO: 391475 - RNA, 19 nt, Artificial Sequence
  Description of Artificial Sequence: Synthetic oligonucleotide
cugcuguccgcacaugaac

SEQ ID NO: 391476 - RNA, 19 nt, Artificial Sequence
  Description of Artificial Sequence: Synthetic oligonucleotide
  modified_base (3)..(3): a, c, u, g, unknown or other
ugnuccagccucagaugaa

SEQ ID NO: 391477 - RNA, 19 nt, Artificial Sequence
  Description of Artificial Sequence: Synthetic oligonucleotide
aggaaauguguuccagaau

SEQ ID NO: 391478 - RNA, 19 nt, Artificial Sequence
  Description of Artificial Sequence: Synthetic oligonucleotide
ugcuauccgaacacugcua

SEQ ID NO: 391479 - RNA, 19 nt, Artificial Sequence
  Description of Artificial Sequence: Synthetic oligonucleotide
caugagcuguucaacagua

SEQ ID NO: 391480 - RNA, 19 nt, Artificial Sequence
  Description of Artificial Sequence: Synthetic oligonucleotide
gaacaauguucucucgaua

SEQ ID NO: 391481 - RNA, 19 nt, Artificial Sequence
  Description of Artificial Sequence: Synthetic oligonucleotide
cacgugacugcaucagcac

SEQ ID NO: 391482 - RNA, 19 nt, Artificial Sequence
  Description of Artificial Sequence: Synthetic oligonucleotide
cguguuagagaaagcaggc

SEQ ID NO: 391483 - RNA, 19 nt, Artificial Sequence
  Description of Artificial Sequence: Synthetic oligonucleotide
uuuguuugccacgguccug

SEQ ID NO: 391484 - RNA, 19 nt, Artificial Sequence
  Description of Artificial Sequence: Synthetic oligonucleotide
augagcccuagacaacaga

SEQ ID NO: 391485 - RNA, 19 nt, Artificial Sequence
  Description of Artificial Sequence: Synthetic oligonucleotide
ggacacaguaucaaaguuc

SEQ ID NO: 391486 - RNA, 19 nt, Artificial Sequence
  Description of Artificial Sequence: Synthetic oligonucleotide
cugaugagcccuagacaac

SEQ ID NO: 391487 - RNA, 19 nt, Artificial Sequence
  Description of Artificial Sequence: Synthetic oligonucleotide
  modified_base (16)..(16): a, c, u, g, unknown or other
uagucacgaacugucncuu

SEQ ID NO: 391488 - RNA, 19 nt, Artificial Sequence
  Description of Artificial Sequence: Synthetic oligonucleotide
uucucucuuaacguagauu

SEQ ID NO: 391489 - RNA, 19 nt, Artificial Sequence
  Description of Artificial Sequence: Synthetic oligonucleotide
uucucgauacugugcccac

SEQ ID NO: 391490 - RNA, 19 nt, Artificial Sequence
  Description of Artificial Sequence: Synthetic oligonucleotide
uggaaucgagucugguguc

SEQ ID NO: 391491 - RNA, 19 nt, Artificial Sequence
  Description of Artificial Sequence: Synthetic oligonucleotide
cagacucucaaguuguugu

SEQ ID NO: 391492 - RNA, 19 nt, Artificial Sequence
  Description of Artificial Sequence: Synthetic oligonucleotide
auccgaacacugcuacuga

SEQ ID NO: 391493 - RNA, 19 nt, Artificial Sequence
  Description of Artificial Sequence: Synthetic oligonucleotide
gacucucaaguuguuguga

SEQ ID NO: 391494 - RNA, 19 nt, Artificial Sequence
  Description of Artificial Sequence: Synthetic oligonucleotide
caauugccuuaauauucuc

SEQ ID NO: 391495 - RNA, 19 nt, Artificial Sequence
  Description of Artificial Sequence: Synthetic oligonucleotide
cugaugcucauagucacga

SEQ ID NO: 391496 - RNA, 19 nt, Artificial Sequence
  Description of Artificial Sequence: Synthetic oligonucleotide
uccgaacacugcuacugau

SEQ ID NO: 391497 - RNA, 19 nt, Artificial Sequence
  Description of Artificial Sequence: Synthetic oligonucleotide
ccaagcugucuguagacug

SEQ ID NO: 391498 - RNA, 19 nt, Artificial Sequence
  Description of Artificial Sequence: Synthetic oligonucleotide
cugaucccuacaccuguug

SEQ ID NO: 391499 - RNA, 19 nt, Artificial Sequence
  Description of Artificial Sequence: Synthetic oligonucleotide
  modified_base (2)..(2): a, c, u, g, unknown or other
gnuccagccucagaugaaa

SEQ ID NO: 391500 - RNA, 19 nt, Artificial Sequence
  Description of Artificial Sequence: Synthetic oligonucleotide
cuuuaacuguuccucuaaa

SEQ ID NO: 391501 - RNA, 19 nt, Artificial Sequence
  Description of Artificial Sequence: Synthetic oligonucleotide
ugcccacugugcucgcucc

SEQ ID NO: 391502 - RNA, 19 nt, Artificial Sequence
  Description of Artificial Sequence: Synthetic oligonucleotide
uugccggauccucucuaac

SEQ ID NO: 391503 - RNA, 19 nt, Artificial Sequence
  Description of Artificial Sequence: Synthetic oligonucleotide
ccaaucugaucccuacacc

SEQ ID NO: 391504 - RNA, 19 nt, Artificial Sequence
  Description of Artificial Sequence: Synthetic oligonucleotide
uguaaccucugagcuuugu

SEQ ID NO: 391505 - RNA, 19 nt, Artificial Sequence
  Description of Artificial Sequence: Synthetic oligonucleotide
ugaugcucauagucacgaa

SEQ ID NO: 391506 - RNA, 19 nt, Artificial Sequence
  Description of Artificial Sequence: Synthetic oligonucleotide
gcucuuaggacaagugcag

SEQ ID NO: 391507 - RNA, 19 nt, Artificial Sequence
  Description of Artificial Sequence: Synthetic oligonucleotide
cucuuaacguagauuccaa

SEQ ID NO: 391508 - RNA, 19 nt, Artificial Sequence
  Description of Artificial Sequence: Synthetic oligonucleotide
  modified_base (11)..(11): a, c, u, g, unknown or other
acgaacugucncuuucauu

SEQ ID NO: 391509 - RNA, 19 nt, Artificial Sequence
  Description of Artificial Sequence: Synthetic oligonucleotide
ugcuaccggggugucaugu

SEQ ID NO: 391510 - RNA, 19 nt, Artificial Sequence
  Description of Artificial Sequence: Synthetic oligonucleotide
agcuguguccgaagaugac

SEQ ID NO: 391511 - RNA, 19 nt, Artificial Sequence
  Description of Artificial Sequence: Synthetic oligonucleotide
cucacucacuaaucgguaa

SEQ ID NO: 391512 - RNA, 19 nt, Artificial Sequence
  Description of Artificial Sequence: Synthetic oligonucleotide
uaccggggugucaugucuc

SEQ ID NO: 391513 - RNA, 19 nt, Artificial Sequence
  Description of Artificial Sequence: Synthetic oligonucleotide
ugcuagcuguaaugacaca

SEQ ID NO: 391514 - RNA, 19 nt, Artificial Sequence
  Description of Artificial Sequence: Synthetic oligonucleotide
cuaacugcaccugaagagu

SEQ ID NO: 391515 - RNA, 19 nt, Artificial Sequence
  Description of Artificial Sequence: Synthetic oligonucleotide
cucuguuguaacucuucaa

SEQ ID NO: 391516 - RNA, 19 nt, Artificial Sequence
  Description of Artificial Sequence: Synthetic oligonucleotide
gucucacucacuaaucggu

SEQ ID NO: 391517 - RNA, 19 nt, Artificial Sequence
  Description of Artificial Sequence: Synthetic oligonucleotide
cuaaugcuuuugauugcaa

SEQ ID NO: 391518 - RNA, 19 nt, Artificial Sequence
  Description of Artificial Sequence: Synthetic oligonucleotide
ggucauuagcuugccuuag

SEQ ID NO: 391519 - RNA, 19 nt, Artificial Sequence
  Description of Artificial Sequence: Synthetic oligonucleotide
gccuaaugcuuuugauugc

SEQ ID NO: 391520 - RNA, 19 nt, Artificial Sequence
  Description of Artificial Sequence: Synthetic oligonucleotide
agcgguccaaaauccgauu

SEQ ID NO: 391521 - RNA, 19 nt, Artificial Sequence
  Description of Artificial Sequence: Synthetic oligonucleotide
caagcuuauuuccagcauu

SEQ ID NO: 391522 - RNA, 19 nt, Artificial Sequence
  Description of Artificial Sequence: Synthetic oligonucleotide
ugauugcaacgagcuugag

SEQ ID NO: 391523 - RNA, 19 nt, Artificial Sequence
  Description of Artificial Sequence: Synthetic oligonucleotide
guaccucuuucugcaggag

SEQ ID NO: 391524 - RNA, 19 nt, Artificial Sequence
  Description of Artificial Sequence: Synthetic oligonucleotide
gauucucuccaaagagucu

SEQ ID NO: 391525 - RNA, 19 nt, Artificial Sequence
  Description of Artificial Sequence: Synthetic oligonucleotide
cacuacaccucucugcuau

SEQ ID NO: 391526 - RNA, 19 nt, Artificial Sequence
  Description of Artificial Sequence: Synthetic oligonucleotide
acacaguaucaaaguucuc

SEQ ID NO: 391527 - RNA, 19 nt, Artificial Sequence
  Description of Artificial Sequence: Synthetic oligonucleotide
  modified_base (5)..(5): a, c, u, g, unknown or other
ccugnuccagccucagaug

SEQ ID NO: 391528 - RNA, 19 nt, Artificial Sequence
  Description of Artificial Sequence: Synthetic oligonucleotide
gcgguccaaaauccgauuc

SEQ ID NO: 391529 - RNA, 19 nt, Artificial Sequence
  Description of Artificial Sequence: Synthetic oligonucleotide
  modified_base (15)..(15): a, c, u, g, unknown or other
agucacgaacugucncuuu

SEQ ID NO: 391530 - RNA, 19 nt, Artificial Sequence
  Description of Artificial Sequence: Synthetic oligonucleotide
agauagcccuagccaagua

SEQ ID NO: 391531 - RNA, 19 nt, Artificial Sequence
  Description of Artificial Sequence: Synthetic oligonucleotide
aacgucuaccaagcuuauu

SEQ ID NO: 391532 - RNA, 19 nt, Artificial Sequence
  Description of Artificial Sequence: Synthetic oligonucleotide
aagcucuguuguaacucuu

SEQ ID NO: 391533 - RNA, 19 nt, Artificial Sequence
  Description of Artificial Sequence: Synthetic oligonucleotide
aucgagucuggugucccau

SEQ ID NO: 391534 - RNA, 19 nt, Artificial Sequence
  Description of Artificial Sequence: Synthetic oligonucleotide
acccaaaaugcagguuaga

SEQ ID NO: 391535 - RNA, 19 nt, Artificial Sequence
  Description of Artificial Sequence: Synthetic oligonucleotide
caccaaucugaucccuaca

SEQ ID NO: 391536 - RNA, 19 nt, Artificial Sequence
  Description of Artificial Sequence: Synthetic oligonucleotide
uugcaacgagcuugagguu

SEQ ID NO: 391537 - RNA, 19 nt, Artificial Sequence
  Description of Artificial Sequence: Synthetic oligonucleotide
  modified_base (14)..(14): a, c, u, g, unknown or other
gugcucgcuccugnuccag

SEQ ID NO: 391538 - RNA, 19 nt, Artificial Sequence
  Description of Artificial Sequence: Synthetic oligonucleotide
cuugaguccucgguguucu

SEQ ID NO: 391539 - RNA, 19 nt, Artificial Sequence
  Description of Artificial Sequence: Synthetic oligonucleotide
gcucucacacuucauauuu

SEQ ID NO: 391540 - RNA, 19 nt, Artificial Sequence
  Description of Artificial Sequence: Synthetic oligonucleotide
ggagauacauaugcagucu

SEQ ID NO: 391541 - RNA, 19 nt, Artificial Sequence
  Description of Artificial Sequence: Synthetic oligonucleotide
caccucucugcuauccgaa

SEQ ID NO: 391542 - RNA, 19 nt, Artificial Sequence
  Description of Artificial Sequence: Synthetic oligonucleotide
agcacuuuacuggcaccaa

SEQ ID NO: 391543 - RNA, 19 nt, Artificial Sequence
  Description of Artificial Sequence: Synthetic oligonucleotide
acguaguuccaaacacuau

SEQ ID NO: 391544 - RNA, 19 nt, Artificial Sequence
  Description of Artificial Sequence: Synthetic oligonucleotide
gcaauugccuuaauauucu

SEQ ID NO: 391545 - RNA, 19 nt, Artificial Sequence
  Description of Artificial Sequence: Synthetic oligonucleotide
cacaacgucuaccaagcuu

SEQ ID NO: 391546 - RNA, 19 nt, Artificial Sequence
  Description of Artificial Sequence: Synthetic oligonucleotide
guaucugggaggaugucuu

SEQ ID NO: 391547 - RNA, 19 nt, Artificial Sequence
  Description of Artificial Sequence: Synthetic oligonucleotide
ucccgcucugcagauucuc

SEQ ID NO: 391548 - RNA, 19 nt, Artificial Sequence
  Description of Artificial Sequence: Synthetic oligonucleotide
gcuagcuguaaugacacau

SEQ ID NO: 391549 - RNA, 19 nt, Artificial Sequence
  Description of Artificial Sequence: Synthetic oligonucleotide
ggaacacauaucacaacgu

SEQ ID NO: 391550 - RNA, 19 nt, Artificial Sequence
  Description of Artificial Sequence: Synthetic oligonucleotide
cggggugucaugucucagg

SEQ ID NO: 391551 - RNA, 19 nt, Artificial Sequence
  Description of Artificial Sequence: Synthetic oligonucleotide
cgauacugugcccacugug

SEQ ID NO: 391552 - RNA, 19 nt, Artificial Sequence
  Description of Artificial Sequence: Synthetic oligonucleotide
acacuacaccucucugcua

SEQ ID NO: 391553 - RNA, 19 nt, Artificial Sequence
  Description of Artificial Sequence: Synthetic oligonucleotide
gcuacugaugagcccuaga

SEQ ID NO: 391554 - RNA, 19 nt, Artificial Sequence
  Description of Artificial Sequence: Synthetic oligonucleotide
  modified_base (2)..(2): a, c, u, g, unknown or other
cncuuucauuacagccuga

SEQ ID NO: 391555 - RNA, 19 nt, Artificial Sequence
  Description of Artificial Sequence: Synthetic oligonucleotide
cucucaaguuguugugacu

SEQ ID NO: 391556 - RNA, 19 nt, Artificial Sequence
  Description of Artificial Sequence: Synthetic oligonucleotide
cuaccggggugucaugucu

SEQ ID NO: 391557 - RNA, 19 nt, Artificial Sequence
  Description of Artificial Sequence: Synthetic oligonucleotide
uguuugccacgguccugua

SEQ ID NO: 391558 - RNA, 19 nt, Artificial Sequence
  Description of Artificial Sequence: Synthetic oligonucleotide
cuauccgaacacugcuacu

SEQ ID NO: 391559 - RNA, 19 nt, Artificial Sequence
  Description of Artificial Sequence: Synthetic oligonucleotide
cuccacugccuuuuaacuu

SEQ ID NO: 391560 - RNA, 19 nt, Artificial Sequence
  Description of Artificial Sequence: Synthetic oligonucleotide
  modified_base (7)..(7): a, c, u, g, unknown or other
cuccugnuccagccucaga

SEQ ID NO: 391561 - RNA, 19 nt, Artificial Sequence
  Description of Artificial Sequence: Synthetic oligonucleotide
cugcaccugaagagucuga

SEQ ID NO: 391562 - RNA, 19 nt, Artificial Sequence
  Description of Artificial Sequence: Synthetic oligonucleotide
agaauccguguuagagaaa

SEQ ID NO: 391563 - RNA, 19 nt, Artificial Sequence
  Description of Artificial Sequence: Synthetic oligonucleotide
ccauuaguguucccuuuga

SEQ ID NO: 391564 - RNA, 19 nt, Artificial Sequence
  Description of Artificial Sequence: Synthetic oligonucleotide
uccugcuaccgggguguca

SEQ ID NO: 391565 - RNA, 19 nt, Artificial Sequence
  Description of Artificial Sequence: Synthetic oligonucleotide
gguuaaugucugucaauuu

SEQ ID NO: 391566 - RNA, 19 nt, Artificial Sequence
  Description of Artificial Sequence: Synthetic oligonucleotide
cggaguccaucuuuaaaca

SEQ ID NO: 391567 - RNA, 19 nt, Artificial Sequence
  Description of Artificial Sequence: Synthetic oligonucleotide
gugucccauuaguguuccc

SEQ ID NO: 391568 - RNA, 19 nt, Artificial Sequence
  Description of Artificial Sequence: Synthetic oligonucleotide
ccucuucgcuugagaaaag

SEQ ID NO: 391569 - RNA, 19 nt, Artificial Sequence
  Description of Artificial Sequence: Synthetic oligonucleotide
gcuaccggggugucauguc

SEQ ID NO: 391570 - RNA, 19 nt, Artificial Sequence
  Description of Artificial Sequence: Synthetic oligonucleotide
cagcgguccaaaauccgau

SEQ ID NO: 391571 - RNA, 19 nt, Artificial Sequence
  Description of Artificial Sequence: Synthetic oligonucleotide
gguccaaaauccgauucau

SEQ ID NO: 391572 - RNA, 19 nt, Artificial Sequence
  Description of Artificial Sequence: Synthetic oligonucleotide
auccugcuaccgggguguc

SEQ ID NO: 391573 - RNA, 19 nt, Artificial Sequence
  Description of Artificial Sequence: Synthetic oligonucleotide
cugcuaccggggugucaug

SEQ ID NO: 391574 - RNA, 19 nt, Artificial Sequence
  Description of Artificial Sequence: Synthetic oligonucleotide
cucucacacuucauauuuu

SEQ ID NO: 391575 - RNA, 19 nt, Artificial Sequence
  Description of Artificial Sequence: Synthetic oligonucleotide
  modified_base (12)..(12): a, c, u, g, unknown or other
cacgaacugucncuuucau

SEQ ID NO: 391576 - RNA, 19 nt, Artificial Sequence
  Description of Artificial Sequence: Synthetic oligonucleotide
cuccggaguccaucuuuaa

SEQ ID NO: 391577 - RNA, 19 nt, Artificial Sequence
  Description of Artificial Sequence: Synthetic oligonucleotide
cccuagccaaguauccaga

SEQ ID NO: 391578 - RNA, 19 nt, Artificial Sequence
  Description of Artificial Sequence: Synthetic oligonucleotide
auuucccgcucugcagauu

SEQ ID NO: 391579 - RNA, 19 nt, Artificial Sequence
  Description of Artificial Sequence: Synthetic oligonucleotide
gagccucccacagcugugu

SEQ ID NO: 391580 - RNA, 19 nt, Artificial Sequence
  Description of Artificial Sequence: Synthetic oligonucleotide
  modified_base (8)..(8): a, c, u, g, unknown or other
gcuccugnuccagccucag

SEQ ID NO: 391581 - RNA, 19 nt, Artificial Sequence
  Description of Artificial Sequence: Synthetic oligonucleotide
gguuaacauaaagccacuu

SEQ ID NO: 391582 - RNA, 19 nt, Artificial Sequence
  Description of Artificial Sequence: Synthetic oligonucleotide
gcuguucaacaguagccuu

SEQ ID NO: 391583 - RNA, 19 nt, Artificial Sequence
  Description of Artificial Sequence: Synthetic oligonucleotide
cugucugauucagcuauuu

SEQ ID NO: 391584 - RNA, 19 nt, Artificial Sequence
  Description of Artificial Sequence: Synthetic oligonucleotide
caacgucuaccaagcuuau

SEQ ID NO: 391585 - RNA, 19 nt, Artificial Sequence
  Description of Artificial Sequence: Synthetic oligonucleotide
caguagcauuuaagguccu

SEQ ID NO: 391586 - RNA, 19 nt, Artificial Sequence
  Description of Artificial Sequence: Synthetic oligonucleotide
cuguccgcacaugaacaau

SEQ ID NO: 391587 - RNA, 19 nt, Artificial Sequence
  Description of Artificial Sequence: Synthetic oligonucleotide
ccaagcuuauuuccagcau

SEQ ID NO: 391588 - RNA, 19 nt, Artificial Sequence
  Description of Artificial Sequence: Synthetic oligonucleotide
ccugcuaccggggugucau

SEQ ID NO: 391589 - RNA, 19 nt, Artificial Sequence
  Description of Artificial Sequence: Synthetic oligonucleotide
ccggggugucaugucucag

SEQ ID NO: 391590 - RNA, 19 nt, Artificial Sequence
  Description of Artificial Sequence: Synthetic oligonucleotide
gugacccaagggacacagu

SEQ ID NO: 391591 - RNA, 19 nt, Artificial Sequence
  Description of Artificial Sequence: Synthetic oligonucleotide
cggagcaccuccacaguau

SEQ ID NO: 391592 - RNA, 19 nt, Artificial Sequence
  Description of Artificial Sequence: Synthetic oligonucleotide
gcucuccggaguccaucuu

SEQ ID NO: 391593 - RNA, 19 nt, Artificial Sequence
  Description of Artificial Sequence: Synthetic oligonucleotide
ccauacccugggugacgcu

SEQ ID NO: 391594 - RNA, 19 nt, Artificial Sequence
  Description of Artificial Sequence: Synthetic oligonucleotide
cgguaaccacugggagaua

SEQ ID NO: 391595 - RNA, 19 nt, Artificial Sequence
  Description of Artificial Sequence: Synthetic oligonucleotide
auauauauaauauauacac

SEQ ID NO: 391596 - RNA, 19 nt, Artificial Sequence
  Description of Artificial Sequence: Synthetic oligonucleotide
auuccuaggauucauaggc

SEQ ID NO: 391597 - RNA, 19 nt, Artificial Sequence
  Description of Artificial Sequence: Synthetic oligonucleotide
agaguuguaacacaucucc

SEQ ID NO: 391598 - RNA, 19 nt, Artificial Sequence
  Description of Artificial Sequence: Synthetic oligonucleotide
ucauauauauaauauauac

SEQ ID NO: 391599 - RNA, 19 nt, Artificial Sequence
  Description of Artificial Sequence: Synthetic oligonucleotide
ugaaauacgagaaggaucu

SEQ ID NO: 391600 - RNA, 19 nt, Artificial Sequence
  Description of Artificial Sequence: Synthetic oligonucleotide
uauaguugaagguggaugg

SEQ ID NO: 391601 - RNA, 19 nt, Artificial Sequence
  Description of Artificial Sequence: Synthetic oligonucleotide
ugucauauauauaauauau

SEQ ID NO: 391602 - RNA, 19 nt, Artificial Sequence
  Description of Artificial Sequence: Synthetic oligonucleotide
aaaucuauguccugagguc

SEQ ID NO: 391603 - RNA, 19 nt, Artificial Sequence
  Description of Artificial Sequence: Synthetic oligonucleotide
auacauauuaugcuuggcg

SEQ ID NO: 391604 - RNA, 19 nt, Artificial Sequence
  Description of Artificial Sequence: Synthetic oligonucleotide
uuuacguaagccaauugcc

SEQ ID NO: 391605 - RNA, 19 nt, Artificial Sequence
  Description of Artificial Sequence: Synthetic oligonucleotide
ucuacugcagcuaagaguu

SEQ ID NO: 391606 - RNA, 19 nt, Artificial Sequence
  Description of Artificial Sequence: Synthetic oligonucleotide
uauauauaauauauacaca

SEQ ID NO: 391607 - RNA, 19 nt, Artificial Sequence
  Description of Artificial Sequence: Synthetic oligonucleotide
ugucguugaacuuuuaucu

SEQ ID NO: 391608 - RNA, 19 nt, Artificial Sequence
  Description of Artificial Sequence: Synthetic oligonucleotide
aauugguccgucaccaucc

SEQ ID NO: 391609 - RNA, 19 nt, Artificial Sequence
  Description of Artificial Sequence: Synthetic oligonucleotide
gauucuugcauuaagccug

SEQ ID NO: 391610 - RNA, 19 nt, Artificial Sequence
  Description of Artificial Sequence: Synthetic oligonucleotide
cuuuacguaagccaauugc

SEQ ID NO: 391611 - RNA, 19 nt, Artificial Sequence
  Description of Artificial Sequence: Synthetic oligonucleotide
uccauaucggccaagcuug

SEQ ID NO: 391612 - RNA, 19 nt, Artificial Sequence
  Description of Artificial Sequence: Synthetic oligonucleotide
aaauugguccgucaccauc

SEQ ID NO: 391613 - RNA, 19 nt, Artificial Sequence
  Description of Artificial Sequence: Synthetic oligonucleotide
uuuauuaccaauagugcua

SEQ ID NO: 391614 - RNA, 19 nt, Artificial Sequence
  Description of Artificial Sequence: Synthetic oligonucleotide
ucccuaaugugaauguucg

SEQ ID NO: 391615 - RNA, 19 nt, Artificial Sequence
  Description of Artificial Sequence: Synthetic oligonucleotide
aauuuaguuguugggcagc

SEQ ID NO: 391616 - RNA, 19 nt, Artificial Sequence
  Description of Artificial Sequence: Synthetic oligonucleotide
ucagauugaggccuaaugu

SEQ ID NO: 391617 - RNA, 19 nt, Artificial Sequence
  Description of Artificial Sequence: Synthetic oligonucleotide
guaauagagauagaagagg

SEQ ID NO: 391618 - RNA, 19 nt, Artificial Sequence
  Description of Artificial Sequence: Synthetic oligonucleotide
uacauauuaugcuuggcga

SEQ ID NO: 391619 - RNA, 19 nt, Artificial Sequence
  Description of Artificial Sequence: Synthetic oligonucleotide
gauggaacuccuuagcuac

SEQ ID NO: 391620 - RNA, 19 nt, Artificial Sequence
  Description of Artificial Sequence: Synthetic oligonucleotide
aaauacgagaaggaucuuc

SEQ ID NO: 391621 - RNA, 19 nt, Artificial Sequence
  Description of Artificial Sequence: Synthetic oligonucleotide
uucauaggcaaaauacccc

SEQ ID NO: 391622 - RNA, 19 nt, Artificial Sequence
  Description of Artificial Sequence: Synthetic oligonucleotide
auauuccuaggauucauag

SEQ ID NO: 391623 - RNA, 19 nt, Artificial Sequence
  Description of Artificial Sequence: Synthetic oligonucleotide
agugcuacaaugaacaaug

SEQ ID NO: 391624 - RNA, 19 nt, Artificial Sequence
  Description of Artificial Sequence: Synthetic oligonucleotide
aaugcccugaccaaccugg

SEQ ID NO: 391625 - RNA, 19 nt, Artificial Sequence
  Description of Artificial Sequence: Synthetic oligonucleotide
aauuugggcccaucuguac

SEQ ID NO: 391626 - RNA, 19 nt, Artificial Sequence
  Description of Artificial Sequence: Synthetic oligonucleotide
uucagauggaacauggaaa

SEQ ID NO: 391627 - RNA, 19 nt, Artificial Sequence
  Description of Artificial Sequence: Synthetic oligonucleotide
uccacaugaaauacgagaa

SEQ ID NO: 391628 - RNA, 19 nt, Artificial Sequence
  Description of Artificial Sequence: Synthetic oligonucleotide
aaucguaacaaagacugga

SEQ ID NO: 391629 - RNA, 19 nt, Artificial Sequence
  Description of Artificial Sequence: Synthetic oligonucleotide
uuuauuaacggaguugggu

SEQ ID NO: 391630 - RNA, 19 nt, Artificial Sequence
  Description of Artificial Sequence: Synthetic oligonucleotide
uuauaguugaagguggaug

SEQ ID NO: 391631 - RNA, 19 nt, Artificial Sequence
  Description of Artificial Sequence: Synthetic oligonucleotide
uauuccuaggauucauagg

SEQ ID NO: 391632 - RNA, 19 nt, Artificial Sequence
  Description of Artificial Sequence: Synthetic oligonucleotide
cauauauauaauauauaca

SEQ ID NO: 391633 - RNA, 19 nt, Artificial Sequence
  Description of Artificial Sequence: Synthetic oligonucleotide
auguucguuaaauauucag

SEQ ID NO: 391634 - RNA, 19 nt, Artificial Sequence
  Description of Artificial Sequence: Synthetic oligonucleotide
gaauguuaguaacucggcc

SEQ ID NO: 391635 - RNA, 19 nt, Artificial Sequence
  Description of Artificial Sequence: Synthetic oligonucleotide
aggaauguuaguaacucgg

SEQ ID NO: 391636 - RNA, 19 nt, Artificial Sequence
  Description of Artificial Sequence: Synthetic oligonucleotide
uuuauagcuggaaccaggu

SEQ ID NO: 391637 - RNA, 19 nt, Artificial Sequence
  Description of Artificial Sequence: Synthetic oligonucleotide
ucguugaacuuuuaucucc

SEQ ID NO: 391638 - RNA, 19 nt, Artificial Sequence
  Description of Artificial Sequence: Synthetic oligonucleotide
uaacaggccaaucauucca

SEQ ID NO: 391639 - RNA, 19 nt, Artificial Sequence
  Description of Artificial Sequence: Synthetic oligonucleotide
acauauuaugcuuggcgag

SEQ ID NO: 391640 - RNA, 19 nt, Artificial Sequence
  Description of Artificial Sequence: Synthetic oligonucleotide
aguaacaacacagcccugg

SEQ ID NO: 391641 - RNA, 19 nt, Artificial Sequence
  Description of Artificial Sequence: Synthetic oligonucleotide
augaaauacgagaaggauc

SEQ ID NO: 391642 - RNA, 19 nt, Artificial Sequence
  Description of Artificial Sequence: Synthetic oligonucleotide
aacggaguuggguuaccac

SEQ ID NO: 391643 - RNA, 19 nt, Artificial Sequence
  Description of Artificial Sequence: Synthetic oligonucleotide
uuauuaacggaguuggguu

SEQ ID NO: 391644 - RNA, 19 nt, Artificial Sequence
  Description of Artificial Sequence: Synthetic oligonucleotide
aaagcgagauguaccauuc

SEQ ID NO: 391645 - RNA, 19 nt, Artificial Sequence
  Description of Artificial Sequence: Synthetic oligonucleotide
uguugguuaccccuguugu

SEQ ID NO: 391646 - RNA, 19 nt, Artificial Sequence
  Description of Artificial Sequence: Synthetic oligonucleotide
cauuacucgacguuggguc

SEQ ID NO: 391647 - RNA, 19 nt, Artificial Sequence
  Description of Artificial Sequence: Synthetic oligonucleotide
acgagaaggaucuucacau

SEQ ID NO: 391648 - RNA, 19 nt, Artificial Sequence
  Description of Artificial Sequence: Synthetic oligonucleotide
gucgacaaggugaagaugc

SEQ ID NO: 391649 - RNA, 19 nt, Artificial Sequence
  Description of Artificial Sequence: Synthetic oligonucleotide
ucaucauuacucgacguug

SEQ ID NO: 391650 - RNA, 19 nt, Artificial Sequence
  Description of Artificial Sequence: Synthetic oligonucleotide
ugagcaggguuauaguuga

SEQ ID NO: 391651 - RNA, 19 nt, Artificial Sequence
  Description of Artificial Sequence: Synthetic oligonucleotide
ugcuauuuguccugcuagg

SEQ ID NO: 391652 - RNA, 19 nt, Artificial Sequence
  Description of Artificial Sequence: Synthetic oligonucleotide
uuagcuacuuuccuccagu

SEQ ID NO: 391653 - RNA, 19 nt, Artificial Sequence
  Description of Artificial Sequence: Synthetic oligonucleotide
aggggaaguaaaaugaaag

SEQ ID NO: 391654 - RNA, 19 nt, Artificial Sequence
  Description of Artificial Sequence: Synthetic oligonucleotide
aaauaccccugcuuggaga

SEQ ID NO: 391655 - RNA, 19 nt, Artificial Sequence
  Description of Artificial Sequence: Synthetic oligonucleotide
aguaaaaggcugucgagaa

SEQ ID NO: 391656 - RNA, 19 nt, Artificial Sequence
  Description of Artificial Sequence: Synthetic oligonucleotide
uauuucggucugcuaaugc

SEQ ID NO: 391657 - RNA, 19 nt, Artificial Sequence
  Description of Artificial Sequence: Synthetic oligonucleotide
uguuguuggcgugacgugg

SEQ ID NO: 391658 - RNA, 19 nt, Artificial Sequence
  Description of Artificial Sequence: Synthetic oligonucleotide
uuaacaggccaaucauucc

SEQ ID NO: 391659 - RNA, 19 nt, Artificial Sequence
  Description of Artificial Sequence: Synthetic oligonucleotide
caucauuacucgacguugg

SEQ ID NO: 391660 - RNA, 19 nt, Artificial Sequence
  Description of Artificial Sequence: Synthetic oligonucleotide
ggauucauaggcaaaauac

SEQ ID NO: 391661 - RNA, 19 nt, Artificial Sequence
  Description of Artificial Sequence: Synthetic oligonucleotide
aguucugcggaucugucga

SEQ ID NO: 391662 - RNA, 19 nt, Artificial Sequence
  Description of Artificial Sequence: Synthetic oligonucleotide
uguuguuaagucacuuccu

SEQ ID NO: 391663 - RNA, 19 nt, Artificial Sequence
  Description of Artificial Sequence: Synthetic oligonucleotide
gucuuuauagacccaaguc

SEQ ID NO: 391664 - RNA, 19 nt, Artificial Sequence
  Description of Artificial Sequence: Synthetic oligonucleotide
uuguugguuaccccuguug

SEQ ID NO: 391665 - RNA, 19 nt, Artificial Sequence
  Description of Artificial Sequence: Synthetic oligonucleotide
aaauuagauuugcugucau

SEQ ID NO: 391666 - RNA, 19 nt, Artificial Sequence
  Description of Artificial Sequence: Synthetic oligonucleotide
cuuaucccuaaugugaaug

SEQ ID NO: 391667 - RNA, 19 nt, Artificial Sequence
  Description of Artificial Sequence: Synthetic oligonucleotide
uuauuaccaauagugcuac

SEQ ID NO: 391668 - RNA, 19 nt, Artificial Sequence
  Description of Artificial Sequence: Synthetic oligonucleotide
guuggcgugacguggcucg

SEQ ID NO: 391669 - RNA, 19 nt, Artificial Sequence
  Description of Artificial Sequence: Synthetic oligonucleotide
cuuugugguaucuccaauc

SEQ ID NO: 391670 - RNA, 19 nt, Artificial Sequence
  Description of Artificial Sequence: Synthetic oligonucleotide
auuaacggaguuggguuac

SEQ ID NO: 391671 - RNA, 19 nt, Artificial Sequence
  Description of Artificial Sequence: Synthetic oligonucleotide
aaugugaauguucguuaaa

SEQ ID NO: 391672 - RNA, 19 nt, Artificial Sequence
  Description of Artificial Sequence: Synthetic oligonucleotide
guuuuguuaccauuccgac

SEQ ID NO: 391673 - RNA, 19 nt, Artificial Sequence
  Description of Artificial Sequence: Synthetic oligonucleotide
uugguuaccccuguuguug

SEQ ID NO: 391674 - RNA, 19 nt, Artificial Sequence
  Description of Artificial Sequence: Synthetic oligonucleotide
uaaugugaauguucguuaa

SEQ ID NO: 391675 - RNA, 19 nt, Artificial Sequence
  Description of Artificial Sequence: Synthetic oligonucleotide
cauauuaugcuuggcgagc

SEQ ID NO: 391676 - RNA, 19 nt, Artificial Sequence
  Description of Artificial Sequence: Synthetic oligonucleotide
gacguugggucuuuauagc

SEQ ID NO: 391677 - RNA, 19 nt, Artificial Sequence
  Description of Artificial Sequence: Synthetic oligonucleotide
cuaccuaacccugaacugc

SEQ ID NO: 391678 - RNA, 19 nt, Artificial Sequence
  Description of Artificial Sequence: Synthetic oligonucleotide
aucauuacucgacguuggg

SEQ ID NO: 391679 - RNA, 19 nt, Artificial Sequence
  Description of Artificial Sequence: Synthetic oligonucleotide
ugugucguugaacuuuuau

SEQ ID NO: 391680 - RNA, 19 nt, Artificial Sequence
  Description of Artificial Sequence: Synthetic oligonucleotide
ugcugauuauuguuuugug

SEQ ID NO: 391681 - RNA, 19 nt, Artificial Sequence
  Description of Artificial Sequence: Synthetic oligonucleotide
ugcagcuaagaguuguaac

SEQ ID NO: 391682 - RNA, 19 nt, Artificial Sequence
  Description of Artificial Sequence: Synthetic oligonucleotide
auuaccaauagugcuacaa

SEQ ID NO: 391683 - RNA, 19 nt, Artificial Sequence
  Description of Artificial Sequence: Synthetic oligonucleotide
cacccguucuucuuugugg

SEQ ID NO: 391684 - RNA, 19 nt, Artificial Sequence
  Description of Artificial Sequence: Synthetic oligonucleotide
ucuauuucggucugcuaau

SEQ ID NO: 391685 - RNA, 19 nt, Artificial Sequence
  Description of Artificial Sequence: Synthetic oligonucleotide
uuacuugauaaggaguuau

SEQ ID NO: 391686 - RNA, 19 nt, Artificial Sequence
  Description of Artificial Sequence: Synthetic oligonucleotide
uucuguuggggcuaccuaa

SEQ ID NO: 391687 - RNA, 19 nt, Artificial Sequence
  Description of Artificial Sequence: Synthetic oligonucleotide
cagcuuaucccuaauguga

SEQ ID NO: 391688 - RNA, 19 nt, Artificial Sequence
  Description of Artificial Sequence: Synthetic oligonucleotide
augcaaauuugggauagag

SEQ ID NO: 391689 - RNA, 19 nt, Artificial Sequence
  Description of Artificial Sequence: Synthetic oligonucleotide
uauuaacggaguuggguua

SEQ ID NO: 391690 - RNA, 19 nt, Artificial Sequence
  Description of Artificial Sequence: Synthetic oligonucleotide
agagugaauugucuuaguu

SEQ ID NO: 391691 - RNA, 19 nt, Artificial Sequence
  Description of Artificial Sequence: Synthetic oligonucleotide
auauugcauccaugcacac

SEQ ID NO: 391692 - RNA, 19 nt, Artificial Sequence
  Description of Artificial Sequence: Synthetic oligonucleotide
auggugacccuuuacguaa

SEQ ID NO: 391693 - RNA, 19 nt, Artificial Sequence
  Description of Artificial Sequence: Synthetic oligonucleotide
acggaguuggguuaccacu

SEQ ID NO: 391694 - RNA, 19 nt, Artificial Sequence
  Description of Artificial Sequence: Synthetic oligonucleotide
aguucacgucuugaagucc

SEQ ID NO: 391695 - RNA, 19 nt, Artificial Sequence
  Description of Artificial Sequence: Synthetic oligonucleotide
ugcuguucaaacagccaga

SEQ ID NO: 391696 - RNA, 19 nt, Artificial Sequence
  Description of Artificial Sequence: Synthetic oligonucleotide
gacauuguugguuaccccu

SEQ ID NO: 391697 - RNA, 19 nt, Artificial Sequence
  Description of Artificial Sequence: Synthetic oligonucleotide
gacuguggcaaucucuaca

SEQ ID NO: 391698 - RNA, 19 nt, Artificial Sequence
  Description of Artificial Sequence: Synthetic oligonucleotide
cacaguaaaaggcugucga

SEQ ID NO: 391699 - RNA, 19 nt, Artificial Sequence
  Description of Artificial Sequence: Synthetic oligonucleotide
uuggguuaccacuuccuuc

SEQ ID NO: 391700 - RNA, 19 nt, Artificial Sequence
  Description of Artificial Sequence: Synthetic oligonucleotide
auuacucgacguugggucu

SEQ ID NO: 391701 - RNA, 19 nt, Artificial Sequence
  Description of Artificial Sequence: Synthetic oligonucleotide
gugaauguucguuaaauau

SEQ ID NO: 391702 - RNA, 19 nt, Artificial Sequence
  Description of Artificial Sequence: Synthetic oligonucleotide
uuccuaggauucauaggca

SEQ ID NO: 391703 - RNA, 19 nt, Artificial Sequence
  Description of Artificial Sequence: Synthetic oligonucleotide
uucguacauacauaccuuu

SEQ ID NO: 391704 - RNA, 19 nt, Artificial Sequence
  Description of Artificial Sequence: Synthetic oligonucleotide
guuaccauuccgacguaag

SEQ ID NO: 391705 - RNA, 19 nt, Artificial Sequence
  Description of Artificial Sequence: Synthetic oligonucleotide
ucgacaaggugaagaugcc

SEQ ID NO: 391706 - RNA, 19 nt, Artificial Sequence
  Description of Artificial Sequence: Synthetic oligonucleotide
agauggaacuccuuagcua

SEQ ID NO: 391707 - RNA, 19 nt, Artificial Sequence
  Description of Artificial Sequence: Synthetic oligonucleotide
caugugauguccaaaauuu

SEQ ID NO: 391708 - RNA, 19 nt, Artificial Sequence
  Description of Artificial Sequence: Synthetic oligonucleotide
agggaauuugggcccaucu

SEQ ID NO: 391709 - RNA, 19 nt, Artificial Sequence
  Description of Artificial Sequence: Synthetic oligonucleotide
ucgacguugggucuuuaua

SEQ ID NO: 391710 - RNA, 19 nt, Artificial Sequence
  Description of Artificial Sequence: Synthetic oligonucleotide
aucggccaagcuugauugc

SEQ ID NO: 391711 - RNA, 19 nt, Artificial Sequence
  Description of Artificial Sequence: Synthetic oligonucleotide
aauguucguuaaauauuca

SEQ ID NO: 391712 - RNA, 19 nt, Artificial Sequence
  Description of Artificial Sequence: Synthetic oligonucleotide
guuaguaacucggccauca

SEQ ID NO: 391713 - RNA, 19 nt, Artificial Sequence
  Description of Artificial Sequence: Synthetic oligonucleotide
gaguuggguuaccacuucc

SEQ ID NO: 391714 - RNA, 19 nt, Artificial Sequence
  Description of Artificial Sequence: Synthetic oligonucleotide
guuuauuaacggaguuggg

SEQ ID NO: 391715 - RNA, 19 nt, Artificial Sequence
  Description of Artificial Sequence: Synthetic oligonucleotide
cuaugaaacgcugcuguuc

SEQ ID NO: 391716 - RNA, 19 nt, Artificial Sequence
  Description of Artificial Sequence: Synthetic oligonucleotide
aaaagcucuacugcagcua

SEQ ID NO: 391717 - RNA, 19 nt, Artificial Sequence
  Description of Artificial Sequence: Synthetic oligonucleotide
guucacgucuugaaguccc

SEQ ID NO: 391718 - RNA, 19 nt, Artificial Sequence
  Description of Artificial Sequence: Synthetic oligonucleotide
ucauuacucgacguugggu

SEQ ID NO: 391719 - RNA, 19 nt, Artificial Sequence
  Description of Artificial Sequence: Synthetic oligonucleotide
cauacauauuaugcuuggc

SEQ ID NO: 391720 - RNA, 19 nt, Artificial Sequence
  Description of Artificial Sequence: Synthetic oligonucleotide
uggucuaauuuuguugagu

SEQ ID NO: 391721 - RNA, 19 nt, Artificial Sequence
  Description of Artificial Sequence: Synthetic oligonucleotide
uauucaugugauguccaaa

SEQ ID NO: 391722 - RNA, 19 nt, Artificial Sequence
  Description of Artificial Sequence: Synthetic oligonucleotide
caaaaucguaacaaagacu

SEQ ID NO: 391723 - RNA, 19 nt, Artificial Sequence
  Description of Artificial Sequence: Synthetic oligonucleotide
ggugaugcaaauuugggau

SEQ ID NO: 391724 - RNA, 19 nt, Artificial Sequence
  Description of Artificial Sequence: Synthetic oligonucleotide
aggccuaauguuguuaagu

SEQ ID NO: 391725 - RNA, 19 nt, Artificial Sequence
  Description of Artificial Sequence: Synthetic oligonucleotide
cagcuaagaguuguaacac

SEQ ID NO: 391726 - RNA, 19 nt, Artificial Sequence
  Description of Artificial Sequence: Synthetic oligonucleotide
uuccccgauguauucaaau

SEQ ID NO: 391727 - RNA, 19 nt, Artificial Sequence
  Description of Artificial Sequence: Synthetic oligonucleotide
uaacuucugucaguguacu

SEQ ID NO: 391728 - RNA, 19 nt, Artificial Sequence
  Description of Artificial Sequence: Synthetic oligonucleotide
cccgauguauucaaauuag

SEQ ID NO: 391729 - RNA, 19 nt, Artificial Sequence
  Description of Artificial Sequence: Synthetic oligonucleotide
gucguugaacuuuuaucuc

SEQ ID NO: 391730 - RNA, 19 nt, Artificial Sequence
  Description of Artificial Sequence: Synthetic oligonucleotide
cuccuuagcuacuuuccuc

SEQ ID NO: 391731 - RNA, 19 nt, Artificial Sequence
  Description of Artificial Sequence: Synthetic oligonucleotide
ugcggaucugucgaguacu

SEQ ID NO: 391732 - RNA, 19 nt, Artificial Sequence
  Description of Artificial Sequence: Synthetic oligonucleotide
cuuuagugcacagggcgac

SEQ ID NO: 391733 - RNA, 19 nt, Artificial Sequence
  Description of Artificial Sequence: Synthetic oligonucleotide
ggcucgguaacugagugcc

SEQ ID NO: 391734 - RNA, 19 nt, Artificial Sequence
  Description of Artificial Sequence: Synthetic oligonucleotide
guggcucgguaacugagug

SEQ ID NO: 391735 - RNA, 19 nt, Artificial Sequence
  Description of Artificial Sequence: Synthetic oligonucleotide
ucgguaacugagugccuug

SEQ ID NO: 391736 - RNA, 19 nt, Artificial Sequence
  Description of Artificial Sequence: Synthetic oligonucleotide
aucugucgaguacugugcu

SEQ ID NO: 391737 - RNA, 19 nt, Artificial Sequence
  Description of Artificial Sequence: Synthetic oligonucleotide
auuuaguuguugggcagca

SEQ ID NO: 391738 - RNA, 19 nt, Artificial Sequence
  Description of Artificial Sequence: Synthetic oligonucleotide
gcuaggaauuccaaugccc

SEQ ID NO: 391739 - RNA, 19 nt, Artificial Sequence
  Description of Artificial Sequence: Synthetic oligonucleotide
ugaccaaccugggaguggu

SEQ ID NO: 391740 - RNA, 19 nt, Artificial Sequence
  Description of Artificial Sequence: Synthetic oligonucleotide
ggcgugugaagugacauug

SEQ ID NO: 391741 - RNA, 19 nt, Artificial Sequence
  Description of Artificial Sequence: Synthetic oligonucleotide
uuaccccuguuguuggcgu

SEQ ID NO: 391742 - RNA, 19 nt, Artificial Sequence
  Description of Artificial Sequence: Synthetic oligonucleotide
ugucgaguacugugcugag

SEQ ID NO: 391743 - RNA, 19 nt, Artificial Sequence
  Description of Artificial Sequence: Synthetic oligonucleotide
gucauauauauaauauaua

SEQ ID NO: 391744 - RNA, 19 nt, Artificial Sequence
  Description of Artificial Sequence: Synthetic oligonucleotide
uccccgauguauucaaauu

SEQ ID NO: 391745 - RNA, 19 nt, Artificial Sequence
  Description of Artificial Sequence: Synthetic oligonucleotide
gcuaccuaacccugaacug

SEQ ID NO: 391746 - RNA, 19 nt, Artificial Sequence
  Description of Artificial Sequence: Synthetic oligonucleotide
acacccguucuucuuugug

SEQ ID NO: 391747 - RNA, 19 nt, Artificial Sequence
  Description of Artificial Sequence: Synthetic oligonucleotide
ucggccaagcuugauugca

SEQ ID NO: 391748 - RNA, 19 nt, Artificial Sequence
  Description of Artificial Sequence: Synthetic oligonucleotide
agggcgacaaaguccccug

SEQ ID NO: 391749 - RNA, 19 nt, Artificial Sequence
  Description of Artificial Sequence: Synthetic oligonucleotide
gacccuuuacguaagccaa

SEQ ID NO: 391750 - RNA, 19 nt, Artificial Sequence
  Description of Artificial Sequence: Synthetic oligonucleotide
gccaagggguuuauuaacg

SEQ ID NO: 391751 - RNA, 19 nt, Artificial Sequence
  Description of Artificial Sequence: Synthetic oligonucleotide
ggccuaauguuguuaaguc

SEQ ID NO: 391752 - RNA, 19 nt, Artificial Sequence
  Description of Artificial Sequence: Synthetic oligonucleotide
uucacgucuugaaguccca

SEQ ID NO: 391753 - RNA, 19 nt, Artificial Sequence
  Description of Artificial Sequence: Synthetic oligonucleotide
caguaaaaggcugucgaga

SEQ ID NO: 391754 - RNA, 19 nt, Artificial Sequence
  Description of Artificial Sequence: Synthetic oligonucleotide
ggguuuauuaacggaguug

SEQ ID NO: 391755 - RNA, 19 nt, Artificial Sequence
  Description of Artificial Sequence: Synthetic oligonucleotide
ugacguggcucgguaacug

SEQ ID NO: 391756 - RNA, 19 nt, Artificial Sequence
  Description of Artificial Sequence: Synthetic oligonucleotide
uccccucucguauguguug

SEQ ID NO: 391757 - RNA, 19 nt, Artificial Sequence
  Description of Artificial Sequence: Synthetic oligonucleotide
ccuaaagcgagauguacca

SEQ ID NO: 391758 - RNA, 19 nt, Artificial Sequence
  Description of Artificial Sequence: Synthetic oligonucleotide
uggcucgguaacugagugc

SEQ ID NO: 391759 - RNA, 19 nt, Artificial Sequence
  Description of Artificial Sequence: Synthetic oligonucleotide
ggaccucaaauggugaccc

SEQ ID NO: 391760 - RNA, 19 nt, Artificial Sequence
  Description of Artificial Sequence: Synthetic oligonucleotide
uguuaccauuccgacguaa

SEQ ID NO: 391761 - RNA, 19 nt, Artificial Sequence
  Description of Artificial Sequence: Synthetic oligonucleotide
cgacguugggucuuuauag

SEQ ID NO: 391762 - RNA, 19 nt, Artificial Sequence
  Description of Artificial Sequence: Synthetic oligonucleotide
gugacccuuuacguaagcc

SEQ ID NO: 391763 - RNA, 19 nt, Artificial Sequence
  Description of Artificial Sequence: Synthetic oligonucleotide
aguuggguuaccacuuccu

SEQ ID NO: 391764 - RNA, 19 nt, Artificial Sequence
  Description of Artificial Sequence: Synthetic oligonucleotide
cuguuggggcuaccuaacc

SEQ ID NO: 391765 - RNA, 19 nt, Artificial Sequence
  Description of Artificial Sequence: Synthetic oligonucleotide
ucaugcuauuuguccugcu

SEQ ID NO: 391766 - RNA, 19 nt, Artificial Sequence
  Description of Artificial Sequence: Synthetic oligonucleotide
cuguuguuggcgugacgug

SEQ ID NO: 391767 - RNA, 19 nt, Artificial Sequence
  Description of Artificial Sequence: Synthetic oligonucleotide
uuaacggaguuggguuacc

SEQ ID NO: 391768 - RNA, 19 nt, Artificial Sequence
  Description of Artificial Sequence: Synthetic oligonucleotide
cuauuucggucugcuaaug

SEQ ID NO: 391769 - RNA, 19 nt, Artificial Sequence
  Description of Artificial Sequence: Synthetic oligonucleotide
uuuaguuguugggcagcac

SEQ ID NO: 391770 - RNA, 19 nt, Artificial Sequence
  Description of Artificial Sequence: Synthetic oligonucleotide
uccaauccugucacauuuu

SEQ ID NO: 391771 - RNA, 19 nt, Artificial Sequence
  Description of Artificial Sequence: Synthetic oligonucleotide
ugggucuuuauagcuggaa

SEQ ID NO: 391772 - RNA, 19 nt, Artificial Sequence
  Description of Artificial Sequence: Synthetic oligonucleotide
auuccgacguaaggugcuc

SEQ ID NO: 391773 - RNA, 19 nt, Artificial Sequence
  Description of Artificial Sequence: Synthetic oligonucleotide
ggcuaccuaacccugaacu

SEQ ID NO: 391774 - RNA, 19 nt, Artificial Sequence
  Description of Artificial Sequence: Synthetic oligonucleotide
ggaguuauucauuccaaau

SEQ ID NO: 391775 - RNA, 19 nt, Artificial Sequence
  Description of Artificial Sequence: Synthetic oligonucleotide
auugaggccuaauguuguu

SEQ ID NO: 391776 - RNA, 19 nt, Artificial Sequence
  Description of Artificial Sequence: Synthetic oligonucleotide
gaauuugggcccaucugua

SEQ ID NO: 391777 - RNA, 19 nt, Artificial Sequence
  Description of Artificial Sequence: Synthetic oligonucleotide
guucugcggaucugucgag

SEQ ID NO: 391778 - RNA, 19 nt, Artificial Sequence
  Description of Artificial Sequence: Synthetic oligonucleotide
uuccccucucguauguguu

SEQ ID NO: 391779 - RNA, 19 nt, Artificial Sequence
  Description of Artificial Sequence: Synthetic oligonucleotide
cugaccaaccugggagugg

SEQ ID NO: 391780 - RNA, 19 nt, Artificial Sequence
  Description of Artificial Sequence: Synthetic oligonucleotide
gacguggcucgguaacuga

SEQ ID NO: 391781 - RNA, 19 nt, Artificial Sequence
  Description of Artificial Sequence: Synthetic oligonucleotide
gaugcaaauuugggauaga

SEQ ID NO: 391782 - RNA, 19 nt, Artificial Sequence
  Description of Artificial Sequence: Synthetic oligonucleotide
uaccccuguuguuggcgug

SEQ ID NO: 391783 - RNA, 19 nt, Artificial Sequence
  Description of Artificial Sequence: Synthetic oligonucleotide
acguggcucgguaacugag

SEQ ID NO: 391784 - RNA, 19 nt, Artificial Sequence
  Description of Artificial Sequence: Synthetic oligonucleotide
uccgacguaaggugcucuu

SEQ ID NO: 391785 - RNA, 19 nt, Artificial Sequence
  Description of Artificial Sequence: Synthetic oligonucleotide
caucuguacuugaagucgu

SEQ ID NO: 391786 - RNA, 19 nt, Artificial Sequence
  Description of Artificial Sequence: Synthetic oligonucleotide
gucaucauuacucgacguu

SEQ ID NO: 391787 - RNA, 19 nt, Artificial Sequence
  Description of Artificial Sequence: Synthetic oligonucleotide
uguuccccucucguaugug

SEQ ID NO: 391788 - RNA, 19 nt, Artificial Sequence
  Description of Artificial Sequence: Synthetic oligonucleotide
guacuugcuugucuuuaua

SEQ ID NO: 391789 - RNA, 19 nt, Artificial Sequence
  Description of Artificial Sequence: Synthetic oligonucleotide
uuccgacguaaggugcucu

SEQ ID NO: 391790 - RNA, 19 nt, Artificial Sequence
  Description of Artificial Sequence: Synthetic oligonucleotide
ugaggccguucuucuaauu

SEQ ID NO: 391791 - RNA, 19 nt, Artificial Sequence
  Description of Artificial Sequence: Synthetic oligonucleotide
uuggcgugacguggcucgg

SEQ ID NO: 391792 - RNA, 19 nt, Artificial Sequence
  Description of Artificial Sequence: Synthetic oligonucleotide
uguuggcgugacguggcuc

SEQ ID NO: 391793 - RNA, 19 nt, Artificial Sequence
  Description of Artificial Sequence: Synthetic oligonucleotide
cgacguaaggugcucuucc

SEQ ID NO: 391794 - RNA, 19 nt, Artificial Sequence
  Description of Artificial Sequence: Synthetic oligonucleotide
ccuuuacguaagccaauug

SEQ ID NO: 391795 - RNA, 19 nt, Artificial Sequence
  Description of Artificial Sequence: Synthetic oligonucleotide
uuacucgacguugggucuu

SEQ ID NO: 391796 - RNA, 19 nt, Artificial Sequence
  Description of Artificial Sequence: Synthetic oligonucleotide
guuccccucucguaugugu

SEQ ID NO: 391797 - RNA, 19 nt, Artificial Sequence
  Description of Artificial Sequence: Synthetic oligonucleotide
gguccgucaccaucccuug

SEQ ID NO: 391798 - RNA, 19 nt, Artificial Sequence
  Description of Artificial Sequence: Synthetic oligonucleotide
ggcgagcuucuguuggggc

SEQ ID NO: 391799 - RNA, 19 nt, Artificial Sequence
  Description of Artificial Sequence: Synthetic oligonucleotide
ggucgacaaggugaagaug

SEQ ID NO: 391800 - RNA, 19 nt, Artificial Sequence
  Description of Artificial Sequence: Synthetic oligonucleotide
gaggcgugugaagugacau

SEQ ID NO: 391801 - RNA, 19 nt, Artificial Sequence
  Description of Artificial Sequence: Synthetic oligonucleotide
guuggguuaccacuuccuu

SEQ ID NO: 391802 - RNA, 19 nt, Artificial Sequence
  Description of Artificial Sequence: Synthetic oligonucleotide
cuucuauuucggucugcua

SEQ ID NO: 391803 - RNA, 19 nt, Artificial Sequence
  Description of Artificial Sequence: Synthetic oligonucleotide
ccuuuagugcacagggcga

SEQ ID NO: 391804 - RNA, 19 nt, Artificial Sequence
  Description of Artificial Sequence: Synthetic oligonucleotide
cuaacccugaacugcucau

SEQ ID NO: 391805 - RNA, 19 nt, Artificial Sequence
  Description of Artificial Sequence: Synthetic oligonucleotide
acagggcgacaaagucccc

SEQ ID NO: 391806 - RNA, 19 nt, Artificial Sequence
  Description of Artificial Sequence: Synthetic oligonucleotide
guugguuaccccuguuguu

SEQ ID NO: 391807 - RNA, 19 nt, Artificial Sequence
  Description of Artificial Sequence: Synthetic oligonucleotide
ccuaacccugaacugcuca

SEQ ID NO: 391808 - RNA, 19 nt, Artificial Sequence
  Description of Artificial Sequence: Synthetic oligonucleotide
aguucagauugaggccuaa

SEQ ID NO: 391809 - RNA, 19 nt, Artificial Sequence
  Description of Artificial Sequence: Synthetic oligonucleotide
agggugccugagccacauc

SEQ ID NO: 391810 - RNA, 19 nt, Artificial Sequence
  Description of Artificial Sequence: Synthetic oligonucleotide
cgugacguggcucgguaac

SEQ ID NO: 391811 - RNA, 19 nt, Artificial Sequence
  Description of Artificial Sequence: Synthetic oligonucleotide
caggccaaucauuccaaau

SEQ ID NO: 391812 - RNA, 19 nt, Artificial Sequence
  Description of Artificial Sequence: Synthetic oligonucleotide
cugcagcuaagaguuguaa

SEQ ID NO: 391813 - RNA, 19 nt, Artificial Sequence
  Description of Artificial Sequence: Synthetic oligonucleotide
ccccucucguauguguugg

SEQ ID NO: 391814 - RNA, 19 nt, Artificial Sequence
  Description of Artificial Sequence: Synthetic oligonucleotide
ccccgauguauucaaauua

SEQ ID NO: 391815 - RNA, 19 nt, Artificial Sequence
  Description of Artificial Sequence: Synthetic oligonucleotide
acccuuuacguaagccaau

SEQ ID NO: 391816 - RNA, 19 nt, Artificial Sequence
  Description of Artificial Sequence: Synthetic oligonucleotide
gguaacaccuggauccccu

SEQ ID NO: 391817 - RNA, 19 nt, Artificial Sequence
  Description of Artificial Sequence: Synthetic oligonucleotide
cuuccccgauguauucaaa

SEQ ID NO: 391818 - RNA, 19 nt, Artificial Sequence
  Description of Artificial Sequence: Synthetic oligonucleotide
cagagugaauugucuuagu

SEQ ID NO: 391819 - RNA, 19 nt, Artificial Sequence
  Description of Artificial Sequence: Synthetic oligonucleotide
gcaaauuuuguggucuaau

SEQ ID NO: 391820 - RNA, 19 nt, Artificial Sequence
  Description of Artificial Sequence: Synthetic oligonucleotide
gaguucagauugaggccua

SEQ ID NO: 391821 - RNA, 19 nt, Artificial Sequence
  Description of Artificial Sequence: Synthetic oligonucleotide
ccacacccguucuucuuug

SEQ ID NO: 391822 - RNA, 19 nt, Artificial Sequence
  Description of Artificial Sequence: Synthetic oligonucleotide
cccuugaggaauguuagua

SEQ ID NO: 391823 - RNA, 19 nt, Artificial Sequence
  Description of Artificial Sequence: Synthetic oligonucleotide
uacucgacguugggucuuu

SEQ ID NO: 391824 - RNA, 19 nt, Artificial Sequence
  Description of Artificial Sequence: Synthetic oligonucleotide
gggcuaccuaacccugaac

SEQ ID NO: 391825 - RNA, 19 nt, Artificial Sequence
  Description of Artificial Sequence: Synthetic oligonucleotide
uggcgugacguggcucggu

SEQ ID NO: 391826 - RNA, 19 nt, Artificial Sequence
  Description of Artificial Sequence: Synthetic oligonucleotide
cucgguaacugagugccuu

SEQ ID NO: 391827 - RNA, 19 nt, Artificial Sequence
  Description of Artificial Sequence: Synthetic oligonucleotide
cucgacguugggucuuuau

SEQ ID NO: 391828 - RNA, 19 nt, Artificial Sequence
  Description of Artificial Sequence: Synthetic oligonucleotide
guucagauugaggccuaau

SEQ ID NO: 391829 - RNA, 19 nt, Artificial Sequence
  Description of Artificial Sequence: Synthetic oligonucleotide
caaaugccugauuccuguu

SEQ ID NO: 391830 - RNA, 19 nt, Artificial Sequence
  Description of Artificial Sequence: Synthetic oligonucleotide
cuuggguauggauguccuu

SEQ ID NO: 391831 - RNA, 19 nt, Artificial Sequence
  Description of Artificial Sequence: Synthetic oligonucleotide
cagggcgacaaaguccccu

SEQ ID NO: 391832 - RNA, 19 nt, Artificial Sequence
  Description of Artificial Sequence: Synthetic oligonucleotide
cgucuuccccgauguauuc

SEQ ID NO: 391833 - RNA, 19 nt, Artificial Sequence
  Description of Artificial Sequence: Synthetic oligonucleotide
gagcaggguuauaguugaa

SEQ ID NO: 391834 - RNA, 19 nt, Artificial Sequence
  Description of Artificial Sequence: Synthetic oligonucleotide
ccgacguaaggugcucuuc

SEQ ID NO: 391835 - RNA, 19 nt, Artificial Sequence
  Description of Artificial Sequence: Synthetic oligonucleotide
cacacccguucuucuuugu

SEQ ID NO: 391836 - RNA, 19 nt, Artificial Sequence
  Description of Artificial Sequence: Synthetic oligonucleotide
ggaacuccuuagcuacuuu

SEQ ID NO: 391837 - RNA, 19 nt, Artificial Sequence
  Description of Artificial Sequence: Synthetic oligonucleotide
ccauaucggccaagcuuga

SEQ ID NO: 391838 - RNA, 19 nt, Artificial Sequence
  Description of Artificial Sequence: Synthetic oligonucleotide
gggagugguucaucauauu

SEQ ID NO: 391839 - RNA, 19 nt, Artificial Sequence
  Description of Artificial Sequence: Synthetic oligonucleotide
cccuaaugugaauguucgu

SEQ ID NO: 391840 - RNA, 19 nt, Artificial Sequence
  Description of Artificial Sequence: Synthetic oligonucleotide
cgugugaagugacauuguu

SEQ ID NO: 391841 - RNA, 19 nt, Artificial Sequence
  Description of Artificial Sequence: Synthetic oligonucleotide
gcgugugaagugacauugu

SEQ ID NO: 391842 - RNA, 19 nt, Artificial Sequence
  Description of Artificial Sequence: Synthetic oligonucleotide
gcucgguaacugagugccu

SEQ ID NO: 391843 - RNA, 19 nt, Artificial Sequence
  Description of Artificial Sequence: Synthetic oligonucleotide
aagauaagggaauauacag

SEQ ID NO: 391844 - RNA, 19 nt, Artificial Sequence
  Description of Artificial Sequence: Synthetic oligonucleotide
aaaucagaauucucuauac

SEQ ID NO: 391845 - RNA, 19 nt, Artificial Sequence
  Description of Artificial Sequence: Synthetic oligonucleotide
uaagcuaacaaacagaauu

SEQ ID NO: 391846 - RNA, 19 nt, Artificial Sequence
  Description of Artificial Sequence: Synthetic oligonucleotide
uauaugacuuucaacacag

SEQ ID NO: 391847 - RNA, 19 nt, Artificial Sequence
  Description of Artificial Sequence: Synthetic oligonucleotide
uuaucaauagcaccaagcc

SEQ ID NO: 391848 - RNA, 19 nt, Artificial Sequence
  Description of Artificial Sequence: Synthetic oligonucleotide
gcucauaugaccuugagcg

SEQ ID NO: 391849 - RNA, 19 nt, Artificial Sequence
  Description of Artificial Sequence: Synthetic oligonucleotide
aaaagaagcaucacagccc

SEQ ID NO: 391850 - RNA, 19 nt, Artificial Sequence
  Description of Artificial Sequence: Synthetic oligonucleotide
aauaccuucacauuuuaaa

SEQ ID NO: 391851 - RNA, 19 nt, Artificial Sequence
  Description of Artificial Sequence: Synthetic oligonucleotide
agcugcaggauuuuaaagc

SEQ ID NO: 391852 - RNA, 19 nt, Artificial Sequence
  Description of Artificial Sequence: Synthetic oligonucleotide
uugacuucggcucucaugc

SEQ ID NO: 391853 - RNA, 19 nt, Artificial Sequence
  Description of Artificial Sequence: Synthetic oligonucleotide
acagcuuaucaauagcacc

SEQ ID NO: 391854 - RNA, 19 nt, Artificial Sequence
  Description of Artificial Sequence: Synthetic oligonucleotide
aagucgguggaauacauug

SEQ ID NO: 391855 - RNA, 19 nt, Artificial Sequence
  Description of Artificial Sequence: Synthetic oligonucleotide
acagaauucaaauuccgag

SEQ ID NO: 391856 - RNA, 19 nt, Artificial Sequence
  Description of Artificial Sequence: Synthetic oligonucleotide
uguuuauucaaccucguaa

SEQ ID NO: 391857 - RNA, 19 nt, Artificial Sequence
  Description of Artificial Sequence: Synthetic oligonucleotide
uaaacucaccucaaggucc

SEQ ID NO: 391858 - RNA, 19 nt, Artificial Sequence
  Description of Artificial Sequence: Synthetic oligonucleotide
uuuguagggagcaccacgg

SEQ ID NO: 391859 - RNA, 19 nt, Artificial Sequence
  Description of Artificial Sequence: Synthetic oligonucleotide
uuuacaacgugaauagaga

SEQ ID NO: 391860 - RNA, 19 nt, Artificial Sequence
  Description of Artificial Sequence: Synthetic oligonucleotide
aauuguguuuauucaaccu

SEQ ID NO: 391861 - RNA, 19 nt, Artificial Sequence
  Description of Artificial Sequence: Synthetic oligonucleotide
ucugauucgucuuggagcc

SEQ ID NO: 391862 - RNA, 19 nt, Artificial Sequence
  Description of Artificial Sequence: Synthetic oligonucleotide
uguuaagcuaacaaacaga

SEQ ID NO: 391863 - RNA, 19 nt, Artificial Sequence
  Description of Artificial Sequence: Synthetic oligonucleotide
uuuccguguauaaagcugc

SEQ ID NO: 391864 - RNA, 19 nt, Artificial Sequence
  Description of Artificial Sequence: Synthetic oligonucleotide
cucuauacaaguguuaagc

SEQ ID NO: 391865 - RNA, 19 nt, Artificial Sequence
  Description of Artificial Sequence: Synthetic oligonucleotide
auagcgauggccugugcgc

SEQ ID NO: 391866 - RNA, 19 nt, Artificial Sequence
  Description of Artificial Sequence: Synthetic oligonucleotide
aguugcuccaaacaaaaga

SEQ ID NO: 391867 - RNA, 19 nt, Artificial Sequence
  Description of Artificial Sequence: Synthetic oligonucleotide
auauauagcuuucacuugu

SEQ ID NO: 391868 - RNA, 19 nt, Artificial Sequence
  Description of Artificial Sequence: Synthetic oligonucleotide
ugugucgaugucgagaccg

SEQ ID NO: 391869 - RNA, 19 nt, Artificial Sequence
  Description of Artificial Sequence: Synthetic oligonucleotide
cuuaacguaauugaaucag

SEQ ID NO: 391870 - RNA, 19 nt, Artificial Sequence
  Description of Artificial Sequence: Synthetic oligonucleotide
aaagauaagggaauauaca

SEQ ID NO: 391871 - RNA, 19 nt, Artificial Sequence
  Description of Artificial Sequence: Synthetic oligonucleotide
agauaagggaauauacagc

SEQ ID NO: 391872 - RNA, 19 nt, Artificial Sequence
  Description of Artificial Sequence: Synthetic oligonucleotide
auacucuugauccagcacu

SEQ ID NO: 391873 - RNA, 19 nt, Artificial Sequence
  Description of Artificial Sequence: Synthetic oligonucleotide
aaccucguaaaauuucucu

SEQ ID NO: 391874 - RNA, 19 nt, Artificial Sequence
  Description of Artificial Sequence: Synthetic oligonucleotide
aaucugguucuuuaaauua

SEQ ID NO: 391875 - RNA, 19 nt, Artificial Sequence
  Description of Artificial Sequence: Synthetic oligonucleotide
cauggaauguuucacgaag

SEQ ID NO: 391876 - RNA, 19 nt, Artificial Sequence
  Description of Artificial Sequence: Synthetic oligonucleotide
aaacaucaugcuacaaggc

SEQ ID NO: 391877 - RNA, 19 nt, Artificial Sequence
  Description of Artificial Sequence: Synthetic oligonucleotide
ucuuacaucccaagugucc

SEQ ID NO: 391878 - RNA, 19 nt, Artificial Sequence
  Description of Artificial Sequence: Synthetic oligonucleotide
uaauugaaucaguuuagga

SEQ ID NO: 391879 - RNA, 19 nt, Artificial Sequence
  Description of Artificial Sequence: Synthetic oligonucleotide
aaccuuuguagggagcacc

SEQ ID NO: 391880 - RNA, 19 nt, Artificial Sequence
  Description of Artificial Sequence: Synthetic oligonucleotide
uuuccccuagaauagcuag

SEQ ID NO: 391881 - RNA, 19 nt, Artificial Sequence
  Description of Artificial Sequence: Synthetic oligonucleotide
auuggguaaagggaucucc

SEQ ID NO: 391882 - RNA, 19 nt, Artificial Sequence
  Description of Artificial Sequence: Synthetic oligonucleotide
ucguaaaauuucucuagag

SEQ ID NO: 391883 - RNA, 19 nt, Artificial Sequence
  Description of Artificial Sequence: Synthetic oligonucleotide
ucuauacaaguguuaagcu

SEQ ID NO: 391884 - RNA, 19 nt, Artificial Sequence
  Description of Artificial Sequence: Synthetic oligonucleotide
ucuauaguaaugacuuuuc

SEQ ID NO: 391885 - RNA, 19 nt, Artificial Sequence
  Description of Artificial Sequence: Synthetic oligonucleotide
ucgaugucgagaccgcucg

SEQ ID NO: 391886 - RNA, 19 nt, Artificial Sequence
  Description of Artificial Sequence: Synthetic oligonucleotide
acguaauugaaucaguuua

SEQ ID NO: 391887 - RNA, 19 nt, Artificial Sequence
  Description of Artificial Sequence: Synthetic oligonucleotide
uguauaaagcugcaggauu

SEQ ID NO: 391888 - RNA, 19 nt, Artificial Sequence
  Description of Artificial Sequence: Synthetic oligonucleotide
uauuaaggccauuuucuca

SEQ ID NO: 391889 - RNA, 19 nt, Artificial Sequence
  Description of Artificial Sequence: Synthetic oligonucleotide
ucaaccucguaaaauuucu

SEQ ID NO: 391890 - RNA, 19 nt, Artificial Sequence
  Description of Artificial Sequence: Synthetic oligonucleotide
guguuaagcuaacaaacag

SEQ ID NO: 391891 - RNA, 19 nt, Artificial Sequence
  Description of Artificial Sequence: Synthetic oligonucleotide
uuaaucugguucuuuaaau

SEQ ID NO: 391892 - RNA, 19 nt, Artificial Sequence
  Description of Artificial Sequence: Synthetic oligonucleotide
aacgugaauagagaauaag

SEQ ID NO: 391893 - RNA, 19 nt, Artificial Sequence
  Description of Artificial Sequence: Synthetic oligonucleotide
acgugaauagagaauaagg

SEQ ID NO: 391894 - RNA, 19 nt, Artificial Sequence
  Description of Artificial Sequence: Synthetic oligonucleotide
ucugugucgaugucgagac

SEQ ID NO: 391895 - RNA, 19 nt, Artificial Sequence
  Description of Artificial Sequence: Synthetic oligonucleotide
aacacagaccuaaauaccu

SEQ ID NO: 391896 - RNA, 19 nt, Artificial Sequence
  Description of Artificial Sequence: Synthetic oligonucleotide
cuuuguagggagcaccacg

SEQ ID NO: 391897 - RNA, 19 nt, Artificial Sequence
  Description of Artificial Sequence: Synthetic oligonucleotide
cauucuuuacagacagugg

SEQ ID NO: 391898 - RNA, 19 nt, Artificial Sequence
  Description of Artificial Sequence: Synthetic oligonucleotide
uuaacguaauugaaucagu

SEQ ID NO: 391899 - RNA, 19 nt, Artificial Sequence
  Description of Artificial Sequence: Synthetic oligonucleotide
cuugguguaaaagaaccgc

SEQ ID NO: 391900 - RNA, 19 nt, Artificial Sequence
  Description of Artificial Sequence: Synthetic oligonucleotide
uugacggggaucuugagua

SEQ ID NO: 391901 - RNA, 19 nt, Artificial Sequence
  Description of Artificial Sequence: Synthetic oligonucleotide
uuauuaaucugguucuuua

SEQ ID NO: 391902 - RNA, 19 nt, Artificial Sequence
  Description of Artificial Sequence: Synthetic oligonucleotide
aacguaauugaaucaguuu

SEQ ID NO: 391903 - RNA, 19 nt, Artificial Sequence
  Description of Artificial Sequence: Synthetic oligonucleotide
ugauccagcacuagaggca

SEQ ID NO: 391904 - RNA, 19 nt, Artificial Sequence
  Description of Artificial Sequence: Synthetic oligonucleotide
aaugcggacgauuggguaa

SEQ ID NO: 391905 - RNA, 19 nt, Artificial Sequence
  Description of Artificial Sequence: Synthetic oligonucleotide
ugguguaaaagaaccgcug

SEQ ID NO: 391906 - RNA, 19 nt, Artificial Sequence
  Description of Artificial Sequence: Synthetic oligonucleotide
uuacaacgugaauagagaa

SEQ ID NO: 391907 - RNA, 19 nt, Artificial Sequence
  Description of Artificial Sequence: Synthetic oligonucleotide
uugguguaaaagaaccgcu

SEQ ID NO: 391908 - RNA, 19 nt, Artificial Sequence
  Description of Artificial Sequence: Synthetic oligonucleotide
acuuggacccaccugaggu

SEQ ID NO: 391909 - RNA, 19 nt, Artificial Sequence
  Description of Artificial Sequence: Synthetic oligonucleotide
guaauugaaucaguuuagg

SEQ ID NO: 391910 - RNA, 19 nt, Artificial Sequence
  Description of Artificial Sequence: Synthetic oligonucleotide
uucgagaacgagaggagcu

SEQ ID NO: 391911 - RNA, 19 nt, Artificial Sequence
  Description of Artificial Sequence: Synthetic oligonucleotide
gguguaaaagaaccgcugg

SEQ ID NO: 391912 - RNA, 19 nt, Artificial Sequence
  Description of Artificial Sequence: Synthetic oligonucleotide
uugaguagcucuguucccg

SEQ ID NO: 391913 - RNA, 19 nt, Artificial Sequence
  Description of Artificial Sequence: Synthetic oligonucleotide
ucauguaguucccuuuaca

SEQ ID NO: 391914 - RNA, 19 nt, Artificial Sequence
  Description of Artificial Sequence: Synthetic oligonucleotide
aacgagaggagcuccggcu

SEQ ID NO: 391915 - RNA, 19 nt, Artificial Sequence
  Description of Artificial Sequence: Synthetic oligonucleotide
uuaggagugaagagacagc

SEQ ID NO: 391916 - RNA, 19 nt, Artificial Sequence
  Description of Artificial Sequence: Synthetic oligonucleotide
cuuggcuuaacguaauuga

SEQ ID NO: 391917 - RNA, 19 nt, Artificial Sequence
  Description of Artificial Sequence: Synthetic oligonucleotide
uguaaaagaaccgcuggaa

SEQ ID NO: 391918 - RNA, 19 nt, Artificial Sequence
  Description of Artificial Sequence: Synthetic oligonucleotide
ucucuauacaaguguuaag

SEQ ID NO: 391919 - RNA, 19 nt, Artificial Sequence
  Description of Artificial Sequence: Synthetic oligonucleotide
guuaagcuaacaaacagaa

SEQ ID NO: 391920 - RNA, 19 nt, Artificial Sequence
  Description of Artificial Sequence: Synthetic oligonucleotide
caucuuucuuggcuuaacg

SEQ ID NO: 391921 - RNA, 19 nt, Artificial Sequence
  Description of Artificial Sequence: Synthetic oligonucleotide
cauagcgauggccugugcg

SEQ ID NO: 391922 - RNA, 19 nt, Artificial Sequence
  Description of Artificial Sequence: Synthetic oligonucleotide
uucaguugcuccaaacaaa

SEQ ID NO: 391923 - RNA, 19 nt, Artificial Sequence
  Description of Artificial Sequence: Synthetic oligonucleotide
cauugugaaacacaggaaa

SEQ ID NO: 391924 - RNA, 19 nt, Artificial Sequence
  Description of Artificial Sequence: Synthetic oligonucleotide
uaggugugucaaaucaacc

SEQ ID NO: 391925 - RNA, 19 nt, Artificial Sequence
  Description of Artificial Sequence: Synthetic oligonucleotide
uaacguaauugaaucaguu

SEQ ID NO: 391926 - RNA, 19 nt, Artificial Sequence
  Description of Artificial Sequence: Synthetic oligonucleotide
gagacagcuuaucaauagc

SEQ ID NO: 391927 - RNA, 19 nt, Artificial Sequence
  Description of Artificial Sequence: Synthetic oligonucleotide
ucuuggcuuaacguaauug

SEQ ID NO: 391928 - RNA, 19 nt, Artificial Sequence
  Description of Artificial Sequence: Synthetic oligonucleotide
gacauggacggcgugaagc

SEQ ID NO: 391929 - RNA, 19 nt, Artificial Sequence
  Description of Artificial Sequence: Synthetic oligonucleotide
aaccaaugcggacgauugg

SEQ ID NO: 391930 - RNA, 19 nt, Artificial Sequence
  Description of Artificial Sequence: Synthetic oligonucleotide
ucauaugaccuugagcgcu

SEQ ID NO: 391931 - RNA, 19 nt, Artificial Sequence
  Description of Artificial Sequence: Synthetic oligonucleotide
uacaacgugaauagagaau

SEQ ID NO: 391932 - RNA, 19 nt, Artificial Sequence
  Description of Artificial Sequence: Synthetic oligonucleotide
uuggcuuaacguaauugaa

SEQ ID NO: 391933 - RNA, 19 nt, Artificial Sequence
  Description of Artificial Sequence: Synthetic oligonucleotide
ucuuuacagacagugggga

SEQ ID NO: 391934 - RNA, 19 nt, Artificial Sequence
  Description of Artificial Sequence: Synthetic oligonucleotide
auuccgaguuuucauauau

SEQ ID NO: 391935 - RNA, 19 nt, Artificial Sequence
  Description of Artificial Sequence: Synthetic oligonucleotide
ugugacuuggacccaccug

SEQ ID NO: 391936 - RNA, 19 nt, Artificial Sequence
  Description of Artificial Sequence: Synthetic oligonucleotide
uuauucaaccucguaaaau

SEQ ID NO: 391937 - RNA, 19 nt, Artificial Sequence
  Description of Artificial Sequence: Synthetic oligonucleotide
ucggggagcaagcaguucu

SEQ ID NO: 391938 - RNA, 19 nt, Artificial Sequence
  Description of Artificial Sequence: Synthetic oligonucleotide
acaacgugaauagagaaua

SEQ ID NO: 391939 - RNA, 19 nt, Artificial Sequence
  Description of Artificial Sequence: Synthetic oligonucleotide
aaggugaugagcacgccug

SEQ ID NO: 391940 - RNA, 19 nt, Artificial Sequence
  Description of Artificial Sequence: Synthetic oligonucleotide
gccuuuauuaaucugguuc

SEQ ID NO: 391941 - RNA, 19 nt, Artificial Sequence
  Description of Artificial Sequence: Synthetic oligonucleotide
accaaugcggacgauuggg

SEQ ID NO: 391942 - RNA, 19 nt, Artificial Sequence
  Description of Artificial Sequence: Synthetic oligonucleotide
acacuuuaaugagaacugg

SEQ ID NO: 391943 - RNA, 19 nt, Artificial Sequence
  Description of Artificial Sequence: Synthetic oligonucleotide
uggcuuaacguaauugaau

SEQ ID NO: 391944 - RNA, 19 nt, Artificial Sequence
  Description of Artificial Sequence: Synthetic oligonucleotide
gugacuuggacccaccuga

SEQ ID NO: 391945 - RNA, 19 nt, Artificial Sequence
  Description of Artificial Sequence: Synthetic oligonucleotide
uuucaacacagaccuaaau

SEQ ID NO: 391946 - RNA, 19 nt, Artificial Sequence
  Description of Artificial Sequence: Synthetic oligonucleotide
aagguccaauugaaaacac

SEQ ID NO: 391947 - RNA, 19 nt, Artificial Sequence
  Description of Artificial Sequence: Synthetic oligonucleotide
ggggauuccagcuuaggag

SEQ ID NO: 391948 - RNA, 19 nt, Artificial Sequence
  Description of Artificial Sequence: Synthetic oligonucleotide
uccgagaacgacucuguga

SEQ ID NO: 391949 - RNA, 19 nt, Artificial Sequence
  Description of Artificial Sequence: Synthetic oligonucleotide
ucuguucgaagacugucau

SEQ ID NO: 391950 - RNA, 19 nt, Artificial Sequence
  Description of Artificial Sequence: Synthetic oligonucleotide
auagcuagguuggcagugc

SEQ ID NO: 391951 - RNA, 19 nt, Artificial Sequence
  Description of Artificial Sequence: Synthetic oligonucleotide
uuucucuuagaugccgaag

SEQ ID NO: 391952 - RNA, 19 nt, Artificial Sequence
  Description of Artificial Sequence: Synthetic oligonucleotide
aaugggagcacuaccuggu

SEQ ID NO: 391953 - RNA, 19 nt, Artificial Sequence
  Description of Artificial Sequence: Synthetic oligonucleotide
gugaccggcuucgagaacg

SEQ ID NO: 391954 - RNA, 19 nt, Artificial Sequence
  Description of Artificial Sequence: Synthetic oligonucleotide
ggcuuaacguaauugaauc

SEQ ID NO: 391955 - RNA, 19 nt, Artificial Sequence
  Description of Artificial Sequence: Synthetic oligonucleotide
auuuccgggagguccucac

SEQ ID NO: 391956 - RNA, 19 nt, Artificial Sequence
  Description of Artificial Sequence: Synthetic oligonucleotide
agcaagcaguucuccaagg

SEQ ID NO: 391957 - RNA, 19 nt, Artificial Sequence
  Description of Artificial Sequence: Synthetic oligonucleotide
uagaauagcuagguuggca

SEQ ID NO: 391958 - RNA, 19 nt, Artificial Sequence
  Description of Artificial Sequence: Synthetic oligonucleotide
ucaauagcaccaagccaca

SEQ ID NO: 391959 - RNA, 19 nt, Artificial Sequence
  Description of Artificial Sequence: Synthetic oligonucleotide
aauguuucacgaaggacuu

SEQ ID NO: 391960 - RNA, 19 nt, Artificial Sequence
  Description of Artificial Sequence: Synthetic oligonucleotide
acagacgcacagcacuccg

SEQ ID NO: 391961 - RNA, 19 nt, Artificial Sequence
  Description of Artificial Sequence: Synthetic oligonucleotide
uucauguaguucccuuuac

SEQ ID NO: 391962 - RNA, 19 nt, Artificial Sequence
  Description of Artificial Sequence: Synthetic oligonucleotide
gacuucggcucucaugccc

SEQ ID NO: 391963 - RNA, 19 nt, Artificial Sequence
  Description of Artificial Sequence: Synthetic oligonucleotide
acaggcacaggcaaugcuc

SEQ ID NO: 391964 - RNA, 19 nt, Artificial Sequence
  Description of Artificial Sequence: Synthetic oligonucleotide
ucucuuagaugccgaaguc

SEQ ID NO: 391965 - RNA, 19 nt, Artificial Sequence
  Description of Artificial Sequence: Synthetic oligonucleotide
cccuagaauagcuagguug

SEQ ID NO: 391966 - RNA, 19 nt, Artificial Sequence
  Description of Artificial Sequence: Synthetic oligonucleotide
gguguaccugccuuggagg

SEQ ID NO: 391967 - RNA, 19 nt, Artificial Sequence
  Description of Artificial Sequence: Synthetic oligonucleotide
ucgagaccgcucgacaugg

SEQ ID NO: 391968 - RNA, 19 nt, Artificial Sequence
  Description of Artificial Sequence: Synthetic oligonucleotide
cucauaugaccuugagcgc

SEQ ID NO: 391969 - RNA, 19 nt, Artificial Sequence
  Description of Artificial Sequence: Synthetic oligonucleotide
uccuugagaacacgucucu

SEQ ID NO: 391970 - RNA, 19 nt, Artificial Sequence
  Description of Artificial Sequence: Synthetic oligonucleotide
ucccuuuacauggacacaa

SEQ ID NO: 391971 - RNA, 19 nt, Artificial Sequence
  Description of Artificial Sequence: Synthetic oligonucleotide
agcgcucccgucuuugauc

SEQ ID NO: 391972 - RNA, 19 nt, Artificial Sequence
  Description of Artificial Sequence: Synthetic oligonucleotide
agacagcuuaucaauagca

SEQ ID NO: 391973 - RNA, 19 nt, Artificial Sequence
  Description of Artificial Sequence: Synthetic oligonucleotide
uauauagcuuucacuugua

SEQ ID NO: 391974 - RNA, 19 nt, Artificial Sequence
  Description of Artificial Sequence: Synthetic oligonucleotide
ccguguauaaagcugcagg

SEQ ID NO: 391975 - RNA, 19 nt, Artificial Sequence
  Description of Artificial Sequence: Synthetic oligonucleotide
aauuccgaguuuucauaua

SEQ ID NO: 391976 - RNA, 19 nt, Artificial Sequence
  Description of Artificial Sequence: Synthetic oligonucleotide
uuacagacaguggggaaga

SEQ ID NO: 391977 - RNA, 19 nt, Artificial Sequence
  Description of Artificial Sequence: Synthetic oligonucleotide
ugugccgccgauucuuucu

SEQ ID NO: 391978 - RNA, 19 nt, Artificial Sequence
  Description of Artificial Sequence: Synthetic oligonucleotide
gaacgacucugugacuugg

SEQ ID NO: 391979 - RNA, 19 nt, Artificial Sequence
  Description of Artificial Sequence: Synthetic oligonucleotide
accaagccacaccaauggg

SEQ ID NO: 391980 - RNA, 19 nt, Artificial Sequence
  Description of Artificial Sequence: Synthetic oligonucleotide
agguauuugcaguccuuug

SEQ ID NO: 391981 - RNA, 19 nt, Artificial Sequence
  Description of Artificial Sequence: Synthetic oligonucleotide
acugucccaucaguuaaac

SEQ ID NO: 391982 - RNA, 19 nt, Artificial Sequence
  Description of Artificial Sequence: Synthetic oligonucleotide
cauacucuugauccagcac

SEQ ID NO: 391983 - RNA, 19 nt, Artificial Sequence
  Description of Artificial Sequence: Synthetic oligonucleotide
caagguccaauugaaaaca

SEQ ID NO: 391984 - RNA, 19 nt, Artificial Sequence
  Description of Artificial Sequence: Synthetic oligonucleotide
auacaggcacaggcaaugc

SEQ ID NO: 391985 - RNA, 19 nt, Artificial Sequence
  Description of Artificial Sequence: Synthetic oligonucleotide
ugacuuggacccaccugag

SEQ ID NO: 391986 - RNA, 19 nt, Artificial Sequence
  Description of Artificial Sequence: Synthetic oligonucleotide
auaagggaauauacagcuc

SEQ ID NO: 391987 - RNA, 19 nt, Artificial Sequence
  Description of Artificial Sequence: Synthetic oligonucleotide
auauagcuuucacuuguau

SEQ ID NO: 391988 - RNA, 19 nt, Artificial Sequence
  Description of Artificial Sequence: Synthetic oligonucleotide
uuucuaggugugucaaauc

SEQ ID NO: 391989 - RNA, 19 nt, Artificial Sequence
  Description of Artificial Sequence: Synthetic oligonucleotide
ccaagccacaccaaugggg

SEQ ID NO: 391990 - RNA, 19 nt, Artificial Sequence
  Description of Artificial Sequence: Synthetic oligonucleotide
uugucgucggggagcaagc

SEQ ID NO: 391991 - RNA, 19 nt, Artificial Sequence
  Description of Artificial Sequence: Synthetic oligonucleotide
guguaaaagaaccgcugga

SEQ ID NO: 391992 - RNA, 19 nt, Artificial Sequence
  Description of Artificial Sequence: Synthetic oligonucleotide
caggcaugcacauaagaaa

SEQ ID NO: 391993 - RNA, 19 nt, Artificial Sequence
  Description of Artificial Sequence: Synthetic oligonucleotide
cuucgagaacgagaggagc

SEQ ID NO: 391994 - RNA, 19 nt, Artificial Sequence
  Description of Artificial Sequence: Synthetic oligonucleotide
gaacgagaggagcuccggc

SEQ ID NO: 391995 - RNA, 19 nt, Artificial Sequence
  Description of Artificial Sequence: Synthetic oligonucleotide
augagcacgccugaguaca

SEQ ID NO: 391996 - RNA, 19 nt, Artificial Sequence
  Description of Artificial Sequence: Synthetic oligonucleotide
gucacugcggcuccgagaa

SEQ ID NO: 391997 - RNA, 19 nt, Artificial Sequence
  Description of Artificial Sequence: Synthetic oligonucleotide
caggugagaacccggcagc

SEQ ID NO: 391998 - RNA, 19 nt, Artificial Sequence
  Description of Artificial Sequence: Synthetic oligonucleotide
ggcuauuaaggccauuuuc

SEQ ID NO: 391999 - RNA, 19 nt, Artificial Sequence
  Description of Artificial Sequence: Synthetic oligonucleotide
accuaaauaccuucacauu

SEQ ID NO: 392000 - RNA, 19 nt, Artificial Sequence
  Description of Artificial Sequence: Synthetic oligonucleotide
cguaauugaaucaguuuag

SEQ ID NO: 392001 - RNA, 19 nt, Artificial Sequence
  Description of Artificial Sequence: Synthetic oligonucleotide
agaacgacucugugacuug

SEQ ID NO: 392002 - RNA, 19 nt, Artificial Sequence
  Description of Artificial Sequence: Synthetic oligonucleotide
uuugggcccuccacuuucc

SEQ ID NO: 392003 - RNA, 19 nt, Artificial Sequence
  Description of Artificial Sequence: Synthetic oligonucleotide
ccgagaacgacucugugac

SEQ ID NO: 392004 - RNA, 19 nt, Artificial Sequence
  Description of Artificial Sequence: Synthetic oligonucleotide
ugucgagaccgcucgacau

SEQ ID NO: 392005 - RNA, 19 nt, Artificial Sequence
  Description of Artificial Sequence: Synthetic oligonucleotide
gagccgccaacaccgaagc

SEQ ID NO: 392006 - RNA, 19 nt, Artificial Sequence
  Description of Artificial Sequence: Synthetic oligonucleotide
agaacgagaggagcuccgg

SEQ ID NO: 392007 - RNA, 19 nt, Artificial Sequence
  Description of Artificial Sequence: Synthetic oligonucleotide
aggcaugcacauaagaaaa

SEQ ID NO: 392008 - RNA, 19 nt, Artificial Sequence
  Description of Artificial Sequence: Synthetic oligonucleotide
cggacgauuggguaaaggg

SEQ ID NO: 392009 - RNA, 19 nt, Artificial Sequence
  Description of Artificial Sequence: Synthetic oligonucleotide
uccguguauaaagcugcag

SEQ ID NO: 392010 - RNA, 19 nt, Artificial Sequence
  Description of Artificial Sequence: Synthetic oligonucleotide
agcccacaaagucuuacau

SEQ ID NO: 392011 - RNA, 19 nt, Artificial Sequence
  Description of Artificial Sequence: Synthetic oligonucleotide
uuccguguauaaagcugca

SEQ ID NO: 392012 - RNA, 19 nt, Artificial Sequence
  Description of Artificial Sequence: Synthetic oligonucleotide
cauaugaccuugagcgcuc

SEQ ID NO: 392013 - RNA, 19 nt, Artificial Sequence
  Description of Artificial Sequence: Synthetic oligonucleotide
cuguccgcucucgugaccg

SEQ ID NO: 392014 - RNA, 19 nt, Artificial Sequence
  Description of Artificial Sequence: Synthetic oligonucleotide
ucccaucaguuaaacucac

SEQ ID NO: 392015 - RNA, 19 nt, Artificial Sequence
  Description of Artificial Sequence: Synthetic oligonucleotide
auaugaccuugagcgcucc

SEQ ID NO: 392016 - RNA, 19 nt, Artificial Sequence
  Description of Artificial Sequence: Synthetic oligonucleotide
uguaccugccuuggaggag

SEQ ID NO: 392017 - RNA, 19 nt, Artificial Sequence
  Description of Artificial Sequence: Synthetic oligonucleotide
gaugucgagaccgcucgac

SEQ ID NO: 392018 - RNA, 19 nt, Artificial Sequence
  Description of Artificial Sequence: Synthetic oligonucleotide
ugacggggaucuugaguag

SEQ ID NO: 392019 - RNA, 19 nt, Artificial Sequence
  Description of Artificial Sequence: Synthetic oligonucleotide
aacccaucucaccuccgau

SEQ ID NO: 392020 - RNA, 19 nt, Artificial Sequence
  Description of Artificial Sequence: Synthetic oligonucleotide
caucuguucgaagacuguc

SEQ ID NO: 392021 - RNA, 19 nt, Artificial Sequence
  Description of Artificial Sequence: Synthetic oligonucleotide
ugagcacgccugaguacag

SEQ ID NO: 392022 - RNA, 19 nt, Artificial Sequence
  Description of Artificial Sequence: Synthetic oligonucleotide
uaguucccuuuacauggac

SEQ ID NO: 392023 - RNA, 19 nt, Artificial Sequence
  Description of Artificial Sequence: Synthetic oligonucleotide
gugcccaagagggagggcc

SEQ ID NO: 392024 - RNA, 19 nt, Artificial Sequence
  Description of Artificial Sequence: Synthetic oligonucleotide
gucgauggcaugcuuucuc

SEQ ID NO: 392025 - RNA, 19 nt, Artificial Sequence
  Description of Artificial Sequence: Synthetic oligonucleotide
cuagaauagcuagguuggc

SEQ ID NO: 392026 - RNA, 19 nt, Artificial Sequence
  Description of Artificial Sequence: Synthetic oligonucleotide
aucuguucgaagacuguca

SEQ ID NO: 392027 - RNA, 19 nt, Artificial Sequence
  Description of Artificial Sequence: Synthetic oligonucleotide
cauguaguucccuuuacau

SEQ ID NO: 392028 - RNA, 19 nt, Artificial Sequence
  Description of Artificial Sequence: Synthetic oligonucleotide
agaacccggcagcacuguc

SEQ ID NO: 392029 - RNA, 19 nt, Artificial Sequence
  Description of Artificial Sequence: Synthetic oligonucleotide
ccgaguuuucauauauagc

SEQ ID NO: 392030 - RNA, 19 nt, Artificial Sequence
  Description of Artificial Sequence: Synthetic oligonucleotide
guacaaccuaauauaggca

SEQ ID NO: 392031 - RNA, 19 nt, Artificial Sequence
  Description of Artificial Sequence: Synthetic oligonucleotide
aauggggacgcgugccuuu

SEQ ID NO: 392032 - RNA, 19 nt, Artificial Sequence
  Description of Artificial Sequence: Synthetic oligonucleotide
caaccucguaaaauuucuc

SEQ ID NO: 392033 - RNA, 19 nt, Artificial Sequence
  Description of Artificial Sequence: Synthetic oligonucleotide
uuccgaguuuucauauaua

SEQ ID NO: 392034 - RNA, 19 nt, Artificial Sequence
  Description of Artificial Sequence: Synthetic oligonucleotide
agcaaagauaagggaauau

SEQ ID NO: 392035 - RNA, 19 nt, Artificial Sequence
  Description of Artificial Sequence: Synthetic oligonucleotide
gacgauuggguaaagggau

SEQ ID NO: 392036 - RNA, 19 nt, Artificial Sequence
  Description of Artificial Sequence: Synthetic oligonucleotide
ugcgcucauaugaccuuga

SEQ ID NO: 392037 - RNA, 19 nt, Artificial Sequence
  Description of Artificial Sequence: Synthetic oligonucleotide
gucgagaccgcucgacaug

SEQ ID NO: 392038 - RNA, 19 nt, Artificial Sequence
  Description of Artificial Sequence: Synthetic oligonucleotide
ucucuauaguaaugacuuu

SEQ ID NO: 392039 - RNA, 19 nt, Artificial Sequence
  Description of Artificial Sequence: Synthetic oligonucleotide
aacacgucucucugccuuu

SEQ ID NO: 392040 - RNA, 19 nt, Artificial Sequence
  Description of Artificial Sequence: Synthetic oligonucleotide
augucgagaccgcucgaca

SEQ ID NO: 392041 - RNA, 19 nt, Artificial Sequence
  Description of Artificial Sequence: Synthetic oligonucleotide
gacggggaucuugaguagc

SEQ ID NO: 392042 - RNA, 19 nt, Artificial Sequence
  Description of Artificial Sequence: Synthetic oligonucleotide
auggcaugcuuucucuuuu

SEQ ID NO: 392043 - RNA, 19 nt, Artificial Sequence
  Description of Artificial Sequence: Synthetic oligonucleotide
gcuuaacguaauugaauca

SEQ ID NO: 392044 - RNA, 19 nt, Artificial Sequence
  Description of Artificial Sequence: Synthetic oligonucleotide
acgauuggguaaagggauc

SEQ ID NO: 392045 - RNA, 19 nt, Artificial Sequence
  Description of Artificial Sequence: Synthetic oligonucleotide
ggcagcgagguagauacag

SEQ ID NO: 392046 - RNA, 19 nt, Artificial Sequence
  Description of Artificial Sequence: Synthetic oligonucleotide
gggaauauacagcucauau

SEQ ID NO: 392047 - RNA, 19 nt, Artificial Sequence
  Description of Artificial Sequence: Synthetic oligonucleotide
uccggcuacgagacuugug

SEQ ID NO: 392048 - RNA, 19 nt, Artificial Sequence
  Description of Artificial Sequence: Synthetic oligonucleotide
ucuguccgcucucgugacc

SEQ ID NO: 392049 - RNA, 19 nt, Artificial Sequence
  Description of Artificial Sequence: Synthetic oligonucleotide
aacgcgggagccgccaaca

SEQ ID NO: 392050 - RNA, 19 nt, Artificial Sequence
  Description of Artificial Sequence: Synthetic oligonucleotide
uggacggcgugaagcgcag

SEQ ID NO: 392051 - RNA, 19 nt, Artificial Sequence
  Description of Artificial Sequence: Synthetic oligonucleotide
ccugcacucagcauugcac

SEQ ID NO: 392052 - RNA, 19 nt, Artificial Sequence
  Description of Artificial Sequence: Synthetic oligonucleotide
agguagagccacucucacu

SEQ ID NO: 392053 - RNA, 19 nt, Artificial Sequence
  Description of Artificial Sequence: Synthetic oligonucleotide
ucgagaacgagaggagcuc

SEQ ID NO: 392054 - RNA, 19 nt, Artificial Sequence
  Description of Artificial Sequence: Synthetic oligonucleotide
cacuagaggcacaggcuuc

SEQ ID NO: 392055 - RNA, 19 nt, Artificial Sequence
  Description of Artificial Sequence: Synthetic oligonucleotide
ccaaguguccugagaauug

SEQ ID NO: 392056 - RNA, 19 nt, Artificial Sequence
  Description of Artificial Sequence: Synthetic oligonucleotide
ccagaaugggagcacuacc

SEQ ID NO: 392057 - RNA, 19 nt, Artificial Sequence
  Description of Artificial Sequence: Synthetic oligonucleotide
gcuacgagacuuguguggc

SEQ ID NO: 392058 - RNA, 19 nt, Artificial Sequence
  Description of Artificial Sequence: Synthetic oligonucleotide
cuauaguaaugacuuuucu

SEQ ID NO: 392059 - RNA, 19 nt, Artificial Sequence
  Description of Artificial Sequence: Synthetic oligonucleotide
cgggcagcgagguagauac

SEQ ID NO: 392060 - RNA, 19 nt, Artificial Sequence
  Description of Artificial Sequence: Synthetic oligonucleotide
acaccaauggggacgcgug

SEQ ID NO: 392061 - RNA, 19 nt, Artificial Sequence
  Description of Artificial Sequence: Synthetic oligonucleotide
ucucaccuccgaugucugc

SEQ ID NO: 392062 - RNA, 19 nt, Artificial Sequence
  Description of Artificial Sequence: Synthetic oligonucleotide
gaauagcuagguuggcagu

SEQ ID NO: 392063 - RNA, 19 nt, Artificial Sequence
  Description of Artificial Sequence: Synthetic oligonucleotide
uacgagacuuguguggcuu

SEQ ID NO: 392064 - RNA, 19 nt, Artificial Sequence
  Description of Artificial Sequence: Synthetic oligonucleotide
ugacuucggcucucaugcc

SEQ ID NO: 392065 - RNA, 19 nt, Artificial Sequence
  Description of Artificial Sequence: Synthetic oligonucleotide
cucccuccaugccugaguc

SEQ ID NO: 392066 - RNA, 19 nt, Artificial Sequence
  Description of Artificial Sequence: Synthetic oligonucleotide
gaagccaaggugugcccaa

SEQ ID NO: 392067 - RNA, 19 nt, Artificial Sequence
  Description of Artificial Sequence: Synthetic oligonucleotide
ggccugugcgcucauauga

SEQ ID NO: 392068 - RNA, 19 nt, Artificial Sequence
  Description of Artificial Sequence: Synthetic oligonucleotide
auccagcuacccgaagguc

SEQ ID NO: 392069 - RNA, 19 nt, Artificial Sequence
  Description of Artificial Sequence: Synthetic oligonucleotide
gcucauauuuccccuagaa

SEQ ID NO: 392070 - RNA, 19 nt, Artificial Sequence
  Description of Artificial Sequence: Synthetic oligonucleotide
ugaccggcuucgagaacga

SEQ ID NO: 392071 - RNA, 19 nt, Artificial Sequence
  Description of Artificial Sequence: Synthetic oligonucleotide
ggacgauuggguaaaggga

SEQ ID NO: 392072 - RNA, 19 nt, Artificial Sequence
  Description of Artificial Sequence: Synthetic oligonucleotide
acaaccuaauauaggcaaa

SEQ ID NO: 392073 - RNA, 19 nt, Artificial Sequence
  Description of Artificial Sequence: Synthetic oligonucleotide
gauggcaugcuuucucuuu

SEQ ID NO: 392074 - RNA, 19 nt, Artificial Sequence
  Description of Artificial Sequence: Synthetic oligonucleotide
accucaagguccaauugaa

SEQ ID NO: 392075 - RNA, 19 nt, Artificial Sequence
  Description of Artificial Sequence: Synthetic oligonucleotide
ucgcagcccaccacgcgga

SEQ ID NO: 392076 - RNA, 19 nt, Artificial Sequence
  Description of Artificial Sequence: Synthetic oligonucleotide
gccgauucuuucucggggc

SEQ ID NO: 392077 - RNA, 19 nt, Artificial Sequence
  Description of Artificial Sequence: Synthetic oligonucleotide
ugagcgcucccgucuuuga

SEQ ID NO: 392078 - RNA, 19 nt, Artificial Sequence
  Description of Artificial Sequence: Synthetic oligonucleotide
caccaauggggacgcgugc

SEQ ID NO: 392079 - RNA, 19 nt, Artificial Sequence
  Description of Artificial Sequence: Synthetic oligonucleotide
uguccgcucucgugaccgg

SEQ ID NO: 392080 - RNA, 19 nt, Artificial Sequence
  Description of Artificial Sequence: Synthetic oligonucleotide
uggcaugcuuucucuuuuc

SEQ ID NO: 392081 - RNA, 19 nt, Artificial Sequence
  Description of Artificial Sequence: Synthetic oligonucleotide
cucuagagcugguggccug

SEQ ID NO: 392082 - RNA, 19 nt, Artificial Sequence
  Description of Artificial Sequence: Synthetic oligonucleotide
gugccuuugcuguuccauc

SEQ ID NO: 392083 - RNA, 19 nt, Artificial Sequence
  Description of Artificial Sequence: Synthetic oligonucleotide
agucgguggaauacauuga

SEQ ID NO: 392084 - RNA, 19 nt, Artificial Sequence
  Description of Artificial Sequence: Synthetic oligonucleotide
gagaacgacucugugacuu

SEQ ID NO: 392085 - RNA, 19 nt, Artificial Sequence
  Description of Artificial Sequence: Synthetic oligonucleotide
guauaaagcugcaggauuu

SEQ ID NO: 392086 - RNA, 19 nt, Artificial Sequence
  Description of Artificial Sequence: Synthetic oligonucleotide
gaacacgucucucugccuu

SEQ ID NO: 392087 - RNA, 19 nt, Artificial Sequence
  Description of Artificial Sequence: Synthetic oligonucleotide
gugagaacccggcagcacu

SEQ ID NO: 392088 - RNA, 19 nt, Artificial Sequence
  Description of Artificial Sequence: Synthetic oligonucleotide
auggacggcgugaagcgca

SEQ ID NO: 392089 - RNA, 19 nt, Artificial Sequence
  Description of Artificial Sequence: Synthetic oligonucleotide
agcucgagccuuggcuucg

SEQ ID NO: 392090 - RNA, 19 nt, Artificial Sequence
  Description of Artificial Sequence: Synthetic oligonucleotide
acuucggcucucaugcccu

SEQ ID NO: 392091 - RNA, 19 nt, Artificial Sequence
  Description of Artificial Sequence: Synthetic oligonucleotide
uagcgauggccugugcgcu

SEQ ID NO: 392092 - RNA, 19 nt, Artificial Sequence
  Description of Artificial Sequence: Synthetic oligonucleotide
ugucgaugucgagaccgcu

SEQ ID NO: 392093 - RNA, 19 nt, Artificial Sequence
  Description of Artificial Sequence: Synthetic oligonucleotide
uggucccgcucauagcgau

SEQ ID NO: 392094 - RNA, 19 nt, Artificial Sequence
  Description of Artificial Sequence: Synthetic oligonucleotide
accuccgaugucugcugug

SEQ ID NO: 392095 - RNA, 19 nt, Artificial Sequence
  Description of Artificial Sequence: Synthetic oligonucleotide
caacgugaauagagaauaa

SEQ ID NO: 392096 - RNA, 19 nt, Artificial Sequence
  Description of Artificial Sequence: Synthetic oligonucleotide
caguguccgggcagcgagg

SEQ ID NO: 392097 - RNA, 19 nt, Artificial Sequence
  Description of Artificial Sequence: Synthetic oligonucleotide
cguguauaaagcugcagga

SEQ ID NO: 392098 - RNA, 19 nt, Artificial Sequence
  Description of Artificial Sequence: Synthetic oligonucleotide
guguuuauucaaccucgua

SEQ ID NO: 392099 - RNA, 19 nt, Artificial Sequence
  Description of Artificial Sequence: Synthetic oligonucleotide
cucuauaguaaugacuuuu

SEQ ID NO: 392100 - RNA, 19 nt, Artificial Sequence
  Description of Artificial Sequence: Synthetic oligonucleotide
gcuucgagaacgagaggag

SEQ ID NO: 392101 - RNA, 19 nt, Artificial Sequence
  Description of Artificial Sequence: Synthetic oligonucleotide
cuugacggggaucuugagu

SEQ ID NO: 392102 - RNA, 19 nt, Artificial Sequence
  Description of Artificial Sequence: Synthetic oligonucleotide
agccaaggugugcccaaga

SEQ ID NO: 392103 - RNA, 19 nt, Artificial Sequence
  Description of Artificial Sequence: Synthetic oligonucleotide
cuccgagaacgacucugug

SEQ ID NO: 392104 - RNA, 19 nt, Artificial Sequence
  Description of Artificial Sequence: Synthetic oligonucleotide
ggcuucgucgauggcaugc

SEQ ID NO: 392105 - RNA, 19 nt, Artificial Sequence
  Description of Artificial Sequence: Synthetic oligonucleotide
ccaguguccgggcagcgag

SEQ ID NO: 392106 - RNA, 19 nt, Artificial Sequence
  Description of Artificial Sequence: Synthetic oligonucleotide
guuuaggagugaagagaca

SEQ ID NO: 392107 - RNA, 19 nt, Artificial Sequence
  Description of Artificial Sequence: Synthetic oligonucleotide
cagcccacaaagucuuaca

SEQ ID NO: 392108 - RNA, 19 nt, Artificial Sequence
  Description of Artificial Sequence: Synthetic oligonucleotide
auuuccccuagaauagcua

SEQ ID NO: 392109 - RNA, 19 nt, Artificial Sequence
  Description of Artificial Sequence: Synthetic oligonucleotide
ugucgucggggagcaagca

SEQ ID NO: 392110 - RNA, 19 nt, Artificial Sequence
  Description of Artificial Sequence: Synthetic oligonucleotide
cugcaggauuuuaaagcaa

SEQ ID NO: 392111 - RNA, 19 nt, Artificial Sequence
  Description of Artificial Sequence: Synthetic oligonucleotide
gucgaugucgagaccgcuc

SEQ ID NO: 392112 - RNA, 19 nt, Artificial Sequence
  Description of Artificial Sequence: Synthetic oligonucleotide
gaccuugagcgcucccguc

SEQ ID NO: 392113 - RNA, 19 nt, Artificial Sequence
  Description of Artificial Sequence: Synthetic oligonucleotide
caaugcggacgauugggua

SEQ ID NO: 392114 - RNA, 19 nt, Artificial Sequence
  Description of Artificial Sequence: Synthetic oligonucleotide
cucgacauggacggcguga

SEQ ID NO: 392115 - RNA, 19 nt, Artificial Sequence
  Description of Artificial Sequence: Synthetic oligonucleotide
ccgccaacaccgaagcccc

SEQ ID NO: 392116 - RNA, 19 nt, Artificial Sequence
  Description of Artificial Sequence: Synthetic oligonucleotide
cugccuuggaggagaguca

SEQ ID NO: 392117 - RNA, 19 nt, Artificial Sequence
  Description of Artificial Sequence: Synthetic oligonucleotide
uggacccaccugagguaga

SEQ ID NO: 392118 - RNA, 19 nt, Artificial Sequence
  Description of Artificial Sequence: Synthetic oligonucleotide
auaugacuuucaacacaga

SEQ ID NO: 392119 - RNA, 19 nt, Artificial Sequence
  Description of Artificial Sequence: Synthetic oligonucleotide
ccagcuacccgaaggucug

SEQ ID NO: 392120 - RNA, 19 nt, Artificial Sequence
  Description of Artificial Sequence: Synthetic oligonucleotide
agcuugucgucggggagca

SEQ ID NO: 392121 - RNA, 19 nt, Artificial Sequence
  Description of Artificial Sequence: Synthetic oligonucleotide
cugugucgaugucgagacc

SEQ ID NO: 392122 - RNA, 19 nt, Artificial Sequence
  Description of Artificial Sequence: Synthetic oligonucleotide
uugugccgccgauucuuuc

SEQ ID NO: 392123 - RNA, 19 nt, Artificial Sequence
  Description of Artificial Sequence: Synthetic oligonucleotide
caucucaccuccgaugucu

SEQ ID NO: 392124 - RNA, 19 nt, Artificial Sequence
  Description of Artificial Sequence: Synthetic oligonucleotide
gauuuccgggagguccuca

SEQ ID NO: 392125 - RNA, 19 nt, Artificial Sequence
  Description of Artificial Sequence: Synthetic oligonucleotide
aggugagaacccggcagca

SEQ ID NO: 392126 - RNA, 19 nt, Artificial Sequence
  Description of Artificial Sequence: Synthetic oligonucleotide
gugucgaugucgagaccgc

SEQ ID NO: 392127 - RNA, 19 nt, Artificial Sequence
  Description of Artificial Sequence: Synthetic oligonucleotide
gcuacccgaaggucugcag

SEQ ID NO: 392128 - RNA, 19 nt, Artificial Sequence
  Description of Artificial Sequence: Synthetic oligonucleotide
acgcgugccuuugcuguuc

SEQ ID NO: 392129 - RNA, 19 nt, Artificial Sequence
  Description of Artificial Sequence: Synthetic oligonucleotide
ggugaacacaagccaugga

SEQ ID NO: 392130 - RNA, 19 nt, Artificial Sequence
  Description of Artificial Sequence: Synthetic oligonucleotide
cacuuucuaggugugucaa

SEQ ID NO: 392131 - RNA, 19 nt, Artificial Sequence
  Description of Artificial Sequence: Synthetic oligonucleotide
augcggacgauuggguaaa

SEQ ID NO: 392132 - RNA, 19 nt, Artificial Sequence
  Description of Artificial Sequence: Synthetic oligonucleotide
augccgaagucgguggaau

SEQ ID NO: 392133 - RNA, 19 nt, Artificial Sequence
  Description of Artificial Sequence: Synthetic oligonucleotide
acucaccucaagguccaau

SEQ ID NO: 392134 - RNA, 19 nt, Artificial Sequence
  Description of Artificial Sequence: Synthetic oligonucleotide
agagucacugcggcuccga

SEQ ID NO: 392135 - RNA, 19 nt, Artificial Sequence
  Description of Artificial Sequence: Synthetic oligonucleotide
cuagcucgagccuuggcuu

SEQ ID NO: 392136 - RNA, 19 nt, Artificial Sequence
  Description of Artificial Sequence: Synthetic oligonucleotide
cuacccgaaggucugcagu

SEQ ID NO: 392137 - RNA, 19 nt, Artificial Sequence
  Description of Artificial Sequence: Synthetic oligonucleotide
ucccgcucauagcgauggc

SEQ ID NO: 392138 - RNA, 19 nt, Artificial Sequence
  Description of Artificial Sequence: Synthetic oligonucleotide
ugugcccaagagggagggc

SEQ ID NO: 392139 - RNA, 19 nt, Artificial Sequence
  Description of Artificial Sequence: Synthetic oligonucleotide
augggagcacuaccuggua

SEQ ID NO: 392140 - RNA, 19 nt, Artificial Sequence
  Description of Artificial Sequence: Synthetic oligonucleotide
agaggagcuccggcuacga

SEQ ID NO: 392141 - RNA, 19 nt, Artificial Sequence
  Description of Artificial Sequence: Synthetic oligonucleotide
ggacccaccugagguagag

SEQ ID NO: 392142 - RNA, 19 nt, Artificial Sequence
  Description of Artificial Sequence: Synthetic oligonucleotide
gagcaccacgguguaccug

SEQ ID NO: 392143 - RNA, 19 nt, Artificial Sequence
  Description of Artificial Sequence: Synthetic oligonucleotide
acgguguaccugccuugga

SEQ ID NO: 392144 - RNA, 19 nt, Artificial Sequence
  Description of Artificial Sequence: Synthetic oligonucleotide
auggggacgcgugccuuug

SEQ ID NO: 392145 - RNA, 19 nt, Artificial Sequence
  Description of Artificial Sequence: Synthetic oligonucleotide
gacccaccugagguagagc

SEQ ID NO: 392146 - RNA, 19 nt, Artificial Sequence
  Description of Artificial Sequence: Synthetic oligonucleotide
cgccgauucuuucucgggg

SEQ ID NO: 392147 - RNA, 19 nt, Artificial Sequence
  Description of Artificial Sequence: Synthetic oligonucleotide
cuuagaugccgaagucggu

SEQ ID NO: 392148 - RNA, 19 nt, Artificial Sequence
  Description of Artificial Sequence: Synthetic oligonucleotide
gggacgcgugccuuugcug

SEQ ID NO: 392149 - RNA, 19 nt, Artificial Sequence
  Description of Artificial Sequence: Synthetic oligonucleotide
ugcggacgauuggguaaag

SEQ ID NO: 392150 - RNA, 19 nt, Artificial Sequence
  Description of Artificial Sequence: Synthetic oligonucleotide
ccagccugagggcaucuug

SEQ ID NO: 392151 - RNA, 19 nt, Artificial Sequence
  Description of Artificial Sequence: Synthetic oligonucleotide
caacgcgggagccgccaac

SEQ ID NO: 392152 - RNA, 19 nt, Artificial Sequence
  Description of Artificial Sequence: Synthetic oligonucleotide
gcgcucauaugaccuugag

SEQ ID NO: 392153 - RNA, 19 nt, Artificial Sequence
  Description of Artificial Sequence: Synthetic oligonucleotide
cgguguaccugccuuggag

SEQ ID NO: 392154 - RNA, 19 nt, Artificial Sequence
  Description of Artificial Sequence: Synthetic oligonucleotide
gcggacgauuggguaaagg

SEQ ID NO: 392155 - RNA, 19 nt, Artificial Sequence
  Description of Artificial Sequence: Synthetic oligonucleotide
ggacgcgugccuuugcugu

SEQ ID NO: 392156 - RNA, 19 nt, Artificial Sequence
  Description of Artificial Sequence: Synthetic oligonucleotide
gaccggcuucgagaacgag

SEQ ID NO: 392157 - RNA, 19 nt, Artificial Sequence
  Description of Artificial Sequence: Synthetic oligonucleotide
gugugucaaaucaaccuuu

SEQ ID NO: 392158 - RNA, 19 nt, Artificial Sequence
  Description of Artificial Sequence: Synthetic oligonucleotide
ucacugcggcuccgagaac

SEQ ID NO: 392159 - RNA, 19 nt, Artificial Sequence
  Description of Artificial Sequence: Synthetic oligonucleotide
ugucaccgaucagcacccc

SEQ ID NO: 392160 - RNA, 19 nt, Artificial Sequence
  Description of Artificial Sequence: Synthetic oligonucleotide
cccgcucauagcgauggcc

SEQ ID NO: 392161 - RNA, 19 nt, Artificial Sequence
  Description of Artificial Sequence: Synthetic oligonucleotide
ccgccgauucuuucucggg

SEQ ID NO: 392162 - RNA, 19 nt, Artificial Sequence
  Description of Artificial Sequence: Synthetic oligonucleotide
gcaagcaguucuccaaggu

SEQ ID NO: 392163 - RNA, 19 nt, Artificial Sequence
  Description of Artificial Sequence: Synthetic oligonucleotide
aucaugcuacaaggccacu

SEQ ID NO: 392164 - RNA, 19 nt, Artificial Sequence
  Description of Artificial Sequence: Synthetic oligonucleotide
ggggagcaagcaguucucc

SEQ ID NO: 392165 - RNA, 19 nt, Artificial Sequence
  Description of Artificial Sequence: Synthetic oligonucleotide
ggagcacuaccugguagca

SEQ ID NO: 392166 - RNA, 19 nt, Artificial Sequence
  Description of Artificial Sequence: Synthetic oligonucleotide
ggugagaacccggcagcac

SEQ ID NO: 392167 - RNA, 19 nt, Artificial Sequence
  Description of Artificial Sequence: Synthetic oligonucleotide
ccuagcucgagccuuggcu

SEQ ID NO: 392168 - RNA, 19 nt, Artificial Sequence
  Description of Artificial Sequence: Synthetic oligonucleotide
ccgcucgacauggacggcg

SEQ ID NO: 392169 - RNA, 19 nt, Artificial Sequence
  Description of Artificial Sequence: Synthetic oligonucleotide
ccggcuacgagacuugugu

SEQ ID NO: 392170 - RNA, 19 nt, Artificial Sequence
  Description of Artificial Sequence: Synthetic oligonucleotide
gaagucgguggaauacauu

SEQ ID NO: 392171 - RNA, 19 nt, Artificial Sequence
  Description of Artificial Sequence: Synthetic oligonucleotide
ccuugacggggaucuugag

SEQ ID NO: 392172 - RNA, 19 nt, Artificial Sequence
  Description of Artificial Sequence: Synthetic oligonucleotide
gccugugcgcucauaugac

SEQ ID NO: 392173 - RNA, 19 nt, Artificial Sequence
  Description of Artificial Sequence: Synthetic oligonucleotide
gauucgucuuggagccucu

SEQ ID NO: 392174 - RNA, 19 nt, Artificial Sequence
  Description of Artificial Sequence: Synthetic oligonucleotide
cacaccaauggggacgcgu

SEQ ID NO: 392175 - RNA, 19 nt, Artificial Sequence
  Description of Artificial Sequence: Synthetic oligonucleotide
cagcuacccgaaggucugc

SEQ ID NO: 392176 - RNA, 19 nt, Artificial Sequence
  Description of Artificial Sequence: Synthetic oligonucleotide
cuacgagacuuguguggcu

SEQ ID NO: 392177 - RNA, 19 nt, Artificial Sequence
  Description of Artificial Sequence: Synthetic oligonucleotide
ccuugagaacacgucucuc

SEQ ID NO: 392178 - RNA, 19 nt, Artificial Sequence
  Description of Artificial Sequence: Synthetic oligonucleotide
cacaaaagcccagcuuccu

SEQ ID NO: 392179 - RNA, 19 nt, Artificial Sequence
  Description of Artificial Sequence: Synthetic oligonucleotide
acacgucucucugccuuua

SEQ ID NO: 392180 - RNA, 19 nt, Artificial Sequence
  Description of Artificial Sequence: Synthetic oligonucleotide
gagcgcucccgucuuugau

SEQ ID NO: 392181 - RNA, 19 nt, Artificial Sequence
  Description of Artificial Sequence: Synthetic oligonucleotide
ccacgcggaggccagucuc

SEQ ID NO: 392182 - RNA, 19 nt, Artificial Sequence
  Description of Artificial Sequence: Synthetic oligonucleotide
ccucaagguccaauugaaa

SEQ ID NO: 392183 - RNA, 19 nt, Artificial Sequence
  Description of Artificial Sequence: Synthetic oligonucleotide
gucggggagcaagcaguuc

SEQ ID NO: 392184 - RNA, 19 nt, Artificial Sequence
  Description of Artificial Sequence: Synthetic oligonucleotide
cugcggcuccgagaacgac

SEQ ID NO: 392185 - RNA, 19 nt, Artificial Sequence
  Description of Artificial Sequence: Synthetic oligonucleotide
cacgaaggacuugguguaa

SEQ ID NO: 392186 - RNA, 19 nt, Artificial Sequence
  Description of Artificial Sequence: Synthetic oligonucleotide
cacgcggaggccagucucu

SEQ ID NO: 392187 - RNA, 19 nt, Artificial Sequence
  Description of Artificial Sequence: Synthetic oligonucleotide
ccagaauugucuguccgcu

SEQ ID NO: 392188 - RNA, 19 nt, Artificial Sequence
  Description of Artificial Sequence: Synthetic oligonucleotide
ccgcucauagcgauggccu

SEQ ID NO: 392189 - RNA, 19 nt, Artificial Sequence
  Description of Artificial Sequence: Synthetic oligonucleotide
cucccgucuuugaucucua

SEQ ID NO: 392190 - RNA, 19 nt, Artificial Sequence
  Description of Artificial Sequence: Synthetic oligonucleotide
cggcuacgagacuugugug

SEQ ID NO: 392191 - RNA, 19 nt, Artificial Sequence
  Description of Artificial Sequence: Synthetic oligonucleotide
ggucccgcucauagcgaug

SEQ ID NO: 392192 - RNA, 19 nt, Artificial Sequence
  Description of Artificial Sequence: Synthetic oligonucleotide
gacgcgugccuuugcuguu

SEQ ID NO: 392193 - RNA, 19 nt, Artificial Sequence
  Description of Artificial Sequence: Synthetic oligonucleotide
ccgaagucgguggaauaca

SEQ ID NO: 392194 - RNA, 19 nt, Artificial Sequence
  Description of Artificial Sequence: Synthetic oligonucleotide
cccgucuuugaucucuaua

SEQ ID NO: 392195 - RNA, 19 nt, Artificial Sequence
  Description of Artificial Sequence: Synthetic oligonucleotide
cccuagcucgagccuuggc

SEQ ID NO: 392196 - RNA, 19 nt, Artificial Sequence
  Description of Artificial Sequence: Synthetic oligonucleotide
ccaaugcggacgauugggu

SEQ ID NO: 392197 - RNA, 19 nt, Artificial Sequence
  Description of Artificial Sequence: Synthetic oligonucleotide
ccaccugcggcaggcggag

SEQ ID NO: 392198 - RNA, 19 nt, Artificial Sequence
  Description of Artificial Sequence: Synthetic oligonucleotide
ggggacgcgugccuuugcu

SEQ ID NO: 392199 - RNA, 19 nt, Artificial Sequence
  Description of Artificial Sequence: Synthetic oligonucleotide
gcuucgucgauggcaugcu

SEQ ID NO: 392200 - RNA, 19 nt, Artificial Sequence
  Description of Artificial Sequence: Synthetic oligonucleotide
ccgagccggaagagccggc

SEQ ID NO: 392201 - RNA, 19 nt, Artificial Sequence
  Description of Artificial Sequence: Synthetic oligonucleotide
cuucgucgauggcaugcuu

SEQ ID NO: 392202 - RNA, 19 nt, Artificial Sequence
  Description of Artificial Sequence: Synthetic oligonucleotide
cccaaguguccugagaauu

SEQ ID NO: 392203 - RNA, 19 nt, Artificial Sequence
  Description of Artificial Sequence: Synthetic oligonucleotide
caccugcggcaggcggagc

SEQ ID NO: 392204 - RNA, 19 nt, Artificial Sequence
  Description of Artificial Sequence: Synthetic oligonucleotide
cgauuggguaaagggaucu

SEQ ID NO: 392205 - RNA, 19 nt, Artificial Sequence
  Description of Artificial Sequence: Synthetic oligonucleotide
cgccauuuugugccgccga

SEQ ID NO: 392206 - RNA, 19 nt, Artificial Sequence
  Description of Artificial Sequence: Synthetic oligonucleotide
ccaauggggacgcgugccu

SEQ ID NO: 392207 - RNA, 19 nt, Artificial Sequence
  Description of Artificial Sequence: Synthetic oligonucleotide
ccccuagcucgagccuugg

SEQ ID NO: 392208 - RNA, 19 nt, Artificial Sequence
  Description of Artificial Sequence: Synthetic oligonucleotide
caauggggacgcgugccuu

SEQ ID NO: 392209 - RNA, 19 nt, Artificial Sequence
  Description of Artificial Sequence: Synthetic oligonucleotide
cgaagucgguggaauacau

SEQ ID NO: 392210 - RNA, 19 nt, Artificial Sequence
  Description of Artificial Sequence: Synthetic oligonucleotide
cugauucgucuuggagccu

SEQ ID NO: 392211 - RNA, 19 nt, Artificial Sequence
  Description of Artificial Sequence: Synthetic oligonucleotide
cgugaccggcuucgagaac

SEQ ID NO: 392212 - RNA, 19 nt, Artificial Sequence
  Description of Artificial Sequence: Synthetic oligonucleotide
ccuccgaugucugcugugu

SEQ ID NO: 392213 - RNA, 19 nt, Artificial Sequence
  Description of Artificial Sequence: Synthetic oligonucleotide
cuccggcuacgagacuugu

SEQ ID NO: 392214 - RNA, 19 nt, Artificial Sequence
  Description of Artificial Sequence: Synthetic oligonucleotide
cuucggcucucaugcccuu

SEQ ID NO: 392215 - RNA, 19 nt, Artificial Sequence
  Description of Artificial Sequence: Synthetic oligonucleotide
gggcagcgagguagauaca

SEQ ID NO: 392216 - RNA, 19 nt, Artificial Sequence
  Description of Artificial Sequence: Synthetic oligonucleotide
cgaugucgagaccgcucga

SEQ ID NO: 392217 - RNA, 19 nt, Artificial Sequence
  Description of Artificial Sequence: Synthetic oligonucleotide
ccaacgcgggagccgccaa

SEQ ID NO: 392218 - RNA, 19 nt, Artificial Sequence
  Description of Artificial Sequence: Synthetic oligonucleotide
ccauuuugugccgccgauu

SEQ ID NO: 392219 - RNA, 19 nt, Artificial Sequence
  Description of Artificial Sequence: Synthetic oligonucleotide
cgagaacgacucugugacu

SEQ ID NO: 392220 - RNA, 19 nt, Artificial Sequence
  Description of Artificial Sequence: Synthetic oligonucleotide
ccgggcagcgagguagaua

SEQ ID NO: 392221 - RNA, 19 nt, Artificial Sequence
  Description of Artificial Sequence: Synthetic oligonucleotide
cgcucgacauggacggcgu

SEQ ID NO: 392222 - RNA, 19 nt, Artificial Sequence
  Description of Artificial Sequence: Synthetic oligonucleotide
cgagaccgcucgacaugga

SEQ ID NO: 392223 - RNA, 19 nt, Artificial Sequence
  Description of Artificial Sequence: Synthetic oligonucleotide
ccccuagaauagcuagguu

SEQ ID NO: 392224 - RNA, 19 nt, Artificial Sequence
  Description of Artificial Sequence: Synthetic oligonucleotide
uguaauauagaaaaguuga

SEQ ID NO: 392225 - RNA, 19 nt, Artificial Sequence
  Description of Artificial Sequence: Synthetic oligonucleotide
cuaaauuugacauucauac

SEQ ID NO: 392226 - RNA, 19 nt, Artificial Sequence
  Description of Artificial Sequence: Synthetic oligonucleotide
uuagcaaucaugaacacag

SEQ ID NO: 392227 - RNA, 19 nt, Artificial Sequence
  Description of Artificial Sequence: Synthetic oligonucleotide
aauguuaaguuucaaucac

SEQ ID NO: 392228 - RNA, 19 nt, Artificial Sequence
  Description of Artificial Sequence: Synthetic oligonucleotide
auaauuggaaccuucaaag

SEQ ID NO: 392229 - RNA, 19 nt, Artificial Sequence
  Description of Artificial Sequence: Synthetic oligonucleotide
aaauuugacauucauacaa

SEQ ID NO: 392230 - RNA, 19 nt, Artificial Sequence
  Description of Artificial Sequence: Synthetic oligonucleotide
uuaaguuucaaucacuccu

SEQ ID NO: 392231 - RNA, 19 nt, Artificial Sequence
  Description of Artificial Sequence: Synthetic oligonucleotide
auaaaauagagucugucag

SEQ ID NO: 392232 - RNA, 19 nt, Artificial Sequence
  Description of Artificial Sequence: Synthetic oligonucleotide
agaguacucacauacaaac

SEQ ID NO: 392233 - RNA, 19 nt, Artificial Sequence
  Description of Artificial Sequence: Synthetic oligonucleotide
uuuucaaccaauaugacuu

SEQ ID NO: 392234 - RNA, 19 nt, Artificial Sequence
  Description of Artificial Sequence: Synthetic oligonucleotide
acuacuaaugaccuauggc

SEQ ID NO: 392235 - RNA, 19 nt, Artificial Sequence
  Description of Artificial Sequence: Synthetic oligonucleotide
agaaaauuagcuuuauuug

SEQ ID NO: 392236 - RNA, 19 nt, Artificial Sequence
  Description of Artificial Sequence: Synthetic oligonucleotide
uacaagaguacucacauac

SEQ ID NO: 392237 - RNA, 19 nt, Artificial Sequence
  Description of Artificial Sequence: Synthetic oligonucleotide
uaaacaccgaggaauaccg

SEQ ID NO: 392238 - RNA, 19 nt, Artificial Sequence
  Description of Artificial Sequence: Synthetic oligonucleotide
agucuuaucacauaguccu

SEQ ID NO: 392239 - RNA, 19 nt, Artificial Sequence
  Description of Artificial Sequence: Synthetic oligonucleotide
ugcuagagcauucuggagg

SEQ ID NO: 392240 - RNA, 19 nt, Artificial Sequence
  Description of Artificial Sequence: Synthetic oligonucleotide
agcaugaucucauaucggc

SEQ ID NO: 392241 - RNA, 19 nt, Artificial Sequence
  Description of Artificial Sequence: Synthetic oligonucleotide
cauaguguggccuauacug

SEQ ID NO: 392242 - RNA, 19 nt, Artificial Sequence
  Description of Artificial Sequence: Synthetic oligonucleotide
aauggaauguaggagcugg

SEQ ID NO: 392243 - RNA, 19 nt, Artificial Sequence
  Description of Artificial Sequence: Synthetic oligonucleotide
uaaaauagagucugucagg

SEQ ID NO: 392244 - RNA, 19 nt, Artificial Sequence
  Description of Artificial Sequence: Synthetic oligonucleotide
uuaauacuacuaaugaccu

SEQ ID NO: 392245 - RNA, 19 nt, Artificial Sequence
  Description of Artificial Sequence: Synthetic oligonucleotide
gauuacuuaguaaauuggg

SEQ ID NO: 392246 - RNA, 19 nt, Artificial Sequence
  Description of Artificial Sequence: Synthetic oligonucleotide
uguuguacuaaauuugaca

SEQ ID NO: 392247 - RNA, 19 nt, Artificial Sequence
  Description of Artificial Sequence: Synthetic oligonucleotide
aaccaauaugacuuuauca

SEQ ID NO: 392248 - RNA, 19 nt, Artificial Sequence
  Description of Artificial Sequence: Synthetic oligonucleotide
aacauaguguggccuauac

SEQ ID NO: 392249 - RNA, 19 nt, Artificial Sequence
  Description of Artificial Sequence: Synthetic oligonucleotide
aauggccggauuuggaaac

SEQ ID NO: 392250 - RNA, 19 nt, Artificial Sequence
  Description of Artificial Sequence: Synthetic oligonucleotide
aaaggcauguaauuuauuu

SEQ ID NO: 392251 - RNA, 19 nt, Artificial Sequence
  Description of Artificial Sequence: Synthetic oligonucleotide
acaugaaucugcauuaagc

SEQ ID NO: 392252 - RNA, 19 nt, Artificial Sequence
  Description of Artificial Sequence: Synthetic oligonucleotide
cucauaucggccuugagac

SEQ ID NO: 392253 - RNA, 19 nt, Artificial Sequence
  Description of Artificial Sequence: Synthetic oligonucleotide
uaaggaguaaauguauggg

SEQ ID NO: 392254 - RNA, 19 nt, Artificial Sequence
  Description of Artificial Sequence: Synthetic oligonucleotide
uguccguuagacaggaccg

SEQ ID NO: 392255 - RNA, 19 nt, Artificial Sequence
  Description of Artificial Sequence: Synthetic oligonucleotide
uauuuguauucacugaagu

SEQ ID NO: 392256 - RNA, 19 nt, Artificial Sequence
  Description of Artificial Sequence: Synthetic oligonucleotide
aagucuuaucacauagucc

SEQ ID NO: 392257 - RNA, 19 nt, Artificial Sequence
  Description of Artificial Sequence: Synthetic oligonucleotide
aaggaguaaauguaugggu

SEQ ID NO: 392258 - RNA, 19 nt, Artificial Sequence
  Description of Artificial Sequence: Synthetic oligonucleotide
aauacauucuguguuaaaa

SEQ ID NO: 392259 - RNA, 19 nt, Artificial Sequence
  Description of Artificial Sequence: Synthetic oligonucleotide
aguucuaaauuuguuguac

SEQ ID NO: 392260 - RNA, 19 nt, Artificial Sequence
  Description of Artificial Sequence: Synthetic oligonucleotide
uacuaaugaccuauggcag

SEQ ID NO: 392261 - RNA, 19 nt, Artificial Sequence
  Description of Artificial Sequence: Synthetic oligonucleotide
ugauuguaguguuaguuug

SEQ ID NO: 392262 - RNA, 19 nt, Artificial Sequence
  Description of Artificial Sequence: Synthetic oligonucleotide
uuagcaagaauguuaaguu

SEQ ID NO: 392263 - RNA, 19 nt, Artificial Sequence
  Description of Artificial Sequence: Synthetic oligonucleotide
uguuaaguuucaaucacuc

SEQ ID NO: 392264 - RNA, 19 nt, Artificial Sequence
  Description of Artificial Sequence: Synthetic oligonucleotide
ggacuuaaaacauagugug

SEQ ID NO: 392265 - RNA, 19 nt, Artificial Sequence
  Description of Artificial Sequence: Synthetic oligonucleotide
auuugacauucauacaauc

SEQ ID NO: 392266 - RNA, 19 nt, Artificial Sequence
  Description of Artificial Sequence: Synthetic oligonucleotide
ucgauaacuucauaguaca

SEQ ID NO: 392267 - RNA, 19 nt, Artificial Sequence
  Description of Artificial Sequence: Synthetic oligonucleotide
gaugcuaaggaguaaaugu

SEQ ID NO: 392268 - RNA, 19 nt, Artificial Sequence
  Description of Artificial Sequence: Synthetic oligonucleotide
ugaaagaucugcagcucgg

SEQ ID NO: 392269 - RNA, 19 nt, Artificial Sequence
  Description of Artificial Sequence: Synthetic oligonucleotide
uacuacuaaugaccuaugg

SEQ ID NO: 392270 - RNA, 19 nt, Artificial Sequence
  Description of Artificial Sequence: Synthetic oligonucleotide
caguuuguaaauuaggaca

SEQ ID NO: 392271 - RNA, 19 nt, Artificial Sequence
  Description of Artificial Sequence: Synthetic oligonucleotide
gcucuaaucauuuauguug

SEQ ID NO: 392272 - RNA, 19 nt, Artificial Sequence
  Description of Artificial Sequence: Synthetic oligonucleotide
caagaauucuggcaguucc

SEQ ID NO: 392273 - RNA, 19 nt, Artificial Sequence
  Description of Artificial Sequence: Synthetic oligonucleotide
aauaccgagggccuaucug

SEQ ID NO: 392274 - RNA, 19 nt, Artificial Sequence
  Description of Artificial Sequence: Synthetic oligonucleotide
ugcucaauucacaaaguac

SEQ ID NO: 392275 - RNA, 19 nt, Artificial Sequence
  Description of Artificial Sequence: Synthetic oligonucleotide
uuagaguugaacgugcgga

SEQ ID NO: 392276 - RNA, 19 nt, Artificial Sequence
  Description of Artificial Sequence: Synthetic oligonucleotide
ucauaguacacugacgucu

SEQ ID NO: 392277 - RNA, 19 nt, Artificial Sequence
  Description of Artificial Sequence: Synthetic oligonucleotide
aucccacauagauauagac

SEQ ID NO: 392278 - RNA, 19 nt, Artificial Sequence
  Description of Artificial Sequence: Synthetic oligonucleotide
auuggaaccuucaaaggac

SEQ ID NO: 392279 - RNA, 19 nt, Artificial Sequence
  Description of Artificial Sequence: Synthetic oligonucleotide
aaacguaauaaaauagagu

SEQ ID NO: 392280 - RNA, 19 nt, Artificial Sequence
  Description of Artificial Sequence: Synthetic oligonucleotide
agcaagaauguuaaguuuc

SEQ ID NO: 392281 - RNA, 19 nt, Artificial Sequence
  Description of Artificial Sequence: Synthetic oligonucleotide
caagaagacacuuggcagc

SEQ ID NO: 392282 - RNA, 19 nt, Artificial Sequence
  Description of Artificial Sequence: Synthetic oligonucleotide
auaaauaucccuguggcaa

SEQ ID NO: 392283 - RNA, 19 nt, Artificial Sequence
  Description of Artificial Sequence: Synthetic oligonucleotide
caaguguuacaauucagug

SEQ ID NO: 392284 - RNA, 19 nt, Artificial Sequence
  Description of Artificial Sequence: Synthetic oligonucleotide
auuaaaggcauguaauuua

SEQ ID NO: 392285 - RNA, 19 nt, Artificial Sequence
  Description of Artificial Sequence: Synthetic oligonucleotide
aguuuguaaauuaggacag

SEQ ID NO: 392286 - RNA, 19 nt, Artificial Sequence
  Description of Artificial Sequence: Synthetic oligonucleotide
aacgugcggacccuuagag

SEQ ID NO: 392287 - RNA, 19 nt, Artificial Sequence
  Description of Artificial Sequence: Synthetic oligonucleotide
uguuagaguugaacgugcg

SEQ ID NO: 392288 - RNA, 19 nt, Artificial Sequence
  Description of Artificial Sequence: Synthetic oligonucleotide
ugacauucauacaauccca

SEQ ID NO: 392289 - RNA, 19 nt, Artificial Sequence
  Description of Artificial Sequence: Synthetic oligonucleotide
augacguuccuaaacaccg

SEQ ID NO: 392290 - RNA, 19 nt, Artificial Sequence
  Description of Artificial Sequence: Synthetic oligonucleotide
cagugcucaauucacaaag

SEQ ID NO: 392291 - RNA, 19 nt, Artificial Sequence
  Description of Artificial Sequence: Synthetic oligonucleotide
gaaguucuaaauuuguugu

SEQ ID NO: 392292 - RNA, 19 nt, Artificial Sequence
  Description of Artificial Sequence: Synthetic oligonucleotide
uguguuagaguugaacgug

SEQ ID NO: 392293 - RNA, 19 nt, Artificial Sequence
  Description of Artificial Sequence: Synthetic oligonucleotide
uaaucaguccuucucaauu

SEQ ID NO: 392294 - RNA, 19 nt, Artificial Sequence
  Description of Artificial Sequence: Synthetic oligonucleotide
ugacuuuaucauuauauuu

SEQ ID NO: 392295 - RNA, 19 nt, Artificial Sequence
  Description of Artificial Sequence: Synthetic oligonucleotide
ugacacagugcucaauuca

SEQ ID NO: 392296 - RNA, 19 nt, Artificial Sequence
  Description of Artificial Sequence: Synthetic oligonucleotide
ucuaaauuuguuguacuaa

SEQ ID NO: 392297 - RNA, 19 nt, Artificial Sequence
  Description of Artificial Sequence: Synthetic oligonucleotide
acaaaaugaagagagguaa

SEQ ID NO: 392298 - RNA, 19 nt, Artificial Sequence
  Description of Artificial Sequence: Synthetic oligonucleotide
cuuuagccaacacugugcc

SEQ ID NO: 392299 - RNA, 19 nt, Artificial Sequence
  Description of Artificial Sequence: Synthetic oligonucleotide
ucaagcacaguugcuagag

SEQ ID NO: 392300 - RNA, 19 nt, Artificial Sequence
  Description of Artificial Sequence: Synthetic oligonucleotide
ugaccaaugcuuccaagac

SEQ ID NO: 392301 - RNA, 19 nt, Artificial Sequence
  Description of Artificial Sequence: Synthetic oligonucleotide
acuuaguaaauugggaucu

SEQ ID NO: 392302 - RNA, 19 nt, Artificial Sequence
  Description of Artificial Sequence: Synthetic oligonucleotide
ucuuagucaauggaaacaa

SEQ ID NO: 392303 - RNA, 19 nt, Artificial Sequence
  Description of Artificial Sequence: Synthetic oligonucleotide
gaucuaaucaguccuucuc

SEQ ID NO: 392304 - RNA, 19 nt, Artificial Sequence
  Description of Artificial Sequence: Synthetic oligonucleotide
uuuguaaauuaggacagaa

SEQ ID NO: 392305 - RNA, 19 nt, Artificial Sequence
  Description of Artificial Sequence: Synthetic oligonucleotide
agccaugacguuccuaaac

SEQ ID NO: 392306 - RNA, 19 nt, Artificial Sequence
  Description of Artificial Sequence: Synthetic oligonucleotide
ugucgauaacuucauagua

SEQ ID NO: 392307 - RNA, 19 nt, Artificial Sequence
  Description of Artificial Sequence: Synthetic oligonucleotide
guuaaguuucaaucacucc

SEQ ID NO: 392308 - RNA, 19 nt, Artificial Sequence
  Description of Artificial Sequence: Synthetic oligonucleotide
cuguccguuagacaggacc

SEQ ID NO: 392309 - RNA, 19 nt, Artificial Sequence
  Description of Artificial Sequence: Synthetic oligonucleotide
aguacaauacugaagugga

SEQ ID NO: 392310 - RNA, 19 nt, Artificial Sequence
  Description of Artificial Sequence: Synthetic oligonucleotide
uggcgcagaacuuugguga

SEQ ID NO: 392311 - RNA, 19 nt, Artificial Sequence
  Description of Artificial Sequence: Synthetic oligonucleotide
uuagcaaguacagcuuuag

SEQ ID NO: 392312 - RNA, 19 nt, Artificial Sequence
  Description of Artificial Sequence: Synthetic oligonucleotide
uagacaugaaucugcauua

SEQ ID NO: 392313 - RNA, 19 nt, Artificial Sequence
  Description of Artificial Sequence: Synthetic oligonucleotide
augucgauaacuucauagu

SEQ ID NO: 392314 - RNA, 19 nt, Artificial Sequence
  Description of Artificial Sequence: Synthetic oligonucleotide
aagcuuuacaagaguacuc

SEQ ID NO: 392315 - RNA, 19 nt, Artificial Sequence
  Description of Artificial Sequence: Synthetic oligonucleotide
uacuaaauuugacauucau

SEQ ID NO: 392316 - RNA, 19 nt, Artificial Sequence
  Description of Artificial Sequence: Synthetic oligonucleotide
aauuagcuuuauuugugua

SEQ ID NO: 392317 - RNA, 19 nt, Artificial Sequence
  Description of Artificial Sequence: Synthetic oligonucleotide
ugcuuugacacagugcuca

SEQ ID NO: 392318 - RNA, 19 nt, Artificial Sequence
  Description of Artificial Sequence: Synthetic oligonucleotide
gagagguaacagaaaaucc

SEQ ID NO: 392319 - RNA, 19 nt, Artificial Sequence
  Description of Artificial Sequence: Synthetic oligonucleotide
ucggcaauggugaccaaug

SEQ ID NO: 392320 - RNA, 19 nt, Artificial Sequence
  Description of Artificial Sequence: Synthetic oligonucleotide
uuccuaaacaccgaggaau

SEQ ID NO: 392321 - RNA, 19 nt, Artificial Sequence
  Description of Artificial Sequence: Synthetic oligonucleotide
uagagcauucuggaggagg

SEQ ID NO: 392322 - RNA, 19 nt, Artificial Sequence
  Description of Artificial Sequence: Synthetic oligonucleotide
uugauuguaguguuaguuu

SEQ ID NO: 392323 - RNA, 19 nt, Artificial Sequence
  Description of Artificial Sequence: Synthetic oligonucleotide
ucggacgcuuuccugauug

SEQ ID NO: 392324 - RNA, 19 nt, Artificial Sequence
  Description of Artificial Sequence: Synthetic oligonucleotide
gucaguauacucugcagac

SEQ ID NO: 392325 - RNA, 19 nt, Artificial Sequence
  Description of Artificial Sequence: Synthetic oligonucleotide
gacaugaaucugcauuaag

SEQ ID NO: 392326 - RNA, 19 nt, Artificial Sequence
  Description of Artificial Sequence: Synthetic oligonucleotide
auucagugcccaguguucc

SEQ ID NO: 392327 - RNA, 19 nt, Artificial Sequence
  Description of Artificial Sequence: Synthetic oligonucleotide
uacucacauacaaacguaa

SEQ ID NO: 392328 - RNA, 19 nt, Artificial Sequence
  Description of Artificial Sequence: Synthetic oligonucleotide
auuacuuaguaaauuggga

SEQ ID NO: 392329 - RNA, 19 nt, Artificial Sequence
  Description of Artificial Sequence: Synthetic oligonucleotide
gaguacucacauacaaacg

SEQ ID NO: 392330 - RNA, 19 nt, Artificial Sequence
  Description of Artificial Sequence: Synthetic oligonucleotide
aaggagacaagcaaguguu

SEQ ID NO: 392331 - RNA, 19 nt, Artificial Sequence
  Description of Artificial Sequence: Synthetic oligonucleotide
ugcauuagcagcuggggua

SEQ ID NO: 392332 - RNA, 19 nt, Artificial Sequence
  Description of Artificial Sequence: Synthetic oligonucleotide
uuauguuguuugagaaaug

SEQ ID NO: 392333 - RNA, 19 nt, Artificial Sequence
  Description of Artificial Sequence: Synthetic oligonucleotide
uggacuccaacagucaagc

SEQ ID NO: 392334 - RNA, 19 nt, Artificial Sequence
  Description of Artificial Sequence: Synthetic oligonucleotide
aguacacugacgucugugu

SEQ ID NO: 392335 - RNA, 19 nt, Artificial Sequence
  Description of Artificial Sequence: Synthetic oligonucleotide
aacugagguugcugauccc

SEQ ID NO: 392336 - RNA, 19 nt, Artificial Sequence
  Description of Artificial Sequence: Synthetic oligonucleotide
ggaauguaggagcugguag

SEQ ID NO: 392337 - RNA, 19 nt, Artificial Sequence
  Description of Artificial Sequence: Synthetic oligonucleotide
augaagacggccucauucu

SEQ ID NO: 392338 - RNA, 19 nt, Artificial Sequence
  Description of Artificial Sequence: Synthetic oligonucleotide
caguauacucugcagacuc

SEQ ID NO: 392339 - RNA, 19 nt, Artificial Sequence
  Description of Artificial Sequence: Synthetic oligonucleotide
acugacgucuguguuagag

SEQ ID NO: 392340 - RNA, 19 nt, Artificial Sequence
  Description of Artificial Sequence: Synthetic oligonucleotide
aagacggccucauucugga

SEQ ID NO: 392341 - RNA, 19 nt, Artificial Sequence
  Description of Artificial Sequence: Synthetic oligonucleotide
ggauuacuuaguaaauugg

SEQ ID NO: 392342 - RNA, 19 nt, Artificial Sequence
  Description of Artificial Sequence: Synthetic oligonucleotide
agagcggugcuguuccucg

SEQ ID NO: 392343 - RNA, 19 nt, Artificial Sequence
  Description of Artificial Sequence: Synthetic oligonucleotide
cauaauuggaaccuucaaa

SEQ ID NO: 392344 - RNA, 19 nt, Artificial Sequence
  Description of Artificial Sequence: Synthetic oligonucleotide
ggaaaguuagcaaucauga

SEQ ID NO: 392345 - RNA, 19 nt, Artificial Sequence
  Description of Artificial Sequence: Synthetic oligonucleotide
ugaacgugcggacccuuag

SEQ ID NO: 392346 - RNA, 19 nt, Artificial Sequence
  Description of Artificial Sequence: Synthetic oligonucleotide
aauuugacauucauacaau

SEQ ID NO: 392347 - RNA, 19 nt, Artificial Sequence
  Description of Artificial Sequence: Synthetic oligonucleotide
aaguucuaaauuuguugua

SEQ ID NO: 392348 - RNA, 19 nt, Artificial Sequence
  Description of Artificial Sequence: Synthetic oligonucleotide
cauaguacacugacgucug

SEQ ID NO: 392349 - RNA, 19 nt, Artificial Sequence
  Description of Artificial Sequence: Synthetic oligonucleotide
caguggauuacuuaguaaa

SEQ ID NO: 392350 - RNA, 19 nt, Artificial Sequence
  Description of Artificial Sequence: Synthetic oligonucleotide
ucauacaaucccacauaga

SEQ ID NO: 392351 - RNA, 19 nt, Artificial Sequence
  Description of Artificial Sequence: Synthetic oligonucleotide
cauacaaucccacauagau

SEQ ID NO: 392352 - RNA, 19 nt, Artificial Sequence
  Description of Artificial Sequence: Synthetic oligonucleotide
aaugaccuauggcaggauu

SEQ ID NO: 392353 - RNA, 19 nt, Artificial Sequence
  Description of Artificial Sequence: Synthetic oligonucleotide
agcuuuacaagaguacuca

SEQ ID NO: 392354 - RNA, 19 nt, Artificial Sequence
  Description of Artificial Sequence: Synthetic oligonucleotide
gucgauaacuucauaguac

SEQ ID NO: 392355 - RNA, 19 nt, Artificial Sequence
  Description of Artificial Sequence: Synthetic oligonucleotide
gaagacggccucauucugg

SEQ ID NO: 392356 - RNA, 19 nt, Artificial Sequence
  Description of Artificial Sequence: Synthetic oligonucleotide
ugggguauggggugaaugu

SEQ ID NO: 392357 - RNA, 19 nt, Artificial Sequence
  Description of Artificial Sequence: Synthetic oligonucleotide
cacauagauauagacauga

SEQ ID NO: 392358 - RNA, 19 nt, Artificial Sequence
  Description of Artificial Sequence: Synthetic oligonucleotide
ugacgucuguguuagaguu

SEQ ID NO: 392359 - RNA, 19 nt, Artificial Sequence
  Description of Artificial Sequence: Synthetic oligonucleotide
ucccugaucuaaucagucc

SEQ ID NO: 392360 - RNA, 19 nt, Artificial Sequence
  Description of Artificial Sequence: Synthetic oligonucleotide
uugcauuagcagcuggggu

SEQ ID NO: 392361 - RNA, 19 nt, Artificial Sequence
  Description of Artificial Sequence: Synthetic oligonucleotide
caacagucaagcacaguug

SEQ ID NO: 392362 - RNA, 19 nt, Artificial Sequence
  Description of Artificial Sequence: Synthetic oligonucleotide
ugaagacggccucauucug

SEQ ID NO: 392363 - RNA, 19 nt, Artificial Sequence
  Description of Artificial Sequence: Synthetic oligonucleotide
uucugaaggcaggggaugg

SEQ ID NO: 392364 - RNA, 19 nt, Artificial Sequence
  Description of Artificial Sequence: Synthetic oligonucleotide
uagaguugaacgugcggac

SEQ ID NO: 392365 - RNA, 19 nt, Artificial Sequence
  Description of Artificial Sequence: Synthetic oligonucleotide
ugcucuggaacuugcuaug

SEQ ID NO: 392366 - RNA, 19 nt, Artificial Sequence
  Description of Artificial Sequence: Synthetic oligonucleotide
cauaucggccuugagacuc

SEQ ID NO: 392367 - RNA, 19 nt, Artificial Sequence
  Description of Artificial Sequence: Synthetic oligonucleotide
ugaccaugcugccucaguc

SEQ ID NO: 392368 - RNA, 19 nt, Artificial Sequence
  Description of Artificial Sequence: Synthetic oligonucleotide
uagcuuggaaacugaaauc

SEQ ID NO: 392369 - RNA, 19 nt, Artificial Sequence
  Description of Artificial Sequence: Synthetic oligonucleotide
gugaccaaugcuuccaaga

SEQ ID NO: 392370 - RNA, 19 nt, Artificial Sequence
  Description of Artificial Sequence: Synthetic oligonucleotide
uagcaaguacagcuuuagc

SEQ ID NO: 392371 - RNA, 19 nt, Artificial Sequence
  Description of Artificial Sequence: Synthetic oligonucleotide
uuguaguguuaguuuguca

SEQ ID NO: 392372 - RNA, 19 nt, Artificial Sequence
  Description of Artificial Sequence: Synthetic oligonucleotide
gacgcuuuccugauugccc

SEQ ID NO: 392373 - RNA, 19 nt, Artificial Sequence
  Description of Artificial Sequence: Synthetic oligonucleotide
auuagcagcugggguaugg

SEQ ID NO: 392374 - RNA, 19 nt, Artificial Sequence
  Description of Artificial Sequence: Synthetic oligonucleotide
acccuucccagcucuaauc

SEQ ID NO: 392375 - RNA, 19 nt, Artificial Sequence
  Description of Artificial Sequence: Synthetic oligonucleotide
cuuaggggcgugcuccugg

SEQ ID NO: 392376 - RNA, 19 nt, Artificial Sequence
  Description of Artificial Sequence: Synthetic oligonucleotide
caaccaauaugacuuuauc

SEQ ID NO: 392377 - RNA, 19 nt, Artificial Sequence
  Description of Artificial Sequence: Synthetic oligonucleotide
aaauggaauguaggagcug

SEQ ID NO: 392378 - RNA, 19 nt, Artificial Sequence
  Description of Artificial Sequence: Synthetic oligonucleotide
agacuucucauaacugagg

SEQ ID NO: 392379 - RNA, 19 nt, Artificial Sequence
  Description of Artificial Sequence: Synthetic oligonucleotide
ugaccuauggcaggauuug

SEQ ID NO: 392380 - RNA, 19 nt, Artificial Sequence
  Description of Artificial Sequence: Synthetic oligonucleotide
acugaaguucuaaauuugu

SEQ ID NO: 392381 - RNA, 19 nt, Artificial Sequence
  Description of Artificial Sequence: Synthetic oligonucleotide
acacugacgucuguguuag

SEQ ID NO: 392382 - RNA, 19 nt, Artificial Sequence
  Description of Artificial Sequence: Synthetic oligonucleotide
uuagagggcggcuccacuc

SEQ ID NO: 392383 - RNA, 19 nt, Artificial Sequence
  Description of Artificial Sequence: Synthetic oligonucleotide
caauggugaccaaugcuuc

SEQ ID NO: 392384 - RNA, 19 nt, Artificial Sequence
  Description of Artificial Sequence: Synthetic oligonucleotide
aagaguacucacauacaaa

SEQ ID NO: 392385 - RNA, 19 nt, Artificial Sequence
  Description of Artificial Sequence: Synthetic oligonucleotide
uucauaguacacugacguc

SEQ ID NO: 392386 - RNA, 19 nt, Artificial Sequence
  Description of Artificial Sequence: Synthetic oligonucleotide
uugcuagagcauucuggag

SEQ ID NO: 392387 - RNA, 19 nt, Artificial Sequence
  Description of Artificial Sequence: Synthetic oligonucleotide
uggccuauacuguccaggu

SEQ ID NO: 392388 - RNA, 19 nt, Artificial Sequence
  Description of Artificial Sequence: Synthetic oligonucleotide
uuuagagggcggcuccacu

SEQ ID NO: 392389 - RNA, 19 nt, Artificial Sequence
  Description of Artificial Sequence: Synthetic oligonucleotide
acauaguguggccuauacu

SEQ ID NO: 392390 - RNA, 19 nt, Artificial Sequence
  Description of Artificial Sequence: Synthetic oligonucleotide
cagucaguauacucugcag

SEQ ID NO: 392391 - RNA, 19 nt, Artificial Sequence
  Description of Artificial Sequence: Synthetic oligonucleotide
cagcaugaucucauaucgg

SEQ ID NO: 392392 - RNA, 19 nt, Artificial Sequence
  Description of Artificial Sequence: Synthetic oligonucleotide
uaguacacugacgucugug

SEQ ID NO: 392393 - RNA, 19 nt, Artificial Sequence
  Description of Artificial Sequence: Synthetic oligonucleotide
gggaaaguuagcaaucaug

SEQ ID NO: 392394 - RNA, 19 nt, Artificial Sequence
  Description of Artificial Sequence: Synthetic oligonucleotide
agcucuaaucauuuauguu

SEQ ID NO: 392395 - RNA, 19 nt, Artificial Sequence
  Description of Artificial Sequence: Synthetic oligonucleotide
ugcccuuuacagcagccuc

SEQ ID NO: 392396 - RNA, 19 nt, Artificial Sequence
  Description of Artificial Sequence: Synthetic oligonucleotide
aaucccacauagauauaga

SEQ ID NO: 392397 - RNA, 19 nt, Artificial Sequence
  Description of Artificial Sequence: Synthetic oligonucleotide
gaaccuucaaaggacuuaa

SEQ ID NO: 392398 - RNA, 19 nt, Artificial Sequence
  Description of Artificial Sequence: Synthetic oligonucleotide
guggccuauacuguccagg

SEQ ID NO: 392399 - RNA, 19 nt, Artificial Sequence
  Description of Artificial Sequence: Synthetic oligonucleotide
uaaauaccgugauggcagu

SEQ ID NO: 392400 - RNA, 19 nt, Artificial Sequence
  Description of Artificial Sequence: Synthetic oligonucleotide
ucaguauacucugcagacu

SEQ ID NO: 392401 - RNA, 19 nt, Artificial Sequence
  Description of Artificial Sequence: Synthetic oligonucleotide
cuggaugcuuagcaaguac

SEQ ID NO: 392402 - RNA, 19 nt, Artificial Sequence
  Description of Artificial Sequence: Synthetic oligonucleotide
uauagacaugaaucugcau

SEQ ID NO: 392403 - RNA, 19 nt, Artificial Sequence
  Description of Artificial Sequence: Synthetic oligonucleotide
auaguccuagaugcucugg

SEQ ID NO: 392404 - RNA, 19 nt, Artificial Sequence
  Description of Artificial Sequence: Synthetic oligonucleotide
ugacguuccuaaacaccga

SEQ ID NO: 392405 - RNA, 19 nt, Artificial Sequence
  Description of Artificial Sequence: Synthetic oligonucleotide
uuaguaaauugggaucuuu

SEQ ID NO: 392406 - RNA, 19 nt, Artificial Sequence
  Description of Artificial Sequence: Synthetic oligonucleotide
acgugcggacccuuagagg

SEQ ID NO: 392407 - RNA, 19 nt, Artificial Sequence
  Description of Artificial Sequence: Synthetic oligonucleotide
cucauaacugagguugcug

SEQ ID NO: 392408 - RNA, 19 nt, Artificial Sequence
  Description of Artificial Sequence: Synthetic oligonucleotide
guuagacaggaccgugcag

SEQ ID NO: 392409 - RNA, 19 nt, Artificial Sequence
  Description of Artificial Sequence: Synthetic oligonucleotide
acgucuguguuagaguuga

SEQ ID NO: 392410 - RNA, 19 nt, Artificial Sequence
  Description of Artificial Sequence: Synthetic oligonucleotide
uaauacuacuaaugaccua

SEQ ID NO: 392411 - RNA, 19 nt, Artificial Sequence
  Description of Artificial Sequence: Synthetic oligonucleotide
caauucugaacaggccucc

SEQ ID NO: 392412 - RNA, 19 nt, Artificial Sequence
  Description of Artificial Sequence: Synthetic oligonucleotide
acgcuuuccugauugcccu

SEQ ID NO: 392413 - RNA, 19 nt, Artificial Sequence
  Description of Artificial Sequence: Synthetic oligonucleotide
cugcauuaagcucuuaaua

SEQ ID NO: 392414 - RNA, 19 nt, Artificial Sequence
  Description of Artificial Sequence: Synthetic oligonucleotide
guguuagaguugaacgugc

SEQ ID NO: 392415 - RNA, 19 nt, Artificial Sequence
  Description of Artificial Sequence: Synthetic oligonucleotide
cauguuuagagggcggcuc

SEQ ID NO: 392416 - RNA, 19 nt, Artificial Sequence
  Description of Artificial Sequence: Synthetic oligonucleotide
aguggauuacuuaguaaau

SEQ ID NO: 392417 - RNA, 19 nt, Artificial Sequence
  Description of Artificial Sequence: Synthetic oligonucleotide
aauucugaacaggccucca

SEQ ID NO: 392418 - RNA, 19 nt, Artificial Sequence
  Description of Artificial Sequence: Synthetic oligonucleotide
uuacaagaguacucacaua

SEQ ID NO: 392419 - RNA, 19 nt, Artificial Sequence
  Description of Artificial Sequence: Synthetic oligonucleotide
guucuaaauuuguuguacu

SEQ ID NO: 392420 - RNA, 19 nt, Artificial Sequence
  Description of Artificial Sequence: Synthetic oligonucleotide
aguccuagaugcucuggaa

SEQ ID NO: 392421 - RNA, 19 nt, Artificial Sequence
  Description of Artificial Sequence: Synthetic oligonucleotide
ucauaucggccuugagacu

SEQ ID NO: 392422 - RNA, 19 nt, Artificial Sequence
  Description of Artificial Sequence: Synthetic oligonucleotide
guacaauacugaaguggag

SEQ ID NO: 392423 - RNA, 19 nt, Artificial Sequence
  Description of Artificial Sequence: Synthetic oligonucleotide
acuuugcuuaggggcgugc

SEQ ID NO: 392424 - RNA, 19 nt, Artificial Sequence
  Description of Artificial Sequence: Synthetic oligonucleotide
aaaguugauuguaguguua

SEQ ID NO: 392425 - RNA, 19 nt, Artificial Sequence
  Description of Artificial Sequence: Synthetic oligonucleotide
auucugaacaggccuccau

SEQ ID NO: 392426 - RNA, 19 nt, Artificial Sequence
  Description of Artificial Sequence: Synthetic oligonucleotide
auaguguggccuauacugu

SEQ ID NO: 392427 - RNA, 19 nt, Artificial Sequence
  Description of Artificial Sequence: Synthetic oligonucleotide
gagcucaagaagacacuug

SEQ ID NO: 392428 - RNA, 19 nt, Artificial Sequence
  Description of Artificial Sequence: Synthetic oligonucleotide
cuaaugaccuauggcagga

SEQ ID NO: 392429 - RNA, 19 nt, Artificial Sequence
  Description of Artificial Sequence: Synthetic oligonucleotide
ggaugcuaaggaguaaaug

SEQ ID NO: 392430 - RNA, 19 nt, Artificial Sequence
  Description of Artificial Sequence: Synthetic oligonucleotide
cagacugacuucaucaagu

SEQ ID NO: 392431 - RNA, 19 nt, Artificial Sequence
  Description of Artificial Sequence: Synthetic oligonucleotide
gcgagcacuuugcuuaggg

SEQ ID NO: 392432 - RNA, 19 nt, Artificial Sequence
  Description of Artificial Sequence: Synthetic oligonucleotide
auuaagcucuuaauaugaa

SEQ ID NO: 392433 - RNA, 19 nt, Artificial Sequence
  Description of Artificial Sequence: Synthetic oligonucleotide
ugcauugcuuugacacagu

SEQ ID NO: 392434 - RNA, 19 nt, Artificial Sequence
  Description of Artificial Sequence: Synthetic oligonucleotide
gcuaaggaguaaauguaug

SEQ ID NO: 392435 - RNA, 19 nt, Artificial Sequence
  Description of Artificial Sequence: Synthetic oligonucleotide
aguagcuuggaaacugaaa

SEQ ID NO: 392436 - RNA, 19 nt, Artificial Sequence
  Description of Artificial Sequence: Synthetic oligonucleotide
agggaaaguuagcaaucau

SEQ ID NO: 392437 - RNA, 19 nt, Artificial Sequence
  Description of Artificial Sequence: Synthetic oligonucleotide
guugauuguaguguuaguu

SEQ ID NO: 392438 - RNA, 19 nt, Artificial Sequence
  Description of Artificial Sequence: Synthetic oligonucleotide
augcuaaggaguaaaugua

SEQ ID NO: 392439 - RNA, 19 nt, Artificial Sequence
  Description of Artificial Sequence: Synthetic oligonucleotide
cuguguuagaguugaacgu

SEQ ID NO: 392440 - RNA, 19 nt, Artificial Sequence
  Description of Artificial Sequence: Synthetic oligonucleotide
cugaaauccucacaucaua

SEQ ID NO: 392441 - RNA, 19 nt, Artificial Sequence
  Description of Artificial Sequence: Synthetic oligonucleotide
ggaauaguaggauggagau

SEQ ID NO: 392442 - RNA, 19 nt, Artificial Sequence
  Description of Artificial Sequence: Synthetic oligonucleotide
acguuccuaaacaccgagg

SEQ ID NO: 392443 - RNA, 19 nt, Artificial Sequence
  Description of Artificial Sequence: Synthetic oligonucleotide
ggagacaagcaaguguuac

SEQ ID NO: 392444 - RNA, 19 nt, Artificial Sequence
  Description of Artificial Sequence: Synthetic oligonucleotide
uuguaccacagggucuuug

SEQ ID NO: 392445 - RNA, 19 nt, Artificial Sequence
  Description of Artificial Sequence: Synthetic oligonucleotide
ccaagugcacuuuugucuc

SEQ ID NO: 392446 - RNA, 19 nt, Artificial Sequence
  Description of Artificial Sequence: Synthetic oligonucleotide
acaagaguacucacauaca

SEQ ID NO: 392447 - RNA, 19 nt, Artificial Sequence
  Description of Artificial Sequence: Synthetic oligonucleotide
uggaauguaggagcuggua

SEQ ID NO: 392448 - RNA, 19 nt, Artificial Sequence
  Description of Artificial Sequence: Synthetic oligonucleotide
cacucggacgcuuuccuga

SEQ ID NO: 392449 - RNA, 19 nt, Artificial Sequence
  Description of Artificial Sequence: Synthetic oligonucleotide
uuaggggcgugcuccugga

SEQ ID NO: 392450 - RNA, 19 nt, Artificial Sequence
  Description of Artificial Sequence: Synthetic oligonucleotide
uugcugaucccagagcauu

SEQ ID NO: 392451 - RNA, 19 nt, Artificial Sequence
  Description of Artificial Sequence: Synthetic oligonucleotide
agugcucaauucacaaagu

SEQ ID NO: 392452 - RNA, 19 nt, Artificial Sequence
  Description of Artificial Sequence: Synthetic oligonucleotide
gacgucuguguuagaguug

SEQ ID NO: 392453 - RNA, 19 nt, Artificial Sequence
  Description of Artificial Sequence: Synthetic oligonucleotide
agcacaacggacagccaug

SEQ ID NO: 392454 - RNA, 19 nt, Artificial Sequence
  Description of Artificial Sequence: Synthetic oligonucleotide
aucuguccguuagacagga

SEQ ID NO: 392455 - RNA, 19 nt, Artificial Sequence
  Description of Artificial Sequence: Synthetic oligonucleotide
gaacgugcggacccuuaga

SEQ ID NO: 392456 - RNA, 19 nt, Artificial Sequence
  Description of Artificial Sequence: Synthetic oligonucleotide
gaccuauggcaggauuugc

SEQ ID NO: 392457 - RNA, 19 nt, Artificial Sequence
  Description of Artificial Sequence: Synthetic oligonucleotide
uucugcgagcacuuugcuu

SEQ ID NO: 392458 - RNA, 19 nt, Artificial Sequence
  Description of Artificial Sequence: Synthetic oligonucleotide
gauuguaguguuaguuugu

SEQ ID NO: 392459 - RNA, 19 nt, Artificial Sequence
  Description of Artificial Sequence: Synthetic oligonucleotide
auaguacacugacgucugu

SEQ ID NO: 392460 - RNA, 19 nt, Artificial Sequence
  Description of Artificial Sequence: Synthetic oligonucleotide
uggggugaaugucgauaac

SEQ ID NO: 392461 - RNA, 19 nt, Artificial Sequence
  Description of Artificial Sequence: Synthetic oligonucleotide
gcauugcuuugacacagug

SEQ ID NO: 392462 - RNA, 19 nt, Artificial Sequence
  Description of Artificial Sequence: Synthetic oligonucleotide
guaggaaauggccggauuu

SEQ ID NO: 392463 - RNA, 19 nt, Artificial Sequence
  Description of Artificial Sequence: Synthetic oligonucleotide
guuccuaaacaccgaggaa

SEQ ID NO: 392464 - RNA, 19 nt, Artificial Sequence
  Description of Artificial Sequence: Synthetic oligonucleotide
ggugaccaaugcuuccaag

SEQ ID NO: 392465 - RNA, 19 nt, Artificial Sequence
  Description of Artificial Sequence: Synthetic oligonucleotide
auacuacuaaugaccuaug

SEQ ID NO: 392466 - RNA, 19 nt, Artificial Sequence
  Description of Artificial Sequence: Synthetic oligonucleotide
ucggcagugucuucagguu

SEQ ID NO: 392467 - RNA, 19 nt, Artificial Sequence
  Description of Artificial Sequence: Synthetic oligonucleotide
agggccuaucugcaugaga

SEQ ID NO: 392468 - RNA, 19 nt, Artificial Sequence
  Description of Artificial Sequence: Synthetic oligonucleotide
uugaacgugcggacccuua

SEQ ID NO: 392469 - RNA, 19 nt, Artificial Sequence
  Description of Artificial Sequence: Synthetic oligonucleotide
augaccuauggcaggauuu

SEQ ID NO: 392470 - RNA, 19 nt, Artificial Sequence
  Description of Artificial Sequence: Synthetic oligonucleotide
guuuguaaauuaggacaga

SEQ ID NO: 392471 - RNA, 19 nt, Artificial Sequence
  Description of Artificial Sequence: Synthetic oligonucleotide
gagcggugcuguuccucgg

SEQ ID NO: 392472 - RNA, 19 nt, Artificial Sequence
  Description of Artificial Sequence: Synthetic oligonucleotide
aaacaccgaggaauaccga

SEQ ID NO: 392473 - RNA, 19 nt, Artificial Sequence
  Description of Artificial Sequence: Synthetic oligonucleotide
gcaugaucucauaucggcc

SEQ ID NO: 392474 - RNA, 19 nt, Artificial Sequence
  Description of Artificial Sequence: Synthetic oligonucleotide
aaauaccgugauggcagua

SEQ ID NO: 392475 - RNA, 19 nt, Artificial Sequence
  Description of Artificial Sequence: Synthetic oligonucleotide
cugcgagcacuuugcuuag

SEQ ID NO: 392476 - RNA, 19 nt, Artificial Sequence
  Description of Artificial Sequence: Synthetic oligonucleotide
ccaucaacuggacuccaac

SEQ ID NO: 392477 - RNA, 19 nt, Artificial Sequence
  Description of Artificial Sequence: Synthetic oligonucleotide
gucccugaucuaaucaguc

SEQ ID NO: 392478 - RNA, 19 nt, Artificial Sequence
  Description of Artificial Sequence: Synthetic oligonucleotide
cagggucuuugcucucuag

SEQ ID NO: 392479 - RNA, 19 nt, Artificial Sequence
  Description of Artificial Sequence: Synthetic oligonucleotide
agacaugaaucugcauuaa

SEQ ID NO: 392480 - RNA, 19 nt, Artificial Sequence
  Description of Artificial Sequence: Synthetic oligonucleotide
uggccggauuuggaaacug

SEQ ID NO: 392481 - RNA, 19 nt, Artificial Sequence
  Description of Artificial Sequence: Synthetic oligonucleotide
acucggacgcuuuccugau

SEQ ID NO: 392482 - RNA, 19 nt, Artificial Sequence
  Description of Artificial Sequence: Synthetic oligonucleotide
gugcacuuuugucucaggu

SEQ ID NO: 392483 - RNA, 19 nt, Artificial Sequence
  Description of Artificial Sequence: Synthetic oligonucleotide
gcagucccugaucuaauca

SEQ ID NO: 392484 - RNA, 19 nt, Artificial Sequence
  Description of Artificial Sequence: Synthetic oligonucleotide
ugcgagcacuuugcuuagg

SEQ ID NO: 392485 - RNA, 19 nt, Artificial Sequence
  Description of Artificial Sequence: Synthetic oligonucleotide
ggcauguuuagagggcggc

SEQ ID NO: 392486 - RNA, 19 nt, Artificial Sequence
  Description of Artificial Sequence: Synthetic oligonucleotide
gcacaacggacagccaugg

SEQ ID NO: 392487 - RNA, 19 nt, Artificial Sequence
  Description of Artificial Sequence: Synthetic oligonucleotide
aggaauaccgagggccuau

SEQ ID NO: 392488 - RNA, 19 nt, Artificial Sequence
  Description of Artificial Sequence: Synthetic oligonucleotide
ugcggacccuuagaggaaa

SEQ ID NO: 392489 - RNA, 19 nt, Artificial Sequence
  Description of Artificial Sequence: Synthetic oligonucleotide
cucuagggcagccuuaaau

SEQ ID NO: 392490 - RNA, 19 nt, Artificial Sequence
  Description of Artificial Sequence: Synthetic oligonucleotide
cgugcggacccuuagagga

SEQ ID NO: 392491 - RNA, 19 nt, Artificial Sequence
  Description of Artificial Sequence: Synthetic oligonucleotide
gaauaccgagggccuaucu

SEQ ID NO: 392492 - RNA, 19 nt, Artificial Sequence
  Description of Artificial Sequence: Synthetic oligonucleotide
ccguuagacaggaccgugc

SEQ ID NO: 392493 - RNA, 19 nt, Artificial Sequence
  Description of Artificial Sequence: Synthetic oligonucleotide
ucucuagggcagccuuaaa

SEQ ID NO: 392494 - RNA, 19 nt, Artificial Sequence
  Description of Artificial Sequence: Synthetic oligonucleotide
ggacgcuuuccugauugcc

SEQ ID NO: 392495 - RNA, 19 nt, Artificial Sequence
  Description of Artificial Sequence: Synthetic oligonucleotide
caaaauuagcaagaauguu

SEQ ID NO: 392496 - RNA, 19 nt, Artificial Sequence
  Description of Artificial Sequence: Synthetic oligonucleotide
ucuguccguuagacaggac

SEQ ID NO: 392497 - RNA, 19 nt, Artificial Sequence
  Description of Artificial Sequence: Synthetic oligonucleotide
uggcaaggugcagcagcag

SEQ ID NO: 392498 - RNA, 19 nt, Artificial Sequence
  Description of Artificial Sequence: Synthetic oligonucleotide
aaccuucaaaggacuuaaa

SEQ ID NO: 392499 - RNA, 19 nt, Artificial Sequence
  Description of Artificial Sequence: Synthetic oligonucleotide
gacaagcaaguguuacaau

SEQ ID NO: 392500 - RNA, 19 nt, Artificial Sequence
  Description of Artificial Sequence: Synthetic oligonucleotide
ggcgcagaacuuuggugac

SEQ ID NO: 392501 - RNA, 19 nt, Artificial Sequence
  Description of Artificial Sequence: Synthetic oligonucleotide
gguauggggugaaugucga

SEQ ID NO: 392502 - RNA, 19 nt, Artificial Sequence
  Description of Artificial Sequence: Synthetic oligonucleotide
ccaacagucaagcacaguu

SEQ ID NO: 392503 - RNA, 19 nt, Artificial Sequence
  Description of Artificial Sequence: Synthetic oligonucleotide
cugacgucuguguuagagu

SEQ ID NO: 392504 - RNA, 19 nt, Artificial Sequence
  Description of Artificial Sequence: Synthetic oligonucleotide
gugcuguuccucggcaaug

SEQ ID NO: 392505 - RNA, 19 nt, Artificial Sequence
  Description of Artificial Sequence: Synthetic oligonucleotide
auggaauguaggagcuggu

SEQ ID NO: 392506 - RNA, 19 nt, Artificial Sequence
  Description of Artificial Sequence: Synthetic oligonucleotide
cuaaucaguccuucucaau

SEQ ID NO: 392507 - RNA, 19 nt, Artificial Sequence
  Description of Artificial Sequence: Synthetic oligonucleotide
ggaaauggccggauuugga

SEQ ID NO: 392508 - RNA, 19 nt, Artificial Sequence
  Description of Artificial Sequence: Synthetic oligonucleotide
auggccggauuuggaaacu

SEQ ID NO: 392509 - RNA, 19 nt, Artificial Sequence
  Description of Artificial Sequence: Synthetic oligonucleotide
uaucggccuugagacucug

SEQ ID NO: 392510 - RNA, 19 nt, Artificial Sequence
  Description of Artificial Sequence: Synthetic oligonucleotide
ccacaauggaggaugcuaa

SEQ ID NO: 392511 - RNA, 19 nt, Artificial Sequence
  Description of Artificial Sequence: Synthetic oligonucleotide
gagaugaagccaugacguu

SEQ ID NO: 392512 - RNA, 19 nt, Artificial Sequence
  Description of Artificial Sequence: Synthetic oligonucleotide
ccgugauggcaguaagcag

SEQ ID NO: 392513 - RNA, 19 nt, Artificial Sequence
  Description of Artificial Sequence: Synthetic oligonucleotide
uaguccaggcuggcgcaga

SEQ ID NO: 392514 - RNA, 19 nt, Artificial Sequence
  Description of Artificial Sequence: Synthetic oligonucleotide
ggaaccuucaaaggacuua

SEQ ID NO: 392515 - RNA, 19 nt, Artificial Sequence
  Description of Artificial Sequence: Synthetic oligonucleotide
auaucggccuugagacucu

SEQ ID NO: 392516 - RNA, 19 nt, Artificial Sequence
  Description of Artificial Sequence: Synthetic oligonucleotide
ggcagucccugaucuaauc

SEQ ID NO: 392517 - RNA, 19 nt, Artificial Sequence
  Description of Artificial Sequence: Synthetic oligonucleotide
ggggugaaugucgauaacu

SEQ ID NO: 392518 - RNA, 19 nt, Artificial Sequence
  Description of Artificial Sequence: Synthetic oligonucleotide
auaguaggauggagauggu

SEQ ID NO: 392519 - RNA, 19 nt, Artificial Sequence
  Description of Artificial Sequence: Synthetic oligonucleotide
gggccuaucugcaugagau

SEQ ID NO: 392520 - RNA, 19 nt, Artificial Sequence
  Description of Artificial Sequence: Synthetic oligonucleotide
gccgcgcucucauggcugg

SEQ ID NO: 392521 - RNA, 19 nt, Artificial Sequence
  Description of Artificial Sequence: Synthetic oligonucleotide
cagcacaacggacagccau

SEQ ID NO: 392522 - RNA, 19 nt, Artificial Sequence
  Description of Artificial Sequence: Synthetic oligonucleotide
ccuaaacaccgaggaauac

SEQ ID NO: 392523 - RNA, 19 nt, Artificial Sequence
  Description of Artificial Sequence: Synthetic oligonucleotide
guacacugacgucuguguu

SEQ ID NO: 392524 - RNA, 19 nt, Artificial Sequence
  Description of Artificial Sequence: Synthetic oligonucleotide
aggcuggcgcagaacuuug

SEQ ID NO: 392525 - RNA, 19 nt, Artificial Sequence
  Description of Artificial Sequence: Synthetic oligonucleotide
ucccugcaguuuguaaauu

SEQ ID NO: 392526 - RNA, 19 nt, Artificial Sequence
  Description of Artificial Sequence: Synthetic oligonucleotide
gcucuuaauaugaaugauu

SEQ ID NO: 392527 - RNA, 19 nt, Artificial Sequence
  Description of Artificial Sequence: Synthetic oligonucleotide
auuucucaaugcagcgcuu

SEQ ID NO: 392528 - RNA, 19 nt, Artificial Sequence
  Description of Artificial Sequence: Synthetic oligonucleotide
ccgagggccuaucugcaug

SEQ ID NO: 392529 - RNA, 19 nt, Artificial Sequence
  Description of Artificial Sequence: Synthetic oligonucleotide
cacuuugcuuaggggcgug

SEQ ID NO: 392530 - RNA, 19 nt, Artificial Sequence
  Description of Artificial Sequence: Synthetic oligonucleotide
gucuauagacagaguuucu

SEQ ID NO: 392531 - RNA, 19 nt, Artificial Sequence
  Description of Artificial Sequence: Synthetic oligonucleotide
gugaccaugcugccucagu

SEQ ID NO: 392532 - RNA, 19 nt, Artificial Sequence
  Description of Artificial Sequence: Synthetic oligonucleotide
guucugcgagcacuuugcu

SEQ ID NO: 392533 - RNA, 19 nt, Artificial Sequence
  Description of Artificial Sequence: Synthetic oligonucleotide
cauuagcagcugggguaug

SEQ ID NO: 392534 - RNA, 19 nt, Artificial Sequence
  Description of Artificial Sequence: Synthetic oligonucleotide
gccggauuuggaaacugaa

SEQ ID NO: 392535 - RNA, 19 nt, Artificial Sequence
  Description of Artificial Sequence: Synthetic oligonucleotide
cuuugcuuaggggcgugcu

SEQ ID NO: 392536 - RNA, 19 nt, Artificial Sequence
  Description of Artificial Sequence: Synthetic oligonucleotide
ccaauaugacuuuaucauu

SEQ ID NO: 392537 - RNA, 19 nt, Artificial Sequence
  Description of Artificial Sequence: Synthetic oligonucleotide
uugggaucuuuggcacuuu

SEQ ID NO: 392538 - RNA, 19 nt, Artificial Sequence
  Description of Artificial Sequence: Synthetic oligonucleotide
cccugcaguuuguaaauua

SEQ ID NO: 392539 - RNA, 19 nt, Artificial Sequence
  Description of Artificial Sequence: Synthetic oligonucleotide
cuggacugguagacaaaau

SEQ ID NO: 392540 - RNA, 19 nt, Artificial Sequence
  Description of Artificial Sequence: Synthetic oligonucleotide
ccacucggacgcuuuccug

SEQ ID NO: 392541 - RNA, 19 nt, Artificial Sequence
  Description of Artificial Sequence: Synthetic oligonucleotide
ggaauaccgagggccuauc

SEQ ID NO: 392542 - RNA, 19 nt, Artificial Sequence
  Description of Artificial Sequence: Synthetic oligonucleotide
ggccggauuuggaaacuga

SEQ ID NO: 392543 - RNA, 19 nt, Artificial Sequence
  Description of Artificial Sequence: Synthetic oligonucleotide
gguaggaaauggccggauu

SEQ ID NO: 392544 - RNA, 19 nt, Artificial Sequence
  Description of Artificial Sequence: Synthetic oligonucleotide
gcgcagaacuuuggugacc

SEQ ID NO: 392545 - RNA, 19 nt, Artificial Sequence
  Description of Artificial Sequence: Synthetic oligonucleotide
cuuaguaaauugggaucuu

SEQ ID NO: 392546 - RNA, 19 nt, Artificial Sequence
  Description of Artificial Sequence: Synthetic oligonucleotide
guauggggugaaugucgau

SEQ ID NO: 392547 - RNA, 19 nt, Artificial Sequence
  Description of Artificial Sequence: Synthetic oligonucleotide
gcgcucucauggcuggaga

SEQ ID NO: 392548 - RNA, 19 nt, Artificial Sequence
  Description of Artificial Sequence: Synthetic oligonucleotide
gcauuagcagcugggguau

SEQ ID NO: 392549 - RNA, 19 nt, Artificial Sequence
  Description of Artificial Sequence: Synthetic oligonucleotide
gugcggacccuuagaggaa

SEQ ID NO: 392550 - RNA, 19 nt, Artificial Sequence
  Description of Artificial Sequence: Synthetic oligonucleotide
guaggagcugguaggucuu

SEQ ID NO: 392551 - RNA, 19 nt, Artificial Sequence
  Description of Artificial Sequence: Synthetic oligonucleotide
gcugaucccagagcauucu

SEQ ID NO: 392552 - RNA, 19 nt, Artificial Sequence
  Description of Artificial Sequence: Synthetic oligonucleotide
cggacgcuuuccugauugc

SEQ ID NO: 392553 - RNA, 19 nt, Artificial Sequence
  Description of Artificial Sequence: Synthetic oligonucleotide
gcauguuuagagggcggcu

SEQ ID NO: 392554 - RNA, 19 nt, Artificial Sequence
  Description of Artificial Sequence: Synthetic oligonucleotide
gcuuaggggcgugcuccug

SEQ ID NO: 392555 - RNA, 19 nt, Artificial Sequence
  Description of Artificial Sequence: Synthetic oligonucleotide
acaggaccgugcagcuuua

SEQ ID NO: 392556 - RNA, 19 nt, Artificial Sequence
  Description of Artificial Sequence: Synthetic oligonucleotide
ccugaucuaaucaguccuu

SEQ ID NO: 392557 - RNA, 19 nt, Artificial Sequence
  Description of Artificial Sequence: Synthetic oligonucleotide
guugaacgugcggacccuu

SEQ ID NO: 392558 - RNA, 19 nt, Artificial Sequence
  Description of Artificial Sequence: Synthetic oligonucleotide
cgaggaauaccgagggccu

SEQ ID NO: 392559 - RNA, 19 nt, Artificial Sequence
  Description of Artificial Sequence: Synthetic oligonucleotide
gccauggaucuguccguua

SEQ ID NO: 392560 - RNA, 19 nt, Artificial Sequence
  Description of Artificial Sequence: Synthetic oligonucleotide
cacugacgucuguguuaga

SEQ ID NO: 392561 - RNA, 19 nt, Artificial Sequence
  Description of Artificial Sequence: Synthetic oligonucleotide
cagccgcgcucucauggcu

SEQ ID NO: 392562 - RNA, 19 nt, Artificial Sequence
  Description of Artificial Sequence: Synthetic oligonucleotide
ggccuaucugcaugagauu

SEQ ID NO: 392563 - RNA, 19 nt, Artificial Sequence
  Description of Artificial Sequence: Synthetic oligonucleotide
gcgugcuccuggaugcuua

SEQ ID NO: 392564 - RNA, 19 nt, Artificial Sequence
  Description of Artificial Sequence: Synthetic oligonucleotide
gcccaguagcuuggaaacu

SEQ ID NO: 392565 - RNA, 19 nt, Artificial Sequence
  Description of Artificial Sequence: Synthetic oligonucleotide
cucggacgcuuuccugauu

SEQ ID NO: 392566 - RNA, 19 nt, Artificial Sequence
  Description of Artificial Sequence: Synthetic oligonucleotide
ggcuccacucggacgcuuu

SEQ ID NO: 392567 - RNA, 19 nt, Artificial Sequence
  Description of Artificial Sequence: Synthetic oligonucleotide
gcggacccuuagaggaaau

SEQ ID NO: 392568 - RNA, 19 nt, Artificial Sequence
  Description of Artificial Sequence: Synthetic oligonucleotide
gggcgugcuccuggaugcu

SEQ ID NO: 392569 - RNA, 19 nt, Artificial Sequence
  Description of Artificial Sequence: Synthetic oligonucleotide
ccucggcaauggugaccaa

SEQ ID NO: 392570 - RNA, 19 nt, Artificial Sequence
  Description of Artificial Sequence: Synthetic oligonucleotide
ccgcgcucucauggcugga

SEQ ID NO: 392571 - RNA, 19 nt, Artificial Sequence
  Description of Artificial Sequence: Synthetic oligonucleotide
cggcuccacucggacgcuu

SEQ ID NO: 392572 - RNA, 19 nt, Artificial Sequence
  Description of Artificial Sequence: Synthetic oligonucleotide
aacaaguagucauuggccc

SEQ ID NO: 392573 - RNA, 19 nt, Artificial Sequence
  Description of Artificial Sequence: Synthetic oligonucleotide
aaacuuauccuucuggguc

SEQ ID NO: 392574 - RNA, 19 nt, Artificial Sequence
  Description of Artificial Sequence: Synthetic oligonucleotide
auucucaagcuuuaggugc

SEQ ID NO: 392575 - RNA, 19 nt, Artificial Sequence
  Description of Artificial Sequence: Synthetic oligonucleotide
aauacuuaguaaugagaac

SEQ ID NO: 392576 - RNA, 19 nt, Artificial Sequence
  Description of Artificial Sequence: Synthetic oligonucleotide
aaauaguauugacaaagag

SEQ ID NO: 392577 - RNA, 19 nt, Artificial Sequence
  Description of Artificial Sequence: Synthetic oligonucleotide
aggauaaggacucaugcac

SEQ ID NO: 392578 - RNA, 19 nt, Artificial Sequence
  Description of Artificial Sequence: Synthetic oligonucleotide
aguaaugguaugcucuucc

SEQ ID NO: 392579 - RNA, 19 nt, Artificial Sequence
  Description of Artificial Sequence: Synthetic oligonucleotide
aauaguauugacaaagagu

SEQ ID NO: 392580 - RNA, 19 nt, Artificial Sequence
  Description of Artificial Sequence: Synthetic oligonucleotide
ucuaaugaggcuuguaaag

SEQ ID NO: 392581 - RNA, 19 nt, Artificial Sequence
  Description of Artificial Sequence: Synthetic oligonucleotide
uuuggcuugaagcauaaac

SEQ ID NO: 392582 - RNA, 19 nt, Artificial Sequence
  Description of Artificial Sequence: Synthetic oligonucleotide
uuuugugucuccccuaggg

SEQ ID NO: 392583 - RNA, 19 nt, Artificial Sequence
  Description of Artificial Sequence: Synthetic oligonucleotide
ugaagcauaaacuuauccu

SEQ ID NO: 392584 - RNA, 19 nt, Artificial Sequence
  Description of Artificial Sequence: Synthetic oligonucleotide
augcacuuuuauuaguucc

SEQ ID NO: 392585 - RNA, 19 nt, Artificial Sequence
  Description of Artificial Sequence: Synthetic oligonucleotide
uuaguaaugagaacaagua

SEQ ID NO: 392586 - RNA, 19 nt, Artificial Sequence
  Description of Artificial Sequence: Synthetic oligonucleotide
ucagagacugaauuucucg

SEQ ID NO: 392587 - RNA, 19 nt, Artificial Sequence
  Description of Artificial Sequence: Synthetic oligonucleotide
aaaugugcuauuucuugag

SEQ ID NO: 392588 - RNA, 19 nt, Artificial Sequence
  Description of Artificial Sequence: Synthetic oligonucleotide
ucugguaucuugaugggug

SEQ ID NO: 392589 - RNA, 19 nt, Artificial Sequence
  Description of Artificial Sequence: Synthetic oligonucleotide
uugaagcauaaacuuaucc

SEQ ID NO: 392590 - RNA, 19 nt, Artificial Sequence
  Description of Artificial Sequence: Synthetic oligonucleotide
agacguuuuaucuuccuuc

SEQ ID NO: 392591 - RNA, 19 nt, Artificial Sequence
  Description of Artificial Sequence: Synthetic oligonucleotide
ucugagcugacuaagcucu

SEQ ID NO: 392592 - RNA, 19 nt, Artificial Sequence
  Description of Artificial Sequence: Synthetic oligonucleotide
aaugcuuucccucuugaau

SEQ ID NO: 392593 - RNA, 19 nt, Artificial Sequence
  Description of Artificial Sequence: Synthetic oligonucleotide
auaguauugacaaagagua

SEQ ID NO: 392594 - RNA, 19 nt, Artificial Sequence
  Description of Artificial Sequence: Synthetic oligonucleotide
uuuagugucucguuggccu

SEQ ID NO: 392595 - RNA, 19 nt, Artificial Sequence
  Description of Artificial Sequence: Synthetic oligonucleotide
aguaaugagaacaaguagu

SEQ ID NO: 392596 - RNA, 19 nt, Artificial Sequence
  Description of Artificial Sequence: Synthetic oligonucleotide
aauuucucguucuuucuga

SEQ ID NO: 392597 - RNA, 19 nt, Artificial Sequence
  Description of Artificial Sequence: Synthetic oligonucleotide
ucguguucuaacuccaggg

SEQ ID NO: 392598 - RNA, 19 nt, Artificial Sequence
  Description of Artificial Sequence: Synthetic oligonucleotide
ugcgcuguaaaacugccug

SEQ ID NO: 392599 - RNA, 19 nt, Artificial Sequence
  Description of Artificial Sequence: Synthetic oligonucleotide
gauaaggacucaugcacag

SEQ ID NO: 392600 - RNA, 19 nt, Artificial Sequence
  Description of Artificial Sequence: Synthetic oligonucleotide
uuuggaaguagcaucuccu

SEQ ID NO: 392601 - RNA, 19 nt, Artificial Sequence
  Description of Artificial Sequence: Synthetic oligonucleotide
ucuacuuccacuagucuuc

SEQ ID NO: 392602 - RNA, 19 nt, Artificial Sequence
  Description of Artificial Sequence: Synthetic oligonucleotide
ugauagucugcaaugucug

SEQ ID NO: 392603 - RNA, 19 nt, Artificial Sequence
  Description of Artificial Sequence: Synthetic oligonucleotide
gacuaugugguuuuguguc

SEQ ID NO: 392604 - RNA, 19 nt, Artificial Sequence
  Description of Artificial Sequence: Synthetic oligonucleotide
agcagucacaaauacuuag

SEQ ID NO: 392605 - RNA, 19 nt, Artificial Sequence
  Description of Artificial Sequence: Synthetic oligonucleotide
ugugcucccgcaaagcugc

SEQ ID NO: 392606 - RNA, 19 nt, Artificial Sequence
  Description of Artificial Sequence: Synthetic oligonucleotide
uguaaagacugcaggugag

SEQ ID NO: 392607 - RNA, 19 nt, Artificial Sequence
  Description of Artificial Sequence: Synthetic oligonucleotide
ugaugcuugaagcuugcug

SEQ ID NO: 392608 - RNA, 19 nt, Artificial Sequence
  Description of Artificial Sequence: Synthetic oligonucleotide
uugacuaugugguuuugug

SEQ ID NO: 392609 - RNA, 19 nt, Artificial Sequence
  Description of Artificial Sequence: Synthetic oligonucleotide
uucaagacguuuuaucuuc

SEQ ID NO: 392610 - RNA, 19 nt, Artificial Sequence
  Description of Artificial Sequence: Synthetic oligonucleotide
uggcuagucauugugauca

SEQ ID NO: 392611 - RNA, 19 nt, Artificial Sequence
  Description of Artificial Sequence: Synthetic oligonucleotide
gagcugaacagcuaugcgc

SEQ ID NO: 392612 - RNA, 19 nt, Artificial Sequence
  Description of Artificial Sequence: Synthetic oligonucleotide
ucaugcacaguaaugguau

SEQ ID NO: 392613 - RNA, 19 nt, Artificial Sequence
  Description of Artificial Sequence: Synthetic oligonucleotide
uccaacaauaucuugcuuu

SEQ ID NO: 392614 - RNA, 19 nt, Artificial Sequence
  Description of Artificial Sequence: Synthetic oligonucleotide
aagcauaaacuuauccuuc

SEQ ID NO: 392615 - RNA, 19 nt, Artificial Sequence
  Description of Artificial Sequence: Synthetic oligonucleotide
cacaaguugcuucaucugg

SEQ ID NO: 392616 - RNA, 19 nt, Artificial Sequence
  Description of Artificial Sequence: Synthetic oligonucleotide
aacuuauccuucugggucu

SEQ ID NO: 392617 - RNA, 19 nt, Artificial Sequence
  Description of Artificial Sequence: Synthetic oligonucleotide
ucucguuggccucaguaag

SEQ ID NO: 392618 - RNA, 19 nt, Artificial Sequence
  Description of Artificial Sequence: Synthetic oligonucleotide
ugcacuuuuauuaguuccu

SEQ ID NO: 392619 - RNA, 19 nt, Artificial Sequence
  Description of Artificial Sequence: Synthetic oligonucleotide
uaaugaggcuuguaaagcu

SEQ ID NO: 392620 - RNA, 19 nt, Artificial Sequence
  Description of Artificial Sequence: Synthetic oligonucleotide
aaagcugcguuagacuguc

SEQ ID NO: 392621 - RNA, 19 nt, Artificial Sequence
  Description of Artificial Sequence: Synthetic oligonucleotide
aaugugcuauuucuugaga

SEQ ID NO: 392622 - RNA, 19 nt, Artificial Sequence
  Description of Artificial Sequence: Synthetic oligonucleotide
acuggucagaucugagccc

SEQ ID NO: 392623 - RNA, 19 nt, Artificial Sequence
  Description of Artificial Sequence: Synthetic oligonucleotide
ugaaccagggacaucuccu

SEQ ID NO: 392624 - RNA, 19 nt, Artificial Sequence
  Description of Artificial Sequence: Synthetic oligonucleotide
cuugauggguguugcaggg

SEQ ID NO: 392625 - RNA, 19 nt, Artificial Sequence
  Description of Artificial Sequence: Synthetic oligonucleotide
cuaagcucugcaucugugg

SEQ ID NO: 392626 - RNA, 19 nt, Artificial Sequence
  Description of Artificial Sequence: Synthetic oligonucleotide
cuaaugaggcuuguaaagc

SEQ ID NO: 392627 - RNA, 19 nt, Artificial Sequence
  Description of Artificial Sequence: Synthetic oligonucleotide
gaagaugccccucaagauc

SEQ ID NO: 392628 - RNA, 19 nt, Artificial Sequence
  Description of Artificial Sequence: Synthetic oligonucleotide
cuuggcugcaccacggcgg

SEQ ID NO: 392629 - RNA, 19 nt, Artificial Sequence
  Description of Artificial Sequence: Synthetic oligonucleotide
ucgugaguguucuacuucc

SEQ ID NO: 392630 - RNA, 19 nt, Artificial Sequence
  Description of Artificial Sequence: Synthetic oligonucleotide
ugauccaguucccauuuga

SEQ ID NO: 392631 - RNA, 19 nt, Artificial Sequence
  Description of Artificial Sequence: Synthetic oligonucleotide
agcugcguuagacuguccg

SEQ ID NO: 392632 - RNA, 19 nt, Artificial Sequence
  Description of Artificial Sequence: Synthetic oligonucleotide
agggaagugcuacuucuac

SEQ ID NO: 392633 - RNA, 19 nt, Artificial Sequence
  Description of Artificial Sequence: Synthetic oligonucleotide
cacggcauucucauaagcc

SEQ ID NO: 392634 - RNA, 19 nt, Artificial Sequence
  Description of Artificial Sequence: Synthetic oligonucleotide
acaaguugcuucaucuggc

SEQ ID NO: 392635 - RNA, 19 nt, Artificial Sequence
  Description of Artificial Sequence: Synthetic oligonucleotide
ugcagucuccagaauacug

SEQ ID NO: 392636 - RNA, 19 nt, Artificial Sequence
  Description of Artificial Sequence: Synthetic oligonucleotide
aggcuuguaaagcuuccac

SEQ ID NO: 392637 - RNA, 19 nt, Artificial Sequence
  Description of Artificial Sequence: Synthetic oligonucleotide
ucuuggcugcaccacggcg

SEQ ID NO: 392638 - RNA, 19 nt, Artificial Sequence
  Description of Artificial Sequence: Synthetic oligonucleotide
cauucucaagcuuuaggug

SEQ ID NO: 392639 - RNA, 19 nt, Artificial Sequence
  Description of Artificial Sequence: Synthetic oligonucleotide
aguucuaccuccagagccc

SEQ ID NO: 392640 - RNA, 19 nt, Artificial Sequence
  Description of Artificial Sequence: Synthetic oligonucleotide
guuagacuguccgaggccg

SEQ ID NO: 392641 - RNA, 19 nt, Artificial Sequence
  Description of Artificial Sequence: Synthetic oligonucleotide
uucagcucacuaaugaguu

SEQ ID NO: 392642 - RNA, 19 nt, Artificial Sequence
  Description of Artificial Sequence: Synthetic oligonucleotide
ggaaaugugcuauuucuug

SEQ ID NO: 392643 - RNA, 19 nt, Artificial Sequence
  Description of Artificial Sequence: Synthetic oligonucleotide
guaugugugccacuucucc

SEQ ID NO: 392644 - RNA, 19 nt, Artificial Sequence
  Description of Artificial Sequence: Synthetic oligonucleotide
aguauauccuucagcaguc

SEQ ID NO: 392645 - RNA, 19 nt, Artificial Sequence
  Description of Artificial Sequence: Synthetic oligonucleotide
gaccugauagucugcaaug

SEQ ID NO: 392646 - RNA, 19 nt, Artificial Sequence
  Description of Artificial Sequence: Synthetic oligonucleotide
uccacuagucuucuucucu

SEQ ID NO: 392647 - RNA, 19 nt, Artificial Sequence
  Description of Artificial Sequence: Synthetic oligonucleotide
uguugugcgcuccaacugu

SEQ ID NO: 392648 - RNA, 19 nt, Artificial Sequence
  Description of Artificial Sequence: Synthetic oligonucleotide
gaguauauccuucagcagu

SEQ ID NO: 392649 - RNA, 19 nt, Artificial Sequence
  Description of Artificial Sequence: Synthetic oligonucleotide
agucacaaauacuuaguaa

SEQ ID NO: 392650 - RNA, 19 nt, Artificial Sequence
  Description of Artificial Sequence: Synthetic oligonucleotide
aagaugccccucaagaucu

SEQ ID NO: 392651 - RNA, 19 nt, Artificial Sequence
  Description of Artificial Sequence: Synthetic oligonucleotide
ugacuaugugguuuugugu

SEQ ID NO: 392652 - RNA, 19 nt, Artificial Sequence
  Description of Artificial Sequence: Synthetic oligonucleotide
acuguaaagacugcaggug

SEQ ID NO: 392653 - RNA, 19 nt, Artificial Sequence
  Description of Artificial Sequence: Synthetic oligonucleotide
ugugcuauuucuugagaau

SEQ ID NO: 392654 - RNA, 19 nt, Artificial Sequence
  Description of Artificial Sequence: Synthetic oligonucleotide
uucuacuuccacuagucuu

SEQ ID NO: 392655 - RNA, 19 nt, Artificial Sequence
  Description of Artificial Sequence: Synthetic oligonucleotide
ugauggguguugcagggcu

SEQ ID NO: 392656 - RNA, 19 nt, Artificial Sequence
  Description of Artificial Sequence: Synthetic oligonucleotide
uuugugucuccccuagggu

SEQ ID NO: 392657 - RNA, 19 nt, Artificial Sequence
  Description of Artificial Sequence: Synthetic oligonucleotide
caaguugcuucaucuggcg

SEQ ID NO: 392658 - RNA, 19 nt, Artificial Sequence
  Description of Artificial Sequence: Synthetic oligonucleotide
guaaugagaacaaguaguc

SEQ ID NO: 392659 - RNA, 19 nt, Artificial Sequence
  Description of Artificial Sequence: Synthetic oligonucleotide
uucugaagccucuggauuc

SEQ ID NO: 392660 - RNA, 19 nt, Artificial Sequence
  Description of Artificial Sequence: Synthetic oligonucleotide
aagccuugugcuuagucuu

SEQ ID NO: 392661 - RNA, 19 nt, Artificial Sequence
  Description of Artificial Sequence: Synthetic oligonucleotide
uuuuguuagcuuucagcuc

SEQ ID NO: 392662 - RNA, 19 nt, Artificial Sequence
  Description of Artificial Sequence: Synthetic oligonucleotide
agggacaucuccuuuugcu

SEQ ID NO: 392663 - RNA, 19 nt, Artificial Sequence
  Description of Artificial Sequence: Synthetic oligonucleotide
ugcucuuugucaaacugua

SEQ ID NO: 392664 - RNA, 19 nt, Artificial Sequence
  Description of Artificial Sequence: Synthetic oligonucleotide
aagucaagcuguugcuuca

SEQ ID NO: 392665 - RNA, 19 nt, Artificial Sequence
  Description of Artificial Sequence: Synthetic oligonucleotide
uccagcuuccaccuuggca

SEQ ID NO: 392666 - RNA, 19 nt, Artificial Sequence
  Description of Artificial Sequence: Synthetic oligonucleotide
guuggauucaccuuuuggu

SEQ ID NO: 392667 - RNA, 19 nt, Artificial Sequence
  Description of Artificial Sequence: Synthetic oligonucleotide
ugcuuagucuucaucuccu

SEQ ID NO: 392668 - RNA, 19 nt, Artificial Sequence
  Description of Artificial Sequence: Synthetic oligonucleotide
ugacaaagaguauauccuu

SEQ ID NO: 392669 - RNA, 19 nt, Artificial Sequence
  Description of Artificial Sequence: Synthetic oligonucleotide
agcaaugaggcugggacag

SEQ ID NO: 392670 - RNA, 19 nt, Artificial Sequence
  Description of Artificial Sequence: Synthetic oligonucleotide
uggauucaccuuuugguuc

SEQ ID NO: 392671 - RNA, 19 nt, Artificial Sequence
  Description of Artificial Sequence: Synthetic oligonucleotide
ugcaaugucugcuguguac

SEQ ID NO: 392672 - RNA, 19 nt, Artificial Sequence
  Description of Artificial Sequence: Synthetic oligonucleotide
guagcugccuuaaaguggc

SEQ ID NO: 392673 - RNA, 19 nt, Artificial Sequence
  Description of Artificial Sequence: Synthetic oligonucleotide
cagggacacauucucaagc

SEQ ID NO: 392674 - RNA, 19 nt, Artificial Sequence
  Description of Artificial Sequence: Synthetic oligonucleotide
caucuggcgauccucuucc

SEQ ID NO: 392675 - RNA, 19 nt, Artificial Sequence
  Description of Artificial Sequence: Synthetic oligonucleotide
aguugcuucaucuggcgau

SEQ ID NO: 392676 - RNA, 19 nt, Artificial Sequence
  Description of Artificial Sequence: Synthetic oligonucleotide
cuuuugcuagucgugagug

SEQ ID NO: 392677 - RNA, 19 nt, Artificial Sequence
  Description of Artificial Sequence: Synthetic oligonucleotide
ugggucaucuguccaaccu

SEQ ID NO: 392678 - RNA, 19 nt, Artificial Sequence
  Description of Artificial Sequence: Synthetic oligonucleotide
uaaugagaacaaguaguca

SEQ ID NO: 392679 - RNA, 19 nt, Artificial Sequence
  Description of Artificial Sequence: Synthetic oligonucleotide
uguacucucuagcucuuuc

SEQ ID NO: 392680 - RNA, 19 nt, Artificial Sequence
  Description of Artificial Sequence: Synthetic oligonucleotide
aaugcucacggcauucuca

SEQ ID NO: 392681 - RNA, 19 nt, Artificial Sequence
  Description of Artificial Sequence: Synthetic oligonucleotide
cuuaaaguggcggcgguug

SEQ ID NO: 392682 - RNA, 19 nt, Artificial Sequence
  Description of Artificial Sequence: Synthetic oligonucleotide
aagacguuuuaucuuccuu

SEQ ID NO: 392683 - RNA, 19 nt, Artificial Sequence
  Description of Artificial Sequence: Synthetic oligonucleotide
uaaugguaugcucuuccau

SEQ ID NO: 392684 - RNA, 19 nt, Artificial Sequence
  Description of Artificial Sequence: Synthetic oligonucleotide
ugcguuagacuguccgagg

SEQ ID NO: 392685 - RNA, 19 nt, Artificial Sequence
  Description of Artificial Sequence: Synthetic oligonucleotide
agaccugauagucugcaau

SEQ ID NO: 392686 - RNA, 19 nt, Artificial Sequence
  Description of Artificial Sequence: Synthetic oligonucleotide
cuagucgugaguguucuac

SEQ ID NO: 392687 - RNA, 19 nt, Artificial Sequence
  Description of Artificial Sequence: Synthetic oligonucleotide
gguaugcucuuccaucugg

SEQ ID NO: 392688 - RNA, 19 nt, Artificial Sequence
  Description of Artificial Sequence: Synthetic oligonucleotide
aaguugcuucaucuggcga

SEQ ID NO: 392689 - RNA, 19 nt, Artificial Sequence
  Description of Artificial Sequence: Synthetic oligonucleotide
acaaguagucauuggccca

SEQ ID NO: 392690 - RNA, 19 nt, Artificial Sequence
  Description of Artificial Sequence: Synthetic oligonucleotide
gcaaagcugcguuagacug

SEQ ID NO: 392691 - RNA, 19 nt, Artificial Sequence
  Description of Artificial Sequence: Synthetic oligonucleotide
gugcuauuucuugagaaug

SEQ ID NO: 392692 - RNA, 19 nt, Artificial Sequence
  Description of Artificial Sequence: Synthetic oligonucleotide
uuagacuguccgaggccgg

SEQ ID NO: 392693 - RNA, 19 nt, Artificial Sequence
  Description of Artificial Sequence: Synthetic oligonucleotide
ugugcuuagucuucaucuc

SEQ ID NO: 392694 - RNA, 19 nt, Artificial Sequence
  Description of Artificial Sequence: Synthetic oligonucleotide
uggaucuaugcugaguuuc

SEQ ID NO: 392695 - RNA, 19 nt, Artificial Sequence
  Description of Artificial Sequence: Synthetic oligonucleotide
ucaagcuuuaggugcucca

SEQ ID NO: 392696 - RNA, 19 nt, Artificial Sequence
  Description of Artificial Sequence: Synthetic oligonucleotide
ucgcucguguucuaacucc

SEQ ID NO: 392697 - RNA, 19 nt, Artificial Sequence
  Description of Artificial Sequence: Synthetic oligonucleotide
acuuaguaaugagaacaag

SEQ ID NO: 392698 - RNA, 19 nt, Artificial Sequence
  Description of Artificial Sequence: Synthetic oligonucleotide
gacaaagaguauauccuuc

SEQ ID NO: 392699 - RNA, 19 nt, Artificial Sequence
  Description of Artificial Sequence: Synthetic oligonucleotide
uaggugcuccaaaaggccu

SEQ ID NO: 392700 - RNA, 19 nt, Artificial Sequence
  Description of Artificial Sequence: Synthetic oligonucleotide
ugacucuucaagacguuuu

SEQ ID NO: 392701 - RNA, 19 nt, Artificial Sequence
  Description of Artificial Sequence: Synthetic oligonucleotide
ucuugcuuuggccaacauu

SEQ ID NO: 392702 - RNA, 19 nt, Artificial Sequence
  Description of Artificial Sequence: Synthetic oligonucleotide
cuggagauucagcugcacc

SEQ ID NO: 392703 - RNA, 19 nt, Artificial Sequence
  Description of Artificial Sequence: Synthetic oligonucleotide
gauggaucuaugcugaguu

SEQ ID NO: 392704 - RNA, 19 nt, Artificial Sequence
  Description of Artificial Sequence: Synthetic oligonucleotide
gcuaagaaugcucacggca

SEQ ID NO: 392705 - RNA, 19 nt, Artificial Sequence
  Description of Artificial Sequence: Synthetic oligonucleotide
agacugaauuucucguucu

SEQ ID NO: 392706 - RNA, 19 nt, Artificial Sequence
  Description of Artificial Sequence: Synthetic oligonucleotide
uuauuaguuccugccucag

SEQ ID NO: 392707 - RNA, 19 nt, Artificial Sequence
  Description of Artificial Sequence: Synthetic oligonucleotide
caugcacuuuuauuaguuc

SEQ ID NO: 392708 - RNA, 19 nt, Artificial Sequence
  Description of Artificial Sequence: Synthetic oligonucleotide
cucacuaaugaguuggucu

SEQ ID NO: 392709 - RNA, 19 nt, Artificial Sequence
  Description of Artificial Sequence: Synthetic oligonucleotide
ugugcgcuccaacuguacu

SEQ ID NO: 392710 - RNA, 19 nt, Artificial Sequence
  Description of Artificial Sequence: Synthetic oligonucleotide
cugugaugcuugaagcuug

SEQ ID NO: 392711 - RNA, 19 nt, Artificial Sequence
  Description of Artificial Sequence: Synthetic oligonucleotide
uccuggcuagucauuguga

SEQ ID NO: 392712 - RNA, 19 nt, Artificial Sequence
  Description of Artificial Sequence: Synthetic oligonucleotide
agcugaacagcuaugcgcu

SEQ ID NO: 392713 - RNA, 19 nt, Artificial Sequence
  Description of Artificial Sequence: Synthetic oligonucleotide
uuugcuagucgugaguguu

SEQ ID NO: 392714 - RNA, 19 nt, Artificial Sequence
  Description of Artificial Sequence: Synthetic oligonucleotide
aaaguggcggcgguugugu

SEQ ID NO: 392715 - RNA, 19 nt, Artificial Sequence
  Description of Artificial Sequence: Synthetic oligonucleotide
aggccggugagcuucccuc

SEQ ID NO: 392716 - RNA, 19 nt, Artificial Sequence
  Description of Artificial Sequence: Synthetic oligonucleotide
uuaaaguggcggcgguugu

SEQ ID NO: 392717 - RNA, 19 nt, Artificial Sequence
  Description of Artificial Sequence: Synthetic oligonucleotide
agaaugcuuucccucuuga

SEQ ID NO: 392718 - RNA, 19 nt, Artificial Sequence
  Description of Artificial Sequence: Synthetic oligonucleotide
cagcgcaaguuguugcugg

SEQ ID NO: 392719 - RNA, 19 nt, Artificial Sequence
  Description of Artificial Sequence: Synthetic oligonucleotide
cuugaagcauaaacuuauc

SEQ ID NO: 392720 - RNA, 19 nt, Artificial Sequence
  Description of Artificial Sequence: Synthetic oligonucleotide
ucguuggccucaguaagag

SEQ ID NO: 392721 - RNA, 19 nt, Artificial Sequence
  Description of Artificial Sequence: Synthetic oligonucleotide
aacucagaccugauagucu

SEQ ID NO: 392722 - RNA, 19 nt, Artificial Sequence
  Description of Artificial Sequence: Synthetic oligonucleotide
acaguaaugguaugcucuu

SEQ ID NO: 392723 - RNA, 19 nt, Artificial Sequence
  Description of Artificial Sequence: Synthetic oligonucleotide
cuguaaagacugcagguga

SEQ ID NO: 392724 - RNA, 19 nt, Artificial Sequence
  Description of Artificial Sequence: Synthetic oligonucleotide
cuagucauugugaucaccu

SEQ ID NO: 392725 - RNA, 19 nt, Artificial Sequence
  Description of Artificial Sequence: Synthetic oligonucleotide
agcccacgaggauaaggac

SEQ ID NO: 392726 - RNA, 19 nt, Artificial Sequence
  Description of Artificial Sequence: Synthetic oligonucleotide
gguuuugugucuccccuag

SEQ ID NO: 392727 - RNA, 19 nt, Artificial Sequence
  Description of Artificial Sequence: Synthetic oligonucleotide
ucauugugaucaccuccug

SEQ ID NO: 392728 - RNA, 19 nt, Artificial Sequence
  Description of Artificial Sequence: Synthetic oligonucleotide
cacuagucuucuucucucc

SEQ ID NO: 392729 - RNA, 19 nt, Artificial Sequence
  Description of Artificial Sequence: Synthetic oligonucleotide
uaguauugacaaagaguau

SEQ ID NO: 392730 - RNA, 19 nt, Artificial Sequence
  Description of Artificial Sequence: Synthetic oligonucleotide
agagacugaauuucucguu

SEQ ID NO: 392731 - RNA, 19 nt, Artificial Sequence
  Description of Artificial Sequence: Synthetic oligonucleotide
cacaguaaugguaugcucu

SEQ ID NO: 392732 - RNA, 19 nt, Artificial Sequence
  Description of Artificial Sequence: Synthetic oligonucleotide
cuugccauguugcucuguc

SEQ ID NO: 392733 - RNA, 19 nt, Artificial Sequence
  Description of Artificial Sequence: Synthetic oligonucleotide
agggccaguuucuuauuug

SEQ ID NO: 392734 - RNA, 19 nt, Artificial Sequence
  Description of Artificial Sequence: Synthetic oligonucleotide
ugaccgaaaggucgugcac

SEQ ID NO: 392735 - RNA, 19 nt, Artificial Sequence
  Description of Artificial Sequence: Synthetic oligonucleotide
gacguuuuaucuuccuucu

SEQ ID NO: 392736 - RNA, 19 nt, Artificial Sequence
  Description of Artificial Sequence: Synthetic oligonucleotide
caucuggcgcugcagacug

SEQ ID NO: 392737 - RNA, 19 nt, Artificial Sequence
  Description of Artificial Sequence: Synthetic oligonucleotide
ccauuugagauuuuccauc

SEQ ID NO: 392738 - RNA, 19 nt, Artificial Sequence
  Description of Artificial Sequence: Synthetic oligonucleotide
uucuuucuguacugacuga

SEQ ID NO: 392739 - RNA, 19 nt, Artificial Sequence
  Description of Artificial Sequence: Synthetic oligonucleotide
caacucagaccugauaguc

SEQ ID NO: 392740 - RNA, 19 nt, Artificial Sequence
  Description of Artificial Sequence: Synthetic oligonucleotide
aaugaggcuuguaaagcuu

SEQ ID NO: 392741 - RNA, 19 nt, Artificial Sequence
  Description of Artificial Sequence: Synthetic oligonucleotide
uugauggaucuaugcugag

SEQ ID NO: 392742 - RNA, 19 nt, Artificial Sequence
  Description of Artificial Sequence: Synthetic oligonucleotide
cucuaaugaggcuuguaaa

SEQ ID NO: 392743 - RNA, 19 nt, Artificial Sequence
  Description of Artificial Sequence: Synthetic oligonucleotide
accgaaaggucgugcacug

SEQ ID NO: 392744 - RNA, 19 nt, Artificial Sequence
  Description of Artificial Sequence: Synthetic oligonucleotide
cauguugcucugucaaguc

SEQ ID NO: 392745 - RNA, 19 nt, Artificial Sequence
  Description of Artificial Sequence: Synthetic oligonucleotide
ggagcugaacagcuaugcg

SEQ ID NO: 392746 - RNA, 19 nt, Artificial Sequence
  Description of Artificial Sequence: Synthetic oligonucleotide
ugauggaucuaugcugagu

SEQ ID NO: 392747 - RNA, 19 nt, Artificial Sequence
  Description of Artificial Sequence: Synthetic oligonucleotide
agcugccuuaaaguggcgg

SEQ ID NO: 392748 - RNA, 19 nt, Artificial Sequence
  Description of Artificial Sequence: Synthetic oligonucleotide
auauccuucagcagucaca

SEQ ID NO: 392749 - RNA, 19 nt, Artificial Sequence
  Description of Artificial Sequence: Synthetic oligonucleotide
guguugugcgcuccaacug

SEQ ID NO: 392750 - RNA, 19 nt, Artificial Sequence
  Description of Artificial Sequence: Synthetic oligonucleotide
ucccgcuuggcuagugcag

SEQ ID NO: 392751 - RNA, 19 nt, Artificial Sequence
  Description of Artificial Sequence: Synthetic oligonucleotide
uagucgugaguguucuacu

SEQ ID NO: 392752 - RNA, 19 nt, Artificial Sequence
  Description of Artificial Sequence: Synthetic oligonucleotide
ucagagagaucuuccugua

SEQ ID NO: 392753 - RNA, 19 nt, Artificial Sequence
  Description of Artificial Sequence: Synthetic oligonucleotide
cugcguuagacuguccgag

SEQ ID NO: 392754 - RNA, 19 nt, Artificial Sequence
  Description of Artificial Sequence: Synthetic oligonucleotide
aguuggucuuuggaaguag

SEQ ID NO: 392755 - RNA, 19 nt, Artificial Sequence
  Description of Artificial Sequence: Synthetic oligonucleotide
cuaugcugaguuucuguca

SEQ ID NO: 392756 - RNA, 19 nt, Artificial Sequence
  Description of Artificial Sequence: Synthetic oligonucleotide
uagucauugugaucaccuc

SEQ ID NO: 392757 - RNA, 19 nt, Artificial Sequence
  Description of Artificial Sequence: Synthetic oligonucleotide
auacuguugugcucccgca

SEQ ID NO: 392758 - RNA, 19 nt, Artificial Sequence
  Description of Artificial Sequence: Synthetic oligonucleotide
aaguggcggcgguuguguc

SEQ ID NO: 392759 - RNA, 19 nt, Artificial Sequence
  Description of Artificial Sequence: Synthetic oligonucleotide
gagcccacgaggauaagga

SEQ ID NO: 392760 - RNA, 19 nt, Artificial Sequence
  Description of Artificial Sequence: Synthetic oligonucleotide
aagccucuggauucuugaa

SEQ ID NO: 392761 - RNA, 19 nt, Artificial Sequence
  Description of Artificial Sequence: Synthetic oligonucleotide
caaccuguaugugugccac

SEQ ID NO: 392762 - RNA, 19 nt, Artificial Sequence
  Description of Artificial Sequence: Synthetic oligonucleotide
cucacggcauucucauaag

SEQ ID NO: 392763 - RNA, 19 nt, Artificial Sequence
  Description of Artificial Sequence: Synthetic oligonucleotide
ugcuagucgugaguguucu

SEQ ID NO: 392764 - RNA, 19 nt, Artificial Sequence
  Description of Artificial Sequence: Synthetic oligonucleotide
gaaugcucacggcauucuc

SEQ ID NO: 392765 - RNA, 19 nt, Artificial Sequence
  Description of Artificial Sequence: Synthetic oligonucleotide
ucugucaagucaagcuguu

SEQ ID NO: 392766 - RNA, 19 nt, Artificial Sequence
  Description of Artificial Sequence: Synthetic oligonucleotide
cugccuuaaaguggcggcg

SEQ ID NO: 392767 - RNA, 19 nt, Artificial Sequence
  Description of Artificial Sequence: Synthetic oligonucleotide
uccaucuggcgcugcagac

SEQ ID NO: 392768 - RNA, 19 nt, Artificial Sequence
  Description of Artificial Sequence: Synthetic oligonucleotide
ucccgcaaagcugcguuag

SEQ ID NO: 392769 - RNA, 19 nt, Artificial Sequence
  Description of Artificial Sequence: Synthetic oligonucleotide
gcugacuaagcucugcauc

SEQ ID NO: 392770 - RNA, 19 nt, Artificial Sequence
  Description of Artificial Sequence: Synthetic oligonucleotide
uaagagcuaccaucugcuc

SEQ ID NO: 392771 - RNA, 19 nt, Artificial Sequence
  Description of Artificial Sequence: Synthetic oligonucleotide
uuggcugcaccacggcgga

SEQ ID NO: 392772 - RNA, 19 nt, Artificial Sequence
  Description of Artificial Sequence: Synthetic oligonucleotide
cuccuggcuagucauugug

SEQ ID NO: 392773 - RNA, 19 nt, Artificial Sequence
  Description of Artificial Sequence: Synthetic oligonucleotide
cugacuaagcucugcaucu

SEQ ID NO: 392774 - RNA, 19 nt, Artificial Sequence
  Description of Artificial Sequence: Synthetic oligonucleotide
cgaggauaaggacucaugc

SEQ ID NO: 392775 - RNA, 19 nt, Artificial Sequence
  Description of Artificial Sequence: Synthetic oligonucleotide
augcucacggcauucucau

SEQ ID NO: 392776 - RNA, 19 nt, Artificial Sequence
  Description of Artificial Sequence: Synthetic oligonucleotide
gcugccuuaaaguggcggc

SEQ ID NO: 392777 - RNA, 19 nt, Artificial Sequence
  Description of Artificial Sequence: Synthetic oligonucleotide
ugagauucuugagggguuc

SEQ ID NO: 392778 - RNA, 19 nt, Artificial Sequence
  Description of Artificial Sequence: Synthetic oligonucleotide
ugagaaugcuuucccucuu

SEQ ID NO: 392779 - RNA, 19 nt, Artificial Sequence
  Description of Artificial Sequence: Synthetic oligonucleotide
gucgugaguguucuacuuc

SEQ ID NO: 392780 - RNA, 19 nt, Artificial Sequence
  Description of Artificial Sequence: Synthetic oligonucleotide
ggcuggaggaguuggauuc

SEQ ID NO: 392781 - RNA, 19 nt, Artificial Sequence
  Description of Artificial Sequence: Synthetic oligonucleotide
cuugagcccacgaggauaa

SEQ ID NO: 392782 - RNA, 19 nt, Artificial Sequence
  Description of Artificial Sequence: Synthetic oligonucleotide
uaaaguggcggcgguugug

SEQ ID NO: 392783 - RNA, 19 nt, Artificial Sequence
  Description of Artificial Sequence: Synthetic oligonucleotide
cuuccuguaccauuuccaa

SEQ ID NO: 392784 - RNA, 19 nt, Artificial Sequence
  Description of Artificial Sequence: Synthetic oligonucleotide
ucugaagccucuggauucu

SEQ ID NO: 392785 - RNA, 19 nt, Artificial Sequence
  Description of Artificial Sequence: Synthetic oligonucleotide
uuugacucuucaagacguu

SEQ ID NO: 392786 - RNA, 19 nt, Artificial Sequence
  Description of Artificial Sequence: Synthetic oligonucleotide
cuguguacucucuagcucu

SEQ ID NO: 392787 - RNA, 19 nt, Artificial Sequence
  Description of Artificial Sequence: Synthetic oligonucleotide
ucaugcuguuuacuuucau

SEQ ID NO: 392788 - RNA, 19 nt, Artificial Sequence
  Description of Artificial Sequence: Synthetic oligonucleotide
caugcacaguaaugguaug

SEQ ID NO: 392789 - RNA, 19 nt, Artificial Sequence
  Description of Artificial Sequence: Synthetic oligonucleotide
agucgugaguguucuacuu

SEQ ID NO: 392790 - RNA, 19 nt, Artificial Sequence
  Description of Artificial Sequence: Synthetic oligonucleotide
uugcgcuguaaaacugccu

SEQ ID NO: 392791 - RNA, 19 nt, Artificial Sequence
  Description of Artificial Sequence: Synthetic oligonucleotide
ugaacagcuaugcgcucuu

SEQ ID NO: 392792 - RNA, 19 nt, Artificial Sequence
  Description of Artificial Sequence: Synthetic oligonucleotide
cuaagaaugcucacggcau

SEQ ID NO: 392793 - RNA, 19 nt, Artificial Sequence
  Description of Artificial Sequence: Synthetic oligonucleotide
ugacuaagcucugcaucug

SEQ ID NO: 392794 - RNA, 19 nt, Artificial Sequence
  Description of Artificial Sequence: Synthetic oligonucleotide
acuaagcucugcaucugug

SEQ ID NO: 392795 - RNA, 19 nt, Artificial Sequence
  Description of Artificial Sequence: Synthetic oligonucleotide
cuguugugcucccgcaaag

SEQ ID NO: 392796 - RNA, 19 nt, Artificial Sequence
  Description of Artificial Sequence: Synthetic oligonucleotide
gaguuggauucaccuuuug

SEQ ID NO: 392797 - RNA, 19 nt, Artificial Sequence
  Description of Artificial Sequence: Synthetic oligonucleotide
gagauucuugagggguucc

SEQ ID NO: 392798 - RNA, 19 nt, Artificial Sequence
  Description of Artificial Sequence: Synthetic oligonucleotide
gguaucuugauggguguug

SEQ ID NO: 392799 - RNA, 19 nt, Artificial Sequence
  Description of Artificial Sequence: Synthetic oligonucleotide
guaagagcuaccaucugcu

SEQ ID NO: 392800 - RNA, 19 nt, Artificial Sequence
  Description of Artificial Sequence: Synthetic oligonucleotide
aaccuguaugugugccacu

SEQ ID NO: 392801 - RNA, 19 nt, Artificial Sequence
  Description of Artificial Sequence: Synthetic oligonucleotide
accugauagucugcaaugu

SEQ ID NO: 392802 - RNA, 19 nt, Artificial Sequence
  Description of Artificial Sequence: Synthetic oligonucleotide
ggguucuagcuucugccag

SEQ ID NO: 392803 - RNA, 19 nt, Artificial Sequence
  Description of Artificial Sequence: Synthetic oligonucleotide
uuccacuagucuucuucuc

SEQ ID NO: 392804 - RNA, 19 nt, Artificial Sequence
  Description of Artificial Sequence: Synthetic oligonucleotide
cagagagaucuuccuguac

SEQ ID NO: 392805 - RNA, 19 nt, Artificial Sequence
  Description of Artificial Sequence: Synthetic oligonucleotide
cugaccgaaaggucgugca

SEQ ID NO: 392806 - RNA, 19 nt, Artificial Sequence
  Description of Artificial Sequence: Synthetic oligonucleotide
acgaggauaaggacucaug

SEQ ID NO: 392807 - RNA, 19 nt, Artificial Sequence
  Description of Artificial Sequence: Synthetic oligonucleotide
gcggcuaagaaugcucacg

SEQ ID NO: 392808 - RNA, 19 nt, Artificial Sequence
  Description of Artificial Sequence: Synthetic oligonucleotide
ugagggguuccuugcucac

SEQ ID NO: 392809 - RNA, 19 nt, Artificial Sequence
  Description of Artificial Sequence: Synthetic oligonucleotide
uguguacucucuagcucuu

SEQ ID NO: 392810 - RNA, 19 nt, Artificial Sequence
  Description of Artificial Sequence: Synthetic oligonucleotide
cugagggaagugcuacuuc

SEQ ID NO: 392811 - RNA, 19 nt, Artificial Sequence
  Description of Artificial Sequence: Synthetic oligonucleotide
cagucacaaauacuuagua

SEQ ID NO: 392812 - RNA, 19 nt, Artificial Sequence
  Description of Artificial Sequence: Synthetic oligonucleotide
gaugccccucaagaucugc

SEQ ID NO: 392813 - RNA, 19 nt, Artificial Sequence
  Description of Artificial Sequence: Synthetic oligonucleotide
gcuagugcagucuccagaa

SEQ ID NO: 392814 - RNA, 19 nt, Artificial Sequence
  Description of Artificial Sequence: Synthetic oligonucleotide
cuucccgcuuggcuagugc

SEQ ID NO: 392815 - RNA, 19 nt, Artificial Sequence
  Description of Artificial Sequence: Synthetic oligonucleotide
cucagucuggaaaugugcu

SEQ ID NO: 392816 - RNA, 19 nt, Artificial Sequence
  Description of Artificial Sequence: Synthetic oligonucleotide
gugcucugagcucugagcu

SEQ ID NO: 392817 - RNA, 19 nt, Artificial Sequence
  Description of Artificial Sequence: Synthetic oligonucleotide
gcucacggcauucucauaa

SEQ ID NO: 392818 - RNA, 19 nt, Artificial Sequence
  Description of Artificial Sequence: Synthetic oligonucleotide
gcaaguuguugcugguacc

SEQ ID NO: 392819 - RNA, 19 nt, Artificial Sequence
  Description of Artificial Sequence: Synthetic oligonucleotide
augagaacaaguagucauu

SEQ ID NO: 392820 - RNA, 19 nt, Artificial Sequence
  Description of Artificial Sequence: Synthetic oligonucleotide
gcguuagacuguccgaggc

SEQ ID NO: 392821 - RNA, 19 nt, Artificial Sequence
  Description of Artificial Sequence: Synthetic oligonucleotide
guuguccuugcugagggaa

SEQ ID NO: 392822 - RNA, 19 nt, Artificial Sequence
  Description of Artificial Sequence: Synthetic oligonucleotide
gacuguccgaggccgguga

SEQ ID NO: 392823 - RNA, 19 nt, Artificial Sequence
  Description of Artificial Sequence: Synthetic oligonucleotide
ugguuuugugucuccccua

SEQ ID NO: 392824 - RNA, 19 nt, Artificial Sequence
  Description of Artificial Sequence: Synthetic oligonucleotide
uagcugccuuaaaguggcg

SEQ ID NO: 392825 - RNA, 19 nt, Artificial Sequence
  Description of Artificial Sequence: Synthetic oligonucleotide
acuguccgaggccggugag

SEQ ID NO: 392826 - RNA, 19 nt, Artificial Sequence
  Description of Artificial Sequence: Synthetic oligonucleotide
guugugcucccgcaaagcu

SEQ ID NO: 392827 - RNA, 19 nt, Artificial Sequence
  Description of Artificial Sequence: Synthetic oligonucleotide
gucauugugaucaccuccu

SEQ ID NO: 392828 - RNA, 19 nt, Artificial Sequence
  Description of Artificial Sequence: Synthetic oligonucleotide
cagagacugaauuucucgu

SEQ ID NO: 392829 - RNA, 19 nt, Artificial Sequence
  Description of Artificial Sequence: Synthetic oligonucleotide
cucugucaagucaagcugu

SEQ ID NO: 392830 - RNA, 19 nt, Artificial Sequence
  Description of Artificial Sequence: Synthetic oligonucleotide
ccucuuugcgcuguaaaac

SEQ ID NO: 392831 - RNA, 19 nt, Artificial Sequence
  Description of Artificial Sequence: Synthetic oligonucleotide
cucauaagccuugugcuua

SEQ ID NO: 392832 - RNA, 19 nt, Artificial Sequence
  Description of Artificial Sequence: Synthetic oligonucleotide
agcgcaaguuguugcuggu

SEQ ID NO: 392833 - RNA, 19 nt, Artificial Sequence
  Description of Artificial Sequence: Synthetic oligonucleotide
uugcuucaucuggcgaucc

SEQ ID NO: 392834 - RNA, 19 nt, Artificial Sequence
  Description of Artificial Sequence: Synthetic oligonucleotide
ggcgguuguguccagcuuc

SEQ ID NO: 392835 - RNA, 19 nt, Artificial Sequence
  Description of Artificial Sequence: Synthetic oligonucleotide
cucaaugcucuggagcuga

SEQ ID NO: 392836 - RNA, 19 nt, Artificial Sequence
  Description of Artificial Sequence: Synthetic oligonucleotide
cucguuggccucaguaaga

SEQ ID NO: 392837 - RNA, 19 nt, Artificial Sequence
  Description of Artificial Sequence: Synthetic oligonucleotide
cggcuaagaaugcucacgg

SEQ ID NO: 392838 - RNA, 19 nt, Artificial Sequence
  Description of Artificial Sequence: Synthetic oligonucleotide
caguaagagcuaccaucug

SEQ ID NO: 392839 - RNA, 19 nt, Artificial Sequence
  Description of Artificial Sequence: Synthetic oligonucleotide
ugcuugagcccacgaggau

SEQ ID NO: 392840 - RNA, 19 nt, Artificial Sequence
  Description of Artificial Sequence: Synthetic oligonucleotide
cguguucuaacuccagggc

SEQ ID NO: 392841 - RNA, 19 nt, Artificial Sequence
  Description of Artificial Sequence: Synthetic oligonucleotide
ggauaaggacucaugcaca

SEQ ID NO: 392842 - RNA, 19 nt, Artificial Sequence
  Description of Artificial Sequence: Synthetic oligonucleotide
ggcuaagaaugcucacggc

SEQ ID NO: 392843 - RNA, 19 nt, Artificial Sequence
  Description of Artificial Sequence: Synthetic oligonucleotide
gcggagauccagcuugagc

SEQ ID NO: 392844 - RNA, 19 nt, Artificial Sequence
  Description of Artificial Sequence: Synthetic oligonucleotide
acucuucaagacguuuuau

SEQ ID NO: 392845 - RNA, 19 nt, Artificial Sequence
  Description of Artificial Sequence: Synthetic oligonucleotide
cuggcgauccucuuccucu

SEQ ID NO: 392846 - RNA, 19 nt, Artificial Sequence
  Description of Artificial Sequence: Synthetic oligonucleotide
uggucaguguugugcgcuc

SEQ ID NO: 392847 - RNA, 19 nt, Artificial Sequence
  Description of Artificial Sequence: Synthetic oligonucleotide
gccaguuucuuauuugacu

SEQ ID NO: 392848 - RNA, 19 nt, Artificial Sequence
  Description of Artificial Sequence: Synthetic oligonucleotide
aagcugcguuagacugucc

SEQ ID NO: 392849 - RNA, 19 nt, Artificial Sequence
  Description of Artificial Sequence: Synthetic oligonucleotide
gccauguugcucugucaag

SEQ ID NO: 392850 - RNA, 19 nt, Artificial Sequence
  Description of Artificial Sequence: Synthetic oligonucleotide
ggauucaccuuuugguucu

SEQ ID NO: 392851 - RNA, 19 nt, Artificial Sequence
  Description of Artificial Sequence: Synthetic oligonucleotide
gaccgaaaggucgugcacu

SEQ ID NO: 392852 - RNA, 19 nt, Artificial Sequence
  Description of Artificial Sequence: Synthetic oligonucleotide
cugucaagucaagcuguug

SEQ ID NO: 392853 - RNA, 19 nt, Artificial Sequence
  Description of Artificial Sequence: Synthetic oligonucleotide
cugagcugacuaagcucug

SEQ ID NO: 392854 - RNA, 19 nt, Artificial Sequence
  Description of Artificial Sequence: Synthetic oligonucleotide
cugauccaguucccauuug

SEQ ID NO: 392855 - RNA, 19 nt, Artificial Sequence
  Description of Artificial Sequence: Synthetic oligonucleotide
ugggccagcgcaaguuguu

SEQ ID NO: 392856 - RNA, 19 nt, Artificial Sequence
  Description of Artificial Sequence: Synthetic oligonucleotide
ccugauagucugcaauguc

SEQ ID NO: 392857 - RNA, 19 nt, Artificial Sequence
  Description of Artificial Sequence: Synthetic oligonucleotide
uggauucuugaagcucauc

SEQ ID NO: 392858 - RNA, 19 nt, Artificial Sequence
  Description of Artificial Sequence: Synthetic oligonucleotide
cuugcaggcggcggcuaag

SEQ ID NO: 392859 - RNA, 19 nt, Artificial Sequence
  Description of Artificial Sequence: Synthetic oligonucleotide
ggccagcgcaaguuguugc

SEQ ID NO: 392860 - RNA, 19 nt, Artificial Sequence
  Description of Artificial Sequence: Synthetic oligonucleotide
agaucugagcccagccgcu

SEQ ID NO: 392861 - RNA, 19 nt, Artificial Sequence
  Description of Artificial Sequence: Synthetic oligonucleotide
gucaguguugugcgcucca

SEQ ID NO: 392862 - RNA, 19 nt, Artificial Sequence
  Description of Artificial Sequence: Synthetic oligonucleotide
gucgugcacuguguugucc

SEQ ID NO: 392863 - RNA, 19 nt, Artificial Sequence
  Description of Artificial Sequence: Synthetic oligonucleotide
ccacuagucuucuucucuc

SEQ ID NO: 392864 - RNA, 19 nt, Artificial Sequence
  Description of Artificial Sequence: Synthetic oligonucleotide
caagcuuuaggugcuccaa

SEQ ID NO: 392865 - RNA, 19 nt, Artificial Sequence
  Description of Artificial Sequence: Synthetic oligonucleotide
agugucucguuggccucag

SEQ ID NO: 392866 - RNA, 19 nt, Artificial Sequence
  Description of Artificial Sequence: Synthetic oligonucleotide
gccaacauucugcaguucu

SEQ ID NO: 392867 - RNA, 19 nt, Artificial Sequence
  Description of Artificial Sequence: Synthetic oligonucleotide
ugccugcaccuggagauuc

SEQ ID NO: 392868 - RNA, 19 nt, Artificial Sequence
  Description of Artificial Sequence: Synthetic oligonucleotide
cgcaaguuguugcugguac

SEQ ID NO: 392869 - RNA, 19 nt, Artificial Sequence
  Description of Artificial Sequence: Synthetic oligonucleotide
gcgcuguaaaacugccugc

SEQ ID NO: 392870 - RNA, 19 nt, Artificial Sequence
  Description of Artificial Sequence: Synthetic oligonucleotide
gcacaguaaugguaugcuc

SEQ ID NO: 392871 - RNA, 19 nt, Artificial Sequence
  Description of Artificial Sequence: Synthetic oligonucleotide
ggccggugagcuucccucg

SEQ ID NO: 392872 - RNA, 19 nt, Artificial Sequence
  Description of Artificial Sequence: Synthetic oligonucleotide
gcuagucauugugaucacc

SEQ ID NO: 392873 - RNA, 19 nt, Artificial Sequence
  Description of Artificial Sequence: Synthetic oligonucleotide
aaaggccugcuugggucau

SEQ ID NO: 392874 - RNA, 19 nt, Artificial Sequence
  Description of Artificial Sequence: Synthetic oligonucleotide
cugcagagaugugauuuca

SEQ ID NO: 392875 - RNA, 19 nt, Artificial Sequence
  Description of Artificial Sequence: Synthetic oligonucleotide
caguaaugguaugcucuuc

SEQ ID NO: 392876 - RNA, 19 nt, Artificial Sequence
  Description of Artificial Sequence: Synthetic oligonucleotide
guauauccuucagcaguca

SEQ ID NO: 392877 - RNA, 19 nt, Artificial Sequence
  Description of Artificial Sequence: Synthetic oligonucleotide
guaaagacugcaggugagu

SEQ ID NO: 392878 - RNA, 19 nt, Artificial Sequence
  Description of Artificial Sequence: Synthetic oligonucleotide
gaguuggucuuuggaagua

SEQ ID NO: 392879 - RNA, 19 nt, Artificial Sequence
  Description of Artificial Sequence: Synthetic oligonucleotide
ucuccccuagggugggcau

SEQ ID NO: 392880 - RNA, 19 nt, Artificial Sequence
  Description of Artificial Sequence: Synthetic oligonucleotide
gcgauccucuuccucuuug

SEQ ID NO: 392881 - RNA, 19 nt, Artificial Sequence
  Description of Artificial Sequence: Synthetic oligonucleotide
gagauccagcuugagcugu

SEQ ID NO: 392882 - RNA, 19 nt, Artificial Sequence
  Description of Artificial Sequence: Synthetic oligonucleotide
gaaccagggacaucuccuu

SEQ ID NO: 392883 - RNA, 19 nt, Artificial Sequence
  Description of Artificial Sequence: Synthetic oligonucleotide
ucucaagcuuuaggugcuc

SEQ ID NO: 392884 - RNA, 19 nt, Artificial Sequence
  Description of Artificial Sequence: Synthetic oligonucleotide
ugguaucuugauggguguu

SEQ ID NO: 392885 - RNA, 19 nt, Artificial Sequence
  Description of Artificial Sequence: Synthetic oligonucleotide
cguuagacuguccgaggcc

SEQ ID NO: 392886 - RNA, 19 nt, Artificial Sequence
  Description of Artificial Sequence: Synthetic oligonucleotide
gggcaugcucugcuggggc

SEQ ID NO: 392887 - RNA, 19 nt, Artificial Sequence
  Description of Artificial Sequence: Synthetic oligonucleotide
cuguccgaggccggugagc

SEQ ID NO: 392888 - RNA, 19 nt, Artificial Sequence
  Description of Artificial Sequence: Synthetic oligonucleotide
caagacguuuuaucuuccu

SEQ ID NO: 392889 - RNA, 19 nt, Artificial Sequence
  Description of Artificial Sequence: Synthetic oligonucleotide
agcucacuaaugaguuggu

SEQ ID NO: 392890 - RNA, 19 nt, Artificial Sequence
  Description of Artificial Sequence: Synthetic oligonucleotide
guggcggcgguugugucca

SEQ ID NO: 392891 - RNA, 19 nt, Artificial Sequence
  Description of Artificial Sequence: Synthetic oligonucleotide
cugguaucuugaugggugu

SEQ ID NO: 392892 - RNA, 19 nt, Artificial Sequence
  Description of Artificial Sequence: Synthetic oligonucleotide
agacuguccgaggccggug

SEQ ID NO: 392893 - RNA, 19 nt, Artificial Sequence
  Description of Artificial Sequence: Synthetic oligonucleotide
gagggaagugcuacuucua

SEQ ID NO: 392894 - RNA, 19 nt, Artificial Sequence
  Description of Artificial Sequence: Synthetic oligonucleotide
cagcagucacaaauacuua

SEQ ID NO: 392895 - RNA, 19 nt, Artificial Sequence
  Description of Artificial Sequence: Synthetic oligonucleotide
gggaagugcuacuucuacu

SEQ ID NO: 392896 - RNA, 19 nt, Artificial Sequence
  Description of Artificial Sequence: Synthetic oligonucleotide
augcugcagagaugugauu

SEQ ID NO: 392897 - RNA, 19 nt, Artificial Sequence
  Description of Artificial Sequence: Synthetic oligonucleotide
ggcggcuaagaaugcucac

SEQ ID NO: 392898 - RNA, 19 nt, Artificial Sequence
  Description of Artificial Sequence: Synthetic oligonucleotide
uucuaacuccagggccagu

SEQ ID NO: 392899 - RNA, 19 nt, Artificial Sequence
  Description of Artificial Sequence: Synthetic oligonucleotide
gcagucacaaauacuuagu

SEQ ID NO: 392900 - RNA, 19 nt, Artificial Sequence
  Description of Artificial Sequence: Synthetic oligonucleotide
ggucaguguugugcgcucc

SEQ ID NO: 392901 - RNA, 19 nt, Artificial Sequence
  Description of Artificial Sequence: Synthetic oligonucleotide
cccucuugaaucugaagcu

SEQ ID NO: 392902 - RNA, 19 nt, Artificial Sequence
  Description of Artificial Sequence: Synthetic oligonucleotide
cuccccuagggugggcaug

SEQ ID NO: 392903 - RNA, 19 nt, Artificial Sequence
  Description of Artificial Sequence: Synthetic oligonucleotide
ggcuagucauugugaucac

SEQ ID NO: 392904 - RNA, 19 nt, Artificial Sequence
  Description of Artificial Sequence: Synthetic oligonucleotide
cuggucaguguugugcgcu

SEQ ID NO: 392905 - RNA, 19 nt, Artificial Sequence
  Description of Artificial Sequence: Synthetic oligonucleotide
guugugcgcuccaacugua

SEQ ID NO: 392906 - RNA, 19 nt, Artificial Sequence
  Description of Artificial Sequence: Synthetic oligonucleotide
ucccucgcucguguucuaa

SEQ ID NO: 392907 - RNA, 19 nt, Artificial Sequence
  Description of Artificial Sequence: Synthetic oligonucleotide
cuucccucgcucguguucu

SEQ ID NO: 392908 - RNA, 19 nt, Artificial Sequence
  Description of Artificial Sequence: Synthetic oligonucleotide
ggaucuaugcugaguuucu

SEQ ID NO: 392909 - RNA, 19 nt, Artificial Sequence
  Description of Artificial Sequence: Synthetic oligonucleotide
gucugguaucuugaugggu

SEQ ID NO: 392910 - RNA, 19 nt, Artificial Sequence
  Description of Artificial Sequence: Synthetic oligonucleotide
ccaaccuguaugugugcca

SEQ ID NO: 392911 - RNA, 19 nt, Artificial Sequence
  Description of Artificial Sequence: Synthetic oligonucleotide
gugcgcuccaacuguacuu

SEQ ID NO: 392912 - RNA, 19 nt, Artificial Sequence
  Description of Artificial Sequence: Synthetic oligonucleotide
agaugccccucaagaucug

SEQ ID NO: 392913 - RNA, 19 nt, Artificial Sequence
  Description of Artificial Sequence: Synthetic oligonucleotide
agucauuggcccagcccuu

SEQ ID NO: 392914 - RNA, 19 nt, Artificial Sequence
  Description of Artificial Sequence: Synthetic oligonucleotide
gggccagcgcaaguuguug

SEQ ID NO: 392915 - RNA, 19 nt, Artificial Sequence
  Description of Artificial Sequence: Synthetic oligonucleotide
gcagccugacccuggccuc

SEQ ID NO: 392916 - RNA, 19 nt, Artificial Sequence
  Description of Artificial Sequence: Synthetic oligonucleotide
cccucgcucguguucuaac

SEQ ID NO: 392917 - RNA, 19 nt, Artificial Sequence
  Description of Artificial Sequence: Synthetic oligonucleotide
cucccgcaaagcugcguua

SEQ ID NO: 392918 - RNA, 19 nt, Artificial Sequence
  Description of Artificial Sequence: Synthetic oligonucleotide
cuacuuccacuagucuucu

SEQ ID NO: 392919 - RNA, 19 nt, Artificial Sequence
  Description of Artificial Sequence: Synthetic oligonucleotide
gucaucuguccaaccugua

SEQ ID NO: 392920 - RNA, 19 nt, Artificial Sequence
  Description of Artificial Sequence: Synthetic oligonucleotide
cagcucagucuggaaaugu

SEQ ID NO: 392921 - RNA, 19 nt, Artificial Sequence
  Description of Artificial Sequence: Synthetic oligonucleotide
ccauguugcucugucaagu

SEQ ID NO: 392922 - RNA, 19 nt, Artificial Sequence
  Description of Artificial Sequence: Synthetic oligonucleotide
ccuuuugcuagucgugagu

SEQ ID NO: 392923 - RNA, 19 nt, Artificial Sequence
  Description of Artificial Sequence: Synthetic oligonucleotide
ccuggcuagucauugugau

SEQ ID NO: 392924 - RNA, 19 nt, Artificial Sequence
  Description of Artificial Sequence: Synthetic oligonucleotide
cgcuguaaaacugccugca

SEQ ID NO: 392925 - RNA, 19 nt, Artificial Sequence
  Description of Artificial Sequence: Synthetic oligonucleotide
cacgaggauaaggacucau

SEQ ID NO: 392926 - RNA, 19 nt, Artificial Sequence
  Description of Artificial Sequence: Synthetic oligonucleotide
gaacuggaggcggguucua

SEQ ID NO: 392927 - RNA, 19 nt, Artificial Sequence
  Description of Artificial Sequence: Synthetic oligonucleotide
cuagugcagucuccagaau

SEQ ID NO: 392928 - RNA, 19 nt, Artificial Sequence
  Description of Artificial Sequence: Synthetic oligonucleotide
cccugugggcugcuggcuc

SEQ ID NO: 392929 - RNA, 19 nt, Artificial Sequence
  Description of Artificial Sequence: Synthetic oligonucleotide
gaucugagcccagccgcuu

SEQ ID NO: 392930 - RNA, 19 nt, Artificial Sequence
  Description of Artificial Sequence: Synthetic oligonucleotide
gugaugcuugaagcuugcu

SEQ ID NO: 392931 - RNA, 19 nt, Artificial Sequence
  Description of Artificial Sequence: Synthetic oligonucleotide
cgugaguguucuacuucca

SEQ ID NO: 392932 - RNA, 19 nt, Artificial Sequence
  Description of Artificial Sequence: Synthetic oligonucleotide
ccgcuuggcuagugcaguc

SEQ ID NO: 392933 - RNA, 19 nt, Artificial Sequence
  Description of Artificial Sequence: Synthetic oligonucleotide
cgcucguguucuaacucca

SEQ ID NO: 392934 - RNA, 19 nt, Artificial Sequence
  Description of Artificial Sequence: Synthetic oligonucleotide
cggcggcuaagaaugcuca

SEQ ID NO: 392935 - RNA, 19 nt, Artificial Sequence
  Description of Artificial Sequence: Synthetic oligonucleotide
gcggcgguuguguccagcu

SEQ ID NO: 392936 - RNA, 19 nt, Artificial Sequence
  Description of Artificial Sequence: Synthetic oligonucleotide
aucuggcgcugcagacugu

SEQ ID NO: 392937 - RNA, 19 nt, Artificial Sequence
  Description of Artificial Sequence: Synthetic oligonucleotide
gccuuaaaguggcggcggu

SEQ ID NO: 392938 - RNA, 19 nt, Artificial Sequence
  Description of Artificial Sequence: Synthetic oligonucleotide
gcuucccgcuuggcuagug

SEQ ID NO: 392939 - RNA, 19 nt, Artificial Sequence
  Description of Artificial Sequence: Synthetic oligonucleotide
ggcggcgguuguguccagc

SEQ ID NO: 392940 - RNA, 19 nt, Artificial Sequence
  Description of Artificial Sequence: Synthetic oligonucleotide
gcuagucgugaguguucua

SEQ ID NO: 392941 - RNA, 19 nt, Artificial Sequence
  Description of Artificial Sequence: Synthetic oligonucleotide
cuaccuccagagcccgaau

SEQ ID NO: 392942 - RNA, 19 nt, Artificial Sequence
  Description of Artificial Sequence: Synthetic oligonucleotide
ccaucucuuggcucccugu

SEQ ID NO: 392943 - RNA, 19 nt, Artificial Sequence
  Description of Artificial Sequence: Synthetic oligonucleotide
cuuccacaaguugcuucau

SEQ ID NO: 392944 - RNA, 19 nt, Artificial Sequence
  Description of Artificial Sequence: Synthetic oligonucleotide
cccgcaaagcugcguuaga

SEQ ID NO: 392945 - RNA, 19 nt, Artificial Sequence
  Description of Artificial Sequence: Synthetic oligonucleotide
cucuugcaggcggcggcua

SEQ ID NO: 392946 - RNA, 19 nt, Artificial Sequence
  Description of Artificial Sequence: Synthetic oligonucleotide
guguacucucuagcucuuu

SEQ ID NO: 392947 - RNA, 19 nt, Artificial Sequence
  Description of Artificial Sequence: Synthetic oligonucleotide
cacggcggagauccagcuu

SEQ ID NO: 392948 - RNA, 19 nt, Artificial Sequence
  Description of Artificial Sequence: Synthetic oligonucleotide
gagcuaccaucugcucuuu

SEQ ID NO: 392949 - RNA, 19 nt, Artificial Sequence
  Description of Artificial Sequence: Synthetic oligonucleotide
cggcauucucauaagccuu

SEQ ID NO: 392950 - RNA, 19 nt, Artificial Sequence
  Description of Artificial Sequence: Synthetic oligonucleotide
ccacggcggagauccagcu

SEQ ID NO: 392951 - RNA, 19 nt, Artificial Sequence
  Description of Artificial Sequence: Synthetic oligonucleotide
cccgcuuggcuagugcagu

SEQ ID NO: 392952 - RNA, 19 nt, Artificial Sequence
  Description of Artificial Sequence: Synthetic oligonucleotide
ccuuaaaguggcggcgguu

SEQ ID NO: 392953 - RNA, 19 nt, Artificial Sequence
  Description of Artificial Sequence: Synthetic oligonucleotide
cggcggagauccagcuuga

SEQ ID NO: 392954 - RNA, 19 nt, Artificial Sequence
  Description of Artificial Sequence: Synthetic oligonucleotide
guccgaggccggugagcuu

SEQ ID NO: 392955 - RNA, 19 nt, Artificial Sequence
  Description of Artificial Sequence: Synthetic oligonucleotide
cugugggcugcuggcucau

SEQ ID NO: 392956 - RNA, 19 nt, Artificial Sequence
  Description of Artificial Sequence: Synthetic oligonucleotide
cggcgguuguguccagcuu

SEQ ID NO: 392957 - RNA, 19 nt, Artificial Sequence
  Description of Artificial Sequence: Synthetic oligonucleotide
aauuauaccauuuuauaac

SEQ ID NO: 392958 - RNA, 19 nt, Artificial Sequence
  Description of Artificial Sequence: Synthetic oligonucleotide
auuauaccauuuuauaacc

SEQ ID NO: 392959 - RNA, 19 nt, Artificial Sequence
  Description of Artificial Sequence: Synthetic oligonucleotide
ugauuaaugaguaagugcu

SEQ ID NO: 392960 - RNA, 19 nt, Artificial Sequence
  Description of Artificial Sequence: Synthetic oligonucleotide
acuaauguucucuagcuac

SEQ ID NO: 392961 - RNA, 19 nt, Artificial Sequence
  Description of Artificial Sequence: Synthetic oligonucleotide
aguccuaaggcccagcucc

SEQ ID NO: 392962 - RNA, 19 nt, Artificial Sequence
  Description of Artificial Sequence: Synthetic oligonucleotide
gagacuaucacaauuauac

SEQ ID NO: 392963 - RNA, 19 nt, Artificial Sequence
  Description of Artificial Sequence: Synthetic oligonucleotide
aauuauucuggccuuaaga

SEQ ID NO: 392964 - RNA, 19 nt, Artificial Sequence
  Description of Artificial Sequence: Synthetic oligonucleotide
uaaggaaagguuuacuucc

SEQ ID NO: 392965 - RNA, 19 nt, Artificial Sequence
  Description of Artificial Sequence: Synthetic oligonucleotide
cacgauuucauccugaaag

SEQ ID NO: 392966 - RNA, 19 nt, Artificial Sequence
  Description of Artificial Sequence: Synthetic oligonucleotide
aucagucugacuucuaggc

SEQ ID NO: 392967 - RNA, 19 nt, Artificial Sequence
  Description of Artificial Sequence: Synthetic oligonucleotide
agauccaagaggaaaaugc

SEQ ID NO: 392968 - RNA, 19 nt, Artificial Sequence
  Description of Artificial Sequence: Synthetic oligonucleotide
ucuagaauagcuuauguuu

SEQ ID NO: 392969 - RNA, 19 nt, Artificial Sequence
  Description of Artificial Sequence: Synthetic oligonucleotide
auuagcuguacuuugucuc

SEQ ID NO: 392970 - RNA, 19 nt, Artificial Sequence
  Description of Artificial Sequence: Synthetic oligonucleotide
ugacuucuaggcuagaucc

SEQ ID NO: 392971 - RNA, 19 nt, Artificial Sequence
  Description of Artificial Sequence: Synthetic oligonucleotide
uaggcuagauccaagagga

SEQ ID NO: 392972 - RNA, 19 nt, Artificial Sequence
  Description of Artificial Sequence: Synthetic oligonucleotide
uuacgcauguuacagcagg

SEQ ID NO: 392973 - RNA, 19 nt, Artificial Sequence
  Description of Artificial Sequence: Synthetic oligonucleotide
ucuaacuagcuccuugggg

SEQ ID NO: 392974 - RNA, 19 nt, Artificial Sequence
  Description of Artificial Sequence: Synthetic oligonucleotide
ucuuacuaccuguagcugg

SEQ ID NO: 392975 - RNA, 19 nt, Artificial Sequence
  Description of Artificial Sequence: Synthetic oligonucleotide
acacaaacaaagcugguag

SEQ ID NO: 392976 - RNA, 19 nt, Artificial Sequence
  Description of Artificial Sequence: Synthetic oligonucleotide
uguacuuugucucuaacua

SEQ ID NO: 392977 - RNA, 19 nt, Artificial Sequence
  Description of Artificial Sequence: Synthetic oligonucleotide
aaggcuacuaaguaucuga

SEQ ID NO: 392978 - RNA, 19 nt, Artificial Sequence
  Description of Artificial Sequence: Synthetic oligonucleotide
uuuuacgcauguuacagca

SEQ ID NO: 392979 - RNA, 19 nt, Artificial Sequence
  Description of Artificial Sequence: Synthetic oligonucleotide
uuagcuugaaauuugcguc

SEQ ID NO: 392980 - RNA, 19 nt, Artificial Sequence
  Description of Artificial Sequence: Synthetic oligonucleotide
uuuauaaccuaaggaaagg

SEQ ID NO: 392981 - RNA, 19 nt, Artificial Sequence
  Description of Artificial Sequence: Synthetic oligonucleotide
gaugcgauggaaaucauug

SEQ ID NO: 392982 - RNA, 19 nt, Artificial Sequence
  Description of Artificial Sequence: Synthetic oligonucleotide
cucaguacuagacugagac

SEQ ID NO: 392983 - RNA, 19 nt, Artificial Sequence
  Description of Artificial Sequence: Synthetic oligonucleotide
gaucagccaauguagaugc

SEQ ID NO: 392984 - RNA, 19 nt, Artificial Sequence
  Description of Artificial Sequence: Synthetic oligonucleotide
aagucgcuuagauagaagu

SEQ ID NO: 392985 - RNA, 19 nt, Artificial Sequence
  Description of Artificial Sequence: Synthetic oligonucleotide
auagcgagucuucacacac

SEQ ID NO: 392986 - RNA, 19 nt, Artificial Sequence
  Description of Artificial Sequence: Synthetic oligonucleotide
gacuaucacaauuauacca

SEQ ID NO: 392987 - RNA, 19 nt, Artificial Sequence
  Description of Artificial Sequence: Synthetic oligonucleotide
uagaaguaagaaauggacu

SEQ ID NO: 392988 - RNA, 19 nt, Artificial Sequence
  Description of Artificial Sequence: Synthetic oligonucleotide
acuagacugagacugcagg

SEQ ID NO: 392989 - RNA, 19 nt, Artificial Sequence
  Description of Artificial Sequence: Synthetic oligonucleotide
auguagacuaaccucaucu

SEQ ID NO: 392990 - RNA, 19 nt, Artificial Sequence
  Description of Artificial Sequence: Synthetic oligonucleotide
agacuaucacaauuauacc

SEQ ID NO: 392991 - RNA, 19 nt, Artificial Sequence
  Description of Artificial Sequence: Synthetic oligonucleotide
ugcgauggaaaucauuggc

SEQ ID NO: 392992 - RNA, 19 nt, Artificial Sequence
  Description of Artificial Sequence: Synthetic oligonucleotide
guagacuaaccucaucucg

SEQ ID NO: 392993 - RNA, 19 nt, Artificial Sequence
  Description of Artificial Sequence: Synthetic oligonucleotide
aaauggacugaauuauccu

SEQ ID NO: 392994 - RNA, 19 nt, Artificial Sequence
  Description of Artificial Sequence: Synthetic oligonucleotide
uucuuauguagacuaaccu

SEQ ID NO: 392995 - RNA, 19 nt, Artificial Sequence
  Description of Artificial Sequence: Synthetic oligonucleotide
uuacuaauguucucuagcu

SEQ ID NO: 392996 - RNA, 19 nt, Artificial Sequence
  Description of Artificial Sequence: Synthetic oligonucleotide
cuagaauagcuuauguuug

SEQ ID NO: 392997 - RNA, 19 nt, Artificial Sequence
  Description of Artificial Sequence: Synthetic oligonucleotide
caaacggauguuuugcucc

SEQ ID NO: 392998 - RNA, 19 nt, Artificial Sequence
  Description of Artificial Sequence: Synthetic oligonucleotide
aucgauacauaucuagcag

SEQ ID NO: 392999 - RNA, 19 nt, Artificial Sequence
  Description of Artificial Sequence: Synthetic oligonucleotide
ucuuguucaggucggacug

SEQ ID NO: 393000 - RNA, 19 nt, Artificial Sequence
  Description of Artificial Sequence: Synthetic oligonucleotide
uucuuaaaaguucucuccu

SEQ ID NO: 393001 - RNA, 19 nt, Artificial Sequence
  Description of Artificial Sequence: Synthetic oligonucleotide
cuuacgcuuauucaucucc

SEQ ID NO: 393002 - RNA, 19 nt, Artificial Sequence
  Description of Artificial Sequence: Synthetic oligonucleotide
agguuuacuucccaaauca

SEQ ID NO: 393003 - RNA, 19 nt, Artificial Sequence
  Description of Artificial Sequence: Synthetic oligonucleotide
uucucagcuucuuauguag

SEQ ID NO: 393004 - RNA, 19 nt, Artificial Sequence
  Description of Artificial Sequence: Synthetic oligonucleotide
auacauaucuagcagcagu

SEQ ID NO: 393005 - RNA, 19 nt, Artificial Sequence
  Description of Artificial Sequence: Synthetic oligonucleotide
uaucagucugacuucuagg

SEQ ID NO: 393006 - RNA, 19 nt, Artificial Sequence
  Description of Artificial Sequence: Synthetic oligonucleotide
aaauuauucuggccuuaag

SEQ ID NO: 393007 - RNA, 19 nt, Artificial Sequence
  Description of Artificial Sequence: Synthetic oligonucleotide
uggauagauccucagaauc

SEQ ID NO: 393008 - RNA, 19 nt, Artificial Sequence
  Description of Artificial Sequence: Synthetic oligonucleotide
uuuuacuaauguucucuag

SEQ ID NO: 393009 - RNA, 19 nt, Artificial Sequence
  Description of Artificial Sequence: Synthetic oligonucleotide
uggggaacaaaggaguugg

SEQ ID NO: 393010 - RNA, 19 nt, Artificial Sequence
  Description of Artificial Sequence: Synthetic oligonucleotide
uagauagaaguaagaaaug

SEQ ID NO: 393011 - RNA, 19 nt, Artificial Sequence
  Description of Artificial Sequence: Synthetic oligonucleotide
agaucgauacauaucuagc

SEQ ID NO: 393012 - RNA, 19 nt, Artificial Sequence
  Description of Artificial Sequence: Synthetic oligonucleotide
gaucgauacauaucuagca

SEQ ID NO: 393013 - RNA, 19 nt, Artificial Sequence
  Description of Artificial Sequence: Synthetic oligonucleotide
ucuagcuacaggagagggg

SEQ ID NO: 393014 - RNA, 19 nt, Artificial Sequence
  Description of Artificial Sequence: Synthetic oligonucleotide
cagaucgauacauaucuag

SEQ ID NO: 393015 - RNA, 19 nt, Artificial Sequence
  Description of Artificial Sequence: Synthetic oligonucleotide
ucuaggcuagauccaagag

SEQ ID NO: 393016 - RNA, 19 nt, Artificial Sequence
  Description of Artificial Sequence: Synthetic oligonucleotide
cuaaggaaagguuuacuuc

SEQ ID NO: 393017 - RNA, 19 nt, Artificial Sequence
  Description of Artificial Sequence: Synthetic oligonucleotide
uuccguuuauaccucagga

SEQ ID NO: 393018 - RNA, 19 nt, Artificial Sequence
  Description of Artificial Sequence: Synthetic oligonucleotide
ugaaauuugcgucauccuu

SEQ ID NO: 393019 - RNA, 19 nt, Artificial Sequence
  Description of Artificial Sequence: Synthetic oligonucleotide
uguucucuagcuacaggag

SEQ ID NO: 393020 - RNA, 19 nt, Artificial Sequence
  Description of Artificial Sequence: Synthetic oligonucleotide
auuaaugaguaagugcuug

SEQ ID NO: 393021 - RNA, 19 nt, Artificial Sequence
  Description of Artificial Sequence: Synthetic oligonucleotide
aggccugaguccuaaggcc

SEQ ID NO: 393022 - RNA, 19 nt, Artificial Sequence
  Description of Artificial Sequence: Synthetic oligonucleotide
uacaggagagacuaucaca

SEQ ID NO: 393023 - RNA, 19 nt, Artificial Sequence
  Description of Artificial Sequence: Synthetic oligonucleotide
ucaucucgcucaaugagcu

SEQ ID NO: 393024 - RNA, 19 nt, Artificial Sequence
  Description of Artificial Sequence: Synthetic oligonucleotide
agcauuacacuugggacac

SEQ ID NO: 393025 - RNA, 19 nt, Artificial Sequence
  Description of Artificial Sequence: Synthetic oligonucleotide
auccaagugccccuaaaag

SEQ ID NO: 393026 - RNA, 19 nt, Artificial Sequence
  Description of Artificial Sequence: Synthetic oligonucleotide
cuuagauagaaguaagaaa

SEQ ID NO: 393027 - RNA, 19 nt, Artificial Sequence
  Description of Artificial Sequence: Synthetic oligonucleotide
gauagaaguaagaaaugga

SEQ ID NO: 393028 - RNA, 19 nt, Artificial Sequence
  Description of Artificial Sequence: Synthetic oligonucleotide
aauccaagugccccuaaaa

SEQ ID NO: 393029 - RNA, 19 nt, Artificial Sequence
  Description of Artificial Sequence: Synthetic oligonucleotide
ucgcuuagauagaaguaag

SEQ ID NO: 393030 - RNA, 19 nt, Artificial Sequence
  Description of Artificial Sequence: Synthetic oligonucleotide
auugccuuacgcuuauuca

SEQ ID NO: 393031 - RNA, 19 nt, Artificial Sequence
  Description of Artificial Sequence: Synthetic oligonucleotide
cuuauucaucuccaaggcc

SEQ ID NO: 393032 - RNA, 19 nt, Artificial Sequence
  Description of Artificial Sequence: Synthetic oligonucleotide
uauccuuagcagaaucucu

SEQ ID NO: 393033 - RNA, 19 nt, Artificial Sequence
  Description of Artificial Sequence: Synthetic oligonucleotide
uggauacaauuucauuaag

SEQ ID NO: 393034 - RNA, 19 nt, Artificial Sequence
  Description of Artificial Sequence: Synthetic oligonucleotide
cuguagguauucaaucugc

SEQ ID NO: 393035 - RNA, 19 nt, Artificial Sequence
  Description of Artificial Sequence: Synthetic oligonucleotide
uuauucuggccuuaagaaa

SEQ ID NO: 393036 - RNA, 19 nt, Artificial Sequence
  Description of Artificial Sequence: Synthetic oligonucleotide
gcucguuugaaauugaaca

SEQ ID NO: 393037 - RNA, 19 nt, Artificial Sequence
  Description of Artificial Sequence: Synthetic oligonucleotide
uggugauuaaugaguaagu

SEQ ID NO: 393038 - RNA, 19 nt, Artificial Sequence
  Description of Artificial Sequence: Synthetic oligonucleotide
agcgagucuucacacacuc

SEQ ID NO: 393039 - RNA, 19 nt, Artificial Sequence
  Description of Artificial Sequence: Synthetic oligonucleotide
aguucauucuaaaacucag

SEQ ID NO: 393040 - RNA, 19 nt, Artificial Sequence
  Description of Artificial Sequence: Synthetic oligonucleotide
ugccaugaagcagaguccg

SEQ ID NO: 393041 - RNA, 19 nt, Artificial Sequence
  Description of Artificial Sequence: Synthetic oligonucleotide
ugaagaaugaguggauaga

SEQ ID NO: 393042 - RNA, 19 nt, Artificial Sequence
  Description of Artificial Sequence: Synthetic oligonucleotide
cucaucucgcucaaugagc

SEQ ID NO: 393043 - RNA, 19 nt, Artificial Sequence
  Description of Artificial Sequence: Synthetic oligonucleotide
uuacaggagagacuaucac

SEQ ID NO: 393044 - RNA, 19 nt, Artificial Sequence
  Description of Artificial Sequence: Synthetic oligonucleotide
uauaccucaggaccucccc

SEQ ID NO: 393045 - RNA, 19 nt, Artificial Sequence
  Description of Artificial Sequence: Synthetic oligonucleotide
uguauuccccucucaaugu

SEQ ID NO: 393046 - RNA, 19 nt, Artificial Sequence
  Description of Artificial Sequence: Synthetic oligonucleotide
uacgcauguuacagcaggg

SEQ ID NO: 393047 - RNA, 19 nt, Artificial Sequence
  Description of Artificial Sequence: Synthetic oligonucleotide
acggauguuuugcuccugc

SEQ ID NO: 393048 - RNA, 19 nt, Artificial Sequence
  Description of Artificial Sequence: Synthetic oligonucleotide
ugaaauugaacaaguccuu

SEQ ID NO: 393049 - RNA, 19 nt, Artificial Sequence
  Description of Artificial Sequence: Synthetic oligonucleotide
ugugccaauguuacucuga

SEQ ID NO: 393050 - RNA, 19 nt, Artificial Sequence
  Description of Artificial Sequence: Synthetic oligonucleotide
cagaguccgagccucaucc

SEQ ID NO: 393051 - RNA, 19 nt, Artificial Sequence
  Description of Artificial Sequence: Synthetic oligonucleotide
ucuauccucagcauuucau

SEQ ID NO: 393052 - RNA, 19 nt, Artificial Sequence
  Description of Artificial Sequence: Synthetic oligonucleotide
uuacgcuuauucaucucca

SEQ ID NO: 393053 - RNA, 19 nt, Artificial Sequence
  Description of Artificial Sequence: Synthetic oligonucleotide
auggacugaauuauccugg

SEQ ID NO: 393054 - RNA, 19 nt, Artificial Sequence
  Description of Artificial Sequence: Synthetic oligonucleotide
uuuacgcauguuacagcag

SEQ ID NO: 393055 - RNA, 19 nt, Artificial Sequence
  Description of Artificial Sequence: Synthetic oligonucleotide
uccguuuauaccucaggac

SEQ ID NO: 393056 - RNA, 19 nt, Artificial Sequence
  Description of Artificial Sequence: Synthetic oligonucleotide
uaaccuaaggaaagguuua

SEQ ID NO: 393057 - RNA, 19 nt, Artificial Sequence
  Description of Artificial Sequence: Synthetic oligonucleotide
uaaaagucgcuuagauaga

SEQ ID NO: 393058 - RNA, 19 nt, Artificial Sequence
  Description of Artificial Sequence: Synthetic oligonucleotide
ugaugaguuccccgggugc

SEQ ID NO: 393059 - RNA, 19 nt, Artificial Sequence
  Description of Artificial Sequence: Synthetic oligonucleotide
aacucaggacuugaggucu

SEQ ID NO: 393060 - RNA, 19 nt, Artificial Sequence
  Description of Artificial Sequence: Synthetic oligonucleotide
uggcgagugucauagcgag

SEQ ID NO: 393061 - RNA, 19 nt, Artificial Sequence
  Description of Artificial Sequence: Synthetic oligonucleotide
cauaucuagcagcaguuuc

SEQ ID NO: 393062 - RNA, 19 nt, Artificial Sequence
  Description of Artificial Sequence: Synthetic oligonucleotide
aaacggauguuuugcuccu

SEQ ID NO: 393063 - RNA, 19 nt, Artificial Sequence
  Description of Artificial Sequence: Synthetic oligonucleotide
uguagacuaaccucaucuc

SEQ ID NO: 393064 - RNA, 19 nt, Artificial Sequence
  Description of Artificial Sequence: Synthetic oligonucleotide
ucgcucaaugagcucaacc

SEQ ID NO: 393065 - RNA, 19 nt, Artificial Sequence
  Description of Artificial Sequence: Synthetic oligonucleotide
uuauccuuagcagaaucuc

SEQ ID NO: 393066 - RNA, 19 nt, Artificial Sequence
  Description of Artificial Sequence: Synthetic oligonucleotide
acgauuucauccugaaagu

SEQ ID NO: 393067 - RNA, 19 nt, Artificial Sequence
  Description of Artificial Sequence: Synthetic oligonucleotide
guucaggucggacugugcc

SEQ ID NO: 393068 - RNA, 19 nt, Artificial Sequence
  Description of Artificial Sequence: Synthetic oligonucleotide
acuaucacaauuauaccau

SEQ ID NO: 393069 - RNA, 19 nt, Artificial Sequence
  Description of Artificial Sequence: Synthetic oligonucleotide
ucauagcgagucuucacac

SEQ ID NO: 393070 - RNA, 19 nt, Artificial Sequence
  Description of Artificial Sequence: Synthetic oligonucleotide
aaaagucgcuuagauagaa

SEQ ID NO: 393071 - RNA, 19 nt, Artificial Sequence
  Description of Artificial Sequence: Synthetic oligonucleotide
aguacuagacugagacugc

SEQ ID NO: 393072 - RNA, 19 nt, Artificial Sequence
  Description of Artificial Sequence: Synthetic oligonucleotide
uugccuuacgcuuauucau

SEQ ID NO: 393073 - RNA, 19 nt, Artificial Sequence
  Description of Artificial Sequence: Synthetic oligonucleotide
ugaguggauagauccucag

SEQ ID NO: 393074 - RNA, 19 nt, Artificial Sequence
  Description of Artificial Sequence: Synthetic oligonucleotide
auaaccuaaggaaagguuu

SEQ ID NO: 393075 - RNA, 19 nt, Artificial Sequence
  Description of Artificial Sequence: Synthetic oligonucleotide
uacuagacugagacugcag

SEQ ID NO: 393076 - RNA, 19 nt, Artificial Sequence
  Description of Artificial Sequence: Synthetic oligonucleotide
uaauguucucuagcuacag

SEQ ID NO: 393077 - RNA, 19 nt, Artificial Sequence
  Description of Artificial Sequence: Synthetic oligonucleotide
agaaguuugggcccacaga

SEQ ID NO: 393078 - RNA, 19 nt, Artificial Sequence
  Description of Artificial Sequence: Synthetic oligonucleotide
ccguuuauaccucaggacc

SEQ ID NO: 393079 - RNA, 19 nt, Artificial Sequence
  Description of Artificial Sequence: Synthetic oligonucleotide
agacgagucuuguucaggu

SEQ ID NO: 393080 - RNA, 19 nt, Artificial Sequence
  Description of Artificial Sequence: Synthetic oligonucleotide
auuggcaccaaaagcagca

SEQ ID NO: 393081 - RNA, 19 nt, Artificial Sequence
  Description of Artificial Sequence: Synthetic oligonucleotide
aaaggcuacuaaguaucug

SEQ ID NO: 393082 - RNA, 19 nt, Artificial Sequence
  Description of Artificial Sequence: Synthetic oligonucleotide
gguuuaugggaccugcuug

SEQ ID NO: 393083 - RNA, 19 nt, Artificial Sequence
  Description of Artificial Sequence: Synthetic oligonucleotide
uugucucuaacuagcuccu

SEQ ID NO: 393084 - RNA, 19 nt, Artificial Sequence
  Description of Artificial Sequence: Synthetic oligonucleotide
auccuuagcagaaucucuc

SEQ ID NO: 393085 - RNA, 19 nt, Artificial Sequence
  Description of Artificial Sequence: Synthetic oligonucleotide
gauuggacuugauucgcuc

SEQ ID NO: 393086 - RNA, 19 nt, Artificial Sequence
  Description of Artificial Sequence: Synthetic oligonucleotide
ucccguuuggacuuaacuu

SEQ ID NO: 393087 - RNA, 19 nt, Artificial Sequence
  Description of Artificial Sequence: Synthetic oligonucleotide
aacuaucagucugacuucu

SEQ ID NO: 393088 - RNA, 19 nt, Artificial Sequence
  Description of Artificial Sequence: Synthetic oligonucleotide
gauacauaucuagcagcag

SEQ ID NO: 393089 - RNA, 19 nt, Artificial Sequence
  Description of Artificial Sequence: Synthetic oligonucleotide
cuuauggaucugauuggac

SEQ ID NO: 393090 - RNA, 19 nt, Artificial Sequence
  Description of Artificial Sequence: Synthetic oligonucleotide
cuggauacaauuucauuaa

SEQ ID NO: 393091 - RNA, 19 nt, Artificial Sequence
  Description of Artificial Sequence: Synthetic oligonucleotide
gcuuauucaucuccaaggc

SEQ ID NO: 393092 - RNA, 19 nt, Artificial Sequence
  Description of Artificial Sequence: Synthetic oligonucleotide
acugcacggaucuuccuca

SEQ ID NO: 393093 - RNA, 19 nt, Artificial Sequence
  Description of Artificial Sequence: Synthetic oligonucleotide
ccuucgaugcugaagaaug

SEQ ID NO: 393094 - RNA, 19 nt, Artificial Sequence
  Description of Artificial Sequence: Synthetic oligonucleotide
ucaaaucuuacaggagaga

SEQ ID NO: 393095 - RNA, 19 nt, Artificial Sequence
  Description of Artificial Sequence: Synthetic oligonucleotide
aucccguuuggacuuaacu

SEQ ID NO: 393096 - RNA, 19 nt, Artificial Sequence
  Description of Artificial Sequence: Synthetic oligonucleotide
aaagucgcuuagauagaag

SEQ ID NO: 393097 - RNA, 19 nt, Artificial Sequence
  Description of Artificial Sequence: Synthetic oligonucleotide
acuuguaguucauucuaaa

SEQ ID NO: 393098 - RNA, 19 nt, Artificial Sequence
  Description of Artificial Sequence: Synthetic oligonucleotide
ggcuucaaaucuuacagga

SEQ ID NO: 393099 - RNA, 19 nt, Artificial Sequence
  Description of Artificial Sequence: Synthetic oligonucleotide
cuagcuacaggagagggga

SEQ ID NO: 393100 - RNA, 19 nt, Artificial Sequence
  Description of Artificial Sequence: Synthetic oligonucleotide
uacacaaacaaagcuggua

SEQ ID NO: 393101 - RNA, 19 nt, Artificial Sequence
  Description of Artificial Sequence: Synthetic oligonucleotide
ugauuggacuugauucgcu

SEQ ID NO: 393102 - RNA, 19 nt, Artificial Sequence
  Description of Artificial Sequence: Synthetic oligonucleotide
uacugcacggaucuuccuc

SEQ ID NO: 393103 - RNA, 19 nt, Artificial Sequence
  Description of Artificial Sequence: Synthetic oligonucleotide
ucaaaacuaucagucugac

SEQ ID NO: 393104 - RNA, 19 nt, Artificial Sequence
  Description of Artificial Sequence: Synthetic oligonucleotide
aggccuggugauuaaugag

SEQ ID NO: 393105 - RNA, 19 nt, Artificial Sequence
  Description of Artificial Sequence: Synthetic oligonucleotide
cugacuucuaggcuagauc

SEQ ID NO: 393106 - RNA, 19 nt, Artificial Sequence
  Description of Artificial Sequence: Synthetic oligonucleotide
uacuaauguucucuagcua

SEQ ID NO: 393107 - RNA, 19 nt, Artificial Sequence
  Description of Artificial Sequence: Synthetic oligonucleotide
uccucaguacuagacugag

SEQ ID NO: 393108 - RNA, 19 nt, Artificial Sequence
  Description of Artificial Sequence: Synthetic oligonucleotide
guagguauucaaucugcuc

SEQ ID NO: 393109 - RNA, 19 nt, Artificial Sequence
  Description of Artificial Sequence: Synthetic oligonucleotide
ugccuuacgcuuauucauc

SEQ ID NO: 393110 - RNA, 19 nt, Artificial Sequence
  Description of Artificial Sequence: Synthetic oligonucleotide
cacggaucuuccucaaggc

SEQ ID NO: 393111 - RNA, 19 nt, Artificial Sequence
  Description of Artificial Sequence: Synthetic oligonucleotide
gaggccuggugauuaauga

SEQ ID NO: 393112 - RNA, 19 nt, Artificial Sequence
  Description of Artificial Sequence: Synthetic oligonucleotide
cagcauuacacuugggaca

SEQ ID NO: 393113 - RNA, 19 nt, Artificial Sequence
  Description of Artificial Sequence: Synthetic oligonucleotide
cucguuugaaauugaacaa

SEQ ID NO: 393114 - RNA, 19 nt, Artificial Sequence
  Description of Artificial Sequence: Synthetic oligonucleotide
agacuaaccucaucucgcu

SEQ ID NO: 393115 - RNA, 19 nt, Artificial Sequence
  Description of Artificial Sequence: Synthetic oligonucleotide
cucuagcuacaggagaggg

SEQ ID NO: 393116 - RNA, 19 nt, Artificial Sequence
  Description of Artificial Sequence: Synthetic oligonucleotide
gaugaguuccccgggugcc

SEQ ID NO: 393117 - RNA, 19 nt, Artificial Sequence
  Description of Artificial Sequence: Synthetic oligonucleotide
acuaccuguagcugggcau

SEQ ID NO: 393118 - RNA, 19 nt, Artificial Sequence
  Description of Artificial Sequence: Synthetic oligonucleotide
agacaaacaguaguaacuu

SEQ ID NO: 393119 - RNA, 19 nt, Artificial Sequence
  Description of Artificial Sequence: Synthetic oligonucleotide
ugugcucguuugaaauuga

SEQ ID NO: 393120 - RNA, 19 nt, Artificial Sequence
  Description of Artificial Sequence: Synthetic oligonucleotide
gucaaaaccugaucagcca

SEQ ID NO: 393121 - RNA, 19 nt, Artificial Sequence
  Description of Artificial Sequence: Synthetic oligonucleotide
ggcagaucgauacauaucu

SEQ ID NO: 393122 - RNA, 19 nt, Artificial Sequence
  Description of Artificial Sequence: Synthetic oligonucleotide
uucauacuccuugcggacc

SEQ ID NO: 393123 - RNA, 19 nt, Artificial Sequence
  Description of Artificial Sequence: Synthetic oligonucleotide
cuugggacacuugcgcugg

SEQ ID NO: 393124 - RNA, 19 nt, Artificial Sequence
  Description of Artificial Sequence: Synthetic oligonucleotide
uugauucgcucugacauua

SEQ ID NO: 393125 - RNA, 19 nt, Artificial Sequence
  Description of Artificial Sequence: Synthetic oligonucleotide
cugauuggacuugauucgc

SEQ ID NO: 393126 - RNA, 19 nt, Artificial Sequence
  Description of Artificial Sequence: Synthetic oligonucleotide
agauguccuccugugcucg

SEQ ID NO: 393127 - RNA, 19 nt, Artificial Sequence
  Description of Artificial Sequence: Synthetic oligonucleotide
cugugcucguuugaaauug

SEQ ID NO: 393128 - RNA, 19 nt, Artificial Sequence
  Description of Artificial Sequence: Synthetic oligonucleotide
cucaaccuggcgcugauga

SEQ ID NO: 393129 - RNA, 19 nt, Artificial Sequence
  Description of Artificial Sequence: Synthetic oligonucleotide
cuagacugagacugcagga

SEQ ID NO: 393130 - RNA, 19 nt, Artificial Sequence
  Description of Artificial Sequence: Synthetic oligonucleotide
agaauagcuuauguuugcu

SEQ ID NO: 393131 - RNA, 19 nt, Artificial Sequence
  Description of Artificial Sequence: Synthetic oligonucleotide
ggucaggcgagccuuguag

SEQ ID NO: 393132 - RNA, 19 nt, Artificial Sequence
  Description of Artificial Sequence: Synthetic oligonucleotide
guuugaaauugaacaaguc

SEQ ID NO: 393133 - RNA, 19 nt, Artificial Sequence
  Description of Artificial Sequence: Synthetic oligonucleotide
aacuuguaguucauucuaa

SEQ ID NO: 393134 - RNA, 19 nt, Artificial Sequence
  Description of Artificial Sequence: Synthetic oligonucleotide
uucaggucggacugugccu

SEQ ID NO: 393135 - RNA, 19 nt, Artificial Sequence
  Description of Artificial Sequence: Synthetic oligonucleotide
gucgcuuagauagaaguaa

SEQ ID NO: 393136 - RNA, 19 nt, Artificial Sequence
  Description of Artificial Sequence: Synthetic oligonucleotide
uucuuacuaccuguagcug

SEQ ID NO: 393137 - RNA, 19 nt, Artificial Sequence
  Description of Artificial Sequence: Synthetic oligonucleotide
uguuacucugaagcaggug

SEQ ID NO: 393138 - RNA, 19 nt, Artificial Sequence
  Description of Artificial Sequence: Synthetic oligonucleotide
gaguggauagauccucaga

SEQ ID NO: 393139 - RNA, 19 nt, Artificial Sequence
  Description of Artificial Sequence: Synthetic oligonucleotide
caaugagcucaaccuggcg

SEQ ID NO: 393140 - RNA, 19 nt, Artificial Sequence
  Description of Artificial Sequence: Synthetic oligonucleotide
acgcauguuacagcagggg

SEQ ID NO: 393141 - RNA, 19 nt, Artificial Sequence
  Description of Artificial Sequence: Synthetic oligonucleotide
gcaauacacaaacaaagcu

SEQ ID NO: 393142 - RNA, 19 nt, Artificial Sequence
  Description of Artificial Sequence: Synthetic oligonucleotide
accuguauuccccucucaa

SEQ ID NO: 393143 - RNA, 19 nt, Artificial Sequence
  Description of Artificial Sequence: Synthetic oligonucleotide
auuauccuggauacaauuu

SEQ ID NO: 393144 - RNA, 19 nt, Artificial Sequence
  Description of Artificial Sequence: Synthetic oligonucleotide
ugaaauuauucuggccuua

SEQ ID NO: 393145 - RNA, 19 nt, Artificial Sequence
  Description of Artificial Sequence: Synthetic oligonucleotide
cccguuuggacuuaacuuc

SEQ ID NO: 393146 - RNA, 19 nt, Artificial Sequence
  Description of Artificial Sequence: Synthetic oligonucleotide
gaaauuauucuggccuuaa

SEQ ID NO: 393147 - RNA, 19 nt, Artificial Sequence
  Description of Artificial Sequence: Synthetic oligonucleotide
cuuauccuuagcagaaucu

SEQ ID NO: 393148 - RNA, 19 nt, Artificial Sequence
  Description of Artificial Sequence: Synthetic oligonucleotide
uacgcuuauucaucuccaa

SEQ ID NO: 393149 - RNA, 19 nt, Artificial Sequence
  Description of Artificial Sequence: Synthetic oligonucleotide
gacuuaacuucacuggcau

SEQ ID NO: 393150 - RNA, 19 nt, Artificial Sequence
  Description of Artificial Sequence: Synthetic oligonucleotide
cuacuaaguaucugaauau

SEQ ID NO: 393151 - RNA, 19 nt, Artificial Sequence
  Description of Artificial Sequence: Synthetic oligonucleotide
aucaagaaguuugggccca

SEQ ID NO: 393152 - RNA, 19 nt, Artificial Sequence
  Description of Artificial Sequence: Synthetic oligonucleotide
guuuccguuuauaccucag

SEQ ID NO: 393153 - RNA, 19 nt, Artificial Sequence
  Description of Artificial Sequence: Synthetic oligonucleotide
gaguaagugcuugccuagc

SEQ ID NO: 393154 - RNA, 19 nt, Artificial Sequence
  Description of Artificial Sequence: Synthetic oligonucleotide
cagacgagucuuguucagg

SEQ ID NO: 393155 - RNA, 19 nt, Artificial Sequence
  Description of Artificial Sequence: Synthetic oligonucleotide
uagcuuauguuugcuccac

SEQ ID NO: 393156 - RNA, 19 nt, Artificial Sequence
  Description of Artificial Sequence: Synthetic oligonucleotide
guauuccccucucaauguc

SEQ ID NO: 393157 - RNA, 19 nt, Artificial Sequence
  Description of Artificial Sequence: Synthetic oligonucleotide
ggcgcugaugaguuccccg

SEQ ID NO: 393158 - RNA, 19 nt, Artificial Sequence
  Description of Artificial Sequence: Synthetic oligonucleotide
ccucaucucgcucaaugag

SEQ ID NO: 393159 - RNA, 19 nt, Artificial Sequence
  Description of Artificial Sequence: Synthetic oligonucleotide
cuggggaacaaaggaguug

SEQ ID NO: 393160 - RNA, 19 nt, Artificial Sequence
  Description of Artificial Sequence: Synthetic oligonucleotide
ggaccugcuuguucauugg

SEQ ID NO: 393161 - RNA, 19 nt, Artificial Sequence
  Description of Artificial Sequence: Synthetic oligonucleotide
gacuaaccucaucucgcuc

SEQ ID NO: 393162 - RNA, 19 nt, Artificial Sequence
  Description of Artificial Sequence: Synthetic oligonucleotide
ucucgcucaaugagcucaa

SEQ ID NO: 393163 - RNA, 19 nt, Artificial Sequence
  Description of Artificial Sequence: Synthetic oligonucleotide
gucuuguucaggucggacu

SEQ ID NO: 393164 - RNA, 19 nt, Artificial Sequence
  Description of Artificial Sequence: Synthetic oligonucleotide
agccuagagauguccuccu

SEQ ID NO: 393165 - RNA, 19 nt, Artificial Sequence
  Description of Artificial Sequence: Synthetic oligonucleotide
caucucccgguuuauggga

SEQ ID NO: 393166 - RNA, 19 nt, Artificial Sequence
  Description of Artificial Sequence: Synthetic oligonucleotide
uucgaagccuagagauguc

SEQ ID NO: 393167 - RNA, 19 nt, Artificial Sequence
  Description of Artificial Sequence: Synthetic oligonucleotide
gugccaugaagcagagucc

SEQ ID NO: 393168 - RNA, 19 nt, Artificial Sequence
  Description of Artificial Sequence: Synthetic oligonucleotide
ggaaagguuuacuucccaa

SEQ ID NO: 393169 - RNA, 19 nt, Artificial Sequence
  Description of Artificial Sequence: Synthetic oligonucleotide
cuggcgagugucauagcga

SEQ ID NO: 393170 - RNA, 19 nt, Artificial Sequence
  Description of Artificial Sequence: Synthetic oligonucleotide
caccaaaagcagcauuaca

SEQ ID NO: 393171 - RNA, 19 nt, Artificial Sequence
  Description of Artificial Sequence: Synthetic oligonucleotide
gagagacuaucacaauuau

SEQ ID NO: 393172 - RNA, 19 nt, Artificial Sequence
  Description of Artificial Sequence: Synthetic oligonucleotide
aacggauguuuugcuccug

SEQ ID NO: 393173 - RNA, 19 nt, Artificial Sequence
  Description of Artificial Sequence: Synthetic oligonucleotide
agagacuaucacaauuaua

SEQ ID NO: 393174 - RNA, 19 nt, Artificial Sequence
  Description of Artificial Sequence: Synthetic oligonucleotide
gacuucuaggcuagaucca

SEQ ID NO: 393175 - RNA, 19 nt, Artificial Sequence
  Description of Artificial Sequence: Synthetic oligonucleotide
gcgagugucauagcgaguc

SEQ ID NO: 393176 - RNA, 19 nt, Artificial Sequence
  Description of Artificial Sequence: Synthetic oligonucleotide
ccaauguuacucugaagca

SEQ ID NO: 393177 - RNA, 19 nt, Artificial Sequence
  Description of Artificial Sequence: Synthetic oligonucleotide
ggacacuugcgcuggcgag

SEQ ID NO: 393178 - RNA, 19 nt, Artificial Sequence
  Description of Artificial Sequence: Synthetic oligonucleotide
gauagauccucagaaucuu

SEQ ID NO: 393179 - RNA, 19 nt, Artificial Sequence
  Description of Artificial Sequence: Synthetic oligonucleotide
cuccucuacugcacggauc

SEQ ID NO: 393180 - RNA, 19 nt, Artificial Sequence
  Description of Artificial Sequence: Synthetic oligonucleotide
uuacuaccuguagcugggc

SEQ ID NO: 393181 - RNA, 19 nt, Artificial Sequence
  Description of Artificial Sequence: Synthetic oligonucleotide
agucgcuuagauagaagua

SEQ ID NO: 393182 - RNA, 19 nt, Artificial Sequence
  Description of Artificial Sequence: Synthetic oligonucleotide
agaguccgagccucaucca

SEQ ID NO: 393183 - RNA, 19 nt, Artificial Sequence
  Description of Artificial Sequence: Synthetic oligonucleotide
aaccuggcgcugaugaguu

SEQ ID NO: 393184 - RNA, 19 nt, Artificial Sequence
  Description of Artificial Sequence: Synthetic oligonucleotide
guacuagacugagacugca

SEQ ID NO: 393185 - RNA, 19 nt, Artificial Sequence
  Description of Artificial Sequence: Synthetic oligonucleotide
agcaacuuauggaucugau

SEQ ID NO: 393186 - RNA, 19 nt, Artificial Sequence
  Description of Artificial Sequence: Synthetic oligonucleotide
gcgcagacgagucuuguuc

SEQ ID NO: 393187 - RNA, 19 nt, Artificial Sequence
  Description of Artificial Sequence: Synthetic oligonucleotide
uuuaugggaccugcuuguu

SEQ ID NO: 393188 - RNA, 19 nt, Artificial Sequence
  Description of Artificial Sequence: Synthetic oligonucleotide
cgcauguuacagcaggggc

SEQ ID NO: 393189 - RNA, 19 nt, Artificial Sequence
  Description of Artificial Sequence: Synthetic oligonucleotide
ggguucauccuuggggucc

SEQ ID NO: 393190 - RNA, 19 nt, Artificial Sequence
  Description of Artificial Sequence: Synthetic oligonucleotide
cgauacauaucuagcagca

SEQ ID NO: 393191 - RNA, 19 nt, Artificial Sequence
  Description of Artificial Sequence: Synthetic oligonucleotide
gcagacgagucuuguucag

SEQ ID NO: 393192 - RNA, 19 nt, Artificial Sequence
  Description of Artificial Sequence: Synthetic oligonucleotide
ugccuagccagcuccucuu

SEQ ID NO: 393193 - RNA, 19 nt, Artificial Sequence
  Description of Artificial Sequence: Synthetic oligonucleotide
ggauagauccucagaaucu

SEQ ID NO: 393194 - RNA, 19 nt, Artificial Sequence
  Description of Artificial Sequence: Synthetic oligonucleotide
ucaagaaguuugggcccac

SEQ ID NO: 393195 - RNA, 19 nt, Artificial Sequence
  Description of Artificial Sequence: Synthetic oligonucleotide
ccuggcgcugaugaguucc

SEQ ID NO: 393196 - RNA, 19 nt, Artificial Sequence
  Description of Artificial Sequence: Synthetic oligonucleotide
aguuccccgggugccauga

SEQ ID NO: 393197 - RNA, 19 nt, Artificial Sequence
  Description of Artificial Sequence: Synthetic oligonucleotide
ccuucgaagccuagagaug

SEQ ID NO: 393198 - RNA, 19 nt, Artificial Sequence
  Description of Artificial Sequence: Synthetic oligonucleotide
gaauuauccuggauacaau

SEQ ID NO: 393199 - RNA, 19 nt, Artificial Sequence
  Description of Artificial Sequence: Synthetic oligonucleotide
ugcgcagacgagucuuguu

SEQ ID NO: 393200 - RNA, 19 nt, Artificial Sequence
  Description of Artificial Sequence: Synthetic oligonucleotide
guggauagauccucagaau

SEQ ID NO: 393201 - RNA, 19 nt, Artificial Sequence
  Description of Artificial Sequence: Synthetic oligonucleotide
caucccguuuggacuuaac

SEQ ID NO: 393202 - RNA, 19 nt, Artificial Sequence
  Description of Artificial Sequence: Synthetic oligonucleotide
gauuaaugaguaagugcuu

SEQ ID NO: 393203 - RNA, 19 nt, Artificial Sequence
  Description of Artificial Sequence: Synthetic oligonucleotide
gugaucagccaauguagau

SEQ ID NO: 393204 - RNA, 19 nt, Artificial Sequence
  Description of Artificial Sequence: Synthetic oligonucleotide
gcgcuggcgagugucauag

SEQ ID NO: 393205 - RNA, 19 nt, Artificial Sequence
  Description of Artificial Sequence: Synthetic oligonucleotide
uucuggccuuaagaaacua

SEQ ID NO: 393206 - RNA, 19 nt, Artificial Sequence
  Description of Artificial Sequence: Synthetic oligonucleotide
ugcggaccugggccaaggu

SEQ ID NO: 393207 - RNA, 19 nt, Artificial Sequence
  Description of Artificial Sequence: Synthetic oligonucleotide
ggccaacugucaaggagag

SEQ ID NO: 393208 - RNA, 19 nt, Artificial Sequence
  Description of Artificial Sequence: Synthetic oligonucleotide
guccucaguacuagacuga

SEQ ID NO: 393209 - RNA, 19 nt, Artificial Sequence
  Description of Artificial Sequence: Synthetic oligonucleotide
gucaaggagagaagaggua

SEQ ID NO: 393210 - RNA, 19 nt, Artificial Sequence
  Description of Artificial Sequence: Synthetic oligonucleotide
aguccgagccucauccaaa

SEQ ID NO: 393211 - RNA, 19 nt, Artificial Sequence
  Description of Artificial Sequence: Synthetic oligonucleotide
gguagaggccuggugauua

SEQ ID NO: 393212 - RNA, 19 nt, Artificial Sequence
  Description of Artificial Sequence: Synthetic oligonucleotide
gacacuugcgcuggcgagu

SEQ ID NO: 393213 - RNA, 19 nt, Artificial Sequence
  Description of Artificial Sequence: Synthetic oligonucleotide
acugcgcagacgagucuug

SEQ ID NO: 393214 - RNA, 19 nt, Artificial Sequence
  Description of Artificial Sequence: Synthetic oligonucleotide
gcugccauuagcuguacuu

SEQ ID NO: 393215 - RNA, 19 nt, Artificial Sequence
  Description of Artificial Sequence: Synthetic oligonucleotide
ccguuuggacuuaacuuca

SEQ ID NO: 393216 - RNA, 19 nt, Artificial Sequence
  Description of Artificial Sequence: Synthetic oligonucleotide
cucuccucuagaauagcuu

SEQ ID NO: 393217 - RNA, 19 nt, Artificial Sequence
  Description of Artificial Sequence: Synthetic oligonucleotide
gcggaccugggccaaggug

SEQ ID NO: 393218 - RNA, 19 nt, Artificial Sequence
  Description of Artificial Sequence: Synthetic oligonucleotide
ccgggugccaugaagcaga

SEQ ID NO: 393219 - RNA, 19 nt, Artificial Sequence
  Description of Artificial Sequence: Synthetic oligonucleotide
agugccccuaaaagucgcu

SEQ ID NO: 393220 - RNA, 19 nt, Artificial Sequence
  Description of Artificial Sequence: Synthetic oligonucleotide
augggaccugcuuguucau

SEQ ID NO: 393221 - RNA, 19 nt, Artificial Sequence
  Description of Artificial Sequence: Synthetic oligonucleotide
ucccgguuuaugggaccug

SEQ ID NO: 393222 - RNA, 19 nt, Artificial Sequence
  Description of Artificial Sequence: Synthetic oligonucleotide
ggggcagaucgauacauau

SEQ ID NO: 393223 - RNA, 19 nt, Artificial Sequence
  Description of Artificial Sequence: Synthetic oligonucleotide
caaccuggcgcugaugagu

SEQ ID NO: 393224 - RNA, 19 nt, Artificial Sequence
  Description of Artificial Sequence: Synthetic oligonucleotide
gagcucaaccuggcgcuga

SEQ ID NO: 393225 - RNA, 19 nt, Artificial Sequence
  Description of Artificial Sequence: Synthetic oligonucleotide
gggcagaucgauacauauc

SEQ ID NO: 393226 - RNA, 19 nt, Artificial Sequence
  Description of Artificial Sequence: Synthetic oligonucleotide
cccgguuuaugggaccugc

SEQ ID NO: 393227 - RNA, 19 nt, Artificial Sequence
  Description of Artificial Sequence: Synthetic oligonucleotide
ccuuacgcuuauucaucuc

SEQ ID NO: 393228 - RNA, 19 nt, Artificial Sequence
  Description of Artificial Sequence: Synthetic oligonucleotide
cuugcggaccugggccaag

SEQ ID NO: 393229 - RNA, 19 nt, Artificial Sequence
  Description of Artificial Sequence: Synthetic oligonucleotide
acuaucagucugacuucua

SEQ ID NO: 393230 - RNA, 19 nt, Artificial Sequence
  Description of Artificial Sequence: Synthetic oligonucleotide
caccuguauuccccucuca

SEQ ID NO: 393231 - RNA, 19 nt, Artificial Sequence
  Description of Artificial Sequence: Synthetic oligonucleotide
gccuuacgcuuauucaucu

SEQ ID NO: 393232 - RNA, 19 nt, Artificial Sequence
  Description of Artificial Sequence: Synthetic oligonucleotide
ccaacucagccuuugacuu

SEQ ID NO: 393233 - RNA, 19 nt, Artificial Sequence
  Description of Artificial Sequence: Synthetic oligonucleotide
cgcuuagauagaaguaaga

SEQ ID NO: 393234 - RNA, 19 nt, Artificial Sequence
  Description of Artificial Sequence: Synthetic oligonucleotide
gccacugcgcagacgaguc

SEQ ID NO: 393235 - RNA, 19 nt, Artificial Sequence
  Description of Artificial Sequence: Synthetic oligonucleotide
ggcuacuaaguaucugaau

SEQ ID NO: 393236 - RNA, 19 nt, Artificial Sequence
  Description of Artificial Sequence: Synthetic oligonucleotide
agguagaggccuggugauu

SEQ ID NO: 393237 - RNA, 19 nt, Artificial Sequence
  Description of Artificial Sequence: Synthetic oligonucleotide
uccuaaggcccagcuccuu

SEQ ID NO: 393238 - RNA, 19 nt, Artificial Sequence
  Description of Artificial Sequence: Synthetic oligonucleotide
gccucucucaguuuccguu

SEQ ID NO: 393239 - RNA, 19 nt, Artificial Sequence
  Description of Artificial Sequence: Synthetic oligonucleotide
ccuccauugccuuacgcuu

SEQ ID NO: 393240 - RNA, 19 nt, Artificial Sequence
  Description of Artificial Sequence: Synthetic oligonucleotide
cuacugcacggaucuuccu

SEQ ID NO: 393241 - RNA, 19 nt, Artificial Sequence
  Description of Artificial Sequence: Synthetic oligonucleotide
cccucucaaugucaaaacu

SEQ ID NO: 393242 - RNA, 19 nt, Artificial Sequence
  Description of Artificial Sequence: Synthetic oligonucleotide
cccgggugccaugaagcag

SEQ ID NO: 393243 - RNA, 19 nt, Artificial Sequence
  Description of Artificial Sequence: Synthetic oligonucleotide
ccucaguacuagacugaga

SEQ ID NO: 393244 - RNA, 19 nt, Artificial Sequence
  Description of Artificial Sequence: Synthetic oligonucleotide
gcagaucgauacauaucua

SEQ ID NO: 393245 - RNA, 19 nt, Artificial Sequence
  Description of Artificial Sequence: Synthetic oligonucleotide
ccaccugagucuucagugu

SEQ ID NO: 393246 - RNA, 19 nt, Artificial Sequence
  Description of Artificial Sequence: Synthetic oligonucleotide
guccuaaggcccagcuccu

SEQ ID NO: 393247 - RNA, 19 nt, Artificial Sequence
  Description of Artificial Sequence: Synthetic oligonucleotide
gccaugaagcagaguccga

SEQ ID NO: 393248 - RNA, 19 nt, Artificial Sequence
  Description of Artificial Sequence: Synthetic oligonucleotide
guuccccgggugccaugaa

SEQ ID NO: 393249 - RNA, 19 nt, Artificial Sequence
  Description of Artificial Sequence: Synthetic oligonucleotide
cgaagccuagagauguccu

SEQ ID NO: 393250 - RNA, 19 nt, Artificial Sequence
  Description of Artificial Sequence: Synthetic oligonucleotide
ccccgggugccaugaagca

SEQ ID NO: 393251 - RNA, 19 nt, Artificial Sequence
  Description of Artificial Sequence: Synthetic oligonucleotide
gugccccuaaaagucgcuu

SEQ ID NO: 393252 - RNA, 19 nt, Artificial Sequence
  Description of Artificial Sequence: Synthetic oligonucleotide
cgggugccaugaagcagag

SEQ ID NO: 393253 - RNA, 19 nt, Artificial Sequence
  Description of Artificial Sequence: Synthetic oligonucleotide
ccugugcucguuugaaauu

SEQ ID NO: 393254 - RNA, 19 nt, Artificial Sequence
  Description of Artificial Sequence: Synthetic oligonucleotide
cugcgcagacgagucuugu

SEQ ID NO: 393255 - RNA, 19 nt, Artificial Sequence
  Description of Artificial Sequence: Synthetic oligonucleotide
cgagccuuguaguccuuua

SEQ ID NO: 393256 - RNA, 19 nt, Artificial Sequence
  Description of Artificial Sequence: Synthetic oligonucleotide
ccgguuuaugggaccugcu

SEQ ID NO: 393257 - RNA, 19 nt, Artificial Sequence
  Description of Artificial Sequence: Synthetic oligonucleotide
ggcgagugucauagcgagu

SEQ ID NO: 393258 - RNA, 19 nt, Artificial Sequence
  Description of Artificial Sequence: Synthetic oligonucleotide
cgcuggcgagugucauagc

SEQ ID NO: 393259 - RNA, 19 nt, Artificial Sequence
  Description of Artificial Sequence: Synthetic oligonucleotide
cgguuuaugggaccugcuu

SEQ ID NO: 393260 - RNA, 19 nt, Artificial Sequence
  Description of Artificial Sequence: Synthetic oligonucleotide
cacuugcgcuggcgagugu

SEQ ID NO: 393261 - RNA, 19 nt, Artificial Sequence
  Description of Artificial Sequence: Synthetic oligonucleotide
gcauuacacuugggacacu

SEQ ID NO: 393262 - RNA, 19 nt, Artificial Sequence
  Description of Artificial Sequence: Synthetic oligonucleotide
gcgagccuuguaguccuuu

SEQ ID NO: 393263 - RNA, 19 nt, Artificial Sequence
  Description of Artificial Sequence: Synthetic oligonucleotide
ccccugugccaauguuacu

SEQ ID NO: 393264 - RNA, 19 nt, Artificial Sequence
  Description of Artificial Sequence: Synthetic oligonucleotide
ccauugccuuacgcuuauu

SEQ ID NO: 393265 - RNA, 19 nt, Artificial Sequence
  Description of Artificial Sequence: Synthetic oligonucleotide
uuaauugucauacagacgu

SEQ ID NO: 393266 - RNA, 19 nt, Artificial Sequence
  Description of Artificial Sequence: Synthetic oligonucleotide
aaaugauaaauaaacuggc

SEQ ID NO: 393267 - RNA, 19 nt, Artificial Sequence
  Description of Artificial Sequence: Synthetic oligonucleotide
agacuuauucuguugaggc

SEQ ID NO: 393268 - RNA, 19 nt, Artificial Sequence
  Description of Artificial Sequence: Synthetic oligonucleotide
aaagggaucuucaauaacg

SEQ ID NO: 393269 - RNA, 19 nt, Artificial Sequence
  Description of Artificial Sequence: Synthetic oligonucleotide
aauaggacuacuuguuuuc

SEQ ID NO: 393270 - RNA, 19 nt, Artificial Sequence
  Description of Artificial Sequence: Synthetic oligonucleotide
auaacgauguauuuugagg

SEQ ID NO: 393271 - RNA, 19 nt, Artificial Sequence
  Description of Artificial Sequence: Synthetic oligonucleotide
ugaucuaagauacuggaga

SEQ ID NO: 393272 - RNA, 19 nt, Artificial Sequence
  Description of Artificial Sequence: Synthetic oligonucleotide
ucaauaacgauguauuuug

SEQ ID NO: 393273 - RNA, 19 nt, Artificial Sequence
  Description of Artificial Sequence: Synthetic oligonucleotide
auuggauauguucacgagc

SEQ ID NO: 393274 - RNA, 19 nt, Artificial Sequence
  Description of Artificial Sequence: Synthetic oligonucleotide
auauauuuacuggaaaggc

SEQ ID NO: 393275 - RNA, 19 nt, Artificial Sequence
  Description of Artificial Sequence: Synthetic oligonucleotide
aacaccugucauuuggagc

SEQ ID NO: 393276 - RNA, 19 nt, Artificial Sequence
  Description of Artificial Sequence: Synthetic oligonucleotide
cauauucuggccaauaagc

SEQ ID NO: 393277 - RNA, 19 nt, Artificial Sequence
  Description of Artificial Sequence: Synthetic oligonucleotide
ucuguauaucucuugaagc

SEQ ID NO: 393278 - RNA, 19 nt, Artificial Sequence
  Description of Artificial Sequence: Synthetic oligonucleotide
ucuucuauaagaguuggag

SEQ ID NO: 393279 - RNA, 19 nt, Artificial Sequence
  Description of Artificial Sequence: Synthetic oligonucleotide
guuaugaagagccagugug

SEQ ID NO: 393280 - RNA, 19 nt, Artificial Sequence
  Description of Artificial Sequence: Synthetic oligonucleotide
ugaagauguacuauuucag

SEQ ID NO: 393281 - RNA, 19 nt, Artificial Sequence
  Description of Artificial Sequence: Synthetic oligonucleotide
ugugaaguuagagaaacag

SEQ ID NO: 393282 - RNA, 19 nt, Artificial Sequence
  Description of Artificial Sequence: Synthetic oligonucleotide
ugugaagugaaccuaauuu

SEQ ID NO: 393283 - RNA, 19 nt, Artificial Sequence
  Description of Artificial Sequence: Synthetic oligonucleotide
ugaaacaacgcuuuucucu

SEQ ID NO: 393284 - RNA, 19 nt, Artificial Sequence
  Description of Artificial Sequence: Synthetic oligonucleotide
aauucgacaacaccuguca

SEQ ID NO: 393285 - RNA, 19 nt, Artificial Sequence
  Description of Artificial Sequence: Synthetic oligonucleotide
aaucuguggggauugaugu

SEQ ID NO: 393286 - RNA, 19 nt, Artificial Sequence
  Description of Artificial Sequence: Synthetic oligonucleotide
ugucauacagacgucaagg

SEQ ID NO: 393287 - RNA, 19 nt, Artificial Sequence
  Description of Artificial Sequence: Synthetic oligonucleotide
uccguuaauugucauacag

SEQ ID NO: 393288 - RNA, 19 nt, Artificial Sequence
  Description of Artificial Sequence: Synthetic oligonucleotide
aauaccuuguaacacugga

SEQ ID NO: 393289 - RNA, 19 nt, Artificial Sequence
  Description of Artificial Sequence: Synthetic oligonucleotide
cauaaaagaagucggacug

SEQ ID NO: 393290 - RNA, 19 nt, Artificial Sequence
  Description of Artificial Sequence: Synthetic oligonucleotide
aacgcuuuucucucaaguc

SEQ ID NO: 393291 - RNA, 19 nt, Artificial Sequence
  Description of Artificial Sequence: Synthetic oligonucleotide
aauaguucuuacgcagucc

SEQ ID NO: 393292 - RNA, 19 nt, Artificial Sequence
  Description of Artificial Sequence: Synthetic oligonucleotide
gacaacaccugucauuugg

SEQ ID NO: 393293 - RNA, 19 nt, Artificial Sequence
  Description of Artificial Sequence: Synthetic oligonucleotide
ugauaauccagcaccaaga

SEQ ID NO: 393294 - RNA, 19 nt, Artificial Sequence
  Description of Artificial Sequence: Synthetic oligonucleotide
agaguguacgcguaggacg

SEQ ID NO: 393295 - RNA, 19 nt, Artificial Sequence
  Description of Artificial Sequence: Synthetic oligonucleotide
aagcggagaagucccaacc

SEQ ID NO: 393296 - RNA, 19 nt, Artificial Sequence
  Description of Artificial Sequence: Synthetic oligonucleotide
ucuucaauaacgauguauu

SEQ ID NO: 393297 - RNA, 19 nt, Artificial Sequence
  Description of Artificial Sequence: Synthetic oligonucleotide
ucauaaaagaagucggacu

SEQ ID NO: 393298 - RNA, 19 nt, Artificial Sequence
  Description of Artificial Sequence: Synthetic oligonucleotide
uguugugaugggcagaaug

SEQ ID NO: 393299 - RNA, 19 nt, Artificial Sequence
  Description of Artificial Sequence: Synthetic oligonucleotide
ucuguuuugaaccccaaau

SEQ ID NO: 393300 - RNA, 19 nt, Artificial Sequence
  Description of Artificial Sequence: Synthetic oligonucleotide
aguuaggacaucuggauca

SEQ ID NO: 393301 - RNA, 19 nt, Artificial Sequence
  Description of Artificial Sequence: Synthetic oligonucleotide
ugguguagcacaaauauuu

SEQ ID NO: 393302 - RNA, 19 nt, Artificial Sequence
  Description of Artificial Sequence: Synthetic oligonucleotide
cucaauaguucuuacgcag

SEQ ID NO: 393303 - RNA, 19 nt, Artificial Sequence
  Description of Artificial Sequence: Synthetic oligonucleotide
ucuuacgcaguccagcccc

SEQ ID NO: 393304 - RNA, 19 nt, Artificial Sequence
  Description of Artificial Sequence: Synthetic oligonucleotide
agcaaauaggacuacuugu

SEQ ID NO: 393305 - RNA, 19 nt, Artificial Sequence
  Description of Artificial Sequence: Synthetic oligonucleotide
ucuuagauggaagaacuug

SEQ ID NO: 393306 - RNA, 19 nt, Artificial Sequence
  Description of Artificial Sequence: Synthetic oligonucleotide
agaacuugacaaugggcac

SEQ ID NO: 393307 - RNA, 19 nt, Artificial Sequence
  Description of Artificial Sequence: Synthetic oligonucleotide
aggugaguuuucuaaacuc

SEQ ID NO: 393308 - RNA, 19 nt, Artificial Sequence
  Description of Artificial Sequence: Synthetic oligonucleotide
uugaucuaagauacuggag

SEQ ID NO: 393309 - RNA, 19 nt, Artificial Sequence
  Description of Artificial Sequence: Synthetic oligonucleotide
ucucgcuuacacaagcugc

SEQ ID NO: 393310 - RNA, 19 nt, Artificial Sequence
  Description of Artificial Sequence: Synthetic oligonucleotide
aaggcuaccugacugggga

SEQ ID NO: 393311 - RNA, 19 nt, Artificial Sequence
  Description of Artificial Sequence: Synthetic oligonucleotide
uguccguuaauugucauac

SEQ ID NO: 393312 - RNA, 19 nt, Artificial Sequence
  Description of Artificial Sequence: Synthetic oligonucleotide
aguucuuacgcaguccagc

SEQ ID NO: 393313 - RNA, 19 nt, Artificial Sequence
  Description of Artificial Sequence: Synthetic oligonucleotide
gaagcuacgcacugugggg

SEQ ID NO: 393314 - RNA, 19 nt, Artificial Sequence
  Description of Artificial Sequence: Synthetic oligonucleotide
aaggugaguuuucuaaacu

SEQ ID NO: 393315 - RNA, 19 nt, Artificial Sequence
  Description of Artificial Sequence: Synthetic oligonucleotide
ugaugucuaccucaagacc

SEQ ID NO: 393316 - RNA, 19 nt, Artificial Sequence
  Description of Artificial Sequence: Synthetic oligonucleotide
aauuugucauuuuccuuga

SEQ ID NO: 393317 - RNA, 19 nt, Artificial Sequence
  Description of Artificial Sequence: Synthetic oligonucleotide
gaaacaacgcuuuucucuc

SEQ ID NO: 393318 - RNA, 19 nt, Artificial Sequence
  Description of Artificial Sequence: Synthetic oligonucleotide
acgauguauuuugaggucc

SEQ ID NO: 393319 - RNA, 19 nt, Artificial Sequence
  Description of Artificial Sequence: Synthetic oligonucleotide
cuuaaaccagcaaauagga

SEQ ID NO: 393320 - RNA, 19 nt, Artificial Sequence
  Description of Artificial Sequence: Synthetic oligonucleotide
uguuauguucuauuaaauu

SEQ ID NO: 393321 - RNA, 19 nt, Artificial Sequence
  Description of Artificial Sequence: Synthetic oligonucleotide
aauugucauacagacguca

SEQ ID NO: 393322 - RNA, 19 nt, Artificial Sequence
  Description of Artificial Sequence: Synthetic oligonucleotide
ucucauguccguuaauugu

SEQ ID NO: 393323 - RNA, 19 nt, Artificial Sequence
  Description of Artificial Sequence: Synthetic oligonucleotide
ugacuggaauuccaaauac

SEQ ID NO: 393324 - RNA, 19 nt, Artificial Sequence
  Description of Artificial Sequence: Synthetic oligonucleotide
acuacggugggagacuugc

SEQ ID NO: 393325 - RNA, 19 nt, Artificial Sequence
  Description of Artificial Sequence: Synthetic oligonucleotide
auaguucuuacgcagucca

SEQ ID NO: 393326 - RNA, 19 nt, Artificial Sequence
  Description of Artificial Sequence: Synthetic oligonucleotide
acuacuuguuuucaugacu

SEQ ID NO: 393327 - RNA, 19 nt, Artificial Sequence
  Description of Artificial Sequence: Synthetic oligonucleotide
aaauucgacaacaccuguc

SEQ ID NO: 393328 - RNA, 19 nt, Artificial Sequence
  Description of Artificial Sequence: Synthetic oligonucleotide
uguaaaagcacugccugga

SEQ ID NO: 393329 - RNA, 19 nt, Artificial Sequence
  Description of Artificial Sequence: Synthetic oligonucleotide
aaaagaagucggacuggcc

SEQ ID NO: 393330 - RNA, 19 nt, Artificial Sequence
  Description of Artificial Sequence: Synthetic oligonucleotide
gaagacuuauucuguugag

SEQ ID NO: 393331 - RNA, 19 nt, Artificial Sequence
  Description of Artificial Sequence: Synthetic oligonucleotide
gaaggugaguuuucuaaac

SEQ ID NO: 393332 - RNA, 19 nt, Artificial Sequence
  Description of Artificial Sequence: Synthetic oligonucleotide
auaagcgggcaauucaucu

SEQ ID NO: 393333 - RNA, 19 nt, Artificial Sequence
  Description of Artificial Sequence: Synthetic oligonucleotide
aggacgacaagcugccucg

SEQ ID NO: 393334 - RNA, 19 nt, Artificial Sequence
  Description of Artificial Sequence: Synthetic oligonucleotide
ugguucaaaucaaagggau

SEQ ID NO: 393335 - RNA, 19 nt, Artificial Sequence
  Description of Artificial Sequence: Synthetic oligonucleotide
uugacuggaauuccaaaua

SEQ ID NO: 393336 - RNA, 19 nt, Artificial Sequence
  Description of Artificial Sequence: Synthetic oligonucleotide
ucaauaguucuuacgcagu

SEQ ID NO: 393337 - RNA, 19 nt, Artificial Sequence
  Description of Artificial Sequence: Synthetic oligonucleotide
cuugaucuaagauacugga

SEQ ID NO: 393338 - RNA, 19 nt, Artificial Sequence
  Description of Artificial Sequence: Synthetic oligonucleotide
acagacgucaaggucacuc

SEQ ID NO: 393339 - RNA, 19 nt, Artificial Sequence
  Description of Artificial Sequence: Synthetic oligonucleotide
gaugcaaacuugaucuaag

SEQ ID NO: 393340 - RNA, 19 nt, Artificial Sequence
  Description of Artificial Sequence: Synthetic oligonucleotide
uugucauacagacgucaag

SEQ ID NO: 393341 - RNA, 19 nt, Artificial Sequence
  Description of Artificial Sequence: Synthetic oligonucleotide
aguccuucuuuagaugacc

SEQ ID NO: 393342 - RNA, 19 nt, Artificial Sequence
  Description of Artificial Sequence: Synthetic oligonucleotide
uauuuacuggaaaggcuac

SEQ ID NO: 393343 - RNA, 19 nt, Artificial Sequence
  Description of Artificial Sequence: Synthetic oligonucleotide
gacuuauucuguugaggcc

SEQ ID NO: 393344 - RNA, 19 nt, Artificial Sequence
  Description of Artificial Sequence: Synthetic oligonucleotide
uaugcagauaagagucuug

SEQ ID NO: 393345 - RNA, 19 nt, Artificial Sequence
  Description of Artificial Sequence: Synthetic oligonucleotide
uucucgcuuacacaagcug

SEQ ID NO: 393346 - RNA, 19 nt, Artificial Sequence
  Description of Artificial Sequence: Synthetic oligonucleotide
uuuacuggaaaggcuaccu

SEQ ID NO: 393347 - RNA, 19 nt, Artificial Sequence
  Description of Artificial Sequence: Synthetic oligonucleotide
uucaauaacgauguauuuu

SEQ ID NO: 393348 - RNA, 19 nt, Artificial Sequence
  Description of Artificial Sequence: Synthetic oligonucleotide
auaaaagaagucggacugg

SEQ ID NO: 393349 - RNA, 19 nt, Artificial Sequence
  Description of Artificial Sequence: Synthetic oligonucleotide
uucauuguuauguucuauu

SEQ ID NO: 393350 - RNA, 19 nt, Artificial Sequence
  Description of Artificial Sequence: Synthetic oligonucleotide
uuuagucagcacuuccugu

SEQ ID NO: 393351 - RNA, 19 nt, Artificial Sequence
  Description of Artificial Sequence: Synthetic oligonucleotide
uccacgacugcccucgaug

SEQ ID NO: 393352 - RNA, 19 nt, Artificial Sequence
  Description of Artificial Sequence: Synthetic oligonucleotide
ugaagagccaguguguuau

SEQ ID NO: 393353 - RNA, 19 nt, Artificial Sequence
  Description of Artificial Sequence: Synthetic oligonucleotide
caccauaagaguguacgcg

SEQ ID NO: 393354 - RNA, 19 nt, Artificial Sequence
  Description of Artificial Sequence: Synthetic oligonucleotide
aacacuggaugcaaacuug

SEQ ID NO: 393355 - RNA, 19 nt, Artificial Sequence
  Description of Artificial Sequence: Synthetic oligonucleotide
uucaguauucaaaguucga

SEQ ID NO: 393356 - RNA, 19 nt, Artificial Sequence
  Description of Artificial Sequence: Synthetic oligonucleotide
accgaugucacacaucuuu

SEQ ID NO: 393357 - RNA, 19 nt, Artificial Sequence
  Description of Artificial Sequence: Synthetic oligonucleotide
aagggugccaauccaacuu

SEQ ID NO: 393358 - RNA, 19 nt, Artificial Sequence
  Description of Artificial Sequence: Synthetic oligonucleotide
acgcuuuucucucaagucu

SEQ ID NO: 393359 - RNA, 19 nt, Artificial Sequence
  Description of Artificial Sequence: Synthetic oligonucleotide
aggucacucuguuuugaac

SEQ ID NO: 393360 - RNA, 19 nt, Artificial Sequence
  Description of Artificial Sequence: Synthetic oligonucleotide
uucgcuuuggaagcuacgc

SEQ ID NO: 393361 - RNA, 19 nt, Artificial Sequence
  Description of Artificial Sequence: Synthetic oligonucleotide
aguguguuauacaagcuga

SEQ ID NO: 393362 - RNA, 19 nt, Artificial Sequence
  Description of Artificial Sequence: Synthetic oligonucleotide
uacgcguaggacgacaagc

SEQ ID NO: 393363 - RNA, 19 nt, Artificial Sequence
  Description of Artificial Sequence: Synthetic oligonucleotide
ugaaggugaguuuucuaaa

SEQ ID NO: 393364 - RNA, 19 nt, Artificial Sequence
  Description of Artificial Sequence: Synthetic oligonucleotide
agagguuuguaagagcucu

SEQ ID NO: 393365 - RNA, 19 nt, Artificial Sequence
  Description of Artificial Sequence: Synthetic oligonucleotide
cucauaaaagaagucggac

SEQ ID NO: 393366 - RNA, 19 nt, Artificial Sequence
  Description of Artificial Sequence: Synthetic oligonucleotide
aaauaccuuguaacacugg

SEQ ID NO: 393367 - RNA, 19 nt, Artificial Sequence
  Description of Artificial Sequence: Synthetic oligonucleotide
ucuccagagguuuguaaga

SEQ ID NO: 393368 - RNA, 19 nt, Artificial Sequence
  Description of Artificial Sequence: Synthetic oligonucleotide
gauaggggugccugacugg

SEQ ID NO: 393369 - RNA, 19 nt, Artificial Sequence
  Description of Artificial Sequence: Synthetic oligonucleotide
uccauauucuggccaauaa

SEQ ID NO: 393370 - RNA, 19 nt, Artificial Sequence
  Description of Artificial Sequence: Synthetic oligonucleotide
auaggggugccugacuggc

SEQ ID NO: 393371 - RNA, 19 nt, Artificial Sequence
  Description of Artificial Sequence: Synthetic oligonucleotide
guucuuacgcaguccagcc

SEQ ID NO: 393372 - RNA, 19 nt, Artificial Sequence
  Description of Artificial Sequence: Synthetic oligonucleotide
ucauguccguuaauuguca

SEQ ID NO: 393373 - RNA, 19 nt, Artificial Sequence
  Description of Artificial Sequence: Synthetic oligonucleotide
uguguugcuauguccugug

SEQ ID NO: 393374 - RNA, 19 nt, Artificial Sequence
  Description of Artificial Sequence: Synthetic oligonucleotide
gggauugauguuaagacug

SEQ ID NO: 393375 - RNA, 19 nt, Artificial Sequence
  Description of Artificial Sequence: Synthetic oligonucleotide
aacccugagugcuuucuga

SEQ ID NO: 393376 - RNA, 19 nt, Artificial Sequence
  Description of Artificial Sequence: Synthetic oligonucleotide
cauaagaguguacgcguag

SEQ ID NO: 393377 - RNA, 19 nt, Artificial Sequence
  Description of Artificial Sequence: Synthetic oligonucleotide
guagaagcggagaaguccc

SEQ ID NO: 393378 - RNA, 19 nt, Artificial Sequence
  Description of Artificial Sequence: Synthetic oligonucleotide
ugcuauguccugugaagug

SEQ ID NO: 393379 - RNA, 19 nt, Artificial Sequence
  Description of Artificial Sequence: Synthetic oligonucleotide
uaccauugauaaaagcuuu

SEQ ID NO: 393380 - RNA, 19 nt, Artificial Sequence
  Description of Artificial Sequence: Synthetic oligonucleotide
uuagucagcacuuccuguu

SEQ ID NO: 393381 - RNA, 19 nt, Artificial Sequence
  Description of Artificial Sequence: Synthetic oligonucleotide
aagcgggcaauucaucuau

SEQ ID NO: 393382 - RNA, 19 nt, Artificial Sequence
  Description of Artificial Sequence: Synthetic oligonucleotide
cguuaauugucauacagac

SEQ ID NO: 393383 - RNA, 19 nt, Artificial Sequence
  Description of Artificial Sequence: Synthetic oligonucleotide
aauguuccucaacccugag

SEQ ID NO: 393384 - RNA, 19 nt, Artificial Sequence
  Description of Artificial Sequence: Synthetic oligonucleotide
cagcaaauaggacuacuug

SEQ ID NO: 393385 - RNA, 19 nt, Artificial Sequence
  Description of Artificial Sequence: Synthetic oligonucleotide
caauuggauauguucacga

SEQ ID NO: 393386 - RNA, 19 nt, Artificial Sequence
  Description of Artificial Sequence: Synthetic oligonucleotide
accucuguauaucucuuga

SEQ ID NO: 393387 - RNA, 19 nt, Artificial Sequence
  Description of Artificial Sequence: Synthetic oligonucleotide
aagcugcacacuacggugg

SEQ ID NO: 393388 - RNA, 19 nt, Artificial Sequence
  Description of Artificial Sequence: Synthetic oligonucleotide
ucucccucaguuaggacau

SEQ ID NO: 393389 - RNA, 19 nt, Artificial Sequence
  Description of Artificial Sequence: Synthetic oligonucleotide
accccaauuucugaguauc

SEQ ID NO: 393390 - RNA, 19 nt, Artificial Sequence
  Description of Artificial Sequence: Synthetic oligonucleotide
gacuacuuguuuucaugac

SEQ ID NO: 393391 - RNA, 19 nt, Artificial Sequence
  Description of Artificial Sequence: Synthetic oligonucleotide
aggccuacgagcagagucc

SEQ ID NO: 393392 - RNA, 19 nt, Artificial Sequence
  Description of Artificial Sequence: Synthetic oligonucleotide
cgaucuuuccacaaauucg

SEQ ID NO: 393393 - RNA, 19 nt, Artificial Sequence
  Description of Artificial Sequence: Synthetic oligonucleotide
uccguguagaagcggagaa

SEQ ID NO: 393394 - RNA, 19 nt, Artificial Sequence
  Description of Artificial Sequence: Synthetic oligonucleotide
aaguggauaggggugccug

SEQ ID NO: 393395 - RNA, 19 nt, Artificial Sequence
  Description of Artificial Sequence: Synthetic oligonucleotide
uaggacgacaagcugccuc

SEQ ID NO: 393396 - RNA, 19 nt, Artificial Sequence
  Description of Artificial Sequence: Synthetic oligonucleotide
ugcagauaagagucuugug

SEQ ID NO: 393397 - RNA, 19 nt, Artificial Sequence
  Description of Artificial Sequence: Synthetic oligonucleotide
ucgacaacaccugucauuu

SEQ ID NO: 393398 - RNA, 19 nt, Artificial Sequence
  Description of Artificial Sequence: Synthetic oligonucleotide
cugcccaacagauucugug

SEQ ID NO: 393399 - RNA, 19 nt, Artificial Sequence
  Description of Artificial Sequence: Synthetic oligonucleotide
uugaaccccaaauccauuu

SEQ ID NO: 393400 - RNA, 19 nt, Artificial Sequence
  Description of Artificial Sequence: Synthetic oligonucleotide
uuugggguaucuuccuggu

SEQ ID NO: 393401 - RNA, 19 nt, Artificial Sequence
  Description of Artificial Sequence: Synthetic oligonucleotide
caauaguucuuacgcaguc

SEQ ID NO: 393402 - RNA, 19 nt, Artificial Sequence
  Description of Artificial Sequence: Synthetic oligonucleotide
uucuuacgcaguccagccc

SEQ ID NO: 393403 - RNA, 19 nt, Artificial Sequence
  Description of Artificial Sequence: Synthetic oligonucleotide
ucgcuuuggaagcuacgca

SEQ ID NO: 393404 - RNA, 19 nt, Artificial Sequence
  Description of Artificial Sequence: Synthetic oligonucleotide
agggcugcguuuccuuccc

SEQ ID NO: 393405 - RNA, 19 nt, Artificial Sequence
  Description of Artificial Sequence: Synthetic oligonucleotide
aggaaauauagcaccauaa

SEQ ID NO: 393406 - RNA, 19 nt, Artificial Sequence
  Description of Artificial Sequence: Synthetic oligonucleotide
uucgacaacaccugucauu

SEQ ID NO: 393407 - RNA, 19 nt, Artificial Sequence
  Description of Artificial Sequence: Synthetic oligonucleotide
uaguucuuacgcaguccag

SEQ ID NO: 393408 - RNA, 19 nt, Artificial Sequence
  Description of Artificial Sequence: Synthetic oligonucleotide
aaaggcuaccugacugggg

SEQ ID NO: 393409 - RNA, 19 nt, Artificial Sequence
  Description of Artificial Sequence: Synthetic oligonucleotide
aaguuguaagcagacuuuu

SEQ ID NO: 393410 - RNA, 19 nt, Artificial Sequence
  Description of Artificial Sequence: Synthetic oligonucleotide
aagcagacuuuuccuucug

SEQ ID NO: 393411 - RNA, 19 nt, Artificial Sequence
  Description of Artificial Sequence: Synthetic oligonucleotide
auaaauaaacuggcauagu

SEQ ID NO: 393412 - RNA, 19 nt, Artificial Sequence
  Description of Artificial Sequence: Synthetic oligonucleotide
aguuguaagcagacuuuuc

SEQ ID NO: 393413 - RNA, 19 nt, Artificial Sequence
  Description of Artificial Sequence: Synthetic oligonucleotide
cugaucuucuauaagaguu

SEQ ID NO: 393414 - RNA, 19 nt, Artificial Sequence
  Description of Artificial Sequence: Synthetic oligonucleotide
uguacgcguaggacgacaa

SEQ ID NO: 393415 - RNA, 19 nt, Artificial Sequence
  Description of Artificial Sequence: Synthetic oligonucleotide
uaauugucauacagacguc

SEQ ID NO: 393416 - RNA, 19 nt, Artificial Sequence
  Description of Artificial Sequence: Synthetic oligonucleotide
aguucugaagauguacuau

SEQ ID NO: 393417 - RNA, 19 nt, Artificial Sequence
  Description of Artificial Sequence: Synthetic oligonucleotide
gagccugaucuucuauaag

SEQ ID NO: 393418 - RNA, 19 nt, Artificial Sequence
  Description of Artificial Sequence: Synthetic oligonucleotide
gaagcggagaagucccaac

SEQ ID NO: 393419 - RNA, 19 nt, Artificial Sequence
  Description of Artificial Sequence: Synthetic oligonucleotide
agggugccaauccaacuug

SEQ ID NO: 393420 - RNA, 19 nt, Artificial Sequence
  Description of Artificial Sequence: Synthetic oligonucleotide
agaguaucuuugguuuggg

SEQ ID NO: 393421 - RNA, 19 nt, Artificial Sequence
  Description of Artificial Sequence: Synthetic oligonucleotide
cuucgcuuuggaagcuacg

SEQ ID NO: 393422 - RNA, 19 nt, Artificial Sequence
  Description of Artificial Sequence: Synthetic oligonucleotide
ucccucaacuguucuguug

SEQ ID NO: 393423 - RNA, 19 nt, Artificial Sequence
  Description of Artificial Sequence: Synthetic oligonucleotide
ugcacuuguucugaauuuc

SEQ ID NO: 393424 - RNA, 19 nt, Artificial Sequence
  Description of Artificial Sequence: Synthetic oligonucleotide
gacgacaagcugccucggg

SEQ ID NO: 393425 - RNA, 19 nt, Artificial Sequence
  Description of Artificial Sequence: Synthetic oligonucleotide
acucauaaaagaagucgga

SEQ ID NO: 393426 - RNA, 19 nt, Artificial Sequence
  Description of Artificial Sequence: Synthetic oligonucleotide
gcagauaagagucuugugu

SEQ ID NO: 393427 - RNA, 19 nt, Artificial Sequence
  Description of Artificial Sequence: Synthetic oligonucleotide
cuucaugaaguguccgauc

SEQ ID NO: 393428 - RNA, 19 nt, Artificial Sequence
  Description of Artificial Sequence: Synthetic oligonucleotide
agacgucaaggucacucug

SEQ ID NO: 393429 - RNA, 19 nt, Artificial Sequence
  Description of Artificial Sequence: Synthetic oligonucleotide
agcggagaagucccaacca

SEQ ID NO: 393430 - RNA, 19 nt, Artificial Sequence
  Description of Artificial Sequence: Synthetic oligonucleotide
guauaucucuugaagcaca

SEQ ID NO: 393431 - RNA, 19 nt, Artificial Sequence
  Description of Artificial Sequence: Synthetic oligonucleotide
aaccagcaaauaggacuac

SEQ ID NO: 393432 - RNA, 19 nt, Artificial Sequence
  Description of Artificial Sequence: Synthetic oligonucleotide
uaagcgggcaauucaucua

SEQ ID NO: 393433 - RNA, 19 nt, Artificial Sequence
  Description of Artificial Sequence: Synthetic oligonucleotide
guguuaugaagagccagug

SEQ ID NO: 393434 - RNA, 19 nt, Artificial Sequence
  Description of Artificial Sequence: Synthetic oligonucleotide
augucuaccucaagaccac

SEQ ID NO: 393435 - RNA, 19 nt, Artificial Sequence
  Description of Artificial Sequence: Synthetic oligonucleotide
auaucucuugaagcacagg

SEQ ID NO: 393436 - RNA, 19 nt, Artificial Sequence
  Description of Artificial Sequence: Synthetic oligonucleotide
uauguucacgagccugauc

SEQ ID NO: 393437 - RNA, 19 nt, Artificial Sequence
  Description of Artificial Sequence: Synthetic oligonucleotide
ccauauucuggccaauaag

SEQ ID NO: 393438 - RNA, 19 nt, Artificial Sequence
  Description of Artificial Sequence: Synthetic oligonucleotide
acaacgcuuuucucucaag

SEQ ID NO: 393439 - RNA, 19 nt, Artificial Sequence
  Description of Artificial Sequence: Synthetic oligonucleotide
ggacuacuuguuuucauga

SEQ ID NO: 393440 - RNA, 19 nt, Artificial Sequence
  Description of Artificial Sequence: Synthetic oligonucleotide
ucuuugcucucagaguauc

SEQ ID NO: 393441 - RNA, 19 nt, Artificial Sequence
  Description of Artificial Sequence: Synthetic oligonucleotide
gcucaauuggauauguuca

SEQ ID NO: 393442 - RNA, 19 nt, Artificial Sequence
  Description of Artificial Sequence: Synthetic oligonucleotide
uuggugaaggugaguuuuc

SEQ ID NO: 393443 - RNA, 19 nt, Artificial Sequence
  Description of Artificial Sequence: Synthetic oligonucleotide
cucgcuuacacaagcugca

SEQ ID NO: 393444 - RNA, 19 nt, Artificial Sequence
  Description of Artificial Sequence: Synthetic oligonucleotide
gaguguacgcguaggacga

SEQ ID NO: 393445 - RNA, 19 nt, Artificial Sequence
  Description of Artificial Sequence: Synthetic oligonucleotide
agucccacccauguguucu

SEQ ID NO: 393446 - RNA, 19 nt, Artificial Sequence
  Description of Artificial Sequence: Synthetic oligonucleotide
caguuaggacaucuggauc

SEQ ID NO: 393447 - RNA, 19 nt, Artificial Sequence
  Description of Artificial Sequence: Synthetic oligonucleotide
guagcacaaauauuucacu

SEQ ID NO: 393448 - RNA, 19 nt, Artificial Sequence
  Description of Artificial Sequence: Synthetic oligonucleotide
uguggggauugauguuaag

SEQ ID NO: 393449 - RNA, 19 nt, Artificial Sequence
  Description of Artificial Sequence: Synthetic oligonucleotide
agaccuuugcugaaggaaa

SEQ ID NO: 393450 - RNA, 19 nt, Artificial Sequence
  Description of Artificial Sequence: Synthetic oligonucleotide
aguggauaggggugccuga

SEQ ID NO: 393451 - RNA, 19 nt, Artificial Sequence
  Description of Artificial Sequence: Synthetic oligonucleotide
auauuucacucugggguca

SEQ ID NO: 393452 - RNA, 19 nt, Artificial Sequence
  Description of Artificial Sequence: Synthetic oligonucleotide
aggguaguccuuugggaau

SEQ ID NO: 393453 - RNA, 19 nt, Artificial Sequence
  Description of Artificial Sequence: Synthetic oligonucleotide
gaaucuucucccgccccag

SEQ ID NO: 393454 - RNA, 19 nt, Artificial Sequence
  Description of Artificial Sequence: Synthetic oligonucleotide
auaggacuacuuguuuuca

SEQ ID NO: 393455 - RNA, 19 nt, Artificial Sequence
  Description of Artificial Sequence: Synthetic oligonucleotide
uacgcaguccagccccuca

SEQ ID NO: 393456 - RNA, 19 nt, Artificial Sequence
  Description of Artificial Sequence: Synthetic oligonucleotide
uccgaucuuuccacaaauu

SEQ ID NO: 393457 - RNA, 19 nt, Artificial Sequence
  Description of Artificial Sequence: Synthetic oligonucleotide
caauaacgauguauuuuga

SEQ ID NO: 393458 - RNA, 19 nt, Artificial Sequence
  Description of Artificial Sequence: Synthetic oligonucleotide
gggcuugucuucuuuaguc

SEQ ID NO: 393459 - RNA, 19 nt, Artificial Sequence
  Description of Artificial Sequence: Synthetic oligonucleotide
cuacgagcagagucccacc

SEQ ID NO: 393460 - RNA, 19 nt, Artificial Sequence
  Description of Artificial Sequence: Synthetic oligonucleotide
guugugaugggcagaaugu

SEQ ID NO: 393461 - RNA, 19 nt, Artificial Sequence
  Description of Artificial Sequence: Synthetic oligonucleotide
aaacuugaucuaagauacu

SEQ ID NO: 393462 - RNA, 19 nt, Artificial Sequence
  Description of Artificial Sequence: Synthetic oligonucleotide
caguccuucuuuagaugac

SEQ ID NO: 393463 - RNA, 19 nt, Artificial Sequence
  Description of Artificial Sequence: Synthetic oligonucleotide
ccgaucuuuccacaaauuc

SEQ ID NO: 393464 - RNA, 19 nt, Artificial Sequence
  Description of Artificial Sequence: Synthetic oligonucleotide
auucgacaacaccugucau

SEQ ID NO: 393465 - RNA, 19 nt, Artificial Sequence
  Description of Artificial Sequence: Synthetic oligonucleotide
cagagguuuguaagagcuc

SEQ ID NO: 393466 - RNA, 19 nt, Artificial Sequence
  Description of Artificial Sequence: Synthetic oligonucleotide
auugucauacagacgucaa

SEQ ID NO: 393467 - RNA, 19 nt, Artificial Sequence
  Description of Artificial Sequence: Synthetic oligonucleotide
ccuucucgcuuacacaagc

SEQ ID NO: 393468 - RNA, 19 nt, Artificial Sequence
  Description of Artificial Sequence: Synthetic oligonucleotide
cagauaagagucuuguguu

SEQ ID NO: 393469 - RNA, 19 nt, Artificial Sequence
  Description of Artificial Sequence: Synthetic oligonucleotide
uggccaauaagcgggcaau

SEQ ID NO: 393470 - RNA, 19 nt, Artificial Sequence
  Description of Artificial Sequence: Synthetic oligonucleotide
auaccuuguaacacuggau

SEQ ID NO: 393471 - RNA, 19 nt, Artificial Sequence
  Description of Artificial Sequence: Synthetic oligonucleotide
uucccucaugauucuugcu

SEQ ID NO: 393472 - RNA, 19 nt, Artificial Sequence
  Description of Artificial Sequence: Synthetic oligonucleotide
accagcaaauaggacuacu

SEQ ID NO: 393473 - RNA, 19 nt, Artificial Sequence
  Description of Artificial Sequence: Synthetic oligonucleotide
acugcccucgauggcuucg

SEQ ID NO: 393474 - RNA, 19 nt, Artificial Sequence
  Description of Artificial Sequence: Synthetic oligonucleotide
accaagauugugguucaaa

SEQ ID NO: 393475 - RNA, 19 nt, Artificial Sequence
  Description of Artificial Sequence: Synthetic oligonucleotide
cuacggugggagacuugcc

SEQ ID NO: 393476 - RNA, 19 nt, Artificial Sequence
  Description of Artificial Sequence: Synthetic oligonucleotide
guacgcguaggacgacaag

SEQ ID NO: 393477 - RNA, 19 nt, Artificial Sequence
  Description of Artificial Sequence: Synthetic oligonucleotide
gggugaauuuuccuccuca

SEQ ID NO: 393478 - RNA, 19 nt, Artificial Sequence
  Description of Artificial Sequence: Synthetic oligonucleotide
gacgcgucaccgaugucac

SEQ ID NO: 393479 - RNA, 19 nt, Artificial Sequence
  Description of Artificial Sequence: Synthetic oligonucleotide
gcguaggacgacaagcugc

SEQ ID NO: 393480 - RNA, 19 nt, Artificial Sequence
  Description of Artificial Sequence: Synthetic oligonucleotide
gauugauguuaagacugua

SEQ ID NO: 393481 - RNA, 19 nt, Artificial Sequence
  Description of Artificial Sequence: Synthetic oligonucleotide
ccacgacugcccucgaugg

SEQ ID NO: 393482 - RNA, 19 nt, Artificial Sequence
  Description of Artificial Sequence: Synthetic oligonucleotide
gguuugggguaucuuccug

SEQ ID NO: 393483 - RNA, 19 nt, Artificial Sequence
  Description of Artificial Sequence: Synthetic oligonucleotide
ccaauaagcgggcaauuca

SEQ ID NO: 393484 - RNA, 19 nt, Artificial Sequence
  Description of Artificial Sequence: Synthetic oligonucleotide
agccaguguguuauacaag

SEQ ID NO: 393485 - RNA, 19 nt, Artificial Sequence
  Description of Artificial Sequence: Synthetic oligonucleotide
ugcuguugugaugggcaga

SEQ ID NO: 393486 - RNA, 19 nt, Artificial Sequence
  Description of Artificial Sequence: Synthetic oligonucleotide
cuuccuggucucgccgucg

SEQ ID NO: 393487 - RNA, 19 nt, Artificial Sequence
  Description of Artificial Sequence: Synthetic oligonucleotide
aguguacgcguaggacgac

SEQ ID NO: 393488 - RNA, 19 nt, Artificial Sequence
  Description of Artificial Sequence: Synthetic oligonucleotide
gguguagcacaaauauuuc

SEQ ID NO: 393489 - RNA, 19 nt, Artificial Sequence
  Description of Artificial Sequence: Synthetic oligonucleotide
ucgccgucgccucacuuuu

SEQ ID NO: 393490 - RNA, 19 nt, Artificial Sequence
  Description of Artificial Sequence: Synthetic oligonucleotide
gcuauguccugugaaguga

SEQ ID NO: 393491 - RNA, 19 nt, Artificial Sequence
  Description of Artificial Sequence: Synthetic oligonucleotide
uuauucuguugaggccuac

SEQ ID NO: 393492 - RNA, 19 nt, Artificial Sequence
  Description of Artificial Sequence: Synthetic oligonucleotide
ccucaugauucuugcuggg

SEQ ID NO: 393493 - RNA, 19 nt, Artificial Sequence
  Description of Artificial Sequence: Synthetic oligonucleotide
caacgcuuuucucucaagu

SEQ ID NO: 393494 - RNA, 19 nt, Artificial Sequence
  Description of Artificial Sequence: Synthetic oligonucleotide
guacuauuucagaaaggcu

SEQ ID NO: 393495 - RNA, 19 nt, Artificial Sequence
  Description of Artificial Sequence: Synthetic oligonucleotide
ucgcuuacacaagcugcac

SEQ ID NO: 393496 - RNA, 19 nt, Artificial Sequence
  Description of Artificial Sequence: Synthetic oligonucleotide
ucgggacgcgucaccgaug

SEQ ID NO: 393497 - RNA, 19 nt, Artificial Sequence
  Description of Artificial Sequence: Synthetic oligonucleotide
uccucaacccugagugcuu

SEQ ID NO: 393498 - RNA, 19 nt, Artificial Sequence
  Description of Artificial Sequence: Synthetic oligonucleotide
cacgacugcccucgauggc

SEQ ID NO: 393499 - RNA, 19 nt, Artificial Sequence
  Description of Artificial Sequence: Synthetic oligonucleotide
ccguuaauugucauacaga

SEQ ID NO: 393500 - RNA, 19 nt, Artificial Sequence
  Description of Artificial Sequence: Synthetic oligonucleotide
ggcaccuuugcuguuguga

SEQ ID NO: 393501 - RNA, 19 nt, Artificial Sequence
  Description of Artificial Sequence: Synthetic oligonucleotide
ggggauugauguuaagacu

SEQ ID NO: 393502 - RNA, 19 nt, Artificial Sequence
  Description of Artificial Sequence: Synthetic oligonucleotide
cgucgccucacuuuucucc

SEQ ID NO: 393503 - RNA, 19 nt, Artificial Sequence
  Description of Artificial Sequence: Synthetic oligonucleotide
guggauaggggugccugac

SEQ ID NO: 393504 - RNA, 19 nt, Artificial Sequence
  Description of Artificial Sequence: Synthetic oligonucleotide
cuucaauaacgauguauuu

SEQ ID NO: 393505 - RNA, 19 nt, Artificial Sequence
  Description of Artificial Sequence: Synthetic oligonucleotide
caaauucgacaacaccugu

SEQ ID NO: 393506 - RNA, 19 nt, Artificial Sequence
  Description of Artificial Sequence: Synthetic oligonucleotide
cuugauaauccagcaccaa

SEQ ID NO: 393507 - RNA, 19 nt, Artificial Sequence
  Description of Artificial Sequence: Synthetic oligonucleotide
ccuacgagcagagucccac

SEQ ID NO: 393508 - RNA, 19 nt, Artificial Sequence
  Description of Artificial Sequence: Synthetic oligonucleotide
ccuugauaauccagcacca

SEQ ID NO: 393509 - RNA, 19 nt, Artificial Sequence
  Description of Artificial Sequence: Synthetic oligonucleotide
accuucucgcuuacacaag

SEQ ID NO: 393510 - RNA, 19 nt, Artificial Sequence
  Description of Artificial Sequence: Synthetic oligonucleotide
ccucaauaguucuuacgca

SEQ ID NO: 393511 - RNA, 19 nt, Artificial Sequence
  Description of Artificial Sequence: Synthetic oligonucleotide
guguccgaucuuuccacaa

SEQ ID NO: 393512 - RNA, 19 nt, Artificial Sequence
  Description of Artificial Sequence: Synthetic oligonucleotide
caaggucacucuguuuuga

SEQ ID NO: 393513 - RNA, 19 nt, Artificial Sequence
  Description of Artificial Sequence: Synthetic oligonucleotide
guccguuaauugucauaca

SEQ ID NO: 393514 - RNA, 19 nt, Artificial Sequence
  Description of Artificial Sequence: Synthetic oligonucleotide
ccauugauaaaagcuuuca

SEQ ID NO: 393515 - RNA, 19 nt, Artificial Sequence
  Description of Artificial Sequence: Synthetic oligonucleotide
gagucccacccauguguuc

SEQ ID NO: 393516 - RNA, 19 nt, Artificial Sequence
  Description of Artificial Sequence: Synthetic oligonucleotide
cucuucuaccauugauaaa

SEQ ID NO: 393517 - RNA, 19 nt, Artificial Sequence
  Description of Artificial Sequence: Synthetic oligonucleotide
uggucucgccgucgccuca

SEQ ID NO: 393518 - RNA, 19 nt, Artificial Sequence
  Description of Artificial Sequence: Synthetic oligonucleotide
agccugaucuguguugcua

SEQ ID NO: 393519 - RNA, 19 nt, Artificial Sequence
  Description of Artificial Sequence: Synthetic oligonucleotide
caaagguuccagcuggauu

SEQ ID NO: 393520 - RNA, 19 nt, Artificial Sequence
  Description of Artificial Sequence: Synthetic oligonucleotide
caagcucaauuggauaugu

SEQ ID NO: 393521 - RNA, 19 nt, Artificial Sequence
  Description of Artificial Sequence: Synthetic oligonucleotide
cagacgucaaggucacucu

SEQ ID NO: 393522 - RNA, 19 nt, Artificial Sequence
  Description of Artificial Sequence: Synthetic oligonucleotide
gccaauaagcgggcaauuc

SEQ ID NO: 393523 - RNA, 19 nt, Artificial Sequence
  Description of Artificial Sequence: Synthetic oligonucleotide
gcacacuacggugggagac

SEQ ID NO: 393524 - RNA, 19 nt, Artificial Sequence
  Description of Artificial Sequence: Synthetic oligonucleotide
gguaguccuuugggaaucc

SEQ ID NO: 393525 - RNA, 19 nt, Artificial Sequence
  Description of Artificial Sequence: Synthetic oligonucleotide
cacuacggugggagacuug

SEQ ID NO: 393526 - RNA, 19 nt, Artificial Sequence
  Description of Artificial Sequence: Synthetic oligonucleotide
gcaaauaggacuacuuguu

SEQ ID NO: 393527 - RNA, 19 nt, Artificial Sequence
  Description of Artificial Sequence: Synthetic oligonucleotide
guguacgcguaggacgaca

SEQ ID NO: 393528 - RNA, 19 nt, Artificial Sequence
  Description of Artificial Sequence: Synthetic oligonucleotide
ucucgccgucgccucacuu

SEQ ID NO: 393529 - RNA, 19 nt, Artificial Sequence
  Description of Artificial Sequence: Synthetic oligonucleotide
ggguaucuuccuggucucg

SEQ ID NO: 393530 - RNA, 19 nt, Artificial Sequence
  Description of Artificial Sequence: Synthetic oligonucleotide
ccaagauugugguucaaau

SEQ ID NO: 393531 - RNA, 19 nt, Artificial Sequence
  Description of Artificial Sequence: Synthetic oligonucleotide
uggcuucgcuuuggaagcu

SEQ ID NO: 393532 - RNA, 19 nt, Artificial Sequence
  Description of Artificial Sequence: Synthetic oligonucleotide
acacuacggugggagacuu

SEQ ID NO: 393533 - RNA, 19 nt, Artificial Sequence
  Description of Artificial Sequence: Synthetic oligonucleotide
cgcgucaccgaugucacac

SEQ ID NO: 393534 - RNA, 19 nt, Artificial Sequence
  Description of Artificial Sequence: Synthetic oligonucleotide
gcuucgcuuuggaagcuac

SEQ ID NO: 393535 - RNA, 19 nt, Artificial Sequence
  Description of Artificial Sequence: Synthetic oligonucleotide
agcugccucgggacgcguc

SEQ ID NO: 393536 - RNA, 19 nt, Artificial Sequence
  Description of Artificial Sequence: Synthetic oligonucleotide
ccguguagaagcggagaag

SEQ ID NO: 393537 - RNA, 19 nt, Artificial Sequence
  Description of Artificial Sequence: Synthetic oligonucleotide
ggccuacgagcagaguccc

SEQ ID NO: 393538 - RNA, 19 nt, Artificial Sequence
  Description of Artificial Sequence: Synthetic oligonucleotide
cugugaagugaaccuaauu

SEQ ID NO: 393539 - RNA, 19 nt, Artificial Sequence
  Description of Artificial Sequence: Synthetic oligonucleotide
gucccacccauguguucuc

SEQ ID NO: 393540 - RNA, 19 nt, Artificial Sequence
  Description of Artificial Sequence: Synthetic oligonucleotide
ggacgacaagcugccucgg

SEQ ID NO: 393541 - RNA, 19 nt, Artificial Sequence
  Description of Artificial Sequence: Synthetic oligonucleotide
gcugccucgggacgcguca

SEQ ID NO: 393542 - RNA, 19 nt, Artificial Sequence
  Description of Artificial Sequence: Synthetic oligonucleotide
auuucacucuggggucaau

SEQ ID NO: 393543 - RNA, 19 nt, Artificial Sequence
  Description of Artificial Sequence: Synthetic oligonucleotide
cauguccguuaauugucau

SEQ ID NO: 393544 - RNA, 19 nt, Artificial Sequence
  Description of Artificial Sequence: Synthetic oligonucleotide
uacagacgucaaggucacu

SEQ ID NO: 393545 - RNA, 19 nt, Artificial Sequence
  Description of Artificial Sequence: Synthetic oligonucleotide
aagcugccucgggacgcgu

SEQ ID NO: 393546 - RNA, 19 nt, Artificial Sequence
  Description of Artificial Sequence: Synthetic oligonucleotide
ccauaagaguguacgcgua

SEQ ID NO: 393547 - RNA, 19 nt, Artificial Sequence
  Description of Artificial Sequence: Synthetic oligonucleotide
acgcgucaccgaugucaca

SEQ ID NO: 393548 - RNA, 19 nt, Artificial Sequence
  Description of Artificial Sequence: Synthetic oligonucleotide
cuuacgcaguccagccccu

SEQ ID NO: 393549 - RNA, 19 nt, Artificial Sequence
  Description of Artificial Sequence: Synthetic oligonucleotide
cacacuacggugggagacu

SEQ ID NO: 393550 - RNA, 19 nt, Artificial Sequence
  Description of Artificial Sequence: Synthetic oligonucleotide
cagucagauccagaagggu

SEQ ID NO: 393551 - RNA, 19 nt, Artificial Sequence
  Description of Artificial Sequence: Synthetic oligonucleotide
gucggacuggccccugggu

SEQ ID NO: 393552 - RNA, 19 nt, Artificial Sequence
  Description of Artificial Sequence: Synthetic oligonucleotide
cuaccugacuggggacuca

SEQ ID NO: 393553 - RNA, 19 nt, Artificial Sequence
  Description of Artificial Sequence: Synthetic oligonucleotide
cucgccgucgccucacuuu

SEQ ID NO: 393554 - RNA, 19 nt, Artificial Sequence
  Description of Artificial Sequence: Synthetic oligonucleotide
cugccucgggacgcgucac

SEQ ID NO: 393555 - RNA, 19 nt, Artificial Sequence
  Description of Artificial Sequence: Synthetic oligonucleotide
gcgucaccgaugucacaca

SEQ ID NO: 393556 - RNA, 19 nt, Artificial Sequence
  Description of Artificial Sequence: Synthetic oligonucleotide
agcgggcaauucaucuauu

SEQ ID NO: 393557 - RNA, 19 nt, Artificial Sequence
  Description of Artificial Sequence: Synthetic oligonucleotide
gccgucgccucacuuuucu

SEQ ID NO: 393558 - RNA, 19 nt, Artificial Sequence
  Description of Artificial Sequence: Synthetic oligonucleotide
ggucucgccgucgccucac

SEQ ID NO: 393559 - RNA, 19 nt, Artificial Sequence
  Description of Artificial Sequence: Synthetic oligonucleotide
cgacaacaccugucauuug

SEQ ID NO: 393560 - RNA, 19 nt, Artificial Sequence
  Description of Artificial Sequence: Synthetic oligonucleotide
ccccugagucauauauuua

SEQ ID NO: 393561 - RNA, 19 nt, Artificial Sequence
  Description of Artificial Sequence: Synthetic oligonucleotide
ccgucgccucacuuuucuc

SEQ ID NO: 393562 - RNA, 19 nt, Artificial Sequence
  Description of Artificial Sequence: Synthetic oligonucleotide
ccugugaagugaaccuaau

SEQ ID NO: 393563 - RNA, 19 nt, Artificial Sequence
  Description of Artificial Sequence: Synthetic oligonucleotide
cagguguccugagaaucuu

SEQ ID NO: 393564 - RNA, 19 nt, Artificial Sequence
  Description of Artificial Sequence: Synthetic oligonucleotide
cagucucauguccguuaau

SEQ ID NO: 393565 - RNA, 19 nt, Artificial Sequence
  Description of Artificial Sequence: Synthetic oligonucleotide
ggcuucgcuuuggaagcua

SEQ ID NO: 393566 - RNA, 19 nt, Artificial Sequence
  Description of Artificial Sequence: Synthetic oligonucleotide
gucucgccgucgccucacu

SEQ ID NO: 393567 - RNA, 19 nt, Artificial Sequence
  Description of Artificial Sequence: Synthetic oligonucleotide
ggccaauaagcgggcaauu

SEQ ID NO: 393568 - RNA, 19 nt, Artificial Sequence
  Description of Artificial Sequence: Synthetic oligonucleotide
cccgccccagguccacgac

SEQ ID NO: 393569 - RNA, 19 nt, Artificial Sequence
  Description of Artificial Sequence: Synthetic oligonucleotide
gccuacgagcagaguccca

SEQ ID NO: 393570 - RNA, 19 nt, Artificial Sequence
  Description of Artificial Sequence: Synthetic oligonucleotide
gcccucgauggcuucgcuu

SEQ ID NO: 393571 - RNA, 19 nt, Artificial Sequence
  Description of Artificial Sequence: Synthetic oligonucleotide
cgggacgcgucaccgaugu

SEQ ID NO: 393572 - RNA, 19 nt, Artificial Sequence
  Description of Artificial Sequence: Synthetic oligonucleotide
gggcugcguuuccuucccu

SEQ ID NO: 393573 - RNA, 19 nt, Artificial Sequence
  Description of Artificial Sequence: Synthetic oligonucleotide
cgccgucgccucacuuuuc

SEQ ID NO: 393574 - RNA, 19 nt, Artificial Sequence
  Description of Artificial Sequence: Synthetic oligonucleotide
ccgccccagguccacgacu

SEQ ID NO: 393575 - RNA, 19 nt, Artificial Sequence
  Description of Artificial Sequence: Synthetic oligonucleotide
aacauagcgagcuuguucc

SEQ ID NO: 393576 - RNA, 19 nt, Artificial Sequence
  Description of Artificial Sequence: Synthetic oligonucleotide
aaaaccuuucuccagguac

SEQ ID NO: 393577 - RNA, 19 nt, Artificial Sequence
  Description of Artificial Sequence: Synthetic oligonucleotide
aaaauugccaugaaagccc

SEQ ID NO: 393578 - RNA, 19 nt, Artificial Sequence
  Description of Artificial Sequence: Synthetic oligonucleotide
uguuccauuagccagaaga

SEQ ID NO: 393579 - RNA, 19 nt, Artificial Sequence
  Description of Artificial Sequence: Synthetic oligonucleotide
agagcuuuacagcaaaugc

SEQ ID NO: 393580 - RNA, 19 nt, Artificial Sequence
  Description of Artificial Sequence: Synthetic oligonucleotide
ugcuauaaugcucucaagg

SEQ ID NO: 393581 - RNA, 19 nt, Artificial Sequence
  Description of Artificial Sequence: Synthetic oligonucleotide
uuuucacuuaugaacaggg

SEQ ID NO: 393582 - RNA, 19 nt, Artificial Sequence
  Description of Artificial Sequence: Synthetic oligonucleotide
uuuauauagaaaacccagg

SEQ ID NO: 393583 - RNA, 19 nt, Artificial Sequence
  Description of Artificial Sequence: Synthetic oligonucleotide
uuuaaagagcuuuacagca

SEQ ID NO: 393584 - RNA, 19 nt, Artificial Sequence
  Description of Artificial Sequence: Synthetic oligonucleotide
ugaaaaucccuuuaggaag

SEQ ID NO: 393585 - RNA, 19 nt, Artificial Sequence
  Description of Artificial Sequence: Synthetic oligonucleotide
uauaucaugcuugauauag

SEQ ID NO: 393586 - RNA, 19 nt, Artificial Sequence
  Description of Artificial Sequence: Synthetic oligonucleotide
uucaguuaagccuugaaca

SEQ ID NO: 393587 - RNA, 19 nt, Artificial Sequence
  Description of Artificial Sequence: Synthetic oligonucleotide
uaacugacaaaccaaugcg

SEQ ID NO: 393588 - RNA, 19 nt, Artificial Sequence
  Description of Artificial Sequence: Synthetic oligonucleotide
aaaucauuggcuucuaaga

SEQ ID NO: 393589 - RNA, 19 nt, Artificial Sequence
  Description of Artificial Sequence: Synthetic oligonucleotide
uaaaacgcuggccugauag

SEQ ID NO: 393590 - RNA, 19 nt, Artificial Sequence
  Description of Artificial Sequence: Synthetic oligonucleotide
aaagcagaucacuacacag

SEQ ID NO: 393591 - RNA, 19 nt, Artificial Sequence
  Description of Artificial Sequence: Synthetic oligonucleotide
aagcaaucgaauuucuagg

SEQ ID NO: 393592 - RNA, 19 nt, Artificial Sequence
  Description of Artificial Sequence: Synthetic oligonucleotide
agaaaagagccagaaaucc

SEQ ID NO: 393593 - RNA, 19 nt, Artificial Sequence
  Description of Artificial Sequence: Synthetic oligonucleotide
uguuauucucucaagauaa

SEQ ID NO: 393594 - RNA, 19 nt, Artificial Sequence
  Description of Artificial Sequence: Synthetic oligonucleotide
cauguuauagauucaauug

SEQ ID NO: 393595 - RNA, 19 nt, Artificial Sequence
  Description of Artificial Sequence: Synthetic oligonucleotide
aagacacccgaauuuaagg

SEQ ID NO: 393596 - RNA, 19 nt, Artificial Sequence
  Description of Artificial Sequence: Synthetic oligonucleotide
aaaucauugccuuuugaga

SEQ ID NO: 393597 - RNA, 19 nt, Artificial Sequence
  Description of Artificial Sequence: Synthetic oligonucleotide
aucuaaugaguacauuugc

SEQ ID NO: 393598 - RNA, 19 nt, Artificial Sequence
  Description of Artificial Sequence: Synthetic oligonucleotide
aaaaugggcaauuuccacu

SEQ ID NO: 393599 - RNA, 19 nt, Artificial Sequence
  Description of Artificial Sequence: Synthetic oligonucleotide
accaacuacaaauggauag

SEQ ID NO: 393600 - RNA, 19 nt, Artificial Sequence
  Description of Artificial Sequence: Synthetic oligonucleotide
ucuaaugaguacauuugcc

SEQ ID NO: 393601 - RNA, 19 nt, Artificial Sequence
  Description of Artificial Sequence: Synthetic oligonucleotide
guaacugacaaaccaaugc

SEQ ID NO: 393602 - RNA, 19 nt, Artificial Sequence
  Description of Artificial Sequence: Synthetic oligonucleotide
uucacuuaugaacagggcu

SEQ ID NO: 393603 - RNA, 19 nt, Artificial Sequence
  Description of Artificial Sequence: Synthetic oligonucleotide
agacacccgaauuuaaggc

SEQ ID NO: 393604 - RNA, 19 nt, Artificial Sequence
  Description of Artificial Sequence: Synthetic oligonucleotide
uggacauacuaaauuauca

SEQ ID NO: 393605 - RNA, 19 nt, Artificial Sequence
  Description of Artificial Sequence: Synthetic oligonucleotide
caaaucauugccuuuugag

SEQ ID NO: 393606 - RNA, 19 nt, Artificial Sequence
  Description of Artificial Sequence: Synthetic oligonucleotide
aagauguaagaaccaggac

SEQ ID NO: 393607 - RNA, 19 nt, Artificial Sequence
  Description of Artificial Sequence: Synthetic oligonucleotide
uaaggcgaagagaaaagag

SEQ ID NO: 393608 - RNA, 19 nt, Artificial Sequence
  Description of Artificial Sequence: Synthetic oligonucleotide
auucauaaaagacacccga

SEQ ID NO: 393609 - RNA, 19 nt, Artificial Sequence
  Description of Artificial Sequence: Synthetic oligonucleotide
uuucaguuaagccuugaac

SEQ ID NO: 393610 - RNA, 19 nt, Artificial Sequence
  Description of Artificial Sequence: Synthetic oligonucleotide
ucagugaaauacuugguga

SEQ ID NO: 393611 - RNA, 19 nt, Artificial Sequence
  Description of Artificial Sequence: Synthetic oligonucleotide
uagaagguaacugacaaac

SEQ ID NO: 393612 - RNA, 19 nt, Artificial Sequence
  Description of Artificial Sequence: Synthetic oligonucleotide
aaauucaccccacccauca

SEQ ID NO: 393613 - RNA, 19 nt, Artificial Sequence
  Description of Artificial Sequence: Synthetic oligonucleotide
agucuugaaacugaguagg

SEQ ID NO: 393614 - RNA, 19 nt, Artificial Sequence
  Description of Artificial Sequence: Synthetic oligonucleotide
aaucccuuuaggaagagca

SEQ ID NO: 393615 - RNA, 19 nt, Artificial Sequence
  Description of Artificial Sequence: Synthetic oligonucleotide
uccgaaagcucuuucaagc

SEQ ID NO: 393616 - RNA, 19 nt, Artificial Sequence
  Description of Artificial Sequence: Synthetic oligonucleotide
aaucuaaugaguacauuug

SEQ ID NO: 393617 - RNA, 19 nt, Artificial Sequence
  Description of Artificial Sequence: Synthetic oligonucleotide
uacaaauucaccccaccca

SEQ ID NO: 393618 - RNA, 19 nt, Artificial Sequence
  Description of Artificial Sequence: Synthetic oligonucleotide
gaagguaacugacaaacca

SEQ ID NO: 393619 - RNA, 19 nt, Artificial Sequence
  Description of Artificial Sequence: Synthetic oligonucleotide
uuugccugugcauaaaacu

SEQ ID NO: 393620 - RNA, 19 nt, Artificial Sequence
  Description of Artificial Sequence: Synthetic oligonucleotide
cagaucacuacacagaauc

SEQ ID NO: 393621 - RNA, 19 nt, Artificial Sequence
  Description of Artificial Sequence: Synthetic oligonucleotide
cagggaauaaaguuaacug

SEQ ID NO: 393622 - RNA, 19 nt, Artificial Sequence
  Description of Artificial Sequence: Synthetic oligonucleotide
caaaucauuggcuucuaag

SEQ ID NO: 393623 - RNA, 19 nt, Artificial Sequence
  Description of Artificial Sequence: Synthetic oligonucleotide
auaaaggcuguuaagaaug

SEQ ID NO: 393624 - RNA, 19 nt, Artificial Sequence
  Description of Artificial Sequence: Synthetic oligonucleotide
gacacccgaauuuaaggcg

SEQ ID NO: 393625 - RNA, 19 nt, Artificial Sequence
  Description of Artificial Sequence: Synthetic oligonucleotide
aaaccacacccacaguuuc

SEQ ID NO: 393626 - RNA, 19 nt, Artificial Sequence
  Description of Artificial Sequence: Synthetic oligonucleotide
aauggauagcaaaagaaaa

SEQ ID NO: 393627 - RNA, 19 nt, Artificial Sequence
  Description of Artificial Sequence: Synthetic oligonucleotide
aaacugaguagggucaaac

SEQ ID NO: 393628 - RNA, 19 nt, Artificial Sequence
  Description of Artificial Sequence: Synthetic oligonucleotide
aaauccccgagcuggcggc

SEQ ID NO: 393629 - RNA, 19 nt, Artificial Sequence
  Description of Artificial Sequence: Synthetic oligonucleotide
gauucaguucuacagcccc

SEQ ID NO: 393630 - RNA, 19 nt, Artificial Sequence
  Description of Artificial Sequence: Synthetic oligonucleotide
acuacaaauggauagcaaa

SEQ ID NO: 393631 - RNA, 19 nt, Artificial Sequence
  Description of Artificial Sequence: Synthetic oligonucleotide
uuauaaaggcuguuaagaa

SEQ ID NO: 393632 - RNA, 19 nt, Artificial Sequence
  Description of Artificial Sequence: Synthetic oligonucleotide
uuaggaagagcaauaacuu

SEQ ID NO: 393633 - RNA, 19 nt, Artificial Sequence
  Description of Artificial Sequence: Synthetic oligonucleotide
gaaacuuagcuacugcuuc

SEQ ID NO: 393634 - RNA, 19 nt, Artificial Sequence
  Description of Artificial Sequence: Synthetic oligonucleotide
uuuugagccauucuacaaa

SEQ ID NO: 393635 - RNA, 19 nt, Artificial Sequence
  Description of Artificial Sequence: Synthetic oligonucleotide
ugaaaccccuucuuuaacc

SEQ ID NO: 393636 - RNA, 19 nt, Artificial Sequence
  Description of Artificial Sequence: Synthetic oligonucleotide
cauuaaguguuccauuagc

SEQ ID NO: 393637 - RNA, 19 nt, Artificial Sequence
  Description of Artificial Sequence: Synthetic oligonucleotide
uuagcuacugcuuccaaau

SEQ ID NO: 393638 - RNA, 19 nt, Artificial Sequence
  Description of Artificial Sequence: Synthetic oligonucleotide
aaauggauagcaaaagaaa

SEQ ID NO: 393639 - RNA, 19 nt, Artificial Sequence
  Description of Artificial Sequence: Synthetic oligonucleotide
uauaaaggcuguuaagaau

SEQ ID NO: 393640 - RNA, 19 nt, Artificial Sequence
  Description of Artificial Sequence: Synthetic oligonucleotide
ugcgacaucagauucaguu

SEQ ID NO: 393641 - RNA, 19 nt, Artificial Sequence
  Description of Artificial Sequence: Synthetic oligonucleotide
aaggccuuacaucacauua

SEQ ID NO: 393642 - RNA, 19 nt, Artificial Sequence
  Description of Artificial Sequence: Synthetic oligonucleotide
agccuugaacaauacaguc

SEQ ID NO: 393643 - RNA, 19 nt, Artificial Sequence
  Description of Artificial Sequence: Synthetic oligonucleotide
uaagcucuaguuuucuucu

SEQ ID NO: 393644 - RNA, 19 nt, Artificial Sequence
  Description of Artificial Sequence: Synthetic oligonucleotide
uuuccggagacuugcagcc

SEQ ID NO: 393645 - RNA, 19 nt, Artificial Sequence
  Description of Artificial Sequence: Synthetic oligonucleotide
agauucaauugucuacagg

SEQ ID NO: 393646 - RNA, 19 nt, Artificial Sequence
  Description of Artificial Sequence: Synthetic oligonucleotide
aauggaugcauuaaguguu

SEQ ID NO: 393647 - RNA, 19 nt, Artificial Sequence
  Description of Artificial Sequence: Synthetic oligonucleotide
uaaccaaaucauaucuuga

SEQ ID NO: 393648 - RNA, 19 nt, Artificial Sequence
  Description of Artificial Sequence: Synthetic oligonucleotide
cagauucaguucuacagcc

SEQ ID NO: 393649 - RNA, 19 nt, Artificial Sequence
  Description of Artificial Sequence: Synthetic oligonucleotide
ugaagugcuccacacuuug

SEQ ID NO: 393650 - RNA, 19 nt, Artificial Sequence
  Description of Artificial Sequence: Synthetic oligonucleotide
ugugugaguucucaacuca

SEQ ID NO: 393651 - RNA, 19 nt, Artificial Sequence
  Description of Artificial Sequence: Synthetic oligonucleotide
cuacuaaacguuuauuuca

SEQ ID NO: 393652 - RNA, 19 nt, Artificial Sequence
  Description of Artificial Sequence: Synthetic oligonucleotide
cucucaaggcuacuaaacg

SEQ ID NO: 393653 - RNA, 19 nt, Artificial Sequence
  Description of Artificial Sequence: Synthetic oligonucleotide
uccuugacauacaaaauua

SEQ ID NO: 393654 - RNA, 19 nt, Artificial Sequence
  Description of Artificial Sequence: Synthetic oligonucleotide
uuugagccauucuacaaac

SEQ ID NO: 393655 - RNA, 19 nt, Artificial Sequence
  Description of Artificial Sequence: Synthetic oligonucleotide
ccaaauucucauuauaaag

SEQ ID NO: 393656 - RNA, 19 nt, Artificial Sequence
  Description of Artificial Sequence: Synthetic oligonucleotide
uuauucucucaagauaagc

SEQ ID NO: 393657 - RNA, 19 nt, Artificial Sequence
  Description of Artificial Sequence: Synthetic oligonucleotide
aacugcucauugcggaagg

SEQ ID NO: 393658 - RNA, 19 nt, Artificial Sequence
  Description of Artificial Sequence: Synthetic oligonucleotide
ugugaguucucaacucaag

SEQ ID NO: 393659 - RNA, 19 nt, Artificial Sequence
  Description of Artificial Sequence: Synthetic oligonucleotide
uccucuccgacucugaaaa

SEQ ID NO: 393660 - RNA, 19 nt, Artificial Sequence
  Description of Artificial Sequence: Synthetic oligonucleotide
aaagacacccgaauuuaag

SEQ ID NO: 393661 - RNA, 19 nt, Artificial Sequence
  Description of Artificial Sequence: Synthetic oligonucleotide
uauuccgaaagcucuuuca

SEQ ID NO: 393662 - RNA, 19 nt, Artificial Sequence
  Description of Artificial Sequence: Synthetic oligonucleotide
auaccaaaucauuggcuuc

SEQ ID NO: 393663 - RNA, 19 nt, Artificial Sequence
  Description of Artificial Sequence: Synthetic oligonucleotide
acugacaaaccaaugcgac

SEQ ID NO: 393664 - RNA, 19 nt, Artificial Sequence
  Description of Artificial Sequence: Synthetic oligonucleotide
auccccacgggacaucugc

SEQ ID NO: 393665 - RNA, 19 nt, Artificial Sequence
  Description of Artificial Sequence: Synthetic oligonucleotide
cagacuaucccaaugacaa

SEQ ID NO: 393666 - RNA, 19 nt, Artificial Sequence
  Description of Artificial Sequence: Synthetic oligonucleotide
uuguuucaaaauucaguca

SEQ ID NO: 393667 - RNA, 19 nt, Artificial Sequence
  Description of Artificial Sequence: Synthetic oligonucleotide
uacuaaacguuuauuucaa

SEQ ID NO: 393668 - RNA, 19 nt, Artificial Sequence
  Description of Artificial Sequence: Synthetic oligonucleotide
cuuguagcgccuuauuaac

SEQ ID NO: 393669 - RNA, 19 nt, Artificial Sequence
  Description of Artificial Sequence: Synthetic oligonucleotide
uuaaagagcuuuacagcaa

SEQ ID NO: 393670 - RNA, 19 nt, Artificial Sequence
  Description of Artificial Sequence: Synthetic oligonucleotide
gcuauaaugcucucaaggc

SEQ ID NO: 393671 - RNA, 19 nt, Artificial Sequence
  Description of Artificial Sequence: Synthetic oligonucleotide
gaaauccccgagcuggcgg

SEQ ID NO: 393672 - RNA, 19 nt, Artificial Sequence
  Description of Artificial Sequence: Synthetic oligonucleotide
auggauagcaaaagaaaag

SEQ ID NO: 393673 - RNA, 19 nt, Artificial Sequence
  Description of Artificial Sequence: Synthetic oligonucleotide
acuuguagcgccuuauuaa

SEQ ID NO: 393674 - RNA, 19 nt, Artificial Sequence
  Description of Artificial Sequence: Synthetic oligonucleotide
uuucacuuaugaacagggc

SEQ ID NO: 393675 - RNA, 19 nt, Artificial Sequence
  Description of Artificial Sequence: Synthetic oligonucleotide
ucuggacauacuaaauuau

SEQ ID NO: 393676 - RNA, 19 nt, Artificial Sequence
  Description of Artificial Sequence: Synthetic oligonucleotide
gaaaagagccagaaauccc

SEQ ID NO: 393677 - RNA, 19 nt, Artificial Sequence
  Description of Artificial Sequence: Synthetic oligonucleotide
agcucuaguuuucuucuuc

SEQ ID NO: 393678 - RNA, 19 nt, Artificial Sequence
  Description of Artificial Sequence: Synthetic oligonucleotide
aguaaaggcagcgagcaga

SEQ ID NO: 393679 - RNA, 19 nt, Artificial Sequence
  Description of Artificial Sequence: Synthetic oligonucleotide
agcaaucgaauuucuagga

SEQ ID NO: 393680 - RNA, 19 nt, Artificial Sequence
  Description of Artificial Sequence: Synthetic oligonucleotide
aaggcuacuaaacguuuau

SEQ ID NO: 393681 - RNA, 19 nt, Artificial Sequence
  Description of Artificial Sequence: Synthetic oligonucleotide
agcuacugcuuccaaauca

SEQ ID NO: 393682 - RNA, 19 nt, Artificial Sequence
  Description of Artificial Sequence: Synthetic oligonucleotide
augugugaguucucaacuc

SEQ ID NO: 393683 - RNA, 19 nt, Artificial Sequence
  Description of Artificial Sequence: Synthetic oligonucleotide
aaagcccuuauaucaugcu

SEQ ID NO: 393684 - RNA, 19 nt, Artificial Sequence
  Description of Artificial Sequence: Synthetic oligonucleotide
aguagggucaaaccucucu

SEQ ID NO: 393685 - RNA, 19 nt, Artificial Sequence
  Description of Artificial Sequence: Synthetic oligonucleotide
cuuauaucaugcuugauau

SEQ ID NO: 393686 - RNA, 19 nt, Artificial Sequence
  Description of Artificial Sequence: Synthetic oligonucleotide
caaaaugggcaauuuccac

SEQ ID NO: 393687 - RNA, 19 nt, Artificial Sequence
  Description of Artificial Sequence: Synthetic oligonucleotide
uuccgaaagcucuuucaag

SEQ ID NO: 393688 - RNA, 19 nt, Artificial Sequence
  Description of Artificial Sequence: Synthetic oligonucleotide
cacuugaccagacuauccc

SEQ ID NO: 393689 - RNA, 19 nt, Artificial Sequence
  Description of Artificial Sequence: Synthetic oligonucleotide
gaaagcucuuucaagccug

SEQ ID NO: 393690 - RNA, 19 nt, Artificial Sequence
  Description of Artificial Sequence: Synthetic oligonucleotide
agaaccccagucaacauag

SEQ ID NO: 393691 - RNA, 19 nt, Artificial Sequence
  Description of Artificial Sequence: Synthetic oligonucleotide
ugaacaauacagucuugaa

SEQ ID NO: 393692 - RNA, 19 nt, Artificial Sequence
  Description of Artificial Sequence: Synthetic oligonucleotide
guuaacugcucauugcgga

SEQ ID NO: 393693 - RNA, 19 nt, Artificial Sequence
  Description of Artificial Sequence: Synthetic oligonucleotide
uucugcuacaagcuccucu

SEQ ID NO: 393694 - RNA, 19 nt, Artificial Sequence
  Description of Artificial Sequence: Synthetic oligonucleotide
gacacgugugcgcaucacg

SEQ ID NO: 393695 - RNA, 19 nt, Artificial Sequence
  Description of Artificial Sequence: Synthetic oligonucleotide
ucuuacacauggcuucaga

SEQ ID NO: 393696 - RNA, 19 nt, Artificial Sequence
  Description of Artificial Sequence: Synthetic oligonucleotide
guggcauuauucuagacua

SEQ ID NO: 393697 - RNA, 19 nt, Artificial Sequence
  Description of Artificial Sequence: Synthetic oligonucleotide
cuggacauacuaaauuauc

SEQ ID NO: 393698 - RNA, 19 nt, Artificial Sequence
  Description of Artificial Sequence: Synthetic oligonucleotide
agcagaucacuacacagaa

SEQ ID NO: 393699 - RNA, 19 nt, Artificial Sequence
  Description of Artificial Sequence: Synthetic oligonucleotide
ugcuuauuggcagggaaca

SEQ ID NO: 393700 - RNA, 19 nt, Artificial Sequence
  Description of Artificial Sequence: Synthetic oligonucleotide
uuccauuccacggugcuca

SEQ ID NO: 393701 - RNA, 19 nt, Artificial Sequence
  Description of Artificial Sequence: Synthetic oligonucleotide
ggacauacuaaauuaucac

SEQ ID NO: 393702 - RNA, 19 nt, Artificial Sequence
  Description of Artificial Sequence: Synthetic oligonucleotide
ugaagggauccccacggga

SEQ ID NO: 393703 - RNA, 19 nt, Artificial Sequence
  Description of Artificial Sequence: Synthetic oligonucleotide
auugcggaaggccuuacau

SEQ ID NO: 393704 - RNA, 19 nt, Artificial Sequence
  Description of Artificial Sequence: Synthetic oligonucleotide
cuuuaggaagagcaauaac

SEQ ID NO: 393705 - RNA, 19 nt, Artificial Sequence
  Description of Artificial Sequence: Synthetic oligonucleotide
ugacuuuccggagacuugc

SEQ ID NO: 393706 - RNA, 19 nt, Artificial Sequence
  Description of Artificial Sequence: Synthetic oligonucleotide
aacugacaaaccaaugcga

SEQ ID NO: 393707 - RNA, 19 nt, Artificial Sequence
  Description of Artificial Sequence: Synthetic oligonucleotide
aaucgaauuucuaggaaua

SEQ ID NO: 393708 - RNA, 19 nt, Artificial Sequence
  Description of Artificial Sequence: Synthetic oligonucleotide
ugcggacguauuccgaaag

SEQ ID NO: 393709 - RNA, 19 nt, Artificial Sequence
  Description of Artificial Sequence: Synthetic oligonucleotide
uacaacuccuguuugcuuu

SEQ ID NO: 393710 - RNA, 19 nt, Artificial Sequence
  Description of Artificial Sequence: Synthetic oligonucleotide
gagaaaagagccagaaauc

SEQ ID NO: 393711 - RNA, 19 nt, Artificial Sequence
  Description of Artificial Sequence: Synthetic oligonucleotide
auuugccugugcauaaaac

SEQ ID NO: 393712 - RNA, 19 nt, Artificial Sequence
  Description of Artificial Sequence: Synthetic oligonucleotide
uguagcgccuuauuaacuu

SEQ ID NO: 393713 - RNA, 19 nt, Artificial Sequence
  Description of Artificial Sequence: Synthetic oligonucleotide
ggcuguuaagaauggaugc

SEQ ID NO: 393714 - RNA, 19 nt, Artificial Sequence
  Description of Artificial Sequence: Synthetic oligonucleotide
uacuuguagcgccuuauua

SEQ ID NO: 393715 - RNA, 19 nt, Artificial Sequence
  Description of Artificial Sequence: Synthetic oligonucleotide
cuacaaauggauagcaaaa

SEQ ID NO: 393716 - RNA, 19 nt, Artificial Sequence
  Description of Artificial Sequence: Synthetic oligonucleotide
guaguaaaggcagcgagca

SEQ ID NO: 393717 - RNA, 19 nt, Artificial Sequence
  Description of Artificial Sequence: Synthetic oligonucleotide
aaaccuuucuccagguacu

SEQ ID NO: 393718 - RNA, 19 nt, Artificial Sequence
  Description of Artificial Sequence: Synthetic oligonucleotide
acacuugaccagacuaucc

SEQ ID NO: 393719 - RNA, 19 nt, Artificial Sequence
  Description of Artificial Sequence: Synthetic oligonucleotide
agauucaguucuacagccc

SEQ ID NO: 393720 - RNA, 19 nt, Artificial Sequence
  Description of Artificial Sequence: Synthetic oligonucleotide
aagguaacugacaaaccaa

SEQ ID NO: 393721 - RNA, 19 nt, Artificial Sequence
  Description of Artificial Sequence: Synthetic oligonucleotide
aagccuugaacaauacagu

SEQ ID NO: 393722 - RNA, 19 nt, Artificial Sequence
  Description of Artificial Sequence: Synthetic oligonucleotide
ugguugcggacguauuccg

SEQ ID NO: 393723 - RNA, 19 nt, Artificial Sequence
  Description of Artificial Sequence: Synthetic oligonucleotide
gcuacuaaacguuuauuuc

SEQ ID NO: 393724 - RNA, 19 nt, Artificial Sequence
  Description of Artificial Sequence: Synthetic oligonucleotide
uugauauagggagguagga

SEQ ID NO: 393725 - RNA, 19 nt, Artificial Sequence
  Description of Artificial Sequence: Synthetic oligonucleotide
auaucaugcuugauauagg

SEQ ID NO: 393726 - RNA, 19 nt, Artificial Sequence
  Description of Artificial Sequence: Synthetic oligonucleotide
uuaacugcucauugcggaa

SEQ ID NO: 393727 - RNA, 19 nt, Artificial Sequence
  Description of Artificial Sequence: Synthetic oligonucleotide
ugucuacaggauuuucacu

SEQ ID NO: 393728 - RNA, 19 nt, Artificial Sequence
  Description of Artificial Sequence: Synthetic oligonucleotide
uuguagcgccuuauuaacu

SEQ ID NO: 393729 - RNA, 19 nt, Artificial Sequence
  Description of Artificial Sequence: Synthetic oligonucleotide
cuggguaguaaaggcagcg

SEQ ID NO: 393730 - RNA, 19 nt, Artificial Sequence
  Description of Artificial Sequence: Synthetic oligonucleotide
uaugaacagggcucuggac

SEQ ID NO: 393731 - RNA, 19 nt, Artificial Sequence
  Description of Artificial Sequence: Synthetic oligonucleotide
auaaugcucucaaggcuac

SEQ ID NO: 393732 - RNA, 19 nt, Artificial Sequence
  Description of Artificial Sequence: Synthetic oligonucleotide
uaacugcucauugcggaag

SEQ ID NO: 393733 - RNA, 19 nt, Artificial Sequence
  Description of Artificial Sequence: Synthetic oligonucleotide
gaauuucuaggaauaagcu

SEQ ID NO: 393734 - RNA, 19 nt, Artificial Sequence
  Description of Artificial Sequence: Synthetic oligonucleotide
agcccuuauaucaugcuug

SEQ ID NO: 393735 - RNA, 19 nt, Artificial Sequence
  Description of Artificial Sequence: Synthetic oligonucleotide
guaagaaccaggacacaug

SEQ ID NO: 393736 - RNA, 19 nt, Artificial Sequence
  Description of Artificial Sequence: Synthetic oligonucleotide
ucaaggcuacuaaacguuu

SEQ ID NO: 393737 - RNA, 19 nt, Artificial Sequence
  Description of Artificial Sequence: Synthetic oligonucleotide
accaaugcgacaucagauu

SEQ ID NO: 393738 - RNA, 19 nt, Artificial Sequence
  Description of Artificial Sequence: Synthetic oligonucleotide
gaagggauccccacgggac

SEQ ID NO: 393739 - RNA, 19 nt, Artificial Sequence
  Description of Artificial Sequence: Synthetic oligonucleotide
ugcuugcauggucucuagg

SEQ ID NO: 393740 - RNA, 19 nt, Artificial Sequence
  Description of Artificial Sequence: Synthetic oligonucleotide
aggcuguuaagaauggaug

SEQ ID NO: 393741 - RNA, 19 nt, Artificial Sequence
  Description of Artificial Sequence: Synthetic oligonucleotide
aaugcucucaaggcuacua

SEQ ID NO: 393742 - RNA, 19 nt, Artificial Sequence
  Description of Artificial Sequence: Synthetic oligonucleotide
ucuacaggauuuucacuua

SEQ ID NO: 393743 - RNA, 19 nt, Artificial Sequence
  Description of Artificial Sequence: Synthetic oligonucleotide
auagaaaacccagggaaua

SEQ ID NO: 393744 - RNA, 19 nt, Artificial Sequence
  Description of Artificial Sequence: Synthetic oligonucleotide
aagccugccucagugaaau

SEQ ID NO: 393745 - RNA, 19 nt, Artificial Sequence
  Description of Artificial Sequence: Synthetic oligonucleotide
uccuaccucugccaugugu

SEQ ID NO: 393746 - RNA, 19 nt, Artificial Sequence
  Description of Artificial Sequence: Synthetic oligonucleotide
auaccacuucagaaugggc

SEQ ID NO: 393747 - RNA, 19 nt, Artificial Sequence
  Description of Artificial Sequence: Synthetic oligonucleotide
cuguuugcuuuacugagga

SEQ ID NO: 393748 - RNA, 19 nt, Artificial Sequence
  Description of Artificial Sequence: Synthetic oligonucleotide
cuaggaauaagcucuaguu

SEQ ID NO: 393749 - RNA, 19 nt, Artificial Sequence
  Description of Artificial Sequence: Synthetic oligonucleotide
gcuugauauagggagguag

SEQ ID NO: 393750 - RNA, 19 nt, Artificial Sequence
  Description of Artificial Sequence: Synthetic oligonucleotide
aaaggcuguuaagaaugga

SEQ ID NO: 393751 - RNA, 19 nt, Artificial Sequence
  Description of Artificial Sequence: Synthetic oligonucleotide
acgugugcgcaucacguca

SEQ ID NO: 393752 - RNA, 19 nt, Artificial Sequence
  Description of Artificial Sequence: Synthetic oligonucleotide
guuauucucucaagauaag

SEQ ID NO: 393753 - RNA, 19 nt, Artificial Sequence
  Description of Artificial Sequence: Synthetic oligonucleotide
uuucuaggaauaagcucua

SEQ ID NO: 393754 - RNA, 19 nt, Artificial Sequence
  Description of Artificial Sequence: Synthetic oligonucleotide
ccauuagccagaagaaccc

SEQ ID NO: 393755 - RNA, 19 nt, Artificial Sequence
  Description of Artificial Sequence: Synthetic oligonucleotide
auauagggagguaggaaga

SEQ ID NO: 393756 - RNA, 19 nt, Artificial Sequence
  Description of Artificial Sequence: Synthetic oligonucleotide
aacuccuguuugcuuuacu

SEQ ID NO: 393757 - RNA, 19 nt, Artificial Sequence
  Description of Artificial Sequence: Synthetic oligonucleotide
cuaagaauggcaccuucaa

SEQ ID NO: 393758 - RNA, 19 nt, Artificial Sequence
  Description of Artificial Sequence: Synthetic oligonucleotide
ugcucucaaggcuacuaaa

SEQ ID NO: 393759 - RNA, 19 nt, Artificial Sequence
  Description of Artificial Sequence: Synthetic oligonucleotide
uuauaucaugcuugauaua

SEQ ID NO: 393760 - RNA, 19 nt, Artificial Sequence
  Description of Artificial Sequence: Synthetic oligonucleotide
uucaagccugccucaguga

SEQ ID NO: 393761 - RNA, 19 nt, Artificial Sequence
  Description of Artificial Sequence: Synthetic oligonucleotide
guagcgccuuauuaacuug

SEQ ID NO: 393762 - RNA, 19 nt, Artificial Sequence
  Description of Artificial Sequence: Synthetic oligonucleotide
auagcggcgguagucaagu

SEQ ID NO: 393763 - RNA, 19 nt, Artificial Sequence
  Description of Artificial Sequence: Synthetic oligonucleotide
ccgaauuuaaggcgaagag

SEQ ID NO: 393764 - RNA, 19 nt, Artificial Sequence
  Description of Artificial Sequence: Synthetic oligonucleotide
cuaccaacuacaaauggau

SEQ ID NO: 393765 - RNA, 19 nt, Artificial Sequence
  Description of Artificial Sequence: Synthetic oligonucleotide
gucuacaggauuuucacuu

SEQ ID NO: 393766 - RNA, 19 nt, Artificial Sequence
  Description of Artificial Sequence: Synthetic oligonucleotide
gaugcauuaaguguuccau

SEQ ID NO: 393767 - RNA, 19 nt, Artificial Sequence
  Description of Artificial Sequence: Synthetic oligonucleotide
gacguauuccgaaagcucu

SEQ ID NO: 393768 - RNA, 19 nt, Artificial Sequence
  Description of Artificial Sequence: Synthetic oligonucleotide
cuauaaugcucucaaggcu

SEQ ID NO: 393769 - RNA, 19 nt, Artificial Sequence
  Description of Artificial Sequence: Synthetic oligonucleotide
agucaaguuuugcuccaga

SEQ ID NO: 393770 - RNA, 19 nt, Artificial Sequence
  Description of Artificial Sequence: Synthetic oligonucleotide
gguaguaaaggcagcgagc

SEQ ID NO: 393771 - RNA, 19 nt, Artificial Sequence
  Description of Artificial Sequence: Synthetic oligonucleotide
acuaaacguuuauuucaaa

SEQ ID NO: 393772 - RNA, 19 nt, Artificial Sequence
  Description of Artificial Sequence: Synthetic oligonucleotide
agaaacuuagcuacugcuu

SEQ ID NO: 393773 - RNA, 19 nt, Artificial Sequence
  Description of Artificial Sequence: Synthetic oligonucleotide
cauuagccagaagaacccc

SEQ ID NO: 393774 - RNA, 19 nt, Artificial Sequence
  Description of Artificial Sequence: Synthetic oligonucleotide
cagugaaauacuuggugaa

SEQ ID NO: 393775 - RNA, 19 nt, Artificial Sequence
  Description of Artificial Sequence: Synthetic oligonucleotide
uccaugauuuaaagagcuu

SEQ ID NO: 393776 - RNA, 19 nt, Artificial Sequence
  Description of Artificial Sequence: Synthetic oligonucleotide
cauagcggcgguagucaag

SEQ ID NO: 393777 - RNA, 19 nt, Artificial Sequence
  Description of Artificial Sequence: Synthetic oligonucleotide
uucuaggaauaagcucuag

SEQ ID NO: 393778 - RNA, 19 nt, Artificial Sequence
  Description of Artificial Sequence: Synthetic oligonucleotide
cuuagcuacugcuuccaaa

SEQ ID NO: 393779 - RNA, 19 nt, Artificial Sequence
  Description of Artificial Sequence: Synthetic oligonucleotide
cugaaaccccuucuuuaac

SEQ ID NO: 393780 - RNA, 19 nt, Artificial Sequence
  Description of Artificial Sequence: Synthetic oligonucleotide
augaguacauuugccugug

SEQ ID NO: 393781 - RNA, 19 nt, Artificial Sequence
  Description of Artificial Sequence: Synthetic oligonucleotide
aauucaccccacccaucaa

SEQ ID NO: 393782 - RNA, 19 nt, Artificial Sequence
  Description of Artificial Sequence: Synthetic oligonucleotide
cugacaaaccaaugcgaca

SEQ ID NO: 393783 - RNA, 19 nt, Artificial Sequence
  Description of Artificial Sequence: Synthetic oligonucleotide
ccuaccucugccaugugug

SEQ ID NO: 393784 - RNA, 19 nt, Artificial Sequence
  Description of Artificial Sequence: Synthetic oligonucleotide
ugccaugaaagcccuuaua

SEQ ID NO: 393785 - RNA, 19 nt, Artificial Sequence
  Description of Artificial Sequence: Synthetic oligonucleotide
cagaaauccccgagcuggc

SEQ ID NO: 393786 - RNA, 19 nt, Artificial Sequence
  Description of Artificial Sequence: Synthetic oligonucleotide
ccaacuacaaauggauagc

SEQ ID NO: 393787 - RNA, 19 nt, Artificial Sequence
  Description of Artificial Sequence: Synthetic oligonucleotide
acaacugguucugggauau

SEQ ID NO: 393788 - RNA, 19 nt, Artificial Sequence
  Description of Artificial Sequence: Synthetic oligonucleotide
uggaugcauuaaguguucc

SEQ ID NO: 393789 - RNA, 19 nt, Artificial Sequence
  Description of Artificial Sequence: Synthetic oligonucleotide
guugcggacguauuccgaa

SEQ ID NO: 393790 - RNA, 19 nt, Artificial Sequence
  Description of Artificial Sequence: Synthetic oligonucleotide
acguuuauuucaaauuaua

SEQ ID NO: 393791 - RNA, 19 nt, Artificial Sequence
  Description of Artificial Sequence: Synthetic oligonucleotide
auuccacggugcucaucac

SEQ ID NO: 393792 - RNA, 19 nt, Artificial Sequence
  Description of Artificial Sequence: Synthetic oligonucleotide
uggguaguaaaggcagcga

SEQ ID NO: 393793 - RNA, 19 nt, Artificial Sequence
  Description of Artificial Sequence: Synthetic oligonucleotide
ccauucuacaaacuucuuc

SEQ ID NO: 393794 - RNA, 19 nt, Artificial Sequence
  Description of Artificial Sequence: Synthetic oligonucleotide
caacuacaaauggauagca

SEQ ID NO: 393795 - RNA, 19 nt, Artificial Sequence
  Description of Artificial Sequence: Synthetic oligonucleotide
caaguuugcucuccauuca

SEQ ID NO: 393796 - RNA, 19 nt, Artificial Sequence
  Description of Artificial Sequence: Synthetic oligonucleotide
accccagucaacauagcga

SEQ ID NO: 393797 - RNA, 19 nt, Artificial Sequence
  Description of Artificial Sequence: Synthetic oligonucleotide
gaguucuuuccgcgccccg

SEQ ID NO: 393798 - RNA, 19 nt, Artificial Sequence
  Description of Artificial Sequence: Synthetic oligonucleotide
uuccgcgccccgauggucu

SEQ ID NO: 393799 - RNA, 19 nt, Artificial Sequence
  Description of Artificial Sequence: Synthetic oligonucleotide
uagucaaguuuugcuccag

SEQ ID NO: 393800 - RNA, 19 nt, Artificial Sequence
  Description of Artificial Sequence: Synthetic oligonucleotide
uagcuacugcuuccaaauc

SEQ ID NO: 393801 - RNA, 19 nt, Artificial Sequence
  Description of Artificial Sequence: Synthetic oligonucleotide
aucaugcuugauauaggga

SEQ ID NO: 393802 - RNA, 19 nt, Artificial Sequence
  Description of Artificial Sequence: Synthetic oligonucleotide
aucaagaaacuuagcuacu

SEQ ID NO: 393803 - RNA, 19 nt, Artificial Sequence
  Description of Artificial Sequence: Synthetic oligonucleotide
ccaugugugaguucucaac

SEQ ID NO: 393804 - RNA, 19 nt, Artificial Sequence
  Description of Artificial Sequence: Synthetic oligonucleotide
acacgugugcgcaucacgu

SEQ ID NO: 393805 - RNA, 19 nt, Artificial Sequence
  Description of Artificial Sequence: Synthetic oligonucleotide
guauuccgaaagcucuuuc

SEQ ID NO: 393806 - RNA, 19 nt, Artificial Sequence
  Description of Artificial Sequence: Synthetic oligonucleotide
augcucucaaggcuacuaa

SEQ ID NO: 393807 - RNA, 19 nt, Artificial Sequence
  Description of Artificial Sequence: Synthetic oligonucleotide
aguuugcucuccauucaug

SEQ ID NO: 393808 - RNA, 19 nt, Artificial Sequence
  Description of Artificial Sequence: Synthetic oligonucleotide
ccuaccaacuacaaaugga

SEQ ID NO: 393809 - RNA, 19 nt, Artificial Sequence
  Description of Artificial Sequence: Synthetic oligonucleotide
cacacuugaccagacuauc

SEQ ID NO: 393810 - RNA, 19 nt, Artificial Sequence
  Description of Artificial Sequence: Synthetic oligonucleotide
gcgagcuuguuccucuccg

SEQ ID NO: 393811 - RNA, 19 nt, Artificial Sequence
  Description of Artificial Sequence: Synthetic oligonucleotide
aacugcggcgcugucuccu

SEQ ID NO: 393812 - RNA, 19 nt, Artificial Sequence
  Description of Artificial Sequence: Synthetic oligonucleotide
ccgaaagcucuuucaagcc

SEQ ID NO: 393813 - RNA, 19 nt, Artificial Sequence
  Description of Artificial Sequence: Synthetic oligonucleotide
uucuuuccgcgccccgaug

SEQ ID NO: 393814 - RNA, 19 nt, Artificial Sequence
  Description of Artificial Sequence: Synthetic oligonucleotide
ccaaaucagcaccaguuuc

SEQ ID NO: 393815 - RNA, 19 nt, Artificial Sequence
  Description of Artificial Sequence: Synthetic oligonucleotide
agcggcgguagucaaguuu

SEQ ID NO: 393816 - RNA, 19 nt, Artificial Sequence
  Description of Artificial Sequence: Synthetic oligonucleotide
ucucauuauaaaggcuguu

SEQ ID NO: 393817 - RNA, 19 nt, Artificial Sequence
  Description of Artificial Sequence: Synthetic oligonucleotide
ccaaugcgacaucagauuc

SEQ ID NO: 393818 - RNA, 19 nt, Artificial Sequence
  Description of Artificial Sequence: Synthetic oligonucleotide
uuaaaacgcuggccugaua

SEQ ID NO: 393819 - RNA, 19 nt, Artificial Sequence
  Description of Artificial Sequence: Synthetic oligonucleotide
cacgucaucugccagugua

SEQ ID NO: 393820 - RNA, 19 nt, Artificial Sequence
  Description of Artificial Sequence: Synthetic oligonucleotide
cagaaugucaaagaguguu

SEQ ID NO: 393821 - RNA, 19 nt, Artificial Sequence
  Description of Artificial Sequence: Synthetic oligonucleotide
ggaugcauuaaguguucca

SEQ ID NO: 393822 - RNA, 19 nt, Artificial Sequence
  Description of Artificial Sequence: Synthetic oligonucleotide
uugcggacguauuccgaaa

SEQ ID NO: 393823 - RNA, 19 nt, Artificial Sequence
  Description of Artificial Sequence: Synthetic oligonucleotide
gcgacaucagauucaguuc

SEQ ID NO: 393824 - RNA, 19 nt, Artificial Sequence
  Description of Artificial Sequence: Synthetic oligonucleotide
agacacgugugcgcaucac

SEQ ID NO: 393825 - RNA, 19 nt, Artificial Sequence
  Description of Artificial Sequence: Synthetic oligonucleotide
aguucuuuccgcgccccga

SEQ ID NO: 393826 - RNA, 19 nt, Artificial Sequence
  Description of Artificial Sequence: Synthetic oligonucleotide
gcucucaaggcuacuaaac

SEQ ID NO: 393827 - RNA, 19 nt, Artificial Sequence
  Description of Artificial Sequence: Synthetic oligonucleotide
ggcuacuaaacguuuauuu

SEQ ID NO: 393828 - RNA, 19 nt, Artificial Sequence
  Description of Artificial Sequence: Synthetic oligonucleotide
uugcaacaugugcaucuuu

SEQ ID NO: 393829 - RNA, 19 nt, Artificial Sequence
  Description of Artificial Sequence: Synthetic oligonucleotide
gcaacugcggcgcugucuc

SEQ ID NO: 393830 - RNA, 19 nt, Artificial Sequence
  Description of Artificial Sequence: Synthetic oligonucleotide
cucaaggcuacuaaacguu

SEQ ID NO: 393831 - RNA, 19 nt, Artificial Sequence
  Description of Artificial Sequence: Synthetic oligonucleotide
acuuagcuacugcuuccaa

SEQ ID NO: 393832 - RNA, 19 nt, Artificial Sequence
  Description of Artificial Sequence: Synthetic oligonucleotide
uccccacgggacaucugcu

SEQ ID NO: 393833 - RNA, 19 nt, Artificial Sequence
  Description of Artificial Sequence: Synthetic oligonucleotide
cagcucagacugacccugg

SEQ ID NO: 393834 - RNA, 19 nt, Artificial Sequence
  Description of Artificial Sequence: Synthetic oligonucleotide
aggccuuacaucacauuau

SEQ ID NO: 393835 - RNA, 19 nt, Artificial Sequence
  Description of Artificial Sequence: Synthetic oligonucleotide
gcaaucgaauuucuaggaa

SEQ ID NO: 393836 - RNA, 19 nt, Artificial Sequence
  Description of Artificial Sequence: Synthetic oligonucleotide
cacgugugcgcaucacguc

SEQ ID NO: 393837 - RNA, 19 nt, Artificial Sequence
  Description of Artificial Sequence: Synthetic oligonucleotide
caguucuacagccccugca

SEQ ID NO: 393838 - RNA, 19 nt, Artificial Sequence
  Description of Artificial Sequence: Synthetic oligonucleotide
acuuaugaacagggcucug

SEQ ID NO: 393839 - RNA, 19 nt, Artificial Sequence
  Description of Artificial Sequence: Synthetic oligonucleotide
augagacaugacauuuuau

SEQ ID NO: 393840 - RNA, 19 nt, Artificial Sequence
  Description of Artificial Sequence: Synthetic oligonucleotide
ugcggcgcugucuccucug

SEQ ID NO: 393841 - RNA, 19 nt, Artificial Sequence
  Description of Artificial Sequence: Synthetic oligonucleotide
cgccuuauuaacuuguuaa

SEQ ID NO: 393842 - RNA, 19 nt, Artificial Sequence
  Description of Artificial Sequence: Synthetic oligonucleotide
ccaaugacaacugguucug

SEQ ID NO: 393843 - RNA, 19 nt, Artificial Sequence
  Description of Artificial Sequence: Synthetic oligonucleotide
ggacguauuccgaaagcuc

SEQ ID NO: 393844 - RNA, 19 nt, Artificial Sequence
  Description of Artificial Sequence: Synthetic oligonucleotide
uggccugauagcguugguu

SEQ ID NO: 393845 - RNA, 19 nt, Artificial Sequence
  Description of Artificial Sequence: Synthetic oligonucleotide
ccagacuaucccaaugaca

SEQ ID NO: 393846 - RNA, 19 nt, Artificial Sequence
  Description of Artificial Sequence: Synthetic oligonucleotide
gcggacguauuccgaaagc

SEQ ID NO: 393847 - RNA, 19 nt, Artificial Sequence
  Description of Artificial Sequence: Synthetic oligonucleotide
agacuugcagccacugcau

SEQ ID NO: 393848 - RNA, 19 nt, Artificial Sequence
  Description of Artificial Sequence: Synthetic oligonucleotide
acccgaauuuaaggcgaag

SEQ ID NO: 393849 - RNA, 19 nt, Artificial Sequence
  Description of Artificial Sequence: Synthetic oligonucleotide
cgguagucaaguuuugcuc

SEQ ID NO: 393850 - RNA, 19 nt, Artificial Sequence
  Description of Artificial Sequence: Synthetic oligonucleotide
caucacgucaucugccagu

SEQ ID NO: 393851 - RNA, 19 nt, Artificial Sequence
  Description of Artificial Sequence: Synthetic oligonucleotide
acgcuggccugauagcguu

SEQ ID NO: 393852 - RNA, 19 nt, Artificial Sequence
  Description of Artificial Sequence: Synthetic oligonucleotide
cccacgggacaucugcucc

SEQ ID NO: 393853 - RNA, 19 nt, Artificial Sequence
  Description of Artificial Sequence: Synthetic oligonucleotide
gaaacugaguagggucaaa

SEQ ID NO: 393854 - RNA, 19 nt, Artificial Sequence
  Description of Artificial Sequence: Synthetic oligonucleotide
gcuuauuggcagggaacag

SEQ ID NO: 393855 - RNA, 19 nt, Artificial Sequence
  Description of Artificial Sequence: Synthetic oligonucleotide
aucccuuuaggaagagcaa

SEQ ID NO: 393856 - RNA, 19 nt, Artificial Sequence
  Description of Artificial Sequence: Synthetic oligonucleotide
gaaccccagucaacauagc

SEQ ID NO: 393857 - RNA, 19 nt, Artificial Sequence
  Description of Artificial Sequence: Synthetic oligonucleotide
gugugaguucucaacucaa

SEQ ID NO: 393858 - RNA, 19 nt, Artificial Sequence
  Description of Artificial Sequence: Synthetic oligonucleotide
ucauugcggaaggccuuac

SEQ ID NO: 393859 - RNA, 19 nt, Artificial Sequence
  Description of Artificial Sequence: Synthetic oligonucleotide
gcccuuauaucaugcuuga

SEQ ID NO: 393860 - RNA, 19 nt, Artificial Sequence
  Description of Artificial Sequence: Synthetic oligonucleotide
aauccccgagcuggcggca

SEQ ID NO: 393861 - RNA, 19 nt, Artificial Sequence
  Description of Artificial Sequence: Synthetic oligonucleotide
cauugcggaaggccuuaca

SEQ ID NO: 393862 - RNA, 19 nt, Artificial Sequence
  Description of Artificial Sequence: Synthetic oligonucleotide
aggcuacuaaacguuuauu

SEQ ID NO: 393863 - RNA, 19 nt, Artificial Sequence
  Description of Artificial Sequence: Synthetic oligonucleotide
gcgguagucaaguuuugcu

SEQ ID NO: 393864 - RNA, 19 nt, Artificial Sequence
  Description of Artificial Sequence: Synthetic oligonucleotide
agguacuuguagcgccuua

SEQ ID NO: 393865 - RNA, 19 nt, Artificial Sequence
  Description of Artificial Sequence: Synthetic oligonucleotide
ggcgaagagaaaagagcca

SEQ ID NO: 393866 - RNA, 19 nt, Artificial Sequence
  Description of Artificial Sequence: Synthetic oligonucleotide
uuuccgcgccccgaugguc

SEQ ID NO: 393867 - RNA, 19 nt, Artificial Sequence
  Description of Artificial Sequence: Synthetic oligonucleotide
caacugcggcgcugucucc

SEQ ID NO: 393868 - RNA, 19 nt, Artificial Sequence
  Description of Artificial Sequence: Synthetic oligonucleotide
cacuuaugaacagggcucu

SEQ ID NO: 393869 - RNA, 19 nt, Artificial Sequence
  Description of Artificial Sequence: Synthetic oligonucleotide
cccgaauuuaaggcgaaga

SEQ ID NO: 393870 - RNA, 19 nt, Artificial Sequence
  Description of Artificial Sequence: Synthetic oligonucleotide
acguauuccgaaagcucuu

SEQ ID NO: 393871 - RNA, 19 nt, Artificial Sequence
  Description of Artificial Sequence: Synthetic oligonucleotide
ggccugauagcguugguuu

SEQ ID NO: 393872 - RNA, 19 nt, Artificial Sequence
  Description of Artificial Sequence: Synthetic oligonucleotide
ccagucaacauagcgagcu

SEQ ID NO: 393873 - RNA, 19 nt, Artificial Sequence
  Description of Artificial Sequence: Synthetic oligonucleotide
agggauccccacgggacau

SEQ ID NO: 393874 - RNA, 19 nt, Artificial Sequence
  Description of Artificial Sequence: Synthetic oligonucleotide
gagggcuguauugcuucaa

SEQ ID NO: 393875 - RNA, 19 nt, Artificial Sequence
  Description of Artificial Sequence: Synthetic oligonucleotide
ccagggaauaaaguuaacu

SEQ ID NO: 393876 - RNA, 19 nt, Artificial Sequence
  Description of Artificial Sequence: Synthetic oligonucleotide
ccuuuaggaagagcaauaa

SEQ ID NO: 393877 - RNA, 19 nt, Artificial Sequence
  Description of Artificial Sequence: Synthetic oligonucleotide
agacugacccuggguagua

SEQ ID NO: 393878 - RNA, 19 nt, Artificial Sequence
  Description of Artificial Sequence: Synthetic oligonucleotide
cacccgaauuuaaggcgaa

SEQ ID NO: 393879 - RNA, 19 nt, Artificial Sequence
  Description of Artificial Sequence: Synthetic oligonucleotide
ggcauuauucuagacuauu

SEQ ID NO: 393880 - RNA, 19 nt, Artificial Sequence
  Description of Artificial Sequence: Synthetic oligonucleotide
gugugcgcaucacgucauc

SEQ ID NO: 393881 - RNA, 19 nt, Artificial Sequence
  Description of Artificial Sequence: Synthetic oligonucleotide
cucauugcggaaggccuua

SEQ ID NO: 393882 - RNA, 19 nt, Artificial Sequence
  Description of Artificial Sequence: Synthetic oligonucleotide
ggccuuacaucacauuauu

SEQ ID NO: 393883 - RNA, 19 nt, Artificial Sequence
  Description of Artificial Sequence: Synthetic oligonucleotide
cacaguuuccaggaaccau

SEQ ID NO: 393884 - RNA, 19 nt, Artificial Sequence
  Description of Artificial Sequence: Synthetic oligonucleotide
gccaugugugaguucucaa

SEQ ID NO: 393885 - RNA, 19 nt, Artificial Sequence
  Description of Artificial Sequence: Synthetic oligonucleotide
cuacaacuccuguuugcuu

SEQ ID NO: 393886 - RNA, 19 nt, Artificial Sequence
  Description of Artificial Sequence: Synthetic oligonucleotide
gguugcggacguauuccga

SEQ ID NO: 393887 - RNA, 19 nt, Artificial Sequence
  Description of Artificial Sequence: Synthetic oligonucleotide
gcgccuuauuaacuuguua

SEQ ID NO: 393888 - RNA, 19 nt, Artificial Sequence
  Description of Artificial Sequence: Synthetic oligonucleotide
gccuuacaucacauuauua

SEQ ID NO: 393889 - RNA, 19 nt, Artificial Sequence
  Description of Artificial Sequence: Synthetic oligonucleotide
uagcggcgguagucaaguu

SEQ ID NO: 393890 - RNA, 19 nt, Artificial Sequence
  Description of Artificial Sequence: Synthetic oligonucleotide
ccccacgggacaucugcuc

SEQ ID NO: 393891 - RNA, 19 nt, Artificial Sequence
  Description of Artificial Sequence: Synthetic oligonucleotide
cgcaucacgucaucugcca

SEQ ID NO: 393892 - RNA, 19 nt, Artificial Sequence
  Description of Artificial Sequence: Synthetic oligonucleotide
uggcggcaacugcggcgcu

SEQ ID NO: 393893 - RNA, 19 nt, Artificial Sequence
  Description of Artificial Sequence: Synthetic oligonucleotide
cuuuccgcgccccgauggu

SEQ ID NO: 393894 - RNA, 19 nt, Artificial Sequence
  Description of Artificial Sequence: Synthetic oligonucleotide
augcgacaucagauucagu

SEQ ID NO: 393895 - RNA, 19 nt, Artificial Sequence
  Description of Artificial Sequence: Synthetic oligonucleotide
gcggcgcugucuccucugc

SEQ ID NO: 393896 - RNA, 19 nt, Artificial Sequence
  Description of Artificial Sequence: Synthetic oligonucleotide
gcggcgguagucaaguuuu

SEQ ID NO: 393897 - RNA, 19 nt, Artificial Sequence
  Description of Artificial Sequence: Synthetic oligonucleotide
ggcggcaacugcggcgcug

SEQ ID NO: 393898 - RNA, 19 nt, Artificial Sequence
  Description of Artificial Sequence: Synthetic oligonucleotide
cacagacacgugugcgcau

SEQ ID NO: 393899 - RNA, 19 nt, Artificial Sequence
  Description of Artificial Sequence: Synthetic oligonucleotide
gcgagcagagggcuguauu

SEQ ID NO: 393900 - RNA, 19 nt, Artificial Sequence
  Description of Artificial Sequence: Synthetic oligonucleotide
ccaucagucuguuguccau

SEQ ID NO: 393901 - RNA, 19 nt, Artificial Sequence
  Description of Artificial Sequence: Synthetic oligonucleotide
cggacguauuccgaaagcu

SEQ ID NO: 393902 - RNA, 19 nt, Artificial Sequence
  Description of Artificial Sequence: Synthetic oligonucleotide
cggcgguagucaaguuuug

SEQ ID NO: 393903 - RNA, 19 nt, Artificial Sequence
  Description of Artificial Sequence: Synthetic oligonucleotide
ccacgggacaucugcuccu

SEQ ID NO: 393904 - RNA, 19 nt, Artificial Sequence
  Description of Artificial Sequence: Synthetic oligonucleotide
gcucauugcggaaggccuu

SEQ ID NO: 393905 - RNA, 19 nt, Artificial Sequence
  Description of Artificial Sequence: Synthetic oligonucleotide
gcggcaacugcggcgcugu

SEQ ID NO: 393906 - RNA, 19 nt, Artificial Sequence
  Description of Artificial Sequence: Synthetic oligonucleotide
gccauucuacaaacuucuu

SEQ ID NO: 393907 - RNA, 19 nt, Artificial Sequence
  Description of Artificial Sequence: Synthetic oligonucleotide
cgugugcgcaucacgucau

SEQ ID NO: 393908 - RNA, 19 nt, Artificial Sequence
  Description of Artificial Sequence: Synthetic oligonucleotide
gcgccccgauggucugcug

SEQ ID NO: 393909 - RNA, 19 nt, Artificial Sequence
  Description of Artificial Sequence: Synthetic oligonucleotide
cguauuccgaaagcucuuu

SEQ ID NO: 393910 - RNA, 19 nt, Artificial Sequence
  Description of Artificial Sequence: Synthetic oligonucleotide
ccccacccaucaauguuuu

SEQ ID NO: 393911 - RNA, 19 nt, Artificial Sequence
  Description of Artificial Sequence: Synthetic oligonucleotide
ccgcgccccgauggucugc

SEQ ID NO: 393912 - RNA, 19 nt, Artificial Sequence
  Description of Artificial Sequence: Synthetic oligonucleotide
caacugguucugggauauu

SEQ ID NO: 393913 - RNA, 19 nt, Artificial Sequence
  Description of Artificial Sequence: Synthetic oligonucleotide
cccuuauaucaugcuugau

SEQ ID NO: 393914 - RNA, 19 nt, Artificial Sequence
  Description of Artificial Sequence: Synthetic oligonucleotide
ccccgagcuggcggcaacu

SEQ ID NO: 393915 - RNA, 19 nt, Artificial Sequence
  Description of Artificial Sequence: Synthetic oligonucleotide
cgcgccccgauggucugcu

SEQ ID NO: 393916 - RNA, 19 nt, Artificial Sequence
  Description of Artificial Sequence: Synthetic oligonucleotide
aaaacuagcacauuucagg

SEQ ID NO: 393917 - RNA, 19 nt, Artificial Sequence
  Description of Artificial Sequence: Synthetic oligonucleotide
ucaaguaauacaaauacag

SEQ ID NO: 393918 - RNA, 19 nt, Artificial Sequence
  Description of Artificial Sequence: Synthetic oligonucleotide
aagaguacagagcacaacc

SEQ ID NO: 393919 - RNA, 19 nt, Artificial Sequence
  Description of Artificial Sequence: Synthetic oligonucleotide
aauacauuuaguguguuac

SEQ ID NO: 393920 - RNA, 19 nt, Artificial Sequence
  Description of Artificial Sequence: Synthetic oligonucleotide
aaugguaaacuuaauaagg

SEQ ID NO: 393921 - RNA, 19 nt, Artificial Sequence
  Description of Artificial Sequence: Synthetic oligonucleotide
aauagacuacucaauaucc

SEQ ID NO: 393922 - RNA, 19 nt, Artificial Sequence
  Description of Artificial Sequence: Synthetic oligonucleotide
aggauuggagucuugaugc

SEQ ID NO: 393923 - RNA, 19 nt, Artificial Sequence
  Description of Artificial Sequence: Synthetic oligonucleotide
ugauaauggugauagaagg

SEQ ID NO: 393924 - RNA, 19 nt, Artificial Sequence
  Description of Artificial Sequence: Synthetic oligonucleotide
acaacgacgagccauuucc

SEQ ID NO: 393925 - RNA, 19 nt, Artificial Sequence
  Description of Artificial Sequence: Synthetic oligonucleotide
aaagcaauuaaugguaaac

SEQ ID NO: 393926 - RNA, 19 nt, Artificial Sequence
  Description of Artificial Sequence: Synthetic oligonucleotide
acaguuacaagguagauga

SEQ ID NO: 393927 - RNA, 19 nt, Artificial Sequence
  Description of Artificial Sequence: Synthetic oligonucleotide
auuaugucuaauucuuugc

SEQ ID NO: 393928 - RNA, 19 nt, Artificial Sequence
  Description of Artificial Sequence: Synthetic oligonucleotide
uauuggagaauguugauca

SEQ ID NO: 393929 - RNA, 19 nt, Artificial Sequence
  Description of Artificial Sequence: Synthetic oligonucleotide
uguauauagaacaaagcaa

SEQ ID NO: 393930 - RNA, 19 nt, Artificial Sequence
  Description of Artificial Sequence: Synthetic oligonucleotide
uaaugguaaacuuaauaag

SEQ ID NO: 393931 - RNA, 19 nt, Artificial Sequence
  Description of Artificial Sequence: Synthetic oligonucleotide
ucuguuuggcaauaguucg

SEQ ID NO: 393932 - RNA, 19 nt, Artificial Sequence
  Description of Artificial Sequence: Synthetic oligonucleotide
ucaugacgcauuaauaccg

SEQ ID NO: 393933 - RNA, 19 nt, Artificial Sequence
  Description of Artificial Sequence: Synthetic oligonucleotide
uucaugauaaucaaguaau

SEQ ID NO: 393934 - RNA, 19 nt, Artificial Sequence
  Description of Artificial Sequence: Synthetic oligonucleotide
uauaaaaccaaguauguuu

SEQ ID NO: 393935 - RNA, 19 nt, Artificial Sequence
  Description of Artificial Sequence: Synthetic oligonucleotide
aauaaagguaguccagauc

SEQ ID NO: 393936 - RNA, 19 nt, Artificial Sequence
  Description of Artificial Sequence: Synthetic oligonucleotide
acuaccagagcuuugugac

SEQ ID NO: 393937 - RNA, 19 nt, Artificial Sequence
  Description of Artificial Sequence: Synthetic oligonucleotide
uuuaugauauuggagaaug

SEQ ID NO: 393938 - RNA, 19 nt, Artificial Sequence
  Description of Artificial Sequence: Synthetic oligonucleotide
ucuucuaagcccauggcag

SEQ ID NO: 393939 - RNA, 19 nt, Artificial Sequence
  Description of Artificial Sequence: Synthetic oligonucleotide
cauguuuaaaccaccagcc

SEQ ID NO: 393940 - RNA, 19 nt, Artificial Sequence
  Description of Artificial Sequence: Synthetic oligonucleotide
uguaauaugguaauugaua

SEQ ID NO: 393941 - RNA, 19 nt, Artificial Sequence
  Description of Artificial Sequence: Synthetic oligonucleotide
ucuuuaagugggaagaaca

SEQ ID NO: 393942 - RNA, 19 nt, Artificial Sequence
  Description of Artificial Sequence: Synthetic oligonucleotide
aagguucacuguuagcagc

SEQ ID NO: 393943 - RNA, 19 nt, Artificial Sequence
  Description of Artificial Sequence: Synthetic oligonucleotide
aaagacaagguuuucacua

SEQ ID NO: 393944 - RNA, 19 nt, Artificial Sequence
  Description of Artificial Sequence: Synthetic oligonucleotide
uuucaugacgcauuaauac

SEQ ID NO: 393945 - RNA, 19 nt, Artificial Sequence
  Description of Artificial Sequence: Synthetic oligonucleotide
cuaucaaugccuuauguac

SEQ ID NO: 393946 - RNA, 19 nt, Artificial Sequence
  Description of Artificial Sequence: Synthetic oligonucleotide
aauaccgucugguagauuu

SEQ ID NO: 393947 - RNA, 19 nt, Artificial Sequence
  Description of Artificial Sequence: Synthetic oligonucleotide
auuacccagaguuagacca

SEQ ID NO: 393948 - RNA, 19 nt, Artificial Sequence
  Description of Artificial Sequence: Synthetic oligonucleotide
auaagcuuaauuugaguag

SEQ ID NO: 393949 - RNA, 19 nt, Artificial Sequence
  Description of Artificial Sequence: Synthetic oligonucleotide
agacauucgucacuguucc

SEQ ID NO: 393950 - RNA, 19 nt, Artificial Sequence
  Description of Artificial Sequence: Synthetic oligonucleotide
uucgcugaaccaauaaagg

SEQ ID NO: 393951 - RNA, 19 nt, Artificial Sequence
  Description of Artificial Sequence: Synthetic oligonucleotide
uccauaacggccuuuacca

SEQ ID NO: 393952 - RNA, 19 nt, Artificial Sequence
  Description of Artificial Sequence: Synthetic oligonucleotide
auagagagauccuauuuuc

SEQ ID NO: 393953 - RNA, 19 nt, Artificial Sequence
  Description of Artificial Sequence: Synthetic oligonucleotide
acuuauuuggccuuuacaa

SEQ ID NO: 393954 - RNA, 19 nt, Artificial Sequence
  Description of Artificial Sequence: Synthetic oligonucleotide
uugacuuucauuagaguga

SEQ ID NO: 393955 - RNA, 19 nt, Artificial Sequence
  Description of Artificial Sequence: Synthetic oligonucleotide
uuagagugaaugaauaaaa

SEQ ID NO: 393956 - RNA, 19 nt, Artificial Sequence
  Description of Artificial Sequence: Synthetic oligonucleotide
ugacuggucaaucaggucu

SEQ ID NO: 393957 - RNA, 19 nt, Artificial Sequence
  Description of Artificial Sequence: Synthetic oligonucleotide
uuaaaucagaugcuguaca

SEQ ID NO: 393958 - RNA, 19 nt, Artificial Sequence
  Description of Artificial Sequence: Synthetic oligonucleotide
cuuucaaugauucuccaac

SEQ ID NO: 393959 - RNA, 19 nt, Artificial Sequence
  Description of Artificial Sequence: Synthetic oligonucleotide
uuuccuuuaaccuaucaau

SEQ ID NO: 393960 - RNA, 19 nt, Artificial Sequence
  Description of Artificial Sequence: Synthetic oligonucleotide
aaccaauaaagguagucca

SEQ ID NO: 393961 - RNA, 19 nt, Artificial Sequence
  Description of Artificial Sequence: Synthetic oligonucleotide
acaaccuaaaauuacagua

SEQ ID NO: 393962 - RNA, 19 nt, Artificial Sequence
  Description of Artificial Sequence: Synthetic oligonucleotide
uguuuaaaccaccagccac

SEQ ID NO: 393963 - RNA, 19 nt, Artificial Sequence
  Description of Artificial Sequence: Synthetic oligonucleotide
ugcuguacaaaauacauuu

SEQ ID NO: 393964 - RNA, 19 nt, Artificial Sequence
  Description of Artificial Sequence: Synthetic oligonucleotide
uguuguaauaugguaauug

SEQ ID NO: 393965 - RNA, 19 nt, Artificial Sequence
  Description of Artificial Sequence: Synthetic oligonucleotide
uccuguaauacaacgacga

SEQ ID NO: 393966 - RNA, 19 nt, Artificial Sequence
  Description of Artificial Sequence: Synthetic oligonucleotide
auuaauaccgucugguaga

SEQ ID NO: 393967 - RNA, 19 nt, Artificial Sequence
  Description of Artificial Sequence: Synthetic oligonucleotide
aacagucccaaucuuauau

SEQ ID NO: 393968 - RNA, 19 nt, Artificial Sequence
  Description of Artificial Sequence: Synthetic oligonucleotide
augguaaacuuaauaaggc

SEQ ID NO: 393969 - RNA, 19 nt, Artificial Sequence
  Description of Artificial Sequence: Synthetic oligonucleotide
aaagguucacuguuagcag

SEQ ID NO: 393970 - RNA, 19 nt, Artificial Sequence
  Description of Artificial Sequence: Synthetic oligonucleotide
aacgacgagccauuucccc

SEQ ID NO: 393971 - RNA, 19 nt, Artificial Sequence
  Description of Artificial Sequence: Synthetic oligonucleotide
ugaacaaccauacauucuu

SEQ ID NO: 393972 - RNA, 19 nt, Artificial Sequence
  Description of Artificial Sequence: Synthetic oligonucleotide
gaauagacuacucaauauc

SEQ ID NO: 393973 - RNA, 19 nt, Artificial Sequence
  Description of Artificial Sequence: Synthetic oligonucleotide
aauguugaucagauauugc

SEQ ID NO: 393974 - RNA, 19 nt, Artificial Sequence
  Description of Artificial Sequence: Synthetic oligonucleotide
uauugcauguuuaaaccac

SEQ ID NO: 393975 - RNA, 19 nt, Artificial Sequence
  Description of Artificial Sequence: Synthetic oligonucleotide
auuaaugguaaacuuaaua

SEQ ID NO: 393976 - RNA, 19 nt, Artificial Sequence
  Description of Artificial Sequence: Synthetic oligonucleotide
uagaugacuuuuaugauau

SEQ ID NO: 393977 - RNA, 19 nt, Artificial Sequence
  Description of Artificial Sequence: Synthetic oligonucleotide
agcuuaaauaauuccacug

SEQ ID NO: 393978 - RNA, 19 nt, Artificial Sequence
  Description of Artificial Sequence: Synthetic oligonucleotide
uuacauaucaaagaugaau

SEQ ID NO: 393979 - RNA, 19 nt, Artificial Sequence
  Description of Artificial Sequence: Synthetic oligonucleotide
gguaccauaaauuucugug

SEQ ID NO: 393980 - RNA, 19 nt, Artificial Sequence
  Description of Artificial Sequence: Synthetic oligonucleotide
aacaaacggauguuuccuc

SEQ ID NO: 393981 - RNA, 19 nt, Artificial Sequence
  Description of Artificial Sequence: Synthetic oligonucleotide
uaguguggcacauuucagg

SEQ ID NO: 393982 - RNA, 19 nt, Artificial Sequence
  Description of Artificial Sequence: Synthetic oligonucleotide
uuugguguuuuacaauuac

SEQ ID NO: 393983 - RNA, 19 nt, Artificial Sequence
  Description of Artificial Sequence: Synthetic oligonucleotide
aaguauugacuuucauuag

SEQ ID NO: 393984 - RNA, 19 nt, Artificial Sequence
  Description of Artificial Sequence: Synthetic oligonucleotide
aaaucagagaugcaugguu

SEQ ID NO: 393985 - RNA, 19 nt, Artificial Sequence
  Description of Artificial Sequence: Synthetic oligonucleotide
ucgaugagcaauugcaggc

SEQ ID NO: 393986 - RNA, 19 nt, Artificial Sequence
  Description of Artificial Sequence: Synthetic oligonucleotide
cacuuuauggacaggacac

SEQ ID NO: 393987 - RNA, 19 nt, Artificial Sequence
  Description of Artificial Sequence: Synthetic oligonucleotide
uaugguaauugauauuccu

SEQ ID NO: 393988 - RNA, 19 nt, Artificial Sequence
  Description of Artificial Sequence: Synthetic oligonucleotide
aaacugcucgaagacauuc

SEQ ID NO: 393989 - RNA, 19 nt, Artificial Sequence
  Description of Artificial Sequence: Synthetic oligonucleotide
gaauguugaucagauauug

SEQ ID NO: 393990 - RNA, 19 nt, Artificial Sequence
  Description of Artificial Sequence: Synthetic oligonucleotide
aaaucacgguuguaacgac

SEQ ID NO: 393991 - RNA, 19 nt, Artificial Sequence
  Description of Artificial Sequence: Synthetic oligonucleotide
gguaugucaacuucauucg

SEQ ID NO: 393992 - RNA, 19 nt, Artificial Sequence
  Description of Artificial Sequence: Synthetic oligonucleotide
aaagaguacagagcacaac

SEQ ID NO: 393993 - RNA, 19 nt, Artificial Sequence
  Description of Artificial Sequence: Synthetic oligonucleotide
aauucuuugcaaaagccau

SEQ ID NO: 393994 - RNA, 19 nt, Artificial Sequence
  Description of Artificial Sequence: Synthetic oligonucleotide
aauuccacugaaagaguac

SEQ ID NO: 393995 - RNA, 19 nt, Artificial Sequence
  Description of Artificial Sequence: Synthetic oligonucleotide
aacauaaucuguauauaga

SEQ ID NO: 393996 - RNA, 19 nt, Artificial Sequence
  Description of Artificial Sequence: Synthetic oligonucleotide
agaaauaagcuuaauuuga

SEQ ID NO: 393997 - RNA, 19 nt, Artificial Sequence
  Description of Artificial Sequence: Synthetic oligonucleotide
ucacuaggcaccauguugu

SEQ ID NO: 393998 - RNA, 19 nt, Artificial Sequence
  Description of Artificial Sequence: Synthetic oligonucleotide
ugguaaacuuaauaaggca

SEQ ID NO: 393999 - RNA, 19 nt, Artificial Sequence
  Description of Artificial Sequence: Synthetic oligonucleotide
ucauuagagugaaugaaua

SEQ ID NO: 394000 - RNA, 19 nt, Artificial Sequence
  Description of Artificial Sequence: Synthetic oligonucleotide
aggacaacagcugauaaug

SEQ ID NO: 394001 - RNA, 19 nt, Artificial Sequence
  Description of Artificial Sequence: Synthetic oligonucleotide
guaaacuuaauaaggcacc

SEQ ID NO: 394002 - RNA, 19 nt, Artificial Sequence
  Description of Artificial Sequence: Synthetic oligonucleotide
uucgccacgccauuuaccc

SEQ ID NO: 394003 - RNA, 19 nt, Artificial Sequence
  Description of Artificial Sequence: Synthetic oligonucleotide
aucuguauauagaacaaag

SEQ ID NO: 394004 - RNA, 19 nt, Artificial Sequence
  Description of Artificial Sequence: Synthetic oligonucleotide
caaguauguuuucaugacg

SEQ ID NO: 394005 - RNA, 19 nt, Artificial Sequence
  Description of Artificial Sequence: Synthetic oligonucleotide
acugauuacccagaguuag

SEQ ID NO: 394006 - RNA, 19 nt, Artificial Sequence
  Description of Artificial Sequence: Synthetic oligonucleotide
acuguuagcagccugugaa

SEQ ID NO: 394007 - RNA, 19 nt, Artificial Sequence
  Description of Artificial Sequence: Synthetic oligonucleotide
ucacuaaggaaaucugccc

SEQ ID NO: 394008 - RNA, 19 nt, Artificial Sequence
  Description of Artificial Sequence: Synthetic oligonucleotide
aaucacgguuguaacgacc

SEQ ID NO: 394009 - RNA, 19 nt, Artificial Sequence
  Description of Artificial Sequence: Synthetic oligonucleotide
caugauaaucaaguaauac

SEQ ID NO: 394010 - RNA, 19 nt, Artificial Sequence
  Description of Artificial Sequence: Synthetic oligonucleotide
guuaaaucuuuacauccug

SEQ ID NO: 394011 - RNA, 19 nt, Artificial Sequence
  Description of Artificial Sequence: Synthetic oligonucleotide
uggugugcccaucaaaggc

SEQ ID NO: 394012 - RNA, 19 nt, Artificial Sequence
  Description of Artificial Sequence: Synthetic oligonucleotide
uucuugcaagucuagauuc

SEQ ID NO: 394013 - RNA, 19 nt, Artificial Sequence
  Description of Artificial Sequence: Synthetic oligonucleotide
aaauacagcugaguccagg

SEQ ID NO: 394014 - RNA, 19 nt, Artificial Sequence
  Description of Artificial Sequence: Synthetic oligonucleotide
gacgcauuaauaccgucug

SEQ ID NO: 394015 - RNA, 19 nt, Artificial Sequence
  Description of Artificial Sequence: Synthetic oligonucleotide
auauuggagaauguugauc

SEQ ID NO: 394016 - RNA, 19 nt, Artificial Sequence
  Description of Artificial Sequence: Synthetic oligonucleotide
guuguaauaugguaauuga

SEQ ID NO: 394017 - RNA, 19 nt, Artificial Sequence
  Description of Artificial Sequence: Synthetic oligonucleotide
aauuuaacagccaggccca

SEQ ID NO: 394018 - RNA, 19 nt, Artificial Sequence
  Description of Artificial Sequence: Synthetic oligonucleotide
ugcauguuuaaaccaccag

SEQ ID NO: 394019 - RNA, 19 nt, Artificial Sequence
  Description of Artificial Sequence: Synthetic oligonucleotide
caauuaaugguaaacuuaa

SEQ ID NO: 394020 - RNA, 19 nt, Artificial Sequence
  Description of Artificial Sequence: Synthetic oligonucleotide
aauugauauuccuccacua

SEQ ID NO: 394021 - RNA, 19 nt, Artificial Sequence
  Description of Artificial Sequence: Synthetic oligonucleotide
auaacggccuuuaccaacc

SEQ ID NO: 394022 - RNA, 19 nt, Artificial Sequence
  Description of Artificial Sequence: Synthetic oligonucleotide
gguuagacacgauuggccg

SEQ ID NO: 394023 - RNA, 19 nt, Artificial Sequence
  Description of Artificial Sequence: Synthetic oligonucleotide
gaggaguuacuacaguuac

SEQ ID NO: 394024 - RNA, 19 nt, Artificial Sequence
  Description of Artificial Sequence: Synthetic oligonucleotide
ugacgcauuaauaccgucu

SEQ ID NO: 394025 - RNA, 19 nt, Artificial Sequence
  Description of Artificial Sequence: Synthetic oligonucleotide
acuauuccuccuguaauac

SEQ ID NO: 394026 - RNA, 19 nt, Artificial Sequence
  Description of Artificial Sequence: Synthetic oligonucleotide
guauugacuuucauuagag

SEQ ID NO: 394027 - RNA, 19 nt, Artificial Sequence
  Description of Artificial Sequence: Synthetic oligonucleotide
aagucuagauucucucuca

SEQ ID NO: 394028 - RNA, 19 nt, Artificial Sequence
  Description of Artificial Sequence: Synthetic oligonucleotide
auuagagugaaugaauaaa

SEQ ID NO: 394029 - RNA, 19 nt, Artificial Sequence
  Description of Artificial Sequence: Synthetic oligonucleotide
gagagauccuauuuucaug

SEQ ID NO: 394030 - RNA, 19 nt, Artificial Sequence
  Description of Artificial Sequence: Synthetic oligonucleotide
aaucuauaggcuguuuaca

SEQ ID NO: 394031 - RNA, 19 nt, Artificial Sequence
  Description of Artificial Sequence: Synthetic oligonucleotide
agcuuaauuugaguagggc

SEQ ID NO: 394032 - RNA, 19 nt, Artificial Sequence
  Description of Artificial Sequence: Synthetic oligonucleotide
aacgaccucugcuugagau

SEQ ID NO: 394033 - RNA, 19 nt, Artificial Sequence
  Description of Artificial Sequence: Synthetic oligonucleotide
uuugaguagggcucuggug

SEQ ID NO: 394034 - RNA, 19 nt, Artificial Sequence
  Description of Artificial Sequence: Synthetic oligonucleotide
cacugaaagaguacagagc

SEQ ID NO: 394035 - RNA, 19 nt, Artificial Sequence
  Description of Artificial Sequence: Synthetic oligonucleotide
uucgucacuguuccagcgg

SEQ ID NO: 394036 - RNA, 19 nt, Artificial Sequence
  Description of Artificial Sequence: Synthetic oligonucleotide
uacaguuacaagguagaug

SEQ ID NO: 394037 - RNA, 19 nt, Artificial Sequence
  Description of Artificial Sequence: Synthetic oligonucleotide
ccagaguuagaccagaggc

SEQ ID NO: 394038 - RNA, 19 nt, Artificial Sequence
  Description of Artificial Sequence: Synthetic oligonucleotide
cauuuccccaugauguagg

SEQ ID NO: 394039 - RNA, 19 nt, Artificial Sequence
  Description of Artificial Sequence: Synthetic oligonucleotide
gacaagguuuucacuaagg

SEQ ID NO: 394040 - RNA, 19 nt, Artificial Sequence
  Description of Artificial Sequence: Synthetic oligonucleotide
ucaaggguaugucaacuuc

SEQ ID NO: 394041 - RNA, 19 nt, Artificial Sequence
  Description of Artificial Sequence: Synthetic oligonucleotide
aggaugggucacuaggcac

SEQ ID NO: 394042 - RNA, 19 nt, Artificial Sequence
  Description of Artificial Sequence: Synthetic oligonucleotide
uagagagauccuauuuuca

SEQ ID NO: 394043 - RNA, 19 nt, Artificial Sequence
  Description of Artificial Sequence: Synthetic oligonucleotide
uggugauagaaggaaaaca

SEQ ID NO: 394044 - RNA, 19 nt, Artificial Sequence
  Description of Artificial Sequence: Synthetic oligonucleotide
uuauggacaggacacugau

SEQ ID NO: 394045 - RNA, 19 nt, Artificial Sequence
  Description of Artificial Sequence: Synthetic oligonucleotide
uagacuacucaauauccaa

SEQ ID NO: 394046 - RNA, 19 nt, Artificial Sequence
  Description of Artificial Sequence: Synthetic oligonucleotide
auaaucuauaggcuguuua

SEQ ID NO: 394047 - RNA, 19 nt, Artificial Sequence
  Description of Artificial Sequence: Synthetic oligonucleotide
agcaauuaaugguaaacuu

SEQ ID NO: 394048 - RNA, 19 nt, Artificial Sequence
  Description of Artificial Sequence: Synthetic oligonucleotide
auucguaucacuguugaau

SEQ ID NO: 394049 - RNA, 19 nt, Artificial Sequence
  Description of Artificial Sequence: Synthetic oligonucleotide
agcgguuagacacgauugg

SEQ ID NO: 394050 - RNA, 19 nt, Artificial Sequence
  Description of Artificial Sequence: Synthetic oligonucleotide
ugccgaaccaucugaaucu

SEQ ID NO: 394051 - RNA, 19 nt, Artificial Sequence
  Description of Artificial Sequence: Synthetic oligonucleotide
uaaaucagaugcuguacaa

SEQ ID NO: 394052 - RNA, 19 nt, Artificial Sequence
  Description of Artificial Sequence: Synthetic oligonucleotide
gacacgauuggccgcaagc

SEQ ID NO: 394053 - RNA, 19 nt, Artificial Sequence
  Description of Artificial Sequence: Synthetic oligonucleotide
auagaaggcaaagucucuc

SEQ ID NO: 394054 - RNA, 19 nt, Artificial Sequence
  Description of Artificial Sequence: Synthetic oligonucleotide
ucccuaagcuauaauauuu

SEQ ID NO: 394055 - RNA, 19 nt, Artificial Sequence
  Description of Artificial Sequence: Synthetic oligonucleotide
aagacaagguuuucacuaa

SEQ ID NO: 394056 - RNA, 19 nt, Artificial Sequence
  Description of Artificial Sequence: Synthetic oligonucleotide
aucuuuaagugggaagaac

SEQ ID NO: 394057 - RNA, 19 nt, Artificial Sequence
  Description of Artificial Sequence: Synthetic oligonucleotide
guaauugauauuccuccac

SEQ ID NO: 394058 - RNA, 19 nt, Artificial Sequence
  Description of Artificial Sequence: Synthetic oligonucleotide
agaugcaugguucuuggaa

SEQ ID NO: 394059 - RNA, 19 nt, Artificial Sequence
  Description of Artificial Sequence: Synthetic oligonucleotide
uuuaaccuaucaaugccuu

SEQ ID NO: 394060 - RNA, 19 nt, Artificial Sequence
  Description of Artificial Sequence: Synthetic oligonucleotide
gguaaacuuaauaaggcac

SEQ ID NO: 394061 - RNA, 19 nt, Artificial Sequence
  Description of Artificial Sequence: Synthetic oligonucleotide
cuccuguaauacaacgacg

SEQ ID NO: 394062 - RNA, 19 nt, Artificial Sequence
  Description of Artificial Sequence: Synthetic oligonucleotide
aguuacaagguagaugacu

SEQ ID NO: 394063 - RNA, 19 nt, Artificial Sequence
  Description of Artificial Sequence: Synthetic oligonucleotide
uuaauuugaguagggcucu

SEQ ID NO: 394064 - RNA, 19 nt, Artificial Sequence
  Description of Artificial Sequence: Synthetic oligonucleotide
gcguuugacacacacaacc

SEQ ID NO: 394065 - RNA, 19 nt, Artificial Sequence
  Description of Artificial Sequence: Synthetic oligonucleotide
cuccauaacggccuuuacc

SEQ ID NO: 394066 - RNA, 19 nt, Artificial Sequence
  Description of Artificial Sequence: Synthetic oligonucleotide
auucgucacuguuccagcg

SEQ ID NO: 394067 - RNA, 19 nt, Artificial Sequence
  Description of Artificial Sequence: Synthetic oligonucleotide
cauaacggccuuuaccaac

SEQ ID NO: 394068 - RNA, 19 nt, Artificial Sequence
  Description of Artificial Sequence: Synthetic oligonucleotide
ucgaagacauucgucacug

SEQ ID NO: 394069 - RNA, 19 nt, Artificial Sequence
  Description of Artificial Sequence: Synthetic oligonucleotide
uuaugauauuggagaaugu

SEQ ID NO: 394070 - RNA, 19 nt, Artificial Sequence
  Description of Artificial Sequence: Synthetic oligonucleotide
auugaacauaaucuguaua

SEQ ID NO: 394071 - RNA, 19 nt, Artificial Sequence
  Description of Artificial Sequence: Synthetic oligonucleotide
aucuauaggcuguuuacaa

SEQ ID NO: 394072 - RNA, 19 nt, Artificial Sequence
  Description of Artificial Sequence: Synthetic oligonucleotide
ucuauaggcuguuuacaaa

SEQ ID NO: 394073 - RNA, 19 nt, Artificial Sequence
  Description of Artificial Sequence: Synthetic oligonucleotide
ggcaauaguucgcugaacc

SEQ ID NO: 394074 - RNA, 19 nt, Artificial Sequence
  Description of Artificial Sequence: Synthetic oligonucleotide
acauucgucacuguuccag

SEQ ID NO: 394075 - RNA, 19 nt, Artificial Sequence
  Description of Artificial Sequence: Synthetic oligonucleotide
ugaaccaauaaagguaguc

SEQ ID NO: 394076 - RNA, 19 nt, Artificial Sequence
  Description of Artificial Sequence: Synthetic oligonucleotide
aaccuaucaaugccuuaug

SEQ ID NO: 394077 - RNA, 19 nt, Artificial Sequence
  Description of Artificial Sequence: Synthetic oligonucleotide
auauagaacaaagcaauua

SEQ ID NO: 394078 - RNA, 19 nt, Artificial Sequence
  Description of Artificial Sequence: Synthetic oligonucleotide
agacuacucaauauccaac

SEQ ID NO: 394079 - RNA, 19 nt, Artificial Sequence
  Description of Artificial Sequence: Synthetic oligonucleotide
ugcaaaagccauauucaua

SEQ ID NO: 394080 - RNA, 19 nt, Artificial Sequence
  Description of Artificial Sequence: Synthetic oligonucleotide
uucguaucacuguugaauu

SEQ ID NO: 394081 - RNA, 19 nt, Artificial Sequence
  Description of Artificial Sequence: Synthetic oligonucleotide
uacauuuaguguguuacau

SEQ ID NO: 394082 - RNA, 19 nt, Artificial Sequence
  Description of Artificial Sequence: Synthetic oligonucleotide
ugcugagcucauuaguucu

SEQ ID NO: 394083 - RNA, 19 nt, Artificial Sequence
  Description of Artificial Sequence: Synthetic oligonucleotide
aaucuguauauagaacaaa

SEQ ID NO: 394084 - RNA, 19 nt, Artificial Sequence
  Description of Artificial Sequence: Synthetic oligonucleotide
guuucccuaagcuauaaua

SEQ ID NO: 394085 - RNA, 19 nt, Artificial Sequence
  Description of Artificial Sequence: Synthetic oligonucleotide
caagucuagauucucucuc

SEQ ID NO: 394086 - RNA, 19 nt, Artificial Sequence
  Description of Artificial Sequence: Synthetic oligonucleotide
acaacagcugauaauggug

SEQ ID NO: 394087 - RNA, 19 nt, Artificial Sequence
  Description of Artificial Sequence: Synthetic oligonucleotide
uaugggcccagcauucuga

SEQ ID NO: 394088 - RNA, 19 nt, Artificial Sequence
  Description of Artificial Sequence: Synthetic oligonucleotide
auaucugaaaagacaaggu

SEQ ID NO: 394089 - RNA, 19 nt, Artificial Sequence
  Description of Artificial Sequence: Synthetic oligonucleotide
ugucuaguguggcacauuu

SEQ ID NO: 394090 - RNA, 19 nt, Artificial Sequence
  Description of Artificial Sequence: Synthetic oligonucleotide
uuguaacgaccucugcuug

SEQ ID NO: 394091 - RNA, 19 nt, Artificial Sequence
  Description of Artificial Sequence: Synthetic oligonucleotide
acaaacggauguuuccucu

SEQ ID NO: 394092 - RNA, 19 nt, Artificial Sequence
  Description of Artificial Sequence: Synthetic oligonucleotide
aacugcucgaagacauucg

SEQ ID NO: 394093 - RNA, 19 nt, Artificial Sequence
  Description of Artificial Sequence: Synthetic oligonucleotide
aacauccuauuucaugcua

SEQ ID NO: 394094 - RNA, 19 nt, Artificial Sequence
  Description of Artificial Sequence: Synthetic oligonucleotide
gauguggcgggaaacaguc

SEQ ID NO: 394095 - RNA, 19 nt, Artificial Sequence
  Description of Artificial Sequence: Synthetic oligonucleotide
guauauagaacaaagcaau

SEQ ID NO: 394096 - RNA, 19 nt, Artificial Sequence
  Description of Artificial Sequence: Synthetic oligonucleotide
aauaguucgcugaaccaau

SEQ ID NO: 394097 - RNA, 19 nt, Artificial Sequence
  Description of Artificial Sequence: Synthetic oligonucleotide
agacaagguuuucacuaag

SEQ ID NO: 394098 - RNA, 19 nt, Artificial Sequence
  Description of Artificial Sequence: Synthetic oligonucleotide
augucaacuucauucguau

SEQ ID NO: 394099 - RNA, 19 nt, Artificial Sequence
  Description of Artificial Sequence: Synthetic oligonucleotide
gauuggagucuugaugcag

SEQ ID NO: 394100 - RNA, 19 nt, Artificial Sequence
  Description of Artificial Sequence: Synthetic oligonucleotide
uucucuaaaccagcuagcu

SEQ ID NO: 394101 - RNA, 19 nt, Artificial Sequence
  Description of Artificial Sequence: Synthetic oligonucleotide
ggccuuuacaacuauuaug

SEQ ID NO: 394102 - RNA, 19 nt, Artificial Sequence
  Description of Artificial Sequence: Synthetic oligonucleotide
uucuuacaggauuggaguc

SEQ ID NO: 394103 - RNA, 19 nt, Artificial Sequence
  Description of Artificial Sequence: Synthetic oligonucleotide
acacgauuggccgcaagcg

SEQ ID NO: 394104 - RNA, 19 nt, Artificial Sequence
  Description of Artificial Sequence: Synthetic oligonucleotide
uauggacacuuuaaacuua

SEQ ID NO: 394105 - RNA, 19 nt, Artificial Sequence
  Description of Artificial Sequence: Synthetic oligonucleotide
uguaacgaccucugcuuga

SEQ ID NO: 394106 - RNA, 19 nt, Artificial Sequence
  Description of Artificial Sequence: Synthetic oligonucleotide
aaccagcuagcuucuucag

SEQ ID NO: 394107 - RNA, 19 nt, Artificial Sequence
  Description of Artificial Sequence: Synthetic oligonucleotide
caaaucacgguuguaacga

SEQ ID NO: 394108 - RNA, 19 nt, Artificial Sequence
  Description of Artificial Sequence: Synthetic oligonucleotide
uuuuaugauauuggagaau

SEQ ID NO: 394109 - RNA, 19 nt, Artificial Sequence
  Description of Artificial Sequence: Synthetic oligonucleotide
uguuuggcaauaguucgcu

SEQ ID NO: 394110 - RNA, 19 nt, Artificial Sequence
  Description of Artificial Sequence: Synthetic oligonucleotide
uguuagcagccugugaaga

SEQ ID NO: 394111 - RNA, 19 nt, Artificial Sequence
  Description of Artificial Sequence: Synthetic oligonucleotide
augguucuuggaaaauuac

SEQ ID NO: 394112 - RNA, 19 nt, Artificial Sequence
  Description of Artificial Sequence: Synthetic oligonucleotide
agaggcuucuuacaggauu

SEQ ID NO: 394113 - RNA, 19 nt, Artificial Sequence
  Description of Artificial Sequence: Synthetic oligonucleotide
accauguuguaauauggua

SEQ ID NO: 394114 - RNA, 19 nt, Artificial Sequence
  Description of Artificial Sequence: Synthetic oligonucleotide
accuaucaaugccuuaugu

SEQ ID NO: 394115 - RNA, 19 nt, Artificial Sequence
  Description of Artificial Sequence: Synthetic oligonucleotide
uuucgccacgccauuuacc

SEQ ID NO: 394116 - RNA, 19 nt, Artificial Sequence
  Description of Artificial Sequence: Synthetic oligonucleotide
cauuuaguguguuacauau

SEQ ID NO: 394117 - RNA, 19 nt, Artificial Sequence
  Description of Artificial Sequence: Synthetic oligonucleotide
uuaguguguuacauaucaa

SEQ ID NO: 394118 - RNA, 19 nt, Artificial Sequence
  Description of Artificial Sequence: Synthetic oligonucleotide
aauacaacgacgagccauu

SEQ ID NO: 394119 - RNA, 19 nt, Artificial Sequence
  Description of Artificial Sequence: Synthetic oligonucleotide
uacuacauuuuaucuuuaa

SEQ ID NO: 394120 - RNA, 19 nt, Artificial Sequence
  Description of Artificial Sequence: Synthetic oligonucleotide
aucaaagaugaauccguau

SEQ ID NO: 394121 - RNA, 19 nt, Artificial Sequence
  Description of Artificial Sequence: Synthetic oligonucleotide
acuacaguuacaagguaga

SEQ ID NO: 394122 - RNA, 19 nt, Artificial Sequence
  Description of Artificial Sequence: Synthetic oligonucleotide
aaaucugcccuggaauaga

SEQ ID NO: 394123 - RNA, 19 nt, Artificial Sequence
  Description of Artificial Sequence: Synthetic oligonucleotide
guuagacacgauuggccgc

SEQ ID NO: 394124 - RNA, 19 nt, Artificial Sequence
  Description of Artificial Sequence: Synthetic oligonucleotide
cagcgguuagacacgauug

SEQ ID NO: 394125 - RNA, 19 nt, Artificial Sequence
  Description of Artificial Sequence: Synthetic oligonucleotide
ucccgcaugucuucauagg

SEQ ID NO: 394126 - RNA, 19 nt, Artificial Sequence
  Description of Artificial Sequence: Synthetic oligonucleotide
uuaugggcccagcauucug

SEQ ID NO: 394127 - RNA, 19 nt, Artificial Sequence
  Description of Artificial Sequence: Synthetic oligonucleotide
aagucauagagagauccua

SEQ ID NO: 394128 - RNA, 19 nt, Artificial Sequence
  Description of Artificial Sequence: Synthetic oligonucleotide
gucucgaugagcaauugca

SEQ ID NO: 394129 - RNA, 19 nt, Artificial Sequence
  Description of Artificial Sequence: Synthetic oligonucleotide
gaguuacuacaguuacaag

SEQ ID NO: 394130 - RNA, 19 nt, Artificial Sequence
  Description of Artificial Sequence: Synthetic oligonucleotide
acugcucgaagacauucgu

SEQ ID NO: 394131 - RNA, 19 nt, Artificial Sequence
  Description of Artificial Sequence: Synthetic oligonucleotide
uaucacuguugaauuuaac

SEQ ID NO: 394132 - RNA, 19 nt, Artificial Sequence
  Description of Artificial Sequence: Synthetic oligonucleotide
guuuucacuaaggaaaucu

SEQ ID NO: 394133 - RNA, 19 nt, Artificial Sequence
  Description of Artificial Sequence: Synthetic oligonucleotide
agcacaaccuaaaauuaca

SEQ ID NO: 394134 - RNA, 19 nt, Artificial Sequence
  Description of Artificial Sequence: Synthetic oligonucleotide
cuuuaagugggaagaacaa

SEQ ID NO: 394135 - RNA, 19 nt, Artificial Sequence
  Description of Artificial Sequence: Synthetic oligonucleotide
augacgcauuaauaccguc

SEQ ID NO: 394136 - RNA, 19 nt, Artificial Sequence
  Description of Artificial Sequence: Synthetic oligonucleotide
cuucuuacaggauuggagu

SEQ ID NO: 394137 - RNA, 19 nt, Artificial Sequence
  Description of Artificial Sequence: Synthetic oligonucleotide
uucccuaagcuauaauauu

SEQ ID NO: 394138 - RNA, 19 nt, Artificial Sequence
  Description of Artificial Sequence: Synthetic oligonucleotide
aaacggauguuuccucuua

SEQ ID NO: 394139 - RNA, 19 nt, Artificial Sequence
  Description of Artificial Sequence: Synthetic oligonucleotide
uuucaggacaacagcugau

SEQ ID NO: 394140 - RNA, 19 nt, Artificial Sequence
  Description of Artificial Sequence: Synthetic oligonucleotide
ucaugcuaaucacccauuu

SEQ ID NO: 394141 - RNA, 19 nt, Artificial Sequence
  Description of Artificial Sequence: Synthetic oligonucleotide
aacggauguuuccucuuau

SEQ ID NO: 394142 - RNA, 19 nt, Artificial Sequence
  Description of Artificial Sequence: Synthetic oligonucleotide
ccaaaucacgguuguaacg

SEQ ID NO: 394143 - RNA, 19 nt, Artificial Sequence
  Description of Artificial Sequence: Synthetic oligonucleotide
auucaaggguaugucaacu

SEQ ID NO: 394144 - RNA, 19 nt, Artificial Sequence
  Description of Artificial Sequence: Synthetic oligonucleotide
ucgucacuguuccagcggu

SEQ ID NO: 394145 - RNA, 19 nt, Artificial Sequence
  Description of Artificial Sequence: Synthetic oligonucleotide
acgcauuaauaccgucugg

SEQ ID NO: 394146 - RNA, 19 nt, Artificial Sequence
  Description of Artificial Sequence: Synthetic oligonucleotide
acauuuaguguguuacaua

SEQ ID NO: 394147 - RNA, 19 nt, Artificial Sequence
  Description of Artificial Sequence: Synthetic oligonucleotide
caaggguaugucaacuuca

SEQ ID NO: 394148 - RNA, 19 nt, Artificial Sequence
  Description of Artificial Sequence: Synthetic oligonucleotide
uggccuuuacaacuauuau

SEQ ID NO: 394149 - RNA, 19 nt, Artificial Sequence
  Description of Artificial Sequence: Synthetic oligonucleotide
ucuucauaggaugggucac

SEQ ID NO: 394150 - RNA, 19 nt, Artificial Sequence
  Description of Artificial Sequence: Synthetic oligonucleotide
aaauuucuguguggaggug

SEQ ID NO: 394151 - RNA, 19 nt, Artificial Sequence
  Description of Artificial Sequence: Synthetic oligonucleotide
gaagauguggcgggaaaca

SEQ ID NO: 394152 - RNA, 19 nt, Artificial Sequence
  Description of Artificial Sequence: Synthetic oligonucleotide
agauccuauuuucaugaua

SEQ ID NO: 394153 - RNA, 19 nt, Artificial Sequence
  Description of Artificial Sequence: Synthetic oligonucleotide
gagcacaaccuaaaauuac

SEQ ID NO: 394154 - RNA, 19 nt, Artificial Sequence
  Description of Artificial Sequence: Synthetic oligonucleotide
aacggccuuuaccaaccug

SEQ ID NO: 394155 - RNA, 19 nt, Artificial Sequence
  Description of Artificial Sequence: Synthetic oligonucleotide
gcuucuuacaggauuggag

SEQ ID NO: 394156 - RNA, 19 nt, Artificial Sequence
  Description of Artificial Sequence: Synthetic oligonucleotide
aauuaaugguaaacuuaau

SEQ ID NO: 394157 - RNA, 19 nt, Artificial Sequence
  Description of Artificial Sequence: Synthetic oligonucleotide
auagacuacucaauaucca

SEQ ID NO: 394158 - RNA, 19 nt, Artificial Sequence
  Description of Artificial Sequence: Synthetic oligonucleotide
ucucuaaaccagcuagcuu

SEQ ID NO: 394159 - RNA, 19 nt, Artificial Sequence
  Description of Artificial Sequence: Synthetic oligonucleotide
acgccauuuacccauccau

SEQ ID NO: 394160 - RNA, 19 nt, Artificial Sequence
  Description of Artificial Sequence: Synthetic oligonucleotide
gguauucaaggguauguca

SEQ ID NO: 394161 - RNA, 19 nt, Artificial Sequence
  Description of Artificial Sequence: Synthetic oligonucleotide
agaguuagaccagaggcuu

SEQ ID NO: 394162 - RNA, 19 nt, Artificial Sequence
  Description of Artificial Sequence: Synthetic oligonucleotide
aucacgguuguaacgaccu

SEQ ID NO: 394163 - RNA, 19 nt, Artificial Sequence
  Description of Artificial Sequence: Synthetic oligonucleotide
agaccagaggcuucuuaca

SEQ ID NO: 394164 - RNA, 19 nt, Artificial Sequence
  Description of Artificial Sequence: Synthetic oligonucleotide
cagaguacugaaagguuca

SEQ ID NO: 394165 - RNA, 19 nt, Artificial Sequence
  Description of Artificial Sequence: Synthetic oligonucleotide
aaggcauggugcaccauca

SEQ ID NO: 394166 - RNA, 19 nt, Artificial Sequence
  Description of Artificial Sequence: Synthetic oligonucleotide
aguuagaccagaggcuucu

SEQ ID NO: 394167 - RNA, 19 nt, Artificial Sequence
  Description of Artificial Sequence: Synthetic oligonucleotide
cuuuaaccuaucaaugccu

SEQ ID NO: 394168 - RNA, 19 nt, Artificial Sequence
  Description of Artificial Sequence: Synthetic oligonucleotide
acgacgagccauuucccca

SEQ ID NO: 394169 - RNA, 19 nt, Artificial Sequence
  Description of Artificial Sequence: Synthetic oligonucleotide
aaacagucccaaucuuaua

SEQ ID NO: 394170 - RNA, 19 nt, Artificial Sequence
  Description of Artificial Sequence: Synthetic oligonucleotide
guaacgaccucugcuugag

SEQ ID NO: 394171 - RNA, 19 nt, Artificial Sequence
  Description of Artificial Sequence: Synthetic oligonucleotide
uuuaaaccaccagccacaa

SEQ ID NO: 394172 - RNA, 19 nt, Artificial Sequence
  Description of Artificial Sequence: Synthetic oligonucleotide
uuacauccugggauucaac

SEQ ID NO: 394173 - RNA, 19 nt, Artificial Sequence
  Description of Artificial Sequence: Synthetic oligonucleotide
gaagaacaaaggucauuaa

SEQ ID NO: 394174 - RNA, 19 nt, Artificial Sequence
  Description of Artificial Sequence: Synthetic oligonucleotide
uuaaccuaucaaugccuua

SEQ ID NO: 394175 - RNA, 19 nt, Artificial Sequence
  Description of Artificial Sequence: Synthetic oligonucleotide
ccaaguauguuuucaugac

SEQ ID NO: 394176 - RNA, 19 nt, Artificial Sequence
  Description of Artificial Sequence: Synthetic oligonucleotide
gcgggaaacagucugaaaa

SEQ ID NO: 394177 - RNA, 19 nt, Artificial Sequence
  Description of Artificial Sequence: Synthetic oligonucleotide
uacaacgacgagccauuuc

SEQ ID NO: 394178 - RNA, 19 nt, Artificial Sequence
  Description of Artificial Sequence: Synthetic oligonucleotide
ugagcaauugcaggcuuuc

SEQ ID NO: 394179 - RNA, 19 nt, Artificial Sequence
  Description of Artificial Sequence: Synthetic oligonucleotide
aaacuuaauaaggcaccuu

SEQ ID NO: 394180 - RNA, 19 nt, Artificial Sequence
  Description of Artificial Sequence: Synthetic oligonucleotide
uucaugcuaaucacccauu

SEQ ID NO: 394181 - RNA, 19 nt, Artificial Sequence
  Description of Artificial Sequence: Synthetic oligonucleotide
gaguacagagcacaaccua

SEQ ID NO: 394182 - RNA, 19 nt, Artificial Sequence
  Description of Artificial Sequence: Synthetic oligonucleotide
ccuccuguaauacaacgac

SEQ ID NO: 394183 - RNA, 19 nt, Artificial Sequence
  Description of Artificial Sequence: Synthetic oligonucleotide
agaguacagagcacaaccu

SEQ ID NO: 394184 - RNA, 19 nt, Artificial Sequence
  Description of Artificial Sequence: Synthetic oligonucleotide
cuguuggaaacauuucaaa

SEQ ID NO: 394185 - RNA, 19 nt, Artificial Sequence
  Description of Artificial Sequence: Synthetic oligonucleotide
ugucaacuucauucguauc

SEQ ID NO: 394186 - RNA, 19 nt, Artificial Sequence
  Description of Artificial Sequence: Synthetic oligonucleotide
augcaugguucuuggaaaa

SEQ ID NO: 394187 - RNA, 19 nt, Artificial Sequence
  Description of Artificial Sequence: Synthetic oligonucleotide
accagcuagcuucuucagu

SEQ ID NO: 394188 - RNA, 19 nt, Artificial Sequence
  Description of Artificial Sequence: Synthetic oligonucleotide
agagcacaaccuaaaauua

SEQ ID NO: 394189 - RNA, 19 nt, Artificial Sequence
  Description of Artificial Sequence: Synthetic oligonucleotide
acagucccaaucuuauauu

SEQ ID NO: 394190 - RNA, 19 nt, Artificial Sequence
  Description of Artificial Sequence: Synthetic oligonucleotide
uuaauaccgucugguagau

SEQ ID NO: 394191 - RNA, 19 nt, Artificial Sequence
  Description of Artificial Sequence: Synthetic oligonucleotide
ugcccuggaauagacuacu

SEQ ID NO: 394192 - RNA, 19 nt, Artificial Sequence
  Description of Artificial Sequence: Synthetic oligonucleotide
ucuuuacauccugggauuc

SEQ ID NO: 394193 - RNA, 19 nt, Artificial Sequence
  Description of Artificial Sequence: Synthetic oligonucleotide
gcccaggucagcaauacag

SEQ ID NO: 394194 - RNA, 19 nt, Artificial Sequence
  Description of Artificial Sequence: Synthetic oligonucleotide
gauauuggagaauguugau

SEQ ID NO: 394195 - RNA, 19 nt, Artificial Sequence
  Description of Artificial Sequence: Synthetic oligonucleotide
cccacccugguauucaagg

SEQ ID NO: 394196 - RNA, 19 nt, Artificial Sequence
  Description of Artificial Sequence: Synthetic oligonucleotide
uccccaugauguagggcug

SEQ ID NO: 394197 - RNA, 19 nt, Artificial Sequence
  Description of Artificial Sequence: Synthetic oligonucleotide
ucacuguuagcagccugug

SEQ ID NO: 394198 - RNA, 19 nt, Artificial Sequence
  Description of Artificial Sequence: Synthetic oligonucleotide
aaccaggcaguaucccaaa

SEQ ID NO: 394199 - RNA, 19 nt, Artificial Sequence
  Description of Artificial Sequence: Synthetic oligonucleotide
accaggcaguaucccaaag

SEQ ID NO: 394200 - RNA, 19 nt, Artificial Sequence
  Description of Artificial Sequence: Synthetic oligonucleotide
ccauguuguaauaugguaa

SEQ ID NO: 394201 - RNA, 19 nt, Artificial Sequence
  Description of Artificial Sequence: Synthetic oligonucleotide
gcacaaccuaaaauuacag

SEQ ID NO: 394202 - RNA, 19 nt, Artificial Sequence
  Description of Artificial Sequence: Synthetic oligonucleotide
ucguaucacuguugaauuu

SEQ ID NO: 394203 - RNA, 19 nt, Artificial Sequence
  Description of Artificial Sequence: Synthetic oligonucleotide
gcaauuaaugguaaacuua

SEQ ID NO: 394204 - RNA, 19 nt, Artificial Sequence
  Description of Artificial Sequence: Synthetic oligonucleotide
agcguuugacacacacaac

SEQ ID NO: 394205 - RNA, 19 nt, Artificial Sequence
  Description of Artificial Sequence: Synthetic oligonucleotide
acauccuauuucaugcuaa

SEQ ID NO: 394206 - RNA, 19 nt, Artificial Sequence
  Description of Artificial Sequence: Synthetic oligonucleotide
ucauaaucuauaggcuguu

SEQ ID NO: 394207 - RNA, 19 nt, Artificial Sequence
  Description of Artificial Sequence: Synthetic oligonucleotide
uaccgucugguagauuucu

SEQ ID NO: 394208 - RNA, 19 nt, Artificial Sequence
  Description of Artificial Sequence: Synthetic oligonucleotide
aguuucccuaagcuauaau

SEQ ID NO: 394209 - RNA, 19 nt, Artificial Sequence
  Description of Artificial Sequence: Synthetic oligonucleotide
gcauggugcaccaucauga

SEQ ID NO: 394210 - RNA, 19 nt, Artificial Sequence
  Description of Artificial Sequence: Synthetic oligonucleotide
uucauaggaugggucacua

SEQ ID NO: 394211 - RNA, 19 nt, Artificial Sequence
  Description of Artificial Sequence: Synthetic oligonucleotide
uaauuugaguagggcucug

SEQ ID NO: 394212 - RNA, 19 nt, Artificial Sequence
  Description of Artificial Sequence: Synthetic oligonucleotide
cacuaaggaaaucugcccu

SEQ ID NO: 394213 - RNA, 19 nt, Artificial Sequence
  Description of Artificial Sequence: Synthetic oligonucleotide
ggccgcaagcguuugacac

SEQ ID NO: 394214 - RNA, 19 nt, Artificial Sequence
  Description of Artificial Sequence: Synthetic oligonucleotide
ccuggaauagacuacucaa

SEQ ID NO: 394215 - RNA, 19 nt, Artificial Sequence
  Description of Artificial Sequence: Synthetic oligonucleotide
aucaagccaacauccuauu

SEQ ID NO: 394216 - RNA, 19 nt, Artificial Sequence
  Description of Artificial Sequence: Synthetic oligonucleotide
gguuguaacgaccucugcu

SEQ ID NO: 394217 - RNA, 19 nt, Artificial Sequence
  Description of Artificial Sequence: Synthetic oligonucleotide
cugcucgaagacauucguc

SEQ ID NO: 394218 - RNA, 19 nt, Artificial Sequence
  Description of Artificial Sequence: Synthetic oligonucleotide
gcaauaguucgcugaacca

SEQ ID NO: 394219 - RNA, 19 nt, Artificial Sequence
  Description of Artificial Sequence: Synthetic oligonucleotide
uccuuaugggaugauccuu

SEQ ID NO: 394220 - RNA, 19 nt, Artificial Sequence
  Description of Artificial Sequence: Synthetic oligonucleotide
gcagaguacugaaagguuc

SEQ ID NO: 394221 - RNA, 19 nt, Artificial Sequence
  Description of Artificial Sequence: Synthetic oligonucleotide
ggucucgaugagcaauugc

SEQ ID NO: 394222 - RNA, 19 nt, Artificial Sequence
  Description of Artificial Sequence: Synthetic oligonucleotide
auaccgucugguagauuuc

SEQ ID NO: 394223 - RNA, 19 nt, Artificial Sequence
  Description of Artificial Sequence: Synthetic oligonucleotide
cagaguuagaccagaggcu

SEQ ID NO: 394224 - RNA, 19 nt, Artificial Sequence
  Description of Artificial Sequence: Synthetic oligonucleotide
cugauuacccagaguuaga

SEQ ID NO: 394225 - RNA, 19 nt, Artificial Sequence
  Description of Artificial Sequence: Synthetic oligonucleotide
cuggauuaugggcccagca

SEQ ID NO: 394226 - RNA, 19 nt, Artificial Sequence
  Description of Artificial Sequence: Synthetic oligonucleotide
uaacgaccucugcuugaga

SEQ ID NO: 394227 - RNA, 19 nt, Artificial Sequence
  Description of Artificial Sequence: Synthetic oligonucleotide
ccuguaauacaacgacgag

SEQ ID NO: 394228 - RNA, 19 nt, Artificial Sequence
  Description of Artificial Sequence: Synthetic oligonucleotide
auuaugggcccagcauucu

SEQ ID NO: 394229 - RNA, 19 nt, Artificial Sequence
  Description of Artificial Sequence: Synthetic oligonucleotide
cccagaguuagaccagagg

SEQ ID NO: 394230 - RNA, 19 nt, Artificial Sequence
  Description of Artificial Sequence: Synthetic oligonucleotide
guacugaaagguucacugu

SEQ ID NO: 394231 - RNA, 19 nt, Artificial Sequence
  Description of Artificial Sequence: Synthetic oligonucleotide
agacacgauuggccgcaag

SEQ ID NO: 394232 - RNA, 19 nt, Artificial Sequence
  Description of Artificial Sequence: Synthetic oligonucleotide
acggauguuuccucuuaua

SEQ ID NO: 394233 - RNA, 19 nt, Artificial Sequence
  Description of Artificial Sequence: Synthetic oligonucleotide
cgguuagacacgauuggcc

SEQ ID NO: 394234 - RNA, 19 nt, Artificial Sequence
  Description of Artificial Sequence: Synthetic oligonucleotide
gaagucauagagagauccu

SEQ ID NO: 394235 - RNA, 19 nt, Artificial Sequence
  Description of Artificial Sequence: Synthetic oligonucleotide
agauccacuaccagagcuu

SEQ ID NO: 394236 - RNA, 19 nt, Artificial Sequence
  Description of Artificial Sequence: Synthetic oligonucleotide
guaucacuguugaauuuaa

SEQ ID NO: 394237 - RNA, 19 nt, Artificial Sequence
  Description of Artificial Sequence: Synthetic oligonucleotide
cacacaaccucccgcaugu

SEQ ID NO: 394238 - RNA, 19 nt, Artificial Sequence
  Description of Artificial Sequence: Synthetic oligonucleotide
guuacauaucaaagaugaa

SEQ ID NO: 394239 - RNA, 19 nt, Artificial Sequence
  Description of Artificial Sequence: Synthetic oligonucleotide
uuccagcgguuagacacga

SEQ ID NO: 394240 - RNA, 19 nt, Artificial Sequence
  Description of Artificial Sequence: Synthetic oligonucleotide
ggugugcccaucaaaggca

SEQ ID NO: 394241 - RNA, 19 nt, Artificial Sequence
  Description of Artificial Sequence: Synthetic oligonucleotide
augcuguacaaaauacauu

SEQ ID NO: 394242 - RNA, 19 nt, Artificial Sequence
  Description of Artificial Sequence: Synthetic oligonucleotide
auuggccgcaagcguuuga

SEQ ID NO: 394243 - RNA, 19 nt, Artificial Sequence
  Description of Artificial Sequence: Synthetic oligonucleotide
caaaccccuccugaacaac

SEQ ID NO: 394244 - RNA, 19 nt, Artificial Sequence
  Description of Artificial Sequence: Synthetic oligonucleotide
uggacacuuuaaacuuauu

SEQ ID NO: 394245 - RNA, 19 nt, Artificial Sequence
  Description of Artificial Sequence: Synthetic oligonucleotide
caaccucccgcaugucuuc

SEQ ID NO: 394246 - RNA, 19 nt, Artificial Sequence
  Description of Artificial Sequence: Synthetic oligonucleotide
acgagccauuuccccauga

SEQ ID NO: 394247 - RNA, 19 nt, Artificial Sequence
  Description of Artificial Sequence: Synthetic oligonucleotide
gacgagccauuuccccaug

SEQ ID NO: 394248 - RNA, 19 nt, Artificial Sequence
  Description of Artificial Sequence: Synthetic oligonucleotide
caugacgcauuaauaccgu

SEQ ID NO: 394249 - RNA, 19 nt, Artificial Sequence
  Description of Artificial Sequence: Synthetic oligonucleotide
ucgccacgccauuuaccca

SEQ ID NO: 394250 - RNA, 19 nt, Artificial Sequence
  Description of Artificial Sequence: Synthetic oligonucleotide
cauccugggauucaaccau

SEQ ID NO: 394251 - RNA, 19 nt, Artificial Sequence
  Description of Artificial Sequence: Synthetic oligonucleotide
acgauuggccgcaagcguu

SEQ ID NO: 394252 - RNA, 19 nt, Artificial Sequence
  Description of Artificial Sequence: Synthetic oligonucleotide
cacugauuacccagaguua

SEQ ID NO: 394253 - RNA, 19 nt, Artificial Sequence
  Description of Artificial Sequence: Synthetic oligonucleotide
gcgguuagacacgauuggc

SEQ ID NO: 394254 - RNA, 19 nt, Artificial Sequence
  Description of Artificial Sequence: Synthetic oligonucleotide
cgaccucugcuugagaugc

SEQ ID NO: 394255 - RNA, 19 nt, Artificial Sequence
  Description of Artificial Sequence: Synthetic oligonucleotide
gcccaucaaaggcauggug

SEQ ID NO: 394256 - RNA, 19 nt, Artificial Sequence
  Description of Artificial Sequence: Synthetic oligonucleotide
agaugacuuuuaugauauu

SEQ ID NO: 394257 - RNA, 19 nt, Artificial Sequence
  Description of Artificial Sequence: Synthetic oligonucleotide
acccugguauucaagggua

SEQ ID NO: 394258 - RNA, 19 nt, Artificial Sequence
  Description of Artificial Sequence: Synthetic oligonucleotide
cauucguaucacuguugaa

SEQ ID NO: 394259 - RNA, 19 nt, Artificial Sequence
  Description of Artificial Sequence: Synthetic oligonucleotide
ggaggaguuacuacaguua

SEQ ID NO: 394260 - RNA, 19 nt, Artificial Sequence
  Description of Artificial Sequence: Synthetic oligonucleotide
ggauuggagucuugaugca

SEQ ID NO: 394261 - RNA, 19 nt, Artificial Sequence
  Description of Artificial Sequence: Synthetic oligonucleotide
guaucccaaagagaucaua

SEQ ID NO: 394262 - RNA, 19 nt, Artificial Sequence
  Description of Artificial Sequence: Synthetic oligonucleotide
cacgccauuuacccaucca

SEQ ID NO: 394263 - RNA, 19 nt, Artificial Sequence
  Description of Artificial Sequence: Synthetic oligonucleotide
cacccugguauucaagggu

SEQ ID NO: 394264 - RNA, 19 nt, Artificial Sequence
  Description of Artificial Sequence: Synthetic oligonucleotide
cacuguuagcagccuguga

SEQ ID NO: 394265 - RNA, 19 nt, Artificial Sequence
  Description of Artificial Sequence: Synthetic oligonucleotide
auaguucgcugaaccaaua

SEQ ID NO: 394266 - RNA, 19 nt, Artificial Sequence
  Description of Artificial Sequence: Synthetic oligonucleotide
gagauccuauuuucaugau

SEQ ID NO: 394267 - RNA, 19 nt, Artificial Sequence
  Description of Artificial Sequence: Synthetic oligonucleotide
cacgguuguaacgaccucu

SEQ ID NO: 394268 - RNA, 19 nt, Artificial Sequence
  Description of Artificial Sequence: Synthetic oligonucleotide
gucuaguguggcacauuuc

SEQ ID NO: 394269 - RNA, 19 nt, Artificial Sequence
  Description of Artificial Sequence: Synthetic oligonucleotide
aggcuuuccuuggguacca

SEQ ID NO: 394270 - RNA, 19 nt, Artificial Sequence
  Description of Artificial Sequence: Synthetic oligonucleotide
cugaaucuguuuggcaaua

SEQ ID NO: 394271 - RNA, 19 nt, Artificial Sequence
  Description of Artificial Sequence: Synthetic oligonucleotide
caugcuaaucacccauuuu

SEQ ID NO: 394272 - RNA, 19 nt, Artificial Sequence
  Description of Artificial Sequence: Synthetic oligonucleotide
ggagaauguugaucagaua

SEQ ID NO: 394273 - RNA, 19 nt, Artificial Sequence
  Description of Artificial Sequence: Synthetic oligonucleotide
cacgauuggccgcaagcgu

SEQ ID NO: 394274 - RNA, 19 nt, Artificial Sequence
  Description of Artificial Sequence: Synthetic oligonucleotide
ggguaccauaaauuucugu

SEQ ID NO: 394275 - RNA, 19 nt, Artificial Sequence
  Description of Artificial Sequence: Synthetic oligonucleotide
cuucauaggaugggucacu

SEQ ID NO: 394276 - RNA, 19 nt, Artificial Sequence
  Description of Artificial Sequence: Synthetic oligonucleotide
gcaucacuuuauggacagg

SEQ ID NO: 394277 - RNA, 19 nt, Artificial Sequence
  Description of Artificial Sequence: Synthetic oligonucleotide
gggguaguucuugcaaguc

SEQ ID NO: 394278 - RNA, 19 nt, Artificial Sequence
  Description of Artificial Sequence: Synthetic oligonucleotide
uaauaccgucugguagauu

SEQ ID NO: 394279 - RNA, 19 nt, Artificial Sequence
  Description of Artificial Sequence: Synthetic oligonucleotide
cuuacaggauuggagucuu

SEQ ID NO: 394280 - RNA, 19 nt, Artificial Sequence
  Description of Artificial Sequence: Synthetic oligonucleotide
caaacggauguuuccucuu

SEQ ID NO: 394281 - RNA, 19 nt, Artificial Sequence
  Description of Artificial Sequence: Synthetic oligonucleotide
cugaaccaauaaagguagu

SEQ ID NO: 394282 - RNA, 19 nt, Artificial Sequence
  Description of Artificial Sequence: Synthetic oligonucleotide
gccgaaccaucugaaucug

SEQ ID NO: 394283 - RNA, 19 nt, Artificial Sequence
  Description of Artificial Sequence: Synthetic oligonucleotide
cugugaagauguggcggga

SEQ ID NO: 394284 - RNA, 19 nt, Artificial Sequence
  Description of Artificial Sequence: Synthetic oligonucleotide
gcuggauuaugggcccagc

SEQ ID NO: 394285 - RNA, 19 nt, Artificial Sequence
  Description of Artificial Sequence: Synthetic oligonucleotide
cggccuuuaccaaccugcc

SEQ ID NO: 394286 - RNA, 19 nt, Artificial Sequence
  Description of Artificial Sequence: Synthetic oligonucleotide
cuccacuauuccuccugua

SEQ ID NO: 394287 - RNA, 19 nt, Artificial Sequence
  Description of Artificial Sequence: Synthetic oligonucleotide
uagacacgauuggccgcaa

SEQ ID NO: 394288 - RNA, 19 nt, Artificial Sequence
  Description of Artificial Sequence: Synthetic oligonucleotide
caacuugaucuugggccaa

SEQ ID NO: 394289 - RNA, 19 nt, Artificial Sequence
  Description of Artificial Sequence: Synthetic oligonucleotide
ccacgccauuuacccaucc

SEQ ID NO: 394290 - RNA, 19 nt, Artificial Sequence
  Description of Artificial Sequence: Synthetic oligonucleotide
cauaaucuauaggcuguuu

SEQ ID NO: 394291 - RNA, 19 nt, Artificial Sequence
  Description of Artificial Sequence: Synthetic oligonucleotide
ccauaacggccuuuaccaa

SEQ ID NO: 394292 - RNA, 19 nt, Artificial Sequence
  Description of Artificial Sequence: Synthetic oligonucleotide
ggaauucuggugugcccau

SEQ ID NO: 394293 - RNA, 19 nt, Artificial Sequence
  Description of Artificial Sequence: Synthetic oligonucleotide
cccuaagcuauaauauuuu

SEQ ID NO: 394294 - RNA, 19 nt, Artificial Sequence
  Description of Artificial Sequence: Synthetic oligonucleotide
ccacuauuccuccuguaau

SEQ ID NO: 394295 - RNA, 19 nt, Artificial Sequence
  Description of Artificial Sequence: Synthetic oligonucleotide
gcaugguucuuggaaaauu

SEQ ID NO: 394296 - RNA, 19 nt, Artificial Sequence
  Description of Artificial Sequence: Synthetic oligonucleotide
cgcauuaauaccgucuggu

SEQ ID NO: 394297 - RNA, 19 nt, Artificial Sequence
  Description of Artificial Sequence: Synthetic oligonucleotide
ggucacuaggcaccauguu

SEQ ID NO: 394298 - RNA, 19 nt, Artificial Sequence
  Description of Artificial Sequence: Synthetic oligonucleotide
ccgcaugucuucauaggau

SEQ ID NO: 394299 - RNA, 19 nt, Artificial Sequence
  Description of Artificial Sequence: Synthetic oligonucleotide
gcccuggaauagacuacuc

SEQ ID NO: 394300 - RNA, 19 nt, Artificial Sequence
  Description of Artificial Sequence: Synthetic oligonucleotide
guuagaccagaggcuucuu

SEQ ID NO: 394301 - RNA, 19 nt, Artificial Sequence
  Description of Artificial Sequence: Synthetic oligonucleotide
gugucuaguguggcacauu

SEQ ID NO: 394302 - RNA, 19 nt, Artificial Sequence
  Description of Artificial Sequence: Synthetic oligonucleotide
cuaaaccagcuagcuucuu

SEQ ID NO: 394303 - RNA, 19 nt, Artificial Sequence
  Description of Artificial Sequence: Synthetic oligonucleotide
cgaugagcaauugcaggcu

SEQ ID NO: 394304 - RNA, 19 nt, Artificial Sequence
  Description of Artificial Sequence: Synthetic oligonucleotide
cgccacgccauuuacccau

SEQ ID NO: 394305 - RNA, 19 nt, Artificial Sequence
  Description of Artificial Sequence: Synthetic oligonucleotide
cgacgagccauuuccccau

SEQ ID NO: 394306 - RNA, 19 nt, Artificial Sequence
  Description of Artificial Sequence: Synthetic oligonucleotide
cgauuggccgcaagcguuu

SEQ ID NO: 394307 - RNA, 19 nt, Artificial Sequence
  Description of Artificial Sequence: Synthetic oligonucleotide
uauucuauauauauaaacc

SEQ ID NO: 394308 - RNA, 19 nt, Artificial Sequence
  Description of Artificial Sequence: Synthetic oligonucleotide
aaaggguaaaacugcaugc

SEQ ID NO: 394309 - RNA, 19 nt, Artificial Sequence
  Description of Artificial Sequence: Synthetic oligonucleotide
aaugauaaagauguugcac

SEQ ID NO: 394310 - RNA, 19 nt, Artificial Sequence
  Description of Artificial Sequence: Synthetic oligonucleotide
uuauauaggauuucaaugu

SEQ ID NO: 394311 - RNA, 19 nt, Artificial Sequence
  Description of Artificial Sequence: Synthetic oligonucleotide
aaaaggguaaaacugcaug

SEQ ID NO: 394312 - RNA, 19 nt, Artificial Sequence
  Description of Artificial Sequence: Synthetic oligonucleotide
ucagaugacccuaagagug

SEQ ID NO: 394313 - RNA, 19 nt, Artificial Sequence
  Description of Artificial Sequence: Synthetic oligonucleotide
guuauauaggauuucaaug

SEQ ID NO: 394314 - RNA, 19 nt, Artificial Sequence
  Description of Artificial Sequence: Synthetic oligonucleotide
aggaauuaguaccacagac

SEQ ID NO: 394315 - RNA, 19 nt, Artificial Sequence
  Description of Artificial Sequence: Synthetic oligonucleotide
agcuuaaaccagcaaagcc

SEQ ID NO: 394316 - RNA, 19 nt, Artificial Sequence
  Description of Artificial Sequence: Synthetic oligonucleotide
guagacauugcccagagug

SEQ ID NO: 394317 - RNA, 19 nt, Artificial Sequence
  Description of Artificial Sequence: Synthetic oligonucleotide
ugcaaacuaucucugagag

SEQ ID NO: 394318 - RNA, 19 nt, Artificial Sequence
  Description of Artificial Sequence: Synthetic oligonucleotide
aaaccuguuauauaggauu

SEQ ID NO: 394319 - RNA, 19 nt, Artificial Sequence
  Description of Artificial Sequence: Synthetic oligonucleotide
uaauaccucuguuagcugg

SEQ ID NO: 394320 - RNA, 19 nt, Artificial Sequence
  Description of Artificial Sequence: Synthetic oligonucleotide
gaauuaguaccacagacuc

SEQ ID NO: 394321 - RNA, 19 nt, Artificial Sequence
  Description of Artificial Sequence: Synthetic oligonucleotide
gagcuuguaacauagcagc

SEQ ID NO: 394322 - RNA, 19 nt, Artificial Sequence
  Description of Artificial Sequence: Synthetic oligonucleotide
augauaaagauguugcaca

SEQ ID NO: 394323 - RNA, 19 nt, Artificial Sequence
  Description of Artificial Sequence: Synthetic oligonucleotide
cacaccuaguccaagacgg

SEQ ID NO: 394324 - RNA, 19 nt, Artificial Sequence
  Description of Artificial Sequence: Synthetic oligonucleotide
caaggaauuaguaccacag

SEQ ID NO: 394325 - RNA, 19 nt, Artificial Sequence
  Description of Artificial Sequence: Synthetic oligonucleotide
guuugaggcauucaucugg

SEQ ID NO: 394326 - RNA, 19 nt, Artificial Sequence
  Description of Artificial Sequence: Synthetic oligonucleotide
aaauguuggaguuucugau

SEQ ID NO: 394327 - RNA, 19 nt, Artificial Sequence
  Description of Artificial Sequence: Synthetic oligonucleotide
uguuauauaggauuucaau

SEQ ID NO: 394328 - RNA, 19 nt, Artificial Sequence
  Description of Artificial Sequence: Synthetic oligonucleotide
ucagcaugugcccuuaaag

SEQ ID NO: 394329 - RNA, 19 nt, Artificial Sequence
  Description of Artificial Sequence: Synthetic oligonucleotide
gaauggacgagacuggggc

SEQ ID NO: 394330 - RNA, 19 nt, Artificial Sequence
  Description of Artificial Sequence: Synthetic oligonucleotide
uccauugccacguagacau

SEQ ID NO: 394331 - RNA, 19 nt, Artificial Sequence
  Description of Artificial Sequence: Synthetic oligonucleotide
agcccuacaggccaagucc

SEQ ID NO: 394332 - RNA, 19 nt, Artificial Sequence
  Description of Artificial Sequence: Synthetic oligonucleotide
aagauugccauugcacagc

SEQ ID NO: 394333 - RNA, 19 nt, Artificial Sequence
  Description of Artificial Sequence: Synthetic oligonucleotide
ugaguucucaacagaaagc

SEQ ID NO: 394334 - RNA, 19 nt, Artificial Sequence
  Description of Artificial Sequence: Synthetic oligonucleotide
aaaacgccuguccauuuuc

SEQ ID NO: 394335 - RNA, 19 nt, Artificial Sequence
  Description of Artificial Sequence: Synthetic oligonucleotide
ugacucauaccacaccagg

SEQ ID NO: 394336 - RNA, 19 nt, Artificial Sequence
  Description of Artificial Sequence: Synthetic oligonucleotide
uguggugcgaucuccacag

SEQ ID NO: 394337 - RNA, 19 nt, Artificial Sequence
  Description of Artificial Sequence: Synthetic oligonucleotide
uguuagcuggcucucaccc

SEQ ID NO: 394338 - RNA, 19 nt, Artificial Sequence
  Description of Artificial Sequence: Synthetic oligonucleotide
auaaaccuguuauauagga

SEQ ID NO: 394339 - RNA, 19 nt, Artificial Sequence
  Description of Artificial Sequence: Synthetic oligonucleotide
uuugcuugauaaaacgccu

SEQ ID NO: 394340 - RNA, 19 nt, Artificial Sequence
  Description of Artificial Sequence: Synthetic oligonucleotide
cauggaauggacgagacug

SEQ ID NO: 394341 - RNA, 19 nt, Artificial Sequence
  Description of Artificial Sequence: Synthetic oligonucleotide
ucuuacuugguaauuccca

SEQ ID NO: 394342 - RNA, 19 nt, Artificial Sequence
  Description of Artificial Sequence: Synthetic oligonucleotide
agagugaagugguucacgg

SEQ ID NO: 394343 - RNA, 19 nt, Artificial Sequence
  Description of Artificial Sequence: Synthetic oligonucleotide
cuugguaauucccacacac

SEQ ID NO: 394344 - RNA, 19 nt, Artificial Sequence
  Description of Artificial Sequence: Synthetic oligonucleotide
cacuaugacagcaucauuc

SEQ ID NO: 394345 - RNA, 19 nt, Artificial Sequence
  Description of Artificial Sequence: Synthetic oligonucleotide
ucuauuucuaguguucccc

SEQ ID NO: 394346 - RNA, 19 nt, Artificial Sequence
  Description of Artificial Sequence: Synthetic oligonucleotide
auugccauugcacagcggu

SEQ ID NO: 394347 - RNA, 19 nt, Artificial Sequence
  Description of Artificial Sequence: Synthetic oligonucleotide
ugguaguuagcuucaaggc

SEQ ID NO: 394348 - RNA, 19 nt, Artificial Sequence
  Description of Artificial Sequence: Synthetic oligonucleotide
aauaccucuguuagcuggc

SEQ ID NO: 394349 - RNA, 19 nt, Artificial Sequence
  Description of Artificial Sequence: Synthetic oligonucleotide
ucacaccuaguccaagacg

SEQ ID NO: 394350 - RNA, 19 nt, Artificial Sequence
  Description of Artificial Sequence: Synthetic oligonucleotide
aacacagcgaacaaggaau

SEQ ID NO: 394351 - RNA, 19 nt, Artificial Sequence
  Description of Artificial Sequence: Synthetic oligonucleotide
cagcggaucagcuuuaggc

SEQ ID NO: 394352 - RNA, 19 nt, Artificial Sequence
  Description of Artificial Sequence: Synthetic oligonucleotide
caagacggggaacacagcg

SEQ ID NO: 394353 - RNA, 19 nt, Artificial Sequence
  Description of Artificial Sequence: Synthetic oligonucleotide
cacuggauggucuggaucc

SEQ ID NO: 394354 - RNA, 19 nt, Artificial Sequence
  Description of Artificial Sequence: Synthetic oligonucleotide
accacugugcuuucaaguc

SEQ ID NO: 394355 - RNA, 19 nt, Artificial Sequence
  Description of Artificial Sequence: Synthetic oligonucleotide
guaguuagcuucaaggccc

SEQ ID NO: 394356 - RNA, 19 nt, Artificial Sequence
  Description of Artificial Sequence: Synthetic oligonucleotide
uacuugguaauucccacac

SEQ ID NO: 394357 - RNA, 19 nt, Artificial Sequence
  Description of Artificial Sequence: Synthetic oligonucleotide
ugucuuacuugguaauucc

SEQ ID NO: 394358 - RNA, 19 nt, Artificial Sequence
  Description of Artificial Sequence: Synthetic oligonucleotide
auaggauuucaauguauug

SEQ ID NO: 394359 - RNA, 19 nt, Artificial Sequence
  Description of Artificial Sequence: Synthetic oligonucleotide
agggcugacagucacaccu

SEQ ID NO: 394360 - RNA, 19 nt, Artificial Sequence
  Description of Artificial Sequence: Synthetic oligonucleotide
ugauaaagauguugcacac

SEQ ID NO: 394361 - RNA, 19 nt, Artificial Sequence
  Description of Artificial Sequence: Synthetic oligonucleotide
acccagcggaguuugaggc

SEQ ID NO: 394362 - RNA, 19 nt, Artificial Sequence
  Description of Artificial Sequence: Synthetic oligonucleotide
uucgcauugugcaggaugu

SEQ ID NO: 394363 - RNA, 19 nt, Artificial Sequence
  Description of Artificial Sequence: Synthetic oligonucleotide
uauauaggauuucaaugua

SEQ ID NO: 394364 - RNA, 19 nt, Artificial Sequence
  Description of Artificial Sequence: Synthetic oligonucleotide
acagacucagucuguagag

SEQ ID NO: 394365 - RNA, 19 nt, Artificial Sequence
  Description of Artificial Sequence: Synthetic oligonucleotide
gagagcuuguaacauagca

SEQ ID NO: 394366 - RNA, 19 nt, Artificial Sequence
  Description of Artificial Sequence: Synthetic oligonucleotide
gauaaagauguugcacacg

SEQ ID NO: 394367 - RNA, 19 nt, Artificial Sequence
  Description of Artificial Sequence: Synthetic oligonucleotide
aguguugacucauaccaca

SEQ ID NO: 394368 - RNA, 19 nt, Artificial Sequence
  Description of Artificial Sequence: Synthetic oligonucleotide
aggguaugcaugcucgugg

SEQ ID NO: 394369 - RNA, 19 nt, Artificial Sequence
  Description of Artificial Sequence: Synthetic oligonucleotide
cgaacaaggaauuaguacc

SEQ ID NO: 394370 - RNA, 19 nt, Artificial Sequence
  Description of Artificial Sequence: Synthetic oligonucleotide
cauuagguggcacuggaug

SEQ ID NO: 394371 - RNA, 19 nt, Artificial Sequence
  Description of Artificial Sequence: Synthetic oligonucleotide
uuaggcugcuuucacacuc

SEQ ID NO: 394372 - RNA, 19 nt, Artificial Sequence
  Description of Artificial Sequence: Synthetic oligonucleotide
aagucugucauaacuggug

SEQ ID NO: 394373 - RNA, 19 nt, Artificial Sequence
  Description of Artificial Sequence: Synthetic oligonucleotide
uguaugggacacccaaccc

SEQ ID NO: 394374 - RNA, 19 nt, Artificial Sequence
  Description of Artificial Sequence: Synthetic oligonucleotide
agaaugggcaguguggcuc

SEQ ID NO: 394375 - RNA, 19 nt, Artificial Sequence
  Description of Artificial Sequence: Synthetic oligonucleotide
aaccuuggcgauucgggug

SEQ ID NO: 394376 - RNA, 19 nt, Artificial Sequence
  Description of Artificial Sequence: Synthetic oligonucleotide
guugacucauaccacacca

SEQ ID NO: 394377 - RNA, 19 nt, Artificial Sequence
  Description of Artificial Sequence: Synthetic oligonucleotide
uccccugcaaacuaucucu

SEQ ID NO: 394378 - RNA, 19 nt, Artificial Sequence
  Description of Artificial Sequence: Synthetic oligonucleotide
gguaguuagcuucaaggcc

SEQ ID NO: 394379 - RNA, 19 nt, Artificial Sequence
  Description of Artificial Sequence: Synthetic oligonucleotide
cuguaugggacacccaacc

SEQ ID NO: 394380 - RNA, 19 nt, Artificial Sequence
  Description of Artificial Sequence: Synthetic oligonucleotide
uagagggcuucaaauacac

SEQ ID NO: 394381 - RNA, 19 nt, Artificial Sequence
  Description of Artificial Sequence: Synthetic oligonucleotide
agauugccauugcacagcg

SEQ ID NO: 394382 - RNA, 19 nt, Artificial Sequence
  Description of Artificial Sequence: Synthetic oligonucleotide
guaauguuguacagaaaag

SEQ ID NO: 394383 - RNA, 19 nt, Artificial Sequence
  Description of Artificial Sequence: Synthetic oligonucleotide
uguaacauagcagcaugga

SEQ ID NO: 394384 - RNA, 19 nt, Artificial Sequence
  Description of Artificial Sequence: Synthetic oligonucleotide
acagcgaacaaggaauuag

SEQ ID NO: 394385 - RNA, 19 nt, Artificial Sequence
  Description of Artificial Sequence: Synthetic oligonucleotide
uagacauugcccagaguga

SEQ ID NO: 394386 - RNA, 19 nt, Artificial Sequence
  Description of Artificial Sequence: Synthetic oligonucleotide
aaggguaaaacugcaugca

SEQ ID NO: 394387 - RNA, 19 nt, Artificial Sequence
  Description of Artificial Sequence: Synthetic oligonucleotide
agagcuuguaacauagcag

SEQ ID NO: 394388 - RNA, 19 nt, Artificial Sequence
  Description of Artificial Sequence: Synthetic oligonucleotide
uguugcacacggcugacuc

SEQ ID NO: 394389 - RNA, 19 nt, Artificial Sequence
  Description of Artificial Sequence: Synthetic oligonucleotide
augucuuacuugguaauuc

SEQ ID NO: 394390 - RNA, 19 nt, Artificial Sequence
  Description of Artificial Sequence: Synthetic oligonucleotide
aggggcacauccuucaucu

SEQ ID NO: 394391 - RNA, 19 nt, Artificial Sequence
  Description of Artificial Sequence: Synthetic oligonucleotide
caguauuuacagugugugg

SEQ ID NO: 394392 - RNA, 19 nt, Artificial Sequence
  Description of Artificial Sequence: Synthetic oligonucleotide
caugcucgugggaagauug

SEQ ID NO: 394393 - RNA, 19 nt, Artificial Sequence
  Description of Artificial Sequence: Synthetic oligonucleotide
uucaagugacuguugugga

SEQ ID NO: 394394 - RNA, 19 nt, Artificial Sequence
  Description of Artificial Sequence: Synthetic oligonucleotide
caugugcccuuaaagaauc

SEQ ID NO: 394395 - RNA, 19 nt, Artificial Sequence
  Description of Artificial Sequence: Synthetic oligonucleotide
uacccagcggaguuugagg

SEQ ID NO: 394396 - RNA, 19 nt, Artificial Sequence
  Description of Artificial Sequence: Synthetic oligonucleotide
agagcuucgcauugugcag

SEQ ID NO: 394397 - RNA, 19 nt, Artificial Sequence
  Description of Artificial Sequence: Synthetic oligonucleotide
ucuguuagcuggcucucac

SEQ ID NO: 394398 - RNA, 19 nt, Artificial Sequence
  Description of Artificial Sequence: Synthetic oligonucleotide
ugcacagcgguuccauugc

SEQ ID NO: 394399 - RNA, 19 nt, Artificial Sequence
  Description of Artificial Sequence: Synthetic oligonucleotide
ugcuaugucuuacuuggua

SEQ ID NO: 394400 - RNA, 19 nt, Artificial Sequence
  Description of Artificial Sequence: Synthetic oligonucleotide
ggagcuuaaaccagcaaag

SEQ ID NO: 394401 - RNA, 19 nt, Artificial Sequence
  Description of Artificial Sequence: Synthetic oligonucleotide
uguacagaaaaggguaaaa

SEQ ID NO: 394402 - RNA, 19 nt, Artificial Sequence
  Description of Artificial Sequence: Synthetic oligonucleotide
aggcauggagguuuugaag

SEQ ID NO: 394403 - RNA, 19 nt, Artificial Sequence
  Description of Artificial Sequence: Synthetic oligonucleotide
auaacuuacaaaggucaga

SEQ ID NO: 394404 - RNA, 19 nt, Artificial Sequence
  Description of Artificial Sequence: Synthetic oligonucleotide
aacgccuguccauuuucug

SEQ ID NO: 394405 - RNA, 19 nt, Artificial Sequence
  Description of Artificial Sequence: Synthetic oligonucleotide
gauuugcuuggcuacugca

SEQ ID NO: 394406 - RNA, 19 nt, Artificial Sequence
  Description of Artificial Sequence: Synthetic oligonucleotide
uuguucucagcaugugccc

SEQ ID NO: 394407 - RNA, 19 nt, Artificial Sequence
  Description of Artificial Sequence: Synthetic oligonucleotide
cuugugaucugcaauuaaa

SEQ ID NO: 394408 - RNA, 19 nt, Artificial Sequence
  Description of Artificial Sequence: Synthetic oligonucleotide
ugcuugauuugcuuggcua

SEQ ID NO: 394409 - RNA, 19 nt, Artificial Sequence
  Description of Artificial Sequence: Synthetic oligonucleotide
aaggucagaugacccuaag

SEQ ID NO: 394410 - RNA, 19 nt, Artificial Sequence
  Description of Artificial Sequence: Synthetic oligonucleotide
uccuggcucaguauuuaca

SEQ ID NO: 394411 - RNA, 19 nt, Artificial Sequence
  Description of Artificial Sequence: Synthetic oligonucleotide
aauuaguaccacagacuca

SEQ ID NO: 394412 - RNA, 19 nt, Artificial Sequence
  Description of Artificial Sequence: Synthetic oligonucleotide
gucagcucuacccagcgga

SEQ ID NO: 394413 - RNA, 19 nt, Artificial Sequence
  Description of Artificial Sequence: Synthetic oligonucleotide
ugauuaggggcacauccuu

SEQ ID NO: 394414 - RNA, 19 nt, Artificial Sequence
  Description of Artificial Sequence: Synthetic oligonucleotide
cacggaggagccgugaagg

SEQ ID NO: 394415 - RNA, 19 nt, Artificial Sequence
  Description of Artificial Sequence: Synthetic oligonucleotide
ucagcucuacccagcggag

SEQ ID NO: 394416 - RNA, 19 nt, Artificial Sequence
  Description of Artificial Sequence: Synthetic oligonucleotide
uguggauacugguccuugc

SEQ ID NO: 394417 - RNA, 19 nt, Artificial Sequence
  Description of Artificial Sequence: Synthetic oligonucleotide
ggacugaucaugauggggc

SEQ ID NO: 394418 - RNA, 19 nt, Artificial Sequence
  Description of Artificial Sequence: Synthetic oligonucleotide
agcauuagguggcacugga

SEQ ID NO: 394419 - RNA, 19 nt, Artificial Sequence
  Description of Artificial Sequence: Synthetic oligonucleotide
agaaaaggguaaaacugca

SEQ ID NO: 394420 - RNA, 19 nt, Artificial Sequence
  Description of Artificial Sequence: Synthetic oligonucleotide
aguucucaacagaaagcac

SEQ ID NO: 394421 - RNA, 19 nt, Artificial Sequence
  Description of Artificial Sequence: Synthetic oligonucleotide
agucacaccuaguccaaga

SEQ ID NO: 394422 - RNA, 19 nt, Artificial Sequence
  Description of Artificial Sequence: Synthetic oligonucleotide
uucacggcgaaguguggug

SEQ ID NO: 394423 - RNA, 19 nt, Artificial Sequence
  Description of Artificial Sequence: Synthetic oligonucleotide
ucucuaaauuugcuugaua

SEQ ID NO: 394424 - RNA, 19 nt, Artificial Sequence
  Description of Artificial Sequence: Synthetic oligonucleotide
gagccgugaaggcauggag

SEQ ID NO: 394425 - RNA, 19 nt, Artificial Sequence
  Description of Artificial Sequence: Synthetic oligonucleotide
ugagagcuuguaacauagc

SEQ ID NO: 394426 - RNA, 19 nt, Artificial Sequence
  Description of Artificial Sequence: Synthetic oligonucleotide
uguuguggauacugguccu

SEQ ID NO: 394427 - RNA, 19 nt, Artificial Sequence
  Description of Artificial Sequence: Synthetic oligonucleotide
acggaggagccgugaaggc

SEQ ID NO: 394428 - RNA, 19 nt, Artificial Sequence
  Description of Artificial Sequence: Synthetic oligonucleotide
guaacauagcagcauggaa

SEQ ID NO: 394429 - RNA, 19 nt, Artificial Sequence
  Description of Artificial Sequence: Synthetic oligonucleotide
ugugcccuuaaagaaucca

SEQ ID NO: 394430 - RNA, 19 nt, Artificial Sequence
  Description of Artificial Sequence: Synthetic oligonucleotide
uggauccgguucuuggcag

SEQ ID NO: 394431 - RNA, 19 nt, Artificial Sequence
  Description of Artificial Sequence: Synthetic oligonucleotide
gcaucugguaguuagcuuc

SEQ ID NO: 394432 - RNA, 19 nt, Artificial Sequence
  Description of Artificial Sequence: Synthetic oligonucleotide
ugaccacuacaaacugaag

SEQ ID NO: 394433 - RNA, 19 nt, Artificial Sequence
  Description of Artificial Sequence: Synthetic oligonucleotide
aacgccggcccuucuuaag

SEQ ID NO: 394434 - RNA, 19 nt, Artificial Sequence
  Description of Artificial Sequence: Synthetic oligonucleotide
gcgaacaaggaauuaguac

SEQ ID NO: 394435 - RNA, 19 nt, Artificial Sequence
  Description of Artificial Sequence: Synthetic oligonucleotide
ugccaagauucuguaauac

SEQ ID NO: 394436 - RNA, 19 nt, Artificial Sequence
  Description of Artificial Sequence: Synthetic oligonucleotide
agcauggaauggacgagac

SEQ ID NO: 394437 - RNA, 19 nt, Artificial Sequence
  Description of Artificial Sequence: Synthetic oligonucleotide
uaaaacgccuguccauuuu

SEQ ID NO: 394438 - RNA, 19 nt, Artificial Sequence
  Description of Artificial Sequence: Synthetic oligonucleotide
aaccuguuauauaggauuu

SEQ ID NO: 394439 - RNA, 19 nt, Artificial Sequence
  Description of Artificial Sequence: Synthetic oligonucleotide
gaaggcauggagguuuuga

SEQ ID NO: 394440 - RNA, 19 nt, Artificial Sequence
  Description of Artificial Sequence: Synthetic oligonucleotide
guaauaccucuguuagcug

SEQ ID NO: 394441 - RNA, 19 nt, Artificial Sequence
  Description of Artificial Sequence: Synthetic oligonucleotide
guuagcuucaaggcccgcc

SEQ ID NO: 394442 - RNA, 19 nt, Artificial Sequence
  Description of Artificial Sequence: Synthetic oligonucleotide
agacggggaacacagcgaa

SEQ ID NO: 394443 - RNA, 19 nt, Artificial Sequence
  Description of Artificial Sequence: Synthetic oligonucleotide
ucccugaguucucaacaga

SEQ ID NO: 394444 - RNA, 19 nt, Artificial Sequence
  Description of Artificial Sequence: Synthetic oligonucleotide
aggucagaugacccuaaga

SEQ ID NO: 394445 - RNA, 19 nt, Artificial Sequence
  Description of Artificial Sequence: Synthetic oligonucleotide
acggggaacacagcgaaca

SEQ ID NO: 394446 - RNA, 19 nt, Artificial Sequence
  Description of Artificial Sequence: Synthetic oligonucleotide
agucgccccgcugacauuc

SEQ ID NO: 394447 - RNA, 19 nt, Artificial Sequence
  Description of Artificial Sequence: Synthetic oligonucleotide
cugacuccccugcucagcc

SEQ ID NO: 394448 - RNA, 19 nt, Artificial Sequence
  Description of Artificial Sequence: Synthetic oligonucleotide
guuggccacucccuguaag

SEQ ID NO: 394449 - RNA, 19 nt, Artificial Sequence
  Description of Artificial Sequence: Synthetic oligonucleotide
gucacaccuaguccaagac

SEQ ID NO: 394450 - RNA, 19 nt, Artificial Sequence
  Description of Artificial Sequence: Synthetic oligonucleotide
cacagacucagucuguaga

SEQ ID NO: 394451 - RNA, 19 nt, Artificial Sequence
  Description of Artificial Sequence: Synthetic oligonucleotide
cacuacaaacugaagaggu

SEQ ID NO: 394452 - RNA, 19 nt, Artificial Sequence
  Description of Artificial Sequence: Synthetic oligonucleotide
caacagaggcuacacagga

SEQ ID NO: 394453 - RNA, 19 nt, Artificial Sequence
  Description of Artificial Sequence: Synthetic oligonucleotide
agugaucucuaaauuugcu

SEQ ID NO: 394454 - RNA, 19 nt, Artificial Sequence
  Description of Artificial Sequence: Synthetic oligonucleotide
uucgggugccaauuuguuc

SEQ ID NO: 394455 - RNA, 19 nt, Artificial Sequence
  Description of Artificial Sequence: Synthetic oligonucleotide
ggugagggcacuguauggg

SEQ ID NO: 394456 - RNA, 19 nt, Artificial Sequence
  Description of Artificial Sequence: Synthetic oligonucleotide
caaccacugugcuuucaag

SEQ ID NO: 394457 - RNA, 19 nt, Artificial Sequence
  Description of Artificial Sequence: Synthetic oligonucleotide
accuguuauauaggauuuc

SEQ ID NO: 394458 - RNA, 19 nt, Artificial Sequence
  Description of Artificial Sequence: Synthetic oligonucleotide
gucuuacuugguaauuccc

SEQ ID NO: 394459 - RNA, 19 nt, Artificial Sequence
  Description of Artificial Sequence: Synthetic oligonucleotide
cuucaagucgccccgcuga

SEQ ID NO: 394460 - RNA, 19 nt, Artificial Sequence
  Description of Artificial Sequence: Synthetic oligonucleotide
uggggcguauucccugaag

SEQ ID NO: 394461 - RNA, 19 nt, Artificial Sequence
  Description of Artificial Sequence: Synthetic oligonucleotide
cugcaaacuaucucugaga

SEQ ID NO: 394462 - RNA, 19 nt, Artificial Sequence
  Description of Artificial Sequence: Synthetic oligonucleotide
ugggccagugaucucuaaa

SEQ ID NO: 394463 - RNA, 19 nt, Artificial Sequence
  Description of Artificial Sequence: Synthetic oligonucleotide
auggacgagacuggggcag

SEQ ID NO: 394464 - RNA, 19 nt, Artificial Sequence
  Description of Artificial Sequence: Synthetic oligonucleotide
ucuuaagcauuagguggca

SEQ ID NO: 394465 - RNA, 19 nt, Artificial Sequence
  Description of Artificial Sequence: Synthetic oligonucleotide
uucaagucgccccgcugac

SEQ ID NO: 394466 - RNA, 19 nt, Artificial Sequence
  Description of Artificial Sequence: Synthetic oligonucleotide
caguguugacucauaccac

SEQ ID NO: 394467 - RNA, 19 nt, Artificial Sequence
  Description of Artificial Sequence: Synthetic oligonucleotide
uguucucagcaugugcccu

SEQ ID NO: 394468 - RNA, 19 nt, Artificial Sequence
  Description of Artificial Sequence: Synthetic oligonucleotide
cacuccgggcaucugguag

SEQ ID NO: 394469 - RNA, 19 nt, Artificial Sequence
  Description of Artificial Sequence: Synthetic oligonucleotide
gacacccaacccuggcucc

SEQ ID NO: 394470 - RNA, 19 nt, Artificial Sequence
  Description of Artificial Sequence: Synthetic oligonucleotide
aagacggggaacacagcga

SEQ ID NO: 394471 - RNA, 19 nt, Artificial Sequence
  Description of Artificial Sequence: Synthetic oligonucleotide
uugccaagauucuguaaua

SEQ ID NO: 394472 - RNA, 19 nt, Artificial Sequence
  Description of Artificial Sequence: Synthetic oligonucleotide
auaaaacgccuguccauuu

SEQ ID NO: 394473 - RNA, 19 nt, Artificial Sequence
  Description of Artificial Sequence: Synthetic oligonucleotide
cauagcagcauggaaugga

SEQ ID NO: 394474 - RNA, 19 nt, Artificial Sequence
  Description of Artificial Sequence: Synthetic oligonucleotide
gacucagucuguagagggc

SEQ ID NO: 394475 - RNA, 19 nt, Artificial Sequence
  Description of Artificial Sequence: Synthetic oligonucleotide
ggccugcugaaacucaucc

SEQ ID NO: 394476 - RNA, 19 nt, Artificial Sequence
  Description of Artificial Sequence: Synthetic oligonucleotide
ucuggggcguauucccuga

SEQ ID NO: 394477 - RNA, 19 nt, Artificial Sequence
  Description of Artificial Sequence: Synthetic oligonucleotide
gauuaggggcacauccuuc

SEQ ID NO: 394478 - RNA, 19 nt, Artificial Sequence
  Description of Artificial Sequence: Synthetic oligonucleotide
acuugguaauucccacaca

SEQ ID NO: 394479 - RNA, 19 nt, Artificial Sequence
  Description of Artificial Sequence: Synthetic oligonucleotide
guaugggacacccaacccu

SEQ ID NO: 394480 - RNA, 19 nt, Artificial Sequence
  Description of Artificial Sequence: Synthetic oligonucleotide
aaacgccuguccauuuucu

SEQ ID NO: 394481 - RNA, 19 nt, Artificial Sequence
  Description of Artificial Sequence: Synthetic oligonucleotide
gggacugaucaugaugggg

SEQ ID NO: 394482 - RNA, 19 nt, Artificial Sequence
  Description of Artificial Sequence: Synthetic oligonucleotide
agagugucugcuguuguaa

SEQ ID NO: 394483 - RNA, 19 nt, Artificial Sequence
  Description of Artificial Sequence: Synthetic oligonucleotide
cacuguaugggacacccaa

SEQ ID NO: 394484 - RNA, 19 nt, Artificial Sequence
  Description of Artificial Sequence: Synthetic oligonucleotide
acuccgggcaucugguagu

SEQ ID NO: 394485 - RNA, 19 nt, Artificial Sequence
  Description of Artificial Sequence: Synthetic oligonucleotide
acugcaugcagcggaucag

SEQ ID NO: 394486 - RNA, 19 nt, Artificial Sequence
  Description of Artificial Sequence: Synthetic oligonucleotide
ggcacuguaugggacaccc

SEQ ID NO: 394487 - RNA, 19 nt, Artificial Sequence
  Description of Artificial Sequence: Synthetic oligonucleotide
uggcuguagcuucaguguu

SEQ ID NO: 394488 - RNA, 19 nt, Artificial Sequence
  Description of Artificial Sequence: Synthetic oligonucleotide
ggaccaaaaggugagggca

SEQ ID NO: 394489 - RNA, 19 nt, Artificial Sequence
  Description of Artificial Sequence: Synthetic oligonucleotide
cuguuauauaggauuucaa

SEQ ID NO: 394490 - RNA, 19 nt, Artificial Sequence
  Description of Artificial Sequence: Synthetic oligonucleotide
cauugcuggcugcuguaug

SEQ ID NO: 394491 - RNA, 19 nt, Artificial Sequence
  Description of Artificial Sequence: Synthetic oligonucleotide
uucaagucuaagggccucu

SEQ ID NO: 394492 - RNA, 19 nt, Artificial Sequence
  Description of Artificial Sequence: Synthetic oligonucleotide
aguccaagacggggaacac

SEQ ID NO: 394493 - RNA, 19 nt, Artificial Sequence
  Description of Artificial Sequence: Synthetic oligonucleotide
guaugcaugcucgugggaa

SEQ ID NO: 394494 - RNA, 19 nt, Artificial Sequence
  Description of Artificial Sequence: Synthetic oligonucleotide
gggaccaaaaggugagggc

SEQ ID NO: 394495 - RNA, 19 nt, Artificial Sequence
  Description of Artificial Sequence: Synthetic oligonucleotide
gacuguuguggauacuggu

SEQ ID NO: 394496 - RNA, 19 nt, Artificial Sequence
  Description of Artificial Sequence: Synthetic oligonucleotide
gucagaugacccuaagagu

SEQ ID NO: 394497 - RNA, 19 nt, Artificial Sequence
  Description of Artificial Sequence: Synthetic oligonucleotide
agcucuacccagcggaguu

SEQ ID NO: 394498 - RNA, 19 nt, Artificial Sequence
  Description of Artificial Sequence: Synthetic oligonucleotide
uguauggguguggcaaagu

SEQ ID NO: 394499 - RNA, 19 nt, Artificial Sequence
  Description of Artificial Sequence: Synthetic oligonucleotide
cacggcgaaguguggugcg

SEQ ID NO: 394500 - RNA, 19 nt, Artificial Sequence
  Description of Artificial Sequence: Synthetic oligonucleotide
gcguauucccugaaggucc

SEQ ID NO: 394501 - RNA, 19 nt, Artificial Sequence
  Description of Artificial Sequence: Synthetic oligonucleotide
gauaaaacgccuguccauu

SEQ ID NO: 394502 - RNA, 19 nt, Artificial Sequence
  Description of Artificial Sequence: Synthetic oligonucleotide
agcgguuccauugcuggcu

SEQ ID NO: 394503 - RNA, 19 nt, Artificial Sequence
  Description of Artificial Sequence: Synthetic oligonucleotide
cuacccagcggaguuugag

SEQ ID NO: 394504 - RNA, 19 nt, Artificial Sequence
  Description of Artificial Sequence: Synthetic oligonucleotide
cuuaagcauuagguggcac

SEQ ID NO: 394505 - RNA, 19 nt, Artificial Sequence
  Description of Artificial Sequence: Synthetic oligonucleotide
cacagcgguuccauugcug

SEQ ID NO: 394506 - RNA, 19 nt, Artificial Sequence
  Description of Artificial Sequence: Synthetic oligonucleotide
aaguguggugcgaucucca

SEQ ID NO: 394507 - RNA, 19 nt, Artificial Sequence
  Description of Artificial Sequence: Synthetic oligonucleotide
augugcccuuaaagaaucc

SEQ ID NO: 394508 - RNA, 19 nt, Artificial Sequence
  Description of Artificial Sequence: Synthetic oligonucleotide
agcggaguuugaggcauuc

SEQ ID NO: 394509 - RNA, 19 nt, Artificial Sequence
  Description of Artificial Sequence: Synthetic oligonucleotide
ucucacccguguagugcag

SEQ ID NO: 394510 - RNA, 19 nt, Artificial Sequence
  Description of Artificial Sequence: Synthetic oligonucleotide
auacugguccuugccaaga

SEQ ID NO: 394511 - RNA, 19 nt, Artificial Sequence
  Description of Artificial Sequence: Synthetic oligonucleotide
cucucacccguguagugca

SEQ ID NO: 394512 - RNA, 19 nt, Artificial Sequence
  Description of Artificial Sequence: Synthetic oligonucleotide
cugcaugcagcggaucagc

SEQ ID NO: 394513 - RNA, 19 nt, Artificial Sequence
  Description of Artificial Sequence: Synthetic oligonucleotide
ggaauggacgagacugggg

SEQ ID NO: 394514 - RNA, 19 nt, Artificial Sequence
  Description of Artificial Sequence: Synthetic oligonucleotide
gauugccauugcacagcgg

SEQ ID NO: 394515 - RNA, 19 nt, Artificial Sequence
  Description of Artificial Sequence: Synthetic oligonucleotide
ccacuacaaacugaagagg

SEQ ID NO: 394516 - RNA, 19 nt, Artificial Sequence
  Description of Artificial Sequence: Synthetic oligonucleotide
gauguugcacacggcugac

SEQ ID NO: 394517 - RNA, 19 nt, Artificial Sequence
  Description of Artificial Sequence: Synthetic oligonucleotide
gauucgggugccaauuugu

SEQ ID NO: 394518 - RNA, 19 nt, Artificial Sequence
  Description of Artificial Sequence: Synthetic oligonucleotide
aucucuaaauuugcuugau

SEQ ID NO: 394519 - RNA, 19 nt, Artificial Sequence
  Description of Artificial Sequence: Synthetic oligonucleotide
gagugucugcuguuguaaa

SEQ ID NO: 394520 - RNA, 19 nt, Artificial Sequence
  Description of Artificial Sequence: Synthetic oligonucleotide
gcggaucagcuuuaggcug

SEQ ID NO: 394521 - RNA, 19 nt, Artificial Sequence
  Description of Artificial Sequence: Synthetic oligonucleotide
cuguauggguguggcaaag

SEQ ID NO: 394522 - RNA, 19 nt, Artificial Sequence
  Description of Artificial Sequence: Synthetic oligonucleotide
uuugggccagugaucucua

SEQ ID NO: 394523 - RNA, 19 nt, Artificial Sequence
  Description of Artificial Sequence: Synthetic oligonucleotide
acuacaaacugaagaggua

SEQ ID NO: 394524 - RNA, 19 nt, Artificial Sequence
  Description of Artificial Sequence: Synthetic oligonucleotide
ucaucugguggggagcaua

SEQ ID NO: 394525 - RNA, 19 nt, Artificial Sequence
  Description of Artificial Sequence: Synthetic oligonucleotide
accuaguccaagacgggga

SEQ ID NO: 394526 - RNA, 19 nt, Artificial Sequence
  Description of Artificial Sequence: Synthetic oligonucleotide
aguuagcuucaaggcccgc

SEQ ID NO: 394527 - RNA, 19 nt, Artificial Sequence
  Description of Artificial Sequence: Synthetic oligonucleotide
acaccuaguccaagacggg

SEQ ID NO: 394528 - RNA, 19 nt, Artificial Sequence
  Description of Artificial Sequence: Synthetic oligonucleotide
gacccaugacgucugauuu

SEQ ID NO: 394529 - RNA, 19 nt, Artificial Sequence
  Description of Artificial Sequence: Synthetic oligonucleotide
cugugcuuucaagucuaag

SEQ ID NO: 394530 - RNA, 19 nt, Artificial Sequence
  Description of Artificial Sequence: Synthetic oligonucleotide
cuggcuguagcuucagugu

SEQ ID NO: 394531 - RNA, 19 nt, Artificial Sequence
  Description of Artificial Sequence: Synthetic oligonucleotide
uugccauugcacagcgguu

SEQ ID NO: 394532 - RNA, 19 nt, Artificial Sequence
  Description of Artificial Sequence: Synthetic oligonucleotide
uccuugugaucugcaauua

SEQ ID NO: 394533 - RNA, 19 nt, Artificial Sequence
  Description of Artificial Sequence: Synthetic oligonucleotide
uguccuggcucaguauuua

SEQ ID NO: 394534 - RNA, 19 nt, Artificial Sequence
  Description of Artificial Sequence: Synthetic oligonucleotide
ugcagcggaucagcuuuag

SEQ ID NO: 394535 - RNA, 19 nt, Artificial Sequence
  Description of Artificial Sequence: Synthetic oligonucleotide
agcgaacaaggaauuagua

SEQ ID NO: 394536 - RNA, 19 nt, Artificial Sequence
  Description of Artificial Sequence: Synthetic oligonucleotide
guaagugguccaggguaug

SEQ ID NO: 394537 - RNA, 19 nt, Artificial Sequence
  Description of Artificial Sequence: Synthetic oligonucleotide
caggguaugcaugcucgug

SEQ ID NO: 394538 - RNA, 19 nt, Artificial Sequence
  Description of Artificial Sequence: Synthetic oligonucleotide
ggugccaauuuguucaagu

SEQ ID NO: 394539 - RNA, 19 nt, Artificial Sequence
  Description of Artificial Sequence: Synthetic oligonucleotide
ugacuccccugcucagccc

SEQ ID NO: 394540 - RNA, 19 nt, Artificial Sequence
  Description of Artificial Sequence: Synthetic oligonucleotide
cuaugucuuacuugguaau

SEQ ID NO: 394541 - RNA, 19 nt, Artificial Sequence
  Description of Artificial Sequence: Synthetic oligonucleotide
uuggcgauucgggugccaa

SEQ ID NO: 394542 - RNA, 19 nt, Artificial Sequence
  Description of Artificial Sequence: Synthetic oligonucleotide
acccaugacgucugauuuu

SEQ ID NO: 394543 - RNA, 19 nt, Artificial Sequence
  Description of Artificial Sequence: Synthetic oligonucleotide
ccuguuauauaggauuuca

SEQ ID NO: 394544 - RNA, 19 nt, Artificial Sequence
  Description of Artificial Sequence: Synthetic oligonucleotide
guccuggcucaguauuuac

SEQ ID NO: 394545 - RNA, 19 nt, Artificial Sequence
  Description of Artificial Sequence: Synthetic oligonucleotide
ggcguauucccugaagguc

SEQ ID NO: 394546 - RNA, 19 nt, Artificial Sequence
  Description of Artificial Sequence: Synthetic oligonucleotide
cugauuaggggcacauccu

SEQ ID NO: 394547 - RNA, 19 nt, Artificial Sequence
  Description of Artificial Sequence: Synthetic oligonucleotide
gugcccuuaaagaauccaa

SEQ ID NO: 394548 - RNA, 19 nt, Artificial Sequence
  Description of Artificial Sequence: Synthetic oligonucleotide
cagcgaacaaggaauuagu

SEQ ID NO: 394549 - RNA, 19 nt, Artificial Sequence
  Description of Artificial Sequence: Synthetic oligonucleotide
aggcuucaagucgccccgc

SEQ ID NO: 394550 - RNA, 19 nt, Artificial Sequence
  Description of Artificial Sequence: Synthetic oligonucleotide
gcagcggaucagcuuuagg

SEQ ID NO: 394551 - RNA, 19 nt, Artificial Sequence
  Description of Artificial Sequence: Synthetic oligonucleotide
uggguguggcaaagucuau

SEQ ID NO: 394552 - RNA, 19 nt, Artificial Sequence
  Description of Artificial Sequence: Synthetic oligonucleotide
auaccucuguuagcuggcu

SEQ ID NO: 394553 - RNA, 19 nt, Artificial Sequence
  Description of Artificial Sequence: Synthetic oligonucleotide
cucagcaugugcccuuaaa

SEQ ID NO: 394554 - RNA, 19 nt, Artificial Sequence
  Description of Artificial Sequence: Synthetic oligonucleotide
cagcauggaauggacgaga

SEQ ID NO: 394555 - RNA, 19 nt, Artificial Sequence
  Description of Artificial Sequence: Synthetic oligonucleotide
gcucucacccguguagugc

SEQ ID NO: 394556 - RNA, 19 nt, Artificial Sequence
  Description of Artificial Sequence: Synthetic oligonucleotide
aaacuaucucugagagcuu

SEQ ID NO: 394557 - RNA, 19 nt, Artificial Sequence
  Description of Artificial Sequence: Synthetic oligonucleotide
gcacuggauggucuggauc

SEQ ID NO: 394558 - RNA, 19 nt, Artificial Sequence
  Description of Artificial Sequence: Synthetic oligonucleotide
cucgugggaagauugccau

SEQ ID NO: 394559 - RNA, 19 nt, Artificial Sequence
  Description of Artificial Sequence: Synthetic oligonucleotide
ccuacaggccaaguccugc

SEQ ID NO: 394560 - RNA, 19 nt, Artificial Sequence
  Description of Artificial Sequence: Synthetic oligonucleotide
agccucacagagagggcug

SEQ ID NO: 394561 - RNA, 19 nt, Artificial Sequence
  Description of Artificial Sequence: Synthetic oligonucleotide
acacagcgaacaaggaauu

SEQ ID NO: 394562 - RNA, 19 nt, Artificial Sequence
  Description of Artificial Sequence: Synthetic oligonucleotide
ggcgcaggcagucgauggc

SEQ ID NO: 394563 - RNA, 19 nt, Artificial Sequence
  Description of Artificial Sequence: Synthetic oligonucleotide
ugcaugcucgugggaagau

SEQ ID NO: 394564 - RNA, 19 nt, Artificial Sequence
  Description of Artificial Sequence: Synthetic oligonucleotide
auucgggugccaauuuguu

SEQ ID NO: 394565 - RNA, 19 nt, Artificial Sequence
  Description of Artificial Sequence: Synthetic oligonucleotide
agugacuguuguggauacu

SEQ ID NO: 394566 - RNA, 19 nt, Artificial Sequence
  Description of Artificial Sequence: Synthetic oligonucleotide
cggaucagcuuuaggcugc

SEQ ID NO: 394567 - RNA, 19 nt, Artificial Sequence
  Description of Artificial Sequence: Synthetic oligonucleotide
aggcugauuaggggcacau

SEQ ID NO: 394568 - RNA, 19 nt, Artificial Sequence
  Description of Artificial Sequence: Synthetic oligonucleotide
ccuucaucugguggggagc

SEQ ID NO: 394569 - RNA, 19 nt, Artificial Sequence
  Description of Artificial Sequence: Synthetic oligonucleotide
gaacgccggcccuucuuaa

SEQ ID NO: 394570 - RNA, 19 nt, Artificial Sequence
  Description of Artificial Sequence: Synthetic oligonucleotide
gacggggaacacagcgaac

SEQ ID NO: 394571 - RNA, 19 nt, Artificial Sequence
  Description of Artificial Sequence: Synthetic oligonucleotide
gccgugaaggcauggaggu

SEQ ID NO: 394572 - RNA, 19 nt, Artificial Sequence
  Description of Artificial Sequence: Synthetic oligonucleotide
ccacguagacauugcccag

SEQ ID NO: 394573 - RNA, 19 nt, Artificial Sequence
  Description of Artificial Sequence: Synthetic oligonucleotide
gacgagacuggggcaggga

SEQ ID NO: 394574 - RNA, 19 nt, Artificial Sequence
  Description of Artificial Sequence: Synthetic oligonucleotide
gguaugcaugcucguggga

SEQ ID NO: 394575 - RNA, 19 nt, Artificial Sequence
  Description of Artificial Sequence: Synthetic oligonucleotide
cuacaggccaaguccugcu

SEQ ID NO: 394576 - RNA, 19 nt, Artificial Sequence
  Description of Artificial Sequence: Synthetic oligonucleotide
gguucacggcgaagugugg

SEQ ID NO: 394577 - RNA, 19 nt, Artificial Sequence
  Description of Artificial Sequence: Synthetic oligonucleotide
gaccgccccuucuauuucu

SEQ ID NO: 394578 - RNA, 19 nt, Artificial Sequence
  Description of Artificial Sequence: Synthetic oligonucleotide
cagacgaccgccccuucua

SEQ ID NO: 394579 - RNA, 19 nt, Artificial Sequence
  Description of Artificial Sequence: Synthetic oligonucleotide
cacacccauguggggacug

SEQ ID NO: 394580 - RNA, 19 nt, Artificial Sequence
  Description of Artificial Sequence: Synthetic oligonucleotide
cacacuccgggcaucuggu

SEQ ID NO: 394581 - RNA, 19 nt, Artificial Sequence
  Description of Artificial Sequence: Synthetic oligonucleotide
aagucgccccgcugacauu

SEQ ID NO: 394582 - RNA, 19 nt, Artificial Sequence
  Description of Artificial Sequence: Synthetic oligonucleotide
aaggcccgccugaaggcuu

SEQ ID NO: 394583 - RNA, 19 nt, Artificial Sequence
  Description of Artificial Sequence: Synthetic oligonucleotide
ccccugcaaacuaucucug

SEQ ID NO: 394584 - RNA, 19 nt, Artificial Sequence
  Description of Artificial Sequence: Synthetic oligonucleotide
ccaagacggggaacacagc

SEQ ID NO: 394585 - RNA, 19 nt, Artificial Sequence
  Description of Artificial Sequence: Synthetic oligonucleotide
ccacggaggagccgugaag

SEQ ID NO: 394586 - RNA, 19 nt, Artificial Sequence
  Description of Artificial Sequence: Synthetic oligonucleotide
ggaacgccggcccuucuua

SEQ ID NO: 394587 - RNA, 19 nt, Artificial Sequence
  Description of Artificial Sequence: Synthetic oligonucleotide
acggcgaaguguggugcga

SEQ ID NO: 394588 - RNA, 19 nt, Artificial Sequence
  Description of Artificial Sequence: Synthetic oligonucleotide
gggcguauucccugaaggu

SEQ ID NO: 394589 - RNA, 19 nt, Artificial Sequence
  Description of Artificial Sequence: Synthetic oligonucleotide
cgauucgggugccaauuug

SEQ ID NO: 394590 - RNA, 19 nt, Artificial Sequence
  Description of Artificial Sequence: Synthetic oligonucleotide
cacagagagggcugacagu

SEQ ID NO: 394591 - RNA, 19 nt, Artificial Sequence
  Description of Artificial Sequence: Synthetic oligonucleotide
aggacccaugacgucugau

SEQ ID NO: 394592 - RNA, 19 nt, Artificial Sequence
  Description of Artificial Sequence: Synthetic oligonucleotide
ggcgaaguguggugcgauc

SEQ ID NO: 394593 - RNA, 19 nt, Artificial Sequence
  Description of Artificial Sequence: Synthetic oligonucleotide
gaccacggaggagccguga

SEQ ID NO: 394594 - RNA, 19 nt, Artificial Sequence
  Description of Artificial Sequence: Synthetic oligonucleotide
cucuguuagcuggcucuca

SEQ ID NO: 394595 - RNA, 19 nt, Artificial Sequence
  Description of Artificial Sequence: Synthetic oligonucleotide
acacacccauguggggacu

SEQ ID NO: 394596 - RNA, 19 nt, Artificial Sequence
  Description of Artificial Sequence: Synthetic oligonucleotide
ucgcauugugcaggauguu

SEQ ID NO: 394597 - RNA, 19 nt, Artificial Sequence
  Description of Artificial Sequence: Synthetic oligonucleotide
ccuaguccaagacggggaa

SEQ ID NO: 394598 - RNA, 19 nt, Artificial Sequence
  Description of Artificial Sequence: Synthetic oligonucleotide
ggggcacauccuucaucug

SEQ ID NO: 394599 - RNA, 19 nt, Artificial Sequence
  Description of Artificial Sequence: Synthetic oligonucleotide
ccuugugaucugcaauuaa

SEQ ID NO: 394600 - RNA, 19 nt, Artificial Sequence
  Description of Artificial Sequence: Synthetic oligonucleotide
gcaugugcccuuaaagaau

SEQ ID NO: 394601 - RNA, 19 nt, Artificial Sequence
  Description of Artificial Sequence: Synthetic oligonucleotide
guccugcuaugucuuacuu

SEQ ID NO: 394602 - RNA, 19 nt, Artificial Sequence
  Description of Artificial Sequence: Synthetic oligonucleotide
gggugccaauuuguucaag

SEQ ID NO: 394603 - RNA, 19 nt, Artificial Sequence
  Description of Artificial Sequence: Synthetic oligonucleotide
ucgccccgcugacauucuu

SEQ ID NO: 394604 - RNA, 19 nt, Artificial Sequence
  Description of Artificial Sequence: Synthetic oligonucleotide
cgggcaucugguaguuagc

SEQ ID NO: 394605 - RNA, 19 nt, Artificial Sequence
  Description of Artificial Sequence: Synthetic oligonucleotide
cccugcaaacuaucucuga

SEQ ID NO: 394606 - RNA, 19 nt, Artificial Sequence
  Description of Artificial Sequence: Synthetic oligonucleotide
gacgaccgccccuucuauu

SEQ ID NO: 394607 - RNA, 19 nt, Artificial Sequence
  Description of Artificial Sequence: Synthetic oligonucleotide
gcauggaauggacgagacu

SEQ ID NO: 394608 - RNA, 19 nt, Artificial Sequence
  Description of Artificial Sequence: Synthetic oligonucleotide
ccgccccuucuauuucuag

SEQ ID NO: 394609 - RNA, 19 nt, Artificial Sequence
  Description of Artificial Sequence: Synthetic oligonucleotide
ggcugauuaggggcacauc

SEQ ID NO: 394610 - RNA, 19 nt, Artificial Sequence
  Description of Artificial Sequence: Synthetic oligonucleotide
cuuggcgauucgggugcca

SEQ ID NO: 394611 - RNA, 19 nt, Artificial Sequence
  Description of Artificial Sequence: Synthetic oligonucleotide
cguauucccugaaggucca

SEQ ID NO: 394612 - RNA, 19 nt, Artificial Sequence
  Description of Artificial Sequence: Synthetic oligonucleotide
ccugaccuuugacucucca

SEQ ID NO: 394613 - RNA, 19 nt, Artificial Sequence
  Description of Artificial Sequence: Synthetic oligonucleotide
ccccgcugacauucuucag

SEQ ID NO: 394614 - RNA, 19 nt, Artificial Sequence
  Description of Artificial Sequence: Synthetic oligonucleotide
cuggggcguauucccugaa

SEQ ID NO: 394615 - RNA, 19 nt, Artificial Sequence
  Description of Artificial Sequence: Synthetic oligonucleotide
ccuuugggccagugaucuc

SEQ ID NO: 394616 - RNA, 19 nt, Artificial Sequence
  Description of Artificial Sequence: Synthetic oligonucleotide
gcggaguuugaggcauuca

SEQ ID NO: 394617 - RNA, 19 nt, Artificial Sequence
  Description of Artificial Sequence: Synthetic oligonucleotide
gggcacuguaugggacacc

SEQ ID NO: 394618 - RNA, 19 nt, Artificial Sequence
  Description of Artificial Sequence: Synthetic oligonucleotide
ggcgauucgggugccaauu

SEQ ID NO: 394619 - RNA, 19 nt, Artificial Sequence
  Description of Artificial Sequence: Synthetic oligonucleotide
ccucaaccacugugcuuuc

SEQ ID NO: 394620 - RNA, 19 nt, Artificial Sequence
  Description of Artificial Sequence: Synthetic oligonucleotide
gcccuacaggccaaguccu

SEQ ID NO: 394621 - RNA, 19 nt, Artificial Sequence
  Description of Artificial Sequence: Synthetic oligonucleotide
ggaccacggaggagccgug

SEQ ID NO: 394622 - RNA, 19 nt, Artificial Sequence
  Description of Artificial Sequence: Synthetic oligonucleotide
gcacagcgguuccauugcu

SEQ ID NO: 394623 - RNA, 19 nt, Artificial Sequence
  Description of Artificial Sequence: Synthetic oligonucleotide
ccuccccugcaaacuaucu

SEQ ID NO: 394624 - RNA, 19 nt, Artificial Sequence
  Description of Artificial Sequence: Synthetic oligonucleotide
gggcugacagucacaccua

SEQ ID NO: 394625 - RNA, 19 nt, Artificial Sequence
  Description of Artificial Sequence: Synthetic oligonucleotide
gcauuagguggcacuggau

SEQ ID NO: 394626 - RNA, 19 nt, Artificial Sequence
  Description of Artificial Sequence: Synthetic oligonucleotide
gcgauucgggugccaauuu

SEQ ID NO: 394627 - RNA, 19 nt, Artificial Sequence
  Description of Artificial Sequence: Synthetic oligonucleotide
cgccggcccuucuuaagca

SEQ ID NO: 394628 - RNA, 19 nt, Artificial Sequence
  Description of Artificial Sequence: Synthetic oligonucleotide
gucgccccgcugacauucu

SEQ ID NO: 394629 - RNA, 19 nt, Artificial Sequence
  Description of Artificial Sequence: Synthetic oligonucleotide
ccagcccuacaggccaagu

SEQ ID NO: 394630 - RNA, 19 nt, Artificial Sequence
  Description of Artificial Sequence: Synthetic oligonucleotide
gcccgccugaaggcuucaa

SEQ ID NO: 394631 - RNA, 19 nt, Artificial Sequence
  Description of Artificial Sequence: Synthetic oligonucleotide
cggcgaaguguggugcgau

SEQ ID NO: 394632 - RNA, 19 nt, Artificial Sequence
  Description of Artificial Sequence: Synthetic oligonucleotide
uauauuuugaaauauggaa

SEQ ID NO: 394633 - RNA, 19 nt, Artificial Sequence
  Description of Artificial Sequence: Synthetic oligonucleotide
uuugcuuaugaaaagaaac

SEQ ID NO: 394634 - RNA, 19 nt, Artificial Sequence
  Description of Artificial Sequence: Synthetic oligonucleotide
uuuaaauacucuuaaggca

SEQ ID NO: 394635 - RNA, 19 nt, Artificial Sequence
  Description of Artificial Sequence: Synthetic oligonucleotide
uguggcauaaagaauaucu

SEQ ID NO: 394636 - RNA, 19 nt, Artificial Sequence
  Description of Artificial Sequence: Synthetic oligonucleotide
aagagaacguguuaaaugu

SEQ ID NO: 394637 - RNA, 19 nt, Artificial Sequence
  Description of Artificial Sequence: Synthetic oligonucleotide
uuaaauucaauucagucuu

SEQ ID NO: 394638 - RNA, 19 nt, Artificial Sequence
  Description of Artificial Sequence: Synthetic oligonucleotide
uauuaaaacguucucugcc

SEQ ID NO: 394639 - RNA, 19 nt, Artificial Sequence
  Description of Artificial Sequence: Synthetic oligonucleotide
aauacuuugaccugcugca

SEQ ID NO: 394640 - RNA, 19 nt, Artificial Sequence
  Description of Artificial Sequence: Synthetic oligonucleotide
uccuaacucaaacucaucg

SEQ ID NO: 394641 - RNA, 19 nt, Artificial Sequence
  Description of Artificial Sequence: Synthetic oligonucleotide
uguuaaucacuaaaucugg

SEQ ID NO: 394642 - RNA, 19 nt, Artificial Sequence
  Description of Artificial Sequence: Synthetic oligonucleotide
accaacuagauguuaauac

SEQ ID NO: 394643 - RNA, 19 nt, Artificial Sequence
  Description of Artificial Sequence: Synthetic oligonucleotide
cauaagacaagcuaccacc

SEQ ID NO: 394644 - RNA, 19 nt, Artificial Sequence
  Description of Artificial Sequence: Synthetic oligonucleotide
aacugaauaggcugugggc

SEQ ID NO: 394645 - RNA, 19 nt, Artificial Sequence
  Description of Artificial Sequence: Synthetic oligonucleotide
agauuauuagugcacuggc

SEQ ID NO: 394646 - RNA, 19 nt, Artificial Sequence
  Description of Artificial Sequence: Synthetic oligonucleotide
auucaagagacuugaaagg

SEQ ID NO: 394647 - RNA, 19 nt, Artificial Sequence
  Description of Artificial Sequence: Synthetic oligonucleotide
aaaugagggagaauuaagg

SEQ ID NO: 394648 - RNA, 19 nt, Artificial Sequence
  Description of Artificial Sequence: Synthetic oligonucleotide
agaaagaacuugcagugcg

SEQ ID NO: 394649 - RNA, 19 nt, Artificial Sequence
  Description of Artificial Sequence: Synthetic oligonucleotide
uugcuuaugaaaagaaacc

SEQ ID NO: 394650 - RNA, 19 nt, Artificial Sequence
  Description of Artificial Sequence: Synthetic oligonucleotide
aaugagggagaauuaagga

SEQ ID NO: 394651 - RNA, 19 nt, Artificial Sequence
  Description of Artificial Sequence: Synthetic oligonucleotide
aaagagauuauuagugcac

SEQ ID NO: 394652 - RNA, 19 nt, Artificial Sequence
  Description of Artificial Sequence: Synthetic oligonucleotide
ucugugagauucaagagac

SEQ ID NO: 394653 - RNA, 19 nt, Artificial Sequence
  Description of Artificial Sequence: Synthetic oligonucleotide
aaagaaaccagugaauccu

SEQ ID NO: 394654 - RNA, 19 nt, Artificial Sequence
  Description of Artificial Sequence: Synthetic oligonucleotide
aaagggaguauuuaacagu

SEQ ID NO: 394655 - RNA, 19 nt, Artificial Sequence
  Description of Artificial Sequence: Synthetic oligonucleotide
ucaacaguaagcuucaaua

SEQ ID NO: 394656 - RNA, 19 nt, Artificial Sequence
  Description of Artificial Sequence: Synthetic oligonucleotide
ucagguaucacaaagccuu

SEQ ID NO: 394657 - RNA, 19 nt, Artificial Sequence
  Description of Artificial Sequence: Synthetic oligonucleotide
auauuuugcagaauucugc

SEQ ID NO: 394658 - RNA, 19 nt, Artificial Sequence
  Description of Artificial Sequence: Synthetic oligonucleotide
agggucuaaagucuggccc

SEQ ID NO: 394659 - RNA, 19 nt, Artificial Sequence
  Description of Artificial Sequence: Synthetic oligonucleotide
agauucauugauccaggcc

SEQ ID NO: 394660 - RNA, 19 nt, Artificial Sequence
  Description of Artificial Sequence: Synthetic oligonucleotide
ucuacacacagcauaagac

SEQ ID NO: 394661 - RNA, 19 nt, Artificial Sequence
  Description of Artificial Sequence: Synthetic oligonucleotide
uuugucaacacccauccuc

SEQ ID NO: 394662 - RNA, 19 nt, Artificial Sequence
  Description of Artificial Sequence: Synthetic oligonucleotide
agagaugugggcaaguccc

SEQ ID NO: 394663 - RNA, 19 nt, Artificial Sequence
  Description of Artificial Sequence: Synthetic oligonucleotide
acacccauccucuugaauc

SEQ ID NO: 394664 - RNA, 19 nt, Artificial Sequence
  Description of Artificial Sequence: Synthetic oligonucleotide
uuacauuucucugagguug

SEQ ID NO: 394665 - RNA, 19 nt, Artificial Sequence
  Description of Artificial Sequence: Synthetic oligonucleotide
agaacaacuuuucagacau

SEQ ID NO: 394666 - RNA, 19 nt, Artificial Sequence
  Description of Artificial Sequence: Synthetic oligonucleotide
ugaagaauucggauguugc

SEQ ID NO: 394667 - RNA, 19 nt, Artificial Sequence
  Description of Artificial Sequence: Synthetic oligonucleotide
uuagcuugaaauuucacuu

SEQ ID NO: 394668 - RNA, 19 nt, Artificial Sequence
  Description of Artificial Sequence: Synthetic oligonucleotide
aacauuuaguaacacacua

SEQ ID NO: 394669 - RNA, 19 nt, Artificial Sequence
  Description of Artificial Sequence: Synthetic oligonucleotide
caguguauuacaaaacccc

SEQ ID NO: 394670 - RNA, 19 nt, Artificial Sequence
  Description of Artificial Sequence: Synthetic oligonucleotide
uggcaaaucaauucaaugu

SEQ ID NO: 394671 - RNA, 19 nt, Artificial Sequence
  Description of Artificial Sequence: Synthetic oligonucleotide
uccauaaacugacaguaug

SEQ ID NO: 394672 - RNA, 19 nt, Artificial Sequence
  Description of Artificial Sequence: Synthetic oligonucleotide
aaguauucgggugacaaug

SEQ ID NO: 394673 - RNA, 19 nt, Artificial Sequence
  Description of Artificial Sequence: Synthetic oligonucleotide
cuacauaggaacucagggg

SEQ ID NO: 394674 - RNA, 19 nt, Artificial Sequence
  Description of Artificial Sequence: Synthetic oligonucleotide
uuacuaauuuauccacagg

SEQ ID NO: 394675 - RNA, 19 nt, Artificial Sequence
  Description of Artificial Sequence: Synthetic oligonucleotide
guauucacaacacucagca

SEQ ID NO: 394676 - RNA, 19 nt, Artificial Sequence
  Description of Artificial Sequence: Synthetic oligonucleotide
auaucuacaauccuuugaa

SEQ ID NO: 394677 - RNA, 19 nt, Artificial Sequence
  Description of Artificial Sequence: Synthetic oligonucleotide
gaacugaauaggcuguggg

SEQ ID NO: 394678 - RNA, 19 nt, Artificial Sequence
  Description of Artificial Sequence: Synthetic oligonucleotide
uuuauagcagggaugcaac

SEQ ID NO: 394679 - RNA, 19 nt, Artificial Sequence
  Description of Artificial Sequence: Synthetic oligonucleotide
ugcacuacauaacaaucug

SEQ ID NO: 394680 - RNA, 19 nt, Artificial Sequence
  Description of Artificial Sequence: Synthetic oligonucleotide
uuuucagacauuccuucug

SEQ ID NO: 394681 - RNA, 19 nt, Artificial Sequence
  Description of Artificial Sequence: Synthetic oligonucleotide
aguagugaguaacauauau

SEQ ID NO: 394682 - RNA, 19 nt, Artificial Sequence
  Description of Artificial Sequence: Synthetic oligonucleotide
ucgacuuagguuaucgcug

SEQ ID NO: 394683 - RNA, 19 nt, Artificial Sequence
  Description of Artificial Sequence: Synthetic oligonucleotide
cuucgucucguucaaaccg

SEQ ID NO: 394684 - RNA, 19 nt, Artificial Sequence
  Description of Artificial Sequence: Synthetic oligonucleotide
ugcagugcgaucaccagcc

SEQ ID NO: 394685 - RNA, 19 nt, Artificial Sequence
  Description of Artificial Sequence: Synthetic oligonucleotide
auuaaaacguucucugcca

SEQ ID NO: 394686 - RNA, 19 nt, Artificial Sequence
  Description of Artificial Sequence: Synthetic oligonucleotide
ugagauucaagagacuuga

SEQ ID NO: 394687 - RNA, 19 nt, Artificial Sequence
  Description of Artificial Sequence: Synthetic oligonucleotide
uauucgggugacaauggag

SEQ ID NO: 394688 - RNA, 19 nt, Artificial Sequence
  Description of Artificial Sequence: Synthetic oligonucleotide
uuaaaacguucucugccag

SEQ ID NO: 394689 - RNA, 19 nt, Artificial Sequence
  Description of Artificial Sequence: Synthetic oligonucleotide
acacuaagagaauuuuauc

SEQ ID NO: 394690 - RNA, 19 nt, Artificial Sequence
  Description of Artificial Sequence: Synthetic oligonucleotide
cucuauucacccaagcuac

SEQ ID NO: 394691 - RNA, 19 nt, Artificial Sequence
  Description of Artificial Sequence: Synthetic oligonucleotide
uguucuaucuuugucagau

SEQ ID NO: 394692 - RNA, 19 nt, Artificial Sequence
  Description of Artificial Sequence: Synthetic oligonucleotide
aauaccuguuuucuacaca

SEQ ID NO: 394693 - RNA, 19 nt, Artificial Sequence
  Description of Artificial Sequence: Synthetic oligonucleotide
caacuagauguuaauacug

SEQ ID NO: 394694 - RNA, 19 nt, Artificial Sequence
  Description of Artificial Sequence: Synthetic oligonucleotide
gaacguguuaaauguaaac

SEQ ID NO: 394695 - RNA, 19 nt, Artificial Sequence
  Description of Artificial Sequence: Synthetic oligonucleotide
acuaaaucuggauuuuccu

SEQ ID NO: 394696 - RNA, 19 nt, Artificial Sequence
  Description of Artificial Sequence: Synthetic oligonucleotide
agaacuugcagugcgauca

SEQ ID NO: 394697 - RNA, 19 nt, Artificial Sequence
  Description of Artificial Sequence: Synthetic oligonucleotide
caaaugagggagaauuaag

SEQ ID NO: 394698 - RNA, 19 nt, Artificial Sequence
  Description of Artificial Sequence: Synthetic oligonucleotide
aauccucuaagaauaauaa

SEQ ID NO: 394699 - RNA, 19 nt, Artificial Sequence
  Description of Artificial Sequence: Synthetic oligonucleotide
uuuuauagcagggaugcaa

SEQ ID NO: 394700 - RNA, 19 nt, Artificial Sequence
  Description of Artificial Sequence: Synthetic oligonucleotide
cuuaaauucaauucagucu

SEQ ID NO: 394701 - RNA, 19 nt, Artificial Sequence
  Description of Artificial Sequence: Synthetic oligonucleotide
cacuaaaucuggauuuucc

SEQ ID NO: 394702 - RNA, 19 nt, Artificial Sequence
  Description of Artificial Sequence: Synthetic oligonucleotide
ucuaucuuugucagauuca

SEQ ID NO: 394703 - RNA, 19 nt, Artificial Sequence
  Description of Artificial Sequence: Synthetic oligonucleotide
ucgguuuacucagagcugg

SEQ ID NO: 394704 - RNA, 19 nt, Artificial Sequence
  Description of Artificial Sequence: Synthetic oligonucleotide
agugcgaucaccagccugc

SEQ ID NO: 394705 - RNA, 19 nt, Artificial Sequence
  Description of Artificial Sequence: Synthetic oligonucleotide
agcuuuccgaaguagaagu

SEQ ID NO: 394706 - RNA, 19 nt, Artificial Sequence
  Description of Artificial Sequence: Synthetic oligonucleotide
aguuaagcacaugauuugg

SEQ ID NO: 394707 - RNA, 19 nt, Artificial Sequence
  Description of Artificial Sequence: Synthetic oligonucleotide
aagaacuugcagugcgauc

SEQ ID NO: 394708 - RNA, 19 nt, Artificial Sequence
  Description of Artificial Sequence: Synthetic oligonucleotide
aacguucucugccagaauu

SEQ ID NO: 394709 - RNA, 19 nt, Artificial Sequence
  Description of Artificial Sequence: Synthetic oligonucleotide
acgucgaguacacauucac

SEQ ID NO: 394710 - RNA, 19 nt, Artificial Sequence
  Description of Artificial Sequence: Synthetic oligonucleotide
agaauucggauguugcucu

SEQ ID NO: 394711 - RNA, 19 nt, Artificial Sequence
  Description of Artificial Sequence: Synthetic oligonucleotide
guaaacuuaacagacagua

SEQ ID NO: 394712 - RNA, 19 nt, Artificial Sequence
  Description of Artificial Sequence: Synthetic oligonucleotide
uuaucgcugguaacugacg

SEQ ID NO: 394713 - RNA, 19 nt, Artificial Sequence
  Description of Artificial Sequence: Synthetic oligonucleotide
uucugccaaacaaaggaac

SEQ ID NO: 394714 - RNA, 19 nt, Artificial Sequence
  Description of Artificial Sequence: Synthetic oligonucleotide
caucaauucggcugcuucg

SEQ ID NO: 394715 - RNA, 19 nt, Artificial Sequence
  Description of Artificial Sequence: Synthetic oligonucleotide
caacaguaagcuucaauac

SEQ ID NO: 394716 - RNA, 19 nt, Artificial Sequence
  Description of Artificial Sequence: Synthetic oligonucleotide
ucgcugguaacugacgucg

SEQ ID NO: 394717 - RNA, 19 nt, Artificial Sequence
  Description of Artificial Sequence: Synthetic oligonucleotide
aagagauuauuagugcacu

SEQ ID NO: 394718 - RNA, 19 nt, Artificial Sequence
  Description of Artificial Sequence: Synthetic oligonucleotide
uuucgcaccaucccugggc

SEQ ID NO: 394719 - RNA, 19 nt, Artificial Sequence
  Description of Artificial Sequence: Synthetic oligonucleotide
ucuaaagucuggcccuucc

SEQ ID NO: 394720 - RNA, 19 nt, Artificial Sequence
  Description of Artificial Sequence: Synthetic oligonucleotide
aggggacugauugaagucc

SEQ ID NO: 394721 - RNA, 19 nt, Artificial Sequence
  Description of Artificial Sequence: Synthetic oligonucleotide
caugcacuacauaacaauc

SEQ ID NO: 394722 - RNA, 19 nt, Artificial Sequence
  Description of Artificial Sequence: Synthetic oligonucleotide
gacaccaaacaccccagcc

SEQ ID NO: 394723 - RNA, 19 nt, Artificial Sequence
  Description of Artificial Sequence: Synthetic oligonucleotide
uaagcacaugauuuggagu

SEQ ID NO: 394724 - RNA, 19 nt, Artificial Sequence
  Description of Artificial Sequence: Synthetic oligonucleotide
aauucggcugcuucgucgu

SEQ ID NO: 394725 - RNA, 19 nt, Artificial Sequence
  Description of Artificial Sequence: Synthetic oligonucleotide
uguaaacuuaacagacagu

SEQ ID NO: 394726 - RNA, 19 nt, Artificial Sequence
  Description of Artificial Sequence: Synthetic oligonucleotide
cagagauucauugauccag

SEQ ID NO: 394727 - RNA, 19 nt, Artificial Sequence
  Description of Artificial Sequence: Synthetic oligonucleotide
acugacgucgaguacacau

SEQ ID NO: 394728 - RNA, 19 nt, Artificial Sequence
  Description of Artificial Sequence: Synthetic oligonucleotide
acuggcaaaguauucgggu

SEQ ID NO: 394729 - RNA, 19 nt, Artificial Sequence
  Description of Artificial Sequence: Synthetic oligonucleotide
uuuugaaauauggaagcau

SEQ ID NO: 394730 - RNA, 19 nt, Artificial Sequence
  Description of Artificial Sequence: Synthetic oligonucleotide
ucaauucaauguuccuuag

SEQ ID NO: 394731 - RNA, 19 nt, Artificial Sequence
  Description of Artificial Sequence: Synthetic oligonucleotide
agugaauccucuaagaaua

SEQ ID NO: 394732 - RNA, 19 nt, Artificial Sequence
  Description of Artificial Sequence: Synthetic oligonucleotide
agacaguacaacaggacuc

SEQ ID NO: 394733 - RNA, 19 nt, Artificial Sequence
  Description of Artificial Sequence: Synthetic oligonucleotide
ucgaguacacauucacugc

SEQ ID NO: 394734 - RNA, 19 nt, Artificial Sequence
  Description of Artificial Sequence: Synthetic oligonucleotide
ugcuugcuuuuauagcagg

SEQ ID NO: 394735 - RNA, 19 nt, Artificial Sequence
  Description of Artificial Sequence: Synthetic oligonucleotide
agacacccucuauucaccc

SEQ ID NO: 394736 - RNA, 19 nt, Artificial Sequence
  Description of Artificial Sequence: Synthetic oligonucleotide
uauagcagggaugcaacug

SEQ ID NO: 394737 - RNA, 19 nt, Artificial Sequence
  Description of Artificial Sequence: Synthetic oligonucleotide
auggaagcauauuuuaaau

SEQ ID NO: 394738 - RNA, 19 nt, Artificial Sequence
  Description of Artificial Sequence: Synthetic oligonucleotide
uagguuaucgcugguaacu

SEQ ID NO: 394739 - RNA, 19 nt, Artificial Sequence
  Description of Artificial Sequence: Synthetic oligonucleotide
agcugcuuaauacucuucu

SEQ ID NO: 394740 - RNA, 19 nt, Artificial Sequence
  Description of Artificial Sequence: Synthetic oligonucleotide
caaagagauuauuagugca

SEQ ID NO: 394741 - RNA, 19 nt, Artificial Sequence
  Description of Artificial Sequence: Synthetic oligonucleotide
uaucgcugguaacugacgu

SEQ ID NO: 394742 - RNA, 19 nt, Artificial Sequence
  Description of Artificial Sequence: Synthetic oligonucleotide
aaacugagcucugucuauc

SEQ ID NO: 394743 - RNA, 19 nt, Artificial Sequence
  Description of Artificial Sequence: Synthetic oligonucleotide
uccugcuugcaauauuuug

SEQ ID NO: 394744 - RNA, 19 nt, Artificial Sequence
  Description of Artificial Sequence: Synthetic oligonucleotide
caauucggcugcuucgucg

SEQ ID NO: 394745 - RNA, 19 nt, Artificial Sequence
  Description of Artificial Sequence: Synthetic oligonucleotide
uugcuuuuauagcagggau

SEQ ID NO: 394746 - RNA, 19 nt, Artificial Sequence
  Description of Artificial Sequence: Synthetic oligonucleotide
uccaagcugcuuaauacuc

SEQ ID NO: 394747 - RNA, 19 nt, Artificial Sequence
  Description of Artificial Sequence: Synthetic oligonucleotide
uucuuucgcaccaucccug

SEQ ID NO: 394748 - RNA, 19 nt, Artificial Sequence
  Description of Artificial Sequence: Synthetic oligonucleotide
aaaguauucgggugacaau

SEQ ID NO: 394749 - RNA, 19 nt, Artificial Sequence
  Description of Artificial Sequence: Synthetic oligonucleotide
acaguuaagcacaugauuu

SEQ ID NO: 394750 - RNA, 19 nt, Artificial Sequence
  Description of Artificial Sequence: Synthetic oligonucleotide
guuuucuacacacagcaua

SEQ ID NO: 394751 - RNA, 19 nt, Artificial Sequence
  Description of Artificial Sequence: Synthetic oligonucleotide
ugguuggccucucuguucc

SEQ ID NO: 394752 - RNA, 19 nt, Artificial Sequence
  Description of Artificial Sequence: Synthetic oligonucleotide
ucccaaaacaucagacaca

SEQ ID NO: 394753 - RNA, 19 nt, Artificial Sequence
  Description of Artificial Sequence: Synthetic oligonucleotide
acuugaaaggccugugaca

SEQ ID NO: 394754 - RNA, 19 nt, Artificial Sequence
  Description of Artificial Sequence: Synthetic oligonucleotide
aggaaugaagucuuuuaaa

SEQ ID NO: 394755 - RNA, 19 nt, Artificial Sequence
  Description of Artificial Sequence: Synthetic oligonucleotide
ugacaauggagagcugugg

SEQ ID NO: 394756 - RNA, 19 nt, Artificial Sequence
  Description of Artificial Sequence: Synthetic oligonucleotide
uggaagcauauuuuaaaua

SEQ ID NO: 394757 - RNA, 19 nt, Artificial Sequence
  Description of Artificial Sequence: Synthetic oligonucleotide
ucuuucgcaccaucccugg

SEQ ID NO: 394758 - RNA, 19 nt, Artificial Sequence
  Description of Artificial Sequence: Synthetic oligonucleotide
uccgucuucgucucguuca

SEQ ID NO: 394759 - RNA, 19 nt, Artificial Sequence
  Description of Artificial Sequence: Synthetic oligonucleotide
uuauuagugcacuggcaaa

SEQ ID NO: 394760 - RNA, 19 nt, Artificial Sequence
  Description of Artificial Sequence: Synthetic oligonucleotide
caguuaagcacaugauuug

SEQ ID NO: 394761 - RNA, 19 nt, Artificial Sequence
  Description of Artificial Sequence: Synthetic oligonucleotide
acagacaguacaacaggac

SEQ ID NO: 394762 - RNA, 19 nt, Artificial Sequence
  Description of Artificial Sequence: Synthetic oligonucleotide
guaacugacgucgaguaca

SEQ ID NO: 394763 - RNA, 19 nt, Artificial Sequence
  Description of Artificial Sequence: Synthetic oligonucleotide
aagggaguauuuaacaguu

SEQ ID NO: 394764 - RNA, 19 nt, Artificial Sequence
  Description of Artificial Sequence: Synthetic oligonucleotide
caauucaauguuccuuagc

SEQ ID NO: 394765 - RNA, 19 nt, Artificial Sequence
  Description of Artificial Sequence: Synthetic oligonucleotide
auuuugcagaauucugcca

SEQ ID NO: 394766 - RNA, 19 nt, Artificial Sequence
  Description of Artificial Sequence: Synthetic oligonucleotide
uucgguuuacucagagcug

SEQ ID NO: 394767 - RNA, 19 nt, Artificial Sequence
  Description of Artificial Sequence: Synthetic oligonucleotide
cuucgguuuacucagagcu

SEQ ID NO: 394768 - RNA, 19 nt, Artificial Sequence
  Description of Artificial Sequence: Synthetic oligonucleotide
acugaucacuccuuugcca

SEQ ID NO: 394769 - RNA, 19 nt, Artificial Sequence
  Description of Artificial Sequence: Synthetic oligonucleotide
agagauucauugauccagg

SEQ ID NO: 394770 - RNA, 19 nt, Artificial Sequence
  Description of Artificial Sequence: Synthetic oligonucleotide
aacacacuaagagaauuuu

SEQ ID NO: 394771 - RNA, 19 nt, Artificial Sequence
  Description of Artificial Sequence: Synthetic oligonucleotide
ugccaaacaaaggaacuga

SEQ ID NO: 394772 - RNA, 19 nt, Artificial Sequence
  Description of Artificial Sequence: Synthetic oligonucleotide
augucgacuuagguuaucg

SEQ ID NO: 394773 - RNA, 19 nt, Artificial Sequence
  Description of Artificial Sequence: Synthetic oligonucleotide
aacuugcagugcgaucacc

SEQ ID NO: 394774 - RNA, 19 nt, Artificial Sequence
  Description of Artificial Sequence: Synthetic oligonucleotide
ugacgucgaguacacauuc

SEQ ID NO: 394775 - RNA, 19 nt, Artificial Sequence
  Description of Artificial Sequence: Synthetic oligonucleotide
aacccgcguccacugaccg

SEQ ID NO: 394776 - RNA, 19 nt, Artificial Sequence
  Description of Artificial Sequence: Synthetic oligonucleotide
ugaaauauggaagcauauu

SEQ ID NO: 394777 - RNA, 19 nt, Artificial Sequence
  Description of Artificial Sequence: Synthetic oligonucleotide
uuaauacugcucugcuaca

SEQ ID NO: 394778 - RNA, 19 nt, Artificial Sequence
  Description of Artificial Sequence: Synthetic oligonucleotide
uuugccagagguccagaaa

SEQ ID NO: 394779 - RNA, 19 nt, Artificial Sequence
  Description of Artificial Sequence: Synthetic oligonucleotide
ucucguucaaaccguccga

SEQ ID NO: 394780 - RNA, 19 nt, Artificial Sequence
  Description of Artificial Sequence: Synthetic oligonucleotide
uucgucucguucaaaccgu

SEQ ID NO: 394781 - RNA, 19 nt, Artificial Sequence
  Description of Artificial Sequence: Synthetic oligonucleotide
aaagaacuugcagugcgau

SEQ ID NO: 394782 - RNA, 19 nt, Artificial Sequence
  Description of Artificial Sequence: Synthetic oligonucleotide
gaauccucuaagaauaaua

SEQ ID NO: 394783 - RNA, 19 nt, Artificial Sequence
  Description of Artificial Sequence: Synthetic oligonucleotide
cuuagcuuuccgaaguaga

SEQ ID NO: 394784 - RNA, 19 nt, Artificial Sequence
  Description of Artificial Sequence: Synthetic oligonucleotide
agcaaacuuaaggagccag

SEQ ID NO: 394785 - RNA, 19 nt, Artificial Sequence
  Description of Artificial Sequence: Synthetic oligonucleotide
uuagguuaucgcugguaac

SEQ ID NO: 394786 - RNA, 19 nt, Artificial Sequence
  Description of Artificial Sequence: Synthetic oligonucleotide
agauguuaauacugcucug

SEQ ID NO: 394787 - RNA, 19 nt, Artificial Sequence
  Description of Artificial Sequence: Synthetic oligonucleotide
ccuaacucaaacucaucgg

SEQ ID NO: 394788 - RNA, 19 nt, Artificial Sequence
  Description of Artificial Sequence: Synthetic oligonucleotide
aacucaggggacugauuga

SEQ ID NO: 394789 - RNA, 19 nt, Artificial Sequence
  Description of Artificial Sequence: Synthetic oligonucleotide
ugcuugcaauauuuugaag

SEQ ID NO: 394790 - RNA, 19 nt, Artificial Sequence
  Description of Artificial Sequence: Synthetic oligonucleotide
aguauucgggugacaaugg

SEQ ID NO: 394791 - RNA, 19 nt, Artificial Sequence
  Description of Artificial Sequence: Synthetic oligonucleotide
uagcuuagcuugaaauuuc

SEQ ID NO: 394792 - RNA, 19 nt, Artificial Sequence
  Description of Artificial Sequence: Synthetic oligonucleotide
acacacuacauaggaacuc

SEQ ID NO: 394793 - RNA, 19 nt, Artificial Sequence
  Description of Artificial Sequence: Synthetic oligonucleotide
ugguaacugacgucgagua

SEQ ID NO: 394794 - RNA, 19 nt, Artificial Sequence
  Description of Artificial Sequence: Synthetic oligonucleotide
auucgggugacaauggaga

SEQ ID NO: 394795 - RNA, 19 nt, Artificial Sequence
  Description of Artificial Sequence: Synthetic oligonucleotide
aucgcugguaacugacguc

SEQ ID NO: 394796 - RNA, 19 nt, Artificial Sequence
  Description of Artificial Sequence: Synthetic oligonucleotide
acccucuauucacccaagc

SEQ ID NO: 394797 - RNA, 19 nt, Artificial Sequence
  Description of Artificial Sequence: Synthetic oligonucleotide
caaugccuguucaaauccc

SEQ ID NO: 394798 - RNA, 19 nt, Artificial Sequence
  Description of Artificial Sequence: Synthetic oligonucleotide
cagagguccagaaagaacu

SEQ ID NO: 394799 - RNA, 19 nt, Artificial Sequence
  Description of Artificial Sequence: Synthetic oligonucleotide
agugugaccagcauccaca

SEQ ID NO: 394800 - RNA, 19 nt, Artificial Sequence
  Description of Artificial Sequence: Synthetic oligonucleotide
ugguacuguauauucuaaa

SEQ ID NO: 394801 - RNA, 19 nt, Artificial Sequence
  Description of Artificial Sequence: Synthetic oligonucleotide
aaugccuguucaaauccca

SEQ ID NO: 394802 - RNA, 19 nt, Artificial Sequence
  Description of Artificial Sequence: Synthetic oligonucleotide
accauugcccauaccaggg

SEQ ID NO: 394803 - RNA, 19 nt, Artificial Sequence
  Description of Artificial Sequence: Synthetic oligonucleotide
aaaucaauacaaacacauu

SEQ ID NO: 394804 - RNA, 19 nt, Artificial Sequence
  Description of Artificial Sequence: Synthetic oligonucleotide
ugucgacuuagguuaucgc

SEQ ID NO: 394805 - RNA, 19 nt, Artificial Sequence
  Description of Artificial Sequence: Synthetic oligonucleotide
gcuugcaauauuuugaagu

SEQ ID NO: 394806 - RNA, 19 nt, Artificial Sequence
  Description of Artificial Sequence: Synthetic oligonucleotide
ugcuacaaggcaacagcuc

SEQ ID NO: 394807 - RNA, 19 nt, Artificial Sequence
  Description of Artificial Sequence: Synthetic oligonucleotide
gguacuguauauucuaaaa

SEQ ID NO: 394808 - RNA, 19 nt, Artificial Sequence
  Description of Artificial Sequence: Synthetic oligonucleotide
ugggcaagucccagaaaca

SEQ ID NO: 394809 - RNA, 19 nt, Artificial Sequence
  Description of Artificial Sequence: Synthetic oligonucleotide
augucaugucgacuuaggu

SEQ ID NO: 394810 - RNA, 19 nt, Artificial Sequence
  Description of Artificial Sequence: Synthetic oligonucleotide
uuaaggaaugaagucuuuu

SEQ ID NO: 394811 - RNA, 19 nt, Artificial Sequence
  Description of Artificial Sequence: Synthetic oligonucleotide
gacaguacaacaggacuca

SEQ ID NO: 394812 - RNA, 19 nt, Artificial Sequence
  Description of Artificial Sequence: Synthetic oligonucleotide
cuuagguuaucgcugguaa

SEQ ID NO: 394813 - RNA, 19 nt, Artificial Sequence
  Description of Artificial Sequence: Synthetic oligonucleotide
acaguaagcuucaauacuu

SEQ ID NO: 394814 - RNA, 19 nt, Artificial Sequence
  Description of Artificial Sequence: Synthetic oligonucleotide
uuccucugaauuccacaca

SEQ ID NO: 394815 - RNA, 19 nt, Artificial Sequence
  Description of Artificial Sequence: Synthetic oligonucleotide
ugccuguucaaaucccaga

SEQ ID NO: 394816 - RNA, 19 nt, Artificial Sequence
  Description of Artificial Sequence: Synthetic oligonucleotide
guuaucgcugguaacugac

SEQ ID NO: 394817 - RNA, 19 nt, Artificial Sequence
  Description of Artificial Sequence: Synthetic oligonucleotide
gagaacguguuaaauguaa

SEQ ID NO: 394818 - RNA, 19 nt, Artificial Sequence
  Description of Artificial Sequence: Synthetic oligonucleotide
aggacucaaugccuguuca

SEQ ID NO: 394819 - RNA, 19 nt, Artificial Sequence
  Description of Artificial Sequence: Synthetic oligonucleotide
ucugucuaucucaggcacu

SEQ ID NO: 394820 - RNA, 19 nt, Artificial Sequence
  Description of Artificial Sequence: Synthetic oligonucleotide
gaagaauucggauguugcu

SEQ ID NO: 394821 - RNA, 19 nt, Artificial Sequence
  Description of Artificial Sequence: Synthetic oligonucleotide
uuucuacacacagcauaag

SEQ ID NO: 394822 - RNA, 19 nt, Artificial Sequence
  Description of Artificial Sequence: Synthetic oligonucleotide
cacugaucacuccuuugcc

SEQ ID NO: 394823 - RNA, 19 nt, Artificial Sequence
  Description of Artificial Sequence: Synthetic oligonucleotide
caugguacuguauauucua

SEQ ID NO: 394824 - RNA, 19 nt, Artificial Sequence
  Description of Artificial Sequence: Synthetic oligonucleotide
uuagugcacuggcaaagua

SEQ ID NO: 394825 - RNA, 19 nt, Artificial Sequence
  Description of Artificial Sequence: Synthetic oligonucleotide
augcacuacauaacaaucu

SEQ ID NO: 394826 - RNA, 19 nt, Artificial Sequence
  Description of Artificial Sequence: Synthetic oligonucleotide
aaccaacuagauguuaaua

SEQ ID NO: 394827 - RNA, 19 nt, Artificial Sequence
  Description of Artificial Sequence: Synthetic oligonucleotide
ugucaccucaguguauuac

SEQ ID NO: 394828 - RNA, 19 nt, Artificial Sequence
  Description of Artificial Sequence: Synthetic oligonucleotide
auugcccauaccaggguuc

SEQ ID NO: 394829 - RNA, 19 nt, Artificial Sequence
  Description of Artificial Sequence: Synthetic oligonucleotide
ucucggggaacccgcgucc

SEQ ID NO: 394830 - RNA, 19 nt, Artificial Sequence
  Description of Artificial Sequence: Synthetic oligonucleotide
agcuggagcgacaagagaa

SEQ ID NO: 394831 - RNA, 19 nt, Artificial Sequence
  Description of Artificial Sequence: Synthetic oligonucleotide
gggaguauuuaacaguuaa

SEQ ID NO: 394832 - RNA, 19 nt, Artificial Sequence
  Description of Artificial Sequence: Synthetic oligonucleotide
aacucaucggaaagagacu

SEQ ID NO: 394833 - RNA, 19 nt, Artificial Sequence
  Description of Artificial Sequence: Synthetic oligonucleotide
acauaacaaucugucauaa

SEQ ID NO: 394834 - RNA, 19 nt, Artificial Sequence
  Description of Artificial Sequence: Synthetic oligonucleotide
caaaguauucgggugacaa

SEQ ID NO: 394835 - RNA, 19 nt, Artificial Sequence
  Description of Artificial Sequence: Synthetic oligonucleotide
gacaguaugcagccccuga

SEQ ID NO: 394836 - RNA, 19 nt, Artificial Sequence
  Description of Artificial Sequence: Synthetic oligonucleotide
auauggaagcauauuuuaa

SEQ ID NO: 394837 - RNA, 19 nt, Artificial Sequence
  Description of Artificial Sequence: Synthetic oligonucleotide
uguguugcaaugggucucu

SEQ ID NO: 394838 - RNA, 19 nt, Artificial Sequence
  Description of Artificial Sequence: Synthetic oligonucleotide
cucuuaaggcauuuauuaa

SEQ ID NO: 394839 - RNA, 19 nt, Artificial Sequence
  Description of Artificial Sequence: Synthetic oligonucleotide
agagacuugaaaggccugu

SEQ ID NO: 394840 - RNA, 19 nt, Artificial Sequence
  Description of Artificial Sequence: Synthetic oligonucleotide
agccuuaggagcugcagua

SEQ ID NO: 394841 - RNA, 19 nt, Artificial Sequence
  Description of Artificial Sequence: Synthetic oligonucleotide
gucgacuuagguuaucgcu

SEQ ID NO: 394842 - RNA, 19 nt, Artificial Sequence
  Description of Artificial Sequence: Synthetic oligonucleotide
cagacaccaaacaccccag

SEQ ID NO: 394843 - RNA, 19 nt, Artificial Sequence
  Description of Artificial Sequence: Synthetic oligonucleotide
cuggagcgacaagagaagg

SEQ ID NO: 394844 - RNA, 19 nt, Artificial Sequence
  Description of Artificial Sequence: Synthetic oligonucleotide
aucaauucggcugcuucgu

SEQ ID NO: 394845 - RNA, 19 nt, Artificial Sequence
  Description of Artificial Sequence: Synthetic oligonucleotide
uugaaaggccugugacagc

SEQ ID NO: 394846 - RNA, 19 nt, Artificial Sequence
  Description of Artificial Sequence: Synthetic oligonucleotide
uccacugaccgcgcgcccg

SEQ ID NO: 394847 - RNA, 19 nt, Artificial Sequence
  Description of Artificial Sequence: Synthetic oligonucleotide
ucucaguagugaguaacau

SEQ ID NO: 394848 - RNA, 19 nt, Artificial Sequence
  Description of Artificial Sequence: Synthetic oligonucleotide
agguugucaccucagugua

SEQ ID NO: 394849 - RNA, 19 nt, Artificial Sequence
  Description of Artificial Sequence: Synthetic oligonucleotide
cuaccaccagaaacaaauc

SEQ ID NO: 394850 - RNA, 19 nt, Artificial Sequence
  Description of Artificial Sequence: Synthetic oligonucleotide
uuucuucgguuuacucaga

SEQ ID NO: 394851 - RNA, 19 nt, Artificial Sequence
  Description of Artificial Sequence: Synthetic oligonucleotide
agcuuaaauucaauucagu

SEQ ID NO: 394852 - RNA, 19 nt, Artificial Sequence
  Description of Artificial Sequence: Synthetic oligonucleotide
ccugcuugcaauauuuuga

SEQ ID NO: 394853 - RNA, 19 nt, Artificial Sequence
  Description of Artificial Sequence: Synthetic oligonucleotide
cuaucuuugucagauucaa

SEQ ID NO: 394854 - RNA, 19 nt, Artificial Sequence
  Description of Artificial Sequence: Synthetic oligonucleotide
ugaauccucuaagaauaau

SEQ ID NO: 394855 - RNA, 19 nt, Artificial Sequence
  Description of Artificial Sequence: Synthetic oligonucleotide
ucaauucggcugcuucguc

SEQ ID NO: 394856 - RNA, 19 nt, Artificial Sequence
  Description of Artificial Sequence: Synthetic oligonucleotide
cauccacaugaagagcccc

SEQ ID NO: 394857 - RNA, 19 nt, Artificial Sequence
  Description of Artificial Sequence: Synthetic oligonucleotide
ugccaucuucggcucucgg

SEQ ID NO: 394858 - RNA, 19 nt, Artificial Sequence
  Description of Artificial Sequence: Synthetic oligonucleotide
agguuaucgcugguaacug

SEQ ID NO: 394859 - RNA, 19 nt, Artificial Sequence
  Description of Artificial Sequence: Synthetic oligonucleotide
agugaguaacauauauuuu

SEQ ID NO: 394860 - RNA, 19 nt, Artificial Sequence
  Description of Artificial Sequence: Synthetic oligonucleotide
uccugucauguuauauuuu

SEQ ID NO: 394861 - RNA, 19 nt, Artificial Sequence
  Description of Artificial Sequence: Synthetic oligonucleotide
caucggaaagagacuucug

SEQ ID NO: 394862 - RNA, 19 nt, Artificial Sequence
  Description of Artificial Sequence: Synthetic oligonucleotide
gccaucuucggcucucggg

SEQ ID NO: 394863 - RNA, 19 nt, Artificial Sequence
  Description of Artificial Sequence: Synthetic oligonucleotide
acauuaggggcugaacaau

SEQ ID NO: 394864 - RNA, 19 nt, Artificial Sequence
  Description of Artificial Sequence: Synthetic oligonucleotide
cucaaacucaucggaaaga

SEQ ID NO: 394865 - RNA, 19 nt, Artificial Sequence
  Description of Artificial Sequence: Synthetic oligonucleotide
cucguucaaaccguccgac

SEQ ID NO: 394866 - RNA, 19 nt, Artificial Sequence
  Description of Artificial Sequence: Synthetic oligonucleotide
cucaucggaaagagacuuc

SEQ ID NO: 394867 - RNA, 19 nt, Artificial Sequence
  Description of Artificial Sequence: Synthetic oligonucleotide
agcuccuaacucaaacuca

SEQ ID NO: 394868 - RNA, 19 nt, Artificial Sequence
  Description of Artificial Sequence: Synthetic oligonucleotide
ucaugucgacuuagguuau

SEQ ID NO: 394869 - RNA, 19 nt, Artificial Sequence
  Description of Artificial Sequence: Synthetic oligonucleotide
guauucgggugacaaugga

SEQ ID NO: 394870 - RNA, 19 nt, Artificial Sequence
  Description of Artificial Sequence: Synthetic oligonucleotide
aguaacacacuaagagaau

SEQ ID NO: 394871 - RNA, 19 nt, Artificial Sequence
  Description of Artificial Sequence: Synthetic oligonucleotide
agaacguguuaaauguaaa

SEQ ID NO: 394872 - RNA, 19 nt, Artificial Sequence
  Description of Artificial Sequence: Synthetic oligonucleotide
acaauccuuugaaguacag

SEQ ID NO: 394873 - RNA, 19 nt, Artificial Sequence
  Description of Artificial Sequence: Synthetic oligonucleotide
cuuucgcaccaucccuggg

SEQ ID NO: 394874 - RNA, 19 nt, Artificial Sequence
  Description of Artificial Sequence: Synthetic oligonucleotide
uucggcugcuucgucguca

SEQ ID NO: 394875 - RNA, 19 nt, Artificial Sequence
  Description of Artificial Sequence: Synthetic oligonucleotide
agucaugguacuguauauu

SEQ ID NO: 394876 - RNA, 19 nt, Artificial Sequence
  Description of Artificial Sequence: Synthetic oligonucleotide
agaugugggcaagucccag

SEQ ID NO: 394877 - RNA, 19 nt, Artificial Sequence
  Description of Artificial Sequence: Synthetic oligonucleotide
cacuccuuugccagagguc

SEQ ID NO: 394878 - RNA, 19 nt, Artificial Sequence
  Description of Artificial Sequence: Synthetic oligonucleotide
acucaggggacugauugaa

SEQ ID NO: 394879 - RNA, 19 nt, Artificial Sequence
  Description of Artificial Sequence: Synthetic oligonucleotide
ucgucaccauugcccauac

SEQ ID NO: 394880 - RNA, 19 nt, Artificial Sequence
  Description of Artificial Sequence: Synthetic oligonucleotide
gcuaccaccagaaacaaau

SEQ ID NO: 394881 - RNA, 19 nt, Artificial Sequence
  Description of Artificial Sequence: Synthetic oligonucleotide
guucuuucgcaccaucccu

SEQ ID NO: 394882 - RNA, 19 nt, Artificial Sequence
  Description of Artificial Sequence: Synthetic oligonucleotide
cagugugaccagcauccac

SEQ ID NO: 394883 - RNA, 19 nt, Artificial Sequence
  Description of Artificial Sequence: Synthetic oligonucleotide
gguuuacucagagcuggag

SEQ ID NO: 394884 - RNA, 19 nt, Artificial Sequence
  Description of Artificial Sequence: Synthetic oligonucleotide
uugcccauaccaggguucu

SEQ ID NO: 394885 - RNA, 19 nt, Artificial Sequence
  Description of Artificial Sequence: Synthetic oligonucleotide
augccuguucaaaucccag

SEQ ID NO: 394886 - RNA, 19 nt, Artificial Sequence
  Description of Artificial Sequence: Synthetic oligonucleotide
ucgucucguucaaaccguc

SEQ ID NO: 394887 - RNA, 19 nt, Artificial Sequence
  Description of Artificial Sequence: Synthetic oligonucleotide
cagugcgaucaccagccug

SEQ ID NO: 394888 - RNA, 19 nt, Artificial Sequence
  Description of Artificial Sequence: Synthetic oligonucleotide
acuuagguuaucgcuggua

SEQ ID NO: 394889 - RNA, 19 nt, Artificial Sequence
  Description of Artificial Sequence: Synthetic oligonucleotide
gguaacugacgucgaguac

SEQ ID NO: 394890 - RNA, 19 nt, Artificial Sequence
  Description of Artificial Sequence: Synthetic oligonucleotide
cugaauaggcugugggcaa

SEQ ID NO: 394891 - RNA, 19 nt, Artificial Sequence
  Description of Artificial Sequence: Synthetic oligonucleotide
cuagcuuagcuugaaauuu

SEQ ID NO: 394892 - RNA, 19 nt, Artificial Sequence
  Description of Artificial Sequence: Synthetic oligonucleotide
guccaagcugcuuaauacu

SEQ ID NO: 394893 - RNA, 19 nt, Artificial Sequence
  Description of Artificial Sequence: Synthetic oligonucleotide
agcagggaugcaacugguc

SEQ ID NO: 394894 - RNA, 19 nt, Artificial Sequence
  Description of Artificial Sequence: Synthetic oligonucleotide
gaacccgcguccacugacc

SEQ ID NO: 394895 - RNA, 19 nt, Artificial Sequence
  Description of Artificial Sequence: Synthetic oligonucleotide
gcugguaacugacgucgag

SEQ ID NO: 394896 - RNA, 19 nt, Artificial Sequence
  Description of Artificial Sequence: Synthetic oligonucleotide
ugcgaucaccagccugcug

SEQ ID NO: 394897 - RNA, 19 nt, Artificial Sequence
  Description of Artificial Sequence: Synthetic oligonucleotide
cgacuuagguuaucgcugg

SEQ ID NO: 394898 - RNA, 19 nt, Artificial Sequence
  Description of Artificial Sequence: Synthetic oligonucleotide
ugacaguaugcagccccug

SEQ ID NO: 394899 - RNA, 19 nt, Artificial Sequence
  Description of Artificial Sequence: Synthetic oligonucleotide
auucggcugcuucgucguc

SEQ ID NO: 394900 - RNA, 19 nt, Artificial Sequence
  Description of Artificial Sequence: Synthetic oligonucleotide
ugucuaucucaggcacugc

SEQ ID NO: 394901 - RNA, 19 nt, Artificial Sequence
  Description of Artificial Sequence: Synthetic oligonucleotide
gcaaaugagggagaauuaa

SEQ ID NO: 394902 - RNA, 19 nt, Artificial Sequence
  Description of Artificial Sequence: Synthetic oligonucleotide
cucucggggaacccgcguc

SEQ ID NO: 394903 - RNA, 19 nt, Artificial Sequence
  Description of Artificial Sequence: Synthetic oligonucleotide
ugaccgcgcgcccggcucc

SEQ ID NO: 394904 - RNA, 19 nt, Artificial Sequence
  Description of Artificial Sequence: Synthetic oligonucleotide
gccgagacacccucuauuc

SEQ ID NO: 394905 - RNA, 19 nt, Artificial Sequence
  Description of Artificial Sequence: Synthetic oligonucleotide
aucuucggcucucggggaa

SEQ ID NO: 394906 - RNA, 19 nt, Artificial Sequence
  Description of Artificial Sequence: Synthetic oligonucleotide
gcuggagcgacaagagaag

SEQ ID NO: 394907 - RNA, 19 nt, Artificial Sequence
  Description of Artificial Sequence: Synthetic oligonucleotide
ccucuauucacccaagcua

SEQ ID NO: 394908 - RNA, 19 nt, Artificial Sequence
  Description of Artificial Sequence: Synthetic oligonucleotide
cacccucuauucacccaag

SEQ ID NO: 394909 - RNA, 19 nt, Artificial Sequence
  Description of Artificial Sequence: Synthetic oligonucleotide
gguuaucgcugguaacuga

SEQ ID NO: 394910 - RNA, 19 nt, Artificial Sequence
  Description of Artificial Sequence: Synthetic oligonucleotide
ccaacuagauguuaauacu

SEQ ID NO: 394911 - RNA, 19 nt, Artificial Sequence
  Description of Artificial Sequence: Synthetic oligonucleotide
gcgaucaccagccugcugu

SEQ ID NO: 394912 - RNA, 19 nt, Artificial Sequence
  Description of Artificial Sequence: Synthetic oligonucleotide
guaguucucuguguugcaa

SEQ ID NO: 394913 - RNA, 19 nt, Artificial Sequence
  Description of Artificial Sequence: Synthetic oligonucleotide
agagaacguguuaaaugua

SEQ ID NO: 394914 - RNA, 19 nt, Artificial Sequence
  Description of Artificial Sequence: Synthetic oligonucleotide
gcugugggcaaagcaaaug

SEQ ID NO: 394915 - RNA, 19 nt, Artificial Sequence
  Description of Artificial Sequence: Synthetic oligonucleotide
gacgucgaguacacauuca

SEQ ID NO: 394916 - RNA, 19 nt, Artificial Sequence
  Description of Artificial Sequence: Synthetic oligonucleotide
gcuucgucgucaccauugc

SEQ ID NO: 394917 - RNA, 19 nt, Artificial Sequence
  Description of Artificial Sequence: Synthetic oligonucleotide
uugucaccucaguguauua

SEQ ID NO: 394918 - RNA, 19 nt, Artificial Sequence
  Description of Artificial Sequence: Synthetic oligonucleotide
ggaacccgcguccacugac

SEQ ID NO: 394919 - RNA, 19 nt, Artificial Sequence
  Description of Artificial Sequence: Synthetic oligonucleotide
ucuucggcucucggggaac

SEQ ID NO: 394920 - RNA, 19 nt, Artificial Sequence
  Description of Artificial Sequence: Synthetic oligonucleotide
ggcuuuacagaacaacuuu

SEQ ID NO: 394921 - RNA, 19 nt, Artificial Sequence
  Description of Artificial Sequence: Synthetic oligonucleotide
cagauucaacugcagagau

SEQ ID NO: 394922 - RNA, 19 nt, Artificial Sequence
  Description of Artificial Sequence: Synthetic oligonucleotide
agauucaacugcagagauu

SEQ ID NO: 394923 - RNA, 19 nt, Artificial Sequence
  Description of Artificial Sequence: Synthetic oligonucleotide
auguucuagcuuagcuuga

SEQ ID NO: 394924 - RNA, 19 nt, Artificial Sequence
  Description of Artificial Sequence: Synthetic oligonucleotide
cuucggcucucggggaacc

SEQ ID NO: 394925 - RNA, 19 nt, Artificial Sequence
  Description of Artificial Sequence: Synthetic oligonucleotide
gcugaacaaucucaguagu

SEQ ID NO: 394926 - RNA, 19 nt, Artificial Sequence
  Description of Artificial Sequence: Synthetic oligonucleotide
ccuuagcuuuccgaaguag

SEQ ID NO: 394927 - RNA, 19 nt, Artificial Sequence
  Description of Artificial Sequence: Synthetic oligonucleotide
gccagcaugucaugucgac

SEQ ID NO: 394928 - RNA, 19 nt, Artificial Sequence
  Description of Artificial Sequence: Synthetic oligonucleotide
agggccgagacacccucua

SEQ ID NO: 394929 - RNA, 19 nt, Artificial Sequence
  Description of Artificial Sequence: Synthetic oligonucleotide
cugucauguuauauuuuau

SEQ ID NO: 394930 - RNA, 19 nt, Artificial Sequence
  Description of Artificial Sequence: Synthetic oligonucleotide
acguucucugccagaauuu

SEQ ID NO: 394931 - RNA, 19 nt, Artificial Sequence
  Description of Artificial Sequence: Synthetic oligonucleotide
cucagagcuggagcgacaa

SEQ ID NO: 394932 - RNA, 19 nt, Artificial Sequence
  Description of Artificial Sequence: Synthetic oligonucleotide
cauaggaacucaggggacu

SEQ ID NO: 394933 - RNA, 19 nt, Artificial Sequence
  Description of Artificial Sequence: Synthetic oligonucleotide
acugaccgcgcgcccggcu

SEQ ID NO: 394934 - RNA, 19 nt, Artificial Sequence
  Description of Artificial Sequence: Synthetic oligonucleotide
ggggaacccgcguccacug

SEQ ID NO: 394935 - RNA, 19 nt, Artificial Sequence
  Description of Artificial Sequence: Synthetic oligonucleotide
caugucgacuuagguuauc

SEQ ID NO: 394936 - RNA, 19 nt, Artificial Sequence
  Description of Artificial Sequence: Synthetic oligonucleotide
cugaccgcgcgcccggcuc

SEQ ID NO: 394937 - RNA, 19 nt, Artificial Sequence
  Description of Artificial Sequence: Synthetic oligonucleotide
cagucaugguacuguauau

SEQ ID NO: 394938 - RNA, 19 nt, Artificial Sequence
  Description of Artificial Sequence: Synthetic oligonucleotide
ggccaaagacuacaucugu

SEQ ID NO: 394939 - RNA, 19 nt, Artificial Sequence
  Description of Artificial Sequence: Synthetic oligonucleotide
cugacaguaugcagccccu

SEQ ID NO: 394940 - RNA, 19 nt, Artificial Sequence
  Description of Artificial Sequence: Synthetic oligonucleotide
gacuuagguuaucgcuggu

SEQ ID NO: 394941 - RNA, 19 nt, Artificial Sequence
  Description of Artificial Sequence: Synthetic oligonucleotide
agggaguauuuaacaguua

SEQ ID NO: 394942 - RNA, 19 nt, Artificial Sequence
  Description of Artificial Sequence: Synthetic oligonucleotide
caguaagcuucaauacuuu

SEQ ID NO: 394943 - RNA, 19 nt, Artificial Sequence
  Description of Artificial Sequence: Synthetic oligonucleotide
cugacgucgaguacacauu

SEQ ID NO: 394944 - RNA, 19 nt, Artificial Sequence
  Description of Artificial Sequence: Synthetic oligonucleotide
gucuaaagucuggcccuuc

SEQ ID NO: 394945 - RNA, 19 nt, Artificial Sequence
  Description of Artificial Sequence: Synthetic oligonucleotide
guccacugaccgcgcgccc

SEQ ID NO: 394946 - RNA, 19 nt, Artificial Sequence
  Description of Artificial Sequence: Synthetic oligonucleotide
gggaugcaacuggucaaug

SEQ ID NO: 394947 - RNA, 19 nt, Artificial Sequence
  Description of Artificial Sequence: Synthetic oligonucleotide
gcguccacugaccgcgcgc

SEQ ID NO: 394948 - RNA, 19 nt, Artificial Sequence
  Description of Artificial Sequence: Synthetic oligonucleotide
cugagagguuucuucgguu

SEQ ID NO: 394949 - RNA, 19 nt, Artificial Sequence
  Description of Artificial Sequence: Synthetic oligonucleotide
cugugagauucaagagacu

SEQ ID NO: 394950 - RNA, 19 nt, Artificial Sequence
  Description of Artificial Sequence: Synthetic oligonucleotide
gcuccuaacucaaacucau

SEQ ID NO: 394951 - RNA, 19 nt, Artificial Sequence
  Description of Artificial Sequence: Synthetic oligonucleotide
gaccgcgcgcccggcuccg

SEQ ID NO: 394952 - RNA, 19 nt, Artificial Sequence
  Description of Artificial Sequence: Synthetic oligonucleotide
ccaagcugcuuaauacucu

SEQ ID NO: 394953 - RNA, 19 nt, Artificial Sequence
  Description of Artificial Sequence: Synthetic oligonucleotide
ccacugaccgcgcgcccgg

SEQ ID NO: 394954 - RNA, 19 nt, Artificial Sequence
  Description of Artificial Sequence: Synthetic oligonucleotide
gcaaaguauucgggugaca

SEQ ID NO: 394955 - RNA, 19 nt, Artificial Sequence
  Description of Artificial Sequence: Synthetic oligonucleotide
gguuccgucuucgucucgu

SEQ ID NO: 394956 - RNA, 19 nt, Artificial Sequence
  Description of Artificial Sequence: Synthetic oligonucleotide
ccgagacacccucuauuca

SEQ ID NO: 394957 - RNA, 19 nt, Artificial Sequence
  Description of Artificial Sequence: Synthetic oligonucleotide
cccauaggucaaggggagc

SEQ ID NO: 394958 - RNA, 19 nt, Artificial Sequence
  Description of Artificial Sequence: Synthetic oligonucleotide
ccgguuccgucuucgucuc

SEQ ID NO: 394959 - RNA, 19 nt, Artificial Sequence
  Description of Artificial Sequence: Synthetic oligonucleotide
cucggggaacccgcgucca

SEQ ID NO: 394960 - RNA, 19 nt, Artificial Sequence
  Description of Artificial Sequence: Synthetic oligonucleotide
ccccucauucuccuggcaa

SEQ ID NO: 394961 - RNA, 19 nt, Artificial Sequence
  Description of Artificial Sequence: Synthetic oligonucleotide
gaucaccagccugcuguau

SEQ ID NO: 394962 - RNA, 19 nt, Artificial Sequence
  Description of Artificial Sequence: Synthetic oligonucleotide
ggccgagacacccucuauu

SEQ ID NO: 394963 - RNA, 19 nt, Artificial Sequence
  Description of Artificial Sequence: Synthetic oligonucleotide
cugcugcaucaauucggcu

SEQ ID NO: 394964 - RNA, 19 nt, Artificial Sequence
  Description of Artificial Sequence: Synthetic oligonucleotide
cacugaccgcgcgcccggc

SEQ ID NO: 394965 - RNA, 19 nt, Artificial Sequence
  Description of Artificial Sequence: Synthetic oligonucleotide
gggaacccgcguccacuga

SEQ ID NO: 394966 - RNA, 19 nt, Artificial Sequence
  Description of Artificial Sequence: Synthetic oligonucleotide
guuccgucuucgucucguu

SEQ ID NO: 394967 - RNA, 19 nt, Artificial Sequence
  Description of Artificial Sequence: Synthetic oligonucleotide
gcucugcuacaaggcaaca

SEQ ID NO: 394968 - RNA, 19 nt, Artificial Sequence
  Description of Artificial Sequence: Synthetic oligonucleotide
cccuuccuucccaaaacau

SEQ ID NO: 394969 - RNA, 19 nt, Artificial Sequence
  Description of Artificial Sequence: Synthetic oligonucleotide
cgcguccacugaccgcgcg

SEQ ID NO: 394970 - RNA, 19 nt, Artificial Sequence
  Description of Artificial Sequence: Synthetic oligonucleotide
ccgucuucgucucguucaa

SEQ ID NO: 394971 - RNA, 19 nt, Artificial Sequence
  Description of Artificial Sequence: Synthetic oligonucleotide
gugcgaucaccagccugcu

SEQ ID NO: 394972 - RNA, 19 nt, Artificial Sequence
  Description of Artificial Sequence: Synthetic oligonucleotide
cgguuuacucagagcugga

SEQ ID NO: 394973 - RNA, 19 nt, Artificial Sequence
  Description of Artificial Sequence: Synthetic oligonucleotide
ggucuaaagucuggcccuu

SEQ ID NO: 394974 - RNA, 19 nt, Artificial Sequence
  Description of Artificial Sequence: Synthetic oligonucleotide
ccgcguccacugaccgcgc

SEQ ID NO: 394975 - RNA, 19 nt, Artificial Sequence
  Description of Artificial Sequence: Synthetic oligonucleotide
cgguuccgucuucgucucg

SEQ ID NO: 394976 - RNA, 19 nt, Artificial Sequence
  Description of Artificial Sequence: Synthetic oligonucleotide
cugcaucaauucggcugcu

SEQ ID NO: 394977 - RNA, 19 nt, Artificial Sequence
  Description of Artificial Sequence: Synthetic oligonucleotide
cccaagcuaccaugcugcu

SEQ ID NO: 394978 - RNA, 19 nt, Artificial Sequence
  Description of Artificial Sequence: Synthetic oligonucleotide
cugcugguccaagcugcuu

SEQ ID NO: 394979 - RNA, 19 nt, Artificial Sequence
  Description of Artificial Sequence: Synthetic oligonucleotide
ccaagcuaccaugcugcuu

SEQ ID NO: 394980 - RNA, 19 nt, Artificial Sequence
  Description of Artificial Sequence: Synthetic oligonucleotide
ccggagcugagagguuucu

SEQ ID NO: 394981 - RNA, 19 nt, Artificial Sequence
  Description of Artificial Sequence: Synthetic oligonucleotide
cggggaacccgcguccacu

SEQ ID NO: 394982 - RNA, 19 nt, Artificial Sequence
  Description of Artificial Sequence: Synthetic oligonucleotide
aaauagaucagcuucuuag

SEQ ID NO: 394983 - RNA, 19 nt, Artificial Sequence
  Description of Artificial Sequence: Synthetic oligonucleotide
auugagaucccacugaaac

SEQ ID NO: 394984 - RNA, 19 nt, Artificial Sequence
  Description of Artificial Sequence: Synthetic oligonucleotide
uggacaauccaccauagcg

SEQ ID NO: 394985 - RNA, 19 nt, Artificial Sequence
  Description of Artificial Sequence: Synthetic oligonucleotide
auaacaaucagauuguagu

SEQ ID NO: 394986 - RNA, 19 nt, Artificial Sequence
  Description of Artificial Sequence: Synthetic oligonucleotide
aagaguuuacgcugguucc

SEQ ID NO: 394987 - RNA, 19 nt, Artificial Sequence
  Description of Artificial Sequence: Synthetic oligonucleotide
acuaggugaagccagacgg

SEQ ID NO: 394988 - RNA, 19 nt, Artificial Sequence
  Description of Artificial Sequence: Synthetic oligonucleotide
uuuauuaaauccacagaag

SEQ ID NO: 394989 - RNA, 19 nt, Artificial Sequence
  Description of Artificial Sequence: Synthetic oligonucleotide
aauagcuaguggcuggggc

SEQ ID NO: 394990 - RNA, 19 nt, Artificial Sequence
  Description of Artificial Sequence: Synthetic oligonucleotide
uggaguuuguaccaggacg

SEQ ID NO: 394991 - RNA, 19 nt, Artificial Sequence
  Description of Artificial Sequence: Synthetic oligonucleotide
agacacgacagauaguggc

SEQ ID NO: 394992 - RNA, 19 nt, Artificial Sequence
  Description of Artificial Sequence: Synthetic oligonucleotide
acguucaaggcucacacgc

SEQ ID NO: 394993 - RNA, 19 nt, Artificial Sequence
  Description of Artificial Sequence: Synthetic oligonucleotide
gauaguggcacugucaucc

SEQ ID NO: 394994 - RNA, 19 nt, Artificial Sequence
  Description of Artificial Sequence: Synthetic oligonucleotide
aucaauacgggcuuggucu

SEQ ID NO: 394995 - RNA, 19 nt, Artificial Sequence
  Description of Artificial Sequence: Synthetic oligonucleotide
agaucagcuucuuagacag

SEQ ID NO: 394996 - RNA, 19 nt, Artificial Sequence
  Description of Artificial Sequence: Synthetic oligonucleotide
aaauaauucuccacgaugu

SEQ ID NO: 394997 - RNA, 19 nt, Artificial Sequence
  Description of Artificial Sequence: Synthetic oligonucleotide
gaucauccgacccaaagcc

SEQ ID NO: 394998 - RNA, 19 nt, Artificial Sequence
  Description of Artificial Sequence: Synthetic oligonucleotide
aguauggaucauccgaccc

SEQ ID NO: 394999 - RNA, 19 nt, Artificial Sequence
  Description of Artificial Sequence: Synthetic oligonucleotide
acugcuugaacaugcggcc

SEQ ID NO: 395000 - RNA, 19 nt, Artificial Sequence
  Description of Artificial Sequence: Synthetic oligonucleotide
aauagaucagcuucuuaga

SEQ ID NO: 395001 - RNA, 19 nt, Artificial Sequence
  Description of Artificial Sequence: Synthetic oligonucleotide
aacacgcucacauuuccuc

SEQ ID NO: 395002 - RNA, 19 nt, Artificial Sequence
  Description of Artificial Sequence: Synthetic oligonucleotide
gagaauguagaaucaguag

SEQ ID NO: 395003 - RNA, 19 nt, Artificial Sequence
  Description of Artificial Sequence: Synthetic oligonucleotide
gagacgagcacguaucagg

SEQ ID NO: 395004 - RNA, 19 nt, Artificial Sequence
  Description of Artificial Sequence: Synthetic oligonucleotide
cuugcugccgcuaucacgc

SEQ ID NO: 395005 - RNA, 19 nt, Artificial Sequence
  Description of Artificial Sequence: Synthetic oligonucleotide
accgcuucaugccagacac

SEQ ID NO: 395006 - RNA, 19 nt, Artificial Sequence
  Description of Artificial Sequence: Synthetic oligonucleotide
ucacgcaugaaauaauucu

SEQ ID NO: 395007 - RNA, 19 nt, Artificial Sequence
  Description of Artificial Sequence: Synthetic oligonucleotide
gaauguagaaucaguagcc

SEQ ID NO: 395008 - RNA, 19 nt, Artificial Sequence
  Description of Artificial Sequence: Synthetic oligonucleotide
agacguucaaggcucacac

SEQ ID NO: 395009 - RNA, 19 nt, Artificial Sequence
  Description of Artificial Sequence: Synthetic oligonucleotide
uggcagacacgacagauag

SEQ ID NO: 395010 - RNA, 19 nt, Artificial Sequence
  Description of Artificial Sequence: Synthetic oligonucleotide
uaggcuagcacugggaagg

SEQ ID NO: 395011 - RNA, 19 nt, Artificial Sequence
  Description of Artificial Sequence: Synthetic oligonucleotide
uugacaucgaccugcacac

SEQ ID NO: 395012 - RNA, 19 nt, Artificial Sequence
  Description of Artificial Sequence: Synthetic oligonucleotide
cagauuguaguccucagug

SEQ ID NO: 395013 - RNA, 19 nt, Artificial Sequence
  Description of Artificial Sequence: Synthetic oligonucleotide
auagcccucuuguacuucc

SEQ ID NO: 395014 - RNA, 19 nt, Artificial Sequence
  Description of Artificial Sequence: Synthetic oligonucleotide
uuaucuucacagcuaguac

SEQ ID NO: 395015 - RNA, 19 nt, Artificial Sequence
  Description of Artificial Sequence: Synthetic oligonucleotide
gacaauccaccauagcgcc

SEQ ID NO: 395016 - RNA, 19 nt, Artificial Sequence
  Description of Artificial Sequence: Synthetic oligonucleotide
cuugugagcguugagcugg

SEQ ID NO: 395017 - RNA, 19 nt, Artificial Sequence
  Description of Artificial Sequence: Synthetic oligonucleotide
uccuugguauacuucaccc

SEQ ID NO: 395018 - RNA, 19 nt, Artificial Sequence
  Description of Artificial Sequence: Synthetic oligonucleotide
agaccuggcggauagagcu

SEQ ID NO: 395019 - RNA, 19 nt, Artificial Sequence
  Description of Artificial Sequence: Synthetic oligonucleotide
ugagcaacuccacuccucc

SEQ ID NO: 395020 - RNA, 19 nt, Artificial Sequence
  Description of Artificial Sequence: Synthetic oligonucleotide
caagaguuuacgcugguuc

SEQ ID NO: 395021 - RNA, 19 nt, Artificial Sequence
  Description of Artificial Sequence: Synthetic oligonucleotide
gacgcuacaauagacugug

SEQ ID NO: 395022 - RNA, 19 nt, Artificial Sequence
  Description of Artificial Sequence: Synthetic oligonucleotide
aaucagauuguaguccuca

SEQ ID NO: 395023 - RNA, 19 nt, Artificial Sequence
  Description of Artificial Sequence: Synthetic oligonucleotide
cugaugguccuugugagcg

SEQ ID NO: 395024 - RNA, 19 nt, Artificial Sequence
  Description of Artificial Sequence: Synthetic oligonucleotide
uagaucagcuucuuagaca

SEQ ID NO: 395025 - RNA, 19 nt, Artificial Sequence
  Description of Artificial Sequence: Synthetic oligonucleotide
uggagaauguagaaucagu

SEQ ID NO: 395026 - RNA, 19 nt, Artificial Sequence
  Description of Artificial Sequence: Synthetic oligonucleotide
gaagguucagcgguggcgg

SEQ ID NO: 395027 - RNA, 19 nt, Artificial Sequence
  Description of Artificial Sequence: Synthetic oligonucleotide
ucagccacgaucuuaccaa

SEQ ID NO: 395028 - RNA, 19 nt, Artificial Sequence
  Description of Artificial Sequence: Synthetic oligonucleotide
accacgcucaauaacaauc

SEQ ID NO: 395029 - RNA, 19 nt, Artificial Sequence
  Description of Artificial Sequence: Synthetic oligonucleotide
aaucauuuugagagcgcgg

SEQ ID NO: 395030 - RNA, 19 nt, Artificial Sequence
  Description of Artificial Sequence: Synthetic oligonucleotide
augcgcgucucaaagaagc

SEQ ID NO: 395031 - RNA, 19 nt, Artificial Sequence
  Description of Artificial Sequence: Synthetic oligonucleotide
aaucgcaaaauguguuccu

SEQ ID NO: 395032 - RNA, 19 nt, Artificial Sequence
  Description of Artificial Sequence: Synthetic oligonucleotide
cacgucuugggcaaacucc

SEQ ID NO: 395033 - RNA, 19 nt, Artificial Sequence
  Description of Artificial Sequence: Synthetic oligonucleotide
ucaggguuaggucuagggu

SEQ ID NO: 395034 - RNA, 19 nt, Artificial Sequence
  Description of Artificial Sequence: Synthetic oligonucleotide
uuaggucuaggguaccacc

SEQ ID NO: 395035 - RNA, 19 nt, Artificial Sequence
  Description of Artificial Sequence: Synthetic oligonucleotide
aucgccaggaccaccagcc

SEQ ID NO: 395036 - RNA, 19 nt, Artificial Sequence
  Description of Artificial Sequence: Synthetic oligonucleotide
cacaauagcuaguggcugg

SEQ ID NO: 395037 - RNA, 19 nt, Artificial Sequence
  Description of Artificial Sequence: Synthetic oligonucleotide
gugaaagcaaaacucgcac

SEQ ID NO: 395038 - RNA, 19 nt, Artificial Sequence
  Description of Artificial Sequence: Synthetic oligonucleotide
caaaacucgcacugguugc

SEQ ID NO: 395039 - RNA, 19 nt, Artificial Sequence
  Description of Artificial Sequence: Synthetic oligonucleotide
ucaugcgcgucucaaagaa

SEQ ID NO: 395040 - RNA, 19 nt, Artificial Sequence
  Description of Artificial Sequence: Synthetic oligonucleotide
caugccagacacaugcggc

SEQ ID NO: 395041 - RNA, 19 nt, Artificial Sequence
  Description of Artificial Sequence: Synthetic oligonucleotide
ccuggggagaacuauaagg

SEQ ID NO: 395042 - RNA, 19 nt, Artificial Sequence
  Description of Artificial Sequence: Synthetic oligonucleotide
aaggcgucauucaugcgcg

SEQ ID NO: 395043 - RNA, 19 nt, Artificial Sequence
  Description of Artificial Sequence: Synthetic oligonucleotide
acguaucaggguuaggucu

SEQ ID NO: 395044 - RNA, 19 nt, Artificial Sequence
  Description of Artificial Sequence: Synthetic oligonucleotide
cauuuugagagcgcggugc

SEQ ID NO: 395045 - RNA, 19 nt, Artificial Sequence
  Description of Artificial Sequence: Synthetic oligonucleotide
gagaacuuaggcuagcacu

SEQ ID NO: 395046 - RNA, 19 nt, Artificial Sequence
  Description of Artificial Sequence: Synthetic oligonucleotide
gacaucgaccugcacacgc

SEQ ID NO: 395047 - RNA, 19 nt, Artificial Sequence
  Description of Artificial Sequence: Synthetic oligonucleotide
agcgggaccgcuucaugcc

SEQ ID NO: 395048 - RNA, 19 nt, Artificial Sequence
  Description of Artificial Sequence: Synthetic oligonucleotide
gacaauagccaugccaggc

SEQ ID NO: 395049 - RNA, 19 nt, Artificial Sequence
  Description of Artificial Sequence: Synthetic oligonucleotide
uuaggcuagcacugggaag

SEQ ID NO: 395050 - RNA, 19 nt, Artificial Sequence
  Description of Artificial Sequence: Synthetic oligonucleotide
ugcgcuggaguauggauca

SEQ ID NO: 395051 - RNA, 19 nt, Artificial Sequence
  Description of Artificial Sequence: Synthetic oligonucleotide
cacgcaugaaauaauucuc

SEQ ID NO: 395052 - RNA, 19 nt, Artificial Sequence
  Description of Artificial Sequence: Synthetic oligonucleotide
aggacgcucagccacgauc

SEQ ID NO: 395053 - RNA, 19 nt, Artificial Sequence
  Description of Artificial Sequence: Synthetic oligonucleotide
agaacuuaggcuagcacug

SEQ ID NO: 395054 - RNA, 19 nt, Artificial Sequence
  Description of Artificial Sequence: Synthetic oligonucleotide
guucaaggcucacacgcgg

SEQ ID NO: 395055 - RNA, 19 nt, Artificial Sequence
  Description of Artificial Sequence: Synthetic oligonucleotide
uugcuuaggggcccuggcg

SEQ ID NO: 395056 - RNA, 19 nt, Artificial Sequence
  Description of Artificial Sequence: Synthetic oligonucleotide
aagaacacgcucacauuuc

SEQ ID NO: 395057 - RNA, 19 nt, Artificial Sequence
  Description of Artificial Sequence: Synthetic oligonucleotide
ugcuuaggggcccuggcgc

SEQ ID NO: 395058 - RNA, 19 nt, Artificial Sequence
  Description of Artificial Sequence: Synthetic oligonucleotide
cacgucagagaccuggcgg

SEQ ID NO: 395059 - RNA, 19 nt, Artificial Sequence
  Description of Artificial Sequence: Synthetic oligonucleotide
ugccacuaggugaagccag

SEQ ID NO: 395060 - RNA, 19 nt, Artificial Sequence
  Description of Artificial Sequence: Synthetic oligonucleotide
ugagcguugagcuggcagu

SEQ ID NO: 395061 - RNA, 19 nt, Artificial Sequence
  Description of Artificial Sequence: Synthetic oligonucleotide
uugagaucccacugaaacu

SEQ ID NO: 395062 - RNA, 19 nt, Artificial Sequence
  Description of Artificial Sequence: Synthetic oligonucleotide
uuuacgcugguuccgcacu

SEQ ID NO: 395063 - RNA, 19 nt, Artificial Sequence
  Description of Artificial Sequence: Synthetic oligonucleotide
agacugugcgcucaccauc

SEQ ID NO: 395064 - RNA, 19 nt, Artificial Sequence
  Description of Artificial Sequence: Synthetic oligonucleotide
uuggagacgagcacguauc

SEQ ID NO: 395065 - RNA, 19 nt, Artificial Sequence
  Description of Artificial Sequence: Synthetic oligonucleotide
auagacugugcgcucacca

SEQ ID NO: 395066 - RNA, 19 nt, Artificial Sequence
  Description of Artificial Sequence: Synthetic oligonucleotide
ugacaauagccaugccagg

SEQ ID NO: 395067 - RNA, 19 nt, Artificial Sequence
  Description of Artificial Sequence: Synthetic oligonucleotide
aggccaagaguuuacgcug

SEQ ID NO: 395068 - RNA, 19 nt, Artificial Sequence
  Description of Artificial Sequence: Synthetic oligonucleotide
cugauuagcauccugugaa

SEQ ID NO: 395069 - RNA, 19 nt, Artificial Sequence
  Description of Artificial Sequence: Synthetic oligonucleotide
agccagagccaucaauacg

SEQ ID NO: 395070 - RNA, 19 nt, Artificial Sequence
  Description of Artificial Sequence: Synthetic oligonucleotide
ucaugguccagugcuggcg

SEQ ID NO: 395071 - RNA, 19 nt, Artificial Sequence
  Description of Artificial Sequence: Synthetic oligonucleotide
gcuacaauagacugugcgc

SEQ ID NO: 395072 - RNA, 19 nt, Artificial Sequence
  Description of Artificial Sequence: Synthetic oligonucleotide
uuuggucaugguccagugc

SEQ ID NO: 395073 - RNA, 19 nt, Artificial Sequence
  Description of Artificial Sequence: Synthetic oligonucleotide
acaauagccaugccaggca

SEQ ID NO: 395074 - RNA, 19 nt, Artificial Sequence
  Description of Artificial Sequence: Synthetic oligonucleotide
gacggggucccucagcacc

SEQ ID NO: 395075 - RNA, 19 nt, Artificial Sequence
  Description of Artificial Sequence: Synthetic oligonucleotide
cagcacagcagaaaacuug

SEQ ID NO: 395076 - RNA, 19 nt, Artificial Sequence
  Description of Artificial Sequence: Synthetic oligonucleotide
uuguacuuccaugggcugg

SEQ ID NO: 395077 - RNA, 19 nt, Artificial Sequence
  Description of Artificial Sequence: Synthetic oligonucleotide
ugugaaucggaggaagccu

SEQ ID NO: 395078 - RNA, 19 nt, Artificial Sequence
  Description of Artificial Sequence: Synthetic oligonucleotide
uccgcaugaggccacuuac

SEQ ID NO: 395079 - RNA, 19 nt, Artificial Sequence
  Description of Artificial Sequence: Synthetic oligonucleotide
aucauuuugagagcgcggu

SEQ ID NO: 395080 - RNA, 19 nt, Artificial Sequence
  Description of Artificial Sequence: Synthetic oligonucleotide
ugcgcgucucaaagaagcg

SEQ ID NO: 395081 - RNA, 19 nt, Artificial Sequence
  Description of Artificial Sequence: Synthetic oligonucleotide
cuaggguaccaccaggcug

SEQ ID NO: 395082 - RNA, 19 nt, Artificial Sequence
  Description of Artificial Sequence: Synthetic oligonucleotide
gcaaaacucgcacugguug

SEQ ID NO: 395083 - RNA, 19 nt, Artificial Sequence
  Description of Artificial Sequence: Synthetic oligonucleotide
ccacacaauagcuaguggc

SEQ ID NO: 395084 - RNA, 19 nt, Artificial Sequence
  Description of Artificial Sequence: Synthetic oligonucleotide
uccugagaacuuaggcuag

SEQ ID NO: 395085 - RNA, 19 nt, Artificial Sequence
  Description of Artificial Sequence: Synthetic oligonucleotide
aaauguguuccugaugcuu

SEQ ID NO: 395086 - RNA, 19 nt, Artificial Sequence
  Description of Artificial Sequence: Synthetic oligonucleotide
ugguauacuucacccgcug

SEQ ID NO: 395087 - RNA, 19 nt, Artificial Sequence
  Description of Artificial Sequence: Synthetic oligonucleotide
ucauccgacccaaagccau

SEQ ID NO: 395088 - RNA, 19 nt, Artificial Sequence
  Description of Artificial Sequence: Synthetic oligonucleotide
gcagacacgacagauagug

SEQ ID NO: 395089 - RNA, 19 nt, Artificial Sequence
  Description of Artificial Sequence: Synthetic oligonucleotide
gggacugaaggacagggcc

SEQ ID NO: 395090 - RNA, 19 nt, Artificial Sequence
  Description of Artificial Sequence: Synthetic oligonucleotide
aucggaggaagccuugcug

SEQ ID NO: 395091 - RNA, 19 nt, Artificial Sequence
  Description of Artificial Sequence: Synthetic oligonucleotide
ucgcaaaauguguuccuga

SEQ ID NO: 395092 - RNA, 19 nt, Artificial Sequence
  Description of Artificial Sequence: Synthetic oligonucleotide
gacguucaaggcucacacg

SEQ ID NO: 395093 - RNA, 19 nt, Artificial Sequence
  Description of Artificial Sequence: Synthetic oligonucleotide
aucacgcaugaaauaauuc

SEQ ID NO: 395094 - RNA, 19 nt, Artificial Sequence
  Description of Artificial Sequence: Synthetic oligonucleotide
guauuguuaucacucucca

SEQ ID NO: 395095 - RNA, 19 nt, Artificial Sequence
  Description of Artificial Sequence: Synthetic oligonucleotide
aaaacucgcacugguugca

SEQ ID NO: 395096 - RNA, 19 nt, Artificial Sequence
  Description of Artificial Sequence: Synthetic oligonucleotide
uucaaggcucacacgcggc

SEQ ID NO: 395097 - RNA, 19 nt, Artificial Sequence
  Description of Artificial Sequence: Synthetic oligonucleotide
ugaaucggaggaagccuug

SEQ ID NO: 395098 - RNA, 19 nt, Artificial Sequence
  Description of Artificial Sequence: Synthetic oligonucleotide
uggcgguucuaccagcaca

SEQ ID NO: 395099 - RNA, 19 nt, Artificial Sequence
  Description of Artificial Sequence: Synthetic oligonucleotide
acaauagcuaguggcuggg

SEQ ID NO: 395100 - RNA, 19 nt, Artificial Sequence
  Description of Artificial Sequence: Synthetic oligonucleotide
cuugggcaaacuccugggg

SEQ ID NO: 395101 - RNA, 19 nt, Artificial Sequence
  Description of Artificial Sequence: Synthetic oligonucleotide
auuuugagagcgcggugca

SEQ ID NO: 395102 - RNA, 19 nt, Artificial Sequence
  Description of Artificial Sequence: Synthetic oligonucleotide
agagaccuggcggauagag

SEQ ID NO: 395103 - RNA, 19 nt, Artificial Sequence
  Description of Artificial Sequence: Synthetic oligonucleotide
ggaucauccgacccaaagc

SEQ ID NO: 395104 - RNA, 19 nt, Artificial Sequence
  Description of Artificial Sequence: Synthetic oligonucleotide
agacgagcacguaucaggg

SEQ ID NO: 395105 - RNA, 19 nt, Artificial Sequence
  Description of Artificial Sequence: Synthetic oligonucleotide
aauacgggcuuggucucag

SEQ ID NO: 395106 - RNA, 19 nt, Artificial Sequence
  Description of Artificial Sequence: Synthetic oligonucleotide
cugugaaucggaggaagcc

SEQ ID NO: 395107 - RNA, 19 nt, Artificial Sequence
  Description of Artificial Sequence: Synthetic oligonucleotide
gaagaacacgcucacauuu

SEQ ID NO: 395108 - RNA, 19 nt, Artificial Sequence
  Description of Artificial Sequence: Synthetic oligonucleotide
acacgacagauaguggcac

SEQ ID NO: 395109 - RNA, 19 nt, Artificial Sequence
  Description of Artificial Sequence: Synthetic oligonucleotide
gaacuuaggcuagcacugg

SEQ ID NO: 395110 - RNA, 19 nt, Artificial Sequence
  Description of Artificial Sequence: Synthetic oligonucleotide
agucuuagcaggcccugug

SEQ ID NO: 395111 - RNA, 19 nt, Artificial Sequence
  Description of Artificial Sequence: Synthetic oligonucleotide
gaacaugcggcccacgucu

SEQ ID NO: 395112 - RNA, 19 nt, Artificial Sequence
  Description of Artificial Sequence: Synthetic oligonucleotide
gcuucuuagacagcaagag

SEQ ID NO: 395113 - RNA, 19 nt, Artificial Sequence
  Description of Artificial Sequence: Synthetic oligonucleotide
aggaccaucgccaggacca

SEQ ID NO: 395114 - RNA, 19 nt, Artificial Sequence
  Description of Artificial Sequence: Synthetic oligonucleotide
cuggcuaucagcagugaga

SEQ ID NO: 395115 - RNA, 19 nt, Artificial Sequence
  Description of Artificial Sequence: Synthetic oligonucleotide
gguucguggcagaagaggg

SEQ ID NO: 395116 - RNA, 19 nt, Artificial Sequence
  Description of Artificial Sequence: Synthetic oligonucleotide
ucgcacugguugcacauga

SEQ ID NO: 395117 - RNA, 19 nt, Artificial Sequence
  Description of Artificial Sequence: Synthetic oligonucleotide
guauggaucauccgaccca

SEQ ID NO: 395118 - RNA, 19 nt, Artificial Sequence
  Description of Artificial Sequence: Synthetic oligonucleotide
gauccagacguucaaggcu

SEQ ID NO: 395119 - RNA, 19 nt, Artificial Sequence
  Description of Artificial Sequence: Synthetic oligonucleotide
auuuugugaggagggacug

SEQ ID NO: 395120 - RNA, 19 nt, Artificial Sequence
  Description of Artificial Sequence: Synthetic oligonucleotide
gugagcguugagcuggcag

SEQ ID NO: 395121 - RNA, 19 nt, Artificial Sequence
  Description of Artificial Sequence: Synthetic oligonucleotide
aguuuguaccaggacgcuc

SEQ ID NO: 395122 - RNA, 19 nt, Artificial Sequence
  Description of Artificial Sequence: Synthetic oligonucleotide
ggacaauccaccauagcgc

SEQ ID NO: 395123 - RNA, 19 nt, Artificial Sequence
  Description of Artificial Sequence: Synthetic oligonucleotide
ugaacaugcggcccacguc

SEQ ID NO: 395124 - RNA, 19 nt, Artificial Sequence
  Description of Artificial Sequence: Synthetic oligonucleotide
gagcgggaccgcuucaugc

SEQ ID NO: 395125 - RNA, 19 nt, Artificial Sequence
  Description of Artificial Sequence: Synthetic oligonucleotide
cuggagucuuagcaggccc

SEQ ID NO: 395126 - RNA, 19 nt, Artificial Sequence
  Description of Artificial Sequence: Synthetic oligonucleotide
accagagcgggaccgcuuc

SEQ ID NO: 395127 - RNA, 19 nt, Artificial Sequence
  Description of Artificial Sequence: Synthetic oligonucleotide
cuggaguauggaucauccg

SEQ ID NO: 395128 - RNA, 19 nt, Artificial Sequence
  Description of Artificial Sequence: Synthetic oligonucleotide
agggguucgugcuugugga

SEQ ID NO: 395129 - RNA, 19 nt, Artificial Sequence
  Description of Artificial Sequence: Synthetic oligonucleotide
uuuugacucggugaaguuu

SEQ ID NO: 395130 - RNA, 19 nt, Artificial Sequence
  Description of Artificial Sequence: Synthetic oligonucleotide
acgagcacguaucaggguu

SEQ ID NO: 395131 - RNA, 19 nt, Artificial Sequence
  Description of Artificial Sequence: Synthetic oligonucleotide
uggcuaucagcagugagau

SEQ ID NO: 395132 - RNA, 19 nt, Artificial Sequence
  Description of Artificial Sequence: Synthetic oligonucleotide
ugcgcucaccaucuggagu

SEQ ID NO: 395133 - RNA, 19 nt, Artificial Sequence
  Description of Artificial Sequence: Synthetic oligonucleotide
uggagucuuagcaggcccu

SEQ ID NO: 395134 - RNA, 19 nt, Artificial Sequence
  Description of Artificial Sequence: Synthetic oligonucleotide
aggucuaggguaccaccag

SEQ ID NO: 395135 - RNA, 19 nt, Artificial Sequence
  Description of Artificial Sequence: Synthetic oligonucleotide
uggagacgagcacguauca

SEQ ID NO: 395136 - RNA, 19 nt, Artificial Sequence
  Description of Artificial Sequence: Synthetic oligonucleotide
uacaauagacugugcgcuc

SEQ ID NO: 395137 - RNA, 19 nt, Artificial Sequence
  Description of Artificial Sequence: Synthetic oligonucleotide
gacagauaguggcacuguc

SEQ ID NO: 395138 - RNA, 19 nt, Artificial Sequence
  Description of Artificial Sequence: Synthetic oligonucleotide
gguauacuucacccgcugg

SEQ ID NO: 395139 - RNA, 19 nt, Artificial Sequence
  Description of Artificial Sequence: Synthetic oligonucleotide
accuguggaguuuguacca

SEQ ID NO: 395140 - RNA, 19 nt, Artificial Sequence
  Description of Artificial Sequence: Synthetic oligonucleotide
acacaauagcuaguggcug

SEQ ID NO: 395141 - RNA, 19 nt, Artificial Sequence
  Description of Artificial Sequence: Synthetic oligonucleotide
acgucagagaccuggcgga

SEQ ID NO: 395142 - RNA, 19 nt, Artificial Sequence
  Description of Artificial Sequence: Synthetic oligonucleotide
guccuugugagcguugagc

SEQ ID NO: 395143 - RNA, 19 nt, Artificial Sequence
  Description of Artificial Sequence: Synthetic oligonucleotide
cugguugcacaugaccagg

SEQ ID NO: 395144 - RNA, 19 nt, Artificial Sequence
  Description of Artificial Sequence: Synthetic oligonucleotide
cacguaucaggguuagguc

SEQ ID NO: 395145 - RNA, 19 nt, Artificial Sequence
  Description of Artificial Sequence: Synthetic oligonucleotide
cuuguacuuccaugggcug

SEQ ID NO: 395146 - RNA, 19 nt, Artificial Sequence
  Description of Artificial Sequence: Synthetic oligonucleotide
aacucgcacugguugcaca

SEQ ID NO: 395147 - RNA, 19 nt, Artificial Sequence
  Description of Artificial Sequence: Synthetic oligonucleotide
cagacacgacagauagugg

SEQ ID NO: 395148 - RNA, 19 nt, Artificial Sequence
  Description of Artificial Sequence: Synthetic oligonucleotide
ucaauacgggcuuggucuc

SEQ ID NO: 395149 - RNA, 19 nt, Artificial Sequence
  Description of Artificial Sequence: Synthetic oligonucleotide
cugccuuguccucagucag

SEQ ID NO: 395150 - RNA, 19 nt, Artificial Sequence
  Description of Artificial Sequence: Synthetic oligonucleotide
aucgcaaaauguguuccug

SEQ ID NO: 395151 - RNA, 19 nt, Artificial Sequence
  Description of Artificial Sequence: Synthetic oligonucleotide
agcacuccacacaauagcu

SEQ ID NO: 395152 - RNA, 19 nt, Artificial Sequence
  Description of Artificial Sequence: Synthetic oligonucleotide
uggcggauagagcugcgaa

SEQ ID NO: 395153 - RNA, 19 nt, Artificial Sequence
  Description of Artificial Sequence: Synthetic oligonucleotide
agcgguggcgguucuacca

SEQ ID NO: 395154 - RNA, 19 nt, Artificial Sequence
  Description of Artificial Sequence: Synthetic oligonucleotide
gcaacgguagggcaccagg

SEQ ID NO: 395155 - RNA, 19 nt, Artificial Sequence
  Description of Artificial Sequence: Synthetic oligonucleotide
acaauagacugugcgcuca

SEQ ID NO: 395156 - RNA, 19 nt, Artificial Sequence
  Description of Artificial Sequence: Synthetic oligonucleotide
ugcuuguggacgcuacaau

SEQ ID NO: 395157 - RNA, 19 nt, Artificial Sequence
  Description of Artificial Sequence: Synthetic oligonucleotide
guucuaccagcacagcaga

SEQ ID NO: 395158 - RNA, 19 nt, Artificial Sequence
  Description of Artificial Sequence: Synthetic oligonucleotide
cugcaguguggcauguuug

SEQ ID NO: 395159 - RNA, 19 nt, Artificial Sequence
  Description of Artificial Sequence: Synthetic oligonucleotide
ggcgcuucaccagagaggc

SEQ ID NO: 395160 - RNA, 19 nt, Artificial Sequence
  Description of Artificial Sequence: Synthetic oligonucleotide
caauccaggugaaagcaaa

SEQ ID NO: 395161 - RNA, 19 nt, Artificial Sequence
  Description of Artificial Sequence: Synthetic oligonucleotide
guuuacgcugguuccgcac

SEQ ID NO: 395162 - RNA, 19 nt, Artificial Sequence
  Description of Artificial Sequence: Synthetic oligonucleotide
gacacgacagauaguggca

SEQ ID NO: 395163 - RNA, 19 nt, Artificial Sequence
  Description of Artificial Sequence: Synthetic oligonucleotide
ggaagguucagcgguggcg

SEQ ID NO: 395164 - RNA, 19 nt, Artificial Sequence
  Description of Artificial Sequence: Synthetic oligonucleotide
gaguuuacgcugguuccgc

SEQ ID NO: 395165 - RNA, 19 nt, Artificial Sequence
  Description of Artificial Sequence: Synthetic oligonucleotide
acacgcggcaccuuccgca

SEQ ID NO: 395166 - RNA, 19 nt, Artificial Sequence
  Description of Artificial Sequence: Synthetic oligonucleotide
cacgcucaauaacaaucag

SEQ ID NO: 395167 - RNA, 19 nt, Artificial Sequence
  Description of Artificial Sequence: Synthetic oligonucleotide
agggacugaaggacagggc

SEQ ID NO: 395168 - RNA, 19 nt, Artificial Sequence
  Description of Artificial Sequence: Synthetic oligonucleotide
cugggcugaccacaagagc

SEQ ID NO: 395169 - RNA, 19 nt, Artificial Sequence
  Description of Artificial Sequence: Synthetic oligonucleotide
accaaaggcgucauucaug

SEQ ID NO: 395170 - RNA, 19 nt, Artificial Sequence
  Description of Artificial Sequence: Synthetic oligonucleotide
aauccaccauagcgccguc

SEQ ID NO: 395171 - RNA, 19 nt, Artificial Sequence
  Description of Artificial Sequence: Synthetic oligonucleotide
acuggacaauccaccauag

SEQ ID NO: 395172 - RNA, 19 nt, Artificial Sequence
  Description of Artificial Sequence: Synthetic oligonucleotide
gaaucggaggaagccuugc

SEQ ID NO: 395173 - RNA, 19 nt, Artificial Sequence
  Description of Artificial Sequence: Synthetic oligonucleotide
acgacagauaguggcacug

SEQ ID NO: 395174 - RNA, 19 nt, Artificial Sequence
  Description of Artificial Sequence: Synthetic oligonucleotide
ggucuaggguaccaccagg

SEQ ID NO: 395175 - RNA, 19 nt, Artificial Sequence
  Description of Artificial Sequence: Synthetic oligonucleotide
cauuuugugaggagggacu

SEQ ID NO: 395176 - RNA, 19 nt, Artificial Sequence
  Description of Artificial Sequence: Synthetic oligonucleotide
cacacaauagcuaguggcu

SEQ ID NO: 395177 - RNA, 19 nt, Artificial Sequence
  Description of Artificial Sequence: Synthetic oligonucleotide
uuuugagagcgcggugcag

SEQ ID NO: 395178 - RNA, 19 nt, Artificial Sequence
  Description of Artificial Sequence: Synthetic oligonucleotide
gauccagauccagacguuc

SEQ ID NO: 395179 - RNA, 19 nt, Artificial Sequence
  Description of Artificial Sequence: Synthetic oligonucleotide
uagacugugcgcucaccau

SEQ ID NO: 395180 - RNA, 19 nt, Artificial Sequence
  Description of Artificial Sequence: Synthetic oligonucleotide
caugcgcgucucaaagaag

SEQ ID NO: 395181 - RNA, 19 nt, Artificial Sequence
  Description of Artificial Sequence: Synthetic oligonucleotide
ggaguauggaucauccgac

SEQ ID NO: 395182 - RNA, 19 nt, Artificial Sequence
  Description of Artificial Sequence: Synthetic oligonucleotide
uuuugugaggagggacuga

SEQ ID NO: 395183 - RNA, 19 nt, Artificial Sequence
  Description of Artificial Sequence: Synthetic oligonucleotide
gguacugaugguccuugug

SEQ ID NO: 395184 - RNA, 19 nt, Artificial Sequence
  Description of Artificial Sequence: Synthetic oligonucleotide
cgcuacaauagacugugcg

SEQ ID NO: 395185 - RNA, 19 nt, Artificial Sequence
  Description of Artificial Sequence: Synthetic oligonucleotide
gcuggaguauggaucaucc

SEQ ID NO: 395186 - RNA, 19 nt, Artificial Sequence
  Description of Artificial Sequence: Synthetic oligonucleotide
caggguucguggcagaaga

SEQ ID NO: 395187 - RNA, 19 nt, Artificial Sequence
  Description of Artificial Sequence: Synthetic oligonucleotide
acgcucaauaacaaucaga

SEQ ID NO: 395188 - RNA, 19 nt, Artificial Sequence
  Description of Artificial Sequence: Synthetic oligonucleotide
cuggacaauccaccauagc

SEQ ID NO: 395189 - RNA, 19 nt, Artificial Sequence
  Description of Artificial Sequence: Synthetic oligonucleotide
gacgacaggguucguggca

SEQ ID NO: 395190 - RNA, 19 nt, Artificial Sequence
  Description of Artificial Sequence: Synthetic oligonucleotide
cuacaauagacugugcgcu

SEQ ID NO: 395191 - RNA, 19 nt, Artificial Sequence
  Description of Artificial Sequence: Synthetic oligonucleotide
acgacaggguucguggcag

SEQ ID NO: 395192 - RNA, 19 nt, Artificial Sequence
  Description of Artificial Sequence: Synthetic oligonucleotide
guauacuucacccgcuggu

SEQ ID NO: 395193 - RNA, 19 nt, Artificial Sequence
  Description of Artificial Sequence: Synthetic oligonucleotide
gcuaucacgcaugaaauaa

SEQ ID NO: 395194 - RNA, 19 nt, Artificial Sequence
  Description of Artificial Sequence: Synthetic oligonucleotide
ucagcgguggcgguucuac

SEQ ID NO: 395195 - RNA, 19 nt, Artificial Sequence
  Description of Artificial Sequence: Synthetic oligonucleotide
gccgcuaucacgcaugaaa

SEQ ID NO: 395196 - RNA, 19 nt, Artificial Sequence
  Description of Artificial Sequence: Synthetic oligonucleotide
ccacgaucuuaccaaaagc

SEQ ID NO: 395197 - RNA, 19 nt, Artificial Sequence
  Description of Artificial Sequence: Synthetic oligonucleotide
gcggauagagcugcgaacc

SEQ ID NO: 395198 - RNA, 19 nt, Artificial Sequence
  Description of Artificial Sequence: Synthetic oligonucleotide
aagccauagcccucuugua

SEQ ID NO: 395199 - RNA, 19 nt, Artificial Sequence
  Description of Artificial Sequence: Synthetic oligonucleotide
acucgcacugguugcacau

SEQ ID NO: 395200 - RNA, 19 nt, Artificial Sequence
  Description of Artificial Sequence: Synthetic oligonucleotide
guuaggucuaggguaccac

SEQ ID NO: 395201 - RNA, 19 nt, Artificial Sequence
  Description of Artificial Sequence: Synthetic oligonucleotide
ccuacaggggcugagguac

SEQ ID NO: 395202 - RNA, 19 nt, Artificial Sequence
  Description of Artificial Sequence: Synthetic oligonucleotide
ggguucguggcagaagagg

SEQ ID NO: 395203 - RNA, 19 nt, Artificial Sequence
  Description of Artificial Sequence: Synthetic oligonucleotide
cuagcacugggaagguuca

SEQ ID NO: 395204 - RNA, 19 nt, Artificial Sequence
  Description of Artificial Sequence: Synthetic oligonucleotide
uuccgcaugaggccacuua

SEQ ID NO: 395205 - RNA, 19 nt, Artificial Sequence
  Description of Artificial Sequence: Synthetic oligonucleotide
aggcgcuucaccagagagg

SEQ ID NO: 395206 - RNA, 19 nt, Artificial Sequence
  Description of Artificial Sequence: Synthetic oligonucleotide
cuugacugggcugaccaca

SEQ ID NO: 395207 - RNA, 19 nt, Artificial Sequence
  Description of Artificial Sequence: Synthetic oligonucleotide
acgucuugggcaaacuccu

SEQ ID NO: 395208 - RNA, 19 nt, Artificial Sequence
  Description of Artificial Sequence: Synthetic oligonucleotide
aguuuacgcugguuccgca

SEQ ID NO: 395209 - RNA, 19 nt, Artificial Sequence
  Description of Artificial Sequence: Synthetic oligonucleotide
gcugguuccgcacugcauc

SEQ ID NO: 395210 - RNA, 19 nt, Artificial Sequence
  Description of Artificial Sequence: Synthetic oligonucleotide
ggagaauguagaaucagua

SEQ ID NO: 395211 - RNA, 19 nt, Artificial Sequence
  Description of Artificial Sequence: Synthetic oligonucleotide
ugcacacgcuucugcacgu

SEQ ID NO: 395212 - RNA, 19 nt, Artificial Sequence
  Description of Artificial Sequence: Synthetic oligonucleotide
auaguggcacugucaucca

SEQ ID NO: 395213 - RNA, 19 nt, Artificial Sequence
  Description of Artificial Sequence: Synthetic oligonucleotide
guucguggcagaagagggc

SEQ ID NO: 395214 - RNA, 19 nt, Artificial Sequence
  Description of Artificial Sequence: Synthetic oligonucleotide
gaccgcuucaugccagaca

SEQ ID NO: 395215 - RNA, 19 nt, Artificial Sequence
  Description of Artificial Sequence: Synthetic oligonucleotide
gagcacguaucaggguuag

SEQ ID NO: 395216 - RNA, 19 nt, Artificial Sequence
  Description of Artificial Sequence: Synthetic oligonucleotide
caucgccaggaccaccagc

SEQ ID NO: 395217 - RNA, 19 nt, Artificial Sequence
  Description of Artificial Sequence: Synthetic oligonucleotide
aagguucagcgguggcggu

SEQ ID NO: 395218 - RNA, 19 nt, Artificial Sequence
  Description of Artificial Sequence: Synthetic oligonucleotide
acaugcggcucugcgcugg

SEQ ID NO: 395219 - RNA, 19 nt, Artificial Sequence
  Description of Artificial Sequence: Synthetic oligonucleotide
uccagacguucaaggcuca

SEQ ID NO: 395220 - RNA, 19 nt, Artificial Sequence
  Description of Artificial Sequence: Synthetic oligonucleotide
ggcgguucuaccagcacag

SEQ ID NO: 395221 - RNA, 19 nt, Artificial Sequence
  Description of Artificial Sequence: Synthetic oligonucleotide
caggcaacgguagggcacc

SEQ ID NO: 395222 - RNA, 19 nt, Artificial Sequence
  Description of Artificial Sequence: Synthetic oligonucleotide
uagccaugccaggcaacgg

SEQ ID NO: 395223 - RNA, 19 nt, Artificial Sequence
  Description of Artificial Sequence: Synthetic oligonucleotide
agacggggucccucagcac

SEQ ID NO: 395224 - RNA, 19 nt, Artificial Sequence
  Description of Artificial Sequence: Synthetic oligonucleotide
ugacaucgaccugcacacg

SEQ ID NO: 395225 - RNA, 19 nt, Artificial Sequence
  Description of Artificial Sequence: Synthetic oligonucleotide
guagaaucaguagccagcu

SEQ ID NO: 395226 - RNA, 19 nt, Artificial Sequence
  Description of Artificial Sequence: Synthetic oligonucleotide
acaauccaccauagcgccg

SEQ ID NO: 395227 - RNA, 19 nt, Artificial Sequence
  Description of Artificial Sequence: Synthetic oligonucleotide
agagcgggaccgcuucaug

SEQ ID NO: 395228 - RNA, 19 nt, Artificial Sequence
  Description of Artificial Sequence: Synthetic oligonucleotide
gcuggcuaucagcagugag

SEQ ID NO: 395229 - RNA, 19 nt, Artificial Sequence
  Description of Artificial Sequence: Synthetic oligonucleotide
agagcuugacugggcugac

SEQ ID NO: 395230 - RNA, 19 nt, Artificial Sequence
  Description of Artificial Sequence: Synthetic oligonucleotide
cagaacccggccccguuug

SEQ ID NO: 395231 - RNA, 19 nt, Artificial Sequence
  Description of Artificial Sequence: Synthetic oligonucleotide
ugguacugaugguccuugu

SEQ ID NO: 395232 - RNA, 19 nt, Artificial Sequence
  Description of Artificial Sequence: Synthetic oligonucleotide
aaacgggguggaaggacaa

SEQ ID NO: 395233 - RNA, 19 nt, Artificial Sequence
  Description of Artificial Sequence: Synthetic oligonucleotide
guaucaggguuaggucuag

SEQ ID NO: 395234 - RNA, 19 nt, Artificial Sequence
  Description of Artificial Sequence: Synthetic oligonucleotide
agggacgacaggguucgug

SEQ ID NO: 395235 - RNA, 19 nt, Artificial Sequence
  Description of Artificial Sequence: Synthetic oligonucleotide
ggcggauagagcugcgaac

SEQ ID NO: 395236 - RNA, 19 nt, Artificial Sequence
  Description of Artificial Sequence: Synthetic oligonucleotide
ggccaagaguuuacgcugg

SEQ ID NO: 395237 - RNA, 19 nt, Artificial Sequence
  Description of Artificial Sequence: Synthetic oligonucleotide
uagcuaguggcuggggcau

SEQ ID NO: 395238 - RNA, 19 nt, Artificial Sequence
  Description of Artificial Sequence: Synthetic oligonucleotide
agccagacggggucccuca

SEQ ID NO: 395239 - RNA, 19 nt, Artificial Sequence
  Description of Artificial Sequence: Synthetic oligonucleotide
aucauccgacccaaagcca

SEQ ID NO: 395240 - RNA, 19 nt, Artificial Sequence
  Description of Artificial Sequence: Synthetic oligonucleotide
cugcuugcacacuggacaa

SEQ ID NO: 395241 - RNA, 19 nt, Artificial Sequence
  Description of Artificial Sequence: Synthetic oligonucleotide
accuacaggggcugaggua

SEQ ID NO: 395242 - RNA, 19 nt, Artificial Sequence
  Description of Artificial Sequence: Synthetic oligonucleotide
acaucgaccugcacacgcu

SEQ ID NO: 395243 - RNA, 19 nt, Artificial Sequence
  Description of Artificial Sequence: Synthetic oligonucleotide
ccacgcucaauaacaauca

SEQ ID NO: 395244 - RNA, 19 nt, Artificial Sequence
  Description of Artificial Sequence: Synthetic oligonucleotide
cguucaaggcucacacgcg

SEQ ID NO: 395245 - RNA, 19 nt, Artificial Sequence
  Description of Artificial Sequence: Synthetic oligonucleotide
cugagaacuuaggcuagca

SEQ ID NO: 395246 - RNA, 19 nt, Artificial Sequence
  Description of Artificial Sequence: Synthetic oligonucleotide
ucgccaggaccaccagcca

SEQ ID NO: 395247 - RNA, 19 nt, Artificial Sequence
  Description of Artificial Sequence: Synthetic oligonucleotide
acgcuacaauagacugugc

SEQ ID NO: 395248 - RNA, 19 nt, Artificial Sequence
  Description of Artificial Sequence: Synthetic oligonucleotide
gacugugcgcucaccaucu

SEQ ID NO: 395249 - RNA, 19 nt, Artificial Sequence
  Description of Artificial Sequence: Synthetic oligonucleotide
acgcugguuccgcacugca

SEQ ID NO: 395250 - RNA, 19 nt, Artificial Sequence
  Description of Artificial Sequence: Synthetic oligonucleotide
agcacguaucaggguuagg

SEQ ID NO: 395251 - RNA, 19 nt, Artificial Sequence
  Description of Artificial Sequence: Synthetic oligonucleotide
gguugcacaugaccagguc

SEQ ID NO: 395252 - RNA, 19 nt, Artificial Sequence
  Description of Artificial Sequence: Synthetic oligonucleotide
agaacccggccccguuugu

SEQ ID NO: 395253 - RNA, 19 nt, Artificial Sequence
  Description of Artificial Sequence: Synthetic oligonucleotide
gcacguaucaggguuaggu

SEQ ID NO: 395254 - RNA, 19 nt, Artificial Sequence
  Description of Artificial Sequence: Synthetic oligonucleotide
cagacguucaaggcucaca

SEQ ID NO: 395255 - RNA, 19 nt, Artificial Sequence
  Description of Artificial Sequence: Synthetic oligonucleotide
ggauagagcugcgaaccuc

SEQ ID NO: 395256 - RNA, 19 nt, Artificial Sequence
  Description of Artificial Sequence: Synthetic oligonucleotide
uccaggcauugagauccca

SEQ ID NO: 395257 - RNA, 19 nt, Artificial Sequence
  Description of Artificial Sequence: Synthetic oligonucleotide
gugcuuguggacgcuacaa

SEQ ID NO: 395258 - RNA, 19 nt, Artificial Sequence
  Description of Artificial Sequence: Synthetic oligonucleotide
caauccaccauagcgccgu

SEQ ID NO: 395259 - RNA, 19 nt, Artificial Sequence
  Description of Artificial Sequence: Synthetic oligonucleotide
guggcgguucuaccagcac

SEQ ID NO: 395260 - RNA, 19 nt, Artificial Sequence
  Description of Artificial Sequence: Synthetic oligonucleotide
ccgcaugaggccacuuacc

SEQ ID NO: 395261 - RNA, 19 nt, Artificial Sequence
  Description of Artificial Sequence: Synthetic oligonucleotide
gacgagcacguaucagggu

SEQ ID NO: 395262 - RNA, 19 nt, Artificial Sequence
  Description of Artificial Sequence: Synthetic oligonucleotide
cucgcacugguugcacaug

SEQ ID NO: 395263 - RNA, 19 nt, Artificial Sequence
  Description of Artificial Sequence: Synthetic oligonucleotide
gaacacgcucacauuuccu

SEQ ID NO: 395264 - RNA, 19 nt, Artificial Sequence
  Description of Artificial Sequence: Synthetic oligonucleotide
caggccgaugauggacugc

SEQ ID NO: 395265 - RNA, 19 nt, Artificial Sequence
  Description of Artificial Sequence: Synthetic oligonucleotide
aggcuaaggcuuccaucuu

SEQ ID NO: 395266 - RNA, 19 nt, Artificial Sequence
  Description of Artificial Sequence: Synthetic oligonucleotide
ggcucugcgcuggaguaug

SEQ ID NO: 395267 - RNA, 19 nt, Artificial Sequence
  Description of Artificial Sequence: Synthetic oligonucleotide
uugcugccgcuaucacgca

SEQ ID NO: 395268 - RNA, 19 nt, Artificial Sequence
  Description of Artificial Sequence: Synthetic oligonucleotide
cugccacuaggugaagcca

SEQ ID NO: 395269 - RNA, 19 nt, Artificial Sequence
  Description of Artificial Sequence: Synthetic oligonucleotide
gcgcgucucaaagaagcgc

SEQ ID NO: 395270 - RNA, 19 nt, Artificial Sequence
  Description of Artificial Sequence: Synthetic oligonucleotide
gguuaggucuaggguacca

SEQ ID NO: 395271 - RNA, 19 nt, Artificial Sequence
  Description of Artificial Sequence: Synthetic oligonucleotide
gaagcgcugcaggccgaug

SEQ ID NO: 395272 - RNA, 19 nt, Artificial Sequence
  Description of Artificial Sequence: Synthetic oligonucleotide
gcucacacgcggcaccuuc

SEQ ID NO: 395273 - RNA, 19 nt, Artificial Sequence
  Description of Artificial Sequence: Synthetic oligonucleotide
accagaacccggccccguu

SEQ ID NO: 395274 - RNA, 19 nt, Artificial Sequence
  Description of Artificial Sequence: Synthetic oligonucleotide
gaguuuguaccaggacgcu

SEQ ID NO: 395275 - RNA, 19 nt, Artificial Sequence
  Description of Artificial Sequence: Synthetic oligonucleotide
aggaccuguggaguuugua

SEQ ID NO: 395276 - RNA, 19 nt, Artificial Sequence
  Description of Artificial Sequence: Synthetic oligonucleotide
cugguuccgcacugcaucu

SEQ ID NO: 395277 - RNA, 19 nt, Artificial Sequence
  Description of Artificial Sequence: Synthetic oligonucleotide
agccacgaucuuaccaaaa

SEQ ID NO: 395278 - RNA, 19 nt, Artificial Sequence
  Description of Artificial Sequence: Synthetic oligonucleotide
gcaaaucgcaaaauguguu

SEQ ID NO: 395279 - RNA, 19 nt, Artificial Sequence
  Description of Artificial Sequence: Synthetic oligonucleotide
gugaaucggaggaagccuu

SEQ ID NO: 395280 - RNA, 19 nt, Artificial Sequence
  Description of Artificial Sequence: Synthetic oligonucleotide
cagccacgaucuuaccaaa

SEQ ID NO: 395281 - RNA, 19 nt, Artificial Sequence
  Description of Artificial Sequence: Synthetic oligonucleotide
aggcgucauucaugcgcgu

SEQ ID NO: 395282 - RNA, 19 nt, Artificial Sequence
  Description of Artificial Sequence: Synthetic oligonucleotide
guacagcacugauuagcau

SEQ ID NO: 395283 - RNA, 19 nt, Artificial Sequence
  Description of Artificial Sequence: Synthetic oligonucleotide
cugccgcuaucacgcauga

SEQ ID NO: 395284 - RNA, 19 nt, Artificial Sequence
  Description of Artificial Sequence: Synthetic oligonucleotide
caauacgggcuuggucuca

SEQ ID NO: 395285 - RNA, 19 nt, Artificial Sequence
  Description of Artificial Sequence: Synthetic oligonucleotide
cacgacagauaguggcacu

SEQ ID NO: 395286 - RNA, 19 nt, Artificial Sequence
  Description of Artificial Sequence: Synthetic oligonucleotide
gguggcgguucuaccagca

SEQ ID NO: 395287 - RNA, 19 nt, Artificial Sequence
  Description of Artificial Sequence: Synthetic oligonucleotide
caccuacaggggcugaggu

SEQ ID NO: 395288 - RNA, 19 nt, Artificial Sequence
  Description of Artificial Sequence: Synthetic oligonucleotide
aggcuagcacugggaaggu

SEQ ID NO: 395289 - RNA, 19 nt, Artificial Sequence
  Description of Artificial Sequence: Synthetic oligonucleotide
gcgucauucaugcgcgucu

SEQ ID NO: 395290 - RNA, 19 nt, Artificial Sequence
  Description of Artificial Sequence: Synthetic oligonucleotide
ggcgucauucaugcgcguc

SEQ ID NO: 395291 - RNA, 19 nt, Artificial Sequence
  Description of Artificial Sequence: Synthetic oligonucleotide
ccuugacaauagccaugcc

SEQ ID NO: 395292 - RNA, 19 nt, Artificial Sequence
  Description of Artificial Sequence: Synthetic oligonucleotide
gcgucucaaagaagcgcug

SEQ ID NO: 395293 - RNA, 19 nt, Artificial Sequence
  Description of Artificial Sequence: Synthetic oligonucleotide
gagucuuagcaggcccugu

SEQ ID NO: 395294 - RNA, 19 nt, Artificial Sequence
  Description of Artificial Sequence: Synthetic oligonucleotide
agguuccacgggguccaca

SEQ ID NO: 395295 - RNA, 19 nt, Artificial Sequence
  Description of Artificial Sequence: Synthetic oligonucleotide
cuggcacguccugcagggc

SEQ ID NO: 395296 - RNA, 19 nt, Artificial Sequence
  Description of Artificial Sequence: Synthetic oligonucleotide
ggcaacgguagggcaccag

SEQ ID NO: 395297 - RNA, 19 nt, Artificial Sequence
  Description of Artificial Sequence: Synthetic oligonucleotide
ccaggaccuguggaguuug

SEQ ID NO: 395298 - RNA, 19 nt, Artificial Sequence
  Description of Artificial Sequence: Synthetic oligonucleotide
ggcuaucagcagugagauc

SEQ ID NO: 395299 - RNA, 19 nt, Artificial Sequence
  Description of Artificial Sequence: Synthetic oligonucleotide
ggacgcuacaauagacugu

SEQ ID NO: 395300 - RNA, 19 nt, Artificial Sequence
  Description of Artificial Sequence: Synthetic oligonucleotide
ggaaauagaucagcuucuu

SEQ ID NO: 395301 - RNA, 19 nt, Artificial Sequence
  Description of Artificial Sequence: Synthetic oligonucleotide
ggguuaggucuaggguacc

SEQ ID NO: 395302 - RNA, 19 nt, Artificial Sequence
  Description of Artificial Sequence: Synthetic oligonucleotide
ugccgcuaucacgcaugaa

SEQ ID NO: 395303 - RNA, 19 nt, Artificial Sequence
  Description of Artificial Sequence: Synthetic oligonucleotide
gccagacggggucccucag

SEQ ID NO: 395304 - RNA, 19 nt, Artificial Sequence
  Description of Artificial Sequence: Synthetic oligonucleotide
aagggacgacaggguucgu

SEQ ID NO: 395305 - RNA, 19 nt, Artificial Sequence
  Description of Artificial Sequence: Synthetic oligonucleotide
gcucaauaacaaucagauu

SEQ ID NO: 395306 - RNA, 19 nt, Artificial Sequence
  Description of Artificial Sequence: Synthetic oligonucleotide
caccacgcucaauaacaau

SEQ ID NO: 395307 - RNA, 19 nt, Artificial Sequence
  Description of Artificial Sequence: Synthetic oligonucleotide
gcucugcgcuggaguaugg

SEQ ID NO: 395308 - RNA, 19 nt, Artificial Sequence
  Description of Artificial Sequence: Synthetic oligonucleotide
ggccccguuuguucagcuc

SEQ ID NO: 395309 - RNA, 19 nt, Artificial Sequence
  Description of Artificial Sequence: Synthetic oligonucleotide
gggaccgcuucaugccaga

SEQ ID NO: 395310 - RNA, 19 nt, Artificial Sequence
  Description of Artificial Sequence: Synthetic oligonucleotide
gugcaagggacgacagggu

SEQ ID NO: 395311 - RNA, 19 nt, Artificial Sequence
  Description of Artificial Sequence: Synthetic oligonucleotide
cgcgucucaaagaagcgcu

SEQ ID NO: 395312 - RNA, 19 nt, Artificial Sequence
  Description of Artificial Sequence: Synthetic oligonucleotide
gccacuaggugaagccaga

SEQ ID NO: 395313 - RNA, 19 nt, Artificial Sequence
  Description of Artificial Sequence: Synthetic oligonucleotide
ccgcuaucacgcaugaaau

SEQ ID NO: 395314 - RNA, 19 nt, Artificial Sequence
  Description of Artificial Sequence: Synthetic oligonucleotide
gagguuccacgggguccac

SEQ ID NO: 395315 - RNA, 19 nt, Artificial Sequence
  Description of Artificial Sequence: Synthetic oligonucleotide
gcgguucuaccagcacagc

SEQ ID NO: 395316 - RNA, 19 nt, Artificial Sequence
  Description of Artificial Sequence: Synthetic oligonucleotide
aggcaacgguagggcacca

SEQ ID NO: 395317 - RNA, 19 nt, Artificial Sequence
  Description of Artificial Sequence: Synthetic oligonucleotide
guuccacgggguccacaau

SEQ ID NO: 395318 - RNA, 19 nt, Artificial Sequence
  Description of Artificial Sequence: Synthetic oligonucleotide
cacgcggcaccuuccgcau

SEQ ID NO: 395319 - RNA, 19 nt, Artificial Sequence
  Description of Artificial Sequence: Synthetic oligonucleotide
guucgugcuuguggacgcu

SEQ ID NO: 395320 - RNA, 19 nt, Artificial Sequence
  Description of Artificial Sequence: Synthetic oligonucleotide
cgguggcgguucuaccagc

SEQ ID NO: 395321 - RNA, 19 nt, Artificial Sequence
  Description of Artificial Sequence: Synthetic oligonucleotide
gcgaaccuccuugguguuc

SEQ ID NO: 395322 - RNA, 19 nt, Artificial Sequence
  Description of Artificial Sequence: Synthetic oligonucleotide
agccagcuccugagaacuu

SEQ ID NO: 395323 - RNA, 19 nt, Artificial Sequence
  Description of Artificial Sequence: Synthetic oligonucleotide
cccuggcgcucuuggagga

SEQ ID NO: 395324 - RNA, 19 nt, Artificial Sequence
  Description of Artificial Sequence: Synthetic oligonucleotide
cgagcacguaucaggguua

SEQ ID NO: 395325 - RNA, 19 nt, Artificial Sequence
  Description of Artificial Sequence: Synthetic oligonucleotide
caggaccuguggaguuugu

SEQ ID NO: 395326 - RNA, 19 nt, Artificial Sequence
  Description of Artificial Sequence: Synthetic oligonucleotide
ggcgcucuuggaggagcca

SEQ ID NO: 395327 - RNA, 19 nt, Artificial Sequence
  Description of Artificial Sequence: Synthetic oligonucleotide
cagagcgggaccgcuucau

SEQ ID NO: 395328 - RNA, 19 nt, Artificial Sequence
  Description of Artificial Sequence: Synthetic oligonucleotide
ggcagacacgacagauagu

SEQ ID NO: 395329 - RNA, 19 nt, Artificial Sequence
  Description of Artificial Sequence: Synthetic oligonucleotide
cuaguggcuggggcauuau

SEQ ID NO: 395330 - RNA, 19 nt, Artificial Sequence
  Description of Artificial Sequence: Synthetic oligonucleotide
ccagagcgggaccgcuuca

SEQ ID NO: 395331 - RNA, 19 nt, Artificial Sequence
  Description of Artificial Sequence: Synthetic oligonucleotide
gcgcucuuggaggagccau

SEQ ID NO: 395332 - RNA, 19 nt, Artificial Sequence
  Description of Artificial Sequence: Synthetic oligonucleotide
caggacgcucagccacgau

SEQ ID NO: 395333 - RNA, 19 nt, Artificial Sequence
  Description of Artificial Sequence: Synthetic oligonucleotide
cggauagagcugcgaaccu

SEQ ID NO: 395334 - RNA, 19 nt, Artificial Sequence
  Description of Artificial Sequence: Synthetic oligonucleotide
ccagaacccggccccguuu

SEQ ID NO: 395335 - RNA, 19 nt, Artificial Sequence
  Description of Artificial Sequence: Synthetic oligonucleotide
ggcuagcacugggaagguu

SEQ ID NO: 395336 - RNA, 19 nt, Artificial Sequence
  Description of Artificial Sequence: Synthetic oligonucleotide
cgucagagaccuggcggau

SEQ ID NO: 395337 - RNA, 19 nt, Artificial Sequence
  Description of Artificial Sequence: Synthetic oligonucleotide
gcgcuggaguauggaucau

SEQ ID NO: 395338 - RNA, 19 nt, Artificial Sequence
  Description of Artificial Sequence: Synthetic oligonucleotide
cggccccguuuguucagcu

SEQ ID NO: 395339 - RNA, 19 nt, Artificial Sequence
  Description of Artificial Sequence: Synthetic oligonucleotide
  modified_base (7)..(7): a, c, u, g, unknown or other
acauccnuaaaucugaucc

SEQ ID NO: 395340 - RNA, 19 nt, Artificial Sequence
  Description of Artificial Sequence: Synthetic oligonucleotide
uuaauguuaagcauaaucc

SEQ ID NO: 395341 - RNA, 19 nt, Artificial Sequence
  Description of Artificial Sequence: Synthetic oligonucleotide
uuaagcauaauccacaucu

SEQ ID NO: 395342 - RNA, 19 nt, Artificial Sequence
  Description of Artificial Sequence: Synthetic oligonucleotide
agaauaaaaggaaugaucc

SEQ ID NO: 395343 - RNA, 19 nt, Artificial Sequence
  Description of Artificial Sequence: Synthetic oligonucleotide
acugucauaaaccacacag

SEQ ID NO: 395344 - RNA, 19 nt, Artificial Sequence
  Description of Artificial Sequence: Synthetic oligonucleotide
ugauguuugaaagugaucc

SEQ ID NO: 395345 - RNA, 19 nt, Artificial Sequence
  Description of Artificial Sequence: Synthetic oligonucleotide
uaccguauaaauauucacg

SEQ ID NO: 395346 - RNA, 19 nt, Artificial Sequence
  Description of Artificial Sequence: Synthetic oligonucleotide
agugaauuuccucagggcg

SEQ ID NO: 395347 - RNA, 19 nt, Artificial Sequence
  Description of Artificial Sequence: Synthetic oligonucleotide
aauguuaagcauaauccac

SEQ ID NO: 395348 - RNA, 19 nt, Artificial Sequence
  Description of Artificial Sequence: Synthetic oligonucleotide
agaguuugcucauaguggc

SEQ ID NO: 395349 - RNA, 19 nt, Artificial Sequence
  Description of Artificial Sequence: Synthetic oligonucleotide
ugugcuuuaaucucuguag

SEQ ID NO: 395350 - RNA, 19 nt, Artificial Sequence
  Description of Artificial Sequence: Synthetic oligonucleotide
aaagugaccugccuacccc

SEQ ID NO: 395351 - RNA, 19 nt, Artificial Sequence
  Description of Artificial Sequence: Synthetic oligonucleotide
aacaccggguacuauacac

SEQ ID NO: 395352 - RNA, 19 nt, Artificial Sequence
  Description of Artificial Sequence: Synthetic oligonucleotide
uuuggaaaggaaaucauaa

SEQ ID NO: 395353 - RNA, 19 nt, Artificial Sequence
  Description of Artificial Sequence: Synthetic oligonucleotide
uuaauaagcuuacuaauuc

SEQ ID NO: 395354 - RNA, 19 nt, Artificial Sequence
  Description of Artificial Sequence: Synthetic oligonucleotide
aaaucugauccacacagug

SEQ ID NO: 395355 - RNA, 19 nt, Artificial Sequence
  Description of Artificial Sequence: Synthetic oligonucleotide
aaacugcacauuuauacug

SEQ ID NO: 395356 - RNA, 19 nt, Artificial Sequence
  Description of Artificial Sequence: Synthetic oligonucleotide
aaaccauaccuugugaagg

SEQ ID NO: 395357 - RNA, 19 nt, Artificial Sequence
  Description of Artificial Sequence: Synthetic oligonucleotide
acgagucucccauagacgc

SEQ ID NO: 395358 - RNA, 19 nt, Artificial Sequence
  Description of Artificial Sequence: Synthetic oligonucleotide
ugucauagaacucucgaga

SEQ ID NO: 395359 - RNA, 19 nt, Artificial Sequence
  Description of Artificial Sequence: Synthetic oligonucleotide
uuaucugcugaguauuugg

SEQ ID NO: 395360 - RNA, 19 nt, Artificial Sequence
  Description of Artificial Sequence: Synthetic oligonucleotide
uuugagauguucucaaaug

SEQ ID NO: 395361 - RNA, 19 nt, Artificial Sequence
  Description of Artificial Sequence: Synthetic oligonucleotide
uaauguuaagcauaaucca

SEQ ID NO: 395362 - RNA, 19 nt, Artificial Sequence
  Description of Artificial Sequence: Synthetic oligonucleotide
uauauacucccaaacuugc

SEQ ID NO: 395363 - RNA, 19 nt, Artificial Sequence
  Description of Artificial Sequence: Synthetic oligonucleotide
cauacgauacgaaggaagg

SEQ ID NO: 395364 - RNA, 19 nt, Artificial Sequence
  Description of Artificial Sequence: Synthetic oligonucleotide
uucauuugagugaauuucc

SEQ ID NO: 395365 - RNA, 19 nt, Artificial Sequence
  Description of Artificial Sequence: Synthetic oligonucleotide
auaguggccacucugccac

SEQ ID NO: 395366 - RNA, 19 nt, Artificial Sequence
  Description of Artificial Sequence: Synthetic oligonucleotide
aggaaugauccuuacaaag

SEQ ID NO: 395367 - RNA, 19 nt, Artificial Sequence
  Description of Artificial Sequence: Synthetic oligonucleotide
acaaucuuauucuuaaacu

SEQ ID NO: 395368 - RNA, 19 nt, Artificial Sequence
  Description of Artificial Sequence: Synthetic oligonucleotide
ucacguuacaauaugguaa

SEQ ID NO: 395369 - RNA, 19 nt, Artificial Sequence
  Description of Artificial Sequence: Synthetic oligonucleotide
ucuccuacaaucuuauucu

SEQ ID NO: 395370 - RNA, 19 nt, Artificial Sequence
  Description of Artificial Sequence: Synthetic oligonucleotide
uggcuuuugaaucacugag

SEQ ID NO: 395371 - RNA, 19 nt, Artificial Sequence
  Description of Artificial Sequence: Synthetic oligonucleotide
ugggagaugacuuggacug

SEQ ID NO: 395372 - RNA, 19 nt, Artificial Sequence
  Description of Artificial Sequence: Synthetic oligonucleotide
aagucauacauccccuagg

SEQ ID NO: 395373 - RNA, 19 nt, Artificial Sequence
  Description of Artificial Sequence: Synthetic oligonucleotide
auauggggcaguaacaacc

SEQ ID NO: 395374 - RNA, 19 nt, Artificial Sequence
  Description of Artificial Sequence: Synthetic oligonucleotide
ucgaaucugacacuuacga

SEQ ID NO: 395375 - RNA, 19 nt, Artificial Sequence
  Description of Artificial Sequence: Synthetic oligonucleotide
agcuaguuuaucuucagug

SEQ ID NO: 395376 - RNA, 19 nt, Artificial Sequence
  Description of Artificial Sequence: Synthetic oligonucleotide
aaacucgucuucuuguuug

SEQ ID NO: 395377 - RNA, 19 nt, Artificial Sequence
  Description of Artificial Sequence: Synthetic oligonucleotide
aauacaaguuauagaaauc

SEQ ID NO: 395378 - RNA, 19 nt, Artificial Sequence
  Description of Artificial Sequence: Synthetic oligonucleotide
aauccaacguaaguagcgc

SEQ ID NO: 395379 - RNA, 19 nt, Artificial Sequence
  Description of Artificial Sequence: Synthetic oligonucleotide
ucuaaguugugcuuuaauc

SEQ ID NO: 395380 - RNA, 19 nt, Artificial Sequence
  Description of Artificial Sequence: Synthetic oligonucleotide
aauaguuaucugcugagua

SEQ ID NO: 395381 - RNA, 19 nt, Artificial Sequence
  Description of Artificial Sequence: Synthetic oligonucleotide
agacgagucucccauagac

SEQ ID NO: 395382 - RNA, 19 nt, Artificial Sequence
  Description of Artificial Sequence: Synthetic oligonucleotide
uccuacauaguacugggca

SEQ ID NO: 395383 - RNA, 19 nt, Artificial Sequence
  Description of Artificial Sequence: Synthetic oligonucleotide
uugagauguucucaaauga

SEQ ID NO: 395384 - RNA, 19 nt, Artificial Sequence
  Description of Artificial Sequence: Synthetic oligonucleotide
acguaaguagcgcugggcc

SEQ ID NO: 395385 - RNA, 19 nt, Artificial Sequence
  Description of Artificial Sequence: Synthetic oligonucleotide
uauacucccaaacuugcac

SEQ ID NO: 395386 - RNA, 19 nt, Artificial Sequence
  Description of Artificial Sequence: Synthetic oligonucleotide
accguauaaauauucacgu

SEQ ID NO: 395387 - RNA, 19 nt, Artificial Sequence
  Description of Artificial Sequence: Synthetic oligonucleotide
uuuguguacauguuacaca

SEQ ID NO: 395388 - RNA, 19 nt, Artificial Sequence
  Description of Artificial Sequence: Synthetic oligonucleotide
auacaaguuauagaaaucu

SEQ ID NO: 395389 - RNA, 19 nt, Artificial Sequence
  Description of Artificial Sequence: Synthetic oligonucleotide
aguauuugggaaguagugg

SEQ ID NO: 395390 - RNA, 19 nt, Artificial Sequence
  Description of Artificial Sequence: Synthetic oligonucleotide
uuuaaaccauaccuuguga

SEQ ID NO: 395391 - RNA, 19 nt, Artificial Sequence
  Description of Artificial Sequence: Synthetic oligonucleotide
gaccuugugccuuuaaacc

SEQ ID NO: 395392 - RNA, 19 nt, Artificial Sequence
  Description of Artificial Sequence: Synthetic oligonucleotide
uaauaagcuuacuaauucu

SEQ ID NO: 395393 - RNA, 19 nt, Artificial Sequence
  Description of Artificial Sequence: Synthetic oligonucleotide
uuggaaaggaaaucauaag

SEQ ID NO: 395394 - RNA, 19 nt, Artificial Sequence
  Description of Artificial Sequence: Synthetic oligonucleotide
acgaaggaaggcuugggcg

SEQ ID NO: 395395 - RNA, 19 nt, Artificial Sequence
  Description of Artificial Sequence: Synthetic oligonucleotide
  modified_base (8)..(8): a, c, u, g, unknown or other
aacauccnuaaaucugauc

SEQ ID NO: 395396 - RNA, 19 nt, Artificial Sequence
  Description of Artificial Sequence: Synthetic oligonucleotide
aagcauaauccacaucuca

SEQ ID NO: 395397 - RNA, 19 nt, Artificial Sequence
  Description of Artificial Sequence: Synthetic oligonucleotide
uagucuaugggcuuacugu

SEQ ID NO: 395398 - RNA, 19 nt, Artificial Sequence
  Description of Artificial Sequence: Synthetic oligonucleotide
uacaaguuauagaaaucug

SEQ ID NO: 395399 - RNA, 19 nt, Artificial Sequence
  Description of Artificial Sequence: Synthetic oligonucleotide
ucaaaugaggucccuugcc

SEQ ID NO: 395400 - RNA, 19 nt, Artificial Sequence
  Description of Artificial Sequence: Synthetic oligonucleotide
uuaaaccauaccuugugaa

SEQ ID NO: 395401 - RNA, 19 nt, Artificial Sequence
  Description of Artificial Sequence: Synthetic oligonucleotide
ugccaguugucauagaacu

SEQ ID NO: 395402 - RNA, 19 nt, Artificial Sequence
  Description of Artificial Sequence: Synthetic oligonucleotide
aacguaaguagcgcugggc

SEQ ID NO: 395403 - RNA, 19 nt, Artificial Sequence
  Description of Artificial Sequence: Synthetic oligonucleotide
ugucgcugauguuugaaag

SEQ ID NO: 395404 - RNA, 19 nt, Artificial Sequence
  Description of Artificial Sequence: Synthetic oligonucleotide
uguuugaaagugauccucu

SEQ ID NO: 395405 - RNA, 19 nt, Artificial Sequence
  Description of Artificial Sequence: Synthetic oligonucleotide
agaguuaauaagcuuacua

SEQ ID NO: 395406 - RNA, 19 nt, Artificial Sequence
  Description of Artificial Sequence: Synthetic oligonucleotide
ugcuuaugcccuuagauua

SEQ ID NO: 395407 - RNA, 19 nt, Artificial Sequence
  Description of Artificial Sequence: Synthetic oligonucleotide
cuuuaaaccauaccuugug

SEQ ID NO: 395408 - RNA, 19 nt, Artificial Sequence
  Description of Artificial Sequence: Synthetic oligonucleotide
aauggucuuauuuuaucuu

SEQ ID NO: 395409 - RNA, 19 nt, Artificial Sequence
  Description of Artificial Sequence: Synthetic oligonucleotide
cuuaauuucuggccccucg

SEQ ID NO: 395410 - RNA, 19 nt, Artificial Sequence
  Description of Artificial Sequence: Synthetic oligonucleotide
ugugccuuuaaaccauacc

SEQ ID NO: 395411 - RNA, 19 nt, Artificial Sequence
  Description of Artificial Sequence: Synthetic oligonucleotide
ucuuucaggacugggaaug

SEQ ID NO: 395412 - RNA, 19 nt, Artificial Sequence
  Description of Artificial Sequence: Synthetic oligonucleotide
gucauagaacucucgagag

SEQ ID NO: 395413 - RNA, 19 nt, Artificial Sequence
  Description of Artificial Sequence: Synthetic oligonucleotide
uaauucucuugccuagaag

SEQ ID NO: 395414 - RNA, 19 nt, Artificial Sequence
  Description of Artificial Sequence: Synthetic oligonucleotide
agcuacagcgcagugagac

SEQ ID NO: 395415 - RNA, 19 nt, Artificial Sequence
  Description of Artificial Sequence: Synthetic oligonucleotide
uuggcguugauuuucuccu

SEQ ID NO: 395416 - RNA, 19 nt, Artificial Sequence
  Description of Artificial Sequence: Synthetic oligonucleotide
aauccuauggcaggugaag

SEQ ID NO: 395417 - RNA, 19 nt, Artificial Sequence
  Description of Artificial Sequence: Synthetic oligonucleotide
gacacuuacgauugcuuug

SEQ ID NO: 395418 - RNA, 19 nt, Artificial Sequence
  Description of Artificial Sequence: Synthetic oligonucleotide
aaguggaacaucauuuucu

SEQ ID NO: 395419 - RNA, 19 nt, Artificial Sequence
  Description of Artificial Sequence: Synthetic oligonucleotide
caagcgaagagugacuucc

SEQ ID NO: 395420 - RNA, 19 nt, Artificial Sequence
  Description of Artificial Sequence: Synthetic oligonucleotide
cucgauauggggcaguaac

SEQ ID NO: 395421 - RNA, 19 nt, Artificial Sequence
  Description of Artificial Sequence: Synthetic oligonucleotide
auagacgccccgcugacag

SEQ ID NO: 395422 - RNA, 19 nt, Artificial Sequence
  Description of Artificial Sequence: Synthetic oligonucleotide
agucuaugggcuuacugug

SEQ ID NO: 395423 - RNA, 19 nt, Artificial Sequence
  Description of Artificial Sequence: Synthetic oligonucleotide
uguagucagcuacagcgca

SEQ ID NO: 395424 - RNA, 19 nt, Artificial Sequence
  Description of Artificial Sequence: Synthetic oligonucleotide
aaacugucauaaaccacac

SEQ ID NO: 395425 - RNA, 19 nt, Artificial Sequence
  Description of Artificial Sequence: Synthetic oligonucleotide
uacgauacgaaggaaggcu

SEQ ID NO: 395426 - RNA, 19 nt, Artificial Sequence
  Description of Artificial Sequence: Synthetic oligonucleotide
cacguuacaauaugguaac

SEQ ID NO: 395427 - RNA, 19 nt, Artificial Sequence
  Description of Artificial Sequence: Synthetic oligonucleotide
auaaacugucauaaaccac

SEQ ID NO: 395428 - RNA, 19 nt, Artificial Sequence
  Description of Artificial Sequence: Synthetic oligonucleotide
uuacuaauucucuugccua

SEQ ID NO: 395429 - RNA, 19 nt, Artificial Sequence
  Description of Artificial Sequence: Synthetic oligonucleotide
aaccauaccuugugaagga

SEQ ID NO: 395430 - RNA, 19 nt, Artificial Sequence
  Description of Artificial Sequence: Synthetic oligonucleotide
ucgaaagugaccugccuac

SEQ ID NO: 395431 - RNA, 19 nt, Artificial Sequence
  Description of Artificial Sequence: Synthetic oligonucleotide
agucauacauccccuaggu

SEQ ID NO: 395432 - RNA, 19 nt, Artificial Sequence
  Description of Artificial Sequence: Synthetic oligonucleotide
uccaacguaaguagcgcug

SEQ ID NO: 395433 - RNA, 19 nt, Artificial Sequence
  Description of Artificial Sequence: Synthetic oligonucleotide
gauacgaaggaaggcuugg

SEQ ID NO: 395434 - RNA, 19 nt, Artificial Sequence
  Description of Artificial Sequence: Synthetic oligonucleotide
auaguuaucugcugaguau

SEQ ID NO: 395435 - RNA, 19 nt, Artificial Sequence
  Description of Artificial Sequence: Synthetic oligonucleotide
uacgaaggaaggcuugggc

SEQ ID NO: 395436 - RNA, 19 nt, Artificial Sequence
  Description of Artificial Sequence: Synthetic oligonucleotide
uucacguuacaauauggua

SEQ ID NO: 395437 - RNA, 19 nt, Artificial Sequence
  Description of Artificial Sequence: Synthetic oligonucleotide
acauacgauacgaaggaag

SEQ ID NO: 395438 - RNA, 19 nt, Artificial Sequence
  Description of Artificial Sequence: Synthetic oligonucleotide
ggaaugauccuuacaaagg

SEQ ID NO: 395439 - RNA, 19 nt, Artificial Sequence
  Description of Artificial Sequence: Synthetic oligonucleotide
auacgauacgaaggaaggc

SEQ ID NO: 395440 - RNA, 19 nt, Artificial Sequence
  Description of Artificial Sequence: Synthetic oligonucleotide
aaggaaugauccuuacaaa

SEQ ID NO: 395441 - RNA, 19 nt, Artificial Sequence
  Description of Artificial Sequence: Synthetic oligonucleotide
gaggcuaccguauaaauau

SEQ ID NO: 395442 - RNA, 19 nt, Artificial Sequence
  Description of Artificial Sequence: Synthetic oligonucleotide
  modified_base (4)..(4): a, c, u, g, unknown or other
uccnuaaaucugauccaca

SEQ ID NO: 395443 - RNA, 19 nt, Artificial Sequence
  Description of Artificial Sequence: Synthetic oligonucleotide
ugcccuuagauuauuugaa

SEQ ID NO: 395444 - RNA, 19 nt, Artificial Sequence
  Description of Artificial Sequence: Synthetic oligonucleotide
gaguauuugggaaguagug

SEQ ID NO: 395445 - RNA, 19 nt, Artificial Sequence
  Description of Artificial Sequence: Synthetic oligonucleotide
aacccgugguagucuaugg

SEQ ID NO: 395446 - RNA, 19 nt, Artificial Sequence
  Description of Artificial Sequence: Synthetic oligonucleotide
gugauaaucgaaucugaca

SEQ ID NO: 395447 - RNA, 19 nt, Artificial Sequence
  Description of Artificial Sequence: Synthetic oligonucleotide
augcccuuagauuauuuga

SEQ ID NO: 395448 - RNA, 19 nt, Artificial Sequence
  Description of Artificial Sequence: Synthetic oligonucleotide
uggcaaagaaaagcugucg

SEQ ID NO: 395449 - RNA, 19 nt, Artificial Sequence
  Description of Artificial Sequence: Synthetic oligonucleotide
ucgauauggggcaguaaca

SEQ ID NO: 395450 - RNA, 19 nt, Artificial Sequence
  Description of Artificial Sequence: Synthetic oligonucleotide
acugcuauagcaaggguca

SEQ ID NO: 395451 - RNA, 19 nt, Artificial Sequence
  Description of Artificial Sequence: Synthetic oligonucleotide
agcgcaaaagggaacaaag

SEQ ID NO: 395452 - RNA, 19 nt, Artificial Sequence
  Description of Artificial Sequence: Synthetic oligonucleotide
ucauagaacucucgagagu

SEQ ID NO: 395453 - RNA, 19 nt, Artificial Sequence
  Description of Artificial Sequence: Synthetic oligonucleotide
agugaaguggaacaucauu

SEQ ID NO: 395454 - RNA, 19 nt, Artificial Sequence
  Description of Artificial Sequence: Synthetic oligonucleotide
gacuccaauccuauggcag

SEQ ID NO: 395455 - RNA, 19 nt, Artificial Sequence
  Description of Artificial Sequence: Synthetic oligonucleotide
gaacucucgagaguugucc

SEQ ID NO: 395456 - RNA, 19 nt, Artificial Sequence
  Description of Artificial Sequence: Synthetic oligonucleotide
cacagguuacaacagcuug

SEQ ID NO: 395457 - RNA, 19 nt, Artificial Sequence
  Description of Artificial Sequence: Synthetic oligonucleotide
accuugugccuuuaaacca

SEQ ID NO: 395458 - RNA, 19 nt, Artificial Sequence
  Description of Artificial Sequence: Synthetic oligonucleotide
ugaaagugauccucuccgc

SEQ ID NO: 395459 - RNA, 19 nt, Artificial Sequence
  Description of Artificial Sequence: Synthetic oligonucleotide
caaacaccggguacuauac

SEQ ID NO: 395460 - RNA, 19 nt, Artificial Sequence
  Description of Artificial Sequence: Synthetic oligonucleotide
uguagaggcuaccguauaa

SEQ ID NO: 395461 - RNA, 19 nt, Artificial Sequence
  Description of Artificial Sequence: Synthetic oligonucleotide
ucgcugauguuugaaagug

SEQ ID NO: 395462 - RNA, 19 nt, Artificial Sequence
  Description of Artificial Sequence: Synthetic oligonucleotide
aacucucgagaguuguccu

SEQ ID NO: 395463 - RNA, 19 nt, Artificial Sequence
  Description of Artificial Sequence: Synthetic oligonucleotide
agaguugaauuucuucuau

SEQ ID NO: 395464 - RNA, 19 nt, Artificial Sequence
  Description of Artificial Sequence: Synthetic oligonucleotide
aguaacaacccgugguagu

SEQ ID NO: 395465 - RNA, 19 nt, Artificial Sequence
  Description of Artificial Sequence: Synthetic oligonucleotide
gaggcauuuguguacaugu

SEQ ID NO: 395466 - RNA, 19 nt, Artificial Sequence
  Description of Artificial Sequence: Synthetic oligonucleotide
guagucuaugggcuuacug

SEQ ID NO: 395467 - RNA, 19 nt, Artificial Sequence
  Description of Artificial Sequence: Synthetic oligonucleotide
caagucauacauccccuag

SEQ ID NO: 395468 - RNA, 19 nt, Artificial Sequence
  Description of Artificial Sequence: Synthetic oligonucleotide
ucccgugauaaucgaaucu

SEQ ID NO: 395469 - RNA, 19 nt, Artificial Sequence
  Description of Artificial Sequence: Synthetic oligonucleotide
acuuacgauugcuuugcug

SEQ ID NO: 395470 - RNA, 19 nt, Artificial Sequence
  Description of Artificial Sequence: Synthetic oligonucleotide
  modified_base (15)..(15): a, c, u, g, unknown or other
uucaucaaacauccnuaaa

SEQ ID NO: 395471 - RNA, 19 nt, Artificial Sequence
  Description of Artificial Sequence: Synthetic oligonucleotide
caguuguucaccuggcaac

SEQ ID NO: 395472 - RNA, 19 nt, Artificial Sequence
  Description of Artificial Sequence: Synthetic oligonucleotide
aucccgugauaaucgaauc

SEQ ID NO: 395473 - RNA, 19 nt, Artificial Sequence
  Description of Artificial Sequence: Synthetic oligonucleotide
cucaaaugaggucccuugc

SEQ ID NO: 395474 - RNA, 19 nt, Artificial Sequence
  Description of Artificial Sequence: Synthetic oligonucleotide
uaccccagcgucuaugacu

SEQ ID NO: 395475 - RNA, 19 nt, Artificial Sequence
  Description of Artificial Sequence: Synthetic oligonucleotide
cauucaacugcuauagcaa

SEQ ID NO: 395476 - RNA, 19 nt, Artificial Sequence
  Description of Artificial Sequence: Synthetic oligonucleotide
aagcaguuguucaccuggc

SEQ ID NO: 395477 - RNA, 19 nt, Artificial Sequence
  Description of Artificial Sequence: Synthetic oligonucleotide
gacgagucucccauagacg

SEQ ID NO: 395478 - RNA, 19 nt, Artificial Sequence
  Description of Artificial Sequence: Synthetic oligonucleotide
auggucuuauuuuaucuuu

SEQ ID NO: 395479 - RNA, 19 nt, Artificial Sequence
  Description of Artificial Sequence: Synthetic oligonucleotide
auggcuuuugaaucacuga

SEQ ID NO: 395480 - RNA, 19 nt, Artificial Sequence
  Description of Artificial Sequence: Synthetic oligonucleotide
uuacgauugcuuugcugug

SEQ ID NO: 395481 - RNA, 19 nt, Artificial Sequence
  Description of Artificial Sequence: Synthetic oligonucleotide
auguuaagcauaauccaca

SEQ ID NO: 395482 - RNA, 19 nt, Artificial Sequence
  Description of Artificial Sequence: Synthetic oligonucleotide
ugacuuccuucucuguuac

SEQ ID NO: 395483 - RNA, 19 nt, Artificial Sequence
  Description of Artificial Sequence: Synthetic oligonucleotide
aacugucauaaaccacaca

SEQ ID NO: 395484 - RNA, 19 nt, Artificial Sequence
  Description of Artificial Sequence: Synthetic oligonucleotide
acaagcgaagagugacuuc

SEQ ID NO: 395485 - RNA, 19 nt, Artificial Sequence
  Description of Artificial Sequence: Synthetic oligonucleotide
  modified_base (3)..(3): a, c, u, g, unknown or other
ccnuaaaucugauccacac

SEQ ID NO: 395486 - RNA, 19 nt, Artificial Sequence
  Description of Artificial Sequence: Synthetic oligonucleotide
uccccuagguccacaaacu

SEQ ID NO: 395487 - RNA, 19 nt, Artificial Sequence
  Description of Artificial Sequence: Synthetic oligonucleotide
cuuacuaauucucuugccu

SEQ ID NO: 395488 - RNA, 19 nt, Artificial Sequence
  Description of Artificial Sequence: Synthetic oligonucleotide
aaacugaguuucaccuccg

SEQ ID NO: 395489 - RNA, 19 nt, Artificial Sequence
  Description of Artificial Sequence: Synthetic oligonucleotide
cauaccuugugaaggaaaa

SEQ ID NO: 395490 - RNA, 19 nt, Artificial Sequence
  Description of Artificial Sequence: Synthetic oligonucleotide
aacugcuuaugcccuuaga

SEQ ID NO: 395491 - RNA, 19 nt, Artificial Sequence
  Description of Artificial Sequence: Synthetic oligonucleotide
aaacaccggguacuauaca

SEQ ID NO: 395492 - RNA, 19 nt, Artificial Sequence
  Description of Artificial Sequence: Synthetic oligonucleotide
uggucuuauuuuaucuuuu

SEQ ID NO: 395493 - RNA, 19 nt, Artificial Sequence
  Description of Artificial Sequence: Synthetic oligonucleotide
ugaggcauuuguguacaug

SEQ ID NO: 395494 - RNA, 19 nt, Artificial Sequence
  Description of Artificial Sequence: Synthetic oligonucleotide
uagaacucucgagaguugu

SEQ ID NO: 395495 - RNA, 19 nt, Artificial Sequence
  Description of Artificial Sequence: Synthetic oligonucleotide
cuaugaguacuggaggcac

SEQ ID NO: 395496 - RNA, 19 nt, Artificial Sequence
  Description of Artificial Sequence: Synthetic oligonucleotide
aucgaaucugacacuuacg

SEQ ID NO: 395497 - RNA, 19 nt, Artificial Sequence
  Description of Artificial Sequence: Synthetic oligonucleotide
uagaggcuaccguauaaau

SEQ ID NO: 395498 - RNA, 19 nt, Artificial Sequence
  Description of Artificial Sequence: Synthetic oligonucleotide
gacuguagaggcuaccgua

SEQ ID NO: 395499 - RNA, 19 nt, Artificial Sequence
  Description of Artificial Sequence: Synthetic oligonucleotide
aguugucauagaacucucg

SEQ ID NO: 395500 - RNA, 19 nt, Artificial Sequence
  Description of Artificial Sequence: Synthetic oligonucleotide
ucccaauggcuacauaauu

SEQ ID NO: 395501 - RNA, 19 nt, Artificial Sequence
  Description of Artificial Sequence: Synthetic oligonucleotide
augcacauucaacugcuau

SEQ ID NO: 395502 - RNA, 19 nt, Artificial Sequence
  Description of Artificial Sequence: Synthetic oligonucleotide
uggaggcacagcuuuaauu

SEQ ID NO: 395503 - RNA, 19 nt, Artificial Sequence
  Description of Artificial Sequence: Synthetic oligonucleotide
gaaaggagaaccagcucuc

SEQ ID NO: 395504 - RNA, 19 nt, Artificial Sequence
  Description of Artificial Sequence: Synthetic oligonucleotide
cauacauccccuaggucca

SEQ ID NO: 395505 - RNA, 19 nt, Artificial Sequence
  Description of Artificial Sequence: Synthetic oligonucleotide
ucuggccccucgauauggg

SEQ ID NO: 395506 - RNA, 19 nt, Artificial Sequence
  Description of Artificial Sequence: Synthetic oligonucleotide
  modified_base (6)..(6): a, c, u, g, unknown or other
cauccnuaaaucugaucca

SEQ ID NO: 395507 - RNA, 19 nt, Artificial Sequence
  Description of Artificial Sequence: Synthetic oligonucleotide
aacccauggaaaguucuau

SEQ ID NO: 395508 - RNA, 19 nt, Artificial Sequence
  Description of Artificial Sequence: Synthetic oligonucleotide
uaguuaucugcugaguauu

SEQ ID NO: 395509 - RNA, 19 nt, Artificial Sequence
  Description of Artificial Sequence: Synthetic oligonucleotide
gaggcaucccgugauaauc

SEQ ID NO: 395510 - RNA, 19 nt, Artificial Sequence
  Description of Artificial Sequence: Synthetic oligonucleotide
auccaacguaaguagcgcu

SEQ ID NO: 395511 - RNA, 19 nt, Artificial Sequence
  Description of Artificial Sequence: Synthetic oligonucleotide
aguaaguuauuaauauaua

SEQ ID NO: 395512 - RNA, 19 nt, Artificial Sequence
  Description of Artificial Sequence: Synthetic oligonucleotide
auacgaaggaaggcuuggg

SEQ ID NO: 395513 - RNA, 19 nt, Artificial Sequence
  Description of Artificial Sequence: Synthetic oligonucleotide
guuugaaagugauccucuc

SEQ ID NO: 395514 - RNA, 19 nt, Artificial Sequence
  Description of Artificial Sequence: Synthetic oligonucleotide
aacaacccgugguagucua

SEQ ID NO: 395515 - RNA, 19 nt, Artificial Sequence
  Description of Artificial Sequence: Synthetic oligonucleotide
cuugcccucuccuacucuc

SEQ ID NO: 395516 - RNA, 19 nt, Artificial Sequence
  Description of Artificial Sequence: Synthetic oligonucleotide
ugcugaguauuugggaagu

SEQ ID NO: 395517 - RNA, 19 nt, Artificial Sequence
  Description of Artificial Sequence: Synthetic oligonucleotide
aggcaucccgugauaaucg

SEQ ID NO: 395518 - RNA, 19 nt, Artificial Sequence
  Description of Artificial Sequence: Synthetic oligonucleotide
acucucgagaguuguccug

SEQ ID NO: 395519 - RNA, 19 nt, Artificial Sequence
  Description of Artificial Sequence: Synthetic oligonucleotide
cagggcgcacauacgauac

SEQ ID NO: 395520 - RNA, 19 nt, Artificial Sequence
  Description of Artificial Sequence: Synthetic oligonucleotide
guaacaacccgugguaguc

SEQ ID NO: 395521 - RNA, 19 nt, Artificial Sequence
  Description of Artificial Sequence: Synthetic oligonucleotide
cauaagacuguagaggcua

SEQ ID NO: 395522 - RNA, 19 nt, Artificial Sequence
  Description of Artificial Sequence: Synthetic oligonucleotide
ugcuauagcaagggucaug

SEQ ID NO: 395523 - RNA, 19 nt, Artificial Sequence
  Description of Artificial Sequence: Synthetic oligonucleotide
cccauggaaaguucuauac

SEQ ID NO: 395524 - RNA, 19 nt, Artificial Sequence
  Description of Artificial Sequence: Synthetic oligonucleotide
ucagggcgcacauacgaua

SEQ ID NO: 395525 - RNA, 19 nt, Artificial Sequence
  Description of Artificial Sequence: Synthetic oligonucleotide
guuaagcauaauccacauc

SEQ ID NO: 395526 - RNA, 19 nt, Artificial Sequence
  Description of Artificial Sequence: Synthetic oligonucleotide
uacgauugcuuugcuguga

SEQ ID NO: 395527 - RNA, 19 nt, Artificial Sequence
  Description of Artificial Sequence: Synthetic oligonucleotide
gcaacaagcgaagagugac

SEQ ID NO: 395528 - RNA, 19 nt, Artificial Sequence
  Description of Artificial Sequence: Synthetic oligonucleotide
ugcuuaccuuuucuauugu

SEQ ID NO: 395529 - RNA, 19 nt, Artificial Sequence
  Description of Artificial Sequence: Synthetic oligonucleotide
gaacaacugccccacccuc

SEQ ID NO: 395530 - RNA, 19 nt, Artificial Sequence
  Description of Artificial Sequence: Synthetic oligonucleotide
uacauaguacugggcaaac

SEQ ID NO: 395531 - RNA, 19 nt, Artificial Sequence
  Description of Artificial Sequence: Synthetic oligonucleotide
gcgaucuugaagucugugc

SEQ ID NO: 395532 - RNA, 19 nt, Artificial Sequence
  Description of Artificial Sequence: Synthetic oligonucleotide
agcagcgcaaaagggaaca

SEQ ID NO: 395533 - RNA, 19 nt, Artificial Sequence
  Description of Artificial Sequence: Synthetic oligonucleotide
gcacauacgauacgaagga

SEQ ID NO: 395534 - RNA, 19 nt, Artificial Sequence
  Description of Artificial Sequence: Synthetic oligonucleotide
uuaugcccuuagauuauuu

SEQ ID NO: 395535 - RNA, 19 nt, Artificial Sequence
  Description of Artificial Sequence: Synthetic oligonucleotide
uuacugugccaguugucau

SEQ ID NO: 395536 - RNA, 19 nt, Artificial Sequence
  Description of Artificial Sequence: Synthetic oligonucleotide
uacugugccaguugucaua

SEQ ID NO: 395537 - RNA, 19 nt, Artificial Sequence
  Description of Artificial Sequence: Synthetic oligonucleotide
auucucuugccuagaaggu

SEQ ID NO: 395538 - RNA, 19 nt, Artificial Sequence
  Description of Artificial Sequence: Synthetic oligonucleotide
uccuuacaaaggauacuuu

SEQ ID NO: 395539 - RNA, 19 nt, Artificial Sequence
  Description of Artificial Sequence: Synthetic oligonucleotide
  modified_base (9)..(9): a, c, u, g, unknown or other
aaacauccnuaaaucugau

SEQ ID NO: 395540 - RNA, 19 nt, Artificial Sequence
  Description of Artificial Sequence: Synthetic oligonucleotide
cuccuacauaguacugggc

SEQ ID NO: 395541 - RNA, 19 nt, Artificial Sequence
  Description of Artificial Sequence: Synthetic oligonucleotide
cguccuaugaguacuggag

SEQ ID NO: 395542 - RNA, 19 nt, Artificial Sequence
  Description of Artificial Sequence: Synthetic oligonucleotide
gacucagccuaacugcuua

SEQ ID NO: 395543 - RNA, 19 nt, Artificial Sequence
  Description of Artificial Sequence: Synthetic oligonucleotide
ggagaugacuuggacuggg

SEQ ID NO: 395544 - RNA, 19 nt, Artificial Sequence
  Description of Artificial Sequence: Synthetic oligonucleotide
aucuuucaggacugggaau

SEQ ID NO: 395545 - RNA, 19 nt, Artificial Sequence
  Description of Artificial Sequence: Synthetic oligonucleotide
guaaguagcgcugggccca

SEQ ID NO: 395546 - RNA, 19 nt, Artificial Sequence
  Description of Artificial Sequence: Synthetic oligonucleotide
gcuauagcaagggucauga

SEQ ID NO: 395547 - RNA, 19 nt, Artificial Sequence
  Description of Artificial Sequence: Synthetic oligonucleotide
agaacucucgagaguuguc

SEQ ID NO: 395548 - RNA, 19 nt, Artificial Sequence
  Description of Artificial Sequence: Synthetic oligonucleotide
cugccuauugagggguugg

SEQ ID NO: 395549 - RNA, 19 nt, Artificial Sequence
  Description of Artificial Sequence: Synthetic oligonucleotide
acgauugcuuugcugugaa

SEQ ID NO: 395550 - RNA, 19 nt, Artificial Sequence
  Description of Artificial Sequence: Synthetic oligonucleotide
gcgcacauacgauacgaag

SEQ ID NO: 395551 - RNA, 19 nt, Artificial Sequence
  Description of Artificial Sequence: Synthetic oligonucleotide
uccguccuaugaguacugg

SEQ ID NO: 395552 - RNA, 19 nt, Artificial Sequence
  Description of Artificial Sequence: Synthetic oligonucleotide
cccgugguagucuaugggc

SEQ ID NO: 395553 - RNA, 19 nt, Artificial Sequence
  Description of Artificial Sequence: Synthetic oligonucleotide
agggcgcacauacgauacg

SEQ ID NO: 395554 - RNA, 19 nt, Artificial Sequence
  Description of Artificial Sequence: Synthetic oligonucleotide
cguauaaauauucacguua

SEQ ID NO: 395555 - RNA, 19 nt, Artificial Sequence
  Description of Artificial Sequence: Synthetic oligonucleotide
cuaauucucuugccuagaa

SEQ ID NO: 395556 - RNA, 19 nt, Artificial Sequence
  Description of Artificial Sequence: Synthetic oligonucleotide
caauaggagcucuccaaaa

SEQ ID NO: 395557 - RNA, 19 nt, Artificial Sequence
  Description of Artificial Sequence: Synthetic oligonucleotide
ccauugagaauaaaaggaa

SEQ ID NO: 395558 - RNA, 19 nt, Artificial Sequence
  Description of Artificial Sequence: Synthetic oligonucleotide
ccuauugagggguuggaca

SEQ ID NO: 395559 - RNA, 19 nt, Artificial Sequence
  Description of Artificial Sequence: Synthetic oligonucleotide
ugaggcaucccgugauaau

SEQ ID NO: 395560 - RNA, 19 nt, Artificial Sequence
  Description of Artificial Sequence: Synthetic oligonucleotide
ggcguugauuuucuccugc

SEQ ID NO: 395561 - RNA, 19 nt, Artificial Sequence
  Description of Artificial Sequence: Synthetic oligonucleotide
aggaaaucauaagacugua

SEQ ID NO: 395562 - RNA, 19 nt, Artificial Sequence
  Description of Artificial Sequence: Synthetic oligonucleotide
gcuuaccuuuucuauugug

SEQ ID NO: 395563 - RNA, 19 nt, Artificial Sequence
  Description of Artificial Sequence: Synthetic oligonucleotide
guacuauacacaguaaguu

SEQ ID NO: 395564 - RNA, 19 nt, Artificial Sequence
  Description of Artificial Sequence: Synthetic oligonucleotide
acuguagaggcuaccguau

SEQ ID NO: 395565 - RNA, 19 nt, Artificial Sequence
  Description of Artificial Sequence: Synthetic oligonucleotide
uggcguugauuuucuccug

SEQ ID NO: 395566 - RNA, 19 nt, Artificial Sequence
  Description of Artificial Sequence: Synthetic oligonucleotide
agaggcuaccguauaaaua

SEQ ID NO: 395567 - RNA, 19 nt, Artificial Sequence
  Description of Artificial Sequence: Synthetic oligonucleotide
cuauagcaagggucaugac

SEQ ID NO: 395568 - RNA, 19 nt, Artificial Sequence
  Description of Artificial Sequence: Synthetic oligonucleotide
gcuaguuuaucuucagugu

SEQ ID NO: 395569 - RNA, 19 nt, Artificial Sequence
  Description of Artificial Sequence: Synthetic oligonucleotide
gugcuuuaaucucuguagu

SEQ ID NO: 395570 - RNA, 19 nt, Artificial Sequence
  Description of Artificial Sequence: Synthetic oligonucleotide
cagugagacaggagaauaa

SEQ ID NO: 395571 - RNA, 19 nt, Artificial Sequence
  Description of Artificial Sequence: Synthetic oligonucleotide
uucucaaaugaggucccuu

SEQ ID NO: 395572 - RNA, 19 nt, Artificial Sequence
  Description of Artificial Sequence: Synthetic oligonucleotide
gagaguuguccuggaacuc

SEQ ID NO: 395573 - RNA, 19 nt, Artificial Sequence
  Description of Artificial Sequence: Synthetic oligonucleotide
cuacauaguacugggcaaa

SEQ ID NO: 395574 - RNA, 19 nt, Artificial Sequence
  Description of Artificial Sequence: Synthetic oligonucleotide
gucgcugauguuugaaagu

SEQ ID NO: 395575 - RNA, 19 nt, Artificial Sequence
  Description of Artificial Sequence: Synthetic oligonucleotide
aguaguggcagagccucaa

SEQ ID NO: 395576 - RNA, 19 nt, Artificial Sequence
  Description of Artificial Sequence: Synthetic oligonucleotide
aagccacauucgaaaguga

SEQ ID NO: 395577 - RNA, 19 nt, Artificial Sequence
  Description of Artificial Sequence: Synthetic oligonucleotide
cccgugauaaucgaaucug

SEQ ID NO: 395578 - RNA, 19 nt, Artificial Sequence
  Description of Artificial Sequence: Synthetic oligonucleotide
caaacuugcacaguguauu

SEQ ID NO: 395579 - RNA, 19 nt, Artificial Sequence
  Description of Artificial Sequence: Synthetic oligonucleotide
gccacauucgaaagugacc

SEQ ID NO: 395580 - RNA, 19 nt, Artificial Sequence
  Description of Artificial Sequence: Synthetic oligonucleotide
ggagcaacguaagggguug

SEQ ID NO: 395581 - RNA, 19 nt, Artificial Sequence
  Description of Artificial Sequence: Synthetic oligonucleotide
acaccggguacuauacaca

SEQ ID NO: 395582 - RNA, 19 nt, Artificial Sequence
  Description of Artificial Sequence: Synthetic oligonucleotide
caagggucaugaccuugug

SEQ ID NO: 395583 - RNA, 19 nt, Artificial Sequence
  Description of Artificial Sequence: Synthetic oligonucleotide
cucagccuaacugcuuaug

SEQ ID NO: 395584 - RNA, 19 nt, Artificial Sequence
  Description of Artificial Sequence: Synthetic oligonucleotide
ccagcgucuaugacugggg

SEQ ID NO: 395585 - RNA, 19 nt, Artificial Sequence
  Description of Artificial Sequence: Synthetic oligonucleotide
agcaacguaagggguugca

SEQ ID NO: 395586 - RNA, 19 nt, Artificial Sequence
  Description of Artificial Sequence: Synthetic oligonucleotide
ugccucuuucacagucccu

SEQ ID NO: 395587 - RNA, 19 nt, Artificial Sequence
  Description of Artificial Sequence: Synthetic oligonucleotide
aggucccuugcccucuccu

SEQ ID NO: 395588 - RNA, 19 nt, Artificial Sequence
  Description of Artificial Sequence: Synthetic oligonucleotide
caauccuauggcaggugaa

SEQ ID NO: 395589 - RNA, 19 nt, Artificial Sequence
  Description of Artificial Sequence: Synthetic oligonucleotide
agacgccccgcugacagga

SEQ ID NO: 395590 - RNA, 19 nt, Artificial Sequence
  Description of Artificial Sequence: Synthetic oligonucleotide
gagugucgcuggagcagcg

SEQ ID NO: 395591 - RNA, 19 nt, Artificial Sequence
  Description of Artificial Sequence: Synthetic oligonucleotide
gcaacguaagggguugcag

SEQ ID NO: 395592 - RNA, 19 nt, Artificial Sequence
  Description of Artificial Sequence: Synthetic oligonucleotide
cguaaguagcgcugggccc

SEQ ID NO: 395593 - RNA, 19 nt, Artificial Sequence
  Description of Artificial Sequence: Synthetic oligonucleotide
auacauccccuagguccac

SEQ ID NO: 395594 - RNA, 19 nt, Artificial Sequence
  Description of Artificial Sequence: Synthetic oligonucleotide
aguuaucugcugaguauuu

SEQ ID NO: 395595 - RNA, 19 nt, Artificial Sequence
  Description of Artificial Sequence: Synthetic oligonucleotide
ccgcugacaggaaucuucc

SEQ ID NO: 395596 - RNA, 19 nt, Artificial Sequence
  Description of Artificial Sequence: Synthetic oligonucleotide
gugaccugccuaccccagc

SEQ ID NO: 395597 - RNA, 19 nt, Artificial Sequence
  Description of Artificial Sequence: Synthetic oligonucleotide
acgauacgaaggaaggcuu

SEQ ID NO: 395598 - RNA, 19 nt, Artificial Sequence
  Description of Artificial Sequence: Synthetic oligonucleotide
cagucccugaggagacaag

SEQ ID NO: 395599 - RNA, 19 nt, Artificial Sequence
  Description of Artificial Sequence: Synthetic oligonucleotide
gaggcacucuuguucccaa

SEQ ID NO: 395600 - RNA, 19 nt, Artificial Sequence
  Description of Artificial Sequence: Synthetic oligonucleotide
gaacuccguccuaugagua

SEQ ID NO: 395601 - RNA, 19 nt, Artificial Sequence
  Description of Artificial Sequence: Synthetic oligonucleotide
acguuacaauaugguaaca

SEQ ID NO: 395602 - RNA, 19 nt, Artificial Sequence
  Description of Artificial Sequence: Synthetic oligonucleotide
ccggguacuauacacagua

SEQ ID NO: 395603 - RNA, 19 nt, Artificial Sequence
  Description of Artificial Sequence: Synthetic oligonucleotide
uacauccccuagguccaca

SEQ ID NO: 395604 - RNA, 19 nt, Artificial Sequence
  Description of Artificial Sequence: Synthetic oligonucleotide
gagcagcgcaaaagggaac

SEQ ID NO: 395605 - RNA, 19 nt, Artificial Sequence
  Description of Artificial Sequence: Synthetic oligonucleotide
ugcagacgagucucccaua

SEQ ID NO: 395606 - RNA, 19 nt, Artificial Sequence
  Description of Artificial Sequence: Synthetic oligonucleotide
gggcuuacugugccaguug

SEQ ID NO: 395607 - RNA, 19 nt, Artificial Sequence
  Description of Artificial Sequence: Synthetic oligonucleotide
caggcacggugccugugug

SEQ ID NO: 395608 - RNA, 19 nt, Artificial Sequence
  Description of Artificial Sequence: Synthetic oligonucleotide
caacaagcgaagagugacu

SEQ ID NO: 395609 - RNA, 19 nt, Artificial Sequence
  Description of Artificial Sequence: Synthetic oligonucleotide
cuggccgugaggcauuugu

SEQ ID NO: 395610 - RNA, 19 nt, Artificial Sequence
  Description of Artificial Sequence: Synthetic oligonucleotide
ccuacauaguacugggcaa

SEQ ID NO: 395611 - RNA, 19 nt, Artificial Sequence
  Description of Artificial Sequence: Synthetic oligonucleotide
caggcagaguugaauuucu

SEQ ID NO: 395612 - RNA, 19 nt, Artificial Sequence
  Description of Artificial Sequence: Synthetic oligonucleotide
gagcaacguaagggguugc

SEQ ID NO: 395613 - RNA, 19 nt, Artificial Sequence
  Description of Artificial Sequence: Synthetic oligonucleotide
cuugugccuuuaaaccaua

SEQ ID NO: 395614 - RNA, 19 nt, Artificial Sequence
  Description of Artificial Sequence: Synthetic oligonucleotide
agguuacaacagcuugcuu

SEQ ID NO: 395615 - RNA, 19 nt, Artificial Sequence
  Description of Artificial Sequence: Synthetic oligonucleotide
uaaguagcgcugggcccac

SEQ ID NO: 395616 - RNA, 19 nt, Artificial Sequence
  Description of Artificial Sequence: Synthetic oligonucleotide
gggagaugacuuggacugg

SEQ ID NO: 395617 - RNA, 19 nt, Artificial Sequence
  Description of Artificial Sequence: Synthetic oligonucleotide
ggccccucgauauggggca

SEQ ID NO: 395618 - RNA, 19 nt, Artificial Sequence
  Description of Artificial Sequence: Synthetic oligonucleotide
ucgcuggagcagcgcaaaa

SEQ ID NO: 395619 - RNA, 19 nt, Artificial Sequence
  Description of Artificial Sequence: Synthetic oligonucleotide
ggcgaucuugaagucugug

SEQ ID NO: 395620 - RNA, 19 nt, Artificial Sequence
  Description of Artificial Sequence: Synthetic oligonucleotide
cgauacgaaggaaggcuug

SEQ ID NO: 395621 - RNA, 19 nt, Artificial Sequence
  Description of Artificial Sequence: Synthetic oligonucleotide
ccaauccuauggcagguga

SEQ ID NO: 395622 - RNA, 19 nt, Artificial Sequence
  Description of Artificial Sequence: Synthetic oligonucleotide
ggcgccuuggugccgccgc

SEQ ID NO: 395623 - RNA, 19 nt, Artificial Sequence
  Description of Artificial Sequence: Synthetic oligonucleotide
gcgcaaaagggaacaaaga

SEQ ID NO: 395624 - RNA, 19 nt, Artificial Sequence
  Description of Artificial Sequence: Synthetic oligonucleotide
gcgggcagaguuccugagc

SEQ ID NO: 395625 - RNA, 19 nt, Artificial Sequence
  Description of Artificial Sequence: Synthetic oligonucleotide
gcuacagcgcagugagaca

SEQ ID NO: 395626 - RNA, 19 nt, Artificial Sequence
  Description of Artificial Sequence: Synthetic oligonucleotide
aggcauuuguguacauguu

SEQ ID NO: 395627 - RNA, 19 nt, Artificial Sequence
  Description of Artificial Sequence: Synthetic oligonucleotide
ggcuuacugugccaguugu

SEQ ID NO: 395628 - RNA, 19 nt, Artificial Sequence
  Description of Artificial Sequence: Synthetic oligonucleotide
ggcaucccgugauaaucga

SEQ ID NO: 395629 - RNA, 19 nt, Artificial Sequence
  Description of Artificial Sequence: Synthetic oligonucleotide
gaauuuccucagggcgcac

SEQ ID NO: 395630 - RNA, 19 nt, Artificial Sequence
  Description of Artificial Sequence: Synthetic oligonucleotide
cacauacgauacgaaggaa

SEQ ID NO: 395631 - RNA, 19 nt, Artificial Sequence
  Description of Artificial Sequence: Synthetic oligonucleotide
ccgugauaaucgaaucuga

SEQ ID NO: 395632 - RNA, 19 nt, Artificial Sequence
  Description of Artificial Sequence: Synthetic oligonucleotide
ccauaccuugugaaggaaa

SEQ ID NO: 395633 - RNA, 19 nt, Artificial Sequence
  Description of Artificial Sequence: Synthetic oligonucleotide
gggcgcacauacgauacga

SEQ ID NO: 395634 - RNA, 19 nt, Artificial Sequence
  Description of Artificial Sequence: Synthetic oligonucleotide
accggguacuauacacagu

SEQ ID NO: 395635 - RNA, 19 nt, Artificial Sequence
  Description of Artificial Sequence: Synthetic oligonucleotide
ccuaugaguacuggaggca

SEQ ID NO: 395636 - RNA, 19 nt, Artificial Sequence
  Description of Artificial Sequence: Synthetic oligonucleotide
ccauagacgccccgcugac

SEQ ID NO: 395637 - RNA, 19 nt, Artificial Sequence
  Description of Artificial Sequence: Synthetic oligonucleotide
ccuaccccagcgucuauga

SEQ ID NO: 395638 - RNA, 19 nt, Artificial Sequence
  Description of Artificial Sequence: Synthetic oligonucleotide
cccauagacgccccgcuga

SEQ ID NO: 395639 - RNA, 19 nt, Artificial Sequence
  Description of Artificial Sequence: Synthetic oligonucleotide
cgagucucccauagacgcc

SEQ ID NO: 395640 - RNA, 19 nt, Artificial Sequence
  Description of Artificial Sequence: Synthetic oligonucleotide
acgccccgcugacaggaau

SEQ ID NO: 395641 - RNA, 19 nt, Artificial Sequence
  Description of Artificial Sequence: Synthetic oligonucleotide
gucgcuggagcagcgcaaa

SEQ ID NO: 395642 - RNA, 19 nt, Artificial Sequence
  Description of Artificial Sequence: Synthetic oligonucleotide
ccccuagguccacaaacuc

SEQ ID NO: 395643 - RNA, 19 nt, Artificial Sequence
  Description of Artificial Sequence: Synthetic oligonucleotide
ccucuccuacucuccuagc

SEQ ID NO: 395644 - RNA, 19 nt, Artificial Sequence
  Description of Artificial Sequence: Synthetic oligonucleotide
cacugaggcaucccgugau

SEQ ID NO: 395645 - RNA, 19 nt, Artificial Sequence
  Description of Artificial Sequence: Synthetic oligonucleotide
cauagacgccccgcugaca

SEQ ID NO: 395646 - RNA, 19 nt, Artificial Sequence
  Description of Artificial Sequence: Synthetic oligonucleotide
cccuuagauuauuugaauu

SEQ ID NO: 395647 - RNA, 19 nt, Artificial Sequence
  Description of Artificial Sequence: Synthetic oligonucleotide
gcaaccuggccgugaggca

SEQ ID NO: 395648 - RNA, 19 nt, Artificial Sequence
  Description of Artificial Sequence: Synthetic oligonucleotide
aggcuaccguauaaauauu

SEQ ID NO: 395649 - RNA, 19 nt, Artificial Sequence
  Description of Artificial Sequence: Synthetic oligonucleotide
cucagggcgcacauacgau

SEQ ID NO: 395650 - RNA, 19 nt, Artificial Sequence
  Description of Artificial Sequence: Synthetic oligonucleotide
gcccuuagauuauuugaau

SEQ ID NO: 395651 - RNA, 19 nt, Artificial Sequence
  Description of Artificial Sequence: Synthetic oligonucleotide
cucuccuagcuuccugccu

SEQ ID NO: 395652 - RNA, 19 nt, Artificial Sequence
  Description of Artificial Sequence: Synthetic oligonucleotide
cuccuacaaucuuauucuu

SEQ ID NO: 395653 - RNA, 19 nt, Artificial Sequence
  Description of Artificial Sequence: Synthetic oligonucleotide
ccguccuaugaguacugga

SEQ ID NO: 395654 - RNA, 19 nt, Artificial Sequence
  Description of Artificial Sequence: Synthetic oligonucleotide
guaguggcagagccucaau

SEQ ID NO: 395655 - RNA, 19 nt, Artificial Sequence
  Description of Artificial Sequence: Synthetic oligonucleotide
cuccaauccuauggcaggu

SEQ ID NO: 395656 - RNA, 19 nt, Artificial Sequence
  Description of Artificial Sequence: Synthetic oligonucleotide
acaacccgugguagucuau

SEQ ID NO: 395657 - RNA, 19 nt, Artificial Sequence
  Description of Artificial Sequence: Synthetic oligonucleotide
gccuaccccagcgucuaug

SEQ ID NO: 395658 - RNA, 19 nt, Artificial Sequence
  Description of Artificial Sequence: Synthetic oligonucleotide
ugccuaccccagcgucuau

SEQ ID NO: 395659 - RNA, 19 nt, Artificial Sequence
  Description of Artificial Sequence: Synthetic oligonucleotide
gcaagggucaugaccuugu

SEQ ID NO: 395660 - RNA, 19 nt, Artificial Sequence
  Description of Artificial Sequence: Synthetic oligonucleotide
guucucaaaugaggucccu

SEQ ID NO: 395661 - RNA, 19 nt, Artificial Sequence
  Description of Artificial Sequence: Synthetic oligonucleotide
caccucccagagcuuucca

SEQ ID NO: 395662 - RNA, 19 nt, Artificial Sequence
  Description of Artificial Sequence: Synthetic oligonucleotide
cuuaugcccuuagauuauu

SEQ ID NO: 395663 - RNA, 19 nt, Artificial Sequence
  Description of Artificial Sequence: Synthetic oligonucleotide
ccgugguagucuaugggcu

SEQ ID NO: 395664 - RNA, 19 nt, Artificial Sequence
  Description of Artificial Sequence: Synthetic oligonucleotide
cuguggugcuuggcguuga

SEQ ID NO: 395665 - RNA, 19 nt, Artificial Sequence
  Description of Artificial Sequence: Synthetic oligonucleotide
cgugaggcauuuguguaca

SEQ ID NO: 395666 - RNA, 19 nt, Artificial Sequence
  Description of Artificial Sequence: Synthetic oligonucleotide
gcgcagugagacaggagaa

SEQ ID NO: 395667 - RNA, 19 nt, Artificial Sequence
  Description of Artificial Sequence: Synthetic oligonucleotide
ccacaacaccaguccagga

SEQ ID NO: 395668 - RNA, 19 nt, Artificial Sequence
  Description of Artificial Sequence: Synthetic oligonucleotide
gcaucccgugauaaucgaa

SEQ ID NO: 395669 - RNA, 19 nt, Artificial Sequence
  Description of Artificial Sequence: Synthetic oligonucleotide
acaggcgggcagaguuccu

SEQ ID NO: 395670 - RNA, 19 nt, Artificial Sequence
  Description of Artificial Sequence: Synthetic oligonucleotide
gcuuaugcccuuagauuau

SEQ ID NO: 395671 - RNA, 19 nt, Artificial Sequence
  Description of Artificial Sequence: Synthetic oligonucleotide
ccguauaaauauucacguu

SEQ ID NO: 395672 - RNA, 19 nt, Artificial Sequence
  Description of Artificial Sequence: Synthetic oligonucleotide
gugaggcauuuguguacau

SEQ ID NO: 395673 - RNA, 19 nt, Artificial Sequence
  Description of Artificial Sequence: Synthetic oligonucleotide
gggagcaacguaagggguu

SEQ ID NO: 395674 - RNA, 19 nt, Artificial Sequence
  Description of Artificial Sequence: Synthetic oligonucleotide
ccugccuaccccagcgucu

SEQ ID NO: 395675 - RNA, 19 nt, Artificial Sequence
  Description of Artificial Sequence: Synthetic oligonucleotide
gggguugcagagaggcacu

SEQ ID NO: 395676 - RNA, 19 nt, Artificial Sequence
  Description of Artificial Sequence: Synthetic oligonucleotide
gguagucuaugggcuuacu

SEQ ID NO: 395677 - RNA, 19 nt, Artificial Sequence
  Description of Artificial Sequence: Synthetic oligonucleotide
gacgccccgcugacaggaa

SEQ ID NO: 395678 - RNA, 19 nt, Artificial Sequence
  Description of Artificial Sequence: Synthetic oligonucleotide
gggcgccuuggugccgccg

SEQ ID NO: 395679 - RNA, 19 nt, Artificial Sequence
  Description of Artificial Sequence: Synthetic oligonucleotide
cggguacuauacacaguaa

SEQ ID NO: 395680 - RNA, 19 nt, Artificial Sequence
  Description of Artificial Sequence: Synthetic oligonucleotide
cgauugcuuugcugugaaa

SEQ ID NO: 395681 - RNA, 19 nt, Artificial Sequence
  Description of Artificial Sequence: Synthetic oligonucleotide
ccucgauauggggcaguaa

SEQ ID NO: 395682 - RNA, 19 nt, Artificial Sequence
  Description of Artificial Sequence: Synthetic oligonucleotide
cccucgauauggggcagua

SEQ ID NO: 395683 - RNA, 19 nt, Artificial Sequence
  Description of Artificial Sequence: Synthetic oligonucleotide
ccuugcccucuccuacucu

SEQ ID NO: 395684 - RNA, 19 nt, Artificial Sequence
  Description of Artificial Sequence: Synthetic oligonucleotide
ccguuguccaaggcugagu

SEQ ID NO: 395685 - RNA, 19 nt, Artificial Sequence
  Description of Artificial Sequence: Synthetic oligonucleotide
ccccucgauauggggcagu

SEQ ID NO: 395686 - RNA, 19 nt, Artificial Sequence
  Description of Artificial Sequence: Synthetic oligonucleotide
agaacuuauaggcagaagg

SEQ ID NO: 395687 - RNA, 19 nt, Artificial Sequence
  Description of Artificial Sequence: Synthetic oligonucleotide
agauauaguaaacaucacc

SEQ ID NO: 395688 - RNA, 19 nt, Artificial Sequence
  Description of Artificial Sequence: Synthetic oligonucleotide
aauaaggggagccaggcuc

SEQ ID NO: 395689 - RNA, 19 nt, Artificial Sequence
  Description of Artificial Sequence: Synthetic oligonucleotide
aacagauugggguaggagg

SEQ ID NO: 395690 - RNA, 19 nt, Artificial Sequence
  Description of Artificial Sequence: Synthetic oligonucleotide
gugacaagaacuuauaggc

SEQ ID NO: 395691 - RNA, 19 nt, Artificial Sequence
  Description of Artificial Sequence: Synthetic oligonucleotide
aaccuaaucucccagaaca

SEQ ID NO: 395692 - RNA, 19 nt, Artificial Sequence
  Description of Artificial Sequence: Synthetic oligonucleotide
gagagugucacuaagaaac

SEQ ID NO: 395693 - RNA, 19 nt, Artificial Sequence
  Description of Artificial Sequence: Synthetic oligonucleotide
aauugguucagaccugguc

SEQ ID NO: 395694 - RNA, 19 nt, Artificial Sequence
  Description of Artificial Sequence: Synthetic oligonucleotide
augucuagcauacugacca

SEQ ID NO: 395695 - RNA, 19 nt, Artificial Sequence
  Description of Artificial Sequence: Synthetic oligonucleotide
aaucguagcucuucacugg

SEQ ID NO: 395696 - RNA, 19 nt, Artificial Sequence
  Description of Artificial Sequence: Synthetic oligonucleotide
acauaggacauccacuggg

SEQ ID NO: 395697 - RNA, 19 nt, Artificial Sequence
  Description of Artificial Sequence: Synthetic oligonucleotide
auaggcuucccugacagcc

SEQ ID NO: 395698 - RNA, 19 nt, Artificial Sequence
  Description of Artificial Sequence: Synthetic oligonucleotide
agaaaaggucucuaucaac

SEQ ID NO: 395699 - RNA, 19 nt, Artificial Sequence
  Description of Artificial Sequence: Synthetic oligonucleotide
ugugcacuaagaaggaccc

SEQ ID NO: 395700 - RNA, 19 nt, Artificial Sequence
  Description of Artificial Sequence: Synthetic oligonucleotide
ucaucuggcuucaacacug

SEQ ID NO: 395701 - RNA, 19 nt, Artificial Sequence
  Description of Artificial Sequence: Synthetic oligonucleotide
acauuuacuguacaaagaa

SEQ ID NO: 395702 - RNA, 19 nt, Artificial Sequence
  Description of Artificial Sequence: Synthetic oligonucleotide
guagaguuaagcaccagcg

SEQ ID NO: 395703 - RNA, 19 nt, Artificial Sequence
  Description of Artificial Sequence: Synthetic oligonucleotide
auuacggaggaauagucca

SEQ ID NO: 395704 - RNA, 19 nt, Artificial Sequence
  Description of Artificial Sequence: Synthetic oligonucleotide
cauauaaauaaggggagcc

SEQ ID NO: 395705 - RNA, 19 nt, Artificial Sequence
  Description of Artificial Sequence: Synthetic oligonucleotide
uaggagaucuugcaguugc

SEQ ID NO: 395706 - RNA, 19 nt, Artificial Sequence
  Description of Artificial Sequence: Synthetic oligonucleotide
gaagggugaugcuugauug

SEQ ID NO: 395707 - RNA, 19 nt, Artificial Sequence
  Description of Artificial Sequence: Synthetic oligonucleotide
uaaucguagcucuucacug

SEQ ID NO: 395708 - RNA, 19 nt, Artificial Sequence
  Description of Artificial Sequence: Synthetic oligonucleotide
uggucuuaagaaaugugca

SEQ ID NO: 395709 - RNA, 19 nt, Artificial Sequence
  Description of Artificial Sequence: Synthetic oligonucleotide
agugcuccagcguaagccc

SEQ ID NO: 395710 - RNA, 19 nt, Artificial Sequence
  Description of Artificial Sequence: Synthetic oligonucleotide
aaagagauuccagugacaa

SEQ ID NO: 395711 - RNA, 19 nt, Artificial Sequence
  Description of Artificial Sequence: Synthetic oligonucleotide
cugacuagaacagauuggg

SEQ ID NO: 395712 - RNA, 19 nt, Artificial Sequence
  Description of Artificial Sequence: Synthetic oligonucleotide
gucuacaccauucuacuag

SEQ ID NO: 395713 - RNA, 19 nt, Artificial Sequence
  Description of Artificial Sequence: Synthetic oligonucleotide
accuuugucagaauggacg

SEQ ID NO: 395714 - RNA, 19 nt, Artificial Sequence
  Description of Artificial Sequence: Synthetic oligonucleotide
caggcugaaaacucgauug

SEQ ID NO: 395715 - RNA, 19 nt, Artificial Sequence
  Description of Artificial Sequence: Synthetic oligonucleotide
cuuccguccaguagaaugg

SEQ ID NO: 395716 - RNA, 19 nt, Artificial Sequence
  Description of Artificial Sequence: Synthetic oligonucleotide
aguaagaacaaagaaccca

SEQ ID NO: 395717 - RNA, 19 nt, Artificial Sequence
  Description of Artificial Sequence: Synthetic oligonucleotide
uuaagcaccagcgugccug

SEQ ID NO: 395718 - RNA, 19 nt, Artificial Sequence
  Description of Artificial Sequence: Synthetic oligonucleotide
ucuccuaggccucaggaac

SEQ ID NO: 395719 - RNA, 19 nt, Artificial Sequence
  Description of Artificial Sequence: Synthetic oligonucleotide
ugccgcauaagcacgauac

SEQ ID NO: 395720 - RNA, 19 nt, Artificial Sequence
  Description of Artificial Sequence: Synthetic oligonucleotide
uuaaccuaaucucccagaa

SEQ ID NO: 395721 - RNA, 19 nt, Artificial Sequence
  Description of Artificial Sequence: Synthetic oligonucleotide
caccccucgaguaagacag

SEQ ID NO: 395722 - RNA, 19 nt, Artificial Sequence
  Description of Artificial Sequence: Synthetic oligonucleotide
aggcggaacccacaggucc

SEQ ID NO: 395723 - RNA, 19 nt, Artificial Sequence
  Description of Artificial Sequence: Synthetic oligonucleotide
gcagcuaugaaacacaguc

SEQ ID NO: 395724 - RNA, 19 nt, Artificial Sequence
  Description of Artificial Sequence: Synthetic oligonucleotide
gucaaugaggugcacgggg

SEQ ID NO: 395725 - RNA, 19 nt, Artificial Sequence
  Description of Artificial Sequence: Synthetic oligonucleotide
auauaguaaacaucaccca

SEQ ID NO: 395726 - RNA, 19 nt, Artificial Sequence
  Description of Artificial Sequence: Synthetic oligonucleotide
acguugaaguugcacaggg

SEQ ID NO: 395727 - RNA, 19 nt, Artificial Sequence
  Description of Artificial Sequence: Synthetic oligonucleotide
uccagaauugguucagacc

SEQ ID NO: 395728 - RNA, 19 nt, Artificial Sequence
  Description of Artificial Sequence: Synthetic oligonucleotide
agcuaugaaacacagucaa

SEQ ID NO: 395729 - RNA, 19 nt, Artificial Sequence
  Description of Artificial Sequence: Synthetic oligonucleotide
accauucuacuagagauuc

SEQ ID NO: 395730 - RNA, 19 nt, Artificial Sequence
  Description of Artificial Sequence: Synthetic oligonucleotide
uacgagagagcucaguaaa

SEQ ID NO: 395731 - RNA, 19 nt, Artificial Sequence
  Description of Artificial Sequence: Synthetic oligonucleotide
acuagcucagauguggagg

SEQ ID NO: 395732 - RNA, 19 nt, Artificial Sequence
  Description of Artificial Sequence: Synthetic oligonucleotide
uugccuaugucuagcauac

SEQ ID NO: 395733 - RNA, 19 nt, Artificial Sequence
  Description of Artificial Sequence: Synthetic oligonucleotide
agaaggaccccaguaaggg

SEQ ID NO: 395734 - RNA, 19 nt, Artificial Sequence
  Description of Artificial Sequence: Synthetic oligonucleotide
ugacuagaacagauugggg

SEQ ID NO: 395735 - RNA, 19 nt, Artificial Sequence
  Description of Artificial Sequence: Synthetic oligonucleotide
uacacaaggaggauucccu

SEQ ID NO: 395736 - RNA, 19 nt, Artificial Sequence
  Description of Artificial Sequence: Synthetic oligonucleotide
ccucgaguaagacagaugg

SEQ ID NO: 395737 - RNA, 19 nt, Artificial Sequence
  Description of Artificial Sequence: Synthetic oligonucleotide
cauuacggaggaauagucc

SEQ ID NO: 395738 - RNA, 19 nt, Artificial Sequence
  Description of Artificial Sequence: Synthetic oligonucleotide
aagaacccaggaauggugg

SEQ ID NO: 395739 - RNA, 19 nt, Artificial Sequence
  Description of Artificial Sequence: Synthetic oligonucleotide
ucuagcauacugaccaccu

SEQ ID NO: 395740 - RNA, 19 nt, Artificial Sequence
  Description of Artificial Sequence: Synthetic oligonucleotide
uacaccauucuacuagaga

SEQ ID NO: 395741 - RNA, 19 nt, Artificial Sequence
  Description of Artificial Sequence: Synthetic oligonucleotide
ugacaagaacuuauaggca

SEQ ID NO: 395742 - RNA, 19 nt, Artificial Sequence
  Description of Artificial Sequence: Synthetic oligonucleotide
uuugucagaauggacgcug

SEQ ID NO: 395743 - RNA, 19 nt, Artificial Sequence
  Description of Artificial Sequence: Synthetic oligonucleotide
ucuaccagugcccucguaa

SEQ ID NO: 395744 - RNA, 19 nt, Artificial Sequence
  Description of Artificial Sequence: Synthetic oligonucleotide
cauaggacauccacugggg

SEQ ID NO: 395745 - RNA, 19 nt, Artificial Sequence
  Description of Artificial Sequence: Synthetic oligonucleotide
ugcaguugcuccgagaaca

SEQ ID NO: 395746 - RNA, 19 nt, Artificial Sequence
  Description of Artificial Sequence: Synthetic oligonucleotide
gucaaugccaucaaaggac

SEQ ID NO: 395747 - RNA, 19 nt, Artificial Sequence
  Description of Artificial Sequence: Synthetic oligonucleotide
agagauucagagaaaaggu

SEQ ID NO: 395748 - RNA, 19 nt, Artificial Sequence
  Description of Artificial Sequence: Synthetic oligonucleotide
aggaauaguccauggcuuc

SEQ ID NO: 395749 - RNA, 19 nt, Artificial Sequence
  Description of Artificial Sequence: Synthetic oligonucleotide
uagucaauuccguugcugu

SEQ ID NO: 395750 - RNA, 19 nt, Artificial Sequence
  Description of Artificial Sequence: Synthetic oligonucleotide
uaagcacgauacgagagag

SEQ ID NO: 395751 - RNA, 19 nt, Artificial Sequence
  Description of Artificial Sequence: Synthetic oligonucleotide
aguguugauggugugcacg

SEQ ID NO: 395752 - RNA, 19 nt, Artificial Sequence
  Description of Artificial Sequence: Synthetic oligonucleotide
cagaagggccacaauaggc

SEQ ID NO: 395753 - RNA, 19 nt, Artificial Sequence
  Description of Artificial Sequence: Synthetic oligonucleotide
aucuguuucccacuggccu

SEQ ID NO: 395754 - RNA, 19 nt, Artificial Sequence
  Description of Artificial Sequence: Synthetic oligonucleotide
uccccaacggcugaugugg

SEQ ID NO: 395755 - RNA, 19 nt, Artificial Sequence
  Description of Artificial Sequence: Synthetic oligonucleotide
gacuagaacagauuggggu

SEQ ID NO: 395756 - RNA, 19 nt, Artificial Sequence
  Description of Artificial Sequence: Synthetic oligonucleotide
auuaaccuaaucucccaga

SEQ ID NO: 395757 - RNA, 19 nt, Artificial Sequence
  Description of Artificial Sequence: Synthetic oligonucleotide
gggacuugccgcuugaagg

SEQ ID NO: 395758 - RNA, 19 nt, Artificial Sequence
  Description of Artificial Sequence: Synthetic oligonucleotide
auaagcacgauacgagaga

SEQ ID NO: 395759 - RNA, 19 nt, Artificial Sequence
  Description of Artificial Sequence: Synthetic oligonucleotide
acaggcggaacccacaggu

SEQ ID NO: 395760 - RNA, 19 nt, Artificial Sequence
  Description of Artificial Sequence: Synthetic oligonucleotide
cuuggaccucuuaagacug

SEQ ID NO: 395761 - RNA, 19 nt, Artificial Sequence
  Description of Artificial Sequence: Synthetic oligonucleotide
uacaggagacaauggcacg

SEQ ID NO: 395762 - RNA, 19 nt, Artificial Sequence
  Description of Artificial Sequence: Synthetic oligonucleotide
uugauuguauccagccucu

SEQ ID NO: 395763 - RNA, 19 nt, Artificial Sequence
  Description of Artificial Sequence: Synthetic oligonucleotide
uguagccaagucuuccugc

SEQ ID NO: 395764 - RNA, 19 nt, Artificial Sequence
  Description of Artificial Sequence: Synthetic oligonucleotide
agcacgauacgagagagcu

SEQ ID NO: 395765 - RNA, 19 nt, Artificial Sequence
  Description of Artificial Sequence: Synthetic oligonucleotide
aucguagcucuucacuggg

SEQ ID NO: 395766 - RNA, 19 nt, Artificial Sequence
  Description of Artificial Sequence: Synthetic oligonucleotide
uggugguagucuuauaguc

SEQ ID NO: 395767 - RNA, 19 nt, Artificial Sequence
  Description of Artificial Sequence: Synthetic oligonucleotide
aggcugaaaacucgauugg

SEQ ID NO: 395768 - RNA, 19 nt, Artificial Sequence
  Description of Artificial Sequence: Synthetic oligonucleotide
aaauaaggggagccaggcu

SEQ ID NO: 395769 - RNA, 19 nt, Artificial Sequence
  Description of Artificial Sequence: Synthetic oligonucleotide
acuaagaaggaccccagua

SEQ ID NO: 395770 - RNA, 19 nt, Artificial Sequence
  Description of Artificial Sequence: Synthetic oligonucleotide
ugggucccuaacaaggggc

SEQ ID NO: 395771 - RNA, 19 nt, Artificial Sequence
  Description of Artificial Sequence: Synthetic oligonucleotide
aguuaagcaccagcgugcc

SEQ ID NO: 395772 - RNA, 19 nt, Artificial Sequence
  Description of Artificial Sequence: Synthetic oligonucleotide
gaaggaccccaguaagggg

SEQ ID NO: 395773 - RNA, 19 nt, Artificial Sequence
  Description of Artificial Sequence: Synthetic oligonucleotide
gucucuaucaacagcaaca

SEQ ID NO: 395774 - RNA, 19 nt, Artificial Sequence
  Description of Artificial Sequence: Synthetic oligonucleotide
ugugcacgcaggccaaucc

SEQ ID NO: 395775 - RNA, 19 nt, Artificial Sequence
  Description of Artificial Sequence: Synthetic oligonucleotide
acacugaaacccuccauca

SEQ ID NO: 395776 - RNA, 19 nt, Artificial Sequence
  Description of Artificial Sequence: Synthetic oligonucleotide
gguagaguuaagcaccagc

SEQ ID NO: 395777 - RNA, 19 nt, Artificial Sequence
  Description of Artificial Sequence: Synthetic oligonucleotide
auauaaauaaggggagcca

SEQ ID NO: 395778 - RNA, 19 nt, Artificial Sequence
  Description of Artificial Sequence: Synthetic oligonucleotide
ugcaagugggguucccagg

SEQ ID NO: 395779 - RNA, 19 nt, Artificial Sequence
  Description of Artificial Sequence: Synthetic oligonucleotide
aagggugaugcuugauugu

SEQ ID NO: 395780 - RNA, 19 nt, Artificial Sequence
  Description of Artificial Sequence: Synthetic oligonucleotide
cugaaacccuccaucacug

SEQ ID NO: 395781 - RNA, 19 nt, Artificial Sequence
  Description of Artificial Sequence: Synthetic oligonucleotide
ucuuauagucaauuccguu

SEQ ID NO: 395782 - RNA, 19 nt, Artificial Sequence
  Description of Artificial Sequence: Synthetic oligonucleotide
uccugagcuuccccaacgg

SEQ ID NO: 395783 - RNA, 19 nt, Artificial Sequence
  Description of Artificial Sequence: Synthetic oligonucleotide
aacucgauugggccuccag

SEQ ID NO: 395784 - RNA, 19 nt, Artificial Sequence
  Description of Artificial Sequence: Synthetic oligonucleotide
aacuuuucuccuaggccuc

SEQ ID NO: 395785 - RNA, 19 nt, Artificial Sequence
  Description of Artificial Sequence: Synthetic oligonucleotide
aaaugugcacuaagaagga

SEQ ID NO: 395786 - RNA, 19 nt, Artificial Sequence
  Description of Artificial Sequence: Synthetic oligonucleotide
cuugacgcgccuuccgucc

SEQ ID NO: 395787 - RNA, 19 nt, Artificial Sequence
  Description of Artificial Sequence: Synthetic oligonucleotide
gugaugcuugauuguaucc

SEQ ID NO: 395788 - RNA, 19 nt, Artificial Sequence
  Description of Artificial Sequence: Synthetic oligonucleotide
ggcugacuagaacagauug

SEQ ID NO: 395789 - RNA, 19 nt, Artificial Sequence
  Description of Artificial Sequence: Synthetic oligonucleotide
aacccuugccuaugucuag

SEQ ID NO: 395790 - RNA, 19 nt, Artificial Sequence
  Description of Artificial Sequence: Synthetic oligonucleotide
accagugcccucguaacac

SEQ ID NO: 395791 - RNA, 19 nt, Artificial Sequence
  Description of Artificial Sequence: Synthetic oligonucleotide
gauucagagaaaaggucuc

SEQ ID NO: 395792 - RNA, 19 nt, Artificial Sequence
  Description of Artificial Sequence: Synthetic oligonucleotide
aaaacucgauugggccucc

SEQ ID NO: 395793 - RNA, 19 nt, Artificial Sequence
  Description of Artificial Sequence: Synthetic oligonucleotide
cacgauacgagagagcuca

SEQ ID NO: 395794 - RNA, 19 nt, Artificial Sequence
  Description of Artificial Sequence: Synthetic oligonucleotide
aguaaacaucacccaaagu

SEQ ID NO: 395795 - RNA, 19 nt, Artificial Sequence
  Description of Artificial Sequence: Synthetic oligonucleotide
agguaguggaagcuuguca

SEQ ID NO: 395796 - RNA, 19 nt, Artificial Sequence
  Description of Artificial Sequence: Synthetic oligonucleotide
ugcccagauauaguaaaca

SEQ ID NO: 395797 - RNA, 19 nt, Artificial Sequence
  Description of Artificial Sequence: Synthetic oligonucleotide
gagcauuacggaggaauag

SEQ ID NO: 395798 - RNA, 19 nt, Artificial Sequence
  Description of Artificial Sequence: Synthetic oligonucleotide
cuccguugggacuugccgc

SEQ ID NO: 395799 - RNA, 19 nt, Artificial Sequence
  Description of Artificial Sequence: Synthetic oligonucleotide
aagcacgauacgagagagc

SEQ ID NO: 395800 - RNA, 19 nt, Artificial Sequence
  Description of Artificial Sequence: Synthetic oligonucleotide
auaguaaacaucacccaaa

SEQ ID NO: 395801 - RNA, 19 nt, Artificial Sequence
  Description of Artificial Sequence: Synthetic oligonucleotide
guauauaggcuucccugac

SEQ ID NO: 395802 - RNA, 19 nt, Artificial Sequence
  Description of Artificial Sequence: Synthetic oligonucleotide
agagcaucuguuucccacu

SEQ ID NO: 395803 - RNA, 19 nt, Artificial Sequence
  Description of Artificial Sequence: Synthetic oligonucleotide
gacguugaaguugcacagg

SEQ ID NO: 395804 - RNA, 19 nt, Artificial Sequence
  Description of Artificial Sequence: Synthetic oligonucleotide
cuugcaguugcuccgagaa

SEQ ID NO: 395805 - RNA, 19 nt, Artificial Sequence
  Description of Artificial Sequence: Synthetic oligonucleotide
auacgagagagcucaguaa

SEQ ID NO: 395806 - RNA, 19 nt, Artificial Sequence
  Description of Artificial Sequence: Synthetic oligonucleotide
uccagcguaagccccgagu

SEQ ID NO: 395807 - RNA, 19 nt, Artificial Sequence
  Description of Artificial Sequence: Synthetic oligonucleotide
cucugcguaggcucgggcc

SEQ ID NO: 395808 - RNA, 19 nt, Artificial Sequence
  Description of Artificial Sequence: Synthetic oligonucleotide
acagauugggguaggagga

SEQ ID NO: 395809 - RNA, 19 nt, Artificial Sequence
  Description of Artificial Sequence: Synthetic oligonucleotide
ugagggguauauaggcuuc

SEQ ID NO: 395810 - RNA, 19 nt, Artificial Sequence
  Description of Artificial Sequence: Synthetic oligonucleotide
cuuaagacuguugcccuug

SEQ ID NO: 395811 - RNA, 19 nt, Artificial Sequence
  Description of Artificial Sequence: Synthetic oligonucleotide
agcauuacggaggaauagu

SEQ ID NO: 395812 - RNA, 19 nt, Artificial Sequence
  Description of Artificial Sequence: Synthetic oligonucleotide
cucuaucaacagcaacagg

SEQ ID NO: 395813 - RNA, 19 nt, Artificial Sequence
  Description of Artificial Sequence: Synthetic oligonucleotide
aguaggaucggccgugcau

SEQ ID NO: 395814 - RNA, 19 nt, Artificial Sequence
  Description of Artificial Sequence: Synthetic oligonucleotide
cuagcucagauguggagga

SEQ ID NO: 395815 - RNA, 19 nt, Artificial Sequence
  Description of Artificial Sequence: Synthetic oligonucleotide
uucuccaugccaugccgca

SEQ ID NO: 395816 - RNA, 19 nt, Artificial Sequence
  Description of Artificial Sequence: Synthetic oligonucleotide
cuaccagugcccucguaac

SEQ ID NO: 395817 - RNA, 19 nt, Artificial Sequence
  Description of Artificial Sequence: Synthetic oligonucleotide
guaaaggacucaaugacgu

SEQ ID NO: 395818 - RNA, 19 nt, Artificial Sequence
  Description of Artificial Sequence: Synthetic oligonucleotide
uucccugacagcccuuuaa

SEQ ID NO: 395819 - RNA, 19 nt, Artificial Sequence
  Description of Artificial Sequence: Synthetic oligonucleotide
ugucagaauggacgcugca

SEQ ID NO: 395820 - RNA, 19 nt, Artificial Sequence
  Description of Artificial Sequence: Synthetic oligonucleotide
cucguaacacccauggcaa

SEQ ID NO: 395821 - RNA, 19 nt, Artificial Sequence
  Description of Artificial Sequence: Synthetic oligonucleotide
ccucuuaagacuguugccc

SEQ ID NO: 395822 - RNA, 19 nt, Artificial Sequence
  Description of Artificial Sequence: Synthetic oligonucleotide
agggguauauaggcuuccc

SEQ ID NO: 395823 - RNA, 19 nt, Artificial Sequence
  Description of Artificial Sequence: Synthetic oligonucleotide
uuacggaggaauaguccau

SEQ ID NO: 395824 - RNA, 19 nt, Artificial Sequence
  Description of Artificial Sequence: Synthetic oligonucleotide
agcuagugggucccuaaca

SEQ ID NO: 395825 - RNA, 19 nt, Artificial Sequence
  Description of Artificial Sequence: Synthetic oligonucleotide
cuugccuaugucuagcaua

SEQ ID NO: 395826 - RNA, 19 nt, Artificial Sequence
  Description of Artificial Sequence: Synthetic oligonucleotide
uugauccaccggucaaugc

SEQ ID NO: 395827 - RNA, 19 nt, Artificial Sequence
  Description of Artificial Sequence: Synthetic oligonucleotide
ggacuugccgcuugaaggc

SEQ ID NO: 395828 - RNA, 19 nt, Artificial Sequence
  Description of Artificial Sequence: Synthetic oligonucleotide
uccguugggacuugccgcu

SEQ ID NO: 395829 - RNA, 19 nt, Artificial Sequence
  Description of Artificial Sequence: Synthetic oligonucleotide
cagcccugucccuacaggc

SEQ ID NO: 395830 - RNA, 19 nt, Artificial Sequence
  Description of Artificial Sequence: Synthetic oligonucleotide
aggaccaacgguuggugau

SEQ ID NO: 395831 - RNA, 19 nt, Artificial Sequence
  Description of Artificial Sequence: Synthetic oligonucleotide
acaaccaacuuuucuccua

SEQ ID NO: 395832 - RNA, 19 nt, Artificial Sequence
  Description of Artificial Sequence: Synthetic oligonucleotide
agaauggugguagucuuau

SEQ ID NO: 395833 - RNA, 19 nt, Artificial Sequence
  Description of Artificial Sequence: Synthetic oligonucleotide
ggcggcgccguccugaagg

SEQ ID NO: 395834 - RNA, 19 nt, Artificial Sequence
  Description of Artificial Sequence: Synthetic oligonucleotide
aggggugaaggcugacuag

SEQ ID NO: 395835 - RNA, 19 nt, Artificial Sequence
  Description of Artificial Sequence: Synthetic oligonucleotide
uaacacccauggcaagaug

SEQ ID NO: 395836 - RNA, 19 nt, Artificial Sequence
  Description of Artificial Sequence: Synthetic oligonucleotide
cacuagcucagauguggag

SEQ ID NO: 395837 - RNA, 19 nt, Artificial Sequence
  Description of Artificial Sequence: Synthetic oligonucleotide
ucccgcuaggagaucuugc

SEQ ID NO: 395838 - RNA, 19 nt, Artificial Sequence
  Description of Artificial Sequence: Synthetic oligonucleotide
agcguaagccccgagucug

SEQ ID NO: 395839 - RNA, 19 nt, Artificial Sequence
  Description of Artificial Sequence: Synthetic oligonucleotide
ucuugcaguugcuccgaga

SEQ ID NO: 395840 - RNA, 19 nt, Artificial Sequence
  Description of Artificial Sequence: Synthetic oligonucleotide
guagccaagucuuccugca

SEQ ID NO: 395841 - RNA, 19 nt, Artificial Sequence
  Description of Artificial Sequence: Synthetic oligonucleotide
uaagacuguugcccuugcu

SEQ ID NO: 395842 - RNA, 19 nt, Artificial Sequence
  Description of Artificial Sequence: Synthetic oligonucleotide
gcugacuagaacagauugg

SEQ ID NO: 395843 - RNA, 19 nt, Artificial Sequence
  Description of Artificial Sequence: Synthetic oligonucleotide
uagaauggugguagucuua

SEQ ID NO: 395844 - RNA, 19 nt, Artificial Sequence
  Description of Artificial Sequence: Synthetic oligonucleotide
ggaggaauaguccauggcu

SEQ ID NO: 395845 - RNA, 19 nt, Artificial Sequence
  Description of Artificial Sequence: Synthetic oligonucleotide
ggaaagcccggagagaccc

SEQ ID NO: 395846 - RNA, 19 nt, Artificial Sequence
  Description of Artificial Sequence: Synthetic oligonucleotide
cagccgguuuccaaccagg

SEQ ID NO: 395847 - RNA, 19 nt, Artificial Sequence
  Description of Artificial Sequence: Synthetic oligonucleotide
gcccucguaacacccaugg

SEQ ID NO: 395848 - RNA, 19 nt, Artificial Sequence
  Description of Artificial Sequence: Synthetic oligonucleotide
ucguaacacccauggcaag

SEQ ID NO: 395849 - RNA, 19 nt, Artificial Sequence
  Description of Artificial Sequence: Synthetic oligonucleotide
uggugacagguaguggaag

SEQ ID NO: 395850 - RNA, 19 nt, Artificial Sequence
  Description of Artificial Sequence: Synthetic oligonucleotide
agcauacugaccaccuuug

SEQ ID NO: 395851 - RNA, 19 nt, Artificial Sequence
  Description of Artificial Sequence: Synthetic oligonucleotide
agaacccaggaauggugga

SEQ ID NO: 395852 - RNA, 19 nt, Artificial Sequence
  Description of Artificial Sequence: Synthetic oligonucleotide
ggugaugcuugauuguauc

SEQ ID NO: 395853 - RNA, 19 nt, Artificial Sequence
  Description of Artificial Sequence: Synthetic oligonucleotide
aagggccacaauaggcaag

SEQ ID NO: 395854 - RNA, 19 nt, Artificial Sequence
  Description of Artificial Sequence: Synthetic oligonucleotide
uaggcguauggggacucgg

SEQ ID NO: 395855 - RNA, 19 nt, Artificial Sequence
  Description of Artificial Sequence: Synthetic oligonucleotide
aucaacaggcaaagacagg

SEQ ID NO: 395856 - RNA, 19 nt, Artificial Sequence
  Description of Artificial Sequence: Synthetic oligonucleotide
gcuccguugggacuugccg

SEQ ID NO: 395857 - RNA, 19 nt, Artificial Sequence
  Description of Artificial Sequence: Synthetic oligonucleotide
cucaucgauuuccuugauc

SEQ ID NO: 395858 - RNA, 19 nt, Artificial Sequence
  Description of Artificial Sequence: Synthetic oligonucleotide
ggcugaaaacucgauuggg

SEQ ID NO: 395859 - RNA, 19 nt, Artificial Sequence
  Description of Artificial Sequence: Synthetic oligonucleotide
ugucuagcauacugaccac

SEQ ID NO: 395860 - RNA, 19 nt, Artificial Sequence
  Description of Artificial Sequence: Synthetic oligonucleotide
gucugaacaggcggaaccc

SEQ ID NO: 395861 - RNA, 19 nt, Artificial Sequence
  Description of Artificial Sequence: Synthetic oligonucleotide
acagaacccuugccuaugu

SEQ ID NO: 395862 - RNA, 19 nt, Artificial Sequence
  Description of Artificial Sequence: Synthetic oligonucleotide
ucgauugggccuccagauc

SEQ ID NO: 395863 - RNA, 19 nt, Artificial Sequence
  Description of Artificial Sequence: Synthetic oligonucleotide
aguugcuccgagaacaguu

SEQ ID NO: 395864 - RNA, 19 nt, Artificial Sequence
  Description of Artificial Sequence: Synthetic oligonucleotide
gucuagcauacugaccacc

SEQ ID NO: 395865 - RNA, 19 nt, Artificial Sequence
  Description of Artificial Sequence: Synthetic oligonucleotide
accuaaucucccagaacag

SEQ ID NO: 395866 - RNA, 19 nt, Artificial Sequence
  Description of Artificial Sequence: Synthetic oligonucleotide
uugcaguugcuccgagaac

SEQ ID NO: 395867 - RNA, 19 nt, Artificial Sequence
  Description of Artificial Sequence: Synthetic oligonucleotide
ccucguaacacccauggca

SEQ ID NO: 395868 - RNA, 19 nt, Artificial Sequence
  Description of Artificial Sequence: Synthetic oligonucleotide
gagguccuaggcccugugc

SEQ ID NO: 395869 - RNA, 19 nt, Artificial Sequence
  Description of Artificial Sequence: Synthetic oligonucleotide
agcucaguaaaggacucaa

SEQ ID NO: 395870 - RNA, 19 nt, Artificial Sequence
  Description of Artificial Sequence: Synthetic oligonucleotide
uaagcaccagcgugccuga

SEQ ID NO: 395871 - RNA, 19 nt, Artificial Sequence
  Description of Artificial Sequence: Synthetic oligonucleotide
auggggacucggcggcgcc

SEQ ID NO: 395872 - RNA, 19 nt, Artificial Sequence
  Description of Artificial Sequence: Synthetic oligonucleotide
ucucugcguaggcucgggc

SEQ ID NO: 395873 - RNA, 19 nt, Artificial Sequence
  Description of Artificial Sequence: Synthetic oligonucleotide
guggaggaaagcccggaga

SEQ ID NO: 395874 - RNA, 19 nt, Artificial Sequence
  Description of Artificial Sequence: Synthetic oligonucleotide
agcuugacgcgccuuccgu

SEQ ID NO: 395875 - RNA, 19 nt, Artificial Sequence
  Description of Artificial Sequence: Synthetic oligonucleotide
caauuccguugcuguaggc

SEQ ID NO: 395876 - RNA, 19 nt, Artificial Sequence
  Description of Artificial Sequence: Synthetic oligonucleotide
aggcguauggggacucggc

SEQ ID NO: 395877 - RNA, 19 nt, Artificial Sequence
  Description of Artificial Sequence: Synthetic oligonucleotide
ccuacaggcauuaaccuaa

SEQ ID NO: 395878 - RNA, 19 nt, Artificial Sequence
  Description of Artificial Sequence: Synthetic oligonucleotide
agggaguaggaucggccgu

SEQ ID NO: 395879 - RNA, 19 nt, Artificial Sequence
  Description of Artificial Sequence: Synthetic oligonucleotide
cccggagagacccaggcag

SEQ ID NO: 395880 - RNA, 19 nt, Artificial Sequence
  Description of Artificial Sequence: Synthetic oligonucleotide
gcguauggggacucggcgg

SEQ ID NO: 395881 - RNA, 19 nt, Artificial Sequence
  Description of Artificial Sequence: Synthetic oligonucleotide
ugcgcaccccucgaguaag

SEQ ID NO: 395882 - RNA, 19 nt, Artificial Sequence
  Description of Artificial Sequence: Synthetic oligonucleotide
acgagagagcucaguaaag

SEQ ID NO: 395883 - RNA, 19 nt, Artificial Sequence
  Description of Artificial Sequence: Synthetic oligonucleotide
ccaauccagguccucaaag

SEQ ID NO: 395884 - RNA, 19 nt, Artificial Sequence
  Description of Artificial Sequence: Synthetic oligonucleotide
cuugccgcuugaaggccag

SEQ ID NO: 395885 - RNA, 19 nt, Artificial Sequence
  Description of Artificial Sequence: Synthetic oligonucleotide
cgcauaagcacgauacgag

SEQ ID NO: 395886 - RNA, 19 nt, Artificial Sequence
  Description of Artificial Sequence: Synthetic oligonucleotide
auaaggggagccaggcuca

SEQ ID NO: 395887 - RNA, 19 nt, Artificial Sequence
  Description of Artificial Sequence: Synthetic oligonucleotide
uacaggcauuaaccuaauc

SEQ ID NO: 395888 - RNA, 19 nt, Artificial Sequence
  Description of Artificial Sequence: Synthetic oligonucleotide
ggucucuaucaacagcaac

SEQ ID NO: 395889 - RNA, 19 nt, Artificial Sequence
  Description of Artificial Sequence: Synthetic oligonucleotide
uuggaccucuuaagacugu

SEQ ID NO: 395890 - RNA, 19 nt, Artificial Sequence
  Description of Artificial Sequence: Synthetic oligonucleotide
ccuaugucuagcauacuga

SEQ ID NO: 395891 - RNA, 19 nt, Artificial Sequence
  Description of Artificial Sequence: Synthetic oligonucleotide
guaaaauguucuccauaua

SEQ ID NO: 395892 - RNA, 19 nt, Artificial Sequence
  Description of Artificial Sequence: Synthetic oligonucleotide
caucaacacccaggaaggg

SEQ ID NO: 395893 - RNA, 19 nt, Artificial Sequence
  Description of Artificial Sequence: Synthetic oligonucleotide
uucucugcguaggcucggg

SEQ ID NO: 395894 - RNA, 19 nt, Artificial Sequence
  Description of Artificial Sequence: Synthetic oligonucleotide
agucuacaccauucuacua

SEQ ID NO: 395895 - RNA, 19 nt, Artificial Sequence
  Description of Artificial Sequence: Synthetic oligonucleotide
ggacucaaugacguugaag

SEQ ID NO: 395896 - RNA, 19 nt, Artificial Sequence
  Description of Artificial Sequence: Synthetic oligonucleotide
aacgguuggugaugucaua

SEQ ID NO: 395897 - RNA, 19 nt, Artificial Sequence
  Description of Artificial Sequence: Synthetic oligonucleotide
acaauggggagggaugcaa

SEQ ID NO: 395898 - RNA, 19 nt, Artificial Sequence
  Description of Artificial Sequence: Synthetic oligonucleotide
ggugguagucuuauaguca

SEQ ID NO: 395899 - RNA, 19 nt, Artificial Sequence
  Description of Artificial Sequence: Synthetic oligonucleotide
caacauccccacaggggug

SEQ ID NO: 395900 - RNA, 19 nt, Artificial Sequence
  Description of Artificial Sequence: Synthetic oligonucleotide
cuggccggauguaucccag

SEQ ID NO: 395901 - RNA, 19 nt, Artificial Sequence
  Description of Artificial Sequence: Synthetic oligonucleotide
gaucucgcccuugcccacg

SEQ ID NO: 395902 - RNA, 19 nt, Artificial Sequence
  Description of Artificial Sequence: Synthetic oligonucleotide
guugcuccgagaacaguuc

SEQ ID NO: 395903 - RNA, 19 nt, Artificial Sequence
  Description of Artificial Sequence: Synthetic oligonucleotide
ugauuguauccagccucug

SEQ ID NO: 395904 - RNA, 19 nt, Artificial Sequence
  Description of Artificial Sequence: Synthetic oligonucleotide
gugcagccgguuuccaacc

SEQ ID NO: 395905 - RNA, 19 nt, Artificial Sequence
  Description of Artificial Sequence: Synthetic oligonucleotide
ccgcuugaaggccaggugc

SEQ ID NO: 395906 - RNA, 19 nt, Artificial Sequence
  Description of Artificial Sequence: Synthetic oligonucleotide
gacagcguucaugccguug

SEQ ID NO: 395907 - RNA, 19 nt, Artificial Sequence
  Description of Artificial Sequence: Synthetic oligonucleotide
uccguggagcauguuuucu

SEQ ID NO: 395908 - RNA, 19 nt, Artificial Sequence
  Description of Artificial Sequence: Synthetic oligonucleotide
auccggggaacaccaggug

SEQ ID NO: 395909 - RNA, 19 nt, Artificial Sequence
  Description of Artificial Sequence: Synthetic oligonucleotide
ggccggauguaucccagag

SEQ ID NO: 395910 - RNA, 19 nt, Artificial Sequence
  Description of Artificial Sequence: Synthetic oligonucleotide
guccccguagcaccagcag

SEQ ID NO: 395911 - RNA, 19 nt, Artificial Sequence
  Description of Artificial Sequence: Synthetic oligonucleotide
uugacgcgccuuccgucca

SEQ ID NO: 395912 - RNA, 19 nt, Artificial Sequence
  Description of Artificial Sequence: Synthetic oligonucleotide
ccuaaucucccagaacagc

SEQ ID NO: 395913 - RNA, 19 nt, Artificial Sequence
  Description of Artificial Sequence: Synthetic oligonucleotide
cuauggccaaagcccugag

SEQ ID NO: 395914 - RNA, 19 nt, Artificial Sequence
  Description of Artificial Sequence: Synthetic oligonucleotide
gcuagugggucccuaacaa

SEQ ID NO: 395915 - RNA, 19 nt, Artificial Sequence
  Description of Artificial Sequence: Synthetic oligonucleotide
aucggccgugcaucaugac

SEQ ID NO: 395916 - RNA, 19 nt, Artificial Sequence
  Description of Artificial Sequence: Synthetic oligonucleotide
gccgcauaagcacgauacg

SEQ ID NO: 395917 - RNA, 19 nt, Artificial Sequence
  Description of Artificial Sequence: Synthetic oligonucleotide
caucgauuuccuugaucca

SEQ ID NO: 395918 - RNA, 19 nt, Artificial Sequence
  Description of Artificial Sequence: Synthetic oligonucleotide
agaacagauugggguagga

SEQ ID NO: 395919 - RNA, 19 nt, Artificial Sequence
  Description of Artificial Sequence: Synthetic oligonucleotide
ugcccucguaacacccaug

SEQ ID NO: 395920 - RNA, 19 nt, Artificial Sequence
  Description of Artificial Sequence: Synthetic oligonucleotide
ggaucggccgugcaucaug

SEQ ID NO: 395921 - RNA, 19 nt, Artificial Sequence
  Description of Artificial Sequence: Synthetic oligonucleotide
ugacgcgccuuccguccag

SEQ ID NO: 395922 - RNA, 19 nt, Artificial Sequence
  Description of Artificial Sequence: Synthetic oligonucleotide
caauaggcaaggagcagcu

SEQ ID NO: 395923 - RNA, 19 nt, Artificial Sequence
  Description of Artificial Sequence: Synthetic oligonucleotide
ccguuggccauggaaaagg

SEQ ID NO: 395924 - RNA, 19 nt, Artificial Sequence
  Description of Artificial Sequence: Synthetic oligonucleotide
guaagccccgagucugaac

SEQ ID NO: 395925 - RNA, 19 nt, Artificial Sequence
  Description of Artificial Sequence: Synthetic oligonucleotide
agacaauggcacggcagca

SEQ ID NO: 395926 - RNA, 19 nt, Artificial Sequence
  Description of Artificial Sequence: Synthetic oligonucleotide
uuccguugcuguaggcgua

SEQ ID NO: 395927 - RNA, 19 nt, Artificial Sequence
  Description of Artificial Sequence: Synthetic oligonucleotide
gaacccacaggucccgcua

SEQ ID NO: 395928 - RNA, 19 nt, Artificial Sequence
  Description of Artificial Sequence: Synthetic oligonucleotide
guagaauggugguagucuu

SEQ ID NO: 395929 - RNA, 19 nt, Artificial Sequence
  Description of Artificial Sequence: Synthetic oligonucleotide
gaucggccgugcaucauga

SEQ ID NO: 395930 - RNA, 19 nt, Artificial Sequence
  Description of Artificial Sequence: Synthetic oligonucleotide
gagucugaacaggcggaac

SEQ ID NO: 395931 - RNA, 19 nt, Artificial Sequence
  Description of Artificial Sequence: Synthetic oligonucleotide
uggacgcugcagccaaguc

SEQ ID NO: 395932 - RNA, 19 nt, Artificial Sequence
  Description of Artificial Sequence: Synthetic oligonucleotide
uuccguccaguagaauggu

SEQ ID NO: 395933 - RNA, 19 nt, Artificial Sequence
  Description of Artificial Sequence: Synthetic oligonucleotide
cuccuaggccucaggaaca

SEQ ID NO: 395934 - RNA, 19 nt, Artificial Sequence
  Description of Artificial Sequence: Synthetic oligonucleotide
ccagcguaagccccgaguc

SEQ ID NO: 395935 - RNA, 19 nt, Artificial Sequence
  Description of Artificial Sequence: Synthetic oligonucleotide
ucccugcgcaccccucgag

SEQ ID NO: 395936 - RNA, 19 nt, Artificial Sequence
  Description of Artificial Sequence: Synthetic oligonucleotide
gguucagaccugguccccg

SEQ ID NO: 395937 - RNA, 19 nt, Artificial Sequence
  Description of Artificial Sequence: Synthetic oligonucleotide
caugagugcuccagcguaa

SEQ ID NO: 395938 - RNA, 19 nt, Artificial Sequence
  Description of Artificial Sequence: Synthetic oligonucleotide
gcguucaugccguuggcca

SEQ ID NO: 395939 - RNA, 19 nt, Artificial Sequence
  Description of Artificial Sequence: Synthetic oligonucleotide
cggccgugcaucaugacag

SEQ ID NO: 395940 - RNA, 19 nt, Artificial Sequence
  Description of Artificial Sequence: Synthetic oligonucleotide
gcagcaaggguaguguuga

SEQ ID NO: 395941 - RNA, 19 nt, Artificial Sequence
  Description of Artificial Sequence: Synthetic oligonucleotide
gauguggcuaugaggggua

SEQ ID NO: 395942 - RNA, 19 nt, Artificial Sequence
  Description of Artificial Sequence: Synthetic oligonucleotide
guuguguagccaagucuuc

SEQ ID NO: 395943 - RNA, 19 nt, Artificial Sequence
  Description of Artificial Sequence: Synthetic oligonucleotide
gugcacgcaggccaaucca

SEQ ID NO: 395944 - RNA, 19 nt, Artificial Sequence
  Description of Artificial Sequence: Synthetic oligonucleotide
cccaguaaggggucauggc

SEQ ID NO: 395945 - RNA, 19 nt, Artificial Sequence
  Description of Artificial Sequence: Synthetic oligonucleotide
guaggcguauggggacucg

SEQ ID NO: 395946 - RNA, 19 nt, Artificial Sequence
  Description of Artificial Sequence: Synthetic oligonucleotide
gcauuacggaggaauaguc

SEQ ID NO: 395947 - RNA, 19 nt, Artificial Sequence
  Description of Artificial Sequence: Synthetic oligonucleotide
caaugccaucaaaggacca

SEQ ID NO: 395948 - RNA, 19 nt, Artificial Sequence
  Description of Artificial Sequence: Synthetic oligonucleotide
ggcggauggacuuggaccu

SEQ ID NO: 395949 - RNA, 19 nt, Artificial Sequence
  Description of Artificial Sequence: Synthetic oligonucleotide
auggacgcugcagccaagu

SEQ ID NO: 395950 - RNA, 19 nt, Artificial Sequence
  Description of Artificial Sequence: Synthetic oligonucleotide
gauccggggaacaccaggu

SEQ ID NO: 395951 - RNA, 19 nt, Artificial Sequence
  Description of Artificial Sequence: Synthetic oligonucleotide
gccaugccgcauaagcacg

SEQ ID NO: 395952 - RNA, 19 nt, Artificial Sequence
  Description of Artificial Sequence: Synthetic oligonucleotide
guugggacuugccgcuuga

SEQ ID NO: 395953 - RNA, 19 nt, Artificial Sequence
  Description of Artificial Sequence: Synthetic oligonucleotide
ccgagaacaguucugaggu

SEQ ID NO: 395954 - RNA, 19 nt, Artificial Sequence
  Description of Artificial Sequence: Synthetic oligonucleotide
aacggcugauguggcuaug

SEQ ID NO: 395955 - RNA, 19 nt, Artificial Sequence
  Description of Artificial Sequence: Synthetic oligonucleotide
uucagaccugguccccgua

SEQ ID NO: 395956 - RNA, 19 nt, Artificial Sequence
  Description of Artificial Sequence: Synthetic oligonucleotide
agguagaguuaagcaccag

SEQ ID NO: 395957 - RNA, 19 nt, Artificial Sequence
  Description of Artificial Sequence: Synthetic oligonucleotide
ggaauaguccauggcuuca

SEQ ID NO: 395958 - RNA, 19 nt, Artificial Sequence
  Description of Artificial Sequence: Synthetic oligonucleotide
uggccggauguaucccaga

SEQ ID NO: 395959 - RNA, 19 nt, Artificial Sequence
  Description of Artificial Sequence: Synthetic oligonucleotide
guggcuaugagggguauau

SEQ ID NO: 395960 - RNA, 19 nt, Artificial Sequence
  Description of Artificial Sequence: Synthetic oligonucleotide
guauggggacucggcggcg

SEQ ID NO: 395961 - RNA, 19 nt, Artificial Sequence
  Description of Artificial Sequence: Synthetic oligonucleotide
gcgccuuccguccaguaga

SEQ ID NO: 395962 - RNA, 19 nt, Artificial Sequence
  Description of Artificial Sequence: Synthetic oligonucleotide
uggggacucggcggcgccg

SEQ ID NO: 395963 - RNA, 19 nt, Artificial Sequence
  Description of Artificial Sequence: Synthetic oligonucleotide
gguuguguagccaagucuu

SEQ ID NO: 395964 - RNA, 19 nt, Artificial Sequence
  Description of Artificial Sequence: Synthetic oligonucleotide
guccguggagcauguuuuc

SEQ ID NO: 395965 - RNA, 19 nt, Artificial Sequence
  Description of Artificial Sequence: Synthetic oligonucleotide
gaauggugguagucuuaua

SEQ ID NO: 395966 - RNA, 19 nt, Artificial Sequence
  Description of Artificial Sequence: Synthetic oligonucleotide
gccggauguaucccagagc

SEQ ID NO: 395967 - RNA, 19 nt, Artificial Sequence
  Description of Artificial Sequence: Synthetic oligonucleotide
cguauggggacucggcggc

SEQ ID NO: 395968 - RNA, 19 nt, Artificial Sequence
  Description of Artificial Sequence: Synthetic oligonucleotide
gaguaggaucggccgugca

SEQ ID NO: 395969 - RNA, 19 nt, Artificial Sequence
  Description of Artificial Sequence: Synthetic oligonucleotide
ggguuguguagccaagucu

SEQ ID NO: 395970 - RNA, 19 nt, Artificial Sequence
  Description of Artificial Sequence: Synthetic oligonucleotide
caaccaggauccggggaac

SEQ ID NO: 395971 - RNA, 19 nt, Artificial Sequence
  Description of Artificial Sequence: Synthetic oligonucleotide
gggaguaggaucggccgug

SEQ ID NO: 395972 - RNA, 19 nt, Artificial Sequence
  Description of Artificial Sequence: Synthetic oligonucleotide
ggacgcugcagccaagucu

SEQ ID NO: 395973 - RNA, 19 nt, Artificial Sequence
  Description of Artificial Sequence: Synthetic oligonucleotide
augccgcauaagcacgaua

SEQ ID NO: 395974 - RNA, 19 nt, Artificial Sequence
  Description of Artificial Sequence: Synthetic oligonucleotide
gugcuccagcguaagcccc

SEQ ID NO: 395975 - RNA, 19 nt, Artificial Sequence
  Description of Artificial Sequence: Synthetic oligonucleotide
aaacucgauugggccucca

SEQ ID NO: 395976 - RNA, 19 nt, Artificial Sequence
  Description of Artificial Sequence: Synthetic oligonucleotide
gucccgcuaggagaucuug

SEQ ID NO: 395977 - RNA, 19 nt, Artificial Sequence
  Description of Artificial Sequence: Synthetic oligonucleotide
uguugcccuugcugccacu

SEQ ID NO: 395978 - RNA, 19 nt, Artificial Sequence
  Description of Artificial Sequence: Synthetic oligonucleotide
ccaacgguuggugauguca

SEQ ID NO: 395979 - RNA, 19 nt, Artificial Sequence
  Description of Artificial Sequence: Synthetic oligonucleotide
caacgguuggugaugucau

SEQ ID NO: 395980 - RNA, 19 nt, Artificial Sequence
  Description of Artificial Sequence: Synthetic oligonucleotide
uccaccggucaaugccauc

SEQ ID NO: 395981 - RNA, 19 nt, Artificial Sequence
  Description of Artificial Sequence: Synthetic oligonucleotide
gcacgcaggccaauccagg

SEQ ID NO: 395982 - RNA, 19 nt, Artificial Sequence
  Description of Artificial Sequence: Synthetic oligonucleotide
cucgaguaagacagauggu

SEQ ID NO: 395983 - RNA, 19 nt, Artificial Sequence
  Description of Artificial Sequence: Synthetic oligonucleotide
agccgguuuccaaccagga

SEQ ID NO: 395984 - RNA, 19 nt, Artificial Sequence
  Description of Artificial Sequence: Synthetic oligonucleotide
ggcggaacccacagguccc

SEQ ID NO: 395985 - RNA, 19 nt, Artificial Sequence
  Description of Artificial Sequence: Synthetic oligonucleotide
cugccugguccguggagca

SEQ ID NO: 395986 - RNA, 19 nt, Artificial Sequence
  Description of Artificial Sequence: Synthetic oligonucleotide
guaacacccauggcaagau

SEQ ID NO: 395987 - RNA, 19 nt, Artificial Sequence
  Description of Artificial Sequence: Synthetic oligonucleotide
guggagcauguuuucuccu

SEQ ID NO: 395988 - RNA, 19 nt, Artificial Sequence
  Description of Artificial Sequence: Synthetic oligonucleotide
gcuugacgcgccuuccguc

SEQ ID NO: 395989 - RNA, 19 nt, Artificial Sequence
  Description of Artificial Sequence: Synthetic oligonucleotide
cuccugcacgccccucccc

SEQ ID NO: 395990 - RNA, 19 nt, Artificial Sequence
  Description of Artificial Sequence: Synthetic oligonucleotide
gcaccccucgaguaagaca

SEQ ID NO: 395991 - RNA, 19 nt, Artificial Sequence
  Description of Artificial Sequence: Synthetic oligonucleotide
uggcuaugagggguauaua

SEQ ID NO: 395992 - RNA, 19 nt, Artificial Sequence
  Description of Artificial Sequence: Synthetic oligonucleotide
uagcucagauguggaggaa

SEQ ID NO: 395993 - RNA, 19 nt, Artificial Sequence
  Description of Artificial Sequence: Synthetic oligonucleotide
cccucgaguaagacagaug

SEQ ID NO: 395994 - RNA, 19 nt, Artificial Sequence
  Description of Artificial Sequence: Synthetic oligonucleotide
cacgucgcugucgcccacc

SEQ ID NO: 395995 - RNA, 19 nt, Artificial Sequence
  Description of Artificial Sequence: Synthetic oligonucleotide
caccauucuacuagagauu

SEQ ID NO: 395996 - RNA, 19 nt, Artificial Sequence
  Description of Artificial Sequence: Synthetic oligonucleotide
ggagggaugcaaguggggu

SEQ ID NO: 395997 - RNA, 19 nt, Artificial Sequence
  Description of Artificial Sequence: Synthetic oligonucleotide
ccuagugccuggccaugag

SEQ ID NO: 395998 - RNA, 19 nt, Artificial Sequence
  Description of Artificial Sequence: Synthetic oligonucleotide
aggucucuaucaacagcaa

SEQ ID NO: 395999 - RNA, 19 nt, Artificial Sequence
  Description of Artificial Sequence: Synthetic oligonucleotide
ccgcauaagcacgauacga

SEQ ID NO: 396000 - RNA, 19 nt, Artificial Sequence
  Description of Artificial Sequence: Synthetic oligonucleotide
ggggucauggcuccugcua

SEQ ID NO: 396001 - RNA, 19 nt, Artificial Sequence
  Description of Artificial Sequence: Synthetic oligonucleotide
gaaagcccggagagaccca

SEQ ID NO: 396002 - RNA, 19 nt, Artificial Sequence
  Description of Artificial Sequence: Synthetic oligonucleotide
gccguuggccauggaaaag

SEQ ID NO: 396003 - RNA, 19 nt, Artificial Sequence
  Description of Artificial Sequence: Synthetic oligonucleotide
cacuugccagggaguagga

SEQ ID NO: 396004 - RNA, 19 nt, Artificial Sequence
  Description of Artificial Sequence: Synthetic oligonucleotide
cuguaucaacaggcaaaga

SEQ ID NO: 396005 - RNA, 19 nt, Artificial Sequence
  Description of Artificial Sequence: Synthetic oligonucleotide
cacgcaggccaauccaggu

SEQ ID NO: 396006 - RNA, 19 nt, Artificial Sequence
  Description of Artificial Sequence: Synthetic oligonucleotide
gcuaggagaucuugcaguu

SEQ ID NO: 396007 - RNA, 19 nt, Artificial Sequence
  Description of Artificial Sequence: Synthetic oligonucleotide
ccaugagugcuccagcgua

SEQ ID NO: 396008 - RNA, 19 nt, Artificial Sequence
  Description of Artificial Sequence: Synthetic oligonucleotide
ggcgccguccugaaggcuc

SEQ ID NO: 396009 - RNA, 19 nt, Artificial Sequence
  Description of Artificial Sequence: Synthetic oligonucleotide
ccgagucugaacaggcgga

SEQ ID NO: 396010 - RNA, 19 nt, Artificial Sequence
  Description of Artificial Sequence: Synthetic oligonucleotide
cacuaagaaggaccccagu

SEQ ID NO: 396011 - RNA, 19 nt, Artificial Sequence
  Description of Artificial Sequence: Synthetic oligonucleotide
ggugcccauccucccgccc

SEQ ID NO: 396012 - RNA, 19 nt, Artificial Sequence
  Description of Artificial Sequence: Synthetic oligonucleotide
cacaauggggagggaugca

SEQ ID NO: 396013 - RNA, 19 nt, Artificial Sequence
  Description of Artificial Sequence: Synthetic oligonucleotide
cuccagcguaagccccgag

SEQ ID NO: 396014 - RNA, 19 nt, Artificial Sequence
  Description of Artificial Sequence: Synthetic oligonucleotide
guuaagcaccagcgugccu

SEQ ID NO: 396015 - RNA, 19 nt, Artificial Sequence
  Description of Artificial Sequence: Synthetic oligonucleotide
acgccccuccccuccacua

SEQ ID NO: 396016 - RNA, 19 nt, Artificial Sequence
  Description of Artificial Sequence: Synthetic oligonucleotide
agacccaggcaggguugug

SEQ ID NO: 396017 - RNA, 19 nt, Artificial Sequence
  Description of Artificial Sequence: Synthetic oligonucleotide
cauccucccgcccgccgca

SEQ ID NO: 396018 - RNA, 19 nt, Artificial Sequence
  Description of Artificial Sequence: Synthetic oligonucleotide
gcggaacccacaggucccg

SEQ ID NO: 396019 - RNA, 19 nt, Artificial Sequence
  Description of Artificial Sequence: Synthetic oligonucleotide
auguggcuaugagggguau

SEQ ID NO: 396020 - RNA, 19 nt, Artificial Sequence
  Description of Artificial Sequence: Synthetic oligonucleotide
ccauucuacuagagauuca

SEQ ID NO: 396021 - RNA, 19 nt, Artificial Sequence
  Description of Artificial Sequence: Synthetic oligonucleotide
ggaugcaagugggguuccc

SEQ ID NO: 396022 - RNA, 19 nt, Artificial Sequence
  Description of Artificial Sequence: Synthetic oligonucleotide
gcaggcugaaaacucgauu

SEQ ID NO: 396023 - RNA, 19 nt, Artificial Sequence
  Description of Artificial Sequence: Synthetic oligonucleotide
cugcgcaccccucgaguaa

SEQ ID NO: 396024 - RNA, 19 nt, Artificial Sequence
  Description of Artificial Sequence: Synthetic oligonucleotide
guggggaagggugaugcuu

SEQ ID NO: 396025 - RNA, 19 nt, Artificial Sequence
  Description of Artificial Sequence: Synthetic oligonucleotide
cccuacaggcauuaaccua

SEQ ID NO: 396026 - RNA, 19 nt, Artificial Sequence
  Description of Artificial Sequence: Synthetic oligonucleotide
cagcguaagccccgagucu

SEQ ID NO: 396027 - RNA, 19 nt, Artificial Sequence
  Description of Artificial Sequence: Synthetic oligonucleotide
cgauugggccuccagaucu

SEQ ID NO: 396028 - RNA, 19 nt, Artificial Sequence
  Description of Artificial Sequence: Synthetic oligonucleotide
auccaccggucaaugccau

SEQ ID NO: 396029 - RNA, 19 nt, Artificial Sequence
  Description of Artificial Sequence: Synthetic oligonucleotide
gugcccucguaacacccau

SEQ ID NO: 396030 - RNA, 19 nt, Artificial Sequence
  Description of Artificial Sequence: Synthetic oligonucleotide
ggaacccacaggucccgcu

SEQ ID NO: 396031 - RNA, 19 nt, Artificial Sequence
  Description of Artificial Sequence: Synthetic oligonucleotide
aggaucggccgugcaucau

SEQ ID NO: 396032 - RNA, 19 nt, Artificial Sequence
  Description of Artificial Sequence: Synthetic oligonucleotide
caacggcugauguggcuau

SEQ ID NO: 396033 - RNA, 19 nt, Artificial Sequence
  Description of Artificial Sequence: Synthetic oligonucleotide
caggguuguguagccaagu

SEQ ID NO: 396034 - RNA, 19 nt, Artificial Sequence
  Description of Artificial Sequence: Synthetic oligonucleotide
ccagcuagugggucccuaa

SEQ ID NO: 396035 - RNA, 19 nt, Artificial Sequence
  Description of Artificial Sequence: Synthetic oligonucleotide
caggccggcgcugugucua

SEQ ID NO: 396036 - RNA, 19 nt, Artificial Sequence
  Description of Artificial Sequence: Synthetic oligonucleotide
gcgcugugucuaccagugc

SEQ ID NO: 396037 - RNA, 19 nt, Artificial Sequence
  Description of Artificial Sequence: Synthetic oligonucleotide
gcacgauacgagagagcuc

SEQ ID NO: 396038 - RNA, 19 nt, Artificial Sequence
  Description of Artificial Sequence: Synthetic oligonucleotide
ccaacggcugauguggcua

SEQ ID NO: 396039 - RNA, 19 nt, Artificial Sequence
  Description of Artificial Sequence: Synthetic oligonucleotide
ccggcgcugugucuaccag

SEQ ID NO: 396040 - RNA, 19 nt, Artificial Sequence
  Description of Artificial Sequence: Synthetic oligonucleotide
cguugggacuugccgcuug

SEQ ID NO: 396041 - RNA, 19 nt, Artificial Sequence
  Description of Artificial Sequence: Synthetic oligonucleotide
acgcgccuuccguccagua

SEQ ID NO: 396042 - RNA, 19 nt, Artificial Sequence
  Description of Artificial Sequence: Synthetic oligonucleotide
cuguaggcguauggggacu

SEQ ID NO: 396043 - RNA, 19 nt, Artificial Sequence
  Description of Artificial Sequence: Synthetic oligonucleotide
gggucccuaacaaggggcu

SEQ ID NO: 396044 - RNA, 19 nt, Artificial Sequence
  Description of Artificial Sequence: Synthetic oligonucleotide
accccucgaguaagacaga

SEQ ID NO: 396045 - RNA, 19 nt, Artificial Sequence
  Description of Artificial Sequence: Synthetic oligonucleotide
cggauguaucccagagcuc

SEQ ID NO: 396046 - RNA, 19 nt, Artificial Sequence
  Description of Artificial Sequence: Synthetic oligonucleotide
ccugcgcaccccucgagua

SEQ ID NO: 396047 - RNA, 19 nt, Artificial Sequence
  Description of Artificial Sequence: Synthetic oligonucleotide
ggacauccacuggggacaa

SEQ ID NO: 396048 - RNA, 19 nt, Artificial Sequence
  Description of Artificial Sequence: Synthetic oligonucleotide
gacgcgccuuccguccagu

SEQ ID NO: 396049 - RNA, 19 nt, Artificial Sequence
  Description of Artificial Sequence: Synthetic oligonucleotide
cgugcaucaugacagcguu

SEQ ID NO: 396050 - RNA, 19 nt, Artificial Sequence
  Description of Artificial Sequence: Synthetic oligonucleotide
gcguaagccccgagucuga

SEQ ID NO: 396051 - RNA, 19 nt, Artificial Sequence
  Description of Artificial Sequence: Synthetic oligonucleotide
ccgccagaucucagccuuc

SEQ ID NO: 396052 - RNA, 19 nt, Artificial Sequence
  Description of Artificial Sequence: Synthetic oligonucleotide
cguaggcucgggccugcuc

SEQ ID NO: 396053 - RNA, 19 nt, Artificial Sequence
  Description of Artificial Sequence: Synthetic oligonucleotide
gcggauggacuuggaccuc

SEQ ID NO: 396054 - RNA, 19 nt, Artificial Sequence
  Description of Artificial Sequence: Synthetic oligonucleotide
cgcaccccucgaguaagac

SEQ ID NO: 396055 - RNA, 19 nt, Artificial Sequence
  Description of Artificial Sequence: Synthetic oligonucleotide
cacggcgccgccgccagau

SEQ ID NO: 396056 - RNA, 19 nt, Artificial Sequence
  Description of Artificial Sequence: Synthetic oligonucleotide
ccuugauccaccggucaau

SEQ ID NO: 396057 - RNA, 19 nt, Artificial Sequence
  Description of Artificial Sequence: Synthetic oligonucleotide
cgagucugaacaggcggaa

SEQ ID NO: 396058 - RNA, 19 nt, Artificial Sequence
  Description of Artificial Sequence: Synthetic oligonucleotide
ccguugcuguaggcguaug

SEQ ID NO: 396059 - RNA, 19 nt, Artificial Sequence
  Description of Artificial Sequence: Synthetic oligonucleotide
ccacgucgcugucgcccac

SEQ ID NO: 396060 - RNA, 19 nt, Artificial Sequence
  Description of Artificial Sequence: Synthetic oligonucleotide
ccuaggccucaggaacaga

SEQ ID NO: 396061 - RNA, 19 nt, Artificial Sequence
  Description of Artificial Sequence: Synthetic oligonucleotide
ggucccuaacaaggggcuu

SEQ ID NO: 396062 - RNA, 19 nt, Artificial Sequence
  Description of Artificial Sequence: Synthetic oligonucleotide
cgccuuccguccaguagaa

SEQ ID NO: 396063 - RNA, 19 nt, Artificial Sequence
  Description of Artificial Sequence: Synthetic oligonucleotide
ccgcaccgcggcccacggc

SEQ ID NO: 396064 - RNA, 19 nt, Artificial Sequence
  Description of Artificial Sequence: Synthetic oligonucleotide
cccugcgcaccccucgagu

SEQ ID NO: 396065 - RNA, 19 nt, Artificial Sequence
  Description of Artificial Sequence: Synthetic oligonucleotide
gcgcaccccucgaguaaga

SEQ ID NO: 396066 - RNA, 19 nt, Artificial Sequence
  Description of Artificial Sequence: Synthetic oligonucleotide
gcaggccggcgcugugucu

SEQ ID NO: 396067 - RNA, 19 nt, Artificial Sequence
  Description of Artificial Sequence: Synthetic oligonucleotide
gcgccguccugaaggcucu

SEQ ID NO: 396068 - RNA, 19 nt, Artificial Sequence
  Description of Artificial Sequence: Synthetic oligonucleotide
ggucccgcuaggagaucuu

SEQ ID NO: 396069 - RNA, 19 nt, Artificial Sequence
  Description of Artificial Sequence: Synthetic oligonucleotide
gccuuccguccaguagaau

SEQ ID NO: 396070 - RNA, 19 nt, Artificial Sequence
  Description of Artificial Sequence: Synthetic oligonucleotide
cccuaacaaggggcuugau

SEQ ID NO: 396071 - RNA, 19 nt, Artificial Sequence
  Description of Artificial Sequence: Synthetic oligonucleotide
ccguugggacuugccgcuu

SEQ ID NO: 396072 - RNA, 19 nt, Artificial Sequence
  Description of Artificial Sequence: Synthetic oligonucleotide
cggcgccguccugaaggcu

SEQ ID NO: 396073 - RNA, 19 nt, Artificial Sequence
  Description of Artificial Sequence: Synthetic oligonucleotide
aaauuacugaaacuggccc

SEQ ID NO: 396074 - RNA, 19 nt, Artificial Sequence
  Description of Artificial Sequence: Synthetic oligonucleotide
aagaguuaaaucguggugg

SEQ ID NO: 396075 - RNA, 19 nt, Artificial Sequence
  Description of Artificial Sequence: Synthetic oligonucleotide
uaagcugccaucaaguuca

SEQ ID NO: 396076 - RNA, 19 nt, Artificial Sequence
  Description of Artificial Sequence: Synthetic oligonucleotide
ucuuugaucaucuaaucug

SEQ ID NO: 396077 - RNA, 19 nt, Artificial Sequence
  Description of Artificial Sequence: Synthetic oligonucleotide
ugaucaucuaaucuggacc

SEQ ID NO: 396078 - RNA, 19 nt, Artificial Sequence
  Description of Artificial Sequence: Synthetic oligonucleotide
aauuauuugugcuguagcu

SEQ ID NO: 396079 - RNA, 19 nt, Artificial Sequence
  Description of Artificial Sequence: Synthetic oligonucleotide
ugagcaauugcuaagugcu

SEQ ID NO: 396080 - RNA, 19 nt, Artificial Sequence
  Description of Artificial Sequence: Synthetic oligonucleotide
ugagcuggcaagaagaucu

SEQ ID NO: 396081 - RNA, 19 nt, Artificial Sequence
  Description of Artificial Sequence: Synthetic oligonucleotide
uugagagcguaaaauaagg

SEQ ID NO: 396082 - RNA, 19 nt, Artificial Sequence
  Description of Artificial Sequence: Synthetic oligonucleotide
uucuuuuagcuugagagcg

SEQ ID NO: 396083 - RNA, 19 nt, Artificial Sequence
  Description of Artificial Sequence: Synthetic oligonucleotide
uuccuaaacuccaacaugc

SEQ ID NO: 396084 - RNA, 19 nt, Artificial Sequence
  Description of Artificial Sequence: Synthetic oligonucleotide
uuuacauaggacauuuaca

SEQ ID NO: 396085 - RNA, 19 nt, Artificial Sequence
  Description of Artificial Sequence: Synthetic oligonucleotide
uugaaaucgccuuaguaag

SEQ ID NO: 396086 - RNA, 19 nt, Artificial Sequence
  Description of Artificial Sequence: Synthetic oligonucleotide
uauucuaacgcuuuggcau

SEQ ID NO: 396087 - RNA, 19 nt, Artificial Sequence
  Description of Artificial Sequence: Synthetic oligonucleotide
aaggaaucuauaccacagc

SEQ ID NO: 396088 - RNA, 19 nt, Artificial Sequence
  Description of Artificial Sequence: Synthetic oligonucleotide
aucgugaagaacuuuagug

SEQ ID NO: 396089 - RNA, 19 nt, Artificial Sequence
  Description of Artificial Sequence: Synthetic oligonucleotide
uguucgugagcuaugacug

SEQ ID NO: 396090 - RNA, 19 nt, Artificial Sequence
  Description of Artificial Sequence: Synthetic oligonucleotide
ucauguaaguagaaguaag

SEQ ID NO: 396091 - RNA, 19 nt, Artificial Sequence
  Description of Artificial Sequence: Synthetic oligonucleotide
uuuccaagauuguagagug

SEQ ID NO: 396092 - RNA, 19 nt, Artificial Sequence
  Description of Artificial Sequence: Synthetic oligonucleotide
gaaucuauaccacagcuuc

SEQ ID NO: 396093 - RNA, 19 nt, Artificial Sequence
  Description of Artificial Sequence: Synthetic oligonucleotide
cuuugaucaucuaaucugg

SEQ ID NO: 396094 - RNA, 19 nt, Artificial Sequence
  Description of Artificial Sequence: Synthetic oligonucleotide
uguagcgaaacaugaaaag

SEQ ID NO: 396095 - RNA, 19 nt, Artificial Sequence
  Description of Artificial Sequence: Synthetic oligonucleotide
uuauuugugcuguagcuca

SEQ ID NO: 396096 - RNA, 19 nt, Artificial Sequence
  Description of Artificial Sequence: Synthetic oligonucleotide
agucaaggaaucuauacca

SEQ ID NO: 396097 - RNA, 19 nt, Artificial Sequence
  Description of Artificial Sequence: Synthetic oligonucleotide
accuagagcaguuacuaac

SEQ ID NO: 396098 - RNA, 19 nt, Artificial Sequence
  Description of Artificial Sequence: Synthetic oligonucleotide
uagucaaggaaucuauacc

SEQ ID NO: 396099 - RNA, 19 nt, Artificial Sequence
  Description of Artificial Sequence: Synthetic oligonucleotide
uccacuauauucaagggua

SEQ ID NO: 396100 - RNA, 19 nt, Artificial Sequence
  Description of Artificial Sequence: Synthetic oligonucleotide
uuuggcgugauacacauuu

SEQ ID NO: 396101 - RNA, 19 nt, Artificial Sequence
  Description of Artificial Sequence: Synthetic oligonucleotide
ucuaauguaggguucauuu

SEQ ID NO: 396102 - RNA, 19 nt, Artificial Sequence
  Description of Artificial Sequence: Synthetic oligonucleotide
gaauuauuugugcuguagc

SEQ ID NO: 396103 - RNA, 19 nt, Artificial Sequence
  Description of Artificial Sequence: Synthetic oligonucleotide
uagucauguaaguagaagu

SEQ ID NO: 396104 - RNA, 19 nt, Artificial Sequence
  Description of Artificial Sequence: Synthetic oligonucleotide
uaaacacuagucaaggaau

SEQ ID NO: 396105 - RNA, 19 nt, Artificial Sequence
  Description of Artificial Sequence: Synthetic oligonucleotide
gagagauucaaccucgcug

SEQ ID NO: 396106 - RNA, 19 nt, Artificial Sequence
  Description of Artificial Sequence: Synthetic oligonucleotide
ugcaagaguuaaaucgugg

SEQ ID NO: 396107 - RNA, 19 nt, Artificial Sequence
  Description of Artificial Sequence: Synthetic oligonucleotide
guaaguagcaccuuugguc

SEQ ID NO: 396108 - RNA, 19 nt, Artificial Sequence
  Description of Artificial Sequence: Synthetic oligonucleotide
ucaauaagcaaggcaaucc

SEQ ID NO: 396109 - RNA, 19 nt, Artificial Sequence
  Description of Artificial Sequence: Synthetic oligonucleotide
aguauucggaggcaguuuc

SEQ ID NO: 396110 - RNA, 19 nt, Artificial Sequence
  Description of Artificial Sequence: Synthetic oligonucleotide
agcaaaaugcauugcuugg

SEQ ID NO: 396111 - RNA, 19 nt, Artificial Sequence
  Description of Artificial Sequence: Synthetic oligonucleotide
auaaucgauggccuucucg

SEQ ID NO: 396112 - RNA, 19 nt, Artificial Sequence
  Description of Artificial Sequence: Synthetic oligonucleotide
cauguaaguagaaguaagc

SEQ ID NO: 396113 - RNA, 19 nt, Artificial Sequence
  Description of Artificial Sequence: Synthetic oligonucleotide
uucuuuugaggauuuggag

SEQ ID NO: 396114 - RNA, 19 nt, Artificial Sequence
  Description of Artificial Sequence: Synthetic oligonucleotide
gauucaaccucgcugucag

SEQ ID NO: 396115 - RNA, 19 nt, Artificial Sequence
  Description of Artificial Sequence: Synthetic oligonucleotide
ugaauucuaauguaggguu

SEQ ID NO: 396116 - RNA, 19 nt, Artificial Sequence
  Description of Artificial Sequence: Synthetic oligonucleotide
ucuguagcgaaacaugaaa

SEQ ID NO: 396117 - RNA, 19 nt, Artificial Sequence
  Description of Artificial Sequence: Synthetic oligonucleotide
cuugagagcguaaaauaag

SEQ ID NO: 396118 - RNA, 19 nt, Artificial Sequence
  Description of Artificial Sequence: Synthetic oligonucleotide
aaguguauguguucccaag

SEQ ID NO: 396119 - RNA, 19 nt, Artificial Sequence
  Description of Artificial Sequence: Synthetic oligonucleotide
uagcgaaacaugaaaagaa

SEQ ID NO: 396120 - RNA, 19 nt, Artificial Sequence
  Description of Artificial Sequence: Synthetic oligonucleotide
uuagcaaggauuucacugu

SEQ ID NO: 396121 - RNA, 19 nt, Artificial Sequence
  Description of Artificial Sequence: Synthetic oligonucleotide
cagaugauaaucgauggcc

SEQ ID NO: 396122 - RNA, 19 nt, Artificial Sequence
  Description of Artificial Sequence: Synthetic oligonucleotide
ugauauucuaacgcuuugg

SEQ ID NO: 396123 - RNA, 19 nt, Artificial Sequence
  Description of Artificial Sequence: Synthetic oligonucleotide
gguucauuuaaauuccuag

SEQ ID NO: 396124 - RNA, 19 nt, Artificial Sequence
  Description of Artificial Sequence: Synthetic oligonucleotide
cuuuaguccaagcucagug

SEQ ID NO: 396125 - RNA, 19 nt, Artificial Sequence
  Description of Artificial Sequence: Synthetic oligonucleotide
uaaucgauggccuucucgu

SEQ ID NO: 396126 - RNA, 19 nt, Artificial Sequence
  Description of Artificial Sequence: Synthetic oligonucleotide
uuuuaagguguuuccaaga

SEQ ID NO: 396127 - RNA, 19 nt, Artificial Sequence
  Description of Artificial Sequence: Synthetic oligonucleotide
ucugucuuuaagcugccga

SEQ ID NO: 396128 - RNA, 19 nt, Artificial Sequence
  Description of Artificial Sequence: Synthetic oligonucleotide
uuugcuaguuacuuuccug

SEQ ID NO: 396129 - RNA, 19 nt, Artificial Sequence
  Description of Artificial Sequence: Synthetic oligonucleotide
ugguguuaacuucauaagu

SEQ ID NO: 396130 - RNA, 19 nt, Artificial Sequence
  Description of Artificial Sequence: Synthetic oligonucleotide
cuugucauuaaguucucug

SEQ ID NO: 396131 - RNA, 19 nt, Artificial Sequence
  Description of Artificial Sequence: Synthetic oligonucleotide
ugagagcguaaaauaaggc

SEQ ID NO: 396132 - RNA, 19 nt, Artificial Sequence
  Description of Artificial Sequence: Synthetic oligonucleotide
auuauuugugcuguagcuc

SEQ ID NO: 396133 - RNA, 19 nt, Artificial Sequence
  Description of Artificial Sequence: Synthetic oligonucleotide
uugacacuuuacaaggaug

SEQ ID NO: 396134 - RNA, 19 nt, Artificial Sequence
  Description of Artificial Sequence: Synthetic oligonucleotide
aauagcacugaguguuuug

SEQ ID NO: 396135 - RNA, 19 nt, Artificial Sequence
  Description of Artificial Sequence: Synthetic oligonucleotide
uccuucgccaauccuaucc

SEQ ID NO: 396136 - RNA, 19 nt, Artificial Sequence
  Description of Artificial Sequence: Synthetic oligonucleotide
ugugcgacaguuuucuugu

SEQ ID NO: 396137 - RNA, 19 nt, Artificial Sequence
  Description of Artificial Sequence: Synthetic oligonucleotide
gucauuugucaucaggugc

SEQ ID NO: 396138 - RNA, 19 nt, Artificial Sequence
  Description of Artificial Sequence: Synthetic oligonucleotide
ucagaugauaaucgauggc

SEQ ID NO: 396139 - RNA, 19 nt, Artificial Sequence
  Description of Artificial Sequence: Synthetic oligonucleotide
caguugaucuccaauaguc

SEQ ID NO: 396140 - RNA, 19 nt, Artificial Sequence
  Description of Artificial Sequence: Synthetic oligonucleotide
aauucuaauguaggguuca

SEQ ID NO: 396141 - RNA, 19 nt, Artificial Sequence
  Description of Artificial Sequence: Synthetic oligonucleotide
agaggacugaauucuaaug

SEQ ID NO: 396142 - RNA, 19 nt, Artificial Sequence
  Description of Artificial Sequence: Synthetic oligonucleotide
aaacacuagucaaggaauc

SEQ ID NO: 396143 - RNA, 19 nt, Artificial Sequence
  Description of Artificial Sequence: Synthetic oligonucleotide
uguaaauagcacugagugu

SEQ ID NO: 396144 - RNA, 19 nt, Artificial Sequence
  Description of Artificial Sequence: Synthetic oligonucleotide
aauugcuaagugcuucaga

SEQ ID NO: 396145 - RNA, 19 nt, Artificial Sequence
  Description of Artificial Sequence: Synthetic oligonucleotide
uucuuagagaaacuagaau

SEQ ID NO: 396146 - RNA, 19 nt, Artificial Sequence
  Description of Artificial Sequence: Synthetic oligonucleotide
cuugcaaggcauuucuuac

SEQ ID NO: 396147 - RNA, 19 nt, Artificial Sequence
  Description of Artificial Sequence: Synthetic oligonucleotide
uuaaguucucuggagauau

SEQ ID NO: 396148 - RNA, 19 nt, Artificial Sequence
  Description of Artificial Sequence: Synthetic oligonucleotide
uggcgugauacacauuucc

SEQ ID NO: 396149 - RNA, 19 nt, Artificial Sequence
  Description of Artificial Sequence: Synthetic oligonucleotide
gguggugauauucuaacgc

SEQ ID NO: 396150 - RNA, 19 nt, Artificial Sequence
  Description of Artificial Sequence: Synthetic oligonucleotide
uauuuucagacaucaugga

SEQ ID NO: 396151 - RNA, 19 nt, Artificial Sequence
  Description of Artificial Sequence: Synthetic oligonucleotide
uccaauaguuucugcacug

SEQ ID NO: 396152 - RNA, 19 nt, Artificial Sequence
  Description of Artificial Sequence: Synthetic oligonucleotide
uaguaagucaaagaauccu

SEQ ID NO: 396153 - RNA, 19 nt, Artificial Sequence
  Description of Artificial Sequence: Synthetic oligonucleotide
acuaacgacagguuuuccu

SEQ ID NO: 396154 - RNA, 19 nt, Artificial Sequence
  Description of Artificial Sequence: Synthetic oligonucleotide
cuaacgacagguuuuccuc

SEQ ID NO: 396155 - RNA, 19 nt, Artificial Sequence
  Description of Artificial Sequence: Synthetic oligonucleotide
cuuguaaguagcaccuuug

SEQ ID NO: 396156 - RNA, 19 nt, Artificial Sequence
  Description of Artificial Sequence: Synthetic oligonucleotide
uugaucaucuaaucuggac

SEQ ID NO: 396157 - RNA, 19 nt, Artificial Sequence
  Description of Artificial Sequence: Synthetic oligonucleotide
auauucuaacgcuuuggca

SEQ ID NO: 396158 - RNA, 19 nt, Artificial Sequence
  Description of Artificial Sequence: Synthetic oligonucleotide
aacacacuauggcuucauc

SEQ ID NO: 396159 - RNA, 19 nt, Artificial Sequence
  Description of Artificial Sequence: Synthetic oligonucleotide
uucgucccagcuuggagcg

SEQ ID NO: 396160 - RNA, 19 nt, Artificial Sequence
  Description of Artificial Sequence: Synthetic oligonucleotide
ggaauauguaugcauuucc

SEQ ID NO: 396161 - RNA, 19 nt, Artificial Sequence
  Description of Artificial Sequence: Synthetic oligonucleotide
agagcaguuacuaacgaca

SEQ ID NO: 396162 - RNA, 19 nt, Artificial Sequence
  Description of Artificial Sequence: Synthetic oligonucleotide
auuuucagacaucauggaa

SEQ ID NO: 396163 - RNA, 19 nt, Artificial Sequence
  Description of Artificial Sequence: Synthetic oligonucleotide
auagucauguaaguagaag

SEQ ID NO: 396164 - RNA, 19 nt, Artificial Sequence
  Description of Artificial Sequence: Synthetic oligonucleotide
cuucgucccagcuuggagc

SEQ ID NO: 396165 - RNA, 19 nt, Artificial Sequence
  Description of Artificial Sequence: Synthetic oligonucleotide
aaggagacgcuguucguga

SEQ ID NO: 396166 - RNA, 19 nt, Artificial Sequence
  Description of Artificial Sequence: Synthetic oligonucleotide
caagaguuaaaucguggug

SEQ ID NO: 396167 - RNA, 19 nt, Artificial Sequence
  Description of Artificial Sequence: Synthetic oligonucleotide
uguaggguucauuuaaauu

SEQ ID NO: 396168 - RNA, 19 nt, Artificial Sequence
  Description of Artificial Sequence: Synthetic oligonucleotide
uucccaagacuguagcaag

SEQ ID NO: 396169 - RNA, 19 nt, Artificial Sequence
  Description of Artificial Sequence: Synthetic oligonucleotide
ucuaaucuggacccuugac

SEQ ID NO: 396170 - RNA, 19 nt, Artificial Sequence
  Description of Artificial Sequence: Synthetic oligonucleotide
uaagcauugcccagcuggc

SEQ ID NO: 396171 - RNA, 19 nt, Artificial Sequence
  Description of Artificial Sequence: Synthetic oligonucleotide
augugcgacaguuuucuug

SEQ ID NO: 396172 - RNA, 19 nt, Artificial Sequence
  Description of Artificial Sequence: Synthetic oligonucleotide
uuucaauaagcaaggcaau

SEQ ID NO: 396173 - RNA, 19 nt, Artificial Sequence
  Description of Artificial Sequence: Synthetic oligonucleotide
augauaaucgauggccuuc

SEQ ID NO: 396174 - RNA, 19 nt, Artificial Sequence
  Description of Artificial Sequence: Synthetic oligonucleotide
uuugaucaucuaaucugga

SEQ ID NO: 396175 - RNA, 19 nt, Artificial Sequence
  Description of Artificial Sequence: Synthetic oligonucleotide
uaagugcuucagaugauaa

SEQ ID NO: 396176 - RNA, 19 nt, Artificial Sequence
  Description of Artificial Sequence: Synthetic oligonucleotide
aaaguguauguguucccaa

SEQ ID NO: 396177 - RNA, 19 nt, Artificial Sequence
  Description of Artificial Sequence: Synthetic oligonucleotide
aguuacuaacgacagguuu

SEQ ID NO: 396178 - RNA, 19 nt, Artificial Sequence
  Description of Artificial Sequence: Synthetic oligonucleotide
uggaucucucugcaaaaga

SEQ ID NO: 396179 - RNA, 19 nt, Artificial Sequence
  Description of Artificial Sequence: Synthetic oligonucleotide
gagagcguaaaauaaggcu

SEQ ID NO: 396180 - RNA, 19 nt, Artificial Sequence
  Description of Artificial Sequence: Synthetic oligonucleotide
caucaaguucaauauuuuc

SEQ ID NO: 396181 - RNA, 19 nt, Artificial Sequence
  Description of Artificial Sequence: Synthetic oligonucleotide
ucuucgucccagcuuggag

SEQ ID NO: 396182 - RNA, 19 nt, Artificial Sequence
  Description of Artificial Sequence: Synthetic oligonucleotide
acgguuggccccuuugugg

SEQ ID NO: 396183 - RNA, 19 nt, Artificial Sequence
  Description of Artificial Sequence: Synthetic oligonucleotide
ucuugagcaauugcuaagu

SEQ ID NO: 396184 - RNA, 19 nt, Artificial Sequence
  Description of Artificial Sequence: Synthetic oligonucleotide
auuugguaccuuuucuggu

SEQ ID NO: 396185 - RNA, 19 nt, Artificial Sequence
  Description of Artificial Sequence: Synthetic oligonucleotide
agcaagacugggcuuccac

SEQ ID NO: 396186 - RNA, 19 nt, Artificial Sequence
  Description of Artificial Sequence: Synthetic oligonucleotide
uuagcuugagagcguaaaa

SEQ ID NO: 396187 - RNA, 19 nt, Artificial Sequence
  Description of Artificial Sequence: Synthetic oligonucleotide
aguguauguguucccaaga

SEQ ID NO: 396188 - RNA, 19 nt, Artificial Sequence
  Description of Artificial Sequence: Synthetic oligonucleotide
ucuccuacauccuggggac

SEQ ID NO: 396189 - RNA, 19 nt, Artificial Sequence
  Description of Artificial Sequence: Synthetic oligonucleotide
cacggcucugucuuuaagc

SEQ ID NO: 396190 - RNA, 19 nt, Artificial Sequence
  Description of Artificial Sequence: Synthetic oligonucleotide
aacacuagucaaggaaucu

SEQ ID NO: 396191 - RNA, 19 nt, Artificial Sequence
  Description of Artificial Sequence: Synthetic oligonucleotide
uuuagcuugagagcguaaa

SEQ ID NO: 396192 - RNA, 19 nt, Artificial Sequence
  Description of Artificial Sequence: Synthetic oligonucleotide
cuucccuuuggcgugauac

SEQ ID NO: 396193 - RNA, 19 nt, Artificial Sequence
  Description of Artificial Sequence: Synthetic oligonucleotide
uuuggucauccagacggcg

SEQ ID NO: 396194 - RNA, 19 nt, Artificial Sequence
  Description of Artificial Sequence: Synthetic oligonucleotide
uuccgguaguauucggagg

SEQ ID NO: 396195 - RNA, 19 nt, Artificial Sequence
  Description of Artificial Sequence: Synthetic oligonucleotide
ucauccauccuguugcuuu

SEQ ID NO: 396196 - RNA, 19 nt, Artificial Sequence
  Description of Artificial Sequence: Synthetic oligonucleotide
uuuugucagacggagcccu

SEQ ID NO: 396197 - RNA, 19 nt, Artificial Sequence
  Description of Artificial Sequence: Synthetic oligonucleotide
ugcuuugaaaucgccuuag

SEQ ID NO: 396198 - RNA, 19 nt, Artificial Sequence
  Description of Artificial Sequence: Synthetic oligonucleotide
aaugcauugcuuggucaug

SEQ ID NO: 396199 - RNA, 19 nt, Artificial Sequence
  Description of Artificial Sequence: Synthetic oligonucleotide
agagcguaaaauaaggcua

SEQ ID NO: 396200 - RNA, 19 nt, Artificial Sequence
  Description of Artificial Sequence: Synthetic oligonucleotide
aauaguuucugcacugguu

SEQ ID NO: 396201 - RNA, 19 nt, Artificial Sequence
  Description of Artificial Sequence: Synthetic oligonucleotide
ucgcuggcaacacacuaug

SEQ ID NO: 396202 - RNA, 19 nt, Artificial Sequence
  Description of Artificial Sequence: Synthetic oligonucleotide
aacuuuagugguacugcug

SEQ ID NO: 396203 - RNA, 19 nt, Artificial Sequence
  Description of Artificial Sequence: Synthetic oligonucleotide
uaacgacagguuuuccuca

SEQ ID NO: 396204 - RNA, 19 nt, Artificial Sequence
  Description of Artificial Sequence: Synthetic oligonucleotide
guagcgaaacaugaaaaga

SEQ ID NO: 396205 - RNA, 19 nt, Artificial Sequence
  Description of Artificial Sequence: Synthetic oligonucleotide
uuaucaaauuucccuccau

SEQ ID NO: 396206 - RNA, 19 nt, Artificial Sequence
  Description of Artificial Sequence: Synthetic oligonucleotide
ucuuuuagcuugagagcgu

SEQ ID NO: 396207 - RNA, 19 nt, Artificial Sequence
  Description of Artificial Sequence: Synthetic oligonucleotide
aaauuucccuccaucgagu

SEQ ID NO: 396208 - RNA, 19 nt, Artificial Sequence
  Description of Artificial Sequence: Synthetic oligonucleotide
guaagcugccaucaaguuc

SEQ ID NO: 396209 - RNA, 19 nt, Artificial Sequence
  Description of Artificial Sequence: Synthetic oligonucleotide
gagcaguuacuaacgacag

SEQ ID NO: 396210 - RNA, 19 nt, Artificial Sequence
  Description of Artificial Sequence: Synthetic oligonucleotide
uggcccuuuggucauccag

SEQ ID NO: 396211 - RNA, 19 nt, Artificial Sequence
  Description of Artificial Sequence: Synthetic oligonucleotide
uucggaggcaguuucgaau

SEQ ID NO: 396212 - RNA, 19 nt, Artificial Sequence
  Description of Artificial Sequence: Synthetic oligonucleotide
ugucuuuaagcugccgagc

SEQ ID NO: 396213 - RNA, 19 nt, Artificial Sequence
  Description of Artificial Sequence: Synthetic oligonucleotide
uuagugguacugcugcuuu

SEQ ID NO: 396214 - RNA, 19 nt, Artificial Sequence
  Description of Artificial Sequence: Synthetic oligonucleotide
ucgccuuaguaagucaaag

SEQ ID NO: 396215 - RNA, 19 nt, Artificial Sequence
  Description of Artificial Sequence: Synthetic oligonucleotide
ugcgacaguuuucuuguaa

SEQ ID NO: 396216 - RNA, 19 nt, Artificial Sequence
  Description of Artificial Sequence: Synthetic oligonucleotide
cucgcugucaguuccccac

SEQ ID NO: 396217 - RNA, 19 nt, Artificial Sequence
  Description of Artificial Sequence: Synthetic oligonucleotide
aguccaagcucagugucuc

SEQ ID NO: 396218 - RNA, 19 nt, Artificial Sequence
  Description of Artificial Sequence: Synthetic oligonucleotide
ucaccuagagcaguuacua

SEQ ID NO: 396219 - RNA, 19 nt, Artificial Sequence
  Description of Artificial Sequence: Synthetic oligonucleotide
ugauaaucgauggccuucu

SEQ ID NO: 396220 - RNA, 19 nt, Artificial Sequence
  Description of Artificial Sequence: Synthetic oligonucleotide
uccuaaacuccaacaugcu

SEQ ID NO: 396221 - RNA, 19 nt, Artificial Sequence
  Description of Artificial Sequence: Synthetic oligonucleotide
uuguagagugcucuugcuu

SEQ ID NO: 396222 - RNA, 19 nt, Artificial Sequence
  Description of Artificial Sequence: Synthetic oligonucleotide
uuacuaacgacagguuuuc

SEQ ID NO: 396223 - RNA, 19 nt, Artificial Sequence
  Description of Artificial Sequence: Synthetic oligonucleotide
aaauuccaacaaagcauug

SEQ ID NO: 396224 - RNA, 19 nt, Artificial Sequence
  Description of Artificial Sequence: Synthetic oligonucleotide
uccuuuaguccaagcucag

SEQ ID NO: 396225 - RNA, 19 nt, Artificial Sequence
  Description of Artificial Sequence: Synthetic oligonucleotide
uuccauucuguagcgaaac

SEQ ID NO: 396226 - RNA, 19 nt, Artificial Sequence
  Description of Artificial Sequence: Synthetic oligonucleotide
cucuccuacauccugggga

SEQ ID NO: 396227 - RNA, 19 nt, Artificial Sequence
  Description of Artificial Sequence: Synthetic oligonucleotide
ccaagauucccaaaggcuc

SEQ ID NO: 396228 - RNA, 19 nt, Artificial Sequence
  Description of Artificial Sequence: Synthetic oligonucleotide
uagcuugagagcguaaaau

SEQ ID NO: 396229 - RNA, 19 nt, Artificial Sequence
  Description of Artificial Sequence: Synthetic oligonucleotide
uuccaagauuguagagugc

SEQ ID NO: 396230 - RNA, 19 nt, Artificial Sequence
  Description of Artificial Sequence: Synthetic oligonucleotide
aaucgccuuaguaagucaa

SEQ ID NO: 396231 - RNA, 19 nt, Artificial Sequence
  Description of Artificial Sequence: Synthetic oligonucleotide
gaauucuaauguaggguuc

SEQ ID NO: 396232 - RNA, 19 nt, Artificial Sequence
  Description of Artificial Sequence: Synthetic oligonucleotide
guaaguagaaguaagcauu

SEQ ID NO: 396233 - RNA, 19 nt, Artificial Sequence
  Description of Artificial Sequence: Synthetic oligonucleotide
uguaagcugccaucaaguu

SEQ ID NO: 396234 - RNA, 19 nt, Artificial Sequence
  Description of Artificial Sequence: Synthetic oligonucleotide
agcaccuuuggucauccau

SEQ ID NO: 396235 - RNA, 19 nt, Artificial Sequence
  Description of Artificial Sequence: Synthetic oligonucleotide
aaucuauaccacagcuucu

SEQ ID NO: 396236 - RNA, 19 nt, Artificial Sequence
  Description of Artificial Sequence: Synthetic oligonucleotide
cuugagcaauugcuaagug

SEQ ID NO: 396237 - RNA, 19 nt, Artificial Sequence
  Description of Artificial Sequence: Synthetic oligonucleotide
acaugcucuuccuucgcca

SEQ ID NO: 396238 - RNA, 19 nt, Artificial Sequence
  Description of Artificial Sequence: Synthetic oligonucleotide
caaccucgcugucaguucc

SEQ ID NO: 396239 - RNA, 19 nt, Artificial Sequence
  Description of Artificial Sequence: Synthetic oligonucleotide
gccuuaguaagucaaagaa

SEQ ID NO: 396240 - RNA, 19 nt, Artificial Sequence
  Description of Artificial Sequence: Synthetic oligonucleotide
agaugauaaucgauggccu

SEQ ID NO: 396241 - RNA, 19 nt, Artificial Sequence
  Description of Artificial Sequence: Synthetic oligonucleotide
uucgugagcuaugacugca

SEQ ID NO: 396242 - RNA, 19 nt, Artificial Sequence
  Description of Artificial Sequence: Synthetic oligonucleotide
aacucuuuguucauccauu

SEQ ID NO: 396243 - RNA, 19 nt, Artificial Sequence
  Description of Artificial Sequence: Synthetic oligonucleotide
uuuguccccaaccucucuu

SEQ ID NO: 396244 - RNA, 19 nt, Artificial Sequence
  Description of Artificial Sequence: Synthetic oligonucleotide
guuuucuuguaaguagcac

SEQ ID NO: 396245 - RNA, 19 nt, Artificial Sequence
  Description of Artificial Sequence: Synthetic oligonucleotide
cuuaucaaauuucccucca

SEQ ID NO: 396246 - RNA, 19 nt, Artificial Sequence
  Description of Artificial Sequence: Synthetic oligonucleotide
aagauugccacuggcuuua

SEQ ID NO: 396247 - RNA, 19 nt, Artificial Sequence
  Description of Artificial Sequence: Synthetic oligonucleotide
uccaagguugcuguaugcu

SEQ ID NO: 396248 - RNA, 19 nt, Artificial Sequence
  Description of Artificial Sequence: Synthetic oligonucleotide
auguaggguucauuuaaau

SEQ ID NO: 396249 - RNA, 19 nt, Artificial Sequence
  Description of Artificial Sequence: Synthetic oligonucleotide
cuggagauauccagguguc

SEQ ID NO: 396250 - RNA, 19 nt, Artificial Sequence
  Description of Artificial Sequence: Synthetic oligonucleotide
ugcucaaguacagacugau

SEQ ID NO: 396251 - RNA, 19 nt, Artificial Sequence
  Description of Artificial Sequence: Synthetic oligonucleotide
ugucagacggagcccuggc

SEQ ID NO: 396252 - RNA, 19 nt, Artificial Sequence
  Description of Artificial Sequence: Synthetic oligonucleotide
ucccaagacuguagcaaga

SEQ ID NO: 396253 - RNA, 19 nt, Artificial Sequence
  Description of Artificial Sequence: Synthetic oligonucleotide
ggacugaauucuaauguag

SEQ ID NO: 396254 - RNA, 19 nt, Artificial Sequence
  Description of Artificial Sequence: Synthetic oligonucleotide
cuuuggucauccagacggc

SEQ ID NO: 396255 - RNA, 19 nt, Artificial Sequence
  Description of Artificial Sequence: Synthetic oligonucleotide
uggagauauccaggugucg

SEQ ID NO: 396256 - RNA, 19 nt, Artificial Sequence
  Description of Artificial Sequence: Synthetic oligonucleotide
uggagcaugguggucgaug

SEQ ID NO: 396257 - RNA, 19 nt, Artificial Sequence
  Description of Artificial Sequence: Synthetic oligonucleotide
ggagcgugcaccauguaag

SEQ ID NO: 396258 - RNA, 19 nt, Artificial Sequence
  Description of Artificial Sequence: Synthetic oligonucleotide
cuaacgcuuuggcauaguc

SEQ ID NO: 396259 - RNA, 19 nt, Artificial Sequence
  Description of Artificial Sequence: Synthetic oligonucleotide
ggguaguagaagaagcugc

SEQ ID NO: 396260 - RNA, 19 nt, Artificial Sequence
  Description of Artificial Sequence: Synthetic oligonucleotide
gcaagacugggcuuccacg

SEQ ID NO: 396261 - RNA, 19 nt, Artificial Sequence
  Description of Artificial Sequence: Synthetic oligonucleotide
gcgacaguuuucuuguaag

SEQ ID NO: 396262 - RNA, 19 nt, Artificial Sequence
  Description of Artificial Sequence: Synthetic oligonucleotide
gagcgugcaccauguaagc

SEQ ID NO: 396263 - RNA, 19 nt, Artificial Sequence
  Description of Artificial Sequence: Synthetic oligonucleotide
cuguaugcucuccuuucag

SEQ ID NO: 396264 - RNA, 19 nt, Artificial Sequence
  Description of Artificial Sequence: Synthetic oligonucleotide
ggagauauccaggugucgc

SEQ ID NO: 396265 - RNA, 19 nt, Artificial Sequence
  Description of Artificial Sequence: Synthetic oligonucleotide
cuguagcgaaacaugaaaa

SEQ ID NO: 396266 - RNA, 19 nt, Artificial Sequence
  Description of Artificial Sequence: Synthetic oligonucleotide
uucaaccucgcugucaguu

SEQ ID NO: 396267 - RNA, 19 nt, Artificial Sequence
  Description of Artificial Sequence: Synthetic oligonucleotide
auucuaacgcuuuggcaua

SEQ ID NO: 396268 - RNA, 19 nt, Artificial Sequence
  Description of Artificial Sequence: Synthetic oligonucleotide
cauaaacacuagucaagga

SEQ ID NO: 396269 - RNA, 19 nt, Artificial Sequence
  Description of Artificial Sequence: Synthetic oligonucleotide
aggauuucacuguuccaau

SEQ ID NO: 396270 - RNA, 19 nt, Artificial Sequence
  Description of Artificial Sequence: Synthetic oligonucleotide
acagacugauuguuguuuu

SEQ ID NO: 396271 - RNA, 19 nt, Artificial Sequence
  Description of Artificial Sequence: Synthetic oligonucleotide
uugucagacggagcccugg

SEQ ID NO: 396272 - RNA, 19 nt, Artificial Sequence
  Description of Artificial Sequence: Synthetic oligonucleotide
auaaggagacgcuguucgu

SEQ ID NO: 396273 - RNA, 19 nt, Artificial Sequence
  Description of Artificial Sequence: Synthetic oligonucleotide
gguaguguguguugccaag

SEQ ID NO: 396274 - RNA, 19 nt, Artificial Sequence
  Description of Artificial Sequence: Synthetic oligonucleotide
uuuagugguacugcugcuu

SEQ ID NO: 396275 - RNA, 19 nt, Artificial Sequence
  Description of Artificial Sequence: Synthetic oligonucleotide
uccuacauccuggggacca

SEQ ID NO: 396276 - RNA, 19 nt, Artificial Sequence
  Description of Artificial Sequence: Synthetic oligonucleotide
aguagcaccuuuggucauc

SEQ ID NO: 396277 - RNA, 19 nt, Artificial Sequence
  Description of Artificial Sequence: Synthetic oligonucleotide
uuugucagacggagcccug

SEQ ID NO: 396278 - RNA, 19 nt, Artificial Sequence
  Description of Artificial Sequence: Synthetic oligonucleotide
ucaaccucgcugucaguuc

SEQ ID NO: 396279 - RNA, 19 nt, Artificial Sequence
  Description of Artificial Sequence: Synthetic oligonucleotide
agauauccaggugucgcug

SEQ ID NO: 396280 - RNA, 19 nt, Artificial Sequence
  Description of Artificial Sequence: Synthetic oligonucleotide
uucuaacgcuuuggcauag

SEQ ID NO: 396281 - RNA, 19 nt, Artificial Sequence
  Description of Artificial Sequence: Synthetic oligonucleotide
guauucggaggcaguuucg

SEQ ID NO: 396282 - RNA, 19 nt, Artificial Sequence
  Description of Artificial Sequence: Synthetic oligonucleotide
ugucuucgucccagcuugg

SEQ ID NO: 396283 - RNA, 19 nt, Artificial Sequence
  Description of Artificial Sequence: Synthetic oligonucleotide
acucuccuacauccugggg

SEQ ID NO: 396284 - RNA, 19 nt, Artificial Sequence
  Description of Artificial Sequence: Synthetic oligonucleotide
aaccucgcugucaguuccc

SEQ ID NO: 396285 - RNA, 19 nt, Artificial Sequence
  Description of Artificial Sequence: Synthetic oligonucleotide
agcgaaacaugaaaagaau

SEQ ID NO: 396286 - RNA, 19 nt, Artificial Sequence
  Description of Artificial Sequence: Synthetic oligonucleotide
gcgaaacaugaaaagaaug

SEQ ID NO: 396287 - RNA, 19 nt, Artificial Sequence
  Description of Artificial Sequence: Synthetic oligonucleotide
uguccccaaccucucuuga

SEQ ID NO: 396288 - RNA, 19 nt, Artificial Sequence
  Description of Artificial Sequence: Synthetic oligonucleotide
cuguucgugagcuaugacu

SEQ ID NO: 396289 - RNA, 19 nt, Artificial Sequence
  Description of Artificial Sequence: Synthetic oligonucleotide
uguggacgaugugcgacag

SEQ ID NO: 396290 - RNA, 19 nt, Artificial Sequence
  Description of Artificial Sequence: Synthetic oligonucleotide
aggcaguuucgaauucccc

SEQ ID NO: 396291 - RNA, 19 nt, Artificial Sequence
  Description of Artificial Sequence: Synthetic oligonucleotide
gagcguaaaauaaggcuaa

SEQ ID NO: 396292 - RNA, 19 nt, Artificial Sequence
  Description of Artificial Sequence: Synthetic oligonucleotide
gucaaggaaucuauaccac

SEQ ID NO: 396293 - RNA, 19 nt, Artificial Sequence
  Description of Artificial Sequence: Synthetic oligonucleotide
aagauucccaaaggcucgu

SEQ ID NO: 396294 - RNA, 19 nt, Artificial Sequence
  Description of Artificial Sequence: Synthetic oligonucleotide
guucgugagcuaugacugc

SEQ ID NO: 396295 - RNA, 19 nt, Artificial Sequence
  Description of Artificial Sequence: Synthetic oligonucleotide
ugccaucaaguucaauauu

SEQ ID NO: 396296 - RNA, 19 nt, Artificial Sequence
  Description of Artificial Sequence: Synthetic oligonucleotide
aagugcuuuucagcaaaau

SEQ ID NO: 396297 - RNA, 19 nt, Artificial Sequence
  Description of Artificial Sequence: Synthetic oligonucleotide
aucuauaccacagcuucua

SEQ ID NO: 396298 - RNA, 19 nt, Artificial Sequence
  Description of Artificial Sequence: Synthetic oligonucleotide
caaaguguauguguuccca

SEQ ID NO: 396299 - RNA, 19 nt, Artificial Sequence
  Description of Artificial Sequence: Synthetic oligonucleotide
uaccuuuucugguguuaac

SEQ ID NO: 396300 - RNA, 19 nt, Artificial Sequence
  Description of Artificial Sequence: Synthetic oligonucleotide
cuagagcaguuacuaacga

SEQ ID NO: 396301 - RNA, 19 nt, Artificial Sequence
  Description of Artificial Sequence: Synthetic oligonucleotide
gacgaugugcgacaguuuu

SEQ ID NO: 396302 - RNA, 19 nt, Artificial Sequence
  Description of Artificial Sequence: Synthetic oligonucleotide
caauccuauccuugagcuc

SEQ ID NO: 396303 - RNA, 19 nt, Artificial Sequence
  Description of Artificial Sequence: Synthetic oligonucleotide
ggauaccacaggaacagac

SEQ ID NO: 396304 - RNA, 19 nt, Artificial Sequence
  Description of Artificial Sequence: Synthetic oligonucleotide
augcauugcuuggucauga

SEQ ID NO: 396305 - RNA, 19 nt, Artificial Sequence
  Description of Artificial Sequence: Synthetic oligonucleotide
cauagucauguaaguagaa

SEQ ID NO: 396306 - RNA, 19 nt, Artificial Sequence
  Description of Artificial Sequence: Synthetic oligonucleotide
caauugcuaagugcuucag

SEQ ID NO: 396307 - RNA, 19 nt, Artificial Sequence
  Description of Artificial Sequence: Synthetic oligonucleotide
caauaaggagacgcuguuc

SEQ ID NO: 396308 - RNA, 19 nt, Artificial Sequence
  Description of Artificial Sequence: Synthetic oligonucleotide
gagauauccaggugucgcu

SEQ ID NO: 396309 - RNA, 19 nt, Artificial Sequence
  Description of Artificial Sequence: Synthetic oligonucleotide
ucaucuaaucuggacccuu

SEQ ID NO: 396310 - RNA, 19 nt, Artificial Sequence
  Description of Artificial Sequence: Synthetic oligonucleotide
guuacuaacgacagguuuu

SEQ ID NO: 396311 - RNA, 19 nt, Artificial Sequence
  Description of Artificial Sequence: Synthetic oligonucleotide
ggcaaccaaaacucuuccc

SEQ ID NO: 396312 - RNA, 19 nt, Artificial Sequence
  Description of Artificial Sequence: Synthetic oligonucleotide
gaugauaaucgauggccuu

SEQ ID NO: 396313 - RNA, 19 nt, Artificial Sequence
  Description of Artificial Sequence: Synthetic oligonucleotide
cacuuuuaagguguuucca

SEQ ID NO: 396314 - RNA, 19 nt, Artificial Sequence
  Description of Artificial Sequence: Synthetic oligonucleotide
cccaguugaucuccaauag

SEQ ID NO: 396315 - RNA, 19 nt, Artificial Sequence
  Description of Artificial Sequence: Synthetic oligonucleotide
gcuaugacugcaucucuga

SEQ ID NO: 396316 - RNA, 19 nt, Artificial Sequence
  Description of Artificial Sequence: Synthetic oligonucleotide
ggucaccuagagcaguuac

SEQ ID NO: 396317 - RNA, 19 nt, Artificial Sequence
  Description of Artificial Sequence: Synthetic oligonucleotide
ggugucgcuggcaacacac

SEQ ID NO: 396318 - RNA, 19 nt, Artificial Sequence
  Description of Artificial Sequence: Synthetic oligonucleotide
aaaucgugguggugauauu

SEQ ID NO: 396319 - RNA, 19 nt, Artificial Sequence
  Description of Artificial Sequence: Synthetic oligonucleotide
acgaugugcgacaguuuuc

SEQ ID NO: 396320 - RNA, 19 nt, Artificial Sequence
  Description of Artificial Sequence: Synthetic oligonucleotide
gauaaucgauggccuucuc

SEQ ID NO: 396321 - RNA, 19 nt, Artificial Sequence
  Description of Artificial Sequence: Synthetic oligonucleotide
augacacgccagcacggca

SEQ ID NO: 396322 - RNA, 19 nt, Artificial Sequence
  Description of Artificial Sequence: Synthetic oligonucleotide
ucgugagcuaugacugcau

SEQ ID NO: 396323 - RNA, 19 nt, Artificial Sequence
  Description of Artificial Sequence: Synthetic oligonucleotide
gacggugcuuucaucaucu

SEQ ID NO: 396324 - RNA, 19 nt, Artificial Sequence
  Description of Artificial Sequence: Synthetic oligonucleotide
agacaucauggaauuauuu

SEQ ID NO: 396325 - RNA, 19 nt, Artificial Sequence
  Description of Artificial Sequence: Synthetic oligonucleotide
uacuaacgacagguuuucc

SEQ ID NO: 396326 - RNA, 19 nt, Artificial Sequence
  Description of Artificial Sequence: Synthetic oligonucleotide
ccuaaacuccaacaugcuc

SEQ ID NO: 396327 - RNA, 19 nt, Artificial Sequence
  Description of Artificial Sequence: Synthetic oligonucleotide
gugagcuaugacugcaucu

SEQ ID NO: 396328 - RNA, 19 nt, Artificial Sequence
  Description of Artificial Sequence: Synthetic oligonucleotide
ucggucaccuagagcaguu

SEQ ID NO: 396329 - RNA, 19 nt, Artificial Sequence
  Description of Artificial Sequence: Synthetic oligonucleotide
cuuccauucuguagcgaaa

SEQ ID NO: 396330 - RNA, 19 nt, Artificial Sequence
  Description of Artificial Sequence: Synthetic oligonucleotide
accucaguaagaggacuga

SEQ ID NO: 396331 - RNA, 19 nt, Artificial Sequence
  Description of Artificial Sequence: Synthetic oligonucleotide
gcaagaguuaaaucguggu

SEQ ID NO: 396332 - RNA, 19 nt, Artificial Sequence
  Description of Artificial Sequence: Synthetic oligonucleotide
gcauagucauguaaguaga

SEQ ID NO: 396333 - RNA, 19 nt, Artificial Sequence
  Description of Artificial Sequence: Synthetic oligonucleotide
ggcguucuccuuccaaggc

SEQ ID NO: 396334 - RNA, 19 nt, Artificial Sequence
  Description of Artificial Sequence: Synthetic oligonucleotide
guaguguguguugccaaga

SEQ ID NO: 396335 - RNA, 19 nt, Artificial Sequence
  Description of Artificial Sequence: Synthetic oligonucleotide
ccaauaguuucugcacugg

SEQ ID NO: 396336 - RNA, 19 nt, Artificial Sequence
  Description of Artificial Sequence: Synthetic oligonucleotide
gguguuaacuucauaaguu

SEQ ID NO: 396337 - RNA, 19 nt, Artificial Sequence
  Description of Artificial Sequence: Synthetic oligonucleotide
cuguggacgaugugcgaca

SEQ ID NO: 396338 - RNA, 19 nt, Artificial Sequence
  Description of Artificial Sequence: Synthetic oligonucleotide
gcaucgugaagaacuuuag

SEQ ID NO: 396339 - RNA, 19 nt, Artificial Sequence
  Description of Artificial Sequence: Synthetic oligonucleotide
agacggcggcucugugagc

SEQ ID NO: 396340 - RNA, 19 nt, Artificial Sequence
  Description of Artificial Sequence: Synthetic oligonucleotide
guuaaaucgugguggugau

SEQ ID NO: 396341 - RNA, 19 nt, Artificial Sequence
  Description of Artificial Sequence: Synthetic oligonucleotide
uuaaaucgugguggugaua

SEQ ID NO: 396342 - RNA, 19 nt, Artificial Sequence
  Description of Artificial Sequence: Synthetic oligonucleotide
gcgugauacacauuuccaa

SEQ ID NO: 396343 - RNA, 19 nt, Artificial Sequence
  Description of Artificial Sequence: Synthetic oligonucleotide
accucucuugaaauuucca

SEQ ID NO: 396344 - RNA, 19 nt, Artificial Sequence
  Description of Artificial Sequence: Synthetic oligonucleotide
cgugcaccauguaagcugc

SEQ ID NO: 396345 - RNA, 19 nt, Artificial Sequence
  Description of Artificial Sequence: Synthetic oligonucleotide
cacuagucaaggaaucuau

SEQ ID NO: 396346 - RNA, 19 nt, Artificial Sequence
  Description of Artificial Sequence: Synthetic oligonucleotide
cauaggacauuuacauuau

SEQ ID NO: 396347 - RNA, 19 nt, Artificial Sequence
  Description of Artificial Sequence: Synthetic oligonucleotide
cuuggagcgugcaccaugu

SEQ ID NO: 396348 - RNA, 19 nt, Artificial Sequence
  Description of Artificial Sequence: Synthetic oligonucleotide
ucuaacgcuuuggcauagu

SEQ ID NO: 396349 - RNA, 19 nt, Artificial Sequence
  Description of Artificial Sequence: Synthetic oligonucleotide
cgacagguuuuccucauag

SEQ ID NO: 396350 - RNA, 19 nt, Artificial Sequence
  Description of Artificial Sequence: Synthetic oligonucleotide
caugcucuuccuucgccaa

SEQ ID NO: 396351 - RNA, 19 nt, Artificial Sequence
  Description of Artificial Sequence: Synthetic oligonucleotide
cuuuuagcuugagagcgua

SEQ ID NO: 396352 - RNA, 19 nt, Artificial Sequence
  Description of Artificial Sequence: Synthetic oligonucleotide
ccaagcacuuuuaaggugu

SEQ ID NO: 396353 - RNA, 19 nt, Artificial Sequence
  Description of Artificial Sequence: Synthetic oligonucleotide
uccagacggcggcucugug

SEQ ID NO: 396354 - RNA, 19 nt, Artificial Sequence
  Description of Artificial Sequence: Synthetic oligonucleotide
gcaguccccugauuuacac

SEQ ID NO: 396355 - RNA, 19 nt, Artificial Sequence
  Description of Artificial Sequence: Synthetic oligonucleotide
cuucuagugguuugcuagu

SEQ ID NO: 396356 - RNA, 19 nt, Artificial Sequence
  Description of Artificial Sequence: Synthetic oligonucleotide
agcacggcaguccccugau

SEQ ID NO: 396357 - RNA, 19 nt, Artificial Sequence
  Description of Artificial Sequence: Synthetic oligonucleotide
caauaguuucugcacuggu

SEQ ID NO: 396358 - RNA, 19 nt, Artificial Sequence
  Description of Artificial Sequence: Synthetic oligonucleotide
caucgugaagaacuuuagu

SEQ ID NO: 396359 - RNA, 19 nt, Artificial Sequence
  Description of Artificial Sequence: Synthetic oligonucleotide
gcugcucggucaccuagag

SEQ ID NO: 396360 - RNA, 19 nt, Artificial Sequence
  Description of Artificial Sequence: Synthetic oligonucleotide
acggcaguccccugauuua

SEQ ID NO: 396361 - RNA, 19 nt, Artificial Sequence
  Description of Artificial Sequence: Synthetic oligonucleotide
cuuccuucgccaauccuau

SEQ ID NO: 396362 - RNA, 19 nt, Artificial Sequence
  Description of Artificial Sequence: Synthetic oligonucleotide
uccacggcucugucuuuaa

SEQ ID NO: 396363 - RNA, 19 nt, Artificial Sequence
  Description of Artificial Sequence: Synthetic oligonucleotide
guccccugauuuacacagg

SEQ ID NO: 396364 - RNA, 19 nt, Artificial Sequence
  Description of Artificial Sequence: Synthetic oligonucleotide
ggcgugauacacauuucca

SEQ ID NO: 396365 - RNA, 19 nt, Artificial Sequence
  Description of Artificial Sequence: Synthetic oligonucleotide
acggagcccuggcaaauua

SEQ ID NO: 396366 - RNA, 19 nt, Artificial Sequence
  Description of Artificial Sequence: Synthetic oligonucleotide
ggcaucgugaagaacuuua

SEQ ID NO: 396367 - RNA, 19 nt, Artificial Sequence
  Description of Artificial Sequence: Synthetic oligonucleotide
ccgcuuuaucuccaaacuc

SEQ ID NO: 396368 - RNA, 19 nt, Artificial Sequence
  Description of Artificial Sequence: Synthetic oligonucleotide
agcguaaaauaaggcuaaa

SEQ ID NO: 396369 - RNA, 19 nt, Artificial Sequence
  Description of Artificial Sequence: Synthetic oligonucleotide
gacggcggcucugugagcu

SEQ ID NO: 396370 - RNA, 19 nt, Artificial Sequence
  Description of Artificial Sequence: Synthetic oligonucleotide
gagcaugguggucgaugga

SEQ ID NO: 396371 - RNA, 19 nt, Artificial Sequence
  Description of Artificial Sequence: Synthetic oligonucleotide
aucgccuuaguaagucaaa

SEQ ID NO: 396372 - RNA, 19 nt, Artificial Sequence
  Description of Artificial Sequence: Synthetic oligonucleotide
ugacugcaucucugaaguu

SEQ ID NO: 396373 - RNA, 19 nt, Artificial Sequence
  Description of Artificial Sequence: Synthetic oligonucleotide
cagcuuggagcgugcacca

SEQ ID NO: 396374 - RNA, 19 nt, Artificial Sequence
  Description of Artificial Sequence: Synthetic oligonucleotide
ugguaccuuuucugguguu

SEQ ID NO: 396375 - RNA, 19 nt, Artificial Sequence
  Description of Artificial Sequence: Synthetic oligonucleotide
caaccaaaacucuucccuu

SEQ ID NO: 396376 - RNA, 19 nt, Artificial Sequence
  Description of Artificial Sequence: Synthetic oligonucleotide
gccgcuuuaucuccaaacu

SEQ ID NO: 396377 - RNA, 19 nt, Artificial Sequence
  Description of Artificial Sequence: Synthetic oligonucleotide
gggacgguuggccccuuug

SEQ ID NO: 396378 - RNA, 19 nt, Artificial Sequence
  Description of Artificial Sequence: Synthetic oligonucleotide
ggcaauaaggagacgcugu

SEQ ID NO: 396379 - RNA, 19 nt, Artificial Sequence
  Description of Artificial Sequence: Synthetic oligonucleotide
cccaagacuguagcaagac

SEQ ID NO: 396380 - RNA, 19 nt, Artificial Sequence
  Description of Artificial Sequence: Synthetic oligonucleotide
uuccuucgccaauccuauc

SEQ ID NO: 396381 - RNA, 19 nt, Artificial Sequence
  Description of Artificial Sequence: Synthetic oligonucleotide
caccuagagcaguuacuaa

SEQ ID NO: 396382 - RNA, 19 nt, Artificial Sequence
  Description of Artificial Sequence: Synthetic oligonucleotide
gcuguaaauagcacugagu

SEQ ID NO: 396383 - RNA, 19 nt, Artificial Sequence
  Description of Artificial Sequence: Synthetic oligonucleotide
gccaagauucccaaaggcu

SEQ ID NO: 396384 - RNA, 19 nt, Artificial Sequence
  Description of Artificial Sequence: Synthetic oligonucleotide
acgacagguuuuccucaua

SEQ ID NO: 396385 - RNA, 19 nt, Artificial Sequence
  Description of Artificial Sequence: Synthetic oligonucleotide
gucaccuagagcaguuacu

SEQ ID NO: 396386 - RNA, 19 nt, Artificial Sequence
  Description of Artificial Sequence: Synthetic oligonucleotide
agacggagcccuggcaaau

SEQ ID NO: 396387 - RNA, 19 nt, Artificial Sequence
  Description of Artificial Sequence: Synthetic oligonucleotide
uagcaagacugggcuucca

SEQ ID NO: 396388 - RNA, 19 nt, Artificial Sequence
  Description of Artificial Sequence: Synthetic oligonucleotide
uuggagcgugcaccaugua

SEQ ID NO: 396389 - RNA, 19 nt, Artificial Sequence
  Description of Artificial Sequence: Synthetic oligonucleotide
ggugauauucuaacgcuuu

SEQ ID NO: 396390 - RNA, 19 nt, Artificial Sequence
  Description of Artificial Sequence: Synthetic oligonucleotide
cuccuacauccuggggacc

SEQ ID NO: 396391 - RNA, 19 nt, Artificial Sequence
  Description of Artificial Sequence: Synthetic oligonucleotide
caggugucgcuggcaacac

SEQ ID NO: 396392 - RNA, 19 nt, Artificial Sequence
  Description of Artificial Sequence: Synthetic oligonucleotide
cagacggagcccuggcaaa

SEQ ID NO: 396393 - RNA, 19 nt, Artificial Sequence
  Description of Artificial Sequence: Synthetic oligonucleotide
uggcaucgugaagaacuuu

SEQ ID NO: 396394 - RNA, 19 nt, Artificial Sequence
  Description of Artificial Sequence: Synthetic oligonucleotide
gcuuccacggcucugucuu

SEQ ID NO: 396395 - RNA, 19 nt, Artificial Sequence
  Description of Artificial Sequence: Synthetic oligonucleotide
cacggcaguccccugauuu

SEQ ID NO: 396396 - RNA, 19 nt, Artificial Sequence
  Description of Artificial Sequence: Synthetic oligonucleotide
gguuggccccuuuguggug

SEQ ID NO: 396397 - RNA, 19 nt, Artificial Sequence
  Description of Artificial Sequence: Synthetic oligonucleotide
acacgccagcacggcaguc

SEQ ID NO: 396398 - RNA, 19 nt, Artificial Sequence
  Description of Artificial Sequence: Synthetic oligonucleotide
acgcuuuggcauagucaug

SEQ ID NO: 396399 - RNA, 19 nt, Artificial Sequence
  Description of Artificial Sequence: Synthetic oligonucleotide
gacacgccagcacggcagu

SEQ ID NO: 396400 - RNA, 19 nt, Artificial Sequence
  Description of Artificial Sequence: Synthetic oligonucleotide
cagcacggcaguccccuga

SEQ ID NO: 396401 - RNA, 19 nt, Artificial Sequence
  Description of Artificial Sequence: Synthetic oligonucleotide
caugguggucgauggaguu

SEQ ID NO: 396402 - RNA, 19 nt, Artificial Sequence
  Description of Artificial Sequence: Synthetic oligonucleotide
acgcuguucgugagcuaug

SEQ ID NO: 396403 - RNA, 19 nt, Artificial Sequence
  Description of Artificial Sequence: Synthetic oligonucleotide
ggaaucuauaccacagcuu

SEQ ID NO: 396404 - RNA, 19 nt, Artificial Sequence
  Description of Artificial Sequence: Synthetic oligonucleotide
gucgcuggcaacacacuau

SEQ ID NO: 396405 - RNA, 19 nt, Artificial Sequence
  Description of Artificial Sequence: Synthetic oligonucleotide
gcaauaaggagacgcuguu

SEQ ID NO: 396406 - RNA, 19 nt, Artificial Sequence
  Description of Artificial Sequence: Synthetic oligonucleotide
acggugcuuucaucaucuu

SEQ ID NO: 396407 - RNA, 19 nt, Artificial Sequence
  Description of Artificial Sequence: Synthetic oligonucleotide
gaugugcgacaguuuucuu

SEQ ID NO: 396408 - RNA, 19 nt, Artificial Sequence
  Description of Artificial Sequence: Synthetic oligonucleotide
cccaggaauauguaugcau

SEQ ID NO: 396409 - RNA, 19 nt, Artificial Sequence
  Description of Artificial Sequence: Synthetic oligonucleotide
ccucaugcuuaucaaauuu

SEQ ID NO: 396410 - RNA, 19 nt, Artificial Sequence
  Description of Artificial Sequence: Synthetic oligonucleotide
caguuacuaacgacagguu

SEQ ID NO: 396411 - RNA, 19 nt, Artificial Sequence
  Description of Artificial Sequence: Synthetic oligonucleotide
cccuuuggcgugauacaca

SEQ ID NO: 396412 - RNA, 19 nt, Artificial Sequence
  Description of Artificial Sequence: Synthetic oligonucleotide
cgugagcuaugacugcauc

SEQ ID NO: 396413 - RNA, 19 nt, Artificial Sequence
  Description of Artificial Sequence: Synthetic oligonucleotide
cuggcaucgugaagaacuu

SEQ ID NO: 396414 - RNA, 19 nt, Artificial Sequence
  Description of Artificial Sequence: Synthetic oligonucleotide
gugcaccauguaagcugcc

SEQ ID NO: 396415 - RNA, 19 nt, Artificial Sequence
  Description of Artificial Sequence: Synthetic oligonucleotide
ggacgguuggccccuuugu

SEQ ID NO: 396416 - RNA, 19 nt, Artificial Sequence
  Description of Artificial Sequence: Synthetic oligonucleotide
uuggagcaugguggucgau

SEQ ID NO: 396417 - RNA, 19 nt, Artificial Sequence
  Description of Artificial Sequence: Synthetic oligonucleotide
gagcaauugcuaagugcuu

SEQ ID NO: 396418 - RNA, 19 nt, Artificial Sequence
  Description of Artificial Sequence: Synthetic oligonucleotide
ccaguugaucuccaauagu

SEQ ID NO: 396419 - RNA, 19 nt, Artificial Sequence
  Description of Artificial Sequence: Synthetic oligonucleotide
caagcacuuuuaagguguu

SEQ ID NO: 396420 - RNA, 19 nt, Artificial Sequence
  Description of Artificial Sequence: Synthetic oligonucleotide
cgccaauccuauccuugag

SEQ ID NO: 396421 - RNA, 19 nt, Artificial Sequence
  Description of Artificial Sequence: Synthetic oligonucleotide
ccugauuuacacaggcguu

SEQ ID NO: 396422 - RNA, 19 nt, Artificial Sequence
  Description of Artificial Sequence: Synthetic oligonucleotide
gcaacacacuauggcuuca

SEQ ID NO: 396423 - RNA, 19 nt, Artificial Sequence
  Description of Artificial Sequence: Synthetic oligonucleotide
cuucgccaauccuauccuu

SEQ ID NO: 396424 - RNA, 19 nt, Artificial Sequence
  Description of Artificial Sequence: Synthetic oligonucleotide
agcuuggagcgugcaccau

SEQ ID NO: 396425 - RNA, 19 nt, Artificial Sequence
  Description of Artificial Sequence: Synthetic oligonucleotide
ccaagacuguagcaagacu

SEQ ID NO: 396426 - RNA, 19 nt, Artificial Sequence
  Description of Artificial Sequence: Synthetic oligonucleotide
gugcgacaguuuucuugua

SEQ ID NO: 396427 - RNA, 19 nt, Artificial Sequence
  Description of Artificial Sequence: Synthetic oligonucleotide
caggaacagacggugcuuu

SEQ ID NO: 396428 - RNA, 19 nt, Artificial Sequence
  Description of Artificial Sequence: Synthetic oligonucleotide
cuccuuucagccgcuuuau

SEQ ID NO: 396429 - RNA, 19 nt, Artificial Sequence
  Description of Artificial Sequence: Synthetic oligonucleotide
ggcugcucggucaccuaga

SEQ ID NO: 396430 - RNA, 19 nt, Artificial Sequence
  Description of Artificial Sequence: Synthetic oligonucleotide
agggacgguuggccccuuu

SEQ ID NO: 396431 - RNA, 19 nt, Artificial Sequence
  Description of Artificial Sequence: Synthetic oligonucleotide
ccauguaagcugccaucaa

SEQ ID NO: 396432 - RNA, 19 nt, Artificial Sequence
  Description of Artificial Sequence: Synthetic oligonucleotide
guggacgaugugcgacagu

SEQ ID NO: 396433 - RNA, 19 nt, Artificial Sequence
  Description of Artificial Sequence: Synthetic oligonucleotide
ccuucgccaauccuauccu

SEQ ID NO: 396434 - RNA, 19 nt, Artificial Sequence
  Description of Artificial Sequence: Synthetic oligonucleotide
cgucccagcuuggagcgug

SEQ ID NO: 396435 - RNA, 19 nt, Artificial Sequence
  Description of Artificial Sequence: Synthetic oligonucleotide
cgaugugcgacaguuuucu

SEQ ID NO: 396436 - RNA, 19 nt, Artificial Sequence
  Description of Artificial Sequence: Synthetic oligonucleotide
cggcaguccccugauuuac

SEQ ID NO: 396437 - RNA, 19 nt, Artificial Sequence
  Description of Artificial Sequence: Synthetic oligonucleotide
cuguuccaauuugguaccu

SEQ ID NO: 396438 - RNA, 19 nt, Artificial Sequence
  Description of Artificial Sequence: Synthetic oligonucleotide
gacggagcccuggcaaauu

SEQ ID NO: 396439 - RNA, 19 nt, Artificial Sequence
  Description of Artificial Sequence: Synthetic oligonucleotide
ccagggcaaccaaaacucu

SEQ ID NO: 396440 - RNA, 19 nt, Artificial Sequence
  Description of Artificial Sequence: Synthetic oligonucleotide
cgcuguucgugagcuauga

SEQ ID NO: 396441 - RNA, 19 nt, Artificial Sequence
  Description of Artificial Sequence: Synthetic oligonucleotide
ccccaaccucucuugaaau

SEQ ID NO: 396442 - RNA, 19 nt, Artificial Sequence
  Description of Artificial Sequence: Synthetic oligonucleotide
cccaaccucucuugaaauu

SEQ ID NO: 396443 - RNA, 19 nt, Artificial Sequence
  Description of Artificial Sequence: Synthetic oligonucleotide
cuuccacggcucugucuuu

SEQ ID NO: 396444 - RNA, 19 nt, Artificial Sequence
  Description of Artificial Sequence: Synthetic oligonucleotide
ccuuuaguccaagcucagu

SEQ ID NO: 396445 - RNA, 19 nt, Artificial Sequence
  Description of Artificial Sequence: Synthetic oligonucleotide
cgguuggccccuuuguggu

SEQ ID NO: 396446 - RNA, 19 nt, Artificial Sequence
  Description of Artificial Sequence: Synthetic oligonucleotide
ggacgaugugcgacaguuu

SEQ ID NO: 396447 - RNA, 19 nt, Artificial Sequence
  Description of Artificial Sequence: Synthetic oligonucleotide
cggucaccuagagcaguua

SEQ ID NO: 396448 - RNA, 19 nt, Artificial Sequence
  Description of Artificial Sequence: Synthetic oligonucleotide
cagggacgguuggccccuu

SEQ ID NO: 396449 - RNA, 19 nt, Artificial Sequence
  Description of Artificial Sequence: Synthetic oligonucleotide
aauacguuauuacugaagg

SEQ ID NO: 396450 - RNA, 19 nt, Artificial Sequence
  Description of Artificial Sequence: Synthetic oligonucleotide
aagcuaauagaucaucucc

SEQ ID NO: 396451 - RNA, 19 nt, Artificial Sequence
  Description of Artificial Sequence: Synthetic oligonucleotide
gauaucguaaacuacuacg

SEQ ID NO: 396452 - RNA, 19 nt, Artificial Sequence
  Description of Artificial Sequence: Synthetic oligonucleotide
agaaauauguuuuaugcuc

SEQ ID NO: 396453 - RNA, 19 nt, Artificial Sequence
  Description of Artificial Sequence: Synthetic oligonucleotide
aaugaguuaacauuuguga

SEQ ID NO: 396454 - RNA, 19 nt, Artificial Sequence
  Description of Artificial Sequence: Synthetic oligonucleotide
uuuccuacuaacaugauga

SEQ ID NO: 396455 - RNA, 19 nt, Artificial Sequence
  Description of Artificial Sequence: Synthetic oligonucleotide
aauugcaauacguuauuac

SEQ ID NO: 396456 - RNA, 19 nt, Artificial Sequence
  Description of Artificial Sequence: Synthetic oligonucleotide
auaaacauaacguucagcu

SEQ ID NO: 396457 - RNA, 19 nt, Artificial Sequence
  Description of Artificial Sequence: Synthetic oligonucleotide
ucaaagaaggucuaaguag

SEQ ID NO: 396458 - RNA, 19 nt, Artificial Sequence
  Description of Artificial Sequence: Synthetic oligonucleotide
uaaguuacaggguaugugg

SEQ ID NO: 396459 - RNA, 19 nt, Artificial Sequence
  Description of Artificial Sequence: Synthetic oligonucleotide
aauuugaccucagaugucc

SEQ ID NO: 396460 - RNA, 19 nt, Artificial Sequence
  Description of Artificial Sequence: Synthetic oligonucleotide
aaagaaacccaagugaauc

SEQ ID NO: 396461 - RNA, 19 nt, Artificial Sequence
  Description of Artificial Sequence: Synthetic oligonucleotide
ugggaaauaauuuuggaca

SEQ ID NO: 396462 - RNA, 19 nt, Artificial Sequence
  Description of Artificial Sequence: Synthetic oligonucleotide
uuauuuccuacuaacauga

SEQ ID NO: 396463 - RNA, 19 nt, Artificial Sequence
  Description of Artificial Sequence: Synthetic oligonucleotide
uuuauuucaggacaugcca

SEQ ID NO: 396464 - RNA, 19 nt, Artificial Sequence
  Description of Artificial Sequence: Synthetic oligonucleotide
aauugauauuuauuucagg

SEQ ID NO: 396465 - RNA, 19 nt, Artificial Sequence
  Description of Artificial Sequence: Synthetic oligonucleotide
ucaucaauccauuuuguag

SEQ ID NO: 396466 - RNA, 19 nt, Artificial Sequence
  Description of Artificial Sequence: Synthetic oligonucleotide
uaauagaucaucuccacga

SEQ ID NO: 396467 - RNA, 19 nt, Artificial Sequence
  Description of Artificial Sequence: Synthetic oligonucleotide
aacgcuucaagggaaauac

SEQ ID NO: 396468 - RNA, 19 nt, Artificial Sequence
  Description of Artificial Sequence: Synthetic oligonucleotide
auuaauuauagcuuaaaua

SEQ ID NO: 396469 - RNA, 19 nt, Artificial Sequence
  Description of Artificial Sequence: Synthetic oligonucleotide
aguaaauucauuauggacu

SEQ ID NO: 396470 - RNA, 19 nt, Artificial Sequence
  Description of Artificial Sequence: Synthetic oligonucleotide
aacacgucggaaaagcugc

SEQ ID NO: 396471 - RNA, 19 nt, Artificial Sequence
  Description of Artificial Sequence: Synthetic oligonucleotide
uaaguaguuuauaucagug

SEQ ID NO: 396472 - RNA, 19 nt, Artificial Sequence
  Description of Artificial Sequence: Synthetic oligonucleotide
ucuauucagauccauaauc

SEQ ID NO: 396473 - RNA, 19 nt, Artificial Sequence
  Description of Artificial Sequence: Synthetic oligonucleotide
uuuuauuuccuacuaacau

SEQ ID NO: 396474 - RNA, 19 nt, Artificial Sequence
  Description of Artificial Sequence: Synthetic oligonucleotide
uccuuaacaagccacauuc

SEQ ID NO: 396475 - RNA, 19 nt, Artificial Sequence
  Description of Artificial Sequence: Synthetic oligonucleotide
uguuaaguaaugcuuacaa

SEQ ID NO: 396476 - RNA, 19 nt, Artificial Sequence
  Description of Artificial Sequence: Synthetic oligonucleotide
aggauaauuccaaagggcc

SEQ ID NO: 396477 - RNA, 19 nt, Artificial Sequence
  Description of Artificial Sequence: Synthetic oligonucleotide
ucuaguaaaagcucaugug

SEQ ID NO: 396478 - RNA, 19 nt, Artificial Sequence
  Description of Artificial Sequence: Synthetic oligonucleotide
acuaaggauaauuccaaag

SEQ ID NO: 396479 - RNA, 19 nt, Artificial Sequence
  Description of Artificial Sequence: Synthetic oligonucleotide
uauuugacuacucuucugu

SEQ ID NO: 396480 - RNA, 19 nt, Artificial Sequence
  Description of Artificial Sequence: Synthetic oligonucleotide
ugucccauaauugcaaucg

SEQ ID NO: 396481 - RNA, 19 nt, Artificial Sequence
  Description of Artificial Sequence: Synthetic oligonucleotide
uaaaagcucaugugaaagg

SEQ ID NO: 396482 - RNA, 19 nt, Artificial Sequence
  Description of Artificial Sequence: Synthetic oligonucleotide
uaagcacucaguaaauuca

SEQ ID NO: 396483 - RNA, 19 nt, Artificial Sequence
  Description of Artificial Sequence: Synthetic oligonucleotide
auguaucuaauccucaaag

SEQ ID NO: 396484 - RNA, 19 nt, Artificial Sequence
  Description of Artificial Sequence: Synthetic oligonucleotide
auaucauuauuucuacuag

SEQ ID NO: 396485 - RNA, 19 nt, Artificial Sequence
  Description of Artificial Sequence: Synthetic oligonucleotide
uaacaagccacauucacac

SEQ ID NO: 396486 - RNA, 19 nt, Artificial Sequence
  Description of Artificial Sequence: Synthetic oligonucleotide
ucuaaguaguuuauaucag

SEQ ID NO: 396487 - RNA, 19 nt, Artificial Sequence
  Description of Artificial Sequence: Synthetic oligonucleotide
aaacuaaauugcuaguuaa

SEQ ID NO: 396488 - RNA, 19 nt, Artificial Sequence
  Description of Artificial Sequence: Synthetic oligonucleotide
aauuauagcuuaaauacaa

SEQ ID NO: 396489 - RNA, 19 nt, Artificial Sequence
  Description of Artificial Sequence: Synthetic oligonucleotide
auugcaauacguuauuacu

SEQ ID NO: 396490 - RNA, 19 nt, Artificial Sequence
  Description of Artificial Sequence: Synthetic oligonucleotide
agucaaugaaagaauaugg

SEQ ID NO: 396491 - RNA, 19 nt, Artificial Sequence
  Description of Artificial Sequence: Synthetic oligonucleotide
uuugcaacgcuucaaggga

SEQ ID NO: 396492 - RNA, 19 nt, Artificial Sequence
  Description of Artificial Sequence: Synthetic oligonucleotide
ucaaacacugcccaucaug

SEQ ID NO: 396493 - RNA, 19 nt, Artificial Sequence
  Description of Artificial Sequence: Synthetic oligonucleotide
uugcaauacguuauuacug

SEQ ID NO: 396494 - RNA, 19 nt, Artificial Sequence
  Description of Artificial Sequence: Synthetic oligonucleotide
ugaugauaacaucacuucc

SEQ ID NO: 396495 - RNA, 19 nt, Artificial Sequence
  Description of Artificial Sequence: Synthetic oligonucleotide
uuuaccuguaagcacucag

SEQ ID NO: 396496 - RNA, 19 nt, Artificial Sequence
  Description of Artificial Sequence: Synthetic oligonucleotide
aaagauuaaaagggugcac

SEQ ID NO: 396497 - RNA, 19 nt, Artificial Sequence
  Description of Artificial Sequence: Synthetic oligonucleotide
aagcucuaaauacucaaca

SEQ ID NO: 396498 - RNA, 19 nt, Artificial Sequence
  Description of Artificial Sequence: Synthetic oligonucleotide
agauacaguaguuuuccuc

SEQ ID NO: 396499 - RNA, 19 nt, Artificial Sequence
  Description of Artificial Sequence: Synthetic oligonucleotide
agagcagagggguauuugc

SEQ ID NO: 396500 - RNA, 19 nt, Artificial Sequence
  Description of Artificial Sequence: Synthetic oligonucleotide
uacguuauuacugaaggga

SEQ ID NO: 396501 - RNA, 19 nt, Artificial Sequence
  Description of Artificial Sequence: Synthetic oligonucleotide
acacuugccucuuaucagc

SEQ ID NO: 396502 - RNA, 19 nt, Artificial Sequence
  Description of Artificial Sequence: Synthetic oligonucleotide
ugcacuccuaguauaauug

SEQ ID NO: 396503 - RNA, 19 nt, Artificial Sequence
  Description of Artificial Sequence: Synthetic oligonucleotide
ucuguaaaacuaaggauaa

SEQ ID NO: 396504 - RNA, 19 nt, Artificial Sequence
  Description of Artificial Sequence: Synthetic oligonucleotide
aaagguucaagccaauauu

SEQ ID NO: 396505 - RNA, 19 nt, Artificial Sequence
  Description of Artificial Sequence: Synthetic oligonucleotide
uccaguuuuaugucaauca

SEQ ID NO: 396506 - RNA, 19 nt, Artificial Sequence
  Description of Artificial Sequence: Synthetic oligonucleotide
aagauuaaaagggugcacu

SEQ ID NO: 396507 - RNA, 19 nt, Artificial Sequence
  Description of Artificial Sequence: Synthetic oligonucleotide
guaaagauuaaaagggugc

SEQ ID NO: 396508 - RNA, 19 nt, Artificial Sequence
  Description of Artificial Sequence: Synthetic oligonucleotide
ugcuaguuaacuuauuuau

SEQ ID NO: 396509 - RNA, 19 nt, Artificial Sequence
  Description of Artificial Sequence: Synthetic oligonucleotide
cauaauugcaaucgcacug

SEQ ID NO: 396510 - RNA, 19 nt, Artificial Sequence
  Description of Artificial Sequence: Synthetic oligonucleotide
uaucuaauccucaaaguua

SEQ ID NO: 396511 - RNA, 19 nt, Artificial Sequence
  Description of Artificial Sequence: Synthetic oligonucleotide
aaagguaucuguaaaacua

SEQ ID NO: 396512 - RNA, 19 nt, Artificial Sequence
  Description of Artificial Sequence: Synthetic oligonucleotide
cuugcaaggaaauuauuuc

SEQ ID NO: 396513 - RNA, 19 nt, Artificial Sequence
  Description of Artificial Sequence: Synthetic oligonucleotide
uuaacauuugugauaucgu

SEQ ID NO: 396514 - RNA, 19 nt, Artificial Sequence
  Description of Artificial Sequence: Synthetic oligonucleotide
auaucguaaacuacuacgg

SEQ ID NO: 396515 - RNA, 19 nt, Artificial Sequence
  Description of Artificial Sequence: Synthetic oligonucleotide
agcugcuuuacauuguauc

SEQ ID NO: 396516 - RNA, 19 nt, Artificial Sequence
  Description of Artificial Sequence: Synthetic oligonucleotide
aguuacaggguaugugggc

SEQ ID NO: 396517 - RNA, 19 nt, Artificial Sequence
  Description of Artificial Sequence: Synthetic oligonucleotide
ucaauugacacuugccucu

SEQ ID NO: 396518 - RNA, 19 nt, Artificial Sequence
  Description of Artificial Sequence: Synthetic oligonucleotide
ugcaauacguuauuacuga

SEQ ID NO: 396519 - RNA, 19 nt, Artificial Sequence
  Description of Artificial Sequence: Synthetic oligonucleotide
aaagagucaauccuugcuu

SEQ ID NO: 396520 - RNA, 19 nt, Artificial Sequence
  Description of Artificial Sequence: Synthetic oligonucleotide
gaauugauauuuauuucag

SEQ ID NO: 396521 - RNA, 19 nt, Artificial Sequence
  Description of Artificial Sequence: Synthetic oligonucleotide
uguaaaacuaaggauaauu

SEQ ID NO: 396522 - RNA, 19 nt, Artificial Sequence
  Description of Artificial Sequence: Synthetic oligonucleotide
gugaugaagcucuaaauac

SEQ ID NO: 396523 - RNA, 19 nt, Artificial Sequence
  Description of Artificial Sequence: Synthetic oligonucleotide
acauauuugacuacucuuc

SEQ ID NO: 396524 - RNA, 19 nt, Artificial Sequence
  Description of Artificial Sequence: Synthetic oligonucleotide
augauaacaucacuuccuc

SEQ ID NO: 396525 - RNA, 19 nt, Artificial Sequence
  Description of Artificial Sequence: Synthetic oligonucleotide
ugggcuaaugauuaucuga

SEQ ID NO: 396526 - RNA, 19 nt, Artificial Sequence
  Description of Artificial Sequence: Synthetic oligonucleotide
uuuuaugcuccuuuaccug

SEQ ID NO: 396527 - RNA, 19 nt, Artificial Sequence
  Description of Artificial Sequence: Synthetic oligonucleotide
guuaucacgaauaugcuga

SEQ ID NO: 396528 - RNA, 19 nt, Artificial Sequence
  Description of Artificial Sequence: Synthetic oligonucleotide
aaggcauaaaucugcauua

SEQ ID NO: 396529 - RNA, 19 nt, Artificial Sequence
  Description of Artificial Sequence: Synthetic oligonucleotide
uauaauuguuugcaacgcu

SEQ ID NO: 396530 - RNA, 19 nt, Artificial Sequence
  Description of Artificial Sequence: Synthetic oligonucleotide
caguaaauucauuauggac

SEQ ID NO: 396531 - RNA, 19 nt, Artificial Sequence
  Description of Artificial Sequence: Synthetic oligonucleotide
ucuccaaguauuacaaggu

SEQ ID NO: 396532 - RNA, 19 nt, Artificial Sequence
  Description of Artificial Sequence: Synthetic oligonucleotide
aguuaucacgaauaugcug

SEQ ID NO: 396533 - RNA, 19 nt, Artificial Sequence
  Description of Artificial Sequence: Synthetic oligonucleotide
uguaucuaauccucaaagu

SEQ ID NO: 396534 - RNA, 19 nt, Artificial Sequence
  Description of Artificial Sequence: Synthetic oligonucleotide
uaucauuauuucuacuaga

SEQ ID NO: 396535 - RNA, 19 nt, Artificial Sequence
  Description of Artificial Sequence: Synthetic oligonucleotide
uaaagauuaaaagggugca

SEQ ID NO: 396536 - RNA, 19 nt, Artificial Sequence
  Description of Artificial Sequence: Synthetic oligonucleotide
uaucguaaacuacuacggc

SEQ ID NO: 396537 - RNA, 19 nt, Artificial Sequence
  Description of Artificial Sequence: Synthetic oligonucleotide
gcuaaugauuaucugaaag

SEQ ID NO: 396538 - RNA, 19 nt, Artificial Sequence
  Description of Artificial Sequence: Synthetic oligonucleotide
aauguaucuaauccucaaa

SEQ ID NO: 396539 - RNA, 19 nt, Artificial Sequence
  Description of Artificial Sequence: Synthetic oligonucleotide
aguauuacaaggugagagu

SEQ ID NO: 396540 - RNA, 19 nt, Artificial Sequence
  Description of Artificial Sequence: Synthetic oligonucleotide
aucguaaacuacuacggcu

SEQ ID NO: 396541 - RNA, 19 nt, Artificial Sequence
  Description of Artificial Sequence: Synthetic oligonucleotide
guaugaacaaggaaaggag

SEQ ID NO: 396542 - RNA, 19 nt, Artificial Sequence
  Description of Artificial Sequence: Synthetic oligonucleotide
aauuguuugcaacgcuuca

SEQ ID NO: 396543 - RNA, 19 nt, Artificial Sequence
  Description of Artificial Sequence: Synthetic oligonucleotide
gaugaauugcaauacguua

SEQ ID NO: 396544 - RNA, 19 nt, Artificial Sequence
  Description of Artificial Sequence: Synthetic oligonucleotide
auuagcaggaacagccucc

SEQ ID NO: 396545 - RNA, 19 nt, Artificial Sequence
  Description of Artificial Sequence: Synthetic oligonucleotide
auacguuauuacugaaggg

SEQ ID NO: 396546 - RNA, 19 nt, Artificial Sequence
  Description of Artificial Sequence: Synthetic oligonucleotide
ugaaagacccaacauuuua

SEQ ID NO: 396547 - RNA, 19 nt, Artificial Sequence
  Description of Artificial Sequence: Synthetic oligonucleotide
ucacgaauaugcugaauug

SEQ ID NO: 396548 - RNA, 19 nt, Artificial Sequence
  Description of Artificial Sequence: Synthetic oligonucleotide
uaaugauuaucugaaagua

SEQ ID NO: 396549 - RNA, 19 nt, Artificial Sequence
  Description of Artificial Sequence: Synthetic oligonucleotide
caauacguuauuacugaag

SEQ ID NO: 396550 - RNA, 19 nt, Artificial Sequence
  Description of Artificial Sequence: Synthetic oligonucleotide
auuaacuuacacagcaauc

SEQ ID NO: 396551 - RNA, 19 nt, Artificial Sequence
  Description of Artificial Sequence: Synthetic oligonucleotide
aaauacauauugccauggu

SEQ ID NO: 396552 - RNA, 19 nt, Artificial Sequence
  Description of Artificial Sequence: Synthetic oligonucleotide
aagccaauauucacacugc

SEQ ID NO: 396553 - RNA, 19 nt, Artificial Sequence
  Description of Artificial Sequence: Synthetic oligonucleotide
aaauaucaccaaaggaaag

SEQ ID NO: 396554 - RNA, 19 nt, Artificial Sequence
  Description of Artificial Sequence: Synthetic oligonucleotide
uauuucaggacaugccaug

SEQ ID NO: 396555 - RNA, 19 nt, Artificial Sequence
  Description of Artificial Sequence: Synthetic oligonucleotide
uguauuauaaaagcacuuu

SEQ ID NO: 396556 - RNA, 19 nt, Artificial Sequence
  Description of Artificial Sequence: Synthetic oligonucleotide
aucacgaauaugcugaauu

SEQ ID NO: 396557 - RNA, 19 nt, Artificial Sequence
  Description of Artificial Sequence: Synthetic oligonucleotide
uaauuguuugcaacgcuuc

SEQ ID NO: 396558 - RNA, 19 nt, Artificial Sequence
  Description of Artificial Sequence: Synthetic oligonucleotide
acuuacacagcaaucucac

SEQ ID NO: 396559 - RNA, 19 nt, Artificial Sequence
  Description of Artificial Sequence: Synthetic oligonucleotide
agggguauuugcuagucug

SEQ ID NO: 396560 - RNA, 19 nt, Artificial Sequence
  Description of Artificial Sequence: Synthetic oligonucleotide
aaugcaugcuuucucugau

SEQ ID NO: 396561 - RNA, 19 nt, Artificial Sequence
  Description of Artificial Sequence: Synthetic oligonucleotide
aauagaucaucuccacgaa

SEQ ID NO: 396562 - RNA, 19 nt, Artificial Sequence
  Description of Artificial Sequence: Synthetic oligonucleotide
auguagcugggaaugaggc

SEQ ID NO: 396563 - RNA, 19 nt, Artificial Sequence
  Description of Artificial Sequence: Synthetic oligonucleotide
ugcuuuacauuguauccug

SEQ ID NO: 396564 - RNA, 19 nt, Artificial Sequence
  Description of Artificial Sequence: Synthetic oligonucleotide
guaagcacucaguaaauuc

SEQ ID NO: 396565 - RNA, 19 nt, Artificial Sequence
  Description of Artificial Sequence: Synthetic oligonucleotide
ugauaucguaaacuacuac

SEQ ID NO: 396566 - RNA, 19 nt, Artificial Sequence
  Description of Artificial Sequence: Synthetic oligonucleotide
uguguuaaguaaugcuuac

SEQ ID NO: 396567 - RNA, 19 nt, Artificial Sequence
  Description of Artificial Sequence: Synthetic oligonucleotide
cugaucugccucuaggggc

SEQ ID NO: 396568 - RNA, 19 nt, Artificial Sequence
  Description of Artificial Sequence: Synthetic oligonucleotide
uauuugcuagucugcgagg

SEQ ID NO: 396569 - RNA, 19 nt, Artificial Sequence
  Description of Artificial Sequence: Synthetic oligonucleotide
uaacauuugugauaucgua

SEQ ID NO: 396570 - RNA, 19 nt, Artificial Sequence
  Description of Artificial Sequence: Synthetic oligonucleotide
aaugauuaucugaaaguau

SEQ ID NO: 396571 - RNA, 19 nt, Artificial Sequence
  Description of Artificial Sequence: Synthetic oligonucleotide
augaguuaacauuugugau

SEQ ID NO: 396572 - RNA, 19 nt, Artificial Sequence
  Description of Artificial Sequence: Synthetic oligonucleotide
uuuacauuguauccugcuu

SEQ ID NO: 396573 - RNA, 19 nt, Artificial Sequence
  Description of Artificial Sequence: Synthetic oligonucleotide
uuauuucaggacaugccau

SEQ ID NO: 396574 - RNA, 19 nt, Artificial Sequence
  Description of Artificial Sequence: Synthetic oligonucleotide
aguaaugcuuacaacauaa

SEQ ID NO: 396575 - RNA, 19 nt, Artificial Sequence
  Description of Artificial Sequence: Synthetic oligonucleotide
aaguuacaggguauguggg

SEQ ID NO: 396576 - RNA, 19 nt, Artificial Sequence
  Description of Artificial Sequence: Synthetic oligonucleotide
cuaacaugaugauaacauc

SEQ ID NO: 396577 - RNA, 19 nt, Artificial Sequence
  Description of Artificial Sequence: Synthetic oligonucleotide
agaaggucuaaguaguuua

SEQ ID NO: 396578 - RNA, 19 nt, Artificial Sequence
  Description of Artificial Sequence: Synthetic oligonucleotide
ucuuugaguauaaguuaca

SEQ ID NO: 396579 - RNA, 19 nt, Artificial Sequence
  Description of Artificial Sequence: Synthetic oligonucleotide
uaaugcaugcuuucucuga

SEQ ID NO: 396580 - RNA, 19 nt, Artificial Sequence
  Description of Artificial Sequence: Synthetic oligonucleotide
cauaaacucagcaggcuuc

SEQ ID NO: 396581 - RNA, 19 nt, Artificial Sequence
  Description of Artificial Sequence: Synthetic oligonucleotide
ucugagcuagaacucacaa

SEQ ID NO: 396582 - RNA, 19 nt, Artificial Sequence
  Description of Artificial Sequence: Synthetic oligonucleotide
uuauuaacuuacacagcaa

SEQ ID NO: 396583 - RNA, 19 nt, Artificial Sequence
  Description of Artificial Sequence: Synthetic oligonucleotide
uacuagauacaguaguuuu

SEQ ID NO: 396584 - RNA, 19 nt, Artificial Sequence
  Description of Artificial Sequence: Synthetic oligonucleotide
uccuaguauaauuguuugc

SEQ ID NO: 396585 - RNA, 19 nt, Artificial Sequence
  Description of Artificial Sequence: Synthetic oligonucleotide
aggucuaaguaguuuauau

SEQ ID NO: 396586 - RNA, 19 nt, Artificial Sequence
  Description of Artificial Sequence: Synthetic oligonucleotide
aagacccaacauuuuaaaa

SEQ ID NO: 396587 - RNA, 19 nt, Artificial Sequence
  Description of Artificial Sequence: Synthetic oligonucleotide
ugaaagggucacuugcucu

SEQ ID NO: 396588 - RNA, 19 nt, Artificial Sequence
  Description of Artificial Sequence: Synthetic oligonucleotide
auaaguuacaggguaugug

SEQ ID NO: 396589 - RNA, 19 nt, Artificial Sequence
  Description of Artificial Sequence: Synthetic oligonucleotide
ccuacuaacaugaugauaa

SEQ ID NO: 396590 - RNA, 19 nt, Artificial Sequence
  Description of Artificial Sequence: Synthetic oligonucleotide
uauuacaaggugagaguaa

SEQ ID NO: 396591 - RNA, 19 nt, Artificial Sequence
  Description of Artificial Sequence: Synthetic oligonucleotide
gaugaagcucuaaauacuc

SEQ ID NO: 396592 - RNA, 19 nt, Artificial Sequence
  Description of Artificial Sequence: Synthetic oligonucleotide
gcacuuuacaacuccaucc

SEQ ID NO: 396593 - RNA, 19 nt, Artificial Sequence
  Description of Artificial Sequence: Synthetic oligonucleotide
acucacaauguuuucccug

SEQ ID NO: 396594 - RNA, 19 nt, Artificial Sequence
  Description of Artificial Sequence: Synthetic oligonucleotide
aaacuaaggauaauuccaa

SEQ ID NO: 396595 - RNA, 19 nt, Artificial Sequence
  Description of Artificial Sequence: Synthetic oligonucleotide
guuuauaucagugcuggga

SEQ ID NO: 396596 - RNA, 19 nt, Artificial Sequence
  Description of Artificial Sequence: Synthetic oligonucleotide
cagucaaugaaagaauaug

SEQ ID NO: 396597 - RNA, 19 nt, Artificial Sequence
  Description of Artificial Sequence: Synthetic oligonucleotide
uggaaugaguuaacauuug

SEQ ID NO: 396598 - RNA, 19 nt, Artificial Sequence
  Description of Artificial Sequence: Synthetic oligonucleotide
uuacaacuccaucccaucu

SEQ ID NO: 396599 - RNA, 19 nt, Artificial Sequence
  Description of Artificial Sequence: Synthetic oligonucleotide
cuugugaagcuaauagauc

SEQ ID NO: 396600 - RNA, 19 nt, Artificial Sequence
  Description of Artificial Sequence: Synthetic oligonucleotide
ugacugguugcuccugagg

SEQ ID NO: 396601 - RNA, 19 nt, Artificial Sequence
  Description of Artificial Sequence: Synthetic oligonucleotide
ucccaguuaaggauugugu

SEQ ID NO: 396602 - RNA, 19 nt, Artificial Sequence
  Description of Artificial Sequence: Synthetic oligonucleotide
ucacaauaacuaguaaaga

SEQ ID NO: 396603 - RNA, 19 nt, Artificial Sequence
  Description of Artificial Sequence: Synthetic oligonucleotide
cuccuaguauaauuguuug

SEQ ID NO: 396604 - RNA, 19 nt, Artificial Sequence
  Description of Artificial Sequence: Synthetic oligonucleotide
aacauaaacucagcaggcu

SEQ ID NO: 396605 - RNA, 19 nt, Artificial Sequence
  Description of Artificial Sequence: Synthetic oligonucleotide
caaugaugaauugcaauac

SEQ ID NO: 396606 - RNA, 19 nt, Artificial Sequence
  Description of Artificial Sequence: Synthetic oligonucleotide
uuuacaacuccaucccauc

SEQ ID NO: 396607 - RNA, 19 nt, Artificial Sequence
  Description of Artificial Sequence: Synthetic oligonucleotide
gauuaauuauagcuuaaau

SEQ ID NO: 396608 - RNA, 19 nt, Artificial Sequence
  Description of Artificial Sequence: Synthetic oligonucleotide
aacuaaggauaauuccaaa

SEQ ID NO: 396609 - RNA, 19 nt, Artificial Sequence
  Description of Artificial Sequence: Synthetic oligonucleotide
ccaaguauuacaaggugag

SEQ ID NO: 396610 - RNA, 19 nt, Artificial Sequence
  Description of Artificial Sequence: Synthetic oligonucleotide
gcugcuuuacauuguaucc

SEQ ID NO: 396611 - RNA, 19 nt, Artificial Sequence
  Description of Artificial Sequence: Synthetic oligonucleotide
aguaaaagcucaugugaaa

SEQ ID NO: 396612 - RNA, 19 nt, Artificial Sequence
  Description of Artificial Sequence: Synthetic oligonucleotide
aaggauuguguugcaauga

SEQ ID NO: 396613 - RNA, 19 nt, Artificial Sequence
  Description of Artificial Sequence: Synthetic oligonucleotide
acuuuagauaucauuauuu

SEQ ID NO: 396614 - RNA, 19 nt, Artificial Sequence
  Description of Artificial Sequence: Synthetic oligonucleotide
ugcuuacaacauaaacuca

SEQ ID NO: 396615 - RNA, 19 nt, Artificial Sequence
  Description of Artificial Sequence: Synthetic oligonucleotide
aaguaaugcuuacaacaua

SEQ ID NO: 396616 - RNA, 19 nt, Artificial Sequence
  Description of Artificial Sequence: Synthetic oligonucleotide
agugaaucuauugcuucuc

SEQ ID NO: 396617 - RNA, 19 nt, Artificial Sequence
  Description of Artificial Sequence: Synthetic oligonucleotide
ugaauugcaauacguuauu

SEQ ID NO: 396618 - RNA, 19 nt, Artificial Sequence
  Description of Artificial Sequence: Synthetic oligonucleotide
caacacgucggaaaagcug

SEQ ID NO: 396619 - RNA, 19 nt, Artificial Sequence
  Description of Artificial Sequence: Synthetic oligonucleotide
agaaaagagucaauccuug

SEQ ID NO: 396620 - RNA, 19 nt, Artificial Sequence
  Description of Artificial Sequence: Synthetic oligonucleotide
cacgaaacaggcagcaaug

SEQ ID NO: 396621 - RNA, 19 nt, Artificial Sequence
  Description of Artificial Sequence: Synthetic oligonucleotide
ugaaguuacuuuuguuguc

SEQ ID NO: 396622 - RNA, 19 nt, Artificial Sequence
  Description of Artificial Sequence: Synthetic oligonucleotide
auaauugcaaucgcacugu

SEQ ID NO: 396623 - RNA, 19 nt, Artificial Sequence
  Description of Artificial Sequence: Synthetic oligonucleotide
aguuuauaucagugcuggg

SEQ ID NO: 396624 - RNA, 19 nt, Artificial Sequence
  Description of Artificial Sequence: Synthetic oligonucleotide
gguaugaacaaggaaagga

SEQ ID NO: 396625 - RNA, 19 nt, Artificial Sequence
  Description of Artificial Sequence: Synthetic oligonucleotide
auuauggacucacuuugaa

SEQ ID NO: 396626 - RNA, 19 nt, Artificial Sequence
  Description of Artificial Sequence: Synthetic oligonucleotide
gcaaucucacaauaacuag

SEQ ID NO: 396627 - RNA, 19 nt, Artificial Sequence
  Description of Artificial Sequence: Synthetic oligonucleotide
gaugauaacaucacuuccu

SEQ ID NO: 396628 - RNA, 19 nt, Artificial Sequence
  Description of Artificial Sequence: Synthetic oligonucleotide
augucgucaaauuguauuu

SEQ ID NO: 396629 - RNA, 19 nt, Artificial Sequence
  Description of Artificial Sequence: Synthetic oligonucleotide
aagggugcacuccuaguau

SEQ ID NO: 396630 - RNA, 19 nt, Artificial Sequence
  Description of Artificial Sequence: Synthetic oligonucleotide
uuuccauauugaauugaua

SEQ ID NO: 396631 - RNA, 19 nt, Artificial Sequence
  Description of Artificial Sequence: Synthetic oligonucleotide
ugauaacaucacuuccucu

SEQ ID NO: 396632 - RNA, 19 nt, Artificial Sequence
  Description of Artificial Sequence: Synthetic oligonucleotide
augaauugcaauacguuau

SEQ ID NO: 396633 - RNA, 19 nt, Artificial Sequence
  Description of Artificial Sequence: Synthetic oligonucleotide
acauaaacucagcaggcuu

SEQ ID NO: 396634 - RNA, 19 nt, Artificial Sequence
  Description of Artificial Sequence: Synthetic oligonucleotide
gaagcucuaaauacucaac

SEQ ID NO: 396635 - RNA, 19 nt, Artificial Sequence
  Description of Artificial Sequence: Synthetic oligonucleotide
gggaaauaauuuuggacac

SEQ ID NO: 396636 - RNA, 19 nt, Artificial Sequence
  Description of Artificial Sequence: Synthetic oligonucleotide
ucaccaaaggaaagauuaa

SEQ ID NO: 396637 - RNA, 19 nt, Artificial Sequence
  Description of Artificial Sequence: Synthetic oligonucleotide
agcaaucucacaauaacua

SEQ ID NO: 396638 - RNA, 19 nt, Artificial Sequence
  Description of Artificial Sequence: Synthetic oligonucleotide
gugaaucuauugcuucucc

SEQ ID NO: 396639 - RNA, 19 nt, Artificial Sequence
  Description of Artificial Sequence: Synthetic oligonucleotide
agaucaucuccacgaaaca

SEQ ID NO: 396640 - RNA, 19 nt, Artificial Sequence
  Description of Artificial Sequence: Synthetic oligonucleotide
guaagugagaggaggaaga

SEQ ID NO: 396641 - RNA, 19 nt, Artificial Sequence
  Description of Artificial Sequence: Synthetic oligonucleotide
aucuaauccucaaaguuau

SEQ ID NO: 396642 - RNA, 19 nt, Artificial Sequence
  Description of Artificial Sequence: Synthetic oligonucleotide
aucguuacacuguguuaag

SEQ ID NO: 396643 - RNA, 19 nt, Artificial Sequence
  Description of Artificial Sequence: Synthetic oligonucleotide
aaagcucaugugaaagggu

SEQ ID NO: 396644 - RNA, 19 nt, Artificial Sequence
  Description of Artificial Sequence: Synthetic oligonucleotide
aucagcaagaucuguuuua

SEQ ID NO: 396645 - RNA, 19 nt, Artificial Sequence
  Description of Artificial Sequence: Synthetic oligonucleotide
guaucuaauccucaaaguu

SEQ ID NO: 396646 - RNA, 19 nt, Artificial Sequence
  Description of Artificial Sequence: Synthetic oligonucleotide
ugcugaauuguuuggcuuu

SEQ ID NO: 396647 - RNA, 19 nt, Artificial Sequence
  Description of Artificial Sequence: Synthetic oligonucleotide
aagaaggucuaaguaguuu

SEQ ID NO: 396648 - RNA, 19 nt, Artificial Sequence
  Description of Artificial Sequence: Synthetic oligonucleotide
ucaggacaugccaugucaa

SEQ ID NO: 396649 - RNA, 19 nt, Artificial Sequence
  Description of Artificial Sequence: Synthetic oligonucleotide
agauuaauuauagcuuaaa

SEQ ID NO: 396650 - RNA, 19 nt, Artificial Sequence
  Description of Artificial Sequence: Synthetic oligonucleotide
guacauuaucauaacauua

SEQ ID NO: 396651 - RNA, 19 nt, Artificial Sequence
  Description of Artificial Sequence: Synthetic oligonucleotide
aggguaugugggcuaauga

SEQ ID NO: 396652 - RNA, 19 nt, Artificial Sequence
  Description of Artificial Sequence: Synthetic oligonucleotide
ggugaugaagcucuaaaua

SEQ ID NO: 396653 - RNA, 19 nt, Artificial Sequence
  Description of Artificial Sequence: Synthetic oligonucleotide
auaauuguuugcaacgcuu

SEQ ID NO: 396654 - RNA, 19 nt, Artificial Sequence
  Description of Artificial Sequence: Synthetic oligonucleotide
auagaucaucuccacgaaa

SEQ ID NO: 396655 - RNA, 19 nt, Artificial Sequence
  Description of Artificial Sequence: Synthetic oligonucleotide
agagggguauuugcuaguc

SEQ ID NO: 396656 - RNA, 19 nt, Artificial Sequence
  Description of Artificial Sequence: Synthetic oligonucleotide
uaauccaagugcucuccaa

SEQ ID NO: 396657 - RNA, 19 nt, Artificial Sequence
  Description of Artificial Sequence: Synthetic oligonucleotide
ucuuaucagcaagaucugu

SEQ ID NO: 396658 - RNA, 19 nt, Artificial Sequence
  Description of Artificial Sequence: Synthetic oligonucleotide
cuacuaacaugaugauaac

SEQ ID NO: 396659 - RNA, 19 nt, Artificial Sequence
  Description of Artificial Sequence: Synthetic oligonucleotide
uugaaagacccaacauuuu

SEQ ID NO: 396660 - RNA, 19 nt, Artificial Sequence
  Description of Artificial Sequence: Synthetic oligonucleotide
uuaaaagggugcacuccua

SEQ ID NO: 396661 - RNA, 19 nt, Artificial Sequence
  Description of Artificial Sequence: Synthetic oligonucleotide
cccauaauugcaaucgcac

SEQ ID NO: 396662 - RNA, 19 nt, Artificial Sequence
  Description of Artificial Sequence: Synthetic oligonucleotide
agcuagaacucacaauguu

SEQ ID NO: 396663 - RNA, 19 nt, Artificial Sequence
  Description of Artificial Sequence: Synthetic oligonucleotide
ucaucguuacacuguguua

SEQ ID NO: 396664 - RNA, 19 nt, Artificial Sequence
  Description of Artificial Sequence: Synthetic oligonucleotide
acugaagggaaaagguuca

SEQ ID NO: 396665 - RNA, 19 nt, Artificial Sequence
  Description of Artificial Sequence: Synthetic oligonucleotide
ccucauucaaacacugccc

SEQ ID NO: 396666 - RNA, 19 nt, Artificial Sequence
  Description of Artificial Sequence: Synthetic oligonucleotide
aaguuacuuuuguugucuu

SEQ ID NO: 396667 - RNA, 19 nt, Artificial Sequence
  Description of Artificial Sequence: Synthetic oligonucleotide
cucuuaucagcaagaucug

SEQ ID NO: 396668 - RNA, 19 nt, Artificial Sequence
  Description of Artificial Sequence: Synthetic oligonucleotide
uuaucacgaauaugcugaa

SEQ ID NO: 396669 - RNA, 19 nt, Artificial Sequence
  Description of Artificial Sequence: Synthetic oligonucleotide
cuaaguaguuuauaucagu

SEQ ID NO: 396670 - RNA, 19 nt, Artificial Sequence
  Description of Artificial Sequence: Synthetic oligonucleotide
uggucagaaauauguuuua

SEQ ID NO: 396671 - RNA, 19 nt, Artificial Sequence
  Description of Artificial Sequence: Synthetic oligonucleotide
guuuggggaggguaugaac

SEQ ID NO: 396672 - RNA, 19 nt, Artificial Sequence
  Description of Artificial Sequence: Synthetic oligonucleotide
caucguuacacuguguuaa

SEQ ID NO: 396673 - RNA, 19 nt, Artificial Sequence
  Description of Artificial Sequence: Synthetic oligonucleotide
uggacucacuuugaagaca

SEQ ID NO: 396674 - RNA, 19 nt, Artificial Sequence
  Description of Artificial Sequence: Synthetic oligonucleotide
aguauaaguuacaggguau

SEQ ID NO: 396675 - RNA, 19 nt, Artificial Sequence
  Description of Artificial Sequence: Synthetic oligonucleotide
aggaaauuauuuccauauu

SEQ ID NO: 396676 - RNA, 19 nt, Artificial Sequence
  Description of Artificial Sequence: Synthetic oligonucleotide
ccaguuaaggauuguguug

SEQ ID NO: 396677 - RNA, 19 nt, Artificial Sequence
  Description of Artificial Sequence: Synthetic oligonucleotide
agaguaagugagaggagga

SEQ ID NO: 396678 - RNA, 19 nt, Artificial Sequence
  Description of Artificial Sequence: Synthetic oligonucleotide
uaagugagaggaggaagaa

SEQ ID NO: 396679 - RNA, 19 nt, Artificial Sequence
  Description of Artificial Sequence: Synthetic oligonucleotide
auaaggcauaaaucugcau

SEQ ID NO: 396680 - RNA, 19 nt, Artificial Sequence
  Description of Artificial Sequence: Synthetic oligonucleotide
caguucugacauauuugac

SEQ ID NO: 396681 - RNA, 19 nt, Artificial Sequence
  Description of Artificial Sequence: Synthetic oligonucleotide
guauuacaaggugagagua

SEQ ID NO: 396682 - RNA, 19 nt, Artificial Sequence
  Description of Artificial Sequence: Synthetic oligonucleotide
caaucucacaauaacuagu

SEQ ID NO: 396683 - RNA, 19 nt, Artificial Sequence
  Description of Artificial Sequence: Synthetic oligonucleotide
cugggaaugaggcuccuga

SEQ ID NO: 396684 - RNA, 19 nt, Artificial Sequence
  Description of Artificial Sequence: Synthetic oligonucleotide
uacuacggcugcaguggag

SEQ ID NO: 396685 - RNA, 19 nt, Artificial Sequence
  Description of Artificial Sequence: Synthetic oligonucleotide
uguaagcacucaguaaauu

SEQ ID NO: 396686 - RNA, 19 nt, Artificial Sequence
  Description of Artificial Sequence: Synthetic oligonucleotide
aagcacucaguaaauucau

SEQ ID NO: 396687 - RNA, 19 nt, Artificial Sequence
  Description of Artificial Sequence: Synthetic oligonucleotide
auguauuauaaaagcacuu

SEQ ID NO: 396688 - RNA, 19 nt, Artificial Sequence
  Description of Artificial Sequence: Synthetic oligonucleotide
cugucagacugcuguuugc

SEQ ID NO: 396689 - RNA, 19 nt, Artificial Sequence
  Description of Artificial Sequence: Synthetic oligonucleotide
gcucuaaauacucaacaaa

SEQ ID NO: 396690 - RNA, 19 nt, Artificial Sequence
  Description of Artificial Sequence: Synthetic oligonucleotide
ucuaauccucaaaguuauc

SEQ ID NO: 396691 - RNA, 19 nt, Artificial Sequence
  Description of Artificial Sequence: Synthetic oligonucleotide
aguuacuuuuguugucuuu

SEQ ID NO: 396692 - RNA, 19 nt, Artificial Sequence
  Description of Artificial Sequence: Synthetic oligonucleotide
ucaugucgucaaauuguau

SEQ ID NO: 396693 - RNA, 19 nt, Artificial Sequence
  Description of Artificial Sequence: Synthetic oligonucleotide
aguuaaggauuguguugca

SEQ ID NO: 396694 - RNA, 19 nt, Artificial Sequence
  Description of Artificial Sequence: Synthetic oligonucleotide
gucccauaauugcaaucgc

SEQ ID NO: 396695 - RNA, 19 nt, Artificial Sequence
  Description of Artificial Sequence: Synthetic oligonucleotide
guaugugggcuaaugauua

SEQ ID NO: 396696 - RNA, 19 nt, Artificial Sequence
  Description of Artificial Sequence: Synthetic oligonucleotide
ugugcuugugaagcuaaua

SEQ ID NO: 396697 - RNA, 19 nt, Artificial Sequence
  Description of Artificial Sequence: Synthetic oligonucleotide
caugucgucaaauuguauu

SEQ ID NO: 396698 - RNA, 19 nt, Artificial Sequence
  Description of Artificial Sequence: Synthetic oligonucleotide
ucaagccaauauucacacu

SEQ ID NO: 396699 - RNA, 19 nt, Artificial Sequence
  Description of Artificial Sequence: Synthetic oligonucleotide
cauuauggacucacuuuga

SEQ ID NO: 396700 - RNA, 19 nt, Artificial Sequence
  Description of Artificial Sequence: Synthetic oligonucleotide
ugcuagucugcgaggguuc

SEQ ID NO: 396701 - RNA, 19 nt, Artificial Sequence
  Description of Artificial Sequence: Synthetic oligonucleotide
gugggcuaaugauuaucug

SEQ ID NO: 396702 - RNA, 19 nt, Artificial Sequence
  Description of Artificial Sequence: Synthetic oligonucleotide
aggguucuuuuguugguaa

SEQ ID NO: 396703 - RNA, 19 nt, Artificial Sequence
  Description of Artificial Sequence: Synthetic oligonucleotide
aaggucuaaguaguuuaua

SEQ ID NO: 396704 - RNA, 19 nt, Artificial Sequence
  Description of Artificial Sequence: Synthetic oligonucleotide
aagggucacuugcucuggu

SEQ ID NO: 396705 - RNA, 19 nt, Artificial Sequence
  Description of Artificial Sequence: Synthetic oligonucleotide
aaagaaggucuaaguaguu

SEQ ID NO: 396706 - RNA, 19 nt, Artificial Sequence
  Description of Artificial Sequence: Synthetic oligonucleotide
uuccuacuaacaugaugau

SEQ ID NO: 396707 - RNA, 19 nt, Artificial Sequence
  Description of Artificial Sequence: Synthetic oligonucleotide
uccuacuaacaugaugaua

SEQ ID NO: 396708 - RNA, 19 nt, Artificial Sequence
  Description of Artificial Sequence: Synthetic oligonucleotide
uuguuuggggaggguauga

SEQ ID NO: 396709 - RNA, 19 nt, Artificial Sequence
  Description of Artificial Sequence: Synthetic oligonucleotide
ugacagcaacagcugaguu

SEQ ID NO: 396710 - RNA, 19 nt, Artificial Sequence
  Description of Artificial Sequence: Synthetic oligonucleotide
acgucggaaaagcugcuuu

SEQ ID NO: 396711 - RNA, 19 nt, Artificial Sequence
  Description of Artificial Sequence: Synthetic oligonucleotide
uaugugggcuaaugauuau

SEQ ID NO: 396712 - RNA, 19 nt, Artificial Sequence
  Description of Artificial Sequence: Synthetic oligonucleotide
ucguuacacuguguuaagu

SEQ ID NO: 396713 - RNA, 19 nt, Artificial Sequence
  Description of Artificial Sequence: Synthetic oligonucleotide
agagucaauccuugcuuuu

SEQ ID NO: 396714 - RNA, 19 nt, Artificial Sequence
  Description of Artificial Sequence: Synthetic oligonucleotide
cugacugguugcuccugag

SEQ ID NO: 396715 - RNA, 19 nt, Artificial Sequence
  Description of Artificial Sequence: Synthetic oligonucleotide
ugucgucaaauuguauuuu

SEQ ID NO: 396716 - RNA, 19 nt, Artificial Sequence
  Description of Artificial Sequence: Synthetic oligonucleotide
uaggggcuugcaaggaaau

SEQ ID NO: 396717 - RNA, 19 nt, Artificial Sequence
  Description of Artificial Sequence: Synthetic oligonucleotide
augaagcucuaaauacuca

SEQ ID NO: 396718 - RNA, 19 nt, Artificial Sequence
  Description of Artificial Sequence: Synthetic oligonucleotide
uuacaggguaugugggcua

SEQ ID NO: 396719 - RNA, 19 nt, Artificial Sequence
  Description of Artificial Sequence: Synthetic oligonucleotide
auaauuccaaagggccugu

SEQ ID NO: 396720 - RNA, 19 nt, Artificial Sequence
  Description of Artificial Sequence: Synthetic oligonucleotide
ggacucacuuugaagacac

SEQ ID NO: 396721 - RNA, 19 nt, Artificial Sequence
  Description of Artificial Sequence: Synthetic oligonucleotide
gccaauauucacacugcag

SEQ ID NO: 396722 - RNA, 19 nt, Artificial Sequence
  Description of Artificial Sequence: Synthetic oligonucleotide
aauugacacuugccucuua

SEQ ID NO: 396723 - RNA, 19 nt, Artificial Sequence
  Description of Artificial Sequence: Synthetic oligonucleotide
ggagucacggauguagcug

SEQ ID NO: 396724 - RNA, 19 nt, Artificial Sequence
  Description of Artificial Sequence: Synthetic oligonucleotide
cucaugucgucaaauugua

SEQ ID NO: 396725 - RNA, 19 nt, Artificial Sequence
  Description of Artificial Sequence: Synthetic oligonucleotide
aguuugcuggaaugaguua

SEQ ID NO: 396726 - RNA, 19 nt, Artificial Sequence
  Description of Artificial Sequence: Synthetic oligonucleotide
acgaaacaggcagcaauga

SEQ ID NO: 396727 - RNA, 19 nt, Artificial Sequence
  Description of Artificial Sequence: Synthetic oligonucleotide
ccucuaggggcuugcaagg

SEQ ID NO: 396728 - RNA, 19 nt, Artificial Sequence
  Description of Artificial Sequence: Synthetic oligonucleotide
gugucccauaauugcaauc

SEQ ID NO: 396729 - RNA, 19 nt, Artificial Sequence
  Description of Artificial Sequence: Synthetic oligonucleotide
uacggcugcaguggaguca

SEQ ID NO: 396730 - RNA, 19 nt, Artificial Sequence
  Description of Artificial Sequence: Synthetic oligonucleotide
auccuugcuuuuaacaaua

SEQ ID NO: 396731 - RNA, 19 nt, Artificial Sequence
  Description of Artificial Sequence: Synthetic oligonucleotide
ggguaugaacaaggaaagg

SEQ ID NO: 396732 - RNA, 19 nt, Artificial Sequence
  Description of Artificial Sequence: Synthetic oligonucleotide
caggguaugugggcuaaug

SEQ ID NO: 396733 - RNA, 19 nt, Artificial Sequence
  Description of Artificial Sequence: Synthetic oligonucleotide
ggauguagcugggaaugag

SEQ ID NO: 396734 - RNA, 19 nt, Artificial Sequence
  Description of Artificial Sequence: Synthetic oligonucleotide
ucccaucuuugaguauaag

SEQ ID NO: 396735 - RNA, 19 nt, Artificial Sequence
  Description of Artificial Sequence: Synthetic oligonucleotide
caucccaucuuugaguaua

SEQ ID NO: 396736 - RNA, 19 nt, Artificial Sequence
  Description of Artificial Sequence: Synthetic oligonucleotide
ucaauccauuuuguaguuu

SEQ ID NO: 396737 - RNA, 19 nt, Artificial Sequence
  Description of Artificial Sequence: Synthetic oligonucleotide
uucccucuuaaugcaugcu

SEQ ID NO: 396738 - RNA, 19 nt, Artificial Sequence
  Description of Artificial Sequence: Synthetic oligonucleotide
agcucaugugaaaggguca

SEQ ID NO: 396739 - RNA, 19 nt, Artificial Sequence
  Description of Artificial Sequence: Synthetic oligonucleotide
ggaaugaguuaacauuugu

SEQ ID NO: 396740 - RNA, 19 nt, Artificial Sequence
  Description of Artificial Sequence: Synthetic oligonucleotide
agggugcacuccuaguaua

SEQ ID NO: 396741 - RNA, 19 nt, Artificial Sequence
  Description of Artificial Sequence: Synthetic oligonucleotide
gggcuaaugauuaucugaa

SEQ ID NO: 396742 - RNA, 19 nt, Artificial Sequence
  Description of Artificial Sequence: Synthetic oligonucleotide
uaucacgaauaugcugaau

SEQ ID NO: 396743 - RNA, 19 nt, Artificial Sequence
  Description of Artificial Sequence: Synthetic oligonucleotide
gggaaaagguucaagccaa

SEQ ID NO: 396744 - RNA, 19 nt, Artificial Sequence
  Description of Artificial Sequence: Synthetic oligonucleotide
cugcauuauagucauguuu

SEQ ID NO: 396745 - RNA, 19 nt, Artificial Sequence
  Description of Artificial Sequence: Synthetic oligonucleotide
guaaugcuuacaacauaaa

SEQ ID NO: 396746 - RNA, 19 nt, Artificial Sequence
  Description of Artificial Sequence: Synthetic oligonucleotide
gugaacacacugcuccuua

SEQ ID NO: 396747 - RNA, 19 nt, Artificial Sequence
  Description of Artificial Sequence: Synthetic oligonucleotide
gugauaucguaaacuacua

SEQ ID NO: 396748 - RNA, 19 nt, Artificial Sequence
  Description of Artificial Sequence: Synthetic oligonucleotide
cagagcagagggguauuug

SEQ ID NO: 396749 - RNA, 19 nt, Artificial Sequence
  Description of Artificial Sequence: Synthetic oligonucleotide
ugccucuuaucagcaagau

SEQ ID NO: 396750 - RNA, 19 nt, Artificial Sequence
  Description of Artificial Sequence: Synthetic oligonucleotide
ggaggguaugaacaaggaa

SEQ ID NO: 396751 - RNA, 19 nt, Artificial Sequence
  Description of Artificial Sequence: Synthetic oligonucleotide
caaguauuacaaggugaga

SEQ ID NO: 396752 - RNA, 19 nt, Artificial Sequence
  Description of Artificial Sequence: Synthetic oligonucleotide
aggcauaaaucugcauuau

SEQ ID NO: 396753 - RNA, 19 nt, Artificial Sequence
  Description of Artificial Sequence: Synthetic oligonucleotide
gggguauuugcuagucugc

SEQ ID NO: 396754 - RNA, 19 nt, Artificial Sequence
  Description of Artificial Sequence: Synthetic oligonucleotide
cucagauguccagagcaga

SEQ ID NO: 396755 - RNA, 19 nt, Artificial Sequence
  Description of Artificial Sequence: Synthetic oligonucleotide
guaguuugcuggaaugagu

SEQ ID NO: 396756 - RNA, 19 nt, Artificial Sequence
  Description of Artificial Sequence: Synthetic oligonucleotide
ccugucagacugcuguuug

SEQ ID NO: 396757 - RNA, 19 nt, Artificial Sequence
  Description of Artificial Sequence: Synthetic oligonucleotide
gguaggcaaaugcagcugu

SEQ ID NO: 396758 - RNA, 19 nt, Artificial Sequence
  Description of Artificial Sequence: Synthetic oligonucleotide
cacgaauaugcugaauugu

SEQ ID NO: 396759 - RNA, 19 nt, Artificial Sequence
  Description of Artificial Sequence: Synthetic oligonucleotide
acucaacaaaacaccuaaa

SEQ ID NO: 396760 - RNA, 19 nt, Artificial Sequence
  Description of Artificial Sequence: Synthetic oligonucleotide
cagcaaugaugaauugcaa

SEQ ID NO: 396761 - RNA, 19 nt, Artificial Sequence
  Description of Artificial Sequence: Synthetic oligonucleotide
ggguaugugggcuaaugau

SEQ ID NO: 396762 - RNA, 19 nt, Artificial Sequence
  Description of Artificial Sequence: Synthetic oligonucleotide
ggcauaaaucugcauuaua

SEQ ID NO: 396763 - RNA, 19 nt, Artificial Sequence
  Description of Artificial Sequence: Synthetic oligonucleotide
uccacgaaacaggcagcaa

SEQ ID NO: 396764 - RNA, 19 nt, Artificial Sequence
  Description of Artificial Sequence: Synthetic oligonucleotide
gcuuuacauuguauccugc

SEQ ID NO: 396765 - RNA, 19 nt, Artificial Sequence
  Description of Artificial Sequence: Synthetic oligonucleotide
cugcuuuacauuguauccu

SEQ ID NO: 396766 - RNA, 19 nt, Artificial Sequence
  Description of Artificial Sequence: Synthetic oligonucleotide
cguaaacuacuacggcugc

SEQ ID NO: 396767 - RNA, 19 nt, Artificial Sequence
  Description of Artificial Sequence: Synthetic oligonucleotide
gagggguauuugcuagucu

SEQ ID NO: 396768 - RNA, 19 nt, Artificial Sequence
  Description of Artificial Sequence: Synthetic oligonucleotide
gcaauacguuauuacugaa

SEQ ID NO: 396769 - RNA, 19 nt, Artificial Sequence
  Description of Artificial Sequence: Synthetic oligonucleotide
cugaaccguucuugaccug

SEQ ID NO: 396770 - RNA, 19 nt, Artificial Sequence
  Description of Artificial Sequence: Synthetic oligonucleotide
cugagcuagaacucacaau

SEQ ID NO: 396771 - RNA, 19 nt, Artificial Sequence
  Description of Artificial Sequence: Synthetic oligonucleotide
ggauaauuccaaagggccu

SEQ ID NO: 396772 - RNA, 19 nt, Artificial Sequence
  Description of Artificial Sequence: Synthetic oligonucleotide
caagugcucuccaaguauu

SEQ ID NO: 396773 - RNA, 19 nt, Artificial Sequence
  Description of Artificial Sequence: Synthetic oligonucleotide
gcugagauuuucaucauuu

SEQ ID NO: 396774 - RNA, 19 nt, Artificial Sequence
  Description of Artificial Sequence: Synthetic oligonucleotide
gugcacuccuaguauaauu

SEQ ID NO: 396775 - RNA, 19 nt, Artificial Sequence
  Description of Artificial Sequence: Synthetic oligonucleotide
ggcuaaugauuaucugaaa

SEQ ID NO: 396776 - RNA, 19 nt, Artificial Sequence
  Description of Artificial Sequence: Synthetic oligonucleotide
cuacuacggcugcagugga

SEQ ID NO: 396777 - RNA, 19 nt, Artificial Sequence
  Description of Artificial Sequence: Synthetic oligonucleotide
cucuuaaugcaugcuuucu

SEQ ID NO: 396778 - RNA, 19 nt, Artificial Sequence
  Description of Artificial Sequence: Synthetic oligonucleotide
agucugcgaggguucuuuu

SEQ ID NO: 396779 - RNA, 19 nt, Artificial Sequence
  Description of Artificial Sequence: Synthetic oligonucleotide
gguaugugggcuaaugauu

SEQ ID NO: 396780 - RNA, 19 nt, Artificial Sequence
  Description of Artificial Sequence: Synthetic oligonucleotide
cacuccuaguauaauuguu

SEQ ID NO: 396781 - RNA, 19 nt, Artificial Sequence
  Description of Artificial Sequence: Synthetic oligonucleotide
acgcuucaagggaaauaca

SEQ ID NO: 396782 - RNA, 19 nt, Artificial Sequence
  Description of Artificial Sequence: Synthetic oligonucleotide
cauuauagucauguuuauu

SEQ ID NO: 396783 - RNA, 19 nt, Artificial Sequence
  Description of Artificial Sequence: Synthetic oligonucleotide
caacgcuucaagggaaaua

SEQ ID NO: 396784 - RNA, 19 nt, Artificial Sequence
  Description of Artificial Sequence: Synthetic oligonucleotide
uuuggacacuguggcucau

SEQ ID NO: 396785 - RNA, 19 nt, Artificial Sequence
  Description of Artificial Sequence: Synthetic oligonucleotide
ccauaauugcaaucgcacu

SEQ ID NO: 396786 - RNA, 19 nt, Artificial Sequence
  Description of Artificial Sequence: Synthetic oligonucleotide
ggguucuuuuguugguaaa

SEQ ID NO: 396787 - RNA, 19 nt, Artificial Sequence
  Description of Artificial Sequence: Synthetic oligonucleotide
gcacuccuaguauaauugu

SEQ ID NO: 396788 - RNA, 19 nt, Artificial Sequence
  Description of Artificial Sequence: Synthetic oligonucleotide
cucuaggggcuugcaagga

SEQ ID NO: 396789 - RNA, 19 nt, Artificial Sequence
  Description of Artificial Sequence: Synthetic oligonucleotide
acacgucggaaaagcugcu

SEQ ID NO: 396790 - RNA, 19 nt, Artificial Sequence
  Description of Artificial Sequence: Synthetic oligonucleotide
gcauuauagucauguuuau

SEQ ID NO: 396791 - RNA, 19 nt, Artificial Sequence
  Description of Artificial Sequence: Synthetic oligonucleotide
ccaagugaaucuauugcuu

SEQ ID NO: 396792 - RNA, 19 nt, Artificial Sequence
  Description of Artificial Sequence: Synthetic oligonucleotide
gggugcacuccuaguauaa

SEQ ID NO: 396793 - RNA, 19 nt, Artificial Sequence
  Description of Artificial Sequence: Synthetic oligonucleotide
ccacgaaacaggcagcaau

SEQ ID NO: 396794 - RNA, 19 nt, Artificial Sequence
  Description of Artificial Sequence: Synthetic oligonucleotide
cugaauuguuuggcuuuua

SEQ ID NO: 396795 - RNA, 19 nt, Artificial Sequence
  Description of Artificial Sequence: Synthetic oligonucleotide
ccuccucaauugacacuug

SEQ ID NO: 396796 - RNA, 19 nt, Artificial Sequence
  Description of Artificial Sequence: Synthetic oligonucleotide
cuguaaaacuaaggauaau

SEQ ID NO: 396797 - RNA, 19 nt, Artificial Sequence
  Description of Artificial Sequence: Synthetic oligonucleotide
gggcuugcaaggaaauuau

SEQ ID NO: 396798 - RNA, 19 nt, Artificial Sequence
  Description of Artificial Sequence: Synthetic oligonucleotide
cccucuuaaugcaugcuuu

SEQ ID NO: 396799 - RNA, 19 nt, Artificial Sequence
  Description of Artificial Sequence: Synthetic oligonucleotide
cugcgaggguucuuuuguu

SEQ ID NO: 396800 - RNA, 19 nt, Artificial Sequence
  Description of Artificial Sequence: Synthetic oligonucleotide
ggugcacuccuaguauaau

SEQ ID NO: 396801 - RNA, 19 nt, Artificial Sequence
  Description of Artificial Sequence: Synthetic oligonucleotide
gcuagucugcgaggguucu

SEQ ID NO: 396802 - RNA, 19 nt, Artificial Sequence
  Description of Artificial Sequence: Synthetic oligonucleotide
gcaacgcuucaagggaaau

SEQ ID NO: 396803 - RNA, 19 nt, Artificial Sequence
  Description of Artificial Sequence: Synthetic oligonucleotide
cacgucggaaaagcugcuu

SEQ ID NO: 396804 - RNA, 19 nt, Artificial Sequence
  Description of Artificial Sequence: Synthetic oligonucleotide
cgaggguucuuuuguuggu

SEQ ID NO: 396805 - RNA, 19 nt, Artificial Sequence
  Description of Artificial Sequence: Synthetic oligonucleotide
uucaucucaacaaacaggc

SEQ ID NO: 396806 - RNA, 19 nt, Artificial Sequence
  Description of Artificial Sequence: Synthetic oligonucleotide
aacuguucgguucauaaag

SEQ ID NO: 396807 - RNA, 19 nt, Artificial Sequence
  Description of Artificial Sequence: Synthetic oligonucleotide
uugaaugccggauucaagg

SEQ ID NO: 396808 - RNA, 19 nt, Artificial Sequence
  Description of Artificial Sequence: Synthetic oligonucleotide
uuguugauaaaauucacga

SEQ ID NO: 396809 - RNA, 19 nt, Artificial Sequence
  Description of Artificial Sequence: Synthetic oligonucleotide
aaaaggaccagacccagcu

SEQ ID NO: 396810 - RNA, 19 nt, Artificial Sequence
  Description of Artificial Sequence: Synthetic oligonucleotide
aaacaggccgaacuugccc

SEQ ID NO: 396811 - RNA, 19 nt, Artificial Sequence
  Description of Artificial Sequence: Synthetic oligonucleotide
caucucaacaaacaggccg

SEQ ID NO: 396812 - RNA, 19 nt, Artificial Sequence
  Description of Artificial Sequence: Synthetic oligonucleotide
aucauaaccacaccgagca

SEQ ID NO: 396813 - RNA, 19 nt, Artificial Sequence
  Description of Artificial Sequence: Synthetic oligonucleotide
uguuugaugagcgagggca

SEQ ID NO: 396814 - RNA, 19 nt, Artificial Sequence
  Description of Artificial Sequence: Synthetic oligonucleotide
aagagagugccugugacuc

SEQ ID NO: 396815 - RNA, 19 nt, Artificial Sequence
  Description of Artificial Sequence: Synthetic oligonucleotide
ugaguuguucaucucaaca

SEQ ID NO: 396816 - RNA, 19 nt, Artificial Sequence
  Description of Artificial Sequence: Synthetic oligonucleotide
ugauuuugcacacgccugg

SEQ ID NO: 396817 - RNA, 19 nt, Artificial Sequence
  Description of Artificial Sequence: Synthetic oligonucleotide
uguagaacguguucagggg

SEQ ID NO: 396818 - RNA, 19 nt, Artificial Sequence
  Description of Artificial Sequence: Synthetic oligonucleotide
ugacaucagagacucagag

SEQ ID NO: 396819 - RNA, 19 nt, Artificial Sequence
  Description of Artificial Sequence: Synthetic oligonucleotide
ugugacagaaacaggggug

SEQ ID NO: 396820 - RNA, 19 nt, Artificial Sequence
  Description of Artificial Sequence: Synthetic oligonucleotide
aaagaaugcucccuugggu

SEQ ID NO: 396821 - RNA, 19 nt, Artificial Sequence
  Description of Artificial Sequence: Synthetic oligonucleotide
accagcugcguguagaacg

SEQ ID NO: 396822 - RNA, 19 nt, Artificial Sequence
  Description of Artificial Sequence: Synthetic oligonucleotide
guguagaacguguucaggg

SEQ ID NO: 396823 - RNA, 19 nt, Artificial Sequence
  Description of Artificial Sequence: Synthetic oligonucleotide
augaauggugcccacaucu

SEQ ID NO: 396824 - RNA, 19 nt, Artificial Sequence
  Description of Artificial Sequence: Synthetic oligonucleotide
uuaucugcaacuucacaga

SEQ ID NO: 396825 - RNA, 19 nt, Artificial Sequence
  Description of Artificial Sequence: Synthetic oligonucleotide
uuuaggaucucgcugggau

SEQ ID NO: 396826 - RNA, 19 nt, Artificial Sequence
  Description of Artificial Sequence: Synthetic oligonucleotide
agcaugagaagucgagggc

SEQ ID NO: 396827 - RNA, 19 nt, Artificial Sequence
  Description of Artificial Sequence: Synthetic oligonucleotide
uaaacagacccauuggcaa

SEQ ID NO: 396828 - RNA, 19 nt, Artificial Sequence
  Description of Artificial Sequence: Synthetic oligonucleotide
aacggcuucugauagcaca

SEQ ID NO: 396829 - RNA, 19 nt, Artificial Sequence
  Description of Artificial Sequence: Synthetic oligonucleotide
auaggguccacgcucccgc

SEQ ID NO: 396830 - RNA, 19 nt, Artificial Sequence
  Description of Artificial Sequence: Synthetic oligonucleotide
aaguaccuggggcaucagc

SEQ ID NO: 396831 - RNA, 19 nt, Artificial Sequence
  Description of Artificial Sequence: Synthetic oligonucleotide
agaccagaauguuaggcag

SEQ ID NO: 396832 - RNA, 19 nt, Artificial Sequence
  Description of Artificial Sequence: Synthetic oligonucleotide
uguucgguucauaaaggca

SEQ ID NO: 396833 - RNA, 19 nt, Artificial Sequence
  Description of Artificial Sequence: Synthetic oligonucleotide
ugucuuugggacccuacag

SEQ ID NO: 396834 - RNA, 19 nt, Artificial Sequence
  Description of Artificial Sequence: Synthetic oligonucleotide
uuugaaugccggauucaag

SEQ ID NO: 396835 - RNA, 19 nt, Artificial Sequence
  Description of Artificial Sequence: Synthetic oligonucleotide
cagcaugagaagucgaggg

SEQ ID NO: 396836 - RNA, 19 nt, Artificial Sequence
  Description of Artificial Sequence: Synthetic oligonucleotide
aguuuuaggggcugugaag

SEQ ID NO: 396837 - RNA, 19 nt, Artificial Sequence
  Description of Artificial Sequence: Synthetic oligonucleotide
aaguagacggacaaguaga

SEQ ID NO: 396838 - RNA, 19 nt, Artificial Sequence
  Description of Artificial Sequence: Synthetic oligonucleotide
guagacauaggguccacgc

SEQ ID NO: 396839 - RNA, 19 nt, Artificial Sequence
  Description of Artificial Sequence: Synthetic oligonucleotide
ucaagaagcgggguguagg

SEQ ID NO: 396840 - RNA, 19 nt, Artificial Sequence
  Description of Artificial Sequence: Synthetic oligonucleotide
cagagauuggaggaaaagg

SEQ ID NO: 396841 - RNA, 19 nt, Artificial Sequence
  Description of Artificial Sequence: Synthetic oligonucleotide
agaaaccuucauugggugg

SEQ ID NO: 396842 - RNA, 19 nt, Artificial Sequence
  Description of Artificial Sequence: Synthetic oligonucleotide
aaaaggugauaaaauuucu

SEQ ID NO: 396843 - RNA, 19 nt, Artificial Sequence
  Description of Artificial Sequence: Synthetic oligonucleotide
ucugaauucccuguagaca

SEQ ID NO: 396844 - RNA, 19 nt, Artificial Sequence
  Description of Artificial Sequence: Synthetic oligonucleotide
guaggugagcuucauagac

SEQ ID NO: 396845 - RNA, 19 nt, Artificial Sequence
  Description of Artificial Sequence: Synthetic oligonucleotide
ucuaugcggacauucuuca

SEQ ID NO: 396846 - RNA, 19 nt, Artificial Sequence
  Description of Artificial Sequence: Synthetic oligonucleotide
aacaggccgaacuugcccu

SEQ ID NO: 396847 - RNA, 19 nt, Artificial Sequence
  Description of Artificial Sequence: Synthetic oligonucleotide
uuaugucugaauucccugu

SEQ ID NO: 396848 - RNA, 19 nt, Artificial Sequence
  Description of Artificial Sequence: Synthetic oligonucleotide
agagccgugggaccugucc

SEQ ID NO: 396849 - RNA, 19 nt, Artificial Sequence
  Description of Artificial Sequence: Synthetic oligonucleotide
uuuuaggggcugugaagcg

SEQ ID NO: 396850 - RNA, 19 nt, Artificial Sequence
  Description of Artificial Sequence: Synthetic oligonucleotide
cuuaugucugaauucccug

SEQ ID NO: 396851 - RNA, 19 nt, Artificial Sequence
  Description of Artificial Sequence: Synthetic oligonucleotide
cuuuaugcgccauggcccg

SEQ ID NO: 396852 - RNA, 19 nt, Artificial Sequence
  Description of Artificial Sequence: Synthetic oligonucleotide
ugauggggaacaugucugg

SEQ ID NO: 396853 - RNA, 19 nt, Artificial Sequence
  Description of Artificial Sequence: Synthetic oligonucleotide
ucugauagcacagggucug

SEQ ID NO: 396854 - RNA, 19 nt, Artificial Sequence
  Description of Artificial Sequence: Synthetic oligonucleotide
acuuagaagagagugccug

SEQ ID NO: 396855 - RNA, 19 nt, Artificial Sequence
  Description of Artificial Sequence: Synthetic oligonucleotide
uucccuguagacauagggu

SEQ ID NO: 396856 - RNA, 19 nt, Artificial Sequence
  Description of Artificial Sequence: Synthetic oligonucleotide
ucccuguagacauaggguc

SEQ ID NO: 396857 - RNA, 19 nt, Artificial Sequence
  Description of Artificial Sequence: Synthetic oligonucleotide
acacccaaccccuacggag

SEQ ID NO: 396858 - RNA, 19 nt, Artificial Sequence
  Description of Artificial Sequence: Synthetic oligonucleotide
ugugaagcgauaggugggg

SEQ ID NO: 396859 - RNA, 19 nt, Artificial Sequence
  Description of Artificial Sequence: Synthetic oligonucleotide
guucgguucauaaaggcac

SEQ ID NO: 396860 - RNA, 19 nt, Artificial Sequence
  Description of Artificial Sequence: Synthetic oligonucleotide
gaggcuuuaugcgccaugg

SEQ ID NO: 396861 - RNA, 19 nt, Artificial Sequence
  Description of Artificial Sequence: Synthetic oligonucleotide
aauucacgaagggauccuc

SEQ ID NO: 396862 - RNA, 19 nt, Artificial Sequence
  Description of Artificial Sequence: Synthetic oligonucleotide
ugcucugaaugccaguagu

SEQ ID NO: 396863 - RNA, 19 nt, Artificial Sequence
  Description of Artificial Sequence: Synthetic oligonucleotide
gaagccgaggcucacguuc

SEQ ID NO: 396864 - RNA, 19 nt, Artificial Sequence
  Description of Artificial Sequence: Synthetic oligonucleotide
ggauugaccaccucgaaga

SEQ ID NO: 396865 - RNA, 19 nt, Artificial Sequence
  Description of Artificial Sequence: Synthetic oligonucleotide
uguuaggcaguauaaugua

SEQ ID NO: 396866 - RNA, 19 nt, Artificial Sequence
  Description of Artificial Sequence: Synthetic oligonucleotide
gaaauggaggcugcggugc

SEQ ID NO: 396867 - RNA, 19 nt, Artificial Sequence
  Description of Artificial Sequence: Synthetic oligonucleotide
cuguucgguucauaaaggc

SEQ ID NO: 396868 - RNA, 19 nt, Artificial Sequence
  Description of Artificial Sequence: Synthetic oligonucleotide
uggggaugccuucaaacac

SEQ ID NO: 396869 - RNA, 19 nt, Artificial Sequence
  Description of Artificial Sequence: Synthetic oligonucleotide
cauuuugaaugccggauuc

SEQ ID NO: 396870 - RNA, 19 nt, Artificial Sequence
  Description of Artificial Sequence: Synthetic oligonucleotide
gacauagcagagauuggag

SEQ ID NO: 396871 - RNA, 19 nt, Artificial Sequence
  Description of Artificial Sequence: Synthetic oligonucleotide
ucacccuuuaggaucucgc

SEQ ID NO: 396872 - RNA, 19 nt, Artificial Sequence
  Description of Artificial Sequence: Synthetic oligonucleotide
auguuaggcaguauaaugu

SEQ ID NO: 396873 - RNA, 19 nt, Artificial Sequence
  Description of Artificial Sequence: Synthetic oligonucleotide
guagaacguguucaggggc

SEQ ID NO: 396874 - RNA, 19 nt, Artificial Sequence
  Description of Artificial Sequence: Synthetic oligonucleotide
uuagccugagggaggaaga

SEQ ID NO: 396875 - RNA, 19 nt, Artificial Sequence
  Description of Artificial Sequence: Synthetic oligonucleotide
ugcguguagaacguguuca

SEQ ID NO: 396876 - RNA, 19 nt, Artificial Sequence
  Description of Artificial Sequence: Synthetic oligonucleotide
caaggcacgggcagaaacc

SEQ ID NO: 396877 - RNA, 19 nt, Artificial Sequence
  Description of Artificial Sequence: Synthetic oligonucleotide
agaguccucaagaagcggg

SEQ ID NO: 396878 - RNA, 19 nt, Artificial Sequence
  Description of Artificial Sequence: Synthetic oligonucleotide
gaucauaaccacaccgagc

SEQ ID NO: 396879 - RNA, 19 nt, Artificial Sequence
  Description of Artificial Sequence: Synthetic oligonucleotide
gauccucauagccccacag

SEQ ID NO: 396880 - RNA, 19 nt, Artificial Sequence
  Description of Artificial Sequence: Synthetic oligonucleotide
ugucugguaaguauuuguu

SEQ ID NO: 396881 - RNA, 19 nt, Artificial Sequence
  Description of Artificial Sequence: Synthetic oligonucleotide
uucccuguuugcccaaugc

SEQ ID NO: 396882 - RNA, 19 nt, Artificial Sequence
  Description of Artificial Sequence: Synthetic oligonucleotide
gacaaguagaaggguacag

SEQ ID NO: 396883 - RNA, 19 nt, Artificial Sequence
  Description of Artificial Sequence: Synthetic oligonucleotide
aacguguucaggggcucgc

SEQ ID NO: 396884 - RNA, 19 nt, Artificial Sequence
  Description of Artificial Sequence: Synthetic oligonucleotide
uuugcacacgccugggcgc

SEQ ID NO: 396885 - RNA, 19 nt, Artificial Sequence
  Description of Artificial Sequence: Synthetic oligonucleotide
aucucgcugggauugacca

SEQ ID NO: 396886 - RNA, 19 nt, Artificial Sequence
  Description of Artificial Sequence: Synthetic oligonucleotide
gacaagggcagcaugagaa

SEQ ID NO: 396887 - RNA, 19 nt, Artificial Sequence
  Description of Artificial Sequence: Synthetic oligonucleotide
uagaacguguucaggggcu

SEQ ID NO: 396888 - RNA, 19 nt, Artificial Sequence
  Description of Artificial Sequence: Synthetic oligonucleotide
gucuuugggacccuacagc

SEQ ID NO: 396889 - RNA, 19 nt, Artificial Sequence
  Description of Artificial Sequence: Synthetic oligonucleotide
uggacgcccgugaacacag

SEQ ID NO: 396890 - RNA, 19 nt, Artificial Sequence
  Description of Artificial Sequence: Synthetic oligonucleotide
gcugggauugaccaccucg

SEQ ID NO: 396891 - RNA, 19 nt, Artificial Sequence
  Description of Artificial Sequence: Synthetic oligonucleotide
ugacauuuugaaugccgga

SEQ ID NO: 396892 - RNA, 19 nt, Artificial Sequence
  Description of Artificial Sequence: Synthetic oligonucleotide
gguucauaaaggcacgcug

SEQ ID NO: 396893 - RNA, 19 nt, Artificial Sequence
  Description of Artificial Sequence: Synthetic oligonucleotide
uucuggacgcccgugaaca

SEQ ID NO: 396894 - RNA, 19 nt, Artificial Sequence
  Description of Artificial Sequence: Synthetic oligonucleotide
gaagucgagggccugggca

SEQ ID NO: 396895 - RNA, 19 nt, Artificial Sequence
  Description of Artificial Sequence: Synthetic oligonucleotide
cucauagccccacaggauc

SEQ ID NO: 396896 - RNA, 19 nt, Artificial Sequence
  Description of Artificial Sequence: Synthetic oligonucleotide
acgaagggauccucauagc

SEQ ID NO: 396897 - RNA, 19 nt, Artificial Sequence
  Description of Artificial Sequence: Synthetic oligonucleotide
gaagcgauagguggggaug

SEQ ID NO: 396898 - RNA, 19 nt, Artificial Sequence
  Description of Artificial Sequence: Synthetic oligonucleotide
uguagacauaggguccacg

SEQ ID NO: 396899 - RNA, 19 nt, Artificial Sequence
  Description of Artificial Sequence: Synthetic oligonucleotide
aaaccugcaagugcugaca

SEQ ID NO: 396900 - RNA, 19 nt, Artificial Sequence
  Description of Artificial Sequence: Synthetic oligonucleotide
agagaguccucaagaagcg

SEQ ID NO: 396901 - RNA, 19 nt, Artificial Sequence
  Description of Artificial Sequence: Synthetic oligonucleotide
gaagaaguagacggacaag

SEQ ID NO: 396902 - RNA, 19 nt, Artificial Sequence
  Description of Artificial Sequence: Synthetic oligonucleotide
aaacaggggugcaccaaac

SEQ ID NO: 396903 - RNA, 19 nt, Artificial Sequence
  Description of Artificial Sequence: Synthetic oligonucleotide
acuguucgguucauaaagg

SEQ ID NO: 396904 - RNA, 19 nt, Artificial Sequence
  Description of Artificial Sequence: Synthetic oligonucleotide
guuaggcaguauaauguag

SEQ ID NO: 396905 - RNA, 19 nt, Artificial Sequence
  Description of Artificial Sequence: Synthetic oligonucleotide
ggcuuuaugcgccauggcc

SEQ ID NO: 396906 - RNA, 19 nt, Artificial Sequence
  Description of Artificial Sequence: Synthetic oligonucleotide
ucgaucuucccuguuugcc

SEQ ID NO: 396907 - RNA, 19 nt, Artificial Sequence
  Description of Artificial Sequence: Synthetic oligonucleotide
aggcucacguuccagcaag

SEQ ID NO: 396908 - RNA, 19 nt, Artificial Sequence
  Description of Artificial Sequence: Synthetic oligonucleotide
gacccuacagcuuggcuuc

SEQ ID NO: 396909 - RNA, 19 nt, Artificial Sequence
  Description of Artificial Sequence: Synthetic oligonucleotide
ggaucauaaccacaccgag

SEQ ID NO: 396910 - RNA, 19 nt, Artificial Sequence
  Description of Artificial Sequence: Synthetic oligonucleotide
agcaaugggaggaccacgg

SEQ ID NO: 396911 - RNA, 19 nt, Artificial Sequence
  Description of Artificial Sequence: Synthetic oligonucleotide
guaaacagacccauuggca

SEQ ID NO: 396912 - RNA, 19 nt, Artificial Sequence
  Description of Artificial Sequence: Synthetic oligonucleotide
aagucgagggccugggcaa

SEQ ID NO: 396913 - RNA, 19 nt, Artificial Sequence
  Description of Artificial Sequence: Synthetic oligonucleotide
ugcugagcccauuccaucu

SEQ ID NO: 396914 - RNA, 19 nt, Artificial Sequence
  Description of Artificial Sequence: Synthetic oligonucleotide
gaagcgacagaggccacag

SEQ ID NO: 396915 - RNA, 19 nt, Artificial Sequence
  Description of Artificial Sequence: Synthetic oligonucleotide
caacugguagaugacgggc

SEQ ID NO: 396916 - RNA, 19 nt, Artificial Sequence
  Description of Artificial Sequence: Synthetic oligonucleotide
acauuuugaaugccggauu

SEQ ID NO: 396917 - RNA, 19 nt, Artificial Sequence
  Description of Artificial Sequence: Synthetic oligonucleotide
gucugaguuguucaucuca

SEQ ID NO: 396918 - RNA, 19 nt, Artificial Sequence
  Description of Artificial Sequence: Synthetic oligonucleotide
agcccauuccaucugucca

SEQ ID NO: 396919 - RNA, 19 nt, Artificial Sequence
  Description of Artificial Sequence: Synthetic oligonucleotide
gaguacaugugcagacccg

SEQ ID NO: 396920 - RNA, 19 nt, Artificial Sequence
  Description of Artificial Sequence: Synthetic oligonucleotide
cucacguuccagcaaggug

SEQ ID NO: 396921 - RNA, 19 nt, Artificial Sequence
  Description of Artificial Sequence: Synthetic oligonucleotide
uacggaguggacaguucug

SEQ ID NO: 396922 - RNA, 19 nt, Artificial Sequence
  Description of Artificial Sequence: Synthetic oligonucleotide
cucgcugggauugaccacc

SEQ ID NO: 396923 - RNA, 19 nt, Artificial Sequence
  Description of Artificial Sequence: Synthetic oligonucleotide
gugcagacccgucaggccc

SEQ ID NO: 396924 - RNA, 19 nt, Artificial Sequence
  Description of Artificial Sequence: Synthetic oligonucleotide
cucugaaugccaguaguug

SEQ ID NO: 396925 - RNA, 19 nt, Artificial Sequence
  Description of Artificial Sequence: Synthetic oligonucleotide
aggcuuuaugcgccauggc

SEQ ID NO: 396926 - RNA, 19 nt, Artificial Sequence
  Description of Artificial Sequence: Synthetic oligonucleotide
gagagugccugugacucag

SEQ ID NO: 396927 - RNA, 19 nt, Artificial Sequence
  Description of Artificial Sequence: Synthetic oligonucleotide
ggcgacagaagcgacagag

SEQ ID NO: 396928 - RNA, 19 nt, Artificial Sequence
  Description of Artificial Sequence: Synthetic oligonucleotide
ucacgaggaucauaaccac

SEQ ID NO: 396929 - RNA, 19 nt, Artificial Sequence
  Description of Artificial Sequence: Synthetic oligonucleotide
gacauaggguccacgcucc

SEQ ID NO: 396930 - RNA, 19 nt, Artificial Sequence
  Description of Artificial Sequence: Synthetic oligonucleotide
caaaccugcaagugcugac

SEQ ID NO: 396931 - RNA, 19 nt, Artificial Sequence
  Description of Artificial Sequence: Synthetic oligonucleotide
aaccugcaagugcugacau

SEQ ID NO: 396932 - RNA, 19 nt, Artificial Sequence
  Description of Artificial Sequence: Synthetic oligonucleotide
acuacuggcuucucacccu

SEQ ID NO: 396933 - RNA, 19 nt, Artificial Sequence
  Description of Artificial Sequence: Synthetic oligonucleotide
uggccuuaugucugaauuc

SEQ ID NO: 396934 - RNA, 19 nt, Artificial Sequence
  Description of Artificial Sequence: Synthetic oligonucleotide
aaucaugguaggugagcuu

SEQ ID NO: 396935 - RNA, 19 nt, Artificial Sequence
  Description of Artificial Sequence: Synthetic oligonucleotide
aguacaugugcagacccgu

SEQ ID NO: 396936 - RNA, 19 nt, Artificial Sequence
  Description of Artificial Sequence: Synthetic oligonucleotide
aaggcacgggcagaaaccu

SEQ ID NO: 396937 - RNA, 19 nt, Artificial Sequence
  Description of Artificial Sequence: Synthetic oligonucleotide
uuccggacugaagaauucc

SEQ ID NO: 396938 - RNA, 19 nt, Artificial Sequence
  Description of Artificial Sequence: Synthetic oligonucleotide
acgacgcccagccccaccg

SEQ ID NO: 396939 - RNA, 19 nt, Artificial Sequence
  Description of Artificial Sequence: Synthetic oligonucleotide
ggauucaaggcacgggcag

SEQ ID NO: 396940 - RNA, 19 nt, Artificial Sequence
  Description of Artificial Sequence: Synthetic oligonucleotide
gugauuuugcacacgccug

SEQ ID NO: 396941 - RNA, 19 nt, Artificial Sequence
  Description of Artificial Sequence: Synthetic oligonucleotide
uuugauguagaggcuuauc

SEQ ID NO: 396942 - RNA, 19 nt, Artificial Sequence
  Description of Artificial Sequence: Synthetic oligonucleotide
ggucugaccaagcuaucag

SEQ ID NO: 396943 - RNA, 19 nt, Artificial Sequence
  Description of Artificial Sequence: Synthetic oligonucleotide
cagagacucagaguaggcc

SEQ ID NO: 396944 - RNA, 19 nt, Artificial Sequence
  Description of Artificial Sequence: Synthetic oligonucleotide
aagugagggugugacagaa

SEQ ID NO: 396945 - RNA, 19 nt, Artificial Sequence
  Description of Artificial Sequence: Synthetic oligonucleotide
ggggacaggcgacagaagc

SEQ ID NO: 396946 - RNA, 19 nt, Artificial Sequence
  Description of Artificial Sequence: Synthetic oligonucleotide
cugcgcaacugguagauga

SEQ ID NO: 396947 - RNA, 19 nt, Artificial Sequence
  Description of Artificial Sequence: Synthetic oligonucleotide
ugcgcaacugguagaugac

SEQ ID NO: 396948 - RNA, 19 nt, Artificial Sequence
  Description of Artificial Sequence: Synthetic oligonucleotide
gcuuuaugcgccauggccc

SEQ ID NO: 396949 - RNA, 19 nt, Artificial Sequence
  Description of Artificial Sequence: Synthetic oligonucleotide
gaacaugucugguaaguau

SEQ ID NO: 396950 - RNA, 19 nt, Artificial Sequence
  Description of Artificial Sequence: Synthetic oligonucleotide
guaccugcuguuugaugag

SEQ ID NO: 396951 - RNA, 19 nt, Artificial Sequence
  Description of Artificial Sequence: Synthetic oligonucleotide
ugcagacuugcucuccauc

SEQ ID NO: 396952 - RNA, 19 nt, Artificial Sequence
  Description of Artificial Sequence: Synthetic oligonucleotide
uccuuauccugcgagcccu

SEQ ID NO: 396953 - RNA, 19 nt, Artificial Sequence
  Description of Artificial Sequence: Synthetic oligonucleotide
uggggacuacagcuuuuag

SEQ ID NO: 396954 - RNA, 19 nt, Artificial Sequence
  Description of Artificial Sequence: Synthetic oligonucleotide
acauaggguccacgcuccc

SEQ ID NO: 396955 - RNA, 19 nt, Artificial Sequence
  Description of Artificial Sequence: Synthetic oligonucleotide
uuaugcgccauggcccggg

SEQ ID NO: 396956 - RNA, 19 nt, Artificial Sequence
  Description of Artificial Sequence: Synthetic oligonucleotide
ggccacuuagaagagagug

SEQ ID NO: 396957 - RNA, 19 nt, Artificial Sequence
  Description of Artificial Sequence: Synthetic oligonucleotide
gacgcccgugaacacagug

SEQ ID NO: 396958 - RNA, 19 nt, Artificial Sequence
  Description of Artificial Sequence: Synthetic oligonucleotide
ccacuuagaagagagugcc

SEQ ID NO: 396959 - RNA, 19 nt, Artificial Sequence
  Description of Artificial Sequence: Synthetic oligonucleotide
cacgcucccgcacuacugg

SEQ ID NO: 396960 - RNA, 19 nt, Artificial Sequence
  Description of Artificial Sequence: Synthetic oligonucleotide
gggauugaccaccucgaag

SEQ ID NO: 396961 - RNA, 19 nt, Artificial Sequence
  Description of Artificial Sequence: Synthetic oligonucleotide
uggucugaccaagcuauca

SEQ ID NO: 396962 - RNA, 19 nt, Artificial Sequence
  Description of Artificial Sequence: Synthetic oligonucleotide
agaggcuuuaugcgccaug

SEQ ID NO: 396963 - RNA, 19 nt, Artificial Sequence
  Description of Artificial Sequence: Synthetic oligonucleotide
uguccgcugagagaguccu

SEQ ID NO: 396964 - RNA, 19 nt, Artificial Sequence
  Description of Artificial Sequence: Synthetic oligonucleotide
ggccuuaugucugaauucc

SEQ ID NO: 396965 - RNA, 19 nt, Artificial Sequence
  Description of Artificial Sequence: Synthetic oligonucleotide
aggcaguauaauguaguca

SEQ ID NO: 396966 - RNA, 19 nt, Artificial Sequence
  Description of Artificial Sequence: Synthetic oligonucleotide
gcaugagaagucgagggcc

SEQ ID NO: 396967 - RNA, 19 nt, Artificial Sequence
  Description of Artificial Sequence: Synthetic oligonucleotide
gacaucagagacucagagu

SEQ ID NO: 396968 - RNA, 19 nt, Artificial Sequence
  Description of Artificial Sequence: Synthetic oligonucleotide
cuuccggacugaagaauuc

SEQ ID NO: 396969 - RNA, 19 nt, Artificial Sequence
  Description of Artificial Sequence: Synthetic oligonucleotide
uguuugcccaaugcccuug

SEQ ID NO: 396970 - RNA, 19 nt, Artificial Sequence
  Description of Artificial Sequence: Synthetic oligonucleotide
cugggauugaccaccucga

SEQ ID NO: 396971 - RNA, 19 nt, Artificial Sequence
  Description of Artificial Sequence: Synthetic oligonucleotide
ucauaaccacaccgagcac

SEQ ID NO: 396972 - RNA, 19 nt, Artificial Sequence
  Description of Artificial Sequence: Synthetic oligonucleotide
augagcgagggcaucacga

SEQ ID NO: 396973 - RNA, 19 nt, Artificial Sequence
  Description of Artificial Sequence: Synthetic oligonucleotide
uuaggaucucgcugggauu

SEQ ID NO: 396974 - RNA, 19 nt, Artificial Sequence
  Description of Artificial Sequence: Synthetic oligonucleotide
gaacguguucaggggcucg

SEQ ID NO: 396975 - RNA, 19 nt, Artificial Sequence
  Description of Artificial Sequence: Synthetic oligonucleotide
uagucacucucagagccgu

SEQ ID NO: 396976 - RNA, 19 nt, Artificial Sequence
  Description of Artificial Sequence: Synthetic oligonucleotide
gacauuuugaaugccggau

SEQ ID NO: 396977 - RNA, 19 nt, Artificial Sequence
  Description of Artificial Sequence: Synthetic oligonucleotide
gaagugagggugugacaga

SEQ ID NO: 396978 - RNA, 19 nt, Artificial Sequence
  Description of Artificial Sequence: Synthetic oligonucleotide
ucgguucauaaaggcacgc

SEQ ID NO: 396979 - RNA, 19 nt, Artificial Sequence
  Description of Artificial Sequence: Synthetic oligonucleotide
gaaugccaguaguugaccu

SEQ ID NO: 396980 - RNA, 19 nt, Artificial Sequence
  Description of Artificial Sequence: Synthetic oligonucleotide
aggggcucgccgcccaugg

SEQ ID NO: 396981 - RNA, 19 nt, Artificial Sequence
  Description of Artificial Sequence: Synthetic oligonucleotide
agaacguguucaggggcuc

SEQ ID NO: 396982 - RNA, 19 nt, Artificial Sequence
  Description of Artificial Sequence: Synthetic oligonucleotide
caccucgaagaaguagacg

SEQ ID NO: 396983 - RNA, 19 nt, Artificial Sequence
  Description of Artificial Sequence: Synthetic oligonucleotide
ucuucaguaccugcuguuu

SEQ ID NO: 396984 - RNA, 19 nt, Artificial Sequence
  Description of Artificial Sequence: Synthetic oligonucleotide
auguccgcgugugcggccc

SEQ ID NO: 396985 - RNA, 19 nt, Artificial Sequence
  Description of Artificial Sequence: Synthetic oligonucleotide
cugagugauuuugcacacg

SEQ ID NO: 396986 - RNA, 19 nt, Artificial Sequence
  Description of Artificial Sequence: Synthetic oligonucleotide
cucccuugggucaggguuc

SEQ ID NO: 396987 - RNA, 19 nt, Artificial Sequence
  Description of Artificial Sequence: Synthetic oligonucleotide
ugggauugaccaccucgaa

SEQ ID NO: 396988 - RNA, 19 nt, Artificial Sequence
  Description of Artificial Sequence: Synthetic oligonucleotide
ccggaagugccauugauca

SEQ ID NO: 396989 - RNA, 19 nt, Artificial Sequence
  Description of Artificial Sequence: Synthetic oligonucleotide
ugccggauucaaggcacgg

SEQ ID NO: 396990 - RNA, 19 nt, Artificial Sequence
  Description of Artificial Sequence: Synthetic oligonucleotide
ccggauucaaggcacgggc

SEQ ID NO: 396991 - RNA, 19 nt, Artificial Sequence
  Description of Artificial Sequence: Synthetic oligonucleotide
gugucuuugggacccuaca

SEQ ID NO: 396992 - RNA, 19 nt, Artificial Sequence
  Description of Artificial Sequence: Synthetic oligonucleotide
uuugcccaaugcccuugac

SEQ ID NO: 396993 - RNA, 19 nt, Artificial Sequence
  Description of Artificial Sequence: Synthetic oligonucleotide
aguucuggacgcccgugaa

SEQ ID NO: 396994 - RNA, 19 nt, Artificial Sequence
  Description of Artificial Sequence: Synthetic oligonucleotide
aguagacggacaaguagaa

SEQ ID NO: 396995 - RNA, 19 nt, Artificial Sequence
  Description of Artificial Sequence: Synthetic oligonucleotide
gauucaaggcacgggcaga

SEQ ID NO: 396996 - RNA, 19 nt, Artificial Sequence
  Description of Artificial Sequence: Synthetic oligonucleotide
ggcaucacgaggaucauaa

SEQ ID NO: 396997 - RNA, 19 nt, Artificial Sequence
  Description of Artificial Sequence: Synthetic oligonucleotide
cagcuuuuagccugaggga

SEQ ID NO: 396998 - RNA, 19 nt, Artificial Sequence
  Description of Artificial Sequence: Synthetic oligonucleotide
cucacccuuuaggaucucg

SEQ ID NO: 396999 - RNA, 19 nt, Artificial Sequence
  Description of Artificial Sequence: Synthetic oligonucleotide
agacuugcucuccaucauu

SEQ ID NO: 397000 - RNA, 19 nt, Artificial Sequence
  Description of Artificial Sequence: Synthetic oligonucleotide
ggccagaggcuuuaugcgc

SEQ ID NO: 397001 - RNA, 19 nt, Artificial Sequence
  Description of Artificial Sequence: Synthetic oligonucleotide
acggaguggacaguucugu

SEQ ID NO: 397002 - RNA, 19 nt, Artificial Sequence
  Description of Artificial Sequence: Synthetic oligonucleotide
agcccagagucugaguugu

SEQ ID NO: 397003 - RNA, 19 nt, Artificial Sequence
  Description of Artificial Sequence: Synthetic oligonucleotide
uuuaugcgccauggcccgg

SEQ ID NO: 397004 - RNA, 19 nt, Artificial Sequence
  Description of Artificial Sequence: Synthetic oligonucleotide
gcuuuuagccugagggagg

SEQ ID NO: 397005 - RNA, 19 nt, Artificial Sequence
  Description of Artificial Sequence: Synthetic oligonucleotide
agagagugccugugacuca

SEQ ID NO: 397006 - RNA, 19 nt, Artificial Sequence
  Description of Artificial Sequence: Synthetic oligonucleotide
gcacacccaaccccuacgg

SEQ ID NO: 397007 - RNA, 19 nt, Artificial Sequence
  Description of Artificial Sequence: Synthetic oligonucleotide
cuuuuagccugagggagga

SEQ ID NO: 397008 - RNA, 19 nt, Artificial Sequence
  Description of Artificial Sequence: Synthetic oligonucleotide
acguguucaggggcucgcc

SEQ ID NO: 397009 - RNA, 19 nt, Artificial Sequence
  Description of Artificial Sequence: Synthetic oligonucleotide
gguucagacccagaacggc

SEQ ID NO: 397010 - RNA, 19 nt, Artificial Sequence
  Description of Artificial Sequence: Synthetic oligonucleotide
cacgaggaucauaaccaca

SEQ ID NO: 397011 - RNA, 19 nt, Artificial Sequence
  Description of Artificial Sequence: Synthetic oligonucleotide
ucucgcugggauugaccac

SEQ ID NO: 397012 - RNA, 19 nt, Artificial Sequence
  Description of Artificial Sequence: Synthetic oligonucleotide
caguaccugcuguuugaug

SEQ ID NO: 397013 - RNA, 19 nt, Artificial Sequence
  Description of Artificial Sequence: Synthetic oligonucleotide
cccuguagacauagggucc

SEQ ID NO: 397014 - RNA, 19 nt, Artificial Sequence
  Description of Artificial Sequence: Synthetic oligonucleotide
uucuugcagcaccgugccc

SEQ ID NO: 397015 - RNA, 19 nt, Artificial Sequence
  Description of Artificial Sequence: Synthetic oligonucleotide
guucuggacgcccgugaac

SEQ ID NO: 397016 - RNA, 19 nt, Artificial Sequence
  Description of Artificial Sequence: Synthetic oligonucleotide
gccacuuagaagagagugc

SEQ ID NO: 397017 - RNA, 19 nt, Artificial Sequence
  Description of Artificial Sequence: Synthetic oligonucleotide
cugcguguagaacguguuc

SEQ ID NO: 397018 - RNA, 19 nt, Artificial Sequence
  Description of Artificial Sequence: Synthetic oligonucleotide
uggcaguugcaauccccac

SEQ ID NO: 397019 - RNA, 19 nt, Artificial Sequence
  Description of Artificial Sequence: Synthetic oligonucleotide
cuuagaagagagugccugu

SEQ ID NO: 397020 - RNA, 19 nt, Artificial Sequence
  Description of Artificial Sequence: Synthetic oligonucleotide
guagaaggguacagggauc

SEQ ID NO: 397021 - RNA, 19 nt, Artificial Sequence
  Description of Artificial Sequence: Synthetic oligonucleotide
guugcaauccccacagccu

SEQ ID NO: 397022 - RNA, 19 nt, Artificial Sequence
  Description of Artificial Sequence: Synthetic oligonucleotide
cucaagaagcgggguguag

SEQ ID NO: 397023 - RNA, 19 nt, Artificial Sequence
  Description of Artificial Sequence: Synthetic oligonucleotide
agaagcgacagaggccaca

SEQ ID NO: 397024 - RNA, 19 nt, Artificial Sequence
  Description of Artificial Sequence: Synthetic oligonucleotide
uagccugagggaggaagac

SEQ ID NO: 397025 - RNA, 19 nt, Artificial Sequence
  Description of Artificial Sequence: Synthetic oligonucleotide
guaggccugaauggccucc

SEQ ID NO: 397026 - RNA, 19 nt, Artificial Sequence
  Description of Artificial Sequence: Synthetic oligonucleotide
ggcaguugcaauccccaca

SEQ ID NO: 397027 - RNA, 19 nt, Artificial Sequence
  Description of Artificial Sequence: Synthetic oligonucleotide
cuccaucauuacugcgccc

SEQ ID NO: 397028 - RNA, 19 nt, Artificial Sequence
  Description of Artificial Sequence: Synthetic oligonucleotide
cauagaccugcaggcuucc

SEQ ID NO: 397029 - RNA, 19 nt, Artificial Sequence
  Description of Artificial Sequence: Synthetic oligonucleotide
acggacaaguagaagggua

SEQ ID NO: 397030 - RNA, 19 nt, Artificial Sequence
  Description of Artificial Sequence: Synthetic oligonucleotide
uaugcgccauggcccgggc

SEQ ID NO: 397031 - RNA, 19 nt, Artificial Sequence
  Description of Artificial Sequence: Synthetic oligonucleotide
ggguucagacccagaacgg

SEQ ID NO: 397032 - RNA, 19 nt, Artificial Sequence
  Description of Artificial Sequence: Synthetic oligonucleotide
cgaucuucccuguuugccc

SEQ ID NO: 397033 - RNA, 19 nt, Artificial Sequence
  Description of Artificial Sequence: Synthetic oligonucleotide
cgaacuugcccuugauggg

SEQ ID NO: 397034 - RNA, 19 nt, Artificial Sequence
  Description of Artificial Sequence: Synthetic oligonucleotide
cccgugaacacagugaaga

SEQ ID NO: 397035 - RNA, 19 nt, Artificial Sequence
  Description of Artificial Sequence: Synthetic oligonucleotide
auagaccugcaggcuuccg

SEQ ID NO: 397036 - RNA, 19 nt, Artificial Sequence
  Description of Artificial Sequence: Synthetic oligonucleotide
gguggcaguugcaaucccc

SEQ ID NO: 397037 - RNA, 19 nt, Artificial Sequence
  Description of Artificial Sequence: Synthetic oligonucleotide
uugcacacgccugggcgca

SEQ ID NO: 397038 - RNA, 19 nt, Artificial Sequence
  Description of Artificial Sequence: Synthetic oligonucleotide
gcggacuguccgcugagag

SEQ ID NO: 397039 - RNA, 19 nt, Artificial Sequence
  Description of Artificial Sequence: Synthetic oligonucleotide
cauguccgcgugugcggcc

SEQ ID NO: 397040 - RNA, 19 nt, Artificial Sequence
  Description of Artificial Sequence: Synthetic oligonucleotide
ugcccggaagugccauuga

SEQ ID NO: 397041 - RNA, 19 nt, Artificial Sequence
  Description of Artificial Sequence: Synthetic oligonucleotide
cggacaaguagaaggguac

SEQ ID NO: 397042 - RNA, 19 nt, Artificial Sequence
  Description of Artificial Sequence: Synthetic oligonucleotide
uggcugcgcaacugguaga

SEQ ID NO: 397043 - RNA, 19 nt, Artificial Sequence
  Description of Artificial Sequence: Synthetic oligonucleotide
cuacggaguggacaguucu

SEQ ID NO: 397044 - RNA, 19 nt, Artificial Sequence
  Description of Artificial Sequence: Synthetic oligonucleotide
ggcacaagaggcugaugca

SEQ ID NO: 397045 - RNA, 19 nt, Artificial Sequence
  Description of Artificial Sequence: Synthetic oligonucleotide
acccauuggcaaacaaagu

SEQ ID NO: 397046 - RNA, 19 nt, Artificial Sequence
  Description of Artificial Sequence: Synthetic oligonucleotide
ccuccuuauccugcgagcc

SEQ ID NO: 397047 - RNA, 19 nt, Artificial Sequence
  Description of Artificial Sequence: Synthetic oligonucleotide
uguccgcgugugcggcccg

SEQ ID NO: 397048 - RNA, 19 nt, Artificial Sequence
  Description of Artificial Sequence: Synthetic oligonucleotide
ucgcugggauugaccaccu

SEQ ID NO: 397049 - RNA, 19 nt, Artificial Sequence
  Description of Artificial Sequence: Synthetic oligonucleotide
cugcccggaagugccauug

SEQ ID NO: 397050 - RNA, 19 nt, Artificial Sequence
  Description of Artificial Sequence: Synthetic oligonucleotide
acaguucauggggauccca

SEQ ID NO: 397051 - RNA, 19 nt, Artificial Sequence
  Description of Artificial Sequence: Synthetic oligonucleotide
ccaaaaggugauaaaauuu

SEQ ID NO: 397052 - RNA, 19 nt, Artificial Sequence
  Description of Artificial Sequence: Synthetic oligonucleotide
ggggaacaugucugguaag

SEQ ID NO: 397053 - RNA, 19 nt, Artificial Sequence
  Description of Artificial Sequence: Synthetic oligonucleotide
guuugcccaaugcccuuga

SEQ ID NO: 397054 - RNA, 19 nt, Artificial Sequence
  Description of Artificial Sequence: Synthetic oligonucleotide
acuggcggacuguccgcug

SEQ ID NO: 397055 - RNA, 19 nt, Artificial Sequence
  Description of Artificial Sequence: Synthetic oligonucleotide
cugauagcacagggucugc

SEQ ID NO: 397056 - RNA, 19 nt, Artificial Sequence
  Description of Artificial Sequence: Synthetic oligonucleotide
gugacaucagagacucaga

SEQ ID NO: 397057 - RNA, 19 nt, Artificial Sequence
  Description of Artificial Sequence: Synthetic oligonucleotide
gaggaccacgggcucgauc

SEQ ID NO: 397058 - RNA, 19 nt, Artificial Sequence
  Description of Artificial Sequence: Synthetic oligonucleotide
ccgugaacacagugaagag

SEQ ID NO: 397059 - RNA, 19 nt, Artificial Sequence
  Description of Artificial Sequence: Synthetic oligonucleotide
acgcccgugaacacaguga

SEQ ID NO: 397060 - RNA, 19 nt, Artificial Sequence
  Description of Artificial Sequence: Synthetic oligonucleotide
ggcacgggcagaaaccuuc

SEQ ID NO: 397061 - RNA, 19 nt, Artificial Sequence
  Description of Artificial Sequence: Synthetic oligonucleotide
gccuccuuauccugcgagc

SEQ ID NO: 397062 - RNA, 19 nt, Artificial Sequence
  Description of Artificial Sequence: Synthetic oligonucleotide
ucgagggccugggcaaggc

SEQ ID NO: 397063 - RNA, 19 nt, Artificial Sequence
  Description of Artificial Sequence: Synthetic oligonucleotide
guacagggaucuccuucca

SEQ ID NO: 397064 - RNA, 19 nt, Artificial Sequence
  Description of Artificial Sequence: Synthetic oligonucleotide
ugggacccuacagcuuggc

SEQ ID NO: 397065 - RNA, 19 nt, Artificial Sequence
  Description of Artificial Sequence: Synthetic oligonucleotide
cccggaagugccauugauc

SEQ ID NO: 397066 - RNA, 19 nt, Artificial Sequence
  Description of Artificial Sequence: Synthetic oligonucleotide
ucagagccgugggaccugu

SEQ ID NO: 397067 - RNA, 19 nt, Artificial Sequence
  Description of Artificial Sequence: Synthetic oligonucleotide
gccggauucaaggcacggg

SEQ ID NO: 397068 - RNA, 19 nt, Artificial Sequence
  Description of Artificial Sequence: Synthetic oligonucleotide
gcucugcucaaaccacagc

SEQ ID NO: 397069 - RNA, 19 nt, Artificial Sequence
  Description of Artificial Sequence: Synthetic oligonucleotide
uguuggccuuaugucugaa

SEQ ID NO: 397070 - RNA, 19 nt, Artificial Sequence
  Description of Artificial Sequence: Synthetic oligonucleotide
guacaugugcagacccguc

SEQ ID NO: 397071 - RNA, 19 nt, Artificial Sequence
  Description of Artificial Sequence: Synthetic oligonucleotide
gaacggcuucugauagcac

SEQ ID NO: 397072 - RNA, 19 nt, Artificial Sequence
  Description of Artificial Sequence: Synthetic oligonucleotide
ggacaaguagaaggguaca

SEQ ID NO: 397073 - RNA, 19 nt, Artificial Sequence
  Description of Artificial Sequence: Synthetic oligonucleotide
caccgagcacagcgcacag

SEQ ID NO: 397074 - RNA, 19 nt, Artificial Sequence
  Description of Artificial Sequence: Synthetic oligonucleotide
ggcgcaugugugcugugca

SEQ ID NO: 397075 - RNA, 19 nt, Artificial Sequence
  Description of Artificial Sequence: Synthetic oligonucleotide
caacaaacaggccgaacuu

SEQ ID NO: 397076 - RNA, 19 nt, Artificial Sequence
  Description of Artificial Sequence: Synthetic oligonucleotide
ggaccuguccggcuggaaa

SEQ ID NO: 397077 - RNA, 19 nt, Artificial Sequence
  Description of Artificial Sequence: Synthetic oligonucleotide
gaccacgggcucgaucuuc

SEQ ID NO: 397078 - RNA, 19 nt, Artificial Sequence
  Description of Artificial Sequence: Synthetic oligonucleotide
gcgcaugugugcugugcag

SEQ ID NO: 397079 - RNA, 19 nt, Artificial Sequence
  Description of Artificial Sequence: Synthetic oligonucleotide
gucgagggccugggcaagg

SEQ ID NO: 397080 - RNA, 19 nt, Artificial Sequence
  Description of Artificial Sequence: Synthetic oligonucleotide
gacggacaaguagaagggu

SEQ ID NO: 397081 - RNA, 19 nt, Artificial Sequence
  Description of Artificial Sequence: Synthetic oligonucleotide
cacccuuuaggaucucgcu

SEQ ID NO: 397082 - RNA, 19 nt, Artificial Sequence
  Description of Artificial Sequence: Synthetic oligonucleotide
cuuuaggaucucgcuggga

SEQ ID NO: 397083 - RNA, 19 nt, Artificial Sequence
  Description of Artificial Sequence: Synthetic oligonucleotide
acgccugggcgcaugugug

SEQ ID NO: 397084 - RNA, 19 nt, Artificial Sequence
  Description of Artificial Sequence: Synthetic oligonucleotide
ccuuaugucugaauucccu

SEQ ID NO: 397085 - RNA, 19 nt, Artificial Sequence
  Description of Artificial Sequence: Synthetic oligonucleotide
cuucauagaccugcaggcu

SEQ ID NO: 397086 - RNA, 19 nt, Artificial Sequence
  Description of Artificial Sequence: Synthetic oligonucleotide
ccagugaccggauggaugu

SEQ ID NO: 397087 - RNA, 19 nt, Artificial Sequence
  Description of Artificial Sequence: Synthetic oligonucleotide
uccgcgugugcggcccggg

SEQ ID NO: 397088 - RNA, 19 nt, Artificial Sequence
  Description of Artificial Sequence: Synthetic oligonucleotide
gccuuaugucugaauuccc

SEQ ID NO: 397089 - RNA, 19 nt, Artificial Sequence
  Description of Artificial Sequence: Synthetic oligonucleotide
cacacccaaccccuacgga

SEQ ID NO: 397090 - RNA, 19 nt, Artificial Sequence
  Description of Artificial Sequence: Synthetic oligonucleotide
cuggcggacuguccgcuga

SEQ ID NO: 397091 - RNA, 19 nt, Artificial Sequence
  Description of Artificial Sequence: Synthetic oligonucleotide
ggaacaugucugguaagua

SEQ ID NO: 397092 - RNA, 19 nt, Artificial Sequence
  Description of Artificial Sequence: Synthetic oligonucleotide
gucccuggucccugaguga

SEQ ID NO: 397093 - RNA, 19 nt, Artificial Sequence
  Description of Artificial Sequence: Synthetic oligonucleotide
ccauuggcaaacaaaguuu

SEQ ID NO: 397094 - RNA, 19 nt, Artificial Sequence
  Description of Artificial Sequence: Synthetic oligonucleotide
cuggacgcccgugaacaca

SEQ ID NO: 397095 - RNA, 19 nt, Artificial Sequence
  Description of Artificial Sequence: Synthetic oligonucleotide
ugggcgcaugugugcugug

SEQ ID NO: 397096 - RNA, 19 nt, Artificial Sequence
  Description of Artificial Sequence: Synthetic oligonucleotide
caaccccuacggaguggac

SEQ ID NO: 397097 - RNA, 19 nt, Artificial Sequence
  Description of Artificial Sequence: Synthetic oligonucleotide
ugcaggcuuccggacugaa

SEQ ID NO: 397098 - RNA, 19 nt, Artificial Sequence
  Description of Artificial Sequence: Synthetic oligonucleotide
gcaucacgaggaucauaac

SEQ ID NO: 397099 - RNA, 19 nt, Artificial Sequence
  Description of Artificial Sequence: Synthetic oligonucleotide
gugaagcgauaggugggga

SEQ ID NO: 397100 - RNA, 19 nt, Artificial Sequence
  Description of Artificial Sequence: Synthetic oligonucleotide
ggcucacguuccagcaagg

SEQ ID NO: 397101 - RNA, 19 nt, Artificial Sequence
  Description of Artificial Sequence: Synthetic oligonucleotide
augcgccauggcccgggca

SEQ ID NO: 397102 - RNA, 19 nt, Artificial Sequence
  Description of Artificial Sequence: Synthetic oligonucleotide
ccuacggaguggacaguuc

SEQ ID NO: 397103 - RNA, 19 nt, Artificial Sequence
  Description of Artificial Sequence: Synthetic oligonucleotide
aucugcccggaagugccau

SEQ ID NO: 397104 - RNA, 19 nt, Artificial Sequence
  Description of Artificial Sequence: Synthetic oligonucleotide
gcacuggcggacuguccgc

SEQ ID NO: 397105 - RNA, 19 nt, Artificial Sequence
  Description of Artificial Sequence: Synthetic oligonucleotide
ugcccuugauggggaacau

SEQ ID NO: 397106 - RNA, 19 nt, Artificial Sequence
  Description of Artificial Sequence: Synthetic oligonucleotide
gcagcgggucugucccugg

SEQ ID NO: 397107 - RNA, 19 nt, Artificial Sequence
  Description of Artificial Sequence: Synthetic oligonucleotide
ggauccucauagccccaca

SEQ ID NO: 397108 - RNA, 19 nt, Artificial Sequence
  Description of Artificial Sequence: Synthetic oligonucleotide
ccacgcucccgcacuacug

SEQ ID NO: 397109 - RNA, 19 nt, Artificial Sequence
  Description of Artificial Sequence: Synthetic oligonucleotide
gggacaguugcaggugaca

SEQ ID NO: 397110 - RNA, 19 nt, Artificial Sequence
  Description of Artificial Sequence: Synthetic oligonucleotide
ggacaguucugucuuccau

SEQ ID NO: 397111 - RNA, 19 nt, Artificial Sequence
  Description of Artificial Sequence: Synthetic oligonucleotide
cgcugagagaguccucaag

SEQ ID NO: 397112 - RNA, 19 nt, Artificial Sequence
  Description of Artificial Sequence: Synthetic oligonucleotide
ugggaccuguccggcugga

SEQ ID NO: 397113 - RNA, 19 nt, Artificial Sequence
  Description of Artificial Sequence: Synthetic oligonucleotide
ggucuaugcggacauucuu

SEQ ID NO: 397114 - RNA, 19 nt, Artificial Sequence
  Description of Artificial Sequence: Synthetic oligonucleotide
agcgaggacugggguguca

SEQ ID NO: 397115 - RNA, 19 nt, Artificial Sequence
  Description of Artificial Sequence: Synthetic oligonucleotide
ccauguccgcgugugcggc

SEQ ID NO: 397116 - RNA, 19 nt, Artificial Sequence
  Description of Artificial Sequence: Synthetic oligonucleotide
cuuugauguagaggcuuau

SEQ ID NO: 397117 - RNA, 19 nt, Artificial Sequence
  Description of Artificial Sequence: Synthetic oligonucleotide
ggaucucgcugggauugac

SEQ ID NO: 397118 - RNA, 19 nt, Artificial Sequence
  Description of Artificial Sequence: Synthetic oligonucleotide
gcauuucuccuggcugcgc

SEQ ID NO: 397119 - RNA, 19 nt, Artificial Sequence
  Description of Artificial Sequence: Synthetic oligonucleotide
cacgggcucgaucuucccu

SEQ ID NO: 397120 - RNA, 19 nt, Artificial Sequence
  Description of Artificial Sequence: Synthetic oligonucleotide
guccgcgugugcggcccgg

SEQ ID NO: 397121 - RNA, 19 nt, Artificial Sequence
  Description of Artificial Sequence: Synthetic oligonucleotide
cagugaccggauggauguc

SEQ ID NO: 397122 - RNA, 19 nt, Artificial Sequence
  Description of Artificial Sequence: Synthetic oligonucleotide
ccuugggucaggguucaga

SEQ ID NO: 397123 - RNA, 19 nt, Artificial Sequence
  Description of Artificial Sequence: Synthetic oligonucleotide
ccaaccccuacggagugga

SEQ ID NO: 397124 - RNA, 19 nt, Artificial Sequence
  Description of Artificial Sequence: Synthetic oligonucleotide
ggcucgaucuucccuguuu

SEQ ID NO: 397125 - RNA, 19 nt, Artificial Sequence
  Description of Artificial Sequence: Synthetic oligonucleotide
gccgaggcucacguuccag

SEQ ID NO: 397126 - RNA, 19 nt, Artificial Sequence
  Description of Artificial Sequence: Synthetic oligonucleotide
cagagccgugggaccuguc

SEQ ID NO: 397127 - RNA, 19 nt, Artificial Sequence
  Description of Artificial Sequence: Synthetic oligonucleotide
gggucuaugcggacauucu

SEQ ID NO: 397128 - RNA, 19 nt, Artificial Sequence
  Description of Artificial Sequence: Synthetic oligonucleotide
caggggcucgccgcccaug

SEQ ID NO: 397129 - RNA, 19 nt, Artificial Sequence
  Description of Artificial Sequence: Synthetic oligonucleotide
ccagcugcguguagaacgu

SEQ ID NO: 397130 - RNA, 19 nt, Artificial Sequence
  Description of Artificial Sequence: Synthetic oligonucleotide
ccugggcgcaugugugcug

SEQ ID NO: 397131 - RNA, 19 nt, Artificial Sequence
  Description of Artificial Sequence: Synthetic oligonucleotide
cugggcgcaugugugcugu

SEQ ID NO: 397132 - RNA, 19 nt, Artificial Sequence
  Description of Artificial Sequence: Synthetic oligonucleotide
uggggucuaugcggacauu

SEQ ID NO: 397133 - RNA, 19 nt, Artificial Sequence
  Description of Artificial Sequence: Synthetic oligonucleotide
cagacccgucaggcccugg

SEQ ID NO: 397134 - RNA, 19 nt, Artificial Sequence
  Description of Artificial Sequence: Synthetic oligonucleotide
gccgugggaccuguccggc

SEQ ID NO: 397135 - RNA, 19 nt, Artificial Sequence
  Description of Artificial Sequence: Synthetic oligonucleotide
gccaguaguugaccuugcu

SEQ ID NO: 397136 - RNA, 19 nt, Artificial Sequence
  Description of Artificial Sequence: Synthetic oligonucleotide
cuguuugcccaaugcccuu

SEQ ID NO: 397137 - RNA, 19 nt, Artificial Sequence
  Description of Artificial Sequence: Synthetic oligonucleotide
cgcccgugaacacagugaa

SEQ ID NO: 397138 - RNA, 19 nt, Artificial Sequence
  Description of Artificial Sequence: Synthetic oligonucleotide
cugcaagugcugacauuuu

SEQ ID NO: 397139 - RNA, 19 nt, Artificial Sequence
  Description of Artificial Sequence: Synthetic oligonucleotide
ugcacacgccugggcgcau

SEQ ID NO: 397140 - RNA, 19 nt, Artificial Sequence
  Description of Artificial Sequence: Synthetic oligonucleotide
accgugcccuuggcagcug

SEQ ID NO: 397141 - RNA, 19 nt, Artificial Sequence
  Description of Artificial Sequence: Synthetic oligonucleotide
ggcugcgcaacugguagau

SEQ ID NO: 397142 - RNA, 19 nt, Artificial Sequence
  Description of Artificial Sequence: Synthetic oligonucleotide
guccgcugagagaguccuc

SEQ ID NO: 397143 - RNA, 19 nt, Artificial Sequence
  Description of Artificial Sequence: Synthetic oligonucleotide
gguccacgcucccgcacua

SEQ ID NO: 397144 - RNA, 19 nt, Artificial Sequence
  Description of Artificial Sequence: Synthetic oligonucleotide
cacacgccugggcgcaugu

SEQ ID NO: 397145 - RNA, 19 nt, Artificial Sequence
  Description of Artificial Sequence: Synthetic oligonucleotide
cacuggcggacuguccgcu

SEQ ID NO: 397146 - RNA, 19 nt, Artificial Sequence
  Description of Artificial Sequence: Synthetic oligonucleotide
cagcgaggacugggguguc

SEQ ID NO: 397147 - RNA, 19 nt, Artificial Sequence
  Description of Artificial Sequence: Synthetic oligonucleotide
gcacacgccugggcgcaug

SEQ ID NO: 397148 - RNA, 19 nt, Artificial Sequence
  Description of Artificial Sequence: Synthetic oligonucleotide
gcgauagguggggaugccu

SEQ ID NO: 397149 - RNA, 19 nt, Artificial Sequence
  Description of Artificial Sequence: Synthetic oligonucleotide
gcccggaagugccauugau

SEQ ID NO: 397150 - RNA, 19 nt, Artificial Sequence
  Description of Artificial Sequence: Synthetic oligonucleotide
gcugcguguagaacguguu

SEQ ID NO: 397151 - RNA, 19 nt, Artificial Sequence
  Description of Artificial Sequence: Synthetic oligonucleotide
ggcggacuguccgcugaga

SEQ ID NO: 397152 - RNA, 19 nt, Artificial Sequence
  Description of Artificial Sequence: Synthetic oligonucleotide
cugccgcccauguccgcgu

SEQ ID NO: 397153 - RNA, 19 nt, Artificial Sequence
  Description of Artificial Sequence: Synthetic oligonucleotide
ccgcgugugcggcccgggc

SEQ ID NO: 397154 - RNA, 19 nt, Artificial Sequence
  Description of Artificial Sequence: Synthetic oligonucleotide
cagcgggucugucccuggu

SEQ ID NO: 397155 - RNA, 19 nt, Artificial Sequence
  Description of Artificial Sequence: Synthetic oligonucleotide
gcgaggacuggggugucau

SEQ ID NO: 397156 - RNA, 19 nt, Artificial Sequence
  Description of Artificial Sequence: Synthetic oligonucleotide
ccucaagaagcggggugua

SEQ ID NO: 397157 - RNA, 19 nt, Artificial Sequence
  Description of Artificial Sequence: Synthetic oligonucleotide
ccgcugagagaguccucaa

SEQ ID NO: 397158 - RNA, 19 nt, Artificial Sequence
  Description of Artificial Sequence: Synthetic oligonucleotide
cagaggcuuuaugcgccau

SEQ ID NO: 397159 - RNA, 19 nt, Artificial Sequence
  Description of Artificial Sequence: Synthetic oligonucleotide
ccggagcagcaguagcccu

SEQ ID NO: 397160 - RNA, 19 nt, Artificial Sequence
  Description of Artificial Sequence: Synthetic oligonucleotide
gggaccuguccggcuggaa

SEQ ID NO: 397161 - RNA, 19 nt, Artificial Sequence
  Description of Artificial Sequence: Synthetic oligonucleotide
cgguucauaaaggcacgcu

SEQ ID NO: 397162 - RNA, 19 nt, Artificial Sequence
  Description of Artificial Sequence: Synthetic oligonucleotide
cccuacggaguggacaguu

SEQ ID NO: 397163 - RNA, 19 nt, Artificial Sequence
  Description of Artificial Sequence: Synthetic oligonucleotide
ggaccacgggcucgaucuu

SEQ ID NO: 397164 - RNA, 19 nt, Artificial Sequence
  Description of Artificial Sequence: Synthetic oligonucleotide
gcgggguguaggggcugga

SEQ ID NO: 397165 - RNA, 19 nt, Artificial Sequence
  Description of Artificial Sequence: Synthetic oligonucleotide
gggcucgaucuucccuguu

SEQ ID NO: 397166 - RNA, 19 nt, Artificial Sequence
  Description of Artificial Sequence: Synthetic oligonucleotide
ccgugggaccuguccggcu

SEQ ID NO: 397167 - RNA, 19 nt, Artificial Sequence
  Description of Artificial Sequence: Synthetic oligonucleotide
ggacgcccgugaacacagu

SEQ ID NO: 397168 - RNA, 19 nt, Artificial Sequence
  Description of Artificial Sequence: Synthetic oligonucleotide
cgggcucgaucuucccugu

SEQ ID NO: 397169 - RNA, 19 nt, Artificial Sequence
  Description of Artificial Sequence: Synthetic oligonucleotide
ggaggaccacgggcucgau

SEQ ID NO: 397170 - RNA, 19 nt, Artificial Sequence
  Description of Artificial Sequence: Synthetic oligonucleotide
ccccuacggaguggacagu

SEQ ID NO: 397171 - RNA, 19 nt, Artificial Sequence
  Description of Artificial Sequence: Synthetic oligonucleotide
ucuuaugucaacaauauca

SEQ ID NO: 397172 - RNA, 19 nt, Artificial Sequence
  Description of Artificial Sequence: Synthetic oligonucleotide
aguuguauaaccuacaaga

SEQ ID NO: 397173 - RNA, 19 nt, Artificial Sequence
  Description of Artificial Sequence: Synthetic oligonucleotide
uuuggaaugagguuuauga

SEQ ID NO: 397174 - RNA, 19 nt, Artificial Sequence
  Description of Artificial Sequence: Synthetic oligonucleotide
auaaccuuuaaauauuuag

SEQ ID NO: 397175 - RNA, 19 nt, Artificial Sequence
  Description of Artificial Sequence: Synthetic oligonucleotide
uuauuuuaguucuaaugcg

SEQ ID NO: 397176 - RNA, 19 nt, Artificial Sequence
  Description of Artificial Sequence: Synthetic oligonucleotide
aaaauauucuucuagucaa

SEQ ID NO: 397177 - RNA, 19 nt, Artificial Sequence
  Description of Artificial Sequence: Synthetic oligonucleotide
uguauaaccuacaagagau

SEQ ID NO: 397178 - RNA, 19 nt, Artificial Sequence
  Description of Artificial Sequence: Synthetic oligonucleotide
uaucuauugaaauagugug

SEQ ID NO: 397179 - RNA, 19 nt, Artificial Sequence
  Description of Artificial Sequence: Synthetic oligonucleotide
gaauuaucuauugaaauag

SEQ ID NO: 397180 - RNA, 19 nt, Artificial Sequence
  Description of Artificial Sequence: Synthetic oligonucleotide
auucaaaggaagcuuuucc

SEQ ID NO: 397181 - RNA, 19 nt, Artificial Sequence
  Description of Artificial Sequence: Synthetic oligonucleotide
uuuagguucaacaguauga

SEQ ID NO: 397182 - RNA, 19 nt, Artificial Sequence
  Description of Artificial Sequence: Synthetic oligonucleotide
uuaucuauugaaauagugu

SEQ ID NO: 397183 - RNA, 19 nt, Artificial Sequence
  Description of Artificial Sequence: Synthetic oligonucleotide
uucuaaaccaggaaguuca

SEQ ID NO: 397184 - RNA, 19 nt, Artificial Sequence
  Description of Artificial Sequence: Synthetic oligonucleotide
ucuaguuacaacuuugacu

SEQ ID NO: 397185 - RNA, 19 nt, Artificial Sequence
  Description of Artificial Sequence: Synthetic oligonucleotide
cucaacuaaacccacagcc

SEQ ID NO: 397186 - RNA, 19 nt, Artificial Sequence
  Description of Artificial Sequence: Synthetic oligonucleotide
uacacaauucuaaaccagg

SEQ ID NO: 397187 - RNA, 19 nt, Artificial Sequence
  Description of Artificial Sequence: Synthetic oligonucleotide
uuuauucgaacccuuuuag

SEQ ID NO: 397188 - RNA, 19 nt, Artificial Sequence
  Description of Artificial Sequence: Synthetic oligonucleotide
aauuaacaaagccagcaga

SEQ ID NO: 397189 - RNA, 19 nt, Artificial Sequence
  Description of Artificial Sequence: Synthetic oligonucleotide
aacuuugaaacccucuuug

SEQ ID NO: 397190 - RNA, 19 nt, Artificial Sequence
  Description of Artificial Sequence: Synthetic oligonucleotide
auagacaguacucagagaa

SEQ ID NO: 397191 - RNA, 19 nt, Artificial Sequence
  Description of Artificial Sequence: Synthetic oligonucleotide
auugaaauaguguggucac

SEQ ID NO: 397192 - RNA, 19 nt, Artificial Sequence
  Description of Artificial Sequence: Synthetic oligonucleotide
ucuuacauguucuuuccgg

SEQ ID NO: 397193 - RNA, 19 nt, Artificial Sequence
  Description of Artificial Sequence: Synthetic oligonucleotide
uuuaugagcaauucguugu

SEQ ID NO: 397194 - RNA, 19 nt, Artificial Sequence
  Description of Artificial Sequence: Synthetic oligonucleotide
aauuguugauucuauuuga

SEQ ID NO: 397195 - RNA, 19 nt, Artificial Sequence
  Description of Artificial Sequence: Synthetic oligonucleotide
uuuugguuuggaaugaggu

SEQ ID NO: 397196 - RNA, 19 nt, Artificial Sequence
  Description of Artificial Sequence: Synthetic oligonucleotide
uuuaguucuaaugcgaaug

SEQ ID NO: 397197 - RNA, 19 nt, Artificial Sequence
  Description of Artificial Sequence: Synthetic oligonucleotide
uuagcaugcaucaagcuau

SEQ ID NO: 397198 - RNA, 19 nt, Artificial Sequence
  Description of Artificial Sequence: Synthetic oligonucleotide
accuacaagagauauguag

SEQ ID NO: 397199 - RNA, 19 nt, Artificial Sequence
  Description of Artificial Sequence: Synthetic oligonucleotide
ugcauuucgagcaugcaug

SEQ ID NO: 397200 - RNA, 19 nt, Artificial Sequence
  Description of Artificial Sequence: Synthetic oligonucleotide
accaccuaguuguauaacc

SEQ ID NO: 397201 - RNA, 19 nt, Artificial Sequence
  Description of Artificial Sequence: Synthetic oligonucleotide
uauucgaacccuuuuaggu

SEQ ID NO: 397202 - RNA, 19 nt, Artificial Sequence
  Description of Artificial Sequence: Synthetic oligonucleotide
uuuggcuacaaguaaauau

SEQ ID NO: 397203 - RNA, 19 nt, Artificial Sequence
  Description of Artificial Sequence: Synthetic oligonucleotide
ucaagcuaugaucaaacac

SEQ ID NO: 397204 - RNA, 19 nt, Artificial Sequence
  Description of Artificial Sequence: Synthetic oligonucleotide
acgacauccacaaagacuc

SEQ ID NO: 397205 - RNA, 19 nt, Artificial Sequence
  Description of Artificial Sequence: Synthetic oligonucleotide
uuuguuuaagcaagaauuc

SEQ ID NO: 397206 - RNA, 19 nt, Artificial Sequence
  Description of Artificial Sequence: Synthetic oligonucleotide
uauacuuuuaggcagucuu

SEQ ID NO: 397207 - RNA, 19 nt, Artificial Sequence
  Description of Artificial Sequence: Synthetic oligonucleotide
cauaaacuuagacaguggc

SEQ ID NO: 397208 - RNA, 19 nt, Artificial Sequence
  Description of Artificial Sequence: Synthetic oligonucleotide
uagucaaaauuucccauag

SEQ ID NO: 397209 - RNA, 19 nt, Artificial Sequence
  Description of Artificial Sequence: Synthetic oligonucleotide
uucauaaacuuagacagug

SEQ ID NO: 397210 - RNA, 19 nt, Artificial Sequence
  Description of Artificial Sequence: Synthetic oligonucleotide
cuucuagucaaaauuuccc

SEQ ID NO: 397211 - RNA, 19 nt, Artificial Sequence
  Description of Artificial Sequence: Synthetic oligonucleotide
aaaugguaccaugacgucg

SEQ ID NO: 397212 - RNA, 19 nt, Artificial Sequence
  Description of Artificial Sequence: Synthetic oligonucleotide
uuguauaaccuacaagaga

SEQ ID NO: 397213 - RNA, 19 nt, Artificial Sequence
  Description of Artificial Sequence: Synthetic oligonucleotide
aaggcguuuggcuacaagu

SEQ ID NO: 397214 - RNA, 19 nt, Artificial Sequence
  Description of Artificial Sequence: Synthetic oligonucleotide
uuaguucuaaugcgaaugc

SEQ ID NO: 397215 - RNA, 19 nt, Artificial Sequence
  Description of Artificial Sequence: Synthetic oligonucleotide
uucuauuacaguuccagaa

SEQ ID NO: 397216 - RNA, 19 nt, Artificial Sequence
  Description of Artificial Sequence: Synthetic oligonucleotide
uuauucgaacccuuuuagg

SEQ ID NO: 397217 - RNA, 19 nt, Artificial Sequence
  Description of Artificial Sequence: Synthetic oligonucleotide
auaauuccucaucagcagg

SEQ ID NO: 397218 - RNA, 19 nt, Artificial Sequence
  Description of Artificial Sequence: Synthetic oligonucleotide
uuaagcaagaauucauuaa

SEQ ID NO: 397219 - RNA, 19 nt, Artificial Sequence
  Description of Artificial Sequence: Synthetic oligonucleotide
uacuaucaaguucaccccg

SEQ ID NO: 397220 - RNA, 19 nt, Artificial Sequence
  Description of Artificial Sequence: Synthetic oligonucleotide
ucauaaacuuagacagugg

SEQ ID NO: 397221 - RNA, 19 nt, Artificial Sequence
  Description of Artificial Sequence: Synthetic oligonucleotide
ugcucaacuaaacccacag

SEQ ID NO: 397222 - RNA, 19 nt, Artificial Sequence
  Description of Artificial Sequence: Synthetic oligonucleotide
ucugcuucgaaaacauuug

SEQ ID NO: 397223 - RNA, 19 nt, Artificial Sequence
  Description of Artificial Sequence: Synthetic oligonucleotide
aguaauauaauuguugauu

SEQ ID NO: 397224 - RNA, 19 nt, Artificial Sequence
  Description of Artificial Sequence: Synthetic oligonucleotide
gagguuuaugagcaauucg

SEQ ID NO: 397225 - RNA, 19 nt, Artificial Sequence
  Description of Artificial Sequence: Synthetic oligonucleotide
aaaacaacgcaugacagua

SEQ ID NO: 397226 - RNA, 19 nt, Artificial Sequence
  Description of Artificial Sequence: Synthetic oligonucleotide
ucuauuacaguuccagaaa

SEQ ID NO: 397227 - RNA, 19 nt, Artificial Sequence
  Description of Artificial Sequence: Synthetic oligonucleotide
uguuuaagcaagaauucau

SEQ ID NO: 397228 - RNA, 19 nt, Artificial Sequence
  Description of Artificial Sequence: Synthetic oligonucleotide
auaauuguugauucuauuu

SEQ ID NO: 397229 - RNA, 19 nt, Artificial Sequence
  Description of Artificial Sequence: Synthetic oligonucleotide
acaguaugacauucaaagg

SEQ ID NO: 397230 - RNA, 19 nt, Artificial Sequence
  Description of Artificial Sequence: Synthetic oligonucleotide
uuuacaucauuuucaaaau

SEQ ID NO: 397231 - RNA, 19 nt, Artificial Sequence
  Description of Artificial Sequence: Synthetic oligonucleotide
uggaauaguggguaggaca

SEQ ID NO: 397232 - RNA, 19 nt, Artificial Sequence
  Description of Artificial Sequence: Synthetic oligonucleotide
uacauguucuuuccggugc

SEQ ID NO: 397233 - RNA, 19 nt, Artificial Sequence
  Description of Artificial Sequence: Synthetic oligonucleotide
uuuaagcaagaauucauua

SEQ ID NO: 397234 - RNA, 19 nt, Artificial Sequence
  Description of Artificial Sequence: Synthetic oligonucleotide
auauuuagccaugaauagg

SEQ ID NO: 397235 - RNA, 19 nt, Artificial Sequence
  Description of Artificial Sequence: Synthetic oligonucleotide
ugugaaagcaaguaauaua

SEQ ID NO: 397236 - RNA, 19 nt, Artificial Sequence
  Description of Artificial Sequence: Synthetic oligonucleotide
cugacuguggugcuaaggg

SEQ ID NO: 397237 - RNA, 19 nt, Artificial Sequence
  Description of Artificial Sequence: Synthetic oligonucleotide
caaguaauauaauuguuga

SEQ ID NO: 397238 - RNA, 19 nt, Artificial Sequence
  Description of Artificial Sequence: Synthetic oligonucleotide
uaguuguauaaccuacaag

SEQ ID NO: 397239 - RNA, 19 nt, Artificial Sequence
  Description of Artificial Sequence: Synthetic oligonucleotide
agcaagaauucauuaaaga

SEQ ID NO: 397240 - RNA, 19 nt, Artificial Sequence
  Description of Artificial Sequence: Synthetic oligonucleotide
guuuaugagcaauucguug

SEQ ID NO: 397241 - RNA, 19 nt, Artificial Sequence
  Description of Artificial Sequence: Synthetic oligonucleotide
uuacuaucaaguucacccc

SEQ ID NO: 397242 - RNA, 19 nt, Artificial Sequence
  Description of Artificial Sequence: Synthetic oligonucleotide
gguaccaugacgucguagg

SEQ ID NO: 397243 - RNA, 19 nt, Artificial Sequence
  Description of Artificial Sequence: Synthetic oligonucleotide
aauaguggguaggacauga

SEQ ID NO: 397244 - RNA, 19 nt, Artificial Sequence
  Description of Artificial Sequence: Synthetic oligonucleotide
aaguucaucccuuuaucau

SEQ ID NO: 397245 - RNA, 19 nt, Artificial Sequence
  Description of Artificial Sequence: Synthetic oligonucleotide
uucacgacauccacaaaga

SEQ ID NO: 397246 - RNA, 19 nt, Artificial Sequence
  Description of Artificial Sequence: Synthetic oligonucleotide
ugacaguauucuuugaaaa

SEQ ID NO: 397247 - RNA, 19 nt, Artificial Sequence
  Description of Artificial Sequence: Synthetic oligonucleotide
aacuaaacccacagccugc

SEQ ID NO: 397248 - RNA, 19 nt, Artificial Sequence
  Description of Artificial Sequence: Synthetic oligonucleotide
agaaacuauaaauaaccuu

SEQ ID NO: 397249 - RNA, 19 nt, Artificial Sequence
  Description of Artificial Sequence: Synthetic oligonucleotide
auuaucuauugaaauagug

SEQ ID NO: 397250 - RNA, 19 nt, Artificial Sequence
  Description of Artificial Sequence: Synthetic oligonucleotide
cuaguuacaacuuugacuu

SEQ ID NO: 397251 - RNA, 19 nt, Artificial Sequence
  Description of Artificial Sequence: Synthetic oligonucleotide
uucuaggacaucauuucac

SEQ ID NO: 397252 - RNA, 19 nt, Artificial Sequence
  Description of Artificial Sequence: Synthetic oligonucleotide
ucuaggacaucauuucacu

SEQ ID NO: 397253 - RNA, 19 nt, Artificial Sequence
  Description of Artificial Sequence: Synthetic oligonucleotide
caguaugacauucaaagga

SEQ ID NO: 397254 - RNA, 19 nt, Artificial Sequence
  Description of Artificial Sequence: Synthetic oligonucleotide
uauaaccuacaagagauau

SEQ ID NO: 397255 - RNA, 19 nt, Artificial Sequence
  Description of Artificial Sequence: Synthetic oligonucleotide
uucuuacauguucuuuccg

SEQ ID NO: 397256 - RNA, 19 nt, Artificial Sequence
  Description of Artificial Sequence: Synthetic oligonucleotide
ugacuuuucuaggacauca

SEQ ID NO: 397257 - RNA, 19 nt, Artificial Sequence
  Description of Artificial Sequence: Synthetic oligonucleotide
caucaagcuaugaucaaac

SEQ ID NO: 397258 - RNA, 19 nt, Artificial Sequence
  Description of Artificial Sequence: Synthetic oligonucleotide
uuaaagugguauucuuccc

SEQ ID NO: 397259 - RNA, 19 nt, Artificial Sequence
  Description of Artificial Sequence: Synthetic oligonucleotide
ucaagugaagcuugagcug

SEQ ID NO: 397260 - RNA, 19 nt, Artificial Sequence
  Description of Artificial Sequence: Synthetic oligonucleotide
auauauuguugguacagaa

SEQ ID NO: 397261 - RNA, 19 nt, Artificial Sequence
  Description of Artificial Sequence: Synthetic oligonucleotide
gaugaacaauggcugacug

SEQ ID NO: 397262 - RNA, 19 nt, Artificial Sequence
  Description of Artificial Sequence: Synthetic oligonucleotide
aaugguaccaugacgucgu

SEQ ID NO: 397263 - RNA, 19 nt, Artificial Sequence
  Description of Artificial Sequence: Synthetic oligonucleotide
ucuagucaaaauuucccau

SEQ ID NO: 397264 - RNA, 19 nt, Artificial Sequence
  Description of Artificial Sequence: Synthetic oligonucleotide
aggcgccacauucacaccc

SEQ ID NO: 397265 - RNA, 19 nt, Artificial Sequence
  Description of Artificial Sequence: Synthetic oligonucleotide
ugugucuucgccauuugua

SEQ ID NO: 397266 - RNA, 19 nt, Artificial Sequence
  Description of Artificial Sequence: Synthetic oligonucleotide
auuaguguggacaaguuuu

SEQ ID NO: 397267 - RNA, 19 nt, Artificial Sequence
  Description of Artificial Sequence: Synthetic oligonucleotide
auucuaaaccaggaaguuc

SEQ ID NO: 397268 - RNA, 19 nt, Artificial Sequence
  Description of Artificial Sequence: Synthetic oligonucleotide
agucaaaauuucccauagg

SEQ ID NO: 397269 - RNA, 19 nt, Artificial Sequence
  Description of Artificial Sequence: Synthetic oligonucleotide
uguccucaagugaagcuug

SEQ ID NO: 397270 - RNA, 19 nt, Artificial Sequence
  Description of Artificial Sequence: Synthetic oligonucleotide
aauucguuguuuuccuuua

SEQ ID NO: 397271 - RNA, 19 nt, Artificial Sequence
  Description of Artificial Sequence: Synthetic oligonucleotide
uuucgagcaugcaugcuac

SEQ ID NO: 397272 - RNA, 19 nt, Artificial Sequence
  Description of Artificial Sequence: Synthetic oligonucleotide
uuagguucaacaguaugaa

SEQ ID NO: 397273 - RNA, 19 nt, Artificial Sequence
  Description of Artificial Sequence: Synthetic oligonucleotide
caagugaagcuugagcugc

SEQ ID NO: 397274 - RNA, 19 nt, Artificial Sequence
  Description of Artificial Sequence: Synthetic oligonucleotide
uuacauguucuuuccggug

SEQ ID NO: 397275 - RNA, 19 nt, Artificial Sequence
  Description of Artificial Sequence: Synthetic oligonucleotide
uugguacagaauuaucuau

SEQ ID NO: 397276 - RNA, 19 nt, Artificial Sequence
  Description of Artificial Sequence: Synthetic oligonucleotide
caacuaaacccacagccug

SEQ ID NO: 397277 - RNA, 19 nt, Artificial Sequence
  Description of Artificial Sequence: Synthetic oligonucleotide
uucgaacccuuuuagguuc

SEQ ID NO: 397278 - RNA, 19 nt, Artificial Sequence
  Description of Artificial Sequence: Synthetic oligonucleotide
aacaacgcaugacaguauu

SEQ ID NO: 397279 - RNA, 19 nt, Artificial Sequence
  Description of Artificial Sequence: Synthetic oligonucleotide
aggaagcuuuuccaagaac

SEQ ID NO: 397280 - RNA, 19 nt, Artificial Sequence
  Description of Artificial Sequence: Synthetic oligonucleotide
accuaguuguauaaccuac

SEQ ID NO: 397281 - RNA, 19 nt, Artificial Sequence
  Description of Artificial Sequence: Synthetic oligonucleotide
uauuguugguacagaauua

SEQ ID NO: 397282 - RNA, 19 nt, Artificial Sequence
  Description of Artificial Sequence: Synthetic oligonucleotide
aguguggacaaguuuuccu

SEQ ID NO: 397283 - RNA, 19 nt, Artificial Sequence
  Description of Artificial Sequence: Synthetic oligonucleotide
gcaaguaauauaauuguug

SEQ ID NO: 397284 - RNA, 19 nt, Artificial Sequence
  Description of Artificial Sequence: Synthetic oligonucleotide
uauaauuguugauucuauu

SEQ ID NO: 397285 - RNA, 19 nt, Artificial Sequence
  Description of Artificial Sequence: Synthetic oligonucleotide
uaggacaucauuucacuuu

SEQ ID NO: 397286 - RNA, 19 nt, Artificial Sequence
  Description of Artificial Sequence: Synthetic oligonucleotide
uccggugcucaacuaaacc

SEQ ID NO: 397287 - RNA, 19 nt, Artificial Sequence
  Description of Artificial Sequence: Synthetic oligonucleotide
ugaauuugcuguguguccu

SEQ ID NO: 397288 - RNA, 19 nt, Artificial Sequence
  Description of Artificial Sequence: Synthetic oligonucleotide
ugcuucgaaaacauuugaa

SEQ ID NO: 397289 - RNA, 19 nt, Artificial Sequence
  Description of Artificial Sequence: Synthetic oligonucleotide
caggauuacuaucaaguuc

SEQ ID NO: 397290 - RNA, 19 nt, Artificial Sequence
  Description of Artificial Sequence: Synthetic oligonucleotide
auauggcaagcacaacauc

SEQ ID NO: 397291 - RNA, 19 nt, Artificial Sequence
  Description of Artificial Sequence: Synthetic oligonucleotide
acuacaguaugacauucaa

SEQ ID NO: 397292 - RNA, 19 nt, Artificial Sequence
  Description of Artificial Sequence: Synthetic oligonucleotide
aaugugaaagcaaguaaua

SEQ ID NO: 397293 - RNA, 19 nt, Artificial Sequence
  Description of Artificial Sequence: Synthetic oligonucleotide
gcugguacaaaacugccug

SEQ ID NO: 397294 - RNA, 19 nt, Artificial Sequence
  Description of Artificial Sequence: Synthetic oligonucleotide
acuaucaaguucaccccgc

SEQ ID NO: 397295 - RNA, 19 nt, Artificial Sequence
  Description of Artificial Sequence: Synthetic oligonucleotide
auuucgagcaugcaugcua

SEQ ID NO: 397296 - RNA, 19 nt, Artificial Sequence
  Description of Artificial Sequence: Synthetic oligonucleotide
uuuuaguucuaaugcgaau

SEQ ID NO: 397297 - RNA, 19 nt, Artificial Sequence
  Description of Artificial Sequence: Synthetic oligonucleotide
ucguuguuuuccuuuacau

SEQ ID NO: 397298 - RNA, 19 nt, Artificial Sequence
  Description of Artificial Sequence: Synthetic oligonucleotide
caagagggccaaaugguac

SEQ ID NO: 397299 - RNA, 19 nt, Artificial Sequence
  Description of Artificial Sequence: Synthetic oligonucleotide
agcaauucguuguuuuccu

SEQ ID NO: 397300 - RNA, 19 nt, Artificial Sequence
  Description of Artificial Sequence: Synthetic oligonucleotide
uucuuuucgcucuggaaua

SEQ ID NO: 397301 - RNA, 19 nt, Artificial Sequence
  Description of Artificial Sequence: Synthetic oligonucleotide
cuugacuacuggcuuggcc

SEQ ID NO: 397302 - RNA, 19 nt, Artificial Sequence
  Description of Artificial Sequence: Synthetic oligonucleotide
uguugcugccaagugagca

SEQ ID NO: 397303 - RNA, 19 nt, Artificial Sequence
  Description of Artificial Sequence: Synthetic oligonucleotide
uacuggcuuggccauuggg

SEQ ID NO: 397304 - RNA, 19 nt, Artificial Sequence
  Description of Artificial Sequence: Synthetic oligonucleotide
aauucaguccccuguucua

SEQ ID NO: 397305 - RNA, 19 nt, Artificial Sequence
  Description of Artificial Sequence: Synthetic oligonucleotide
ucgaaaacauuugaaguuu

SEQ ID NO: 397306 - RNA, 19 nt, Artificial Sequence
  Description of Artificial Sequence: Synthetic oligonucleotide
auaaacuuagacaguggca

SEQ ID NO: 397307 - RNA, 19 nt, Artificial Sequence
  Description of Artificial Sequence: Synthetic oligonucleotide
gauuacuaucaaguucacc

SEQ ID NO: 397308 - RNA, 19 nt, Artificial Sequence
  Description of Artificial Sequence: Synthetic oligonucleotide
aaccaccuaguuguauaac

SEQ ID NO: 397309 - RNA, 19 nt, Artificial Sequence
  Description of Artificial Sequence: Synthetic oligonucleotide
aguaugacauucaaaggaa

SEQ ID NO: 397310 - RNA, 19 nt, Artificial Sequence
  Description of Artificial Sequence: Synthetic oligonucleotide
uuuccggugcucaacuaaa

SEQ ID NO: 397311 - RNA, 19 nt, Artificial Sequence
  Description of Artificial Sequence: Synthetic oligonucleotide
ugagcaauucguuguuuuc

SEQ ID NO: 397312 - RNA, 19 nt, Artificial Sequence
  Description of Artificial Sequence: Synthetic oligonucleotide
cuuugacuuuucuaggaca

SEQ ID NO: 397313 - RNA, 19 nt, Artificial Sequence
  Description of Artificial Sequence: Synthetic oligonucleotide
agcagaacgucacaguauu

SEQ ID NO: 397314 - RNA, 19 nt, Artificial Sequence
  Description of Artificial Sequence: Synthetic oligonucleotide
ucgagcaugcaugcuacag

SEQ ID NO: 397315 - RNA, 19 nt, Artificial Sequence
  Description of Artificial Sequence: Synthetic oligonucleotide
gcaugcaugcuacagccgg

SEQ ID NO: 397316 - RNA, 19 nt, Artificial Sequence
  Description of Artificial Sequence: Synthetic oligonucleotide
augcaucaagcuaugauca

SEQ ID NO: 397317 - RNA, 19 nt, Artificial Sequence
  Description of Artificial Sequence: Synthetic oligonucleotide
agugccuuuaaaaugugaa

SEQ ID NO: 397318 - RNA, 19 nt, Artificial Sequence
  Description of Artificial Sequence: Synthetic oligonucleotide
uucaagucgagcccauaau

SEQ ID NO: 397319 - RNA, 19 nt, Artificial Sequence
  Description of Artificial Sequence: Synthetic oligonucleotide
agucugucaccggaggcgc

SEQ ID NO: 397320 - RNA, 19 nt, Artificial Sequence
  Description of Artificial Sequence: Synthetic oligonucleotide
auucgaacccuuuuagguu

SEQ ID NO: 397321 - RNA, 19 nt, Artificial Sequence
  Description of Artificial Sequence: Synthetic oligonucleotide
aaaagccucggacgcuucu

SEQ ID NO: 397322 - RNA, 19 nt, Artificial Sequence
  Description of Artificial Sequence: Synthetic oligonucleotide
uaaggcguuuggcuacaag

SEQ ID NO: 397323 - RNA, 19 nt, Artificial Sequence
  Description of Artificial Sequence: Synthetic oligonucleotide
ccauagacaguacucagag

SEQ ID NO: 397324 - RNA, 19 nt, Artificial Sequence
  Description of Artificial Sequence: Synthetic oligonucleotide
uuaugagcaauucguuguu

SEQ ID NO: 397325 - RNA, 19 nt, Artificial Sequence
  Description of Artificial Sequence: Synthetic oligonucleotide
ugagguuuaugagcaauuc

SEQ ID NO: 397326 - RNA, 19 nt, Artificial Sequence
  Description of Artificial Sequence: Synthetic oligonucleotide
acguacucgccauucacga

SEQ ID NO: 397327 - RNA, 19 nt, Artificial Sequence
  Description of Artificial Sequence: Synthetic oligonucleotide
guacucgccauucacgaca

SEQ ID NO: 397328 - RNA, 19 nt, Artificial Sequence
  Description of Artificial Sequence: Synthetic oligonucleotide
guaugacauucaaaggaag

SEQ ID NO: 397329 - RNA, 19 nt, Artificial Sequence
  Description of Artificial Sequence: Synthetic oligonucleotide
ucuaggcuuguccauuaau

SEQ ID NO: 397330 - RNA, 19 nt, Artificial Sequence
  Description of Artificial Sequence: Synthetic oligonucleotide
ugaugaacaauggcugacu

SEQ ID NO: 397331 - RNA, 19 nt, Artificial Sequence
  Description of Artificial Sequence: Synthetic oligonucleotide
ucuaaaccaggaaguucac

SEQ ID NO: 397332 - RNA, 19 nt, Artificial Sequence
  Description of Artificial Sequence: Synthetic oligonucleotide
ucuuuucgcucuggaauag

SEQ ID NO: 397333 - RNA, 19 nt, Artificial Sequence
  Description of Artificial Sequence: Synthetic oligonucleotide
aacgcaugacaguauucuu

SEQ ID NO: 397334 - RNA, 19 nt, Artificial Sequence
  Description of Artificial Sequence: Synthetic oligonucleotide
gucuucgccauuuguaauc

SEQ ID NO: 397335 - RNA, 19 nt, Artificial Sequence
  Description of Artificial Sequence: Synthetic oligonucleotide
auauaauuguugauucuau

SEQ ID NO: 397336 - RNA, 19 nt, Artificial Sequence
  Description of Artificial Sequence: Synthetic oligonucleotide
auaguguggucacugucau

SEQ ID NO: 397337 - RNA, 19 nt, Artificial Sequence
  Description of Artificial Sequence: Synthetic oligonucleotide
auuuuaguucuaaugcgaa

SEQ ID NO: 397338 - RNA, 19 nt, Artificial Sequence
  Description of Artificial Sequence: Synthetic oligonucleotide
augugaaagcaaguaauau

SEQ ID NO: 397339 - RNA, 19 nt, Artificial Sequence
  Description of Artificial Sequence: Synthetic oligonucleotide
cugcgagacuugaggaugg

SEQ ID NO: 397340 - RNA, 19 nt, Artificial Sequence
  Description of Artificial Sequence: Synthetic oligonucleotide
uuaggcagucuuucaaauu

SEQ ID NO: 397341 - RNA, 19 nt, Artificial Sequence
  Description of Artificial Sequence: Synthetic oligonucleotide
augagcaauucguuguuuu

SEQ ID NO: 397342 - RNA, 19 nt, Artificial Sequence
  Description of Artificial Sequence: Synthetic oligonucleotide
auaaccuacaagagauaug

SEQ ID NO: 397343 - RNA, 19 nt, Artificial Sequence
  Description of Artificial Sequence: Synthetic oligonucleotide
acuccaugggcugaauuug

SEQ ID NO: 397344 - RNA, 19 nt, Artificial Sequence
  Description of Artificial Sequence: Synthetic oligonucleotide
uaucaaguucaccccgcaa

SEQ ID NO: 397345 - RNA, 19 nt, Artificial Sequence
  Description of Artificial Sequence: Synthetic oligonucleotide
aguucuaaugcgaaugcuu

SEQ ID NO: 397346 - RNA, 19 nt, Artificial Sequence
  Description of Artificial Sequence: Synthetic oligonucleotide
cacuuugcaaaccaguugu

SEQ ID NO: 397347 - RNA, 19 nt, Artificial Sequence
  Description of Artificial Sequence: Synthetic oligonucleotide
cuaguuguauaaccuacaa

SEQ ID NO: 397348 - RNA, 19 nt, Artificial Sequence
  Description of Artificial Sequence: Synthetic oligonucleotide
ccuacaagagauauguaga

SEQ ID NO: 397349 - RNA, 19 nt, Artificial Sequence
  Description of Artificial Sequence: Synthetic oligonucleotide
uucacacccgugccugugc

SEQ ID NO: 397350 - RNA, 19 nt, Artificial Sequence
  Description of Artificial Sequence: Synthetic oligonucleotide
agacaguacucagagaauu

SEQ ID NO: 397351 - RNA, 19 nt, Artificial Sequence
  Description of Artificial Sequence: Synthetic oligonucleotide
aaagccucggacgcuucug

SEQ ID NO: 397352 - RNA, 19 nt, Artificial Sequence
  Description of Artificial Sequence: Synthetic oligonucleotide
uuauacuuuuaggcagucu

SEQ ID NO: 397353 - RNA, 19 nt, Artificial Sequence
  Description of Artificial Sequence: Synthetic oligonucleotide
caguccauauggcaagcac

SEQ ID NO: 397354 - RNA, 19 nt, Artificial Sequence
  Description of Artificial Sequence: Synthetic oligonucleotide
uccucggaagacacugugu

SEQ ID NO: 397355 - RNA, 19 nt, Artificial Sequence
  Description of Artificial Sequence: Synthetic oligonucleotide
caugcaugcuacagccggc

SEQ ID NO: 397356 - RNA, 19 nt, Artificial Sequence
  Description of Artificial Sequence: Synthetic oligonucleotide
ugguuuggaaugagguuua

SEQ ID NO: 397357 - RNA, 19 nt, Artificial Sequence
  Description of Artificial Sequence: Synthetic oligonucleotide
cuggugucacugcacacac

SEQ ID NO: 397358 - RNA, 19 nt, Artificial Sequence
  Description of Artificial Sequence: Synthetic oligonucleotide
uaccaugacgucguaggac

SEQ ID NO: 397359 - RNA, 19 nt, Artificial Sequence
  Description of Artificial Sequence: Synthetic oligonucleotide
uuccggggcacguacucgc

SEQ ID NO: 397360 - RNA, 19 nt, Artificial Sequence
  Description of Artificial Sequence: Synthetic oligonucleotide
auuguugauucuauuugaa

SEQ ID NO: 397361 - RNA, 19 nt, Artificial Sequence
  Description of Artificial Sequence: Synthetic oligonucleotide
gaaccaccuaguuguauaa

SEQ ID NO: 397362 - RNA, 19 nt, Artificial Sequence
  Description of Artificial Sequence: Synthetic oligonucleotide
cagaacgucacaguauuca

SEQ ID NO: 397363 - RNA, 19 nt, Artificial Sequence
  Description of Artificial Sequence: Synthetic oligonucleotide
agaaaccaaguuucauaaa

SEQ ID NO: 397364 - RNA, 19 nt, Artificial Sequence
  Description of Artificial Sequence: Synthetic oligonucleotide
uaguucuaaugcgaaugcu

SEQ ID NO: 397365 - RNA, 19 nt, Artificial Sequence
  Description of Artificial Sequence: Synthetic oligonucleotide
aguauucuuugaaaagaaa

SEQ ID NO: 397366 - RNA, 19 nt, Artificial Sequence
  Description of Artificial Sequence: Synthetic oligonucleotide
acaacgcaugacaguauuc

SEQ ID NO: 397367 - RNA, 19 nt, Artificial Sequence
  Description of Artificial Sequence: Synthetic oligonucleotide
ucacacccgugccugugcc

SEQ ID NO: 397368 - RNA, 19 nt, Artificial Sequence
  Description of Artificial Sequence: Synthetic oligonucleotide
uucuaaugcgaaugcuuuu

SEQ ID NO: 397369 - RNA, 19 nt, Artificial Sequence
  Description of Artificial Sequence: Synthetic oligonucleotide
ugucuucgccauuuguaau

SEQ ID NO: 397370 - RNA, 19 nt, Artificial Sequence
  Description of Artificial Sequence: Synthetic oligonucleotide
ggagcucugcauuucgagc

SEQ ID NO: 397371 - RNA, 19 nt, Artificial Sequence
  Description of Artificial Sequence: Synthetic oligonucleotide
ugcaugcuacagccggcag

SEQ ID NO: 397372 - RNA, 19 nt, Artificial Sequence
  Description of Artificial Sequence: Synthetic oligonucleotide
gacgcagcgccggucaucc

SEQ ID NO: 397373 - RNA, 19 nt, Artificial Sequence
  Description of Artificial Sequence: Synthetic oligonucleotide
ugcaucaagcuaugaucaa

SEQ ID NO: 397374 - RNA, 19 nt, Artificial Sequence
  Description of Artificial Sequence: Synthetic oligonucleotide
acuacuggcuuggccauug

SEQ ID NO: 397375 - RNA, 19 nt, Artificial Sequence
  Description of Artificial Sequence: Synthetic oligonucleotide
uuccggugcucaacuaaac

SEQ ID NO: 397376 - RNA, 19 nt, Artificial Sequence
  Description of Artificial Sequence: Synthetic oligonucleotide
gaaauaguguggucacugu

SEQ ID NO: 397377 - RNA, 19 nt, Artificial Sequence
  Description of Artificial Sequence: Synthetic oligonucleotide
cuuugcugagcacuuugca

SEQ ID NO: 397378 - RNA, 19 nt, Artificial Sequence
  Description of Artificial Sequence: Synthetic oligonucleotide
ucggacgcuucugagggca

SEQ ID NO: 397379 - RNA, 19 nt, Artificial Sequence
  Description of Artificial Sequence: Synthetic oligonucleotide
aggccauagacaguacuca

SEQ ID NO: 397380 - RNA, 19 nt, Artificial Sequence
  Description of Artificial Sequence: Synthetic oligonucleotide
ucgaacccuuuuagguuca

SEQ ID NO: 397381 - RNA, 19 nt, Artificial Sequence
  Description of Artificial Sequence: Synthetic oligonucleotide
uguucuaggcuuguccauu

SEQ ID NO: 397382 - RNA, 19 nt, Artificial Sequence
  Description of Artificial Sequence: Synthetic oligonucleotide
cuucaagucgagcccauaa

SEQ ID NO: 397383 - RNA, 19 nt, Artificial Sequence
  Description of Artificial Sequence: Synthetic oligonucleotide
uccucaagugaagcuugag

SEQ ID NO: 397384 - RNA, 19 nt, Artificial Sequence
  Description of Artificial Sequence: Synthetic oligonucleotide
cagcucguggggagcaugg

SEQ ID NO: 397385 - RNA, 19 nt, Artificial Sequence
  Description of Artificial Sequence: Synthetic oligonucleotide
ucgagcccauaauuccuca

SEQ ID NO: 397386 - RNA, 19 nt, Artificial Sequence
  Description of Artificial Sequence: Synthetic oligonucleotide
ucgcucuggaauagugggu

SEQ ID NO: 397387 - RNA, 19 nt, Artificial Sequence
  Description of Artificial Sequence: Synthetic oligonucleotide
ucguggggagcauggcucc

SEQ ID NO: 397388 - RNA, 19 nt, Artificial Sequence
  Description of Artificial Sequence: Synthetic oligonucleotide
ccauauggcaagcacaaca

SEQ ID NO: 397389 - RNA, 19 nt, Artificial Sequence
  Description of Artificial Sequence: Synthetic oligonucleotide
auugcucuaguuacaacuu

SEQ ID NO: 397390 - RNA, 19 nt, Artificial Sequence
  Description of Artificial Sequence: Synthetic oligonucleotide
uggucaaccugagacugaa

SEQ ID NO: 397391 - RNA, 19 nt, Artificial Sequence
  Description of Artificial Sequence: Synthetic oligonucleotide
agcaaguaauauaauuguu

SEQ ID NO: 397392 - RNA, 19 nt, Artificial Sequence
  Description of Artificial Sequence: Synthetic oligonucleotide
ucccaguguuuauucgaac

SEQ ID NO: 397393 - RNA, 19 nt, Artificial Sequence
  Description of Artificial Sequence: Synthetic oligonucleotide
guccauuaauggauucaag

SEQ ID NO: 397394 - RNA, 19 nt, Artificial Sequence
  Description of Artificial Sequence: Synthetic oligonucleotide
gggagcucugcauuucgag

SEQ ID NO: 397395 - RNA, 19 nt, Artificial Sequence
  Description of Artificial Sequence: Synthetic oligonucleotide
cauauggcaagcacaacau

SEQ ID NO: 397396 - RNA, 19 nt, Artificial Sequence
  Description of Artificial Sequence: Synthetic oligonucleotide
cugugaauucaacucugga

SEQ ID NO: 397397 - RNA, 19 nt, Artificial Sequence
  Description of Artificial Sequence: Synthetic oligonucleotide
uacucgccauucacgacau

SEQ ID NO: 397398 - RNA, 19 nt, Artificial Sequence
  Description of Artificial Sequence: Synthetic oligonucleotide
aguccccuguucuaggcuu

SEQ ID NO: 397399 - RNA, 19 nt, Artificial Sequence
  Description of Artificial Sequence: Synthetic oligonucleotide
gaauaguggguaggacaug

SEQ ID NO: 397400 - RNA, 19 nt, Artificial Sequence
  Description of Artificial Sequence: Synthetic oligonucleotide
cuucauuaguguggacaag

SEQ ID NO: 397401 - RNA, 19 nt, Artificial Sequence
  Description of Artificial Sequence: Synthetic oligonucleotide
ucugucaccggaggcgcca

SEQ ID NO: 397402 - RNA, 19 nt, Artificial Sequence
  Description of Artificial Sequence: Synthetic oligonucleotide
guccauauggcaagcacaa

SEQ ID NO: 397403 - RNA, 19 nt, Artificial Sequence
  Description of Artificial Sequence: Synthetic oligonucleotide
uucuaggcuuguccauuaa

SEQ ID NO: 397404 - RNA, 19 nt, Artificial Sequence
  Description of Artificial Sequence: Synthetic oligonucleotide
acaguggcauugcucuagu

SEQ ID NO: 397405 - RNA, 19 nt, Artificial Sequence
  Description of Artificial Sequence: Synthetic oligonucleotide
agucgagcccauaauuccu

SEQ ID NO: 397406 - RNA, 19 nt, Artificial Sequence
  Description of Artificial Sequence: Synthetic oligonucleotide
cuaaggccauagacaguac

SEQ ID NO: 397407 - RNA, 19 nt, Artificial Sequence
  Description of Artificial Sequence: Synthetic oligonucleotide
cugcuucgaaaacauuuga

SEQ ID NO: 397408 - RNA, 19 nt, Artificial Sequence
  Description of Artificial Sequence: Synthetic oligonucleotide
cauagacaguacucagaga

SEQ ID NO: 397409 - RNA, 19 nt, Artificial Sequence
  Description of Artificial Sequence: Synthetic oligonucleotide
caccggaggcgccacauuc

SEQ ID NO: 397410 - RNA, 19 nt, Artificial Sequence
  Description of Artificial Sequence: Synthetic oligonucleotide
uaugagcaauucguuguuu

SEQ ID NO: 397411 - RNA, 19 nt, Artificial Sequence
  Description of Artificial Sequence: Synthetic oligonucleotide
guaccaugacgucguagga

SEQ ID NO: 397412 - RNA, 19 nt, Artificial Sequence
  Description of Artificial Sequence: Synthetic oligonucleotide
gaacuuugaaacccucuuu

SEQ ID NO: 397413 - RNA, 19 nt, Artificial Sequence
  Description of Artificial Sequence: Synthetic oligonucleotide
uccugcguuuccguuuggc

SEQ ID NO: 397414 - RNA, 19 nt, Artificial Sequence
  Description of Artificial Sequence: Synthetic oligonucleotide
gagaaaggugagagagcug

SEQ ID NO: 397415 - RNA, 19 nt, Artificial Sequence
  Description of Artificial Sequence: Synthetic oligonucleotide
gguaggacaugaugaacaa

SEQ ID NO: 397416 - RNA, 19 nt, Artificial Sequence
  Description of Artificial Sequence: Synthetic oligonucleotide
uucgagcaugcaugcuaca

SEQ ID NO: 397417 - RNA, 19 nt, Artificial Sequence
  Description of Artificial Sequence: Synthetic oligonucleotide
caaguucaccccgcaauuc

SEQ ID NO: 397418 - RNA, 19 nt, Artificial Sequence
  Description of Artificial Sequence: Synthetic oligonucleotide
ccucggaagacacuguguc

SEQ ID NO: 397419 - RNA, 19 nt, Artificial Sequence
  Description of Artificial Sequence: Synthetic oligonucleotide
cuaucaaguucaccccgca

SEQ ID NO: 397420 - RNA, 19 nt, Artificial Sequence
  Description of Artificial Sequence: Synthetic oligonucleotide
gcugcgagacuugaggaug

SEQ ID NO: 397421 - RNA, 19 nt, Artificial Sequence
  Description of Artificial Sequence: Synthetic oligonucleotide
gauggacuuccggggcacg

SEQ ID NO: 397422 - RNA, 19 nt, Artificial Sequence
  Description of Artificial Sequence: Synthetic oligonucleotide
gcucaacuaaacccacagc

SEQ ID NO: 397423 - RNA, 19 nt, Artificial Sequence
  Description of Artificial Sequence: Synthetic oligonucleotide
uucuugccuuaaacacuac

SEQ ID NO: 397424 - RNA, 19 nt, Artificial Sequence
  Description of Artificial Sequence: Synthetic oligonucleotide
guguuuaguuggaaacaca

SEQ ID NO: 397425 - RNA, 19 nt, Artificial Sequence
  Description of Artificial Sequence: Synthetic oligonucleotide
uugucucugcugcgagacu

SEQ ID NO: 397426 - RNA, 19 nt, Artificial Sequence
  Description of Artificial Sequence: Synthetic oligonucleotide
agcuaugaucaaacacuug

SEQ ID NO: 397427 - RNA, 19 nt, Artificial Sequence
  Description of Artificial Sequence: Synthetic oligonucleotide
cuguugcugccaagugagc

SEQ ID NO: 397428 - RNA, 19 nt, Artificial Sequence
  Description of Artificial Sequence: Synthetic oligonucleotide
ucuuuccggugcucaacua

SEQ ID NO: 397429 - RNA, 19 nt, Artificial Sequence
  Description of Artificial Sequence: Synthetic oligonucleotide
augcaugcuacagccggca

SEQ ID NO: 397430 - RNA, 19 nt, Artificial Sequence
  Description of Artificial Sequence: Synthetic oligonucleotide
uccauauggcaagcacaac

SEQ ID NO: 397431 - RNA, 19 nt, Artificial Sequence
  Description of Artificial Sequence: Synthetic oligonucleotide
caacgcaugacaguauucu

SEQ ID NO: 397432 - RNA, 19 nt, Artificial Sequence
  Description of Artificial Sequence: Synthetic oligonucleotide
guucuaaugcgaaugcuuu

SEQ ID NO: 397433 - RNA, 19 nt, Artificial Sequence
  Description of Artificial Sequence: Synthetic oligonucleotide
gaggcgccacauucacacc

SEQ ID NO: 397434 - RNA, 19 nt, Artificial Sequence
  Description of Artificial Sequence: Synthetic oligonucleotide
gacgcuucugagggcaaca

SEQ ID NO: 397435 - RNA, 19 nt, Artificial Sequence
  Description of Artificial Sequence: Synthetic oligonucleotide
cuacuggcuuggccauugg

SEQ ID NO: 397436 - RNA, 19 nt, Artificial Sequence
  Description of Artificial Sequence: Synthetic oligonucleotide
cuugcacuguacuggucaa

SEQ ID NO: 397437 - RNA, 19 nt, Artificial Sequence
  Description of Artificial Sequence: Synthetic oligonucleotide
ccuaguuguauaaccuaca

SEQ ID NO: 397438 - RNA, 19 nt, Artificial Sequence
  Description of Artificial Sequence: Synthetic oligonucleotide
uggcugacuguggugcuaa

SEQ ID NO: 397439 - RNA, 19 nt, Artificial Sequence
  Description of Artificial Sequence: Synthetic oligonucleotide
ggaauaguggguaggacau

SEQ ID NO: 397440 - RNA, 19 nt, Artificial Sequence
  Description of Artificial Sequence: Synthetic oligonucleotide
gguacaaaacugccugugu

SEQ ID NO: 397441 - RNA, 19 nt, Artificial Sequence
  Description of Artificial Sequence: Synthetic oligonucleotide
gucgagcccauaauuccuc

SEQ ID NO: 397442 - RNA, 19 nt, Artificial Sequence
  Description of Artificial Sequence: Synthetic oligonucleotide
ccuaaggccauagacagua

SEQ ID NO: 397443 - RNA, 19 nt, Artificial Sequence
  Description of Artificial Sequence: Synthetic oligonucleotide
aggcaaauccuuggguuuu

SEQ ID NO: 397444 - RNA, 19 nt, Artificial Sequence
  Description of Artificial Sequence: Synthetic oligonucleotide
cauuaguguggacaaguuu

SEQ ID NO: 397445 - RNA, 19 nt, Artificial Sequence
  Description of Artificial Sequence: Synthetic oligonucleotide
aaccuacaagagauaugua

SEQ ID NO: 397446 - RNA, 19 nt, Artificial Sequence
  Description of Artificial Sequence: Synthetic oligonucleotide
aaaugucagccgggcuccu

SEQ ID NO: 397447 - RNA, 19 nt, Artificial Sequence
  Description of Artificial Sequence: Synthetic oligonucleotide
gcucuaguuacaacuuuga

SEQ ID NO: 397448 - RNA, 19 nt, Artificial Sequence
  Description of Artificial Sequence: Synthetic oligonucleotide
cugccuguguuuaguugga

SEQ ID NO: 397449 - RNA, 19 nt, Artificial Sequence
  Description of Artificial Sequence: Synthetic oligonucleotide
ugucaccggaggcgccaca

SEQ ID NO: 397450 - RNA, 19 nt, Artificial Sequence
  Description of Artificial Sequence: Synthetic oligonucleotide
ggugguuuuccugcaguuc

SEQ ID NO: 397451 - RNA, 19 nt, Artificial Sequence
  Description of Artificial Sequence: Synthetic oligonucleotide
guauaaccuacaagagaua

SEQ ID NO: 397452 - RNA, 19 nt, Artificial Sequence
  Description of Artificial Sequence: Synthetic oligonucleotide
ggacuuccggggcacguac

SEQ ID NO: 397453 - RNA, 19 nt, Artificial Sequence
  Description of Artificial Sequence: Synthetic oligonucleotide
gcaugcuacagccggcaga

SEQ ID NO: 397454 - RNA, 19 nt, Artificial Sequence
  Description of Artificial Sequence: Synthetic oligonucleotide
ugcgagacuugaggaugga

SEQ ID NO: 397455 - RNA, 19 nt, Artificial Sequence
  Description of Artificial Sequence: Synthetic oligonucleotide
ggcgccacauucacacccg

SEQ ID NO: 397456 - RNA, 19 nt, Artificial Sequence
  Description of Artificial Sequence: Synthetic oligonucleotide
cuuagacaguggcauugcu

SEQ ID NO: 397457 - RNA, 19 nt, Artificial Sequence
  Description of Artificial Sequence: Synthetic oligonucleotide
cuaggacaucauuucacuu

SEQ ID NO: 397458 - RNA, 19 nt, Artificial Sequence
  Description of Artificial Sequence: Synthetic oligonucleotide
uuaaggcguuuggcuacaa

SEQ ID NO: 397459 - RNA, 19 nt, Artificial Sequence
  Description of Artificial Sequence: Synthetic oligonucleotide
ucaggacgcagcgccgguc

SEQ ID NO: 397460 - RNA, 19 nt, Artificial Sequence
  Description of Artificial Sequence: Synthetic oligonucleotide
uggacuuccggggcacgua

SEQ ID NO: 397461 - RNA, 19 nt, Artificial Sequence
  Description of Artificial Sequence: Synthetic oligonucleotide
gcccucggaggccuccucg

SEQ ID NO: 397462 - RNA, 19 nt, Artificial Sequence
  Description of Artificial Sequence: Synthetic oligonucleotide
uccuggcaugaaggcaaga

SEQ ID NO: 397463 - RNA, 19 nt, Artificial Sequence
  Description of Artificial Sequence: Synthetic oligonucleotide
accggaggcgccacauuca

SEQ ID NO: 397464 - RNA, 19 nt, Artificial Sequence
  Description of Artificial Sequence: Synthetic oligonucleotide
acgcagcgccggucauccc

SEQ ID NO: 397465 - RNA, 19 nt, Artificial Sequence
  Description of Artificial Sequence: Synthetic oligonucleotide
ccaccuaguuguauaaccu

SEQ ID NO: 397466 - RNA, 19 nt, Artificial Sequence
  Description of Artificial Sequence: Synthetic oligonucleotide
cagcagaacgucacaguau

SEQ ID NO: 397467 - RNA, 19 nt, Artificial Sequence
  Description of Artificial Sequence: Synthetic oligonucleotide
ggcugaauuugcugugugu

SEQ ID NO: 397468 - RNA, 19 nt, Artificial Sequence
  Description of Artificial Sequence: Synthetic oligonucleotide
agccgggcuccugauggca

SEQ ID NO: 397469 - RNA, 19 nt, Artificial Sequence
  Description of Artificial Sequence: Synthetic oligonucleotide
guccucaagugaagcuuga

SEQ ID NO: 397470 - RNA, 19 nt, Artificial Sequence
  Description of Artificial Sequence: Synthetic oligonucleotide
ggcuuauuuuaguucuaau

SEQ ID NO: 397471 - RNA, 19 nt, Artificial Sequence
  Description of Artificial Sequence: Synthetic oligonucleotide
gcaagagggccaaauggua

SEQ ID NO: 397472 - RNA, 19 nt, Artificial Sequence
  Description of Artificial Sequence: Synthetic oligonucleotide
gucugucaccggaggcgcc

SEQ ID NO: 397473 - RNA, 19 nt, Artificial Sequence
  Description of Artificial Sequence: Synthetic oligonucleotide
guguuuauucgaacccuuu

SEQ ID NO: 397474 - RNA, 19 nt, Artificial Sequence
  Description of Artificial Sequence: Synthetic oligonucleotide
ccggaggcgccacauucac

SEQ ID NO: 397475 - RNA, 19 nt, Artificial Sequence
  Description of Artificial Sequence: Synthetic oligonucleotide
cguacucgccauucacgac

SEQ ID NO: 397476 - RNA, 19 nt, Artificial Sequence
  Description of Artificial Sequence: Synthetic oligonucleotide
cggucauccccauccgcag

SEQ ID NO: 397477 - RNA, 19 nt, Artificial Sequence
  Description of Artificial Sequence: Synthetic oligonucleotide
gacgucuuuccaacuccau

SEQ ID NO: 397478 - RNA, 19 nt, Artificial Sequence
  Description of Artificial Sequence: Synthetic oligonucleotide
gcagaacgucacaguauuc

SEQ ID NO: 397479 - RNA, 19 nt, Artificial Sequence
  Description of Artificial Sequence: Synthetic oligonucleotide
cacuccugcguuuccguuu

SEQ ID NO: 397480 - RNA, 19 nt, Artificial Sequence
  Description of Artificial Sequence: Synthetic oligonucleotide
cauuucgagcaugcaugcu

SEQ ID NO: 397481 - RNA, 19 nt, Artificial Sequence
  Description of Artificial Sequence: Synthetic oligonucleotide
gucaccggaggcgccacau

SEQ ID NO: 397482 - RNA, 19 nt, Artificial Sequence
  Description of Artificial Sequence: Synthetic oligonucleotide
gccaagugagcaggacguc

SEQ ID NO: 397483 - RNA, 19 nt, Artificial Sequence
  Description of Artificial Sequence: Synthetic oligonucleotide
gucuggcagcuuugaacuu

SEQ ID NO: 397484 - RNA, 19 nt, Artificial Sequence
  Description of Artificial Sequence: Synthetic oligonucleotide
gcagcgccggucaucccca

SEQ ID NO: 397485 - RNA, 19 nt, Artificial Sequence
  Description of Artificial Sequence: Synthetic oligonucleotide
cucaggacgcagcgccggu

SEQ ID NO: 397486 - RNA, 19 nt, Artificial Sequence
  Description of Artificial Sequence: Synthetic oligonucleotide
gacuacuggcuuggccauu

SEQ ID NO: 397487 - RNA, 19 nt, Artificial Sequence
  Description of Artificial Sequence: Synthetic oligonucleotide
caguggcauugcucuaguu

SEQ ID NO: 397488 - RNA, 19 nt, Artificial Sequence
  Description of Artificial Sequence: Synthetic oligonucleotide
gguuuggaaugagguuuau

SEQ ID NO: 397489 - RNA, 19 nt, Artificial Sequence
  Description of Artificial Sequence: Synthetic oligonucleotide
gcgccacauucacacccgu

SEQ ID NO: 397490 - RNA, 19 nt, Artificial Sequence
  Description of Artificial Sequence: Synthetic oligonucleotide
cggaggcgccacauucaca

SEQ ID NO: 397491 - RNA, 19 nt, Artificial Sequence
  Description of Artificial Sequence: Synthetic oligonucleotide
ccccauccgcagcacugcu

SEQ ID NO: 397492 - RNA, 19 nt, Artificial Sequence
  Description of Artificial Sequence: Synthetic oligonucleotide
cggacgcuucugagggcaa

SEQ ID NO: 397493 - RNA, 19 nt, Artificial Sequence
  Description of Artificial Sequence: Synthetic oligonucleotide
ccaacuccaugggcugaau

SEQ ID NO: 397494 - RNA, 19 nt, Artificial Sequence
  Description of Artificial Sequence: Synthetic oligonucleotide
auuuccaucaaugaagucc

SEQ ID NO: 397495 - RNA, 19 nt, Artificial Sequence
  Description of Artificial Sequence: Synthetic oligonucleotide
uaugcaggcaaccucaucg

SEQ ID NO: 397496 - RNA, 19 nt, Artificial Sequence
  Description of Artificial Sequence: Synthetic oligonucleotide
acagugucgaaguugagcc

SEQ ID NO: 397497 - RNA, 19 nt, Artificial Sequence
  Description of Artificial Sequence: Synthetic oligonucleotide
aacugaaucucucgaaagc

SEQ ID NO: 397498 - RNA, 19 nt, Artificial Sequence
  Description of Artificial Sequence: Synthetic oligonucleotide
cuugagucgaucuucacgg

SEQ ID NO: 397499 - RNA, 19 nt, Artificial Sequence
  Description of Artificial Sequence: Synthetic oligonucleotide
ugacguugaaucuacagag

SEQ ID NO: 397500 - RNA, 19 nt, Artificial Sequence
  Description of Artificial Sequence: Synthetic oligonucleotide
aauggucuuggguauuacc

SEQ ID NO: 397501 - RNA, 19 nt, Artificial Sequence
  Description of Artificial Sequence: Synthetic oligonucleotide
ugauuaacacuucugcuug

SEQ ID NO: 397502 - RNA, 19 nt, Artificial Sequence
  Description of Artificial Sequence: Synthetic oligonucleotide
aucgacaauguccucaugg

SEQ ID NO: 397503 - RNA, 19 nt, Artificial Sequence
  Description of Artificial Sequence: Synthetic oligonucleotide
guaaauuggagguaaugag

SEQ ID NO: 397504 - RNA, 19 nt, Artificial Sequence
  Description of Artificial Sequence: Synthetic oligonucleotide
ucuaguucagucauaagau

SEQ ID NO: 397505 - RNA, 19 nt, Artificial Sequence
  Description of Artificial Sequence: Synthetic oligonucleotide
ugggaguucaggaagaaac

SEQ ID NO: 397506 - RNA, 19 nt, Artificial Sequence
  Description of Artificial Sequence: Synthetic oligonucleotide
gucaaugagaguuagagaa

SEQ ID NO: 397507 - RNA, 19 nt, Artificial Sequence
  Description of Artificial Sequence: Synthetic oligonucleotide
uauaagugcgagcugaguc

SEQ ID NO: 397508 - RNA, 19 nt, Artificial Sequence
  Description of Artificial Sequence: Synthetic oligonucleotide
ugacuuauuuaguuuaucu

SEQ ID NO: 397509 - RNA, 19 nt, Artificial Sequence
  Description of Artificial Sequence: Synthetic oligonucleotide
ucauugauuuccauuugcc

SEQ ID NO: 397510 - RNA, 19 nt, Artificial Sequence
  Description of Artificial Sequence: Synthetic oligonucleotide
agcgacuuccgucucaccc

SEQ ID NO: 397511 - RNA, 19 nt, Artificial Sequence
  Description of Artificial Sequence: Synthetic oligonucleotide
ucguuguugauguuucugg

SEQ ID NO: 397512 - RNA, 19 nt, Artificial Sequence
  Description of Artificial Sequence: Synthetic oligonucleotide
uuuacuucccugaugugac

SEQ ID NO: 397513 - RNA, 19 nt, Artificial Sequence
  Description of Artificial Sequence: Synthetic oligonucleotide
ucucauuuguggugaaugg

SEQ ID NO: 397514 - RNA, 19 nt, Artificial Sequence
  Description of Artificial Sequence: Synthetic oligonucleotide
uacagagcuacuaguaacc

SEQ ID NO: 397515 - RNA, 19 nt, Artificial Sequence
  Description of Artificial Sequence: Synthetic oligonucleotide
ugcuuuauaagugcgagcu

SEQ ID NO: 397516 - RNA, 19 nt, Artificial Sequence
  Description of Artificial Sequence: Synthetic oligonucleotide
gaaguugagccuugagucg

SEQ ID NO: 397517 - RNA, 19 nt, Artificial Sequence
  Description of Artificial Sequence: Synthetic oligonucleotide
uaguucagucauaagauuc

SEQ ID NO: 397518 - RNA, 19 nt, Artificial Sequence
  Description of Artificial Sequence: Synthetic oligonucleotide
caugaugugaauuugggaa

SEQ ID NO: 397519 - RNA, 19 nt, Artificial Sequence
  Description of Artificial Sequence: Synthetic oligonucleotide
agucuuauguuucgacagc

SEQ ID NO: 397520 - RNA, 19 nt, Artificial Sequence
  Description of Artificial Sequence: Synthetic oligonucleotide
aguggauugucaaugagag

SEQ ID NO: 397521 - RNA, 19 nt, Artificial Sequence
  Description of Artificial Sequence: Synthetic oligonucleotide
aaucuuucugguuugccau

SEQ ID NO: 397522 - RNA, 19 nt, Artificial Sequence
  Description of Artificial Sequence: Synthetic oligonucleotide
gaaaucugcccucauagca

SEQ ID NO: 397523 - RNA, 19 nt, Artificial Sequence
  Description of Artificial Sequence: Synthetic oligonucleotide
aaucuacagagcuacuagu

SEQ ID NO: 397524 - RNA, 19 nt, Artificial Sequence
  Description of Artificial Sequence: Synthetic oligonucleotide
uagacauacagugucgaag

SEQ ID NO: 397525 - RNA, 19 nt, Artificial Sequence
  Description of Artificial Sequence: Synthetic oligonucleotide
ugcuuagacauacaguguc

SEQ ID NO: 397526 - RNA, 19 nt, Artificial Sequence
  Description of Artificial Sequence: Synthetic oligonucleotide
accuaguuccucuuguagg

SEQ ID NO: 397527 - RNA, 19 nt, Artificial Sequence
  Description of Artificial Sequence: Synthetic oligonucleotide
uuuauaagugcgagcugag

SEQ ID NO: 397528 - RNA, 19 nt, Artificial Sequence
  Description of Artificial Sequence: Synthetic oligonucleotide
ugcuugauucaaauggucu

SEQ ID NO: 397529 - RNA, 19 nt, Artificial Sequence
  Description of Artificial Sequence: Synthetic oligonucleotide
ggugguauggagcaggucc

SEQ ID NO: 397530 - RNA, 19 nt, Artificial Sequence
  Description of Artificial Sequence: Synthetic oligonucleotide
ucagucuuauguuucgaca

SEQ ID NO: 397531 - RNA, 19 nt, Artificial Sequence
  Description of Artificial Sequence: Synthetic oligonucleotide
agacauacagugucgaagu

SEQ ID NO: 397532 - RNA, 19 nt, Artificial Sequence
  Description of Artificial Sequence: Synthetic oligonucleotide
uugacuucccuauuagcug

SEQ ID NO: 397533 - RNA, 19 nt, Artificial Sequence
  Description of Artificial Sequence: Synthetic oligonucleotide
cagucuuauguuucgacag

SEQ ID NO: 397534 - RNA, 19 nt, Artificial Sequence
  Description of Artificial Sequence: Synthetic oligonucleotide
cagaagugauuuuacuucc

SEQ ID NO: 397535 - RNA, 19 nt, Artificial Sequence
  Description of Artificial Sequence: Synthetic oligonucleotide
ugcaaguggauugucaaug

SEQ ID NO: 397536 - RNA, 19 nt, Artificial Sequence
  Description of Artificial Sequence: Synthetic oligonucleotide
uuuguggugaaugggaagu

SEQ ID NO: 397537 - RNA, 19 nt, Artificial Sequence
  Description of Artificial Sequence: Synthetic oligonucleotide
auaagugcgagcugagucu

SEQ ID NO: 397538 - RNA, 19 nt, Artificial Sequence
  Description of Artificial Sequence: Synthetic oligonucleotide
ucucgaaagccucuugucu

SEQ ID NO: 397539 - RNA, 19 nt, Artificial Sequence
  Description of Artificial Sequence: Synthetic oligonucleotide
caucaaugaaguccuuucg

SEQ ID NO: 397540 - RNA, 19 nt, Artificial Sequence
  Description of Artificial Sequence: Synthetic oligonucleotide
uuucgcaggaggcugaaau

SEQ ID NO: 397541 - RNA, 19 nt, Artificial Sequence
  Description of Artificial Sequence: Synthetic oligonucleotide
ugcaggaaaguucaugcuc

SEQ ID NO: 397542 - RNA, 19 nt, Artificial Sequence
  Description of Artificial Sequence: Synthetic oligonucleotide
uguuagaucugcugggagu

SEQ ID NO: 397543 - RNA, 19 nt, Artificial Sequence
  Description of Artificial Sequence: Synthetic oligonucleotide
ugacuucccuauuagcugc

SEQ ID NO: 397544 - RNA, 19 nt, Artificial Sequence
  Description of Artificial Sequence: Synthetic oligonucleotide
uguucuuaagcucgucugu

SEQ ID NO: 397545 - RNA, 19 nt, Artificial Sequence
  Description of Artificial Sequence: Synthetic oligonucleotide
uuuaguuuaucuugauuuu

SEQ ID NO: 397546 - RNA, 19 nt, Artificial Sequence
  Description of Artificial Sequence: Synthetic oligonucleotide
uccguuggaacuucagugc

SEQ ID NO: 397547 - RNA, 19 nt, Artificial Sequence
  Description of Artificial Sequence: Synthetic oligonucleotide
acguugaaucuacagagcu

SEQ ID NO: 397548 - RNA, 19 nt, Artificial Sequence
  Description of Artificial Sequence: Synthetic oligonucleotide
acuaguaaccaguucuccu

SEQ ID NO: 397549 - RNA, 19 nt, Artificial Sequence
  Description of Artificial Sequence: Synthetic oligonucleotide
ggaaaguucaugcucggcc

SEQ ID NO: 397550 - RNA, 19 nt, Artificial Sequence
  Description of Artificial Sequence: Synthetic oligonucleotide
cuccguuggaacuucagug

SEQ ID NO: 397551 - RNA, 19 nt, Artificial Sequence
  Description of Artificial Sequence: Synthetic oligonucleotide
ugcucagugagcaagcauu

SEQ ID NO: 397552 - RNA, 19 nt, Artificial Sequence
  Description of Artificial Sequence: Synthetic oligonucleotide
guacucaugcugcaucugg

SEQ ID NO: 397553 - RNA, 19 nt, Artificial Sequence
  Description of Artificial Sequence: Synthetic oligonucleotide
uguaaggugcccucugucu

SEQ ID NO: 397554 - RNA, 19 nt, Artificial Sequence
  Description of Artificial Sequence: Synthetic oligonucleotide
uucagucauaagauucuca

SEQ ID NO: 397555 - RNA, 19 nt, Artificial Sequence
  Description of Artificial Sequence: Synthetic oligonucleotide
auuuguggugaaugggaag

SEQ ID NO: 397556 - RNA, 19 nt, Artificial Sequence
  Description of Artificial Sequence: Synthetic oligonucleotide
gucuaggacagccaacucc

SEQ ID NO: 397557 - RNA, 19 nt, Artificial Sequence
  Description of Artificial Sequence: Synthetic oligonucleotide
  modified_base (4)..(4): a, c, u, g, unknown or other
cucncuuuucuaaugccuc

SEQ ID NO: 397558 - RNA, 19 nt, Artificial Sequence
  Description of Artificial Sequence: Synthetic oligonucleotide
ucgaucuucacgguggcgc

SEQ ID NO: 397559 - RNA, 19 nt, Artificial Sequence
  Description of Artificial Sequence: Synthetic oligonucleotide
gcugauauccuucugcagc

SEQ ID NO: 397560 - RNA, 19 nt, Artificial Sequence
  Description of Artificial Sequence: Synthetic oligonucleotide
aaacuuuccagggaacgga

SEQ ID NO: 397561 - RNA, 19 nt, Artificial Sequence
  Description of Artificial Sequence: Synthetic oligonucleotide
ugucaaugagaguuagaga

SEQ ID NO: 397562 - RNA, 19 nt, Artificial Sequence
  Description of Artificial Sequence: Synthetic oligonucleotide
uauccugagugguuaccgg

SEQ ID NO: 397563 - RNA, 19 nt, Artificial Sequence
  Description of Artificial Sequence: Synthetic oligonucleotide
aaguggauugucaaugaga

SEQ ID NO: 397564 - RNA, 19 nt, Artificial Sequence
  Description of Artificial Sequence: Synthetic oligonucleotide
uucuaaugccucagcaucu

SEQ ID NO: 397565 - RNA, 19 nt, Artificial Sequence
  Description of Artificial Sequence: Synthetic oligonucleotide
accaguucaauuguggcca

SEQ ID NO: 397566 - RNA, 19 nt, Artificial Sequence
  Description of Artificial Sequence: Synthetic oligonucleotide
uucaaauggucuuggguau

SEQ ID NO: 397567 - RNA, 19 nt, Artificial Sequence
  Description of Artificial Sequence: Synthetic oligonucleotide
  modified_base (3)..(3): a, c, u, g, unknown or other
ucncuuuucuaaugccuca

SEQ ID NO: 397568 - RNA, 19 nt, Artificial Sequence
  Description of Artificial Sequence: Synthetic oligonucleotide
ugcagcuauucucuugucu

SEQ ID NO: 397569 - RNA, 19 nt, Artificial Sequence
  Description of Artificial Sequence: Synthetic oligonucleotide
gugagcaagcauucuggcg

SEQ ID NO: 397570 - RNA, 19 nt, Artificial Sequence
  Description of Artificial Sequence: Synthetic oligonucleotide
guuaagaacugguuucgca

SEQ ID NO: 397571 - RNA, 19 nt, Artificial Sequence
  Description of Artificial Sequence: Synthetic oligonucleotide
uccucauugcaucauugau

SEQ ID NO: 397572 - RNA, 19 nt, Artificial Sequence
  Description of Artificial Sequence: Synthetic oligonucleotide
cuguuaagaacugguuucg

SEQ ID NO: 397573 - RNA, 19 nt, Artificial Sequence
  Description of Artificial Sequence: Synthetic oligonucleotide
gugacguugaaucuacaga

SEQ ID NO: 397574 - RNA, 19 nt, Artificial Sequence
  Description of Artificial Sequence: Synthetic oligonucleotide
cuauccugagugguuaccg

SEQ ID NO: 397575 - RNA, 19 nt, Artificial Sequence
  Description of Artificial Sequence: Synthetic oligonucleotide
cuauuagcugcuguucccg

SEQ ID NO: 397576 - RNA, 19 nt, Artificial Sequence
  Description of Artificial Sequence: Synthetic oligonucleotide
ucuccuaaguuuucauuuc

SEQ ID NO: 397577 - RNA, 19 nt, Artificial Sequence
  Description of Artificial Sequence: Synthetic oligonucleotide
ugguaaauuggagguaaug

SEQ ID NO: 397578 - RNA, 19 nt, Artificial Sequence
  Description of Artificial Sequence: Synthetic oligonucleotide
uuauuuaguuuaucuugau

SEQ ID NO: 397579 - RNA, 19 nt, Artificial Sequence
  Description of Artificial Sequence: Synthetic oligonucleotide
ucucuaugcaggcaaccuc

SEQ ID NO: 397580 - RNA, 19 nt, Artificial Sequence
  Description of Artificial Sequence: Synthetic oligonucleotide
ucuaugcaauucuucuacu

SEQ ID NO: 397581 - RNA, 19 nt, Artificial Sequence
  Description of Artificial Sequence: Synthetic oligonucleotide
aaguugagccuugagucga

SEQ ID NO: 397582 - RNA, 19 nt, Artificial Sequence
  Description of Artificial Sequence: Synthetic oligonucleotide
ccuaguuccucuuguaggg

SEQ ID NO: 397583 - RNA, 19 nt, Artificial Sequence
  Description of Artificial Sequence: Synthetic oligonucleotide
gguaaauuggagguaauga

SEQ ID NO: 397584 - RNA, 19 nt, Artificial Sequence
  Description of Artificial Sequence: Synthetic oligonucleotide
ugaaucuacagagcuacua

SEQ ID NO: 397585 - RNA, 19 nt, Artificial Sequence
  Description of Artificial Sequence: Synthetic oligonucleotide
ggugacguugaaucuacag

SEQ ID NO: 397586 - RNA, 19 nt, Artificial Sequence
  Description of Artificial Sequence: Synthetic oligonucleotide
augacuuauuuaguuuauc

SEQ ID NO: 397587 - RNA, 19 nt, Artificial Sequence
  Description of Artificial Sequence: Synthetic oligonucleotide
uugcuuagacauacagugu

SEQ ID NO: 397588 - RNA, 19 nt, Artificial Sequence
  Description of Artificial Sequence: Synthetic oligonucleotide
ucgacagcugcuguaaacu

SEQ ID NO: 397589 - RNA, 19 nt, Artificial Sequence
  Description of Artificial Sequence: Synthetic oligonucleotide
cuacuaguaaccaguucuc

SEQ ID NO: 397590 - RNA, 19 nt, Artificial Sequence
  Description of Artificial Sequence: Synthetic oligonucleotide
uggacauucaguucuccuu

SEQ ID NO: 397591 - RNA, 19 nt, Artificial Sequence
  Description of Artificial Sequence: Synthetic oligonucleotide
aaaucugcccucauagcau

SEQ ID NO: 397592 - RNA, 19 nt, Artificial Sequence
  Description of Artificial Sequence: Synthetic oligonucleotide
uacuaguaaccaguucucc

SEQ ID NO: 397593 - RNA, 19 nt, Artificial Sequence
  Description of Artificial Sequence: Synthetic oligonucleotide
uguaaacuaucugaagauu

SEQ ID NO: 397594 - RNA, 19 nt, Artificial Sequence
  Description of Artificial Sequence: Synthetic oligonucleotide
cuccugcuuuauaagugcg

SEQ ID NO: 397595 - RNA, 19 nt, Artificial Sequence
  Description of Artificial Sequence: Synthetic oligonucleotide
uccugcuuuauaagugcga

SEQ ID NO: 397596 - RNA, 19 nt, Artificial Sequence
  Description of Artificial Sequence: Synthetic oligonucleotide
aacuuuccagggaacggag

SEQ ID NO: 397597 - RNA, 19 nt, Artificial Sequence
  Description of Artificial Sequence: Synthetic oligonucleotide
guugcaaguggauugucaa

SEQ ID NO: 397598 - RNA, 19 nt, Artificial Sequence
  Description of Artificial Sequence: Synthetic oligonucleotide
uugagccuugagucgaucu

SEQ ID NO: 397599 - RNA, 19 nt, Artificial Sequence
  Description of Artificial Sequence: Synthetic oligonucleotide
aguucaggaagaaacuggu

SEQ ID NO: 397600 - RNA, 19 nt, Artificial Sequence
  Description of Artificial Sequence: Synthetic oligonucleotide
gaguuuauggcuuccaguu

SEQ ID NO: 397601 - RNA, 19 nt, Artificial Sequence
  Description of Artificial Sequence: Synthetic oligonucleotide
aucaacuugucuccucaga

SEQ ID NO: 397602 - RNA, 19 nt, Artificial Sequence
  Description of Artificial Sequence: Synthetic oligonucleotide
caaguggauugucaaugag

SEQ ID NO: 397603 - RNA, 19 nt, Artificial Sequence
  Description of Artificial Sequence: Synthetic oligonucleotide
  modified_base (8)..(8): a, c, u, g, unknown or other
ugggcucncuuuucuaaug

SEQ ID NO: 397604 - RNA, 19 nt, Artificial Sequence
  Description of Artificial Sequence: Synthetic oligonucleotide
ucccuucuaugccucagcu

SEQ ID NO: 397605 - RNA, 19 nt, Artificial Sequence
  Description of Artificial Sequence: Synthetic oligonucleotide
ucuaaugccucagcaucug

SEQ ID NO: 397606 - RNA, 19 nt, Artificial Sequence
  Description of Artificial Sequence: Synthetic oligonucleotide
uggguauuaccuaguuccu

SEQ ID NO: 397607 - RNA, 19 nt, Artificial Sequence
  Description of Artificial Sequence: Synthetic oligonucleotide
agauggaaaaugguaaauu

SEQ ID NO: 397608 - RNA, 19 nt, Artificial Sequence
  Description of Artificial Sequence: Synthetic oligonucleotide
ggucuuggguauuaccuag

SEQ ID NO: 397609 - RNA, 19 nt, Artificial Sequence
  Description of Artificial Sequence: Synthetic oligonucleotide
uccaaacuuuccagggaac

SEQ ID NO: 397610 - RNA, 19 nt, Artificial Sequence
  Description of Artificial Sequence: Synthetic oligonucleotide
uucucuaugcaggcaaccu

SEQ ID NO: 397611 - RNA, 19 nt, Artificial Sequence
  Description of Artificial Sequence: Synthetic oligonucleotide
ggaacggagauggaaaaug

SEQ ID NO: 397612 - RNA, 19 nt, Artificial Sequence
  Description of Artificial Sequence: Synthetic oligonucleotide
gauguuucuggaugguucu

SEQ ID NO: 397613 - RNA, 19 nt, Artificial Sequence
  Description of Artificial Sequence: Synthetic oligonucleotide
ugauguggacauucaguuc

SEQ ID NO: 397614 - RNA, 19 nt, Artificial Sequence
  Description of Artificial Sequence: Synthetic oligonucleotide
gacguugaaucuacagagc

SEQ ID NO: 397615 - RNA, 19 nt, Artificial Sequence
  Description of Artificial Sequence: Synthetic oligonucleotide
cugcuuuauaagugcgagc

SEQ ID NO: 397616 - RNA, 19 nt, Artificial Sequence
  Description of Artificial Sequence: Synthetic oligonucleotide
aacggagauggaaaauggu

SEQ ID NO: 397617 - RNA, 19 nt, Artificial Sequence
  Description of Artificial Sequence: Synthetic oligonucleotide
aauagcuguuagaucugcu

SEQ ID NO: 397618 - RNA, 19 nt, Artificial Sequence
  Description of Artificial Sequence: Synthetic oligonucleotide
ucuauccugagugguuacc

SEQ ID NO: 397619 - RNA, 19 nt, Artificial Sequence
  Description of Artificial Sequence: Synthetic oligonucleotide
aggcucucacugcaccgcc

SEQ ID NO: 397620 - RNA, 19 nt, Artificial Sequence
  Description of Artificial Sequence: Synthetic oligonucleotide
ccuugagucgaucuucacg

SEQ ID NO: 397621 - RNA, 19 nt, Artificial Sequence
  Description of Artificial Sequence: Synthetic oligonucleotide
ugcaccgcccuucuuccug

SEQ ID NO: 397622 - RNA, 19 nt, Artificial Sequence
  Description of Artificial Sequence: Synthetic oligonucleotide
gaagugauuuuacuucccu

SEQ ID NO: 397623 - RNA, 19 nt, Artificial Sequence
  Description of Artificial Sequence: Synthetic oligonucleotide
ugagccuugagucgaucuu

SEQ ID NO: 397624 - RNA, 19 nt, Artificial Sequence
  Description of Artificial Sequence: Synthetic oligonucleotide
uuauaagugcgagcugagu

SEQ ID NO: 397625 - RNA, 19 nt, Artificial Sequence
  Description of Artificial Sequence: Synthetic oligonucleotide
uucccuauuagcugcuguu

SEQ ID NO: 397626 - RNA, 19 nt, Artificial Sequence
  Description of Artificial Sequence: Synthetic oligonucleotide
uguuucgacagcugcugua

SEQ ID NO: 397627 - RNA, 19 nt, Artificial Sequence
  Description of Artificial Sequence: Synthetic oligonucleotide
ggcgcagucuuucacggag

SEQ ID NO: 397628 - RNA, 19 nt, Artificial Sequence
  Description of Artificial Sequence: Synthetic oligonucleotide
  modified_base (2)..(2): a, c, u, g, unknown or other
cncuuuucuaaugccucag

SEQ ID NO: 397629 - RNA, 19 nt, Artificial Sequence
  Description of Artificial Sequence: Synthetic oligonucleotide
ugucuauccugagugguua

SEQ ID NO: 397630 - RNA, 19 nt, Artificial Sequence
  Description of Artificial Sequence: Synthetic oligonucleotide
uugaaucuacagagcuacu

SEQ ID NO: 397631 - RNA, 19 nt, Artificial Sequence
  Description of Artificial Sequence: Synthetic oligonucleotide
  modified_base (7)..(7): a, c, u, g, unknown or other
gggcucncuuuucuaaugc

SEQ ID NO: 397632 - RNA, 19 nt, Artificial Sequence
  Description of Artificial Sequence: Synthetic oligonucleotide
cuccucagacuguguaagg

SEQ ID NO: 397633 - RNA, 19 nt, Artificial Sequence
  Description of Artificial Sequence: Synthetic oligonucleotide
uugucuauccugagugguu

SEQ ID NO: 397634 - RNA, 19 nt, Artificial Sequence
  Description of Artificial Sequence: Synthetic oligonucleotide
uggcaauccacuugcugau

SEQ ID NO: 397635 - RNA, 19 nt, Artificial Sequence
  Description of Artificial Sequence: Synthetic oligonucleotide
uccgucucacccaguguca

SEQ ID NO: 397636 - RNA, 19 nt, Artificial Sequence
  Description of Artificial Sequence: Synthetic oligonucleotide
cuucucuaugcaggcaacc

SEQ ID NO: 397637 - RNA, 19 nt, Artificial Sequence
  Description of Artificial Sequence: Synthetic oligonucleotide
ucuggcguugggugguaug

SEQ ID NO: 397638 - RNA, 19 nt, Artificial Sequence
  Description of Artificial Sequence: Synthetic oligonucleotide
ugcaggcaaccucaucgac

SEQ ID NO: 397639 - RNA, 19 nt, Artificial Sequence
  Description of Artificial Sequence: Synthetic oligonucleotide
uguucccguucugaaagcu

SEQ ID NO: 397640 - RNA, 19 nt, Artificial Sequence
  Description of Artificial Sequence: Synthetic oligonucleotide
aaguucaugcucggccucu

SEQ ID NO: 397641 - RNA, 19 nt, Artificial Sequence
  Description of Artificial Sequence: Synthetic oligonucleotide
gcuuagacauacagugucg

SEQ ID NO: 397642 - RNA, 19 nt, Artificial Sequence
  Description of Artificial Sequence: Synthetic oligonucleotide
cauuuguggugaaugggaa

SEQ ID NO: 397643 - RNA, 19 nt, Artificial Sequence
  Description of Artificial Sequence: Synthetic oligonucleotide
ucacuuuaccagccucuaa

SEQ ID NO: 397644 - RNA, 19 nt, Artificial Sequence
  Description of Artificial Sequence: Synthetic oligonucleotide
gguauuaccuaguuccucu

SEQ ID NO: 397645 - RNA, 19 nt, Artificial Sequence
  Description of Artificial Sequence: Synthetic oligonucleotide
ccuuagugcaggaaaguuc

SEQ ID NO: 397646 - RNA, 19 nt, Artificial Sequence
  Description of Artificial Sequence: Synthetic oligonucleotide
ucccugagcuccgagcgcc

SEQ ID NO: 397647 - RNA, 19 nt, Artificial Sequence
  Description of Artificial Sequence: Synthetic oligonucleotide
cuguaaacuaucugaagau

SEQ ID NO: 397648 - RNA, 19 nt, Artificial Sequence
  Description of Artificial Sequence: Synthetic oligonucleotide
augcaggcaaccucaucga

SEQ ID NO: 397649 - RNA, 19 nt, Artificial Sequence
  Description of Artificial Sequence: Synthetic oligonucleotide
acagagcuacuaguaacca

SEQ ID NO: 397650 - RNA, 19 nt, Artificial Sequence
  Description of Artificial Sequence: Synthetic oligonucleotide
ccuauuagcugcuguuccc

SEQ ID NO: 397651 - RNA, 19 nt, Artificial Sequence
  Description of Artificial Sequence: Synthetic oligonucleotide
cugcuguaaacuaucugaa

SEQ ID NO: 397652 - RNA, 19 nt, Artificial Sequence
  Description of Artificial Sequence: Synthetic oligonucleotide
uccuuagugcaggaaaguu

SEQ ID NO: 397653 - RNA, 19 nt, Artificial Sequence
  Description of Artificial Sequence: Synthetic oligonucleotide
acggagauggaaaauggua

SEQ ID NO: 397654 - RNA, 19 nt, Artificial Sequence
  Description of Artificial Sequence: Synthetic oligonucleotide
ugguuucgcaggaggcuga

SEQ ID NO: 397655 - RNA, 19 nt, Artificial Sequence
  Description of Artificial Sequence: Synthetic oligonucleotide
gggaguuuauggcuuccag

SEQ ID NO: 397656 - RNA, 19 nt, Artificial Sequence
  Description of Artificial Sequence: Synthetic oligonucleotide
agaacugguuucgcaggag

SEQ ID NO: 397657 - RNA, 19 nt, Artificial Sequence
  Description of Artificial Sequence: Synthetic oligonucleotide
ucagcgacuuccgucucac

SEQ ID NO: 397658 - RNA, 19 nt, Artificial Sequence
  Description of Artificial Sequence: Synthetic oligonucleotide
aucucucgaaagccucuug

SEQ ID NO: 397659 - RNA, 19 nt, Artificial Sequence
  Description of Artificial Sequence: Synthetic oligonucleotide
cucgaaagccucuugucua

SEQ ID NO: 397660 - RNA, 19 nt, Artificial Sequence
  Description of Artificial Sequence: Synthetic oligonucleotide
ccagcucgcuuucacaagg

SEQ ID NO: 397661 - RNA, 19 nt, Artificial Sequence
  Description of Artificial Sequence: Synthetic oligonucleotide
  modified_base (6)..(6): a, c, u, g, unknown or other
ggcucncuuuucuaaugcc

SEQ ID NO: 397662 - RNA, 19 nt, Artificial Sequence
  Description of Artificial Sequence: Synthetic oligonucleotide
ucccuauuagcugcuguuc

SEQ ID NO: 397663 - RNA, 19 nt, Artificial Sequence
  Description of Artificial Sequence: Synthetic oligonucleotide
cugguuucgcaggaggcug

SEQ ID NO: 397664 - RNA, 19 nt, Artificial Sequence
  Description of Artificial Sequence: Synthetic oligonucleotide
uucccugagcuccgagcgc

SEQ ID NO: 397665 - RNA, 19 nt, Artificial Sequence
  Description of Artificial Sequence: Synthetic oligonucleotide
uuacuucccugaugugacu

SEQ ID NO: 397666 - RNA, 19 nt, Artificial Sequence
  Description of Artificial Sequence: Synthetic oligonucleotide
cuucuaugccucagcugug

SEQ ID NO: 397667 - RNA, 19 nt, Artificial Sequence
  Description of Artificial Sequence: Synthetic oligonucleotide
ugggugguauggagcaggu

SEQ ID NO: 397668 - RNA, 19 nt, Artificial Sequence
  Description of Artificial Sequence: Synthetic oligonucleotide
aaucucucgaaagccucuu

SEQ ID NO: 397669 - RNA, 19 nt, Artificial Sequence
  Description of Artificial Sequence: Synthetic oligonucleotide
guucaauuguggccauuuc

SEQ ID NO: 397670 - RNA, 19 nt, Artificial Sequence
  Description of Artificial Sequence: Synthetic oligonucleotide
uugagucgaucuucacggu

SEQ ID NO: 397671 - RNA, 19 nt, Artificial Sequence
  Description of Artificial Sequence: Synthetic oligonucleotide
cuguucccguucugaaagc

SEQ ID NO: 397672 - RNA, 19 nt, Artificial Sequence
  Description of Artificial Sequence: Synthetic oligonucleotide
agugcgagcugagucuucu

SEQ ID NO: 397673 - RNA, 19 nt, Artificial Sequence
  Description of Artificial Sequence: Synthetic oligonucleotide
cccuauuagcugcuguucc

SEQ ID NO: 397674 - RNA, 19 nt, Artificial Sequence
  Description of Artificial Sequence: Synthetic oligonucleotide
cucuuguagggaguuuaug

SEQ ID NO: 397675 - RNA, 19 nt, Artificial Sequence
  Description of Artificial Sequence: Synthetic oligonucleotide
uuagugcaggaaaguucau

SEQ ID NO: 397676 - RNA, 19 nt, Artificial Sequence
  Description of Artificial Sequence: Synthetic oligonucleotide
guggugacguugaaucuac

SEQ ID NO: 397677 - RNA, 19 nt, Artificial Sequence
  Description of Artificial Sequence: Synthetic oligonucleotide
guguaaggugcccucuguc

SEQ ID NO: 397678 - RNA, 19 nt, Artificial Sequence
  Description of Artificial Sequence: Synthetic oligonucleotide
guuucgacagcugcuguaa

SEQ ID NO: 397679 - RNA, 19 nt, Artificial Sequence
  Description of Artificial Sequence: Synthetic oligonucleotide
ucccguucugaaagcugcu

SEQ ID NO: 397680 - RNA, 19 nt, Artificial Sequence
  Description of Artificial Sequence: Synthetic oligonucleotide
ggcguugggugguauggag

SEQ ID NO: 397681 - RNA, 19 nt, Artificial Sequence
  Description of Artificial Sequence: Synthetic oligonucleotide
uaagugcgagcugagucuu

SEQ ID NO: 397682 - RNA, 19 nt, Artificial Sequence
  Description of Artificial Sequence: Synthetic oligonucleotide
guucccguucugaaagcug

SEQ ID NO: 397683 - RNA, 19 nt, Artificial Sequence
  Description of Artificial Sequence: Synthetic oligonucleotide
cugacucaauuuguaauaa

SEQ ID NO: 397684 - RNA, 19 nt, Artificial Sequence
  Description of Artificial Sequence: Synthetic oligonucleotide
gucuauccugagugguuac

SEQ ID NO: 397685 - RNA, 19 nt, Artificial Sequence
  Description of Artificial Sequence: Synthetic oligonucleotide
cucgucuguuuccaccauc

SEQ ID NO: 397686 - RNA, 19 nt, Artificial Sequence
  Description of Artificial Sequence: Synthetic oligonucleotide
uuaccggcugacccuccaa

SEQ ID NO: 397687 - RNA, 19 nt, Artificial Sequence
  Description of Artificial Sequence: Synthetic oligonucleotide
caugguuguccugggcuac

SEQ ID NO: 397688 - RNA, 19 nt, Artificial Sequence
  Description of Artificial Sequence: Synthetic oligonucleotide
ccuucuaugccucagcugu

SEQ ID NO: 397689 - RNA, 19 nt, Artificial Sequence
  Description of Artificial Sequence: Synthetic oligonucleotide
uggugacguugaaucuaca

SEQ ID NO: 397690 - RNA, 19 nt, Artificial Sequence
  Description of Artificial Sequence: Synthetic oligonucleotide
ucaaauggucuuggguauu

SEQ ID NO: 397691 - RNA, 19 nt, Artificial Sequence
  Description of Artificial Sequence: Synthetic oligonucleotide
uuauggcuuccaguucagu

SEQ ID NO: 397692 - RNA, 19 nt, Artificial Sequence
  Description of Artificial Sequence: Synthetic oligonucleotide
acaucugugagcagcuguu

SEQ ID NO: 397693 - RNA, 19 nt, Artificial Sequence
  Description of Artificial Sequence: Synthetic oligonucleotide
gcaagcauucuggcguugg

SEQ ID NO: 397694 - RNA, 19 nt, Artificial Sequence
  Description of Artificial Sequence: Synthetic oligonucleotide
ugguauggagcagguccug

SEQ ID NO: 397695 - RNA, 19 nt, Artificial Sequence
  Description of Artificial Sequence: Synthetic oligonucleotide
ggaguuuauggcuuccagu

SEQ ID NO: 397696 - RNA, 19 nt, Artificial Sequence
  Description of Artificial Sequence: Synthetic oligonucleotide
ucgcuuucacaagguuaag

SEQ ID NO: 397697 - RNA, 19 nt, Artificial Sequence
  Description of Artificial Sequence: Synthetic oligonucleotide
gaaguuggucagcuucccu

SEQ ID NO: 397698 - RNA, 19 nt, Artificial Sequence
  Description of Artificial Sequence: Synthetic oligonucleotide
gugauuuuacuucccugau

SEQ ID NO: 397699 - RNA, 19 nt, Artificial Sequence
  Description of Artificial Sequence: Synthetic oligonucleotide
cuaaugccucagcaucuga

SEQ ID NO: 397700 - RNA, 19 nt, Artificial Sequence
  Description of Artificial Sequence: Synthetic oligonucleotide
guuagaucugcugggaguu

SEQ ID NO: 397701 - RNA, 19 nt, Artificial Sequence
  Description of Artificial Sequence: Synthetic oligonucleotide
ugguuaccggcugacccuc

SEQ ID NO: 397702 - RNA, 19 nt, Artificial Sequence
  Description of Artificial Sequence: Synthetic oligonucleotide
gaaucucucgaaagccucu

SEQ ID NO: 397703 - RNA, 19 nt, Artificial Sequence
  Description of Artificial Sequence: Synthetic oligonucleotide
agcucgcuuucacaagguu

SEQ ID NO: 397704 - RNA, 19 nt, Artificial Sequence
  Description of Artificial Sequence: Synthetic oligonucleotide
cuaguucagucauaagauu

SEQ ID NO: 397705 - RNA, 19 nt, Artificial Sequence
  Description of Artificial Sequence: Synthetic oligonucleotide
guuaccggcugacccucca

SEQ ID NO: 397706 - RNA, 19 nt, Artificial Sequence
  Description of Artificial Sequence: Synthetic oligonucleotide
acgccaguguucauccaug

SEQ ID NO: 397707 - RNA, 19 nt, Artificial Sequence
  Description of Artificial Sequence: Synthetic oligonucleotide
ucauggcguuucagagacu

SEQ ID NO: 397708 - RNA, 19 nt, Artificial Sequence
  Description of Artificial Sequence: Synthetic oligonucleotide
cacgguggcgcagucuuuc

SEQ ID NO: 397709 - RNA, 19 nt, Artificial Sequence
  Description of Artificial Sequence: Synthetic oligonucleotide
gcgccuggcccgcucaugg

SEQ ID NO: 397710 - RNA, 19 nt, Artificial Sequence
  Description of Artificial Sequence: Synthetic oligonucleotide
gugguuaccggcugacccu

SEQ ID NO: 397711 - RNA, 19 nt, Artificial Sequence
  Description of Artificial Sequence: Synthetic oligonucleotide
gaaggguugcaaguggauu

SEQ ID NO: 397712 - RNA, 19 nt, Artificial Sequence
  Description of Artificial Sequence: Synthetic oligonucleotide
acuucccuauuagcugcug

SEQ ID NO: 397713 - RNA, 19 nt, Artificial Sequence
  Description of Artificial Sequence: Synthetic oligonucleotide
uggcgcagucuuucacgga

SEQ ID NO: 397714 - RNA, 19 nt, Artificial Sequence
  Description of Artificial Sequence: Synthetic oligonucleotide
cuaugccucagcugugugu

SEQ ID NO: 397715 - RNA, 19 nt, Artificial Sequence
  Description of Artificial Sequence: Synthetic oligonucleotide
uggcguugggugguaugga

SEQ ID NO: 397716 - RNA, 19 nt, Artificial Sequence
  Description of Artificial Sequence: Synthetic oligonucleotide
cggagauggaaaaugguaa

SEQ ID NO: 397717 - RNA, 19 nt, Artificial Sequence
  Description of Artificial Sequence: Synthetic oligonucleotide
gcgacuuccgucucaccca

SEQ ID NO: 397718 - RNA, 19 nt, Artificial Sequence
  Description of Artificial Sequence: Synthetic oligonucleotide
agcgccgcuucagaagagu

SEQ ID NO: 397719 - RNA, 19 nt, Artificial Sequence
  Description of Artificial Sequence: Synthetic oligonucleotide
uaccagccucuaacuucug

SEQ ID NO: 397720 - RNA, 19 nt, Artificial Sequence
  Description of Artificial Sequence: Synthetic oligonucleotide
augguaaauuggagguaau

SEQ ID NO: 397721 - RNA, 19 nt, Artificial Sequence
  Description of Artificial Sequence: Synthetic oligonucleotide
cccucauagcaucugccuc

SEQ ID NO: 397722 - RNA, 19 nt, Artificial Sequence
  Description of Artificial Sequence: Synthetic oligonucleotide
cucggccucugccagaagu

SEQ ID NO: 397723 - RNA, 19 nt, Artificial Sequence
  Description of Artificial Sequence: Synthetic oligonucleotide
ggugaaugggaaguucucu

SEQ ID NO: 397724 - RNA, 19 nt, Artificial Sequence
  Description of Artificial Sequence: Synthetic oligonucleotide
ugagcuccgagcgccgcuu

SEQ ID NO: 397725 - RNA, 19 nt, Artificial Sequence
  Description of Artificial Sequence: Synthetic oligonucleotide
cucagcgacuuccgucuca

SEQ ID NO: 397726 - RNA, 19 nt, Artificial Sequence
  Description of Artificial Sequence: Synthetic oligonucleotide
ggguauuaccuaguuccuc

SEQ ID NO: 397727 - RNA, 19 nt, Artificial Sequence
  Description of Artificial Sequence: Synthetic oligonucleotide
gacauacagugucgaaguu

SEQ ID NO: 397728 - RNA, 19 nt, Artificial Sequence
  Description of Artificial Sequence: Synthetic oligonucleotide
agcaagcauucuggcguug

SEQ ID NO: 397729 - RNA, 19 nt, Artificial Sequence
  Description of Artificial Sequence: Synthetic oligonucleotide
cauggcguuucagagacuu

SEQ ID NO: 397730 - RNA, 19 nt, Artificial Sequence
  Description of Artificial Sequence: Synthetic oligonucleotide
gcucacuugacuucccuau

SEQ ID NO: 397731 - RNA, 19 nt, Artificial Sequence
  Description of Artificial Sequence: Synthetic oligonucleotide
gugcgagcugagucuucug

SEQ ID NO: 397732 - RNA, 19 nt, Artificial Sequence
  Description of Artificial Sequence: Synthetic oligonucleotide
gcguugggugguauggagc

SEQ ID NO: 397733 - RNA, 19 nt, Artificial Sequence
  Description of Artificial Sequence: Synthetic oligonucleotide
  modified_base (5)..(5): a, c, u, g, unknown or other
gcucncuuuucuaaugccu

SEQ ID NO: 397734 - RNA, 19 nt, Artificial Sequence
  Description of Artificial Sequence: Synthetic oligonucleotide
uggcuucaacuugcuuaca

SEQ ID NO: 397735 - RNA, 19 nt, Artificial Sequence
  Description of Artificial Sequence: Synthetic oligonucleotide
gcagucuuucacggagugc

SEQ ID NO: 397736 - RNA, 19 nt, Artificial Sequence
  Description of Artificial Sequence: Synthetic oligonucleotide
guugagccuugagucgauc

SEQ ID NO: 397737 - RNA, 19 nt, Artificial Sequence
  Description of Artificial Sequence: Synthetic oligonucleotide
agacugguucugauuucau

SEQ ID NO: 397738 - RNA, 19 nt, Artificial Sequence
  Description of Artificial Sequence: Synthetic oligonucleotide
cacccagugucagggcuuc

SEQ ID NO: 397739 - RNA, 19 nt, Artificial Sequence
  Description of Artificial Sequence: Synthetic oligonucleotide
gcuugcuuagacauacagu

SEQ ID NO: 397740 - RNA, 19 nt, Artificial Sequence
  Description of Artificial Sequence: Synthetic oligonucleotide
cagcgacuuccgucucacc

SEQ ID NO: 397741 - RNA, 19 nt, Artificial Sequence
  Description of Artificial Sequence: Synthetic oligonucleotide
gcucgcuuucacaagguua

SEQ ID NO: 397742 - RNA, 19 nt, Artificial Sequence
  Description of Artificial Sequence: Synthetic oligonucleotide
ccucauagcaucugccucu

SEQ ID NO: 397743 - RNA, 19 nt, Artificial Sequence
  Description of Artificial Sequence: Synthetic oligonucleotide
cugcuugcuuagacauaca

SEQ ID NO: 397744 - RNA, 19 nt, Artificial Sequence
  Description of Artificial Sequence: Synthetic oligonucleotide
  modified_base (9)..(9): a, c, u, g, unknown or other
cugggcucncuuuucuaau

SEQ ID NO: 397745 - RNA, 19 nt, Artificial Sequence
  Description of Artificial Sequence: Synthetic oligonucleotide
aguugagccuugagucgau

SEQ ID NO: 397746 - RNA, 19 nt, Artificial Sequence
  Description of Artificial Sequence: Synthetic oligonucleotide
cacgccaguguucauccau

SEQ ID NO: 397747 - RNA, 19 nt, Artificial Sequence
  Description of Artificial Sequence: Synthetic oligonucleotide
gagcaagcauucuggcguu

SEQ ID NO: 397748 - RNA, 19 nt, Artificial Sequence
  Description of Artificial Sequence: Synthetic oligonucleotide
gcuccguuggaacuucagu

SEQ ID NO: 397749 - RNA, 19 nt, Artificial Sequence
  Description of Artificial Sequence: Synthetic oligonucleotide
cagugucgaaguugagccu

SEQ ID NO: 397750 - RNA, 19 nt, Artificial Sequence
  Description of Artificial Sequence: Synthetic oligonucleotide
guucauccaugaugugaau

SEQ ID NO: 397751 - RNA, 19 nt, Artificial Sequence
  Description of Artificial Sequence: Synthetic oligonucleotide
gcaaccucaucgacaaugu

SEQ ID NO: 397752 - RNA, 19 nt, Artificial Sequence
  Description of Artificial Sequence: Synthetic oligonucleotide
cgcagucuuucacggagug

SEQ ID NO: 397753 - RNA, 19 nt, Artificial Sequence
  Description of Artificial Sequence: Synthetic oligonucleotide
cucacugcaccgcccuucu

SEQ ID NO: 397754 - RNA, 19 nt, Artificial Sequence
  Description of Artificial Sequence: Synthetic oligonucleotide
cgacuuccgucucacccag

SEQ ID NO: 397755 - RNA, 19 nt, Artificial Sequence
  Description of Artificial Sequence: Synthetic oligonucleotide
gggcuaccaguucaauugu

SEQ ID NO: 397756 - RNA, 19 nt, Artificial Sequence
  Description of Artificial Sequence: Synthetic oligonucleotide
cgagcgccgcuucagaaga

SEQ ID NO: 397757 - RNA, 19 nt, Artificial Sequence
  Description of Artificial Sequence: Synthetic oligonucleotide
aggcaaccucaucgacaau

SEQ ID NO: 397758 - RNA, 19 nt, Artificial Sequence
  Description of Artificial Sequence: Synthetic oligonucleotide
cagcucgcuuucacaaggu

SEQ ID NO: 397759 - RNA, 19 nt, Artificial Sequence
  Description of Artificial Sequence: Synthetic oligonucleotide
ccgucucacccagugucag

SEQ ID NO: 397760 - RNA, 19 nt, Artificial Sequence
  Description of Artificial Sequence: Synthetic oligonucleotide
guuucgcaggaggcugaaa

SEQ ID NO: 397761 - RNA, 19 nt, Artificial Sequence
  Description of Artificial Sequence: Synthetic oligonucleotide
ccguuggaacuucagugcu

SEQ ID NO: 397762 - RNA, 19 nt, Artificial Sequence
  Description of Artificial Sequence: Synthetic oligonucleotide
aggcguccuucagcugcug

SEQ ID NO: 397763 - RNA, 19 nt, Artificial Sequence
  Description of Artificial Sequence: Synthetic oligonucleotide
gcgccgcuucagaagaguc

SEQ ID NO: 397764 - RNA, 19 nt, Artificial Sequence
  Description of Artificial Sequence: Synthetic oligonucleotide
gcgagcugagucuucuguu

SEQ ID NO: 397765 - RNA, 19 nt, Artificial Sequence
  Description of Artificial Sequence: Synthetic oligonucleotide
cugagcuccgagcgccgcu

SEQ ID NO: 397766 - RNA, 19 nt, Artificial Sequence
  Description of Artificial Sequence: Synthetic oligonucleotide
gguuucgcaggaggcugaa

SEQ ID NO: 397767 - RNA, 19 nt, Artificial Sequence
  Description of Artificial Sequence: Synthetic oligonucleotide
guuuggccugggacagcaa

SEQ ID NO: 397768 - RNA, 19 nt, Artificial Sequence
  Description of Artificial Sequence: Synthetic oligonucleotide
gggaacggagauggaaaau

SEQ ID NO: 397769 - RNA, 19 nt, Artificial Sequence
  Description of Artificial Sequence: Synthetic oligonucleotide
gggugguauggagcagguc

SEQ ID NO: 397770 - RNA, 19 nt, Artificial Sequence
  Description of Artificial Sequence: Synthetic oligonucleotide
ccucuuguagggaguuuau

SEQ ID NO: 397771 - RNA, 19 nt, Artificial Sequence
  Description of Artificial Sequence: Synthetic oligonucleotide
gcucgucuguuuccaccau

SEQ ID NO: 397772 - RNA, 19 nt, Artificial Sequence
  Description of Artificial Sequence: Synthetic oligonucleotide
cgccgcuucagaagagucu

SEQ ID NO: 397773 - RNA, 19 nt, Artificial Sequence
  Description of Artificial Sequence: Synthetic oligonucleotide
gcgcagucuuucacggagu

SEQ ID NO: 397774 - RNA, 19 nt, Artificial Sequence
  Description of Artificial Sequence: Synthetic oligonucleotide
cguuggaacuucagugcuu

SEQ ID NO: 397775 - RNA, 19 nt, Artificial Sequence
  Description of Artificial Sequence: Synthetic oligonucleotide
auguugggcacuuaaaacc

SEQ ID NO: 397776 - RNA, 19 nt, Artificial Sequence
  Description of Artificial Sequence: Synthetic oligonucleotide
aacucagugauucaaccuc

SEQ ID NO: 397777 - RNA, 19 nt, Artificial Sequence
  Description of Artificial Sequence: Synthetic oligonucleotide
ggguauaucaaauucaggg

SEQ ID NO: 397778 - RNA, 19 nt, Artificial Sequence
  Description of Artificial Sequence: Synthetic oligonucleotide
ugucaaucagaccaggccc

SEQ ID NO: 397779 - RNA, 19 nt, Artificial Sequence
  Description of Artificial Sequence: Synthetic oligonucleotide
ggacuuaagaucuugaggc

SEQ ID NO: 397780 - RNA, 19 nt, Artificial Sequence
  Description of Artificial Sequence: Synthetic oligonucleotide
aguuguaaaccucgagucc

SEQ ID NO: 397781 - RNA, 19 nt, Artificial Sequence
  Description of Artificial Sequence: Synthetic oligonucleotide
agcaggguauaucaaauuc

SEQ ID NO: 397782 - RNA, 19 nt, Artificial Sequence
  Description of Artificial Sequence: Synthetic oligonucleotide
ucuugguccgccuaugcgg

SEQ ID NO: 397783 - RNA, 19 nt, Artificial Sequence
  Description of Artificial Sequence: Synthetic oligonucleotide
acgucaauaugguacugcc

SEQ ID NO: 397784 - RNA, 19 nt, Artificial Sequence
  Description of Artificial Sequence: Synthetic oligonucleotide
uugcacgucaauaugguac

SEQ ID NO: 397785 - RNA, 19 nt, Artificial Sequence
  Description of Artificial Sequence: Synthetic oligonucleotide
aaaaccucacagauguugg

SEQ ID NO: 397786 - RNA, 19 nt, Artificial Sequence
  Description of Artificial Sequence: Synthetic oligonucleotide
ucuacaagcaggccccacg

SEQ ID NO: 397787 - RNA, 19 nt, Artificial Sequence
  Description of Artificial Sequence: Synthetic oligonucleotide
agagacauguaccuggucu

SEQ ID NO: 397788 - RNA, 19 nt, Artificial Sequence
  Description of Artificial Sequence: Synthetic oligonucleotide
ugcauaacauggcagguga

SEQ ID NO: 397789 - RNA, 19 nt, Artificial Sequence
  Description of Artificial Sequence: Synthetic oligonucleotide
cucuaggacgcauagcugg

SEQ ID NO: 397790 - RNA, 19 nt, Artificial Sequence
  Description of Artificial Sequence: Synthetic oligonucleotide
ugucacaugggcagcaugc

SEQ ID NO: 397791 - RNA, 19 nt, Artificial Sequence
  Description of Artificial Sequence: Synthetic oligonucleotide
gauguugggcacuuaaaac

SEQ ID NO: 397792 - RNA, 19 nt, Artificial Sequence
  Description of Artificial Sequence: Synthetic oligonucleotide
aaccucacagauguugggc

SEQ ID NO: 397793 - RNA, 19 nt, Artificial Sequence
  Description of Artificial Sequence: Synthetic oligonucleotide
accgaagagauaugguuac

SEQ ID NO: 397794 - RNA, 19 nt, Artificial Sequence
  Description of Artificial Sequence: Synthetic oligonucleotide
ugauuucacggccaugcag

SEQ ID NO: 397795 - RNA, 19 nt, Artificial Sequence
  Description of Artificial Sequence: Synthetic oligonucleotide
uuuggucagauguuugccc

SEQ ID NO: 397796 - RNA, 19 nt, Artificial Sequence
  Description of Artificial Sequence: Synthetic oligonucleotide
auaguuuuaucccacugaa

SEQ ID NO: 397797 - RNA, 19 nt, Artificial Sequence
  Description of Artificial Sequence: Synthetic oligonucleotide
agagauaugguuacaaaca

SEQ ID NO: 397798 - RNA, 19 nt, Artificial Sequence
  Description of Artificial Sequence: Synthetic oligonucleotide
gguauaucaaauucagggc

SEQ ID NO: 397799 - RNA, 19 nt, Artificial Sequence
  Description of Artificial Sequence: Synthetic oligonucleotide
acacgcuuuacacagguga

SEQ ID NO: 397800 - RNA, 19 nt, Artificial Sequence
  Description of Artificial Sequence: Synthetic oligonucleotide
cuaggggugaguauacagc

SEQ ID NO: 397801 - RNA, 19 nt, Artificial Sequence
  Description of Artificial Sequence: Synthetic oligonucleotide
accgagugcacauucuagg

SEQ ID NO: 397802 - RNA, 19 nt, Artificial Sequence
  Description of Artificial Sequence: Synthetic oligonucleotide
aacacaccgcuuauggugg

SEQ ID NO: 397803 - RNA, 19 nt, Artificial Sequence
  Description of Artificial Sequence: Synthetic oligonucleotide
uguuugcccgccuacagcu

SEQ ID NO: 397804 - RNA, 19 nt, Artificial Sequence
  Description of Artificial Sequence: Synthetic oligonucleotide
guuguaaaccucgaguccc

SEQ ID NO: 397805 - RNA, 19 nt, Artificial Sequence
  Description of Artificial Sequence: Synthetic oligonucleotide
caguuguaaaccucgaguc

SEQ ID NO: 397806 - RNA, 19 nt, Artificial Sequence
  Description of Artificial Sequence: Synthetic oligonucleotide
aaucacguuuggccgagug

SEQ ID NO: 397807 - RNA, 19 nt, Artificial Sequence
  Description of Artificial Sequence: Synthetic oligonucleotide
cuacaugagcaguaagacc

SEQ ID NO: 397808 - RNA, 19 nt, Artificial Sequence
  Description of Artificial Sequence: Synthetic oligonucleotide
uuucagcucauacuauaac

SEQ ID NO: 397809 - RNA, 19 nt, Artificial Sequence
  Description of Artificial Sequence: Synthetic oligonucleotide
auguuugcccgccuacagc

SEQ ID NO: 397810 - RNA, 19 nt, Artificial Sequence
  Description of Artificial Sequence: Synthetic oligonucleotide
auaccaguuguaaaccucg

SEQ ID NO: 397811 - RNA, 19 nt, Artificial Sequence
  Description of Artificial Sequence: Synthetic oligonucleotide
gauguuugcccgccuacag

SEQ ID NO: 397812 - RNA, 19 nt, Artificial Sequence
  Description of Artificial Sequence: Synthetic oligonucleotide
aacucacaaauagcaagag

SEQ ID NO: 397813 - RNA, 19 nt, Artificial Sequence
  Description of Artificial Sequence: Synthetic oligonucleotide
acuauaaccgagugcacau

SEQ ID NO: 397814 - RNA, 19 nt, Artificial Sequence
  Description of Artificial Sequence: Synthetic oligonucleotide
aaggcuauggcugccucag

SEQ ID NO: 397815 - RNA, 19 nt, Artificial Sequence
  Description of Artificial Sequence: Synthetic oligonucleotide
gauuucacggccaugcaga

SEQ ID NO: 397816 - RNA, 19 nt, Artificial Sequence
  Description of Artificial Sequence: Synthetic oligonucleotide
uacuauaaccgagugcaca

SEQ ID NO: 397817 - RNA, 19 nt, Artificial Sequence
  Description of Artificial Sequence: Synthetic oligonucleotide
uccaucaggcaccaugcga

SEQ ID NO: 397818 - RNA, 19 nt, Artificial Sequence
  Description of Artificial Sequence: Synthetic oligonucleotide
auuccucuaggacgcauag

SEQ ID NO: 397819 - RNA, 19 nt, Artificial Sequence
  Description of Artificial Sequence: Synthetic oligonucleotide
ugcacgucaauaugguacu

SEQ ID NO: 397820 - RNA, 19 nt, Artificial Sequence
  Description of Artificial Sequence: Synthetic oligonucleotide
ucaauaugguacugccuca

SEQ ID NO: 397821 - RNA, 19 nt, Artificial Sequence
  Description of Artificial Sequence: Synthetic oligonucleotide
auuucacggccaugcagac

SEQ ID NO: 397822 - RNA, 19 nt, Artificial Sequence
  Description of Artificial Sequence: Synthetic oligonucleotide
ugcguugcacgucaauaug

SEQ ID NO: 397823 - RNA, 19 nt, Artificial Sequence
  Description of Artificial Sequence: Synthetic oligonucleotide
ucuaagggcccaguaacug

SEQ ID NO: 397824 - RNA, 19 nt, Artificial Sequence
  Description of Artificial Sequence: Synthetic oligonucleotide
guacucauccagccggugg

SEQ ID NO: 397825 - RNA, 19 nt, Artificial Sequence
  Description of Artificial Sequence: Synthetic oligonucleotide
cuuccgaugccgauugcgc

SEQ ID NO: 397826 - RNA, 19 nt, Artificial Sequence
  Description of Artificial Sequence: Synthetic oligonucleotide
guaaaccucgagucccugg

SEQ ID NO: 397827 - RNA, 19 nt, Artificial Sequence
  Description of Artificial Sequence: Synthetic oligonucleotide
gaagagauaugguuacaaa

SEQ ID NO: 397828 - RNA, 19 nt, Artificial Sequence
  Description of Artificial Sequence: Synthetic oligonucleotide
ccacacuacaaauucauug

SEQ ID NO: 397829 - RNA, 19 nt, Artificial Sequence
  Description of Artificial Sequence: Synthetic oligonucleotide
ucagucauaccaguuguaa

SEQ ID NO: 397830 - RNA, 19 nt, Artificial Sequence
  Description of Artificial Sequence: Synthetic oligonucleotide
augccgauugcgcugccgg

SEQ ID NO: 397831 - RNA, 19 nt, Artificial Sequence
  Description of Artificial Sequence: Synthetic oligonucleotide
acucacaaauagcaagaga

SEQ ID NO: 397832 - RNA, 19 nt, Artificial Sequence
  Description of Artificial Sequence: Synthetic oligonucleotide
ggaugaaaggugcauaaca

SEQ ID NO: 397833 - RNA, 19 nt, Artificial Sequence
  Description of Artificial Sequence: Synthetic oligonucleotide
cagugauucaaccucuguc

SEQ ID NO: 397834 - RNA, 19 nt, Artificial Sequence
  Description of Artificial Sequence: Synthetic oligonucleotide
uauacguagacagcagauc

SEQ ID NO: 397835 - RNA, 19 nt, Artificial Sequence
  Description of Artificial Sequence: Synthetic oligonucleotide
cagccguuggucuauggag

SEQ ID NO: 397836 - RNA, 19 nt, Artificial Sequence
  Description of Artificial Sequence: Synthetic oligonucleotide
ucagugauucaaccucugu

SEQ ID NO: 397837 - RNA, 19 nt, Artificial Sequence
  Description of Artificial Sequence: Synthetic oligonucleotide
ucgagaauccugugggcca

SEQ ID NO: 397838 - RNA, 19 nt, Artificial Sequence
  Description of Artificial Sequence: Synthetic oligonucleotide
agaaccaaugccccacacu

SEQ ID NO: 397839 - RNA, 19 nt, Artificial Sequence
  Description of Artificial Sequence: Synthetic oligonucleotide
ccuacugaugcguugcacg

SEQ ID NO: 397840 - RNA, 19 nt, Artificial Sequence
  Description of Artificial Sequence: Synthetic oligonucleotide
aggagcgguguccuccacc

SEQ ID NO: 397841 - RNA, 19 nt, Artificial Sequence
  Description of Artificial Sequence: Synthetic oligonucleotide
uacuaagggcgguacguga

SEQ ID NO: 397842 - RNA, 19 nt, Artificial Sequence
  Description of Artificial Sequence: Synthetic oligonucleotide
uugucggagucaaacucac

SEQ ID NO: 397843 - RNA, 19 nt, Artificial Sequence
  Description of Artificial Sequence: Synthetic oligonucleotide
uuugcccgccuacagcuac

SEQ ID NO: 397844 - RNA, 19 nt, Artificial Sequence
  Description of Artificial Sequence: Synthetic oligonucleotide
uccuuaagguaggcaaagg

SEQ ID NO: 397845 - RNA, 19 nt, Artificial Sequence
  Description of Artificial Sequence: Synthetic oligonucleotide
gaccuuccgaugccgauug

SEQ ID NO: 397846 - RNA, 19 nt, Artificial Sequence
  Description of Artificial Sequence: Synthetic oligonucleotide
aaccgagugcacauucuag

SEQ ID NO: 397847 - RNA, 19 nt, Artificial Sequence
  Description of Artificial Sequence: Synthetic oligonucleotide
caaauagcaagagacaugu

SEQ ID NO: 397848 - RNA, 19 nt, Artificial Sequence
  Description of Artificial Sequence: Synthetic oligonucleotide
acauccggaacaugguaca

SEQ ID NO: 397849 - RNA, 19 nt, Artificial Sequence
  Description of Artificial Sequence: Synthetic oligonucleotide
agcucauacuauaaccgag

SEQ ID NO: 397850 - RNA, 19 nt, Artificial Sequence
  Description of Artificial Sequence: Synthetic oligonucleotide
uaugcggcacccuacugau

SEQ ID NO: 397851 - RNA, 19 nt, Artificial Sequence
  Description of Artificial Sequence: Synthetic oligonucleotide
cuugucggagucaaacuca

SEQ ID NO: 397852 - RNA, 19 nt, Artificial Sequence
  Description of Artificial Sequence: Synthetic oligonucleotide
gccaccuagagcccgauag

SEQ ID NO: 397853 - RNA, 19 nt, Artificial Sequence
  Description of Artificial Sequence: Synthetic oligonucleotide
agcuacuaagggcgguacg

SEQ ID NO: 397854 - RNA, 19 nt, Artificial Sequence
  Description of Artificial Sequence: Synthetic oligonucleotide
agcccgauagagcaugaca

SEQ ID NO: 397855 - RNA, 19 nt, Artificial Sequence
  Description of Artificial Sequence: Synthetic oligonucleotide
aauaugguacugccucauu

SEQ ID NO: 397856 - RNA, 19 nt, Artificial Sequence
  Description of Artificial Sequence: Synthetic oligonucleotide
uauuccucuaggacgcaua

SEQ ID NO: 397857 - RNA, 19 nt, Artificial Sequence
  Description of Artificial Sequence: Synthetic oligonucleotide
uaaccgagugcacauucua

SEQ ID NO: 397858 - RNA, 19 nt, Artificial Sequence
  Description of Artificial Sequence: Synthetic oligonucleotide
caugcgaagcccagcuacc

SEQ ID NO: 397859 - RNA, 19 nt, Artificial Sequence
  Description of Artificial Sequence: Synthetic oligonucleotide
uaggacgcauagcuggggu

SEQ ID NO: 397860 - RNA, 19 nt, Artificial Sequence
  Description of Artificial Sequence: Synthetic oligonucleotide
augcguugcacgucaauau

SEQ ID NO: 397861 - RNA, 19 nt, Artificial Sequence
  Description of Artificial Sequence: Synthetic oligonucleotide
gagaaucacguuuggccga

SEQ ID NO: 397862 - RNA, 19 nt, Artificial Sequence
  Description of Artificial Sequence: Synthetic oligonucleotide
ucggagucaaacucacaaa

SEQ ID NO: 397863 - RNA, 19 nt, Artificial Sequence
  Description of Artificial Sequence: Synthetic oligonucleotide
gucgagaauccugugggcc

SEQ ID NO: 397864 - RNA, 19 nt, Artificial Sequence
  Description of Artificial Sequence: Synthetic oligonucleotide
cacgucaauaugguacugc

SEQ ID NO: 397865 - RNA, 19 nt, Artificial Sequence
  Description of Artificial Sequence: Synthetic oligonucleotide
aggguauaucaaauucagg

SEQ ID NO: 397866 - RNA, 19 nt, Artificial Sequence
  Description of Artificial Sequence: Synthetic oligonucleotide
auauacguagacagcagau

SEQ ID NO: 397867 - RNA, 19 nt, Artificial Sequence
  Description of Artificial Sequence: Synthetic oligonucleotide
agccguuggucuauggagg

SEQ ID NO: 397868 - RNA, 19 nt, Artificial Sequence
  Description of Artificial Sequence: Synthetic oligonucleotide
ggcauauacguagacagca

SEQ ID NO: 397869 - RNA, 19 nt, Artificial Sequence
  Description of Artificial Sequence: Synthetic oligonucleotide
cucggccacaccucuuugg

SEQ ID NO: 397870 - RNA, 19 nt, Artificial Sequence
  Description of Artificial Sequence: Synthetic oligonucleotide
uuccgaugccgauugcgcu

SEQ ID NO: 397871 - RNA, 19 nt, Artificial Sequence
  Description of Artificial Sequence: Synthetic oligonucleotide
agcuacccaguucaugccu

SEQ ID NO: 397872 - RNA, 19 nt, Artificial Sequence
  Description of Artificial Sequence: Synthetic oligonucleotide
cagagcacgcaccgaagag

SEQ ID NO: 397873 - RNA, 19 nt, Artificial Sequence
  Description of Artificial Sequence: Synthetic oligonucleotide
cuaagggcgguacgugaag

SEQ ID NO: 397874 - RNA, 19 nt, Artificial Sequence
  Description of Artificial Sequence: Synthetic oligonucleotide
aucagaccaggccccucac

SEQ ID NO: 397875 - RNA, 19 nt, Artificial Sequence
  Description of Artificial Sequence: Synthetic oligonucleotide
gaugcguugcacgucaaua

SEQ ID NO: 397876 - RNA, 19 nt, Artificial Sequence
  Description of Artificial Sequence: Synthetic oligonucleotide
agaaucacguuuggccgag

SEQ ID NO: 397877 - RNA, 19 nt, Artificial Sequence
  Description of Artificial Sequence: Synthetic oligonucleotide
ugguuaggugccucaugug

SEQ ID NO: 397878 - RNA, 19 nt, Artificial Sequence
  Description of Artificial Sequence: Synthetic oligonucleotide
auacuauaaccgagugcac

SEQ ID NO: 397879 - RNA, 19 nt, Artificial Sequence
  Description of Artificial Sequence: Synthetic oligonucleotide
agaauucgcccagaguccu

SEQ ID NO: 397880 - RNA, 19 nt, Artificial Sequence
  Description of Artificial Sequence: Synthetic oligonucleotide
cuaugcggcacccuacuga

SEQ ID NO: 397881 - RNA, 19 nt, Artificial Sequence
  Description of Artificial Sequence: Synthetic oligonucleotide
ccuagagcccgauagagca

SEQ ID NO: 397882 - RNA, 19 nt, Artificial Sequence
  Description of Artificial Sequence: Synthetic oligonucleotide
cucggagaaucacguuugg

SEQ ID NO: 397883 - RNA, 19 nt, Artificial Sequence
  Description of Artificial Sequence: Synthetic oligonucleotide
ccgccuacagcuacuaagg

SEQ ID NO: 397884 - RNA, 19 nt, Artificial Sequence
  Description of Artificial Sequence: Synthetic oligonucleotide
guacgugaaguguuccaca

SEQ ID NO: 397885 - RNA, 19 nt, Artificial Sequence
  Description of Artificial Sequence: Synthetic oligonucleotide
cucagugauucaaccucug

SEQ ID NO: 397886 - RNA, 19 nt, Artificial Sequence
  Description of Artificial Sequence: Synthetic oligonucleotide
caccgcuuaugguggaaag

SEQ ID NO: 397887 - RNA, 19 nt, Artificial Sequence
  Description of Artificial Sequence: Synthetic oligonucleotide
ggagcuggccaccauguac

SEQ ID NO: 397888 - RNA, 19 nt, Artificial Sequence
  Description of Artificial Sequence: Synthetic oligonucleotide
aggcugggacuuaagaucu

SEQ ID NO: 397889 - RNA, 19 nt, Artificial Sequence
  Description of Artificial Sequence: Synthetic oligonucleotide
gcuugucggagucaaacuc

SEQ ID NO: 397890 - RNA, 19 nt, Artificial Sequence
  Description of Artificial Sequence: Synthetic oligonucleotide
cagcucauacuauaaccga

SEQ ID NO: 397891 - RNA, 19 nt, Artificial Sequence
  Description of Artificial Sequence: Synthetic oligonucleotide
aauauuccucuaggacgca

SEQ ID NO: 397892 - RNA, 19 nt, Artificial Sequence
  Description of Artificial Sequence: Synthetic oligonucleotide
cacccuacugaugcguugc

SEQ ID NO: 397893 - RNA, 19 nt, Artificial Sequence
  Description of Artificial Sequence: Synthetic oligonucleotide
aaucaucaaccggggaaaa

SEQ ID NO: 397894 - RNA, 19 nt, Artificial Sequence
  Description of Artificial Sequence: Synthetic oligonucleotide
caccgaagagauaugguua

SEQ ID NO: 397895 - RNA, 19 nt, Artificial Sequence
  Description of Artificial Sequence: Synthetic oligonucleotide
ccgagugcacauucuaggg

SEQ ID NO: 397896 - RNA, 19 nt, Artificial Sequence
  Description of Artificial Sequence: Synthetic oligonucleotide
acauucuaggggugaguau

SEQ ID NO: 397897 - RNA, 19 nt, Artificial Sequence
  Description of Artificial Sequence: Synthetic oligonucleotide
gaaggucagccguuggucu

SEQ ID NO: 397898 - RNA, 19 nt, Artificial Sequence
  Description of Artificial Sequence: Synthetic oligonucleotide
gcauguaaucacaauguca

SEQ ID NO: 397899 - RNA, 19 nt, Artificial Sequence
  Description of Artificial Sequence: Synthetic oligonucleotide
gacggucaagcagggagug

SEQ ID NO: 397900 - RNA, 19 nt, Artificial Sequence
  Description of Artificial Sequence: Synthetic oligonucleotide
caccauguacaaagagcug

SEQ ID NO: 397901 - RNA, 19 nt, Artificial Sequence
  Description of Artificial Sequence: Synthetic oligonucleotide
gcguugcacgucaauaugg

SEQ ID NO: 397902 - RNA, 19 nt, Artificial Sequence
  Description of Artificial Sequence: Synthetic oligonucleotide
uaccgucuguagcugcacu

SEQ ID NO: 397903 - RNA, 19 nt, Artificial Sequence
  Description of Artificial Sequence: Synthetic oligonucleotide
cuaggacgcauagcugggg

SEQ ID NO: 397904 - RNA, 19 nt, Artificial Sequence
  Description of Artificial Sequence: Synthetic oligonucleotide
cuacuaagggcgguacgug

SEQ ID NO: 397905 - RNA, 19 nt, Artificial Sequence
  Description of Artificial Sequence: Synthetic oligonucleotide
ugaugcguugcacgucaau

SEQ ID NO: 397906 - RNA, 19 nt, Artificial Sequence
  Description of Artificial Sequence: Synthetic oligonucleotide
auaaccgagugcacauucu

SEQ ID NO: 397907 - RNA, 19 nt, Artificial Sequence
  Description of Artificial Sequence: Synthetic oligonucleotide
acccucucggagaaucacg

SEQ ID NO: 397908 - RNA, 19 nt, Artificial Sequence
  Description of Artificial Sequence: Synthetic oligonucleotide
cugguuaggugccucaugu

SEQ ID NO: 397909 - RNA, 19 nt, Artificial Sequence
  Description of Artificial Sequence: Synthetic oligonucleotide
cacaaauagcaagagacau

SEQ ID NO: 397910 - RNA, 19 nt, Artificial Sequence
  Description of Artificial Sequence: Synthetic oligonucleotide
uucaaccaccugugguaac

SEQ ID NO: 397911 - RNA, 19 nt, Artificial Sequence
  Description of Artificial Sequence: Synthetic oligonucleotide
uucgcccagaguccugcaa

SEQ ID NO: 397912 - RNA, 19 nt, Artificial Sequence
  Description of Artificial Sequence: Synthetic oligonucleotide
ucaaucagaccaggccccu

SEQ ID NO: 397913 - RNA, 19 nt, Artificial Sequence
  Description of Artificial Sequence: Synthetic oligonucleotide
gcaggguauaucaaauuca

SEQ ID NO: 397914 - RNA, 19 nt, Artificial Sequence
  Description of Artificial Sequence: Synthetic oligonucleotide
gguuaggugccucaugugu

SEQ ID NO: 397915 - RNA, 19 nt, Artificial Sequence
  Description of Artificial Sequence: Synthetic oligonucleotide
caggcuaccgucuguagcu

SEQ ID NO: 397916 - RNA, 19 nt, Artificial Sequence
  Description of Artificial Sequence: Synthetic oligonucleotide
cugucacaugggcagcaug

SEQ ID NO: 397917 - RNA, 19 nt, Artificial Sequence
  Description of Artificial Sequence: Synthetic oligonucleotide
aagcgcuaggacacagaca

SEQ ID NO: 397918 - RNA, 19 nt, Artificial Sequence
  Description of Artificial Sequence: Synthetic oligonucleotide
cacguuuggccgagugcag

SEQ ID NO: 397919 - RNA, 19 nt, Artificial Sequence
  Description of Artificial Sequence: Synthetic oligonucleotide
ccaccgucuacaagcaggc

SEQ ID NO: 397920 - RNA, 19 nt, Artificial Sequence
  Description of Artificial Sequence: Synthetic oligonucleotide
acuaagggcgguacgugaa

SEQ ID NO: 397921 - RNA, 19 nt, Artificial Sequence
  Description of Artificial Sequence: Synthetic oligonucleotide
ggccuaggguuacagugcc

SEQ ID NO: 397922 - RNA, 19 nt, Artificial Sequence
  Description of Artificial Sequence: Synthetic oligonucleotide
ucaugccucgacaggccuu

SEQ ID NO: 397923 - RNA, 19 nt, Artificial Sequence
  Description of Artificial Sequence: Synthetic oligonucleotide
cacacgcuuuacacaggug

SEQ ID NO: 397924 - RNA, 19 nt, Artificial Sequence
  Description of Artificial Sequence: Synthetic oligonucleotide
gacgcauagcugggguacc

SEQ ID NO: 397925 - RNA, 19 nt, Artificial Sequence
  Description of Artificial Sequence: Synthetic oligonucleotide
cuacugaugcguugcacgu

SEQ ID NO: 397926 - RNA, 19 nt, Artificial Sequence
  Description of Artificial Sequence: Synthetic oligonucleotide
cgagugcacauucuagggg

SEQ ID NO: 397927 - RNA, 19 nt, Artificial Sequence
  Description of Artificial Sequence: Synthetic oligonucleotide
ggucgagaauccugugggc

SEQ ID NO: 397928 - RNA, 19 nt, Artificial Sequence
  Description of Artificial Sequence: Synthetic oligonucleotide
guaguggagccacggucca

SEQ ID NO: 397929 - RNA, 19 nt, Artificial Sequence
  Description of Artificial Sequence: Synthetic oligonucleotide
guugcacgucaauauggua

SEQ ID NO: 397930 - RNA, 19 nt, Artificial Sequence
  Description of Artificial Sequence: Synthetic oligonucleotide
auauuccucuaggacgcau

SEQ ID NO: 397931 - RNA, 19 nt, Artificial Sequence
  Description of Artificial Sequence: Synthetic oligonucleotide
gccguuggucuauggaggc

SEQ ID NO: 397932 - RNA, 19 nt, Artificial Sequence
  Description of Artificial Sequence: Synthetic oligonucleotide
cauccggaacaugguacac

SEQ ID NO: 397933 - RNA, 19 nt, Artificial Sequence
  Description of Artificial Sequence: Synthetic oligonucleotide
ccaucaggcaccaugcgaa

SEQ ID NO: 397934 - RNA, 19 nt, Artificial Sequence
  Description of Artificial Sequence: Synthetic oligonucleotide
gaauucgcccagaguccug

SEQ ID NO: 397935 - RNA, 19 nt, Artificial Sequence
  Description of Artificial Sequence: Synthetic oligonucleotide
acagcuacuaagggcggua

SEQ ID NO: 397936 - RNA, 19 nt, Artificial Sequence
  Description of Artificial Sequence: Synthetic oligonucleotide
aggacgcauagcuggggua

SEQ ID NO: 397937 - RNA, 19 nt, Artificial Sequence
  Description of Artificial Sequence: Synthetic oligonucleotide
cacgcaccgaagagauaug

SEQ ID NO: 397938 - RNA, 19 nt, Artificial Sequence
  Description of Artificial Sequence: Synthetic oligonucleotide
cacaagaugguggcccuca

SEQ ID NO: 397939 - RNA, 19 nt, Artificial Sequence
  Description of Artificial Sequence: Synthetic oligonucleotide
ggagagacccaucuucacu

SEQ ID NO: 397940 - RNA, 19 nt, Artificial Sequence
  Description of Artificial Sequence: Synthetic oligonucleotide
cagcuacuaagggcgguac

SEQ ID NO: 397941 - RNA, 19 nt, Artificial Sequence
  Description of Artificial Sequence: Synthetic oligonucleotide
ugccggucccaguacucau

SEQ ID NO: 397942 - RNA, 19 nt, Artificial Sequence
  Description of Artificial Sequence: Synthetic oligonucleotide
gggcauauacguagacagc

SEQ ID NO: 397943 - RNA, 19 nt, Artificial Sequence
  Description of Artificial Sequence: Synthetic oligonucleotide
uggccgagugcagccaccu

SEQ ID NO: 397944 - RNA, 19 nt, Artificial Sequence
  Description of Artificial Sequence: Synthetic oligonucleotide
gccggugggaugaaaggug

SEQ ID NO: 397945 - RNA, 19 nt, Artificial Sequence
  Description of Artificial Sequence: Synthetic oligonucleotide
acaccgcuuaugguggaaa

SEQ ID NO: 397946 - RNA, 19 nt, Artificial Sequence
  Description of Artificial Sequence: Synthetic oligonucleotide
cuaccgucuguagcugcac

SEQ ID NO: 397947 - RNA, 19 nt, Artificial Sequence
  Description of Artificial Sequence: Synthetic oligonucleotide
cagcuuagccuccccguca

SEQ ID NO: 397948 - RNA, 19 nt, Artificial Sequence
  Description of Artificial Sequence: Synthetic oligonucleotide
uugguccgccuaugcggca

SEQ ID NO: 397949 - RNA, 19 nt, Artificial Sequence
  Description of Artificial Sequence: Synthetic oligonucleotide
gggaugaaaggugcauaac

SEQ ID NO: 397950 - RNA, 19 nt, Artificial Sequence
  Description of Artificial Sequence: Synthetic oligonucleotide
acgcuuuacacaggugauu

SEQ ID NO: 397951 - RNA, 19 nt, Artificial Sequence
  Description of Artificial Sequence: Synthetic oligonucleotide
aggauaagccugguuccuu

SEQ ID NO: 397952 - RNA, 19 nt, Artificial Sequence
  Description of Artificial Sequence: Synthetic oligonucleotide
cugccuuaggacugggccu

SEQ ID NO: 397953 - RNA, 19 nt, Artificial Sequence
  Description of Artificial Sequence: Synthetic oligonucleotide
ccuggacggucaagcaggg

SEQ ID NO: 397954 - RNA, 19 nt, Artificial Sequence
  Description of Artificial Sequence: Synthetic oligonucleotide
caccauccuuaagguaggc

SEQ ID NO: 397955 - RNA, 19 nt, Artificial Sequence
  Description of Artificial Sequence: Synthetic oligonucleotide
ccgauugcgcugccggucc

SEQ ID NO: 397956 - RNA, 19 nt, Artificial Sequence
  Description of Artificial Sequence: Synthetic oligonucleotide
gcuacuaagggcgguacgu

SEQ ID NO: 397957 - RNA, 19 nt, Artificial Sequence
  Description of Artificial Sequence: Synthetic oligonucleotide
cacgcuuuacacaggugau

SEQ ID NO: 397958 - RNA, 19 nt, Artificial Sequence
  Description of Artificial Sequence: Synthetic oligonucleotide
guugggcacuuaaaaccaa

SEQ ID NO: 397959 - RNA, 19 nt, Artificial Sequence
  Description of Artificial Sequence: Synthetic oligonucleotide
gcacccuacugaugcguug

SEQ ID NO: 397960 - RNA, 19 nt, Artificial Sequence
  Description of Artificial Sequence: Synthetic oligonucleotide
gagcccgauagagcaugac

SEQ ID NO: 397961 - RNA, 19 nt, Artificial Sequence
  Description of Artificial Sequence: Synthetic oligonucleotide
aggcuaccgucuguagcug

SEQ ID NO: 397962 - RNA, 19 nt, Artificial Sequence
  Description of Artificial Sequence: Synthetic oligonucleotide
cucgacaggccuucugccu

SEQ ID NO: 397963 - RNA, 19 nt, Artificial Sequence
  Description of Artificial Sequence: Synthetic oligonucleotide
augcgcgcaggggacagaa

SEQ ID NO: 397964 - RNA, 19 nt, Artificial Sequence
  Description of Artificial Sequence: Synthetic oligonucleotide
gcucauacuauaaccgagu

SEQ ID NO: 397965 - RNA, 19 nt, Artificial Sequence
  Description of Artificial Sequence: Synthetic oligonucleotide
cagacacuacaugagcagu

SEQ ID NO: 397966 - RNA, 19 nt, Artificial Sequence
  Description of Artificial Sequence: Synthetic oligonucleotide
aggucagccguuggucuau

SEQ ID NO: 397967 - RNA, 19 nt, Artificial Sequence
  Description of Artificial Sequence: Synthetic oligonucleotide
gcacgcaccgaagagauau

SEQ ID NO: 397968 - RNA, 19 nt, Artificial Sequence
  Description of Artificial Sequence: Synthetic oligonucleotide
gaaggccaggcuaccgucu

SEQ ID NO: 397969 - RNA, 19 nt, Artificial Sequence
  Description of Artificial Sequence: Synthetic oligonucleotide
caccgucuacaagcaggcc

SEQ ID NO: 397970 - RNA, 19 nt, Artificial Sequence
  Description of Artificial Sequence: Synthetic oligonucleotide
ggcuugucggagucaaacu

SEQ ID NO: 397971 - RNA, 19 nt, Artificial Sequence
  Description of Artificial Sequence: Synthetic oligonucleotide
ccagcuuagccuccccguc

SEQ ID NO: 397972 - RNA, 19 nt, Artificial Sequence
  Description of Artificial Sequence: Synthetic oligonucleotide
uccgccuaugcggcacccu

SEQ ID NO: 397973 - RNA, 19 nt, Artificial Sequence
  Description of Artificial Sequence: Synthetic oligonucleotide
ugcgcgcaggggacagaau

SEQ ID NO: 397974 - RNA, 19 nt, Artificial Sequence
  Description of Artificial Sequence: Synthetic oligonucleotide
ggugcauaacauggcaggu

SEQ ID NO: 397975 - RNA, 19 nt, Artificial Sequence
  Description of Artificial Sequence: Synthetic oligonucleotide
cgccuacagcuacuaaggg

SEQ ID NO: 397976 - RNA, 19 nt, Artificial Sequence
  Description of Artificial Sequence: Synthetic oligonucleotide
caauaugguacugccucau

SEQ ID NO: 397977 - RNA, 19 nt, Artificial Sequence
  Description of Artificial Sequence: Synthetic oligonucleotide
ccagagcacgcaccgaaga

SEQ ID NO: 397978 - RNA, 19 nt, Artificial Sequence
  Description of Artificial Sequence: Synthetic oligonucleotide
ccuggucgagaauccugug

SEQ ID NO: 397979 - RNA, 19 nt, Artificial Sequence
  Description of Artificial Sequence: Synthetic oligonucleotide
ggcgguacgugaaguguuc

SEQ ID NO: 397980 - RNA, 19 nt, Artificial Sequence
  Description of Artificial Sequence: Synthetic oligonucleotide
ccuaugcggcacccuacug

SEQ ID NO: 397981 - RNA, 19 nt, Artificial Sequence
  Description of Artificial Sequence: Synthetic oligonucleotide
gcuaccgucuguagcugca

SEQ ID NO: 397982 - RNA, 19 nt, Artificial Sequence
  Description of Artificial Sequence: Synthetic oligonucleotide
gcgugggcugagccugugg

SEQ ID NO: 397983 - RNA, 19 nt, Artificial Sequence
  Description of Artificial Sequence: Synthetic oligonucleotide
cuccgccgcugguuaggug

SEQ ID NO: 397984 - RNA, 19 nt, Artificial Sequence
  Description of Artificial Sequence: Synthetic oligonucleotide
ccgaugccgauugcgcugc

SEQ ID NO: 397985 - RNA, 19 nt, Artificial Sequence
  Description of Artificial Sequence: Synthetic oligonucleotide
guccaucgcaguggugaga

SEQ ID NO: 397986 - RNA, 19 nt, Artificial Sequence
  Description of Artificial Sequence: Synthetic oligonucleotide
gucagauguuugcccgccu

SEQ ID NO: 397987 - RNA, 19 nt, Artificial Sequence
  Description of Artificial Sequence: Synthetic oligonucleotide
gcuaugggccuggacgguc

SEQ ID NO: 397988 - RNA, 19 nt, Artificial Sequence
  Description of Artificial Sequence: Synthetic oligonucleotide
cccagacgccagaagguca

SEQ ID NO: 397989 - RNA, 19 nt, Artificial Sequence
  Description of Artificial Sequence: Synthetic oligonucleotide
gcacgucaauaugguacug

SEQ ID NO: 397990 - RNA, 19 nt, Artificial Sequence
  Description of Artificial Sequence: Synthetic oligonucleotide
guccgccuaugcggcaccc

SEQ ID NO: 397991 - RNA, 19 nt, Artificial Sequence
  Description of Artificial Sequence: Synthetic oligonucleotide
cugaugcguugcacgucaa

SEQ ID NO: 397992 - RNA, 19 nt, Artificial Sequence
  Description of Artificial Sequence: Synthetic oligonucleotide
augcggcacccuacugaug

SEQ ID NO: 397993 - RNA, 19 nt, Artificial Sequence
  Description of Artificial Sequence: Synthetic oligonucleotide
ggacggucaagcagggagu

SEQ ID NO: 397994 - RNA, 19 nt, Artificial Sequence
  Description of Artificial Sequence: Synthetic oligonucleotide
ggguaccagcuuagccucc

SEQ ID NO: 397995 - RNA, 19 nt, Artificial Sequence
  Description of Artificial Sequence: Synthetic oligonucleotide
gccuaugcggcacccuacu

SEQ ID NO: 397996 - RNA, 19 nt, Artificial Sequence
  Description of Artificial Sequence: Synthetic oligonucleotide
guuugcccgccuacagcua

SEQ ID NO: 397997 - RNA, 19 nt, Artificial Sequence
  Description of Artificial Sequence: Synthetic oligonucleotide
gccuaggguuacagugccc

SEQ ID NO: 397998 - RNA, 19 nt, Artificial Sequence
  Description of Artificial Sequence: Synthetic oligonucleotide
cguugcacgucaauauggu

SEQ ID NO: 397999 - RNA, 19 nt, Artificial Sequence
  Description of Artificial Sequence: Synthetic oligonucleotide
cgccuaugcggcacccuac

SEQ ID NO: 398000 - RNA, 19 nt, Artificial Sequence
  Description of Artificial Sequence: Synthetic oligonucleotide
cgguacgugaaguguucca

SEQ ID NO: 398001 - RNA, 19 nt, Artificial Sequence
  Description of Artificial Sequence: Synthetic oligonucleotide
cuggacggucaagcaggga

SEQ ID NO: 398002 - RNA, 19 nt, Artificial Sequence
  Description of Artificial Sequence: Synthetic oligonucleotide
ccgaagagauaugguuaca

SEQ ID NO: 398003 - RNA, 19 nt, Artificial Sequence
  Description of Artificial Sequence: Synthetic oligonucleotide
cgauugcgcugccgguccc

SEQ ID NO: 398004 - RNA, 19 nt, Artificial Sequence
  Description of Artificial Sequence: Synthetic oligonucleotide
ccgccuaugcggcacccua

SEQ ID NO: 398005 - RNA, 19 nt, Artificial Sequence
  Description of Artificial Sequence: Synthetic oligonucleotide
gggcgguacgugaaguguu

SEQ ID NO: 398006 - RNA, 19 nt, Artificial Sequence
  Description of Artificial Sequence: Synthetic oligonucleotide
ggcacccuacugaugcguu

SEQ ID NO: 398007 - RNA, 19 nt, Artificial Sequence
  Description of Artificial Sequence: Synthetic oligonucleotide
gcccgccuacagcuacuaa

SEQ ID NO: 398008 - RNA, 19 nt, Artificial Sequence
  Description of Artificial Sequence: Synthetic oligonucleotide
cgcgcaggggacagaauau

SEQ ID NO: 398009 - RNA, 19 nt, Artificial Sequence
  Description of Artificial Sequence: Synthetic oligonucleotide
gcgcaggggacagaauauu

SEQ ID NO: 398010 - RNA, 19 nt, Artificial Sequence
  Description of Artificial Sequence: Synthetic oligonucleotide
cgaugccgauugcgcugcc

SEQ ID NO: 398011 - RNA, 19 nt, Artificial Sequence
  Description of Artificial Sequence: Synthetic oligonucleotide
ccguuggucuauggaggcu

SEQ ID NO: 398012 - RNA, 19 nt, Artificial Sequence
  Description of Artificial Sequence: Synthetic oligonucleotide
cgucuacaagcaggcccca

SEQ ID NO: 398013 - RNA, 19 nt, Artificial Sequence
  Description of Artificial Sequence: Synthetic oligonucleotide
ccuccgccgcugguuaggu

SEQ ID NO: 398014 - RNA, 19 nt, Artificial Sequence
  Description of Artificial Sequence: Synthetic oligonucleotide
cgccgcugguuaggugccu

SEQ ID NO: 398015 - RNA, 19 nt, Artificial Sequence
  Description of Artificial Sequence: Synthetic oligonucleotide
uguuuaguuauucucaaug

SEQ ID NO: 398016 - RNA, 19 nt, Artificial Sequence
  Description of Artificial Sequence: Synthetic oligonucleotide
aagaacuaaguuuagcaug

SEQ ID NO: 398017 - RNA, 19 nt, Artificial Sequence
  Description of Artificial Sequence: Synthetic oligonucleotide
uuugugucgaucauggugc

SEQ ID NO: 398018 - RNA, 19 nt, Artificial Sequence
  Description of Artificial Sequence: Synthetic oligonucleotide
ugaacagcgacccuugagg

SEQ ID NO: 398019 - RNA, 19 nt, Artificial Sequence
  Description of Artificial Sequence: Synthetic oligonucleotide
gauggaaucaacccaaggc

SEQ ID NO: 398020 - RNA, 19 nt, Artificial Sequence
  Description of Artificial Sequence: Synthetic oligonucleotide
aguggaacuagccuuaggg

SEQ ID NO: 398021 - RNA, 19 nt, Artificial Sequence
  Description of Artificial Sequence: Synthetic oligonucleotide
agaauuaucugauuggcug

SEQ ID NO: 398022 - RNA, 19 nt, Artificial Sequence
  Description of Artificial Sequence: Synthetic oligonucleotide
uuaagugauggaaucaacc

SEQ ID NO: 398023 - RNA, 19 nt, Artificial Sequence
  Description of Artificial Sequence: Synthetic oligonucleotide
guaguuaucuaucuuaggc

SEQ ID NO: 398024 - RNA, 19 nt, Artificial Sequence
  Description of Artificial Sequence: Synthetic oligonucleotide
aaaucaugaaaugaaagga

SEQ ID NO: 398025 - RNA, 19 nt, Artificial Sequence
  Description of Artificial Sequence: Synthetic oligonucleotide
aauaauaagcaaaaucugu

SEQ ID NO: 398026 - RNA, 19 nt, Artificial Sequence
  Description of Artificial Sequence: Synthetic oligonucleotide
acucauauaugacauagug

SEQ ID NO: 398027 - RNA, 19 nt, Artificial Sequence
  Description of Artificial Sequence: Synthetic oligonucleotide
uuuaguuauucucaaugca

SEQ ID NO: 398028 - RNA, 19 nt, Artificial Sequence
  Description of Artificial Sequence: Synthetic oligonucleotide
agacaauauuccuagggac

SEQ ID NO: 398029 - RNA, 19 nt, Artificial Sequence
  Description of Artificial Sequence: Synthetic oligonucleotide
agaacuaaguuuagcaugc

SEQ ID NO: 398030 - RNA, 19 nt, Artificial Sequence
  Description of Artificial Sequence: Synthetic oligonucleotide
uauacuaagcauaccauau

SEQ ID NO: 398031 - RNA, 19 nt, Artificial Sequence
  Description of Artificial Sequence: Synthetic oligonucleotide
ucguuugugucgaucaugg

SEQ ID NO: 398032 - RNA, 19 nt, Artificial Sequence
  Description of Artificial Sequence: Synthetic oligonucleotide
uaauaagcaaaaucuguug

SEQ ID NO: 398033 - RNA, 19 nt, Artificial Sequence
  Description of Artificial Sequence: Synthetic oligonucleotide
uauaguuacggagauaaga

SEQ ID NO: 398034 - RNA, 19 nt, Artificial Sequence
  Description of Artificial Sequence: Synthetic oligonucleotide
auaguuacggagauaagac

SEQ ID NO: 398035 - RNA, 19 nt, Artificial Sequence
  Description of Artificial Sequence: Synthetic oligonucleotide
ucuacugucuucucaauga

SEQ ID NO: 398036 - RNA, 19 nt, Artificial Sequence
  Description of Artificial Sequence: Synthetic oligonucleotide
agcauaccauauuuaauac

SEQ ID NO: 398037 - RNA, 19 nt, Artificial Sequence
  Description of Artificial Sequence: Synthetic oligonucleotide
uuaggaucgaaccugcccu

SEQ ID NO: 398038 - RNA, 19 nt, Artificial Sequence
  Description of Artificial Sequence: Synthetic oligonucleotide
uauucugagucgaaaugag

SEQ ID NO: 398039 - RNA, 19 nt, Artificial Sequence
  Description of Artificial Sequence: Synthetic oligonucleotide
auacucauauaugacauag

SEQ ID NO: 398040 - RNA, 19 nt, Artificial Sequence
  Description of Artificial Sequence: Synthetic oligonucleotide
aauguuuaguuauucucaa

SEQ ID NO: 398041 - RNA, 19 nt, Artificial Sequence
  Description of Artificial Sequence: Synthetic oligonucleotide
uaugacauaguggaacuag

SEQ ID NO: 398042 - RNA, 19 nt, Artificial Sequence
  Description of Artificial Sequence: Synthetic oligonucleotide
acuggggcaacguucaagg

SEQ ID NO: 398043 - RNA, 19 nt, Artificial Sequence
  Description of Artificial Sequence: Synthetic oligonucleotide
uuuuagauccucucaaauc

SEQ ID NO: 398044 - RNA, 19 nt, Artificial Sequence
  Description of Artificial Sequence: Synthetic oligonucleotide
uggaacuagccuuagggug

SEQ ID NO: 398045 - RNA, 19 nt, Artificial Sequence
  Description of Artificial Sequence: Synthetic oligonucleotide
uuauaaucacaauucugga

SEQ ID NO: 398046 - RNA, 19 nt, Artificial Sequence
  Description of Artificial Sequence: Synthetic oligonucleotide
uccguuaauuucuaguugu

SEQ ID NO: 398047 - RNA, 19 nt, Artificial Sequence
  Description of Artificial Sequence: Synthetic oligonucleotide
ucuaauucuaugcaauguu

SEQ ID NO: 398048 - RNA, 19 nt, Artificial Sequence
  Description of Artificial Sequence: Synthetic oligonucleotide
uaucguggaggaaacagga

SEQ ID NO: 398049 - RNA, 19 nt, Artificial Sequence
  Description of Artificial Sequence: Synthetic oligonucleotide
ugaaccauacccuuugauc

SEQ ID NO: 398050 - RNA, 19 nt, Artificial Sequence
  Description of Artificial Sequence: Synthetic oligonucleotide
ucagaauuaucugauuggc

SEQ ID NO: 398051 - RNA, 19 nt, Artificial Sequence
  Description of Artificial Sequence: Synthetic oligonucleotide
cuagggacagaaacuaugc

SEQ ID NO: 398052 - RNA, 19 nt, Artificial Sequence
  Description of Artificial Sequence: Synthetic oligonucleotide
uggguagaaucucugucgg

SEQ ID NO: 398053 - RNA, 19 nt, Artificial Sequence
  Description of Artificial Sequence: Synthetic oligonucleotide
ucggcuauaguuacggaga

SEQ ID NO: 398054 - RNA, 19 nt, Artificial Sequence
  Description of Artificial Sequence: Synthetic oligonucleotide
ucuguuaagugauggaauc

SEQ ID NO: 398055 - RNA, 19 nt, Artificial Sequence
  Description of Artificial Sequence: Synthetic oligonucleotide
aucggcuauaguuacggag

SEQ ID NO: 398056 - RNA, 19 nt, Artificial Sequence
  Description of Artificial Sequence: Synthetic oligonucleotide
uuaagugugucggagggug

SEQ ID NO: 398057 - RNA, 19 nt, Artificial Sequence
  Description of Artificial Sequence: Synthetic oligonucleotide
ugugcaaagcggcagucug

SEQ ID NO: 398058 - RNA, 19 nt, Artificial Sequence
  Description of Artificial Sequence: Synthetic oligonucleotide
uauucuagaaucccaugau

SEQ ID NO: 398059 - RNA, 19 nt, Artificial Sequence
  Description of Artificial Sequence: Synthetic oligonucleotide
uuaggcuggaauauacuaa

SEQ ID NO: 398060 - RNA, 19 nt, Artificial Sequence
  Description of Artificial Sequence: Synthetic oligonucleotide
caaccuggcaacuuuuggg

SEQ ID NO: 398061 - RNA, 19 nt, Artificial Sequence
  Description of Artificial Sequence: Synthetic oligonucleotide
uauugcuaaauuugaaaua

SEQ ID NO: 398062 - RNA, 19 nt, Artificial Sequence
  Description of Artificial Sequence: Synthetic oligonucleotide
ucucugucgggacuaaccc

SEQ ID NO: 398063 - RNA, 19 nt, Artificial Sequence
  Description of Artificial Sequence: Synthetic oligonucleotide
gugauuggaguuaggaucg

SEQ ID NO: 398064 - RNA, 19 nt, Artificial Sequence
  Description of Artificial Sequence: Synthetic oligonucleotide
gaacagcgacccuugaggg

SEQ ID NO: 398065 - RNA, 19 nt, Artificial Sequence
  Description of Artificial Sequence: Synthetic oligonucleotide
cuaucguggaggaaacagg

SEQ ID NO: 398066 - RNA, 19 nt, Artificial Sequence
  Description of Artificial Sequence: Synthetic oligonucleotide
uggggcaacguucaaggcc

SEQ ID NO: 398067 - RNA, 19 nt, Artificial Sequence
  Description of Artificial Sequence: Synthetic oligonucleotide
uccauacaaacgguuacgg

SEQ ID NO: 398068 - RNA, 19 nt, Artificial Sequence
  Description of Artificial Sequence: Synthetic oligonucleotide
gauucagugcggcaucucc

SEQ ID NO: 398069 - RNA, 19 nt, Artificial Sequence
  Description of Artificial Sequence: Synthetic oligonucleotide
ucgggacuaacccaacucc

SEQ ID NO: 398070 - RNA, 19 nt, Artificial Sequence
  Description of Artificial Sequence: Synthetic oligonucleotide
ugagucgcaguugagcccg

SEQ ID NO: 398071 - RNA, 19 nt, Artificial Sequence
  Description of Artificial Sequence: Synthetic oligonucleotide
uuuagaccugccaggcagg

SEQ ID NO: 398072 - RNA, 19 nt, Artificial Sequence
  Description of Artificial Sequence: Synthetic oligonucleotide
ucugguacugccugcagac

SEQ ID NO: 398073 - RNA, 19 nt, Artificial Sequence
  Description of Artificial Sequence: Synthetic oligonucleotide
uugaaauauucugagucga

SEQ ID NO: 398074 - RNA, 19 nt, Artificial Sequence
  Description of Artificial Sequence: Synthetic oligonucleotide
ucaaugaguuuaaaugaau

SEQ ID NO: 398075 - RNA, 19 nt, Artificial Sequence
  Description of Artificial Sequence: Synthetic oligonucleotide
uugucguuugugucgauca

SEQ ID NO: 398076 - RNA, 19 nt, Artificial Sequence
  Description of Artificial Sequence: Synthetic oligonucleotide
guuaggaucgaaccugccc

SEQ ID NO: 398077 - RNA, 19 nt, Artificial Sequence
  Description of Artificial Sequence: Synthetic oligonucleotide
uugaacagcgacccuugag

SEQ ID NO: 398078 - RNA, 19 nt, Artificial Sequence
  Description of Artificial Sequence: Synthetic oligonucleotide
uucuguuaagugauggaau

SEQ ID NO: 398079 - RNA, 19 nt, Artificial Sequence
  Description of Artificial Sequence: Synthetic oligonucleotide
uggaguuaggaucgaaccu

SEQ ID NO: 398080 - RNA, 19 nt, Artificial Sequence
  Description of Artificial Sequence: Synthetic oligonucleotide
auauacuaagcauaccaua

SEQ ID NO: 398081 - RNA, 19 nt, Artificial Sequence
  Description of Artificial Sequence: Synthetic oligonucleotide
ucaucagagcgagagcacg

SEQ ID NO: 398082 - RNA, 19 nt, Artificial Sequence
  Description of Artificial Sequence: Synthetic oligonucleotide
ucuugaacagcgacccuug

SEQ ID NO: 398083 - RNA, 19 nt, Artificial Sequence
  Description of Artificial Sequence: Synthetic oligonucleotide
guaaauggcauauuugacu

SEQ ID NO: 398084 - RNA, 19 nt, Artificial Sequence
  Description of Artificial Sequence: Synthetic oligonucleotide
ucugucgggacuaacccaa

SEQ ID NO: 398085 - RNA, 19 nt, Artificial Sequence
  Description of Artificial Sequence: Synthetic oligonucleotide
uaguuacggagauaagaca

SEQ ID NO: 398086 - RNA, 19 nt, Artificial Sequence
  Description of Artificial Sequence: Synthetic oligonucleotide
ugaaauauucugagucgaa

SEQ ID NO: 398087 - RNA, 19 nt, Artificial Sequence
  Description of Artificial Sequence: Synthetic oligonucleotide
auaauaagcaaaaucuguu

SEQ ID NO: 398088 - RNA, 19 nt, Artificial Sequence
  Description of Artificial Sequence: Synthetic oligonucleotide
guuauucuagaaucccaug

SEQ ID NO: 398089 - RNA, 19 nt, Artificial Sequence
  Description of Artificial Sequence: Synthetic oligonucleotide
aaagcggcagucugucucu

SEQ ID NO: 398090 - RNA, 19 nt, Artificial Sequence
  Description of Artificial Sequence: Synthetic oligonucleotide
ucaacccaaggcucaauga

SEQ ID NO: 398091 - RNA, 19 nt, Artificial Sequence
  Description of Artificial Sequence: Synthetic oligonucleotide
aguuacggagauaagacaa

SEQ ID NO: 398092 - RNA, 19 nt, Artificial Sequence
  Description of Artificial Sequence: Synthetic oligonucleotide
ggaccuacaggaaaagugg

SEQ ID NO: 398093 - RNA, 19 nt, Artificial Sequence
  Description of Artificial Sequence: Synthetic oligonucleotide
gaacauugcagcuggucuc

SEQ ID NO: 398094 - RNA, 19 nt, Artificial Sequence
  Description of Artificial Sequence: Synthetic oligonucleotide
ugcagcguucaucuuguca

SEQ ID NO: 398095 - RNA, 19 nt, Artificial Sequence
  Description of Artificial Sequence: Synthetic oligonucleotide
uucaaccuggcaacuuuug

SEQ ID NO: 398096 - RNA, 19 nt, Artificial Sequence
  Description of Artificial Sequence: Synthetic oligonucleotide
aacuaugcuuacaacccug

SEQ ID NO: 398097 - RNA, 19 nt, Artificial Sequence
  Description of Artificial Sequence: Synthetic oligonucleotide
uacaacaauuagucuacaa

SEQ ID NO: 398098 - RNA, 19 nt, Artificial Sequence
  Description of Artificial Sequence: Synthetic oligonucleotide
acggagauaagacaauauu

SEQ ID NO: 398099 - RNA, 19 nt, Artificial Sequence
  Description of Artificial Sequence: Synthetic oligonucleotide
uggcauuccaucccguuuc

SEQ ID NO: 398100 - RNA, 19 nt, Artificial Sequence
  Description of Artificial Sequence: Synthetic oligonucleotide
gauaaacgccguguguugc

SEQ ID NO: 398101 - RNA, 19 nt, Artificial Sequence
  Description of Artificial Sequence: Synthetic oligonucleotide
caugcaacgccccuuuaug

SEQ ID NO: 398102 - RNA, 19 nt, Artificial Sequence
  Description of Artificial Sequence: Synthetic oligonucleotide
uuaucuaucuuaggcugga

SEQ ID NO: 398103 - RNA, 19 nt, Artificial Sequence
  Description of Artificial Sequence: Synthetic oligonucleotide
uacggagauaagacaauau

SEQ ID NO: 398104 - RNA, 19 nt, Artificial Sequence
  Description of Artificial Sequence: Synthetic oligonucleotide
gaccuacaggaaaaguggg

SEQ ID NO: 398105 - RNA, 19 nt, Artificial Sequence
  Description of Artificial Sequence: Synthetic oligonucleotide
uacucauauaugacauagu

SEQ ID NO: 398106 - RNA, 19 nt, Artificial Sequence
  Description of Artificial Sequence: Synthetic oligonucleotide
gaagaacuaaguuuagcau

SEQ ID NO: 398107 - RNA, 19 nt, Artificial Sequence
  Description of Artificial Sequence: Synthetic oligonucleotide
ugcaucggcuauaguuacg

SEQ ID NO: 398108 - RNA, 19 nt, Artificial Sequence
  Description of Artificial Sequence: Synthetic oligonucleotide
ugccgggugugcaaagcgg

SEQ ID NO: 398109 - RNA, 19 nt, Artificial Sequence
  Description of Artificial Sequence: Synthetic oligonucleotide
auucuaucguggaggaaac

SEQ ID NO: 398110 - RNA, 19 nt, Artificial Sequence
  Description of Artificial Sequence: Synthetic oligonucleotide
uguguccccaggcaauugu

SEQ ID NO: 398111 - RNA, 19 nt, Artificial Sequence
  Description of Artificial Sequence: Synthetic oligonucleotide
caaagcggcagucugucuc

SEQ ID NO: 398112 - RNA, 19 nt, Artificial Sequence
  Description of Artificial Sequence: Synthetic oligonucleotide
caguuuaucaguccugaga

SEQ ID NO: 398113 - RNA, 19 nt, Artificial Sequence
  Description of Artificial Sequence: Synthetic oligonucleotide
ucaugcaacgccccuuuau

SEQ ID NO: 398114 - RNA, 19 nt, Artificial Sequence
  Description of Artificial Sequence: Synthetic oligonucleotide
aacgccccuuuauguaauc

SEQ ID NO: 398115 - RNA, 19 nt, Artificial Sequence
  Description of Artificial Sequence: Synthetic oligonucleotide
guaaugggugaagagcacc

SEQ ID NO: 398116 - RNA, 19 nt, Artificial Sequence
  Description of Artificial Sequence: Synthetic oligonucleotide
gcuauaguuacggagauaa

SEQ ID NO: 398117 - RNA, 19 nt, Artificial Sequence
  Description of Artificial Sequence: Synthetic oligonucleotide
ucgcaguugagcccgggac

SEQ ID NO: 398118 - RNA, 19 nt, Artificial Sequence
  Description of Artificial Sequence: Synthetic oligonucleotide
agcgcugugcaccaugggu

SEQ ID NO: 398119 - RNA, 19 nt, Artificial Sequence
  Description of Artificial Sequence: Synthetic oligonucleotide
uucugucccuuucuguuaa

SEQ ID NO: 398120 - RNA, 19 nt, Artificial Sequence
  Description of Artificial Sequence: Synthetic oligonucleotide
cagaagaacuaaguuuagc

SEQ ID NO: 398121 - RNA, 19 nt, Artificial Sequence
  Description of Artificial Sequence: Synthetic oligonucleotide
caggcaauugugcuugaac

SEQ ID NO: 398122 - RNA, 19 nt, Artificial Sequence
  Description of Artificial Sequence: Synthetic oligonucleotide
ucagguaguuaucuaucuu

SEQ ID NO: 398123 - RNA, 19 nt, Artificial Sequence
  Description of Artificial Sequence: Synthetic oligonucleotide
ucagugcggcaucuccacg

SEQ ID NO: 398124 - RNA, 19 nt, Artificial Sequence
  Description of Artificial Sequence: Synthetic oligonucleotide
ugacucccauaauuuaccu

SEQ ID NO: 398125 - RNA, 19 nt, Artificial Sequence
  Description of Artificial Sequence: Synthetic oligonucleotide
cuauaguuacggagauaag

SEQ ID NO: 398126 - RNA, 19 nt, Artificial Sequence
  Description of Artificial Sequence: Synthetic oligonucleotide
auacuaagcauaccauauu

SEQ ID NO: 398127 - RNA, 19 nt, Artificial Sequence
  Description of Artificial Sequence: Synthetic oligonucleotide
ugagucgaaaugagucuau

SEQ ID NO: 398128 - RNA, 19 nt, Artificial Sequence
  Description of Artificial Sequence: Synthetic oligonucleotide
caacccgaaucccacacuc

SEQ ID NO: 398129 - RNA, 19 nt, Artificial Sequence
  Description of Artificial Sequence: Synthetic oligonucleotide
agggauaaacgccgugugu

SEQ ID NO: 398130 - RNA, 19 nt, Artificial Sequence
  Description of Artificial Sequence: Synthetic oligonucleotide
uuacggagauaagacaaua

SEQ ID NO: 398131 - RNA, 19 nt, Artificial Sequence
  Description of Artificial Sequence: Synthetic oligonucleotide
aaaugaaaugacggugauu

SEQ ID NO: 398132 - RNA, 19 nt, Artificial Sequence
  Description of Artificial Sequence: Synthetic oligonucleotide
augcaacgccccuuuaugu

SEQ ID NO: 398133 - RNA, 19 nt, Artificial Sequence
  Description of Artificial Sequence: Synthetic oligonucleotide
cugagucgcaguugagccc

SEQ ID NO: 398134 - RNA, 19 nt, Artificial Sequence
  Description of Artificial Sequence: Synthetic oligonucleotide
uuggcauuccaucccguuu

SEQ ID NO: 398135 - RNA, 19 nt, Artificial Sequence
  Description of Artificial Sequence: Synthetic oligonucleotide
ugucgggacuaacccaacu

SEQ ID NO: 398136 - RNA, 19 nt, Artificial Sequence
  Description of Artificial Sequence: Synthetic oligonucleotide
ugcaacgccccuuuaugua

SEQ ID NO: 398137 - RNA, 19 nt, Artificial Sequence
  Description of Artificial Sequence: Synthetic oligonucleotide
gagcccgggacagugacug

SEQ ID NO: 398138 - RNA, 19 nt, Artificial Sequence
  Description of Artificial Sequence: Synthetic oligonucleotide
gugugucggagggugaagg

SEQ ID NO: 398139 - RNA, 19 nt, Artificial Sequence
  Description of Artificial Sequence: Synthetic oligonucleotide
uaagugugucggaggguga

SEQ ID NO: 398140 - RNA, 19 nt, Artificial Sequence
  Description of Artificial Sequence: Synthetic oligonucleotide
gcaucggcuauaguuacgg

SEQ ID NO: 398141 - RNA, 19 nt, Artificial Sequence
  Description of Artificial Sequence: Synthetic oligonucleotide
ugacggugauuggaguuag

SEQ ID NO: 398142 - RNA, 19 nt, Artificial Sequence
  Description of Artificial Sequence: Synthetic oligonucleotide
agcggcagucugucucucc

SEQ ID NO: 398143 - RNA, 19 nt, Artificial Sequence
  Description of Artificial Sequence: Synthetic oligonucleotide
gucgggacuaacccaacuc

SEQ ID NO: 398144 - RNA, 19 nt, Artificial Sequence
  Description of Artificial Sequence: Synthetic oligonucleotide
cugcaucggcuauaguuac

SEQ ID NO: 398145 - RNA, 19 nt, Artificial Sequence
  Description of Artificial Sequence: Synthetic oligonucleotide
cucacuggggcaacguuca

SEQ ID NO: 398146 - RNA, 19 nt, Artificial Sequence
  Description of Artificial Sequence: Synthetic oligonucleotide
ggauaaacgccguguguug

SEQ ID NO: 398147 - RNA, 19 nt, Artificial Sequence
  Description of Artificial Sequence: Synthetic oligonucleotide
cugccgggugugcaaagcg

SEQ ID NO: 398148 - RNA, 19 nt, Artificial Sequence
  Description of Artificial Sequence: Synthetic oligonucleotide
gaugagagcuacucugggu

SEQ ID NO: 398149 - RNA, 19 nt, Artificial Sequence
  Description of Artificial Sequence: Synthetic oligonucleotide
ucccaugauucagugcggc

SEQ ID NO: 398150 - RNA, 19 nt, Artificial Sequence
  Description of Artificial Sequence: Synthetic oligonucleotide
agugaaccauacccuuuga

SEQ ID NO: 398151 - RNA, 19 nt, Artificial Sequence
  Description of Artificial Sequence: Synthetic oligonucleotide
acggcaacccgaaucccac

SEQ ID NO: 398152 - RNA, 19 nt, Artificial Sequence
  Description of Artificial Sequence: Synthetic oligonucleotide
ugucccuauggugggaccu

SEQ ID NO: 398153 - RNA, 19 nt, Artificial Sequence
  Description of Artificial Sequence: Synthetic oligonucleotide
gucguuugugucgaucaug

SEQ ID NO: 398154 - RNA, 19 nt, Artificial Sequence
  Description of Artificial Sequence: Synthetic oligonucleotide
aggcaauuacucuuccauu

SEQ ID NO: 398155 - RNA, 19 nt, Artificial Sequence
  Description of Artificial Sequence: Synthetic oligonucleotide
gcgaaggggacacuuguug

SEQ ID NO: 398156 - RNA, 19 nt, Artificial Sequence
  Description of Artificial Sequence: Synthetic oligonucleotide
augagucuauuggcuguac

SEQ ID NO: 398157 - RNA, 19 nt, Artificial Sequence
  Description of Artificial Sequence: Synthetic oligonucleotide
uagcgcugugcaccauggg

SEQ ID NO: 398158 - RNA, 19 nt, Artificial Sequence
  Description of Artificial Sequence: Synthetic oligonucleotide
cauuugccuugccuccucc

SEQ ID NO: 398159 - RNA, 19 nt, Artificial Sequence
  Description of Artificial Sequence: Synthetic oligonucleotide
uaucuuaggcuggaauaua

SEQ ID NO: 398160 - RNA, 19 nt, Artificial Sequence
  Description of Artificial Sequence: Synthetic oligonucleotide
guggagcgaauuugcauuc

SEQ ID NO: 398161 - RNA, 19 nt, Artificial Sequence
  Description of Artificial Sequence: Synthetic oligonucleotide
auaguggaacuagccuuag

SEQ ID NO: 398162 - RNA, 19 nt, Artificial Sequence
  Description of Artificial Sequence: Synthetic oligonucleotide
ggaauauacuaagcauacc

SEQ ID NO: 398163 - RNA, 19 nt, Artificial Sequence
  Description of Artificial Sequence: Synthetic oligonucleotide
ucugccgggugugcaaagc

SEQ ID NO: 398164 - RNA, 19 nt, Artificial Sequence
  Description of Artificial Sequence: Synthetic oligonucleotide
cuuacaacccugggaaaga

SEQ ID NO: 398165 - RNA, 19 nt, Artificial Sequence
  Description of Artificial Sequence: Synthetic oligonucleotide
ugcaagacacugggguuga

SEQ ID NO: 398166 - RNA, 19 nt, Artificial Sequence
  Description of Artificial Sequence: Synthetic oligonucleotide
uugucccuauggugggacc

SEQ ID NO: 398167 - RNA, 19 nt, Artificial Sequence
  Description of Artificial Sequence: Synthetic oligonucleotide
gcaauucuaucguggagga

SEQ ID NO: 398168 - RNA, 19 nt, Artificial Sequence
  Description of Artificial Sequence: Synthetic oligonucleotide
gacguagcgcugugcacca

SEQ ID NO: 398169 - RNA, 19 nt, Artificial Sequence
  Description of Artificial Sequence: Synthetic oligonucleotide
ugggaccuacaggaaaagu

SEQ ID NO: 398170 - RNA, 19 nt, Artificial Sequence
  Description of Artificial Sequence: Synthetic oligonucleotide
uugugucgaucauggugcu

SEQ ID NO: 398171 - RNA, 19 nt, Artificial Sequence
  Description of Artificial Sequence: Synthetic oligonucleotide
cuggggcaacguucaaggc

SEQ ID NO: 398172 - RNA, 19 nt, Artificial Sequence
  Description of Artificial Sequence: Synthetic oligonucleotide
guggaacuagccuuagggu

SEQ ID NO: 398173 - RNA, 19 nt, Artificial Sequence
  Description of Artificial Sequence: Synthetic oligonucleotide
uucuaucguggaggaaaca

SEQ ID NO: 398174 - RNA, 19 nt, Artificial Sequence
  Description of Artificial Sequence: Synthetic oligonucleotide
guugucguuugugucgauc

SEQ ID NO: 398175 - RNA, 19 nt, Artificial Sequence
  Description of Artificial Sequence: Synthetic oligonucleotide
caggcaauuacucuuccau

SEQ ID NO: 398176 - RNA, 19 nt, Artificial Sequence
  Description of Artificial Sequence: Synthetic oligonucleotide
gcaacguucaaggccauga

SEQ ID NO: 398177 - RNA, 19 nt, Artificial Sequence
  Description of Artificial Sequence: Synthetic oligonucleotide
ugcgaaggggacacuuguu

SEQ ID NO: 398178 - RNA, 19 nt, Artificial Sequence
  Description of Artificial Sequence: Synthetic oligonucleotide
cucgcuggaacucccugca

SEQ ID NO: 398179 - RNA, 19 nt, Artificial Sequence
  Description of Artificial Sequence: Synthetic oligonucleotide
agugugucggagggugaag

SEQ ID NO: 398180 - RNA, 19 nt, Artificial Sequence
  Description of Artificial Sequence: Synthetic oligonucleotide
ggagugguguuccuggaaa

SEQ ID NO: 398181 - RNA, 19 nt, Artificial Sequence
  Description of Artificial Sequence: Synthetic oligonucleotide
gggacuaacccaacuccag

SEQ ID NO: 398182 - RNA, 19 nt, Artificial Sequence
  Description of Artificial Sequence: Synthetic oligonucleotide
cuaugcauuugccuugccu

SEQ ID NO: 398183 - RNA, 19 nt, Artificial Sequence
  Description of Artificial Sequence: Synthetic oligonucleotide
caaacgguuacgguguugu

SEQ ID NO: 398184 - RNA, 19 nt, Artificial Sequence
  Description of Artificial Sequence: Synthetic oligonucleotide
ggggcaacguucaaggcca

SEQ ID NO: 398185 - RNA, 19 nt, Artificial Sequence
  Description of Artificial Sequence: Synthetic oligonucleotide
agcaucgccgcugcagucu

SEQ ID NO: 398186 - RNA, 19 nt, Artificial Sequence
  Description of Artificial Sequence: Synthetic oligonucleotide
cucugucgggacuaaccca

SEQ ID NO: 398187 - RNA, 19 nt, Artificial Sequence
  Description of Artificial Sequence: Synthetic oligonucleotide
ugagcccgggacagugacu

SEQ ID NO: 398188 - RNA, 19 nt, Artificial Sequence
  Description of Artificial Sequence: Synthetic oligonucleotide
ggcaauuacucuuccauuu

SEQ ID NO: 398189 - RNA, 19 nt, Artificial Sequence
  Description of Artificial Sequence: Synthetic oligonucleotide
ccuacaggaaaagugggca

SEQ ID NO: 398190 - RNA, 19 nt, Artificial Sequence
  Description of Artificial Sequence: Synthetic oligonucleotide
cuggaucaaguuguuccuc

SEQ ID NO: 398191 - RNA, 19 nt, Artificial Sequence
  Description of Artificial Sequence: Synthetic oligonucleotide
gguggagcgaauuugcauu

SEQ ID NO: 398192 - RNA, 19 nt, Artificial Sequence
  Description of Artificial Sequence: Synthetic oligonucleotide
ccguuaauuucuaguugug

SEQ ID NO: 398193 - RNA, 19 nt, Artificial Sequence
  Description of Artificial Sequence: Synthetic oligonucleotide
caacccaaggcucaaugau

SEQ ID NO: 398194 - RNA, 19 nt, Artificial Sequence
  Description of Artificial Sequence: Synthetic oligonucleotide
cugagucgaaaugagucua

SEQ ID NO: 398195 - RNA, 19 nt, Artificial Sequence
  Description of Artificial Sequence: Synthetic oligonucleotide
ugcugcgaaggggacacuu

SEQ ID NO: 398196 - RNA, 19 nt, Artificial Sequence
  Description of Artificial Sequence: Synthetic oligonucleotide
cuagccuuagggugguggu

SEQ ID NO: 398197 - RNA, 19 nt, Artificial Sequence
  Description of Artificial Sequence: Synthetic oligonucleotide
gcaacgccccuuuauguaa

SEQ ID NO: 398198 - RNA, 19 nt, Artificial Sequence
  Description of Artificial Sequence: Synthetic oligonucleotide
gucgcaguugagcccggga

SEQ ID NO: 398199 - RNA, 19 nt, Artificial Sequence
  Description of Artificial Sequence: Synthetic oligonucleotide
cugucgggacuaacccaac

SEQ ID NO: 398200 - RNA, 19 nt, Artificial Sequence
  Description of Artificial Sequence: Synthetic oligonucleotide
gugaaccauacccuuugau

SEQ ID NO: 398201 - RNA, 19 nt, Artificial Sequence
  Description of Artificial Sequence: Synthetic oligonucleotide
ccuuauuguaaauggcaua

SEQ ID NO: 398202 - RNA, 19 nt, Artificial Sequence
  Description of Artificial Sequence: Synthetic oligonucleotide
agcgacccuugagggaguc

SEQ ID NO: 398203 - RNA, 19 nt, Artificial Sequence
  Description of Artificial Sequence: Synthetic oligonucleotide
ccugcauaccuccaguuua

SEQ ID NO: 398204 - RNA, 19 nt, Artificial Sequence
  Description of Artificial Sequence: Synthetic oligonucleotide
guuacggagauaagacaau

SEQ ID NO: 398205 - RNA, 19 nt, Artificial Sequence
  Description of Artificial Sequence: Synthetic oligonucleotide
aucguggaggaaacaggau

SEQ ID NO: 398206 - RNA, 19 nt, Artificial Sequence
  Description of Artificial Sequence: Synthetic oligonucleotide
caucggcuauaguuacgga

SEQ ID NO: 398207 - RNA, 19 nt, Artificial Sequence
  Description of Artificial Sequence: Synthetic oligonucleotide
uggcggacguagcgcugug

SEQ ID NO: 398208 - RNA, 19 nt, Artificial Sequence
  Description of Artificial Sequence: Synthetic oligonucleotide
gcggacguagcgcugugca

SEQ ID NO: 398209 - RNA, 19 nt, Artificial Sequence
  Description of Artificial Sequence: Synthetic oligonucleotide
ucgcuggaacucccugcau

SEQ ID NO: 398210 - RNA, 19 nt, Artificial Sequence
  Description of Artificial Sequence: Synthetic oligonucleotide
gaaucucugucgggacuaa

SEQ ID NO: 398211 - RNA, 19 nt, Artificial Sequence
  Description of Artificial Sequence: Synthetic oligonucleotide
aucgccgcugcagucuuuu

SEQ ID NO: 398212 - RNA, 19 nt, Artificial Sequence
  Description of Artificial Sequence: Synthetic oligonucleotide
guuugucccuaugguggga

SEQ ID NO: 398213 - RNA, 19 nt, Artificial Sequence
  Description of Artificial Sequence: Synthetic oligonucleotide
gggauaaacgccguguguu

SEQ ID NO: 398214 - RNA, 19 nt, Artificial Sequence
  Description of Artificial Sequence: Synthetic oligonucleotide
cugcauaccuccaguuuau

SEQ ID NO: 398215 - RNA, 19 nt, Artificial Sequence
  Description of Artificial Sequence: Synthetic oligonucleotide
ggggauacaggugauguuu

SEQ ID NO: 398216 - RNA, 19 nt, Artificial Sequence
  Description of Artificial Sequence: Synthetic oligonucleotide
guugagcccgggacaguga

SEQ ID NO: 398217 - RNA, 19 nt, Artificial Sequence
  Description of Artificial Sequence: Synthetic oligonucleotide
ggucucagguaguuaucua

SEQ ID NO: 398218 - RNA, 19 nt, Artificial Sequence
  Description of Artificial Sequence: Synthetic oligonucleotide
gggcgcuaaguaaggagca

SEQ ID NO: 398219 - RNA, 19 nt, Artificial Sequence
  Description of Artificial Sequence: Synthetic oligonucleotide
ccuccguuaauuucuaguu

SEQ ID NO: 398220 - RNA, 19 nt, Artificial Sequence
  Description of Artificial Sequence: Synthetic oligonucleotide
guuccuccguuaauuucua

SEQ ID NO: 398221 - RNA, 19 nt, Artificial Sequence
  Description of Artificial Sequence: Synthetic oligonucleotide
gagucgaaaugagucuauu

SEQ ID NO: 398222 - RNA, 19 nt, Artificial Sequence
  Description of Artificial Sequence: Synthetic oligonucleotide
caauucuaucguggaggaa

SEQ ID NO: 398223 - RNA, 19 nt, Artificial Sequence
  Description of Artificial Sequence: Synthetic oligonucleotide
gcgcuaaguaaggagcaaa

SEQ ID NO: 398224 - RNA, 19 nt, Artificial Sequence
  Description of Artificial Sequence: Synthetic oligonucleotide
ggcaacguucaaggccaug

SEQ ID NO: 398225 - RNA, 19 nt, Artificial Sequence
  Description of Artificial Sequence: Synthetic oligonucleotide
cccgaaucccacacucuga

SEQ ID NO: 398226 - RNA, 19 nt, Artificial Sequence
  Description of Artificial Sequence: Synthetic oligonucleotide
cccaugauucagugcggca

SEQ ID NO: 398227 - RNA, 19 nt, Artificial Sequence
  Description of Artificial Sequence: Synthetic oligonucleotide
ggagcgaauuugcauucuu

SEQ ID NO: 398228 - RNA, 19 nt, Artificial Sequence
  Description of Artificial Sequence: Synthetic oligonucleotide
cgggacuaacccaacucca

SEQ ID NO: 398229 - RNA, 19 nt, Artificial Sequence
  Description of Artificial Sequence: Synthetic oligonucleotide
ccauuauuaaagggcugaa

SEQ ID NO: 398230 - RNA, 19 nt, Artificial Sequence
  Description of Artificial Sequence: Synthetic oligonucleotide
caacgccccuuuauguaau

SEQ ID NO: 398231 - RNA, 19 nt, Artificial Sequence
  Description of Artificial Sequence: Synthetic oligonucleotide
gcgccgcuuugauuuuggc

SEQ ID NO: 398232 - RNA, 19 nt, Artificial Sequence
  Description of Artificial Sequence: Synthetic oligonucleotide
ggcgcuaaguaaggagcaa

SEQ ID NO: 398233 - RNA, 19 nt, Artificial Sequence
  Description of Artificial Sequence: Synthetic oligonucleotide
gucccuauggugggaccua

SEQ ID NO: 398234 - RNA, 19 nt, Artificial Sequence
  Description of Artificial Sequence: Synthetic oligonucleotide
cucaugcaacgccccuuua

SEQ ID NO: 398235 - RNA, 19 nt, Artificial Sequence
  Description of Artificial Sequence: Synthetic oligonucleotide
uugcugcgaaggggacacu

SEQ ID NO: 398236 - RNA, 19 nt, Artificial Sequence
  Description of Artificial Sequence: Synthetic oligonucleotide
ggcauuccaucccguuucu

SEQ ID NO: 398237 - RNA, 19 nt, Artificial Sequence
  Description of Artificial Sequence: Synthetic oligonucleotide
ggcggacguagcgcugugc

SEQ ID NO: 398238 - RNA, 19 nt, Artificial Sequence
  Description of Artificial Sequence: Synthetic oligonucleotide
ccaugauucagugcggcau

SEQ ID NO: 398239 - RNA, 19 nt, Artificial Sequence
  Description of Artificial Sequence: Synthetic oligonucleotide
cgccguguguugcugcaac

SEQ ID NO: 398240 - RNA, 19 nt, Artificial Sequence
  Description of Artificial Sequence: Synthetic oligonucleotide
gguuacgguguugucguuu

SEQ ID NO: 398241 - RNA, 19 nt, Artificial Sequence
  Description of Artificial Sequence: Synthetic oligonucleotide
uggcgccguugcucuuuuc

SEQ ID NO: 398242 - RNA, 19 nt, Artificial Sequence
  Description of Artificial Sequence: Synthetic oligonucleotide
caucccguuucuguugauu

SEQ ID NO: 398243 - RNA, 19 nt, Artificial Sequence
  Description of Artificial Sequence: Synthetic oligonucleotide
ccacggcaacccgaauccc

SEQ ID NO: 398244 - RNA, 19 nt, Artificial Sequence
  Description of Artificial Sequence: Synthetic oligonucleotide
ccgaaucccacacucugau

SEQ ID NO: 398245 - RNA, 19 nt, Artificial Sequence
  Description of Artificial Sequence: Synthetic oligonucleotide
gccguguguugcugcaacu

SEQ ID NO: 398246 - RNA, 19 nt, Artificial Sequence
  Description of Artificial Sequence: Synthetic oligonucleotide
cccuauggugggaccuaca

SEQ ID NO: 398247 - RNA, 19 nt, Artificial Sequence
  Description of Artificial Sequence: Synthetic oligonucleotide
acguagcgcugugcaccau

SEQ ID NO: 398248 - RNA, 19 nt, Artificial Sequence
  Description of Artificial Sequence: Synthetic oligonucleotide
gugcugcgccgcuuugauu

SEQ ID NO: 398249 - RNA, 19 nt, Artificial Sequence
  Description of Artificial Sequence: Synthetic oligonucleotide
cccuuggaauaaguacuua

SEQ ID NO: 398250 - RNA, 19 nt, Artificial Sequence
  Description of Artificial Sequence: Synthetic oligonucleotide
ccaggcaauugugcuugaa

SEQ ID NO: 398251 - RNA, 19 nt, Artificial Sequence
  Description of Artificial Sequence: Synthetic oligonucleotide
cagcgacccuugagggagu

SEQ ID NO: 398252 - RNA, 19 nt, Artificial Sequence
  Description of Artificial Sequence: Synthetic oligonucleotide
cggcuauaguuacggagau

SEQ ID NO: 398253 - RNA, 19 nt, Artificial Sequence
  Description of Artificial Sequence: Synthetic oligonucleotide
cguuugugucgaucauggu

SEQ ID NO: 398254 - RNA, 19 nt, Artificial Sequence
  Description of Artificial Sequence: Synthetic oligonucleotide
cgguuacgguguugucguu

SEQ ID NO: 398255 - RNA, 19 nt, Artificial Sequence
  Description of Artificial Sequence: Synthetic oligonucleotide
aaauacaugagucuuuacc

SEQ ID NO: 398256 - RNA, 19 nt, Artificial Sequence
  Description of Artificial Sequence: Synthetic oligonucleotide
aacuugaacagcuuuacac

SEQ ID NO: 398257 - RNA, 19 nt, Artificial Sequence
  Description of Artificial Sequence: Synthetic oligonucleotide
uguaauaaucaucauggcg

SEQ ID NO: 398258 - RNA, 19 nt, Artificial Sequence
  Description of Artificial Sequence: Synthetic oligonucleotide
ugucaaaucagaauuauca

SEQ ID NO: 398259 - RNA, 19 nt, Artificial Sequence
  Description of Artificial Sequence: Synthetic oligonucleotide
aauacaugagucuuuacca

SEQ ID NO: 398260 - RNA, 19 nt, Artificial Sequence
  Description of Artificial Sequence: Synthetic oligonucleotide
uucacaauuaaccaucuca

SEQ ID NO: 398261 - RNA, 19 nt, Artificial Sequence
  Description of Artificial Sequence: Synthetic oligonucleotide
uaaccaguaauaaaguugc

SEQ ID NO: 398262 - RNA, 19 nt, Artificial Sequence
  Description of Artificial Sequence: Synthetic oligonucleotide
agauuuaugacgccgacuc

SEQ ID NO: 398263 - RNA, 19 nt, Artificial Sequence
  Description of Artificial Sequence: Synthetic oligonucleotide
aguaacauuaucuuuagau

SEQ ID NO: 398264 - RNA, 19 nt, Artificial Sequence
  Description of Artificial Sequence: Synthetic oligonucleotide
ugucauaguaacauuaucu

SEQ ID NO: 398265 - RNA, 19 nt, Artificial Sequence
  Description of Artificial Sequence: Synthetic oligonucleotide
uaucauaugguggaggucg

SEQ ID NO: 398266 - RNA, 19 nt, Artificial Sequence
  Description of Artificial Sequence: Synthetic oligonucleotide
uugauuguccauuugcccg

SEQ ID NO: 398267 - RNA, 19 nt, Artificial Sequence
  Description of Artificial Sequence: Synthetic oligonucleotide
auaucauuuacucccaaag

SEQ ID NO: 398268 - RNA, 19 nt, Artificial Sequence
  Description of Artificial Sequence: Synthetic oligonucleotide
ucacaauuaaccaucucag

SEQ ID NO: 398269 - RNA, 19 nt, Artificial Sequence
  Description of Artificial Sequence: Synthetic oligonucleotide
uuugcaacgaucaucugca

SEQ ID NO: 398270 - RNA, 19 nt, Artificial Sequence
  Description of Artificial Sequence: Synthetic oligonucleotide
acugaaucgcuauaucugc

SEQ ID NO: 398271 - RNA, 19 nt, Artificial Sequence
  Description of Artificial Sequence: Synthetic oligonucleotide
auaauggccaaauauauau

SEQ ID NO: 398272 - RNA, 19 nt, Artificial Sequence
  Description of Artificial Sequence: Synthetic oligonucleotide
ugaacgcaagauuagauug

SEQ ID NO: 398273 - RNA, 19 nt, Artificial Sequence
  Description of Artificial Sequence: Synthetic oligonucleotide
aauagcacuacuugagaug

SEQ ID NO: 398274 - RNA, 19 nt, Artificial Sequence
  Description of Artificial Sequence: Synthetic oligonucleotide
aacgaucaucugcagauac

SEQ ID NO: 398275 - RNA, 19 nt, Artificial Sequence
  Description of Artificial Sequence: Synthetic oligonucleotide
acaauuaaccaucucagca

SEQ ID NO: 398276 - RNA, 19 nt, Artificial Sequence
  Description of Artificial Sequence: Synthetic oligonucleotide
uacaacacuacaucuauug

SEQ ID NO: 398277 - RNA, 19 nt, Artificial Sequence
  Description of Artificial Sequence: Synthetic oligonucleotide
uggccaaauauauauaacc

SEQ ID NO: 398278 - RNA, 19 nt, Artificial Sequence
  Description of Artificial Sequence: Synthetic oligonucleotide
uacuccgagauuuaugacg

SEQ ID NO: 398279 - RNA, 19 nt, Artificial Sequence
  Description of Artificial Sequence: Synthetic oligonucleotide
uaaaaguagagcuacuggu

SEQ ID NO: 398280 - RNA, 19 nt, Artificial Sequence
  Description of Artificial Sequence: Synthetic oligonucleotide
aaaagccggauucacaugu

SEQ ID NO: 398281 - RNA, 19 nt, Artificial Sequence
  Description of Artificial Sequence: Synthetic oligonucleotide
ucuacuccgagauuuauga

SEQ ID NO: 398282 - RNA, 19 nt, Artificial Sequence
  Description of Artificial Sequence: Synthetic oligonucleotide
uuauaauggccaaauauau

SEQ ID NO: 398283 - RNA, 19 nt, Artificial Sequence
  Description of Artificial Sequence: Synthetic oligonucleotide
agaauauagaaauauuaaa

SEQ ID NO: 398284 - RNA, 19 nt, Artificial Sequence
  Description of Artificial Sequence: Synthetic oligonucleotide
ugaugcauauccaaacacc

SEQ ID NO: 398285 - RNA, 19 nt, Artificial Sequence
  Description of Artificial Sequence: Synthetic oligonucleotide
cuugaaauagcacuacuug

SEQ ID NO: 398286 - RNA, 19 nt, Artificial Sequence
  Description of Artificial Sequence: Synthetic oligonucleotide
ucuacuauggucccuuucu

SEQ ID NO: 398287 - RNA, 19 nt, Artificial Sequence
  Description of Artificial Sequence: Synthetic oligonucleotide
auugcaaggagucacgaca

SEQ ID NO: 398288 - RNA, 19 nt, Artificial Sequence
  Description of Artificial Sequence: Synthetic oligonucleotide
auugguuauguuuaauuca

SEQ ID NO: 398289 - RNA, 19 nt, Artificial Sequence
  Description of Artificial Sequence: Synthetic oligonucleotide
uugguuauguuuaauucac

SEQ ID NO: 398290 - RNA, 19 nt, Artificial Sequence
  Description of Artificial Sequence: Synthetic oligonucleotide
uuggauuguuuaauuaaag

SEQ ID NO: 398291 - RNA, 19 nt, Artificial Sequence
  Description of Artificial Sequence: Synthetic oligonucleotide
uguuuaauucacugaacgc

SEQ ID NO: 398292 - RNA, 19 nt, Artificial Sequence
  Description of Artificial Sequence: Synthetic oligonucleotide
aaucaccuauccuaauauc

SEQ ID NO: 398293 - RNA, 19 nt, Artificial Sequence
  Description of Artificial Sequence: Synthetic oligonucleotide
uuacacaucagccccauuc

SEQ ID NO: 398294 - RNA, 19 nt, Artificial Sequence
  Description of Artificial Sequence: Synthetic oligonucleotide
guuuacauaccauucagca

SEQ ID NO: 398295 - RNA, 19 nt, Artificial Sequence
  Description of Artificial Sequence: Synthetic oligonucleotide
gauugaugcauauccaaac

SEQ ID NO: 398296 - RNA, 19 nt, Artificial Sequence
  Description of Artificial Sequence: Synthetic oligonucleotide
auagcacuacuugagaugg

SEQ ID NO: 398297 - RNA, 19 nt, Artificial Sequence
  Description of Artificial Sequence: Synthetic oligonucleotide
uugaaauagcacuacuuga

SEQ ID NO: 398298 - RNA, 19 nt, Artificial Sequence
  Description of Artificial Sequence: Synthetic oligonucleotide
uacugguuaccauuuaugc

SEQ ID NO: 398299 - RNA, 19 nt, Artificial Sequence
  Description of Artificial Sequence: Synthetic oligonucleotide
uauugcugcacacaagacu

SEQ ID NO: 398300 - RNA, 19 nt, Artificial Sequence
  Description of Artificial Sequence: Synthetic oligonucleotide
aaugcuagcaguucacaau

SEQ ID NO: 398301 - RNA, 19 nt, Artificial Sequence
  Description of Artificial Sequence: Synthetic oligonucleotide
uuugauuguccauuugccc

SEQ ID NO: 398302 - RNA, 19 nt, Artificial Sequence
  Description of Artificial Sequence: Synthetic oligonucleotide
aaauagcacuacuugagau

SEQ ID NO: 398303 - RNA, 19 nt, Artificial Sequence
  Description of Artificial Sequence: Synthetic oligonucleotide
aacgaugacgguauucucg

SEQ ID NO: 398304 - RNA, 19 nt, Artificial Sequence
  Description of Artificial Sequence: Synthetic oligonucleotide
ucacaagcuaacuagguaa

SEQ ID NO: 398305 - RNA, 19 nt, Artificial Sequence
  Description of Artificial Sequence: Synthetic oligonucleotide
acuacaucuauuguaauca

SEQ ID NO: 398306 - RNA, 19 nt, Artificial Sequence
  Description of Artificial Sequence: Synthetic oligonucleotide
cuuugcaacgaucaucugc

SEQ ID NO: 398307 - RNA, 19 nt, Artificial Sequence
  Description of Artificial Sequence: Synthetic oligonucleotide
uaucauuuacucccaaaga

SEQ ID NO: 398308 - RNA, 19 nt, Artificial Sequence
  Description of Artificial Sequence: Synthetic oligonucleotide
uuucccgugaucuacuaug

SEQ ID NO: 398309 - RNA, 19 nt, Artificial Sequence
  Description of Artificial Sequence: Synthetic oligonucleotide
auaaccaguaauaaaguug

SEQ ID NO: 398310 - RNA, 19 nt, Artificial Sequence
  Description of Artificial Sequence: Synthetic oligonucleotide
acgaugacgguauucucgc

SEQ ID NO: 398311 - RNA, 19 nt, Artificial Sequence
  Description of Artificial Sequence: Synthetic oligonucleotide
ucucuuaaaugcuagcagu

SEQ ID NO: 398312 - RNA, 19 nt, Artificial Sequence
  Description of Artificial Sequence: Synthetic oligonucleotide
uuauucagaucuauuccug

SEQ ID NO: 398313 - RNA, 19 nt, Artificial Sequence
  Description of Artificial Sequence: Synthetic oligonucleotide
aucauggcgaucucuacuc

SEQ ID NO: 398314 - RNA, 19 nt, Artificial Sequence
  Description of Artificial Sequence: Synthetic oligonucleotide
auaacuugaacagcuuuac

SEQ ID NO: 398315 - RNA, 19 nt, Artificial Sequence
  Description of Artificial Sequence: Synthetic oligonucleotide
auaguaacauuaucuuuag

SEQ ID NO: 398316 - RNA, 19 nt, Artificial Sequence
  Description of Artificial Sequence: Synthetic oligonucleotide
augacgccgacucuuuucc

SEQ ID NO: 398317 - RNA, 19 nt, Artificial Sequence
  Description of Artificial Sequence: Synthetic oligonucleotide
uuagauugaugcauaucca

SEQ ID NO: 398318 - RNA, 19 nt, Artificial Sequence
  Description of Artificial Sequence: Synthetic oligonucleotide
ucagaucuauuccuguuca

SEQ ID NO: 398319 - RNA, 19 nt, Artificial Sequence
  Description of Artificial Sequence: Synthetic oligonucleotide
aaacacccuauugcaaugc

SEQ ID NO: 398320 - RNA, 19 nt, Artificial Sequence
  Description of Artificial Sequence: Synthetic oligonucleotide
gaacuaauaagaacuuugc

SEQ ID NO: 398321 - RNA, 19 nt, Artificial Sequence
  Description of Artificial Sequence: Synthetic oligonucleotide
uauuacaacacuacaucua

SEQ ID NO: 398322 - RNA, 19 nt, Artificial Sequence
  Description of Artificial Sequence: Synthetic oligonucleotide
ugacugaaucgcuauaucu

SEQ ID NO: 398323 - RNA, 19 nt, Artificial Sequence
  Description of Artificial Sequence: Synthetic oligonucleotide
auugcuugcacauuauaau

SEQ ID NO: 398324 - RNA, 19 nt, Artificial Sequence
  Description of Artificial Sequence: Synthetic oligonucleotide
cauaccauucagcaaauuc

SEQ ID NO: 398325 - RNA, 19 nt, Artificial Sequence
  Description of Artificial Sequence: Synthetic oligonucleotide
uaaucaccuauccuaauau

SEQ ID NO: 398326 - RNA, 19 nt, Artificial Sequence
  Description of Artificial Sequence: Synthetic oligonucleotide
acuccgagauuuaugacgc

SEQ ID NO: 398327 - RNA, 19 nt, Artificial Sequence
  Description of Artificial Sequence: Synthetic oligonucleotide
aaaguagagcuacugguua

SEQ ID NO: 398328 - RNA, 19 nt, Artificial Sequence
  Description of Artificial Sequence: Synthetic oligonucleotide
cagcuucuaacgaugacgg

SEQ ID NO: 398329 - RNA, 19 nt, Artificial Sequence
  Description of Artificial Sequence: Synthetic oligonucleotide
aucaacucucucuuaaaug

SEQ ID NO: 398330 - RNA, 19 nt, Artificial Sequence
  Description of Artificial Sequence: Synthetic oligonucleotide
uuucaccccuaaaacauug

SEQ ID NO: 398331 - RNA, 19 nt, Artificial Sequence
  Description of Artificial Sequence: Synthetic oligonucleotide
auugaugcauauccaaaca

SEQ ID NO: 398332 - RNA, 19 nt, Artificial Sequence
  Description of Artificial Sequence: Synthetic oligonucleotide
agucaccccuaucauaugg

SEQ ID NO: 398333 - RNA, 19 nt, Artificial Sequence
  Description of Artificial Sequence: Synthetic oligonucleotide
aagcagaauauagaaauau

SEQ ID NO: 398334 - RNA, 19 nt, Artificial Sequence
  Description of Artificial Sequence: Synthetic oligonucleotide
uuaauucacugaacgcaag

SEQ ID NO: 398335 - RNA, 19 nt, Artificial Sequence
  Description of Artificial Sequence: Synthetic oligonucleotide
cuauccuaauaucaaaauc

SEQ ID NO: 398336 - RNA, 19 nt, Artificial Sequence
  Description of Artificial Sequence: Synthetic oligonucleotide
uaauugagcugcacuacug

SEQ ID NO: 398337 - RNA, 19 nt, Artificial Sequence
  Description of Artificial Sequence: Synthetic oligonucleotide
aauugcuugcacauuauaa

SEQ ID NO: 398338 - RNA, 19 nt, Artificial Sequence
  Description of Artificial Sequence: Synthetic oligonucleotide
agcacuacuugagauggcc

SEQ ID NO: 398339 - RNA, 19 nt, Artificial Sequence
  Description of Artificial Sequence: Synthetic oligonucleotide
ucuugaaauagcacuacuu

SEQ ID NO: 398340 - RNA, 19 nt, Artificial Sequence
  Description of Artificial Sequence: Synthetic oligonucleotide
ucuauuccuguucaguuua

SEQ ID NO: 398341 - RNA, 19 nt, Artificial Sequence
  Description of Artificial Sequence: Synthetic oligonucleotide
aaaugcuagcaguucacaa

SEQ ID NO: 398342 - RNA, 19 nt, Artificial Sequence
  Description of Artificial Sequence: Synthetic oligonucleotide
uaccauucagcaaauucac

SEQ ID NO: 398343 - RNA, 19 nt, Artificial Sequence
  Description of Artificial Sequence: Synthetic oligonucleotide
uuuacauaccauucagcaa

SEQ ID NO: 398344 - RNA, 19 nt, Artificial Sequence
  Description of Artificial Sequence: Synthetic oligonucleotide
uugcaaggagucacgacag

SEQ ID NO: 398345 - RNA, 19 nt, Artificial Sequence
  Description of Artificial Sequence: Synthetic oligonucleotide
uuuggaugaugcuucagau

SEQ ID NO: 398346 - RNA, 19 nt, Artificial Sequence
  Description of Artificial Sequence: Synthetic oligonucleotide
agcaaauucacaagcuaac

SEQ ID NO: 398347 - RNA, 19 nt, Artificial Sequence
  Description of Artificial Sequence: Synthetic oligonucleotide
uauaaccaguaauaaaguu

SEQ ID NO: 398348 - RNA, 19 nt, Artificial Sequence
  Description of Artificial Sequence: Synthetic oligonucleotide
gacugaaucgcuauaucug

SEQ ID NO: 398349 - RNA, 19 nt, Artificial Sequence
  Description of Artificial Sequence: Synthetic oligonucleotide
uccgagauuuaugacgccg

SEQ ID NO: 398350 - RNA, 19 nt, Artificial Sequence
  Description of Artificial Sequence: Synthetic oligonucleotide
uggaagguguuccucuucc

SEQ ID NO: 398351 - RNA, 19 nt, Artificial Sequence
  Description of Artificial Sequence: Synthetic oligonucleotide
cacuacuugagauggcccg

SEQ ID NO: 398352 - RNA, 19 nt, Artificial Sequence
  Description of Artificial Sequence: Synthetic oligonucleotide
uaucaacucucucuuaaau

SEQ ID NO: 398353 - RNA, 19 nt, Artificial Sequence
  Description of Artificial Sequence: Synthetic oligonucleotide
ucaagggcgagacacuuaa

SEQ ID NO: 398354 - RNA, 19 nt, Artificial Sequence
  Description of Artificial Sequence: Synthetic oligonucleotide
uucagaucuauuccuguuc

SEQ ID NO: 398355 - RNA, 19 nt, Artificial Sequence
  Description of Artificial Sequence: Synthetic oligonucleotide
uucccgugaucuacuaugg

SEQ ID NO: 398356 - RNA, 19 nt, Artificial Sequence
  Description of Artificial Sequence: Synthetic oligonucleotide
ucucucuuaaaugcuagca

SEQ ID NO: 398357 - RNA, 19 nt, Artificial Sequence
  Description of Artificial Sequence: Synthetic oligonucleotide
ggccauaugggucuguugg

SEQ ID NO: 398358 - RNA, 19 nt, Artificial Sequence
  Description of Artificial Sequence: Synthetic oligonucleotide
ugaaucgcuauaucugcca

SEQ ID NO: 398359 - RNA, 19 nt, Artificial Sequence
  Description of Artificial Sequence: Synthetic oligonucleotide
uauuaguugguggaggaaa

SEQ ID NO: 398360 - RNA, 19 nt, Artificial Sequence
  Description of Artificial Sequence: Synthetic oligonucleotide
auaucugggguguaauuga

SEQ ID NO: 398361 - RNA, 19 nt, Artificial Sequence
  Description of Artificial Sequence: Synthetic oligonucleotide
aagggcgagacacuuaauu

SEQ ID NO: 398362 - RNA, 19 nt, Artificial Sequence
  Description of Artificial Sequence: Synthetic oligonucleotide
auaugggucuguugguggg

SEQ ID NO: 398363 - RNA, 19 nt, Artificial Sequence
  Description of Artificial Sequence: Synthetic oligonucleotide
gaaauagcacuacuugaga

SEQ ID NO: 398364 - RNA, 19 nt, Artificial Sequence
  Description of Artificial Sequence: Synthetic oligonucleotide
ucucuuuuaggcagcagau

SEQ ID NO: 398365 - RNA, 19 nt, Artificial Sequence
  Description of Artificial Sequence: Synthetic oligonucleotide
cuagcaguucacaauuaac

SEQ ID NO: 398366 - RNA, 19 nt, Artificial Sequence
  Description of Artificial Sequence: Synthetic oligonucleotide
ugccacuauuaguuggugg

SEQ ID NO: 398367 - RNA, 19 nt, Artificial Sequence
  Description of Artificial Sequence: Synthetic oligonucleotide
agaagcaaacugcuggaca

SEQ ID NO: 398368 - RNA, 19 nt, Artificial Sequence
  Description of Artificial Sequence: Synthetic oligonucleotide
uuuacucccaaagaaugaa

SEQ ID NO: 398369 - RNA, 19 nt, Artificial Sequence
  Description of Artificial Sequence: Synthetic oligonucleotide
ucgacuaucugauguuggc

SEQ ID NO: 398370 - RNA, 19 nt, Artificial Sequence
  Description of Artificial Sequence: Synthetic oligonucleotide
ugucuauggcaccaucagc

SEQ ID NO: 398371 - RNA, 19 nt, Artificial Sequence
  Description of Artificial Sequence: Synthetic oligonucleotide
agggcgagacacuuaauug

SEQ ID NO: 398372 - RNA, 19 nt, Artificial Sequence
  Description of Artificial Sequence: Synthetic oligonucleotide
cuacugguuaccauuuaug

SEQ ID NO: 398373 - RNA, 19 nt, Artificial Sequence
  Description of Artificial Sequence: Synthetic oligonucleotide
cacgacaggauucugacca

SEQ ID NO: 398374 - RNA, 19 nt, Artificial Sequence
  Description of Artificial Sequence: Synthetic oligonucleotide
cauaucugggguguaauug

SEQ ID NO: 398375 - RNA, 19 nt, Artificial Sequence
  Description of Artificial Sequence: Synthetic oligonucleotide
uguuuacagacauuaucau

SEQ ID NO: 398376 - RNA, 19 nt, Artificial Sequence
  Description of Artificial Sequence: Synthetic oligonucleotide
uucacgucuugauccagag

SEQ ID NO: 398377 - RNA, 19 nt, Artificial Sequence
  Description of Artificial Sequence: Synthetic oligonucleotide
cacaauuaaccaucucagc

SEQ ID NO: 398378 - RNA, 19 nt, Artificial Sequence
  Description of Artificial Sequence: Synthetic oligonucleotide
gacgccgacucuuuucccg

SEQ ID NO: 398379 - RNA, 19 nt, Artificial Sequence
  Description of Artificial Sequence: Synthetic oligonucleotide
uguaaggggaggcccaagu

SEQ ID NO: 398380 - RNA, 19 nt, Artificial Sequence
  Description of Artificial Sequence: Synthetic oligonucleotide
cugcuuauugcaaggaguc

SEQ ID NO: 398381 - RNA, 19 nt, Artificial Sequence
  Description of Artificial Sequence: Synthetic oligonucleotide
agcaaguguaaggggaggc

SEQ ID NO: 398382 - RNA, 19 nt, Artificial Sequence
  Description of Artificial Sequence: Synthetic oligonucleotide
aaguggacccaacggaggu

SEQ ID NO: 398383 - RNA, 19 nt, Artificial Sequence
  Description of Artificial Sequence: Synthetic oligonucleotide
uguaauugagcugcacuac

SEQ ID NO: 398384 - RNA, 19 nt, Artificial Sequence
  Description of Artificial Sequence: Synthetic oligonucleotide
aaaaguagagcuacugguu

SEQ ID NO: 398385 - RNA, 19 nt, Artificial Sequence
  Description of Artificial Sequence: Synthetic oligonucleotide
aucaccuauccuaauauca

SEQ ID NO: 398386 - RNA, 19 nt, Artificial Sequence
  Description of Artificial Sequence: Synthetic oligonucleotide
gaugacgguauucucgcuc

SEQ ID NO: 398387 - RNA, 19 nt, Artificial Sequence
  Description of Artificial Sequence: Synthetic oligonucleotide
cacuacaucuauuguaauc

SEQ ID NO: 398388 - RNA, 19 nt, Artificial Sequence
  Description of Artificial Sequence: Synthetic oligonucleotide
ugaaggcaaucuugcaaag

SEQ ID NO: 398389 - RNA, 19 nt, Artificial Sequence
  Description of Artificial Sequence: Synthetic oligonucleotide
accccuaucauauggugga

SEQ ID NO: 398390 - RNA, 19 nt, Artificial Sequence
  Description of Artificial Sequence: Synthetic oligonucleotide
cucgacuaucugauguugg

SEQ ID NO: 398391 - RNA, 19 nt, Artificial Sequence
  Description of Artificial Sequence: Synthetic oligonucleotide
ucaccccuaaaacauugac

SEQ ID NO: 398392 - RNA, 19 nt, Artificial Sequence
  Description of Artificial Sequence: Synthetic oligonucleotide
ugcaacgaucaucugcaga

SEQ ID NO: 398393 - RNA, 19 nt, Artificial Sequence
  Description of Artificial Sequence: Synthetic oligonucleotide
cuguaauaaucaucauggc

SEQ ID NO: 398394 - RNA, 19 nt, Artificial Sequence
  Description of Artificial Sequence: Synthetic oligonucleotide
acaacacuacaucuauugu

SEQ ID NO: 398395 - RNA, 19 nt, Artificial Sequence
  Description of Artificial Sequence: Synthetic oligonucleotide
aaagaacuaauaagaacuu

SEQ ID NO: 398396 - RNA, 19 nt, Artificial Sequence
  Description of Artificial Sequence: Synthetic oligonucleotide
gauggcccgauuucuauuc

SEQ ID NO: 398397 - RNA, 19 nt, Artificial Sequence
  Description of Artificial Sequence: Synthetic oligonucleotide
gggcgagacacuuaauugg

SEQ ID NO: 398398 - RNA, 19 nt, Artificial Sequence
  Description of Artificial Sequence: Synthetic oligonucleotide
cuauaucugccaaauuuca

SEQ ID NO: 398399 - RNA, 19 nt, Artificial Sequence
  Description of Artificial Sequence: Synthetic oligonucleotide
cauggcgaucucuacuccg

SEQ ID NO: 398400 - RNA, 19 nt, Artificial Sequence
  Description of Artificial Sequence: Synthetic oligonucleotide
auagucaccccuaucauau

SEQ ID NO: 398401 - RNA, 19 nt, Artificial Sequence
  Description of Artificial Sequence: Synthetic oligonucleotide
acgguauucucgcucucgg

SEQ ID NO: 398402 - RNA, 19 nt, Artificial Sequence
  Description of Artificial Sequence: Synthetic oligonucleotide
cuaucugauguuggcaugc

SEQ ID NO: 398403 - RNA, 19 nt, Artificial Sequence
  Description of Artificial Sequence: Synthetic oligonucleotide
aacacccuauugcaaugcu

SEQ ID NO: 398404 - RNA, 19 nt, Artificial Sequence
  Description of Artificial Sequence: Synthetic oligonucleotide
cugucuauggcaccaucag

SEQ ID NO: 398405 - RNA, 19 nt, Artificial Sequence
  Description of Artificial Sequence: Synthetic oligonucleotide
uacuauggucccuuucucu

SEQ ID NO: 398406 - RNA, 19 nt, Artificial Sequence
  Description of Artificial Sequence: Synthetic oligonucleotide
auacaugagucuuuaccaa

SEQ ID NO: 398407 - RNA, 19 nt, Artificial Sequence
  Description of Artificial Sequence: Synthetic oligonucleotide
uuaucaacucucucuuaaa

SEQ ID NO: 398408 - RNA, 19 nt, Artificial Sequence
  Description of Artificial Sequence: Synthetic oligonucleotide
ugggaaacggccccguccu

SEQ ID NO: 398409 - RNA, 19 nt, Artificial Sequence
  Description of Artificial Sequence: Synthetic oligonucleotide
ucuuaaaugcuagcaguuc

SEQ ID NO: 398410 - RNA, 19 nt, Artificial Sequence
  Description of Artificial Sequence: Synthetic oligonucleotide
cugaaucgcuauaucugcc

SEQ ID NO: 398411 - RNA, 19 nt, Artificial Sequence
  Description of Artificial Sequence: Synthetic oligonucleotide
uguuaccaauguuucaaua

SEQ ID NO: 398412 - RNA, 19 nt, Artificial Sequence
  Description of Artificial Sequence: Synthetic oligonucleotide
aacaccaacaagggcaaau

SEQ ID NO: 398413 - RNA, 19 nt, Artificial Sequence
  Description of Artificial Sequence: Synthetic oligonucleotide
uggacaagcgucacuuuuc

SEQ ID NO: 398414 - RNA, 19 nt, Artificial Sequence
  Description of Artificial Sequence: Synthetic oligonucleotide
cuugagauggcccgauuuc

SEQ ID NO: 398415 - RNA, 19 nt, Artificial Sequence
  Description of Artificial Sequence: Synthetic oligonucleotide
acuuggacucaauuccaug

SEQ ID NO: 398416 - RNA, 19 nt, Artificial Sequence
  Description of Artificial Sequence: Synthetic oligonucleotide
aaaucuguccccaccggga

SEQ ID NO: 398417 - RNA, 19 nt, Artificial Sequence
  Description of Artificial Sequence: Synthetic oligonucleotide
ucuuuucccgugaucuacu

SEQ ID NO: 398418 - RNA, 19 nt, Artificial Sequence
  Description of Artificial Sequence: Synthetic oligonucleotide
uugacugaaucgcuauauc

SEQ ID NO: 398419 - RNA, 19 nt, Artificial Sequence
  Description of Artificial Sequence: Synthetic oligonucleotide
aaguggugcuguuuacaga

SEQ ID NO: 398420 - RNA, 19 nt, Artificial Sequence
  Description of Artificial Sequence: Synthetic oligonucleotide
ugaucguucacgucuugau

SEQ ID NO: 398421 - RNA, 19 nt, Artificial Sequence
  Description of Artificial Sequence: Synthetic oligonucleotide
acaccaacaagggcaaauc

SEQ ID NO: 398422 - RNA, 19 nt, Artificial Sequence
  Description of Artificial Sequence: Synthetic oligonucleotide
augacgguauucucgcucu

SEQ ID NO: 398423 - RNA, 19 nt, Artificial Sequence
  Description of Artificial Sequence: Synthetic oligonucleotide
auugacugaaucgcuauau

SEQ ID NO: 398424 - RNA, 19 nt, Artificial Sequence
  Description of Artificial Sequence: Synthetic oligonucleotide
aaucgcuauaucugccaaa

SEQ ID NO: 398425 - RNA, 19 nt, Artificial Sequence
  Description of Artificial Sequence: Synthetic oligonucleotide
uaugacgccgacucuuuuc

SEQ ID NO: 398426 - RNA, 19 nt, Artificial Sequence
  Description of Artificial Sequence: Synthetic oligonucleotide
aagaacuaauaagaacuuu

SEQ ID NO: 398427 - RNA, 19 nt, Artificial Sequence
  Description of Artificial Sequence: Synthetic oligonucleotide
caauagcacucccauaauc

SEQ ID NO: 398428 - RNA, 19 nt, Artificial Sequence
  Description of Artificial Sequence: Synthetic oligonucleotide
acauugacugaaucgcuau

SEQ ID NO: 398429 - RNA, 19 nt, Artificial Sequence
  Description of Artificial Sequence: Synthetic oligonucleotide
cauaugguggaggucggcc

SEQ ID NO: 398430 - RNA, 19 nt, Artificial Sequence
  Description of Artificial Sequence: Synthetic oligonucleotide
ugguuaccauuuaugcaga

SEQ ID NO: 398431 - RNA, 19 nt, Artificial Sequence
  Description of Artificial Sequence: Synthetic oligonucleotide
agggccguagccuggaacu

SEQ ID NO: 398432 - RNA, 19 nt, Artificial Sequence
  Description of Artificial Sequence: Synthetic oligonucleotide
cacaagacuuucccugagg

SEQ ID NO: 398433 - RNA, 19 nt, Artificial Sequence
  Description of Artificial Sequence: Synthetic oligonucleotide
gacgguauucucgcucucg

SEQ ID NO: 398434 - RNA, 19 nt, Artificial Sequence
  Description of Artificial Sequence: Synthetic oligonucleotide
guagcaaauacaugagucu

SEQ ID NO: 398435 - RNA, 19 nt, Artificial Sequence
  Description of Artificial Sequence: Synthetic oligonucleotide
auaugguggaggucggcca

SEQ ID NO: 398436 - RNA, 19 nt, Artificial Sequence
  Description of Artificial Sequence: Synthetic oligonucleotide
agauuagauugaugcauau

SEQ ID NO: 398437 - RNA, 19 nt, Artificial Sequence
  Description of Artificial Sequence: Synthetic oligonucleotide
uuaaccaucucagcauauc

SEQ ID NO: 398438 - RNA, 19 nt, Artificial Sequence
  Description of Artificial Sequence: Synthetic oligonucleotide
uuuaugacgccgacucuuu

SEQ ID NO: 398439 - RNA, 19 nt, Artificial Sequence
  Description of Artificial Sequence: Synthetic oligonucleotide
aacgcaagauuagauugau

SEQ ID NO: 398440 - RNA, 19 nt, Artificial Sequence
  Description of Artificial Sequence: Synthetic oligonucleotide
cacaagaagcaaacugcug

SEQ ID NO: 398441 - RNA, 19 nt, Artificial Sequence
  Description of Artificial Sequence: Synthetic oligonucleotide
guguaauugagcugcacua

SEQ ID NO: 398442 - RNA, 19 nt, Artificial Sequence
  Description of Artificial Sequence: Synthetic oligonucleotide
ugcuuuauucagaucuauu

SEQ ID NO: 398443 - RNA, 19 nt, Artificial Sequence
  Description of Artificial Sequence: Synthetic oligonucleotide
cucucucuuaaaugcuagc

SEQ ID NO: 398444 - RNA, 19 nt, Artificial Sequence
  Description of Artificial Sequence: Synthetic oligonucleotide
acuugagauggcccgauuu

SEQ ID NO: 398445 - RNA, 19 nt, Artificial Sequence
  Description of Artificial Sequence: Synthetic oligonucleotide
uuaauugguuauguuuaau

SEQ ID NO: 398446 - RNA, 19 nt, Artificial Sequence
  Description of Artificial Sequence: Synthetic oligonucleotide
cucuacuccgagauuuaug

SEQ ID NO: 398447 - RNA, 19 nt, Artificial Sequence
  Description of Artificial Sequence: Synthetic oligonucleotide
aggagucacgacaggauuc

SEQ ID NO: 398448 - RNA, 19 nt, Artificial Sequence
  Description of Artificial Sequence: Synthetic oligonucleotide
cugcacgugaacugccucc

SEQ ID NO: 398449 - RNA, 19 nt, Artificial Sequence
  Description of Artificial Sequence: Synthetic oligonucleotide
ucauggcgaucucuacucc

SEQ ID NO: 398450 - RNA, 19 nt, Artificial Sequence
  Description of Artificial Sequence: Synthetic oligonucleotide
gcaagaccugaccaggagg

SEQ ID NO: 398451 - RNA, 19 nt, Artificial Sequence
  Description of Artificial Sequence: Synthetic oligonucleotide
uugagauggcccgauuucu

SEQ ID NO: 398452 - RNA, 19 nt, Artificial Sequence
  Description of Artificial Sequence: Synthetic oligonucleotide
gcccaaguggaccuggugg

SEQ ID NO: 398453 - RNA, 19 nt, Artificial Sequence
  Description of Artificial Sequence: Synthetic oligonucleotide
uuacacugucuauggcacc

SEQ ID NO: 398454 - RNA, 19 nt, Artificial Sequence
  Description of Artificial Sequence: Synthetic oligonucleotide
guaaggggaggcccaagug

SEQ ID NO: 398455 - RNA, 19 nt, Artificial Sequence
  Description of Artificial Sequence: Synthetic oligonucleotide
aucgcuauaucugccaaau

SEQ ID NO: 398456 - RNA, 19 nt, Artificial Sequence
  Description of Artificial Sequence: Synthetic oligonucleotide
aucuauuccuguucaguuu

SEQ ID NO: 398457 - RNA, 19 nt, Artificial Sequence
  Description of Artificial Sequence: Synthetic oligonucleotide
caagaagcaaacugcugga

SEQ ID NO: 398458 - RNA, 19 nt, Artificial Sequence
  Description of Artificial Sequence: Synthetic oligonucleotide
cacuacuguagcaaauaca

SEQ ID NO: 398459 - RNA, 19 nt, Artificial Sequence
  Description of Artificial Sequence: Synthetic oligonucleotide
cuauggucccuuucucuug

SEQ ID NO: 398460 - RNA, 19 nt, Artificial Sequence
  Description of Artificial Sequence: Synthetic oligonucleotide
cuuaauugguuauguuuaa

SEQ ID NO: 398461 - RNA, 19 nt, Artificial Sequence
  Description of Artificial Sequence: Synthetic oligonucleotide
ucuugaucguucacgucuu

SEQ ID NO: 398462 - RNA, 19 nt, Artificial Sequence
  Description of Artificial Sequence: Synthetic oligonucleotide
caaauacaugagucuuuac

SEQ ID NO: 398463 - RNA, 19 nt, Artificial Sequence
  Description of Artificial Sequence: Synthetic oligonucleotide
gaacgcaagauuagauuga

SEQ ID NO: 398464 - RNA, 19 nt, Artificial Sequence
  Description of Artificial Sequence: Synthetic oligonucleotide
uugaucguucacgucuuga

SEQ ID NO: 398465 - RNA, 19 nt, Artificial Sequence
  Description of Artificial Sequence: Synthetic oligonucleotide
uuuucccgugaucuacuau

SEQ ID NO: 398466 - RNA, 19 nt, Artificial Sequence
  Description of Artificial Sequence: Synthetic oligonucleotide
ucgauugggagguccugcu

SEQ ID NO: 398467 - RNA, 19 nt, Artificial Sequence
  Description of Artificial Sequence: Synthetic oligonucleotide
uaugguggaggucggccau

SEQ ID NO: 398468 - RNA, 19 nt, Artificial Sequence
  Description of Artificial Sequence: Synthetic oligonucleotide
gccacuauuaguuggugga

SEQ ID NO: 398469 - RNA, 19 nt, Artificial Sequence
  Description of Artificial Sequence: Synthetic oligonucleotide
ugagauggcccgauuucua

SEQ ID NO: 398470 - RNA, 19 nt, Artificial Sequence
  Description of Artificial Sequence: Synthetic oligonucleotide
gaaucgcuauaucugccaa

SEQ ID NO: 398471 - RNA, 19 nt, Artificial Sequence
  Description of Artificial Sequence: Synthetic oligonucleotide
agauugaugcauauccaaa

SEQ ID NO: 398472 - RNA, 19 nt, Artificial Sequence
  Description of Artificial Sequence: Synthetic oligonucleotide
uccugcuagagguggcggc

SEQ ID NO: 398473 - RNA, 19 nt, Artificial Sequence
  Description of Artificial Sequence: Synthetic oligonucleotide
uaugcagauuugcuuuauu

SEQ ID NO: 398474 - RNA, 19 nt, Artificial Sequence
  Description of Artificial Sequence: Synthetic oligonucleotide
auuaucauaugaacauuuu

SEQ ID NO: 398475 - RNA, 19 nt, Artificial Sequence
  Description of Artificial Sequence: Synthetic oligonucleotide
ucaauuccaugaaggcaau

SEQ ID NO: 398476 - RNA, 19 nt, Artificial Sequence
  Description of Artificial Sequence: Synthetic oligonucleotide
ucguucacgucuugaucca

SEQ ID NO: 398477 - RNA, 19 nt, Artificial Sequence
  Description of Artificial Sequence: Synthetic oligonucleotide
acauuauaauggccaaaua

SEQ ID NO: 398478 - RNA, 19 nt, Artificial Sequence
  Description of Artificial Sequence: Synthetic oligonucleotide
acugucuauggcaccauca

SEQ ID NO: 398479 - RNA, 19 nt, Artificial Sequence
  Description of Artificial Sequence: Synthetic oligonucleotide
guugcccaaaagguugucc

SEQ ID NO: 398480 - RNA, 19 nt, Artificial Sequence
  Description of Artificial Sequence: Synthetic oligonucleotide
gaccucgacuaucugaugu

SEQ ID NO: 398481 - RNA, 19 nt, Artificial Sequence
  Description of Artificial Sequence: Synthetic oligonucleotide
accuauccuaauaucaaaa

SEQ ID NO: 398482 - RNA, 19 nt, Artificial Sequence
  Description of Artificial Sequence: Synthetic oligonucleotide
aaguguaaggggaggccca

SEQ ID NO: 398483 - RNA, 19 nt, Artificial Sequence
  Description of Artificial Sequence: Synthetic oligonucleotide
aacucucucuuaaaugcua

SEQ ID NO: 398484 - RNA, 19 nt, Artificial Sequence
  Description of Artificial Sequence: Synthetic oligonucleotide
caucagccccauucaacag

SEQ ID NO: 398485 - RNA, 19 nt, Artificial Sequence
  Description of Artificial Sequence: Synthetic oligonucleotide
caauuaaccaucucagcau

SEQ ID NO: 398486 - RNA, 19 nt, Artificial Sequence
  Description of Artificial Sequence: Synthetic oligonucleotide
uggcgaucucuacuccgag

SEQ ID NO: 398487 - RNA, 19 nt, Artificial Sequence
  Description of Artificial Sequence: Synthetic oligonucleotide
gccggauucacauguggag

SEQ ID NO: 398488 - RNA, 19 nt, Artificial Sequence
  Description of Artificial Sequence: Synthetic oligonucleotide
cuacuauggucccuuucuc

SEQ ID NO: 398489 - RNA, 19 nt, Artificial Sequence
  Description of Artificial Sequence: Synthetic oligonucleotide
cuacuccgagauuuaugac

SEQ ID NO: 398490 - RNA, 19 nt, Artificial Sequence
  Description of Artificial Sequence: Synthetic oligonucleotide
gcaagauuagauugaugca

SEQ ID NO: 398491 - RNA, 19 nt, Artificial Sequence
  Description of Artificial Sequence: Synthetic oligonucleotide
caagauuagauugaugcau

SEQ ID NO: 398492 - RNA, 19 nt, Artificial Sequence
  Description of Artificial Sequence: Synthetic oligonucleotide
gacccaacggagguugccc

SEQ ID NO: 398493 - RNA, 19 nt, Artificial Sequence
  Description of Artificial Sequence: Synthetic oligonucleotide
aguucacaauuaaccaucu

SEQ ID NO: 398494 - RNA, 19 nt, Artificial Sequence
  Description of Artificial Sequence: Synthetic oligonucleotide
guaauugagcugcacuacu

SEQ ID NO: 398495 - RNA, 19 nt, Artificial Sequence
  Description of Artificial Sequence: Synthetic oligonucleotide
caucuauuguaaucaaagu

SEQ ID NO: 398496 - RNA, 19 nt, Artificial Sequence
  Description of Artificial Sequence: Synthetic oligonucleotide
gaucucuacuccgagauuu

SEQ ID NO: 398497 - RNA, 19 nt, Artificial Sequence
  Description of Artificial Sequence: Synthetic oligonucleotide
agcagaauauagaaauauu

SEQ ID NO: 398498 - RNA, 19 nt, Artificial Sequence
  Description of Artificial Sequence: Synthetic oligonucleotide
ugcugcacgugaacugccu

SEQ ID NO: 398499 - RNA, 19 nt, Artificial Sequence
  Description of Artificial Sequence: Synthetic oligonucleotide
cauuuaugcagauuugcuu

SEQ ID NO: 398500 - RNA, 19 nt, Artificial Sequence
  Description of Artificial Sequence: Synthetic oligonucleotide
cuucuaacgaugacgguau

SEQ ID NO: 398501 - RNA, 19 nt, Artificial Sequence
  Description of Artificial Sequence: Synthetic oligonucleotide
caagaccugaccaggaggu

SEQ ID NO: 398502 - RNA, 19 nt, Artificial Sequence
  Description of Artificial Sequence: Synthetic oligonucleotide
uugcaacgaucaucugcag

SEQ ID NO: 398503 - RNA, 19 nt, Artificial Sequence
  Description of Artificial Sequence: Synthetic oligonucleotide
ugcacgugaacugccuccu

SEQ ID NO: 398504 - RNA, 19 nt, Artificial Sequence
  Description of Artificial Sequence: Synthetic oligonucleotide
guggcggcaagaccugacc

SEQ ID NO: 398505 - RNA, 19 nt, Artificial Sequence
  Description of Artificial Sequence: Synthetic oligonucleotide
uagcacuacuugagauggc

SEQ ID NO: 398506 - RNA, 19 nt, Artificial Sequence
  Description of Artificial Sequence: Synthetic oligonucleotide
cauagucaccccuaucaua

SEQ ID NO: 398507 - RNA, 19 nt, Artificial Sequence
  Description of Artificial Sequence: Synthetic oligonucleotide
aagaccugaccaggaggug

SEQ ID NO: 398508 - RNA, 19 nt, Artificial Sequence
  Description of Artificial Sequence: Synthetic oligonucleotide
gcaacgaucaucugcagau

SEQ ID NO: 398509 - RNA, 19 nt, Artificial Sequence
  Description of Artificial Sequence: Synthetic oligonucleotide
ucccgugaucuacuauggu

SEQ ID NO: 398510 - RNA, 19 nt, Artificial Sequence
  Description of Artificial Sequence: Synthetic oligonucleotide
guggacgugguggagucug

SEQ ID NO: 398511 - RNA, 19 nt, Artificial Sequence
  Description of Artificial Sequence: Synthetic oligonucleotide
cuacaucuauuguaaucaa

SEQ ID NO: 398512 - RNA, 19 nt, Artificial Sequence
  Description of Artificial Sequence: Synthetic oligonucleotide
gagggccguagccuggaac

SEQ ID NO: 398513 - RNA, 19 nt, Artificial Sequence
  Description of Artificial Sequence: Synthetic oligonucleotide
ggcaagaccugaccaggag

SEQ ID NO: 398514 - RNA, 19 nt, Artificial Sequence
  Description of Artificial Sequence: Synthetic oligonucleotide
gcacuagcaucagacacag

SEQ ID NO: 398515 - RNA, 19 nt, Artificial Sequence
  Description of Artificial Sequence: Synthetic oligonucleotide
uuaugacgccgacucuuuu

SEQ ID NO: 398516 - RNA, 19 nt, Artificial Sequence
  Description of Artificial Sequence: Synthetic oligonucleotide
cuaucauaugguggagguc

SEQ ID NO: 398517 - RNA, 19 nt, Artificial Sequence
  Description of Artificial Sequence: Synthetic oligonucleotide
gucgaggugggaaggggcc

SEQ ID NO: 398518 - RNA, 19 nt, Artificial Sequence
  Description of Artificial Sequence: Synthetic oligonucleotide
uagucaccccuaucauaug

SEQ ID NO: 398519 - RNA, 19 nt, Artificial Sequence
  Description of Artificial Sequence: Synthetic oligonucleotide
aaccaguaauaaaguugca

SEQ ID NO: 398520 - RNA, 19 nt, Artificial Sequence
  Description of Artificial Sequence: Synthetic oligonucleotide
cugugucaaaucagaauua

SEQ ID NO: 398521 - RNA, 19 nt, Artificial Sequence
  Description of Artificial Sequence: Synthetic oligonucleotide
acuuugcaacgaucaucug

SEQ ID NO: 398522 - RNA, 19 nt, Artificial Sequence
  Description of Artificial Sequence: Synthetic oligonucleotide
accucgacuaucugauguu

SEQ ID NO: 398523 - RNA, 19 nt, Artificial Sequence
  Description of Artificial Sequence: Synthetic oligonucleotide
gauguuggcaugccacuau

SEQ ID NO: 398524 - RNA, 19 nt, Artificial Sequence
  Description of Artificial Sequence: Synthetic oligonucleotide
ugacgccgacucuuuuccc

SEQ ID NO: 398525 - RNA, 19 nt, Artificial Sequence
  Description of Artificial Sequence: Synthetic oligonucleotide
ucucuacuccgagauuuau

SEQ ID NO: 398526 - RNA, 19 nt, Artificial Sequence
  Description of Artificial Sequence: Synthetic oligonucleotide
acccaacggagguugccca

SEQ ID NO: 398527 - RNA, 19 nt, Artificial Sequence
  Description of Artificial Sequence: Synthetic oligonucleotide
agcuucuaacgaugacggu

SEQ ID NO: 398528 - RNA, 19 nt, Artificial Sequence
  Description of Artificial Sequence: Synthetic oligonucleotide
cuugaucguucacgucuug

SEQ ID NO: 398529 - RNA, 19 nt, Artificial Sequence
  Description of Artificial Sequence: Synthetic oligonucleotide
auggcccgauuucuauuca

SEQ ID NO: 398530 - RNA, 19 nt, Artificial Sequence
  Description of Artificial Sequence: Synthetic oligonucleotide
gcuucuaacgaugacggua

SEQ ID NO: 398531 - RNA, 19 nt, Artificial Sequence
  Description of Artificial Sequence: Synthetic oligonucleotide
uggacccaacggagguugc

SEQ ID NO: 398532 - RNA, 19 nt, Artificial Sequence
  Description of Artificial Sequence: Synthetic oligonucleotide
cuccgagauuuaugacgcc

SEQ ID NO: 398533 - RNA, 19 nt, Artificial Sequence
  Description of Artificial Sequence: Synthetic oligonucleotide
acgaucaucugcagauacu

SEQ ID NO: 398534 - RNA, 19 nt, Artificial Sequence
  Description of Artificial Sequence: Synthetic oligonucleotide
acgccgacucuuuucccgu

SEQ ID NO: 398535 - RNA, 19 nt, Artificial Sequence
  Description of Artificial Sequence: Synthetic oligonucleotide
guagagcuacugguuacca

SEQ ID NO: 398536 - RNA, 19 nt, Artificial Sequence
  Description of Artificial Sequence: Synthetic oligonucleotide
caaaaucaagggcgagaca

SEQ ID NO: 398537 - RNA, 19 nt, Artificial Sequence
  Description of Artificial Sequence: Synthetic oligonucleotide
auggcgaucucuacuccga

SEQ ID NO: 398538 - RNA, 19 nt, Artificial Sequence
  Description of Artificial Sequence: Synthetic oligonucleotide
gcccgauuucuauucauga

SEQ ID NO: 398539 - RNA, 19 nt, Artificial Sequence
  Description of Artificial Sequence: Synthetic oligonucleotide
cugaacgcaagauuagauu

SEQ ID NO: 398540 - RNA, 19 nt, Artificial Sequence
  Description of Artificial Sequence: Synthetic oligonucleotide
cacccuauugcaaugcuuu

SEQ ID NO: 398541 - RNA, 19 nt, Artificial Sequence
  Description of Artificial Sequence: Synthetic oligonucleotide
uggcccgauuucuauucau

SEQ ID NO: 398542 - RNA, 19 nt, Artificial Sequence
  Description of Artificial Sequence: Synthetic oligonucleotide
cucuuaaaugcuagcaguu

SEQ ID NO: 398543 - RNA, 19 nt, Artificial Sequence
  Description of Artificial Sequence: Synthetic oligonucleotide
gcuagcaguucacaauuaa

SEQ ID NO: 398544 - RNA, 19 nt, Artificial Sequence
  Description of Artificial Sequence: Synthetic oligonucleotide
gaacagccccugggaaacg

SEQ ID NO: 398545 - RNA, 19 nt, Artificial Sequence
  Description of Artificial Sequence: Synthetic oligonucleotide
gagauuuaugacgccgacu

SEQ ID NO: 398546 - RNA, 19 nt, Artificial Sequence
  Description of Artificial Sequence: Synthetic oligonucleotide
agccggauucacaugugga

SEQ ID NO: 398547 - RNA, 19 nt, Artificial Sequence
  Description of Artificial Sequence: Synthetic oligonucleotide
uuuacacaucagccccauu

SEQ ID NO: 398548 - RNA, 19 nt, Artificial Sequence
  Description of Artificial Sequence: Synthetic oligonucleotide
guccugcuagagguggcgg

SEQ ID NO: 398549 - RNA, 19 nt, Artificial Sequence
  Description of Artificial Sequence: Synthetic oligonucleotide
cccaugaagacuguuuguc

SEQ ID NO: 398550 - RNA, 19 nt, Artificial Sequence
  Description of Artificial Sequence: Synthetic oligonucleotide
ccggauucacauguggagc

SEQ ID NO: 398551 - RNA, 19 nt, Artificial Sequence
  Description of Artificial Sequence: Synthetic oligonucleotide
ucgcuauaucugccaaauu

SEQ ID NO: 398552 - RNA, 19 nt, Artificial Sequence
  Description of Artificial Sequence: Synthetic oligonucleotide
cuguagcaaauacaugagu

SEQ ID NO: 398553 - RNA, 19 nt, Artificial Sequence
  Description of Artificial Sequence: Synthetic oligonucleotide
ugacgguauucucgcucuc

SEQ ID NO: 398554 - RNA, 19 nt, Artificial Sequence
  Description of Artificial Sequence: Synthetic oligonucleotide
gguccugcuagagguggcg

SEQ ID NO: 398555 - RNA, 19 nt, Artificial Sequence
  Description of Artificial Sequence: Synthetic oligonucleotide
gcggcaagaccugaccagg

SEQ ID NO: 398556 - RNA, 19 nt, Artificial Sequence
  Description of Artificial Sequence: Synthetic oligonucleotide
guuuauccaugaauccuua

SEQ ID NO: 398557 - RNA, 19 nt, Artificial Sequence
  Description of Artificial Sequence: Synthetic oligonucleotide
uacuugagauggcccgauu

SEQ ID NO: 398558 - RNA, 19 nt, Artificial Sequence
  Description of Artificial Sequence: Synthetic oligonucleotide
acccuauugcaaugcuuuu

SEQ ID NO: 398559 - RNA, 19 nt, Artificial Sequence
  Description of Artificial Sequence: Synthetic oligonucleotide
acgacaggauucugaccau

SEQ ID NO: 398560 - RNA, 19 nt, Artificial Sequence
  Description of Artificial Sequence: Synthetic oligonucleotide
uucuaacgaugacgguauu

SEQ ID NO: 398561 - RNA, 19 nt, Artificial Sequence
  Description of Artificial Sequence: Synthetic oligonucleotide
ucucggucgcgcucccggu

SEQ ID NO: 398562 - RNA, 19 nt, Artificial Sequence
  Description of Artificial Sequence: Synthetic oligonucleotide
agcuacugguuaccauuua

SEQ ID NO: 398563 - RNA, 19 nt, Artificial Sequence
  Description of Artificial Sequence: Synthetic oligonucleotide
acgcaagauuagauugaug

SEQ ID NO: 398564 - RNA, 19 nt, Artificial Sequence
  Description of Artificial Sequence: Synthetic oligonucleotide
cuauuaguugguggaggaa

SEQ ID NO: 398565 - RNA, 19 nt, Artificial Sequence
  Description of Artificial Sequence: Synthetic oligonucleotide
gcaaaucccuuugauuguc

SEQ ID NO: 398566 - RNA, 19 nt, Artificial Sequence
  Description of Artificial Sequence: Synthetic oligonucleotide
ggucgaggugggaaggggc

SEQ ID NO: 398567 - RNA, 19 nt, Artificial Sequence
  Description of Artificial Sequence: Synthetic oligonucleotide
ggcccgauuucuauucaug

SEQ ID NO: 398568 - RNA, 19 nt, Artificial Sequence
  Description of Artificial Sequence: Synthetic oligonucleotide
ggcggucuccucgauuggg

SEQ ID NO: 398569 - RNA, 19 nt, Artificial Sequence
  Description of Artificial Sequence: Synthetic oligonucleotide
gagucacgacaggauucug

SEQ ID NO: 398570 - RNA, 19 nt, Artificial Sequence
  Description of Artificial Sequence: Synthetic oligonucleotide
ccacuauuaguugguggag

SEQ ID NO: 398571 - RNA, 19 nt, Artificial Sequence
  Description of Artificial Sequence: Synthetic oligonucleotide
ggccguagccuggaacugg

SEQ ID NO: 398572 - RNA, 19 nt, Artificial Sequence
  Description of Artificial Sequence: Synthetic oligonucleotide
ggacuuggacucaauucca

SEQ ID NO: 398573 - RNA, 19 nt, Artificial Sequence
  Description of Artificial Sequence: Synthetic oligonucleotide
gcgaucucuacuccgagau

SEQ ID NO: 398574 - RNA, 19 nt, Artificial Sequence
  Description of Artificial Sequence: Synthetic oligonucleotide
acacccuauugcaaugcuu

SEQ ID NO: 398575 - RNA, 19 nt, Artificial Sequence
  Description of Artificial Sequence: Synthetic oligonucleotide
ucggccauaugggucuguu

SEQ ID NO: 398576 - RNA, 19 nt, Artificial Sequence
  Description of Artificial Sequence: Synthetic oligonucleotide
cacuagcaucagacacagc

SEQ ID NO: 398577 - RNA, 19 nt, Artificial Sequence
  Description of Artificial Sequence: Synthetic oligonucleotide
uguccccaccgggaacagc

SEQ ID NO: 398578 - RNA, 19 nt, Artificial Sequence
  Description of Artificial Sequence: Synthetic oligonucleotide
ccgagauuuaugacgccga

SEQ ID NO: 398579 - RNA, 19 nt, Artificial Sequence
  Description of Artificial Sequence: Synthetic oligonucleotide
ggcgaucucuacuccgaga

SEQ ID NO: 398580 - RNA, 19 nt, Artificial Sequence
  Description of Artificial Sequence: Synthetic oligonucleotide
gcuacugguuaccauuuau

SEQ ID NO: 398581 - RNA, 19 nt, Artificial Sequence
  Description of Artificial Sequence: Synthetic oligonucleotide
ccuauccuaauaucaaaau

SEQ ID NO: 398582 - RNA, 19 nt, Artificial Sequence
  Description of Artificial Sequence: Synthetic oligonucleotide
ccucgacuaucugauguug

SEQ ID NO: 398583 - RNA, 19 nt, Artificial Sequence
  Description of Artificial Sequence: Synthetic oligonucleotide
cgagauuuaugacgccgac

SEQ ID NO: 398584 - RNA, 19 nt, Artificial Sequence
  Description of Artificial Sequence: Synthetic oligonucleotide
ggaccucgacuaucugaug

SEQ ID NO: 398585 - RNA, 19 nt, Artificial Sequence
  Description of Artificial Sequence: Synthetic oligonucleotide
auuguccauuugcccgauu

SEQ ID NO: 398586 - RNA, 19 nt, Artificial Sequence
  Description of Artificial Sequence: Synthetic oligonucleotide
caccgggaacagccccugg

SEQ ID NO: 398587 - RNA, 19 nt, Artificial Sequence
  Description of Artificial Sequence: Synthetic oligonucleotide
gcugcacgugaacugccuc

SEQ ID NO: 398588 - RNA, 19 nt, Artificial Sequence
  Description of Artificial Sequence: Synthetic oligonucleotide
ggacccaacggagguugcc

SEQ ID NO: 398589 - RNA, 19 nt, Artificial Sequence
  Description of Artificial Sequence: Synthetic oligonucleotide
ggcgagacacuuaauuggu

SEQ ID NO: 398590 - RNA, 19 nt, Artificial Sequence
  Description of Artificial Sequence: Synthetic oligonucleotide
agcuucacucaaagguguu

SEQ ID NO: 398591 - RNA, 19 nt, Artificial Sequence
  Description of Artificial Sequence: Synthetic oligonucleotide
cgcuauaucugccaaauuu

SEQ ID NO: 398592 - RNA, 19 nt, Artificial Sequence
  Description of Artificial Sequence: Synthetic oligonucleotide
cuuacagguucaguucaau

SEQ ID NO: 398593 - RNA, 19 nt, Artificial Sequence
  Description of Artificial Sequence: Synthetic oligonucleotide
gggcggucuccucgauugg

SEQ ID NO: 398594 - RNA, 19 nt, Artificial Sequence
  Description of Artificial Sequence: Synthetic oligonucleotide
gguggcggcaagaccugac

SEQ ID NO: 398595 - RNA, 19 nt, Artificial Sequence
  Description of Artificial Sequence: Synthetic oligonucleotide
gugaucuacuauggucccu

SEQ ID NO: 398596 - RNA, 19 nt, Artificial Sequence
  Description of Artificial Sequence: Synthetic oligonucleotide
ccuuacagguucaguucaa

SEQ ID NO: 398597 - RNA, 19 nt, Artificial Sequence
  Description of Artificial Sequence: Synthetic oligonucleotide
gcauaucugggguguaauu

SEQ ID NO: 398598 - RNA, 19 nt, Artificial Sequence
  Description of Artificial Sequence: Synthetic oligonucleotide
ccaaaagguuguccaggaa

SEQ ID NO: 398599 - RNA, 19 nt, Artificial Sequence
  Description of Artificial Sequence: Synthetic oligonucleotide
ggacgugguggagucuguc

SEQ ID NO: 398600 - RNA, 19 nt, Artificial Sequence
  Description of Artificial Sequence: Synthetic oligonucleotide
gggccguagccuggaacug

SEQ ID NO: 398601 - RNA, 19 nt, Artificial Sequence
  Description of Artificial Sequence: Synthetic oligonucleotide
gguugcccaaaagguuguc

SEQ ID NO: 398602 - RNA, 19 nt, Artificial Sequence
  Description of Artificial Sequence: Synthetic oligonucleotide
ccguagccuggaacuggag

SEQ ID NO: 398603 - RNA, 19 nt, Artificial Sequence
  Description of Artificial Sequence: Synthetic oligonucleotide
cccgauuucuauucaugau

SEQ ID NO: 398604 - RNA, 19 nt, Artificial Sequence
  Description of Artificial Sequence: Synthetic oligonucleotide
ggggcccaaagguggacgu

SEQ ID NO: 398605 - RNA, 19 nt, Artificial Sequence
  Description of Artificial Sequence: Synthetic oligonucleotide
ccucgauugggagguccug

SEQ ID NO: 398606 - RNA, 19 nt, Artificial Sequence
  Description of Artificial Sequence: Synthetic oligonucleotide
gccauaggacuuggacuca

SEQ ID NO: 398607 - RNA, 19 nt, Artificial Sequence
  Description of Artificial Sequence: Synthetic oligonucleotide
cguucacgucuugauccag

SEQ ID NO: 398608 - RNA, 19 nt, Artificial Sequence
  Description of Artificial Sequence: Synthetic oligonucleotide
cggccauaugggucuguug

SEQ ID NO: 398609 - RNA, 19 nt, Artificial Sequence
  Description of Artificial Sequence: Synthetic oligonucleotide
caagggcgagacacuuaau

SEQ ID NO: 398610 - RNA, 19 nt, Artificial Sequence
  Description of Artificial Sequence: Synthetic oligonucleotide
ccaccgggaacagccccug

SEQ ID NO: 398611 - RNA, 19 nt, Artificial Sequence
  Description of Artificial Sequence: Synthetic oligonucleotide
cccaacggagguugcccaa

SEQ ID NO: 398612 - RNA, 19 nt, Artificial Sequence
  Description of Artificial Sequence: Synthetic oligonucleotide
ccaacggagguugcccaaa

SEQ ID NO: 398613 - RNA, 19 nt, Artificial Sequence
  Description of Artificial Sequence: Synthetic oligonucleotide
cggcaagaccugaccagga

SEQ ID NO: 398614 - RNA, 19 nt, Artificial Sequence
  Description of Artificial Sequence: Synthetic oligonucleotide
gcgagacacuuaauugguu

SEQ ID NO: 398615 - RNA, 19 nt, Artificial Sequence
  Description of Artificial Sequence: Synthetic oligonucleotide
gguggacgugguggagucu

SEQ ID NO: 398616 - RNA, 19 nt, Artificial Sequence
  Description of Artificial Sequence: Synthetic oligonucleotide
gucggccauaugggucugu

SEQ ID NO: 398617 - RNA, 19 nt, Artificial Sequence
  Description of Artificial Sequence: Synthetic oligonucleotide
ccgacucuuuucccgugau

SEQ ID NO: 398618 - RNA, 19 nt, Artificial Sequence
  Description of Artificial Sequence: Synthetic oligonucleotide
cgaugacgguauucucgcu

SEQ ID NO: 398619 - RNA, 19 nt, Artificial Sequence
  Description of Artificial Sequence: Synthetic oligonucleotide
ccgaucccugugucucucu

SEQ ID NO: 398620 - RNA, 19 nt, Artificial Sequence
  Description of Artificial Sequence: Synthetic oligonucleotide
cgaucucuacuccgagauu

SEQ ID NO: 398621 - RNA, 19 nt, Artificial Sequence
  Description of Artificial Sequence: Synthetic oligonucleotide
ccccguccucuaccaccuu

SEQ ID NO: 398622 - RNA, 19 nt, Artificial Sequence
  Description of Artificial Sequence: Synthetic oligonucleotide
acuauauugacuuggagcc

SEQ ID NO: 398623 - RNA, 19 nt, Artificial Sequence
  Description of Artificial Sequence: Synthetic oligonucleotide
auaaucauaauguuguggc

SEQ ID NO: 398624 - RNA, 19 nt, Artificial Sequence
  Description of Artificial Sequence: Synthetic oligonucleotide
gaaacuuuaaguuugcuuc

SEQ ID NO: 398625 - RNA, 19 nt, Artificial Sequence
  Description of Artificial Sequence: Synthetic oligonucleotide
ggaauuauaaauuuaaaac

SEQ ID NO: 398626 - RNA, 19 nt, Artificial Sequence
  Description of Artificial Sequence: Synthetic oligonucleotide
aauaaucauaauguugugg

SEQ ID NO: 398627 - RNA, 19 nt, Artificial Sequence
  Description of Artificial Sequence: Synthetic oligonucleotide
uuuauaaacauuuggaauu

SEQ ID NO: 398628 - RNA, 19 nt, Artificial Sequence
  Description of Artificial Sequence: Synthetic oligonucleotide
gacuauauugacuuggagc

SEQ ID NO: 398629 - RNA, 19 nt, Artificial Sequence
  Description of Artificial Sequence: Synthetic oligonucleotide
acaaggaauaaucauaaug

SEQ ID NO: 398630 - RNA, 19 nt, Artificial Sequence
  Description of Artificial Sequence: Synthetic oligonucleotide
ugaacauuguuacaauuag

SEQ ID NO: 398631 - RNA, 19 nt, Artificial Sequence
  Description of Artificial Sequence: Synthetic oligonucleotide
guuacauugucauuuaaac

SEQ ID NO: 398632 - RNA, 19 nt, Artificial Sequence
  Description of Artificial Sequence: Synthetic oligonucleotide
ucugaucguaacuagucgg

SEQ ID NO: 398633 - RNA, 19 nt, Artificial Sequence
  Description of Artificial Sequence: Synthetic oligonucleotide
auauccuugaguuggcugg

SEQ ID NO: 398634 - RNA, 19 nt, Artificial Sequence
  Description of Artificial Sequence: Synthetic oligonucleotide
aaggccuagaucaagaucu

SEQ ID NO: 398635 - RNA, 19 nt, Artificial Sequence
  Description of Artificial Sequence: Synthetic oligonucleotide
uuaagucuuaaaacaacca

SEQ ID NO: 398636 - RNA, 19 nt, Artificial Sequence
  Description of Artificial Sequence: Synthetic oligonucleotide
uuacauugucauuuaaacc

SEQ ID NO: 398637 - RNA, 19 nt, Artificial Sequence
  Description of Artificial Sequence: Synthetic oligonucleotide
ucggaaugaacucugcugc

SEQ ID NO: 398638 - RNA, 19 nt, Artificial Sequence
  Description of Artificial Sequence: Synthetic oligonucleotide
auagauguggaucaugggu

SEQ ID NO: 398639 - RNA, 19 nt, Artificial Sequence
  Description of Artificial Sequence: Synthetic oligonucleotide
gucucuacguuccugacgg

SEQ ID NO: 398640 - RNA, 19 nt, Artificial Sequence
  Description of Artificial Sequence: Synthetic oligonucleotide
aguuuauaaacauuuggaa

SEQ ID NO: 398641 - RNA, 19 nt, Artificial Sequence
  Description of Artificial Sequence: Synthetic oligonucleotide
acauuguuacaauuagagg

SEQ ID NO: 398642 - RNA, 19 nt, Artificial Sequence
  Description of Artificial Sequence: Synthetic oligonucleotide
gagugguauaaccaguggg

SEQ ID NO: 398643 - RNA, 19 nt, Artificial Sequence
  Description of Artificial Sequence: Synthetic oligonucleotide
uuuguugcccauaugccug

SEQ ID NO: 398644 - RNA, 19 nt, Artificial Sequence
  Description of Artificial Sequence: Synthetic oligonucleotide
uuaucagggccacucaugc

SEQ ID NO: 398645 - RNA, 19 nt, Artificial Sequence
  Description of Artificial Sequence: Synthetic oligonucleotide
agugccauauccuuggaca

SEQ ID NO: 398646 - RNA, 19 nt, Artificial Sequence
  Description of Artificial Sequence: Synthetic oligonucleotide
acggugcucgccuuuaucc

SEQ ID NO: 398647 - RNA, 19 nt, Artificial Sequence
  Description of Artificial Sequence: Synthetic oligonucleotide
uccagauagauguggauca

SEQ ID NO: 398648 - RNA, 19 nt, Artificial Sequence
  Description of Artificial Sequence: Synthetic oligonucleotide
auagguguucugcugagag

SEQ ID NO: 398649 - RNA, 19 nt, Artificial Sequence
  Description of Artificial Sequence: Synthetic oligonucleotide
guugacuauauugacuugg

SEQ ID NO: 398650 - RNA, 19 nt, Artificial Sequence
  Description of Artificial Sequence: Synthetic oligonucleotide
gguuccauagcuuuguugc

SEQ ID NO: 398651 - RNA, 19 nt, Artificial Sequence
  Description of Artificial Sequence: Synthetic oligonucleotide
aguugcauaugcugucugc

SEQ ID NO: 398652 - RNA, 19 nt, Artificial Sequence
  Description of Artificial Sequence: Synthetic oligonucleotide
guuaagucuuaaaacaacc

SEQ ID NO: 398653 - RNA, 19 nt, Artificial Sequence
  Description of Artificial Sequence: Synthetic oligonucleotide
caaccaugaacauuguuac

SEQ ID NO: 398654 - RNA, 19 nt, Artificial Sequence
  Description of Artificial Sequence: Synthetic oligonucleotide
agauagauguggaucaugg

SEQ ID NO: 398655 - RNA, 19 nt, Artificial Sequence
  Description of Artificial Sequence: Synthetic oligonucleotide
guuggagugguauaaccag

SEQ ID NO: 398656 - RNA, 19 nt, Artificial Sequence
  Description of Artificial Sequence: Synthetic oligonucleotide
aacuagucggcugugaaga

SEQ ID NO: 398657 - RNA, 19 nt, Artificial Sequence
  Description of Artificial Sequence: Synthetic oligonucleotide
cuguccauagguuccauag

SEQ ID NO: 398658 - RNA, 19 nt, Artificial Sequence
  Description of Artificial Sequence: Synthetic oligonucleotide
auaaaucuggucgucaaug

SEQ ID NO: 398659 - RNA, 19 nt, Artificial Sequence
  Description of Artificial Sequence: Synthetic oligonucleotide
ugcacuguugucagaaucu

SEQ ID NO: 398660 - RNA, 19 nt, Artificial Sequence
  Description of Artificial Sequence: Synthetic oligonucleotide
agugguuugagccugggua

SEQ ID NO: 398661 - RNA, 19 nt, Artificial Sequence
  Description of Artificial Sequence: Synthetic oligonucleotide
aaacaaccauacuuuaaaa

SEQ ID NO: 398662 - RNA, 19 nt, Artificial Sequence
  Description of Artificial Sequence: Synthetic oligonucleotide
uguagguacuguaauccgu

SEQ ID NO: 398663 - RNA, 19 nt, Artificial Sequence
  Description of Artificial Sequence: Synthetic oligonucleotide
ugcgggucugucuaguagg

SEQ ID NO: 398664 - RNA, 19 nt, Artificial Sequence
  Description of Artificial Sequence: Synthetic oligonucleotide
ucgccuuuauccauuuucc

SEQ ID NO: 398665 - RNA, 19 nt, Artificial Sequence
  Description of Artificial Sequence: Synthetic oligonucleotide
gaggauaggauggaggcgc

SEQ ID NO: 398666 - RNA, 19 nt, Artificial Sequence
  Description of Artificial Sequence: Synthetic oligonucleotide
aauugcacuguugucagaa

SEQ ID NO: 398667 - RNA, 19 nt, Artificial Sequence
  Description of Artificial Sequence: Synthetic oligonucleotide
agaaacuuuaaguuugcuu

SEQ ID NO: 398668 - RNA, 19 nt, Artificial Sequence
  Description of Artificial Sequence: Synthetic oligonucleotide
aggaauaaucauaauguug

SEQ ID NO: 398669 - RNA, 19 nt, Artificial Sequence
  Description of Artificial Sequence: Synthetic oligonucleotide
ugacuauauugacuuggag

SEQ ID NO: 398670 - RNA, 19 nt, Artificial Sequence
  Description of Artificial Sequence: Synthetic oligonucleotide
uugacuauauugacuugga

SEQ ID NO: 398671 - RNA, 19 nt, Artificial Sequence
  Description of Artificial Sequence: Synthetic oligonucleotide
acaauuagaggcccucuug

SEQ ID NO: 398672 - RNA, 19 nt, Artificial Sequence
  Description of Artificial Sequence: Synthetic oligonucleotide
guauagcugacaucaguag

SEQ ID NO: 398673 - RNA, 19 nt, Artificial Sequence
  Description of Artificial Sequence: Synthetic oligonucleotide
cuucuuucgggcaagagaa

SEQ ID NO: 398674 - RNA, 19 nt, Artificial Sequence
  Description of Artificial Sequence: Synthetic oligonucleotide
ugcuuaaagaagucugcca

SEQ ID NO: 398675 - RNA, 19 nt, Artificial Sequence
  Description of Artificial Sequence: Synthetic oligonucleotide
ucuauaggaaggccuagau

SEQ ID NO: 398676 - RNA, 19 nt, Artificial Sequence
  Description of Artificial Sequence: Synthetic oligonucleotide
uacuguaauccguggacgc

SEQ ID NO: 398677 - RNA, 19 nt, Artificial Sequence
  Description of Artificial Sequence: Synthetic oligonucleotide
uaacuagucggcugugaag

SEQ ID NO: 398678 - RNA, 19 nt, Artificial Sequence
  Description of Artificial Sequence: Synthetic oligonucleotide
agcacacuaccauuuaacu

SEQ ID NO: 398679 - RNA, 19 nt, Artificial Sequence
  Description of Artificial Sequence: Synthetic oligonucleotide
cugaucguaacuagucggc

SEQ ID NO: 398680 - RNA, 19 nt, Artificial Sequence
  Description of Artificial Sequence: Synthetic oligonucleotide
acuagugggaggcugcugu

SEQ ID NO: 398681 - RNA, 19 nt, Artificial Sequence
  Description of Artificial Sequence: Synthetic oligonucleotide
cucugaucguaacuagucg

SEQ ID NO: 398682 - RNA, 19 nt, Artificial Sequence
  Description of Artificial Sequence: Synthetic oligonucleotide
ugcauucuguucuccaggc

SEQ ID NO: 398683 - RNA, 19 nt, Artificial Sequence
  Description of Artificial Sequence: Synthetic oligonucleotide
cuuggagccugguuguagg

SEQ ID NO: 398684 - RNA, 19 nt, Artificial Sequence
  Description of Artificial Sequence: Synthetic oligonucleotide
acaaccaugaacauuguua

SEQ ID NO: 398685 - RNA, 19 nt, Artificial Sequence
  Description of Artificial Sequence: Synthetic oligonucleotide
uuugagccuggguauagcu

SEQ ID NO: 398686 - RNA, 19 nt, Artificial Sequence
  Description of Artificial Sequence: Synthetic oligonucleotide
auaaacacccaugcuacug

SEQ ID NO: 398687 - RNA, 19 nt, Artificial Sequence
  Description of Artificial Sequence: Synthetic oligonucleotide
uccuugaguuggcugggcg

SEQ ID NO: 398688 - RNA, 19 nt, Artificial Sequence
  Description of Artificial Sequence: Synthetic oligonucleotide
auauccuuggacaggcugg

SEQ ID NO: 398689 - RNA, 19 nt, Artificial Sequence
  Description of Artificial Sequence: Synthetic oligonucleotide
cuguagguacuguaauccg

SEQ ID NO: 398690 - RNA, 19 nt, Artificial Sequence
  Description of Artificial Sequence: Synthetic oligonucleotide
accaugaacauuguuacaa

SEQ ID NO: 398691 - RNA, 19 nt, Artificial Sequence
  Description of Artificial Sequence: Synthetic oligonucleotide
cauaugcggacugagcugc

SEQ ID NO: 398692 - RNA, 19 nt, Artificial Sequence
  Description of Artificial Sequence: Synthetic oligonucleotide
aacugcucugaucguaacu

SEQ ID NO: 398693 - RNA, 19 nt, Artificial Sequence
  Description of Artificial Sequence: Synthetic oligonucleotide
acuguaauccguggacgcc

SEQ ID NO: 398694 - RNA, 19 nt, Artificial Sequence
  Description of Artificial Sequence: Synthetic oligonucleotide
uccggaaaauccuccagac

SEQ ID NO: 398695 - RNA, 19 nt, Artificial Sequence
  Description of Artificial Sequence: Synthetic oligonucleotide
agugguauaaccaguggga

SEQ ID NO: 398696 - RNA, 19 nt, Artificial Sequence
  Description of Artificial Sequence: Synthetic oligonucleotide
cauauccuuggacaggcug

SEQ ID NO: 398697 - RNA, 19 nt, Artificial Sequence
  Description of Artificial Sequence: Synthetic oligonucleotide
ggaauaaucauaauguugu

SEQ ID NO: 398698 - RNA, 19 nt, Artificial Sequence
  Description of Artificial Sequence: Synthetic oligonucleotide
ucgggcaagagaaacuuua

SEQ ID NO: 398699 - RNA, 19 nt, Artificial Sequence
  Description of Artificial Sequence: Synthetic oligonucleotide
ugcucggcuguccauaggu

SEQ ID NO: 398700 - RNA, 19 nt, Artificial Sequence
  Description of Artificial Sequence: Synthetic oligonucleotide
ccuuuauccauuuucccag

SEQ ID NO: 398701 - RNA, 19 nt, Artificial Sequence
  Description of Artificial Sequence: Synthetic oligonucleotide
uugacuagucucagcgggc

SEQ ID NO: 398702 - RNA, 19 nt, Artificial Sequence
  Description of Artificial Sequence: Synthetic oligonucleotide
ucuuucgggcaagagaaac

SEQ ID NO: 398703 - RNA, 19 nt, Artificial Sequence
  Description of Artificial Sequence: Synthetic oligonucleotide
cauaggacacuguugcauc

SEQ ID NO: 398704 - RNA, 19 nt, Artificial Sequence
  Description of Artificial Sequence: Synthetic oligonucleotide
ugucuaguagggccggucu

SEQ ID NO: 398705 - RNA, 19 nt, Artificial Sequence
  Description of Artificial Sequence: Synthetic oligonucleotide
auauccuaggcugggcugg

SEQ ID NO: 398706 - RNA, 19 nt, Artificial Sequence
  Description of Artificial Sequence: Synthetic oligonucleotide
ugaacucugcugcccguag

SEQ ID NO: 398707 - RNA, 19 nt, Artificial Sequence
  Description of Artificial Sequence: Synthetic oligonucleotide
cugguuguaggauccaguc

SEQ ID NO: 398708 - RNA, 19 nt, Artificial Sequence
  Description of Artificial Sequence: Synthetic oligonucleotide
gauggaggcgcggugacug

SEQ ID NO: 398709 - RNA, 19 nt, Artificial Sequence
  Description of Artificial Sequence: Synthetic oligonucleotide
guagcugguaggaggauag

SEQ ID NO: 398710 - RNA, 19 nt, Artificial Sequence
  Description of Artificial Sequence: Synthetic oligonucleotide
ugcacauaaauugcacugu

SEQ ID NO: 398711 - RNA, 19 nt, Artificial Sequence
  Description of Artificial Sequence: Synthetic oligonucleotide
uguuacaauuagaggcccu

SEQ ID NO: 398712 - RNA, 19 nt, Artificial Sequence
  Description of Artificial Sequence: Synthetic oligonucleotide
gaaggccuagaucaagauc

SEQ ID NO: 398713 - RNA, 19 nt, Artificial Sequence
  Description of Artificial Sequence: Synthetic oligonucleotide
ucauaggacacuguugcau

SEQ ID NO: 398714 - RNA, 19 nt, Artificial Sequence
  Description of Artificial Sequence: Synthetic oligonucleotide
uccucguucucucaacguc

SEQ ID NO: 398715 - RNA, 19 nt, Artificial Sequence
  Description of Artificial Sequence: Synthetic oligonucleotide
gcuagauugagguugacua

SEQ ID NO: 398716 - RNA, 19 nt, Artificial Sequence
  Description of Artificial Sequence: Synthetic oligonucleotide
aacuuuaaguuugcuuccu

SEQ ID NO: 398717 - RNA, 19 nt, Artificial Sequence
  Description of Artificial Sequence: Synthetic oligonucleotide
gguacuguaauccguggac

SEQ ID NO: 398718 - RNA, 19 nt, Artificial Sequence
  Description of Artificial Sequence: Synthetic oligonucleotide
cagacuccugcccauaaac

SEQ ID NO: 398719 - RNA, 19 nt, Artificial Sequence
  Description of Artificial Sequence: Synthetic oligonucleotide
cauucuguucuccaggcga

SEQ ID NO: 398720 - RNA, 19 nt, Artificial Sequence
  Description of Artificial Sequence: Synthetic oligonucleotide
uggucuuguaggugcagug

SEQ ID NO: 398721 - RNA, 19 nt, Artificial Sequence
  Description of Artificial Sequence: Synthetic oligonucleotide
guagguacuguaauccgug

SEQ ID NO: 398722 - RNA, 19 nt, Artificial Sequence
  Description of Artificial Sequence: Synthetic oligonucleotide
uguugacuauauugacuug

SEQ ID NO: 398723 - RNA, 19 nt, Artificial Sequence
  Description of Artificial Sequence: Synthetic oligonucleotide
aaccauuccacagcagccu

SEQ ID NO: 398724 - RNA, 19 nt, Artificial Sequence
  Description of Artificial Sequence: Synthetic oligonucleotide
ugcucugaucguaacuagu

SEQ ID NO: 398725 - RNA, 19 nt, Artificial Sequence
  Description of Artificial Sequence: Synthetic oligonucleotide
gucucagcgggcuuguuac

SEQ ID NO: 398726 - RNA, 19 nt, Artificial Sequence
  Description of Artificial Sequence: Synthetic oligonucleotide
uuguugaccauagcuacuc

SEQ ID NO: 398727 - RNA, 19 nt, Artificial Sequence
  Description of Artificial Sequence: Synthetic oligonucleotide
ugguuguaggauccagucu

SEQ ID NO: 398728 - RNA, 19 nt, Artificial Sequence
  Description of Artificial Sequence: Synthetic oligonucleotide
cucggugcuggacauuucc

SEQ ID NO: 398729 - RNA, 19 nt, Artificial Sequence
  Description of Artificial Sequence: Synthetic oligonucleotide
aucauaauguuguggccaa

SEQ ID NO: 398730 - RNA, 19 nt, Artificial Sequence
  Description of Artificial Sequence: Synthetic oligonucleotide
aguuggagugguauaacca

SEQ ID NO: 398731 - RNA, 19 nt, Artificial Sequence
  Description of Artificial Sequence: Synthetic oligonucleotide
acuaaaguacagacaagga

SEQ ID NO: 398732 - RNA, 19 nt, Artificial Sequence
  Description of Artificial Sequence: Synthetic oligonucleotide
uacaauuagaggcccucuu

SEQ ID NO: 398733 - RNA, 19 nt, Artificial Sequence
  Description of Artificial Sequence: Synthetic oligonucleotide
ugccauaugcggacugagc

SEQ ID NO: 398734 - RNA, 19 nt, Artificial Sequence
  Description of Artificial Sequence: Synthetic oligonucleotide
cauauccuaggcugggcug

SEQ ID NO: 398735 - RNA, 19 nt, Artificial Sequence
  Description of Artificial Sequence: Synthetic oligonucleotide
gggucugucuaguagggcc

SEQ ID NO: 398736 - RNA, 19 nt, Artificial Sequence
  Description of Artificial Sequence: Synthetic oligonucleotide
gugccauauccuuggacag

SEQ ID NO: 398737 - RNA, 19 nt, Artificial Sequence
  Description of Artificial Sequence: Synthetic oligonucleotide
aggaucuauaggaaggccu

SEQ ID NO: 398738 - RNA, 19 nt, Artificial Sequence
  Description of Artificial Sequence: Synthetic oligonucleotide
auaagaaguugcauaugcu

SEQ ID NO: 398739 - RNA, 19 nt, Artificial Sequence
  Description of Artificial Sequence: Synthetic oligonucleotide
ugcgcauauccuugaguug

SEQ ID NO: 398740 - RNA, 19 nt, Artificial Sequence
  Description of Artificial Sequence: Synthetic oligonucleotide
auaugcugucugcccauag

SEQ ID NO: 398741 - RNA, 19 nt, Artificial Sequence
  Description of Artificial Sequence: Synthetic oligonucleotide
auccguggacgccauuuuc

SEQ ID NO: 398742 - RNA, 19 nt, Artificial Sequence
  Description of Artificial Sequence: Synthetic oligonucleotide
gaucuauaggaaggccuag

SEQ ID NO: 398743 - RNA, 19 nt, Artificial Sequence
  Description of Artificial Sequence: Synthetic oligonucleotide
guaacuagugggaggcugc

SEQ ID NO: 398744 - RNA, 19 nt, Artificial Sequence
  Description of Artificial Sequence: Synthetic oligonucleotide
gcuuguuaccauccugugg

SEQ ID NO: 398745 - RNA, 19 nt, Artificial Sequence
  Description of Artificial Sequence: Synthetic oligonucleotide
gcgcauauccuugaguugg

SEQ ID NO: 398746 - RNA, 19 nt, Artificial Sequence
  Description of Artificial Sequence: Synthetic oligonucleotide
guuaucagggccacucaug

SEQ ID NO: 398747 - RNA, 19 nt, Artificial Sequence
  Description of Artificial Sequence: Synthetic oligonucleotide
uuucgggcaagagaaacuu

SEQ ID NO: 398748 - RNA, 19 nt, Artificial Sequence
  Description of Artificial Sequence: Synthetic oligonucleotide
uuacaauuagaggcccucu

SEQ ID NO: 398749 - RNA, 19 nt, Artificial Sequence
  Description of Artificial Sequence: Synthetic oligonucleotide
guuacaauuagaggcccuc

SEQ ID NO: 398750 - RNA, 19 nt, Artificial Sequence
  Description of Artificial Sequence: Synthetic oligonucleotide
acccaugcuacuggggugg

SEQ ID NO: 398751 - RNA, 19 nt, Artificial Sequence
  Description of Artificial Sequence: Synthetic oligonucleotide
gacaaccccacacugcuua

SEQ ID NO: 398752 - RNA, 19 nt, Artificial Sequence
  Description of Artificial Sequence: Synthetic oligonucleotide
acugcucugaucguaacua

SEQ ID NO: 398753 - RNA, 19 nt, Artificial Sequence
  Description of Artificial Sequence: Synthetic oligonucleotide
auaggauggaggcgcggug

SEQ ID NO: 398754 - RNA, 19 nt, Artificial Sequence
  Description of Artificial Sequence: Synthetic oligonucleotide
uuccugacggugcucgccu

SEQ ID NO: 398755 - RNA, 19 nt, Artificial Sequence
  Description of Artificial Sequence: Synthetic oligonucleotide
cugggcugguuauaacccc

SEQ ID NO: 398756 - RNA, 19 nt, Artificial Sequence
  Description of Artificial Sequence: Synthetic oligonucleotide
gcauaagaggccuggguug

SEQ ID NO: 398757 - RNA, 19 nt, Artificial Sequence
  Description of Artificial Sequence: Synthetic oligonucleotide
ugaucguaacuagucggcu

SEQ ID NO: 398758 - RNA, 19 nt, Artificial Sequence
  Description of Artificial Sequence: Synthetic oligonucleotide
gguugacuagucucagcgg

SEQ ID NO: 398759 - RNA, 19 nt, Artificial Sequence
  Description of Artificial Sequence: Synthetic oligonucleotide
uguuaccauccuguggucu

SEQ ID NO: 398760 - RNA, 19 nt, Artificial Sequence
  Description of Artificial Sequence: Synthetic oligonucleotide
uggugucauaagcaccagu

SEQ ID NO: 398761 - RNA, 19 nt, Artificial Sequence
  Description of Artificial Sequence: Synthetic oligonucleotide
aauccguggacgccauuuu

SEQ ID NO: 398762 - RNA, 19 nt, Artificial Sequence
  Description of Artificial Sequence: Synthetic oligonucleotide
ggucucuacguuccugacg

SEQ ID NO: 398763 - RNA, 19 nt, Artificial Sequence
  Description of Artificial Sequence: Synthetic oligonucleotide
guaacuagucggcugugaa

SEQ ID NO: 398764 - RNA, 19 nt, Artificial Sequence
  Description of Artificial Sequence: Synthetic oligonucleotide
acagcccggauugggacac

SEQ ID NO: 398765 - RNA, 19 nt, Artificial Sequence
  Description of Artificial Sequence: Synthetic oligonucleotide
uaauccguggacgccauuu

SEQ ID NO: 398766 - RNA, 19 nt, Artificial Sequence
  Description of Artificial Sequence: Synthetic oligonucleotide
uccauagguuccauagcuu

SEQ ID NO: 398767 - RNA, 19 nt, Artificial Sequence
  Description of Artificial Sequence: Synthetic oligonucleotide
cucgaucaccacccggagg

SEQ ID NO: 398768 - RNA, 19 nt, Artificial Sequence
  Description of Artificial Sequence: Synthetic oligonucleotide
cugcucugaucguaacuag

SEQ ID NO: 398769 - RNA, 19 nt, Artificial Sequence
  Description of Artificial Sequence: Synthetic oligonucleotide
ucggugcuggacauuuccu

SEQ ID NO: 398770 - RNA, 19 nt, Artificial Sequence
  Description of Artificial Sequence: Synthetic oligonucleotide
ucggaacauuccuccagga

SEQ ID NO: 398771 - RNA, 19 nt, Artificial Sequence
  Description of Artificial Sequence: Synthetic oligonucleotide
gauacugagcaugcucaca

SEQ ID NO: 398772 - RNA, 19 nt, Artificial Sequence
  Description of Artificial Sequence: Synthetic oligonucleotide
acaucaguaggcuguccau

SEQ ID NO: 398773 - RNA, 19 nt, Artificial Sequence
  Description of Artificial Sequence: Synthetic oligonucleotide
uccugucggaaugaacucu

SEQ ID NO: 398774 - RNA, 19 nt, Artificial Sequence
  Description of Artificial Sequence: Synthetic oligonucleotide
cuugcacauaaauugcacu

SEQ ID NO: 398775 - RNA, 19 nt, Artificial Sequence
  Description of Artificial Sequence: Synthetic oligonucleotide
cuccacgaagugguggugg

SEQ ID NO: 398776 - RNA, 19 nt, Artificial Sequence
  Description of Artificial Sequence: Synthetic oligonucleotide
accacgguccauaagccca

SEQ ID NO: 398777 - RNA, 19 nt, Artificial Sequence
  Description of Artificial Sequence: Synthetic oligonucleotide
aggcuuauugaagccaccu

SEQ ID NO: 398778 - RNA, 19 nt, Artificial Sequence
  Description of Artificial Sequence: Synthetic oligonucleotide
uccccgcaugccaccaggg

SEQ ID NO: 398779 - RNA, 19 nt, Artificial Sequence
  Description of Artificial Sequence: Synthetic oligonucleotide
uguaauccguggacgccau

SEQ ID NO: 398780 - RNA, 19 nt, Artificial Sequence
  Description of Artificial Sequence: Synthetic oligonucleotide
aguaacugcucugaucgua

SEQ ID NO: 398781 - RNA, 19 nt, Artificial Sequence
  Description of Artificial Sequence: Synthetic oligonucleotide
uaacugcucugaucguaac

SEQ ID NO: 398782 - RNA, 19 nt, Artificial Sequence
  Description of Artificial Sequence: Synthetic oligonucleotide
gguaacuagugggaggcug

SEQ ID NO: 398783 - RNA, 19 nt, Artificial Sequence
  Description of Artificial Sequence: Synthetic oligonucleotide
agcugguaggaggauagga

SEQ ID NO: 398784 - RNA, 19 nt, Artificial Sequence
  Description of Artificial Sequence: Synthetic oligonucleotide
acgaaguggugguggcauc

SEQ ID NO: 398785 - RNA, 19 nt, Artificial Sequence
  Description of Artificial Sequence: Synthetic oligonucleotide
augccuggguggucugcgc

SEQ ID NO: 398786 - RNA, 19 nt, Artificial Sequence
  Description of Artificial Sequence: Synthetic oligonucleotide
caggcgaaguucugguuuc

SEQ ID NO: 398787 - RNA, 19 nt, Artificial Sequence
  Description of Artificial Sequence: Synthetic oligonucleotide
cugcgggucugucuaguag

SEQ ID NO: 398788 - RNA, 19 nt, Artificial Sequence
  Description of Artificial Sequence: Synthetic oligonucleotide
cugucggaaugaacucugc

SEQ ID NO: 398789 - RNA, 19 nt, Artificial Sequence
  Description of Artificial Sequence: Synthetic oligonucleotide
caggcuuauugaagccacc

SEQ ID NO: 398790 - RNA, 19 nt, Artificial Sequence
  Description of Artificial Sequence: Synthetic oligonucleotide
uguggucuuguaggugcag

SEQ ID NO: 398791 - RNA, 19 nt, Artificial Sequence
  Description of Artificial Sequence: Synthetic oligonucleotide
gcggugacuggcugcaugg

SEQ ID NO: 398792 - RNA, 19 nt, Artificial Sequence
  Description of Artificial Sequence: Synthetic oligonucleotide
cagauagauguggaucaug

SEQ ID NO: 398793 - RNA, 19 nt, Artificial Sequence
  Description of Artificial Sequence: Synthetic oligonucleotide
agucucagcgggcuuguua

SEQ ID NO: 398794 - RNA, 19 nt, Artificial Sequence
  Description of Artificial Sequence: Synthetic oligonucleotide
uucuuucgggcaagagaaa

SEQ ID NO: 398795 - RNA, 19 nt, Artificial Sequence
  Description of Artificial Sequence: Synthetic oligonucleotide
cucccaugcgucccauggg

SEQ ID NO: 398796 - RNA, 19 nt, Artificial Sequence
  Description of Artificial Sequence: Synthetic oligonucleotide
aacuagugggaggcugcug

SEQ ID NO: 398797 - RNA, 19 nt, Artificial Sequence
  Description of Artificial Sequence: Synthetic oligonucleotide
gguauagcugacaucagua

SEQ ID NO: 398798 - RNA, 19 nt, Artificial Sequence
  Description of Artificial Sequence: Synthetic oligonucleotide
ggaggauaggauggaggcg

SEQ ID NO: 398799 - RNA, 19 nt, Artificial Sequence
  Description of Artificial Sequence: Synthetic oligonucleotide
cauggguugcccaguucuc

SEQ ID NO: 398800 - RNA, 19 nt, Artificial Sequence
  Description of Artificial Sequence: Synthetic oligonucleotide
cagugccauauccuuggac

SEQ ID NO: 398801 - RNA, 19 nt, Artificial Sequence
  Description of Artificial Sequence: Synthetic oligonucleotide
aggcgaaguucugguuucc

SEQ ID NO: 398802 - RNA, 19 nt, Artificial Sequence
  Description of Artificial Sequence: Synthetic oligonucleotide
auaaccagugggaggcugu

SEQ ID NO: 398803 - RNA, 19 nt, Artificial Sequence
  Description of Artificial Sequence: Synthetic oligonucleotide
uaacuagugggaggcugcu

SEQ ID NO: 398804 - RNA, 19 nt, Artificial Sequence
  Description of Artificial Sequence: Synthetic oligonucleotide
caccucgguccauuccacg

SEQ ID NO: 398805 - RNA, 19 nt, Artificial Sequence
  Description of Artificial Sequence: Synthetic oligonucleotide
guaacugcucugaucguaa

SEQ ID NO: 398806 - RNA, 19 nt, Artificial Sequence
  Description of Artificial Sequence: Synthetic oligonucleotide
gcugggcugguuauaaccc

SEQ ID NO: 398807 - RNA, 19 nt, Artificial Sequence
  Description of Artificial Sequence: Synthetic oligonucleotide
uuguuaccauccugugguc

SEQ ID NO: 398808 - RNA, 19 nt, Artificial Sequence
  Description of Artificial Sequence: Synthetic oligonucleotide
ggagccugguuguaggauc

SEQ ID NO: 398809 - RNA, 19 nt, Artificial Sequence
  Description of Artificial Sequence: Synthetic oligonucleotide
uucgggcaagagaaacuuu

SEQ ID NO: 398810 - RNA, 19 nt, Artificial Sequence
  Description of Artificial Sequence: Synthetic oligonucleotide
guccugucggaaugaacuc

SEQ ID NO: 398811 - RNA, 19 nt, Artificial Sequence
  Description of Artificial Sequence: Synthetic oligonucleotide
gguccugucggaaugaacu

SEQ ID NO: 398812 - RNA, 19 nt, Artificial Sequence
  Description of Artificial Sequence: Synthetic oligonucleotide
cuuggcuguagguacugua

SEQ ID NO: 398813 - RNA, 19 nt, Artificial Sequence
  Description of Artificial Sequence: Synthetic oligonucleotide
uggcaguugguggaucuuc

SEQ ID NO: 398814 - RNA, 19 nt, Artificial Sequence
  Description of Artificial Sequence: Synthetic oligonucleotide
gucgucaaugcagcucugc

SEQ ID NO: 398815 - RNA, 19 nt, Artificial Sequence
  Description of Artificial Sequence: Synthetic oligonucleotide
acacuaccauuuaacuugu

SEQ ID NO: 398816 - RNA, 19 nt, Artificial Sequence
  Description of Artificial Sequence: Synthetic oligonucleotide
guguaagcacuguagcccu

SEQ ID NO: 398817 - RNA, 19 nt, Artificial Sequence
  Description of Artificial Sequence: Synthetic oligonucleotide
cugcccauagguggcagug

SEQ ID NO: 398818 - RNA, 19 nt, Artificial Sequence
  Description of Artificial Sequence: Synthetic oligonucleotide
ucauaauguuguggccaac

SEQ ID NO: 398819 - RNA, 19 nt, Artificial Sequence
  Description of Artificial Sequence: Synthetic oligonucleotide
gucugucuaguagggccgg

SEQ ID NO: 398820 - RNA, 19 nt, Artificial Sequence
  Description of Artificial Sequence: Synthetic oligonucleotide
ccugucggaaugaacucug

SEQ ID NO: 398821 - RNA, 19 nt, Artificial Sequence
  Description of Artificial Sequence: Synthetic oligonucleotide
gaucaagaucugguccuuc

SEQ ID NO: 398822 - RNA, 19 nt, Artificial Sequence
  Description of Artificial Sequence: Synthetic oligonucleotide
guggaucauggguugccca

SEQ ID NO: 398823 - RNA, 19 nt, Artificial Sequence
  Description of Artificial Sequence: Synthetic oligonucleotide
cuguaauccguggacgcca

SEQ ID NO: 398824 - RNA, 19 nt, Artificial Sequence
  Description of Artificial Sequence: Synthetic oligonucleotide
cccggauugggacacugcc

SEQ ID NO: 398825 - RNA, 19 nt, Artificial Sequence
  Description of Artificial Sequence: Synthetic oligonucleotide
cuagugggaggcugcuguc

SEQ ID NO: 398826 - RNA, 19 nt, Artificial Sequence
  Description of Artificial Sequence: Synthetic oligonucleotide
gccauaugcggacugagcu

SEQ ID NO: 398827 - RNA, 19 nt, Artificial Sequence
  Description of Artificial Sequence: Synthetic oligonucleotide
ccgugcuagauugagguug

SEQ ID NO: 398828 - RNA, 19 nt, Artificial Sequence
  Description of Artificial Sequence: Synthetic oligonucleotide
ugacaucaguaggcugucc

SEQ ID NO: 398829 - RNA, 19 nt, Artificial Sequence
  Description of Artificial Sequence: Synthetic oligonucleotide
aggauaggauggaggcgcg

SEQ ID NO: 398830 - RNA, 19 nt, Artificial Sequence
  Description of Artificial Sequence: Synthetic oligonucleotide
cuuucgggcaagagaaacu

SEQ ID NO: 398831 - RNA, 19 nt, Artificial Sequence
  Description of Artificial Sequence: Synthetic oligonucleotide
accucggaacauuccucca

SEQ ID NO: 398832 - RNA, 19 nt, Artificial Sequence
  Description of Artificial Sequence: Synthetic oligonucleotide
cugcgcauauccuugaguu

SEQ ID NO: 398833 - RNA, 19 nt, Artificial Sequence
  Description of Artificial Sequence: Synthetic oligonucleotide
ucccauuguuaagucuuaa

SEQ ID NO: 398834 - RNA, 19 nt, Artificial Sequence
  Description of Artificial Sequence: Synthetic oligonucleotide
gcucugaucguaacuaguc

SEQ ID NO: 398835 - RNA, 19 nt, Artificial Sequence
  Description of Artificial Sequence: Synthetic oligonucleotide
auucuguucuccaggcgaa

SEQ ID NO: 398836 - RNA, 19 nt, Artificial Sequence
  Description of Artificial Sequence: Synthetic oligonucleotide
ucaugccuccacgaucaaa

SEQ ID NO: 398837 - RNA, 19 nt, Artificial Sequence
  Description of Artificial Sequence: Synthetic oligonucleotide
ccauaugcggacugagcug

SEQ ID NO: 398838 - RNA, 19 nt, Artificial Sequence
  Description of Artificial Sequence: Synthetic oligonucleotide
cuccuuaccuccucguucu

SEQ ID NO: 398839 - RNA, 19 nt, Artificial Sequence
  Description of Artificial Sequence: Synthetic oligonucleotide
ggcuuauugaagccaccuc

SEQ ID NO: 398840 - RNA, 19 nt, Artificial Sequence
  Description of Artificial Sequence: Synthetic oligonucleotide
acgguccauaagcccaccu

SEQ ID NO: 398841 - RNA, 19 nt, Artificial Sequence
  Description of Artificial Sequence: Synthetic oligonucleotide
gaggcgcggugacuggcug

SEQ ID NO: 398842 - RNA, 19 nt, Artificial Sequence
  Description of Artificial Sequence: Synthetic oligonucleotide
cugggcgguguaagcacug

SEQ ID NO: 398843 - RNA, 19 nt, Artificial Sequence
  Description of Artificial Sequence: Synthetic oligonucleotide
gugguuugagccuggguau

SEQ ID NO: 398844 - RNA, 19 nt, Artificial Sequence
  Description of Artificial Sequence: Synthetic oligonucleotide
guaggugcaguggcugcug

SEQ ID NO: 398845 - RNA, 19 nt, Artificial Sequence
  Description of Artificial Sequence: Synthetic oligonucleotide
ccucggaacauuccuccag

SEQ ID NO: 398846 - RNA, 19 nt, Artificial Sequence
  Description of Artificial Sequence: Synthetic oligonucleotide
uaaccagugggaggcuguc

SEQ ID NO: 398847 - RNA, 19 nt, Artificial Sequence
  Description of Artificial Sequence: Synthetic oligonucleotide
auaggaaggccuagaucaa

SEQ ID NO: 398848 - RNA, 19 nt, Artificial Sequence
  Description of Artificial Sequence: Synthetic oligonucleotide
ggccuagaucaagaucugg

SEQ ID NO: 398849 - RNA, 19 nt, Artificial Sequence
  Description of Artificial Sequence: Synthetic oligonucleotide
cucucgagguggcaugcca

SEQ ID NO: 398850 - RNA, 19 nt, Artificial Sequence
  Description of Artificial Sequence: Synthetic oligonucleotide
guuaccauccuguggucuu

SEQ ID NO: 398851 - RNA, 19 nt, Artificial Sequence
  Description of Artificial Sequence: Synthetic oligonucleotide
uggaggcgcggugacuggc

SEQ ID NO: 398852 - RNA, 19 nt, Artificial Sequence
  Description of Artificial Sequence: Synthetic oligonucleotide
cucgggagccucggggucc

SEQ ID NO: 398853 - RNA, 19 nt, Artificial Sequence
  Description of Artificial Sequence: Synthetic oligonucleotide
augcggacugagcugcaua

SEQ ID NO: 398854 - RNA, 19 nt, Artificial Sequence
  Description of Artificial Sequence: Synthetic oligonucleotide
ugacaaccccacacugcuu

SEQ ID NO: 398855 - RNA, 19 nt, Artificial Sequence
  Description of Artificial Sequence: Synthetic oligonucleotide
ggaucuauaggaaggccua

SEQ ID NO: 398856 - RNA, 19 nt, Artificial Sequence
  Description of Artificial Sequence: Synthetic oligonucleotide
cuccgguucucuccugguc

SEQ ID NO: 398857 - RNA, 19 nt, Artificial Sequence
  Description of Artificial Sequence: Synthetic oligonucleotide
caguugguggaucuucaua

SEQ ID NO: 398858 - RNA, 19 nt, Artificial Sequence
  Description of Artificial Sequence: Synthetic oligonucleotide
cugucuaguagggccgguc

SEQ ID NO: 398859 - RNA, 19 nt, Artificial Sequence
  Description of Artificial Sequence: Synthetic oligonucleotide
cucggcuguccauaggugu

SEQ ID NO: 398860 - RNA, 19 nt, Artificial Sequence
  Description of Artificial Sequence: Synthetic oligonucleotide
gguccaccaggcuuauuga

SEQ ID NO: 398861 - RNA, 19 nt, Artificial Sequence
  Description of Artificial Sequence: Synthetic oligonucleotide
cucagcgggcuuguuacca

SEQ ID NO: 398862 - RNA, 19 nt, Artificial Sequence
  Description of Artificial Sequence: Synthetic oligonucleotide
ugguuugagccuggguaua

SEQ ID NO: 398863 - RNA, 19 nt, Artificial Sequence
  Description of Artificial Sequence: Synthetic oligonucleotide
cccgcaugcuguucauugg

SEQ ID NO: 398864 - RNA, 19 nt, Artificial Sequence
  Description of Artificial Sequence: Synthetic oligonucleotide
ucucuacguuccugacggu

SEQ ID NO: 398865 - RNA, 19 nt, Artificial Sequence
  Description of Artificial Sequence: Synthetic oligonucleotide
agaucaagaucugguccuu

SEQ ID NO: 398866 - RNA, 19 nt, Artificial Sequence
  Description of Artificial Sequence: Synthetic oligonucleotide
cagcgcccauuccaccgcg

SEQ ID NO: 398867 - RNA, 19 nt, Artificial Sequence
  Description of Artificial Sequence: Synthetic oligonucleotide
cugcucggcuguccauagg

SEQ ID NO: 398868 - RNA, 19 nt, Artificial Sequence
  Description of Artificial Sequence: Synthetic oligonucleotide
ucugucuaguagggccggu

SEQ ID NO: 398869 - RNA, 19 nt, Artificial Sequence
  Description of Artificial Sequence: Synthetic oligonucleotide
ggguugcccaguucucuug

SEQ ID NO: 398870 - RNA, 19 nt, Artificial Sequence
  Description of Artificial Sequence: Synthetic oligonucleotide
ggcugggcgguguaagcac

SEQ ID NO: 398871 - RNA, 19 nt, Artificial Sequence
  Description of Artificial Sequence: Synthetic oligonucleotide
cacagcccggauugggaca

SEQ ID NO: 398872 - RNA, 19 nt, Artificial Sequence
  Description of Artificial Sequence: Synthetic oligonucleotide
aggcuguccauaagaaguu

SEQ ID NO: 398873 - RNA, 19 nt, Artificial Sequence
  Description of Artificial Sequence: Synthetic oligonucleotide
ccuccacgaucaaaucccc

SEQ ID NO: 398874 - RNA, 19 nt, Artificial Sequence
  Description of Artificial Sequence: Synthetic oligonucleotide
ugggaggcugcuguccaua

SEQ ID NO: 398875 - RNA, 19 nt, Artificial Sequence
  Description of Artificial Sequence: Synthetic oligonucleotide
ggauaggauggaggcgcgg

SEQ ID NO: 398876 - RNA, 19 nt, Artificial Sequence
  Description of Artificial Sequence: Synthetic oligonucleotide
ugggcgguguaagcacugu

SEQ ID NO: 398877 - RNA, 19 nt, Artificial Sequence
  Description of Artificial Sequence: Synthetic oligonucleotide
aggccuagaucaagaucug

SEQ ID NO: 398878 - RNA, 19 nt, Artificial Sequence
  Description of Artificial Sequence: Synthetic oligonucleotide
uccuuaccuccucguucuc

SEQ ID NO: 398879 - RNA, 19 nt, Artificial Sequence
  Description of Artificial Sequence: Synthetic oligonucleotide
caucaguaggcuguccaua

SEQ ID NO: 398880 - RNA, 19 nt, Artificial Sequence
  Description of Artificial Sequence: Synthetic oligonucleotide
cauagguguucugcugaga

SEQ ID NO: 398881 - RNA, 19 nt, Artificial Sequence
  Description of Artificial Sequence: Synthetic oligonucleotide
agguggcaugccaccccgc

SEQ ID NO: 398882 - RNA, 19 nt, Artificial Sequence
  Description of Artificial Sequence: Synthetic oligonucleotide
gagccucgggguccccgug

SEQ ID NO: 398883 - RNA, 19 nt, Artificial Sequence
  Description of Artificial Sequence: Synthetic oligonucleotide
cuauauugacuuggagccu

SEQ ID NO: 398884 - RNA, 19 nt, Artificial Sequence
  Description of Artificial Sequence: Synthetic oligonucleotide
gccuagaucaagaucuggu

SEQ ID NO: 398885 - RNA, 19 nt, Artificial Sequence
  Description of Artificial Sequence: Synthetic oligonucleotide
ucgggagccucgggguccc

SEQ ID NO: 398886 - RNA, 19 nt, Artificial Sequence
  Description of Artificial Sequence: Synthetic oligonucleotide
gguuaucagggccacucau

SEQ ID NO: 398887 - RNA, 19 nt, Artificial Sequence
  Description of Artificial Sequence: Synthetic oligonucleotide
cucacaagggguucccauu

SEQ ID NO: 398888 - RNA, 19 nt, Artificial Sequence
  Description of Artificial Sequence: Synthetic oligonucleotide
cuacuggggugguccuguc

SEQ ID NO: 398889 - RNA, 19 nt, Artificial Sequence
  Description of Artificial Sequence: Synthetic oligonucleotide
ggugccauaugcggacuga

SEQ ID NO: 398890 - RNA, 19 nt, Artificial Sequence
  Description of Artificial Sequence: Synthetic oligonucleotide
ccucgaucaccacccggag

SEQ ID NO: 398891 - RNA, 19 nt, Artificial Sequence
  Description of Artificial Sequence: Synthetic oligonucleotide
aguuggcugggcgguguaa

SEQ ID NO: 398892 - RNA, 19 nt, Artificial Sequence
  Description of Artificial Sequence: Synthetic oligonucleotide
cuacguuccugacggugcu

SEQ ID NO: 398893 - RNA, 19 nt, Artificial Sequence
  Description of Artificial Sequence: Synthetic oligonucleotide
ccacgguccauaagcccac

SEQ ID NO: 398894 - RNA, 19 nt, Artificial Sequence
  Description of Artificial Sequence: Synthetic oligonucleotide
ccggucucuacguuccuga

SEQ ID NO: 398895 - RNA, 19 nt, Artificial Sequence
  Description of Artificial Sequence: Synthetic oligonucleotide
cgcauauccuugaguuggc

SEQ ID NO: 398896 - RNA, 19 nt, Artificial Sequence
  Description of Artificial Sequence: Synthetic oligonucleotide
ccccgugcuagauugaggu

SEQ ID NO: 398897 - RNA, 19 nt, Artificial Sequence
  Description of Artificial Sequence: Synthetic oligonucleotide
auaugcggacugagcugca

SEQ ID NO: 398898 - RNA, 19 nt, Artificial Sequence
  Description of Artificial Sequence: Synthetic oligonucleotide
cuguaguuacucuguccau

SEQ ID NO: 398899 - RNA, 19 nt, Artificial Sequence
  Description of Artificial Sequence: Synthetic oligonucleotide
cacgaaguggugguggcau

SEQ ID NO: 398900 - RNA, 19 nt, Artificial Sequence
  Description of Artificial Sequence: Synthetic oligonucleotide
uccugacggugcucgccuu

SEQ ID NO: 398901 - RNA, 19 nt, Artificial Sequence
  Description of Artificial Sequence: Synthetic oligonucleotide
ccggauugggacacugcca

SEQ ID NO: 398902 - RNA, 19 nt, Artificial Sequence
  Description of Artificial Sequence: Synthetic oligonucleotide
gcggacugagcugcauaag

SEQ ID NO: 398903 - RNA, 19 nt, Artificial Sequence
  Description of Artificial Sequence: Synthetic oligonucleotide
cgugcuagauugagguuga

SEQ ID NO: 398904 - RNA, 19 nt, Artificial Sequence
  Description of Artificial Sequence: Synthetic oligonucleotide
ucgcucuccagcgcccauu

SEQ ID NO: 398905 - RNA, 19 nt, Artificial Sequence
  Description of Artificial Sequence: Synthetic oligonucleotide
gcucugcgggucugucuag

SEQ ID NO: 398906 - RNA, 19 nt, Artificial Sequence
  Description of Artificial Sequence: Synthetic oligonucleotide
gcucggcuguccauaggug

SEQ ID NO: 398907 - RNA, 19 nt, Artificial Sequence
  Description of Artificial Sequence: Synthetic oligonucleotide
ggugcucgccuuuauccau

SEQ ID NO: 398908 - RNA, 19 nt, Artificial Sequence
  Description of Artificial Sequence: Synthetic oligonucleotide
ggcgaaguucugguuucca

SEQ ID NO: 398909 - RNA, 19 nt, Artificial Sequence
  Description of Artificial Sequence: Synthetic oligonucleotide
gcaugcucacaagggguuc

SEQ ID NO: 398910 - RNA, 19 nt, Artificial Sequence
  Description of Artificial Sequence: Synthetic oligonucleotide
ccauauccuaggcugggcu

SEQ ID NO: 398911 - RNA, 19 nt, Artificial Sequence
  Description of Artificial Sequence: Synthetic oligonucleotide
gcccguagcugcugcucug

SEQ ID NO: 398912 - RNA, 19 nt, Artificial Sequence
  Description of Artificial Sequence: Synthetic oligonucleotide
uuccccugccccgguuauc

SEQ ID NO: 398913 - RNA, 19 nt, Artificial Sequence
  Description of Artificial Sequence: Synthetic oligonucleotide
cagcuuggcuguagguacu

SEQ ID NO: 398914 - RNA, 19 nt, Artificial Sequence
  Description of Artificial Sequence: Synthetic oligonucleotide
ggcgcggugacuggcugca

SEQ ID NO: 398915 - RNA, 19 nt, Artificial Sequence
  Description of Artificial Sequence: Synthetic oligonucleotide
gcccauaaacacccaugcu

SEQ ID NO: 398916 - RNA, 19 nt, Artificial Sequence
  Description of Artificial Sequence: Synthetic oligonucleotide
cccucucgagguggcaugc

SEQ ID NO: 398917 - RNA, 19 nt, Artificial Sequence
  Description of Artificial Sequence: Synthetic oligonucleotide
cugacggugcucgccuuua

SEQ ID NO: 398918 - RNA, 19 nt, Artificial Sequence
  Description of Artificial Sequence: Synthetic oligonucleotide
guccauaagcccaccucuu

SEQ ID NO: 398919 - RNA, 19 nt, Artificial Sequence
  Description of Artificial Sequence: Synthetic oligonucleotide
cgcggugacuggcugcaug

SEQ ID NO: 398920 - RNA, 19 nt, Artificial Sequence
  Description of Artificial Sequence: Synthetic oligonucleotide
gcccggauugggacacugc

SEQ ID NO: 398921 - RNA, 19 nt, Artificial Sequence
  Description of Artificial Sequence: Synthetic oligonucleotide
agcgcccauuccaccgcgu

SEQ ID NO: 398922 - RNA, 19 nt, Artificial Sequence
  Description of Artificial Sequence: Synthetic oligonucleotide
uagucucagcgggcuuguu

SEQ ID NO: 398923 - RNA, 19 nt, Artificial Sequence
  Description of Artificial Sequence: Synthetic oligonucleotide
cucaugccuccacgaucaa

SEQ ID NO: 398924 - RNA, 19 nt, Artificial Sequence
  Description of Artificial Sequence: Synthetic oligonucleotide
ccucucgagguggcaugcc

SEQ ID NO: 398925 - RNA, 19 nt, Artificial Sequence
  Description of Artificial Sequence: Synthetic oligonucleotide
cuccccgcccaccucugcu

SEQ ID NO: 398926 - RNA, 19 nt, Artificial Sequence
  Description of Artificial Sequence: Synthetic oligonucleotide
cguaacuagucggcuguga

SEQ ID NO: 398927 - RNA, 19 nt, Artificial Sequence
  Description of Artificial Sequence: Synthetic oligonucleotide
auccuaggcugggcugguu

SEQ ID NO: 398928 - RNA, 19 nt, Artificial Sequence
  Description of Artificial Sequence: Synthetic oligonucleotide
ccuccccgcaugccaccag

SEQ ID NO: 398929 - RNA, 19 nt, Artificial Sequence
  Description of Artificial Sequence: Synthetic oligonucleotide
guaauccguggacgccauu

SEQ ID NO: 398930 - RNA, 19 nt, Artificial Sequence
  Description of Artificial Sequence: Synthetic oligonucleotide
gcuccgguucucuccuggu

SEQ ID NO: 398931 - RNA, 19 nt, Artificial Sequence
  Description of Artificial Sequence: Synthetic oligonucleotide
gcugggcgguguaagcacu

SEQ ID NO: 398932 - RNA, 19 nt, Artificial Sequence
  Description of Artificial Sequence: Synthetic oligonucleotide
cacuaccauuuaacuuguu

SEQ ID NO: 398933 - RNA, 19 nt, Artificial Sequence
  Description of Artificial Sequence: Synthetic oligonucleotide
ccccgguuaucagggccac

SEQ ID NO: 398934 - RNA, 19 nt, Artificial Sequence
  Description of Artificial Sequence: Synthetic oligonucleotide
ccaugcuacuggggugguc

SEQ ID NO: 398935 - RNA, 19 nt, Artificial Sequence
  Description of Artificial Sequence: Synthetic oligonucleotide
ggaggcgcggugacuggcu

SEQ ID NO: 398936 - RNA, 19 nt, Artificial Sequence
  Description of Artificial Sequence: Synthetic oligonucleotide
ccuuaccuccucguucucu

SEQ ID NO: 398937 - RNA, 19 nt, Artificial Sequence
  Description of Artificial Sequence: Synthetic oligonucleotide
ggguaacuagugggaggcu

SEQ ID NO: 398938 - RNA, 19 nt, Artificial Sequence
  Description of Artificial Sequence: Synthetic oligonucleotide
ggccacucaugcuccgguu

SEQ ID NO: 398939 - RNA, 19 nt, Artificial Sequence
  Description of Artificial Sequence: Synthetic oligonucleotide
ccagauagauguggaucau

SEQ ID NO: 398940 - RNA, 19 nt, Artificial Sequence
  Description of Artificial Sequence: Synthetic oligonucleotide
ccugacggugcucgccuuu

SEQ ID NO: 398941 - RNA, 19 nt, Artificial Sequence
  Description of Artificial Sequence: Synthetic oligonucleotide
gcgcggugacuggcugcau

SEQ ID NO: 398942 - RNA, 19 nt, Artificial Sequence
  Description of Artificial Sequence: Synthetic oligonucleotide
aagaauaagugucuauucc

SEQ ID NO: 398943 - RNA, 19 nt, Artificial Sequence
  Description of Artificial Sequence: Synthetic oligonucleotide
guagauaucaggcagcugg

SEQ ID NO: 398944 - RNA, 19 nt, Artificial Sequence
  Description of Artificial Sequence: Synthetic oligonucleotide
cuacaaauggggaacaagg

SEQ ID NO: 398945 - RNA, 19 nt, Artificial Sequence
  Description of Artificial Sequence: Synthetic oligonucleotide
aaaaccacccagcuggcgg

SEQ ID NO: 398946 - RNA, 19 nt, Artificial Sequence
  Description of Artificial Sequence: Synthetic oligonucleotide
agugagaaucuguaguccc

SEQ ID NO: 398947 - RNA, 19 nt, Artificial Sequence
  Description of Artificial Sequence: Synthetic oligonucleotide
acaccauugagccaggcgg

SEQ ID NO: 398948 - RNA, 19 nt, Artificial Sequence
  Description of Artificial Sequence: Synthetic oligonucleotide
ugacuuacgagccagggcu

SEQ ID NO: 398949 - RNA, 19 nt, Artificial Sequence
  Description of Artificial Sequence: Synthetic oligonucleotide
aauagcggcagcuaagggu

SEQ ID NO: 398950 - RNA, 19 nt, Artificial Sequence
  Description of Artificial Sequence: Synthetic oligonucleotide
ucagauauuucugugacca

SEQ ID NO: 398951 - RNA, 19 nt, Artificial Sequence
  Description of Artificial Sequence: Synthetic oligonucleotide
gaacaugaaggccacagag

SEQ ID NO: 398952 - RNA, 19 nt, Artificial Sequence
  Description of Artificial Sequence: Synthetic oligonucleotide
aacuuucggaacaugaagg

SEQ ID NO: 398953 - RNA, 19 nt, Artificial Sequence
  Description of Artificial Sequence: Synthetic oligonucleotide
uaauagguguaucagacau

SEQ ID NO: 398954 - RNA, 19 nt, Artificial Sequence
  Description of Artificial Sequence: Synthetic oligonucleotide
aggaguaagaauaaguguc

SEQ ID NO: 398955 - RNA, 19 nt, Artificial Sequence
  Description of Artificial Sequence: Synthetic oligonucleotide
agguguaucagacaucauc

SEQ ID NO: 398956 - RNA, 19 nt, Artificial Sequence
  Description of Artificial Sequence: Synthetic oligonucleotide
aggaccauagcuucccugc

SEQ ID NO: 398957 - RNA, 19 nt, Artificial Sequence
  Description of Artificial Sequence: Synthetic oligonucleotide
gaacuuucggaacaugaag

SEQ ID NO: 398958 - RNA, 19 nt, Artificial Sequence
  Description of Artificial Sequence: Synthetic oligonucleotide
aacaugaaggccacagagc

SEQ ID NO: 398959 - RNA, 19 nt, Artificial Sequence
  Description of Artificial Sequence: Synthetic oligonucleotide
auaagugucuauuccaaca

SEQ ID NO: 398960 - RNA, 19 nt, Artificial Sequence
  Description of Artificial Sequence: Synthetic oligonucleotide
auguaaagcacguucacga

SEQ ID NO: 398961 - RNA, 19 nt, Artificial Sequence
  Description of Artificial Sequence: Synthetic oligonucleotide
uacuacaugagggaagggg

SEQ ID NO: 398962 - RNA, 19 nt, Artificial Sequence
  Description of Artificial Sequence: Synthetic oligonucleotide
ugucugcacauccagguag

SEQ ID NO: 398963 - RNA, 19 nt, Artificial Sequence
  Description of Artificial Sequence: Synthetic oligonucleotide
caacuuuggaaagagacgc

SEQ ID NO: 398964 - RNA, 19 nt, Artificial Sequence
  Description of Artificial Sequence: Synthetic oligonucleotide
accaaaucguaauaggugu

SEQ ID NO: 398965 - RNA, 19 nt, Artificial Sequence
  Description of Artificial Sequence: Synthetic oligonucleotide
cuauccacagcuucagugg

SEQ ID NO: 398966 - RNA, 19 nt, Artificial Sequence
  Description of Artificial Sequence: Synthetic oligonucleotide
acuacaugagggaaggggc

SEQ ID NO: 398967 - RNA, 19 nt, Artificial Sequence
  Description of Artificial Sequence: Synthetic oligonucleotide
caaagauggcaccagcucg

SEQ ID NO: 398968 - RNA, 19 nt, Artificial Sequence
  Description of Artificial Sequence: Synthetic oligonucleotide
uuuuaggccuggcagaccu

SEQ ID NO: 398969 - RNA, 19 nt, Artificial Sequence
  Description of Artificial Sequence: Synthetic oligonucleotide
cuugggaaauaccagaguc

SEQ ID NO: 398970 - RNA, 19 nt, Artificial Sequence
  Description of Artificial Sequence: Synthetic oligonucleotide
aggaaacccaaauuuuggg

SEQ ID NO: 398971 - RNA, 19 nt, Artificial Sequence
  Description of Artificial Sequence: Synthetic oligonucleotide
uaagaauaagugucuauuc

SEQ ID NO: 398972 - RNA, 19 nt, Artificial Sequence
  Description of Artificial Sequence: Synthetic oligonucleotide
uugggaaauaccagagucc

SEQ ID NO: 398973 - RNA, 19 nt, Artificial Sequence
  Description of Artificial Sequence: Synthetic oligonucleotide
uauucuacaaauggggaac

SEQ ID NO: 398974 - RNA, 19 nt, Artificial Sequence
  Description of Artificial Sequence: Synthetic oligonucleotide
uguguugucuuauucuaca

SEQ ID NO: 398975 - RNA, 19 nt, Artificial Sequence
  Description of Artificial Sequence: Synthetic oligonucleotide
uagacgagggaucacguga

SEQ ID NO: 398976 - RNA, 19 nt, Artificial Sequence
  Description of Artificial Sequence: Synthetic oligonucleotide
uuauucuacaaauggggaa

SEQ ID NO: 398977 - RNA, 19 nt, Artificial Sequence
  Description of Artificial Sequence: Synthetic oligonucleotide
acguucacgaagugcacgc

SEQ ID NO: 398978 - RNA, 19 nt, Artificial Sequence
  Description of Artificial Sequence: Synthetic oligonucleotide
ugugcagcccuguaaagug

SEQ ID NO: 398979 - RNA, 19 nt, Artificial Sequence
  Description of Artificial Sequence: Synthetic oligonucleotide
aggccuagaggucccaucc

SEQ ID NO: 398980 - RNA, 19 nt, Artificial Sequence
  Description of Artificial Sequence: Synthetic oligonucleotide
agaggaguaagaauaagug

SEQ ID NO: 398981 - RNA, 19 nt, Artificial Sequence
  Description of Artificial Sequence: Synthetic oligonucleotide
uuaaauaaggcaggagcca

SEQ ID NO: 398982 - RNA, 19 nt, Artificial Sequence
  Description of Artificial Sequence: Synthetic oligonucleotide
cacgcaguuucucaggugg

SEQ ID NO: 398983 - RNA, 19 nt, Artificial Sequence
  Description of Artificial Sequence: Synthetic oligonucleotide
aaaacaacccaaaugcuuu

SEQ ID NO: 398984 - RNA, 19 nt, Artificial Sequence
  Description of Artificial Sequence: Synthetic oligonucleotide
aaaucguaauagguguauc

SEQ ID NO: 398985 - RNA, 19 nt, Artificial Sequence
  Description of Artificial Sequence: Synthetic oligonucleotide
aacccuuaaauaaggcagg

SEQ ID NO: 398986 - RNA, 19 nt, Artificial Sequence
  Description of Artificial Sequence: Synthetic oligonucleotide
ugggaaauaccagaguccc

SEQ ID NO: 398987 - RNA, 19 nt, Artificial Sequence
  Description of Artificial Sequence: Synthetic oligonucleotide
ucuacaaauggggaacaag

SEQ ID NO: 398988 - RNA, 19 nt, Artificial Sequence
  Description of Artificial Sequence: Synthetic oligonucleotide
cagaccaaaucguaauagg

SEQ ID NO: 398989 - RNA, 19 nt, Artificial Sequence
  Description of Artificial Sequence: Synthetic oligonucleotide
ggacuagggaccuugacag

SEQ ID NO: 398990 - RNA, 19 nt, Artificial Sequence
  Description of Artificial Sequence: Synthetic oligonucleotide
cuuuggaaagagacgcucc

SEQ ID NO: 398991 - RNA, 19 nt, Artificial Sequence
  Description of Artificial Sequence: Synthetic oligonucleotide
guaaagcacguucacgaag

SEQ ID NO: 398992 - RNA, 19 nt, Artificial Sequence
  Description of Artificial Sequence: Synthetic oligonucleotide
ugaggugcagccauguaaa

SEQ ID NO: 398993 - RNA, 19 nt, Artificial Sequence
  Description of Artificial Sequence: Synthetic oligonucleotide
agucaugccacugcaggcc

SEQ ID NO: 398994 - RNA, 19 nt, Artificial Sequence
  Description of Artificial Sequence: Synthetic oligonucleotide
caguacgugguccacagag

SEQ ID NO: 398995 - RNA, 19 nt, Artificial Sequence
  Description of Artificial Sequence: Synthetic oligonucleotide
cuguggaacagacuggcgc

SEQ ID NO: 398996 - RNA, 19 nt, Artificial Sequence
  Description of Artificial Sequence: Synthetic oligonucleotide
uguggccccaaguaggcag

SEQ ID NO: 398997 - RNA, 19 nt, Artificial Sequence
  Description of Artificial Sequence: Synthetic oligonucleotide
agugggcuuaccauguacc

SEQ ID NO: 398998 - RNA, 19 nt, Artificial Sequence
  Description of Artificial Sequence: Synthetic oligonucleotide
ucguacuacaugagggaag

SEQ ID NO: 398999 - RNA, 19 nt, Artificial Sequence
  Description of Artificial Sequence: Synthetic oligonucleotide
aagcagaccaaaucguaau

SEQ ID NO: 399000 - RNA, 19 nt, Artificial Sequence
  Description of Artificial Sequence: Synthetic oligonucleotide
aucacagagugacgugugc

SEQ ID NO: 399001 - RNA, 19 nt, Artificial Sequence
  Description of Artificial Sequence: Synthetic oligonucleotide
acuacagggagguugcccu

SEQ ID NO: 399002 - RNA, 19 nt, Artificial Sequence
  Description of Artificial Sequence: Synthetic oligonucleotide
gagcuguggaaguuggucc

SEQ ID NO: 399003 - RNA, 19 nt, Artificial Sequence
  Description of Artificial Sequence: Synthetic oligonucleotide
aauagguguaucagacauc

SEQ ID NO: 399004 - RNA, 19 nt, Artificial Sequence
  Description of Artificial Sequence: Synthetic oligonucleotide
gguagggccagguugaagc

SEQ ID NO: 399005 - RNA, 19 nt, Artificial Sequence
  Description of Artificial Sequence: Synthetic oligonucleotide
acaauagcggcagcuaagg

SEQ ID NO: 399006 - RNA, 19 nt, Artificial Sequence
  Description of Artificial Sequence: Synthetic oligonucleotide
agcuuuagcaugcgugagg

SEQ ID NO: 399007 - RNA, 19 nt, Artificial Sequence
  Description of Artificial Sequence: Synthetic oligonucleotide
uguggaacagacuggcgcu

SEQ ID NO: 399008 - RNA, 19 nt, Artificial Sequence
  Description of Artificial Sequence: Synthetic oligonucleotide
guugucucaagccacucac

SEQ ID NO: 399009 - RNA, 19 nt, Artificial Sequence
  Description of Artificial Sequence: Synthetic oligonucleotide
ucguaauagguguaucaga

SEQ ID NO: 399010 - RNA, 19 nt, Artificial Sequence
  Description of Artificial Sequence: Synthetic oligonucleotide
agcucguacuacaugaggg

SEQ ID NO: 399011 - RNA, 19 nt, Artificial Sequence
  Description of Artificial Sequence: Synthetic oligonucleotide
caggguagauaucaggcag

SEQ ID NO: 399012 - RNA, 19 nt, Artificial Sequence
  Description of Artificial Sequence: Synthetic oligonucleotide
aggacuagggaccuugaca

SEQ ID NO: 399013 - RNA, 19 nt, Artificial Sequence
  Description of Artificial Sequence: Synthetic oligonucleotide
aucguaauagguguaucag

SEQ ID NO: 399014 - RNA, 19 nt, Artificial Sequence
  Description of Artificial Sequence: Synthetic oligonucleotide
ugcaguacgugguccacag

SEQ ID NO: 399015 - RNA, 19 nt, Artificial Sequence
  Description of Artificial Sequence: Synthetic oligonucleotide
agagcuguggaaguugguc

SEQ ID NO: 399016 - RNA, 19 nt, Artificial Sequence
  Description of Artificial Sequence: Synthetic oligonucleotide
acgguaccgaugcuaaagg

SEQ ID NO: 399017 - RNA, 19 nt, Artificial Sequence
  Description of Artificial Sequence: Synthetic oligonucleotide
uagauaucaggcagcuggc

SEQ ID NO: 399018 - RNA, 19 nt, Artificial Sequence
  Description of Artificial Sequence: Synthetic oligonucleotide
ugaagcaugccaccggcaa

SEQ ID NO: 399019 - RNA, 19 nt, Artificial Sequence
  Description of Artificial Sequence: Synthetic oligonucleotide
uggcaccagagcuagacga

SEQ ID NO: 399020 - RNA, 19 nt, Artificial Sequence
  Description of Artificial Sequence: Synthetic oligonucleotide
uugucucaagccacucacg

SEQ ID NO: 399021 - RNA, 19 nt, Artificial Sequence
  Description of Artificial Sequence: Synthetic oligonucleotide
caggcgguuuccaacaggc

SEQ ID NO: 399022 - RNA, 19 nt, Artificial Sequence
  Description of Artificial Sequence: Synthetic oligonucleotide
guacgugguccacagaggc

SEQ ID NO: 399023 - RNA, 19 nt, Artificial Sequence
  Description of Artificial Sequence: Synthetic oligonucleotide
ugggcaagcagaccaaauc

SEQ ID NO: 399024 - RNA, 19 nt, Artificial Sequence
  Description of Artificial Sequence: Synthetic oligonucleotide
auagcggcagcuaagggug

SEQ ID NO: 399025 - RNA, 19 nt, Artificial Sequence
  Description of Artificial Sequence: Synthetic oligonucleotide
agcacguucacgaagugca

SEQ ID NO: 399026 - RNA, 19 nt, Artificial Sequence
  Description of Artificial Sequence: Synthetic oligonucleotide
uguggaaguugguccuugg

SEQ ID NO: 399027 - RNA, 19 nt, Artificial Sequence
  Description of Artificial Sequence: Synthetic oligonucleotide
acagagugacgugugcagc

SEQ ID NO: 399028 - RNA, 19 nt, Artificial Sequence
  Description of Artificial Sequence: Synthetic oligonucleotide
agcuagacgagggaucacg

SEQ ID NO: 399029 - RNA, 19 nt, Artificial Sequence
  Description of Artificial Sequence: Synthetic oligonucleotide
acgagggaucacgugaccc

SEQ ID NO: 399030 - RNA, 19 nt, Artificial Sequence
  Description of Artificial Sequence: Synthetic oligonucleotide
gacaauagcggcagcuaag

SEQ ID NO: 399031 - RNA, 19 nt, Artificial Sequence
  Description of Artificial Sequence: Synthetic oligonucleotide
aaagauggcaccagcucgu

SEQ ID NO: 399032 - RNA, 19 nt, Artificial Sequence
  Description of Artificial Sequence: Synthetic oligonucleotide
uguaaagcacguucacgaa

SEQ ID NO: 399033 - RNA, 19 nt, Artificial Sequence
  Description of Artificial Sequence: Synthetic oligonucleotide
cuuucggaacaugaaggcc

SEQ ID NO: 399034 - RNA, 19 nt, Artificial Sequence
  Description of Artificial Sequence: Synthetic oligonucleotide
uccccuugcaaucuuuguc

SEQ ID NO: 399035 - RNA, 19 nt, Artificial Sequence
  Description of Artificial Sequence: Synthetic oligonucleotide
acuguggauucugaugggg

SEQ ID NO: 399036 - RNA, 19 nt, Artificial Sequence
  Description of Artificial Sequence: Synthetic oligonucleotide
gaggaguaagaauaagugu

SEQ ID NO: 399037 - RNA, 19 nt, Artificial Sequence
  Description of Artificial Sequence: Synthetic oligonucleotide
cacagagugacgugugcag

SEQ ID NO: 399038 - RNA, 19 nt, Artificial Sequence
  Description of Artificial Sequence: Synthetic oligonucleotide
uuauuggugguuggagcag

SEQ ID NO: 399039 - RNA, 19 nt, Artificial Sequence
  Description of Artificial Sequence: Synthetic oligonucleotide
cguaauagguguaucagac

SEQ ID NO: 399040 - RNA, 19 nt, Artificial Sequence
  Description of Artificial Sequence: Synthetic oligonucleotide
gagugagaaucuguagucc

SEQ ID NO: 399041 - RNA, 19 nt, Artificial Sequence
  Description of Artificial Sequence: Synthetic oligonucleotide
ugcuaaaggugauggcucu

SEQ ID NO: 399042 - RNA, 19 nt, Artificial Sequence
  Description of Artificial Sequence: Synthetic oligonucleotide
agagugacgugugcagccc

SEQ ID NO: 399043 - RNA, 19 nt, Artificial Sequence
  Description of Artificial Sequence: Synthetic oligonucleotide
aaggggcauugcugugugc

SEQ ID NO: 399044 - RNA, 19 nt, Artificial Sequence
  Description of Artificial Sequence: Synthetic oligonucleotide
guaccgaugcuaaagguga

SEQ ID NO: 399045 - RNA, 19 nt, Artificial Sequence
  Description of Artificial Sequence: Synthetic oligonucleotide
guguaucagacaucauccc

SEQ ID NO: 399046 - RNA, 19 nt, Artificial Sequence
  Description of Artificial Sequence: Synthetic oligonucleotide
gcaacuuuggaaagagacg

SEQ ID NO: 399047 - RNA, 19 nt, Artificial Sequence
  Description of Artificial Sequence: Synthetic oligonucleotide
caccagagcuagacgaggg

SEQ ID NO: 399048 - RNA, 19 nt, Artificial Sequence
  Description of Artificial Sequence: Synthetic oligonucleotide
agaguggugggccguagcu

SEQ ID NO: 399049 - RNA, 19 nt, Artificial Sequence
  Description of Artificial Sequence: Synthetic oligonucleotide
uaguagccccugcacaccc

SEQ ID NO: 399050 - RNA, 19 nt, Artificial Sequence
  Description of Artificial Sequence: Synthetic oligonucleotide
uucggaacaugaaggccac

SEQ ID NO: 399051 - RNA, 19 nt, Artificial Sequence
  Description of Artificial Sequence: Synthetic oligonucleotide
uaaaaccacccagcuggcg

SEQ ID NO: 399052 - RNA, 19 nt, Artificial Sequence
  Description of Artificial Sequence: Synthetic oligonucleotide
cacgguaccgaugcuaaag

SEQ ID NO: 399053 - RNA, 19 nt, Artificial Sequence
  Description of Artificial Sequence: Synthetic oligonucleotide
guguuugcccaggacacgg

SEQ ID NO: 399054 - RNA, 19 nt, Artificial Sequence
  Description of Artificial Sequence: Synthetic oligonucleotide
guaauagguguaucagaca

SEQ ID NO: 399055 - RNA, 19 nt, Artificial Sequence
  Description of Artificial Sequence: Synthetic oligonucleotide
agagcuagacgagggauca

SEQ ID NO: 399056 - RNA, 19 nt, Artificial Sequence
  Description of Artificial Sequence: Synthetic oligonucleotide
ucacagagugacgugugca

SEQ ID NO: 399057 - RNA, 19 nt, Artificial Sequence
  Description of Artificial Sequence: Synthetic oligonucleotide
agguugaagcaugccaccg

SEQ ID NO: 399058 - RNA, 19 nt, Artificial Sequence
  Description of Artificial Sequence: Synthetic oligonucleotide
uggcaucacagagugacgu

SEQ ID NO: 399059 - RNA, 19 nt, Artificial Sequence
  Description of Artificial Sequence: Synthetic oligonucleotide
cagcucguacuacaugagg

SEQ ID NO: 399060 - RNA, 19 nt, Artificial Sequence
  Description of Artificial Sequence: Synthetic oligonucleotide
ggaaauaccagagucccca

SEQ ID NO: 399061 - RNA, 19 nt, Artificial Sequence
  Description of Artificial Sequence: Synthetic oligonucleotide
gugacuuacgagccagggc

SEQ ID NO: 399062 - RNA, 19 nt, Artificial Sequence
  Description of Artificial Sequence: Synthetic oligonucleotide
gacuagggaccuugacagg

SEQ ID NO: 399063 - RNA, 19 nt, Artificial Sequence
  Description of Artificial Sequence: Synthetic oligonucleotide
cugacagaguggugggccg

SEQ ID NO: 399064 - RNA, 19 nt, Artificial Sequence
  Description of Artificial Sequence: Synthetic oligonucleotide
gugcacgcuccucugacag

SEQ ID NO: 399065 - RNA, 19 nt, Artificial Sequence
  Description of Artificial Sequence: Synthetic oligonucleotide
cacucacgcaguuucucag

SEQ ID NO: 399066 - RNA, 19 nt, Artificial Sequence
  Description of Artificial Sequence: Synthetic oligonucleotide
ugcaggacggaggaucuug

SEQ ID NO: 399067 - RNA, 19 nt, Artificial Sequence
  Description of Artificial Sequence: Synthetic oligonucleotide
cagguugaagcaugccacc

SEQ ID NO: 399068 - RNA, 19 nt, Artificial Sequence
  Description of Artificial Sequence: Synthetic oligonucleotide
aucacgugacccuucccca

SEQ ID NO: 399069 - RNA, 19 nt, Artificial Sequence
  Description of Artificial Sequence: Synthetic oligonucleotide
gguugaagcaugccaccgg

SEQ ID NO: 399070 - RNA, 19 nt, Artificial Sequence
  Description of Artificial Sequence: Synthetic oligonucleotide
caauagcggcagcuaaggg

SEQ ID NO: 399071 - RNA, 19 nt, Artificial Sequence
  Description of Artificial Sequence: Synthetic oligonucleotide
ucacgugacccuuccccag

SEQ ID NO: 399072 - RNA, 19 nt, Artificial Sequence
  Description of Artificial Sequence: Synthetic oligonucleotide
uguagucccaugggcacug

SEQ ID NO: 399073 - RNA, 19 nt, Artificial Sequence
  Description of Artificial Sequence: Synthetic oligonucleotide
gaagcgugcccucagggua

SEQ ID NO: 399074 - RNA, 19 nt, Artificial Sequence
  Description of Artificial Sequence: Synthetic oligonucleotide
agacgagggaucacgugac

SEQ ID NO: 399075 - RNA, 19 nt, Artificial Sequence
  Description of Artificial Sequence: Synthetic oligonucleotide
aguacgugguccacagagg

SEQ ID NO: 399076 - RNA, 19 nt, Artificial Sequence
  Description of Artificial Sequence: Synthetic oligonucleotide
uuuuccauaucuggccuau

SEQ ID NO: 399077 - RNA, 19 nt, Artificial Sequence
  Description of Artificial Sequence: Synthetic oligonucleotide
uggccguccugccaugcag

SEQ ID NO: 399078 - RNA, 19 nt, Artificial Sequence
  Description of Artificial Sequence: Synthetic oligonucleotide
ggucaucccuggcauaagg

SEQ ID NO: 399079 - RNA, 19 nt, Artificial Sequence
  Description of Artificial Sequence: Synthetic oligonucleotide
cagcuggcggcguacacag

SEQ ID NO: 399080 - RNA, 19 nt, Artificial Sequence
  Description of Artificial Sequence: Synthetic oligonucleotide
cuagacgagggaucacgug

SEQ ID NO: 399081 - RNA, 19 nt, Artificial Sequence
  Description of Artificial Sequence: Synthetic oligonucleotide
ugccuaguagccccugcac

SEQ ID NO: 399082 - RNA, 19 nt, Artificial Sequence
  Description of Artificial Sequence: Synthetic oligonucleotide
cacguucacgaagugcacg

SEQ ID NO: 399083 - RNA, 19 nt, Artificial Sequence
  Description of Artificial Sequence: Synthetic oligonucleotide
cuaagggugcaggacggag

SEQ ID NO: 399084 - RNA, 19 nt, Artificial Sequence
  Description of Artificial Sequence: Synthetic oligonucleotide
gcagaccaaaucguaauag

SEQ ID NO: 399085 - RNA, 19 nt, Artificial Sequence
  Description of Artificial Sequence: Synthetic oligonucleotide
acgugugcagcccuguaaa

SEQ ID NO: 399086 - RNA, 19 nt, Artificial Sequence
  Description of Artificial Sequence: Synthetic oligonucleotide
auugagccaggcgguuucc

SEQ ID NO: 399087 - RNA, 19 nt, Artificial Sequence
  Description of Artificial Sequence: Synthetic oligonucleotide
cagagcuagacgagggauc

SEQ ID NO: 399088 - RNA, 19 nt, Artificial Sequence
  Description of Artificial Sequence: Synthetic oligonucleotide
agacuggcgcucuuuggca

SEQ ID NO: 399089 - RNA, 19 nt, Artificial Sequence
  Description of Artificial Sequence: Synthetic oligonucleotide
gggcuuaccauguaccuca

SEQ ID NO: 399090 - RNA, 19 nt, Artificial Sequence
  Description of Artificial Sequence: Synthetic oligonucleotide
gggaaugggaagguggugc

SEQ ID NO: 399091 - RNA, 19 nt, Artificial Sequence
  Description of Artificial Sequence: Synthetic oligonucleotide
aguguuugcccaggacacg

SEQ ID NO: 399092 - RNA, 19 nt, Artificial Sequence
  Description of Artificial Sequence: Synthetic oligonucleotide
cugccaugcagcccggccc

SEQ ID NO: 399093 - RNA, 19 nt, Artificial Sequence
  Description of Artificial Sequence: Synthetic oligonucleotide
ugcggaagcgugcccucag

SEQ ID NO: 399094 - RNA, 19 nt, Artificial Sequence
  Description of Artificial Sequence: Synthetic oligonucleotide
guaagaauaagugucuauu

SEQ ID NO: 399095 - RNA, 19 nt, Artificial Sequence
  Description of Artificial Sequence: Synthetic oligonucleotide
cauugagccaggcgguuuc

SEQ ID NO: 399096 - RNA, 19 nt, Artificial Sequence
  Description of Artificial Sequence: Synthetic oligonucleotide
cacagguugcacacuguuc

SEQ ID NO: 399097 - RNA, 19 nt, Artificial Sequence
  Description of Artificial Sequence: Synthetic oligonucleotide
uggcucuuauuggugguug

SEQ ID NO: 399098 - RNA, 19 nt, Artificial Sequence
  Description of Artificial Sequence: Synthetic oligonucleotide
ggugacuuacgagccaggg

SEQ ID NO: 399099 - RNA, 19 nt, Artificial Sequence
  Description of Artificial Sequence: Synthetic oligonucleotide
ggacggaggaucuugaacu

SEQ ID NO: 399100 - RNA, 19 nt, Artificial Sequence
  Description of Artificial Sequence: Synthetic oligonucleotide
ucuacacggugcucuugca

SEQ ID NO: 399101 - RNA, 19 nt, Artificial Sequence
  Description of Artificial Sequence: Synthetic oligonucleotide
cuggcaccagagcuagacg

SEQ ID NO: 399102 - RNA, 19 nt, Artificial Sequence
  Description of Artificial Sequence: Synthetic oligonucleotide
ucacgcaguuucucaggug

SEQ ID NO: 399103 - RNA, 19 nt, Artificial Sequence
  Description of Artificial Sequence: Synthetic oligonucleotide
gcgaaggccggucuggucc

SEQ ID NO: 399104 - RNA, 19 nt, Artificial Sequence
  Description of Artificial Sequence: Synthetic oligonucleotide
aagcgugcccucaggguag

SEQ ID NO: 399105 - RNA, 19 nt, Artificial Sequence
  Description of Artificial Sequence: Synthetic oligonucleotide
cuugccuaguagccccugc

SEQ ID NO: 399106 - RNA, 19 nt, Artificial Sequence
  Description of Artificial Sequence: Synthetic oligonucleotide
guaggggcugcccagccca

SEQ ID NO: 399107 - RNA, 19 nt, Artificial Sequence
  Description of Artificial Sequence: Synthetic oligonucleotide
ccgaugcuaaaggugaugg

SEQ ID NO: 399108 - RNA, 19 nt, Artificial Sequence
  Description of Artificial Sequence: Synthetic oligonucleotide
uccucacgaagagagcagu

SEQ ID NO: 399109 - RNA, 19 nt, Artificial Sequence
  Description of Artificial Sequence: Synthetic oligonucleotide
ccuaguagccccugcacac

SEQ ID NO: 399110 - RNA, 19 nt, Artificial Sequence
  Description of Artificial Sequence: Synthetic oligonucleotide
cacuacagggagguugccc

SEQ ID NO: 399111 - RNA, 19 nt, Artificial Sequence
  Description of Artificial Sequence: Synthetic oligonucleotide
gguaaggggucugggaugc

SEQ ID NO: 399112 - RNA, 19 nt, Artificial Sequence
  Description of Artificial Sequence: Synthetic oligonucleotide
gguuggugacuuacgagcc

SEQ ID NO: 399113 - RNA, 19 nt, Artificial Sequence
  Description of Artificial Sequence: Synthetic oligonucleotide
caucccuggcauaaggaaa

SEQ ID NO: 399114 - RNA, 19 nt, Artificial Sequence
  Description of Artificial Sequence: Synthetic oligonucleotide
guguuaaaaccacccagcu

SEQ ID NO: 399115 - RNA, 19 nt, Artificial Sequence
  Description of Artificial Sequence: Synthetic oligonucleotide
ccgagauggcaucacagag

SEQ ID NO: 399116 - RNA, 19 nt, Artificial Sequence
  Description of Artificial Sequence: Synthetic oligonucleotide
cuccgucugguuaucccac

SEQ ID NO: 399117 - RNA, 19 nt, Artificial Sequence
  Description of Artificial Sequence: Synthetic oligonucleotide
gacgagggaucacgugacc

SEQ ID NO: 399118 - RNA, 19 nt, Artificial Sequence
  Description of Artificial Sequence: Synthetic oligonucleotide
ccuagaggucccauccugg

SEQ ID NO: 399119 - RNA, 19 nt, Artificial Sequence
  Description of Artificial Sequence: Synthetic oligonucleotide
cuuacgagccagggcuugg

SEQ ID NO: 399120 - RNA, 19 nt, Artificial Sequence
  Description of Artificial Sequence: Synthetic oligonucleotide
ggcucuuauuggugguugg

SEQ ID NO: 399121 - RNA, 19 nt, Artificial Sequence
  Description of Artificial Sequence: Synthetic oligonucleotide
gaagugcacgcuccucuga

SEQ ID NO: 399122 - RNA, 19 nt, Artificial Sequence
  Description of Artificial Sequence: Synthetic oligonucleotide
cguacuacaugagggaagg

SEQ ID NO: 399123 - RNA, 19 nt, Artificial Sequence
  Description of Artificial Sequence: Synthetic oligonucleotide
gacgugugcagcccuguaa

SEQ ID NO: 399124 - RNA, 19 nt, Artificial Sequence
  Description of Artificial Sequence: Synthetic oligonucleotide
gcggcguacacagucaugc

SEQ ID NO: 399125 - RNA, 19 nt, Artificial Sequence
  Description of Artificial Sequence: Synthetic oligonucleotide
augcccauagagagagagg

SEQ ID NO: 399126 - RNA, 19 nt, Artificial Sequence
  Description of Artificial Sequence: Synthetic oligonucleotide
aguccagcgggcaccuugg

SEQ ID NO: 399127 - RNA, 19 nt, Artificial Sequence
  Description of Artificial Sequence: Synthetic oligonucleotide
uucuacaaauggggaacaa

SEQ ID NO: 399128 - RNA, 19 nt, Artificial Sequence
  Description of Artificial Sequence: Synthetic oligonucleotide
agugcacgcuccucugaca

SEQ ID NO: 399129 - RNA, 19 nt, Artificial Sequence
  Description of Artificial Sequence: Synthetic oligonucleotide
gaagcaugccaccggcaaa

SEQ ID NO: 399130 - RNA, 19 nt, Artificial Sequence
  Description of Artificial Sequence: Synthetic oligonucleotide
uuacgagccagggcuuggc

SEQ ID NO: 399131 - RNA, 19 nt, Artificial Sequence
  Description of Artificial Sequence: Synthetic oligonucleotide
cuuuagcaugcgugaggug

SEQ ID NO: 399132 - RNA, 19 nt, Artificial Sequence
  Description of Artificial Sequence: Synthetic oligonucleotide
ugggccacggagcccgaga

SEQ ID NO: 399133 - RNA, 19 nt, Artificial Sequence
  Description of Artificial Sequence: Synthetic oligonucleotide
accgaugcuaaaggugaug

SEQ ID NO: 399134 - RNA, 19 nt, Artificial Sequence
  Description of Artificial Sequence: Synthetic oligonucleotide
ucaagccacucacgcaguu

SEQ ID NO: 399135 - RNA, 19 nt, Artificial Sequence
  Description of Artificial Sequence: Synthetic oligonucleotide
uccgucugguuaucccaca

SEQ ID NO: 399136 - RNA, 19 nt, Artificial Sequence
  Description of Artificial Sequence: Synthetic oligonucleotide
agaccugacacuggguuuu

SEQ ID NO: 399137 - RNA, 19 nt, Artificial Sequence
  Description of Artificial Sequence: Synthetic oligonucleotide
guacacagucaugccacug

SEQ ID NO: 399138 - RNA, 19 nt, Artificial Sequence
  Description of Artificial Sequence: Synthetic oligonucleotide
acuuacgagccagggcuug

SEQ ID NO: 399139 - RNA, 19 nt, Artificial Sequence
  Description of Artificial Sequence: Synthetic oligonucleotide
cguccugccaugcagcccg

SEQ ID NO: 399140 - RNA, 19 nt, Artificial Sequence
  Description of Artificial Sequence: Synthetic oligonucleotide
ccggcaaaggcugagugag

SEQ ID NO: 399141 - RNA, 19 nt, Artificial Sequence
  Description of Artificial Sequence: Synthetic oligonucleotide
guagggccagguugaagca

SEQ ID NO: 399142 - RNA, 19 nt, Artificial Sequence
  Description of Artificial Sequence: Synthetic oligonucleotide
uaccgaugcuaaaggugau

SEQ ID NO: 399143 - RNA, 19 nt, Artificial Sequence
  Description of Artificial Sequence: Synthetic oligonucleotide
guacuacaugagggaaggg

SEQ ID NO: 399144 - RNA, 19 nt, Artificial Sequence
  Description of Artificial Sequence: Synthetic oligonucleotide
ccuugugugcucccagagg

SEQ ID NO: 399145 - RNA, 19 nt, Artificial Sequence
  Description of Artificial Sequence: Synthetic oligonucleotide
gcagugggagcagaggacc

SEQ ID NO: 399146 - RNA, 19 nt, Artificial Sequence
  Description of Artificial Sequence: Synthetic oligonucleotide
ugguagggccagguugaag

SEQ ID NO: 399147 - RNA, 19 nt, Artificial Sequence
  Description of Artificial Sequence: Synthetic oligonucleotide
ccacaacaacccuugugag

SEQ ID NO: 399148 - RNA, 19 nt, Artificial Sequence
  Description of Artificial Sequence: Synthetic oligonucleotide
acgugacccuuccccagug

SEQ ID NO: 399149 - RNA, 19 nt, Artificial Sequence
  Description of Artificial Sequence: Synthetic oligonucleotide
cuagggaccuugacaggga

SEQ ID NO: 399150 - RNA, 19 nt, Artificial Sequence
  Description of Artificial Sequence: Synthetic oligonucleotide
ggcaucacagagugacgug

SEQ ID NO: 399151 - RNA, 19 nt, Artificial Sequence
  Description of Artificial Sequence: Synthetic oligonucleotide
gcacgcuccucugacagag

SEQ ID NO: 399152 - RNA, 19 nt, Artificial Sequence
  Description of Artificial Sequence: Synthetic oligonucleotide
ugcacgcuccucugacaga

SEQ ID NO: 399153 - RNA, 19 nt, Artificial Sequence
  Description of Artificial Sequence: Synthetic oligonucleotide
ugucgguggcuuccucccu

SEQ ID NO: 399154 - RNA, 19 nt, Artificial Sequence
  Description of Artificial Sequence: Synthetic oligonucleotide
gccauguaaagcacguuca

SEQ ID NO: 399155 - RNA, 19 nt, Artificial Sequence
  Description of Artificial Sequence: Synthetic oligonucleotide
agccuccgucugguuaucc

SEQ ID NO: 399156 - RNA, 19 nt, Artificial Sequence
  Description of Artificial Sequence: Synthetic oligonucleotide
uggcggcguacacagucau

SEQ ID NO: 399157 - RNA, 19 nt, Artificial Sequence
  Description of Artificial Sequence: Synthetic oligonucleotide
gugacuggagcagggccug

SEQ ID NO: 399158 - RNA, 19 nt, Artificial Sequence
  Description of Artificial Sequence: Synthetic oligonucleotide
ggaguaagaauaagugucu

SEQ ID NO: 399159 - RNA, 19 nt, Artificial Sequence
  Description of Artificial Sequence: Synthetic oligonucleotide
ugcacacccuggccguccu

SEQ ID NO: 399160 - RNA, 19 nt, Artificial Sequence
  Description of Artificial Sequence: Synthetic oligonucleotide
ugcucgcuggaaggcacug

SEQ ID NO: 399161 - RNA, 19 nt, Artificial Sequence
  Description of Artificial Sequence: Synthetic oligonucleotide
uagguguaucagacaucau

SEQ ID NO: 399162 - RNA, 19 nt, Artificial Sequence
  Description of Artificial Sequence: Synthetic oligonucleotide
ugacgugugcagcccugua

SEQ ID NO: 399163 - RNA, 19 nt, Artificial Sequence
  Description of Artificial Sequence: Synthetic oligonucleotide
cucguacuacaugagggaa

SEQ ID NO: 399164 - RNA, 19 nt, Artificial Sequence
  Description of Artificial Sequence: Synthetic oligonucleotide
agugacgugugcagcccug

SEQ ID NO: 399165 - RNA, 19 nt, Artificial Sequence
  Description of Artificial Sequence: Synthetic oligonucleotide
ggugcucuugcaguacgug

SEQ ID NO: 399166 - RNA, 19 nt, Artificial Sequence
  Description of Artificial Sequence: Synthetic oligonucleotide
gcagcuugccuaguagccc

SEQ ID NO: 399167 - RNA, 19 nt, Artificial Sequence
  Description of Artificial Sequence: Synthetic oligonucleotide
acagaguggugggccguag

SEQ ID NO: 399168 - RNA, 19 nt, Artificial Sequence
  Description of Artificial Sequence: Synthetic oligonucleotide
ccuugcaaucuuugucuug

SEQ ID NO: 399169 - RNA, 19 nt, Artificial Sequence
  Description of Artificial Sequence: Synthetic oligonucleotide
gccguagcucuacacggug

SEQ ID NO: 399170 - RNA, 19 nt, Artificial Sequence
  Description of Artificial Sequence: Synthetic oligonucleotide
caaaucguaauagguguau

SEQ ID NO: 399171 - RNA, 19 nt, Artificial Sequence
  Description of Artificial Sequence: Synthetic oligonucleotide
gguggagagugggccacgg

SEQ ID NO: 399172 - RNA, 19 nt, Artificial Sequence
  Description of Artificial Sequence: Synthetic oligonucleotide
agcuauggcuggugggcuu

SEQ ID NO: 399173 - RNA, 19 nt, Artificial Sequence
  Description of Artificial Sequence: Synthetic oligonucleotide
uuuccauaucuggccuauc

SEQ ID NO: 399174 - RNA, 19 nt, Artificial Sequence
  Description of Artificial Sequence: Synthetic oligonucleotide
uuguggccccaaguaggca

SEQ ID NO: 399175 - RNA, 19 nt, Artificial Sequence
  Description of Artificial Sequence: Synthetic oligonucleotide
guuggagcagaguccugcu

SEQ ID NO: 399176 - RNA, 19 nt, Artificial Sequence
  Description of Artificial Sequence: Synthetic oligonucleotide
gccuaguagccccugcaca

SEQ ID NO: 399177 - RNA, 19 nt, Artificial Sequence
  Description of Artificial Sequence: Synthetic oligonucleotide
caugcagcccggccccaug

SEQ ID NO: 399178 - RNA, 19 nt, Artificial Sequence
  Description of Artificial Sequence: Synthetic oligonucleotide
cccaaguaggcagugccac

SEQ ID NO: 399179 - RNA, 19 nt, Artificial Sequence
  Description of Artificial Sequence: Synthetic oligonucleotide
cuggcggcguacacaguca

SEQ ID NO: 399180 - RNA, 19 nt, Artificial Sequence
  Description of Artificial Sequence: Synthetic oligonucleotide
gccuccgucugguuauccc

SEQ ID NO: 399181 - RNA, 19 nt, Artificial Sequence
  Description of Artificial Sequence: Synthetic oligonucleotide
aguucuggccucaguguua

SEQ ID NO: 399182 - RNA, 19 nt, Artificial Sequence
  Description of Artificial Sequence: Synthetic oligonucleotide
guggaaguugguccuuggu

SEQ ID NO: 399183 - RNA, 19 nt, Artificial Sequence
  Description of Artificial Sequence: Synthetic oligonucleotide
cucacgcaguuucucaggu

SEQ ID NO: 399184 - RNA, 19 nt, Artificial Sequence
  Description of Artificial Sequence: Synthetic oligonucleotide
ccaggcgguuuccaacagg

SEQ ID NO: 399185 - RNA, 19 nt, Artificial Sequence
  Description of Artificial Sequence: Synthetic oligonucleotide
gcuuuagcaugcgugaggu

SEQ ID NO: 399186 - RNA, 19 nt, Artificial Sequence
  Description of Artificial Sequence: Synthetic oligonucleotide
gggaaauaccagagucccc

SEQ ID NO: 399187 - RNA, 19 nt, Artificial Sequence
  Description of Artificial Sequence: Synthetic oligonucleotide
gguagauaucaggcagcug

SEQ ID NO: 399188 - RNA, 19 nt, Artificial Sequence
  Description of Artificial Sequence: Synthetic oligonucleotide
acacgguaccgaugcuaaa

SEQ ID NO: 399189 - RNA, 19 nt, Artificial Sequence
  Description of Artificial Sequence: Synthetic oligonucleotide
gacggaggaucuugaacuu

SEQ ID NO: 399190 - RNA, 19 nt, Artificial Sequence
  Description of Artificial Sequence: Synthetic oligonucleotide
agggaccuugacagggaca

SEQ ID NO: 399191 - RNA, 19 nt, Artificial Sequence
  Description of Artificial Sequence: Synthetic oligonucleotide
gcuaaaggugauggcucug

SEQ ID NO: 399192 - RNA, 19 nt, Artificial Sequence
  Description of Artificial Sequence: Synthetic oligonucleotide
gcuauggcuggugggcuug

SEQ ID NO: 399193 - RNA, 19 nt, Artificial Sequence
  Description of Artificial Sequence: Synthetic oligonucleotide
ggccuuguggccccaagua

SEQ ID NO: 399194 - RNA, 19 nt, Artificial Sequence
  Description of Artificial Sequence: Synthetic oligonucleotide
agcgugcccucaggguagg

SEQ ID NO: 399195 - RNA, 19 nt, Artificial Sequence
  Description of Artificial Sequence: Synthetic oligonucleotide
ccgucugguuaucccacag

SEQ ID NO: 399196 - RNA, 19 nt, Artificial Sequence
  Description of Artificial Sequence: Synthetic oligonucleotide
gcuguucuagggagucugc

SEQ ID NO: 399197 - RNA, 19 nt, Artificial Sequence
  Description of Artificial Sequence: Synthetic oligonucleotide
gagcuagacgagggaucac

SEQ ID NO: 399198 - RNA, 19 nt, Artificial Sequence
  Description of Artificial Sequence: Synthetic oligonucleotide
ccuccgucugguuauccca

SEQ ID NO: 399199 - RNA, 19 nt, Artificial Sequence
  Description of Artificial Sequence: Synthetic oligonucleotide
gagcccgagauggcaucac

SEQ ID NO: 399200 - RNA, 19 nt, Artificial Sequence
  Description of Artificial Sequence: Synthetic oligonucleotide
ggcucaugagaggugaagu

SEQ ID NO: 399201 - RNA, 19 nt, Artificial Sequence
  Description of Artificial Sequence: Synthetic oligonucleotide
acgcaguuucucaggugga

SEQ ID NO: 399202 - RNA, 19 nt, Artificial Sequence
  Description of Artificial Sequence: Synthetic oligonucleotide
guccccuugcaaucuuugu

SEQ ID NO: 399203 - RNA, 19 nt, Artificial Sequence
  Description of Artificial Sequence: Synthetic oligonucleotide
cccauggcccaguugucuc

SEQ ID NO: 399204 - RNA, 19 nt, Artificial Sequence
  Description of Artificial Sequence: Synthetic oligonucleotide
ccaaaucguaauaggugua

SEQ ID NO: 399205 - RNA, 19 nt, Artificial Sequence
  Description of Artificial Sequence: Synthetic oligonucleotide
caggacggaggaucuugaa

SEQ ID NO: 399206 - RNA, 19 nt, Artificial Sequence
  Description of Artificial Sequence: Synthetic oligonucleotide
guaaggggucugggaugcc

SEQ ID NO: 399207 - RNA, 19 nt, Artificial Sequence
  Description of Artificial Sequence: Synthetic oligonucleotide
gaccugacacuggguuuuc

SEQ ID NO: 399208 - RNA, 19 nt, Artificial Sequence
  Description of Artificial Sequence: Synthetic oligonucleotide
cgaagugcacgcuccucug

SEQ ID NO: 399209 - RNA, 19 nt, Artificial Sequence
  Description of Artificial Sequence: Synthetic oligonucleotide
aggcgguuuccaacaggcu

SEQ ID NO: 399210 - RNA, 19 nt, Artificial Sequence
  Description of Artificial Sequence: Synthetic oligonucleotide
gacagaguggugggccgua

SEQ ID NO: 399211 - RNA, 19 nt, Artificial Sequence
  Description of Artificial Sequence: Synthetic oligonucleotide
cagugcucgcuggaaggca

SEQ ID NO: 399212 - RNA, 19 nt, Artificial Sequence
  Description of Artificial Sequence: Synthetic oligonucleotide
aggcgaaggccggucuggu

SEQ ID NO: 399213 - RNA, 19 nt, Artificial Sequence
  Description of Artificial Sequence: Synthetic oligonucleotide
ggccguccugccaugcagc

SEQ ID NO: 399214 - RNA, 19 nt, Artificial Sequence
  Description of Artificial Sequence: Synthetic oligonucleotide
ggacacgguaccgaugcua

SEQ ID NO: 399215 - RNA, 19 nt, Artificial Sequence
  Description of Artificial Sequence: Synthetic oligonucleotide
aggucccauccuggacagg

SEQ ID NO: 399216 - RNA, 19 nt, Artificial Sequence
  Description of Artificial Sequence: Synthetic oligonucleotide
ccaaguaggcagugccaca

SEQ ID NO: 399217 - RNA, 19 nt, Artificial Sequence
  Description of Artificial Sequence: Synthetic oligonucleotide
cauggcccaguugucucaa

SEQ ID NO: 399218 - RNA, 19 nt, Artificial Sequence
  Description of Artificial Sequence: Synthetic oligonucleotide
cuggccguccugccaugca

SEQ ID NO: 399219 - RNA, 19 nt, Artificial Sequence
  Description of Artificial Sequence: Synthetic oligonucleotide
cacccagcuggcggcguac

SEQ ID NO: 399220 - RNA, 19 nt, Artificial Sequence
  Description of Artificial Sequence: Synthetic oligonucleotide
gagccagggcuuggcuuuc

SEQ ID NO: 399221 - RNA, 19 nt, Artificial Sequence
  Description of Artificial Sequence: Synthetic oligonucleotide
ggagcccgagauggcauca

SEQ ID NO: 399222 - RNA, 19 nt, Artificial Sequence
  Description of Artificial Sequence: Synthetic oligonucleotide
caaaguccagcgggcaccu

SEQ ID NO: 399223 - RNA, 19 nt, Artificial Sequence
  Description of Artificial Sequence: Synthetic oligonucleotide
cgugacccuuccccagugg

SEQ ID NO: 399224 - RNA, 19 nt, Artificial Sequence
  Description of Artificial Sequence: Synthetic oligonucleotide
gcugcggaagcgugcccuc

SEQ ID NO: 399225 - RNA, 19 nt, Artificial Sequence
  Description of Artificial Sequence: Synthetic oligonucleotide
ccccaaguaggcagugcca

SEQ ID NO: 399226 - RNA, 19 nt, Artificial Sequence
  Description of Artificial Sequence: Synthetic oligonucleotide
ggcggcguacacagucaug

SEQ ID NO: 399227 - RNA, 19 nt, Artificial Sequence
  Description of Artificial Sequence: Synthetic oligonucleotide
gcuagacgagggaucacgu

SEQ ID NO: 399228 - RNA, 19 nt, Artificial Sequence
  Description of Artificial Sequence: Synthetic oligonucleotide
gacuuacgagccagggcuu

SEQ ID NO: 399229 - RNA, 19 nt, Artificial Sequence
  Description of Artificial Sequence: Synthetic oligonucleotide
ggccggggaggccacagcu

SEQ ID NO: 399230 - RNA, 19 nt, Artificial Sequence
  Description of Artificial Sequence: Synthetic oligonucleotide
gcugccucagguaggggcu

SEQ ID NO: 399231 - RNA, 19 nt, Artificial Sequence
  Description of Artificial Sequence: Synthetic oligonucleotide
ccaguugucucaagccacu

SEQ ID NO: 399232 - RNA, 19 nt, Artificial Sequence
  Description of Artificial Sequence: Synthetic oligonucleotide
cagucucaucaaaacccuu

SEQ ID NO: 399233 - RNA, 19 nt, Artificial Sequence
  Description of Artificial Sequence: Synthetic oligonucleotide
gugggccacggagcccgag

SEQ ID NO: 399234 - RNA, 19 nt, Artificial Sequence
  Description of Artificial Sequence: Synthetic oligonucleotide
accacccagcuggcggcgu

SEQ ID NO: 399235 - RNA, 19 nt, Artificial Sequence
  Description of Artificial Sequence: Synthetic oligonucleotide
gcaguacgugguccacaga

SEQ ID NO: 399236 - RNA, 19 nt, Artificial Sequence
  Description of Artificial Sequence: Synthetic oligonucleotide
gcuaagggugcaggacgga

SEQ ID NO: 399237 - RNA, 19 nt, Artificial Sequence
  Description of Artificial Sequence: Synthetic oligonucleotide
cugcggaagcgugcccuca

SEQ ID NO: 399238 - RNA, 19 nt, Artificial Sequence
  Description of Artificial Sequence: Synthetic oligonucleotide
gugacgugugcagcccugu

SEQ ID NO: 399239 - RNA, 19 nt, Artificial Sequence
  Description of Artificial Sequence: Synthetic oligonucleotide
ccagcuggcggcguacaca

SEQ ID NO: 399240 - RNA, 19 nt, Artificial Sequence
  Description of Artificial Sequence: Synthetic oligonucleotide
gcaggucaggguagauauc

SEQ ID NO: 399241 - RNA, 19 nt, Artificial Sequence
  Description of Artificial Sequence: Synthetic oligonucleotide
ggccuagaggucccauccu

SEQ ID NO: 399242 - RNA, 19 nt, Artificial Sequence
  Description of Artificial Sequence: Synthetic oligonucleotide
ggcugcggaagcgugcccu

SEQ ID NO: 399243 - RNA, 19 nt, Artificial Sequence
  Description of Artificial Sequence: Synthetic oligonucleotide
cagccuccgucugguuauc

SEQ ID NO: 399244 - RNA, 19 nt, Artificial Sequence
  Description of Artificial Sequence: Synthetic oligonucleotide
gggccacggagcccgagau

SEQ ID NO: 399245 - RNA, 19 nt, Artificial Sequence
  Description of Artificial Sequence: Synthetic oligonucleotide
gcgugaggugcagccaugu

SEQ ID NO: 399246 - RNA, 19 nt, Artificial Sequence
  Description of Artificial Sequence: Synthetic oligonucleotide
cagccugauugaggucaaa

SEQ ID NO: 399247 - RNA, 19 nt, Artificial Sequence
  Description of Artificial Sequence: Synthetic oligonucleotide
cagccauguaaagcacguu

SEQ ID NO: 399248 - RNA, 19 nt, Artificial Sequence
  Description of Artificial Sequence: Synthetic oligonucleotide
cccuggccguccugccaug

SEQ ID NO: 399249 - RNA, 19 nt, Artificial Sequence
  Description of Artificial Sequence: Synthetic oligonucleotide
gccggggaggccacagcua

SEQ ID NO: 399250 - RNA, 19 nt, Artificial Sequence
  Description of Artificial Sequence: Synthetic oligonucleotide
ggguccccuugcaaucuuu

SEQ ID NO: 399251 - RNA, 19 nt, Artificial Sequence
  Description of Artificial Sequence: Synthetic oligonucleotide
cggccccauggcccaguug

SEQ ID NO: 399252 - RNA, 19 nt, Artificial Sequence
  Description of Artificial Sequence: Synthetic oligonucleotide
cguucacgaagugcacgcu

SEQ ID NO: 399253 - RNA, 19 nt, Artificial Sequence
  Description of Artificial Sequence: Synthetic oligonucleotide
ccggccccauggcccaguu

SEQ ID NO: 399254 - RNA, 19 nt, Artificial Sequence
  Description of Artificial Sequence: Synthetic oligonucleotide
gaauuaauagucuauauug

SEQ ID NO: 399255 - RNA, 19 nt, Artificial Sequence
  Description of Artificial Sequence: Synthetic oligonucleotide
uagaaguagaguaggaacg

SEQ ID NO: 399256 - RNA, 19 nt, Artificial Sequence
  Description of Artificial Sequence: Synthetic oligonucleotide
uuacauuccacucuuggag

SEQ ID NO: 399257 - RNA, 19 nt, Artificial Sequence
  Description of Artificial Sequence: Synthetic oligonucleotide
ucuauauuguacaaauuug

SEQ ID NO: 399258 - RNA, 19 nt, Artificial Sequence
  Description of Artificial Sequence: Synthetic oligonucleotide
ugguucuaaacuaauaagc

SEQ ID NO: 399259 - RNA, 19 nt, Artificial Sequence
  Description of Artificial Sequence: Synthetic oligonucleotide
cauguugucgugaagaagc

SEQ ID NO: 399260 - RNA, 19 nt, Artificial Sequence
  Description of Artificial Sequence: Synthetic oligonucleotide
uucauugcauacucgaugg

SEQ ID NO: 399261 - RNA, 19 nt, Artificial Sequence
  Description of Artificial Sequence: Synthetic oligonucleotide
ucgaaugccacaaaguagc

SEQ ID NO: 399262 - RNA, 19 nt, Artificial Sequence
  Description of Artificial Sequence: Synthetic oligonucleotide
ugaagcuagcguaaggacg

SEQ ID NO: 399263 - RNA, 19 nt, Artificial Sequence
  Description of Artificial Sequence: Synthetic oligonucleotide
uaucgguuggaauagcugg

SEQ ID NO: 399264 - RNA, 19 nt, Artificial Sequence
  Description of Artificial Sequence: Synthetic oligonucleotide
uuucgcgaggcuuugaagg

SEQ ID NO: 399265 - RNA, 19 nt, Artificial Sequence
  Description of Artificial Sequence: Synthetic oligonucleotide
uaaacuaauaagcuguaaa

SEQ ID NO: 399266 - RNA, 19 nt, Artificial Sequence
  Description of Artificial Sequence: Synthetic oligonucleotide
ugcuuuauaauuuuguaau

SEQ ID NO: 399267 - RNA, 19 nt, Artificial Sequence
  Description of Artificial Sequence: Synthetic oligonucleotide
augugaguuauuuacacug

SEQ ID NO: 399268 - RNA, 19 nt, Artificial Sequence
  Description of Artificial Sequence: Synthetic oligonucleotide
acuaauaagcuguaaagaa

SEQ ID NO: 399269 - RNA, 19 nt, Artificial Sequence
  Description of Artificial Sequence: Synthetic oligonucleotide
uucauacuuaguuuaaaga

SEQ ID NO: 399270 - RNA, 19 nt, Artificial Sequence
  Description of Artificial Sequence: Synthetic oligonucleotide
ucauguagaaguagaguag

SEQ ID NO: 399271 - RNA, 19 nt, Artificial Sequence
  Description of Artificial Sequence: Synthetic oligonucleotide
aagugggccaccuugugag

SEQ ID NO: 399272 - RNA, 19 nt, Artificial Sequence
  Description of Artificial Sequence: Synthetic oligonucleotide
ucaaucaggagcacuucgg

SEQ ID NO: 399273 - RNA, 19 nt, Artificial Sequence
  Description of Artificial Sequence: Synthetic oligonucleotide
ugcacuuaaggucauuggc

SEQ ID NO: 399274 - RNA, 19 nt, Artificial Sequence
  Description of Artificial Sequence: Synthetic oligonucleotide
acucgauggacuugcaggc

SEQ ID NO: 399275 - RNA, 19 nt, Artificial Sequence
  Description of Artificial Sequence: Synthetic oligonucleotide
caagcaucaggccacaugc

SEQ ID NO: 399276 - RNA, 19 nt, Artificial Sequence
  Description of Artificial Sequence: Synthetic oligonucleotide
gagaagacuucauagccag

SEQ ID NO: 399277 - RNA, 19 nt, Artificial Sequence
  Description of Artificial Sequence: Synthetic oligonucleotide
gauuucaaccauguugucg

SEQ ID NO: 399278 - RNA, 19 nt, Artificial Sequence
  Description of Artificial Sequence: Synthetic oligonucleotide
ucaaucacaaguguguaug

SEQ ID NO: 399279 - RNA, 19 nt, Artificial Sequence
  Description of Artificial Sequence: Synthetic oligonucleotide
aaauugagggacugacuag

SEQ ID NO: 399280 - RNA, 19 nt, Artificial Sequence
  Description of Artificial Sequence: Synthetic oligonucleotide
uucucaagagcaaauggga

SEQ ID NO: 399281 - RNA, 19 nt, Artificial Sequence
  Description of Artificial Sequence: Synthetic oligonucleotide
ugacuagaagugaagcuag

SEQ ID NO: 399282 - RNA, 19 nt, Artificial Sequence
  Description of Artificial Sequence: Synthetic oligonucleotide
gaaaaggaccuucaagagc

SEQ ID NO: 399283 - RNA, 19 nt, Artificial Sequence
  Description of Artificial Sequence: Synthetic oligonucleotide
gugaggacagcucaaagag

SEQ ID NO: 399284 - RNA, 19 nt, Artificial Sequence
  Description of Artificial Sequence: Synthetic oligonucleotide
uguaagaaggugcacugcu

SEQ ID NO: 399285 - RNA, 19 nt, Artificial Sequence
  Description of Artificial Sequence: Synthetic oligonucleotide
guucauacuuaguuuaaag

SEQ ID NO: 399286 - RNA, 19 nt, Artificial Sequence
  Description of Artificial Sequence: Synthetic oligonucleotide
guaaggacgauucucaaga

SEQ ID NO: 399287 - RNA, 19 nt, Artificial Sequence
  Description of Artificial Sequence: Synthetic oligonucleotide
gagugcaucgaggaaaucg

SEQ ID NO: 399288 - RNA, 19 nt, Artificial Sequence
  Description of Artificial Sequence: Synthetic oligonucleotide
uagucuauauuguacaaau

SEQ ID NO: 399289 - RNA, 19 nt, Artificial Sequence
  Description of Artificial Sequence: Synthetic oligonucleotide
aauucuuguaccaggucuc

SEQ ID NO: 399290 - RNA, 19 nt, Artificial Sequence
  Description of Artificial Sequence: Synthetic oligonucleotide
uccaucgaaugccacaaag

SEQ ID NO: 399291 - RNA, 19 nt, Artificial Sequence
  Description of Artificial Sequence: Synthetic oligonucleotide
agaauuaauagucuauauu

SEQ ID NO: 399292 - RNA, 19 nt, Artificial Sequence
  Description of Artificial Sequence: Synthetic oligonucleotide
ucagggauuacauuccacu

SEQ ID NO: 399293 - RNA, 19 nt, Artificial Sequence
  Description of Artificial Sequence: Synthetic oligonucleotide
augggagaaauugagggac

SEQ ID NO: 399294 - RNA, 19 nt, Artificial Sequence
  Description of Artificial Sequence: Synthetic oligonucleotide
  modified_base (4)..(4): a, c, u, g, unknown or other
gaunacccgguuuaucaug

SEQ ID NO: 399295 - RNA, 19 nt, Artificial Sequence
  Description of Artificial Sequence: Synthetic oligonucleotide
uauauuguacaaauuuguu

SEQ ID NO: 399296 - RNA, 19 nt, Artificial Sequence
  Description of Artificial Sequence: Synthetic oligonucleotide
uuagcgaacagccccuacc

SEQ ID NO: 399297 - RNA, 19 nt, Artificial Sequence
  Description of Artificial Sequence: Synthetic oligonucleotide
uguguaugggagaaauuga

SEQ ID NO: 399298 - RNA, 19 nt, Artificial Sequence
  Description of Artificial Sequence: Synthetic oligonucleotide
agcaagcaagaccaaaguc

SEQ ID NO: 399299 - RNA, 19 nt, Artificial Sequence
  Description of Artificial Sequence: Synthetic oligonucleotide
caccaugugaguuauuuac

SEQ ID NO: 399300 - RNA, 19 nt, Artificial Sequence
  Description of Artificial Sequence: Synthetic oligonucleotide
uuuaucgguuggaauagcu

SEQ ID NO: 399301 - RNA, 19 nt, Artificial Sequence
  Description of Artificial Sequence: Synthetic oligonucleotide
aagugaagcuagcguaagg

SEQ ID NO: 399302 - RNA, 19 nt, Artificial Sequence
  Description of Artificial Sequence: Synthetic oligonucleotide
aguggcagauuuccagucc

SEQ ID NO: 399303 - RNA, 19 nt, Artificial Sequence
  Description of Artificial Sequence: Synthetic oligonucleotide
caucgaggaaaucggaugg

SEQ ID NO: 399304 - RNA, 19 nt, Artificial Sequence
  Description of Artificial Sequence: Synthetic oligonucleotide
uuaucgguuggaauagcug

SEQ ID NO: 399305 - RNA, 19 nt, Artificial Sequence
  Description of Artificial Sequence: Synthetic oligonucleotide
agaucaugcuugaucagcc

SEQ ID NO: 399306 - RNA, 19 nt, Artificial Sequence
  Description of Artificial Sequence: Synthetic oligonucleotide
uuuaucaugucagccaggu

SEQ ID NO: 399307 - RNA, 19 nt, Artificial Sequence
  Description of Artificial Sequence: Synthetic oligonucleotide
cuucauugcauacucgaug

SEQ ID NO: 399308 - RNA, 19 nt, Artificial Sequence
  Description of Artificial Sequence: Synthetic oligonucleotide
ugagccucagauuuggaaa

SEQ ID NO: 399309 - RNA, 19 nt, Artificial Sequence
  Description of Artificial Sequence: Synthetic oligonucleotide
uccugauccauaagggacc

SEQ ID NO: 399310 - RNA, 19 nt, Artificial Sequence
  Description of Artificial Sequence: Synthetic oligonucleotide
ucauagcagcccaugagga

SEQ ID NO: 399311 - RNA, 19 nt, Artificial Sequence
  Description of Artificial Sequence: Synthetic oligonucleotide
gauucgagugcaucgagga

SEQ ID NO: 399312 - RNA, 19 nt, Artificial Sequence
  Description of Artificial Sequence: Synthetic oligonucleotide
ugguauaguuccuugaguu

SEQ ID NO: 399313 - RNA, 19 nt, Artificial Sequence
  Description of Artificial Sequence: Synthetic oligonucleotide
acuagaagugaagcuagcg

SEQ ID NO: 399314 - RNA, 19 nt, Artificial Sequence
  Description of Artificial Sequence: Synthetic oligonucleotide
uuuuggaugugaauguguu

SEQ ID NO: 399315 - RNA, 19 nt, Artificial Sequence
  Description of Artificial Sequence: Synthetic oligonucleotide
gagacugcggcugaaguag

SEQ ID NO: 399316 - RNA, 19 nt, Artificial Sequence
  Description of Artificial Sequence: Synthetic oligonucleotide
cauaucuagcuccuucugc

SEQ ID NO: 399317 - RNA, 19 nt, Artificial Sequence
  Description of Artificial Sequence: Synthetic oligonucleotide
uuaaagugggccaccuugu

SEQ ID NO: 399318 - RNA, 19 nt, Artificial Sequence
  Description of Artificial Sequence: Synthetic oligonucleotide
acugacuagaagugaagcu

SEQ ID NO: 399319 - RNA, 19 nt, Artificial Sequence
  Description of Artificial Sequence: Synthetic oligonucleotide
cucaccauugcuaccuccg

SEQ ID NO: 399320 - RNA, 19 nt, Artificial Sequence
  Description of Artificial Sequence: Synthetic oligonucleotide
ugauccauaagggaccaug

SEQ ID NO: 399321 - RNA, 19 nt, Artificial Sequence
  Description of Artificial Sequence: Synthetic oligonucleotide
agcacauuuggugacagug

SEQ ID NO: 399322 - RNA, 19 nt, Artificial Sequence
  Description of Artificial Sequence: Synthetic oligonucleotide
ugugaguuauuuacacugu

SEQ ID NO: 399323 - RNA, 19 nt, Artificial Sequence
  Description of Artificial Sequence: Synthetic oligonucleotide
ucauuaaaguagauacaaa

SEQ ID NO: 399324 - RNA, 19 nt, Artificial Sequence
  Description of Artificial Sequence: Synthetic oligonucleotide
acuacaucgaagucugccu

SEQ ID NO: 399325 - RNA, 19 nt, Artificial Sequence
  Description of Artificial Sequence: Synthetic oligonucleotide
gaugcacuuaaggucauug

SEQ ID NO: 399326 - RNA, 19 nt, Artificial Sequence
  Description of Artificial Sequence: Synthetic oligonucleotide
agguaucuugcugggaucc

SEQ ID NO: 399327 - RNA, 19 nt, Artificial Sequence
  Description of Artificial Sequence: Synthetic oligonucleotide
gagaaauugagggacugac

SEQ ID NO: 399328 - RNA, 19 nt, Artificial Sequence
  Description of Artificial Sequence: Synthetic oligonucleotide
acaccuggaggcaaugucc

SEQ ID NO: 399329 - RNA, 19 nt, Artificial Sequence
  Description of Artificial Sequence: Synthetic oligonucleotide
aaacauuagcauccuggaa

SEQ ID NO: 399330 - RNA, 19 nt, Artificial Sequence
  Description of Artificial Sequence: Synthetic oligonucleotide
agcuaaguggaaaagaaaa

SEQ ID NO: 399331 - RNA, 19 nt, Artificial Sequence
  Description of Artificial Sequence: Synthetic oligonucleotide
agggauuacauuccacucu

SEQ ID NO: 399332 - RNA, 19 nt, Artificial Sequence
  Description of Artificial Sequence: Synthetic oligonucleotide
gauacaugcccaaauccac

SEQ ID NO: 399333 - RNA, 19 nt, Artificial Sequence
  Description of Artificial Sequence: Synthetic oligonucleotide
agaaggugcacugcuuagc

SEQ ID NO: 399334 - RNA, 19 nt, Artificial Sequence
  Description of Artificial Sequence: Synthetic oligonucleotide
gguuuaucaugucagccag

SEQ ID NO: 399335 - RNA, 19 nt, Artificial Sequence
  Description of Artificial Sequence: Synthetic oligonucleotide
cauaagggaccaugaagag

SEQ ID NO: 399336 - RNA, 19 nt, Artificial Sequence
  Description of Artificial Sequence: Synthetic oligonucleotide
ugauuauauaccaguucau

SEQ ID NO: 399337 - RNA, 19 nt, Artificial Sequence
  Description of Artificial Sequence: Synthetic oligonucleotide
caaucacaaguguguaugg

SEQ ID NO: 399338 - RNA, 19 nt, Artificial Sequence
  Description of Artificial Sequence: Synthetic oligonucleotide
  modified_base (9)..(9): a, c, u, g, unknown or other
ucucggaunacccgguuua

SEQ ID NO: 399339 - RNA, 19 nt, Artificial Sequence
  Description of Artificial Sequence: Synthetic oligonucleotide
agugaagcuagcguaagga

SEQ ID NO: 399340 - RNA, 19 nt, Artificial Sequence
  Description of Artificial Sequence: Synthetic oligonucleotide
ucgugaagaagcuuccuuc

SEQ ID NO: 399341 - RNA, 19 nt, Artificial Sequence
  Description of Artificial Sequence: Synthetic oligonucleotide
agcuguuugaagucuggug

SEQ ID NO: 399342 - RNA, 19 nt, Artificial Sequence
  Description of Artificial Sequence: Synthetic oligonucleotide
ggaaaucggauggagaucc

SEQ ID NO: 399343 - RNA, 19 nt, Artificial Sequence
  Description of Artificial Sequence: Synthetic oligonucleotide
ccaacaguaccuuugucgg

SEQ ID NO: 399344 - RNA, 19 nt, Artificial Sequence
  Description of Artificial Sequence: Synthetic oligonucleotide
gaagcuagcguaaggacga

SEQ ID NO: 399345 - RNA, 19 nt, Artificial Sequence
  Description of Artificial Sequence: Synthetic oligonucleotide
aguggcuuauauuaagauu

SEQ ID NO: 399346 - RNA, 19 nt, Artificial Sequence
  Description of Artificial Sequence: Synthetic oligonucleotide
ucaagcugacaucauuaaa

SEQ ID NO: 399347 - RNA, 19 nt, Artificial Sequence
  Description of Artificial Sequence: Synthetic oligonucleotide
augcuuugcacccgaguuc

SEQ ID NO: 399348 - RNA, 19 nt, Artificial Sequence
  Description of Artificial Sequence: Synthetic oligonucleotide
uagcgaacagccccuacca

SEQ ID NO: 399349 - RNA, 19 nt, Artificial Sequence
  Description of Artificial Sequence: Synthetic oligonucleotide
uggagagaccagcugggcc

SEQ ID NO: 399350 - RNA, 19 nt, Artificial Sequence
  Description of Artificial Sequence: Synthetic oligonucleotide
guguaugggagaaauugag

SEQ ID NO: 399351 - RNA, 19 nt, Artificial Sequence
  Description of Artificial Sequence: Synthetic oligonucleotide
uaaggacgauucucaagag

SEQ ID NO: 399352 - RNA, 19 nt, Artificial Sequence
  Description of Artificial Sequence: Synthetic oligonucleotide
guugucgucccuguuaccc

SEQ ID NO: 399353 - RNA, 19 nt, Artificial Sequence
  Description of Artificial Sequence: Synthetic oligonucleotide
uucgagugcaucgaggaaa

SEQ ID NO: 399354 - RNA, 19 nt, Artificial Sequence
  Description of Artificial Sequence: Synthetic oligonucleotide
aguagaguaggaacgugag

SEQ ID NO: 399355 - RNA, 19 nt, Artificial Sequence
  Description of Artificial Sequence: Synthetic oligonucleotide
uugucgugaagaagcuucc

SEQ ID NO: 399356 - RNA, 19 nt, Artificial Sequence
  Description of Artificial Sequence: Synthetic oligonucleotide
cuugugcacucccagaguc

SEQ ID NO: 399357 - RNA, 19 nt, Artificial Sequence
  Description of Artificial Sequence: Synthetic oligonucleotide
aucgaaugccacaaaguag

SEQ ID NO: 399358 - RNA, 19 nt, Artificial Sequence
  Description of Artificial Sequence: Synthetic oligonucleotide
  modified_base (15)..(15): a, c, u, g, unknown or other
aagcccucucggaunaccc

SEQ ID NO: 399359 - RNA, 19 nt, Artificial Sequence
  Description of Artificial Sequence: Synthetic oligonucleotide
uagcguuugagcuguuuga

SEQ ID NO: 399360 - RNA, 19 nt, Artificial Sequence
  Description of Artificial Sequence: Synthetic oligonucleotide
uucucucacagagaggccu

SEQ ID NO: 399361 - RNA, 19 nt, Artificial Sequence
  Description of Artificial Sequence: Synthetic oligonucleotide
gcaucuaacacaugcuuug

SEQ ID NO: 399362 - RNA, 19 nt, Artificial Sequence
  Description of Artificial Sequence: Synthetic oligonucleotide
uucgcgaggcuuugaaggc

SEQ ID NO: 399363 - RNA, 19 nt, Artificial Sequence
  Description of Artificial Sequence: Synthetic oligonucleotide
auugcuaccuccgguacug

SEQ ID NO: 399364 - RNA, 19 nt, Artificial Sequence
  Description of Artificial Sequence: Synthetic oligonucleotide
ugucccaucuggugugggg

SEQ ID NO: 399365 - RNA, 19 nt, Artificial Sequence
  Description of Artificial Sequence: Synthetic oligonucleotide
uacaccuggaggcaauguc

SEQ ID NO: 399366 - RNA, 19 nt, Artificial Sequence
  Description of Artificial Sequence: Synthetic oligonucleotide
uccaaguggcuuauauuaa

SEQ ID NO: 399367 - RNA, 19 nt, Artificial Sequence
  Description of Artificial Sequence: Synthetic oligonucleotide
cacuacaucgaagucugcc

SEQ ID NO: 399368 - RNA, 19 nt, Artificial Sequence
  Description of Artificial Sequence: Synthetic oligonucleotide
ugcuuugcacccgaguuca

SEQ ID NO: 399369 - RNA, 19 nt, Artificial Sequence
  Description of Artificial Sequence: Synthetic oligonucleotide
auacucgauggacuugcag

SEQ ID NO: 399370 - RNA, 19 nt, Artificial Sequence
  Description of Artificial Sequence: Synthetic oligonucleotide
uucaagagcuaaguggaaa

SEQ ID NO: 399371 - RNA, 19 nt, Artificial Sequence
  Description of Artificial Sequence: Synthetic oligonucleotide
uggaauagcugguucuaaa

SEQ ID NO: 399372 - RNA, 19 nt, Artificial Sequence
  Description of Artificial Sequence: Synthetic oligonucleotide
ugcaucgaggaaaucggau

SEQ ID NO: 399373 - RNA, 19 nt, Artificial Sequence
  Description of Artificial Sequence: Synthetic oligonucleotide
guaguccuuaaagugggcc

SEQ ID NO: 399374 - RNA, 19 nt, Artificial Sequence
  Description of Artificial Sequence: Synthetic oligonucleotide
uacaugcccaaauccacuc

SEQ ID NO: 399375 - RNA, 19 nt, Artificial Sequence
  Description of Artificial Sequence: Synthetic oligonucleotide
ugcagucgggcaagugugg

SEQ ID NO: 399376 - RNA, 19 nt, Artificial Sequence
  Description of Artificial Sequence: Synthetic oligonucleotide
gaagugaagcuagcguaag

SEQ ID NO: 399377 - RNA, 19 nt, Artificial Sequence
  Description of Artificial Sequence: Synthetic oligonucleotide
ucgaggaaaucggauggag

SEQ ID NO: 399378 - RNA, 19 nt, Artificial Sequence
  Description of Artificial Sequence: Synthetic oligonucleotide
aggucggaggcuuuuguga

SEQ ID NO: 399379 - RNA, 19 nt, Artificial Sequence
  Description of Artificial Sequence: Synthetic oligonucleotide
gaccuucaagagcuaagug

SEQ ID NO: 399380 - RNA, 19 nt, Artificial Sequence
  Description of Artificial Sequence: Synthetic oligonucleotide
cauugugaaggacucgcuc

SEQ ID NO: 399381 - RNA, 19 nt, Artificial Sequence
  Description of Artificial Sequence: Synthetic oligonucleotide
ggaauagcugguucuaaac

SEQ ID NO: 399382 - RNA, 19 nt, Artificial Sequence
  Description of Artificial Sequence: Synthetic oligonucleotide
uccggauacaugcccaaau

SEQ ID NO: 399383 - RNA, 19 nt, Artificial Sequence
  Description of Artificial Sequence: Synthetic oligonucleotide
ggcaaguguggcaucaucg

SEQ ID NO: 399384 - RNA, 19 nt, Artificial Sequence
  Description of Artificial Sequence: Synthetic oligonucleotide
gaucccaucagcaguguga

SEQ ID NO: 399385 - RNA, 19 nt, Artificial Sequence
  Description of Artificial Sequence: Synthetic oligonucleotide
ugucgucccuguuacccag

SEQ ID NO: 399386 - RNA, 19 nt, Artificial Sequence
  Description of Artificial Sequence: Synthetic oligonucleotide
caugcccaaauccacucug

SEQ ID NO: 399387 - RNA, 19 nt, Artificial Sequence
  Description of Artificial Sequence: Synthetic oligonucleotide
uugugcacucccagagucc

SEQ ID NO: 399388 - RNA, 19 nt, Artificial Sequence
  Description of Artificial Sequence: Synthetic oligonucleotide
agucugguguggaaggagg

SEQ ID NO: 399389 - RNA, 19 nt, Artificial Sequence
  Description of Artificial Sequence: Synthetic oligonucleotide
gaagacuucauagccagcu

SEQ ID NO: 399390 - RNA, 19 nt, Artificial Sequence
  Description of Artificial Sequence: Synthetic oligonucleotide
ugaucagccggaugaugca

SEQ ID NO: 399391 - RNA, 19 nt, Artificial Sequence
  Description of Artificial Sequence: Synthetic oligonucleotide
aucaugucagccaggucgg

SEQ ID NO: 399392 - RNA, 19 nt, Artificial Sequence
  Description of Artificial Sequence: Synthetic oligonucleotide
guuucgcgaggcuuugaag

SEQ ID NO: 399393 - RNA, 19 nt, Artificial Sequence
  Description of Artificial Sequence: Synthetic oligonucleotide
ugcuuagcgaacagccccu

SEQ ID NO: 399394 - RNA, 19 nt, Artificial Sequence
  Description of Artificial Sequence: Synthetic oligonucleotide
gguuuaucgguuggaauag

SEQ ID NO: 399395 - RNA, 19 nt, Artificial Sequence
  Description of Artificial Sequence: Synthetic oligonucleotide
auaagggaccaugaagagu

SEQ ID NO: 399396 - RNA, 19 nt, Artificial Sequence
  Description of Artificial Sequence: Synthetic oligonucleotide
ugcccaaauccacucugga

SEQ ID NO: 399397 - RNA, 19 nt, Artificial Sequence
  Description of Artificial Sequence: Synthetic oligonucleotide
acaaguguguaugggagaa

SEQ ID NO: 399398 - RNA, 19 nt, Artificial Sequence
  Description of Artificial Sequence: Synthetic oligonucleotide
aguccuagcagggagcuau

SEQ ID NO: 399399 - RNA, 19 nt, Artificial Sequence
  Description of Artificial Sequence: Synthetic oligonucleotide
caaguguggcaucaucgug

SEQ ID NO: 399400 - RNA, 19 nt, Artificial Sequence
  Description of Artificial Sequence: Synthetic oligonucleotide
ucgagugcaucgaggaaau

SEQ ID NO: 399401 - RNA, 19 nt, Artificial Sequence
  Description of Artificial Sequence: Synthetic oligonucleotide
agcaaacccaaauguguau

SEQ ID NO: 399402 - RNA, 19 nt, Artificial Sequence
  Description of Artificial Sequence: Synthetic oligonucleotide
gcaucgaggaaaucggaug

SEQ ID NO: 399403 - RNA, 19 nt, Artificial Sequence
  Description of Artificial Sequence: Synthetic oligonucleotide
ggcaaguagagccgcaccc

SEQ ID NO: 399404 - RNA, 19 nt, Artificial Sequence
  Description of Artificial Sequence: Synthetic oligonucleotide
aguagagccgcaccccagu

SEQ ID NO: 399405 - RNA, 19 nt, Artificial Sequence
  Description of Artificial Sequence: Synthetic oligonucleotide
ggaaaauucugccccugug

SEQ ID NO: 399406 - RNA, 19 nt, Artificial Sequence
  Description of Artificial Sequence: Synthetic oligonucleotide
  modified_base (3)..(3): a, c, u, g, unknown or other
aunacccgguuuaucaugu

SEQ ID NO: 399407 - RNA, 19 nt, Artificial Sequence
  Description of Artificial Sequence: Synthetic oligonucleotide
uuaugcaccuggacucgcu

SEQ ID NO: 399408 - RNA, 19 nt, Artificial Sequence
  Description of Artificial Sequence: Synthetic oligonucleotide
gauccauaagggaccauga

SEQ ID NO: 399409 - RNA, 19 nt, Artificial Sequence
  Description of Artificial Sequence: Synthetic oligonucleotide
agcguaaggacgauucuca

SEQ ID NO: 399410 - RNA, 19 nt, Artificial Sequence
  Description of Artificial Sequence: Synthetic oligonucleotide
auaguuccuugaguugggg

SEQ ID NO: 399411 - RNA, 19 nt, Artificial Sequence
  Description of Artificial Sequence: Synthetic oligonucleotide
uugcauacucgauggacuu

SEQ ID NO: 399412 - RNA, 19 nt, Artificial Sequence
  Description of Artificial Sequence: Synthetic oligonucleotide
gauccuugcugaucuucac

SEQ ID NO: 399413 - RNA, 19 nt, Artificial Sequence
  Description of Artificial Sequence: Synthetic oligonucleotide
ggaacgugaggacagcuca

SEQ ID NO: 399414 - RNA, 19 nt, Artificial Sequence
  Description of Artificial Sequence: Synthetic oligonucleotide
agagccgcaccccagugaa

SEQ ID NO: 399415 - RNA, 19 nt, Artificial Sequence
  Description of Artificial Sequence: Synthetic oligonucleotide
agcaccaugugaguuauuu

SEQ ID NO: 399416 - RNA, 19 nt, Artificial Sequence
  Description of Artificial Sequence: Synthetic oligonucleotide
ccggaugaugcacuuaagg

SEQ ID NO: 399417 - RNA, 19 nt, Artificial Sequence
  Description of Artificial Sequence: Synthetic oligonucleotide
uugucgggcacuuggguuu

SEQ ID NO: 399418 - RNA, 19 nt, Artificial Sequence
  Description of Artificial Sequence: Synthetic oligonucleotide
uaucagccuccguuuccgg

SEQ ID NO: 399419 - RNA, 19 nt, Artificial Sequence
  Description of Artificial Sequence: Synthetic oligonucleotide
gaggguguaagaaggugca

SEQ ID NO: 399420 - RNA, 19 nt, Artificial Sequence
  Description of Artificial Sequence: Synthetic oligonucleotide
guuuaucaugucagccagg

SEQ ID NO: 399421 - RNA, 19 nt, Artificial Sequence
  Description of Artificial Sequence: Synthetic oligonucleotide
accaucguacuugaucuca

SEQ ID NO: 399422 - RNA, 19 nt, Artificial Sequence
  Description of Artificial Sequence: Synthetic oligonucleotide
uugucgucccuguuaccca

SEQ ID NO: 399423 - RNA, 19 nt, Artificial Sequence
  Description of Artificial Sequence: Synthetic oligonucleotide
uagcguaaggacgauucuc

SEQ ID NO: 399424 - RNA, 19 nt, Artificial Sequence
  Description of Artificial Sequence: Synthetic oligonucleotide
cagggagcuaucagccucc

SEQ ID NO: 399425 - RNA, 19 nt, Artificial Sequence
  Description of Artificial Sequence: Synthetic oligonucleotide
ugucgucccggauucgagu

SEQ ID NO: 399426 - RNA, 19 nt, Artificial Sequence
  Description of Artificial Sequence: Synthetic oligonucleotide
uggcuuauauuaagauuuu

SEQ ID NO: 399427 - RNA, 19 nt, Artificial Sequence
  Description of Artificial Sequence: Synthetic oligonucleotide
cuagaagugaagcuagcgu

SEQ ID NO: 399428 - RNA, 19 nt, Artificial Sequence
  Description of Artificial Sequence: Synthetic oligonucleotide
gucgucccggauucgagug

SEQ ID NO: 399429 - RNA, 19 nt, Artificial Sequence
  Description of Artificial Sequence: Synthetic oligonucleotide
uagagccgcaccccaguga

SEQ ID NO: 399430 - RNA, 19 nt, Artificial Sequence
  Description of Artificial Sequence: Synthetic oligonucleotide
guuacccagcacaugugug

SEQ ID NO: 399431 - RNA, 19 nt, Artificial Sequence
  Description of Artificial Sequence: Synthetic oligonucleotide
gcuguuugaagucuggugu

SEQ ID NO: 399432 - RNA, 19 nt, Artificial Sequence
  Description of Artificial Sequence: Synthetic oligonucleotide
ggcuuuugugacuugcuuc

SEQ ID NO: 399433 - RNA, 19 nt, Artificial Sequence
  Description of Artificial Sequence: Synthetic oligonucleotide
uagguaucuugcugggauc

SEQ ID NO: 399434 - RNA, 19 nt, Artificial Sequence
  Description of Artificial Sequence: Synthetic oligonucleotide
cugacuagaagugaagcua

SEQ ID NO: 399435 - RNA, 19 nt, Artificial Sequence
  Description of Artificial Sequence: Synthetic oligonucleotide
  modified_base (19)..(19): a, c, u, g, unknown or other
uccuaagcccucucggaun

SEQ ID NO: 399436 - RNA, 19 nt, Artificial Sequence
  Description of Artificial Sequence: Synthetic oligonucleotide
uuuccggauacaugcccaa

SEQ ID NO: 399437 - RNA, 19 nt, Artificial Sequence
  Description of Artificial Sequence: Synthetic oligonucleotide
auccauaagggaccaugaa

SEQ ID NO: 399438 - RNA, 19 nt, Artificial Sequence
  Description of Artificial Sequence: Synthetic oligonucleotide
ugacugccuucaaucacaa

SEQ ID NO: 399439 - RNA, 19 nt, Artificial Sequence
  Description of Artificial Sequence: Synthetic oligonucleotide
uugcugcaugcugugacug

SEQ ID NO: 399440 - RNA, 19 nt, Artificial Sequence
  Description of Artificial Sequence: Synthetic oligonucleotide
accuccgguacuggaauuc

SEQ ID NO: 399441 - RNA, 19 nt, Artificial Sequence
  Description of Artificial Sequence: Synthetic oligonucleotide
aacgugaggacagcucaaa

SEQ ID NO: 399442 - RNA, 19 nt, Artificial Sequence
  Description of Artificial Sequence: Synthetic oligonucleotide
agaucccaucagcagugug

SEQ ID NO: 399443 - RNA, 19 nt, Artificial Sequence
  Description of Artificial Sequence: Synthetic oligonucleotide
ggucaagggcaucuaacac

SEQ ID NO: 399444 - RNA, 19 nt, Artificial Sequence
  Description of Artificial Sequence: Synthetic oligonucleotide
gacuagaagugaagcuagc

SEQ ID NO: 399445 - RNA, 19 nt, Artificial Sequence
  Description of Artificial Sequence: Synthetic oligonucleotide
cuuccuaagcccucucgga

SEQ ID NO: 399446 - RNA, 19 nt, Artificial Sequence
  Description of Artificial Sequence: Synthetic oligonucleotide
auacaugcccaaauccacu

SEQ ID NO: 399447 - RNA, 19 nt, Artificial Sequence
  Description of Artificial Sequence: Synthetic oligonucleotide
  modified_base (7)..(7): a, c, u, g, unknown or other
ucggaunacccgguuuauc

SEQ ID NO: 399448 - RNA, 19 nt, Artificial Sequence
  Description of Artificial Sequence: Synthetic oligonucleotide
aaguagagccgcaccccag

SEQ ID NO: 399449 - RNA, 19 nt, Artificial Sequence
  Description of Artificial Sequence: Synthetic oligonucleotide
caaucaggagcacuucgga

SEQ ID NO: 399450 - RNA, 19 nt, Artificial Sequence
  Description of Artificial Sequence: Synthetic oligonucleotide
ugcauacucgauggacuug

SEQ ID NO: 399451 - RNA, 19 nt, Artificial Sequence
  Description of Artificial Sequence: Synthetic oligonucleotide
ucgucccuguuacccagca

SEQ ID NO: 399452 - RNA, 19 nt, Artificial Sequence
  Description of Artificial Sequence: Synthetic oligonucleotide
gugagccucagauuuggaa

SEQ ID NO: 399453 - RNA, 19 nt, Artificial Sequence
  Description of Artificial Sequence: Synthetic oligonucleotide
ggauucgagugcaucgagg

SEQ ID NO: 399454 - RNA, 19 nt, Artificial Sequence
  Description of Artificial Sequence: Synthetic oligonucleotide
acucgcucaccaucguacu

SEQ ID NO: 399455 - RNA, 19 nt, Artificial Sequence
  Description of Artificial Sequence: Synthetic oligonucleotide
cuccgguacuggaauuccc

SEQ ID NO: 399456 - RNA, 19 nt, Artificial Sequence
  Description of Artificial Sequence: Synthetic oligonucleotide
cccggauucgagugcaucg

SEQ ID NO: 399457 - RNA, 19 nt, Artificial Sequence
  Description of Artificial Sequence: Synthetic oligonucleotide
auacagaugccugucccau

SEQ ID NO: 399458 - RNA, 19 nt, Artificial Sequence
  Description of Artificial Sequence: Synthetic oligonucleotide
gcauacucgauggacuugc

SEQ ID NO: 399459 - RNA, 19 nt, Artificial Sequence
  Description of Artificial Sequence: Synthetic oligonucleotide
cacaugcacagagcuauug

SEQ ID NO: 399460 - RNA, 19 nt, Artificial Sequence
  Description of Artificial Sequence: Synthetic oligonucleotide
ucgucccggauucgagugc

SEQ ID NO: 399461 - RNA, 19 nt, Artificial Sequence
  Description of Artificial Sequence: Synthetic oligonucleotide
gcuagcguaaggacgauuc

SEQ ID NO: 399462 - RNA, 19 nt, Artificial Sequence
  Description of Artificial Sequence: Synthetic oligonucleotide
cgaacagccccuaccaucc

SEQ ID NO: 399463 - RNA, 19 nt, Artificial Sequence
  Description of Artificial Sequence: Synthetic oligonucleotide
caggucggaggcuuuugug

SEQ ID NO: 399464 - RNA, 19 nt, Artificial Sequence
  Description of Artificial Sequence: Synthetic oligonucleotide
augcccaaauccacucugg

SEQ ID NO: 399465 - RNA, 19 nt, Artificial Sequence
  Description of Artificial Sequence: Synthetic oligonucleotide
gggucugaaacaaugaagu

SEQ ID NO: 399466 - RNA, 19 nt, Artificial Sequence
  Description of Artificial Sequence: Synthetic oligonucleotide
uguugucgucccuguuacc

SEQ ID NO: 399467 - RNA, 19 nt, Artificial Sequence
  Description of Artificial Sequence: Synthetic oligonucleotide
cuagguaucuugcugggau

SEQ ID NO: 399468 - RNA, 19 nt, Artificial Sequence
  Description of Artificial Sequence: Synthetic oligonucleotide
ggagaucccaucagcagug

SEQ ID NO: 399469 - RNA, 19 nt, Artificial Sequence
  Description of Artificial Sequence: Synthetic oligonucleotide
aggguguaagaaggugcac

SEQ ID NO: 399470 - RNA, 19 nt, Artificial Sequence
  Description of Artificial Sequence: Synthetic oligonucleotide
uaggaacgugaggacagcu

SEQ ID NO: 399471 - RNA, 19 nt, Artificial Sequence
  Description of Artificial Sequence: Synthetic oligonucleotide
ugugaauguguugcuccaa

SEQ ID NO: 399472 - RNA, 19 nt, Artificial Sequence
  Description of Artificial Sequence: Synthetic oligonucleotide
caucaucguggccuccagc

SEQ ID NO: 399473 - RNA, 19 nt, Artificial Sequence
  Description of Artificial Sequence: Synthetic oligonucleotide
auucgagugcaucgaggaa

SEQ ID NO: 399474 - RNA, 19 nt, Artificial Sequence
  Description of Artificial Sequence: Synthetic oligonucleotide
guuuaucgguuggaauagc

SEQ ID NO: 399475 - RNA, 19 nt, Artificial Sequence
  Description of Artificial Sequence: Synthetic oligonucleotide
aggcuuuugugacuugcuu

SEQ ID NO: 399476 - RNA, 19 nt, Artificial Sequence
  Description of Artificial Sequence: Synthetic oligonucleotide
cuuagcgaacagccccuac

SEQ ID NO: 399477 - RNA, 19 nt, Artificial Sequence
  Description of Artificial Sequence: Synthetic oligonucleotide
guuacagagcucugcuuua

SEQ ID NO: 399478 - RNA, 19 nt, Artificial Sequence
  Description of Artificial Sequence: Synthetic oligonucleotide
ugcugaucuucaccauauc

SEQ ID NO: 399479 - RNA, 19 nt, Artificial Sequence
  Description of Artificial Sequence: Synthetic oligonucleotide
cggauacaugcccaaaucc

SEQ ID NO: 399480 - RNA, 19 nt, Artificial Sequence
  Description of Artificial Sequence: Synthetic oligonucleotide
guagagccgcaccccagug

SEQ ID NO: 399481 - RNA, 19 nt, Artificial Sequence
  Description of Artificial Sequence: Synthetic oligonucleotide
gaaaucggauggagauccc

SEQ ID NO: 399482 - RNA, 19 nt, Artificial Sequence
  Description of Artificial Sequence: Synthetic oligonucleotide
ugucgugaagaagcuuccu

SEQ ID NO: 399483 - RNA, 19 nt, Artificial Sequence
  Description of Artificial Sequence: Synthetic oligonucleotide
agucgggcaaguguggcau

SEQ ID NO: 399484 - RNA, 19 nt, Artificial Sequence
  Description of Artificial Sequence: Synthetic oligonucleotide
acaguaccuuugucgggca

SEQ ID NO: 399485 - RNA, 19 nt, Artificial Sequence
  Description of Artificial Sequence: Synthetic oligonucleotide
augcuugaucagccggaug

SEQ ID NO: 399486 - RNA, 19 nt, Artificial Sequence
  Description of Artificial Sequence: Synthetic oligonucleotide
agugugagccucagauuug

SEQ ID NO: 399487 - RNA, 19 nt, Artificial Sequence
  Description of Artificial Sequence: Synthetic oligonucleotide
augauccgguucuggauuu

SEQ ID NO: 399488 - RNA, 19 nt, Artificial Sequence
  Description of Artificial Sequence: Synthetic oligonucleotide
ggcuuuggggauguagucc

SEQ ID NO: 399489 - RNA, 19 nt, Artificial Sequence
  Description of Artificial Sequence: Synthetic oligonucleotide
gacugccuucaaucacaag

SEQ ID NO: 399490 - RNA, 19 nt, Artificial Sequence
  Description of Artificial Sequence: Synthetic oligonucleotide
gacgaugccagaggccuca

SEQ ID NO: 399491 - RNA, 19 nt, Artificial Sequence
  Description of Artificial Sequence: Synthetic oligonucleotide
gagucccaaagggcagugg

SEQ ID NO: 399492 - RNA, 19 nt, Artificial Sequence
  Description of Artificial Sequence: Synthetic oligonucleotide
aggagcacuucggagucca

SEQ ID NO: 399493 - RNA, 19 nt, Artificial Sequence
  Description of Artificial Sequence: Synthetic oligonucleotide
ggaggcuuuugugacuugc

SEQ ID NO: 399494 - RNA, 19 nt, Artificial Sequence
  Description of Artificial Sequence: Synthetic oligonucleotide
cucgcuccaccacauccug

SEQ ID NO: 399495 - RNA, 19 nt, Artificial Sequence
  Description of Artificial Sequence: Synthetic oligonucleotide
gcguuugagcuguuugaag

SEQ ID NO: 399496 - RNA, 19 nt, Artificial Sequence
  Description of Artificial Sequence: Synthetic oligonucleotide
uccgucgcuggccuuggua

SEQ ID NO: 399497 - RNA, 19 nt, Artificial Sequence
  Description of Artificial Sequence: Synthetic oligonucleotide
ucggaggcuuuugugacuu

SEQ ID NO: 399498 - RNA, 19 nt, Artificial Sequence
  Description of Artificial Sequence: Synthetic oligonucleotide
gcacauguguggcggaggc

SEQ ID NO: 399499 - RNA, 19 nt, Artificial Sequence
  Description of Artificial Sequence: Synthetic oligonucleotide
agugaggccugaacgcuca

SEQ ID NO: 399500 - RNA, 19 nt, Artificial Sequence
  Description of Artificial Sequence: Synthetic oligonucleotide
cugggauccuugcugaucu

SEQ ID NO: 399501 - RNA, 19 nt, Artificial Sequence
  Description of Artificial Sequence: Synthetic oligonucleotide
gauccgguucuggauuuca

SEQ ID NO: 399502 - RNA, 19 nt, Artificial Sequence
  Description of Artificial Sequence: Synthetic oligonucleotide
gccuucaaucacaagugug

SEQ ID NO: 399503 - RNA, 19 nt, Artificial Sequence
  Description of Artificial Sequence: Synthetic oligonucleotide
caucguacuugaucucaga

SEQ ID NO: 399504 - RNA, 19 nt, Artificial Sequence
  Description of Artificial Sequence: Synthetic oligonucleotide
aucgaggaaaucggaugga

SEQ ID NO: 399505 - RNA, 19 nt, Artificial Sequence
  Description of Artificial Sequence: Synthetic oligonucleotide
ggagagaccagcugggccu

SEQ ID NO: 399506 - RNA, 19 nt, Artificial Sequence
  Description of Artificial Sequence: Synthetic oligonucleotide
cguaaggacgauucucaag

SEQ ID NO: 399507 - RNA, 19 nt, Artificial Sequence
  Description of Artificial Sequence: Synthetic oligonucleotide
gagaugcuugggccgccug

SEQ ID NO: 399508 - RNA, 19 nt, Artificial Sequence
  Description of Artificial Sequence: Synthetic oligonucleotide
gaguccgucgcuggccuug

SEQ ID NO: 399509 - RNA, 19 nt, Artificial Sequence
  Description of Artificial Sequence: Synthetic oligonucleotide
cagugugagccucagauuu

SEQ ID NO: 399510 - RNA, 19 nt, Artificial Sequence
  Description of Artificial Sequence: Synthetic oligonucleotide
ggacugacuagaagugaag

SEQ ID NO: 399511 - RNA, 19 nt, Artificial Sequence
  Description of Artificial Sequence: Synthetic oligonucleotide
cauuccacucuuggagaug

SEQ ID NO: 399512 - RNA, 19 nt, Artificial Sequence
  Description of Artificial Sequence: Synthetic oligonucleotide
auguugucgugaagaagcu

SEQ ID NO: 399513 - RNA, 19 nt, Artificial Sequence
  Description of Artificial Sequence: Synthetic oligonucleotide
ggucauuggcuguacaccu

SEQ ID NO: 399514 - RNA, 19 nt, Artificial Sequence
  Description of Artificial Sequence: Synthetic oligonucleotide
guuggaauagcugguucua

SEQ ID NO: 399515 - RNA, 19 nt, Artificial Sequence
  Description of Artificial Sequence: Synthetic oligonucleotide
ccgguuuaucaugucagcc

SEQ ID NO: 399516 - RNA, 19 nt, Artificial Sequence
  Description of Artificial Sequence: Synthetic oligonucleotide
accccuacuuucacuggag

SEQ ID NO: 399517 - RNA, 19 nt, Artificial Sequence
  Description of Artificial Sequence: Synthetic oligonucleotide
gcgaacagccccuaccauc

SEQ ID NO: 399518 - RNA, 19 nt, Artificial Sequence
  Description of Artificial Sequence: Synthetic oligonucleotide
  modified_base (2)..(2): a, c, u, g, unknown or other
unacccgguuuaucauguc

SEQ ID NO: 399519 - RNA, 19 nt, Artificial Sequence
  Description of Artificial Sequence: Synthetic oligonucleotide
ggagguuaguggcagauuu

SEQ ID NO: 399520 - RNA, 19 nt, Artificial Sequence
  Description of Artificial Sequence: Synthetic oligonucleotide
guggcagauuuccaguccu

SEQ ID NO: 399521 - RNA, 19 nt, Artificial Sequence
  Description of Artificial Sequence: Synthetic oligonucleotide
cacccgaguucaucuucag

SEQ ID NO: 399522 - RNA, 19 nt, Artificial Sequence
  Description of Artificial Sequence: Synthetic oligonucleotide
aucagccggaugaugcacu

SEQ ID NO: 399523 - RNA, 19 nt, Artificial Sequence
  Description of Artificial Sequence: Synthetic oligonucleotide
ucgguuggaauagcugguu

SEQ ID NO: 399524 - RNA, 19 nt, Artificial Sequence
  Description of Artificial Sequence: Synthetic oligonucleotide
agaaaacuccugauccaua

SEQ ID NO: 399525 - RNA, 19 nt, Artificial Sequence
  Description of Artificial Sequence: Synthetic oligonucleotide
agccccuaccauccaggcu

SEQ ID NO: 399526 - RNA, 19 nt, Artificial Sequence
  Description of Artificial Sequence: Synthetic oligonucleotide
agcgaacagccccuaccau

SEQ ID NO: 399527 - RNA, 19 nt, Artificial Sequence
  Description of Artificial Sequence: Synthetic oligonucleotide
auauaccaguucauacuua

SEQ ID NO: 399528 - RNA, 19 nt, Artificial Sequence
  Description of Artificial Sequence: Synthetic oligonucleotide
  modified_base (6)..(6): a, c, u, g, unknown or other
cggaunacccgguuuauca

SEQ ID NO: 399529 - RNA, 19 nt, Artificial Sequence
  Description of Artificial Sequence: Synthetic oligonucleotide
  modified_base (13)..(13): a, c, u, g, unknown or other
gcccucucggaunacccgg

SEQ ID NO: 399530 - RNA, 19 nt, Artificial Sequence
  Description of Artificial Sequence: Synthetic oligonucleotide
gcuuuggggauguaguccu

SEQ ID NO: 399531 - RNA, 19 nt, Artificial Sequence
  Description of Artificial Sequence: Synthetic oligonucleotide
caccccuacuuucacugga

SEQ ID NO: 399532 - RNA, 19 nt, Artificial Sequence
  Description of Artificial Sequence: Synthetic oligonucleotide
caccaucguacuugaucuc

SEQ ID NO: 399533 - RNA, 19 nt, Artificial Sequence
  Description of Artificial Sequence: Synthetic oligonucleotide
ccugaacgcucagaguccg

SEQ ID NO: 399534 - RNA, 19 nt, Artificial Sequence
  Description of Artificial Sequence: Synthetic oligonucleotide
cccgguuuaucaugucagc

SEQ ID NO: 399535 - RNA, 19 nt, Artificial Sequence
  Description of Artificial Sequence: Synthetic oligonucleotide
cacauguguggcggaggcc

SEQ ID NO: 399536 - RNA, 19 nt, Artificial Sequence
  Description of Artificial Sequence: Synthetic oligonucleotide
gguuucgcgaggcuuugaa

SEQ ID NO: 399537 - RNA, 19 nt, Artificial Sequence
  Description of Artificial Sequence: Synthetic oligonucleotide
ccggauacaugcccaaauc

SEQ ID NO: 399538 - RNA, 19 nt, Artificial Sequence
  Description of Artificial Sequence: Synthetic oligonucleotide
ccuguuacccagcacaugu

SEQ ID NO: 399539 - RNA, 19 nt, Artificial Sequence
  Description of Artificial Sequence: Synthetic oligonucleotide
caugauccgguucuggauu

SEQ ID NO: 399540 - RNA, 19 nt, Artificial Sequence
  Description of Artificial Sequence: Synthetic oligonucleotide
ucccggauucgagugcauc

SEQ ID NO: 399541 - RNA, 19 nt, Artificial Sequence
  Description of Artificial Sequence: Synthetic oligonucleotide
acgcucagaguccgucgcu

SEQ ID NO: 399542 - RNA, 19 nt, Artificial Sequence
  Description of Artificial Sequence: Synthetic oligonucleotide
uuccggauacaugcccaaa

SEQ ID NO: 399543 - RNA, 19 nt, Artificial Sequence
  Description of Artificial Sequence: Synthetic oligonucleotide
cauacucgauggacuugca

SEQ ID NO: 399544 - RNA, 19 nt, Artificial Sequence
  Description of Artificial Sequence: Synthetic oligonucleotide
ccgaguucaucuucagauc

SEQ ID NO: 399545 - RNA, 19 nt, Artificial Sequence
  Description of Artificial Sequence: Synthetic oligonucleotide
aguccgucgcuggccuugg

SEQ ID NO: 399546 - RNA, 19 nt, Artificial Sequence
  Description of Artificial Sequence: Synthetic oligonucleotide
gagcuaucagccuccguuu

SEQ ID NO: 399547 - RNA, 19 nt, Artificial Sequence
  Description of Artificial Sequence: Synthetic oligonucleotide
gaacgugaggacagcucaa

SEQ ID NO: 399548 - RNA, 19 nt, Artificial Sequence
  Description of Artificial Sequence: Synthetic oligonucleotide
aguagcguuugagcuguuu

SEQ ID NO: 399549 - RNA, 19 nt, Artificial Sequence
  Description of Artificial Sequence: Synthetic oligonucleotide
gucgugaagaagcuuccuu

SEQ ID NO: 399550 - RNA, 19 nt, Artificial Sequence
  Description of Artificial Sequence: Synthetic oligonucleotide
cuuugucgggcacuugggu

SEQ ID NO: 399551 - RNA, 19 nt, Artificial Sequence
  Description of Artificial Sequence: Synthetic oligonucleotide
gggaccaugaagaguugga

SEQ ID NO: 399552 - RNA, 19 nt, Artificial Sequence
  Description of Artificial Sequence: Synthetic oligonucleotide
aacaugccauugggauacu

SEQ ID NO: 399553 - RNA, 19 nt, Artificial Sequence
  Description of Artificial Sequence: Synthetic oligonucleotide
uaccuccgguacuggaauu

SEQ ID NO: 399554 - RNA, 19 nt, Artificial Sequence
  Description of Artificial Sequence: Synthetic oligonucleotide
ccauugcuaccuccgguac

SEQ ID NO: 399555 - RNA, 19 nt, Artificial Sequence
  Description of Artificial Sequence: Synthetic oligonucleotide
cagucgggcaaguguggca

SEQ ID NO: 399556 - RNA, 19 nt, Artificial Sequence
  Description of Artificial Sequence: Synthetic oligonucleotide
cuagcguaaggacgauucu

SEQ ID NO: 399557 - RNA, 19 nt, Artificial Sequence
  Description of Artificial Sequence: Synthetic oligonucleotide
gaacagccccuaccaucca

SEQ ID NO: 399558 - RNA, 19 nt, Artificial Sequence
  Description of Artificial Sequence: Synthetic oligonucleotide
gcccucauucucaccauug

SEQ ID NO: 399559 - RNA, 19 nt, Artificial Sequence
  Description of Artificial Sequence: Synthetic oligonucleotide
cguuugagcuguuugaagu

SEQ ID NO: 399560 - RNA, 19 nt, Artificial Sequence
  Description of Artificial Sequence: Synthetic oligonucleotide
ugucgggcacuuggguuuc

SEQ ID NO: 399561 - RNA, 19 nt, Artificial Sequence
  Description of Artificial Sequence: Synthetic oligonucleotide
gcaucaucguggccuccag

SEQ ID NO: 399562 - RNA, 19 nt, Artificial Sequence
  Description of Artificial Sequence: Synthetic oligonucleotide
ggguguaagaaggugcacu

SEQ ID NO: 399563 - RNA, 19 nt, Artificial Sequence
  Description of Artificial Sequence: Synthetic oligonucleotide
caguaccagugaggcaagc

SEQ ID NO: 399564 - RNA, 19 nt, Artificial Sequence
  Description of Artificial Sequence: Synthetic oligonucleotide
cuacaucgaagucugccuu

SEQ ID NO: 399565 - RNA, 19 nt, Artificial Sequence
  Description of Artificial Sequence: Synthetic oligonucleotide
aagcuagcguaaggacgau

SEQ ID NO: 399566 - RNA, 19 nt, Artificial Sequence
  Description of Artificial Sequence: Synthetic oligonucleotide
agucaggauaguagaucuu

SEQ ID NO: 399567 - RNA, 19 nt, Artificial Sequence
  Description of Artificial Sequence: Synthetic oligonucleotide
  modified_base (5)..(5): a, c, u, g, unknown or other
ggaunacccgguuuaucau

SEQ ID NO: 399568 - RNA, 19 nt, Artificial Sequence
  Description of Artificial Sequence: Synthetic oligonucleotide
ggcugagccucauguagaa

SEQ ID NO: 399569 - RNA, 19 nt, Artificial Sequence
  Description of Artificial Sequence: Synthetic oligonucleotide
ccguuuccggauacaugcc

SEQ ID NO: 399570 - RNA, 19 nt, Artificial Sequence
  Description of Artificial Sequence: Synthetic oligonucleotide
gccugaacgcucagagucc

SEQ ID NO: 399571 - RNA, 19 nt, Artificial Sequence
  Description of Artificial Sequence: Synthetic oligonucleotide
aggacucgcuccaccacau

SEQ ID NO: 399572 - RNA, 19 nt, Artificial Sequence
  Description of Artificial Sequence: Synthetic oligonucleotide
gcugguuuaucgguuggaa

SEQ ID NO: 399573 - RNA, 19 nt, Artificial Sequence
  Description of Artificial Sequence: Synthetic oligonucleotide
cuaccuccgguacuggaau

SEQ ID NO: 399574 - RNA, 19 nt, Artificial Sequence
  Description of Artificial Sequence: Synthetic oligonucleotide
guguggcaucaucguggcc

SEQ ID NO: 399575 - RNA, 19 nt, Artificial Sequence
  Description of Artificial Sequence: Synthetic oligonucleotide
ccaucgaaugccacaaagu

SEQ ID NO: 399576 - RNA, 19 nt, Artificial Sequence
  Description of Artificial Sequence: Synthetic oligonucleotide
  modified_base (18)..(18): a, c, u, g, unknown or other
ccuaagcccucucggauna

SEQ ID NO: 399577 - RNA, 19 nt, Artificial Sequence
  Description of Artificial Sequence: Synthetic oligonucleotide
cccuacuuucacuggagaa

SEQ ID NO: 399578 - RNA, 19 nt, Artificial Sequence
  Description of Artificial Sequence: Synthetic oligonucleotide
ccuccgguacuggaauucc

SEQ ID NO: 399579 - RNA, 19 nt, Artificial Sequence
  Description of Artificial Sequence: Synthetic oligonucleotide
guaagaaggugcacugcuu

SEQ ID NO: 399580 - RNA, 19 nt, Artificial Sequence
  Description of Artificial Sequence: Synthetic oligonucleotide
gucgucccuguuacccagc

SEQ ID NO: 399581 - RNA, 19 nt, Artificial Sequence
  Description of Artificial Sequence: Synthetic oligonucleotide
gucggaggcuuuugugacu

SEQ ID NO: 399582 - RNA, 19 nt, Artificial Sequence
  Description of Artificial Sequence: Synthetic oligonucleotide
caccauugcuaccuccggu

SEQ ID NO: 399583 - RNA, 19 nt, Artificial Sequence
  Description of Artificial Sequence: Synthetic oligonucleotide
agcuagcguaaggacgauu

SEQ ID NO: 399584 - RNA, 19 nt, Artificial Sequence
  Description of Artificial Sequence: Synthetic oligonucleotide
  modified_base (17)..(17): a, c, u, g, unknown or other
cuaagcccucucggaunac

SEQ ID NO: 399585 - RNA, 19 nt, Artificial Sequence
  Description of Artificial Sequence: Synthetic oligonucleotide
gucgggcaaguguggcauc

SEQ ID NO: 399586 - RNA, 19 nt, Artificial Sequence
  Description of Artificial Sequence: Synthetic oligonucleotide
aggcaagcaucaggccaca

SEQ ID NO: 399587 - RNA, 19 nt, Artificial Sequence
  Description of Artificial Sequence: Synthetic oligonucleotide
cggauucgagugcaucgag

SEQ ID NO: 399588 - RNA, 19 nt, Artificial Sequence
  Description of Artificial Sequence: Synthetic oligonucleotide
cagaguccgucgcuggccu

SEQ ID NO: 399589 - RNA, 19 nt, Artificial Sequence
  Description of Artificial Sequence: Synthetic oligonucleotide
gcacccgaguucaucuuca

SEQ ID NO: 399590 - RNA, 19 nt, Artificial Sequence
  Description of Artificial Sequence: Synthetic oligonucleotide
cggaggccaugucaaauuc

SEQ ID NO: 399591 - RNA, 19 nt, Artificial Sequence
  Description of Artificial Sequence: Synthetic oligonucleotide
gcuagguaucuugcuggga

SEQ ID NO: 399592 - RNA, 19 nt, Artificial Sequence
  Description of Artificial Sequence: Synthetic oligonucleotide
agaguccgucgcuggccuu

SEQ ID NO: 399593 - RNA, 19 nt, Artificial Sequence
  Description of Artificial Sequence: Synthetic oligonucleotide
ccuugaguuggggagguua

SEQ ID NO: 399594 - RNA, 19 nt, Artificial Sequence
  Description of Artificial Sequence: Synthetic oligonucleotide
cgguuggaauagcugguuc

SEQ ID NO: 399595 - RNA, 19 nt, Artificial Sequence
  Description of Artificial Sequence: Synthetic oligonucleotide
ggacucgcucaccaucgua

SEQ ID NO: 399596 - RNA, 19 nt, Artificial Sequence
  Description of Artificial Sequence: Synthetic oligonucleotide
cuguacaccuggaggcaau

SEQ ID NO: 399597 - RNA, 19 nt, Artificial Sequence
  Description of Artificial Sequence: Synthetic oligonucleotide
ccucauguagaaguagagu

SEQ ID NO: 399598 - RNA, 19 nt, Artificial Sequence
  Description of Artificial Sequence: Synthetic oligonucleotide
guacuggaauuccccucau

SEQ ID NO: 399599 - RNA, 19 nt, Artificial Sequence
  Description of Artificial Sequence: Synthetic oligonucleotide
guccuagcagggagcuauc

SEQ ID NO: 399600 - RNA, 19 nt, Artificial Sequence
  Description of Artificial Sequence: Synthetic oligonucleotide
uccuugaguuggggagguu

SEQ ID NO: 399601 - RNA, 19 nt, Artificial Sequence
  Description of Artificial Sequence: Synthetic oligonucleotide
ccggauucgagugcaucga

SEQ ID NO: 399602 - RNA, 19 nt, Artificial Sequence
  Description of Artificial Sequence: Synthetic oligonucleotide
ccccuacuuucacuggaga

SEQ ID NO: 399603 - RNA, 19 nt, Artificial Sequence
  Description of Artificial Sequence: Synthetic oligonucleotide
gggaagcaccaugugaguu

SEQ ID NO: 399604 - RNA, 19 nt, Artificial Sequence
  Description of Artificial Sequence: Synthetic oligonucleotide
cagccuccguuuccggaua

SEQ ID NO: 399605 - RNA, 19 nt, Artificial Sequence
  Description of Artificial Sequence: Synthetic oligonucleotide
cugaacgcucagaguccgu

SEQ ID NO: 399606 - RNA, 19 nt, Artificial Sequence
  Description of Artificial Sequence: Synthetic oligonucleotide
cucgcucaccaucguacuu

SEQ ID NO: 399607 - RNA, 19 nt, Artificial Sequence
  Description of Artificial Sequence: Synthetic oligonucleotide
ggggagguuaguggcagau

SEQ ID NO: 399608 - RNA, 19 nt, Artificial Sequence
  Description of Artificial Sequence: Synthetic oligonucleotide
aaguagcguuugagcuguu

SEQ ID NO: 399609 - RNA, 19 nt, Artificial Sequence
  Description of Artificial Sequence: Synthetic oligonucleotide
cuuuggggauguaguccuu

SEQ ID NO: 399610 - RNA, 19 nt, Artificial Sequence
  Description of Artificial Sequence: Synthetic oligonucleotide
  modified_base (8)..(8): a, c, u, g, unknown or other
cucggaunacccgguuuau

SEQ ID NO: 399611 - RNA, 19 nt, Artificial Sequence
  Description of Artificial Sequence: Synthetic oligonucleotide
ggacgaugccagaggccuc

SEQ ID NO: 399612 - RNA, 19 nt, Artificial Sequence
  Description of Artificial Sequence: Synthetic oligonucleotide
ccgccuggucucagccaag

SEQ ID NO: 399613 - RNA, 19 nt, Artificial Sequence
  Description of Artificial Sequence: Synthetic oligonucleotide
gccucagauuuggaaaauu

SEQ ID NO: 399614 - RNA, 19 nt, Artificial Sequence
  Description of Artificial Sequence: Synthetic oligonucleotide
gucgggcacuuggguuuca

SEQ ID NO: 399615 - RNA, 19 nt, Artificial Sequence
  Description of Artificial Sequence: Synthetic oligonucleotide
gcuuagcgaacagccccua

SEQ ID NO: 399616 - RNA, 19 nt, Artificial Sequence
  Description of Artificial Sequence: Synthetic oligonucleotide
cgucccggauucgagugca

SEQ ID NO: 399617 - RNA, 19 nt, Artificial Sequence
  Description of Artificial Sequence: Synthetic oligonucleotide
ggagaugcuugggccgccu

SEQ ID NO: 399618 - RNA, 19 nt, Artificial Sequence
  Description of Artificial Sequence: Synthetic oligonucleotide
ccuccguuuccggauacau

SEQ ID NO: 399619 - RNA, 19 nt, Artificial Sequence
  Description of Artificial Sequence: Synthetic oligonucleotide
  modified_base (12)..(12): a, c, u, g, unknown or other
cccucucggaunacccggu

SEQ ID NO: 399620 - RNA, 19 nt, Artificial Sequence
  Description of Artificial Sequence: Synthetic oligonucleotide
gggagguuaguggcagauu

SEQ ID NO: 399621 - RNA, 19 nt, Artificial Sequence
  Description of Artificial Sequence: Synthetic oligonucleotide
cccuaccauccaggcugag

SEQ ID NO: 399622 - RNA, 19 nt, Artificial Sequence
  Description of Artificial Sequence: Synthetic oligonucleotide
gucccggauucgagugcau

SEQ ID NO: 399623 - RNA, 19 nt, Artificial Sequence
  Description of Artificial Sequence: Synthetic oligonucleotide
  modified_base (11)..(11): a, c, u, g, unknown or other
ccucucggaunacccgguu

SEQ ID NO: 399624 - RNA, 19 nt, Artificial Sequence
  Description of Artificial Sequence: Synthetic oligonucleotide
cgggcaaguguggcaucau

SEQ ID NO: 399625 - RNA, 19 nt, Artificial Sequence
  Description of Artificial Sequence: Synthetic oligonucleotide
ucuaggguaauuaugacug

SEQ ID NO: 399626 - RNA, 19 nt, Artificial Sequence
  Description of Artificial Sequence: Synthetic oligonucleotide
uguuaaucaaauuuuagga

SEQ ID NO: 399627 - RNA, 19 nt, Artificial Sequence
  Description of Artificial Sequence: Synthetic oligonucleotide
aaucuauuuaucccuuugc

SEQ ID NO: 399628 - RNA, 19 nt, Artificial Sequence
  Description of Artificial Sequence: Synthetic oligonucleotide
ucucaaaacacaaaaugag

SEQ ID NO: 399629 - RNA, 19 nt, Artificial Sequence
  Description of Artificial Sequence: Synthetic oligonucleotide
aauaauuuuggauguuuag

SEQ ID NO: 399630 - RNA, 19 nt, Artificial Sequence
  Description of Artificial Sequence: Synthetic oligonucleotide
agagcaacaauuucuaggg

SEQ ID NO: 399631 - RNA, 19 nt, Artificial Sequence
  Description of Artificial Sequence: Synthetic oligonucleotide
uuagcugcaucuuugagag

SEQ ID NO: 399632 - RNA, 19 nt, Artificial Sequence
  Description of Artificial Sequence: Synthetic oligonucleotide
aaacaaguugguuaaaaga

SEQ ID NO: 399633 - RNA, 19 nt, Artificial Sequence
  Description of Artificial Sequence: Synthetic oligonucleotide
aacaaguugguuaaaagag

SEQ ID NO: 399634 - RNA, 19 nt, Artificial Sequence
  Description of Artificial Sequence: Synthetic oligonucleotide
uuuaggggaauccuaagag

SEQ ID NO: 399635 - RNA, 19 nt, Artificial Sequence
  Description of Artificial Sequence: Synthetic oligonucleotide
uauacuacaucacagccac

SEQ ID NO: 399636 - RNA, 19 nt, Artificial Sequence
  Description of Artificial Sequence: Synthetic oligonucleotide
agaacauucucucaaaaca

SEQ ID NO: 399637 - RNA, 19 nt, Artificial Sequence
  Description of Artificial Sequence: Synthetic oligonucleotide
ugcuguaugaaaacaaacc

SEQ ID NO: 399638 - RNA, 19 nt, Artificial Sequence
  Description of Artificial Sequence: Synthetic oligonucleotide
auuuugggaauuuacaacu

SEQ ID NO: 399639 - RNA, 19 nt, Artificial Sequence
  Description of Artificial Sequence: Synthetic oligonucleotide
ucauaaacagaagacaccc

SEQ ID NO: 399640 - RNA, 19 nt, Artificial Sequence
  Description of Artificial Sequence: Synthetic oligonucleotide
aaauccauuuggucagagc

SEQ ID NO: 399641 - RNA, 19 nt, Artificial Sequence
  Description of Artificial Sequence: Synthetic oligonucleotide
auuaugacugcauugauuu

SEQ ID NO: 399642 - RNA, 19 nt, Artificial Sequence
  Description of Artificial Sequence: Synthetic oligonucleotide
aaaacaaaacaaaacaaaa

SEQ ID NO: 399643 - RNA, 19 nt, Artificial Sequence
  Description of Artificial Sequence: Synthetic oligonucleotide
auaauuuuggauguuuagg

SEQ ID NO: 399644 - RNA, 19 nt, Artificial Sequence
  Description of Artificial Sequence: Synthetic oligonucleotide
agcuauacuacaucacagc

SEQ ID NO: 399645 - RNA, 19 nt, Artificial Sequence
  Description of Artificial Sequence: Synthetic oligonucleotide
aaguucacgguaugaaauc

SEQ ID NO: 399646 - RNA, 19 nt, Artificial Sequence
  Description of Artificial Sequence: Synthetic oligonucleotide
aauccuaagagagagcaca

SEQ ID NO: 399647 - RNA, 19 nt, Artificial Sequence
  Description of Artificial Sequence: Synthetic oligonucleotide
uaugcaacgcgcuucauac

SEQ ID NO: 399648 - RNA, 19 nt, Artificial Sequence
  Description of Artificial Sequence: Synthetic oligonucleotide
uuuuaugaccaccgcaucc

SEQ ID NO: 399649 - RNA, 19 nt, Artificial Sequence
  Description of Artificial Sequence: Synthetic oligonucleotide
ugauacuucagugcuacgg

SEQ ID NO: 399650 - RNA, 19 nt, Artificial Sequence
  Description of Artificial Sequence: Synthetic oligonucleotide
uucauaaacagaagacacc

SEQ ID NO: 399651 - RNA, 19 nt, Artificial Sequence
  Description of Artificial Sequence: Synthetic oligonucleotide
aauuggcccucuuaguguc

SEQ ID NO: 399652 - RNA, 19 nt, Artificial Sequence
  Description of Artificial Sequence: Synthetic oligonucleotide
agagauucauuaaaguuac

SEQ ID NO: 399653 - RNA, 19 nt, Artificial Sequence
  Description of Artificial Sequence: Synthetic oligonucleotide
uagucuacuucccucacag

SEQ ID NO: 399654 - RNA, 19 nt, Artificial Sequence
  Description of Artificial Sequence: Synthetic oligonucleotide
cagagcaacaauuucuagg

SEQ ID NO: 399655 - RNA, 19 nt, Artificial Sequence
  Description of Artificial Sequence: Synthetic oligonucleotide
uugccuuuuaugaccaccg

SEQ ID NO: 399656 - RNA, 19 nt, Artificial Sequence
  Description of Artificial Sequence: Synthetic oligonucleotide
uuaaaaucuaacagacgcu

SEQ ID NO: 399657 - RNA, 19 nt, Artificial Sequence
  Description of Artificial Sequence: Synthetic oligonucleotide
gaugauaggcuauauuuca

SEQ ID NO: 399658 - RNA, 19 nt, Artificial Sequence
  Description of Artificial Sequence: Synthetic oligonucleotide
ugcaagagagagcucaaag

SEQ ID NO: 399659 - RNA, 19 nt, Artificial Sequence
  Description of Artificial Sequence: Synthetic oligonucleotide
uuauuuugguguuaacuac

SEQ ID NO: 399660 - RNA, 19 nt, Artificial Sequence
  Description of Artificial Sequence: Synthetic oligonucleotide
cuaacagacgcucuucacg

SEQ ID NO: 399661 - RNA, 19 nt, Artificial Sequence
  Description of Artificial Sequence: Synthetic oligonucleotide
agugcuacggauaugcaac

SEQ ID NO: 399662 - RNA, 19 nt, Artificial Sequence
  Description of Artificial Sequence: Synthetic oligonucleotide
ucacaugaggcgauaauca

SEQ ID NO: 399663 - RNA, 19 nt, Artificial Sequence
  Description of Artificial Sequence: Synthetic oligonucleotide
aauucugcgccaaagccuc

SEQ ID NO: 399664 - RNA, 19 nt, Artificial Sequence
  Description of Artificial Sequence: Synthetic oligonucleotide
ucuauuuaucccuuugccu

SEQ ID NO: 399665 - RNA, 19 nt, Artificial Sequence
  Description of Artificial Sequence: Synthetic oligonucleotide
uucagaacuuaccccaucc

SEQ ID NO: 399666 - RNA, 19 nt, Artificial Sequence
  Description of Artificial Sequence: Synthetic oligonucleotide
cuuccaugguacuuuaggg

SEQ ID NO: 399667 - RNA, 19 nt, Artificial Sequence
  Description of Artificial Sequence: Synthetic oligonucleotide
auuccugauauucuggaca

SEQ ID NO: 399668 - RNA, 19 nt, Artificial Sequence
  Description of Artificial Sequence: Synthetic oligonucleotide
acaugcucaacucauguca

SEQ ID NO: 399669 - RNA, 19 nt, Artificial Sequence
  Description of Artificial Sequence: Synthetic oligonucleotide
aaucccuguugccuccucc

SEQ ID NO: 399670 - RNA, 19 nt, Artificial Sequence
  Description of Artificial Sequence: Synthetic oligonucleotide
ucugaugucuguaaauaaa

SEQ ID NO: 399671 - RNA, 19 nt, Artificial Sequence
  Description of Artificial Sequence: Synthetic oligonucleotide
acaauuggcccucuuagug

SEQ ID NO: 399672 - RNA, 19 nt, Artificial Sequence
  Description of Artificial Sequence: Synthetic oligonucleotide
agaacuuaccccauccacc

SEQ ID NO: 399673 - RNA, 19 nt, Artificial Sequence
  Description of Artificial Sequence: Synthetic oligonucleotide
gaacuuaccccauccaccc

SEQ ID NO: 399674 - RNA, 19 nt, Artificial Sequence
  Description of Artificial Sequence: Synthetic oligonucleotide
ugagcuucagccauuuaac

SEQ ID NO: 399675 - RNA, 19 nt, Artificial Sequence
  Description of Artificial Sequence: Synthetic oligonucleotide
ucugguguacgugaaauca

SEQ ID NO: 399676 - RNA, 19 nt, Artificial Sequence
  Description of Artificial Sequence: Synthetic oligonucleotide
aguucacgguaugaaaucc

SEQ ID NO: 399677 - RNA, 19 nt, Artificial Sequence
  Description of Artificial Sequence: Synthetic oligonucleotide
auaaucagaacagcaauca

SEQ ID NO: 399678 - RNA, 19 nt, Artificial Sequence
  Description of Artificial Sequence: Synthetic oligonucleotide
cuacuucccucacagaagg

SEQ ID NO: 399679 - RNA, 19 nt, Artificial Sequence
  Description of Artificial Sequence: Synthetic oligonucleotide
gaacaauacaaccacggaa

SEQ ID NO: 399680 - RNA, 19 nt, Artificial Sequence
  Description of Artificial Sequence: Synthetic oligonucleotide
uauaccauucucucccuug

SEQ ID NO: 399681 - RNA, 19 nt, Artificial Sequence
  Description of Artificial Sequence: Synthetic oligonucleotide
uuuaugaccaccgcauccc

SEQ ID NO: 399682 - RNA, 19 nt, Artificial Sequence
  Description of Artificial Sequence: Synthetic oligonucleotide
ucaacucaugucacagacg

SEQ ID NO: 399683 - RNA, 19 nt, Artificial Sequence
  Description of Artificial Sequence: Synthetic oligonucleotide
caaacauuggcuguccagg

SEQ ID NO: 399684 - RNA, 19 nt, Artificial Sequence
  Description of Artificial Sequence: Synthetic oligonucleotide
uucuaggguaauuaugacu

SEQ ID NO: 399685 - RNA, 19 nt, Artificial Sequence
  Description of Artificial Sequence: Synthetic oligonucleotide
ucagugcagauguuaauca

SEQ ID NO: 399686 - RNA, 19 nt, Artificial Sequence
  Description of Artificial Sequence: Synthetic oligonucleotide
ucuggauauucuucuauac

SEQ ID NO: 399687 - RNA, 19 nt, Artificial Sequence
  Description of Artificial Sequence: Synthetic oligonucleotide
agauacaagcuauacuaca

SEQ ID NO: 399688 - RNA, 19 nt, Artificial Sequence
  Description of Artificial Sequence: Synthetic oligonucleotide
ugcaacgcgcuucauacca

SEQ ID NO: 399689 - RNA, 19 nt, Artificial Sequence
  Description of Artificial Sequence: Synthetic oligonucleotide
aaagcacacccuuguguuc

SEQ ID NO: 399690 - RNA, 19 nt, Artificial Sequence
  Description of Artificial Sequence: Synthetic oligonucleotide
ucucccuuggcauuuguca

SEQ ID NO: 399691 - RNA, 19 nt, Artificial Sequence
  Description of Artificial Sequence: Synthetic oligonucleotide
cacagucuagucuacuucc

SEQ ID NO: 399692 - RNA, 19 nt, Artificial Sequence
  Description of Artificial Sequence: Synthetic oligonucleotide
caagaaagucacaagccac

SEQ ID NO: 399693 - RNA, 19 nt, Artificial Sequence
  Description of Artificial Sequence: Synthetic oligonucleotide
auaaacagaagacacccua

SEQ ID NO: 399694 - RNA, 19 nt, Artificial Sequence
  Description of Artificial Sequence: Synthetic oligonucleotide
acaguaucuuccaugguac

SEQ ID NO: 399695 - RNA, 19 nt, Artificial Sequence
  Description of Artificial Sequence: Synthetic oligonucleotide
gagcuagagucucuggacg

SEQ ID NO: 399696 - RNA, 19 nt, Artificial Sequence
  Description of Artificial Sequence: Synthetic oligonucleotide
aagcuauacuacaucacag

SEQ ID NO: 399697 - RNA, 19 nt, Artificial Sequence
  Description of Artificial Sequence: Synthetic oligonucleotide
uaucccuuugccuuuuaug

SEQ ID NO: 399698 - RNA, 19 nt, Artificial Sequence
  Description of Artificial Sequence: Synthetic oligonucleotide
agccauuuaacuacaaaag

SEQ ID NO: 399699 - RNA, 19 nt, Artificial Sequence
  Description of Artificial Sequence: Synthetic oligonucleotide
cucaacucaugucacagac

SEQ ID NO: 399700 - RNA, 19 nt, Artificial Sequence
  Description of Artificial Sequence: Synthetic oligonucleotide
uuaggggaauccuaagaga

SEQ ID NO: 399701 - RNA, 19 nt, Artificial Sequence
  Description of Artificial Sequence: Synthetic oligonucleotide
acaaacauuggcuguccag

SEQ ID NO: 399702 - RNA, 19 nt, Artificial Sequence
  Description of Artificial Sequence: Synthetic oligonucleotide
ugugaucauccauucacga

SEQ ID NO: 399703 - RNA, 19 nt, Artificial Sequence
  Description of Artificial Sequence: Synthetic oligonucleotide
cacccuauuaaaaucuaac

SEQ ID NO: 399704 - RNA, 19 nt, Artificial Sequence
  Description of Artificial Sequence: Synthetic oligonucleotide
ugggaaauuccucuaccca

SEQ ID NO: 399705 - RNA, 19 nt, Artificial Sequence
  Description of Artificial Sequence: Synthetic oligonucleotide
agauucauuaaaguuacau

SEQ ID NO: 399706 - RNA, 19 nt, Artificial Sequence
  Description of Artificial Sequence: Synthetic oligonucleotide
ugauaggcuauauuucagu

SEQ ID NO: 399707 - RNA, 19 nt, Artificial Sequence
  Description of Artificial Sequence: Synthetic oligonucleotide
uucaguacaggaaacucuu

SEQ ID NO: 399708 - RNA, 19 nt, Artificial Sequence
  Description of Artificial Sequence: Synthetic oligonucleotide
guguuaacuaccaacaaga

SEQ ID NO: 399709 - RNA, 19 nt, Artificial Sequence
  Description of Artificial Sequence: Synthetic oligonucleotide
gguguuaacuaccaacaag

SEQ ID NO: 399710 - RNA, 19 nt, Artificial Sequence
  Description of Artificial Sequence: Synthetic oligonucleotide
cuacggauaugcaacgcgc

SEQ ID NO: 399711 - RNA, 19 nt, Artificial Sequence
  Description of Artificial Sequence: Synthetic oligonucleotide
aggcuuugcacaauuggcc

SEQ ID NO: 399712 - RNA, 19 nt, Artificial Sequence
  Description of Artificial Sequence: Synthetic oligonucleotide
aaacauuggcuguccaggu

SEQ ID NO: 399713 - RNA, 19 nt, Artificial Sequence
  Description of Artificial Sequence: Synthetic oligonucleotide
uccagagauucauuaaagu

SEQ ID NO: 399714 - RNA, 19 nt, Artificial Sequence
  Description of Artificial Sequence: Synthetic oligonucleotide
auguguucgggagaagagc

SEQ ID NO: 399715 - RNA, 19 nt, Artificial Sequence
  Description of Artificial Sequence: Synthetic oligonucleotide
cagagauucauuaaaguua

SEQ ID NO: 399716 - RNA, 19 nt, Artificial Sequence
  Description of Artificial Sequence: Synthetic oligonucleotide
uuaucugaugucuguaaau

SEQ ID NO: 399717 - RNA, 19 nt, Artificial Sequence
  Description of Artificial Sequence: Synthetic oligonucleotide
aacuuaccccauccacccc

SEQ ID NO: 399718 - RNA, 19 nt, Artificial Sequence
  Description of Artificial Sequence: Synthetic oligonucleotide
aucaaauuuuaggaagcuc

SEQ ID NO: 399719 - RNA, 19 nt, Artificial Sequence
  Description of Artificial Sequence: Synthetic oligonucleotide
uguuaacuaccaacaagaa

SEQ ID NO: 399720 - RNA, 19 nt, Artificial Sequence
  Description of Artificial Sequence: Synthetic oligonucleotide
caacucaugucacagacga

SEQ ID NO: 399721 - RNA, 19 nt, Artificial Sequence
  Description of Artificial Sequence: Synthetic oligonucleotide
ugguguacgugaaaucaga

SEQ ID NO: 399722 - RNA, 19 nt, Artificial Sequence
  Description of Artificial Sequence: Synthetic oligonucleotide
uuuaaccugggcaggaauu

SEQ ID NO: 399723 - RNA, 19 nt, Artificial Sequence
  Description of Artificial Sequence: Synthetic oligonucleotide
guuacucugguguacguga

SEQ ID NO: 399724 - RNA, 19 nt, Artificial Sequence
  Description of Artificial Sequence: Synthetic oligonucleotide
gcuauacuacaucacagcc

SEQ ID NO: 399725 - RNA, 19 nt, Artificial Sequence
  Description of Artificial Sequence: Synthetic oligonucleotide
uagagucucuggacggugg

SEQ ID NO: 399726 - RNA, 19 nt, Artificial Sequence
  Description of Artificial Sequence: Synthetic oligonucleotide
gaugagucaccaugcuucc

SEQ ID NO: 399727 - RNA, 19 nt, Artificial Sequence
  Description of Artificial Sequence: Synthetic oligonucleotide
ugcucaacucaugucacag

SEQ ID NO: 399728 - RNA, 19 nt, Artificial Sequence
  Description of Artificial Sequence: Synthetic oligonucleotide
agagucucuggacgguggc

SEQ ID NO: 399729 - RNA, 19 nt, Artificial Sequence
  Description of Artificial Sequence: Synthetic oligonucleotide
auuugguuuugccucagaa

SEQ ID NO: 399730 - RNA, 19 nt, Artificial Sequence
  Description of Artificial Sequence: Synthetic oligonucleotide
uaccccauccaccccaugc

SEQ ID NO: 399731 - RNA, 19 nt, Artificial Sequence
  Description of Artificial Sequence: Synthetic oligonucleotide
uuugggaauuuacaacuuu

SEQ ID NO: 399732 - RNA, 19 nt, Artificial Sequence
  Description of Artificial Sequence: Synthetic oligonucleotide
cugcagaugagucaccaug

SEQ ID NO: 399733 - RNA, 19 nt, Artificial Sequence
  Description of Artificial Sequence: Synthetic oligonucleotide
uguucgggagaagagcucc

SEQ ID NO: 399734 - RNA, 19 nt, Artificial Sequence
  Description of Artificial Sequence: Synthetic oligonucleotide
ugucacccgugucagagcu

SEQ ID NO: 399735 - RNA, 19 nt, Artificial Sequence
  Description of Artificial Sequence: Synthetic oligonucleotide
ucagaacuuaccccaucca

SEQ ID NO: 399736 - RNA, 19 nt, Artificial Sequence
  Description of Artificial Sequence: Synthetic oligonucleotide
caugaggcgauaaucagaa

SEQ ID NO: 399737 - RNA, 19 nt, Artificial Sequence
  Description of Artificial Sequence: Synthetic oligonucleotide
gugauggcgacacugccgc

SEQ ID NO: 399738 - RNA, 19 nt, Artificial Sequence
  Description of Artificial Sequence: Synthetic oligonucleotide
ugcguuucagcguuugccu

SEQ ID NO: 399739 - RNA, 19 nt, Artificial Sequence
  Description of Artificial Sequence: Synthetic oligonucleotide
uaauuaugacugcauugau

SEQ ID NO: 399740 - RNA, 19 nt, Artificial Sequence
  Description of Artificial Sequence: Synthetic oligonucleotide
uuuuaaccugggcaggaau

SEQ ID NO: 399741 - RNA, 19 nt, Artificial Sequence
  Description of Artificial Sequence: Synthetic oligonucleotide
caaguugguuaaaagagaa

SEQ ID NO: 399742 - RNA, 19 nt, Artificial Sequence
  Description of Artificial Sequence: Synthetic oligonucleotide
guuaacuaccaacaagaaa

SEQ ID NO: 399743 - RNA, 19 nt, Artificial Sequence
  Description of Artificial Sequence: Synthetic oligonucleotide
accacacuucaauucugcg

SEQ ID NO: 399744 - RNA, 19 nt, Artificial Sequence
  Description of Artificial Sequence: Synthetic oligonucleotide
aagcgggacgcgcuaggac

SEQ ID NO: 399745 - RNA, 19 nt, Artificial Sequence
  Description of Artificial Sequence: Synthetic oligonucleotide
cuauacuacaucacagcca

SEQ ID NO: 399746 - RNA, 19 nt, Artificial Sequence
  Description of Artificial Sequence: Synthetic oligonucleotide
gugggaaauuccucuaccc

SEQ ID NO: 399747 - RNA, 19 nt, Artificial Sequence
  Description of Artificial Sequence: Synthetic oligonucleotide
cuacaucacagccacaaga

SEQ ID NO: 399748 - RNA, 19 nt, Artificial Sequence
  Description of Artificial Sequence: Synthetic oligonucleotide
uucacgguaugaaauccau

SEQ ID NO: 399749 - RNA, 19 nt, Artificial Sequence
  Description of Artificial Sequence: Synthetic oligonucleotide
uuccugauauucuggacau

SEQ ID NO: 399750 - RNA, 19 nt, Artificial Sequence
  Description of Artificial Sequence: Synthetic oligonucleotide
agugcguuucagcguuugc

SEQ ID NO: 399751 - RNA, 19 nt, Artificial Sequence
  Description of Artificial Sequence: Synthetic oligonucleotide
ucuaacagacgcucuucac

SEQ ID NO: 399752 - RNA, 19 nt, Artificial Sequence
  Description of Artificial Sequence: Synthetic oligonucleotide
acaucuugcuucauaaaca

SEQ ID NO: 399753 - RNA, 19 nt, Artificial Sequence
  Description of Artificial Sequence: Synthetic oligonucleotide
ugcgccaaagccucugagc

SEQ ID NO: 399754 - RNA, 19 nt, Artificial Sequence
  Description of Artificial Sequence: Synthetic oligonucleotide
caguucagaacuuacccca

SEQ ID NO: 399755 - RNA, 19 nt, Artificial Sequence
  Description of Artificial Sequence: Synthetic oligonucleotide
uggcauuugucaguguuca

SEQ ID NO: 399756 - RNA, 19 nt, Artificial Sequence
  Description of Artificial Sequence: Synthetic oligonucleotide
uguggaggccauuugguuu

SEQ ID NO: 399757 - RNA, 19 nt, Artificial Sequence
  Description of Artificial Sequence: Synthetic oligonucleotide
uaggguaauuaugacugca

SEQ ID NO: 399758 - RNA, 19 nt, Artificial Sequence
  Description of Artificial Sequence: Synthetic oligonucleotide
uacggauaugcaacgcgcu

SEQ ID NO: 399759 - RNA, 19 nt, Artificial Sequence
  Description of Artificial Sequence: Synthetic oligonucleotide
aagagcaacaugaaaccuu

SEQ ID NO: 399760 - RNA, 19 nt, Artificial Sequence
  Description of Artificial Sequence: Synthetic oligonucleotide
caugcucaacucaugucac

SEQ ID NO: 399761 - RNA, 19 nt, Artificial Sequence
  Description of Artificial Sequence: Synthetic oligonucleotide
uuaugaccaccgcaucccc

SEQ ID NO: 399762 - RNA, 19 nt, Artificial Sequence
  Description of Artificial Sequence: Synthetic oligonucleotide
cugguguacgugaaaucag

SEQ ID NO: 399763 - RNA, 19 nt, Artificial Sequence
  Description of Artificial Sequence: Synthetic oligonucleotide
uucagcuagcaagaaaguc

SEQ ID NO: 399764 - RNA, 19 nt, Artificial Sequence
  Description of Artificial Sequence: Synthetic oligonucleotide
aucuaacagacgcucuuca

SEQ ID NO: 399765 - RNA, 19 nt, Artificial Sequence
  Description of Artificial Sequence: Synthetic oligonucleotide
gcuacggauaugcaacgcg

SEQ ID NO: 399766 - RNA, 19 nt, Artificial Sequence
  Description of Artificial Sequence: Synthetic oligonucleotide
gagauacaagcuauacuac

SEQ ID NO: 399767 - RNA, 19 nt, Artificial Sequence
  Description of Artificial Sequence: Synthetic oligonucleotide
uguguuccuacagcaaugu

SEQ ID NO: 399768 - RNA, 19 nt, Artificial Sequence
  Description of Artificial Sequence: Synthetic oligonucleotide
ugguuuugccucagaaccu

SEQ ID NO: 399769 - RNA, 19 nt, Artificial Sequence
  Description of Artificial Sequence: Synthetic oligonucleotide
augagaucuucugaaugag

SEQ ID NO: 399770 - RNA, 19 nt, Artificial Sequence
  Description of Artificial Sequence: Synthetic oligonucleotide
aacugacaaccugcuuugc

SEQ ID NO: 399771 - RNA, 19 nt, Artificial Sequence
  Description of Artificial Sequence: Synthetic oligonucleotide
uaccuuugaugauaggcua

SEQ ID NO: 399772 - RNA, 19 nt, Artificial Sequence
  Description of Artificial Sequence: Synthetic oligonucleotide
acagucuagucuacuuccc

SEQ ID NO: 399773 - RNA, 19 nt, Artificial Sequence
  Description of Artificial Sequence: Synthetic oligonucleotide
agucucuggacgguggcgg

SEQ ID NO: 399774 - RNA, 19 nt, Artificial Sequence
  Description of Artificial Sequence: Synthetic oligonucleotide
augcacacccauuccucac

SEQ ID NO: 399775 - RNA, 19 nt, Artificial Sequence
  Description of Artificial Sequence: Synthetic oligonucleotide
ugcugacaaggugauggcg

SEQ ID NO: 399776 - RNA, 19 nt, Artificial Sequence
  Description of Artificial Sequence: Synthetic oligonucleotide
uccaaguucacgguaugaa

SEQ ID NO: 399777 - RNA, 19 nt, Artificial Sequence
  Description of Artificial Sequence: Synthetic oligonucleotide
cuaggguaauuaugacugc

SEQ ID NO: 399778 - RNA, 19 nt, Artificial Sequence
  Description of Artificial Sequence: Synthetic oligonucleotide
caaacccuaagguggcaag

SEQ ID NO: 399779 - RNA, 19 nt, Artificial Sequence
  Description of Artificial Sequence: Synthetic oligonucleotide
aggccauuugguuuugccu

SEQ ID NO: 399780 - RNA, 19 nt, Artificial Sequence
  Description of Artificial Sequence: Synthetic oligonucleotide
cugguacuacucugcaggg

SEQ ID NO: 399781 - RNA, 19 nt, Artificial Sequence
  Description of Artificial Sequence: Synthetic oligonucleotide
auguuuaggcuuugcacaa

SEQ ID NO: 399782 - RNA, 19 nt, Artificial Sequence
  Description of Artificial Sequence: Synthetic oligonucleotide
augcaacgcgcuucauacc

SEQ ID NO: 399783 - RNA, 19 nt, Artificial Sequence
  Description of Artificial Sequence: Synthetic oligonucleotide
uucagcguuugccuaacuu

SEQ ID NO: 399784 - RNA, 19 nt, Artificial Sequence
  Description of Artificial Sequence: Synthetic oligonucleotide
ucuagucuacuucccucac

SEQ ID NO: 399785 - RNA, 19 nt, Artificial Sequence
  Description of Artificial Sequence: Synthetic oligonucleotide
ggaauccuaagagagagca

SEQ ID NO: 399786 - RNA, 19 nt, Artificial Sequence
  Description of Artificial Sequence: Synthetic oligonucleotide
gaaauccauuuggucagag

SEQ ID NO: 399787 - RNA, 19 nt, Artificial Sequence
  Description of Artificial Sequence: Synthetic oligonucleotide
uucggagccugugucaccc

SEQ ID NO: 399788 - RNA, 19 nt, Artificial Sequence
  Description of Artificial Sequence: Synthetic oligonucleotide
acaagucacuauaaagugu

SEQ ID NO: 399789 - RNA, 19 nt, Artificial Sequence
  Description of Artificial Sequence: Synthetic oligonucleotide
cuauuuaucccuuugccuu

SEQ ID NO: 399790 - RNA, 19 nt, Artificial Sequence
  Description of Artificial Sequence: Synthetic oligonucleotide
cuaagguggcaagaugccc

SEQ ID NO: 399791 - RNA, 19 nt, Artificial Sequence
  Description of Artificial Sequence: Synthetic oligonucleotide
augccucaaauccuuggcu

SEQ ID NO: 399792 - RNA, 19 nt, Artificial Sequence
  Description of Artificial Sequence: Synthetic oligonucleotide
guucauuuggagacuucag

SEQ ID NO: 399793 - RNA, 19 nt, Artificial Sequence
  Description of Artificial Sequence: Synthetic oligonucleotide
ucuauaccauucucucccu

SEQ ID NO: 399794 - RNA, 19 nt, Artificial Sequence
  Description of Artificial Sequence: Synthetic oligonucleotide
gugcuacggauaugcaacg

SEQ ID NO: 399795 - RNA, 19 nt, Artificial Sequence
  Description of Artificial Sequence: Synthetic oligonucleotide
agcaaucacacagguaugu

SEQ ID NO: 399796 - RNA, 19 nt, Artificial Sequence
  Description of Artificial Sequence: Synthetic oligonucleotide
agaagcgggacgcgcuagg

SEQ ID NO: 399797 - RNA, 19 nt, Artificial Sequence
  Description of Artificial Sequence: Synthetic oligonucleotide
ugccuuuuaugaccaccgc

SEQ ID NO: 399798 - RNA, 19 nt, Artificial Sequence
  Description of Artificial Sequence: Synthetic oligonucleotide
ugcacacccauuccucacu

SEQ ID NO: 399799 - RNA, 19 nt, Artificial Sequence
  Description of Artificial Sequence: Synthetic oligonucleotide
accaccgcauccccugugg

SEQ ID NO: 399800 - RNA, 19 nt, Artificial Sequence
  Description of Artificial Sequence: Synthetic oligonucleotide
ugacaaacauuggcugucc

SEQ ID NO: 399801 - RNA, 19 nt, Artificial Sequence
  Description of Artificial Sequence: Synthetic oligonucleotide
cacaguaucuuccauggua

SEQ ID NO: 399802 - RNA, 19 nt, Artificial Sequence
  Description of Artificial Sequence: Synthetic oligonucleotide
cauuugucaguguucagua

SEQ ID NO: 399803 - RNA, 19 nt, Artificial Sequence
  Description of Artificial Sequence: Synthetic oligonucleotide
cuuuuaugaccaccgcauc

SEQ ID NO: 399804 - RNA, 19 nt, Artificial Sequence
  Description of Artificial Sequence: Synthetic oligonucleotide
cgguaugaaauccauuugg

SEQ ID NO: 399805 - RNA, 19 nt, Artificial Sequence
  Description of Artificial Sequence: Synthetic oligonucleotide
gucuagucuacuucccuca

SEQ ID NO: 399806 - RNA, 19 nt, Artificial Sequence
  Description of Artificial Sequence: Synthetic oligonucleotide
cucuccgccggcuucggag

SEQ ID NO: 399807 - RNA, 19 nt, Artificial Sequence
  Description of Artificial Sequence: Synthetic oligonucleotide
aguuacucugguguacgug

SEQ ID NO: 399808 - RNA, 19 nt, Artificial Sequence
  Description of Artificial Sequence: Synthetic oligonucleotide
gcaagagagagcucaaaga

SEQ ID NO: 399809 - RNA, 19 nt, Artificial Sequence
  Description of Artificial Sequence: Synthetic oligonucleotide
gaugcagaagcgggacgcg

SEQ ID NO: 399810 - RNA, 19 nt, Artificial Sequence
  Description of Artificial Sequence: Synthetic oligonucleotide
gugcguuucagcguuugcc

SEQ ID NO: 399811 - RNA, 19 nt, Artificial Sequence
  Description of Artificial Sequence: Synthetic oligonucleotide
uggagacuucaguucagaa

SEQ ID NO: 399812 - RNA, 19 nt, Artificial Sequence
  Description of Artificial Sequence: Synthetic oligonucleotide
ccacacuucaauucugcgc

SEQ ID NO: 399813 - RNA, 19 nt, Artificial Sequence
  Description of Artificial Sequence: Synthetic oligonucleotide
gacgcucuucacgacuggg

SEQ ID NO: 399814 - RNA, 19 nt, Artificial Sequence
  Description of Artificial Sequence: Synthetic oligonucleotide
uuaaccugggcaggaauuu

SEQ ID NO: 399815 - RNA, 19 nt, Artificial Sequence
  Description of Artificial Sequence: Synthetic oligonucleotide
uaaguucauuuggagacuu

SEQ ID NO: 399816 - RNA, 19 nt, Artificial Sequence
  Description of Artificial Sequence: Synthetic oligonucleotide
ggaaauuccucuacccacc

SEQ ID NO: 399817 - RNA, 19 nt, Artificial Sequence
  Description of Artificial Sequence: Synthetic oligonucleotide
aacccuaagguggcaagau

SEQ ID NO: 399818 - RNA, 19 nt, Artificial Sequence
  Description of Artificial Sequence: Synthetic oligonucleotide
uacgugaaaucagaacaau

SEQ ID NO: 399819 - RNA, 19 nt, Artificial Sequence
  Description of Artificial Sequence: Synthetic oligonucleotide
gacgcgcuaggacaagcac

SEQ ID NO: 399820 - RNA, 19 nt, Artificial Sequence
  Description of Artificial Sequence: Synthetic oligonucleotide
agcacagucuagucuacuu

SEQ ID NO: 399821 - RNA, 19 nt, Artificial Sequence
  Description of Artificial Sequence: Synthetic oligonucleotide
acaugaggcgauaaucaga

SEQ ID NO: 399822 - RNA, 19 nt, Artificial Sequence
  Description of Artificial Sequence: Synthetic oligonucleotide
agucacaugaggcgauaau

SEQ ID NO: 399823 - RNA, 19 nt, Artificial Sequence
  Description of Artificial Sequence: Synthetic oligonucleotide
aaguugguuaaaagagaaa

SEQ ID NO: 399824 - RNA, 19 nt, Artificial Sequence
  Description of Artificial Sequence: Synthetic oligonucleotide
augaggcgauaaucagaac

SEQ ID NO: 399825 - RNA, 19 nt, Artificial Sequence
  Description of Artificial Sequence: Synthetic oligonucleotide
cacgguaugaaauccauuu

SEQ ID NO: 399826 - RNA, 19 nt, Artificial Sequence
  Description of Artificial Sequence: Synthetic oligonucleotide
uacuacucugcagggucag

SEQ ID NO: 399827 - RNA, 19 nt, Artificial Sequence
  Description of Artificial Sequence: Synthetic oligonucleotide
caaguucacgguaugaaau

SEQ ID NO: 399828 - RNA, 19 nt, Artificial Sequence
  Description of Artificial Sequence: Synthetic oligonucleotide
uuccuguggaggccauuug

SEQ ID NO: 399829 - RNA, 19 nt, Artificial Sequence
  Description of Artificial Sequence: Synthetic oligonucleotide
ucugcgccaaagccucuga

SEQ ID NO: 399830 - RNA, 19 nt, Artificial Sequence
  Description of Artificial Sequence: Synthetic oligonucleotide
uacuucccucacagaaggc

SEQ ID NO: 399831 - RNA, 19 nt, Artificial Sequence
  Description of Artificial Sequence: Synthetic oligonucleotide
ggugauggcgacacugccg

SEQ ID NO: 399832 - RNA, 19 nt, Artificial Sequence
  Description of Artificial Sequence: Synthetic oligonucleotide
ucauaccacagugcguuuc

SEQ ID NO: 399833 - RNA, 19 nt, Artificial Sequence
  Description of Artificial Sequence: Synthetic oligonucleotide
ugcccagaacauucucuca

SEQ ID NO: 399834 - RNA, 19 nt, Artificial Sequence
  Description of Artificial Sequence: Synthetic oligonucleotide
caccgcauccccugugggg

SEQ ID NO: 399835 - RNA, 19 nt, Artificial Sequence
  Description of Artificial Sequence: Synthetic oligonucleotide
gacaaacauuggcugucca

SEQ ID NO: 399836 - RNA, 19 nt, Artificial Sequence
  Description of Artificial Sequence: Synthetic oligonucleotide
ugcauugauuuugggaauu

SEQ ID NO: 399837 - RNA, 19 nt, Artificial Sequence
  Description of Artificial Sequence: Synthetic oligonucleotide
aucccuguugccuccuccu

SEQ ID NO: 399838 - RNA, 19 nt, Artificial Sequence
  Description of Artificial Sequence: Synthetic oligonucleotide
aacucaugucacagacgag

SEQ ID NO: 399839 - RNA, 19 nt, Artificial Sequence
  Description of Artificial Sequence: Synthetic oligonucleotide
caauucugcgccaaagccu

SEQ ID NO: 399840 - RNA, 19 nt, Artificial Sequence
  Description of Artificial Sequence: Synthetic oligonucleotide
acccgugucagagcuggcg

SEQ ID NO: 399841 - RNA, 19 nt, Artificial Sequence
  Description of Artificial Sequence: Synthetic oligonucleotide
ucacgguaugaaauccauu

SEQ ID NO: 399842 - RNA, 19 nt, Artificial Sequence
  Description of Artificial Sequence: Synthetic oligonucleotide
ugcuacggauaugcaacgc

SEQ ID NO: 399843 - RNA, 19 nt, Artificial Sequence
  Description of Artificial Sequence: Synthetic oligonucleotide
ggcgcuggaacacaucuuc

SEQ ID NO: 399844 - RNA, 19 nt, Artificial Sequence
  Description of Artificial Sequence: Synthetic oligonucleotide
guacgugaaaucagaacaa

SEQ ID NO: 399845 - RNA, 19 nt, Artificial Sequence
  Description of Artificial Sequence: Synthetic oligonucleotide
uccuaagagagagcacagu

SEQ ID NO: 399846 - RNA, 19 nt, Artificial Sequence
  Description of Artificial Sequence: Synthetic oligonucleotide
ggcgauaaucagaacagca

SEQ ID NO: 399847 - RNA, 19 nt, Artificial Sequence
  Description of Artificial Sequence: Synthetic oligonucleotide
ugccgccagaggaaggccu

SEQ ID NO: 399848 - RNA, 19 nt, Artificial Sequence
  Description of Artificial Sequence: Synthetic oligonucleotide
guauucuguaagucucuaa

SEQ ID NO: 399849 - RNA, 19 nt, Artificial Sequence
  Description of Artificial Sequence: Synthetic oligonucleotide
cgcuaggacaagcacaugc

SEQ ID NO: 399850 - RNA, 19 nt, Artificial Sequence
  Description of Artificial Sequence: Synthetic oligonucleotide
cacaagccacaguaucuuc

SEQ ID NO: 399851 - RNA, 19 nt, Artificial Sequence
  Description of Artificial Sequence: Synthetic oligonucleotide
guucagaacuuaccccauc

SEQ ID NO: 399852 - RNA, 19 nt, Artificial Sequence
  Description of Artificial Sequence: Synthetic oligonucleotide
caccuuacuggugaggcca

SEQ ID NO: 399853 - RNA, 19 nt, Artificial Sequence
  Description of Artificial Sequence: Synthetic oligonucleotide
ggugaugagugcccuuagc

SEQ ID NO: 399854 - RNA, 19 nt, Artificial Sequence
  Description of Artificial Sequence: Synthetic oligonucleotide
ggauaugcaacgcgcuuca

SEQ ID NO: 399855 - RNA, 19 nt, Artificial Sequence
  Description of Artificial Sequence: Synthetic oligonucleotide
aggguaauuaugacugcau

SEQ ID NO: 399856 - RNA, 19 nt, Artificial Sequence
  Description of Artificial Sequence: Synthetic oligonucleotide
ggcuauauuucagugcaga

SEQ ID NO: 399857 - RNA, 19 nt, Artificial Sequence
  Description of Artificial Sequence: Synthetic oligonucleotide
acggauaugcaacgcgcuu

SEQ ID NO: 399858 - RNA, 19 nt, Artificial Sequence
  Description of Artificial Sequence: Synthetic oligonucleotide
cccucuuagugucuguggc

SEQ ID NO: 399859 - RNA, 19 nt, Artificial Sequence
  Description of Artificial Sequence: Synthetic oligonucleotide
acgacugggugucucuuua

SEQ ID NO: 399860 - RNA, 19 nt, Artificial Sequence
  Description of Artificial Sequence: Synthetic oligonucleotide
guucacgguaugaaaucca

SEQ ID NO: 399861 - RNA, 19 nt, Artificial Sequence
  Description of Artificial Sequence: Synthetic oligonucleotide
cuucauaccacagugcguu

SEQ ID NO: 399862 - RNA, 19 nt, Artificial Sequence
  Description of Artificial Sequence: Synthetic oligonucleotide
agucuacuucccucacaga

SEQ ID NO: 399863 - RNA, 19 nt, Artificial Sequence
  Description of Artificial Sequence: Synthetic oligonucleotide
gccuuuuaugaccaccgca

SEQ ID NO: 399864 - RNA, 19 nt, Artificial Sequence
  Description of Artificial Sequence: Synthetic oligonucleotide
cuucggagccugugucacc

SEQ ID NO: 399865 - RNA, 19 nt, Artificial Sequence
  Description of Artificial Sequence: Synthetic oligonucleotide
gucauccaaguucacggua

SEQ ID NO: 399866 - RNA, 19 nt, Artificial Sequence
  Description of Artificial Sequence: Synthetic oligonucleotide
cuagucuacuucccucaca

SEQ ID NO: 399867 - RNA, 19 nt, Artificial Sequence
  Description of Artificial Sequence: Synthetic oligonucleotide
acgugaaaucagaacaaua

SEQ ID NO: 399868 - RNA, 19 nt, Artificial Sequence
  Description of Artificial Sequence: Synthetic oligonucleotide
caauuggcccucuuagugu

SEQ ID NO: 399869 - RNA, 19 nt, Artificial Sequence
  Description of Artificial Sequence: Synthetic oligonucleotide
gcugacaaggugauggcga

SEQ ID NO: 399870 - RNA, 19 nt, Artificial Sequence
  Description of Artificial Sequence: Synthetic oligonucleotide
agcccuuuccugacaaaca

SEQ ID NO: 399871 - RNA, 19 nt, Artificial Sequence
  Description of Artificial Sequence: Synthetic oligonucleotide
cagagauguguucgggaga

SEQ ID NO: 399872 - RNA, 19 nt, Artificial Sequence
  Description of Artificial Sequence: Synthetic oligonucleotide
acgcgcuaggacaagcaca

SEQ ID NO: 399873 - RNA, 19 nt, Artificial Sequence
  Description of Artificial Sequence: Synthetic oligonucleotide
guuucagcguuugccuaac

SEQ ID NO: 399874 - RNA, 19 nt, Artificial Sequence
  Description of Artificial Sequence: Synthetic oligonucleotide
acacccuauuaaaaucuaa

SEQ ID NO: 399875 - RNA, 19 nt, Artificial Sequence
  Description of Artificial Sequence: Synthetic oligonucleotide
cugcgccaaagccucugag

SEQ ID NO: 399876 - RNA, 19 nt, Artificial Sequence
  Description of Artificial Sequence: Synthetic oligonucleotide
guaggugucuuugcuaccu

SEQ ID NO: 399877 - RNA, 19 nt, Artificial Sequence
  Description of Artificial Sequence: Synthetic oligonucleotide
gguuuugccucagaaccuc

SEQ ID NO: 399878 - RNA, 19 nt, Artificial Sequence
  Description of Artificial Sequence: Synthetic oligonucleotide
caacgcgcuucauaccaca

SEQ ID NO: 399879 - RNA, 19 nt, Artificial Sequence
  Description of Artificial Sequence: Synthetic oligonucleotide
guacuuuaggggaauccua

SEQ ID NO: 399880 - RNA, 19 nt, Artificial Sequence
  Description of Artificial Sequence: Synthetic oligonucleotide
gugucacccgugucagagc

SEQ ID NO: 399881 - RNA, 19 nt, Artificial Sequence
  Description of Artificial Sequence: Synthetic oligonucleotide
ugaccaccgcauccccugu

SEQ ID NO: 399882 - RNA, 19 nt, Artificial Sequence
  Description of Artificial Sequence: Synthetic oligonucleotide
cuggacaugcucaacucau

SEQ ID NO: 399883 - RNA, 19 nt, Artificial Sequence
  Description of Artificial Sequence: Synthetic oligonucleotide
gcuaggacaagcacaugca

SEQ ID NO: 399884 - RNA, 19 nt, Artificial Sequence
  Description of Artificial Sequence: Synthetic oligonucleotide
gcgauaaucagaacagcaa

SEQ ID NO: 399885 - RNA, 19 nt, Artificial Sequence
  Description of Artificial Sequence: Synthetic oligonucleotide
cucucagccauuccugaua

SEQ ID NO: 399886 - RNA, 19 nt, Artificial Sequence
  Description of Artificial Sequence: Synthetic oligonucleotide
gacacccuauuaaaaucua

SEQ ID NO: 399887 - RNA, 19 nt, Artificial Sequence
  Description of Artificial Sequence: Synthetic oligonucleotide
gaucauccauucacgaaau

SEQ ID NO: 399888 - RNA, 19 nt, Artificial Sequence
  Description of Artificial Sequence: Synthetic oligonucleotide
guaucuuccaugguacuuu

SEQ ID NO: 399889 - RNA, 19 nt, Artificial Sequence
  Description of Artificial Sequence: Synthetic oligonucleotide
ggcauuugucaguguucag

SEQ ID NO: 399890 - RNA, 19 nt, Artificial Sequence
  Description of Artificial Sequence: Synthetic oligonucleotide
cagcugcgaugcagaagcg

SEQ ID NO: 399891 - RNA, 19 nt, Artificial Sequence
  Description of Artificial Sequence: Synthetic oligonucleotide
agcccaccuuacuggugag

SEQ ID NO: 399892 - RNA, 19 nt, Artificial Sequence
  Description of Artificial Sequence: Synthetic oligonucleotide
guacuacucugcaggguca

SEQ ID NO: 399893 - RNA, 19 nt, Artificial Sequence
  Description of Artificial Sequence: Synthetic oligonucleotide
gagauucauuaaaguuaca

SEQ ID NO: 399894 - RNA, 19 nt, Artificial Sequence
  Description of Artificial Sequence: Synthetic oligonucleotide
ccuuuuaugaccaccgcau

SEQ ID NO: 399895 - RNA, 19 nt, Artificial Sequence
  Description of Artificial Sequence: Synthetic oligonucleotide
acgguggcgguuguagcca

SEQ ID NO: 399896 - RNA, 19 nt, Artificial Sequence
  Description of Artificial Sequence: Synthetic oligonucleotide
aggcuauauuucagugcag

SEQ ID NO: 399897 - RNA, 19 nt, Artificial Sequence
  Description of Artificial Sequence: Synthetic oligonucleotide
cuucacgacugggugucuc

SEQ ID NO: 399898 - RNA, 19 nt, Artificial Sequence
  Description of Artificial Sequence: Synthetic oligonucleotide
gaagcgggacgcgcuagga

SEQ ID NO: 399899 - RNA, 19 nt, Artificial Sequence
  Description of Artificial Sequence: Synthetic oligonucleotide
cugauauucuggacaugcu

SEQ ID NO: 399900 - RNA, 19 nt, Artificial Sequence
  Description of Artificial Sequence: Synthetic oligonucleotide
ccagagauucauuaaaguu

SEQ ID NO: 399901 - RNA, 19 nt, Artificial Sequence
  Description of Artificial Sequence: Synthetic oligonucleotide
accccaugccucaaauccu

SEQ ID NO: 399902 - RNA, 19 nt, Artificial Sequence
  Description of Artificial Sequence: Synthetic oligonucleotide
cacaauuggcccucuuagu

SEQ ID NO: 399903 - RNA, 19 nt, Artificial Sequence
  Description of Artificial Sequence: Synthetic oligonucleotide
ccaaguucacgguaugaaa

SEQ ID NO: 399904 - RNA, 19 nt, Artificial Sequence
  Description of Artificial Sequence: Synthetic oligonucleotide
cccgugucagagcuggcgc

SEQ ID NO: 399905 - RNA, 19 nt, Artificial Sequence
  Description of Artificial Sequence: Synthetic oligonucleotide
accuuacuggugaggccag

SEQ ID NO: 399906 - RNA, 19 nt, Artificial Sequence
  Description of Artificial Sequence: Synthetic oligonucleotide
ggaauggagcugauacuuc

SEQ ID NO: 399907 - RNA, 19 nt, Artificial Sequence
  Description of Artificial Sequence: Synthetic oligonucleotide
gcgccaaagccucugagcu

SEQ ID NO: 399908 - RNA, 19 nt, Artificial Sequence
  Description of Artificial Sequence: Synthetic oligonucleotide
agguggccucacugcaugu

SEQ ID NO: 399909 - RNA, 19 nt, Artificial Sequence
  Description of Artificial Sequence: Synthetic oligonucleotide
cagugcguuucagcguuug

SEQ ID NO: 399910 - RNA, 19 nt, Artificial Sequence
  Description of Artificial Sequence: Synthetic oligonucleotide
cagaagcgggacgcgcuag

SEQ ID NO: 399911 - RNA, 19 nt, Artificial Sequence
  Description of Artificial Sequence: Synthetic oligonucleotide
cuucagugcuacggauaug

SEQ ID NO: 399912 - RNA, 19 nt, Artificial Sequence
  Description of Artificial Sequence: Synthetic oligonucleotide
gcuauauuucagugcagau

SEQ ID NO: 399913 - RNA, 19 nt, Artificial Sequence
  Description of Artificial Sequence: Synthetic oligonucleotide
cuuacuggugaggccagcu

SEQ ID NO: 399914 - RNA, 19 nt, Artificial Sequence
  Description of Artificial Sequence: Synthetic oligonucleotide
ucuucacgacugggugucu

SEQ ID NO: 399915 - RNA, 19 nt, Artificial Sequence
  Description of Artificial Sequence: Synthetic oligonucleotide
guguucgggagaagagcuc

SEQ ID NO: 399916 - RNA, 19 nt, Artificial Sequence
  Description of Artificial Sequence: Synthetic oligonucleotide
ccucuuagugucuguggca

SEQ ID NO: 399917 - RNA, 19 nt, Artificial Sequence
  Description of Artificial Sequence: Synthetic oligonucleotide
agacuucaguucagaacuu

SEQ ID NO: 399918 - RNA, 19 nt, Artificial Sequence
  Description of Artificial Sequence: Synthetic oligonucleotide
cugcauugauuuugggaau

SEQ ID NO: 399919 - RNA, 19 nt, Artificial Sequence
  Description of Artificial Sequence: Synthetic oligonucleotide
gcgacacugccgccagagg

SEQ ID NO: 399920 - RNA, 19 nt, Artificial Sequence
  Description of Artificial Sequence: Synthetic oligonucleotide
ggcccucuuagugucugug

SEQ ID NO: 399921 - RNA, 19 nt, Artificial Sequence
  Description of Artificial Sequence: Synthetic oligonucleotide
cugagcacucuuuuccauu

SEQ ID NO: 399922 - RNA, 19 nt, Artificial Sequence
  Description of Artificial Sequence: Synthetic oligonucleotide
agcuagcaagaaagucaca

SEQ ID NO: 399923 - RNA, 19 nt, Artificial Sequence
  Description of Artificial Sequence: Synthetic oligonucleotide
gcuuugcacaauuggcccu

SEQ ID NO: 399924 - RNA, 19 nt, Artificial Sequence
  Description of Artificial Sequence: Synthetic oligonucleotide
cacuucaauucugcgccaa

SEQ ID NO: 399925 - RNA, 19 nt, Artificial Sequence
  Description of Artificial Sequence: Synthetic oligonucleotide
auacuacaucacagccaca

SEQ ID NO: 399926 - RNA, 19 nt, Artificial Sequence
  Description of Artificial Sequence: Synthetic oligonucleotide
gcgcuucauaccacagugc

SEQ ID NO: 399927 - RNA, 19 nt, Artificial Sequence
  Description of Artificial Sequence: Synthetic oligonucleotide
gggacgcgcuaggacaagc

SEQ ID NO: 399928 - RNA, 19 nt, Artificial Sequence
  Description of Artificial Sequence: Synthetic oligonucleotide
acucuccgccggcuucgga

SEQ ID NO: 399929 - RNA, 19 nt, Artificial Sequence
  Description of Artificial Sequence: Synthetic oligonucleotide
cgauaaucagaacagcaau

SEQ ID NO: 399930 - RNA, 19 nt, Artificial Sequence
  Description of Artificial Sequence: Synthetic oligonucleotide
cggauaugcaacgcgcuuc

SEQ ID NO: 399931 - RNA, 19 nt, Artificial Sequence
  Description of Artificial Sequence: Synthetic oligonucleotide
ccaugguacuuuaggggaa

SEQ ID NO: 399932 - RNA, 19 nt, Artificial Sequence
  Description of Artificial Sequence: Synthetic oligonucleotide
caguuacucugguguacgu

SEQ ID NO: 399933 - RNA, 19 nt, Artificial Sequence
  Description of Artificial Sequence: Synthetic oligonucleotide
ggacgcgcuaggacaagca

SEQ ID NO: 399934 - RNA, 19 nt, Artificial Sequence
  Description of Artificial Sequence: Synthetic oligonucleotide
ccacucuccgccggcuucg

SEQ ID NO: 399935 - RNA, 19 nt, Artificial Sequence
  Description of Artificial Sequence: Synthetic oligonucleotide
gcaacgcgcuucauaccac

SEQ ID NO: 399936 - RNA, 19 nt, Artificial Sequence
  Description of Artificial Sequence: Synthetic oligonucleotide
cugugucacccgugucaga

SEQ ID NO: 399937 - RNA, 19 nt, Artificial Sequence
  Description of Artificial Sequence: Synthetic oligonucleotide
gcguuucagcguuugccua

SEQ ID NO: 399938 - RNA, 19 nt, Artificial Sequence
  Description of Artificial Sequence: Synthetic oligonucleotide
caguuguccugaagacacu

SEQ ID NO: 399939 - RNA, 19 nt, Artificial Sequence
  Description of Artificial Sequence: Synthetic oligonucleotide
gucucuggacgguggcggu

SEQ ID NO: 399940 - RNA, 19 nt, Artificial Sequence
  Description of Artificial Sequence: Synthetic oligonucleotide
ggccucacugcaugucaaa

SEQ ID NO: 399941 - RNA, 19 nt, Artificial Sequence
  Description of Artificial Sequence: Synthetic oligonucleotide
gauaugcaacgcgcuucau

SEQ ID NO: 399942 - RNA, 19 nt, Artificial Sequence
  Description of Artificial Sequence: Synthetic oligonucleotide
guucgggagaagagcuccu

SEQ ID NO: 399943 - RNA, 19 nt, Artificial Sequence
  Description of Artificial Sequence: Synthetic oligonucleotide
gcagaagcgggacgcgcua

SEQ ID NO: 399944 - RNA, 19 nt, Artificial Sequence
  Description of Artificial Sequence: Synthetic oligonucleotide
gcuucauaccacagugcgu

SEQ ID NO: 399945 - RNA, 19 nt, Artificial Sequence
  Description of Artificial Sequence: Synthetic oligonucleotide
ccuuacuggugaggccagc

SEQ ID NO: 399946 - RNA, 19 nt, Artificial Sequence
  Description of Artificial Sequence: Synthetic oligonucleotide
ggagcccuuuccugacaaa

SEQ ID NO: 399947 - RNA, 19 nt, Artificial Sequence
  Description of Artificial Sequence: Synthetic oligonucleotide
acagugcguuucagcguuu

SEQ ID NO: 399948 - RNA, 19 nt, Artificial Sequence
  Description of Artificial Sequence: Synthetic oligonucleotide
cgcgcuaggacaagcacau

SEQ ID NO: 399949 - RNA, 19 nt, Artificial Sequence
  Description of Artificial Sequence: Synthetic oligonucleotide
gggaacugacaaccugcuu

SEQ ID NO: 399950 - RNA, 19 nt, Artificial Sequence
  Description of Artificial Sequence: Synthetic oligonucleotide
gcgggacgcgcuaggacaa

SEQ ID NO: 399951 - RNA, 19 nt, Artificial Sequence
  Description of Artificial Sequence: Synthetic oligonucleotide
ccgccagaggaaggccugc

SEQ ID NO: 399952 - RNA, 19 nt, Artificial Sequence
  Description of Artificial Sequence: Synthetic oligonucleotide
cacuggcagaaucccuguu

SEQ ID NO: 399953 - RNA, 19 nt, Artificial Sequence
  Description of Artificial Sequence: Synthetic oligonucleotide
cgguggcgguuguagccac

SEQ ID NO: 399954 - RNA, 19 nt, Artificial Sequence
  Description of Artificial Sequence: Synthetic oligonucleotide
ccgugucagagcuggcgcu

SEQ ID NO: 399955 - RNA, 19 nt, Artificial Sequence
  Description of Artificial Sequence: Synthetic oligonucleotide
cgggacgcgcuaggacaag

SEQ ID NO: 399956 - RNA, 19 nt, Artificial Sequence
  Description of Artificial Sequence: Synthetic oligonucleotide
cggagccugugucacccgu

SEQ ID NO: 399957 - RNA, 19 nt, Artificial Sequence
  Description of Artificial Sequence: Synthetic oligonucleotide
aaaaugauaaagcaugacc

SEQ ID NO: 399958 - RNA, 19 nt, Artificial Sequence
  Description of Artificial Sequence: Synthetic oligonucleotide
uuuaguucacaccagaccc

SEQ ID NO: 399959 - RNA, 19 nt, Artificial Sequence
  Description of Artificial Sequence: Synthetic oligonucleotide
aauacaucagacaauauug

SEQ ID NO: 399960 - RNA, 19 nt, Artificial Sequence
  Description of Artificial Sequence: Synthetic oligonucleotide
uuaucuuugguucuguccc

SEQ ID NO: 399961 - RNA, 19 nt, Artificial Sequence
  Description of Artificial Sequence: Synthetic oligonucleotide
  modified_base (11)..(11): a, c, u, g, unknown or other
auucuuauugnguuuuacc

SEQ ID NO: 399962 - RNA, 19 nt, Artificial Sequence
  Description of Artificial Sequence: Synthetic oligonucleotide
gaccgauaaaauuauaucc

SEQ ID NO: 399963 - RNA, 19 nt, Artificial Sequence
  Description of Artificial Sequence: Synthetic oligonucleotide
uauuuaaccagcugaacag

SEQ ID NO: 399964 - RNA, 19 nt, Artificial Sequence
  Description of Artificial Sequence: Synthetic oligonucleotide
uuaccugucauauucaaug

SEQ ID NO: 399965 - RNA, 19 nt, Artificial Sequence
  Description of Artificial Sequence: Synthetic oligonucleotide
ugcaagauagcaaaaggcc

SEQ ID NO: 399966 - RNA, 19 nt, Artificial Sequence
  Description of Artificial Sequence: Synthetic oligonucleotide
uuaauaagaaaacucacuu

SEQ ID NO: 399967 - RNA, 19 nt, Artificial Sequence
  Description of Artificial Sequence: Synthetic oligonucleotide
uacuaucagaauuuaaucc

SEQ ID NO: 399968 - RNA, 19 nt, Artificial Sequence
  Description of Artificial Sequence: Synthetic oligonucleotide
uaaauacugcguaagagga

SEQ ID NO: 399969 - RNA, 19 nt, Artificial Sequence
  Description of Artificial Sequence: Synthetic oligonucleotide
gaggcuuaaaaccaaauac

SEQ ID NO: 399970 - RNA, 19 nt, Artificial Sequence
  Description of Artificial Sequence: Synthetic oligonucleotide
uauaauaaggucacugugu

SEQ ID NO: 399971 - RNA, 19 nt, Artificial Sequence
  Description of Artificial Sequence: Synthetic oligonucleotide
uguauuguuucagauauag

SEQ ID NO: 399972 - RNA, 19 nt, Artificial Sequence
  Description of Artificial Sequence: Synthetic oligonucleotide
gaucuuuuauccuacuucc

SEQ ID NO: 399973 - RNA, 19 nt, Artificial Sequence
  Description of Artificial Sequence: Synthetic oligonucleotide
agaaucaacuggcuaauac

SEQ ID NO: 399974 - RNA, 19 nt, Artificial Sequence
  Description of Artificial Sequence: Synthetic oligonucleotide
ucuaauaacacacgauaca

SEQ ID NO: 399975 - RNA, 19 nt, Artificial Sequence
  Description of Artificial Sequence: Synthetic oligonucleotide
aauaccacaaucaaauaca

SEQ ID NO: 399976 - RNA, 19 nt, Artificial Sequence
  Description of Artificial Sequence: Synthetic oligonucleotide
aguacugauucuuauuggg

SEQ ID NO: 399977 - RNA, 19 nt, Artificial Sequence
  Description of Artificial Sequence: Synthetic oligonucleotide
uauuauaauaaggucacug

SEQ ID NO: 399978 - RNA, 19 nt, Artificial Sequence
  Description of Artificial Sequence: Synthetic oligonucleotide
ucaacuggcuaauacauca

SEQ ID NO: 399979 - RNA, 19 nt, Artificial Sequence
  Description of Artificial Sequence: Synthetic oligonucleotide
ucacaggcuaacaauaugc

SEQ ID NO: 399980 - RNA, 19 nt, Artificial Sequence
  Description of Artificial Sequence: Synthetic oligonucleotide
uccuuaacuaacccuauag

SEQ ID NO: 399981 - RNA, 19 nt, Artificial Sequence
  Description of Artificial Sequence: Synthetic oligonucleotide
acuaucagaauuuaaucca

SEQ ID NO: 399982 - RNA, 19 nt, Artificial Sequence
  Description of Artificial Sequence: Synthetic oligonucleotide
uuaacuaacccuauaguua

SEQ ID NO: 399983 - RNA, 19 nt, Artificial Sequence
  Description of Artificial Sequence: Synthetic oligonucleotide
agugacucuaauaacacac

SEQ ID NO: 399984 - RNA, 19 nt, Artificial Sequence
  Description of Artificial Sequence: Synthetic oligonucleotide
uuaacaguagagaacucug

SEQ ID NO: 399985 - RNA, 19 nt, Artificial Sequence
  Description of Artificial Sequence: Synthetic oligonucleotide
agugcaaucgccuuuaaaa

SEQ ID NO: 399986 - RNA, 19 nt, Artificial Sequence
  Description of Artificial Sequence: Synthetic oligonucleotide
aaauuauauccaaugcagg

SEQ ID NO: 399987 - RNA, 19 nt, Artificial Sequence
  Description of Artificial Sequence: Synthetic oligonucleotide
aauuuccuuaacuaacccu

SEQ ID NO: 399988 - RNA, 19 nt, Artificial Sequence
  Description of Artificial Sequence: Synthetic oligonucleotide
uauauagcugcagauaccc

SEQ ID NO: 399989 - RNA, 19 nt, Artificial Sequence
  Description of Artificial Sequence: Synthetic oligonucleotide
uuauccaacacugagguuc

SEQ ID NO: 399990 - RNA, 19 nt, Artificial Sequence
  Description of Artificial Sequence: Synthetic oligonucleotide
aaaacuuuccaauggccgu

SEQ ID NO: 399991 - RNA, 19 nt, Artificial Sequence
  Description of Artificial Sequence: Synthetic oligonucleotide
ucccguacgugcaagauag

SEQ ID NO: 399992 - RNA, 19 nt, Artificial Sequence
  Description of Artificial Sequence: Synthetic oligonucleotide
aaaagccaauugcacauag

SEQ ID NO: 399993 - RNA, 19 nt, Artificial Sequence
  Description of Artificial Sequence: Synthetic oligonucleotide
caucagacaauauuguaag

SEQ ID NO: 399994 - RNA, 19 nt, Artificial Sequence
  Description of Artificial Sequence: Synthetic oligonucleotide
caauagacucuucaaaugc

SEQ ID NO: 399995 - RNA, 19 nt, Artificial Sequence
  Description of Artificial Sequence: Synthetic oligonucleotide
acugcguaagaggagaugc

SEQ ID NO: 399996 - RNA, 19 nt, Artificial Sequence
  Description of Artificial Sequence: Synthetic oligonucleotide
  modified_base (9)..(9): a, c, u, g, unknown or other
ucuuauugnguuuuaccug

SEQ ID NO: 399997 - RNA, 19 nt, Artificial Sequence
  Description of Artificial Sequence: Synthetic oligonucleotide
auaauaaggucacugugug

SEQ ID NO: 399998 - RNA, 19 nt, Artificial Sequence
  Description of Artificial Sequence: Synthetic oligonucleotide
auacuuuggaaguauaggu

SEQ ID NO: 399999 - RNA, 19 nt, Artificial Sequence
  Description of Artificial Sequence: Synthetic oligonucleotide
acaggcuaacaauaugccc

SEQ ID NO: 400000 - RNA, 19 nt, Artificial Sequence
  Description of Artificial Sequence: Synthetic oligonucleotide
ugaauuuaagucccuguga

SEQ ID NO: 400001 - RNA, 19 nt, Artificial Sequence
  Description of Artificial Sequence: Synthetic oligonucleotide
acaacagcggcacucacuc

SEQ ID NO: 400002 - RNA, 19 nt, Artificial Sequence
  Description of Artificial Sequence: Synthetic oligonucleotide
aagauauguaacuaagcuu

SEQ ID NO: 400003 - RNA, 19 nt, Artificial Sequence
  Description of Artificial Sequence: Synthetic oligonucleotide
aaugcaggaacacuguuua

SEQ ID NO: 400004 - RNA, 19 nt, Artificial Sequence
  Description of Artificial Sequence: Synthetic oligonucleotide
augauguacauacaccaag

SEQ ID NO: 400005 - RNA, 19 nt, Artificial Sequence
  Description of Artificial Sequence: Synthetic oligonucleotide
aauucucuaucagagcguc

SEQ ID NO: 400006 - RNA, 19 nt, Artificial Sequence
  Description of Artificial Sequence: Synthetic oligonucleotide
acaaaccuuuucuauagag

SEQ ID NO: 400007 - RNA, 19 nt, Artificial Sequence
  Description of Artificial Sequence: Synthetic oligonucleotide
uuuauccuacuuccaaucc

SEQ ID NO: 400008 - RNA, 19 nt, Artificial Sequence
  Description of Artificial Sequence: Synthetic oligonucleotide
ucugcguaauacuuuaucu

SEQ ID NO: 400009 - RNA, 19 nt, Artificial Sequence
  Description of Artificial Sequence: Synthetic oligonucleotide
uggcuaauacaucagacaa

SEQ ID NO: 400010 - RNA, 19 nt, Artificial Sequence
  Description of Artificial Sequence: Synthetic oligonucleotide
aaaacggaccgauaaaauu

SEQ ID NO: 400011 - RNA, 19 nt, Artificial Sequence
  Description of Artificial Sequence: Synthetic oligonucleotide
cauccuaauauuuauuauc

SEQ ID NO: 400012 - RNA, 19 nt, Artificial Sequence
  Description of Artificial Sequence: Synthetic oligonucleotide
uugcaggucaauuaaccag

SEQ ID NO: 400013 - RNA, 19 nt, Artificial Sequence
  Description of Artificial Sequence: Synthetic oligonucleotide
gaaacuaggcuggagcugg

SEQ ID NO: 400014 - RNA, 19 nt, Artificial Sequence
  Description of Artificial Sequence: Synthetic oligonucleotide
uucaaggguaacauaguca

SEQ ID NO: 400015 - RNA, 19 nt, Artificial Sequence
  Description of Artificial Sequence: Synthetic oligonucleotide
uuuaacaguagagaacucu

SEQ ID NO: 400016 - RNA, 19 nt, Artificial Sequence
  Description of Artificial Sequence: Synthetic oligonucleotide
uauguagcuugcaagauuu

SEQ ID NO: 400017 - RNA, 19 nt, Artificial Sequence
  Description of Artificial Sequence: Synthetic oligonucleotide
uguagcuugcaagauuucg

SEQ ID NO: 400018 - RNA, 19 nt, Artificial Sequence
  Description of Artificial Sequence: Synthetic oligonucleotide
uuaaccagcugaacagagg

SEQ ID NO: 400019 - RNA, 19 nt, Artificial Sequence
  Description of Artificial Sequence: Synthetic oligonucleotide
ugauucugagcuacuauca

SEQ ID NO: 400020 - RNA, 19 nt, Artificial Sequence
  Description of Artificial Sequence: Synthetic oligonucleotide
gguuccacgacauucuucg

SEQ ID NO: 400021 - RNA, 19 nt, Artificial Sequence
  Description of Artificial Sequence: Synthetic oligonucleotide
cauugcaggucaauuaacc

SEQ ID NO: 400022 - RNA, 19 nt, Artificial Sequence
  Description of Artificial Sequence: Synthetic oligonucleotide
uuugaauuuaagucccugu

SEQ ID NO: 400023 - RNA, 19 nt, Artificial Sequence
  Description of Artificial Sequence: Synthetic oligonucleotide
ucuuuaagugcaaucgccu

SEQ ID NO: 400024 - RNA, 19 nt, Artificial Sequence
  Description of Artificial Sequence: Synthetic oligonucleotide
uucgguaaucauuuggcug

SEQ ID NO: 400025 - RNA, 19 nt, Artificial Sequence
  Description of Artificial Sequence: Synthetic oligonucleotide
ugcaaauucucacaggcua

SEQ ID NO: 400026 - RNA, 19 nt, Artificial Sequence
  Description of Artificial Sequence: Synthetic oligonucleotide
ucgguaaucauuuggcugu

SEQ ID NO: 400027 - RNA, 19 nt, Artificial Sequence
  Description of Artificial Sequence: Synthetic oligonucleotide
guaaauaccagucuuaaau

SEQ ID NO: 400028 - RNA, 19 nt, Artificial Sequence
  Description of Artificial Sequence: Synthetic oligonucleotide
aaugcacugagaaauguga

SEQ ID NO: 400029 - RNA, 19 nt, Artificial Sequence
  Description of Artificial Sequence: Synthetic oligonucleotide
ugacugucauuuaagauua

SEQ ID NO: 400030 - RNA, 19 nt, Artificial Sequence
  Description of Artificial Sequence: Synthetic oligonucleotide
ucugggaccggaauuggag

SEQ ID NO: 400031 - RNA, 19 nt, Artificial Sequence
  Description of Artificial Sequence: Synthetic oligonucleotide
cuuauuguagccgauaaca

SEQ ID NO: 400032 - RNA, 19 nt, Artificial Sequence
  Description of Artificial Sequence: Synthetic oligonucleotide
acucuaauaacacacgaua

SEQ ID NO: 400033 - RNA, 19 nt, Artificial Sequence
  Description of Artificial Sequence: Synthetic oligonucleotide
uaagaggagaugcugaauu

SEQ ID NO: 400034 - RNA, 19 nt, Artificial Sequence
  Description of Artificial Sequence: Synthetic oligonucleotide
uacauccuaauauuuauua

SEQ ID NO: 400035 - RNA, 19 nt, Artificial Sequence
  Description of Artificial Sequence: Synthetic oligonucleotide
uaacuaacccuauaguuau

SEQ ID NO: 400036 - RNA, 19 nt, Artificial Sequence
  Description of Artificial Sequence: Synthetic oligonucleotide
uuuuauccuacuuccaauc

SEQ ID NO: 400037 - RNA, 19 nt, Artificial Sequence
  Description of Artificial Sequence: Synthetic oligonucleotide
agauauguaacuaagcuua

SEQ ID NO: 400038 - RNA, 19 nt, Artificial Sequence
  Description of Artificial Sequence: Synthetic oligonucleotide
cuacuaucagaauuuaauc

SEQ ID NO: 400039 - RNA, 19 nt, Artificial Sequence
  Description of Artificial Sequence: Synthetic oligonucleotide
ucacuguaaugacugacug

SEQ ID NO: 400040 - RNA, 19 nt, Artificial Sequence
  Description of Artificial Sequence: Synthetic oligonucleotide
uuauccuacuuccaaucca

SEQ ID NO: 400041 - RNA, 19 nt, Artificial Sequence
  Description of Artificial Sequence: Synthetic oligonucleotide
uuuaaagccugguaauagu

SEQ ID NO: 400042 - RNA, 19 nt, Artificial Sequence
  Description of Artificial Sequence: Synthetic oligonucleotide
gagaauauccuagaaugug

SEQ ID NO: 400043 - RNA, 19 nt, Artificial Sequence
  Description of Artificial Sequence: Synthetic oligonucleotide
uguggcuagcacuauccgg

SEQ ID NO: 400044 - RNA, 19 nt, Artificial Sequence
  Description of Artificial Sequence: Synthetic oligonucleotide
agugguuaugucccguacg

SEQ ID NO: 400045 - RNA, 19 nt, Artificial Sequence
  Description of Artificial Sequence: Synthetic oligonucleotide
uauagaggaagcaccuaug

SEQ ID NO: 400046 - RNA, 19 nt, Artificial Sequence
  Description of Artificial Sequence: Synthetic oligonucleotide
  modified_base (3)..(3): a, c, u, g, unknown or other
ugnguuuuaccugucauau

SEQ ID NO: 400047 - RNA, 19 nt, Artificial Sequence
  Description of Artificial Sequence: Synthetic oligonucleotide
cuguuuuacucacaggcag

SEQ ID NO: 400048 - RNA, 19 nt, Artificial Sequence
  Description of Artificial Sequence: Synthetic oligonucleotide
auuuggcuguuuuacucac

SEQ ID NO: 400049 - RNA, 19 nt, Artificial Sequence
  Description of Artificial Sequence: Synthetic oligonucleotide
acacgauacauccuaauau

SEQ ID NO: 400050 - RNA, 19 nt, Artificial Sequence
  Description of Artificial Sequence: Synthetic oligonucleotide
agugucagugaacuaaaca

SEQ ID NO: 400051 - RNA, 19 nt, Artificial Sequence
  Description of Artificial Sequence: Synthetic oligonucleotide
caucucagcaacaacaaca

SEQ ID NO: 400052 - RNA, 19 nt, Artificial Sequence
  Description of Artificial Sequence: Synthetic oligonucleotide
uucuuauugggcuggcugc

SEQ ID NO: 400053 - RNA, 19 nt, Artificial Sequence
  Description of Artificial Sequence: Synthetic oligonucleotide
uacuuuggaaguauagguc

SEQ ID NO: 400054 - RNA, 19 nt, Artificial Sequence
  Description of Artificial Sequence: Synthetic oligonucleotide
ugucacucuggccagguga

SEQ ID NO: 400055 - RNA, 19 nt, Artificial Sequence
  Description of Artificial Sequence: Synthetic oligonucleotide
ugacugacugucauuuaag

SEQ ID NO: 400056 - RNA, 19 nt, Artificial Sequence
  Description of Artificial Sequence: Synthetic oligonucleotide
uuuagcgccaacaaaccuu

SEQ ID NO: 400057 - RNA, 19 nt, Artificial Sequence
  Description of Artificial Sequence: Synthetic oligonucleotide
aaucaacuggcuaauacau

SEQ ID NO: 400058 - RNA, 19 nt, Artificial Sequence
  Description of Artificial Sequence: Synthetic oligonucleotide
cuuaaccacaguuuaauaa

SEQ ID NO: 400059 - RNA, 19 nt, Artificial Sequence
  Description of Artificial Sequence: Synthetic oligonucleotide
gccaugaauacuuuggaag

SEQ ID NO: 400060 - RNA, 19 nt, Artificial Sequence
  Description of Artificial Sequence: Synthetic oligonucleotide
ucauuuggcuguuuuacuc

SEQ ID NO: 400061 - RNA, 19 nt, Artificial Sequence
  Description of Artificial Sequence: Synthetic oligonucleotide
gaccuuugcucucaggcag

SEQ ID NO: 400062 - RNA, 19 nt, Artificial Sequence
  Description of Artificial Sequence: Synthetic oligonucleotide
acccuauaguuauauaaug

SEQ ID NO: 400063 - RNA, 19 nt, Artificial Sequence
  Description of Artificial Sequence: Synthetic oligonucleotide
ugaaaacggaccgauaaaa

SEQ ID NO: 400064 - RNA, 19 nt, Artificial Sequence
  Description of Artificial Sequence: Synthetic oligonucleotide
uuaguucacaccagacccc

SEQ ID NO: 400065 - RNA, 19 nt, Artificial Sequence
  Description of Artificial Sequence: Synthetic oligonucleotide
acauaaagugcaaauucuc

SEQ ID NO: 400066 - RNA, 19 nt, Artificial Sequence
  Description of Artificial Sequence: Synthetic oligonucleotide
aaacggaccgauaaaauua

SEQ ID NO: 400067 - RNA, 19 nt, Artificial Sequence
  Description of Artificial Sequence: Synthetic oligonucleotide
uauaggucagaaaggcaga

SEQ ID NO: 400068 - RNA, 19 nt, Artificial Sequence
  Description of Artificial Sequence: Synthetic oligonucleotide
  modified_base (6)..(6): a, c, u, g, unknown or other
uauugnguuuuaccuguca

SEQ ID NO: 400069 - RNA, 19 nt, Artificial Sequence
  Description of Artificial Sequence: Synthetic oligonucleotide
gaaguucugccacugccag

SEQ ID NO: 400070 - RNA, 19 nt, Artificial Sequence
  Description of Artificial Sequence: Synthetic oligonucleotide
caggcuaacaauaugccca

SEQ ID NO: 400071 - RNA, 19 nt, Artificial Sequence
  Description of Artificial Sequence: Synthetic oligonucleotide
acauagucauguccaacuc

SEQ ID NO: 400072 - RNA, 19 nt, Artificial Sequence
  Description of Artificial Sequence: Synthetic oligonucleotide
acuccuaucccuccaaaca

SEQ ID NO: 400073 - RNA, 19 nt, Artificial Sequence
  Description of Artificial Sequence: Synthetic oligonucleotide
acuauuguuuuauguucag

SEQ ID NO: 400074 - RNA, 19 nt, Artificial Sequence
  Description of Artificial Sequence: Synthetic oligonucleotide
auugcaggucaauuaacca

SEQ ID NO: 400075 - RNA, 19 nt, Artificial Sequence
  Description of Artificial Sequence: Synthetic oligonucleotide
acuggcuaauacaucagac

SEQ ID NO: 400076 - RNA, 19 nt, Artificial Sequence
  Description of Artificial Sequence: Synthetic oligonucleotide
uuuuagcgccaacaaaccu

SEQ ID NO: 400077 - RNA, 19 nt, Artificial Sequence
  Description of Artificial Sequence: Synthetic oligonucleotide
cugagugacucuaauaaca

SEQ ID NO: 400078 - RNA, 19 nt, Artificial Sequence
  Description of Artificial Sequence: Synthetic oligonucleotide
guggcuagcacuauccggg

SEQ ID NO: 400079 - RNA, 19 nt, Artificial Sequence
  Description of Artificial Sequence: Synthetic oligonucleotide
ucgcuuagccaucugaaaa

SEQ ID NO: 400080 - RNA, 19 nt, Artificial Sequence
  Description of Artificial Sequence: Synthetic oligonucleotide
ccuaggagaucuuuuaucc

SEQ ID NO: 400081 - RNA, 19 nt, Artificial Sequence
  Description of Artificial Sequence: Synthetic oligonucleotide
uagucuauuuaaccagcug

SEQ ID NO: 400082 - RNA, 19 nt, Artificial Sequence
  Description of Artificial Sequence: Synthetic oligonucleotide
uauccuacuuccaauccau

SEQ ID NO: 400083 - RNA, 19 nt, Artificial Sequence
  Description of Artificial Sequence: Synthetic oligonucleotide
uauccaacacugagguucc

SEQ ID NO: 400084 - RNA, 19 nt, Artificial Sequence
  Description of Artificial Sequence: Synthetic oligonucleotide
  modified_base (5)..(5): a, c, u, g, unknown or other
auugnguuuuaccugucau

SEQ ID NO: 400085 - RNA, 19 nt, Artificial Sequence
  Description of Artificial Sequence: Synthetic oligonucleotide
cuaaauuaucguuccagga

SEQ ID NO: 400086 - RNA, 19 nt, Artificial Sequence
  Description of Artificial Sequence: Synthetic oligonucleotide
aagauagcaaaaggccauc

SEQ ID NO: 400087 - RNA, 19 nt, Artificial Sequence
  Description of Artificial Sequence: Synthetic oligonucleotide
gguuaugucccguacgugc

SEQ ID NO: 400088 - RNA, 19 nt, Artificial Sequence
  Description of Artificial Sequence: Synthetic oligonucleotide
aggcuaacaauaugcccac

SEQ ID NO: 400089 - RNA, 19 nt, Artificial Sequence
  Description of Artificial Sequence: Synthetic oligonucleotide
guaacuaagcuuaaccaca

SEQ ID NO: 400090 - RNA, 19 nt, Artificial Sequence
  Description of Artificial Sequence: Synthetic oligonucleotide
guguuaaggagugucagug

SEQ ID NO: 400091 - RNA, 19 nt, Artificial Sequence
  Description of Artificial Sequence: Synthetic oligonucleotide
acaaggucucaccauauau

SEQ ID NO: 400092 - RNA, 19 nt, Artificial Sequence
  Description of Artificial Sequence: Synthetic oligonucleotide
uagggcauaugauaaacuu

SEQ ID NO: 400093 - RNA, 19 nt, Artificial Sequence
  Description of Artificial Sequence: Synthetic oligonucleotide
cacaggcuaacaauaugcc

SEQ ID NO: 400094 - RNA, 19 nt, Artificial Sequence
  Description of Artificial Sequence: Synthetic oligonucleotide
caguacugauucuuauugg

SEQ ID NO: 400095 - RNA, 19 nt, Artificial Sequence
  Description of Artificial Sequence: Synthetic oligonucleotide
gcaguacugauucuuauug

SEQ ID NO: 400096 - RNA, 19 nt, Artificial Sequence
  Description of Artificial Sequence: Synthetic oligonucleotide
cuaucagagcgucaaugag

SEQ ID NO: 400097 - RNA, 19 nt, Artificial Sequence
  Description of Artificial Sequence: Synthetic oligonucleotide
uaacaauaugcccacuauu

SEQ ID NO: 400098 - RNA, 19 nt, Artificial Sequence
  Description of Artificial Sequence: Synthetic oligonucleotide
aauggcgugccgcuguuaa

SEQ ID NO: 400099 - RNA, 19 nt, Artificial Sequence
  Description of Artificial Sequence: Synthetic oligonucleotide
gugcaagauagcaaaaggc

SEQ ID NO: 400100 - RNA, 19 nt, Artificial Sequence
  Description of Artificial Sequence: Synthetic oligonucleotide
uaagguucaaggguaacau

SEQ ID NO: 400101 - RNA, 19 nt, Artificial Sequence
  Description of Artificial Sequence: Synthetic oligonucleotide
uuaaggagugucagugaac

SEQ ID NO: 400102 - RNA, 19 nt, Artificial Sequence
  Description of Artificial Sequence: Synthetic oligonucleotide
gggaauuuagggcauauga

SEQ ID NO: 400103 - RNA, 19 nt, Artificial Sequence
  Description of Artificial Sequence: Synthetic oligonucleotide
uucugucccacuuguucgg

SEQ ID NO: 400104 - RNA, 19 nt, Artificial Sequence
  Description of Artificial Sequence: Synthetic oligonucleotide
  modified_base (4)..(4): a, c, u, g, unknown or other
uugnguuuuaccugucaua

SEQ ID NO: 400105 - RNA, 19 nt, Artificial Sequence
  Description of Artificial Sequence: Synthetic oligonucleotide
uaauaaggucacugugugc

SEQ ID NO: 400106 - RNA, 19 nt, Artificial Sequence
  Description of Artificial Sequence: Synthetic oligonucleotide
uagcuugcaagauuucgcu

SEQ ID NO: 400107 - RNA, 19 nt, Artificial Sequence
  Description of Artificial Sequence: Synthetic oligonucleotide
ucaauuaaccagccaugaa

SEQ ID NO: 400108 - RNA, 19 nt, Artificial Sequence
  Description of Artificial Sequence: Synthetic oligonucleotide
uuuaccugucauauucaau

SEQ ID NO: 400109 - RNA, 19 nt, Artificial Sequence
  Description of Artificial Sequence: Synthetic oligonucleotide
uguuaaggagugucaguga

SEQ ID NO: 400110 - RNA, 19 nt, Artificial Sequence
  Description of Artificial Sequence: Synthetic oligonucleotide
uguccacuaaauuaucguu

SEQ ID NO: 400111 - RNA, 19 nt, Artificial Sequence
  Description of Artificial Sequence: Synthetic oligonucleotide
auuauauccaaugcaggaa

SEQ ID NO: 400112 - RNA, 19 nt, Artificial Sequence
  Description of Artificial Sequence: Synthetic oligonucleotide
auacuuuaucuuugguucu

SEQ ID NO: 400113 - RNA, 19 nt, Artificial Sequence
  Description of Artificial Sequence: Synthetic oligonucleotide
ugcaggaacacuguuuagu

SEQ ID NO: 400114 - RNA, 19 nt, Artificial Sequence
  Description of Artificial Sequence: Synthetic oligonucleotide
ugccacuauuguuuuaugu

SEQ ID NO: 400115 - RNA, 19 nt, Artificial Sequence
  Description of Artificial Sequence: Synthetic oligonucleotide
uggagaggaucuuucuuca

SEQ ID NO: 400116 - RNA, 19 nt, Artificial Sequence
  Description of Artificial Sequence: Synthetic oligonucleotide
aggcuuaaaaccaaauacu

SEQ ID NO: 400117 - RNA, 19 nt, Artificial Sequence
  Description of Artificial Sequence: Synthetic oligonucleotide
ucauugcaggucaauuaac

SEQ ID NO: 400118 - RNA, 19 nt, Artificial Sequence
  Description of Artificial Sequence: Synthetic oligonucleotide
agaauauccuagaaugugu

SEQ ID NO: 400119 - RNA, 19 nt, Artificial Sequence
  Description of Artificial Sequence: Synthetic oligonucleotide
ugucauauccagugguuau

SEQ ID NO: 400120 - RNA, 19 nt, Artificial Sequence
  Description of Artificial Sequence: Synthetic oligonucleotide
acauccuaauauuuauuau

SEQ ID NO: 400121 - RNA, 19 nt, Artificial Sequence
  Description of Artificial Sequence: Synthetic oligonucleotide
aagauuucgcuuagccauc

SEQ ID NO: 400122 - RNA, 19 nt, Artificial Sequence
  Description of Artificial Sequence: Synthetic oligonucleotide
  modified_base (8)..(8): a, c, u, g, unknown or other
cuuauugnguuuuaccugu

SEQ ID NO: 400123 - RNA, 19 nt, Artificial Sequence
  Description of Artificial Sequence: Synthetic oligonucleotide
guagcuugcaagauuucgc

SEQ ID NO: 400124 - RNA, 19 nt, Artificial Sequence
  Description of Artificial Sequence: Synthetic oligonucleotide
uaccugucauauucaauga

SEQ ID NO: 400125 - RNA, 19 nt, Artificial Sequence
  Description of Artificial Sequence: Synthetic oligonucleotide
uuagcgccaacaaaccuuu

SEQ ID NO: 400126 - RNA, 19 nt, Artificial Sequence
  Description of Artificial Sequence: Synthetic oligonucleotide
aggaggaauggcgugccgc

SEQ ID NO: 400127 - RNA, 19 nt, Artificial Sequence
  Description of Artificial Sequence: Synthetic oligonucleotide
ucuauuuaaccagcugaac

SEQ ID NO: 400128 - RNA, 19 nt, Artificial Sequence
  Description of Artificial Sequence: Synthetic oligonucleotide
gaauuuaauccauucuuau

SEQ ID NO: 400129 - RNA, 19 nt, Artificial Sequence
  Description of Artificial Sequence: Synthetic oligonucleotide
aaacucacuuuuguauugu

SEQ ID NO: 400130 - RNA, 19 nt, Artificial Sequence
  Description of Artificial Sequence: Synthetic oligonucleotide
aucauuuggcuguuuuacu

SEQ ID NO: 400131 - RNA, 19 nt, Artificial Sequence
  Description of Artificial Sequence: Synthetic oligonucleotide
guacgugcaagauagcaaa

SEQ ID NO: 400132 - RNA, 19 nt, Artificial Sequence
  Description of Artificial Sequence: Synthetic oligonucleotide
gugacucuaauaacacacg

SEQ ID NO: 400133 - RNA, 19 nt, Artificial Sequence
  Description of Artificial Sequence: Synthetic oligonucleotide
guucuuacugggcucaaga

SEQ ID NO: 400134 - RNA, 19 nt, Artificial Sequence
  Description of Artificial Sequence: Synthetic oligonucleotide
caccauccaaacaaagcug

SEQ ID NO: 400135 - RNA, 19 nt, Artificial Sequence
  Description of Artificial Sequence: Synthetic oligonucleotide
auuguaagguucaagggua

SEQ ID NO: 400136 - RNA, 19 nt, Artificial Sequence
  Description of Artificial Sequence: Synthetic oligonucleotide
accauuccaggguuccacg

SEQ ID NO: 400137 - RNA, 19 nt, Artificial Sequence
  Description of Artificial Sequence: Synthetic oligonucleotide
  modified_base (7)..(7): a, c, u, g, unknown or other
uuauugnguuuuaccuguc

SEQ ID NO: 400138 - RNA, 19 nt, Artificial Sequence
  Description of Artificial Sequence: Synthetic oligonucleotide
ugcguaagaggagaugcug

SEQ ID NO: 400139 - RNA, 19 nt, Artificial Sequence
  Description of Artificial Sequence: Synthetic oligonucleotide
ucucacaggcuaacaauau

SEQ ID NO: 400140 - RNA, 19 nt, Artificial Sequence
  Description of Artificial Sequence: Synthetic oligonucleotide
cauuugacuccuaucccuc

SEQ ID NO: 400141 - RNA, 19 nt, Artificial Sequence
  Description of Artificial Sequence: Synthetic oligonucleotide
aguaaggcagugucacucu

SEQ ID NO: 400142 - RNA, 19 nt, Artificial Sequence
  Description of Artificial Sequence: Synthetic oligonucleotide
cacuauuguuuuauguuca

SEQ ID NO: 400143 - RNA, 19 nt, Artificial Sequence
  Description of Artificial Sequence: Synthetic oligonucleotide
cuuaacuaacccuauaguu

SEQ ID NO: 400144 - RNA, 19 nt, Artificial Sequence
  Description of Artificial Sequence: Synthetic oligonucleotide
ggguuuggacauuuaacag

SEQ ID NO: 400145 - RNA, 19 nt, Artificial Sequence
  Description of Artificial Sequence: Synthetic oligonucleotide
auauccuagaauguguauu

SEQ ID NO: 400146 - RNA, 19 nt, Artificial Sequence
  Description of Artificial Sequence: Synthetic oligonucleotide
ggaccgauaaaauuauauc

SEQ ID NO: 400147 - RNA, 19 nt, Artificial Sequence
  Description of Artificial Sequence: Synthetic oligonucleotide
cuuugaauuuaagucccug

SEQ ID NO: 400148 - RNA, 19 nt, Artificial Sequence
  Description of Artificial Sequence: Synthetic oligonucleotide
aguaaauaccagucuuaaa

SEQ ID NO: 400149 - RNA, 19 nt, Artificial Sequence
  Description of Artificial Sequence: Synthetic oligonucleotide
uccacgacauucuucgaua

SEQ ID NO: 400150 - RNA, 19 nt, Artificial Sequence
  Description of Artificial Sequence: Synthetic oligonucleotide
acuuguucgguaaucauuu

SEQ ID NO: 400151 - RNA, 19 nt, Artificial Sequence
  Description of Artificial Sequence: Synthetic oligonucleotide
uuaagugcaaucgccuuua

SEQ ID NO: 400152 - RNA, 19 nt, Artificial Sequence
  Description of Artificial Sequence: Synthetic oligonucleotide
ccugucauauucaaugaug

SEQ ID NO: 400153 - RNA, 19 nt, Artificial Sequence
  Description of Artificial Sequence: Synthetic oligonucleotide
auuccaggguuccacgaca

SEQ ID NO: 400154 - RNA, 19 nt, Artificial Sequence
  Description of Artificial Sequence: Synthetic oligonucleotide
uuccaguaaggcaguguca

SEQ ID NO: 400155 - RNA, 19 nt, Artificial Sequence
  Description of Artificial Sequence: Synthetic oligonucleotide
  modified_base (12)..(12): a, c, u, g, unknown or other
cauucuuauugnguuuuac

SEQ ID NO: 400156 - RNA, 19 nt, Artificial Sequence
  Description of Artificial Sequence: Synthetic oligonucleotide
uuuggaaguauaggucaga

SEQ ID NO: 400157 - RNA, 19 nt, Artificial Sequence
  Description of Artificial Sequence: Synthetic oligonucleotide
uaacaaggucucaccauau

SEQ ID NO: 400158 - RNA, 19 nt, Artificial Sequence
  Description of Artificial Sequence: Synthetic oligonucleotide
acuguuaaacaaaggcaug

SEQ ID NO: 400159 - RNA, 19 nt, Artificial Sequence
  Description of Artificial Sequence: Synthetic oligonucleotide
gacuccuaucccuccaaac

SEQ ID NO: 400160 - RNA, 19 nt, Artificial Sequence
  Description of Artificial Sequence: Synthetic oligonucleotide
cauuuggcuguuuuacuca

SEQ ID NO: 400161 - RNA, 19 nt, Artificial Sequence
  Description of Artificial Sequence: Synthetic oligonucleotide
ucacaacaagggcaccuga

SEQ ID NO: 400162 - RNA, 19 nt, Artificial Sequence
  Description of Artificial Sequence: Synthetic oligonucleotide
gauauaggaggaauggcgu

SEQ ID NO: 400163 - RNA, 19 nt, Artificial Sequence
  Description of Artificial Sequence: Synthetic oligonucleotide
cugacugucauuuaagauu

SEQ ID NO: 400164 - RNA, 19 nt, Artificial Sequence
  Description of Artificial Sequence: Synthetic oligonucleotide
caauuaaccagccaugaau

SEQ ID NO: 400165 - RNA, 19 nt, Artificial Sequence
  Description of Artificial Sequence: Synthetic oligonucleotide
agcuuaaccacaguuuaau

SEQ ID NO: 400166 - RNA, 19 nt, Artificial Sequence
  Description of Artificial Sequence: Synthetic oligonucleotide
uucgcuuagccaucugaaa

SEQ ID NO: 400167 - RNA, 19 nt, Artificial Sequence
  Description of Artificial Sequence: Synthetic oligonucleotide
uuguaagguucaaggguaa

SEQ ID NO: 400168 - RNA, 19 nt, Artificial Sequence
  Description of Artificial Sequence: Synthetic oligonucleotide
gauaacaaggucucaccau

SEQ ID NO: 400169 - RNA, 19 nt, Artificial Sequence
  Description of Artificial Sequence: Synthetic oligonucleotide
gugaugcacacaucucugc

SEQ ID NO: 400170 - RNA, 19 nt, Artificial Sequence
  Description of Artificial Sequence: Synthetic oligonucleotide
uguagccgauaacaagguc

SEQ ID NO: 400171 - RNA, 19 nt, Artificial Sequence
  Description of Artificial Sequence: Synthetic oligonucleotide
caacuggcuaauacaucag

SEQ ID NO: 400172 - RNA, 19 nt, Artificial Sequence
  Description of Artificial Sequence: Synthetic oligonucleotide
aacggaccgauaaaauuau

SEQ ID NO: 400173 - RNA, 19 nt, Artificial Sequence
  Description of Artificial Sequence: Synthetic oligonucleotide
guccacuaaauuaucguuc

SEQ ID NO: 400174 - RNA, 19 nt, Artificial Sequence
  Description of Artificial Sequence: Synthetic oligonucleotide
uuugccugagugacucuaa

SEQ ID NO: 400175 - RNA, 19 nt, Artificial Sequence
  Description of Artificial Sequence: Synthetic oligonucleotide
aucaacuggcuaauacauc

SEQ ID NO: 400176 - RNA, 19 nt, Artificial Sequence
  Description of Artificial Sequence: Synthetic oligonucleotide
agccaugaauacuuuggaa

SEQ ID NO: 400177 - RNA, 19 nt, Artificial Sequence
  Description of Artificial Sequence: Synthetic oligonucleotide
aacucacuuuuguauuguu

SEQ ID NO: 400178 - RNA, 19 nt, Artificial Sequence
  Description of Artificial Sequence: Synthetic oligonucleotide
gaauauccuagaaugugua

SEQ ID NO: 400179 - RNA, 19 nt, Artificial Sequence
  Description of Artificial Sequence: Synthetic oligonucleotide
guagccgauaacaaggucu

SEQ ID NO: 400180 - RNA, 19 nt, Artificial Sequence
  Description of Artificial Sequence: Synthetic oligonucleotide
acuguuuaguucacaccag

SEQ ID NO: 400181 - RNA, 19 nt, Artificial Sequence
  Description of Artificial Sequence: Synthetic oligonucleotide
uggcgugccgcuguuaaca

SEQ ID NO: 400182 - RNA, 19 nt, Artificial Sequence
  Description of Artificial Sequence: Synthetic oligonucleotide
cacucuggccaggugaugc

SEQ ID NO: 400183 - RNA, 19 nt, Artificial Sequence
  Description of Artificial Sequence: Synthetic oligonucleotide
aagguggucuuugaauuua

SEQ ID NO: 400184 - RNA, 19 nt, Artificial Sequence
  Description of Artificial Sequence: Synthetic oligonucleotide
accugucauauucaaugau

SEQ ID NO: 400185 - RNA, 19 nt, Artificial Sequence
  Description of Artificial Sequence: Synthetic oligonucleotide
gcuaauacaucagacaaua

SEQ ID NO: 400186 - RNA, 19 nt, Artificial Sequence
  Description of Artificial Sequence: Synthetic oligonucleotide
uguaagguucaaggguaac

SEQ ID NO: 400187 - RNA, 19 nt, Artificial Sequence
  Description of Artificial Sequence: Synthetic oligonucleotide
caugaccuuugcucucagg

SEQ ID NO: 400188 - RNA, 19 nt, Artificial Sequence
  Description of Artificial Sequence: Synthetic oligonucleotide
aagcaccuauguagcuugc

SEQ ID NO: 400189 - RNA, 19 nt, Artificial Sequence
  Description of Artificial Sequence: Synthetic oligonucleotide
uacgugcaagauagcaaaa

SEQ ID NO: 400190 - RNA, 19 nt, Artificial Sequence
  Description of Artificial Sequence: Synthetic oligonucleotide
cugguaauaguuuccucaa

SEQ ID NO: 400191 - RNA, 19 nt, Artificial Sequence
  Description of Artificial Sequence: Synthetic oligonucleotide
ugcccuaggagaucuuuua

SEQ ID NO: 400192 - RNA, 19 nt, Artificial Sequence
  Description of Artificial Sequence: Synthetic oligonucleotide
aucacaacaagggcaccug

SEQ ID NO: 400193 - RNA, 19 nt, Artificial Sequence
  Description of Artificial Sequence: Synthetic oligonucleotide
cuuguucgguaaucauuug

SEQ ID NO: 400194 - RNA, 19 nt, Artificial Sequence
  Description of Artificial Sequence: Synthetic oligonucleotide
uuaucguuccaggaaccau

SEQ ID NO: 400195 - RNA, 19 nt, Artificial Sequence
  Description of Artificial Sequence: Synthetic oligonucleotide
uuaugucccguacgugcaa

SEQ ID NO: 400196 - RNA, 19 nt, Artificial Sequence
  Description of Artificial Sequence: Synthetic oligonucleotide
uacauacaccaagagcuua

SEQ ID NO: 400197 - RNA, 19 nt, Artificial Sequence
  Description of Artificial Sequence: Synthetic oligonucleotide
agauagcaaaaggccaucu

SEQ ID NO: 400198 - RNA, 19 nt, Artificial Sequence
  Description of Artificial Sequence: Synthetic oligonucleotide
cuguuuaguucacaccaga

SEQ ID NO: 400199 - RNA, 19 nt, Artificial Sequence
  Description of Artificial Sequence: Synthetic oligonucleotide
cacagaaaaccaauagacu

SEQ ID NO: 400200 - RNA, 19 nt, Artificial Sequence
  Description of Artificial Sequence: Synthetic oligonucleotide
cuaagcuuaaccacaguuu

SEQ ID NO: 400201 - RNA, 19 nt, Artificial Sequence
  Description of Artificial Sequence: Synthetic oligonucleotide
  modified_base (12)..(12): a, c, u, g, unknown or other
ugcagauacccncccuuuu

SEQ ID NO: 400202 - RNA, 19 nt, Artificial Sequence
  Description of Artificial Sequence: Synthetic oligonucleotide
uacugcguaagaggagaug

SEQ ID NO: 400203 - RNA, 19 nt, Artificial Sequence
  Description of Artificial Sequence: Synthetic oligonucleotide
acagaaucaacuggcuaau

SEQ ID NO: 400204 - RNA, 19 nt, Artificial Sequence
  Description of Artificial Sequence: Synthetic oligonucleotide
auaccacaaucaaauacau

SEQ ID NO: 400205 - RNA, 19 nt, Artificial Sequence
  Description of Artificial Sequence: Synthetic oligonucleotide
ugguggcuagcauguacac

SEQ ID NO: 400206 - RNA, 19 nt, Artificial Sequence
  Description of Artificial Sequence: Synthetic oligonucleotide
acacacgauacauccuaau

SEQ ID NO: 400207 - RNA, 19 nt, Artificial Sequence
  Description of Artificial Sequence: Synthetic oligonucleotide
ucguuccaggaaccauucc

SEQ ID NO: 400208 - RNA, 19 nt, Artificial Sequence
  Description of Artificial Sequence: Synthetic oligonucleotide
gcaagauagcaaaaggcca

SEQ ID NO: 400209 - RNA, 19 nt, Artificial Sequence
  Description of Artificial Sequence: Synthetic oligonucleotide
caagauagcaaaaggccau

SEQ ID NO: 400210 - RNA, 19 nt, Artificial Sequence
  Description of Artificial Sequence: Synthetic oligonucleotide
ccgauaacaaggucucacc

SEQ ID NO: 400211 - RNA, 19 nt, Artificial Sequence
  Description of Artificial Sequence: Synthetic oligonucleotide
acaucucugcguaauacuu

SEQ ID NO: 400212 - RNA, 19 nt, Artificial Sequence
  Description of Artificial Sequence: Synthetic oligonucleotide
aaggagguaugcacaaauu

SEQ ID NO: 400213 - RNA, 19 nt, Artificial Sequence
  Description of Artificial Sequence: Synthetic oligonucleotide
auggcgugccgcuguuaac

SEQ ID NO: 400214 - RNA, 19 nt, Artificial Sequence
  Description of Artificial Sequence: Synthetic oligonucleotide
gauuucgcuuagccaucug

SEQ ID NO: 400215 - RNA, 19 nt, Artificial Sequence
  Description of Artificial Sequence: Synthetic oligonucleotide
aagcuuaaccacaguuuaa

SEQ ID NO: 400216 - RNA, 19 nt, Artificial Sequence
  Description of Artificial Sequence: Synthetic oligonucleotide
ugauucuuauugggcuggc

SEQ ID NO: 400217 - RNA, 19 nt, Artificial Sequence
  Description of Artificial Sequence: Synthetic oligonucleotide
uuccaggguuccacgacau

SEQ ID NO: 400218 - RNA, 19 nt, Artificial Sequence
  Description of Artificial Sequence: Synthetic oligonucleotide
aacacacgauacauccuaa

SEQ ID NO: 400219 - RNA, 19 nt, Artificial Sequence
  Description of Artificial Sequence: Synthetic oligonucleotide
cacacgauacauccuaaua

SEQ ID NO: 400220 - RNA, 19 nt, Artificial Sequence
  Description of Artificial Sequence: Synthetic oligonucleotide
gugguuaugucccguacgu

SEQ ID NO: 400221 - RNA, 19 nt, Artificial Sequence
  Description of Artificial Sequence: Synthetic oligonucleotide
aaggagugucagugaacua

SEQ ID NO: 400222 - RNA, 19 nt, Artificial Sequence
  Description of Artificial Sequence: Synthetic oligonucleotide
uggcuagcacuauccgggc

SEQ ID NO: 400223 - RNA, 19 nt, Artificial Sequence
  Description of Artificial Sequence: Synthetic oligonucleotide
gcgucaaugagcuucuuua

SEQ ID NO: 400224 - RNA, 19 nt, Artificial Sequence
  Description of Artificial Sequence: Synthetic oligonucleotide
gcuacuaucagaauuuaau

SEQ ID NO: 400225 - RNA, 19 nt, Artificial Sequence
  Description of Artificial Sequence: Synthetic oligonucleotide
ggugaugcacacaucucug

SEQ ID NO: 400226 - RNA, 19 nt, Artificial Sequence
  Description of Artificial Sequence: Synthetic oligonucleotide
ggaaccauuccaggguucc

SEQ ID NO: 400227 - RNA, 19 nt, Artificial Sequence
  Description of Artificial Sequence: Synthetic oligonucleotide
aggcaguacugauucuuau

SEQ ID NO: 400228 - RNA, 19 nt, Artificial Sequence
  Description of Artificial Sequence: Synthetic oligonucleotide
cagugguuaugucccguac

SEQ ID NO: 400229 - RNA, 19 nt, Artificial Sequence
  Description of Artificial Sequence: Synthetic oligonucleotide
ugguuaugucccguacgug

SEQ ID NO: 400230 - RNA, 19 nt, Artificial Sequence
  Description of Artificial Sequence: Synthetic oligonucleotide
cuaucagaauuuaauccau

SEQ ID NO: 400231 - RNA, 19 nt, Artificial Sequence
  Description of Artificial Sequence: Synthetic oligonucleotide
agcgucaaugagcuucuuu

SEQ ID NO: 400232 - RNA, 19 nt, Artificial Sequence
  Description of Artificial Sequence: Synthetic oligonucleotide
acaauauuguaagguucaa

SEQ ID NO: 400233 - RNA, 19 nt, Artificial Sequence
  Description of Artificial Sequence: Synthetic oligonucleotide
caguacccacagcaaacac

SEQ ID NO: 400234 - RNA, 19 nt, Artificial Sequence
  Description of Artificial Sequence: Synthetic oligonucleotide
auucaaugauguacauaca

SEQ ID NO: 400235 - RNA, 19 nt, Artificial Sequence
  Description of Artificial Sequence: Synthetic oligonucleotide
ccugagugacucuaauaac

SEQ ID NO: 400236 - RNA, 19 nt, Artificial Sequence
  Description of Artificial Sequence: Synthetic oligonucleotide
acuauccgggcauucucuu

SEQ ID NO: 400237 - RNA, 19 nt, Artificial Sequence
  Description of Artificial Sequence: Synthetic oligonucleotide
agaccccugagaaugcacu

SEQ ID NO: 400238 - RNA, 19 nt, Artificial Sequence
  Description of Artificial Sequence: Synthetic oligonucleotide
agauuucgcuuagccaucu

SEQ ID NO: 400239 - RNA, 19 nt, Artificial Sequence
  Description of Artificial Sequence: Synthetic oligonucleotide
agcacuauccgggcauucu

SEQ ID NO: 400240 - RNA, 19 nt, Artificial Sequence
  Description of Artificial Sequence: Synthetic oligonucleotide
agcaugaccuuugcucuca

SEQ ID NO: 400241 - RNA, 19 nt, Artificial Sequence
  Description of Artificial Sequence: Synthetic oligonucleotide
gaaaacggaccgauaaaau

SEQ ID NO: 400242 - RNA, 19 nt, Artificial Sequence
  Description of Artificial Sequence: Synthetic oligonucleotide
guucgguaaucauuuggcu

SEQ ID NO: 400243 - RNA, 19 nt, Artificial Sequence
  Description of Artificial Sequence: Synthetic oligonucleotide
gcuuauuguagccgauaac

SEQ ID NO: 400244 - RNA, 19 nt, Artificial Sequence
  Description of Artificial Sequence: Synthetic oligonucleotide
gugguggcuagcauguaca

SEQ ID NO: 400245 - RNA, 19 nt, Artificial Sequence
  Description of Artificial Sequence: Synthetic oligonucleotide
gugcaaucgccuuuaaaau

SEQ ID NO: 400246 - RNA, 19 nt, Artificial Sequence
  Description of Artificial Sequence: Synthetic oligonucleotide
gcguaauacuuuaucuuug

SEQ ID NO: 400247 - RNA, 19 nt, Artificial Sequence
  Description of Artificial Sequence: Synthetic oligonucleotide
aggguucuuacugggcuca

SEQ ID NO: 400248 - RNA, 19 nt, Artificial Sequence
  Description of Artificial Sequence: Synthetic oligonucleotide
agcuugcaagauuucgcuu

SEQ ID NO: 400249 - RNA, 19 nt, Artificial Sequence
  Description of Artificial Sequence: Synthetic oligonucleotide
ggguaacauagucauugca

SEQ ID NO: 400250 - RNA, 19 nt, Artificial Sequence
  Description of Artificial Sequence: Synthetic oligonucleotide
cacaaauuucaaggugguc

SEQ ID NO: 400251 - RNA, 19 nt, Artificial Sequence
  Description of Artificial Sequence: Synthetic oligonucleotide
uggccguucuccugaaguu

SEQ ID NO: 400252 - RNA, 19 nt, Artificial Sequence
  Description of Artificial Sequence: Synthetic oligonucleotide
  modified_base (19)..(19): a, c, u, g, unknown or other
auauagcugcagauacccn

SEQ ID NO: 400253 - RNA, 19 nt, Artificial Sequence
  Description of Artificial Sequence: Synthetic oligonucleotide
cagccggucugcaucagga

SEQ ID NO: 400254 - RNA, 19 nt, Artificial Sequence
  Description of Artificial Sequence: Synthetic oligonucleotide
ugcacacaucucugcguaa

SEQ ID NO: 400255 - RNA, 19 nt, Artificial Sequence
  Description of Artificial Sequence: Synthetic oligonucleotide
cuaggagaucuuuuauccu

SEQ ID NO: 400256 - RNA, 19 nt, Artificial Sequence
  Description of Artificial Sequence: Synthetic oligonucleotide
ugucccguacgugcaagau

SEQ ID NO: 400257 - RNA, 19 nt, Artificial Sequence
  Description of Artificial Sequence: Synthetic oligonucleotide
gccgauaacaaggucucac

SEQ ID NO: 400258 - RNA, 19 nt, Artificial Sequence
  Description of Artificial Sequence: Synthetic oligonucleotide
ccgauaaaauuauauccaa

SEQ ID NO: 400259 - RNA, 19 nt, Artificial Sequence
  Description of Artificial Sequence: Synthetic oligonucleotide
ucugucccacuuguucggu

SEQ ID NO: 400260 - RNA, 19 nt, Artificial Sequence
  Description of Artificial Sequence: Synthetic oligonucleotide
ucccacuuguucgguaauc

SEQ ID NO: 400261 - RNA, 19 nt, Artificial Sequence
  Description of Artificial Sequence: Synthetic oligonucleotide
cgcuuagccaucugaaaac

SEQ ID NO: 400262 - RNA, 19 nt, Artificial Sequence
  Description of Artificial Sequence: Synthetic oligonucleotide
agcuacuaucagaauuuaa

SEQ ID NO: 400263 - RNA, 19 nt, Artificial Sequence
  Description of Artificial Sequence: Synthetic oligonucleotide
ccuauaguuauauaauguu

SEQ ID NO: 400264 - RNA, 19 nt, Artificial Sequence
  Description of Artificial Sequence: Synthetic oligonucleotide
cuuuaagugcaaucgccuu

SEQ ID NO: 400265 - RNA, 19 nt, Artificial Sequence
  Description of Artificial Sequence: Synthetic oligonucleotide
ccaggguuccacgacauuc

SEQ ID NO: 400266 - RNA, 19 nt, Artificial Sequence
  Description of Artificial Sequence: Synthetic oligonucleotide
agcaccuauguagcuugca

SEQ ID NO: 400267 - RNA, 19 nt, Artificial Sequence
  Description of Artificial Sequence: Synthetic oligonucleotide
ccgcuguuaacacuuucac

SEQ ID NO: 400268 - RNA, 19 nt, Artificial Sequence
  Description of Artificial Sequence: Synthetic oligonucleotide
cccuauaguuauauaaugu

SEQ ID NO: 400269 - RNA, 19 nt, Artificial Sequence
  Description of Artificial Sequence: Synthetic oligonucleotide
cuauguagcuugcaagauu

SEQ ID NO: 400270 - RNA, 19 nt, Artificial Sequence
  Description of Artificial Sequence: Synthetic oligonucleotide
ccacgacauucuucgauac

SEQ ID NO: 400271 - RNA, 19 nt, Artificial Sequence
  Description of Artificial Sequence: Synthetic oligonucleotide
gcaccuauguagcuugcaa

SEQ ID NO: 400272 - RNA, 19 nt, Artificial Sequence
  Description of Artificial Sequence: Synthetic oligonucleotide
cuauuguuuuauguucagu

SEQ ID NO: 400273 - RNA, 19 nt, Artificial Sequence
  Description of Artificial Sequence: Synthetic oligonucleotide
auccuagaauguguauuua

SEQ ID NO: 400274 - RNA, 19 nt, Artificial Sequence
  Description of Artificial Sequence: Synthetic oligonucleotide
caggguuccacgacauucu

SEQ ID NO: 400275 - RNA, 19 nt, Artificial Sequence
  Description of Artificial Sequence: Synthetic oligonucleotide
gguucuuacugggcucaag

SEQ ID NO: 400276 - RNA, 19 nt, Artificial Sequence
  Description of Artificial Sequence: Synthetic oligonucleotide
gcuuaaccacaguuuaaua

SEQ ID NO: 400277 - RNA, 19 nt, Artificial Sequence
  Description of Artificial Sequence: Synthetic oligonucleotide
gcgccaacaaaccuuuucu

SEQ ID NO: 400278 - RNA, 19 nt, Artificial Sequence
  Description of Artificial Sequence: Synthetic oligonucleotide
ccaauggccguucuccuga

SEQ ID NO: 400279 - RNA, 19 nt, Artificial Sequence
  Description of Artificial Sequence: Synthetic oligonucleotide
uccaggguuccacgacauu

SEQ ID NO: 400280 - RNA, 19 nt, Artificial Sequence
  Description of Artificial Sequence: Synthetic oligonucleotide
gucccguacgugcaagaua

SEQ ID NO: 400281 - RNA, 19 nt, Artificial Sequence
  Description of Artificial Sequence: Synthetic oligonucleotide
agccggucugcaucaggau

SEQ ID NO: 400282 - RNA, 19 nt, Artificial Sequence
  Description of Artificial Sequence: Synthetic oligonucleotide
accggaauuggaggcuuaa

SEQ ID NO: 400283 - RNA, 19 nt, Artificial Sequence
  Description of Artificial Sequence: Synthetic oligonucleotide
  modified_base (2)..(2): a, c, u, g, unknown or other
gnguuuuaccugucauauu

SEQ ID NO: 400284 - RNA, 19 nt, Artificial Sequence
  Description of Artificial Sequence: Synthetic oligonucleotide
gccgcuguuaacacuuuca

SEQ ID NO: 400285 - RNA, 19 nt, Artificial Sequence
  Description of Artificial Sequence: Synthetic oligonucleotide
auacugcguaagaggagau

SEQ ID NO: 400286 - RNA, 19 nt, Artificial Sequence
  Description of Artificial Sequence: Synthetic oligonucleotide
gcuagcauguacacguucu

SEQ ID NO: 400287 - RNA, 19 nt, Artificial Sequence
  Description of Artificial Sequence: Synthetic oligonucleotide
gcaaucgccuuuaaaauuu

SEQ ID NO: 400288 - RNA, 19 nt, Artificial Sequence
  Description of Artificial Sequence: Synthetic oligonucleotide
caucugaaaacggaccgau

SEQ ID NO: 400289 - RNA, 19 nt, Artificial Sequence
  Description of Artificial Sequence: Synthetic oligonucleotide
cuuugguucugucccacuu

SEQ ID NO: 400290 - RNA, 19 nt, Artificial Sequence
  Description of Artificial Sequence: Synthetic oligonucleotide
gcguaagaggagaugcuga

SEQ ID NO: 400291 - RNA, 19 nt, Artificial Sequence
  Description of Artificial Sequence: Synthetic oligonucleotide
gcacauagucauguccaac

SEQ ID NO: 400292 - RNA, 19 nt, Artificial Sequence
  Description of Artificial Sequence: Synthetic oligonucleotide
ccauguaucucuugcaaau

SEQ ID NO: 400293 - RNA, 19 nt, Artificial Sequence
  Description of Artificial Sequence: Synthetic oligonucleotide
ccuuaacuaacccuauagu

SEQ ID NO: 400294 - RNA, 19 nt, Artificial Sequence
  Description of Artificial Sequence: Synthetic oligonucleotide
gcccacuauuuucagggaa

SEQ ID NO: 400295 - RNA, 19 nt, Artificial Sequence
  Description of Artificial Sequence: Synthetic oligonucleotide
caucucugcguaauacuuu

SEQ ID NO: 400296 - RNA, 19 nt, Artificial Sequence
  Description of Artificial Sequence: Synthetic oligonucleotide
gggcucaagaaaauucucu

SEQ ID NO: 400297 - RNA, 19 nt, Artificial Sequence
  Description of Artificial Sequence: Synthetic oligonucleotide
gagggcugguguccacuaa

SEQ ID NO: 400298 - RNA, 19 nt, Artificial Sequence
  Description of Artificial Sequence: Synthetic oligonucleotide
ccuagaauguguauuuauu

SEQ ID NO: 400299 - RNA, 19 nt, Artificial Sequence
  Description of Artificial Sequence: Synthetic oligonucleotide
  modified_base (14)..(14): a, c, u, g, unknown or other
gcugcagauacccncccuu

SEQ ID NO: 400300 - RNA, 19 nt, Artificial Sequence
  Description of Artificial Sequence: Synthetic oligonucleotide
cugcguaagaggagaugcu

SEQ ID NO: 400301 - RNA, 19 nt, Artificial Sequence
  Description of Artificial Sequence: Synthetic oligonucleotide
ggcgugccgcuguuaacac

SEQ ID NO: 400302 - RNA, 19 nt, Artificial Sequence
  Description of Artificial Sequence: Synthetic oligonucleotide
cguacgugcaagauagcaa

SEQ ID NO: 400303 - RNA, 19 nt, Artificial Sequence
  Description of Artificial Sequence: Synthetic oligonucleotide
agccgauaacaaggucuca

SEQ ID NO: 400304 - RNA, 19 nt, Artificial Sequence
  Description of Artificial Sequence: Synthetic oligonucleotide
gccaacucauucccuguaa

SEQ ID NO: 400305 - RNA, 19 nt, Artificial Sequence
  Description of Artificial Sequence: Synthetic oligonucleotide
augcccuaggagaucuuuu

SEQ ID NO: 400306 - RNA, 19 nt, Artificial Sequence
  Description of Artificial Sequence: Synthetic oligonucleotide
cguaagaggagaugcugaa

SEQ ID NO: 400307 - RNA, 19 nt, Artificial Sequence
  Description of Artificial Sequence: Synthetic oligonucleotide
ccguacgugcaagauagca

SEQ ID NO: 400308 - RNA, 19 nt, Artificial Sequence
  Description of Artificial Sequence: Synthetic oligonucleotide
ggcuagcacuauccgggca

SEQ ID NO: 400309 - RNA, 19 nt, Artificial Sequence
  Description of Artificial Sequence: Synthetic oligonucleotide
ggguuccacgacauucuuc

SEQ ID NO: 400310 - RNA, 19 nt, Artificial Sequence
  Description of Artificial Sequence: Synthetic oligonucleotide
uagcgccaacaaaccuuuu

SEQ ID NO: 400311 - RNA, 19 nt, Artificial Sequence
  Description of Artificial Sequence: Synthetic oligonucleotide
  modified_base (13)..(13): a, c, u, g, unknown or other
cugcagauacccncccuuu

SEQ ID NO: 400312 - RNA, 19 nt, Artificial Sequence
  Description of Artificial Sequence: Synthetic oligonucleotide
caauggccguucuccugaa

SEQ ID NO: 400313 - RNA, 19 nt, Artificial Sequence
  Description of Artificial Sequence: Synthetic oligonucleotide
cggaccgauaaaauuauau

SEQ ID NO: 400314 - RNA, 19 nt, Artificial Sequence
  Description of Artificial Sequence: Synthetic oligonucleotide
ggcuaauacaucagacaau

SEQ ID NO: 400315 - RNA, 19 nt, Artificial Sequence
  Description of Artificial Sequence: Synthetic oligonucleotide
ccacuaaauuaucguucca

SEQ ID NO: 400316 - RNA, 19 nt, Artificial Sequence
  Description of Artificial Sequence: Synthetic oligonucleotide
cugucccacuuguucggua

SEQ ID NO: 400317 - RNA, 19 nt, Artificial Sequence
  Description of Artificial Sequence: Synthetic oligonucleotide
acggaccgauaaaauuaua

SEQ ID NO: 400318 - RNA, 19 nt, Artificial Sequence
  Description of Artificial Sequence: Synthetic oligonucleotide
cuaggagugcugccacuau

SEQ ID NO: 400319 - RNA, 19 nt, Artificial Sequence
  Description of Artificial Sequence: Synthetic oligonucleotide
cacuauuuucagggaagau

SEQ ID NO: 400320 - RNA, 19 nt, Artificial Sequence
  Description of Artificial Sequence: Synthetic oligonucleotide
cuauccgggcauucucuuu

SEQ ID NO: 400321 - RNA, 19 nt, Artificial Sequence
  Description of Artificial Sequence: Synthetic oligonucleotide
gaauggcgugccgcuguua

SEQ ID NO: 400322 - RNA, 19 nt, Artificial Sequence
  Description of Artificial Sequence: Synthetic oligonucleotide
cuaucccuccaaacauuuu

SEQ ID NO: 400323 - RNA, 19 nt, Artificial Sequence
  Description of Artificial Sequence: Synthetic oligonucleotide
cacuaggagugcugccacu

SEQ ID NO: 400324 - RNA, 19 nt, Artificial Sequence
  Description of Artificial Sequence: Synthetic oligonucleotide
gaccggaauuggaggcuua

SEQ ID NO: 400325 - RNA, 19 nt, Artificial Sequence
  Description of Artificial Sequence: Synthetic oligonucleotide
ccuaucccuccaaacauuu

SEQ ID NO: 400326 - RNA, 19 nt, Artificial Sequence
  Description of Artificial Sequence: Synthetic oligonucleotide
caugcccuaggagaucuuu

SEQ ID NO: 400327 - RNA, 19 nt, Artificial Sequence
  Description of Artificial Sequence: Synthetic oligonucleotide
cccguacgugcaagauagc

SEQ ID NO: 400328 - RNA, 19 nt, Artificial Sequence
  Description of Artificial Sequence: Synthetic oligonucleotide
ccagugguuaugucccgua

SEQ ID NO: 400329 - RNA, 19 nt, Artificial Sequence
  Description of Artificial Sequence: Synthetic oligonucleotide
gcccuaggagaucuuuuau

SEQ ID NO: 400330 - RNA, 19 nt, Artificial Sequence
  Description of Artificial Sequence: Synthetic oligonucleotide
cgugccgcuguuaacacuu

SEQ ID NO: 400331 - RNA, 19 nt, Artificial Sequence
  Description of Artificial Sequence: Synthetic oligonucleotide
gggaccggaauuggaggcu

SEQ ID NO: 400332 - RNA, 19 nt, Artificial Sequence
  Description of Artificial Sequence: Synthetic oligonucleotide
ggcaugauucugagcuacu

SEQ ID NO: 400333 - RNA, 19 nt, Artificial Sequence
  Description of Artificial Sequence: Synthetic oligonucleotide
ccuauguagcuugcaagau

SEQ ID NO: 400334 - RNA, 19 nt, Artificial Sequence
  Description of Artificial Sequence: Synthetic oligonucleotide
ccacuuguucgguaaucau

SEQ ID NO: 400335 - RNA, 19 nt, Artificial Sequence
  Description of Artificial Sequence: Synthetic oligonucleotide
cuagcacuauccgggcauu

SEQ ID NO: 400336 - RNA, 19 nt, Artificial Sequence
  Description of Artificial Sequence: Synthetic oligonucleotide
ccagaccccugagaaugca

SEQ ID NO: 400337 - RNA, 19 nt, Artificial Sequence
  Description of Artificial Sequence: Synthetic oligonucleotide
gggcugguguccacuaaau

SEQ ID NO: 400338 - RNA, 19 nt, Artificial Sequence
  Description of Artificial Sequence: Synthetic oligonucleotide
ggaauggcgugccgcuguu

SEQ ID NO: 400339 - RNA, 19 nt, Artificial Sequence
  Description of Artificial Sequence: Synthetic oligonucleotide
cagguguguuaaggagugu

SEQ ID NO: 400340 - RNA, 19 nt, Artificial Sequence
  Description of Artificial Sequence: Synthetic oligonucleotide
cccugugaaaacagaucuu

SEQ ID NO: 400341 - RNA, 19 nt, Artificial Sequence
  Description of Artificial Sequence: Synthetic oligonucleotide
gcgugccgcuguuaacacu

SEQ ID NO: 400342 - RNA, 19 nt, Artificial Sequence
  Description of Artificial Sequence: Synthetic oligonucleotide
ccggaauuggaggcuuaaa

SEQ ID NO: 400343 - RNA, 19 nt, Artificial Sequence
  Description of Artificial Sequence: Synthetic oligonucleotide
ggaccggaauuggaggcuu

SEQ ID NO: 400344 - RNA, 19 nt, Artificial Sequence
  Description of Artificial Sequence: Synthetic oligonucleotide
ggcuaacaauaugcccacu

SEQ ID NO: 400345 - RNA, 19 nt, Artificial Sequence
  Description of Artificial Sequence: Synthetic oligonucleotide
gagcgucaaugagcuucuu

SEQ ID NO: 400346 - RNA, 19 nt, Artificial Sequence
  Description of Artificial Sequence: Synthetic oligonucleotide
cggcacucacuccaucuuu

SEQ ID NO: 400347 - RNA, 19 nt, Artificial Sequence
  Description of Artificial Sequence: Synthetic oligonucleotide
  modified_base (1)..(1): a, c, u, g, unknown or other
nguuuuaccugucauauuc

SEQ ID NO: 400348 - RNA, 19 nt, Artificial Sequence
  Description of Artificial Sequence: Synthetic oligonucleotide
aagaaaauuagugaggcag

SEQ ID NO: 400349 - RNA, 19 nt, Artificial Sequence
  Description of Artificial Sequence: Synthetic oligonucleotide
agugcaauaguguaguucg

SEQ ID NO: 400350 - RNA, 19 nt, Artificial Sequence
  Description of Artificial Sequence: Synthetic oligonucleotide
ugagaagaaaauuagugag

SEQ ID NO: 400351 - RNA, 19 nt, Artificial Sequence
  Description of Artificial Sequence: Synthetic oligonucleotide
auaaucaugggccaguaac

SEQ ID NO: 400352 - RNA, 19 nt, Artificial Sequence
  Description of Artificial Sequence: Synthetic oligonucleotide
ucaaccaaguuguauaucg

SEQ ID NO: 400353 - RNA, 19 nt, Artificial Sequence
  Description of Artificial Sequence: Synthetic oligonucleotide
uuaagaaagggauugaagu

SEQ ID NO: 400354 - RNA, 19 nt, Artificial Sequence
  Description of Artificial Sequence: Synthetic oligonucleotide
aaaaucuguaauccgguag

SEQ ID NO: 400355 - RNA, 19 nt, Artificial Sequence
  Description of Artificial Sequence: Synthetic oligonucleotide
aacucguuccacaugaugc

SEQ ID NO: 400356 - RNA, 19 nt, Artificial Sequence
  Description of Artificial Sequence: Synthetic oligonucleotide
gauaauaaggacauuggcc

SEQ ID NO: 400357 - RNA, 19 nt, Artificial Sequence
  Description of Artificial Sequence: Synthetic oligonucleotide
aguucgaugcuguuggucc

SEQ ID NO: 400358 - RNA, 19 nt, Artificial Sequence
  Description of Artificial Sequence: Synthetic oligonucleotide
uuuugaaucugcaugagau

SEQ ID NO: 400359 - RNA, 19 nt, Artificial Sequence
  Description of Artificial Sequence: Synthetic oligonucleotide
aguccaagaauucagaaca

SEQ ID NO: 400360 - RNA, 19 nt, Artificial Sequence
  Description of Artificial Sequence: Synthetic oligonucleotide
aauauacuaaacuuaguuu

SEQ ID NO: 400361 - RNA, 19 nt, Artificial Sequence
  Description of Artificial Sequence: Synthetic oligonucleotide
uuuuaggacggucagacac

SEQ ID NO: 400362 - RNA, 19 nt, Artificial Sequence
  Description of Artificial Sequence: Synthetic oligonucleotide
aggugaguccuuuauaacc

SEQ ID NO: 400363 - RNA, 19 nt, Artificial Sequence
  Description of Artificial Sequence: Synthetic oligonucleotide
aauaguuuuauuuggcaaa

SEQ ID NO: 400364 - RNA, 19 nt, Artificial Sequence
  Description of Artificial Sequence: Synthetic oligonucleotide
ugaaucaagaccaacucac

SEQ ID NO: 400365 - RNA, 19 nt, Artificial Sequence
  Description of Artificial Sequence: Synthetic oligonucleotide
agauaauuuguugaaauuc

SEQ ID NO: 400366 - RNA, 19 nt, Artificial Sequence
  Description of Artificial Sequence: Synthetic oligonucleotide
aauucgauaugcuccagug

SEQ ID NO: 400367 - RNA, 19 nt, Artificial Sequence
  Description of Artificial Sequence: Synthetic oligonucleotide
gacuucacuggucaaaacg

SEQ ID NO: 400368 - RNA, 19 nt, Artificial Sequence
  Description of Artificial Sequence: Synthetic oligonucleotide
aaggcuaucuucaccaacc

SEQ ID NO: 400369 - RNA, 19 nt, Artificial Sequence
  Description of Artificial Sequence: Synthetic oligonucleotide
aaggaguuaaccuguuuuc

SEQ ID NO: 400370 - RNA, 19 nt, Artificial Sequence
  Description of Artificial Sequence: Synthetic oligonucleotide
uuaccgucucuuuaaaugg

SEQ ID NO: 400371 - RNA, 19 nt, Artificial Sequence
  Description of Artificial Sequence: Synthetic oligonucleotide
uucgauaugcuccagugca

SEQ ID NO: 400372 - RNA, 19 nt, Artificial Sequence
  Description of Artificial Sequence: Synthetic oligonucleotide
agcguuucuaacucguucc

SEQ ID NO: 400373 - RNA, 19 nt, Artificial Sequence
  Description of Artificial Sequence: Synthetic oligonucleotide
uaaucaugggccaguaacg

SEQ ID NO: 400374 - RNA, 19 nt, Artificial Sequence
  Description of Artificial Sequence: Synthetic oligonucleotide
aaaucuguaauccgguagu

SEQ ID NO: 400375 - RNA, 19 nt, Artificial Sequence
  Description of Artificial Sequence: Synthetic oligonucleotide
aaccaaguuguauaucguc

SEQ ID NO: 400376 - RNA, 19 nt, Artificial Sequence
  Description of Artificial Sequence: Synthetic oligonucleotide
guaggugugaaucaagacc

SEQ ID NO: 400377 - RNA, 19 nt, Artificial Sequence
  Description of Artificial Sequence: Synthetic oligonucleotide
uuaauaguuuuauuuggca

SEQ ID NO: 400378 - RNA, 19 nt, Artificial Sequence
  Description of Artificial Sequence: Synthetic oligonucleotide
uuguauaucgucuuuugac

SEQ ID NO: 400379 - RNA, 19 nt, Artificial Sequence
  Description of Artificial Sequence: Synthetic oligonucleotide
uuguaauacagaugauucg

SEQ ID NO: 400380 - RNA, 19 nt, Artificial Sequence
  Description of Artificial Sequence: Synthetic oligonucleotide
uguauaucgucuuuugaca

SEQ ID NO: 400381 - RNA, 19 nt, Artificial Sequence
  Description of Artificial Sequence: Synthetic oligonucleotide
caauaguguaguucgaugc

SEQ ID NO: 400382 - RNA, 19 nt, Artificial Sequence
  Description of Artificial Sequence: Synthetic oligonucleotide
uuagacuuuuccaugugug

SEQ ID NO: 400383 - RNA, 19 nt, Artificial Sequence
  Description of Artificial Sequence: Synthetic oligonucleotide
acuuaguuucuccagucac

SEQ ID NO: 400384 - RNA, 19 nt, Artificial Sequence
  Description of Artificial Sequence: Synthetic oligonucleotide
aauggaccuucucuacugc

SEQ ID NO: 400385 - RNA, 19 nt, Artificial Sequence
  Description of Artificial Sequence: Synthetic oligonucleotide
uaacguucgagccucaugu

SEQ ID NO: 400386 - RNA, 19 nt, Artificial Sequence
  Description of Artificial Sequence: Synthetic oligonucleotide
guuaccgucucuuuaaaug

SEQ ID NO: 400387 - RNA, 19 nt, Artificial Sequence
  Description of Artificial Sequence: Synthetic oligonucleotide
aaauggaccuucucuacug

SEQ ID NO: 400388 - RNA, 19 nt, Artificial Sequence
  Description of Artificial Sequence: Synthetic oligonucleotide
uaauacagaugauucgucc

SEQ ID NO: 400389 - RNA, 19 nt, Artificial Sequence
  Description of Artificial Sequence: Synthetic oligonucleotide
aauaguguaguucgaugcu

SEQ ID NO: 400390 - RNA, 19 nt, Artificial Sequence
  Description of Artificial Sequence: Synthetic oligonucleotide
uguaauacagaugauucgu

SEQ ID NO: 400391 - RNA, 19 nt, Artificial Sequence
  Description of Artificial Sequence: Synthetic oligonucleotide
aacaccuuuuaccauaaaa

SEQ ID NO: 400392 - RNA, 19 nt, Artificial Sequence
  Description of Artificial Sequence: Synthetic oligonucleotide
aagcguuucuaacucguuc

SEQ ID NO: 400393 - RNA, 19 nt, Artificial Sequence
  Description of Artificial Sequence: Synthetic oligonucleotide
aaggucuacuauuuacauc

SEQ ID NO: 400394 - RNA, 19 nt, Artificial Sequence
  Description of Artificial Sequence: Synthetic oligonucleotide
cuuucaaccugucugaguc

SEQ ID NO: 400395 - RNA, 19 nt, Artificial Sequence
  Description of Artificial Sequence: Synthetic oligonucleotide
uucacuggucaaaacgggg

SEQ ID NO: 400396 - RNA, 19 nt, Artificial Sequence
  Description of Artificial Sequence: Synthetic oligonucleotide
ucaagaccaacucacauuu

SEQ ID NO: 400397 - RNA, 19 nt, Artificial Sequence
  Description of Artificial Sequence: Synthetic oligonucleotide
uaauaguuuuauuuggcaa

SEQ ID NO: 400398 - RNA, 19 nt, Artificial Sequence
  Description of Artificial Sequence: Synthetic oligonucleotide
aguacuuauaucaaauucu

SEQ ID NO: 400399 - RNA, 19 nt, Artificial Sequence
  Description of Artificial Sequence: Synthetic oligonucleotide
gaugauucguccucuauuc

SEQ ID NO: 400400 - RNA, 19 nt, Artificial Sequence
  Description of Artificial Sequence: Synthetic oligonucleotide
agagcgaccauugagaaga

SEQ ID NO: 400401 - RNA, 19 nt, Artificial Sequence
  Description of Artificial Sequence: Synthetic oligonucleotide
auucgauaugcuccagugc

SEQ ID NO: 400402 - RNA, 19 nt, Artificial Sequence
  Description of Artificial Sequence: Synthetic oligonucleotide
uuuauaaccucugcuucgg

SEQ ID NO: 400403 - RNA, 19 nt, Artificial Sequence
  Description of Artificial Sequence: Synthetic oligonucleotide
uagacuuuuccaugugugg

SEQ ID NO: 400404 - RNA, 19 nt, Artificial Sequence
  Description of Artificial Sequence: Synthetic oligonucleotide
ucuuuuagggcccuuuccu

SEQ ID NO: 400405 - RNA, 19 nt, Artificial Sequence
  Description of Artificial Sequence: Synthetic oligonucleotide
gguaucaccacuucugagg

SEQ ID NO: 400406 - RNA, 19 nt, Artificial Sequence
  Description of Artificial Sequence: Synthetic oligonucleotide
gaggaaaucuacgugcgcg

SEQ ID NO: 400407 - RNA, 19 nt, Artificial Sequence
  Description of Artificial Sequence: Synthetic oligonucleotide
ugacuuuggaaccugacuu

SEQ ID NO: 400408 - RNA, 19 nt, Artificial Sequence
  Description of Artificial Sequence: Synthetic oligonucleotide
acaaaucucaaauguauau

SEQ ID NO: 400409 - RNA, 19 nt, Artificial Sequence
  Description of Artificial Sequence: Synthetic oligonucleotide
uccucuauucccaacucgc

SEQ ID NO: 400410 - RNA, 19 nt, Artificial Sequence
  Description of Artificial Sequence: Synthetic oligonucleotide
uagacuugcauccauuuua

SEQ ID NO: 400411 - RNA, 19 nt, Artificial Sequence
  Description of Artificial Sequence: Synthetic oligonucleotide
auaucaaccaaguuguaua

SEQ ID NO: 400412 - RNA, 19 nt, Artificial Sequence
  Description of Artificial Sequence: Synthetic oligonucleotide
gaacauucagcuugguagc

SEQ ID NO: 400413 - RNA, 19 nt, Artificial Sequence
  Description of Artificial Sequence: Synthetic oligonucleotide
auacagaugauucguccuc

SEQ ID NO: 400414 - RNA, 19 nt, Artificial Sequence
  Description of Artificial Sequence: Synthetic oligonucleotide
ucuauucccaacucgcucu

SEQ ID NO: 400415 - RNA, 19 nt, Artificial Sequence
  Description of Artificial Sequence: Synthetic oligonucleotide
auauaucauacauuauccu

SEQ ID NO: 400416 - RNA, 19 nt, Artificial Sequence
  Description of Artificial Sequence: Synthetic oligonucleotide
cagacguccagcaaacucc

SEQ ID NO: 400417 - RNA, 19 nt, Artificial Sequence
  Description of Artificial Sequence: Synthetic oligonucleotide
ugauucguccucuauuccc

SEQ ID NO: 400418 - RNA, 19 nt, Artificial Sequence
  Description of Artificial Sequence: Synthetic oligonucleotide
cuuugcacguuccagcggg

SEQ ID NO: 400419 - RNA, 19 nt, Artificial Sequence
  Description of Artificial Sequence: Synthetic oligonucleotide
guauaucgucuuuugacag

SEQ ID NO: 400420 - RNA, 19 nt, Artificial Sequence
  Description of Artificial Sequence: Synthetic oligonucleotide
auagcuauauaaucuugcu

SEQ ID NO: 400421 - RNA, 19 nt, Artificial Sequence
  Description of Artificial Sequence: Synthetic oligonucleotide
gugaaguagcuccacgucg

SEQ ID NO: 400422 - RNA, 19 nt, Artificial Sequence
  Description of Artificial Sequence: Synthetic oligonucleotide
gaaagggaauauaucauac

SEQ ID NO: 400423 - RNA, 19 nt, Artificial Sequence
  Description of Artificial Sequence: Synthetic oligonucleotide
ucuggaauuggcaguguug

SEQ ID NO: 400424 - RNA, 19 nt, Artificial Sequence
  Description of Artificial Sequence: Synthetic oligonucleotide
ugguuugugaaauaaucau

SEQ ID NO: 400425 - RNA, 19 nt, Artificial Sequence
  Description of Artificial Sequence: Synthetic oligonucleotide
aaauucgauaugcuccagu

SEQ ID NO: 400426 - RNA, 19 nt, Artificial Sequence
  Description of Artificial Sequence: Synthetic oligonucleotide
uuugaaucugcaugagaug

SEQ ID NO: 400427 - RNA, 19 nt, Artificial Sequence
  Description of Artificial Sequence: Synthetic oligonucleotide
ucaccaaccggguaggugu

SEQ ID NO: 400428 - RNA, 19 nt, Artificial Sequence
  Description of Artificial Sequence: Synthetic oligonucleotide
aguuuagcacgucuucuuc

SEQ ID NO: 400429 - RNA, 19 nt, Artificial Sequence
  Description of Artificial Sequence: Synthetic oligonucleotide
ucuguuacuccacaaggau

SEQ ID NO: 400430 - RNA, 19 nt, Artificial Sequence
  Description of Artificial Sequence: Synthetic oligonucleotide
ugaaagggaauauaucaua

SEQ ID NO: 400431 - RNA, 19 nt, Artificial Sequence
  Description of Artificial Sequence: Synthetic oligonucleotide
uguauauauuuugacucug

SEQ ID NO: 400432 - RNA, 19 nt, Artificial Sequence
  Description of Artificial Sequence: Synthetic oligonucleotide
aguuguauaucgucuuuug

SEQ ID NO: 400433 - RNA, 19 nt, Artificial Sequence
  Description of Artificial Sequence: Synthetic oligonucleotide
ucgaggccaagucaaaaug

SEQ ID NO: 400434 - RNA, 19 nt, Artificial Sequence
  Description of Artificial Sequence: Synthetic oligonucleotide
ucuaacugguccuuugcac

SEQ ID NO: 400435 - RNA, 19 nt, Artificial Sequence
  Description of Artificial Sequence: Synthetic oligonucleotide
uugaaaauggugguuugug

SEQ ID NO: 400436 - RNA, 19 nt, Artificial Sequence
  Description of Artificial Sequence: Synthetic oligonucleotide
cugcucgucucuuuuaggg

SEQ ID NO: 400437 - RNA, 19 nt, Artificial Sequence
  Description of Artificial Sequence: Synthetic oligonucleotide
uucaagcaugcguacauga

SEQ ID NO: 400438 - RNA, 19 nt, Artificial Sequence
  Description of Artificial Sequence: Synthetic oligonucleotide
agaaaauuagugaggcagg

SEQ ID NO: 400439 - RNA, 19 nt, Artificial Sequence
  Description of Artificial Sequence: Synthetic oligonucleotide
uaucauacauuauccuaca

SEQ ID NO: 400440 - RNA, 19 nt, Artificial Sequence
  Description of Artificial Sequence: Synthetic oligonucleotide
ugaaguagcuccacgucgu

SEQ ID NO: 400441 - RNA, 19 nt, Artificial Sequence
  Description of Artificial Sequence: Synthetic oligonucleotide
aggauaauaaggacauugg

SEQ ID NO: 400442 - RNA, 19 nt, Artificial Sequence
  Description of Artificial Sequence: Synthetic oligonucleotide
ugaaauaaucaugggccag

SEQ ID NO: 400443 - RNA, 19 nt, Artificial Sequence
  Description of Artificial Sequence: Synthetic oligonucleotide
uaauccgguagucugucac

SEQ ID NO: 400444 - RNA, 19 nt, Artificial Sequence
  Description of Artificial Sequence: Synthetic oligonucleotide
uccuuuauaaccucugcuu

SEQ ID NO: 400445 - RNA, 19 nt, Artificial Sequence
  Description of Artificial Sequence: Synthetic oligonucleotide
ucugacaagcguuucuaac

SEQ ID NO: 400446 - RNA, 19 nt, Artificial Sequence
  Description of Artificial Sequence: Synthetic oligonucleotide
uccacgucguaguuggcgg

SEQ ID NO: 400447 - RNA, 19 nt, Artificial Sequence
  Description of Artificial Sequence: Synthetic oligonucleotide
aauuagugaggcaggaaga

SEQ ID NO: 400448 - RNA, 19 nt, Artificial Sequence
  Description of Artificial Sequence: Synthetic oligonucleotide
aguuaaccuguuuucccuc

SEQ ID NO: 400449 - RNA, 19 nt, Artificial Sequence
  Description of Artificial Sequence: Synthetic oligonucleotide
ucgucuuuugacaguuuag

SEQ ID NO: 400450 - RNA, 19 nt, Artificial Sequence
  Description of Artificial Sequence: Synthetic oligonucleotide
ucacucuucacugacggcu

SEQ ID NO: 400451 - RNA, 19 nt, Artificial Sequence
  Description of Artificial Sequence: Synthetic oligonucleotide
uuuuauaucuggggucuag

SEQ ID NO: 400452 - RNA, 19 nt, Artificial Sequence
  Description of Artificial Sequence: Synthetic oligonucleotide
aauggaacuaccgcuugca

SEQ ID NO: 400453 - RNA, 19 nt, Artificial Sequence
  Description of Artificial Sequence: Synthetic oligonucleotide
ucagacguccagcaaacuc

SEQ ID NO: 400454 - RNA, 19 nt, Artificial Sequence
  Description of Artificial Sequence: Synthetic oligonucleotide
gcauccauuuuauaucugg

SEQ ID NO: 400455 - RNA, 19 nt, Artificial Sequence
  Description of Artificial Sequence: Synthetic oligonucleotide
ugacaagcguuucuaacuc

SEQ ID NO: 400456 - RNA, 19 nt, Artificial Sequence
  Description of Artificial Sequence: Synthetic oligonucleotide
uuucccucguucuaaaaua

SEQ ID NO: 400457 - RNA, 19 nt, Artificial Sequence
  Description of Artificial Sequence: Synthetic oligonucleotide
gacaagcguuucuaacucg

SEQ ID NO: 400458 - RNA, 19 nt, Artificial Sequence
  Description of Artificial Sequence: Synthetic oligonucleotide
agagugugagcacuuuaag

SEQ ID NO: 400459 - RNA, 19 nt, Artificial Sequence
  Description of Artificial Sequence: Synthetic oligonucleotide
uucuaacugguccuuugca

SEQ ID NO: 400460 - RNA, 19 nt, Artificial Sequence
  Description of Artificial Sequence: Synthetic oligonucleotide
ugcgacaagcccaugcaga

SEQ ID NO: 400461 - RNA, 19 nt, Artificial Sequence
  Description of Artificial Sequence: Synthetic oligonucleotide
agggauugaaguucggggu

SEQ ID NO: 400462 - RNA, 19 nt, Artificial Sequence
  Description of Artificial Sequence: Synthetic oligonucleotide
aggacauuggcccuuuaga

SEQ ID NO: 400463 - RNA, 19 nt, Artificial Sequence
  Description of Artificial Sequence: Synthetic oligonucleotide
ucugcuucggccaacucuu

SEQ ID NO: 400464 - RNA, 19 nt, Artificial Sequence
  Description of Artificial Sequence: Synthetic oligonucleotide
aauggaucgagagcugcug

SEQ ID NO: 400465 - RNA, 19 nt, Artificial Sequence
  Description of Artificial Sequence: Synthetic oligonucleotide
ucuacuggugaaauucgau

SEQ ID NO: 400466 - RNA, 19 nt, Artificial Sequence
  Description of Artificial Sequence: Synthetic oligonucleotide
acauuggcccuuuagacuu

SEQ ID NO: 400467 - RNA, 19 nt, Artificial Sequence
  Description of Artificial Sequence: Synthetic oligonucleotide
uaccaacuguagaaauagg

SEQ ID NO: 400468 - RNA, 19 nt, Artificial Sequence
  Description of Artificial Sequence: Synthetic oligonucleotide
uuauaucuggggucuagaa

SEQ ID NO: 400469 - RNA, 19 nt, Artificial Sequence
  Description of Artificial Sequence: Synthetic oligonucleotide
uauaucgucuuuugacagu

SEQ ID NO: 400470 - RNA, 19 nt, Artificial Sequence
  Description of Artificial Sequence: Synthetic oligonucleotide
uugauucuguuacuccaca

SEQ ID NO: 400471 - RNA, 19 nt, Artificial Sequence
  Description of Artificial Sequence: Synthetic oligonucleotide
ucaagcaugcguacaugac

SEQ ID NO: 400472 - RNA, 19 nt, Artificial Sequence
  Description of Artificial Sequence: Synthetic oligonucleotide
uaucaaccaaguuguauau

SEQ ID NO: 400473 - RNA, 19 nt, Artificial Sequence
  Description of Artificial Sequence: Synthetic oligonucleotide
augcguacaugacuaucac

SEQ ID NO: 400474 - RNA, 19 nt, Artificial Sequence
  Description of Artificial Sequence: Synthetic oligonucleotide
uccaugaguaacguucgag

SEQ ID NO: 400475 - RNA, 19 nt, Artificial Sequence
  Description of Artificial Sequence: Synthetic oligonucleotide
uugauauaacucagcucug

SEQ ID NO: 400476 - RNA, 19 nt, Artificial Sequence
  Description of Artificial Sequence: Synthetic oligonucleotide
agaguucagacguccagca

SEQ ID NO: 400477 - RNA, 19 nt, Artificial Sequence
  Description of Artificial Sequence: Synthetic oligonucleotide
augaguaacguucgagccu

SEQ ID NO: 400478 - RNA, 19 nt, Artificial Sequence
  Description of Artificial Sequence: Synthetic oligonucleotide
aauccgguagucugucacu

SEQ ID NO: 400479 - RNA, 19 nt, Artificial Sequence
  Description of Artificial Sequence: Synthetic oligonucleotide
uaguguaguucgaugcugu

SEQ ID NO: 400480 - RNA, 19 nt, Artificial Sequence
  Description of Artificial Sequence: Synthetic oligonucleotide
cuuguuaugcucaugaauu

SEQ ID NO: 400481 - RNA, 19 nt, Artificial Sequence
  Description of Artificial Sequence: Synthetic oligonucleotide
ucucuuuaaauggaccuuc

SEQ ID NO: 400482 - RNA, 19 nt, Artificial Sequence
  Description of Artificial Sequence: Synthetic oligonucleotide
gcaacauagcuauauaauc

SEQ ID NO: 400483 - RNA, 19 nt, Artificial Sequence
  Description of Artificial Sequence: Synthetic oligonucleotide
auauaacucagcucuguua

SEQ ID NO: 400484 - RNA, 19 nt, Artificial Sequence
  Description of Artificial Sequence: Synthetic oligonucleotide
uggugaaguagcuccacgu

SEQ ID NO: 400485 - RNA, 19 nt, Artificial Sequence
  Description of Artificial Sequence: Synthetic oligonucleotide
uacgugcgcgucuuugugg

SEQ ID NO: 400486 - RNA, 19 nt, Artificial Sequence
  Description of Artificial Sequence: Synthetic oligonucleotide
ucguucuaaaauaccuuuc

SEQ ID NO: 400487 - RNA, 19 nt, Artificial Sequence
  Description of Artificial Sequence: Synthetic oligonucleotide
uuccacaugaugcgguacu

SEQ ID NO: 400488 - RNA, 19 nt, Artificial Sequence
  Description of Artificial Sequence: Synthetic oligonucleotide
aguucgggguccuccaguc

SEQ ID NO: 400489 - RNA, 19 nt, Artificial Sequence
  Description of Artificial Sequence: Synthetic oligonucleotide
uucccucguucuaaaauac

SEQ ID NO: 400490 - RNA, 19 nt, Artificial Sequence
  Description of Artificial Sequence: Synthetic oligonucleotide
uggguaucaccacuucuga

SEQ ID NO: 400491 - RNA, 19 nt, Artificial Sequence
  Description of Artificial Sequence: Synthetic oligonucleotide
ugaguaacguucgagccuc

SEQ ID NO: 400492 - RNA, 19 nt, Artificial Sequence
  Description of Artificial Sequence: Synthetic oligonucleotide
uuuauaucuggggucuaga

SEQ ID NO: 400493 - RNA, 19 nt, Artificial Sequence
  Description of Artificial Sequence: Synthetic oligonucleotide
gacaguuuagcacgucuuc

SEQ ID NO: 400494 - RNA, 19 nt, Artificial Sequence
  Description of Artificial Sequence: Synthetic oligonucleotide
ugauauaacucagcucugu

SEQ ID NO: 400495 - RNA, 19 nt, Artificial Sequence
  Description of Artificial Sequence: Synthetic oligonucleotide
ugaggaaaucuacgugcgc

SEQ ID NO: 400496 - RNA, 19 nt, Artificial Sequence
  Description of Artificial Sequence: Synthetic oligonucleotide
uugaaguucgggguccucc

SEQ ID NO: 400497 - RNA, 19 nt, Artificial Sequence
  Description of Artificial Sequence: Synthetic oligonucleotide
aucaagaccaacucacauu

SEQ ID NO: 400498 - RNA, 19 nt, Artificial Sequence
  Description of Artificial Sequence: Synthetic oligonucleotide
agaaggucuacuauuuaca

SEQ ID NO: 400499 - RNA, 19 nt, Artificial Sequence
  Description of Artificial Sequence: Synthetic oligonucleotide
auugugauuugggaggaca

SEQ ID NO: 400500 - RNA, 19 nt, Artificial Sequence
  Description of Artificial Sequence: Synthetic oligonucleotide
uccagcgggaucucuagac

SEQ ID NO: 400501 - RNA, 19 nt, Artificial Sequence
  Description of Artificial Sequence: Synthetic oligonucleotide
uucaaccugucugagucug

SEQ ID NO: 400502 - RNA, 19 nt, Artificial Sequence
  Description of Artificial Sequence: Synthetic oligonucleotide
ggaguuaaccuguuuuccc

SEQ ID NO: 400503 - RNA, 19 nt, Artificial Sequence
  Description of Artificial Sequence: Synthetic oligonucleotide
ugggccaguaacgagugug

SEQ ID NO: 400504 - RNA, 19 nt, Artificial Sequence
  Description of Artificial Sequence: Synthetic oligonucleotide
guccucuauucccaacucg

SEQ ID NO: 400505 - RNA, 19 nt, Artificial Sequence
  Description of Artificial Sequence: Synthetic oligonucleotide
guaucaccacuucugagga

SEQ ID NO: 400506 - RNA, 19 nt, Artificial Sequence
  Description of Artificial Sequence: Synthetic oligonucleotide
ugcucgucucuuuuagggc

SEQ ID NO: 400507 - RNA, 19 nt, Artificial Sequence
  Description of Artificial Sequence: Synthetic oligonucleotide
gugaaauaaucaugggcca

SEQ ID NO: 400508 - RNA, 19 nt, Artificial Sequence
  Description of Artificial Sequence: Synthetic oligonucleotide
aggcuaucuucaccaaccg

SEQ ID NO: 400509 - RNA, 19 nt, Artificial Sequence
  Description of Artificial Sequence: Synthetic oligonucleotide
ugaaguucgggguccucca

SEQ ID NO: 400510 - RNA, 19 nt, Artificial Sequence
  Description of Artificial Sequence: Synthetic oligonucleotide
ucacaauaacacuggcuaa

SEQ ID NO: 400511 - RNA, 19 nt, Artificial Sequence
  Description of Artificial Sequence: Synthetic oligonucleotide
aacuaccgcuugcauguug

SEQ ID NO: 400512 - RNA, 19 nt, Artificial Sequence
  Description of Artificial Sequence: Synthetic oligonucleotide
guuguauaucgucuuuuga

SEQ ID NO: 400513 - RNA, 19 nt, Artificial Sequence
  Description of Artificial Sequence: Synthetic oligonucleotide
auaguguaguucgaugcug

SEQ ID NO: 400514 - RNA, 19 nt, Artificial Sequence
  Description of Artificial Sequence: Synthetic oligonucleotide
ucaaccugucugagucugg

SEQ ID NO: 400515 - RNA, 19 nt, Artificial Sequence
  Description of Artificial Sequence: Synthetic oligonucleotide
cuaauggaacuaccgcuug

SEQ ID NO: 400516 - RNA, 19 nt, Artificial Sequence
  Description of Artificial Sequence: Synthetic oligonucleotide
ucccucguucuaaaauacc

SEQ ID NO: 400517 - RNA, 19 nt, Artificial Sequence
  Description of Artificial Sequence: Synthetic oligonucleotide
guggguaucaccacuucug

SEQ ID NO: 400518 - RNA, 19 nt, Artificial Sequence
  Description of Artificial Sequence: Synthetic oligonucleotide
acguucgagccucauguug

SEQ ID NO: 400519 - RNA, 19 nt, Artificial Sequence
  Description of Artificial Sequence: Synthetic oligonucleotide
ugacaguuuagcacgucuu

SEQ ID NO: 400520 - RNA, 19 nt, Artificial Sequence
  Description of Artificial Sequence: Synthetic oligonucleotide
ugaaucugcaugagaugau

SEQ ID NO: 400521 - RNA, 19 nt, Artificial Sequence
  Description of Artificial Sequence: Synthetic oligonucleotide
uccacggcugcgacaagcc

SEQ ID NO: 400522 - RNA, 19 nt, Artificial Sequence
  Description of Artificial Sequence: Synthetic oligonucleotide
cuuuuagggcccuuuccuc

SEQ ID NO: 400523 - RNA, 19 nt, Artificial Sequence
  Description of Artificial Sequence: Synthetic oligonucleotide
accacuucaggguuaccgu

SEQ ID NO: 400524 - RNA, 19 nt, Artificial Sequence
  Description of Artificial Sequence: Synthetic oligonucleotide
gugguuugugaaauaauca

SEQ ID NO: 400525 - RNA, 19 nt, Artificial Sequence
  Description of Artificial Sequence: Synthetic oligonucleotide
uagaauggaucgagagcug

SEQ ID NO: 400526 - RNA, 19 nt, Artificial Sequence
  Description of Artificial Sequence: Synthetic oligonucleotide
ucuacgugcgcgucuuugu

SEQ ID NO: 400527 - RNA, 19 nt, Artificial Sequence
  Description of Artificial Sequence: Synthetic oligonucleotide
aggaaaucuacgugcgcgu

SEQ ID NO: 400528 - RNA, 19 nt, Artificial Sequence
  Description of Artificial Sequence: Synthetic oligonucleotide
gucuacuauuuacaucuac

SEQ ID NO: 400529 - RNA, 19 nt, Artificial Sequence
  Description of Artificial Sequence: Synthetic oligonucleotide
ggacauuggcccuuuagac

SEQ ID NO: 400530 - RNA, 19 nt, Artificial Sequence
  Description of Artificial Sequence: Synthetic oligonucleotide
aagcaugcguacaugacua

SEQ ID NO: 400531 - RNA, 19 nt, Artificial Sequence
  Description of Artificial Sequence: Synthetic oligonucleotide
aaauaccuuucaaccuguc

SEQ ID NO: 400532 - RNA, 19 nt, Artificial Sequence
  Description of Artificial Sequence: Synthetic oligonucleotide
guaacguucgagccucaug

SEQ ID NO: 400533 - RNA, 19 nt, Artificial Sequence
  Description of Artificial Sequence: Synthetic oligonucleotide
uguggcgucucauccauuu

SEQ ID NO: 400534 - RNA, 19 nt, Artificial Sequence
  Description of Artificial Sequence: Synthetic oligonucleotide
cagaacaugugccccggag

SEQ ID NO: 400535 - RNA, 19 nt, Artificial Sequence
  Description of Artificial Sequence: Synthetic oligonucleotide
ugcguacaugacuaucacu

SEQ ID NO: 400536 - RNA, 19 nt, Artificial Sequence
  Description of Artificial Sequence: Synthetic oligonucleotide
ugcgguacugcucgucucu

SEQ ID NO: 400537 - RNA, 19 nt, Artificial Sequence
  Description of Artificial Sequence: Synthetic oligonucleotide
acagagcgaccauugagaa

SEQ ID NO: 400538 - RNA, 19 nt, Artificial Sequence
  Description of Artificial Sequence: Synthetic oligonucleotide
ggccaagucaaaaugcugc

SEQ ID NO: 400539 - RNA, 19 nt, Artificial Sequence
  Description of Artificial Sequence: Synthetic oligonucleotide
gguagucugucacucuucc

SEQ ID NO: 400540 - RNA, 19 nt, Artificial Sequence
  Description of Artificial Sequence: Synthetic oligonucleotide
cucuauucccaacucgcuc

SEQ ID NO: 400541 - RNA, 19 nt, Artificial Sequence
  Description of Artificial Sequence: Synthetic oligonucleotide
aguaacgagugugcuuuuc

SEQ ID NO: 400542 - RNA, 19 nt, Artificial Sequence
  Description of Artificial Sequence: Synthetic oligonucleotide
ugguaccaacuguagaaau

SEQ ID NO: 400543 - RNA, 19 nt, Artificial Sequence
  Description of Artificial Sequence: Synthetic oligonucleotide
ugcaauaguguaguucgau

SEQ ID NO: 400544 - RNA, 19 nt, Artificial Sequence
  Description of Artificial Sequence: Synthetic oligonucleotide
ggaacuaccgcuugcaugu

SEQ ID NO: 400545 - RNA, 19 nt, Artificial Sequence
  Description of Artificial Sequence: Synthetic oligonucleotide
aaauaaucaugggccagua

SEQ ID NO: 400546 - RNA, 19 nt, Artificial Sequence
  Description of Artificial Sequence: Synthetic oligonucleotide
aucaaccaaguuguauauc

SEQ ID NO: 400547 - RNA, 19 nt, Artificial Sequence
  Description of Artificial Sequence: Synthetic oligonucleotide
uuagcacgucuucuucugu

SEQ ID NO: 400548 - RNA, 19 nt, Artificial Sequence
  Description of Artificial Sequence: Synthetic oligonucleotide
ugccaaucuuagaauuagu

SEQ ID NO: 400549 - RNA, 19 nt, Artificial Sequence
  Description of Artificial Sequence: Synthetic oligonucleotide
ucguuccacaugaugcggu

SEQ ID NO: 400550 - RNA, 19 nt, Artificial Sequence
  Description of Artificial Sequence: Synthetic oligonucleotide
accgucucuuuaaauggac

SEQ ID NO: 400551 - RNA, 19 nt, Artificial Sequence
  Description of Artificial Sequence: Synthetic oligonucleotide
aaaucuacgugcgcgucuu

SEQ ID NO: 400552 - RNA, 19 nt, Artificial Sequence
  Description of Artificial Sequence: Synthetic oligonucleotide
agcucggacacuguggacu

SEQ ID NO: 400553 - RNA, 19 nt, Artificial Sequence
  Description of Artificial Sequence: Synthetic oligonucleotide
guuccagcgggaucucuag

SEQ ID NO: 400554 - RNA, 19 nt, Artificial Sequence
  Description of Artificial Sequence: Synthetic oligonucleotide
uuucaaccugucugagucu

SEQ ID NO: 400555 - RNA, 19 nt, Artificial Sequence
  Description of Artificial Sequence: Synthetic oligonucleotide
gaguuaaccuguuuucccu

SEQ ID NO: 400556 - RNA, 19 nt, Artificial Sequence
  Description of Artificial Sequence: Synthetic oligonucleotide
caaggcuaucuucaccaac

SEQ ID NO: 400557 - RNA, 19 nt, Artificial Sequence
  Description of Artificial Sequence: Synthetic oligonucleotide
uguaauccgguagucuguc

SEQ ID NO: 400558 - RNA, 19 nt, Artificial Sequence
  Description of Artificial Sequence: Synthetic oligonucleotide
uaacgagugugcuuuucua

SEQ ID NO: 400559 - RNA, 19 nt, Artificial Sequence
  Description of Artificial Sequence: Synthetic oligonucleotide
accagaacauucagcuugg

SEQ ID NO: 400560 - RNA, 19 nt, Artificial Sequence
  Description of Artificial Sequence: Synthetic oligonucleotide
agguguugauauaacucag

SEQ ID NO: 400561 - RNA, 19 nt, Artificial Sequence
  Description of Artificial Sequence: Synthetic oligonucleotide
cucgucucuuuuagggccc

SEQ ID NO: 400562 - RNA, 19 nt, Artificial Sequence
  Description of Artificial Sequence: Synthetic oligonucleotide
gcucgucucuuuuagggcc

SEQ ID NO: 400563 - RNA, 19 nt, Artificial Sequence
  Description of Artificial Sequence: Synthetic oligonucleotide
gaaggucuacuauuuacau

SEQ ID NO: 400564 - RNA, 19 nt, Artificial Sequence
  Description of Artificial Sequence: Synthetic oligonucleotide
gagucacucacaaugaaau

SEQ ID NO: 400565 - RNA, 19 nt, Artificial Sequence
  Description of Artificial Sequence: Synthetic oligonucleotide
cagucacucuucacugacg

SEQ ID NO: 400566 - RNA, 19 nt, Artificial Sequence
  Description of Artificial Sequence: Synthetic oligonucleotide
aaacaaguccaggcaacau

SEQ ID NO: 400567 - RNA, 19 nt, Artificial Sequence
  Description of Artificial Sequence: Synthetic oligonucleotide
ugggaggacaaaucucaaa

SEQ ID NO: 400568 - RNA, 19 nt, Artificial Sequence
  Description of Artificial Sequence: Synthetic oligonucleotide
cuacuggugaaauucgaua

SEQ ID NO: 400569 - RNA, 19 nt, Artificial Sequence
  Description of Artificial Sequence: Synthetic oligonucleotide
auaucgucuuuugacaguu

SEQ ID NO: 400570 - RNA, 19 nt, Artificial Sequence
  Description of Artificial Sequence: Synthetic oligonucleotide
caggugaguccuuuauaac

SEQ ID NO: 400571 - RNA, 19 nt, Artificial Sequence
  Description of Artificial Sequence: Synthetic oligonucleotide
ccauuuuauaucugggguc

SEQ ID NO: 400572 - RNA, 19 nt, Artificial Sequence
  Description of Artificial Sequence: Synthetic oligonucleotide
gaaguucgggguccuccag

SEQ ID NO: 400573 - RNA, 19 nt, Artificial Sequence
  Description of Artificial Sequence: Synthetic oligonucleotide
cuucuugaguccaagaauu

SEQ ID NO: 400574 - RNA, 19 nt, Artificial Sequence
  Description of Artificial Sequence: Synthetic oligonucleotide
ucgauaugcuccagugcaa

SEQ ID NO: 400575 - RNA, 19 nt, Artificial Sequence
  Description of Artificial Sequence: Synthetic oligonucleotide
auccgguagucugucacuc

SEQ ID NO: 400576 - RNA, 19 nt, Artificial Sequence
  Description of Artificial Sequence: Synthetic oligonucleotide
gaaggcggaucuucuagaa

SEQ ID NO: 400577 - RNA, 19 nt, Artificial Sequence
  Description of Artificial Sequence: Synthetic oligonucleotide
cucggcugcuccaacaaca

SEQ ID NO: 400578 - RNA, 19 nt, Artificial Sequence
  Description of Artificial Sequence: Synthetic oligonucleotide
acaagcguuucuaacucgu

SEQ ID NO: 400579 - RNA, 19 nt, Artificial Sequence
  Description of Artificial Sequence: Synthetic oligonucleotide
cagugcaauaguguaguuc

SEQ ID NO: 400580 - RNA, 19 nt, Artificial Sequence
  Description of Artificial Sequence: Synthetic oligonucleotide
ugguccuuugcacguucca

SEQ ID NO: 400581 - RNA, 19 nt, Artificial Sequence
  Description of Artificial Sequence: Synthetic oligonucleotide
ugcaugagaugaucugaau

SEQ ID NO: 400582 - RNA, 19 nt, Artificial Sequence
  Description of Artificial Sequence: Synthetic oligonucleotide
aucauacauuauccuacaa

SEQ ID NO: 400583 - RNA, 19 nt, Artificial Sequence
  Description of Artificial Sequence: Synthetic oligonucleotide
gauuuugcacagggucucc

SEQ ID NO: 400584 - RNA, 19 nt, Artificial Sequence
  Description of Artificial Sequence: Synthetic oligonucleotide
cacucacaaugaaauucac

SEQ ID NO: 400585 - RNA, 19 nt, Artificial Sequence
  Description of Artificial Sequence: Synthetic oligonucleotide
ugguggucgaggccaaguc

SEQ ID NO: 400586 - RNA, 19 nt, Artificial Sequence
  Description of Artificial Sequence: Synthetic oligonucleotide
uugggaggacaaaucucaa

SEQ ID NO: 400587 - RNA, 19 nt, Artificial Sequence
  Description of Artificial Sequence: Synthetic oligonucleotide
caaguccaggcaacauagc

SEQ ID NO: 400588 - RNA, 19 nt, Artificial Sequence
  Description of Artificial Sequence: Synthetic oligonucleotide
acuaccgcuugcauguuga

SEQ ID NO: 400589 - RNA, 19 nt, Artificial Sequence
  Description of Artificial Sequence: Synthetic oligonucleotide
guucagacguccagcaaac

SEQ ID NO: 400590 - RNA, 19 nt, Artificial Sequence
  Description of Artificial Sequence: Synthetic oligonucleotide
cauuuuauaucuggggucu

SEQ ID NO: 400591 - RNA, 19 nt, Artificial Sequence
  Description of Artificial Sequence: Synthetic oligonucleotide
accggguaggugugaauca

SEQ ID NO: 400592 - RNA, 19 nt, Artificial Sequence
  Description of Artificial Sequence: Synthetic oligonucleotide
acgugcgcgucuuuguggu

SEQ ID NO: 400593 - RNA, 19 nt, Artificial Sequence
  Description of Artificial Sequence: Synthetic oligonucleotide
ugcucaugaauuguuucuu

SEQ ID NO: 400594 - RNA, 19 nt, Artificial Sequence
  Description of Artificial Sequence: Synthetic oligonucleotide
augcgguacugcucgucuc

SEQ ID NO: 400595 - RNA, 19 nt, Artificial Sequence
  Description of Artificial Sequence: Synthetic oligonucleotide
uuccauguguggcgucuca

SEQ ID NO: 400596 - RNA, 19 nt, Artificial Sequence
  Description of Artificial Sequence: Synthetic oligonucleotide
ugaucugaauuugcagcaa

SEQ ID NO: 400597 - RNA, 19 nt, Artificial Sequence
  Description of Artificial Sequence: Synthetic oligonucleotide
aacaugugccccggaguca

SEQ ID NO: 400598 - RNA, 19 nt, Artificial Sequence
  Description of Artificial Sequence: Synthetic oligonucleotide
cguucgagccucauguugg

SEQ ID NO: 400599 - RNA, 19 nt, Artificial Sequence
  Description of Artificial Sequence: Synthetic oligonucleotide
gaaaucuacgugcgcgucu

SEQ ID NO: 400600 - RNA, 19 nt, Artificial Sequence
  Description of Artificial Sequence: Synthetic oligonucleotide
ucuuucccucguucuaaaa

SEQ ID NO: 400601 - RNA, 19 nt, Artificial Sequence
  Description of Artificial Sequence: Synthetic oligonucleotide
cuacgugcgcgucuuugug

SEQ ID NO: 400602 - RNA, 19 nt, Artificial Sequence
  Description of Artificial Sequence: Synthetic oligonucleotide
cagagcgaccauugagaag

SEQ ID NO: 400603 - RNA, 19 nt, Artificial Sequence
  Description of Artificial Sequence: Synthetic oligonucleotide
aacguucgagccucauguu

SEQ ID NO: 400604 - RNA, 19 nt, Artificial Sequence
  Description of Artificial Sequence: Synthetic oligonucleotide
uuugcacguuccagcggga

SEQ ID NO: 400605 - RNA, 19 nt, Artificial Sequence
  Description of Artificial Sequence: Synthetic oligonucleotide
cuucuagaauggaucgaga

SEQ ID NO: 400606 - RNA, 19 nt, Artificial Sequence
  Description of Artificial Sequence: Synthetic oligonucleotide
cgaggugccgcccagcucg

SEQ ID NO: 400607 - RNA, 19 nt, Artificial Sequence
  Description of Artificial Sequence: Synthetic oligonucleotide
cuggccgcggcuucuccgg

SEQ ID NO: 400608 - RNA, 19 nt, Artificial Sequence
  Description of Artificial Sequence: Synthetic oligonucleotide
uaguucgaugcuguugguc

SEQ ID NO: 400609 - RNA, 19 nt, Artificial Sequence
  Description of Artificial Sequence: Synthetic oligonucleotide
guuuagcacgucuucuucu

SEQ ID NO: 400610 - RNA, 19 nt, Artificial Sequence
  Description of Artificial Sequence: Synthetic oligonucleotide
gauaugcuccagugcaaua

SEQ ID NO: 400611 - RNA, 19 nt, Artificial Sequence
  Description of Artificial Sequence: Synthetic oligonucleotide
aucuacgugcgcgucuuug

SEQ ID NO: 400612 - RNA, 19 nt, Artificial Sequence
  Description of Artificial Sequence: Synthetic oligonucleotide
guaacgagugugcuuuucu

SEQ ID NO: 400613 - RNA, 19 nt, Artificial Sequence
  Description of Artificial Sequence: Synthetic oligonucleotide
auaucaaauucugcccaaa

SEQ ID NO: 400614 - RNA, 19 nt, Artificial Sequence
  Description of Artificial Sequence: Synthetic oligonucleotide
cugguccuuugcacguucc

SEQ ID NO: 400615 - RNA, 19 nt, Artificial Sequence
  Description of Artificial Sequence: Synthetic oligonucleotide
ucagaacaugugccccgga

SEQ ID NO: 400616 - RNA, 19 nt, Artificial Sequence
  Description of Artificial Sequence: Synthetic oligonucleotide
uguggacuucacuggucaa

SEQ ID NO: 400617 - RNA, 19 nt, Artificial Sequence
  Description of Artificial Sequence: Synthetic oligonucleotide
uucgaugcuguugguccug

SEQ ID NO: 400618 - RNA, 19 nt, Artificial Sequence
  Description of Artificial Sequence: Synthetic oligonucleotide
agacuugcauccauuuuau

SEQ ID NO: 400619 - RNA, 19 nt, Artificial Sequence
  Description of Artificial Sequence: Synthetic oligonucleotide
ggcggaucuucuagaaugg

SEQ ID NO: 400620 - RNA, 19 nt, Artificial Sequence
  Description of Artificial Sequence: Synthetic oligonucleotide
gggaggacaaaucucaaau

SEQ ID NO: 400621 - RNA, 19 nt, Artificial Sequence
  Description of Artificial Sequence: Synthetic oligonucleotide
uuugacaguuuagcacguc

SEQ ID NO: 400622 - RNA, 19 nt, Artificial Sequence
  Description of Artificial Sequence: Synthetic oligonucleotide
cugcaugagaugaucugaa

SEQ ID NO: 400623 - RNA, 19 nt, Artificial Sequence
  Description of Artificial Sequence: Synthetic oligonucleotide
gucugcccgaggguuaggg

SEQ ID NO: 400624 - RNA, 19 nt, Artificial Sequence
  Description of Artificial Sequence: Synthetic oligonucleotide
uggaauuggcaguguugau

SEQ ID NO: 400625 - RNA, 19 nt, Artificial Sequence
  Description of Artificial Sequence: Synthetic oligonucleotide
gcgaccauugagaagaaaa

SEQ ID NO: 400626 - RNA, 19 nt, Artificial Sequence
  Description of Artificial Sequence: Synthetic oligonucleotide
auggaacuaccgcuugcau

SEQ ID NO: 400627 - RNA, 19 nt, Artificial Sequence
  Description of Artificial Sequence: Synthetic oligonucleotide
cgucuuuugacaguuuagc

SEQ ID NO: 400628 - RNA, 19 nt, Artificial Sequence
  Description of Artificial Sequence: Synthetic oligonucleotide
gaguggguaucaccacuuc

SEQ ID NO: 400629 - RNA, 19 nt, Artificial Sequence
  Description of Artificial Sequence: Synthetic oligonucleotide
cucguucuaaaauaccuuu

SEQ ID NO: 400630 - RNA, 19 nt, Artificial Sequence
  Description of Artificial Sequence: Synthetic oligonucleotide
cuccacggcugcgacaagc

SEQ ID NO: 400631 - RNA, 19 nt, Artificial Sequence
  Description of Artificial Sequence: Synthetic oligonucleotide
ggcugcgacaagcccaugc

SEQ ID NO: 400632 - RNA, 19 nt, Artificial Sequence
  Description of Artificial Sequence: Synthetic oligonucleotide
ucucggaguugcugacaug

SEQ ID NO: 400633 - RNA, 19 nt, Artificial Sequence
  Description of Artificial Sequence: Synthetic oligonucleotide
aguguaguucgaugcuguu

SEQ ID NO: 400634 - RNA, 19 nt, Artificial Sequence
  Description of Artificial Sequence: Synthetic oligonucleotide
gggaacaccuuuuaccaua

SEQ ID NO: 400635 - RNA, 19 nt, Artificial Sequence
  Description of Artificial Sequence: Synthetic oligonucleotide
augugccccggagucacuc

SEQ ID NO: 400636 - RNA, 19 nt, Artificial Sequence
  Description of Artificial Sequence: Synthetic oligonucleotide
caaccuccucaccauuuuc

SEQ ID NO: 400637 - RNA, 19 nt, Artificial Sequence
  Description of Artificial Sequence: Synthetic oligonucleotide
uaggacggucagacacaag

SEQ ID NO: 400638 - RNA, 19 nt, Artificial Sequence
  Description of Artificial Sequence: Synthetic oligonucleotide
ggucuagaaaaggaguuaa

SEQ ID NO: 400639 - RNA, 19 nt, Artificial Sequence
  Description of Artificial Sequence: Synthetic oligonucleotide
ggcaaagaggagccuaaga

SEQ ID NO: 400640 - RNA, 19 nt, Artificial Sequence
  Description of Artificial Sequence: Synthetic oligonucleotide
guagcgaggugccgcccag

SEQ ID NO: 400641 - RNA, 19 nt, Artificial Sequence
  Description of Artificial Sequence: Synthetic oligonucleotide
gaaucaggugaguccuuua

SEQ ID NO: 400642 - RNA, 19 nt, Artificial Sequence
  Description of Artificial Sequence: Synthetic oligonucleotide
agcgggaucucuagacuug

SEQ ID NO: 400643 - RNA, 19 nt, Artificial Sequence
  Description of Artificial Sequence: Synthetic oligonucleotide
uaccgcuugcauguugaaa

SEQ ID NO: 400644 - RNA, 19 nt, Artificial Sequence
  Description of Artificial Sequence: Synthetic oligonucleotide
ggacaaaucucaaauguau

SEQ ID NO: 400645 - RNA, 19 nt, Artificial Sequence
  Description of Artificial Sequence: Synthetic oligonucleotide
cuaucuucaccaaccgggu

SEQ ID NO: 400646 - RNA, 19 nt, Artificial Sequence
  Description of Artificial Sequence: Synthetic oligonucleotide
uaucgucuuuugacaguuu

SEQ ID NO: 400647 - RNA, 19 nt, Artificial Sequence
  Description of Artificial Sequence: Synthetic oligonucleotide
ggaaggcggaucuucuaga

SEQ ID NO: 400648 - RNA, 19 nt, Artificial Sequence
  Description of Artificial Sequence: Synthetic oligonucleotide
cauaucaaccaaguuguau

SEQ ID NO: 400649 - RNA, 19 nt, Artificial Sequence
  Description of Artificial Sequence: Synthetic oligonucleotide
uggucgaggccaagucaaa

SEQ ID NO: 400650 - RNA, 19 nt, Artificial Sequence
  Description of Artificial Sequence: Synthetic oligonucleotide
augguggucgaggccaagu

SEQ ID NO: 400651 - RNA, 19 nt, Artificial Sequence
  Description of Artificial Sequence: Synthetic oligonucleotide
agcaugcguacaugacuau

SEQ ID NO: 400652 - RNA, 19 nt, Artificial Sequence
  Description of Artificial Sequence: Synthetic oligonucleotide
guaauccgguagucuguca

SEQ ID NO: 400653 - RNA, 19 nt, Artificial Sequence
  Description of Artificial Sequence: Synthetic oligonucleotide
guuccacaugaugcgguac

SEQ ID NO: 400654 - RNA, 19 nt, Artificial Sequence
  Description of Artificial Sequence: Synthetic oligonucleotide
gcugcgacaagcccaugca

SEQ ID NO: 400655 - RNA, 19 nt, Artificial Sequence
  Description of Artificial Sequence: Synthetic oligonucleotide
uucagacguccagcaaacu

SEQ ID NO: 400656 - RNA, 19 nt, Artificial Sequence
  Description of Artificial Sequence: Synthetic oligonucleotide
ggcaguguugauucuguua

SEQ ID NO: 400657 - RNA, 19 nt, Artificial Sequence
  Description of Artificial Sequence: Synthetic oligonucleotide
gaauggaucgagagcugcu

SEQ ID NO: 400658 - RNA, 19 nt, Artificial Sequence
  Description of Artificial Sequence: Synthetic oligonucleotide
ccgacacgccaucagacac

SEQ ID NO: 400659 - RNA, 19 nt, Artificial Sequence
  Description of Artificial Sequence: Synthetic oligonucleotide
gcuccagugcaauagugua

SEQ ID NO: 400660 - RNA, 19 nt, Artificial Sequence
  Description of Artificial Sequence: Synthetic oligonucleotide
uccauguguggcgucucau

SEQ ID NO: 400661 - RNA, 19 nt, Artificial Sequence
  Description of Artificial Sequence: Synthetic oligonucleotide
aaucuacgugcgcgucuuu

SEQ ID NO: 400662 - RNA, 19 nt, Artificial Sequence
  Description of Artificial Sequence: Synthetic oligonucleotide
gguaccaacuguagaaaua

SEQ ID NO: 400663 - RNA, 19 nt, Artificial Sequence
  Description of Artificial Sequence: Synthetic oligonucleotide
gucgaggccaagucaaaau

SEQ ID NO: 400664 - RNA, 19 nt, Artificial Sequence
  Description of Artificial Sequence: Synthetic oligonucleotide
ggagucacucacaaugaaa

SEQ ID NO: 400665 - RNA, 19 nt, Artificial Sequence
  Description of Artificial Sequence: Synthetic oligonucleotide
ggcaacauagcuauauaau

SEQ ID NO: 400666 - RNA, 19 nt, Artificial Sequence
  Description of Artificial Sequence: Synthetic oligonucleotide
ggguaggugugaaucaaga

SEQ ID NO: 400667 - RNA, 19 nt, Artificial Sequence
  Description of Artificial Sequence: Synthetic oligonucleotide
caccaaccggguaggugug

SEQ ID NO: 400668 - RNA, 19 nt, Artificial Sequence
  Description of Artificial Sequence: Synthetic oligonucleotide
cacaauaacacuggcuaau

SEQ ID NO: 400669 - RNA, 19 nt, Artificial Sequence
  Description of Artificial Sequence: Synthetic oligonucleotide
cucugacaagcguuucuaa

SEQ ID NO: 400670 - RNA, 19 nt, Artificial Sequence
  Description of Artificial Sequence: Synthetic oligonucleotide
gguuugcuccgacacgcca

SEQ ID NO: 400671 - RNA, 19 nt, Artificial Sequence
  Description of Artificial Sequence: Synthetic oligonucleotide
caaccaaguuguauaucgu

SEQ ID NO: 400672 - RNA, 19 nt, Artificial Sequence
  Description of Artificial Sequence: Synthetic oligonucleotide
gaaguagcuccacgucgua

SEQ ID NO: 400673 - RNA, 19 nt, Artificial Sequence
  Description of Artificial Sequence: Synthetic oligonucleotide
ugcgcgucuuuguggugaa

SEQ ID NO: 400674 - RNA, 19 nt, Artificial Sequence
  Description of Artificial Sequence: Synthetic oligonucleotide
gcguacaugacuaucacuu

SEQ ID NO: 400675 - RNA, 19 nt, Artificial Sequence
  Description of Artificial Sequence: Synthetic oligonucleotide
auaaggacauuggcccuuu

SEQ ID NO: 400676 - RNA, 19 nt, Artificial Sequence
  Description of Artificial Sequence: Synthetic oligonucleotide
auuuuauaucuggggucua

SEQ ID NO: 400677 - RNA, 19 nt, Artificial Sequence
  Description of Artificial Sequence: Synthetic oligonucleotide
aguaacguucgagccucau

SEQ ID NO: 400678 - RNA, 19 nt, Artificial Sequence
  Description of Artificial Sequence: Synthetic oligonucleotide
gugcgcgucuuugugguga

SEQ ID NO: 400679 - RNA, 19 nt, Artificial Sequence
  Description of Artificial Sequence: Synthetic oligonucleotide
ggacuucacuggucaaaac

SEQ ID NO: 400680 - RNA, 19 nt, Artificial Sequence
  Description of Artificial Sequence: Synthetic oligonucleotide
acacuggcuaauggaacua

SEQ ID NO: 400681 - RNA, 19 nt, Artificial Sequence
  Description of Artificial Sequence: Synthetic oligonucleotide
uaaggacauuggcccuuua

SEQ ID NO: 400682 - RNA, 19 nt, Artificial Sequence
  Description of Artificial Sequence: Synthetic oligonucleotide
ucuccacggcugcgacaag

SEQ ID NO: 400683 - RNA, 19 nt, Artificial Sequence
  Description of Artificial Sequence: Synthetic oligonucleotide
gggccaguaacgagugugc

SEQ ID NO: 400684 - RNA, 19 nt, Artificial Sequence
  Description of Artificial Sequence: Synthetic oligonucleotide
guucgaugcuguugguccu

SEQ ID NO: 400685 - RNA, 19 nt, Artificial Sequence
  Description of Artificial Sequence: Synthetic oligonucleotide
ggaaaucuacgugcgcguc

SEQ ID NO: 400686 - RNA, 19 nt, Artificial Sequence
  Description of Artificial Sequence: Synthetic oligonucleotide
uugcacguuccagcgggau

SEQ ID NO: 400687 - RNA, 19 nt, Artificial Sequence
  Description of Artificial Sequence: Synthetic oligonucleotide
gcguuucuaacucguucca

SEQ ID NO: 400688 - RNA, 19 nt, Artificial Sequence
  Description of Artificial Sequence: Synthetic oligonucleotide
ucgucucuuuuagggcccu

SEQ ID NO: 400689 - RNA, 19 nt, Artificial Sequence
  Description of Artificial Sequence: Synthetic oligonucleotide
gguagcgaggugccgccca

SEQ ID NO: 400690 - RNA, 19 nt, Artificial Sequence
  Description of Artificial Sequence: Synthetic oligonucleotide
cccucguucuaaaauaccu

SEQ ID NO: 400691 - RNA, 19 nt, Artificial Sequence
  Description of Artificial Sequence: Synthetic oligonucleotide
ggaauuggcaguguugauu

SEQ ID NO: 400692 - RNA, 19 nt, Artificial Sequence
  Description of Artificial Sequence: Synthetic oligonucleotide
guucgggguccuccaguca

SEQ ID NO: 400693 - RNA, 19 nt, Artificial Sequence
  Description of Artificial Sequence: Synthetic oligonucleotide
uugcuccgacacgccauca

SEQ ID NO: 400694 - RNA, 19 nt, Artificial Sequence
  Description of Artificial Sequence: Synthetic oligonucleotide
uggccgcggcuucuccggc

SEQ ID NO: 400695 - RNA, 19 nt, Artificial Sequence
  Description of Artificial Sequence: Synthetic oligonucleotide
cuagacuugcauccauuuu

SEQ ID NO: 400696 - RNA, 19 nt, Artificial Sequence
  Description of Artificial Sequence: Synthetic oligonucleotide
cagcucggacacuguggac

SEQ ID NO: 400697 - RNA, 19 nt, Artificial Sequence
  Description of Artificial Sequence: Synthetic oligonucleotide
gcaugcguacaugacuauc

SEQ ID NO: 400698 - RNA, 19 nt, Artificial Sequence
  Description of Artificial Sequence: Synthetic oligonucleotide
ugguagcgaggugccgccc

SEQ ID NO: 400699 - RNA, 19 nt, Artificial Sequence
  Description of Artificial Sequence: Synthetic oligonucleotide
gggaucucuagacuugcau

SEQ ID NO: 400700 - RNA, 19 nt, Artificial Sequence
  Description of Artificial Sequence: Synthetic oligonucleotide
acacgccaucagacacucc

SEQ ID NO: 400701 - RNA, 19 nt, Artificial Sequence
  Description of Artificial Sequence: Synthetic oligonucleotide
gugcaauaguguaguucga

SEQ ID NO: 400702 - RNA, 19 nt, Artificial Sequence
  Description of Artificial Sequence: Synthetic oligonucleotide
guucgagccucauguuggu

SEQ ID NO: 400703 - RNA, 19 nt, Artificial Sequence
  Description of Artificial Sequence: Synthetic oligonucleotide
gcgggaucucuagacuugc

SEQ ID NO: 400704 - RNA, 19 nt, Artificial Sequence
  Description of Artificial Sequence: Synthetic oligonucleotide
gcgucucauccauuucaac

SEQ ID NO: 400705 - RNA, 19 nt, Artificial Sequence
  Description of Artificial Sequence: Synthetic oligonucleotide
agcgaccauugagaagaaa

SEQ ID NO: 400706 - RNA, 19 nt, Artificial Sequence
  Description of Artificial Sequence: Synthetic oligonucleotide
gcuaauggaacuaccgcuu

SEQ ID NO: 400707 - RNA, 19 nt, Artificial Sequence
  Description of Artificial Sequence: Synthetic oligonucleotide
gguuaccgucucuuuaaau

SEQ ID NO: 400708 - RNA, 19 nt, Artificial Sequence
  Description of Artificial Sequence: Synthetic oligonucleotide
cuaccgcuugcauguugaa

SEQ ID NO: 400709 - RNA, 19 nt, Artificial Sequence
  Description of Artificial Sequence: Synthetic oligonucleotide
gggucugcccgaggguuag

SEQ ID NO: 400710 - RNA, 19 nt, Artificial Sequence
  Description of Artificial Sequence: Synthetic oligonucleotide
accaaccggguagguguga

SEQ ID NO: 400711 - RNA, 19 nt, Artificial Sequence
  Description of Artificial Sequence: Synthetic oligonucleotide
ggguuaccgucucuuuaaa

SEQ ID NO: 400712 - RNA, 19 nt, Artificial Sequence
  Description of Artificial Sequence: Synthetic oligonucleotide
ggucgaggccaagucaaaa

SEQ ID NO: 400713 - RNA, 19 nt, Artificial Sequence
  Description of Artificial Sequence: Synthetic oligonucleotide
cuaacucguuccacaugau

SEQ ID NO: 400714 - RNA, 19 nt, Artificial Sequence
  Description of Artificial Sequence: Synthetic oligonucleotide
ggcgucucauccauuucaa

SEQ ID NO: 400715 - RNA, 19 nt, Artificial Sequence
  Description of Artificial Sequence: Synthetic oligonucleotide
gaguaacguucgagccuca

SEQ ID NO: 400716 - RNA, 19 nt, Artificial Sequence
  Description of Artificial Sequence: Synthetic oligonucleotide
caagcguuucuaacucguu

SEQ ID NO: 400717 - RNA, 19 nt, Artificial Sequence
  Description of Artificial Sequence: Synthetic oligonucleotide
gcaagcuuguuaugcucau

SEQ ID NO: 400718 - RNA, 19 nt, Artificial Sequence
  Description of Artificial Sequence: Synthetic oligonucleotide
gcggaucuucuagaaugga

SEQ ID NO: 400719 - RNA, 19 nt, Artificial Sequence
  Description of Artificial Sequence: Synthetic oligonucleotide
cgguagucugucacucuuc

SEQ ID NO: 400720 - RNA, 19 nt, Artificial Sequence
  Description of Artificial Sequence: Synthetic oligonucleotide
cucgcucugcauucuccau

SEQ ID NO: 400721 - RNA, 19 nt, Artificial Sequence
  Description of Artificial Sequence: Synthetic oligonucleotide
ccucguucuaaaauaccuu

SEQ ID NO: 400722 - RNA, 19 nt, Artificial Sequence
  Description of Artificial Sequence: Synthetic oligonucleotide
ggaaucaggugaguccuuu

SEQ ID NO: 400723 - RNA, 19 nt, Artificial Sequence
  Description of Artificial Sequence: Synthetic oligonucleotide
ccucuauucccaacucgcu

SEQ ID NO: 400724 - RNA, 19 nt, Artificial Sequence
  Description of Artificial Sequence: Synthetic oligonucleotide
gccaguaacgagugugcuu

SEQ ID NO: 400725 - RNA, 19 nt, Artificial Sequence
  Description of Artificial Sequence: Synthetic oligonucleotide
ggucuacuauuuacaucua

SEQ ID NO: 400726 - RNA, 19 nt, Artificial Sequence
  Description of Artificial Sequence: Synthetic oligonucleotide
ggucugcccgaggguuagg

SEQ ID NO: 400727 - RNA, 19 nt, Artificial Sequence
  Description of Artificial Sequence: Synthetic oligonucleotide
ggccaguaacgagugugcu

SEQ ID NO: 400728 - RNA, 19 nt, Artificial Sequence
  Description of Artificial Sequence: Synthetic oligonucleotide
ccagcgggaucucuagacu

SEQ ID NO: 400729 - RNA, 19 nt, Artificial Sequence
  Description of Artificial Sequence: Synthetic oligonucleotide
cacgucguaguuggcggau

SEQ ID NO: 400730 - RNA, 19 nt, Artificial Sequence
  Description of Artificial Sequence: Synthetic oligonucleotide
cguuccacaugaugcggua

SEQ ID NO: 400731 - RNA, 19 nt, Artificial Sequence
  Description of Artificial Sequence: Synthetic oligonucleotide
gaacuaccgcuugcauguu

SEQ ID NO: 400732 - RNA, 19 nt, Artificial Sequence
  Description of Artificial Sequence: Synthetic oligonucleotide
ccaaccggguaggugugaa

SEQ ID NO: 400733 - RNA, 19 nt, Artificial Sequence
  Description of Artificial Sequence: Synthetic oligonucleotide
caugugccccggagucacu

SEQ ID NO: 400734 - RNA, 19 nt, Artificial Sequence
  Description of Artificial Sequence: Synthetic oligonucleotide
cguacaugacuaucacuuu

SEQ ID NO: 400735 - RNA, 19 nt, Artificial Sequence
  Description of Artificial Sequence: Synthetic oligonucleotide
gcgcgucuuuguggugaag

SEQ ID NO: 400736 - RNA, 19 nt, Artificial Sequence
  Description of Artificial Sequence: Synthetic oligonucleotide
cgcgucuuuguggugaagu

SEQ ID NO: 400737 - RNA, 19 nt, Artificial Sequence
  Description of Artificial Sequence: Synthetic oligonucleotide
cgugcgcgucuuuguggug

SEQ ID NO: 400738 - RNA, 19 nt, Artificial Sequence
  Description of Artificial Sequence: Synthetic oligonucleotide
ccgguagucugucacucuu

SEQ ID NO: 400739 - RNA, 19 nt, Artificial Sequence
  Description of Artificial Sequence: Synthetic oligonucleotide
ccaugagcuccuguaaguu

SEQ ID NO: 400740 - RNA, 19 nt, Artificial Sequence
  Description of Artificial Sequence: Synthetic oligonucleotide
cgggaucucuagacuugca

SEQ ID NO: 400741 - RNA, 19 nt, Artificial Sequence
  Description of Artificial Sequence: Synthetic oligonucleotide
cgacacgccaucagacacu

SEQ ID NO: 400742 - RNA, 19 nt, Artificial Sequence
  Description of Artificial Sequence: Synthetic oligonucleotide
cgauaugcuccagugcaau

SEQ ID NO: 400743 - RNA, 19 nt, Artificial Sequence
  Description of Artificial Sequence: Synthetic oligonucleotide
ccaacucgcucugcauucu

SEQ ID NO: 400744 - RNA, 19 nt, Artificial Sequence
  Description of Artificial Sequence: Synthetic oligonucleotide
ccagugcaauaguguaguu

SEQ ID NO: 400745 - RNA, 19 nt, Artificial Sequence
  Description of Artificial Sequence: Synthetic oligonucleotide
gcgguacugcucgucucuu

SEQ ID NO: 400746 - RNA, 19 nt, Artificial Sequence
  Description of Artificial Sequence: Synthetic oligonucleotide
ccccggagucacucacaau

SEQ ID NO: 400747 - RNA, 19 nt, Artificial Sequence
  Description of Artificial Sequence: Synthetic oligonucleotide
ucugaaacgucucugggcg

SEQ ID NO: 400748 - RNA, 19 nt, Artificial Sequence
  Description of Artificial Sequence: Synthetic oligonucleotide
aauguacuuaggcugggac

SEQ ID NO: 400749 - RNA, 19 nt, Artificial Sequence
  Description of Artificial Sequence: Synthetic oligonucleotide
cauaauauaggucuggcug

SEQ ID NO: 400750 - RNA, 19 nt, Artificial Sequence
  Description of Artificial Sequence: Synthetic oligonucleotide
aauuggagcucauuguguc

SEQ ID NO: 400751 - RNA, 19 nt, Artificial Sequence
  Description of Artificial Sequence: Synthetic oligonucleotide
aaggaauuggagcucauug

SEQ ID NO: 400752 - RNA, 19 nt, Artificial Sequence
  Description of Artificial Sequence: Synthetic oligonucleotide
auaauauaggucuggcugg

SEQ ID NO: 400753 - RNA, 19 nt, Artificial Sequence
  Description of Artificial Sequence: Synthetic oligonucleotide
guaaagcagacacacagcg

SEQ ID NO: 400754 - RNA, 19 nt, Artificial Sequence
  Description of Artificial Sequence: Synthetic oligonucleotide
uguucaaccgagcuggcgg

SEQ ID NO: 400755 - RNA, 19 nt, Artificial Sequence
  Description of Artificial Sequence: Synthetic oligonucleotide
agauggugcagacagguac

SEQ ID NO: 400756 - RNA, 19 nt, Artificial Sequence
  Description of Artificial Sequence: Synthetic oligonucleotide
aguacuugauaacugcgcg

SEQ ID NO: 400757 - RNA, 19 nt, Artificial Sequence
  Description of Artificial Sequence: Synthetic oligonucleotide
uuucucaacgucuugaaaa

SEQ ID NO: 400758 - RNA, 19 nt, Artificial Sequence
  Description of Artificial Sequence: Synthetic oligonucleotide
gaucguuccauccuuguag

SEQ ID NO: 400759 - RNA, 19 nt, Artificial Sequence
  Description of Artificial Sequence: Synthetic oligonucleotide
guugagcuuaucuacaaag

SEQ ID NO: 400760 - RNA, 19 nt, Artificial Sequence
  Description of Artificial Sequence: Synthetic oligonucleotide
gacuguucaaccgagcugg

SEQ ID NO: 400761 - RNA, 19 nt, Artificial Sequence
  Description of Artificial Sequence: Synthetic oligonucleotide
uguagaguaagaugggcug

SEQ ID NO: 400762 - RNA, 19 nt, Artificial Sequence
  Description of Artificial Sequence: Synthetic oligonucleotide
gaagcgaagcaucaagucc

SEQ ID NO: 400763 - RNA, 19 nt, Artificial Sequence
  Description of Artificial Sequence: Synthetic oligonucleotide
cuuaacugcaucucccugg

SEQ ID NO: 400764 - RNA, 19 nt, Artificial Sequence
  Description of Artificial Sequence: Synthetic oligonucleotide
uauguagucgguccaagga

SEQ ID NO: 400765 - RNA, 19 nt, Artificial Sequence
  Description of Artificial Sequence: Synthetic oligonucleotide
cuucguuacuuucucaacg

SEQ ID NO: 400766 - RNA, 19 nt, Artificial Sequence
  Description of Artificial Sequence: Synthetic oligonucleotide
auuaccaggcccugcgucc

SEQ ID NO: 400767 - RNA, 19 nt, Artificial Sequence
  Description of Artificial Sequence: Synthetic oligonucleotide
aaugccagucucacaaacc

SEQ ID NO: 400768 - RNA, 19 nt, Artificial Sequence
  Description of Artificial Sequence: Synthetic oligonucleotide
uaucuggcgacuuuucucc

SEQ ID NO: 400769 - RNA, 19 nt, Artificial Sequence
  Description of Artificial Sequence: Synthetic oligonucleotide
uauacgccugucaaacgcg

SEQ ID NO: 400770 - RNA, 19 nt, Artificial Sequence
  Description of Artificial Sequence: Synthetic oligonucleotide
ugucaugucugaaacgucu

SEQ ID NO: 400771 - RNA, 19 nt, Artificial Sequence
  Description of Artificial Sequence: Synthetic oligonucleotide
agugccauauugcuggguc

SEQ ID NO: 400772 - RNA, 19 nt, Artificial Sequence
  Description of Artificial Sequence: Synthetic oligonucleotide
uggacgacacuucugaggu

SEQ ID NO: 400773 - RNA, 19 nt, Artificial Sequence
  Description of Artificial Sequence: Synthetic oligonucleotide
uauucauaauauaggucug

SEQ ID NO: 400774 - RNA, 19 nt, Artificial Sequence
  Description of Artificial Sequence: Synthetic oligonucleotide
accugauucugaucguucc

SEQ ID NO: 400775 - RNA, 19 nt, Artificial Sequence
  Description of Artificial Sequence: Synthetic oligonucleotide
agcuuaucuacaaaguuuc

SEQ ID NO: 400776 - RNA, 19 nt, Artificial Sequence
  Description of Artificial Sequence: Synthetic oligonucleotide
acgaaagacuguucaaccg

SEQ ID NO: 400777 - RNA, 19 nt, Artificial Sequence
  Description of Artificial Sequence: Synthetic oligonucleotide
cuugucuaugaacacagug

SEQ ID NO: 400778 - RNA, 19 nt, Artificial Sequence
  Description of Artificial Sequence: Synthetic oligonucleotide
auacaugguggucagguug

SEQ ID NO: 400779 - RNA, 19 nt, Artificial Sequence
  Description of Artificial Sequence: Synthetic oligonucleotide
aguauucauaauauagguc

SEQ ID NO: 400780 - RNA, 19 nt, Artificial Sequence
  Description of Artificial Sequence: Synthetic oligonucleotide
ucugcuaucaggugucaug

SEQ ID NO: 400781 - RNA, 19 nt, Artificial Sequence
  Description of Artificial Sequence: Synthetic oligonucleotide
aguuccggcagcuaaugag

SEQ ID NO: 400782 - RNA, 19 nt, Artificial Sequence
  Description of Artificial Sequence: Synthetic oligonucleotide
cuauacgccugucaaacgc

SEQ ID NO: 400783 - RNA, 19 nt, Artificial Sequence
  Description of Artificial Sequence: Synthetic oligonucleotide
aacgcguuuccugaucccc

SEQ ID NO: 400784 - RNA, 19 nt, Artificial Sequence
  Description of Artificial Sequence: Synthetic oligonucleotide
uaaugaguugcuucagccc

SEQ ID NO: 400785 - RNA, 19 nt, Artificial Sequence
  Description of Artificial Sequence: Synthetic oligonucleotide
acaggcucaucuuuugagg

SEQ ID NO: 400786 - RNA, 19 nt, Artificial Sequence
  Description of Artificial Sequence: Synthetic oligonucleotide
agaaugcgcaucgaaaagg

SEQ ID NO: 400787 - RNA, 19 nt, Artificial Sequence
  Description of Artificial Sequence: Synthetic oligonucleotide
ucuaugaacacagugccau

SEQ ID NO: 400788 - RNA, 19 nt, Artificial Sequence
  Description of Artificial Sequence: Synthetic oligonucleotide
aagcaucaaguccuuaacu

SEQ ID NO: 400789 - RNA, 19 nt, Artificial Sequence
  Description of Artificial Sequence: Synthetic oligonucleotide
agaccauuauuuuacccug

SEQ ID NO: 400790 - RNA, 19 nt, Artificial Sequence
  Description of Artificial Sequence: Synthetic oligonucleotide
aaacgcguuuccugauccc

SEQ ID NO: 400791 - RNA, 19 nt, Artificial Sequence
  Description of Artificial Sequence: Synthetic oligonucleotide
uugagcuuaucuacaaagu

SEQ ID NO: 400792 - RNA, 19 nt, Artificial Sequence
  Description of Artificial Sequence: Synthetic oligonucleotide
gaaugcgcaucgaaaaggg

SEQ ID NO: 400793 - RNA, 19 nt, Artificial Sequence
  Description of Artificial Sequence: Synthetic oligonucleotide
cuugacccuauguagucgg

SEQ ID NO: 400794 - RNA, 19 nt, Artificial Sequence
  Description of Artificial Sequence: Synthetic oligonucleotide
uugauaacugcgcgguaag

SEQ ID NO: 400795 - RNA, 19 nt, Artificial Sequence
  Description of Artificial Sequence: Synthetic oligonucleotide
auguagucgguccaaggag

SEQ ID NO: 400796 - RNA, 19 nt, Artificial Sequence
  Description of Artificial Sequence: Synthetic oligonucleotide
ugucaaacgcguuuccuga

SEQ ID NO: 400797 - RNA, 19 nt, Artificial Sequence
  Description of Artificial Sequence: Synthetic oligonucleotide
aaguuauucuggccaaggu

SEQ ID NO: 400798 - RNA, 19 nt, Artificial Sequence
  Description of Artificial Sequence: Synthetic oligonucleotide
uguagucgguccaaggagu

SEQ ID NO: 400799 - RNA, 19 nt, Artificial Sequence
  Description of Artificial Sequence: Synthetic oligonucleotide
ugagcgucugcaaaguuau

SEQ ID NO: 400800 - RNA, 19 nt, Artificial Sequence
  Description of Artificial Sequence: Synthetic oligonucleotide
uuaacugcaucucccugga

SEQ ID NO: 400801 - RNA, 19 nt, Artificial Sequence
  Description of Artificial Sequence: Synthetic oligonucleotide
gguaguacuugauaacugc

SEQ ID NO: 400802 - RNA, 19 nt, Artificial Sequence
  Description of Artificial Sequence: Synthetic oligonucleotide
aaagacuguucaaccgagc

SEQ ID NO: 400803 - RNA, 19 nt, Artificial Sequence
  Description of Artificial Sequence: Synthetic oligonucleotide
aaaauguacuuaggcuggg

SEQ ID NO: 400804 - RNA, 19 nt, Artificial Sequence
  Description of Artificial Sequence: Synthetic oligonucleotide
aagcgaagcaucaaguccu

SEQ ID NO: 400805 - RNA, 19 nt, Artificial Sequence
  Description of Artificial Sequence: Synthetic oligonucleotide
ccaucugcgacucaaagcc

SEQ ID NO: 400806 - RNA, 19 nt, Artificial Sequence
  Description of Artificial Sequence: Synthetic oligonucleotide
uucguuacuuucucaacgu

SEQ ID NO: 400807 - RNA, 19 nt, Artificial Sequence
  Description of Artificial Sequence: Synthetic oligonucleotide
gaggaggacugacuggacg

SEQ ID NO: 400808 - RNA, 19 nt, Artificial Sequence
  Description of Artificial Sequence: Synthetic oligonucleotide
ucucacaaaccagagcugc

SEQ ID NO: 400809 - RNA, 19 nt, Artificial Sequence
  Description of Artificial Sequence: Synthetic oligonucleotide
uaagcaucuacagccagca

SEQ ID NO: 400810 - RNA, 19 nt, Artificial Sequence
  Description of Artificial Sequence: Synthetic oligonucleotide
gacgacacuucugaggucc

SEQ ID NO: 400811 - RNA, 19 nt, Artificial Sequence
  Description of Artificial Sequence: Synthetic oligonucleotide
guaguacuugauaacugcg

SEQ ID NO: 400812 - RNA, 19 nt, Artificial Sequence
  Description of Artificial Sequence: Synthetic oligonucleotide
gacccuauguagucggucc

SEQ ID NO: 400813 - RNA, 19 nt, Artificial Sequence
  Description of Artificial Sequence: Synthetic oligonucleotide
guacuugauaacugcgcgg

SEQ ID NO: 400814 - RNA, 19 nt, Artificial Sequence
  Description of Artificial Sequence: Synthetic oligonucleotide
cuggacgacacuucugagg

SEQ ID NO: 400815 - RNA, 19 nt, Artificial Sequence
  Description of Artificial Sequence: Synthetic oligonucleotide
uccagauuuccaaaggguu

SEQ ID NO: 400816 - RNA, 19 nt, Artificial Sequence
  Description of Artificial Sequence: Synthetic oligonucleotide
auggaauacagcacacggc

SEQ ID NO: 400817 - RNA, 19 nt, Artificial Sequence
  Description of Artificial Sequence: Synthetic oligonucleotide
gacucagggacguccagag

SEQ ID NO: 400818 - RNA, 19 nt, Artificial Sequence
  Description of Artificial Sequence: Synthetic oligonucleotide
uucgagagucuucggauga

SEQ ID NO: 400819 - RNA, 19 nt, Artificial Sequence
  Description of Artificial Sequence: Synthetic oligonucleotide
uggugcuacugaaacucgg

SEQ ID NO: 400820 - RNA, 19 nt, Artificial Sequence
  Description of Artificial Sequence: Synthetic oligonucleotide
uccuauacgccugucaaac

SEQ ID NO: 400821 - RNA, 19 nt, Artificial Sequence
  Description of Artificial Sequence: Synthetic oligonucleotide
gcuacugaaacucggagac

SEQ ID NO: 400822 - RNA, 19 nt, Artificial Sequence
  Description of Artificial Sequence: Synthetic oligonucleotide
gaaagacuguucaaccgag

SEQ ID NO: 400823 - RNA, 19 nt, Artificial Sequence
  Description of Artificial Sequence: Synthetic oligonucleotide
cuauguagucgguccaagg

SEQ ID NO: 400824 - RNA, 19 nt, Artificial Sequence
  Description of Artificial Sequence: Synthetic oligonucleotide
uuaugucuccaaucuggag

SEQ ID NO: 400825 - RNA, 19 nt, Artificial Sequence
  Description of Artificial Sequence: Synthetic oligonucleotide
cuuuggagacucagggacg

SEQ ID NO: 400826 - RNA, 19 nt, Artificial Sequence
  Description of Artificial Sequence: Synthetic oligonucleotide
cacacucuccaucaugugc

SEQ ID NO: 400827 - RNA, 19 nt, Artificial Sequence
  Description of Artificial Sequence: Synthetic oligonucleotide
caaggagucuguugugugg

SEQ ID NO: 400828 - RNA, 19 nt, Artificial Sequence
  Description of Artificial Sequence: Synthetic oligonucleotide
cacguaguccuucaucagg

SEQ ID NO: 400829 - RNA, 19 nt, Artificial Sequence
  Description of Artificial Sequence: Synthetic oligonucleotide
aucuacagccagcacguag

SEQ ID NO: 400830 - RNA, 19 nt, Artificial Sequence
  Description of Artificial Sequence: Synthetic oligonucleotide
uggggaaacaccugauucu

SEQ ID NO: 400831 - RNA, 19 nt, Artificial Sequence
  Description of Artificial Sequence: Synthetic oligonucleotide
ugaaacucggagacuuuac

SEQ ID NO: 400832 - RNA, 19 nt, Artificial Sequence
  Description of Artificial Sequence: Synthetic oligonucleotide
acagcggcguuguuguugg

SEQ ID NO: 400833 - RNA, 19 nt, Artificial Sequence
  Description of Artificial Sequence: Synthetic oligonucleotide
ugcgcaucgaaaaggggac

SEQ ID NO: 400834 - RNA, 19 nt, Artificial Sequence
  Description of Artificial Sequence: Synthetic oligonucleotide
uacuugauaacugcgcggu

SEQ ID NO: 400835 - RNA, 19 nt, Artificial Sequence
  Description of Artificial Sequence: Synthetic oligonucleotide
caaacgcguuuccugaucc

SEQ ID NO: 400836 - RNA, 19 nt, Artificial Sequence
  Description of Artificial Sequence: Synthetic oligonucleotide
uggguaguacuugauaacu

SEQ ID NO: 400837 - RNA, 19 nt, Artificial Sequence
  Description of Artificial Sequence: Synthetic oligonucleotide
auauugcugggucgcuacc

SEQ ID NO: 400838 - RNA, 19 nt, Artificial Sequence
  Description of Artificial Sequence: Synthetic oligonucleotide
ggaauuggagcucauugug

SEQ ID NO: 400839 - RNA, 19 nt, Artificial Sequence
  Description of Artificial Sequence: Synthetic oligonucleotide
gauaacugcgcgguaagca

SEQ ID NO: 400840 - RNA, 19 nt, Artificial Sequence
  Description of Artificial Sequence: Synthetic oligonucleotide
gacuggacgacacuucuga

SEQ ID NO: 400841 - RNA, 19 nt, Artificial Sequence
  Description of Artificial Sequence: Synthetic oligonucleotide
ucuugacccuauguagucg

SEQ ID NO: 400842 - RNA, 19 nt, Artificial Sequence
  Description of Artificial Sequence: Synthetic oligonucleotide
cauccaacuucuucguuac

SEQ ID NO: 400843 - RNA, 19 nt, Artificial Sequence
  Description of Artificial Sequence: Synthetic oligonucleotide
auucugaucguuccauccu

SEQ ID NO: 400844 - RNA, 19 nt, Artificial Sequence
  Description of Artificial Sequence: Synthetic oligonucleotide
auguacuuaggcugggacu

SEQ ID NO: 400845 - RNA, 19 nt, Artificial Sequence
  Description of Artificial Sequence: Synthetic oligonucleotide
cauuacucaaggugucccc

SEQ ID NO: 400846 - RNA, 19 nt, Artificial Sequence
  Description of Artificial Sequence: Synthetic oligonucleotide
cauauugcugggucgcuac

SEQ ID NO: 400847 - RNA, 19 nt, Artificial Sequence
  Description of Artificial Sequence: Synthetic oligonucleotide
aagagcacgcucucaugca

SEQ ID NO: 400848 - RNA, 19 nt, Artificial Sequence
  Description of Artificial Sequence: Synthetic oligonucleotide
gacaguuugccauggaaua

SEQ ID NO: 400849 - RNA, 19 nt, Artificial Sequence
  Description of Artificial Sequence: Synthetic oligonucleotide
ucugaucguuccauccuug

SEQ ID NO: 400850 - RNA, 19 nt, Artificial Sequence
  Description of Artificial Sequence: Synthetic oligonucleotide
gacugcauggcaggcaggg

SEQ ID NO: 400851 - RNA, 19 nt, Artificial Sequence
  Description of Artificial Sequence: Synthetic oligonucleotide
uccaaucuggaggaggaug

SEQ ID NO: 400852 - RNA, 19 nt, Artificial Sequence
  Description of Artificial Sequence: Synthetic oligonucleotide
agagucagagaugagcaca

SEQ ID NO: 400853 - RNA, 19 nt, Artificial Sequence
  Description of Artificial Sequence: Synthetic oligonucleotide
auaacugcgcgguaagcau

SEQ ID NO: 400854 - RNA, 19 nt, Artificial Sequence
  Description of Artificial Sequence: Synthetic oligonucleotide
caggugucaugucugaaac

SEQ ID NO: 400855 - RNA, 19 nt, Artificial Sequence
  Description of Artificial Sequence: Synthetic oligonucleotide
agacuguucaaccgagcug

SEQ ID NO: 400856 - RNA, 19 nt, Artificial Sequence
  Description of Artificial Sequence: Synthetic oligonucleotide
uggcgguuaagacuucucu

SEQ ID NO: 400857 - RNA, 19 nt, Artificial Sequence
  Description of Artificial Sequence: Synthetic oligonucleotide
acacuucugagguccguuc

SEQ ID NO: 400858 - RNA, 19 nt, Artificial Sequence
  Description of Artificial Sequence: Synthetic oligonucleotide
aggaggacugacuggacga

SEQ ID NO: 400859 - RNA, 19 nt, Artificial Sequence
  Description of Artificial Sequence: Synthetic oligonucleotide
acacaggucgaccgccgcc

SEQ ID NO: 400860 - RNA, 19 nt, Artificial Sequence
  Description of Artificial Sequence: Synthetic oligonucleotide
cagaaugcgcaucgaaaag

SEQ ID NO: 400861 - RNA, 19 nt, Artificial Sequence
  Description of Artificial Sequence: Synthetic oligonucleotide
uucucacccaggaagcgaa

SEQ ID NO: 400862 - RNA, 19 nt, Artificial Sequence
  Description of Artificial Sequence: Synthetic oligonucleotide
ucaagguguccccugcuuc

SEQ ID NO: 400863 - RNA, 19 nt, Artificial Sequence
  Description of Artificial Sequence: Synthetic oligonucleotide
ugcucguugagcuuaucua

SEQ ID NO: 400864 - RNA, 19 nt, Artificial Sequence
  Description of Artificial Sequence: Synthetic oligonucleotide
uacucaagguguccccugc

SEQ ID NO: 400865 - RNA, 19 nt, Artificial Sequence
  Description of Artificial Sequence: Synthetic oligonucleotide
aauauaggucuggcugguc

SEQ ID NO: 400866 - RNA, 19 nt, Artificial Sequence
  Description of Artificial Sequence: Synthetic oligonucleotide
agagcacgcucucaugcag

SEQ ID NO: 400867 - RNA, 19 nt, Artificial Sequence
  Description of Artificial Sequence: Synthetic oligonucleotide
gaugcggccaauaccacuc

SEQ ID NO: 400868 - RNA, 19 nt, Artificial Sequence
  Description of Artificial Sequence: Synthetic oligonucleotide
ucucaugcagguagugccu

SEQ ID NO: 400869 - RNA, 19 nt, Artificial Sequence
  Description of Artificial Sequence: Synthetic oligonucleotide
guaucuggcgacuuuucuc

SEQ ID NO: 400870 - RNA, 19 nt, Artificial Sequence
  Description of Artificial Sequence: Synthetic oligonucleotide
auagccuuguccgugggcu

SEQ ID NO: 400871 - RNA, 19 nt, Artificial Sequence
  Description of Artificial Sequence: Synthetic oligonucleotide
cuggguaguacuugauaac

SEQ ID NO: 400872 - RNA, 19 nt, Artificial Sequence
  Description of Artificial Sequence: Synthetic oligonucleotide
uguugugugguuggugggc

SEQ ID NO: 400873 - RNA, 19 nt, Artificial Sequence
  Description of Artificial Sequence: Synthetic oligonucleotide
uucggaugaggguuccuca

SEQ ID NO: 400874 - RNA, 19 nt, Artificial Sequence
  Description of Artificial Sequence: Synthetic oligonucleotide
ugcguugagucuucuuuga

SEQ ID NO: 400875 - RNA, 19 nt, Artificial Sequence
  Description of Artificial Sequence: Synthetic oligonucleotide
ugagcuugcccagguaaag

SEQ ID NO: 400876 - RNA, 19 nt, Artificial Sequence
  Description of Artificial Sequence: Synthetic oligonucleotide
cagaaacaaguguggcugg

SEQ ID NO: 400877 - RNA, 19 nt, Artificial Sequence
  Description of Artificial Sequence: Synthetic oligonucleotide
gaaggggucgucacucccg

SEQ ID NO: 400878 - RNA, 19 nt, Artificial Sequence
  Description of Artificial Sequence: Synthetic oligonucleotide
ugcuccuauacgccuguca

SEQ ID NO: 400879 - RNA, 19 nt, Artificial Sequence
  Description of Artificial Sequence: Synthetic oligonucleotide
acuuuaccaucugcgacuc

SEQ ID NO: 400880 - RNA, 19 nt, Artificial Sequence
  Description of Artificial Sequence: Synthetic oligonucleotide
aucguuccauccuuguaga

SEQ ID NO: 400881 - RNA, 19 nt, Artificial Sequence
  Description of Artificial Sequence: Synthetic oligonucleotide
gugcuacugaaacucggag

SEQ ID NO: 400882 - RNA, 19 nt, Artificial Sequence
  Description of Artificial Sequence: Synthetic oligonucleotide
uuacucaagguguccccug

SEQ ID NO: 400883 - RNA, 19 nt, Artificial Sequence
  Description of Artificial Sequence: Synthetic oligonucleotide
gaaacaccugauucugauc

SEQ ID NO: 400884 - RNA, 19 nt, Artificial Sequence
  Description of Artificial Sequence: Synthetic oligonucleotide
ucaaacgcguuuccugauc

SEQ ID NO: 400885 - RNA, 19 nt, Artificial Sequence
  Description of Artificial Sequence: Synthetic oligonucleotide
ugcgacucaaagccguccu

SEQ ID NO: 400886 - RNA, 19 nt, Artificial Sequence
  Description of Artificial Sequence: Synthetic oligonucleotide
aucuggcgacuuuucuccc

SEQ ID NO: 400887 - RNA, 19 nt, Artificial Sequence
  Description of Artificial Sequence: Synthetic oligonucleotide
gauaccuggcgggaacuag

SEQ ID NO: 400888 - RNA, 19 nt, Artificial Sequence
  Description of Artificial Sequence: Synthetic oligonucleotide
gucgcuaccuucaucagga

SEQ ID NO: 400889 - RNA, 19 nt, Artificial Sequence
  Description of Artificial Sequence: Synthetic oligonucleotide
uacccugcaguccauccaa

SEQ ID NO: 400890 - RNA, 19 nt, Artificial Sequence
  Description of Artificial Sequence: Synthetic oligonucleotide
aaauguacuuaggcuggga

SEQ ID NO: 400891 - RNA, 19 nt, Artificial Sequence
  Description of Artificial Sequence: Synthetic oligonucleotide
uaauauaggucuggcuggu

SEQ ID NO: 400892 - RNA, 19 nt, Artificial Sequence
  Description of Artificial Sequence: Synthetic oligonucleotide
cugcguugagucuucuuug

SEQ ID NO: 400893 - RNA, 19 nt, Artificial Sequence
  Description of Artificial Sequence: Synthetic oligonucleotide
cuggugcuacugaaacucg

SEQ ID NO: 400894 - RNA, 19 nt, Artificial Sequence
  Description of Artificial Sequence: Synthetic oligonucleotide
uaccuggcgggaacuaggc

SEQ ID NO: 400895 - RNA, 19 nt, Artificial Sequence
  Description of Artificial Sequence: Synthetic oligonucleotide
augcgcaucgaaaagggga

SEQ ID NO: 400896 - RNA, 19 nt, Artificial Sequence
  Description of Artificial Sequence: Synthetic oligonucleotide
gggcgugucgucuccaucg

SEQ ID NO: 400897 - RNA, 19 nt, Artificial Sequence
  Description of Artificial Sequence: Synthetic oligonucleotide
guuugugggguccauccuc

SEQ ID NO: 400898 - RNA, 19 nt, Artificial Sequence
  Description of Artificial Sequence: Synthetic oligonucleotide
ucccggcaaacacagccug

SEQ ID NO: 400899 - RNA, 19 nt, Artificial Sequence
  Description of Artificial Sequence: Synthetic oligonucleotide
uucugaucguuccauccuu

SEQ ID NO: 400900 - RNA, 19 nt, Artificial Sequence
  Description of Artificial Sequence: Synthetic oligonucleotide
ugcaaggagucuguugugu

SEQ ID NO: 400901 - RNA, 19 nt, Artificial Sequence
  Description of Artificial Sequence: Synthetic oligonucleotide
gagagucagagaugagcac

SEQ ID NO: 400902 - RNA, 19 nt, Artificial Sequence
  Description of Artificial Sequence: Synthetic oligonucleotide
guaagcaucuacagccagc

SEQ ID NO: 400903 - RNA, 19 nt, Artificial Sequence
  Description of Artificial Sequence: Synthetic oligonucleotide
auuacucaagguguccccu

SEQ ID NO: 400904 - RNA, 19 nt, Artificial Sequence
  Description of Artificial Sequence: Synthetic oligonucleotide
acggucuugacccuaugua

SEQ ID NO: 400905 - RNA, 19 nt, Artificial Sequence
  Description of Artificial Sequence: Synthetic oligonucleotide
ucguuacuuucucaacguc

SEQ ID NO: 400906 - RNA, 19 nt, Artificial Sequence
  Description of Artificial Sequence: Synthetic oligonucleotide
aacuugugagcgucugcaa

SEQ ID NO: 400907 - RNA, 19 nt, Artificial Sequence
  Description of Artificial Sequence: Synthetic oligonucleotide
acuggacgacacuucugag

SEQ ID NO: 400908 - RNA, 19 nt, Artificial Sequence
  Description of Artificial Sequence: Synthetic oligonucleotide
auaccuggcgggaacuagg

SEQ ID NO: 400909 - RNA, 19 nt, Artificial Sequence
  Description of Artificial Sequence: Synthetic oligonucleotide
ugaucguuccauccuugua

SEQ ID NO: 400910 - RNA, 19 nt, Artificial Sequence
  Description of Artificial Sequence: Synthetic oligonucleotide
ggaggaugcggccaauacc

SEQ ID NO: 400911 - RNA, 19 nt, Artificial Sequence
  Description of Artificial Sequence: Synthetic oligonucleotide
accuggcgggaacuaggcc

SEQ ID NO: 400912 - RNA, 19 nt, Artificial Sequence
  Description of Artificial Sequence: Synthetic oligonucleotide
ugccagaguucuccagugc

SEQ ID NO: 400913 - RNA, 19 nt, Artificial Sequence
  Description of Artificial Sequence: Synthetic oligonucleotide
ugauaacugcgcgguaagc

SEQ ID NO: 400914 - RNA, 19 nt, Artificial Sequence
  Description of Artificial Sequence: Synthetic oligonucleotide
uacacguguggguaguauu

SEQ ID NO: 400915 - RNA, 19 nt, Artificial Sequence
  Description of Artificial Sequence: Synthetic oligonucleotide
ccaugcaucauuccuccgg

SEQ ID NO: 400916 - RNA, 19 nt, Artificial Sequence
  Description of Artificial Sequence: Synthetic oligonucleotide
gagagaugcucugcuauca

SEQ ID NO: 400917 - RNA, 19 nt, Artificial Sequence
  Description of Artificial Sequence: Synthetic oligonucleotide
gaccauuauuuuacccugc

SEQ ID NO: 400918 - RNA, 19 nt, Artificial Sequence
  Description of Artificial Sequence: Synthetic oligonucleotide
ucgaccgccgcccuccagu

SEQ ID NO: 400919 - RNA, 19 nt, Artificial Sequence
  Description of Artificial Sequence: Synthetic oligonucleotide
ggucgcuaccuucaucagg

SEQ ID NO: 400920 - RNA, 19 nt, Artificial Sequence
  Description of Artificial Sequence: Synthetic oligonucleotide
gucgucuccaucgguuucg

SEQ ID NO: 400921 - RNA, 19 nt, Artificial Sequence
  Description of Artificial Sequence: Synthetic oligonucleotide
aacugcgcgguaagcaucu

SEQ ID NO: 400922 - RNA, 19 nt, Artificial Sequence
  Description of Artificial Sequence: Synthetic oligonucleotide
aggucgaccgccgcccucc

SEQ ID NO: 400923 - RNA, 19 nt, Artificial Sequence
  Description of Artificial Sequence: Synthetic oligonucleotide
ucggagacuuuaccaucug

SEQ ID NO: 400924 - RNA, 19 nt, Artificial Sequence
  Description of Artificial Sequence: Synthetic oligonucleotide
ggaagcgaagcaucaaguc

SEQ ID NO: 400925 - RNA, 19 nt, Artificial Sequence
  Description of Artificial Sequence: Synthetic oligonucleotide
caaguuugccaggaucuug

SEQ ID NO: 400926 - RNA, 19 nt, Artificial Sequence
  Description of Artificial Sequence: Synthetic oligonucleotide
ugcggccaauaccacucag

SEQ ID NO: 400927 - RNA, 19 nt, Artificial Sequence
  Description of Artificial Sequence: Synthetic oligonucleotide
ucguuccauccuuguagag

SEQ ID NO: 400928 - RNA, 19 nt, Artificial Sequence
  Description of Artificial Sequence: Synthetic oligonucleotide
uccggcagcuaaugaguug

SEQ ID NO: 400929 - RNA, 19 nt, Artificial Sequence
  Description of Artificial Sequence: Synthetic oligonucleotide
caggcucaucuuuugagga

SEQ ID NO: 400930 - RNA, 19 nt, Artificial Sequence
  Description of Artificial Sequence: Synthetic oligonucleotide
aucgguuucgcugccauua

SEQ ID NO: 400931 - RNA, 19 nt, Artificial Sequence
  Description of Artificial Sequence: Synthetic oligonucleotide
cucaacgucuugaaaauau

SEQ ID NO: 400932 - RNA, 19 nt, Artificial Sequence
  Description of Artificial Sequence: Synthetic oligonucleotide
gcgguuaagacuucucuuc

SEQ ID NO: 400933 - RNA, 19 nt, Artificial Sequence
  Description of Artificial Sequence: Synthetic oligonucleotide
aggcauggugagguucucc

SEQ ID NO: 400934 - RNA, 19 nt, Artificial Sequence
  Description of Artificial Sequence: Synthetic oligonucleotide
acguaguccuucaucagga

SEQ ID NO: 400935 - RNA, 19 nt, Artificial Sequence
  Description of Artificial Sequence: Synthetic oligonucleotide
cucagggacguccagaggu

SEQ ID NO: 400936 - RNA, 19 nt, Artificial Sequence
  Description of Artificial Sequence: Synthetic oligonucleotide
ggcgacuuuucucccacag

SEQ ID NO: 400937 - RNA, 19 nt, Artificial Sequence
  Description of Artificial Sequence: Synthetic oligonucleotide
ugucgucuccaucgguuuc

SEQ ID NO: 400938 - RNA, 19 nt, Artificial Sequence
  Description of Artificial Sequence: Synthetic oligonucleotide
cugccauuacucaaggugu

SEQ ID NO: 400939 - RNA, 19 nt, Artificial Sequence
  Description of Artificial Sequence: Synthetic oligonucleotide
ggugagcuuggccauuacc

SEQ ID NO: 400940 - RNA, 19 nt, Artificial Sequence
  Description of Artificial Sequence: Synthetic oligonucleotide
agcacgcucucaugcaggu

SEQ ID NO: 400941 - RNA, 19 nt, Artificial Sequence
  Description of Artificial Sequence: Synthetic oligonucleotide
cugagaguggccccagcuc

SEQ ID NO: 400942 - RNA, 19 nt, Artificial Sequence
  Description of Artificial Sequence: Synthetic oligonucleotide
gcguuugugggguccaucc

SEQ ID NO: 400943 - RNA, 19 nt, Artificial Sequence
  Description of Artificial Sequence: Synthetic oligonucleotide
ucggaugaggguuccucau

SEQ ID NO: 400944 - RNA, 19 nt, Artificial Sequence
  Description of Artificial Sequence: Synthetic oligonucleotide
ucgguuucgcugccauuac

SEQ ID NO: 400945 - RNA, 19 nt, Artificial Sequence
  Description of Artificial Sequence: Synthetic oligonucleotide
caaucuggaggaggaugcg

SEQ ID NO: 400946 - RNA, 19 nt, Artificial Sequence
  Description of Artificial Sequence: Synthetic oligonucleotide
ucgagagucuucggaugag

SEQ ID NO: 400947 - RNA, 19 nt, Artificial Sequence
  Description of Artificial Sequence: Synthetic oligonucleotide
agucuucggaugaggguuc

SEQ ID NO: 400948 - RNA, 19 nt, Artificial Sequence
  Description of Artificial Sequence: Synthetic oligonucleotide
cuggcgacuuuucucccac

SEQ ID NO: 400949 - RNA, 19 nt, Artificial Sequence
  Description of Artificial Sequence: Synthetic oligonucleotide
cuucagccccacgaaagac

SEQ ID NO: 400950 - RNA, 19 nt, Artificial Sequence
  Description of Artificial Sequence: Synthetic oligonucleotide
gcuggcgacagccucgagc

SEQ ID NO: 400951 - RNA, 19 nt, Artificial Sequence
  Description of Artificial Sequence: Synthetic oligonucleotide
acccuauguagucggucca

SEQ ID NO: 400952 - RNA, 19 nt, Artificial Sequence
  Description of Artificial Sequence: Synthetic oligonucleotide
uugacccuauguagucggu

SEQ ID NO: 400953 - RNA, 19 nt, Artificial Sequence
  Description of Artificial Sequence: Synthetic oligonucleotide
gaauuggagcucauugugu

SEQ ID NO: 400954 - RNA, 19 nt, Artificial Sequence
  Description of Artificial Sequence: Synthetic oligonucleotide
cacaggucgaccgccgccc

SEQ ID NO: 400955 - RNA, 19 nt, Artificial Sequence
  Description of Artificial Sequence: Synthetic oligonucleotide
aucugcgacucaaagccgu

SEQ ID NO: 400956 - RNA, 19 nt, Artificial Sequence
  Description of Artificial Sequence: Synthetic oligonucleotide
ggugucaugucugaaacgu

SEQ ID NO: 400957 - RNA, 19 nt, Artificial Sequence
  Description of Artificial Sequence: Synthetic oligonucleotide
gcgacuuuucucccacagg

SEQ ID NO: 400958 - RNA, 19 nt, Artificial Sequence
  Description of Artificial Sequence: Synthetic oligonucleotide
uuccggcagcuaaugaguu

SEQ ID NO: 400959 - RNA, 19 nt, Artificial Sequence
  Description of Artificial Sequence: Synthetic oligonucleotide
cuuguccgugggcugugag

SEQ ID NO: 400960 - RNA, 19 nt, Artificial Sequence
  Description of Artificial Sequence: Synthetic oligonucleotide
cagcacacggcccagacgu

SEQ ID NO: 400961 - RNA, 19 nt, Artificial Sequence
  Description of Artificial Sequence: Synthetic oligonucleotide
ugacccuauguagucgguc

SEQ ID NO: 400962 - RNA, 19 nt, Artificial Sequence
  Description of Artificial Sequence: Synthetic oligonucleotide
agcccacucuugccauagc

SEQ ID NO: 400963 - RNA, 19 nt, Artificial Sequence
  Description of Artificial Sequence: Synthetic oligonucleotide
auaccacucaguagcugug

SEQ ID NO: 400964 - RNA, 19 nt, Artificial Sequence
  Description of Artificial Sequence: Synthetic oligonucleotide
cacagcggcguuguuguug

SEQ ID NO: 400965 - RNA, 19 nt, Artificial Sequence
  Description of Artificial Sequence: Synthetic oligonucleotide
ucucaacgucuugaaaaua

SEQ ID NO: 400966 - RNA, 19 nt, Artificial Sequence
  Description of Artificial Sequence: Synthetic oligonucleotide
agaguaagaugggcuggug

SEQ ID NO: 400967 - RNA, 19 nt, Artificial Sequence
  Description of Artificial Sequence: Synthetic oligonucleotide
ccuauacgccugucaaacg

SEQ ID NO: 400968 - RNA, 19 nt, Artificial Sequence
  Description of Artificial Sequence: Synthetic oligonucleotide
guacuuaggcugggacugg

SEQ ID NO: 400969 - RNA, 19 nt, Artificial Sequence
  Description of Artificial Sequence: Synthetic oligonucleotide
acgccugucaaacgcguuu

SEQ ID NO: 400970 - RNA, 19 nt, Artificial Sequence
  Description of Artificial Sequence: Synthetic oligonucleotide
ggaacuaggccagcuugag

SEQ ID NO: 400971 - RNA, 19 nt, Artificial Sequence
  Description of Artificial Sequence: Synthetic oligonucleotide
aagccguccugcagaaaca

SEQ ID NO: 400972 - RNA, 19 nt, Artificial Sequence
  Description of Artificial Sequence: Synthetic oligonucleotide
ggguaguacuugauaacug

SEQ ID NO: 400973 - RNA, 19 nt, Artificial Sequence
  Description of Artificial Sequence: Synthetic oligonucleotide
uucguggcacugggcaucc

SEQ ID NO: 400974 - RNA, 19 nt, Artificial Sequence
  Description of Artificial Sequence: Synthetic oligonucleotide
ugcguccucugugccagag

SEQ ID NO: 400975 - RNA, 19 nt, Artificial Sequence
  Description of Artificial Sequence: Synthetic oligonucleotide
gagucuucggaugaggguu

SEQ ID NO: 400976 - RNA, 19 nt, Artificial Sequence
  Description of Artificial Sequence: Synthetic oligonucleotide
agacucagggacguccaga

SEQ ID NO: 400977 - RNA, 19 nt, Artificial Sequence
  Description of Artificial Sequence: Synthetic oligonucleotide
cuggcgguuaagacuucuc

SEQ ID NO: 400978 - RNA, 19 nt, Artificial Sequence
  Description of Artificial Sequence: Synthetic oligonucleotide
ugcuaucaggugucauguc

SEQ ID NO: 400979 - RNA, 19 nt, Artificial Sequence
  Description of Artificial Sequence: Synthetic oligonucleotide
ggcagcgggucugagagug

SEQ ID NO: 400980 - RNA, 19 nt, Artificial Sequence
  Description of Artificial Sequence: Synthetic oligonucleotide
ccggcagcuaaugaguugc

SEQ ID NO: 400981 - RNA, 19 nt, Artificial Sequence
  Description of Artificial Sequence: Synthetic oligonucleotide
gacggucuugacccuaugu

SEQ ID NO: 400982 - RNA, 19 nt, Artificial Sequence
  Description of Artificial Sequence: Synthetic oligonucleotide
acguguggguaguauucau

SEQ ID NO: 400983 - RNA, 19 nt, Artificial Sequence
  Description of Artificial Sequence: Synthetic oligonucleotide
ugcaggcaugccagucaca

SEQ ID NO: 400984 - RNA, 19 nt, Artificial Sequence
  Description of Artificial Sequence: Synthetic oligonucleotide
uugcugggucgcuaccuuc

SEQ ID NO: 400985 - RNA, 19 nt, Artificial Sequence
  Description of Artificial Sequence: Synthetic oligonucleotide
cugcgcgguaagcaucuac

SEQ ID NO: 400986 - RNA, 19 nt, Artificial Sequence
  Description of Artificial Sequence: Synthetic oligonucleotide
ccuggcgggaacuaggcca

SEQ ID NO: 400987 - RNA, 19 nt, Artificial Sequence
  Description of Artificial Sequence: Synthetic oligonucleotide
cacacaggucgaccgccgc

SEQ ID NO: 400988 - RNA, 19 nt, Artificial Sequence
  Description of Artificial Sequence: Synthetic oligonucleotide
cacacggcccagacgugac

SEQ ID NO: 400989 - RNA, 19 nt, Artificial Sequence
  Description of Artificial Sequence: Synthetic oligonucleotide
cucggagacuuuaccaucu

SEQ ID NO: 400990 - RNA, 19 nt, Artificial Sequence
  Description of Artificial Sequence: Synthetic oligonucleotide
agcgggucugagaguggcc

SEQ ID NO: 400991 - RNA, 19 nt, Artificial Sequence
  Description of Artificial Sequence: Synthetic oligonucleotide
ugcgucccggguacacgug

SEQ ID NO: 400992 - RNA, 19 nt, Artificial Sequence
  Description of Artificial Sequence: Synthetic oligonucleotide
guagucgguccaaggaguc

SEQ ID NO: 400993 - RNA, 19 nt, Artificial Sequence
  Description of Artificial Sequence: Synthetic oligonucleotide
gugagcgucugcaaaguua

SEQ ID NO: 400994 - RNA, 19 nt, Artificial Sequence
  Description of Artificial Sequence: Synthetic oligonucleotide
caugcaucauuccuccggu

SEQ ID NO: 400995 - RNA, 19 nt, Artificial Sequence
  Description of Artificial Sequence: Synthetic oligonucleotide
aaccgagcuggcgguuaag

SEQ ID NO: 400996 - RNA, 19 nt, Artificial Sequence
  Description of Artificial Sequence: Synthetic oligonucleotide
gucuaugaacacagugcca

SEQ ID NO: 400997 - RNA, 19 nt, Artificial Sequence
  Description of Artificial Sequence: Synthetic oligonucleotide
aggaugcggccaauaccac

SEQ ID NO: 400998 - RNA, 19 nt, Artificial Sequence
  Description of Artificial Sequence: Synthetic oligonucleotide
cguccacacaggucgaccg

SEQ ID NO: 400999 - RNA, 19 nt, Artificial Sequence
  Description of Artificial Sequence: Synthetic oligonucleotide
gcgcgguaagcaucuacag

SEQ ID NO: 401000 - RNA, 19 nt, Artificial Sequence
  Description of Artificial Sequence: Synthetic oligonucleotide
agccccacgaaagacuguu

SEQ ID NO: 401001 - RNA, 19 nt, Artificial Sequence
  Description of Artificial Sequence: Synthetic oligonucleotide
ugggcgugucgucuccauc

SEQ ID NO: 401002 - RNA, 19 nt, Artificial Sequence
  Description of Artificial Sequence: Synthetic oligonucleotide
auacgccugucaaacgcgu

SEQ ID NO: 401003 - RNA, 19 nt, Artificial Sequence
  Description of Artificial Sequence: Synthetic oligonucleotide
gugcucguugagcuuaucu

SEQ ID NO: 401004 - RNA, 19 nt, Artificial Sequence
  Description of Artificial Sequence: Synthetic oligonucleotide
ucaaccgagcuggcgguua

SEQ ID NO: 401005 - RNA, 19 nt, Artificial Sequence
  Description of Artificial Sequence: Synthetic oligonucleotide
cucuggguaguacuugaua

SEQ ID NO: 401006 - RNA, 19 nt, Artificial Sequence
  Description of Artificial Sequence: Synthetic oligonucleotide
ggcgugucgucuccaucgg

SEQ ID NO: 401007 - RNA, 19 nt, Artificial Sequence
  Description of Artificial Sequence: Synthetic oligonucleotide
guuccggcagcuaaugagu

SEQ ID NO: 401008 - RNA, 19 nt, Artificial Sequence
  Description of Artificial Sequence: Synthetic oligonucleotide
ugcagacggucuugacccu

SEQ ID NO: 401009 - RNA, 19 nt, Artificial Sequence
  Description of Artificial Sequence: Synthetic oligonucleotide
cucugggcgugucgucucc

SEQ ID NO: 401010 - RNA, 19 nt, Artificial Sequence
  Description of Artificial Sequence: Synthetic oligonucleotide
uacgccugucaaacgcguu

SEQ ID NO: 401011 - RNA, 19 nt, Artificial Sequence
  Description of Artificial Sequence: Synthetic oligonucleotide
agacggucuugacccuaug

SEQ ID NO: 401012 - RNA, 19 nt, Artificial Sequence
  Description of Artificial Sequence: Synthetic oligonucleotide
cagggacguccagaggugc

SEQ ID NO: 401013 - RNA, 19 nt, Artificial Sequence
  Description of Artificial Sequence: Synthetic oligonucleotide
ccuuaacugcaucucccug

SEQ ID NO: 401014 - RNA, 19 nt, Artificial Sequence
  Description of Artificial Sequence: Synthetic oligonucleotide
ggggucgucacucccggca

SEQ ID NO: 401015 - RNA, 19 nt, Artificial Sequence
  Description of Artificial Sequence: Synthetic oligonucleotide
uugcuggcgacagccucga

SEQ ID NO: 401016 - RNA, 19 nt, Artificial Sequence
  Description of Artificial Sequence: Synthetic oligonucleotide
acgacacuucugagguccg

SEQ ID NO: 401017 - RNA, 19 nt, Artificial Sequence
  Description of Artificial Sequence: Synthetic oligonucleotide
gccauuacucaaggugucc

SEQ ID NO: 401018 - RNA, 19 nt, Artificial Sequence
  Description of Artificial Sequence: Synthetic oligonucleotide
cuaugaacacagugccaua

SEQ ID NO: 401019 - RNA, 19 nt, Artificial Sequence
  Description of Artificial Sequence: Synthetic oligonucleotide
cugcuaucaggugucaugu

SEQ ID NO: 401020 - RNA, 19 nt, Artificial Sequence
  Description of Artificial Sequence: Synthetic oligonucleotide
guucaaccgagcuggcggu

SEQ ID NO: 401021 - RNA, 19 nt, Artificial Sequence
  Description of Artificial Sequence: Synthetic oligonucleotide
ccaaaggguucaaauucca

SEQ ID NO: 401022 - RNA, 19 nt, Artificial Sequence
  Description of Artificial Sequence: Synthetic oligonucleotide
ucgcuaccuucaucaggac

SEQ ID NO: 401023 - RNA, 19 nt, Artificial Sequence
  Description of Artificial Sequence: Synthetic oligonucleotide
uggcgacuuuucucccaca

SEQ ID NO: 401024 - RNA, 19 nt, Artificial Sequence
  Description of Artificial Sequence: Synthetic oligonucleotide
cgucugcaaaguuauucug

SEQ ID NO: 401025 - RNA, 19 nt, Artificial Sequence
  Description of Artificial Sequence: Synthetic oligonucleotide
gcgucugcaaaguuauucu

SEQ ID NO: 401026 - RNA, 19 nt, Artificial Sequence
  Description of Artificial Sequence: Synthetic oligonucleotide
cacguguggguaguauuca

SEQ ID NO: 401027 - RNA, 19 nt, Artificial Sequence
  Description of Artificial Sequence: Synthetic oligonucleotide
gcgggucugagaguggccc

SEQ ID NO: 401028 - RNA, 19 nt, Artificial Sequence
  Description of Artificial Sequence: Synthetic oligonucleotide
gucuucggaugaggguucc

SEQ ID NO: 401029 - RNA, 19 nt, Artificial Sequence
  Description of Artificial Sequence: Synthetic oligonucleotide
ggcgaaggggucgucacuc

SEQ ID NO: 401030 - RNA, 19 nt, Artificial Sequence
  Description of Artificial Sequence: Synthetic oligonucleotide
caucggaggaggggucuug

SEQ ID NO: 401031 - RNA, 19 nt, Artificial Sequence
  Description of Artificial Sequence: Synthetic oligonucleotide
cgcuaccuucaucaggacc

SEQ ID NO: 401032 - RNA, 19 nt, Artificial Sequence
  Description of Artificial Sequence: Synthetic oligonucleotide
ggucuugacccuauguagu

SEQ ID NO: 401033 - RNA, 19 nt, Artificial Sequence
  Description of Artificial Sequence: Synthetic oligonucleotide
cugaucguuccauccuugu

SEQ ID NO: 401034 - RNA, 19 nt, Artificial Sequence
  Description of Artificial Sequence: Synthetic oligonucleotide
gggucgcuaccuucaucag

SEQ ID NO: 401035 - RNA, 19 nt, Artificial Sequence
  Description of Artificial Sequence: Synthetic oligonucleotide
gccugucaaacgcguuucc

SEQ ID NO: 401036 - RNA, 19 nt, Artificial Sequence
  Description of Artificial Sequence: Synthetic oligonucleotide
agccucgagcaggcccugc

SEQ ID NO: 401037 - RNA, 19 nt, Artificial Sequence
  Description of Artificial Sequence: Synthetic oligonucleotide
gaccaucggaggagggguc

SEQ ID NO: 401038 - RNA, 19 nt, Artificial Sequence
  Description of Artificial Sequence: Synthetic oligonucleotide
gcgacucaaagccguccug

SEQ ID NO: 401039 - RNA, 19 nt, Artificial Sequence
  Description of Artificial Sequence: Synthetic oligonucleotide
auacagcacacggcccaga

SEQ ID NO: 401040 - RNA, 19 nt, Artificial Sequence
  Description of Artificial Sequence: Synthetic oligonucleotide
agauaccuggcgggaacua

SEQ ID NO: 401041 - RNA, 19 nt, Artificial Sequence
  Description of Artificial Sequence: Synthetic oligonucleotide
ccccacgaaagacuguuca

SEQ ID NO: 401042 - RNA, 19 nt, Artificial Sequence
  Description of Artificial Sequence: Synthetic oligonucleotide
cacuucugagguccguucu

SEQ ID NO: 401043 - RNA, 19 nt, Artificial Sequence
  Description of Artificial Sequence: Synthetic oligonucleotide
caguuccggcagcuaauga

SEQ ID NO: 401044 - RNA, 19 nt, Artificial Sequence
  Description of Artificial Sequence: Synthetic oligonucleotide
augcuccuauacgccuguc

SEQ ID NO: 401045 - RNA, 19 nt, Artificial Sequence
  Description of Artificial Sequence: Synthetic oligonucleotide
ccugauucugaucguucca

SEQ ID NO: 401046 - RNA, 19 nt, Artificial Sequence
  Description of Artificial Sequence: Synthetic oligonucleotide
ugcuggcgacagccucgag

SEQ ID NO: 401047 - RNA, 19 nt, Artificial Sequence
  Description of Artificial Sequence: Synthetic oligonucleotide
uggugguaucuggcgacuu

SEQ ID NO: 401048 - RNA, 19 nt, Artificial Sequence
  Description of Artificial Sequence: Synthetic oligonucleotide
ccguccugcagaaacaagu

SEQ ID NO: 401049 - RNA, 19 nt, Artificial Sequence
  Description of Artificial Sequence: Synthetic oligonucleotide
uucaaccgagcuggcgguu

SEQ ID NO: 401050 - RNA, 19 nt, Artificial Sequence
  Description of Artificial Sequence: Synthetic oligonucleotide
gacacuucugagguccguu

SEQ ID NO: 401051 - RNA, 19 nt, Artificial Sequence
  Description of Artificial Sequence: Synthetic oligonucleotide
cuuccuuguucguggcacu

SEQ ID NO: 401052 - RNA, 19 nt, Artificial Sequence
  Description of Artificial Sequence: Synthetic oligonucleotide
gaggaggaugcggccaaua

SEQ ID NO: 401053 - RNA, 19 nt, Artificial Sequence
  Description of Artificial Sequence: Synthetic oligonucleotide
ggaugcggccaauaccacu

SEQ ID NO: 401054 - RNA, 19 nt, Artificial Sequence
  Description of Artificial Sequence: Synthetic oligonucleotide
ggcgguuaagacuucucuu

SEQ ID NO: 401055 - RNA, 19 nt, Artificial Sequence
  Description of Artificial Sequence: Synthetic oligonucleotide
cucccggcaaacacagccu

SEQ ID NO: 401056 - RNA, 19 nt, Artificial Sequence
  Description of Artificial Sequence: Synthetic oligonucleotide
ccaguuccggcagcuaaug

SEQ ID NO: 401057 - RNA, 19 nt, Artificial Sequence
  Description of Artificial Sequence: Synthetic oligonucleotide
cugcgucccggguacacgu

SEQ ID NO: 401058 - RNA, 19 nt, Artificial Sequence
  Description of Artificial Sequence: Synthetic oligonucleotide
ggacugcauggcaggcagg

SEQ ID NO: 401059 - RNA, 19 nt, Artificial Sequence
  Description of Artificial Sequence: Synthetic oligonucleotide
gcguccacacaggucgacc

SEQ ID NO: 401060 - RNA, 19 nt, Artificial Sequence
  Description of Artificial Sequence: Synthetic oligonucleotide
gucgaccgccgcccuccag

SEQ ID NO: 401061 - RNA, 19 nt, Artificial Sequence
  Description of Artificial Sequence: Synthetic oligonucleotide
gcguuguuguuggccacug

SEQ ID NO: 401062 - RNA, 19 nt, Artificial Sequence
  Description of Artificial Sequence: Synthetic oligonucleotide
caaccgagcuggcgguuaa

SEQ ID NO: 401063 - RNA, 19 nt, Artificial Sequence
  Description of Artificial Sequence: Synthetic oligonucleotide
agcgaagcaucaaguccuu

SEQ ID NO: 401064 - RNA, 19 nt, Artificial Sequence
  Description of Artificial Sequence: Synthetic oligonucleotide
gacgcugcucaggccgcca

SEQ ID NO: 401065 - RNA, 19 nt, Artificial Sequence
  Description of Artificial Sequence: Synthetic oligonucleotide
ggacgacacuucugagguc

SEQ ID NO: 401066 - RNA, 19 nt, Artificial Sequence
  Description of Artificial Sequence: Synthetic oligonucleotide
gcgcaucgaaaaggggacc

SEQ ID NO: 401067 - RNA, 19 nt, Artificial Sequence
  Description of Artificial Sequence: Synthetic oligonucleotide
cucaagguguccccugcuu

SEQ ID NO: 401068 - RNA, 19 nt, Artificial Sequence
  Description of Artificial Sequence: Synthetic oligonucleotide
gccguccugcagaaacaag

SEQ ID NO: 401069 - RNA, 19 nt, Artificial Sequence
  Description of Artificial Sequence: Synthetic oligonucleotide
guacacguguggguaguau

SEQ ID NO: 401070 - RNA, 19 nt, Artificial Sequence
  Description of Artificial Sequence: Synthetic oligonucleotide
cgagcuggcgguuaagacu

SEQ ID NO: 401071 - RNA, 19 nt, Artificial Sequence
  Description of Artificial Sequence: Synthetic oligonucleotide
gccuugcuccaaguuugcc

SEQ ID NO: 401072 - RNA, 19 nt, Artificial Sequence
  Description of Artificial Sequence: Synthetic oligonucleotide
gggucgucacucccggcaa

SEQ ID NO: 401073 - RNA, 19 nt, Artificial Sequence
  Description of Artificial Sequence: Synthetic oligonucleotide
caggcauggugagguucuc

SEQ ID NO: 401074 - RNA, 19 nt, Artificial Sequence
  Description of Artificial Sequence: Synthetic oligonucleotide
cacggcccagacgugaccu

SEQ ID NO: 401075 - RNA, 19 nt, Artificial Sequence
  Description of Artificial Sequence: Synthetic oligonucleotide
cagauaccuggcgggaacu

SEQ ID NO: 401076 - RNA, 19 nt, Artificial Sequence
  Description of Artificial Sequence: Synthetic oligonucleotide
caaggaauuggagcucauu

SEQ ID NO: 401077 - RNA, 19 nt, Artificial Sequence
  Description of Artificial Sequence: Synthetic oligonucleotide
ggugguaucuggcgacuuu

SEQ ID NO: 401078 - RNA, 19 nt, Artificial Sequence
  Description of Artificial Sequence: Synthetic oligonucleotide
cagacggucuugacccuau

SEQ ID NO: 401079 - RNA, 19 nt, Artificial Sequence
  Description of Artificial Sequence: Synthetic oligonucleotide
cagcggcguuguuguuggc

SEQ ID NO: 401080 - RNA, 19 nt, Artificial Sequence
  Description of Artificial Sequence: Synthetic oligonucleotide
cacccaggaagcgaagcau

SEQ ID NO: 401081 - RNA, 19 nt, Artificial Sequence
  Description of Artificial Sequence: Synthetic oligonucleotide
cggccaauaccacucagua

SEQ ID NO: 401082 - RNA, 19 nt, Artificial Sequence
  Description of Artificial Sequence: Synthetic oligonucleotide
cugcuaagccuugcuccaa

SEQ ID NO: 401083 - RNA, 19 nt, Artificial Sequence
  Description of Artificial Sequence: Synthetic oligonucleotide
gcccugcguccucugugcc

SEQ ID NO: 401084 - RNA, 19 nt, Artificial Sequence
  Description of Artificial Sequence: Synthetic oligonucleotide
cgcaucgaaaaggggacca

SEQ ID NO: 401085 - RNA, 19 nt, Artificial Sequence
  Description of Artificial Sequence: Synthetic oligonucleotide
ccccuucuuugcuggcgac

SEQ ID NO: 401086 - RNA, 19 nt, Artificial Sequence
  Description of Artificial Sequence: Synthetic oligonucleotide
cguugagcuuaucuacaaa

SEQ ID NO: 401087 - RNA, 19 nt, Artificial Sequence
  Description of Artificial Sequence: Synthetic oligonucleotide
cgucccggguacacgugug

SEQ ID NO: 401088 - RNA, 19 nt, Artificial Sequence
  Description of Artificial Sequence: Synthetic oligonucleotide
gcggccaauaccacucagu

SEQ ID NO: 401089 - RNA, 19 nt, Artificial Sequence
  Description of Artificial Sequence: Synthetic oligonucleotide
gguacacguguggguagua

SEQ ID NO: 401090 - RNA, 19 nt, Artificial Sequence
  Description of Artificial Sequence: Synthetic oligonucleotide
cgccugucaaacgcguuuc

SEQ ID NO: 401091 - RNA, 19 nt, Artificial Sequence
  Description of Artificial Sequence: Synthetic oligonucleotide
ucguggcacugggcauccu

SEQ ID NO: 401092 - RNA, 19 nt, Artificial Sequence
  Description of Artificial Sequence: Synthetic oligonucleotide
ccggguacacgugugggua

SEQ ID NO: 401093 - RNA, 19 nt, Artificial Sequence
  Description of Artificial Sequence: Synthetic oligonucleotide
ccguucuucugggugagcu

SEQ ID NO: 401094 - RNA, 19 nt, Artificial Sequence
  Description of Artificial Sequence: Synthetic oligonucleotide
cagccucgagcaggcccug

SEQ ID NO: 401095 - RNA, 19 nt, Artificial Sequence
  Description of Artificial Sequence: Synthetic oligonucleotide
ggcguuguuguuggccacu

SEQ ID NO: 401096 - RNA, 19 nt, Artificial Sequence
  Description of Artificial Sequence: Synthetic oligonucleotide
ccugucaaacgcguuuccu

SEQ ID NO: 401097 - RNA, 19 nt, Artificial Sequence
  Description of Artificial Sequence: Synthetic oligonucleotide
caucgguuucgcugccauu

SEQ ID NO: 401098 - RNA, 19 nt, Artificial Sequence
  Description of Artificial Sequence: Synthetic oligonucleotide
cucugcuaucaggugucau

SEQ ID NO: 401099 - RNA, 19 nt, Artificial Sequence
  Description of Artificial Sequence: Synthetic oligonucleotide
acugcgcgguaagcaucua

SEQ ID NO: 401100 - RNA, 19 nt, Artificial Sequence
  Description of Artificial Sequence: Synthetic oligonucleotide
gcagacggucuugacccua

SEQ ID NO: 401101 - RNA, 19 nt, Artificial Sequence
  Description of Artificial Sequence: Synthetic oligonucleotide
gcuggcgguuaagacuucu

SEQ ID NO: 401102 - RNA, 19 nt, Artificial Sequence
  Description of Artificial Sequence: Synthetic oligonucleotide
ccauauugcugggucgcua

SEQ ID NO: 401103 - RNA, 19 nt, Artificial Sequence
  Description of Artificial Sequence: Synthetic oligonucleotide
caucuacagccagcacgua

SEQ ID NO: 401104 - RNA, 19 nt, Artificial Sequence
  Description of Artificial Sequence: Synthetic oligonucleotide
gcgucccggguacacgugu

SEQ ID NO: 401105 - RNA, 19 nt, Artificial Sequence
  Description of Artificial Sequence: Synthetic oligonucleotide
ggcagcuaaugaguugcuu

SEQ ID NO: 401106 - RNA, 19 nt, Artificial Sequence
  Description of Artificial Sequence: Synthetic oligonucleotide
cggcguuguuguuggccac

SEQ ID NO: 401107 - RNA, 19 nt, Artificial Sequence
  Description of Artificial Sequence: Synthetic oligonucleotide
cgugucgucuccaucgguu

SEQ ID NO: 401108 - RNA, 19 nt, Artificial Sequence
  Description of Artificial Sequence: Synthetic oligonucleotide
cugcguccucugugccaga

SEQ ID NO: 401109 - RNA, 19 nt, Artificial Sequence
  Description of Artificial Sequence: Synthetic oligonucleotide
gcaucgaaaaggggaccau

SEQ ID NO: 401110 - RNA, 19 nt, Artificial Sequence
  Description of Artificial Sequence: Synthetic oligonucleotide
ggggaccauggagccucug

SEQ ID NO: 401111 - RNA, 19 nt, Artificial Sequence
  Description of Artificial Sequence: Synthetic oligonucleotide
gccauauugcugggucgcu

SEQ ID NO: 401112 - RNA, 19 nt, Artificial Sequence
  Description of Artificial Sequence: Synthetic oligonucleotide
cccggguacacgugugggu

SEQ ID NO: 401113 - RNA, 19 nt, Artificial Sequence
  Description of Artificial Sequence: Synthetic oligonucleotide
ggucgaccgccgcccucca

SEQ ID NO: 401114 - RNA, 19 nt, Artificial Sequence
  Description of Artificial Sequence: Synthetic oligonucleotide
gcgugucgucuccaucggu

SEQ ID NO: 401115 - RNA, 19 nt, Artificial Sequence
  Description of Artificial Sequence: Synthetic oligonucleotide
gcgaagcaucaaguccuua

SEQ ID NO: 401116 - RNA, 19 nt, Artificial Sequence
  Description of Artificial Sequence: Synthetic oligonucleotide
ccaaggaauuggagcucau

SEQ ID NO: 401117 - RNA, 19 nt, Artificial Sequence
  Description of Artificial Sequence: Synthetic oligonucleotide
gggcagcgggucugagagu

SEQ ID NO: 401118 - RNA, 19 nt, Artificial Sequence
  Description of Artificial Sequence: Synthetic oligonucleotide
cugcguuugugggguccau

SEQ ID NO: 401119 - RNA, 19 nt, Artificial Sequence
  Description of Artificial Sequence: Synthetic oligonucleotide
cggcagcuaaugaguugcu

SEQ ID NO: 401120 - RNA, 19 nt, Artificial Sequence
  Description of Artificial Sequence: Synthetic oligonucleotide
cgacacuucugagguccgu

SEQ ID NO: 401121 - RNA, 19 nt, Artificial Sequence
  Description of Artificial Sequence: Synthetic oligonucleotide
cgaccgccgcccuccaguu

SEQ ID NO: 401122 - RNA, 19 nt, Artificial Sequence
  Description of Artificial Sequence: Synthetic oligonucleotide
uguaauauaacucauagcc

SEQ ID NO: 401123 - RNA, 19 nt, Artificial Sequence
  Description of Artificial Sequence: Synthetic oligonucleotide
acaaaauuggauuagaaac

SEQ ID NO: 401124 - RNA, 19 nt, Artificial Sequence
  Description of Artificial Sequence: Synthetic oligonucleotide
aauucgaugagccucaaug

SEQ ID NO: 401125 - RNA, 19 nt, Artificial Sequence
  Description of Artificial Sequence: Synthetic oligonucleotide
aauuggauuagaaacacac

SEQ ID NO: 401126 - RNA, 19 nt, Artificial Sequence
  Description of Artificial Sequence: Synthetic oligonucleotide
aauuguucagcugaggccc

SEQ ID NO: 401127 - RNA, 19 nt, Artificial Sequence
  Description of Artificial Sequence: Synthetic oligonucleotide
aaaacguacagucucuagg

SEQ ID NO: 401128 - RNA, 19 nt, Artificial Sequence
  Description of Artificial Sequence: Synthetic oligonucleotide
ucaacuuccaucaagggaa

SEQ ID NO: 401129 - RNA, 19 nt, Artificial Sequence
  Description of Artificial Sequence: Synthetic oligonucleotide
aauuucugggaucugaagu

SEQ ID NO: 401130 - RNA, 19 nt, Artificial Sequence
  Description of Artificial Sequence: Synthetic oligonucleotide
auaaucacaugaugcagcc

SEQ ID NO: 401131 - RNA, 19 nt, Artificial Sequence
  Description of Artificial Sequence: Synthetic oligonucleotide
cuuacuuaacccaucagag

SEQ ID NO: 401132 - RNA, 19 nt, Artificial Sequence
  Description of Artificial Sequence: Synthetic oligonucleotide
auauaguuuccccuguccc

SEQ ID NO: 401133 - RNA, 19 nt, Artificial Sequence
  Description of Artificial Sequence: Synthetic oligonucleotide
aguuugaaaaugcuggcag

SEQ ID NO: 401134 - RNA, 19 nt, Artificial Sequence
  Description of Artificial Sequence: Synthetic oligonucleotide
caauaggggauucagauac

SEQ ID NO: 401135 - RNA, 19 nt, Artificial Sequence
  Description of Artificial Sequence: Synthetic oligonucleotide
ugcaggauuuggcacaugg

SEQ ID NO: 401136 - RNA, 19 nt, Artificial Sequence
  Description of Artificial Sequence: Synthetic oligonucleotide
aaacguacagucucuagga

SEQ ID NO: 401137 - RNA, 19 nt, Artificial Sequence
  Description of Artificial Sequence: Synthetic oligonucleotide
agacguguauaugaaaugc

SEQ ID NO: 401138 - RNA, 19 nt, Artificial Sequence
  Description of Artificial Sequence: Synthetic oligonucleotide
uauauaguuuccccugucc

SEQ ID NO: 401139 - RNA, 19 nt, Artificial Sequence
  Description of Artificial Sequence: Synthetic oligonucleotide
aguucagacguguauauga

SEQ ID NO: 401140 - RNA, 19 nt, Artificial Sequence
  Description of Artificial Sequence: Synthetic oligonucleotide
ugugagaacggccacccag

SEQ ID NO: 401141 - RNA, 19 nt, Artificial Sequence
  Description of Artificial Sequence: Synthetic oligonucleotide
uacacgaaguuguugagca

SEQ ID NO: 401142 - RNA, 19 nt, Artificial Sequence
  Description of Artificial Sequence: Synthetic oligonucleotide
gauacauaagggcacuggc

SEQ ID NO: 401143 - RNA, 19 nt, Artificial Sequence
  Description of Artificial Sequence: Synthetic oligonucleotide
ucucgagaaggccacaaag

SEQ ID NO: 401144 - RNA, 19 nt, Artificial Sequence
  Description of Artificial Sequence: Synthetic oligonucleotide
gaauuguucagcugaggcc

SEQ ID NO: 401145 - RNA, 19 nt, Artificial Sequence
  Description of Artificial Sequence: Synthetic oligonucleotide
acguacagucucuaggagc

SEQ ID NO: 401146 - RNA, 19 nt, Artificial Sequence
  Description of Artificial Sequence: Synthetic oligonucleotide
cauucggggagccagagag

SEQ ID NO: 401147 - RNA, 19 nt, Artificial Sequence
  Description of Artificial Sequence: Synthetic oligonucleotide
aaucaaguacacgaaguug

SEQ ID NO: 401148 - RNA, 19 nt, Artificial Sequence
  Description of Artificial Sequence: Synthetic oligonucleotide
uguaagacacaccauggau

SEQ ID NO: 401149 - RNA, 19 nt, Artificial Sequence
  Description of Artificial Sequence: Synthetic oligonucleotide
aagccuuggacauuauugu

SEQ ID NO: 401150 - RNA, 19 nt, Artificial Sequence
  Description of Artificial Sequence: Synthetic oligonucleotide
ugugccucgggucauaccu

SEQ ID NO: 401151 - RNA, 19 nt, Artificial Sequence
  Description of Artificial Sequence: Synthetic oligonucleotide
agcaauaccagguucgcca

SEQ ID NO: 401152 - RNA, 19 nt, Artificial Sequence
  Description of Artificial Sequence: Synthetic oligonucleotide
uuuccacucucccaauagg

SEQ ID NO: 401153 - RNA, 19 nt, Artificial Sequence
  Description of Artificial Sequence: Synthetic oligonucleotide
caaaauuggauuagaaaca

SEQ ID NO: 401154 - RNA, 19 nt, Artificial Sequence
  Description of Artificial Sequence: Synthetic oligonucleotide
aggcacgucgcacaggccc

SEQ ID NO: 401155 - RNA, 19 nt, Artificial Sequence
  Description of Artificial Sequence: Synthetic oligonucleotide
agaacggccacccagcaca

SEQ ID NO: 401156 - RNA, 19 nt, Artificial Sequence
  Description of Artificial Sequence: Synthetic oligonucleotide
gucauugugguagucacgg

SEQ ID NO: 401157 - RNA, 19 nt, Artificial Sequence
  Description of Artificial Sequence: Synthetic oligonucleotide
agaguaugccauguguugc

SEQ ID NO: 401158 - RNA, 19 nt, Artificial Sequence
  Description of Artificial Sequence: Synthetic oligonucleotide
uagaccuuuuccaagggaa

SEQ ID NO: 401159 - RNA, 19 nt, Artificial Sequence
  Description of Artificial Sequence: Synthetic oligonucleotide
uggugaaccaggaacccag

SEQ ID NO: 401160 - RNA, 19 nt, Artificial Sequence
  Description of Artificial Sequence: Synthetic oligonucleotide
ucuaugucguagaugugca

SEQ ID NO: 401161 - RNA, 19 nt, Artificial Sequence
  Description of Artificial Sequence: Synthetic oligonucleotide
ugauacauaagggcacugg

SEQ ID NO: 401162 - RNA, 19 nt, Artificial Sequence
  Description of Artificial Sequence: Synthetic oligonucleotide
auacauaagggcacuggcc

SEQ ID NO: 401163 - RNA, 19 nt, Artificial Sequence
  Description of Artificial Sequence: Synthetic oligonucleotide
cauugugguagucacggcc

SEQ ID NO: 401164 - RNA, 19 nt, Artificial Sequence
  Description of Artificial Sequence: Synthetic oligonucleotide
gaaguuggcaggcagcaac

SEQ ID NO: 401165 - RNA, 19 nt, Artificial Sequence
  Description of Artificial Sequence: Synthetic oligonucleotide
acgcucaucacuucagagg

SEQ ID NO: 401166 - RNA, 19 nt, Artificial Sequence
  Description of Artificial Sequence: Synthetic oligonucleotide
ugcucaccagaccaugugg

SEQ ID NO: 401167 - RNA, 19 nt, Artificial Sequence
  Description of Artificial Sequence: Synthetic oligonucleotide
acggcuaggacugcuagcc

SEQ ID NO: 401168 - RNA, 19 nt, Artificial Sequence
  Description of Artificial Sequence: Synthetic oligonucleotide
gacacacacacacagaucu

SEQ ID NO: 401169 - RNA, 19 nt, Artificial Sequence
  Description of Artificial Sequence: Synthetic oligonucleotide
gaggauguagguauccagg

SEQ ID NO: 401170 - RNA, 19 nt, Artificial Sequence
  Description of Artificial Sequence: Synthetic oligonucleotide
guagcaagccaccuggugc

SEQ ID NO: 401171 - RNA, 19 nt, Artificial Sequence
  Description of Artificial Sequence: Synthetic oligonucleotide
ucauucuggugauacauaa

SEQ ID NO: 401172 - RNA, 19 nt, Artificial Sequence
  Description of Artificial Sequence: Synthetic oligonucleotide
ugcacaucccuccuguagc

SEQ ID NO: 401173 - RNA, 19 nt, Artificial Sequence
  Description of Artificial Sequence: Synthetic oligonucleotide
acuccuaaacacuaggcau

SEQ ID NO: 401174 - RNA, 19 nt, Artificial Sequence
  Description of Artificial Sequence: Synthetic oligonucleotide
ugagauggaauuguucagc

SEQ ID NO: 401175 - RNA, 19 nt, Artificial Sequence
  Description of Artificial Sequence: Synthetic oligonucleotide
aucaagggaaaacguacag

SEQ ID NO: 401176 - RNA, 19 nt, Artificial Sequence
  Description of Artificial Sequence: Synthetic oligonucleotide
ucucuaggagcuugggagg

SEQ ID NO: 401177 - RNA, 19 nt, Artificial Sequence
  Description of Artificial Sequence: Synthetic oligonucleotide
uugucuagaacagcaauac

SEQ ID NO: 401178 - RNA, 19 nt, Artificial Sequence
  Description of Artificial Sequence: Synthetic oligonucleotide
uaauuucugggaucugaag

SEQ ID NO: 401179 - RNA, 19 nt, Artificial Sequence
  Description of Artificial Sequence: Synthetic oligonucleotide
gaaaacguacagucucuag

SEQ ID NO: 401180 - RNA, 19 nt, Artificial Sequence
  Description of Artificial Sequence: Synthetic oligonucleotide
aacguacagucucuaggag

SEQ ID NO: 401181 - RNA, 19 nt, Artificial Sequence
  Description of Artificial Sequence: Synthetic oligonucleotide
gaucaagcuugucaugcag

SEQ ID NO: 401182 - RNA, 19 nt, Artificial Sequence
  Description of Artificial Sequence: Synthetic oligonucleotide
ucgguugugagaacggcca

SEQ ID NO: 401183 - RNA, 19 nt, Artificial Sequence
  Description of Artificial Sequence: Synthetic oligonucleotide
cauauauccuguugucuag

SEQ ID NO: 401184 - RNA, 19 nt, Artificial Sequence
  Description of Artificial Sequence: Synthetic oligonucleotide
ggaauuguucagcugaggc

SEQ ID NO: 401185 - RNA, 19 nt, Artificial Sequence
  Description of Artificial Sequence: Synthetic oligonucleotide
agagaccagacuaagagga

SEQ ID NO: 401186 - RNA, 19 nt, Artificial Sequence
  Description of Artificial Sequence: Synthetic oligonucleotide
uggaucuggaaccagcgau

SEQ ID NO: 401187 - RNA, 19 nt, Artificial Sequence
  Description of Artificial Sequence: Synthetic oligonucleotide
guuacccacuccuaaacac

SEQ ID NO: 401188 - RNA, 19 nt, Artificial Sequence
  Description of Artificial Sequence: Synthetic oligonucleotide
auagaguuugaaaaugcug

SEQ ID NO: 401189 - RNA, 19 nt, Artificial Sequence
  Description of Artificial Sequence: Synthetic oligonucleotide
auucgaugagccucaaugu

SEQ ID NO: 401190 - RNA, 19 nt, Artificial Sequence
  Description of Artificial Sequence: Synthetic oligonucleotide
ugguuggacauucggggag

SEQ ID NO: 401191 - RNA, 19 nt, Artificial Sequence
  Description of Artificial Sequence: Synthetic oligonucleotide
ccacccagcacauauaucc

SEQ ID NO: 401192 - RNA, 19 nt, Artificial Sequence
  Description of Artificial Sequence: Synthetic oligonucleotide
uaacccaucagagaccaga

SEQ ID NO: 401193 - RNA, 19 nt, Artificial Sequence
  Description of Artificial Sequence: Synthetic oligonucleotide
aguagaccuuuuccaaggg

SEQ ID NO: 401194 - RNA, 19 nt, Artificial Sequence
  Description of Artificial Sequence: Synthetic oligonucleotide
uguugagcaccgcaaugcc

SEQ ID NO: 401195 - RNA, 19 nt, Artificial Sequence
  Description of Artificial Sequence: Synthetic oligonucleotide
uguagcaagccaccuggug

SEQ ID NO: 401196 - RNA, 19 nt, Artificial Sequence
  Description of Artificial Sequence: Synthetic oligonucleotide
ugucuagaacagcaauacc

SEQ ID NO: 401197 - RNA, 19 nt, Artificial Sequence
  Description of Artificial Sequence: Synthetic oligonucleotide
auaccuccagcaucgggac

SEQ ID NO: 401198 - RNA, 19 nt, Artificial Sequence
  Description of Artificial Sequence: Synthetic oligonucleotide
aaguguuuccacucuccca

SEQ ID NO: 401199 - RNA, 19 nt, Artificial Sequence
  Description of Artificial Sequence: Synthetic oligonucleotide
uggugauacauaagggcac

SEQ ID NO: 401200 - RNA, 19 nt, Artificial Sequence
  Description of Artificial Sequence: Synthetic oligonucleotide
cauucagugagaucugguc

SEQ ID NO: 401201 - RNA, 19 nt, Artificial Sequence
  Description of Artificial Sequence: Synthetic oligonucleotide
ucugcgaccacagguaaug

SEQ ID NO: 401202 - RNA, 19 nt, Artificial Sequence
  Description of Artificial Sequence: Synthetic oligonucleotide
agcgauugugccucggguc

SEQ ID NO: 401203 - RNA, 19 nt, Artificial Sequence
  Description of Artificial Sequence: Synthetic oligonucleotide
cucgggguggcucacagag

SEQ ID NO: 401204 - RNA, 19 nt, Artificial Sequence
  Description of Artificial Sequence: Synthetic oligonucleotide
cugcacauugcucaggcug

SEQ ID NO: 401205 - RNA, 19 nt, Artificial Sequence
  Description of Artificial Sequence: Synthetic oligonucleotide
cuccuaaacacuaggcaug

SEQ ID NO: 401206 - RNA, 19 nt, Artificial Sequence
  Description of Artificial Sequence: Synthetic oligonucleotide
uccaucaagggaaaacgua

SEQ ID NO: 401207 - RNA, 19 nt, Artificial Sequence
  Description of Artificial Sequence: Synthetic oligonucleotide
ucgagaaggccacaaaguu

SEQ ID NO: 401208 - RNA, 19 nt, Artificial Sequence
  Description of Artificial Sequence: Synthetic oligonucleotide
gccaaauagagauaccagc

SEQ ID NO: 401209 - RNA, 19 nt, Artificial Sequence
  Description of Artificial Sequence: Synthetic oligonucleotide
acgacacacacacacagau

SEQ ID NO: 401210 - RNA, 19 nt, Artificial Sequence
  Description of Artificial Sequence: Synthetic oligonucleotide
cauaccuccagcaucggga

SEQ ID NO: 401211 - RNA, 19 nt, Artificial Sequence
  Description of Artificial Sequence: Synthetic oligonucleotide
agagauaccagcccuucaa

SEQ ID NO: 401212 - RNA, 19 nt, Artificial Sequence
  Description of Artificial Sequence: Synthetic oligonucleotide
acuuaacccaucagagacc

SEQ ID NO: 401213 - RNA, 19 nt, Artificial Sequence
  Description of Artificial Sequence: Synthetic oligonucleotide
ggcccuauggcuuucacug

SEQ ID NO: 401214 - RNA, 19 nt, Artificial Sequence
  Description of Artificial Sequence: Synthetic oligonucleotide
uucgccaugcccagcuggg

SEQ ID NO: 401215 - RNA, 19 nt, Artificial Sequence
  Description of Artificial Sequence: Synthetic oligonucleotide
aggauuguagauggugugg

SEQ ID NO: 401216 - RNA, 19 nt, Artificial Sequence
  Description of Artificial Sequence: Synthetic oligonucleotide
ugaguggggccacauaauc

SEQ ID NO: 401217 - RNA, 19 nt, Artificial Sequence
  Description of Artificial Sequence: Synthetic oligonucleotide
gaugcagccagcagaauuc

SEQ ID NO: 401218 - RNA, 19 nt, Artificial Sequence
  Description of Artificial Sequence: Synthetic oligonucleotide
ugaaugccuccaaagccca

SEQ ID NO: 401219 - RNA, 19 nt, Artificial Sequence
  Description of Artificial Sequence: Synthetic oligonucleotide
cagaguaugccauguguug

SEQ ID NO: 401220 - RNA, 19 nt, Artificial Sequence
  Description of Artificial Sequence: Synthetic oligonucleotide
cugagauggaauuguucag

SEQ ID NO: 401221 - RNA, 19 nt, Artificial Sequence
  Description of Artificial Sequence: Synthetic oligonucleotide
acguguauaugaaaugcag

SEQ ID NO: 401222 - RNA, 19 nt, Artificial Sequence
  Description of Artificial Sequence: Synthetic oligonucleotide
agccuuggacauuauuguc

SEQ ID NO: 401223 - RNA, 19 nt, Artificial Sequence
  Description of Artificial Sequence: Synthetic oligonucleotide
ucauucagugagaucuggu

SEQ ID NO: 401224 - RNA, 19 nt, Artificial Sequence
  Description of Artificial Sequence: Synthetic oligonucleotide
cuugucgaggagagcagcc

SEQ ID NO: 401225 - RNA, 19 nt, Artificial Sequence
  Description of Artificial Sequence: Synthetic oligonucleotide
guaagacacaccauggauc

SEQ ID NO: 401226 - RNA, 19 nt, Artificial Sequence
  Description of Artificial Sequence: Synthetic oligonucleotide
auagagauaccagcccuuc

SEQ ID NO: 401227 - RNA, 19 nt, Artificial Sequence
  Description of Artificial Sequence: Synthetic oligonucleotide
guaucucaucaucucuggg

SEQ ID NO: 401228 - RNA, 19 nt, Artificial Sequence
  Description of Artificial Sequence: Synthetic oligonucleotide
uaggggauucagauacuug

SEQ ID NO: 401229 - RNA, 19 nt, Artificial Sequence
  Description of Artificial Sequence: Synthetic oligonucleotide
ucgggacucagcucggaag

SEQ ID NO: 401230 - RNA, 19 nt, Artificial Sequence
  Description of Artificial Sequence: Synthetic oligonucleotide
guagaugugcacguagccc

SEQ ID NO: 401231 - RNA, 19 nt, Artificial Sequence
  Description of Artificial Sequence: Synthetic oligonucleotide
aguuacccacuccuaaaca

SEQ ID NO: 401232 - RNA, 19 nt, Artificial Sequence
  Description of Artificial Sequence: Synthetic oligonucleotide
cucgguugugagaacggcc

SEQ ID NO: 401233 - RNA, 19 nt, Artificial Sequence
  Description of Artificial Sequence: Synthetic oligonucleotide
aggccaaauagagauacca

SEQ ID NO: 401234 - RNA, 19 nt, Artificial Sequence
  Description of Artificial Sequence: Synthetic oligonucleotide
uccuuguaauauaacucau

SEQ ID NO: 401235 - RNA, 19 nt, Artificial Sequence
  Description of Artificial Sequence: Synthetic oligonucleotide
uccagguauauaguuuccc

SEQ ID NO: 401236 - RNA, 19 nt, Artificial Sequence
  Description of Artificial Sequence: Synthetic oligonucleotide
uuccagguauauaguuucc

SEQ ID NO: 401237 - RNA, 19 nt, Artificial Sequence
  Description of Artificial Sequence: Synthetic oligonucleotide
gcuaggaucaagcuuguca

SEQ ID NO: 401238 - RNA, 19 nt, Artificial Sequence
  Description of Artificial Sequence: Synthetic oligonucleotide
cacacacacacagaucugc

SEQ ID NO: 401239 - RNA, 19 nt, Artificial Sequence
  Description of Artificial Sequence: Synthetic oligonucleotide
agccauagaguuugaaaau

SEQ ID NO: 401240 - RNA, 19 nt, Artificial Sequence
  Description of Artificial Sequence: Synthetic oligonucleotide
cuugaguggggccacauaa

SEQ ID NO: 401241 - RNA, 19 nt, Artificial Sequence
  Description of Artificial Sequence: Synthetic oligonucleotide
gaccuuacuuaacccauca

SEQ ID NO: 401242 - RNA, 19 nt, Artificial Sequence
  Description of Artificial Sequence: Synthetic oligonucleotide
auagcguuccacagcacuc

SEQ ID NO: 401243 - RNA, 19 nt, Artificial Sequence
  Description of Artificial Sequence: Synthetic oligonucleotide
aggcccgucagccagagua

SEQ ID NO: 401244 - RNA, 19 nt, Artificial Sequence
  Description of Artificial Sequence: Synthetic oligonucleotide
ccauguguugcuuucuggg

SEQ ID NO: 401245 - RNA, 19 nt, Artificial Sequence
  Description of Artificial Sequence: Synthetic oligonucleotide
ugccucgguugugagaacg

SEQ ID NO: 401246 - RNA, 19 nt, Artificial Sequence
  Description of Artificial Sequence: Synthetic oligonucleotide
cugagcgaagcucugucug

SEQ ID NO: 401247 - RNA, 19 nt, Artificial Sequence
  Description of Artificial Sequence: Synthetic oligonucleotide
uggaaccagcgauugugcc

SEQ ID NO: 401248 - RNA, 19 nt, Artificial Sequence
  Description of Artificial Sequence: Synthetic oligonucleotide
uuuugaggauguagguauc

SEQ ID NO: 401249 - RNA, 19 nt, Artificial Sequence
  Description of Artificial Sequence: Synthetic oligonucleotide
ccaucaagggaaaacguac

SEQ ID NO: 401250 - RNA, 19 nt, Artificial Sequence
  Description of Artificial Sequence: Synthetic oligonucleotide
acacgaaguuguugagcac

SEQ ID NO: 401251 - RNA, 19 nt, Artificial Sequence
  Description of Artificial Sequence: Synthetic oligonucleotide
uccuaaacacuaggcauga

SEQ ID NO: 401252 - RNA, 19 nt, Artificial Sequence
  Description of Artificial Sequence: Synthetic oligonucleotide
aaacuccucccaguccgac

SEQ ID NO: 401253 - RNA, 19 nt, Artificial Sequence
  Description of Artificial Sequence: Synthetic oligonucleotide
cacgcucaucacuucagag

SEQ ID NO: 401254 - RNA, 19 nt, Artificial Sequence
  Description of Artificial Sequence: Synthetic oligonucleotide
caugagaucccuaguccuc

SEQ ID NO: 401255 - RNA, 19 nt, Artificial Sequence
  Description of Artificial Sequence: Synthetic oligonucleotide
cuggaaccagcgauugugc

SEQ ID NO: 401256 - RNA, 19 nt, Artificial Sequence
  Description of Artificial Sequence: Synthetic oligonucleotide
uggugcacaucccuccugu

SEQ ID NO: 401257 - RNA, 19 nt, Artificial Sequence
  Description of Artificial Sequence: Synthetic oligonucleotide
uucagacguguauaugaaa

SEQ ID NO: 401258 - RNA, 19 nt, Artificial Sequence
  Description of Artificial Sequence: Synthetic oligonucleotide
uagagauaccagcccuuca

SEQ ID NO: 401259 - RNA, 19 nt, Artificial Sequence
  Description of Artificial Sequence: Synthetic oligonucleotide
gaaccagcgauugugccuc

SEQ ID NO: 401260 - RNA, 19 nt, Artificial Sequence
  Description of Artificial Sequence: Synthetic oligonucleotide
caguuacccacuccuaaac

SEQ ID NO: 401261 - RNA, 19 nt, Artificial Sequence
  Description of Artificial Sequence: Synthetic oligonucleotide
cuuaacccaucagagacca

SEQ ID NO: 401262 - RNA, 19 nt, Artificial Sequence
  Description of Artificial Sequence: Synthetic oligonucleotide
gaguggggccacauaaucc

SEQ ID NO: 401263 - RNA, 19 nt, Artificial Sequence
  Description of Artificial Sequence: Synthetic oligonucleotide
caugcggcugccucgguug

SEQ ID NO: 401264 - RNA, 19 nt, Artificial Sequence
  Description of Artificial Sequence: Synthetic oligonucleotide
aggcgauugcugcugagga

SEQ ID NO: 401265 - RNA, 19 nt, Artificial Sequence
  Description of Artificial Sequence: Synthetic oligonucleotide
guagcagugcgucucuuuc

SEQ ID NO: 401266 - RNA, 19 nt, Artificial Sequence
  Description of Artificial Sequence: Synthetic oligonucleotide
aauagagauaccagcccuu

SEQ ID NO: 401267 - RNA, 19 nt, Artificial Sequence
  Description of Artificial Sequence: Synthetic oligonucleotide
ggcaugagaucccuagucc

SEQ ID NO: 401268 - RNA, 19 nt, Artificial Sequence
  Description of Artificial Sequence: Synthetic oligonucleotide
ugagcgaagcucugucugu

SEQ ID NO: 401269 - RNA, 19 nt, Artificial Sequence
  Description of Artificial Sequence: Synthetic oligonucleotide
gagugggcagaccauugac

SEQ ID NO: 401270 - RNA, 19 nt, Artificial Sequence
  Description of Artificial Sequence: Synthetic oligonucleotide
gacguguauaugaaaugca

SEQ ID NO: 401271 - RNA, 19 nt, Artificial Sequence
  Description of Artificial Sequence: Synthetic oligonucleotide
ugagaacggccacccagca

SEQ ID NO: 401272 - RNA, 19 nt, Artificial Sequence
  Description of Artificial Sequence: Synthetic oligonucleotide
accuuacuuaacccaucag

SEQ ID NO: 401273 - RNA, 19 nt, Artificial Sequence
  Description of Artificial Sequence: Synthetic oligonucleotide
ggucagucgguucagguca

SEQ ID NO: 401274 - RNA, 19 nt, Artificial Sequence
  Description of Artificial Sequence: Synthetic oligonucleotide
uccucugcgaccacaggua

SEQ ID NO: 401275 - RNA, 19 nt, Artificial Sequence
  Description of Artificial Sequence: Synthetic oligonucleotide
ccagguauauaguuucccc

SEQ ID NO: 401276 - RNA, 19 nt, Artificial Sequence
  Description of Artificial Sequence: Synthetic oligonucleotide
uuucugggucguagcagug

SEQ ID NO: 401277 - RNA, 19 nt, Artificial Sequence
  Description of Artificial Sequence: Synthetic oligonucleotide
agaucccuaguccucacua

SEQ ID NO: 401278 - RNA, 19 nt, Artificial Sequence
  Description of Artificial Sequence: Synthetic oligonucleotide
aaguuguugagcaccgcaa

SEQ ID NO: 401279 - RNA, 19 nt, Artificial Sequence
  Description of Artificial Sequence: Synthetic oligonucleotide
auaccagguucgccaugcc

SEQ ID NO: 401280 - RNA, 19 nt, Artificial Sequence
  Description of Artificial Sequence: Synthetic oligonucleotide
ggcucauucagugagaucu

SEQ ID NO: 401281 - RNA, 19 nt, Artificial Sequence
  Description of Artificial Sequence: Synthetic oligonucleotide
acguagcccaugcggcugc

SEQ ID NO: 401282 - RNA, 19 nt, Artificial Sequence
  Description of Artificial Sequence: Synthetic oligonucleotide
gacacgcucaucacuucag

SEQ ID NO: 401283 - RNA, 19 nt, Artificial Sequence
  Description of Artificial Sequence: Synthetic oligonucleotide
uccucacuagaguugucaa

SEQ ID NO: 401284 - RNA, 19 nt, Artificial Sequence
  Description of Artificial Sequence: Synthetic oligonucleotide
caccgcaaugcccugguug

SEQ ID NO: 401285 - RNA, 19 nt, Artificial Sequence
  Description of Artificial Sequence: Synthetic oligonucleotide
aacuccucccaguccgaca

SEQ ID NO: 401286 - RNA, 19 nt, Artificial Sequence
  Description of Artificial Sequence: Synthetic oligonucleotide
guacuugcccacgacacac

SEQ ID NO: 401287 - RNA, 19 nt, Artificial Sequence
  Description of Artificial Sequence: Synthetic oligonucleotide
cucccucagaugauagcag

SEQ ID NO: 401288 - RNA, 19 nt, Artificial Sequence
  Description of Artificial Sequence: Synthetic oligonucleotide
gaccauugaccacugccga

SEQ ID NO: 401289 - RNA, 19 nt, Artificial Sequence
  Description of Artificial Sequence: Synthetic oligonucleotide
guauauaguuuccccuguc

SEQ ID NO: 401290 - RNA, 19 nt, Artificial Sequence
  Description of Artificial Sequence: Synthetic oligonucleotide
cagcacauauauccuguug

SEQ ID NO: 401291 - RNA, 19 nt, Artificial Sequence
  Description of Artificial Sequence: Synthetic oligonucleotide
caguccgacacgcucauca

SEQ ID NO: 401292 - RNA, 19 nt, Artificial Sequence
  Description of Artificial Sequence: Synthetic oligonucleotide
caucagagaccagacuaag

SEQ ID NO: 401293 - RNA, 19 nt, Artificial Sequence
  Description of Artificial Sequence: Synthetic oligonucleotide
ugggaccaguuccagguau

SEQ ID NO: 401294 - RNA, 19 nt, Artificial Sequence
  Description of Artificial Sequence: Synthetic oligonucleotide
uugaguggggccacauaau

SEQ ID NO: 401295 - RNA, 19 nt, Artificial Sequence
  Description of Artificial Sequence: Synthetic oligonucleotide
uccccugucccuugagagc

SEQ ID NO: 401296 - RNA, 19 nt, Artificial Sequence
  Description of Artificial Sequence: Synthetic oligonucleotide
gguagggugagcacacagg

SEQ ID NO: 401297 - RNA, 19 nt, Artificial Sequence
  Description of Artificial Sequence: Synthetic oligonucleotide
gaccagacuaagaggaaga

SEQ ID NO: 401298 - RNA, 19 nt, Artificial Sequence
  Description of Artificial Sequence: Synthetic oligonucleotide
auuguucagcugaggcccc

SEQ ID NO: 401299 - RNA, 19 nt, Artificial Sequence
  Description of Artificial Sequence: Synthetic oligonucleotide
uaguucagacguguauaug

SEQ ID NO: 401300 - RNA, 19 nt, Artificial Sequence
  Description of Artificial Sequence: Synthetic oligonucleotide
guagguauccaggcuguug

SEQ ID NO: 401301 - RNA, 19 nt, Artificial Sequence
  Description of Artificial Sequence: Synthetic oligonucleotide
agguucgccaugcccagcu

SEQ ID NO: 401302 - RNA, 19 nt, Artificial Sequence
  Description of Artificial Sequence: Synthetic oligonucleotide
ccuuacuuaacccaucaga

SEQ ID NO: 401303 - RNA, 19 nt, Artificial Sequence
  Description of Artificial Sequence: Synthetic oligonucleotide
uggacauuauuguccccuc

SEQ ID NO: 401304 - RNA, 19 nt, Artificial Sequence
  Description of Artificial Sequence: Synthetic oligonucleotide
auugugccucgggucauac

SEQ ID NO: 401305 - RNA, 19 nt, Artificial Sequence
  Description of Artificial Sequence: Synthetic oligonucleotide
aauaggggauucagauacu

SEQ ID NO: 401306 - RNA, 19 nt, Artificial Sequence
  Description of Artificial Sequence: Synthetic oligonucleotide
guagaccuuuuccaaggga

SEQ ID NO: 401307 - RNA, 19 nt, Artificial Sequence
  Description of Artificial Sequence: Synthetic oligonucleotide
aucauuguugcugccucca

SEQ ID NO: 401308 - RNA, 19 nt, Artificial Sequence
  Description of Artificial Sequence: Synthetic oligonucleotide
cuaugucguagaugugcac

SEQ ID NO: 401309 - RNA, 19 nt, Artificial Sequence
  Description of Artificial Sequence: Synthetic oligonucleotide
guagucacggccugccaca

SEQ ID NO: 401310 - RNA, 19 nt, Artificial Sequence
  Description of Artificial Sequence: Synthetic oligonucleotide
ucaccagaccauguggguc

SEQ ID NO: 401311 - RNA, 19 nt, Artificial Sequence
  Description of Artificial Sequence: Synthetic oligonucleotide
gacauucggggagccagag

SEQ ID NO: 401312 - RNA, 19 nt, Artificial Sequence
  Description of Artificial Sequence: Synthetic oligonucleotide
cuuggacauuauugucccc

SEQ ID NO: 401313 - RNA, 19 nt, Artificial Sequence
  Description of Artificial Sequence: Synthetic oligonucleotide
caggcgauugcugcugagg

SEQ ID NO: 401314 - RNA, 19 nt, Artificial Sequence
  Description of Artificial Sequence: Synthetic oligonucleotide
uuaacccaucagagaccag

SEQ ID NO: 401315 - RNA, 19 nt, Artificial Sequence
  Description of Artificial Sequence: Synthetic oligonucleotide
uugucgaggagagcagcca

SEQ ID NO: 401316 - RNA, 19 nt, Artificial Sequence
  Description of Artificial Sequence: Synthetic oligonucleotide
cucuaggagcuugggaggc

SEQ ID NO: 401317 - RNA, 19 nt, Artificial Sequence
  Description of Artificial Sequence: Synthetic oligonucleotide
ucauuguugcugccuccaa

SEQ ID NO: 401318 - RNA, 19 nt, Artificial Sequence
  Description of Artificial Sequence: Synthetic oligonucleotide
acacgcucaucacuucaga

SEQ ID NO: 401319 - RNA, 19 nt, Artificial Sequence
  Description of Artificial Sequence: Synthetic oligonucleotide
ugcgaccacagguaaugua

SEQ ID NO: 401320 - RNA, 19 nt, Artificial Sequence
  Description of Artificial Sequence: Synthetic oligonucleotide
ccacgacacacacacacag

SEQ ID NO: 401321 - RNA, 19 nt, Artificial Sequence
  Description of Artificial Sequence: Synthetic oligonucleotide
gcccacgacacacacacac

SEQ ID NO: 401322 - RNA, 19 nt, Artificial Sequence
  Description of Artificial Sequence: Synthetic oligonucleotide
uccucccaguccgacacgc

SEQ ID NO: 401323 - RNA, 19 nt, Artificial Sequence
  Description of Artificial Sequence: Synthetic oligonucleotide
cacggcuaggacugcuagc

SEQ ID NO: 401324 - RNA, 19 nt, Artificial Sequence
  Description of Artificial Sequence: Synthetic oligonucleotide
gcucaccagaccauguggg

SEQ ID NO: 401325 - RNA, 19 nt, Artificial Sequence
  Description of Artificial Sequence: Synthetic oligonucleotide
auaggggauucagauacuu

SEQ ID NO: 401326 - RNA, 19 nt, Artificial Sequence
  Description of Artificial Sequence: Synthetic oligonucleotide
gcgaccacagguaauguac

SEQ ID NO: 401327 - RNA, 19 nt, Artificial Sequence
  Description of Artificial Sequence: Synthetic oligonucleotide
ugagaucccuaguccucac

SEQ ID NO: 401328 - RNA, 19 nt, Artificial Sequence
  Description of Artificial Sequence: Synthetic oligonucleotide
ggacauuauuguccccucc

SEQ ID NO: 401329 - RNA, 19 nt, Artificial Sequence
  Description of Artificial Sequence: Synthetic oligonucleotide
gaguaugccauguguugcu

SEQ ID NO: 401330 - RNA, 19 nt, Artificial Sequence
  Description of Artificial Sequence: Synthetic oligonucleotide
ggaagucugagcgaagcuc

SEQ ID NO: 401331 - RNA, 19 nt, Artificial Sequence
  Description of Artificial Sequence: Synthetic oligonucleotide
ccaggcacgucgcacaggc

SEQ ID NO: 401332 - RNA, 19 nt, Artificial Sequence
  Description of Artificial Sequence: Synthetic oligonucleotide
gagaacggccacccagcac

SEQ ID NO: 401333 - RNA, 19 nt, Artificial Sequence
  Description of Artificial Sequence: Synthetic oligonucleotide
agcaccgcaaugcccuggu

SEQ ID NO: 401334 - RNA, 19 nt, Artificial Sequence
  Description of Artificial Sequence: Synthetic oligonucleotide
ucaaugugucuccccucua

SEQ ID NO: 401335 - RNA, 19 nt, Artificial Sequence
  Description of Artificial Sequence: Synthetic oligonucleotide
cauagcguuccacagcacu

SEQ ID NO: 401336 - RNA, 19 nt, Artificial Sequence
  Description of Artificial Sequence: Synthetic oligonucleotide
gggucauaccuccagcauc

SEQ ID NO: 401337 - RNA, 19 nt, Artificial Sequence
  Description of Artificial Sequence: Synthetic oligonucleotide
ucauagcguuccacagcac

SEQ ID NO: 401338 - RNA, 19 nt, Artificial Sequence
  Description of Artificial Sequence: Synthetic oligonucleotide
aucagagaccagacuaaga

SEQ ID NO: 401339 - RNA, 19 nt, Artificial Sequence
  Description of Artificial Sequence: Synthetic oligonucleotide
uguccccuccaaucaagua

SEQ ID NO: 401340 - RNA, 19 nt, Artificial Sequence
  Description of Artificial Sequence: Synthetic oligonucleotide
uaguuuccccugucccuug

SEQ ID NO: 401341 - RNA, 19 nt, Artificial Sequence
  Description of Artificial Sequence: Synthetic oligonucleotide
auguagguauccaggcugu

SEQ ID NO: 401342 - RNA, 19 nt, Artificial Sequence
  Description of Artificial Sequence: Synthetic oligonucleotide
gguacuugucaguucucga

SEQ ID NO: 401343 - RNA, 19 nt, Artificial Sequence
  Description of Artificial Sequence: Synthetic oligonucleotide
ggauuguagauggugugga

SEQ ID NO: 401344 - RNA, 19 nt, Artificial Sequence
  Description of Artificial Sequence: Synthetic oligonucleotide
uugugccucgggucauacc

SEQ ID NO: 401345 - RNA, 19 nt, Artificial Sequence
  Description of Artificial Sequence: Synthetic oligonucleotide
guucagacguguauaugaa

SEQ ID NO: 401346 - RNA, 19 nt, Artificial Sequence
  Description of Artificial Sequence: Synthetic oligonucleotide
cagucgguucaggucaaag

SEQ ID NO: 401347 - RNA, 19 nt, Artificial Sequence
  Description of Artificial Sequence: Synthetic oligonucleotide
ggucauugugguagucacg

SEQ ID NO: 401348 - RNA, 19 nt, Artificial Sequence
  Description of Artificial Sequence: Synthetic oligonucleotide
aucuggaaccagcgauugu

SEQ ID NO: 401349 - RNA, 19 nt, Artificial Sequence
  Description of Artificial Sequence: Synthetic oligonucleotide
cuaguucagacguguauau

SEQ ID NO: 401350 - RNA, 19 nt, Artificial Sequence
  Description of Artificial Sequence: Synthetic oligonucleotide
cagugcgucucuuucaggu

SEQ ID NO: 401351 - RNA, 19 nt, Artificial Sequence
  Description of Artificial Sequence: Synthetic oligonucleotide
gugauacauaagggcacug

SEQ ID NO: 401352 - RNA, 19 nt, Artificial Sequence
  Description of Artificial Sequence: Synthetic oligonucleotide
guugggucagucgguucag

SEQ ID NO: 401353 - RNA, 19 nt, Artificial Sequence
  Description of Artificial Sequence: Synthetic oligonucleotide
acauucggggagccagaga

SEQ ID NO: 401354 - RNA, 19 nt, Artificial Sequence
  Description of Artificial Sequence: Synthetic oligonucleotide
guaguccucuccucugcga

SEQ ID NO: 401355 - RNA, 19 nt, Artificial Sequence
  Description of Artificial Sequence: Synthetic oligonucleotide
ggcgauugcugcugaggag

SEQ ID NO: 401356 - RNA, 19 nt, Artificial Sequence
  Description of Artificial Sequence: Synthetic oligonucleotide
ucuaggagcuugggaggcu

SEQ ID NO: 401357 - RNA, 19 nt, Artificial Sequence
  Description of Artificial Sequence: Synthetic oligonucleotide
cucauucuggugauacaua

SEQ ID NO: 401358 - RNA, 19 nt, Artificial Sequence
  Description of Artificial Sequence: Synthetic oligonucleotide
cauguguugcuuucugggu

SEQ ID NO: 401359 - RNA, 19 nt, Artificial Sequence
  Description of Artificial Sequence: Synthetic oligonucleotide
cguagaugugcacguagcc

SEQ ID NO: 401360 - RNA, 19 nt, Artificial Sequence
  Description of Artificial Sequence: Synthetic oligonucleotide
cucaaugugucuccccucu

SEQ ID NO: 401361 - RNA, 19 nt, Artificial Sequence
  Description of Artificial Sequence: Synthetic oligonucleotide
gugucccucagugggcuag

SEQ ID NO: 401362 - RNA, 19 nt, Artificial Sequence
  Description of Artificial Sequence: Synthetic oligonucleotide
caggagggaccuuacuuaa

SEQ ID NO: 401363 - RNA, 19 nt, Artificial Sequence
  Description of Artificial Sequence: Synthetic oligonucleotide
caagcuugucaugcagcug

SEQ ID NO: 401364 - RNA, 19 nt, Artificial Sequence
  Description of Artificial Sequence: Synthetic oligonucleotide
caaccagggucuccugcac

SEQ ID NO: 401365 - RNA, 19 nt, Artificial Sequence
  Description of Artificial Sequence: Synthetic oligonucleotide
agcuugucgaggagagcag

SEQ ID NO: 401366 - RNA, 19 nt, Artificial Sequence
  Description of Artificial Sequence: Synthetic oligonucleotide
aucgggacucagcucggaa

SEQ ID NO: 401367 - RNA, 19 nt, Artificial Sequence
  Description of Artificial Sequence: Synthetic oligonucleotide
agucugagcgaagcucugu

SEQ ID NO: 401368 - RNA, 19 nt, Artificial Sequence
  Description of Artificial Sequence: Synthetic oligonucleotide
guuggacauucggggagcc

SEQ ID NO: 401369 - RNA, 19 nt, Artificial Sequence
  Description of Artificial Sequence: Synthetic oligonucleotide
uggcuuucacugucccagu

SEQ ID NO: 401370 - RNA, 19 nt, Artificial Sequence
  Description of Artificial Sequence: Synthetic oligonucleotide
cacgacacacacacacaga

SEQ ID NO: 401371 - RNA, 19 nt, Artificial Sequence
  Description of Artificial Sequence: Synthetic oligonucleotide
caccuggugcacaucccuc

SEQ ID NO: 401372 - RNA, 19 nt, Artificial Sequence
  Description of Artificial Sequence: Synthetic oligonucleotide
gguauauaguuuccccugu

SEQ ID NO: 401373 - RNA, 19 nt, Artificial Sequence
  Description of Artificial Sequence: Synthetic oligonucleotide
cccaucagagaccagacua

SEQ ID NO: 401374 - RNA, 19 nt, Artificial Sequence
  Description of Artificial Sequence: Synthetic oligonucleotide
gcgauugcugcugaggaga

SEQ ID NO: 401375 - RNA, 19 nt, Artificial Sequence
  Description of Artificial Sequence: Synthetic oligonucleotide
acacacacacacagaucug

SEQ ID NO: 401376 - RNA, 19 nt, Artificial Sequence
  Description of Artificial Sequence: Synthetic oligonucleotide
gggucagucgguucagguc

SEQ ID NO: 401377 - RNA, 19 nt, Artificial Sequence
  Description of Artificial Sequence: Synthetic oligonucleotide
auuuggcacauggcauugu

SEQ ID NO: 401378 - RNA, 19 nt, Artificial Sequence
  Description of Artificial Sequence: Synthetic oligonucleotide
cuggaucuggaaccagcga

SEQ ID NO: 401379 - RNA, 19 nt, Artificial Sequence
  Description of Artificial Sequence: Synthetic oligonucleotide
cauaaucccaggaguuggu

SEQ ID NO: 401380 - RNA, 19 nt, Artificial Sequence
  Description of Artificial Sequence: Synthetic oligonucleotide
ugucguagaugugcacgua

SEQ ID NO: 401381 - RNA, 19 nt, Artificial Sequence
  Description of Artificial Sequence: Synthetic oligonucleotide
gagaccagacuaagaggaa

SEQ ID NO: 401382 - RNA, 19 nt, Artificial Sequence
  Description of Artificial Sequence: Synthetic oligonucleotide
ggaaccagcgauugugccu

SEQ ID NO: 401383 - RNA, 19 nt, Artificial Sequence
  Description of Artificial Sequence: Synthetic oligonucleotide
ccagcgauugugccucggg

SEQ ID NO: 401384 - RNA, 19 nt, Artificial Sequence
  Description of Artificial Sequence: Synthetic oligonucleotide
gagcucuaguucagacgug

SEQ ID NO: 401385 - RNA, 19 nt, Artificial Sequence
  Description of Artificial Sequence: Synthetic oligonucleotide
gucauaccuccagcaucgg

SEQ ID NO: 401386 - RNA, 19 nt, Artificial Sequence
  Description of Artificial Sequence: Synthetic oligonucleotide
ggagugggcagaccauuga

SEQ ID NO: 401387 - RNA, 19 nt, Artificial Sequence
  Description of Artificial Sequence: Synthetic oligonucleotide
aguaugccauguguugcuu

SEQ ID NO: 401388 - RNA, 19 nt, Artificial Sequence
  Description of Artificial Sequence: Synthetic oligonucleotide
uggcgguacuugucaguuc

SEQ ID NO: 401389 - RNA, 19 nt, Artificial Sequence
  Description of Artificial Sequence: Synthetic oligonucleotide
gucgcacaggcccgucagc

SEQ ID NO: 401390 - RNA, 19 nt, Artificial Sequence
  Description of Artificial Sequence: Synthetic oligonucleotide
gaugagccucaaugugucu

SEQ ID NO: 401391 - RNA, 19 nt, Artificial Sequence
  Description of Artificial Sequence: Synthetic oligonucleotide
gcuugucgaggagagcagc

SEQ ID NO: 401392 - RNA, 19 nt, Artificial Sequence
  Description of Artificial Sequence: Synthetic oligonucleotide
accagcgauugugccucgg

SEQ ID NO: 401393 - RNA, 19 nt, Artificial Sequence
  Description of Artificial Sequence: Synthetic oligonucleotide
acgucgcacaggcccguca

SEQ ID NO: 401394 - RNA, 19 nt, Artificial Sequence
  Description of Artificial Sequence: Synthetic oligonucleotide
acugaggauuguagauggu

SEQ ID NO: 401395 - RNA, 19 nt, Artificial Sequence
  Description of Artificial Sequence: Synthetic oligonucleotide
caacuuccaucaagggaaa

SEQ ID NO: 401396 - RNA, 19 nt, Artificial Sequence
  Description of Artificial Sequence: Synthetic oligonucleotide
acaggcccgucagccagag

SEQ ID NO: 401397 - RNA, 19 nt, Artificial Sequence
  Description of Artificial Sequence: Synthetic oligonucleotide
gccagaguaugccaugugu

SEQ ID NO: 401398 - RNA, 19 nt, Artificial Sequence
  Description of Artificial Sequence: Synthetic oligonucleotide
gagcucgccagcugcucaa

SEQ ID NO: 401399 - RNA, 19 nt, Artificial Sequence
  Description of Artificial Sequence: Synthetic oligonucleotide
uguagguauccaggcuguu

SEQ ID NO: 401400 - RNA, 19 nt, Artificial Sequence
  Description of Artificial Sequence: Synthetic oligonucleotide
gggguaucucaucaucucu

SEQ ID NO: 401401 - RNA, 19 nt, Artificial Sequence
  Description of Artificial Sequence: Synthetic oligonucleotide
ggauaauuucugggaucug

SEQ ID NO: 401402 - RNA, 19 nt, Artificial Sequence
  Description of Artificial Sequence: Synthetic oligonucleotide
gagagcucgccagcugcuc

SEQ ID NO: 401403 - RNA, 19 nt, Artificial Sequence
  Description of Artificial Sequence: Synthetic oligonucleotide
caggcacgucgcacaggcc

SEQ ID NO: 401404 - RNA, 19 nt, Artificial Sequence
  Description of Artificial Sequence: Synthetic oligonucleotide
ccagguucgccaugcccag

SEQ ID NO: 401405 - RNA, 19 nt, Artificial Sequence
  Description of Artificial Sequence: Synthetic oligonucleotide
gccucgguugugagaacgg

SEQ ID NO: 401406 - RNA, 19 nt, Artificial Sequence
  Description of Artificial Sequence: Synthetic oligonucleotide
gaauucgaugagccucaau

SEQ ID NO: 401407 - RNA, 19 nt, Artificial Sequence
  Description of Artificial Sequence: Synthetic oligonucleotide
cucaccagaccaugugggu

SEQ ID NO: 401408 - RNA, 19 nt, Artificial Sequence
  Description of Artificial Sequence: Synthetic oligonucleotide
cacucucccaauaggggau

SEQ ID NO: 401409 - RNA, 19 nt, Artificial Sequence
  Description of Artificial Sequence: Synthetic oligonucleotide
ccugucccuugagagcucg

SEQ ID NO: 401410 - RNA, 19 nt, Artificial Sequence
  Description of Artificial Sequence: Synthetic oligonucleotide
agaugugcacguagcccau

SEQ ID NO: 401411 - RNA, 19 nt, Artificial Sequence
  Description of Artificial Sequence: Synthetic oligonucleotide
gccugagauggaauuguuc

SEQ ID NO: 401412 - RNA, 19 nt, Artificial Sequence
  Description of Artificial Sequence: Synthetic oligonucleotide
cacccagcacauauauccu

SEQ ID NO: 401413 - RNA, 19 nt, Artificial Sequence
  Description of Artificial Sequence: Synthetic oligonucleotide
ccucgguugugagaacggc

SEQ ID NO: 401414 - RNA, 19 nt, Artificial Sequence
  Description of Artificial Sequence: Synthetic oligonucleotide
ggaaaacguacagucucua

SEQ ID NO: 401415 - RNA, 19 nt, Artificial Sequence
  Description of Artificial Sequence: Synthetic oligonucleotide
ggaccuuacuuaacccauc

SEQ ID NO: 401416 - RNA, 19 nt, Artificial Sequence
  Description of Artificial Sequence: Synthetic oligonucleotide
guaugccauguguugcuuu

SEQ ID NO: 401417 - RNA, 19 nt, Artificial Sequence
  Description of Artificial Sequence: Synthetic oligonucleotide
gccugccacagcauagaug

SEQ ID NO: 401418 - RNA, 19 nt, Artificial Sequence
  Description of Artificial Sequence: Synthetic oligonucleotide
caaagcaagcaggccccga

SEQ ID NO: 401419 - RNA, 19 nt, Artificial Sequence
  Description of Artificial Sequence: Synthetic oligonucleotide
cugccgagaugugcagcug

SEQ ID NO: 401420 - RNA, 19 nt, Artificial Sequence
  Description of Artificial Sequence: Synthetic oligonucleotide
gggaaaacguacagucucu

SEQ ID NO: 401421 - RNA, 19 nt, Artificial Sequence
  Description of Artificial Sequence: Synthetic oligonucleotide
gucguagcagugcgucucu

SEQ ID NO: 401422 - RNA, 19 nt, Artificial Sequence
  Description of Artificial Sequence: Synthetic oligonucleotide
ccuaguccucacuagaguu

SEQ ID NO: 401423 - RNA, 19 nt, Artificial Sequence
  Description of Artificial Sequence: Synthetic oligonucleotide
cagcgauugugccucgggu

SEQ ID NO: 401424 - RNA, 19 nt, Artificial Sequence
  Description of Artificial Sequence: Synthetic oligonucleotide
gccgguagacaucaaggau

SEQ ID NO: 401425 - RNA, 19 nt, Artificial Sequence
  Description of Artificial Sequence: Synthetic oligonucleotide
cugccucgguugugagaac

SEQ ID NO: 401426 - RNA, 19 nt, Artificial Sequence
  Description of Artificial Sequence: Synthetic oligonucleotide
cagguucgccaugcccagc

SEQ ID NO: 401427 - RNA, 19 nt, Artificial Sequence
  Description of Artificial Sequence: Synthetic oligonucleotide
ccgagaugugcagcuguag

SEQ ID NO: 401428 - RNA, 19 nt, Artificial Sequence
  Description of Artificial Sequence: Synthetic oligonucleotide
ccacugccgagaugugcag

SEQ ID NO: 401429 - RNA, 19 nt, Artificial Sequence
  Description of Artificial Sequence: Synthetic oligonucleotide
cgacacacacacacagauc

SEQ ID NO: 401430 - RNA, 19 nt, Artificial Sequence
  Description of Artificial Sequence: Synthetic oligonucleotide
gcaucgggacucagcucgg

SEQ ID NO: 401431 - RNA, 19 nt, Artificial Sequence
  Description of Artificial Sequence: Synthetic oligonucleotide
gggaccuuacuuaacccau

SEQ ID NO: 401432 - RNA, 19 nt, Artificial Sequence
  Description of Artificial Sequence: Synthetic oligonucleotide
cccacgacacacacacaca

SEQ ID NO: 401433 - RNA, 19 nt, Artificial Sequence
  Description of Artificial Sequence: Synthetic oligonucleotide
ucguagcagugcgucucuu

SEQ ID NO: 401434 - RNA, 19 nt, Artificial Sequence
  Description of Artificial Sequence: Synthetic oligonucleotide
ccagaguaugccauguguu

SEQ ID NO: 401435 - RNA, 19 nt, Artificial Sequence
  Description of Artificial Sequence: Synthetic oligonucleotide
cccucgggguggcucacag

SEQ ID NO: 401436 - RNA, 19 nt, Artificial Sequence
  Description of Artificial Sequence: Synthetic oligonucleotide
cuggcgguacuugucaguu

SEQ ID NO: 401437 - RNA, 19 nt, Artificial Sequence
  Description of Artificial Sequence: Synthetic oligonucleotide
cuccagcaucgggacucag

SEQ ID NO: 401438 - RNA, 19 nt, Artificial Sequence
  Description of Artificial Sequence: Synthetic oligonucleotide
ccaguuccagguauauagu

SEQ ID NO: 401439 - RNA, 19 nt, Artificial Sequence
  Description of Artificial Sequence: Synthetic oligonucleotide
ucccucgggguggcucaca

SEQ ID NO: 401440 - RNA, 19 nt, Artificial Sequence
  Description of Artificial Sequence: Synthetic oligonucleotide
caucgggacucagcucgga

SEQ ID NO: 401441 - RNA, 19 nt, Artificial Sequence
  Description of Artificial Sequence: Synthetic oligonucleotide
gcuggcgguacuugucagu

SEQ ID NO: 401442 - RNA, 19 nt, Artificial Sequence
  Description of Artificial Sequence: Synthetic oligonucleotide
cucugcgaccacagguaau

SEQ ID NO: 401443 - RNA, 19 nt, Artificial Sequence
  Description of Artificial Sequence: Synthetic oligonucleotide
cugggucguagcagugcgu

SEQ ID NO: 401444 - RNA, 19 nt, Artificial Sequence
  Description of Artificial Sequence: Synthetic oligonucleotide
cagggccccuucauacacu

SEQ ID NO: 401445 - RNA, 19 nt, Artificial Sequence
  Description of Artificial Sequence: Synthetic oligonucleotide
gcgucucuuucagguaguc

SEQ ID NO: 401446 - RNA, 19 nt, Artificial Sequence
  Description of Artificial Sequence: Synthetic oligonucleotide
ccucugcgaccacagguaa

SEQ ID NO: 401447 - RNA, 19 nt, Artificial Sequence
  Description of Artificial Sequence: Synthetic oligonucleotide
cacgucgcacaggcccguc

SEQ ID NO: 401448 - RNA, 19 nt, Artificial Sequence
  Description of Artificial Sequence: Synthetic oligonucleotide
cccuaguccucacuagagu

SEQ ID NO: 401449 - RNA, 19 nt, Artificial Sequence
  Description of Artificial Sequence: Synthetic oligonucleotide
gaacggccacccagcacau

SEQ ID NO: 401450 - RNA, 19 nt, Artificial Sequence
  Description of Artificial Sequence: Synthetic oligonucleotide
ggcuaggaucaagcuuguc

SEQ ID NO: 401451 - RNA, 19 nt, Artificial Sequence
  Description of Artificial Sequence: Synthetic oligonucleotide
gggucguagcagugcgucu

SEQ ID NO: 401452 - RNA, 19 nt, Artificial Sequence
  Description of Artificial Sequence: Synthetic oligonucleotide
cagcuguagcaagccaccu

SEQ ID NO: 401453 - RNA, 19 nt, Artificial Sequence
  Description of Artificial Sequence: Synthetic oligonucleotide
cugcgaccacagguaaugu

SEQ ID NO: 401454 - RNA, 19 nt, Artificial Sequence
  Description of Artificial Sequence: Synthetic oligonucleotide
gcgguacuugucaguucuc

SEQ ID NO: 401455 - RNA, 19 nt, Artificial Sequence
  Description of Artificial Sequence: Synthetic oligonucleotide
gcuguugggucagucgguu

SEQ ID NO: 401456 - RNA, 19 nt, Artificial Sequence
  Description of Artificial Sequence: Synthetic oligonucleotide
ggccugccacagcauagau

SEQ ID NO: 401457 - RNA, 19 nt, Artificial Sequence
  Description of Artificial Sequence: Synthetic oligonucleotide
ggcccgucagccagaguau

SEQ ID NO: 401458 - RNA, 19 nt, Artificial Sequence
  Description of Artificial Sequence: Synthetic oligonucleotide
gggcuaggaucaagcuugu

SEQ ID NO: 401459 - RNA, 19 nt, Artificial Sequence
  Description of Artificial Sequence: Synthetic oligonucleotide
cguagcagugcgucucuuu

SEQ ID NO: 401460 - RNA, 19 nt, Artificial Sequence
  Description of Artificial Sequence: Synthetic oligonucleotide
ccaguccgacacgcucauc

SEQ ID NO: 401461 - RNA, 19 nt, Artificial Sequence
  Description of Artificial Sequence: Synthetic oligonucleotide
ccgcaaugcccugguugga

SEQ ID NO: 401462 - RNA, 19 nt, Artificial Sequence
  Description of Artificial Sequence: Synthetic oligonucleotide
cccaguccgacacgcucau

SEQ ID NO: 401463 - RNA, 19 nt, Artificial Sequence
  Description of Artificial Sequence: Synthetic oligonucleotide
ccaugcggcugccucgguu

SEQ ID NO: 401464 - RNA, 19 nt, Artificial Sequence
  Description of Artificial Sequence: Synthetic oligonucleotide
cgauugugccucgggucau

SEQ ID NO: 401465 - RNA, 19 nt, Artificial Sequence
  Description of Artificial Sequence: Synthetic oligonucleotide
aaauaugagaauuuaaugg

SEQ ID NO: 401466 - RNA, 19 nt, Artificial Sequence
  Description of Artificial Sequence: Synthetic oligonucleotide
ucuagaaugagccuugggg

SEQ ID NO: 401467 - RNA, 19 nt, Artificial Sequence
  Description of Artificial Sequence: Synthetic oligonucleotide
uuuaaaggguucuagaaug

SEQ ID NO: 401468 - RNA, 19 nt, Artificial Sequence
  Description of Artificial Sequence: Synthetic oligonucleotide
aaggguucuagaaugagcc

SEQ ID NO: 401469 - RNA, 19 nt, Artificial Sequence
  Description of Artificial Sequence: Synthetic oligonucleotide
ugcaguaaauucaaaaccc

SEQ ID NO: 401470 - RNA, 19 nt, Artificial Sequence
  Description of Artificial Sequence: Synthetic oligonucleotide
auuuaauggagaaaugacc

SEQ ID NO: 401471 - RNA, 19 nt, Artificial Sequence
  Description of Artificial Sequence: Synthetic oligonucleotide
aaggcugugucauucuugg

SEQ ID NO: 401472 - RNA, 19 nt, Artificial Sequence
  Description of Artificial Sequence: Synthetic oligonucleotide
ugagccgucaaacaagaag

SEQ ID NO: 401473 - RNA, 19 nt, Artificial Sequence
  Description of Artificial Sequence: Synthetic oligonucleotide
cucacaugcaguuuaauug

SEQ ID NO: 401474 - RNA, 19 nt, Artificial Sequence
  Description of Artificial Sequence: Synthetic oligonucleotide
guaaucagcgcccaggucc

SEQ ID NO: 401475 - RNA, 19 nt, Artificial Sequence
  Description of Artificial Sequence: Synthetic oligonucleotide
uuuaauugugggaagggaa

SEQ ID NO: 401476 - RNA, 19 nt, Artificial Sequence
  Description of Artificial Sequence: Synthetic oligonucleotide
uaugagaauuuaauggaga

SEQ ID NO: 401477 - RNA, 19 nt, Artificial Sequence
  Description of Artificial Sequence: Synthetic oligonucleotide
gaaguaguccagcucaggg

SEQ ID NO: 401478 - RNA, 19 nt, Artificial Sequence
  Description of Artificial Sequence: Synthetic oligonucleotide
acucacucgaggcucagcc

SEQ ID NO: 401479 - RNA, 19 nt, Artificial Sequence
  Description of Artificial Sequence: Synthetic oligonucleotide
uuaauugugggaagggaac

SEQ ID NO: 401480 - RNA, 19 nt, Artificial Sequence
  Description of Artificial Sequence: Synthetic oligonucleotide
acguccacagcuuacagag

SEQ ID NO: 401481 - RNA, 19 nt, Artificial Sequence
  Description of Artificial Sequence: Synthetic oligonucleotide
uugggugcacugcagaccg

SEQ ID NO: 401482 - RNA, 19 nt, Artificial Sequence
  Description of Artificial Sequence: Synthetic oligonucleotide
ugcucgauagcucugggug

SEQ ID NO: 401483 - RNA, 19 nt, Artificial Sequence
  Description of Artificial Sequence: Synthetic oligonucleotide
ucgcauauacgcuccaugg

SEQ ID NO: 401484 - RNA, 19 nt, Artificial Sequence
  Description of Artificial Sequence: Synthetic oligonucleotide
aaugaugugcacagacacc

SEQ ID NO: 401485 - RNA, 19 nt, Artificial Sequence
  Description of Artificial Sequence: Synthetic oligonucleotide
cagauuaacaccugccagg

SEQ ID NO: 401486 - RNA, 19 nt, Artificial Sequence
  Description of Artificial Sequence: Synthetic oligonucleotide
guaaguaccaccugucuug

SEQ ID NO: 401487 - RNA, 19 nt, Artificial Sequence
  Description of Artificial Sequence: Synthetic oligonucleotide
caaagcucagcucacggcg

SEQ ID NO: 401488 - RNA, 19 nt, Artificial Sequence
  Description of Artificial Sequence: Synthetic oligonucleotide
uguaggcuaguacauaggu

SEQ ID NO: 401489 - RNA, 19 nt, Artificial Sequence
  Description of Artificial Sequence: Synthetic oligonucleotide
uuuagaguaugguaggaau

SEQ ID NO: 401490 - RNA, 19 nt, Artificial Sequence
  Description of Artificial Sequence: Synthetic oligonucleotide
uuaauggagaaaugaccag

SEQ ID NO: 401491 - RNA, 19 nt, Artificial Sequence
  Description of Artificial Sequence: Synthetic oligonucleotide
caaugaugugcacagacac

SEQ ID NO: 401492 - RNA, 19 nt, Artificial Sequence
  Description of Artificial Sequence: Synthetic oligonucleotide
ugagaaccccgcuaagugg

SEQ ID NO: 401493 - RNA, 19 nt, Artificial Sequence
  Description of Artificial Sequence: Synthetic oligonucleotide
ucuuuacacugacagcugc

SEQ ID NO: 401494 - RNA, 19 nt, Artificial Sequence
  Description of Artificial Sequence: Synthetic oligonucleotide
auaaggcugauugaggaag

SEQ ID NO: 401495 - RNA, 19 nt, Artificial Sequence
  Description of Artificial Sequence: Synthetic oligonucleotide
agagagguuguaaucagcg

SEQ ID NO: 401496 - RNA, 19 nt, Artificial Sequence
  Description of Artificial Sequence: Synthetic oligonucleotide
gaggccaucaugccgacgc

SEQ ID NO: 401497 - RNA, 19 nt, Artificial Sequence
  Description of Artificial Sequence: Synthetic oligonucleotide
ugaaguagcauauggccuc

SEQ ID NO: 401498 - RNA, 19 nt, Artificial Sequence
  Description of Artificial Sequence: Synthetic oligonucleotide
guacauagguaugugagcc

SEQ ID NO: 401499 - RNA, 19 nt, Artificial Sequence
  Description of Artificial Sequence: Synthetic oligonucleotide
uggccuuggguuuauacug

SEQ ID NO: 401500 - RNA, 19 nt, Artificial Sequence
  Description of Artificial Sequence: Synthetic oligonucleotide
guuguaaucagcgcccagg

SEQ ID NO: 401501 - RNA, 19 nt, Artificial Sequence
  Description of Artificial Sequence: Synthetic oligonucleotide
caaugcaauaaauaugaga

SEQ ID NO: 401502 - RNA, 19 nt, Artificial Sequence
  Description of Artificial Sequence: Synthetic oligonucleotide
uauacuggucagcggcucg

SEQ ID NO: 401503 - RNA, 19 nt, Artificial Sequence
  Description of Artificial Sequence: Synthetic oligonucleotide
cuuacagaggagaaggcca

SEQ ID NO: 401504 - RNA, 19 nt, Artificial Sequence
  Description of Artificial Sequence: Synthetic oligonucleotide
aaggccacguggcagaaaa

SEQ ID NO: 401505 - RNA, 19 nt, Artificial Sequence
  Description of Artificial Sequence: Synthetic oligonucleotide
aucaugccgacgcugcucg

SEQ ID NO: 401506 - RNA, 19 nt, Artificial Sequence
  Description of Artificial Sequence: Synthetic oligonucleotide
ugugagccgucaaacaaga

SEQ ID NO: 401507 - RNA, 19 nt, Artificial Sequence
  Description of Artificial Sequence: Synthetic oligonucleotide
uuuauacuggucagcggcu

SEQ ID NO: 401508 - RNA, 19 nt, Artificial Sequence
  Description of Artificial Sequence: Synthetic oligonucleotide
auaugagaauuuaauggag

SEQ ID NO: 401509 - RNA, 19 nt, Artificial Sequence
  Description of Artificial Sequence: Synthetic oligonucleotide
agcggcaaagcucagcuca

SEQ ID NO: 401510 - RNA, 19 nt, Artificial Sequence
  Description of Artificial Sequence: Synthetic oligonucleotide
gaugccuaggaugugugcc

SEQ ID NO: 401511 - RNA, 19 nt, Artificial Sequence
  Description of Artificial Sequence: Synthetic oligonucleotide
cauauacgcuccauggcag

SEQ ID NO: 401512 - RNA, 19 nt, Artificial Sequence
  Description of Artificial Sequence: Synthetic oligonucleotide
uucuagaaugagccuuggg

SEQ ID NO: 401513 - RNA, 19 nt, Artificial Sequence
  Description of Artificial Sequence: Synthetic oligonucleotide
aguaugguaggaauuggag

SEQ ID NO: 401514 - RNA, 19 nt, Artificial Sequence
  Description of Artificial Sequence: Synthetic oligonucleotide
aacccaagcagcaauuugu

SEQ ID NO: 401515 - RNA, 19 nt, Artificial Sequence
  Description of Artificial Sequence: Synthetic oligonucleotide
augaugugcacagacaccu

SEQ ID NO: 401516 - RNA, 19 nt, Artificial Sequence
  Description of Artificial Sequence: Synthetic oligonucleotide
acucaggacugcauaaggc

SEQ ID NO: 401517 - RNA, 19 nt, Artificial Sequence
  Description of Artificial Sequence: Synthetic oligonucleotide
ugaguucagucguguaagg

SEQ ID NO: 401518 - RNA, 19 nt, Artificial Sequence
  Description of Artificial Sequence: Synthetic oligonucleotide
gugauaguccuguuucuag

SEQ ID NO: 401519 - RNA, 19 nt, Artificial Sequence
  Description of Artificial Sequence: Synthetic oligonucleotide
cuagcuuccgaagugugag

SEQ ID NO: 401520 - RNA, 19 nt, Artificial Sequence
  Description of Artificial Sequence: Synthetic oligonucleotide
uuaacaccugccagguccc

SEQ ID NO: 401521 - RNA, 19 nt, Artificial Sequence
  Description of Artificial Sequence: Synthetic oligonucleotide
ugaacugaguucagucgug

SEQ ID NO: 401522 - RNA, 19 nt, Artificial Sequence
  Description of Artificial Sequence: Synthetic oligonucleotide
gguguaggcuaguacauag

SEQ ID NO: 401523 - RNA, 19 nt, Artificial Sequence
  Description of Artificial Sequence: Synthetic oligonucleotide
uuacagaggagaaggccac

SEQ ID NO: 401524 - RNA, 19 nt, Artificial Sequence
  Description of Artificial Sequence: Synthetic oligonucleotide
accuguuugaugcagucaa

SEQ ID NO: 401525 - RNA, 19 nt, Artificial Sequence
  Description of Artificial Sequence: Synthetic oligonucleotide
ugcaucaugggugcagccg

SEQ ID NO: 401526 - RNA, 19 nt, Artificial Sequence
  Description of Artificial Sequence: Synthetic oligonucleotide
caucgcacaccugagagag

SEQ ID NO: 401527 - RNA, 19 nt, Artificial Sequence
  Description of Artificial Sequence: Synthetic oligonucleotide
ucgucucacuagcugagcc

SEQ ID NO: 401528 - RNA, 19 nt, Artificial Sequence
  Description of Artificial Sequence: Synthetic oligonucleotide
ugucgucucacuagcugag

SEQ ID NO: 401529 - RNA, 19 nt, Artificial Sequence
  Description of Artificial Sequence: Synthetic oligonucleotide
uaaaggguucuagaaugag

SEQ ID NO: 401530 - RNA, 19 nt, Artificial Sequence
  Description of Artificial Sequence: Synthetic oligonucleotide
agugagucuggaaauuuuc

SEQ ID NO: 401531 - RNA, 19 nt, Artificial Sequence
  Description of Artificial Sequence: Synthetic oligonucleotide
ucaccaauagcaccccacu

SEQ ID NO: 401532 - RNA, 19 nt, Artificial Sequence
  Description of Artificial Sequence: Synthetic oligonucleotide
aaagcuacucaggacugca

SEQ ID NO: 401533 - RNA, 19 nt, Artificial Sequence
  Description of Artificial Sequence: Synthetic oligonucleotide
ugucgcaccucgcgcaugg

SEQ ID NO: 401534 - RNA, 19 nt, Artificial Sequence
  Description of Artificial Sequence: Synthetic oligonucleotide
ucgaaggcuacgcaggcuc

SEQ ID NO: 401535 - RNA, 19 nt, Artificial Sequence
  Description of Artificial Sequence: Synthetic oligonucleotide
aaccccgcuaaguggcugg

SEQ ID NO: 401536 - RNA, 19 nt, Artificial Sequence
  Description of Artificial Sequence: Synthetic oligonucleotide
aggucuagcccucccguac

SEQ ID NO: 401537 - RNA, 19 nt, Artificial Sequence
  Description of Artificial Sequence: Synthetic oligonucleotide
caucucgaaggcuacgcag

SEQ ID NO: 401538 - RNA, 19 nt, Artificial Sequence
  Description of Artificial Sequence: Synthetic oligonucleotide
agcggcucgaagcuuuugg

SEQ ID NO: 401539 - RNA, 19 nt, Artificial Sequence
  Description of Artificial Sequence: Synthetic oligonucleotide
uuuccaucgcacaccugag

SEQ ID NO: 401540 - RNA, 19 nt, Artificial Sequence
  Description of Artificial Sequence: Synthetic oligonucleotide
cuuguugugcucugcauca

SEQ ID NO: 401541 - RNA, 19 nt, Artificial Sequence
  Description of Artificial Sequence: Synthetic oligonucleotide
cugagaaccccgcuaagug

SEQ ID NO: 401542 - RNA, 19 nt, Artificial Sequence
  Description of Artificial Sequence: Synthetic oligonucleotide
ugagaauuuaauggagaaa

SEQ ID NO: 401543 - RNA, 19 nt, Artificial Sequence
  Description of Artificial Sequence: Synthetic oligonucleotide
gagagguuguaaucagcgc

SEQ ID NO: 401544 - RNA, 19 nt, Artificial Sequence
  Description of Artificial Sequence: Synthetic oligonucleotide
uaauugugggaagggaaca

SEQ ID NO: 401545 - RNA, 19 nt, Artificial Sequence
  Description of Artificial Sequence: Synthetic oligonucleotide
cacgaaguaguccagcuca

SEQ ID NO: 401546 - RNA, 19 nt, Artificial Sequence
  Description of Artificial Sequence: Synthetic oligonucleotide
uaccccgccacucgguagg

SEQ ID NO: 401547 - RNA, 19 nt, Artificial Sequence
  Description of Artificial Sequence: Synthetic oligonucleotide
agaguaugguaggaauugg

SEQ ID NO: 401548 - RNA, 19 nt, Artificial Sequence
  Description of Artificial Sequence: Synthetic oligonucleotide
gaaccagcccucuccauac

SEQ ID NO: 401549 - RNA, 19 nt, Artificial Sequence
  Description of Artificial Sequence: Synthetic oligonucleotide
caugguucuuuacacugac

SEQ ID NO: 401550 - RNA, 19 nt, Artificial Sequence
  Description of Artificial Sequence: Synthetic oligonucleotide
ugcagucaauguaguaggc

SEQ ID NO: 401551 - RNA, 19 nt, Artificial Sequence
  Description of Artificial Sequence: Synthetic oligonucleotide
ggcucgaagcuuuugguag

SEQ ID NO: 401552 - RNA, 19 nt, Artificial Sequence
  Description of Artificial Sequence: Synthetic oligonucleotide
aaggaguaccccgccacuc

SEQ ID NO: 401553 - RNA, 19 nt, Artificial Sequence
  Description of Artificial Sequence: Synthetic oligonucleotide
cuuggcacgcaacaguguc

SEQ ID NO: 401554 - RNA, 19 nt, Artificial Sequence
  Description of Artificial Sequence: Synthetic oligonucleotide
acugagagcacaucucgaa

SEQ ID NO: 401555 - RNA, 19 nt, Artificial Sequence
  Description of Artificial Sequence: Synthetic oligonucleotide
gucucacuagcugagcccg

SEQ ID NO: 401556 - RNA, 19 nt, Artificial Sequence
  Description of Artificial Sequence: Synthetic oligonucleotide
uccaaaggaguaccccgcc

SEQ ID NO: 401557 - RNA, 19 nt, Artificial Sequence
  Description of Artificial Sequence: Synthetic oligonucleotide
ugauagcagggccucuagc

SEQ ID NO: 401558 - RNA, 19 nt, Artificial Sequence
  Description of Artificial Sequence: Synthetic oligonucleotide
aggaauuggagcaucucug

SEQ ID NO: 401559 - RNA, 19 nt, Artificial Sequence
  Description of Artificial Sequence: Synthetic oligonucleotide
agaguuggcgaagccauag

SEQ ID NO: 401560 - RNA, 19 nt, Artificial Sequence
  Description of Artificial Sequence: Synthetic oligonucleotide
aucaccaauagcaccccac

SEQ ID NO: 401561 - RNA, 19 nt, Artificial Sequence
  Description of Artificial Sequence: Synthetic oligonucleotide
ucaguccagacaugguucu

SEQ ID NO: 401562 - RNA, 19 nt, Artificial Sequence
  Description of Artificial Sequence: Synthetic oligonucleotide
ggagaguuccucuagcuuc

SEQ ID NO: 401563 - RNA, 19 nt, Artificial Sequence
  Description of Artificial Sequence: Synthetic oligonucleotide
cacggcaaggccugggagg

SEQ ID NO: 401564 - RNA, 19 nt, Artificial Sequence
  Description of Artificial Sequence: Synthetic oligonucleotide
uggucgcccucaaugaugu

SEQ ID NO: 401565 - RNA, 19 nt, Artificial Sequence
  Description of Artificial Sequence: Synthetic oligonucleotide
ggguuuauacuggucagcg

SEQ ID NO: 401566 - RNA, 19 nt, Artificial Sequence
  Description of Artificial Sequence: Synthetic oligonucleotide
uaaucagcgcccagguccu

SEQ ID NO: 401567 - RNA, 19 nt, Artificial Sequence
  Description of Artificial Sequence: Synthetic oligonucleotide
aguugguuuggccagcauu

SEQ ID NO: 401568 - RNA, 19 nt, Artificial Sequence
  Description of Artificial Sequence: Synthetic oligonucleotide
auccuugcucgauagcucu

SEQ ID NO: 401569 - RNA, 19 nt, Artificial Sequence
  Description of Artificial Sequence: Synthetic oligonucleotide
gcuccaaaggaguaccccg

SEQ ID NO: 401570 - RNA, 19 nt, Artificial Sequence
  Description of Artificial Sequence: Synthetic oligonucleotide
agacaugguucuuuacacu

SEQ ID NO: 401571 - RNA, 19 nt, Artificial Sequence
  Description of Artificial Sequence: Synthetic oligonucleotide
cugagagcacaucucgaag

SEQ ID NO: 401572 - RNA, 19 nt, Artificial Sequence
  Description of Artificial Sequence: Synthetic oligonucleotide
cuggcgcacuucuacaccc

SEQ ID NO: 401573 - RNA, 19 nt, Artificial Sequence
  Description of Artificial Sequence: Synthetic oligonucleotide
ucauuccggggaaccagcc

SEQ ID NO: 401574 - RNA, 19 nt, Artificial Sequence
  Description of Artificial Sequence: Synthetic oligonucleotide
auuuucccagacacuugcc

SEQ ID NO: 401575 - RNA, 19 nt, Artificial Sequence
  Description of Artificial Sequence: Synthetic oligonucleotide
caaggcugugucauucuug

SEQ ID NO: 401576 - RNA, 19 nt, Artificial Sequence
  Description of Artificial Sequence: Synthetic oligonucleotide
ugugguagcgugccaccga

SEQ ID NO: 401577 - RNA, 19 nt, Artificial Sequence
  Description of Artificial Sequence: Synthetic oligonucleotide
ugggacacgugugauaguc

SEQ ID NO: 401578 - RNA, 19 nt, Artificial Sequence
  Description of Artificial Sequence: Synthetic oligonucleotide
gaagugugagcugucgcac

SEQ ID NO: 401579 - RNA, 19 nt, Artificial Sequence
  Description of Artificial Sequence: Synthetic oligonucleotide
cucauuccggggaaccagc

SEQ ID NO: 401580 - RNA, 19 nt, Artificial Sequence
  Description of Artificial Sequence: Synthetic oligonucleotide
accgaugaccgugucauug

SEQ ID NO: 401581 - RNA, 19 nt, Artificial Sequence
  Description of Artificial Sequence: Synthetic oligonucleotide
cucgcauauacgcuccaug

SEQ ID NO: 401582 - RNA, 19 nt, Artificial Sequence
  Description of Artificial Sequence: Synthetic oligonucleotide
auagguaugugagccguca

SEQ ID NO: 401583 - RNA, 19 nt, Artificial Sequence
  Description of Artificial Sequence: Synthetic oligonucleotide
uggguguaggcuaguacau

SEQ ID NO: 401584 - RNA, 19 nt, Artificial Sequence
  Description of Artificial Sequence: Synthetic oligonucleotide
ccugucaagggcuguaagg

SEQ ID NO: 401585 - RNA, 19 nt, Artificial Sequence
  Description of Artificial Sequence: Synthetic oligonucleotide
uuggcacgcaacaguguca

SEQ ID NO: 401586 - RNA, 19 nt, Artificial Sequence
  Description of Artificial Sequence: Synthetic oligonucleotide
guuuaauugugggaaggga

SEQ ID NO: 401587 - RNA, 19 nt, Artificial Sequence
  Description of Artificial Sequence: Synthetic oligonucleotide
gguuuauacuggucagcgg

SEQ ID NO: 401588 - RNA, 19 nt, Artificial Sequence
  Description of Artificial Sequence: Synthetic oligonucleotide
ucccguacacucacucgag

SEQ ID NO: 401589 - RNA, 19 nt, Artificial Sequence
  Description of Artificial Sequence: Synthetic oligonucleotide
gcauauacgcuccauggca

SEQ ID NO: 401590 - RNA, 19 nt, Artificial Sequence
  Description of Artificial Sequence: Synthetic oligonucleotide
gagagagguuguaaucagc

SEQ ID NO: 401591 - RNA, 19 nt, Artificial Sequence
  Description of Artificial Sequence: Synthetic oligonucleotide
ucaccguaaguaccaccug

SEQ ID NO: 401592 - RNA, 19 nt, Artificial Sequence
  Description of Artificial Sequence: Synthetic oligonucleotide
guaugugagccgucaaaca

SEQ ID NO: 401593 - RNA, 19 nt, Artificial Sequence
  Description of Artificial Sequence: Synthetic oligonucleotide
accguaggugggcacacug

SEQ ID NO: 401594 - RNA, 19 nt, Artificial Sequence
  Description of Artificial Sequence: Synthetic oligonucleotide
ugugauaguccuguuucua

SEQ ID NO: 401595 - RNA, 19 nt, Artificial Sequence
  Description of Artificial Sequence: Synthetic oligonucleotide
uacgcuccauggcagaguu

SEQ ID NO: 401596 - RNA, 19 nt, Artificial Sequence
  Description of Artificial Sequence: Synthetic oligonucleotide
auauacgcuccauggcaga

SEQ ID NO: 401597 - RNA, 19 nt, Artificial Sequence
  Description of Artificial Sequence: Synthetic oligonucleotide
guccagauuaacaccugcc

SEQ ID NO: 401598 - RNA, 19 nt, Artificial Sequence
  Description of Artificial Sequence: Synthetic oligonucleotide
gguaugugagccgucaaac

SEQ ID NO: 401599 - RNA, 19 nt, Artificial Sequence
  Description of Artificial Sequence: Synthetic oligonucleotide
gaguaugguaggaauugga

SEQ ID NO: 401600 - RNA, 19 nt, Artificial Sequence
  Description of Artificial Sequence: Synthetic oligonucleotide
agcugagcccgccuuggag

SEQ ID NO: 401601 - RNA, 19 nt, Artificial Sequence
  Description of Artificial Sequence: Synthetic oligonucleotide
ugcgcugugguagcgugcc

SEQ ID NO: 401602 - RNA, 19 nt, Artificial Sequence
  Description of Artificial Sequence: Synthetic oligonucleotide
cuugcucgauagcucuggg

SEQ ID NO: 401603 - RNA, 19 nt, Artificial Sequence
  Description of Artificial Sequence: Synthetic oligonucleotide
acaucucgaaggcuacgca

SEQ ID NO: 401604 - RNA, 19 nt, Artificial Sequence
  Description of Artificial Sequence: Synthetic oligonucleotide
cuacucaggacugcauaag

SEQ ID NO: 401605 - RNA, 19 nt, Artificial Sequence
  Description of Artificial Sequence: Synthetic oligonucleotide
augccuaggaugugugcca

SEQ ID NO: 401606 - RNA, 19 nt, Artificial Sequence
  Description of Artificial Sequence: Synthetic oligonucleotide
accuccaugcaagaggcga

SEQ ID NO: 401607 - RNA, 19 nt, Artificial Sequence
  Description of Artificial Sequence: Synthetic oligonucleotide
agguaugugagccgucaaa

SEQ ID NO: 401608 - RNA, 19 nt, Artificial Sequence
  Description of Artificial Sequence: Synthetic oligonucleotide
ugcaagaggcgaugcgcug

SEQ ID NO: 401609 - RNA, 19 nt, Artificial Sequence
  Description of Artificial Sequence: Synthetic oligonucleotide
agcaucaagagcagcauuu

SEQ ID NO: 401610 - RNA, 19 nt, Artificial Sequence
  Description of Artificial Sequence: Synthetic oligonucleotide
guaccaccugucuuggcac

SEQ ID NO: 401611 - RNA, 19 nt, Artificial Sequence
  Description of Artificial Sequence: Synthetic oligonucleotide
gaugaccgugucauuggug

SEQ ID NO: 401612 - RNA, 19 nt, Artificial Sequence
  Description of Artificial Sequence: Synthetic oligonucleotide
uuccggugcuguccgcagg

SEQ ID NO: 401613 - RNA, 19 nt, Artificial Sequence
  Description of Artificial Sequence: Synthetic oligonucleotide
gaccgugucauuggugccc

SEQ ID NO: 401614 - RNA, 19 nt, Artificial Sequence
  Description of Artificial Sequence: Synthetic oligonucleotide
ggucauccuugcucgauag

SEQ ID NO: 401615 - RNA, 19 nt, Artificial Sequence
  Description of Artificial Sequence: Synthetic oligonucleotide
guguaggcuaguacauagg

SEQ ID NO: 401616 - RNA, 19 nt, Artificial Sequence
  Description of Artificial Sequence: Synthetic oligonucleotide
ucaaggcugugucauucuu

SEQ ID NO: 401617 - RNA, 19 nt, Artificial Sequence
  Description of Artificial Sequence: Synthetic oligonucleotide
aggcgaugcgcugugguag

SEQ ID NO: 401618 - RNA, 19 nt, Artificial Sequence
  Description of Artificial Sequence: Synthetic oligonucleotide
agaggcgaugcgcuguggu

SEQ ID NO: 401619 - RNA, 19 nt, Artificial Sequence
  Description of Artificial Sequence: Synthetic oligonucleotide
uaaguggcugggacacgug

SEQ ID NO: 401620 - RNA, 19 nt, Artificial Sequence
  Description of Artificial Sequence: Synthetic oligonucleotide
gugauagcagggccucuag

SEQ ID NO: 401621 - RNA, 19 nt, Artificial Sequence
  Description of Artificial Sequence: Synthetic oligonucleotide
cucaccguaaguaccaccu

SEQ ID NO: 401622 - RNA, 19 nt, Artificial Sequence
  Description of Artificial Sequence: Synthetic oligonucleotide
gucguguaaggguggggcc

SEQ ID NO: 401623 - RNA, 19 nt, Artificial Sequence
  Description of Artificial Sequence: Synthetic oligonucleotide
cugucgucucacuagcuga

SEQ ID NO: 401624 - RNA, 19 nt, Artificial Sequence
  Description of Artificial Sequence: Synthetic oligonucleotide
cugcucgcauauacgcucc

SEQ ID NO: 401625 - RNA, 19 nt, Artificial Sequence
  Description of Artificial Sequence: Synthetic oligonucleotide
gguagcgugccaccgauga

SEQ ID NO: 401626 - RNA, 19 nt, Artificial Sequence
  Description of Artificial Sequence: Synthetic oligonucleotide
caucaugggugcagccggg

SEQ ID NO: 401627 - RNA, 19 nt, Artificial Sequence
  Description of Artificial Sequence: Synthetic oligonucleotide
ugcccuccaacagcgugcg

SEQ ID NO: 401628 - RNA, 19 nt, Artificial Sequence
  Description of Artificial Sequence: Synthetic oligonucleotide
aggguucuagaaugagccu

SEQ ID NO: 401629 - RNA, 19 nt, Artificial Sequence
  Description of Artificial Sequence: Synthetic oligonucleotide
uuauacuggucagcggcuc

SEQ ID NO: 401630 - RNA, 19 nt, Artificial Sequence
  Description of Artificial Sequence: Synthetic oligonucleotide
aggagaguuccucuagcuu

SEQ ID NO: 401631 - RNA, 19 nt, Artificial Sequence
  Description of Artificial Sequence: Synthetic oligonucleotide
guucuagaaugagccuugg

SEQ ID NO: 401632 - RNA, 19 nt, Artificial Sequence
  Description of Artificial Sequence: Synthetic oligonucleotide
ucccgggucguccugucaa

SEQ ID NO: 401633 - RNA, 19 nt, Artificial Sequence
  Description of Artificial Sequence: Synthetic oligonucleotide
caccaauagcaccccacug

SEQ ID NO: 401634 - RNA, 19 nt, Artificial Sequence
  Description of Artificial Sequence: Synthetic oligonucleotide
ggggcugucgucucacuag

SEQ ID NO: 401635 - RNA, 19 nt, Artificial Sequence
  Description of Artificial Sequence: Synthetic oligonucleotide
cucccguacacucacucga

SEQ ID NO: 401636 - RNA, 19 nt, Artificial Sequence
  Description of Artificial Sequence: Synthetic oligonucleotide
uagcuuccgaagugugagc

SEQ ID NO: 401637 - RNA, 19 nt, Artificial Sequence
  Description of Artificial Sequence: Synthetic oligonucleotide
gguucuagaaugagccuug

SEQ ID NO: 401638 - RNA, 19 nt, Artificial Sequence
  Description of Artificial Sequence: Synthetic oligonucleotide
caaagcuacucaggacugc

SEQ ID NO: 401639 - RNA, 19 nt, Artificial Sequence
  Description of Artificial Sequence: Synthetic oligonucleotide
uccuugcucgauagcucug

SEQ ID NO: 401640 - RNA, 19 nt, Artificial Sequence
  Description of Artificial Sequence: Synthetic oligonucleotide
uagguaugugagccgucaa

SEQ ID NO: 401641 - RNA, 19 nt, Artificial Sequence
  Description of Artificial Sequence: Synthetic oligonucleotide
caccuuuccaucgcacacc

SEQ ID NO: 401642 - RNA, 19 nt, Artificial Sequence
  Description of Artificial Sequence: Synthetic oligonucleotide
ugggguccucauuccgggg

SEQ ID NO: 401643 - RNA, 19 nt, Artificial Sequence
  Description of Artificial Sequence: Synthetic oligonucleotide
ugucuccaagucaguggcu

SEQ ID NO: 401644 - RNA, 19 nt, Artificial Sequence
  Description of Artificial Sequence: Synthetic oligonucleotide
acagcgugcgguggucgcc

SEQ ID NO: 401645 - RNA, 19 nt, Artificial Sequence
  Description of Artificial Sequence: Synthetic oligonucleotide
ucucacuagcugagcccgc

SEQ ID NO: 401646 - RNA, 19 nt, Artificial Sequence
  Description of Artificial Sequence: Synthetic oligonucleotide
agaccguaggugggcacac

SEQ ID NO: 401647 - RNA, 19 nt, Artificial Sequence
  Description of Artificial Sequence: Synthetic oligonucleotide
agcgugccaccgaugaccg

SEQ ID NO: 401648 - RNA, 19 nt, Artificial Sequence
  Description of Artificial Sequence: Synthetic oligonucleotide
gauuaacaccugccagguc

SEQ ID NO: 401649 - RNA, 19 nt, Artificial Sequence
  Description of Artificial Sequence: Synthetic oligonucleotide
acgugugauaguccuguuu

SEQ ID NO: 401650 - RNA, 19 nt, Artificial Sequence
  Description of Artificial Sequence: Synthetic oligonucleotide
gcgguggucgcccucaaug

SEQ ID NO: 401651 - RNA, 19 nt, Artificial Sequence
  Description of Artificial Sequence: Synthetic oligonucleotide
ccguacacucacucgaggc

SEQ ID NO: 401652 - RNA, 19 nt, Artificial Sequence
  Description of Artificial Sequence: Synthetic oligonucleotide
gcugcucgcauauacgcuc

SEQ ID NO: 401653 - RNA, 19 nt, Artificial Sequence
  Description of Artificial Sequence: Synthetic oligonucleotide
ggcugauugaggaagaggu

SEQ ID NO: 401654 - RNA, 19 nt, Artificial Sequence
  Description of Artificial Sequence: Synthetic oligonucleotide
accaagggccaugggcuac

SEQ ID NO: 401655 - RNA, 19 nt, Artificial Sequence
  Description of Artificial Sequence: Synthetic oligonucleotide
guaaggguggggcccucug

SEQ ID NO: 401656 - RNA, 19 nt, Artificial Sequence
  Description of Artificial Sequence: Synthetic oligonucleotide
gaaguagcauauggccuca

SEQ ID NO: 401657 - RNA, 19 nt, Artificial Sequence
  Description of Artificial Sequence: Synthetic oligonucleotide
caagaggcgaugcgcugug

SEQ ID NO: 401658 - RNA, 19 nt, Artificial Sequence
  Description of Artificial Sequence: Synthetic oligonucleotide
aagaggcgaugcgcugugg

SEQ ID NO: 401659 - RNA, 19 nt, Artificial Sequence
  Description of Artificial Sequence: Synthetic oligonucleotide
gucauccuugcucgauagc

SEQ ID NO: 401660 - RNA, 19 nt, Artificial Sequence
  Description of Artificial Sequence: Synthetic oligonucleotide
gcuaguacauagguaugug

SEQ ID NO: 401661 - RNA, 19 nt, Artificial Sequence
  Description of Artificial Sequence: Synthetic oligonucleotide
cugcaucaugggugcagcc

SEQ ID NO: 401662 - RNA, 19 nt, Artificial Sequence
  Description of Artificial Sequence: Synthetic oligonucleotide
guggucgcccucaaugaug

SEQ ID NO: 401663 - RNA, 19 nt, Artificial Sequence
  Description of Artificial Sequence: Synthetic oligonucleotide
gacacgugugauaguccug

SEQ ID NO: 401664 - RNA, 19 nt, Artificial Sequence
  Description of Artificial Sequence: Synthetic oligonucleotide
auaguugguuuggccagca

SEQ ID NO: 401665 - RNA, 19 nt, Artificial Sequence
  Description of Artificial Sequence: Synthetic oligonucleotide
ccagacaugguucuuuaca

SEQ ID NO: 401666 - RNA, 19 nt, Artificial Sequence
  Description of Artificial Sequence: Synthetic oligonucleotide
augcaagaggcgaugcgcu

SEQ ID NO: 401667 - RNA, 19 nt, Artificial Sequence
  Description of Artificial Sequence: Synthetic oligonucleotide
cauauggccucagccucag

SEQ ID NO: 401668 - RNA, 19 nt, Artificial Sequence
  Description of Artificial Sequence: Synthetic oligonucleotide
aggcuccaaaggaguaccc

SEQ ID NO: 401669 - RNA, 19 nt, Artificial Sequence
  Description of Artificial Sequence: Synthetic oligonucleotide
guccgcagggucagguugg

SEQ ID NO: 401670 - RNA, 19 nt, Artificial Sequence
  Description of Artificial Sequence: Synthetic oligonucleotide
guaggugggcacacugagc

SEQ ID NO: 401671 - RNA, 19 nt, Artificial Sequence
  Description of Artificial Sequence: Synthetic oligonucleotide
uggcgcacuucuacaccca

SEQ ID NO: 401672 - RNA, 19 nt, Artificial Sequence
  Description of Artificial Sequence: Synthetic oligonucleotide
ucgcucacaugcaguuuaa

SEQ ID NO: 401673 - RNA, 19 nt, Artificial Sequence
  Description of Artificial Sequence: Synthetic oligonucleotide
ugcucgcauauacgcucca

SEQ ID NO: 401674 - RNA, 19 nt, Artificial Sequence
  Description of Artificial Sequence: Synthetic oligonucleotide
augcuguccagaggcgcgg

SEQ ID NO: 401675 - RNA, 19 nt, Artificial Sequence
  Description of Artificial Sequence: Synthetic oligonucleotide
ucuccauaccccgcccugu

SEQ ID NO: 401676 - RNA, 19 nt, Artificial Sequence
  Description of Artificial Sequence: Synthetic oligonucleotide
caacagcgugcgguggucg

SEQ ID NO: 401677 - RNA, 19 nt, Artificial Sequence
  Description of Artificial Sequence: Synthetic oligonucleotide
cucgcgcaugggcagcacc

SEQ ID NO: 401678 - RNA, 19 nt, Artificial Sequence
  Description of Artificial Sequence: Synthetic oligonucleotide
cacguccacagcuuacaga

SEQ ID NO: 401679 - RNA, 19 nt, Artificial Sequence
  Description of Artificial Sequence: Synthetic oligonucleotide
gcuacucaggacugcauaa

SEQ ID NO: 401680 - RNA, 19 nt, Artificial Sequence
  Description of Artificial Sequence: Synthetic oligonucleotide
acgaaguaguccagcucag

SEQ ID NO: 401681 - RNA, 19 nt, Artificial Sequence
  Description of Artificial Sequence: Synthetic oligonucleotide
ugguagcgugccaccgaug

SEQ ID NO: 401682 - RNA, 19 nt, Artificial Sequence
  Description of Artificial Sequence: Synthetic oligonucleotide
gguuguaaucagcgcccag

SEQ ID NO: 401683 - RNA, 19 nt, Artificial Sequence
  Description of Artificial Sequence: Synthetic oligonucleotide
ggccuuggguuuauacugg

SEQ ID NO: 401684 - RNA, 19 nt, Artificial Sequence
  Description of Artificial Sequence: Synthetic oligonucleotide
aguaccccgccacucggua

SEQ ID NO: 401685 - RNA, 19 nt, Artificial Sequence
  Description of Artificial Sequence: Synthetic oligonucleotide
ggaugccuaggaugugugc

SEQ ID NO: 401686 - RNA, 19 nt, Artificial Sequence
  Description of Artificial Sequence: Synthetic oligonucleotide
auacuggucagcggcucga

SEQ ID NO: 401687 - RNA, 19 nt, Artificial Sequence
  Description of Artificial Sequence: Synthetic oligonucleotide
caucaugccgacgcugcuc

SEQ ID NO: 401688 - RNA, 19 nt, Artificial Sequence
  Description of Artificial Sequence: Synthetic oligonucleotide
augcgcugugguagcgugc

SEQ ID NO: 401689 - RNA, 19 nt, Artificial Sequence
  Description of Artificial Sequence: Synthetic oligonucleotide
ugccuaggaugugugccac

SEQ ID NO: 401690 - RNA, 19 nt, Artificial Sequence
  Description of Artificial Sequence: Synthetic oligonucleotide
cuccaugcaagaggcgaug

SEQ ID NO: 401691 - RNA, 19 nt, Artificial Sequence
  Description of Artificial Sequence: Synthetic oligonucleotide
aggcuaguacauagguaug

SEQ ID NO: 401692 - RNA, 19 nt, Artificial Sequence
  Description of Artificial Sequence: Synthetic oligonucleotide
cauaccccgcccugucgug

SEQ ID NO: 401693 - RNA, 19 nt, Artificial Sequence
  Description of Artificial Sequence: Synthetic oligonucleotide
guaggcuaguacauaggua

SEQ ID NO: 401694 - RNA, 19 nt, Artificial Sequence
  Description of Artificial Sequence: Synthetic oligonucleotide
uguaaggguggggcccucu

SEQ ID NO: 401695 - RNA, 19 nt, Artificial Sequence
  Description of Artificial Sequence: Synthetic oligonucleotide
gaaccccgcuaaguggcug

SEQ ID NO: 401696 - RNA, 19 nt, Artificial Sequence
  Description of Artificial Sequence: Synthetic oligonucleotide
auacgcuccauggcagagu

SEQ ID NO: 401697 - RNA, 19 nt, Artificial Sequence
  Description of Artificial Sequence: Synthetic oligonucleotide
uagcugagcccgccuugga

SEQ ID NO: 401698 - RNA, 19 nt, Artificial Sequence
  Description of Artificial Sequence: Synthetic oligonucleotide
gaggcgaugcgcuguggua

SEQ ID NO: 401699 - RNA, 19 nt, Artificial Sequence
  Description of Artificial Sequence: Synthetic oligonucleotide
guagcgugccaccgaugac

SEQ ID NO: 401700 - RNA, 19 nt, Artificial Sequence
  Description of Artificial Sequence: Synthetic oligonucleotide
gaaggcuacgcaggcucca

SEQ ID NO: 401701 - RNA, 19 nt, Artificial Sequence
  Description of Artificial Sequence: Synthetic oligonucleotide
auugccacguccacagcuu

SEQ ID NO: 401702 - RNA, 19 nt, Artificial Sequence
  Description of Artificial Sequence: Synthetic oligonucleotide
aaggcuacgcaggcuccaa

SEQ ID NO: 401703 - RNA, 19 nt, Artificial Sequence
  Description of Artificial Sequence: Synthetic oligonucleotide
uaguugguuuggccagcau

SEQ ID NO: 401704 - RNA, 19 nt, Artificial Sequence
  Description of Artificial Sequence: Synthetic oligonucleotide
ggcuccaaaggaguacccc

SEQ ID NO: 401705 - RNA, 19 nt, Artificial Sequence
  Description of Artificial Sequence: Synthetic oligonucleotide
gagcguggcuucacggcug

SEQ ID NO: 401706 - RNA, 19 nt, Artificial Sequence
  Description of Artificial Sequence: Synthetic oligonucleotide
uuccggggaaccagcccuc

SEQ ID NO: 401707 - RNA, 19 nt, Artificial Sequence
  Description of Artificial Sequence: Synthetic oligonucleotide
cuguaacugagagcacauc

SEQ ID NO: 401708 - RNA, 19 nt, Artificial Sequence
  Description of Artificial Sequence: Synthetic oligonucleotide
guuuccggugcuguccgca

SEQ ID NO: 401709 - RNA, 19 nt, Artificial Sequence
  Description of Artificial Sequence: Synthetic oligonucleotide
aaucagcgcccagguccuc

SEQ ID NO: 401710 - RNA, 19 nt, Artificial Sequence
  Description of Artificial Sequence: Synthetic oligonucleotide
agguuguaaucagcgccca

SEQ ID NO: 401711 - RNA, 19 nt, Artificial Sequence
  Description of Artificial Sequence: Synthetic oligonucleotide
gcugugguagcgugccacc

SEQ ID NO: 401712 - RNA, 19 nt, Artificial Sequence
  Description of Artificial Sequence: Synthetic oligonucleotide
ucccugcauuuagaguaug

SEQ ID NO: 401713 - RNA, 19 nt, Artificial Sequence
  Description of Artificial Sequence: Synthetic oligonucleotide
ggacacgugugauaguccu

SEQ ID NO: 401714 - RNA, 19 nt, Artificial Sequence
  Description of Artificial Sequence: Synthetic oligonucleotide
ccuugcucgauagcucugg

SEQ ID NO: 401715 - RNA, 19 nt, Artificial Sequence
  Description of Artificial Sequence: Synthetic oligonucleotide
cagucguguaagggugggg

SEQ ID NO: 401716 - RNA, 19 nt, Artificial Sequence
  Description of Artificial Sequence: Synthetic oligonucleotide
cgcauauacgcuccauggc

SEQ ID NO: 401717 - RNA, 19 nt, Artificial Sequence
  Description of Artificial Sequence: Synthetic oligonucleotide
cccgcuaaguggcugggac

SEQ ID NO: 401718 - RNA, 19 nt, Artificial Sequence
  Description of Artificial Sequence: Synthetic oligonucleotide
caccguaaguaccaccugu

SEQ ID NO: 401719 - RNA, 19 nt, Artificial Sequence
  Description of Artificial Sequence: Synthetic oligonucleotide
gucgucucacuagcugagc

SEQ ID NO: 401720 - RNA, 19 nt, Artificial Sequence
  Description of Artificial Sequence: Synthetic oligonucleotide
augccgacgcugcucgcau

SEQ ID NO: 401721 - RNA, 19 nt, Artificial Sequence
  Description of Artificial Sequence: Synthetic oligonucleotide
ccgaagugugagcugucgc

SEQ ID NO: 401722 - RNA, 19 nt, Artificial Sequence
  Description of Artificial Sequence: Synthetic oligonucleotide
ucacggcuggcaggucuag

SEQ ID NO: 401723 - RNA, 19 nt, Artificial Sequence
  Description of Artificial Sequence: Synthetic oligonucleotide
ccagcccucuccauacccc

SEQ ID NO: 401724 - RNA, 19 nt, Artificial Sequence
  Description of Artificial Sequence: Synthetic oligonucleotide
cuaaguggcugggacacgu

SEQ ID NO: 401725 - RNA, 19 nt, Artificial Sequence
  Description of Artificial Sequence: Synthetic oligonucleotide
ucaugccgacgcugcucgc

SEQ ID NO: 401726 - RNA, 19 nt, Artificial Sequence
  Description of Artificial Sequence: Synthetic oligonucleotide
acggcgguccaggcugugg

SEQ ID NO: 401727 - RNA, 19 nt, Artificial Sequence
  Description of Artificial Sequence: Synthetic oligonucleotide
cgcacuucuacacccauga

SEQ ID NO: 401728 - RNA, 19 nt, Artificial Sequence
  Description of Artificial Sequence: Synthetic oligonucleotide
accccgcccugucgugggc

SEQ ID NO: 401729 - RNA, 19 nt, Artificial Sequence
  Description of Artificial Sequence: Synthetic oligonucleotide
gcacuucuacacccaugag

SEQ ID NO: 401730 - RNA, 19 nt, Artificial Sequence
  Description of Artificial Sequence: Synthetic oligonucleotide
gaguuggcgaagccauagu

SEQ ID NO: 401731 - RNA, 19 nt, Artificial Sequence
  Description of Artificial Sequence: Synthetic oligonucleotide
ucacggcgguccaggcugu

SEQ ID NO: 401732 - RNA, 19 nt, Artificial Sequence
  Description of Artificial Sequence: Synthetic oligonucleotide
gaccaagggccaugggcua

SEQ ID NO: 401733 - RNA, 19 nt, Artificial Sequence
  Description of Artificial Sequence: Synthetic oligonucleotide
cuccggccggccuccacug

SEQ ID NO: 401734 - RNA, 19 nt, Artificial Sequence
  Description of Artificial Sequence: Synthetic oligonucleotide
cccguacacucacucgagg

SEQ ID NO: 401735 - RNA, 19 nt, Artificial Sequence
  Description of Artificial Sequence: Synthetic oligonucleotide
aucgcacaccugagagagg

SEQ ID NO: 401736 - RNA, 19 nt, Artificial Sequence
  Description of Artificial Sequence: Synthetic oligonucleotide
cagcgugcgguggucgccc

SEQ ID NO: 401737 - RNA, 19 nt, Artificial Sequence
  Description of Artificial Sequence: Synthetic oligonucleotide
ccggaaugcuguccagagg

SEQ ID NO: 401738 - RNA, 19 nt, Artificial Sequence
  Description of Artificial Sequence: Synthetic oligonucleotide
gguccggaaugcuguccag

SEQ ID NO: 401739 - RNA, 19 nt, Artificial Sequence
  Description of Artificial Sequence: Synthetic oligonucleotide
gccuaggaugugugccacg

SEQ ID NO: 401740 - RNA, 19 nt, Artificial Sequence
  Description of Artificial Sequence: Synthetic oligonucleotide
ugagcccgccuuggaggag

SEQ ID NO: 401741 - RNA, 19 nt, Artificial Sequence
  Description of Artificial Sequence: Synthetic oligonucleotide
cugcacggcaaggccuggg

SEQ ID NO: 401742 - RNA, 19 nt, Artificial Sequence
  Description of Artificial Sequence: Synthetic oligonucleotide
gcucacaugcaguuuaauu

SEQ ID NO: 401743 - RNA, 19 nt, Artificial Sequence
  Description of Artificial Sequence: Synthetic oligonucleotide
accccgcuaaguggcuggg

SEQ ID NO: 401744 - RNA, 19 nt, Artificial Sequence
  Description of Artificial Sequence: Synthetic oligonucleotide
gggacacgugugauagucc

SEQ ID NO: 401745 - RNA, 19 nt, Artificial Sequence
  Description of Artificial Sequence: Synthetic oligonucleotide
gcaccucgcgcaugggcag

SEQ ID NO: 401746 - RNA, 19 nt, Artificial Sequence
  Description of Artificial Sequence: Synthetic oligonucleotide
gagcccgccuuggaggaga

SEQ ID NO: 401747 - RNA, 19 nt, Artificial Sequence
  Description of Artificial Sequence: Synthetic oligonucleotide
gcacaucucgaaggcuacg

SEQ ID NO: 401748 - RNA, 19 nt, Artificial Sequence
  Description of Artificial Sequence: Synthetic oligonucleotide
ggcuaguacauagguaugu

SEQ ID NO: 401749 - RNA, 19 nt, Artificial Sequence
  Description of Artificial Sequence: Synthetic oligonucleotide
aggcuacgcaggcuccaaa

SEQ ID NO: 401750 - RNA, 19 nt, Artificial Sequence
  Description of Artificial Sequence: Synthetic oligonucleotide
ugcgguggucgcccucaau

SEQ ID NO: 401751 - RNA, 19 nt, Artificial Sequence
  Description of Artificial Sequence: Synthetic oligonucleotide
gcacgcaacagugucacgu

SEQ ID NO: 401752 - RNA, 19 nt, Artificial Sequence
  Description of Artificial Sequence: Synthetic oligonucleotide
ucguccugucaagggcugu

SEQ ID NO: 401753 - RNA, 19 nt, Artificial Sequence
  Description of Artificial Sequence: Synthetic oligonucleotide
agaaccccgcuaaguggcu

SEQ ID NO: 401754 - RNA, 19 nt, Artificial Sequence
  Description of Artificial Sequence: Synthetic oligonucleotide
cgcuaaguggcugggacac

SEQ ID NO: 401755 - RNA, 19 nt, Artificial Sequence
  Description of Artificial Sequence: Synthetic oligonucleotide
gcuaaguggcugggacacg

SEQ ID NO: 401756 - RNA, 19 nt, Artificial Sequence
  Description of Artificial Sequence: Synthetic oligonucleotide
uccggccggccuccacuga

SEQ ID NO: 401757 - RNA, 19 nt, Artificial Sequence
  Description of Artificial Sequence: Synthetic oligonucleotide
cgggucguccugucaaggg

SEQ ID NO: 401758 - RNA, 19 nt, Artificial Sequence
  Description of Artificial Sequence: Synthetic oligonucleotide
cgacgcugcucgcauauac

SEQ ID NO: 401759 - RNA, 19 nt, Artificial Sequence
  Description of Artificial Sequence: Synthetic oligonucleotide
cacggcuggcaggucuagc

SEQ ID NO: 401760 - RNA, 19 nt, Artificial Sequence
  Description of Artificial Sequence: Synthetic oligonucleotide
ggguguggagcguggcuuc

SEQ ID NO: 401761 - RNA, 19 nt, Artificial Sequence
  Description of Artificial Sequence: Synthetic oligonucleotide
gugguagcgugccaccgau

SEQ ID NO: 401762 - RNA, 19 nt, Artificial Sequence
  Description of Artificial Sequence: Synthetic oligonucleotide
ccguggccagaccagauga

SEQ ID NO: 401763 - RNA, 19 nt, Artificial Sequence
  Description of Artificial Sequence: Synthetic oligonucleotide
gguaggaauuggagcaucu

SEQ ID NO: 401764 - RNA, 19 nt, Artificial Sequence
  Description of Artificial Sequence: Synthetic oligonucleotide
gcagaguuggcgaagccau

SEQ ID NO: 401765 - RNA, 19 nt, Artificial Sequence
  Description of Artificial Sequence: Synthetic oligonucleotide
ggguucuagaaugagccuu

SEQ ID NO: 401766 - RNA, 19 nt, Artificial Sequence
  Description of Artificial Sequence: Synthetic oligonucleotide
caccucgcgcaugggcagc

SEQ ID NO: 401767 - RNA, 19 nt, Artificial Sequence
  Description of Artificial Sequence: Synthetic oligonucleotide
cccucccguacacucacuc

SEQ ID NO: 401768 - RNA, 19 nt, Artificial Sequence
  Description of Artificial Sequence: Synthetic oligonucleotide
cccugucgugggcagggcc

SEQ ID NO: 401769 - RNA, 19 nt, Artificial Sequence
  Description of Artificial Sequence: Synthetic oligonucleotide
gcagaccguaggugggcac

SEQ ID NO: 401770 - RNA, 19 nt, Artificial Sequence
  Description of Artificial Sequence: Synthetic oligonucleotide
caggucuagcccucccgua

SEQ ID NO: 401771 - RNA, 19 nt, Artificial Sequence
  Description of Artificial Sequence: Synthetic oligonucleotide
cagaguuggcgaagccaua

SEQ ID NO: 401772 - RNA, 19 nt, Artificial Sequence
  Description of Artificial Sequence: Synthetic oligonucleotide
cugugucauucuuggacuu

SEQ ID NO: 401773 - RNA, 19 nt, Artificial Sequence
  Description of Artificial Sequence: Synthetic oligonucleotide
ccgccacucgguagggccc

SEQ ID NO: 401774 - RNA, 19 nt, Artificial Sequence
  Description of Artificial Sequence: Synthetic oligonucleotide
ccaucgcacaccugagaga

SEQ ID NO: 401775 - RNA, 19 nt, Artificial Sequence
  Description of Artificial Sequence: Synthetic oligonucleotide
cagugguggagccuucgau

SEQ ID NO: 401776 - RNA, 19 nt, Artificial Sequence
  Description of Artificial Sequence: Synthetic oligonucleotide
agcgugcgguggucgcccu

SEQ ID NO: 401777 - RNA, 19 nt, Artificial Sequence
  Description of Artificial Sequence: Synthetic oligonucleotide
cggaugccuaggaugugug

SEQ ID NO: 401778 - RNA, 19 nt, Artificial Sequence
  Description of Artificial Sequence: Synthetic oligonucleotide
ugccgacgcugcucgcaua

SEQ ID NO: 401779 - RNA, 19 nt, Artificial Sequence
  Description of Artificial Sequence: Synthetic oligonucleotide
cacgcaacagugucacguu

SEQ ID NO: 401780 - RNA, 19 nt, Artificial Sequence
  Description of Artificial Sequence: Synthetic oligonucleotide
cugucgcaccucgcgcaug

SEQ ID NO: 401781 - RNA, 19 nt, Artificial Sequence
  Description of Artificial Sequence: Synthetic oligonucleotide
ccgggucguccugucaagg

SEQ ID NO: 401782 - RNA, 19 nt, Artificial Sequence
  Description of Artificial Sequence: Synthetic oligonucleotide
ccuguaacugagagcacau

SEQ ID NO: 401783 - RNA, 19 nt, Artificial Sequence
  Description of Artificial Sequence: Synthetic oligonucleotide
gcggcucgaagcuuuuggu

SEQ ID NO: 401784 - RNA, 19 nt, Artificial Sequence
  Description of Artificial Sequence: Synthetic oligonucleotide
cccgggucguccugucaag

SEQ ID NO: 401785 - RNA, 19 nt, Artificial Sequence
  Description of Artificial Sequence: Synthetic oligonucleotide
gguggucgcccucaaugau

SEQ ID NO: 401786 - RNA, 19 nt, Artificial Sequence
  Description of Artificial Sequence: Synthetic oligonucleotide
ccgcuaaguggcugggaca

SEQ ID NO: 401787 - RNA, 19 nt, Artificial Sequence
  Description of Artificial Sequence: Synthetic oligonucleotide
agcccgccuuggaggagag

SEQ ID NO: 401788 - RNA, 19 nt, Artificial Sequence
  Description of Artificial Sequence: Synthetic oligonucleotide
gcaagaggcgaugcgcugu

SEQ ID NO: 401789 - RNA, 19 nt, Artificial Sequence
  Description of Artificial Sequence: Synthetic oligonucleotide
gugagccgucaaacaagaa

SEQ ID NO: 401790 - RNA, 19 nt, Artificial Sequence
  Description of Artificial Sequence: Synthetic oligonucleotide
gaguaccccgccacucggu

SEQ ID NO: 401791 - RNA, 19 nt, Artificial Sequence
  Description of Artificial Sequence: Synthetic oligonucleotide
ccagaucccucugggcuuc

SEQ ID NO: 401792 - RNA, 19 nt, Artificial Sequence
  Description of Artificial Sequence: Synthetic oligonucleotide
ccaacagcgugcggugguc

SEQ ID NO: 401793 - RNA, 19 nt, Artificial Sequence
  Description of Artificial Sequence: Synthetic oligonucleotide
cgguggucgcccucaauga

SEQ ID NO: 401794 - RNA, 19 nt, Artificial Sequence
  Description of Artificial Sequence: Synthetic oligonucleotide
gaggcgcggcuugggugca

SEQ ID NO: 401795 - RNA, 19 nt, Artificial Sequence
  Description of Artificial Sequence: Synthetic oligonucleotide
cccgcccugucgugggcag

SEQ ID NO: 401796 - RNA, 19 nt, Artificial Sequence
  Description of Artificial Sequence: Synthetic oligonucleotide
gccgacgcugcucgcauau

SEQ ID NO: 401797 - RNA, 19 nt, Artificial Sequence
  Description of Artificial Sequence: Synthetic oligonucleotide
cugggacacgugugauagu

SEQ ID NO: 401798 - RNA, 19 nt, Artificial Sequence
  Description of Artificial Sequence: Synthetic oligonucleotide
gaccguaggugggcacacu

SEQ ID NO: 401799 - RNA, 19 nt, Artificial Sequence
  Description of Artificial Sequence: Synthetic oligonucleotide
ccauaccccgcccugucgu

SEQ ID NO: 401800 - RNA, 19 nt, Artificial Sequence
  Description of Artificial Sequence: Synthetic oligonucleotide
gcuguccgcagggucaggu

SEQ ID NO: 401801 - RNA, 19 nt, Artificial Sequence
  Description of Artificial Sequence: Synthetic oligonucleotide
gcuccggccggccuccacu

SEQ ID NO: 401802 - RNA, 19 nt, Artificial Sequence
  Description of Artificial Sequence: Synthetic oligonucleotide
cggcuugggugcacugcag

SEQ ID NO: 401803 - RNA, 19 nt, Artificial Sequence
  Description of Artificial Sequence: Synthetic oligonucleotide
cacggcgguccaggcugug

SEQ ID NO: 401804 - RNA, 19 nt, Artificial Sequence
  Description of Artificial Sequence: Synthetic oligonucleotide
ccuccaugcaagaggcgau

SEQ ID NO: 401805 - RNA, 19 nt, Artificial Sequence
  Description of Artificial Sequence: Synthetic oligonucleotide
ccaagggccaugggcuaca

SEQ ID NO: 401806 - RNA, 19 nt, Artificial Sequence
  Description of Artificial Sequence: Synthetic oligonucleotide
cggcucgaagcuuuuggua

SEQ ID NO: 401807 - RNA, 19 nt, Artificial Sequence
  Description of Artificial Sequence: Synthetic oligonucleotide
cacgugugauaguccuguu

SEQ ID NO: 401808 - RNA, 19 nt, Artificial Sequence
  Description of Artificial Sequence: Synthetic oligonucleotide
gugcgguggucgcccucaa

SEQ ID NO: 401809 - RNA, 19 nt, Artificial Sequence
  Description of Artificial Sequence: Synthetic oligonucleotide
ggccgaggucugccaguga

SEQ ID NO: 401810 - RNA, 19 nt, Artificial Sequence
  Description of Artificial Sequence: Synthetic oligonucleotide
gcugucgcaccucgcgcau

SEQ ID NO: 401811 - RNA, 19 nt, Artificial Sequence
  Description of Artificial Sequence: Synthetic oligonucleotide
ccggaugccuaggaugugu

SEQ ID NO: 401812 - RNA, 19 nt, Artificial Sequence
  Description of Artificial Sequence: Synthetic oligonucleotide
ggcugucgucucacuagcu

SEQ ID NO: 401813 - RNA, 19 nt, Artificial Sequence
  Description of Artificial Sequence: Synthetic oligonucleotide
cgugcgguggucgcccuca

SEQ ID NO: 401814 - RNA, 19 nt, Artificial Sequence
  Description of Artificial Sequence: Synthetic oligonucleotide
cacuugccccacacagcuu

SEQ ID NO: 401815 - RNA, 19 nt, Artificial Sequence
  Description of Artificial Sequence: Synthetic oligonucleotide
gcucgcauauacgcuccau

SEQ ID NO: 401816 - RNA, 19 nt, Artificial Sequence
  Description of Artificial Sequence: Synthetic oligonucleotide
ccucuccauaccccgcccu

SEQ ID NO: 401817 - RNA, 19 nt, Artificial Sequence
  Description of Artificial Sequence: Synthetic oligonucleotide
cgcugcucgcauauacgcu

SEQ ID NO: 401818 - RNA, 19 nt, Artificial Sequence
  Description of Artificial Sequence: Synthetic oligonucleotide
cgaugaccgugucauuggu

SEQ ID NO: 401819 - RNA, 19 nt, Artificial Sequence
  Description of Artificial Sequence: Synthetic oligonucleotide
caccgaugaccgugucauu

SEQ ID NO: 401820 - RNA, 19 nt, Artificial Sequence
  Description of Artificial Sequence: Synthetic oligonucleotide
ccgcccugucgugggcagg

SEQ ID NO: 401821 - RNA, 19 nt, Artificial Sequence
  Description of Artificial Sequence: Synthetic oligonucleotide
ggcgcggcuugggugcacu

SEQ ID NO: 401822 - RNA, 19 nt, Artificial Sequence
  Description of Artificial Sequence: Synthetic oligonucleotide
cguguaaggguggggcccu

SEQ ID NO: 401823 - RNA, 19 nt, Artificial Sequence
  Description of Artificial Sequence: Synthetic oligonucleotide
ggcaggcuucccgggucgu

SEQ ID NO: 401824 - RNA, 19 nt, Artificial Sequence
  Description of Artificial Sequence: Synthetic oligonucleotide
ccccgcuaaguggcuggga

SEQ ID NO: 401825 - RNA, 19 nt, Artificial Sequence
  Description of Artificial Sequence: Synthetic oligonucleotide
ccccgcccugucgugggca

SEQ ID NO: 401826 - RNA, 19 nt, Artificial Sequence
  Description of Artificial Sequence: Synthetic oligonucleotide
ggacugcauaaggcugauu

SEQ ID NO: 401827 - RNA, 19 nt, Artificial Sequence
  Description of Artificial Sequence: Synthetic oligonucleotide
cgguagggccccucaggcu

SEQ ID NO: 401828 - RNA, 19 nt, Artificial Sequence
  Description of Artificial Sequence: Synthetic oligonucleotide
gcgugccaccgaugaccgu

SEQ ID NO: 401829 - RNA, 19 nt, Artificial Sequence
  Description of Artificial Sequence: Synthetic oligonucleotide
ccgacgcugcucgcauaua

SEQ ID NO: 401830 - RNA, 19 nt, Artificial Sequence
  Description of Artificial Sequence: Synthetic oligonucleotide
cgcucacaugcaguuuaau

SEQ ID NO: 401831 - RNA, 19 nt, Artificial Sequence
  Description of Artificial Sequence: Synthetic oligonucleotide
ccgugucauuggugcccau

SEQ ID NO: 401832 - RNA, 19 nt, Artificial Sequence
  Description of Artificial Sequence: Synthetic oligonucleotide
aaauagauaaucaaguuuc

SEQ ID NO: 401833 - RNA, 19 nt, Artificial Sequence
  Description of Artificial Sequence: Synthetic oligonucleotide
agauaaucaaguuucaaac

SEQ ID NO: 401834 - RNA, 19 nt, Artificial Sequence
  Description of Artificial Sequence: Synthetic oligonucleotide
aacuauguuguauacuuac

SEQ ID NO: 401835 - RNA, 19 nt, Artificial Sequence
  Description of Artificial Sequence: Synthetic oligonucleotide
uguuaagucagucagcugc

SEQ ID NO: 401836 - RNA, 19 nt, Artificial Sequence
  Description of Artificial Sequence: Synthetic oligonucleotide
aacuuaauuuuacaaggac

SEQ ID NO: 401837 - RNA, 19 nt, Artificial Sequence
  Description of Artificial Sequence: Synthetic oligonucleotide
agcagcuaaauuuauacac

SEQ ID NO: 401838 - RNA, 19 nt, Artificial Sequence
  Description of Artificial Sequence: Synthetic oligonucleotide
uguauagacacucugaaau

SEQ ID NO: 401839 - RNA, 19 nt, Artificial Sequence
  Description of Artificial Sequence: Synthetic oligonucleotide
acacauguuaacuuuauuc

SEQ ID NO: 401840 - RNA, 19 nt, Artificial Sequence
  Description of Artificial Sequence: Synthetic oligonucleotide
aaauaauccguagucauuc

SEQ ID NO: 401841 - RNA, 19 nt, Artificial Sequence
  Description of Artificial Sequence: Synthetic oligonucleotide
auaacagaccguuaacugc

SEQ ID NO: 401842 - RNA, 19 nt, Artificial Sequence
  Description of Artificial Sequence: Synthetic oligonucleotide
aaugccgagguugagaaac

SEQ ID NO: 401843 - RNA, 19 nt, Artificial Sequence
  Description of Artificial Sequence: Synthetic oligonucleotide
uauaauacucuaccgacgc

SEQ ID NO: 401844 - RNA, 19 nt, Artificial Sequence
  Description of Artificial Sequence: Synthetic oligonucleotide
aagagauuaauagaagauc

SEQ ID NO: 401845 - RNA, 19 nt, Artificial Sequence
  Description of Artificial Sequence: Synthetic oligonucleotide
uuuacaaggacacauguua

SEQ ID NO: 401846 - RNA, 19 nt, Artificial Sequence
  Description of Artificial Sequence: Synthetic oligonucleotide
uaauaaguuguuuaggacu

SEQ ID NO: 401847 - RNA, 19 nt, Artificial Sequence
  Description of Artificial Sequence: Synthetic oligonucleotide
auguuugcaacgcuggucc

SEQ ID NO: 401848 - RNA, 19 nt, Artificial Sequence
  Description of Artificial Sequence: Synthetic oligonucleotide
uuagggaaccauuaaaacc

SEQ ID NO: 401849 - RNA, 19 nt, Artificial Sequence
  Description of Artificial Sequence: Synthetic oligonucleotide
auaauaaguuguuuaggac

SEQ ID NO: 401850 - RNA, 19 nt, Artificial Sequence
  Description of Artificial Sequence: Synthetic oligonucleotide
cuuaucaugguuuacccag

SEQ ID NO: 401851 - RNA, 19 nt, Artificial Sequence
  Description of Artificial Sequence: Synthetic oligonucleotide
uuaauagaagaucucagaa

SEQ ID NO: 401852 - RNA, 19 nt, Artificial Sequence
  Description of Artificial Sequence: Synthetic oligonucleotide
aauaaguuguuuaggacuc

SEQ ID NO: 401853 - RNA, 19 nt, Artificial Sequence
  Description of Artificial Sequence: Synthetic oligonucleotide
uccaacaacgcccacaccc

SEQ ID NO: 401854 - RNA, 19 nt, Artificial Sequence
  Description of Artificial Sequence: Synthetic oligonucleotide
uuauaauacucuaccgacg

SEQ ID NO: 401855 - RNA, 19 nt, Artificial Sequence
  Description of Artificial Sequence: Synthetic oligonucleotide
uuuuccguacuaaaggacc

SEQ ID NO: 401856 - RNA, 19 nt, Artificial Sequence
  Description of Artificial Sequence: Synthetic oligonucleotide
uucucugagacguaaagug

SEQ ID NO: 401857 - RNA, 19 nt, Artificial Sequence
  Description of Artificial Sequence: Synthetic oligonucleotide
uguguuaacaccguguuca

SEQ ID NO: 401858 - RNA, 19 nt, Artificial Sequence
  Description of Artificial Sequence: Synthetic oligonucleotide
auguuggucaucuuuaaag

SEQ ID NO: 401859 - RNA, 19 nt, Artificial Sequence
  Description of Artificial Sequence: Synthetic oligonucleotide
uauaacagaccguuaacug

SEQ ID NO: 401860 - RNA, 19 nt, Artificial Sequence
  Description of Artificial Sequence: Synthetic oligonucleotide
guuauaauacucuaccgac

SEQ ID NO: 401861 - RNA, 19 nt, Artificial Sequence
  Description of Artificial Sequence: Synthetic oligonucleotide
aauccguagucauucgagg

SEQ ID NO: 401862 - RNA, 19 nt, Artificial Sequence
  Description of Artificial Sequence: Synthetic oligonucleotide
aucggagcaacaugaaacc

SEQ ID NO: 401863 - RNA, 19 nt, Artificial Sequence
  Description of Artificial Sequence: Synthetic oligonucleotide
uuaugaaagcgacugcugc

SEQ ID NO: 401864 - RNA, 19 nt, Artificial Sequence
  Description of Artificial Sequence: Synthetic oligonucleotide
auaaucaaguuucaaacau

SEQ ID NO: 401865 - RNA, 19 nt, Artificial Sequence
  Description of Artificial Sequence: Synthetic oligonucleotide
uucuacugugcuaagacac

SEQ ID NO: 401866 - RNA, 19 nt, Artificial Sequence
  Description of Artificial Sequence: Synthetic oligonucleotide
ucuaccgacgccaaguuac

SEQ ID NO: 401867 - RNA, 19 nt, Artificial Sequence
  Description of Artificial Sequence: Synthetic oligonucleotide
uauccgaggccucuaaagg

SEQ ID NO: 401868 - RNA, 19 nt, Artificial Sequence
  Description of Artificial Sequence: Synthetic oligonucleotide
aauaauccguagucauucg

SEQ ID NO: 401869 - RNA, 19 nt, Artificial Sequence
  Description of Artificial Sequence: Synthetic oligonucleotide
acaguucggacucuuaggg

SEQ ID NO: 401870 - RNA, 19 nt, Artificial Sequence
  Description of Artificial Sequence: Synthetic oligonucleotide
acuggcauaauucaaagua

SEQ ID NO: 401871 - RNA, 19 nt, Artificial Sequence
  Description of Artificial Sequence: Synthetic oligonucleotide
uuguuuaggacuccaacac

SEQ ID NO: 401872 - RNA, 19 nt, Artificial Sequence
  Description of Artificial Sequence: Synthetic oligonucleotide
ucuuagggaaccauuaaaa

SEQ ID NO: 401873 - RNA, 19 nt, Artificial Sequence
  Description of Artificial Sequence: Synthetic oligonucleotide
gacaagcccagccauauag

SEQ ID NO: 401874 - RNA, 19 nt, Artificial Sequence
  Description of Artificial Sequence: Synthetic oligonucleotide
uaaguguuggccuuauuca

SEQ ID NO: 401875 - RNA, 19 nt, Artificial Sequence
  Description of Artificial Sequence: Synthetic oligonucleotide
agcauauagacacacauuu

SEQ ID NO: 401876 - RNA, 19 nt, Artificial Sequence
  Description of Artificial Sequence: Synthetic oligonucleotide
uaauccguagucauucgag

SEQ ID NO: 401877 - RNA, 19 nt, Artificial Sequence
  Description of Artificial Sequence: Synthetic oligonucleotide
uucgaggcugauaagaacu

SEQ ID NO: 401878 - RNA, 19 nt, Artificial Sequence
  Description of Artificial Sequence: Synthetic oligonucleotide
gauuaauagaagaucucag

SEQ ID NO: 401879 - RNA, 19 nt, Artificial Sequence
  Description of Artificial Sequence: Synthetic oligonucleotide
augagguaaucuuugcacg

SEQ ID NO: 401880 - RNA, 19 nt, Artificial Sequence
  Description of Artificial Sequence: Synthetic oligonucleotide
auaauucaaaguacugugc

SEQ ID NO: 401881 - RNA, 19 nt, Artificial Sequence
  Description of Artificial Sequence: Synthetic oligonucleotide
guuaacaccguguucauuc

SEQ ID NO: 401882 - RNA, 19 nt, Artificial Sequence
  Description of Artificial Sequence: Synthetic oligonucleotide
auauaauaaguuguuuagg

SEQ ID NO: 401883 - RNA, 19 nt, Artificial Sequence
  Description of Artificial Sequence: Synthetic oligonucleotide
uaacagaccguuaacugca

SEQ ID NO: 401884 - RNA, 19 nt, Artificial Sequence
  Description of Artificial Sequence: Synthetic oligonucleotide
caucggagcaacaugaaac

SEQ ID NO: 401885 - RNA, 19 nt, Artificial Sequence
  Description of Artificial Sequence: Synthetic oligonucleotide
uauacuuacauagauuuua

SEQ ID NO: 401886 - RNA, 19 nt, Artificial Sequence
  Description of Artificial Sequence: Synthetic oligonucleotide
ucuguacuaaguacucccg

SEQ ID NO: 401887 - RNA, 19 nt, Artificial Sequence
  Description of Artificial Sequence: Synthetic oligonucleotide
uuuaugaaagcgacugcug

SEQ ID NO: 401888 - RNA, 19 nt, Artificial Sequence
  Description of Artificial Sequence: Synthetic oligonucleotide
uguucauuccucagaagug

SEQ ID NO: 401889 - RNA, 19 nt, Artificial Sequence
  Description of Artificial Sequence: Synthetic oligonucleotide
acagacgauaaaccugugc

SEQ ID NO: 401890 - RNA, 19 nt, Artificial Sequence
  Description of Artificial Sequence: Synthetic oligonucleotide
aagcgcuaggcucucaguc

SEQ ID NO: 401891 - RNA, 19 nt, Artificial Sequence
  Description of Artificial Sequence: Synthetic oligonucleotide
uuccauacauucauuauau

SEQ ID NO: 401892 - RNA, 19 nt, Artificial Sequence
  Description of Artificial Sequence: Synthetic oligonucleotide
uaagacacuggcgugaggc

SEQ ID NO: 401893 - RNA, 19 nt, Artificial Sequence
  Description of Artificial Sequence: Synthetic oligonucleotide
agagauuaauagaagaucu

SEQ ID NO: 401894 - RNA, 19 nt, Artificial Sequence
  Description of Artificial Sequence: Synthetic oligonucleotide
agucauucgaggcugauaa

SEQ ID NO: 401895 - RNA, 19 nt, Artificial Sequence
  Description of Artificial Sequence: Synthetic oligonucleotide
auccguagucauucgaggc

SEQ ID NO: 401896 - RNA, 19 nt, Artificial Sequence
  Description of Artificial Sequence: Synthetic oligonucleotide
ucaugguuuacccaggcua

SEQ ID NO: 401897 - RNA, 19 nt, Artificial Sequence
  Description of Artificial Sequence: Synthetic oligonucleotide
uguacgcuuccacagacga

SEQ ID NO: 401898 - RNA, 19 nt, Artificial Sequence
  Description of Artificial Sequence: Synthetic oligonucleotide
ugugccaauuauaaauaga

SEQ ID NO: 401899 - RNA, 19 nt, Artificial Sequence
  Description of Artificial Sequence: Synthetic oligonucleotide
agcguuauagcauucuacu

SEQ ID NO: 401900 - RNA, 19 nt, Artificial Sequence
  Description of Artificial Sequence: Synthetic oligonucleotide
acauauaacagaccguuaa

SEQ ID NO: 401901 - RNA, 19 nt, Artificial Sequence
  Description of Artificial Sequence: Synthetic oligonucleotide
uguacuaaguacucccgug

SEQ ID NO: 401902 - RNA, 19 nt, Artificial Sequence
  Description of Artificial Sequence: Synthetic oligonucleotide
auuugcaguagcguuauag

SEQ ID NO: 401903 - RNA, 19 nt, Artificial Sequence
  Description of Artificial Sequence: Synthetic oligonucleotide
uguuguauacuuacauaga

SEQ ID NO: 401904 - RNA, 19 nt, Artificial Sequence
  Description of Artificial Sequence: Synthetic oligonucleotide
cucuguacuaaguacuccc

SEQ ID NO: 401905 - RNA, 19 nt, Artificial Sequence
  Description of Artificial Sequence: Synthetic oligonucleotide
uuaagcugcacacuugcuc

SEQ ID NO: 401906 - RNA, 19 nt, Artificial Sequence
  Description of Artificial Sequence: Synthetic oligonucleotide
cuuagggaaccauuaaaac

SEQ ID NO: 401907 - RNA, 19 nt, Artificial Sequence
  Description of Artificial Sequence: Synthetic oligonucleotide
gucacuugagauuaagcug

SEQ ID NO: 401908 - RNA, 19 nt, Artificial Sequence
  Description of Artificial Sequence: Synthetic oligonucleotide
cagaccuccaacaacgccc

SEQ ID NO: 401909 - RNA, 19 nt, Artificial Sequence
  Description of Artificial Sequence: Synthetic oligonucleotide
aagguguuacuuuaagaaa

SEQ ID NO: 401910 - RNA, 19 nt, Artificial Sequence
  Description of Artificial Sequence: Synthetic oligonucleotide
guacuaaguacucccgugg

SEQ ID NO: 401911 - RNA, 19 nt, Artificial Sequence
  Description of Artificial Sequence: Synthetic oligonucleotide
uucaguugaauuccauaca

SEQ ID NO: 401912 - RNA, 19 nt, Artificial Sequence
  Description of Artificial Sequence: Synthetic oligonucleotide
auaggaaucaacaguucgg

SEQ ID NO: 401913 - RNA, 19 nt, Artificial Sequence
  Description of Artificial Sequence: Synthetic oligonucleotide
uguuuaggacuccaacacc

SEQ ID NO: 401914 - RNA, 19 nt, Artificial Sequence
  Description of Artificial Sequence: Synthetic oligonucleotide
gccaauuauaaauagauaa

SEQ ID NO: 401915 - RNA, 19 nt, Artificial Sequence
  Description of Artificial Sequence: Synthetic oligonucleotide
uggcauaauucaaaguacu

SEQ ID NO: 401916 - RNA, 19 nt, Artificial Sequence
  Description of Artificial Sequence: Synthetic oligonucleotide
auauacuucaacgcuuuuc

SEQ ID NO: 401917 - RNA, 19 nt, Artificial Sequence
  Description of Artificial Sequence: Synthetic oligonucleotide
gacgauaaaccugugcugc

SEQ ID NO: 401918 - RNA, 19 nt, Artificial Sequence
  Description of Artificial Sequence: Synthetic oligonucleotide
uuacaauguaguacuggca

SEQ ID NO: 401919 - RNA, 19 nt, Artificial Sequence
  Description of Artificial Sequence: Synthetic oligonucleotide
ugagacguaaagugcagcu

SEQ ID NO: 401920 - RNA, 19 nt, Artificial Sequence
  Description of Artificial Sequence: Synthetic oligonucleotide
acuuaauuuuacaaggaca

SEQ ID NO: 401921 - RNA, 19 nt, Artificial Sequence
  Description of Artificial Sequence: Synthetic oligonucleotide
auaacugugaccccugcau

SEQ ID NO: 401922 - RNA, 19 nt, Artificial Sequence
  Description of Artificial Sequence: Synthetic oligonucleotide
aauaacugugaccccugca

SEQ ID NO: 401923 - RNA, 19 nt, Artificial Sequence
  Description of Artificial Sequence: Synthetic oligonucleotide
acaugcgcugcucuguugg

SEQ ID NO: 401924 - RNA, 19 nt, Artificial Sequence
  Description of Artificial Sequence: Synthetic oligonucleotide
uagcauuccacacuccgga

SEQ ID NO: 401925 - RNA, 19 nt, Artificial Sequence
  Description of Artificial Sequence: Synthetic oligonucleotide
ucauucgaggcugauaaga

SEQ ID NO: 401926 - RNA, 19 nt, Artificial Sequence
  Description of Artificial Sequence: Synthetic oligonucleotide
aacaauccauuuagaacgg

SEQ ID NO: 401927 - RNA, 19 nt, Artificial Sequence
  Description of Artificial Sequence: Synthetic oligonucleotide
uuuccguacuaaaggacca

SEQ ID NO: 401928 - RNA, 19 nt, Artificial Sequence
  Description of Artificial Sequence: Synthetic oligonucleotide
auauaacagaccguuaacu

SEQ ID NO: 401929 - RNA, 19 nt, Artificial Sequence
  Description of Artificial Sequence: Synthetic oligonucleotide
cuuuauguuguacgcuucc

SEQ ID NO: 401930 - RNA, 19 nt, Artificial Sequence
  Description of Artificial Sequence: Synthetic oligonucleotide
uacugugcuaagacacugg

SEQ ID NO: 401931 - RNA, 19 nt, Artificial Sequence
  Description of Artificial Sequence: Synthetic oligonucleotide
agcagacaguuucaucccc

SEQ ID NO: 401932 - RNA, 19 nt, Artificial Sequence
  Description of Artificial Sequence: Synthetic oligonucleotide
cuaaguacucccguggaag

SEQ ID NO: 401933 - RNA, 19 nt, Artificial Sequence
  Description of Artificial Sequence: Synthetic oligonucleotide
acgauaaaccugugcugcc

SEQ ID NO: 401934 - RNA, 19 nt, Artificial Sequence
  Description of Artificial Sequence: Synthetic oligonucleotide
gaagucguagcauuccaca

SEQ ID NO: 401935 - RNA, 19 nt, Artificial Sequence
  Description of Artificial Sequence: Synthetic oligonucleotide
guauccgaggccucuaaag

SEQ ID NO: 401936 - RNA, 19 nt, Artificial Sequence
  Description of Artificial Sequence: Synthetic oligonucleotide
ugguuacucacagaaagcu

SEQ ID NO: 401937 - RNA, 19 nt, Artificial Sequence
  Description of Artificial Sequence: Synthetic oligonucleotide
aacgcuuuuccguacuaaa

SEQ ID NO: 401938 - RNA, 19 nt, Artificial Sequence
  Description of Artificial Sequence: Synthetic oligonucleotide
cauagguguccucagccgg

SEQ ID NO: 401939 - RNA, 19 nt, Artificial Sequence
  Description of Artificial Sequence: Synthetic oligonucleotide
guacuggcauaauucaaag

SEQ ID NO: 401940 - RNA, 19 nt, Artificial Sequence
  Description of Artificial Sequence: Synthetic oligonucleotide
uagcguuauagcauucuac

SEQ ID NO: 401941 - RNA, 19 nt, Artificial Sequence
  Description of Artificial Sequence: Synthetic oligonucleotide
uggaagcaaggguagccgg

SEQ ID NO: 401942 - RNA, 19 nt, Artificial Sequence
  Description of Artificial Sequence: Synthetic oligonucleotide
cuaaguacgacaucugcaa

SEQ ID NO: 401943 - RNA, 19 nt, Artificial Sequence
  Description of Artificial Sequence: Synthetic oligonucleotide
auuuauaugcacaccauuu

SEQ ID NO: 401944 - RNA, 19 nt, Artificial Sequence
  Description of Artificial Sequence: Synthetic oligonucleotide
ugcagcuacaaguggagaa

SEQ ID NO: 401945 - RNA, 19 nt, Artificial Sequence
  Description of Artificial Sequence: Synthetic oligonucleotide
uauguagguccacucauuu

SEQ ID NO: 401946 - RNA, 19 nt, Artificial Sequence
  Description of Artificial Sequence: Synthetic oligonucleotide
ucuuugaagucguagcauu

SEQ ID NO: 401947 - RNA, 19 nt, Artificial Sequence
  Description of Artificial Sequence: Synthetic oligonucleotide
uagucuaggucucuuguua

SEQ ID NO: 401948 - RNA, 19 nt, Artificial Sequence
  Description of Artificial Sequence: Synthetic oligonucleotide
uccguagucauucgaggcu

SEQ ID NO: 401949 - RNA, 19 nt, Artificial Sequence
  Description of Artificial Sequence: Synthetic oligonucleotide
uacuaaguacucccgugga

SEQ ID NO: 401950 - RNA, 19 nt, Artificial Sequence
  Description of Artificial Sequence: Synthetic oligonucleotide
accgacgccaaguuacagg

SEQ ID NO: 401951 - RNA, 19 nt, Artificial Sequence
  Description of Artificial Sequence: Synthetic oligonucleotide
agacgauaaaccugugcug

SEQ ID NO: 401952 - RNA, 19 nt, Artificial Sequence
  Description of Artificial Sequence: Synthetic oligonucleotide
uguuguacgcuuccacaga

SEQ ID NO: 401953 - RNA, 19 nt, Artificial Sequence
  Description of Artificial Sequence: Synthetic oligonucleotide
uuaacaccguguucauucc

SEQ ID NO: 401954 - RNA, 19 nt, Artificial Sequence
  Description of Artificial Sequence: Synthetic oligonucleotide
auaaguuguuuaggacucc

SEQ ID NO: 401955 - RNA, 19 nt, Artificial Sequence
  Description of Artificial Sequence: Synthetic oligonucleotide
uuguacgcuuccacagacg

SEQ ID NO: 401956 - RNA, 19 nt, Artificial Sequence
  Description of Artificial Sequence: Synthetic oligonucleotide
cugugccaauuauaaauag

SEQ ID NO: 401957 - RNA, 19 nt, Artificial Sequence
  Description of Artificial Sequence: Synthetic oligonucleotide
ggguuauaauacucuaccg

SEQ ID NO: 401958 - RNA, 19 nt, Artificial Sequence
  Description of Artificial Sequence: Synthetic oligonucleotide
uaaucuuugcacgcacugc

SEQ ID NO: 401959 - RNA, 19 nt, Artificial Sequence
  Description of Artificial Sequence: Synthetic oligonucleotide
ucuaaaggcagauggucuu

SEQ ID NO: 401960 - RNA, 19 nt, Artificial Sequence
  Description of Artificial Sequence: Synthetic oligonucleotide
ucgcauguuugcaacgcug

SEQ ID NO: 401961 - RNA, 19 nt, Artificial Sequence
  Description of Artificial Sequence: Synthetic oligonucleotide
auaauccguagucauucga

SEQ ID NO: 401962 - RNA, 19 nt, Artificial Sequence
  Description of Artificial Sequence: Synthetic oligonucleotide
aucaauuugggaagguuca

SEQ ID NO: 401963 - RNA, 19 nt, Artificial Sequence
  Description of Artificial Sequence: Synthetic oligonucleotide
aaaauaauccguagucauu

SEQ ID NO: 401964 - RNA, 19 nt, Artificial Sequence
  Description of Artificial Sequence: Synthetic oligonucleotide
gaccguuaacugcacaaac

SEQ ID NO: 401965 - RNA, 19 nt, Artificial Sequence
  Description of Artificial Sequence: Synthetic oligonucleotide
cagaguagggacuguaguc

SEQ ID NO: 401966 - RNA, 19 nt, Artificial Sequence
  Description of Artificial Sequence: Synthetic oligonucleotide
cuuugaagucguagcauuc

SEQ ID NO: 401967 - RNA, 19 nt, Artificial Sequence
  Description of Artificial Sequence: Synthetic oligonucleotide
uuuauguuguacgcuucca

SEQ ID NO: 401968 - RNA, 19 nt, Artificial Sequence
  Description of Artificial Sequence: Synthetic oligonucleotide
ucaucggagcaacaugaaa

SEQ ID NO: 401969 - RNA, 19 nt, Artificial Sequence
  Description of Artificial Sequence: Synthetic oligonucleotide
auaugguaaguuugucacu

SEQ ID NO: 401970 - RNA, 19 nt, Artificial Sequence
  Description of Artificial Sequence: Synthetic oligonucleotide
uaaguuguuuaggacucca

SEQ ID NO: 401971 - RNA, 19 nt, Artificial Sequence
  Description of Artificial Sequence: Synthetic oligonucleotide
guuacaggaaccgucaucu

SEQ ID NO: 401972 - RNA, 19 nt, Artificial Sequence
  Description of Artificial Sequence: Synthetic oligonucleotide
caaagguguuacuuuaaga

SEQ ID NO: 401973 - RNA, 19 nt, Artificial Sequence
  Description of Artificial Sequence: Synthetic oligonucleotide
uacgcuuccacagacgaua

SEQ ID NO: 401974 - RNA, 19 nt, Artificial Sequence
  Description of Artificial Sequence: Synthetic oligonucleotide
acuucaacgcuuuuccgua

SEQ ID NO: 401975 - RNA, 19 nt, Artificial Sequence
  Description of Artificial Sequence: Synthetic oligonucleotide
guuguauacuuacauagau

SEQ ID NO: 401976 - RNA, 19 nt, Artificial Sequence
  Description of Artificial Sequence: Synthetic oligonucleotide
ucuucggucucgcauguuu

SEQ ID NO: 401977 - RNA, 19 nt, Artificial Sequence
  Description of Artificial Sequence: Synthetic oligonucleotide
uaaguacgacaucugcaaa

SEQ ID NO: 401978 - RNA, 19 nt, Artificial Sequence
  Description of Artificial Sequence: Synthetic oligonucleotide
uccccgugcucauacaaga

SEQ ID NO: 401979 - RNA, 19 nt, Artificial Sequence
  Description of Artificial Sequence: Synthetic oligonucleotide
uccacuggucuuucaccgg

SEQ ID NO: 401980 - RNA, 19 nt, Artificial Sequence
  Description of Artificial Sequence: Synthetic oligonucleotide
ucucgcauguuugcaacgc

SEQ ID NO: 401981 - RNA, 19 nt, Artificial Sequence
  Description of Artificial Sequence: Synthetic oligonucleotide
auacaagaggacacaacug

SEQ ID NO: 401982 - RNA, 19 nt, Artificial Sequence
  Description of Artificial Sequence: Synthetic oligonucleotide
cagacgauaaaccugugcu

SEQ ID NO: 401983 - RNA, 19 nt, Artificial Sequence
  Description of Artificial Sequence: Synthetic oligonucleotide
ugcuaagacacuggcguga

SEQ ID NO: 401984 - RNA, 19 nt, Artificial Sequence
  Description of Artificial Sequence: Synthetic oligonucleotide
aggcucauaaugguuuauc

SEQ ID NO: 401985 - RNA, 19 nt, Artificial Sequence
  Description of Artificial Sequence: Synthetic oligonucleotide
acuuuauguuguacgcuuc

SEQ ID NO: 401986 - RNA, 19 nt, Artificial Sequence
  Description of Artificial Sequence: Synthetic oligonucleotide
aacaugcgcugcucuguug

SEQ ID NO: 401987 - RNA, 19 nt, Artificial Sequence
  Description of Artificial Sequence: Synthetic oligonucleotide
acgccaaguuacaggaacc

SEQ ID NO: 401988 - RNA, 19 nt, Artificial Sequence
  Description of Artificial Sequence: Synthetic oligonucleotide
acggcaguuucucauguau

SEQ ID NO: 401989 - RNA, 19 nt, Artificial Sequence
  Description of Artificial Sequence: Synthetic oligonucleotide
uacccaggcuauuacugcu

SEQ ID NO: 401990 - RNA, 19 nt, Artificial Sequence
  Description of Artificial Sequence: Synthetic oligonucleotide
aggauaugguaaguuuguc

SEQ ID NO: 401991 - RNA, 19 nt, Artificial Sequence
  Description of Artificial Sequence: Synthetic oligonucleotide
uucaugccaaagguguuac

SEQ ID NO: 401992 - RNA, 19 nt, Artificial Sequence
  Description of Artificial Sequence: Synthetic oligonucleotide
uuugcaacgcugguccacu

SEQ ID NO: 401993 - RNA, 19 nt, Artificial Sequence
  Description of Artificial Sequence: Synthetic oligonucleotide
gcgacugcugcccaaauac

SEQ ID NO: 401994 - RNA, 19 nt, Artificial Sequence
  Description of Artificial Sequence: Synthetic oligonucleotide
aacagaccguuaacugcac

SEQ ID NO: 401995 - RNA, 19 nt, Artificial Sequence
  Description of Artificial Sequence: Synthetic oligonucleotide
cuucggucucgcauguuug

SEQ ID NO: 401996 - RNA, 19 nt, Artificial Sequence
  Description of Artificial Sequence: Synthetic oligonucleotide
acuaaguacucccguggaa

SEQ ID NO: 401997 - RNA, 19 nt, Artificial Sequence
  Description of Artificial Sequence: Synthetic oligonucleotide
gucucgcauguuugcaacg

SEQ ID NO: 401998 - RNA, 19 nt, Artificial Sequence
  Description of Artificial Sequence: Synthetic oligonucleotide
cuccucguguucaucggag

SEQ ID NO: 401999 - RNA, 19 nt, Artificial Sequence
  Description of Artificial Sequence: Synthetic oligonucleotide
uaacaccguguucauuccu

SEQ ID NO: 402000 - RNA, 19 nt, Artificial Sequence
  Description of Artificial Sequence: Synthetic oligonucleotide
ucauuugcaguagcguuau

SEQ ID NO: 402001 - RNA, 19 nt, Artificial Sequence
  Description of Artificial Sequence: Synthetic oligonucleotide
guuaagcauuguuaaauau

SEQ ID NO: 402002 - RNA, 19 nt, Artificial Sequence
  Description of Artificial Sequence: Synthetic oligonucleotide
acucuuagggaaccauuaa

SEQ ID NO: 402003 - RNA, 19 nt, Artificial Sequence
  Description of Artificial Sequence: Synthetic oligonucleotide
gguaaguuugucacuugag

SEQ ID NO: 402004 - RNA, 19 nt, Artificial Sequence
  Description of Artificial Sequence: Synthetic oligonucleotide
guucgcacgcucuucauua

SEQ ID NO: 402005 - RNA, 19 nt, Artificial Sequence
  Description of Artificial Sequence: Synthetic oligonucleotide
cuauguuguauacuuacau

SEQ ID NO: 402006 - RNA, 19 nt, Artificial Sequence
  Description of Artificial Sequence: Synthetic oligonucleotide
aauacucuaccgacgccaa

SEQ ID NO: 402007 - RNA, 19 nt, Artificial Sequence
  Description of Artificial Sequence: Synthetic oligonucleotide
gaagcaaggguagccggac

SEQ ID NO: 402008 - RNA, 19 nt, Artificial Sequence
  Description of Artificial Sequence: Synthetic oligonucleotide
cuguugugggguuauaaua

SEQ ID NO: 402009 - RNA, 19 nt, Artificial Sequence
  Description of Artificial Sequence: Synthetic oligonucleotide
aaguacugugccaauuaua

SEQ ID NO: 402010 - RNA, 19 nt, Artificial Sequence
  Description of Artificial Sequence: Synthetic oligonucleotide
uccucagccggguucgcac

SEQ ID NO: 402011 - RNA, 19 nt, Artificial Sequence
  Description of Artificial Sequence: Synthetic oligonucleotide
caauguaguacuggcauaa

SEQ ID NO: 402012 - RNA, 19 nt, Artificial Sequence
  Description of Artificial Sequence: Synthetic oligonucleotide
ucauuaacaugcgcugcuc

SEQ ID NO: 402013 - RNA, 19 nt, Artificial Sequence
  Description of Artificial Sequence: Synthetic oligonucleotide
cucuuagggaaccauuaaa

SEQ ID NO: 402014 - RNA, 19 nt, Artificial Sequence
  Description of Artificial Sequence: Synthetic oligonucleotide
ucguguucaucggagcaac

SEQ ID NO: 402015 - RNA, 19 nt, Artificial Sequence
  Description of Artificial Sequence: Synthetic oligonucleotide
ucggagcaacaugaaacca

SEQ ID NO: 402016 - RNA, 19 nt, Artificial Sequence
  Description of Artificial Sequence: Synthetic oligonucleotide
acgcacugcuauucuucac

SEQ ID NO: 402017 - RNA, 19 nt, Artificial Sequence
  Description of Artificial Sequence: Synthetic oligonucleotide
ggucauauacuucaacgcu

SEQ ID NO: 402018 - RNA, 19 nt, Artificial Sequence
  Description of Artificial Sequence: Synthetic oligonucleotide
aacauauaacagaccguua

SEQ ID NO: 402019 - RNA, 19 nt, Artificial Sequence
  Description of Artificial Sequence: Synthetic oligonucleotide
gacucuuagggaaccauua

SEQ ID NO: 402020 - RNA, 19 nt, Artificial Sequence
  Description of Artificial Sequence: Synthetic oligonucleotide
gcuacaaguggagaagcgc

SEQ ID NO: 402021 - RNA, 19 nt, Artificial Sequence
  Description of Artificial Sequence: Synthetic oligonucleotide
cugagacguaaagugcagc

SEQ ID NO: 402022 - RNA, 19 nt, Artificial Sequence
  Description of Artificial Sequence: Synthetic oligonucleotide
cuucaacgcuuuuccguac

SEQ ID NO: 402023 - RNA, 19 nt, Artificial Sequence
  Description of Artificial Sequence: Synthetic oligonucleotide
ucaacgcuuuuccguacua

SEQ ID NO: 402024 - RNA, 19 nt, Artificial Sequence
  Description of Artificial Sequence: Synthetic oligonucleotide
agccggacguguuccauga

SEQ ID NO: 402025 - RNA, 19 nt, Artificial Sequence
  Description of Artificial Sequence: Synthetic oligonucleotide
uaacaugcgcugcucuguu

SEQ ID NO: 402026 - RNA, 19 nt, Artificial Sequence
  Description of Artificial Sequence: Synthetic oligonucleotide
gcccaaauaccacagagua

SEQ ID NO: 402027 - RNA, 19 nt, Artificial Sequence
  Description of Artificial Sequence: Synthetic oligonucleotide
cuacacggugcuucuacca

SEQ ID NO: 402028 - RNA, 19 nt, Artificial Sequence
  Description of Artificial Sequence: Synthetic oligonucleotide
ucgcacgcucuucauuaac

SEQ ID NO: 402029 - RNA, 19 nt, Artificial Sequence
  Description of Artificial Sequence: Synthetic oligonucleotide
gcguuauagcauucuacug

SEQ ID NO: 402030 - RNA, 19 nt, Artificial Sequence
  Description of Artificial Sequence: Synthetic oligonucleotide
cugcuauguagguccacuc

SEQ ID NO: 402031 - RNA, 19 nt, Artificial Sequence
  Description of Artificial Sequence: Synthetic oligonucleotide
aguauccgaggccucuaaa

SEQ ID NO: 402032 - RNA, 19 nt, Artificial Sequence
  Description of Artificial Sequence: Synthetic oligonucleotide
gguuuacccaggcuauuac

SEQ ID NO: 402033 - RNA, 19 nt, Artificial Sequence
  Description of Artificial Sequence: Synthetic oligonucleotide
aacaacgcccacacccaca

SEQ ID NO: 402034 - RNA, 19 nt, Artificial Sequence
  Description of Artificial Sequence: Synthetic oligonucleotide
ugguuuacccaggcuauua

SEQ ID NO: 402035 - RNA, 19 nt, Artificial Sequence
  Description of Artificial Sequence: Synthetic oligonucleotide
aaguuguuuaggacuccaa

SEQ ID NO: 402036 - RNA, 19 nt, Artificial Sequence
  Description of Artificial Sequence: Synthetic oligonucleotide
guagcguuauagcauucua

SEQ ID NO: 402037 - RNA, 19 nt, Artificial Sequence
  Description of Artificial Sequence: Synthetic oligonucleotide
gcagcuaaauuuauacaca

SEQ ID NO: 402038 - RNA, 19 nt, Artificial Sequence
  Description of Artificial Sequence: Synthetic oligonucleotide
caacauauaacagaccguu

SEQ ID NO: 402039 - RNA, 19 nt, Artificial Sequence
  Description of Artificial Sequence: Synthetic oligonucleotide
guuuacccaggcuauuacu

SEQ ID NO: 402040 - RNA, 19 nt, Artificial Sequence
  Description of Artificial Sequence: Synthetic oligonucleotide
acacggugcuucuaccaaa

SEQ ID NO: 402041 - RNA, 19 nt, Artificial Sequence
  Description of Artificial Sequence: Synthetic oligonucleotide
cauuuaucuguuguggggu

SEQ ID NO: 402042 - RNA, 19 nt, Artificial Sequence
  Description of Artificial Sequence: Synthetic oligonucleotide
cccgugcucauacaagagg

SEQ ID NO: 402043 - RNA, 19 nt, Artificial Sequence
  Description of Artificial Sequence: Synthetic oligonucleotide
guguguuaacaccguguuc

SEQ ID NO: 402044 - RNA, 19 nt, Artificial Sequence
  Description of Artificial Sequence: Synthetic oligonucleotide
caugcgcugcucuguuggc

SEQ ID NO: 402045 - RNA, 19 nt, Artificial Sequence
  Description of Artificial Sequence: Synthetic oligonucleotide
ggucucgcauguuugcaac

SEQ ID NO: 402046 - RNA, 19 nt, Artificial Sequence
  Description of Artificial Sequence: Synthetic oligonucleotide
ucggucucgcauguuugca

SEQ ID NO: 402047 - RNA, 19 nt, Artificial Sequence
  Description of Artificial Sequence: Synthetic oligonucleotide
agaccguuaacugcacaaa

SEQ ID NO: 402048 - RNA, 19 nt, Artificial Sequence
  Description of Artificial Sequence: Synthetic oligonucleotide
aggcuauuacugcuucaaa

SEQ ID NO: 402049 - RNA, 19 nt, Artificial Sequence
  Description of Artificial Sequence: Synthetic oligonucleotide
cgcauguuugcaacgcugg

SEQ ID NO: 402050 - RNA, 19 nt, Artificial Sequence
  Description of Artificial Sequence: Synthetic oligonucleotide
acguaaagugcagcuacaa

SEQ ID NO: 402051 - RNA, 19 nt, Artificial Sequence
  Description of Artificial Sequence: Synthetic oligonucleotide
cucaaugccgagguugaga

SEQ ID NO: 402052 - RNA, 19 nt, Artificial Sequence
  Description of Artificial Sequence: Synthetic oligonucleotide
cauuaauagcagcuaaauu

SEQ ID NO: 402053 - RNA, 19 nt, Artificial Sequence
  Description of Artificial Sequence: Synthetic oligonucleotide
uaccgacgccaaguuacag

SEQ ID NO: 402054 - RNA, 19 nt, Artificial Sequence
  Description of Artificial Sequence: Synthetic oligonucleotide
uucgcacgcucuucauuaa

SEQ ID NO: 402055 - RNA, 19 nt, Artificial Sequence
  Description of Artificial Sequence: Synthetic oligonucleotide
gucaacggcaguuucucau

SEQ ID NO: 402056 - RNA, 19 nt, Artificial Sequence
  Description of Artificial Sequence: Synthetic oligonucleotide
ggcuauuacugcuucaaau

SEQ ID NO: 402057 - RNA, 19 nt, Artificial Sequence
  Description of Artificial Sequence: Synthetic oligonucleotide
uagucauucgaggcugaua

SEQ ID NO: 402058 - RNA, 19 nt, Artificial Sequence
  Description of Artificial Sequence: Synthetic oligonucleotide
gugaggccccaucguaacc

SEQ ID NO: 402059 - RNA, 19 nt, Artificial Sequence
  Description of Artificial Sequence: Synthetic oligonucleotide
uggcgugaggccccaucgu

SEQ ID NO: 402060 - RNA, 19 nt, Artificial Sequence
  Description of Artificial Sequence: Synthetic oligonucleotide
gagacguaaagugcagcua

SEQ ID NO: 402061 - RNA, 19 nt, Artificial Sequence
  Description of Artificial Sequence: Synthetic oligonucleotide
cucagccggguucgcacgc

SEQ ID NO: 402062 - RNA, 19 nt, Artificial Sequence
  Description of Artificial Sequence: Synthetic oligonucleotide
ccaacuauguuguauacuu

SEQ ID NO: 402063 - RNA, 19 nt, Artificial Sequence
  Description of Artificial Sequence: Synthetic oligonucleotide
caacuauguuguauacuua

SEQ ID NO: 402064 - RNA, 19 nt, Artificial Sequence
  Description of Artificial Sequence: Synthetic oligonucleotide
caggcuauuacugcuucaa

SEQ ID NO: 402065 - RNA, 19 nt, Artificial Sequence
  Description of Artificial Sequence: Synthetic oligonucleotide
cauuaacaugcgcugcucu

SEQ ID NO: 402066 - RNA, 19 nt, Artificial Sequence
  Description of Artificial Sequence: Synthetic oligonucleotide
guucaugccaaagguguua

SEQ ID NO: 402067 - RNA, 19 nt, Artificial Sequence
  Description of Artificial Sequence: Synthetic oligonucleotide
ccuacacggugcuucuacc

SEQ ID NO: 402068 - RNA, 19 nt, Artificial Sequence
  Description of Artificial Sequence: Synthetic oligonucleotide
gguccacucauuugcagua

SEQ ID NO: 402069 - RNA, 19 nt, Artificial Sequence
  Description of Artificial Sequence: Synthetic oligonucleotide
cacggugcuucuaccaaaa

SEQ ID NO: 402070 - RNA, 19 nt, Artificial Sequence
  Description of Artificial Sequence: Synthetic oligonucleotide
gccuacacggugcuucuac

SEQ ID NO: 402071 - RNA, 19 nt, Artificial Sequence
  Description of Artificial Sequence: Synthetic oligonucleotide
cacagacgauaaaccugug

SEQ ID NO: 402072 - RNA, 19 nt, Artificial Sequence
  Description of Artificial Sequence: Synthetic oligonucleotide
caguagcguuauagcauuc

SEQ ID NO: 402073 - RNA, 19 nt, Artificial Sequence
  Description of Artificial Sequence: Synthetic oligonucleotide
cuaccgacgccaaguuaca

SEQ ID NO: 402074 - RNA, 19 nt, Artificial Sequence
  Description of Artificial Sequence: Synthetic oligonucleotide
uacgccuggugcucaucuc

SEQ ID NO: 402075 - RNA, 19 nt, Artificial Sequence
  Description of Artificial Sequence: Synthetic oligonucleotide
ccgacgccaaguuacagga

SEQ ID NO: 402076 - RNA, 19 nt, Artificial Sequence
  Description of Artificial Sequence: Synthetic oligonucleotide
aggcugauaagaacugguu

SEQ ID NO: 402077 - RNA, 19 nt, Artificial Sequence
  Description of Artificial Sequence: Synthetic oligonucleotide
acuacgccuggugcucauc

SEQ ID NO: 402078 - RNA, 19 nt, Artificial Sequence
  Description of Artificial Sequence: Synthetic oligonucleotide
ugccgagguugagaaacuc

SEQ ID NO: 402079 - RNA, 19 nt, Artificial Sequence
  Description of Artificial Sequence: Synthetic oligonucleotide
cuguacuaaguacucccgu

SEQ ID NO: 402080 - RNA, 19 nt, Artificial Sequence
  Description of Artificial Sequence: Synthetic oligonucleotide
caugaacuccugccuuaca

SEQ ID NO: 402081 - RNA, 19 nt, Artificial Sequence
  Description of Artificial Sequence: Synthetic oligonucleotide
ccuuaucaugguuuaccca

SEQ ID NO: 402082 - RNA, 19 nt, Artificial Sequence
  Description of Artificial Sequence: Synthetic oligonucleotide
guagucuaggucucuuguu

SEQ ID NO: 402083 - RNA, 19 nt, Artificial Sequence
  Description of Artificial Sequence: Synthetic oligonucleotide
cacuccggauggccuucgg

SEQ ID NO: 402084 - RNA, 19 nt, Artificial Sequence
  Description of Artificial Sequence: Synthetic oligonucleotide
ggguagccggacguguucc

SEQ ID NO: 402085 - RNA, 19 nt, Artificial Sequence
  Description of Artificial Sequence: Synthetic oligonucleotide
ccguagucauucgaggcug

SEQ ID NO: 402086 - RNA, 19 nt, Artificial Sequence
  Description of Artificial Sequence: Synthetic oligonucleotide
guguucaucggagcaacau

SEQ ID NO: 402087 - RNA, 19 nt, Artificial Sequence
  Description of Artificial Sequence: Synthetic oligonucleotide
ucagccggguucgcacgcu

SEQ ID NO: 402088 - RNA, 19 nt, Artificial Sequence
  Description of Artificial Sequence: Synthetic oligonucleotide
ccucagccggguucgcacg

SEQ ID NO: 402089 - RNA, 19 nt, Artificial Sequence
  Description of Artificial Sequence: Synthetic oligonucleotide
cuacgccuggugcucaucu

SEQ ID NO: 402090 - RNA, 19 nt, Artificial Sequence
  Description of Artificial Sequence: Synthetic oligonucleotide
augccgagguugagaaacu

SEQ ID NO: 402091 - RNA, 19 nt, Artificial Sequence
  Description of Artificial Sequence: Synthetic oligonucleotide
gcaguagcguuauagcauu

SEQ ID NO: 402092 - RNA, 19 nt, Artificial Sequence
  Description of Artificial Sequence: Synthetic oligonucleotide
ccccgugcucauacaagag

SEQ ID NO: 402093 - RNA, 19 nt, Artificial Sequence
  Description of Artificial Sequence: Synthetic oligonucleotide
augguuuacccaggcuauu

SEQ ID NO: 402094 - RNA, 19 nt, Artificial Sequence
  Description of Artificial Sequence: Synthetic oligonucleotide
ggugccaucguuccucuuu

SEQ ID NO: 402095 - RNA, 19 nt, Artificial Sequence
  Description of Artificial Sequence: Synthetic oligonucleotide
gcgcuaggcucucagucuc

SEQ ID NO: 402096 - RNA, 19 nt, Artificial Sequence
  Description of Artificial Sequence: Synthetic oligonucleotide
cucccguggaagcaagggu

SEQ ID NO: 402097 - RNA, 19 nt, Artificial Sequence
  Description of Artificial Sequence: Synthetic oligonucleotide
gcaaggguagccggacgug

SEQ ID NO: 402098 - RNA, 19 nt, Artificial Sequence
  Description of Artificial Sequence: Synthetic oligonucleotide
accgggucauaggaaucaa

SEQ ID NO: 402099 - RNA, 19 nt, Artificial Sequence
  Description of Artificial Sequence: Synthetic oligonucleotide
cgugaggccccaucguaac

SEQ ID NO: 402100 - RNA, 19 nt, Artificial Sequence
  Description of Artificial Sequence: Synthetic oligonucleotide
cucgcauguuugcaacgcu

SEQ ID NO: 402101 - RNA, 19 nt, Artificial Sequence
  Description of Artificial Sequence: Synthetic oligonucleotide
acgcuuccacagacgauaa

SEQ ID NO: 402102 - RNA, 19 nt, Artificial Sequence
  Description of Artificial Sequence: Synthetic oligonucleotide
cgcacgcucuucauuaaca

SEQ ID NO: 402103 - RNA, 19 nt, Artificial Sequence
  Description of Artificial Sequence: Synthetic oligonucleotide
ggcgugaggccccaucgua

SEQ ID NO: 402104 - RNA, 19 nt, Artificial Sequence
  Description of Artificial Sequence: Synthetic oligonucleotide
cuuugcacgcacugcuauu

SEQ ID NO: 402105 - RNA, 19 nt, Artificial Sequence
  Description of Artificial Sequence: Synthetic oligonucleotide
cagccggguucgcacgcuc

SEQ ID NO: 402106 - RNA, 19 nt, Artificial Sequence
  Description of Artificial Sequence: Synthetic oligonucleotide
agccggguucgcacgcucu

SEQ ID NO: 402107 - RNA, 19 nt, Artificial Sequence
  Description of Artificial Sequence: Synthetic oligonucleotide
guagucauucgaggcugau

SEQ ID NO: 402108 - RNA, 19 nt, Artificial Sequence
  Description of Artificial Sequence: Synthetic oligonucleotide
ggagaagcgcuaggcucuc

SEQ ID NO: 402109 - RNA, 19 nt, Artificial Sequence
  Description of Artificial Sequence: Synthetic oligonucleotide
ccaggcucauaaugguuua

SEQ ID NO: 402110 - RNA, 19 nt, Artificial Sequence
  Description of Artificial Sequence: Synthetic oligonucleotide
gguucgcacgcucuucauu

SEQ ID NO: 402111 - RNA, 19 nt, Artificial Sequence
  Description of Artificial Sequence: Synthetic oligonucleotide
gccaaguuacaggaaccgu

SEQ ID NO: 402112 - RNA, 19 nt, Artificial Sequence
  Description of Artificial Sequence: Synthetic oligonucleotide
gaaagccuacacggugcuu

SEQ ID NO: 402113 - RNA, 19 nt, Artificial Sequence
  Description of Artificial Sequence: Synthetic oligonucleotide
cauaaguguuggccuuauu

SEQ ID NO: 402114 - RNA, 19 nt, Artificial Sequence
  Description of Artificial Sequence: Synthetic oligonucleotide
cauuugcaguagcguuaua

SEQ ID NO: 402115 - RNA, 19 nt, Artificial Sequence
  Description of Artificial Sequence: Synthetic oligonucleotide
cuugcucaaugccgagguu

SEQ ID NO: 402116 - RNA, 19 nt, Artificial Sequence
  Description of Artificial Sequence: Synthetic oligonucleotide
gcgugaggccccaucguaa

SEQ ID NO: 402117 - RNA, 19 nt, Artificial Sequence
  Description of Artificial Sequence: Synthetic oligonucleotide
guagccggacguguuccau

SEQ ID NO: 402118 - RNA, 19 nt, Artificial Sequence
  Description of Artificial Sequence: Synthetic oligonucleotide
guacgcuuccacagacgau

SEQ ID NO: 402119 - RNA, 19 nt, Artificial Sequence
  Description of Artificial Sequence: Synthetic oligonucleotide
cguguucaucggagcaaca

SEQ ID NO: 402120 - RNA, 19 nt, Artificial Sequence
  Description of Artificial Sequence: Synthetic oligonucleotide
cggguucgcacgcucuuca

SEQ ID NO: 402121 - RNA, 19 nt, Artificial Sequence
  Description of Artificial Sequence: Synthetic oligonucleotide
cggucucgcauguuugcaa

SEQ ID NO: 402122 - RNA, 19 nt, Artificial Sequence
  Description of Artificial Sequence: Synthetic oligonucleotide
ccggguucgcacgcucuuc

SEQ ID NO: 402123 - RNA, 19 nt, Artificial Sequence
  Description of Artificial Sequence: Synthetic oligonucleotide
cacuacgccuggugcucau

SEQ ID NO: 402124 - RNA, 19 nt, Artificial Sequence
  Description of Artificial Sequence: Synthetic oligonucleotide
ggguucgcacgcucuucau

SEQ ID NO: 402125 - RNA, 19 nt, Artificial Sequence
  Description of Artificial Sequence: Synthetic oligonucleotide
gccggguucgcacgcucuu

SEQ ID NO: 402126 - RNA, 19 nt, Artificial Sequence
  Description of Artificial Sequence: Synthetic oligonucleotide
gcguuggugguggggucau

SEQ ID NO: 402127 - RNA, 19 nt, Artificial Sequence
  Description of Artificial Sequence: Synthetic oligonucleotide
aaguauuguguagagagcc

SEQ ID NO: 402128 - RNA, 19 nt, Artificial Sequence
  Description of Artificial Sequence: Synthetic oligonucleotide
aaacgcuccaguuucuccc

SEQ ID NO: 402129 - RNA, 19 nt, Artificial Sequence
  Description of Artificial Sequence: Synthetic oligonucleotide
uuuaaaacgcuccaguuuc

SEQ ID NO: 402130 - RNA, 19 nt, Artificial Sequence
  Description of Artificial Sequence: Synthetic oligonucleotide
uguacaagauaucacuucc

SEQ ID NO: 402131 - RNA, 19 nt, Artificial Sequence
  Description of Artificial Sequence: Synthetic oligonucleotide
ucaaguaacacuucaguac

SEQ ID NO: 402132 - RNA, 19 nt, Artificial Sequence
  Description of Artificial Sequence: Synthetic oligonucleotide
aaaacgcuccaguuucucc

SEQ ID NO: 402133 - RNA, 19 nt, Artificial Sequence
  Description of Artificial Sequence: Synthetic oligonucleotide
aacagguagacccguggcc

SEQ ID NO: 402134 - RNA, 19 nt, Artificial Sequence
  Description of Artificial Sequence: Synthetic oligonucleotide
aaaugaaggcgagagguac

SEQ ID NO: 402135 - RNA, 19 nt, Artificial Sequence
  Description of Artificial Sequence: Synthetic oligonucleotide
uauccuguguacaagauau

SEQ ID NO: 402136 - RNA, 19 nt, Artificial Sequence
  Description of Artificial Sequence: Synthetic oligonucleotide
gaaggcgagagguacaggg

SEQ ID NO: 402137 - RNA, 19 nt, Artificial Sequence
  Description of Artificial Sequence: Synthetic oligonucleotide
uucagugacguucaaggag

SEQ ID NO: 402138 - RNA, 19 nt, Artificial Sequence
  Description of Artificial Sequence: Synthetic oligonucleotide
ggcacauccguuuaaaacg

SEQ ID NO: 402139 - RNA, 19 nt, Artificial Sequence
  Description of Artificial Sequence: Synthetic oligonucleotide
agcgaaaggggccaggugg

SEQ ID NO: 402140 - RNA, 19 nt, Artificial Sequence
  Description of Artificial Sequence: Synthetic oligonucleotide
uugcagucgguucagaagc

SEQ ID NO: 402141 - RNA, 19 nt, Artificial Sequence
  Description of Artificial Sequence: Synthetic oligonucleotide
aagauaucacuucccucac

SEQ ID NO: 402142 - RNA, 19 nt, Artificial Sequence
  Description of Artificial Sequence: Synthetic oligonucleotide
agagaggguacuuacuauc

SEQ ID NO: 402143 - RNA, 19 nt, Artificial Sequence
  Description of Artificial Sequence: Synthetic oligonucleotide
gaagcaaaggccccgggag

SEQ ID NO: 402144 - RNA, 19 nt, Artificial Sequence
  Description of Artificial Sequence: Synthetic oligonucleotide
ucagugacguucaaggagu

SEQ ID NO: 402145 - RNA, 19 nt, Artificial Sequence
  Description of Artificial Sequence: Synthetic oligonucleotide
agacgcuugucguagcacc

SEQ ID NO: 402146 - RNA, 19 nt, Artificial Sequence
  Description of Artificial Sequence: Synthetic oligonucleotide
cauccuaggccacagacgc

SEQ ID NO: 402147 - RNA, 19 nt, Artificial Sequence
  Description of Artificial Sequence: Synthetic oligonucleotide
uucauccucacuaagugau

SEQ ID NO: 402148 - RNA, 19 nt, Artificial Sequence
  Description of Artificial Sequence: Synthetic oligonucleotide
aacuccacuaagcaugggu

SEQ ID NO: 402149 - RNA, 19 nt, Artificial Sequence
  Description of Artificial Sequence: Synthetic oligonucleotide
uuagaggagugccaaguca

SEQ ID NO: 402150 - RNA, 19 nt, Artificial Sequence
  Description of Artificial Sequence: Synthetic oligonucleotide
gaggguacuuacuaucucc

SEQ ID NO: 402151 - RNA, 19 nt, Artificial Sequence
  Description of Artificial Sequence: Synthetic oligonucleotide
uggacaacagguagacccg

SEQ ID NO: 402152 - RNA, 19 nt, Artificial Sequence
  Description of Artificial Sequence: Synthetic oligonucleotide
ugcaauagcugccauuuuc

SEQ ID NO: 402153 - RNA, 19 nt, Artificial Sequence
  Description of Artificial Sequence: Synthetic oligonucleotide
uguuggucggcuuucugcc

SEQ ID NO: 402154 - RNA, 19 nt, Artificial Sequence
  Description of Artificial Sequence: Synthetic oligonucleotide
cauccguuuaaaacgcucc

SEQ ID NO: 402155 - RNA, 19 nt, Artificial Sequence
  Description of Artificial Sequence: Synthetic oligonucleotide
uccagcgagauugaggugc

SEQ ID NO: 402156 - RNA, 19 nt, Artificial Sequence
  Description of Artificial Sequence: Synthetic oligonucleotide
auaggcauccaacuagcug

SEQ ID NO: 402157 - RNA, 19 nt, Artificial Sequence
  Description of Artificial Sequence: Synthetic oligonucleotide
cucggauucagaacccugg

SEQ ID NO: 402158 - RNA, 19 nt, Artificial Sequence
  Description of Artificial Sequence: Synthetic oligonucleotide
uggcacauccguuuaaaac

SEQ ID NO: 402159 - RNA, 19 nt, Artificial Sequence
  Description of Artificial Sequence: Synthetic oligonucleotide
ugacguucaaggagucugg

SEQ ID NO: 402160 - RNA, 19 nt, Artificial Sequence
  Description of Artificial Sequence: Synthetic oligonucleotide
ucggauucagaacccuggg

SEQ ID NO: 402161 - RNA, 19 nt, Artificial Sequence
  Description of Artificial Sequence: Synthetic oligonucleotide
uucauggauuccccaauug

SEQ ID NO: 402162 - RNA, 19 nt, Artificial Sequence
  Description of Artificial Sequence: Synthetic oligonucleotide
uugucguagcaccagcggc

SEQ ID NO: 402163 - RNA, 19 nt, Artificial Sequence
  Description of Artificial Sequence: Synthetic oligonucleotide
gauaucagugcaggugugg

SEQ ID NO: 402164 - RNA, 19 nt, Artificial Sequence
  Description of Artificial Sequence: Synthetic oligonucleotide
caaguauuguguagagagc

SEQ ID NO: 402165 - RNA, 19 nt, Artificial Sequence
  Description of Artificial Sequence: Synthetic oligonucleotide
uucccuaucuugcccaucu

SEQ ID NO: 402166 - RNA, 19 nt, Artificial Sequence
  Description of Artificial Sequence: Synthetic oligonucleotide
cacgaagccaggcagcccg

SEQ ID NO: 402167 - RNA, 19 nt, Artificial Sequence
  Description of Artificial Sequence: Synthetic oligonucleotide
aagccgguccccucacacc

SEQ ID NO: 402168 - RNA, 19 nt, Artificial Sequence
  Description of Artificial Sequence: Synthetic oligonucleotide
ggcgcagugacucaagucc

SEQ ID NO: 402169 - RNA, 19 nt, Artificial Sequence
  Description of Artificial Sequence: Synthetic oligonucleotide
uccucacuaagugaugugc

SEQ ID NO: 402170 - RNA, 19 nt, Artificial Sequence
  Description of Artificial Sequence: Synthetic oligonucleotide
ugucguagcaccagcggcu

SEQ ID NO: 402171 - RNA, 19 nt, Artificial Sequence
  Description of Artificial Sequence: Synthetic oligonucleotide
ugggcuaccccucaccacu

SEQ ID NO: 402172 - RNA, 19 nt, Artificial Sequence
  Description of Artificial Sequence: Synthetic oligonucleotide
cuugucguagcaccagcgg

SEQ ID NO: 402173 - RNA, 19 nt, Artificial Sequence
  Description of Artificial Sequence: Synthetic oligonucleotide
agaggguacuuacuaucuc

SEQ ID NO: 402174 - RNA, 19 nt, Artificial Sequence
  Description of Artificial Sequence: Synthetic oligonucleotide
ggagcguagguccaggcgg

SEQ ID NO: 402175 - RNA, 19 nt, Artificial Sequence
  Description of Artificial Sequence: Synthetic oligonucleotide
cacggggugaaaugaaggc

SEQ ID NO: 402176 - RNA, 19 nt, Artificial Sequence
  Description of Artificial Sequence: Synthetic oligonucleotide
guauuguguagagagccag

SEQ ID NO: 402177 - RNA, 19 nt, Artificial Sequence
  Description of Artificial Sequence: Synthetic oligonucleotide
uccccaguaccucuugacc

SEQ ID NO: 402178 - RNA, 19 nt, Artificial Sequence
  Description of Artificial Sequence: Synthetic oligonucleotide
ggaaucucaagucauuaca

SEQ ID NO: 402179 - RNA, 19 nt, Artificial Sequence
  Description of Artificial Sequence: Synthetic oligonucleotide
ggugggacgguccaaacug

SEQ ID NO: 402180 - RNA, 19 nt, Artificial Sequence
  Description of Artificial Sequence: Synthetic oligonucleotide
accgguucuccuucucgcc

SEQ ID NO: 402181 - RNA, 19 nt, Artificial Sequence
  Description of Artificial Sequence: Synthetic oligonucleotide
uuaaaacgcuccaguuucu

SEQ ID NO: 402182 - RNA, 19 nt, Artificial Sequence
  Description of Artificial Sequence: Synthetic oligonucleotide
uccagcggagguccaagag

SEQ ID NO: 402183 - RNA, 19 nt, Artificial Sequence
  Description of Artificial Sequence: Synthetic oligonucleotide
gggguaaccccagagaggg

SEQ ID NO: 402184 - RNA, 19 nt, Artificial Sequence
  Description of Artificial Sequence: Synthetic oligonucleotide
uccguuuaaaacgcuccag

SEQ ID NO: 402185 - RNA, 19 nt, Artificial Sequence
  Description of Artificial Sequence: Synthetic oligonucleotide
gaacggagcauaggcaucc

SEQ ID NO: 402186 - RNA, 19 nt, Artificial Sequence
  Description of Artificial Sequence: Synthetic oligonucleotide
agugccaagucaugaagaa

SEQ ID NO: 402187 - RNA, 19 nt, Artificial Sequence
  Description of Artificial Sequence: Synthetic oligonucleotide
aggagcguagguccaggcg

SEQ ID NO: 402188 - RNA, 19 nt, Artificial Sequence
  Description of Artificial Sequence: Synthetic oligonucleotide
auggauuccccaauugcuc

SEQ ID NO: 402189 - RNA, 19 nt, Artificial Sequence
  Description of Artificial Sequence: Synthetic oligonucleotide
acggggugaaaugaaggcg

SEQ ID NO: 402190 - RNA, 19 nt, Artificial Sequence
  Description of Artificial Sequence: Synthetic oligonucleotide
gacgguccaaacuggguac

SEQ ID NO: 402191 - RNA, 19 nt, Artificial Sequence
  Description of Artificial Sequence: Synthetic oligonucleotide
cugcuugagacuugcacuc

SEQ ID NO: 402192 - RNA, 19 nt, Artificial Sequence
  Description of Artificial Sequence: Synthetic oligonucleotide
uuccgcacucccaguaucc

SEQ ID NO: 402193 - RNA, 19 nt, Artificial Sequence
  Description of Artificial Sequence: Synthetic oligonucleotide
gucagugacuuccuucggc

SEQ ID NO: 402194 - RNA, 19 nt, Artificial Sequence
  Description of Artificial Sequence: Synthetic oligonucleotide
gugacucaaguccagggca

SEQ ID NO: 402195 - RNA, 19 nt, Artificial Sequence
  Description of Artificial Sequence: Synthetic oligonucleotide
ucauccucacuaagugaug

SEQ ID NO: 402196 - RNA, 19 nt, Artificial Sequence
  Description of Artificial Sequence: Synthetic oligonucleotide
aaguccggcagacucgcau

SEQ ID NO: 402197 - RNA, 19 nt, Artificial Sequence
  Description of Artificial Sequence: Synthetic oligonucleotide
acauccguuuaaaacgcuc

SEQ ID NO: 402198 - RNA, 19 nt, Artificial Sequence
  Description of Artificial Sequence: Synthetic oligonucleotide
aauccagcggagguccaag

SEQ ID NO: 402199 - RNA, 19 nt, Artificial Sequence
  Description of Artificial Sequence: Synthetic oligonucleotide
guccaggcggcgaagacgg

SEQ ID NO: 402200 - RNA, 19 nt, Artificial Sequence
  Description of Artificial Sequence: Synthetic oligonucleotide
agcgacggaacaguggaag

SEQ ID NO: 402201 - RNA, 19 nt, Artificial Sequence
  Description of Artificial Sequence: Synthetic oligonucleotide
acuccacuaagcaugggug

SEQ ID NO: 402202 - RNA, 19 nt, Artificial Sequence
  Description of Artificial Sequence: Synthetic oligonucleotide
acuagcuguccuugagaag

SEQ ID NO: 402203 - RNA, 19 nt, Artificial Sequence
  Description of Artificial Sequence: Synthetic oligonucleotide
gguacuuacuaucuccaca

SEQ ID NO: 402204 - RNA, 19 nt, Artificial Sequence
  Description of Artificial Sequence: Synthetic oligonucleotide
cauccagcgagauugaggu

SEQ ID NO: 402205 - RNA, 19 nt, Artificial Sequence
  Description of Artificial Sequence: Synthetic oligonucleotide
cuucggcuuagguccaucc

SEQ ID NO: 402206 - RNA, 19 nt, Artificial Sequence
  Description of Artificial Sequence: Synthetic oligonucleotide
ugugaggagguggacacuc

SEQ ID NO: 402207 - RNA, 19 nt, Artificial Sequence
  Description of Artificial Sequence: Synthetic oligonucleotide
cagugucucucggagaggg

SEQ ID NO: 402208 - RNA, 19 nt, Artificial Sequence
  Description of Artificial Sequence: Synthetic oligonucleotide
auccguuuaaaacgcucca

SEQ ID NO: 402209 - RNA, 19 nt, Artificial Sequence
  Description of Artificial Sequence: Synthetic oligonucleotide
uaucagugcagguguggga

SEQ ID NO: 402210 - RNA, 19 nt, Artificial Sequence
  Description of Artificial Sequence: Synthetic oligonucleotide
augaaggcgagagguacag

SEQ ID NO: 402211 - RNA, 19 nt, Artificial Sequence
  Description of Artificial Sequence: Synthetic oligonucleotide
uuggucggcuuucugcccu

SEQ ID NO: 402212 - RNA, 19 nt, Artificial Sequence
  Description of Artificial Sequence: Synthetic oligonucleotide
guacaagauaucacuuccc

SEQ ID NO: 402213 - RNA, 19 nt, Artificial Sequence
  Description of Artificial Sequence: Synthetic oligonucleotide
agagccgaagugccggcag

SEQ ID NO: 402214 - RNA, 19 nt, Artificial Sequence
  Description of Artificial Sequence: Synthetic oligonucleotide
acuugcacucucaccgccc

SEQ ID NO: 402215 - RNA, 19 nt, Artificial Sequence
  Description of Artificial Sequence: Synthetic oligonucleotide
gacguucaaggagucuggg

SEQ ID NO: 402216 - RNA, 19 nt, Artificial Sequence
  Description of Artificial Sequence: Synthetic oligonucleotide
aggcgagagguacagggga

SEQ ID NO: 402217 - RNA, 19 nt, Artificial Sequence
  Description of Artificial Sequence: Synthetic oligonucleotide
acucgggucagaggggugg

SEQ ID NO: 402218 - RNA, 19 nt, Artificial Sequence
  Description of Artificial Sequence: Synthetic oligonucleotide
aggcggugggcauccagcg

SEQ ID NO: 402219 - RNA, 19 nt, Artificial Sequence
  Description of Artificial Sequence: Synthetic oligonucleotide
agugacuuccuucggcuua

SEQ ID NO: 402220 - RNA, 19 nt, Artificial Sequence
  Description of Artificial Sequence: Synthetic oligonucleotide
ucggguccccaacaugggc

SEQ ID NO: 402221 - RNA, 19 nt, Artificial Sequence
  Description of Artificial Sequence: Synthetic oligonucleotide
aguccggcagacucgcaug

SEQ ID NO: 402222 - RNA, 19 nt, Artificial Sequence
  Description of Artificial Sequence: Synthetic oligonucleotide
cauggauuccccaauugcu

SEQ ID NO: 402223 - RNA, 19 nt, Artificial Sequence
  Description of Artificial Sequence: Synthetic oligonucleotide
agugccggcaguggggccg

SEQ ID NO: 402224 - RNA, 19 nt, Artificial Sequence
  Description of Artificial Sequence: Synthetic oligonucleotide
agccgguccccucacacca

SEQ ID NO: 402225 - RNA, 19 nt, Artificial Sequence
  Description of Artificial Sequence: Synthetic oligonucleotide
acgguccaaacuggguacc

SEQ ID NO: 402226 - RNA, 19 nt, Artificial Sequence
  Description of Artificial Sequence: Synthetic oligonucleotide
guaccucuugacccauucc

SEQ ID NO: 402227 - RNA, 19 nt, Artificial Sequence
  Description of Artificial Sequence: Synthetic oligonucleotide
gaggagguaucaggcaccc

SEQ ID NO: 402228 - RNA, 19 nt, Artificial Sequence
  Description of Artificial Sequence: Synthetic oligonucleotide
cuugagacuugcacucuca

SEQ ID NO: 402229 - RNA, 19 nt, Artificial Sequence
  Description of Artificial Sequence: Synthetic oligonucleotide
aguauuguguagagagcca

SEQ ID NO: 402230 - RNA, 19 nt, Artificial Sequence
  Description of Artificial Sequence: Synthetic oligonucleotide
gacacucggguccccaaca

SEQ ID NO: 402231 - RNA, 19 nt, Artificial Sequence
  Description of Artificial Sequence: Synthetic oligonucleotide
ccucagagaggcaucagug

SEQ ID NO: 402232 - RNA, 19 nt, Artificial Sequence
  Description of Artificial Sequence: Synthetic oligonucleotide
ccucacuaagugaugugcc

SEQ ID NO: 402233 - RNA, 19 nt, Artificial Sequence
  Description of Artificial Sequence: Synthetic oligonucleotide
cagucgguucagaagccac

SEQ ID NO: 402234 - RNA, 19 nt, Artificial Sequence
  Description of Artificial Sequence: Synthetic oligonucleotide
gauucauggauuccccaau

SEQ ID NO: 402235 - RNA, 19 nt, Artificial Sequence
  Description of Artificial Sequence: Synthetic oligonucleotide
uucccucacucuucccugc

SEQ ID NO: 402236 - RNA, 19 nt, Artificial Sequence
  Description of Artificial Sequence: Synthetic oligonucleotide
cuccccaguaccucuugac

SEQ ID NO: 402237 - RNA, 19 nt, Artificial Sequence
  Description of Artificial Sequence: Synthetic oligonucleotide
gcuccaacuguggaggccg

SEQ ID NO: 402238 - RNA, 19 nt, Artificial Sequence
  Description of Artificial Sequence: Synthetic oligonucleotide
ccccaguaccucuugaccc

SEQ ID NO: 402239 - RNA, 19 nt, Artificial Sequence
  Description of Artificial Sequence: Synthetic oligonucleotide
guaacacuucaguacagau

SEQ ID NO: 402240 - RNA, 19 nt, Artificial Sequence
  Description of Artificial Sequence: Synthetic oligonucleotide
guaucaggcacccgcucca

SEQ ID NO: 402241 - RNA, 19 nt, Artificial Sequence
  Description of Artificial Sequence: Synthetic oligonucleotide
uggcccuacuccuugcaau

SEQ ID NO: 402242 - RNA, 19 nt, Artificial Sequence
  Description of Artificial Sequence: Synthetic oligonucleotide
ugccaaccgggcacaagcu

SEQ ID NO: 402243 - RNA, 19 nt, Artificial Sequence
  Description of Artificial Sequence: Synthetic oligonucleotide
acacccacccuuccgcacu

SEQ ID NO: 402244 - RNA, 19 nt, Artificial Sequence
  Description of Artificial Sequence: Synthetic oligonucleotide
agcucacgaagcugggagu

SEQ ID NO: 402245 - RNA, 19 nt, Artificial Sequence
  Description of Artificial Sequence: Synthetic oligonucleotide
ccauccuaggccacagacg

SEQ ID NO: 402246 - RNA, 19 nt, Artificial Sequence
  Description of Artificial Sequence: Synthetic oligonucleotide
uccguuugcccugguuuag

SEQ ID NO: 402247 - RNA, 19 nt, Artificial Sequence
  Description of Artificial Sequence: Synthetic oligonucleotide
uccuaggccacagacgcuu

SEQ ID NO: 402248 - RNA, 19 nt, Artificial Sequence
  Description of Artificial Sequence: Synthetic oligonucleotide
uuuucccuaucuugcccau

SEQ ID NO: 402249 - RNA, 19 nt, Artificial Sequence
  Description of Artificial Sequence: Synthetic oligonucleotide
gcggcaggagcguaggucc

SEQ ID NO: 402250 - RNA, 19 nt, Artificial Sequence
  Description of Artificial Sequence: Synthetic oligonucleotide
gcauccagcgagauugagg

SEQ ID NO: 402251 - RNA, 19 nt, Artificial Sequence
  Description of Artificial Sequence: Synthetic oligonucleotide
guuggucggcuuucugccc

SEQ ID NO: 402252 - RNA, 19 nt, Artificial Sequence
  Description of Artificial Sequence: Synthetic oligonucleotide
ugggcagcgaaaggggcca

SEQ ID NO: 402253 - RNA, 19 nt, Artificial Sequence
  Description of Artificial Sequence: Synthetic oligonucleotide
gagcauaggcauccaacua

SEQ ID NO: 402254 - RNA, 19 nt, Artificial Sequence
  Description of Artificial Sequence: Synthetic oligonucleotide
ugggcgcagugacucaagu

SEQ ID NO: 402255 - RNA, 19 nt, Artificial Sequence
  Description of Artificial Sequence: Synthetic oligonucleotide
gcgaacaacuccacuaagc

SEQ ID NO: 402256 - RNA, 19 nt, Artificial Sequence
  Description of Artificial Sequence: Synthetic oligonucleotide
agggguggagcuguucaag

SEQ ID NO: 402257 - RNA, 19 nt, Artificial Sequence
  Description of Artificial Sequence: Synthetic oligonucleotide
cagaugaauguucaaguau

SEQ ID NO: 402258 - RNA, 19 nt, Artificial Sequence
  Description of Artificial Sequence: Synthetic oligonucleotide
cuuccgcacucccaguauc

SEQ ID NO: 402259 - RNA, 19 nt, Artificial Sequence
  Description of Artificial Sequence: Synthetic oligonucleotide
gcggugggcauccagcgag

SEQ ID NO: 402260 - RNA, 19 nt, Artificial Sequence
  Description of Artificial Sequence: Synthetic oligonucleotide
gcacauccguuuaaaacgc

SEQ ID NO: 402261 - RNA, 19 nt, Artificial Sequence
  Description of Artificial Sequence: Synthetic oligonucleotide
gcgacggaacaguggaagg

SEQ ID NO: 402262 - RNA, 19 nt, Artificial Sequence
  Description of Artificial Sequence: Synthetic oligonucleotide
gagaggguacuuacuaucu

SEQ ID NO: 402263 - RNA, 19 nt, Artificial Sequence
  Description of Artificial Sequence: Synthetic oligonucleotide
ugaacccuuguuggucggc

SEQ ID NO: 402264 - RNA, 19 nt, Artificial Sequence
  Description of Artificial Sequence: Synthetic oligonucleotide
ggagcauaggcauccaacu

SEQ ID NO: 402265 - RNA, 19 nt, Artificial Sequence
  Description of Artificial Sequence: Synthetic oligonucleotide
guccggcagacucgcaugc

SEQ ID NO: 402266 - RNA, 19 nt, Artificial Sequence
  Description of Artificial Sequence: Synthetic oligonucleotide
gcuggcggcgaacaacucc

SEQ ID NO: 402267 - RNA, 19 nt, Artificial Sequence
  Description of Artificial Sequence: Synthetic oligonucleotide
cuucucgccagagccugcc

SEQ ID NO: 402268 - RNA, 19 nt, Artificial Sequence
  Description of Artificial Sequence: Synthetic oligonucleotide
cucagggcuucgaggcggg

SEQ ID NO: 402269 - RNA, 19 nt, Artificial Sequence
  Description of Artificial Sequence: Synthetic oligonucleotide
agaaugccuggcucggauu

SEQ ID NO: 402270 - RNA, 19 nt, Artificial Sequence
  Description of Artificial Sequence: Synthetic oligonucleotide
caggagcguagguccaggc

SEQ ID NO: 402271 - RNA, 19 nt, Artificial Sequence
  Description of Artificial Sequence: Synthetic oligonucleotide
aacccuuguuggucggcuu

SEQ ID NO: 402272 - RNA, 19 nt, Artificial Sequence
  Description of Artificial Sequence: Synthetic oligonucleotide
ggcgaacaacuccacuaag

SEQ ID NO: 402273 - RNA, 19 nt, Artificial Sequence
  Description of Artificial Sequence: Synthetic oligonucleotide
gagcguagguccaggcggc

SEQ ID NO: 402274 - RNA, 19 nt, Artificial Sequence
  Description of Artificial Sequence: Synthetic oligonucleotide
ugcucuccguuugcccugg

SEQ ID NO: 402275 - RNA, 19 nt, Artificial Sequence
  Description of Artificial Sequence: Synthetic oligonucleotide
aagagccgaagugccggca

SEQ ID NO: 402276 - RNA, 19 nt, Artificial Sequence
  Description of Artificial Sequence: Synthetic oligonucleotide
cacgagcuggacaacaggu

SEQ ID NO: 402277 - RNA, 19 nt, Artificial Sequence
  Description of Artificial Sequence: Synthetic oligonucleotide
auccuguguacaagauauc

SEQ ID NO: 402278 - RNA, 19 nt, Artificial Sequence
  Description of Artificial Sequence: Synthetic oligonucleotide
accacuccccuggaccacg

SEQ ID NO: 402279 - RNA, 19 nt, Artificial Sequence
  Description of Artificial Sequence: Synthetic oligonucleotide
ugcuugagacuugcacucu

SEQ ID NO: 402280 - RNA, 19 nt, Artificial Sequence
  Description of Artificial Sequence: Synthetic oligonucleotide
ggaagcaaaggccccggga

SEQ ID NO: 402281 - RNA, 19 nt, Artificial Sequence
  Description of Artificial Sequence: Synthetic oligonucleotide
gacgcuugucguagcacca

SEQ ID NO: 402282 - RNA, 19 nt, Artificial Sequence
  Description of Artificial Sequence: Synthetic oligonucleotide
ccaaccgggcacaagcuuc

SEQ ID NO: 402283 - RNA, 19 nt, Artificial Sequence
  Description of Artificial Sequence: Synthetic oligonucleotide
uagacccguggcccuacuc

SEQ ID NO: 402284 - RNA, 19 nt, Artificial Sequence
  Description of Artificial Sequence: Synthetic oligonucleotide
agaggagugccaagucaug

SEQ ID NO: 402285 - RNA, 19 nt, Artificial Sequence
  Description of Artificial Sequence: Synthetic oligonucleotide
uugcaauagcugccauuuu

SEQ ID NO: 402286 - RNA, 19 nt, Artificial Sequence
  Description of Artificial Sequence: Synthetic oligonucleotide
caggggaacggagcauagg

SEQ ID NO: 402287 - RNA, 19 nt, Artificial Sequence
  Description of Artificial Sequence: Synthetic oligonucleotide
guacccacuagcccagucu

SEQ ID NO: 402288 - RNA, 19 nt, Artificial Sequence
  Description of Artificial Sequence: Synthetic oligonucleotide
cuuggucaagccggucccc

SEQ ID NO: 402289 - RNA, 19 nt, Artificial Sequence
  Description of Artificial Sequence: Synthetic oligonucleotide
guaaccccagagaggguac

SEQ ID NO: 402290 - RNA, 19 nt, Artificial Sequence
  Description of Artificial Sequence: Synthetic oligonucleotide
cugggcuaccccucaccac

SEQ ID NO: 402291 - RNA, 19 nt, Artificial Sequence
  Description of Artificial Sequence: Synthetic oligonucleotide
agugucucucggagagggg

SEQ ID NO: 402292 - RNA, 19 nt, Artificial Sequence
  Description of Artificial Sequence: Synthetic oligonucleotide
auccagcgagauugaggug

SEQ ID NO: 402293 - RNA, 19 nt, Artificial Sequence
  Description of Artificial Sequence: Synthetic oligonucleotide
gagaaugccuggcucggau

SEQ ID NO: 402294 - RNA, 19 nt, Artificial Sequence
  Description of Artificial Sequence: Synthetic oligonucleotide
ggacgguccaaacugggua

SEQ ID NO: 402295 - RNA, 19 nt, Artificial Sequence
  Description of Artificial Sequence: Synthetic oligonucleotide
ggcuuagguccauccuagg

SEQ ID NO: 402296 - RNA, 19 nt, Artificial Sequence
  Description of Artificial Sequence: Synthetic oligonucleotide
cacucggguccccaacaug

SEQ ID NO: 402297 - RNA, 19 nt, Artificial Sequence
  Description of Artificial Sequence: Synthetic oligonucleotide
cacacccacccuuccgcac

SEQ ID NO: 402298 - RNA, 19 nt, Artificial Sequence
  Description of Artificial Sequence: Synthetic oligonucleotide
cagugacguucaaggaguc

SEQ ID NO: 402299 - RNA, 19 nt, Artificial Sequence
  Description of Artificial Sequence: Synthetic oligonucleotide
uggacacucggguccccaa

SEQ ID NO: 402300 - RNA, 19 nt, Artificial Sequence
  Description of Artificial Sequence: Synthetic oligonucleotide
uccgcacucccaguauccu

SEQ ID NO: 402301 - RNA, 19 nt, Artificial Sequence
  Description of Artificial Sequence: Synthetic oligonucleotide
aacggagcauaggcaucca

SEQ ID NO: 402302 - RNA, 19 nt, Artificial Sequence
  Description of Artificial Sequence: Synthetic oligonucleotide
acaugggcgcagugacuca

SEQ ID NO: 402303 - RNA, 19 nt, Artificial Sequence
  Description of Artificial Sequence: Synthetic oligonucleotide
ggagguggacacucggguc

SEQ ID NO: 402304 - RNA, 19 nt, Artificial Sequence
  Description of Artificial Sequence: Synthetic oligonucleotide
gggguggucggauccagca

SEQ ID NO: 402305 - RNA, 19 nt, Artificial Sequence
  Description of Artificial Sequence: Synthetic oligonucleotide
auggcgcaguaggagccuc

SEQ ID NO: 402306 - RNA, 19 nt, Artificial Sequence
  Description of Artificial Sequence: Synthetic oligonucleotide
gguaaccccagagagggua

SEQ ID NO: 402307 - RNA, 19 nt, Artificial Sequence
  Description of Artificial Sequence: Synthetic oligonucleotide
uccaacuguggaggccgug

SEQ ID NO: 402308 - RNA, 19 nt, Artificial Sequence
  Description of Artificial Sequence: Synthetic oligonucleotide
agccgaagugccggcagug

SEQ ID NO: 402309 - RNA, 19 nt, Artificial Sequence
  Description of Artificial Sequence: Synthetic oligonucleotide
acggagcauaggcauccaa

SEQ ID NO: 402310 - RNA, 19 nt, Artificial Sequence
  Description of Artificial Sequence: Synthetic oligonucleotide
cccaaggggauggacaaug

SEQ ID NO: 402311 - RNA, 19 nt, Artificial Sequence
  Description of Artificial Sequence: Synthetic oligonucleotide
gcaugucuuggcuucuaga

SEQ ID NO: 402312 - RNA, 19 nt, Artificial Sequence
  Description of Artificial Sequence: Synthetic oligonucleotide
ccaccgguucuccuucucg

SEQ ID NO: 402313 - RNA, 19 nt, Artificial Sequence
  Description of Artificial Sequence: Synthetic oligonucleotide
aacucgggucagaggggug

SEQ ID NO: 402314 - RNA, 19 nt, Artificial Sequence
  Description of Artificial Sequence: Synthetic oligonucleotide
ggucggauccagcagccaa

SEQ ID NO: 402315 - RNA, 19 nt, Artificial Sequence
  Description of Artificial Sequence: Synthetic oligonucleotide
gcuugagacuugcacucuc

SEQ ID NO: 402316 - RNA, 19 nt, Artificial Sequence
  Description of Artificial Sequence: Synthetic oligonucleotide
gcuaccccucaccacuccc

SEQ ID NO: 402317 - RNA, 19 nt, Artificial Sequence
  Description of Artificial Sequence: Synthetic oligonucleotide
gggaacggagcauaggcau

SEQ ID NO: 402318 - RNA, 19 nt, Artificial Sequence
  Description of Artificial Sequence: Synthetic oligonucleotide
ggggugaaaugaaggcgag

SEQ ID NO: 402319 - RNA, 19 nt, Artificial Sequence
  Description of Artificial Sequence: Synthetic oligonucleotide
ggucaagccgguccccuca

SEQ ID NO: 402320 - RNA, 19 nt, Artificial Sequence
  Description of Artificial Sequence: Synthetic oligonucleotide
agcguagguccaggcggcg

SEQ ID NO: 402321 - RNA, 19 nt, Artificial Sequence
  Description of Artificial Sequence: Synthetic oligonucleotide
ccacagacgcuugucguag

SEQ ID NO: 402322 - RNA, 19 nt, Artificial Sequence
  Description of Artificial Sequence: Synthetic oligonucleotide
ggggccguaccacgugccg

SEQ ID NO: 402323 - RNA, 19 nt, Artificial Sequence
  Description of Artificial Sequence: Synthetic oligonucleotide
gacccguggcccuacuccu

SEQ ID NO: 402324 - RNA, 19 nt, Artificial Sequence
  Description of Artificial Sequence: Synthetic oligonucleotide
ccagagaggguacuuacua

SEQ ID NO: 402325 - RNA, 19 nt, Artificial Sequence
  Description of Artificial Sequence: Synthetic oligonucleotide
cauaggcauccaacuagcu

SEQ ID NO: 402326 - RNA, 19 nt, Artificial Sequence
  Description of Artificial Sequence: Synthetic oligonucleotide
gcacccggaaagcaccaac

SEQ ID NO: 402327 - RNA, 19 nt, Artificial Sequence
  Description of Artificial Sequence: Synthetic oligonucleotide
ccgggagauaucagugcag

SEQ ID NO: 402328 - RNA, 19 nt, Artificial Sequence
  Description of Artificial Sequence: Synthetic oligonucleotide
caucccacccaacugguuu

SEQ ID NO: 402329 - RNA, 19 nt, Artificial Sequence
  Description of Artificial Sequence: Synthetic oligonucleotide
ccaaguccggcagacucgc

SEQ ID NO: 402330 - RNA, 19 nt, Artificial Sequence
  Description of Artificial Sequence: Synthetic oligonucleotide
gaacccuuguuggucggcu

SEQ ID NO: 402331 - RNA, 19 nt, Artificial Sequence
  Description of Artificial Sequence: Synthetic oligonucleotide
ucccuaucuugcccaucuu

SEQ ID NO: 402332 - RNA, 19 nt, Artificial Sequence
  Description of Artificial Sequence: Synthetic oligonucleotide
ccucccacggggugaaaug

SEQ ID NO: 402333 - RNA, 19 nt, Artificial Sequence
  Description of Artificial Sequence: Synthetic oligonucleotide
acgagcuggacaacaggua

SEQ ID NO: 402334 - RNA, 19 nt, Artificial Sequence
  Description of Artificial Sequence: Synthetic oligonucleotide
ggcgaaguucugccacacc

SEQ ID NO: 402335 - RNA, 19 nt, Artificial Sequence
  Description of Artificial Sequence: Synthetic oligonucleotide
ggggagagggguaacccca

SEQ ID NO: 402336 - RNA, 19 nt, Artificial Sequence
  Description of Artificial Sequence: Synthetic oligonucleotide
uccccaacaugggcgcagu

SEQ ID NO: 402337 - RNA, 19 nt, Artificial Sequence
  Description of Artificial Sequence: Synthetic oligonucleotide
gagguaucaggcacccgcu

SEQ ID NO: 402338 - RNA, 19 nt, Artificial Sequence
  Description of Artificial Sequence: Synthetic oligonucleotide
gcgaaaggggccagguggc

SEQ ID NO: 402339 - RNA, 19 nt, Artificial Sequence
  Description of Artificial Sequence: Synthetic oligonucleotide
cagagaggguacuuacuau

SEQ ID NO: 402340 - RNA, 19 nt, Artificial Sequence
  Description of Artificial Sequence: Synthetic oligonucleotide
gucggauccagcagccaaa

SEQ ID NO: 402341 - RNA, 19 nt, Artificial Sequence
  Description of Artificial Sequence: Synthetic oligonucleotide
uggucggauccagcagcca

SEQ ID NO: 402342 - RNA, 19 nt, Artificial Sequence
  Description of Artificial Sequence: Synthetic oligonucleotide
ccggcagacucgcaugcag

SEQ ID NO: 402343 - RNA, 19 nt, Artificial Sequence
  Description of Artificial Sequence: Synthetic oligonucleotide
gaaccucugcucuccguuu

SEQ ID NO: 402344 - RNA, 19 nt, Artificial Sequence
  Description of Artificial Sequence: Synthetic oligonucleotide
uggucggcuuucugcccuc

SEQ ID NO: 402345 - RNA, 19 nt, Artificial Sequence
  Description of Artificial Sequence: Synthetic oligonucleotide
ggaacggagcauaggcauc

SEQ ID NO: 402346 - RNA, 19 nt, Artificial Sequence
  Description of Artificial Sequence: Synthetic oligonucleotide
gggcgcagugacucaaguc

SEQ ID NO: 402347 - RNA, 19 nt, Artificial Sequence
  Description of Artificial Sequence: Synthetic oligonucleotide
guggcccuacuccuugcaa

SEQ ID NO: 402348 - RNA, 19 nt, Artificial Sequence
  Description of Artificial Sequence: Synthetic oligonucleotide
cccgguucaaguaacacuu

SEQ ID NO: 402349 - RNA, 19 nt, Artificial Sequence
  Description of Artificial Sequence: Synthetic oligonucleotide
cgacggaacaguggaaggc

SEQ ID NO: 402350 - RNA, 19 nt, Artificial Sequence
  Description of Artificial Sequence: Synthetic oligonucleotide
gcagccgaaccucugcucu

SEQ ID NO: 402351 - RNA, 19 nt, Artificial Sequence
  Description of Artificial Sequence: Synthetic oligonucleotide
cauccaacuagcuguccuu

SEQ ID NO: 402352 - RNA, 19 nt, Artificial Sequence
  Description of Artificial Sequence: Synthetic oligonucleotide
ccgggcacaagcuucaggu

SEQ ID NO: 402353 - RNA, 19 nt, Artificial Sequence
  Description of Artificial Sequence: Synthetic oligonucleotide
ggggaacggagcauaggca

SEQ ID NO: 402354 - RNA, 19 nt, Artificial Sequence
  Description of Artificial Sequence: Synthetic oligonucleotide
ggcauccagcgagauugag

SEQ ID NO: 402355 - RNA, 19 nt, Artificial Sequence
  Description of Artificial Sequence: Synthetic oligonucleotide
acccuuccgcacucccagu

SEQ ID NO: 402356 - RNA, 19 nt, Artificial Sequence
  Description of Artificial Sequence: Synthetic oligonucleotide
ggcccuacuccuugcaaua

SEQ ID NO: 402357 - RNA, 19 nt, Artificial Sequence
  Description of Artificial Sequence: Synthetic oligonucleotide
gggagagggguaaccccag

SEQ ID NO: 402358 - RNA, 19 nt, Artificial Sequence
  Description of Artificial Sequence: Synthetic oligonucleotide
gugguccgugaggcggugg

SEQ ID NO: 402359 - RNA, 19 nt, Artificial Sequence
  Description of Artificial Sequence: Synthetic oligonucleotide
gguccaaacuggguaccca

SEQ ID NO: 402360 - RNA, 19 nt, Artificial Sequence
  Description of Artificial Sequence: Synthetic oligonucleotide
cacuccccuggaccacgag

SEQ ID NO: 402361 - RNA, 19 nt, Artificial Sequence
  Description of Artificial Sequence: Synthetic oligonucleotide
gccgaaccucugcucuccg

SEQ ID NO: 402362 - RNA, 19 nt, Artificial Sequence
  Description of Artificial Sequence: Synthetic oligonucleotide
caggugagagcuggcggca

SEQ ID NO: 402363 - RNA, 19 nt, Artificial Sequence
  Description of Artificial Sequence: Synthetic oligonucleotide
ccguuuaaaacgcuccagu

SEQ ID NO: 402364 - RNA, 19 nt, Artificial Sequence
  Description of Artificial Sequence: Synthetic oligonucleotide
gucgguucagaagccacau

SEQ ID NO: 402365 - RNA, 19 nt, Artificial Sequence
  Description of Artificial Sequence: Synthetic oligonucleotide
gcccugguuuagugucugg

SEQ ID NO: 402366 - RNA, 19 nt, Artificial Sequence
  Description of Artificial Sequence: Synthetic oligonucleotide
cacauccguuuaaaacgcu

SEQ ID NO: 402367 - RNA, 19 nt, Artificial Sequence
  Description of Artificial Sequence: Synthetic oligonucleotide
ggguccgcuccucggagga

SEQ ID NO: 402368 - RNA, 19 nt, Artificial Sequence
  Description of Artificial Sequence: Synthetic oligonucleotide
gccucagagaggcaucagu

SEQ ID NO: 402369 - RNA, 19 nt, Artificial Sequence
  Description of Artificial Sequence: Synthetic oligonucleotide
gcgagagguacaggggaac

SEQ ID NO: 402370 - RNA, 19 nt, Artificial Sequence
  Description of Artificial Sequence: Synthetic oligonucleotide
ggauuccccaauugcuccu

SEQ ID NO: 402371 - RNA, 19 nt, Artificial Sequence
  Description of Artificial Sequence: Synthetic oligonucleotide
gccacagacgcuugucgua

SEQ ID NO: 402372 - RNA, 19 nt, Artificial Sequence
  Description of Artificial Sequence: Synthetic oligonucleotide
auccuaggccacagacgcu

SEQ ID NO: 402373 - RNA, 19 nt, Artificial Sequence
  Description of Artificial Sequence: Synthetic oligonucleotide
accgucccuuuggcucagc

SEQ ID NO: 402374 - RNA, 19 nt, Artificial Sequence
  Description of Artificial Sequence: Synthetic oligonucleotide
ccgguucaaguaacacuuc

SEQ ID NO: 402375 - RNA, 19 nt, Artificial Sequence
  Description of Artificial Sequence: Synthetic oligonucleotide
ccgcacucccaguauccug

SEQ ID NO: 402376 - RNA, 19 nt, Artificial Sequence
  Description of Artificial Sequence: Synthetic oligonucleotide
gggccguaccacgugccgc

SEQ ID NO: 402377 - RNA, 19 nt, Artificial Sequence
  Description of Artificial Sequence: Synthetic oligonucleotide
ggucugggcuaccccucac

SEQ ID NO: 402378 - RNA, 19 nt, Artificial Sequence
  Description of Artificial Sequence: Synthetic oligonucleotide
cagucuuggucaagccggu

SEQ ID NO: 402379 - RNA, 19 nt, Artificial Sequence
  Description of Artificial Sequence: Synthetic oligonucleotide
caccgccccucccaccguc

SEQ ID NO: 402380 - RNA, 19 nt, Artificial Sequence
  Description of Artificial Sequence: Synthetic oligonucleotide
cccguggcccuacuccuug

SEQ ID NO: 402381 - RNA, 19 nt, Artificial Sequence
  Description of Artificial Sequence: Synthetic oligonucleotide
gggugggacgguccaaacu

SEQ ID NO: 402382 - RNA, 19 nt, Artificial Sequence
  Description of Artificial Sequence: Synthetic oligonucleotide
ccuucucgccagagccugc

SEQ ID NO: 402383 - RNA, 19 nt, Artificial Sequence
  Description of Artificial Sequence: Synthetic oligonucleotide
gguagacccguggcccuac

SEQ ID NO: 402384 - RNA, 19 nt, Artificial Sequence
  Description of Artificial Sequence: Synthetic oligonucleotide
caaguccggcagacucgca

SEQ ID NO: 402385 - RNA, 19 nt, Artificial Sequence
  Description of Artificial Sequence: Synthetic oligonucleotide
uccuucggcuuagguccau

SEQ ID NO: 402386 - RNA, 19 nt, Artificial Sequence
  Description of Artificial Sequence: Synthetic oligonucleotide
ccaccgucccuuuggcuca

SEQ ID NO: 402387 - RNA, 19 nt, Artificial Sequence
  Description of Artificial Sequence: Synthetic oligonucleotide
cagcgacggaacaguggaa

SEQ ID NO: 402388 - RNA, 19 nt, Artificial Sequence
  Description of Artificial Sequence: Synthetic oligonucleotide
ggcgagagguacaggggaa

SEQ ID NO: 402389 - RNA, 19 nt, Artificial Sequence
  Description of Artificial Sequence: Synthetic oligonucleotide
ggccguaccacgugccgcu

SEQ ID NO: 402390 - RNA, 19 nt, Artificial Sequence
  Description of Artificial Sequence: Synthetic oligonucleotide
gcuguccuugagaaguagu

SEQ ID NO: 402391 - RNA, 19 nt, Artificial Sequence
  Description of Artificial Sequence: Synthetic oligonucleotide
ggcggugggcauccagcga

SEQ ID NO: 402392 - RNA, 19 nt, Artificial Sequence
  Description of Artificial Sequence: Synthetic oligonucleotide
ccgguucuccuucucgcca

SEQ ID NO: 402393 - RNA, 19 nt, Artificial Sequence
  Description of Artificial Sequence: Synthetic oligonucleotide
gaggugcaccagugucucu

SEQ ID NO: 402394 - RNA, 19 nt, Artificial Sequence
  Description of Artificial Sequence: Synthetic oligonucleotide
cguuuaaaacgcuccaguu

SEQ ID NO: 402395 - RNA, 19 nt, Artificial Sequence
  Description of Artificial Sequence: Synthetic oligonucleotide
ccccgguucaaguaacacu

SEQ ID NO: 402396 - RNA, 19 nt, Artificial Sequence
  Description of Artificial Sequence: Synthetic oligonucleotide
cagugguccgugaggcggu

SEQ ID NO: 402397 - RNA, 19 nt, Artificial Sequence
  Description of Artificial Sequence: Synthetic oligonucleotide
ccgcuccaacuguggaggc

SEQ ID NO: 402398 - RNA, 19 nt, Artificial Sequence
  Description of Artificial Sequence: Synthetic oligonucleotide
ggggagcauggcgcaguag

SEQ ID NO: 402399 - RNA, 19 nt, Artificial Sequence
  Description of Artificial Sequence: Synthetic oligonucleotide
cacgugccgcuccaacugu

SEQ ID NO: 402400 - RNA, 19 nt, Artificial Sequence
  Description of Artificial Sequence: Synthetic oligonucleotide
caccgucccuuuggcucag

SEQ ID NO: 402401 - RNA, 19 nt, Artificial Sequence
  Description of Artificial Sequence: Synthetic oligonucleotide
ggucggcuuucugcccucc

SEQ ID NO: 402402 - RNA, 19 nt, Artificial Sequence
  Description of Artificial Sequence: Synthetic oligonucleotide
ccucaccacuccccuggac

SEQ ID NO: 402403 - RNA, 19 nt, Artificial Sequence
  Description of Artificial Sequence: Synthetic oligonucleotide
gguccgcuccucggaggag

SEQ ID NO: 402404 - RNA, 19 nt, Artificial Sequence
  Description of Artificial Sequence: Synthetic oligonucleotide
cauggcgcaguaggagccu

SEQ ID NO: 402405 - RNA, 19 nt, Artificial Sequence
  Description of Artificial Sequence: Synthetic oligonucleotide
guagacccguggcccuacu

SEQ ID NO: 402406 - RNA, 19 nt, Artificial Sequence
  Description of Artificial Sequence: Synthetic oligonucleotide
gggacgguccaaacugggu

SEQ ID NO: 402407 - RNA, 19 nt, Artificial Sequence
  Description of Artificial Sequence: Synthetic oligonucleotide
gcgcaguaggagccucaga

SEQ ID NO: 402408 - RNA, 19 nt, Artificial Sequence
  Description of Artificial Sequence: Synthetic oligonucleotide
gcccacuugcgagccuccc

SEQ ID NO: 402409 - RNA, 19 nt, Artificial Sequence
  Description of Artificial Sequence: Synthetic oligonucleotide
cguagguccaggcggcgaa

SEQ ID NO: 402410 - RNA, 19 nt, Artificial Sequence
  Description of Artificial Sequence: Synthetic oligonucleotide
gggcuaccccucaccacuc

SEQ ID NO: 402411 - RNA, 19 nt, Artificial Sequence
  Description of Artificial Sequence: Synthetic oligonucleotide
cccaccgguucuccuucuc

SEQ ID NO: 402412 - RNA, 19 nt, Artificial Sequence
  Description of Artificial Sequence: Synthetic oligonucleotide
ccuugcaauagcugccauu

SEQ ID NO: 402413 - RNA, 19 nt, Artificial Sequence
  Description of Artificial Sequence: Synthetic oligonucleotide
cucuccguuugcccugguu

SEQ ID NO: 402414 - RNA, 19 nt, Artificial Sequence
  Description of Artificial Sequence: Synthetic oligonucleotide
acccguggcccuacuccuu

SEQ ID NO: 402415 - RNA, 19 nt, Artificial Sequence
  Description of Artificial Sequence: Synthetic oligonucleotide
ccgcccacuugcgagccuc

SEQ ID NO: 402416 - RNA, 19 nt, Artificial Sequence
  Description of Artificial Sequence: Synthetic oligonucleotide
ccgucccuuuggcucagca

SEQ ID NO: 402417 - RNA, 19 nt, Artificial Sequence
  Description of Artificial Sequence: Synthetic oligonucleotide
cugugaggagguggacacu

SEQ ID NO: 402418 - RNA, 19 nt, Artificial Sequence
  Description of Artificial Sequence: Synthetic oligonucleotide
gccaaccgggcacaagcuu

SEQ ID NO: 402419 - RNA, 19 nt, Artificial Sequence
  Description of Artificial Sequence: Synthetic oligonucleotide
cccuuccgcacucccagua

SEQ ID NO: 402420 - RNA, 19 nt, Artificial Sequence
  Description of Artificial Sequence: Synthetic oligonucleotide
gugccggcaguggggccga

SEQ ID NO: 402421 - RNA, 19 nt, Artificial Sequence
  Description of Artificial Sequence: Synthetic oligonucleotide
ugccggcaguggggccgag

SEQ ID NO: 402422 - RNA, 19 nt, Artificial Sequence
  Description of Artificial Sequence: Synthetic oligonucleotide
ggcuggcggcgaacaacuc

SEQ ID NO: 402423 - RNA, 19 nt, Artificial Sequence
  Description of Artificial Sequence: Synthetic oligonucleotide
gcaaaggccccgggagaua

SEQ ID NO: 402424 - RNA, 19 nt, Artificial Sequence
  Description of Artificial Sequence: Synthetic oligonucleotide
ccacacccugcagccgaac

SEQ ID NO: 402425 - RNA, 19 nt, Artificial Sequence
  Description of Artificial Sequence: Synthetic oligonucleotide
ggguaaccccagagagggu

SEQ ID NO: 402426 - RNA, 19 nt, Artificial Sequence
  Description of Artificial Sequence: Synthetic oligonucleotide
ccguuugcccugguuuagu

SEQ ID NO: 402427 - RNA, 19 nt, Artificial Sequence
  Description of Artificial Sequence: Synthetic oligonucleotide
ccaucccacccaacugguu

SEQ ID NO: 402428 - RNA, 19 nt, Artificial Sequence
  Description of Artificial Sequence: Synthetic oligonucleotide
gccgcccacuugcgagccu

SEQ ID NO: 402429 - RNA, 19 nt, Artificial Sequence
  Description of Artificial Sequence: Synthetic oligonucleotide
ggcuggccgccgcccacuu

SEQ ID NO: 402430 - RNA, 19 nt, Artificial Sequence
  Description of Artificial Sequence: Synthetic oligonucleotide
ccccaccgguucuccuucu

SEQ ID NO: 402431 - RNA, 19 nt, Artificial Sequence
  Description of Artificial Sequence: Synthetic oligonucleotide
agaaauugaacccagcacc

SEQ ID NO: 402432 - RNA, 19 nt, Artificial Sequence
  Description of Artificial Sequence: Synthetic oligonucleotide
aaagucuuugagcagauuc

SEQ ID NO: 402433 - RNA, 19 nt, Artificial Sequence
  Description of Artificial Sequence: Synthetic oligonucleotide
ugaaacauuuagaaguggg

SEQ ID NO: 402434 - RNA, 19 nt, Artificial Sequence
  Description of Artificial Sequence: Synthetic oligonucleotide
uugaaugugacguucgagg

SEQ ID NO: 402435 - RNA, 19 nt, Artificial Sequence
  Description of Artificial Sequence: Synthetic oligonucleotide
aaggguuuguuccauguac

SEQ ID NO: 402436 - RNA, 19 nt, Artificial Sequence
  Description of Artificial Sequence: Synthetic oligonucleotide
aaagaaauugaacccagca

SEQ ID NO: 402437 - RNA, 19 nt, Artificial Sequence
  Description of Artificial Sequence: Synthetic oligonucleotide
aucaaguagaggaagaggc

SEQ ID NO: 402438 - RNA, 19 nt, Artificial Sequence
  Description of Artificial Sequence: Synthetic oligonucleotide
uggaauugauguuugagag

SEQ ID NO: 402439 - RNA, 19 nt, Artificial Sequence
  Description of Artificial Sequence: Synthetic oligonucleotide
aguguaacaucauugccac

SEQ ID NO: 402440 - RNA, 19 nt, Artificial Sequence
  Description of Artificial Sequence: Synthetic oligonucleotide
uguucuuugggccauugag

SEQ ID NO: 402441 - RNA, 19 nt, Artificial Sequence
  Description of Artificial Sequence: Synthetic oligonucleotide
uuaugguucaaccagcagu

SEQ ID NO: 402442 - RNA, 19 nt, Artificial Sequence
  Description of Artificial Sequence: Synthetic oligonucleotide
aggaaguagagcucuauac

SEQ ID NO: 402443 - RNA, 19 nt, Artificial Sequence
  Description of Artificial Sequence: Synthetic oligonucleotide
ucagucuucgcuuaaagaa

SEQ ID NO: 402444 - RNA, 19 nt, Artificial Sequence
  Description of Artificial Sequence: Synthetic oligonucleotide
uaguguaacaucauugcca

SEQ ID NO: 402445 - RNA, 19 nt, Artificial Sequence
  Description of Artificial Sequence: Synthetic oligonucleotide
agaaacaggccgaagaccc

SEQ ID NO: 402446 - RNA, 19 nt, Artificial Sequence
  Description of Artificial Sequence: Synthetic oligonucleotide
auugauguuugagaggagc

SEQ ID NO: 402447 - RNA, 19 nt, Artificial Sequence
  Description of Artificial Sequence: Synthetic oligonucleotide
caggcaagaucauugaugg

SEQ ID NO: 402448 - RNA, 19 nt, Artificial Sequence
  Description of Artificial Sequence: Synthetic oligonucleotide
aagcgagaaagacuuuggc

SEQ ID NO: 402449 - RNA, 19 nt, Artificial Sequence
  Description of Artificial Sequence: Synthetic oligonucleotide
ucagaaaauuucauuguga

SEQ ID NO: 402450 - RNA, 19 nt, Artificial Sequence
  Description of Artificial Sequence: Synthetic oligonucleotide
uguaccgugagcuuuggca

SEQ ID NO: 402451 - RNA, 19 nt, Artificial Sequence
  Description of Artificial Sequence: Synthetic oligonucleotide
uuggcuaugguacacugug

SEQ ID NO: 402452 - RNA, 19 nt, Artificial Sequence
  Description of Artificial Sequence: Synthetic oligonucleotide
guaagugaaacauuuagaa

SEQ ID NO: 402453 - RNA, 19 nt, Artificial Sequence
  Description of Artificial Sequence: Synthetic oligonucleotide
ugagggacccagaaguugg

SEQ ID NO: 402454 - RNA, 19 nt, Artificial Sequence
  Description of Artificial Sequence: Synthetic oligonucleotide
uuugagaggagcguaagug

SEQ ID NO: 402455 - RNA, 19 nt, Artificial Sequence
  Description of Artificial Sequence: Synthetic oligonucleotide
gaacacgcgcacuacaagg

SEQ ID NO: 402456 - RNA, 19 nt, Artificial Sequence
  Description of Artificial Sequence: Synthetic oligonucleotide
gaauugauguuugagagga

SEQ ID NO: 402457 - RNA, 19 nt, Artificial Sequence
  Description of Artificial Sequence: Synthetic oligonucleotide
uucgcuuaaagaaauugaa

SEQ ID NO: 402458 - RNA, 19 nt, Artificial Sequence
  Description of Artificial Sequence: Synthetic oligonucleotide
aauugaacccagcacccug

SEQ ID NO: 402459 - RNA, 19 nt, Artificial Sequence
  Description of Artificial Sequence: Synthetic oligonucleotide
uuggugaucaauuccaguc

SEQ ID NO: 402460 - RNA, 19 nt, Artificial Sequence
  Description of Artificial Sequence: Synthetic oligonucleotide
agggccauccagcagaagg

SEQ ID NO: 402461 - RNA, 19 nt, Artificial Sequence
  Description of Artificial Sequence: Synthetic oligonucleotide
aguucaguguuugagggcg

SEQ ID NO: 402462 - RNA, 19 nt, Artificial Sequence
  Description of Artificial Sequence: Synthetic oligonucleotide
uguacucaguccuuggccc

SEQ ID NO: 402463 - RNA, 19 nt, Artificial Sequence
  Description of Artificial Sequence: Synthetic oligonucleotide
aaagaaagcccuccuuaug

SEQ ID NO: 402464 - RNA, 19 nt, Artificial Sequence
  Description of Artificial Sequence: Synthetic oligonucleotide
uccaauauaucccggcucu

SEQ ID NO: 402465 - RNA, 19 nt, Artificial Sequence
  Description of Artificial Sequence: Synthetic oligonucleotide
uucgaggcaaguuuccuag

SEQ ID NO: 402466 - RNA, 19 nt, Artificial Sequence
  Description of Artificial Sequence: Synthetic oligonucleotide
uagaagugggcuuucgaag

SEQ ID NO: 402467 - RNA, 19 nt, Artificial Sequence
  Description of Artificial Sequence: Synthetic oligonucleotide
guggcaguaguuuugcccg

SEQ ID NO: 402468 - RNA, 19 nt, Artificial Sequence
  Description of Artificial Sequence: Synthetic oligonucleotide
uccaguuucacccaagcuu

SEQ ID NO: 402469 - RNA, 19 nt, Artificial Sequence
  Description of Artificial Sequence: Synthetic oligonucleotide
ucaacgacaguucaguguu

SEQ ID NO: 402470 - RNA, 19 nt, Artificial Sequence
  Description of Artificial Sequence: Synthetic oligonucleotide
agauuccggacuucaaugg

SEQ ID NO: 402471 - RNA, 19 nt, Artificial Sequence
  Description of Artificial Sequence: Synthetic oligonucleotide
aagaagaaguaguguaaca

SEQ ID NO: 402472 - RNA, 19 nt, Artificial Sequence
  Description of Artificial Sequence: Synthetic oligonucleotide
uucuuauugagcaggcaga

SEQ ID NO: 402473 - RNA, 19 nt, Artificial Sequence
  Description of Artificial Sequence: Synthetic oligonucleotide
aauauaucccggcucuggu

SEQ ID NO: 402474 - RNA, 19 nt, Artificial Sequence
  Description of Artificial Sequence: Synthetic oligonucleotide
gaaacauuuagaagugggc

SEQ ID NO: 402475 - RNA, 19 nt, Artificial Sequence
  Description of Artificial Sequence: Synthetic oligonucleotide
aacauuuagaagugggcuu

SEQ ID NO: 402476 - RNA, 19 nt, Artificial Sequence
  Description of Artificial Sequence: Synthetic oligonucleotide
ugcauguuuggacuggaca

SEQ ID NO: 402477 - RNA, 19 nt, Artificial Sequence
  Description of Artificial Sequence: Synthetic oligonucleotide
ugguucaggugcauggagg

SEQ ID NO: 402478 - RNA, 19 nt, Artificial Sequence
  Description of Artificial Sequence: Synthetic oligonucleotide
ucuucgcuuaaagaaauug

SEQ ID NO: 402479 - RNA, 19 nt, Artificial Sequence
  Description of Artificial Sequence: Synthetic oligonucleotide
ucugaguacuuguugccag

SEQ ID NO: 402480 - RNA, 19 nt, Artificial Sequence
  Description of Artificial Sequence: Synthetic oligonucleotide
uuuggguugauuucagaaa

SEQ ID NO: 402481 - RNA, 19 nt, Artificial Sequence
  Description of Artificial Sequence: Synthetic oligonucleotide
ugaucaauuccagucucgg

SEQ ID NO: 402482 - RNA, 19 nt, Artificial Sequence
  Description of Artificial Sequence: Synthetic oligonucleotide
uaugugccaaggucaaggg

SEQ ID NO: 402483 - RNA, 19 nt, Artificial Sequence
  Description of Artificial Sequence: Synthetic oligonucleotide
cacauaucaggucuucacg

SEQ ID NO: 402484 - RNA, 19 nt, Artificial Sequence
  Description of Artificial Sequence: Synthetic oligonucleotide
uuguugacgcaaugggugg

SEQ ID NO: 402485 - RNA, 19 nt, Artificial Sequence
  Description of Artificial Sequence: Synthetic oligonucleotide
cuagaucaaagucuuugag

SEQ ID NO: 402486 - RNA, 19 nt, Artificial Sequence
  Description of Artificial Sequence: Synthetic oligonucleotide
uuuagaagugggcuuucga

SEQ ID NO: 402487 - RNA, 19 nt, Artificial Sequence
  Description of Artificial Sequence: Synthetic oligonucleotide
gaaauugaacccagcaccc

SEQ ID NO: 402488 - RNA, 19 nt, Artificial Sequence
  Description of Artificial Sequence: Synthetic oligonucleotide
uauaucccggcucugguuc

SEQ ID NO: 402489 - RNA, 19 nt, Artificial Sequence
  Description of Artificial Sequence: Synthetic oligonucleotide
ucgcuuaaagaaauugaac

SEQ ID NO: 402490 - RNA, 19 nt, Artificial Sequence
  Description of Artificial Sequence: Synthetic oligonucleotide
cuccuuaugguucaaccag

SEQ ID NO: 402491 - RNA, 19 nt, Artificial Sequence
  Description of Artificial Sequence: Synthetic oligonucleotide
cagaugcaagcauaggugc

SEQ ID NO: 402492 - RNA, 19 nt, Artificial Sequence
  Description of Artificial Sequence: Synthetic oligonucleotide
ggaaggucaggauacacag

SEQ ID NO: 402493 - RNA, 19 nt, Artificial Sequence
  Description of Artificial Sequence: Synthetic oligonucleotide
uucugugguaggcaguagc

SEQ ID NO: 402494 - RNA, 19 nt, Artificial Sequence
  Description of Artificial Sequence: Synthetic oligonucleotide
agaggagcguaagugaaac

SEQ ID NO: 402495 - RNA, 19 nt, Artificial Sequence
  Description of Artificial Sequence: Synthetic oligonucleotide
cagauagugccguucauug

SEQ ID NO: 402496 - RNA, 19 nt, Artificial Sequence
  Description of Artificial Sequence: Synthetic oligonucleotide
gggguguuaucacaaaugg

SEQ ID NO: 402497 - RNA, 19 nt, Artificial Sequence
  Description of Artificial Sequence: Synthetic oligonucleotide
uucgagagcucugggaugg

SEQ ID NO: 402498 - RNA, 19 nt, Artificial Sequence
  Description of Artificial Sequence: Synthetic oligonucleotide
ugggccaagguccgaaggg

SEQ ID NO: 402499 - RNA, 19 nt, Artificial Sequence
  Description of Artificial Sequence: Synthetic oligonucleotide
aaugugacguucgaggcaa

SEQ ID NO: 402500 - RNA, 19 nt, Artificial Sequence
  Description of Artificial Sequence: Synthetic oligonucleotide
ccaggaauaugacagagcc

SEQ ID NO: 402501 - RNA, 19 nt, Artificial Sequence
  Description of Artificial Sequence: Synthetic oligonucleotide
agcgagaaagacuuuggcu

SEQ ID NO: 402502 - RNA, 19 nt, Artificial Sequence
  Description of Artificial Sequence: Synthetic oligonucleotide
ucaucaacgacaguucagu

SEQ ID NO: 402503 - RNA, 19 nt, Artificial Sequence
  Description of Artificial Sequence: Synthetic oligonucleotide
aucaacgacaguucagugu

SEQ ID NO: 402504 - RNA, 19 nt, Artificial Sequence
  Description of Artificial Sequence: Synthetic oligonucleotide
cuuggcgacagaugcaagc

SEQ ID NO: 402505 - RNA, 19 nt, Artificial Sequence
  Description of Artificial Sequence: Synthetic oligonucleotide
gaagcgagaaagacuuugg

SEQ ID NO: 402506 - RNA, 19 nt, Artificial Sequence
  Description of Artificial Sequence: Synthetic oligonucleotide
ggaaguagagcucuauacc

SEQ ID NO: 402507 - RNA, 19 nt, Artificial Sequence
  Description of Artificial Sequence: Synthetic oligonucleotide
cacguggcgaaguugaaug

SEQ ID NO: 402508 - RNA, 19 nt, Artificial Sequence
  Description of Artificial Sequence: Synthetic oligonucleotide
uggugaucaauuccagucu

SEQ ID NO: 402509 - RNA, 19 nt, Artificial Sequence
  Description of Artificial Sequence: Synthetic oligonucleotide
agucuuugagcagauuccg

SEQ ID NO: 402510 - RNA, 19 nt, Artificial Sequence
  Description of Artificial Sequence: Synthetic oligonucleotide
uaccccauagccgaacagg

SEQ ID NO: 402511 - RNA, 19 nt, Artificial Sequence
  Description of Artificial Sequence: Synthetic oligonucleotide
accagcaguauguuuguug

SEQ ID NO: 402512 - RNA, 19 nt, Artificial Sequence
  Description of Artificial Sequence: Synthetic oligonucleotide
agugaaacauuuagaagug

SEQ ID NO: 402513 - RNA, 19 nt, Artificial Sequence
  Description of Artificial Sequence: Synthetic oligonucleotide
ugagcgaaagugacagccc

SEQ ID NO: 402514 - RNA, 19 nt, Artificial Sequence
  Description of Artificial Sequence: Synthetic oligonucleotide
cagauuccggacuucaaug

SEQ ID NO: 402515 - RNA, 19 nt, Artificial Sequence
  Description of Artificial Sequence: Synthetic oligonucleotide
ggaauugauguuugagagg

SEQ ID NO: 402516 - RNA, 19 nt, Artificial Sequence
  Description of Artificial Sequence: Synthetic oligonucleotide
uucccucaccuucuuauug

SEQ ID NO: 402517 - RNA, 19 nt, Artificial Sequence
  Description of Artificial Sequence: Synthetic oligonucleotide
agaagcgagaaagacuuug

SEQ ID NO: 402518 - RNA, 19 nt, Artificial Sequence
  Description of Artificial Sequence: Synthetic oligonucleotide
agcgccauuguguacucag

SEQ ID NO: 402519 - RNA, 19 nt, Artificial Sequence
  Description of Artificial Sequence: Synthetic oligonucleotide
aaguuggcuuccaaccugg

SEQ ID NO: 402520 - RNA, 19 nt, Artificial Sequence
  Description of Artificial Sequence: Synthetic oligonucleotide
gcguaagugaaacauuuag

SEQ ID NO: 402521 - RNA, 19 nt, Artificial Sequence
  Description of Artificial Sequence: Synthetic oligonucleotide
aacgacaguucaguguuug

SEQ ID NO: 402522 - RNA, 19 nt, Artificial Sequence
  Description of Artificial Sequence: Synthetic oligonucleotide
auagcaucagucuucgcuu

SEQ ID NO: 402523 - RNA, 19 nt, Artificial Sequence
  Description of Artificial Sequence: Synthetic oligonucleotide
gaaagacuuuggcucuggg

SEQ ID NO: 402524 - RNA, 19 nt, Artificial Sequence
  Description of Artificial Sequence: Synthetic oligonucleotide
cuucgcuuaaagaaauuga

SEQ ID NO: 402525 - RNA, 19 nt, Artificial Sequence
  Description of Artificial Sequence: Synthetic oligonucleotide
aaacaggccgaagacccag

SEQ ID NO: 402526 - RNA, 19 nt, Artificial Sequence
  Description of Artificial Sequence: Synthetic oligonucleotide
acgaugaggaaggguaccc

SEQ ID NO: 402527 - RNA, 19 nt, Artificial Sequence
  Description of Artificial Sequence: Synthetic oligonucleotide
ugacgcaauggguggauug

SEQ ID NO: 402528 - RNA, 19 nt, Artificial Sequence
  Description of Artificial Sequence: Synthetic oligonucleotide
gacguguaggugaaggagc

SEQ ID NO: 402529 - RNA, 19 nt, Artificial Sequence
  Description of Artificial Sequence: Synthetic oligonucleotide
gaggaaggguaccccauag

SEQ ID NO: 402530 - RNA, 19 nt, Artificial Sequence
  Description of Artificial Sequence: Synthetic oligonucleotide
gguccgaaggguuuguucc

SEQ ID NO: 402531 - RNA, 19 nt, Artificial Sequence
  Description of Artificial Sequence: Synthetic oligonucleotide
caauauaucccggcucugg

SEQ ID NO: 402532 - RNA, 19 nt, Artificial Sequence
  Description of Artificial Sequence: Synthetic oligonucleotide
uugaguguaugcuggugac

SEQ ID NO: 402533 - RNA, 19 nt, Artificial Sequence
  Description of Artificial Sequence: Synthetic oligonucleotide
gacgcaauggguggauugg

SEQ ID NO: 402534 - RNA, 19 nt, Artificial Sequence
  Description of Artificial Sequence: Synthetic oligonucleotide
ugcaccacgguucgagagc

SEQ ID NO: 402535 - RNA, 19 nt, Artificial Sequence
  Description of Artificial Sequence: Synthetic oligonucleotide
ugacguucgaggcaaguuu

SEQ ID NO: 402536 - RNA, 19 nt, Artificial Sequence
  Description of Artificial Sequence: Synthetic oligonucleotide
guguacucaguccuuggcc

SEQ ID NO: 402537 - RNA, 19 nt, Artificial Sequence
  Description of Artificial Sequence: Synthetic oligonucleotide
gcgagaaagacuuuggcuc

SEQ ID NO: 402538 - RNA, 19 nt, Artificial Sequence
  Description of Artificial Sequence: Synthetic oligonucleotide
uuccuagugucgguguugg

SEQ ID NO: 402539 - RNA, 19 nt, Artificial Sequence
  Description of Artificial Sequence: Synthetic oligonucleotide
agcaacuucugcauguuug

SEQ ID NO: 402540 - RNA, 19 nt, Artificial Sequence
  Description of Artificial Sequence: Synthetic oligonucleotide
uggcacuuaguguucuuug

SEQ ID NO: 402541 - RNA, 19 nt, Artificial Sequence
  Description of Artificial Sequence: Synthetic oligonucleotide
gcaauggguggauuggugg

SEQ ID NO: 402542 - RNA, 19 nt, Artificial Sequence
  Description of Artificial Sequence: Synthetic oligonucleotide
cauguuuggacuggacagg

SEQ ID NO: 402543 - RNA, 19 nt, Artificial Sequence
  Description of Artificial Sequence: Synthetic oligonucleotide
cuaugguacacugugguga

SEQ ID NO: 402544 - RNA, 19 nt, Artificial Sequence
  Description of Artificial Sequence: Synthetic oligonucleotide
cuagugucgguguugguca

SEQ ID NO: 402545 - RNA, 19 nt, Artificial Sequence
  Description of Artificial Sequence: Synthetic oligonucleotide
uggcuaugguacacugugg

SEQ ID NO: 402546 - RNA, 19 nt, Artificial Sequence
  Description of Artificial Sequence: Synthetic oligonucleotide
cauugagagguuuacaggu

SEQ ID NO: 402547 - RNA, 19 nt, Artificial Sequence
  Description of Artificial Sequence: Synthetic oligonucleotide
uguuugagaggagcguaag

SEQ ID NO: 402548 - RNA, 19 nt, Artificial Sequence
  Description of Artificial Sequence: Synthetic oligonucleotide
gaacuugccuucauauccc

SEQ ID NO: 402549 - RNA, 19 nt, Artificial Sequence
  Description of Artificial Sequence: Synthetic oligonucleotide
aaguuuccuagugucggug

SEQ ID NO: 402550 - RNA, 19 nt, Artificial Sequence
  Description of Artificial Sequence: Synthetic oligonucleotide
cauugagggacccagaagu

SEQ ID NO: 402551 - RNA, 19 nt, Artificial Sequence
  Description of Artificial Sequence: Synthetic oligonucleotide
cagucucggauccugcacg

SEQ ID NO: 402552 - RNA, 19 nt, Artificial Sequence
  Description of Artificial Sequence: Synthetic oligonucleotide
uggaacacgcgcacuacaa

SEQ ID NO: 402553 - RNA, 19 nt, Artificial Sequence
  Description of Artificial Sequence: Synthetic oligonucleotide
accaggaauaugacagagc

SEQ ID NO: 402554 - RNA, 19 nt, Artificial Sequence
  Description of Artificial Sequence: Synthetic oligonucleotide
cuucacguggcgaaguuga

SEQ ID NO: 402555 - RNA, 19 nt, Artificial Sequence
  Description of Artificial Sequence: Synthetic oligonucleotide
cuuaguguucuuugggcca

SEQ ID NO: 402556 - RNA, 19 nt, Artificial Sequence
  Description of Artificial Sequence: Synthetic oligonucleotide
uggcagauagugccguuca

SEQ ID NO: 402557 - RNA, 19 nt, Artificial Sequence
  Description of Artificial Sequence: Synthetic oligonucleotide
guugaaugugacguucgag

SEQ ID NO: 402558 - RNA, 19 nt, Artificial Sequence
  Description of Artificial Sequence: Synthetic oligonucleotide
cacuacaaggaaguagagc

SEQ ID NO: 402559 - RNA, 19 nt, Artificial Sequence
  Description of Artificial Sequence: Synthetic oligonucleotide
ugggcuuucgaagcgcucc

SEQ ID NO: 402560 - RNA, 19 nt, Artificial Sequence
  Description of Artificial Sequence: Synthetic oligonucleotide
gaaugugacguucgaggca

SEQ ID NO: 402561 - RNA, 19 nt, Artificial Sequence
  Description of Artificial Sequence: Synthetic oligonucleotide
guugucuugcuccuugauc

SEQ ID NO: 402562 - RNA, 19 nt, Artificial Sequence
  Description of Artificial Sequence: Synthetic oligonucleotide
uuucgguacucuucccuca

SEQ ID NO: 402563 - RNA, 19 nt, Artificial Sequence
  Description of Artificial Sequence: Synthetic oligonucleotide
caugcaggcccacuuucgg

SEQ ID NO: 402564 - RNA, 19 nt, Artificial Sequence
  Description of Artificial Sequence: Synthetic oligonucleotide
ccagcaguauguuuguugc

SEQ ID NO: 402565 - RNA, 19 nt, Artificial Sequence
  Description of Artificial Sequence: Synthetic oligonucleotide
aguggaccagugcccauuc

SEQ ID NO: 402566 - RNA, 19 nt, Artificial Sequence
  Description of Artificial Sequence: Synthetic oligonucleotide
cauagcaucagucuucgcu

SEQ ID NO: 402567 - RNA, 19 nt, Artificial Sequence
  Description of Artificial Sequence: Synthetic oligonucleotide
caggaauaugacagagccc

SEQ ID NO: 402568 - RNA, 19 nt, Artificial Sequence
  Description of Artificial Sequence: Synthetic oligonucleotide
aacuugccuucauaucccu

SEQ ID NO: 402569 - RNA, 19 nt, Artificial Sequence
  Description of Artificial Sequence: Synthetic oligonucleotide
uccuuaauugcuucauguu

SEQ ID NO: 402570 - RNA, 19 nt, Artificial Sequence
  Description of Artificial Sequence: Synthetic oligonucleotide
ccuguuucauguaccaggg

SEQ ID NO: 402571 - RNA, 19 nt, Artificial Sequence
  Description of Artificial Sequence: Synthetic oligonucleotide
aaccuuuauaacagugaga

SEQ ID NO: 402572 - RNA, 19 nt, Artificial Sequence
  Description of Artificial Sequence: Synthetic oligonucleotide
auagugccguucauugagc

SEQ ID NO: 402573 - RNA, 19 nt, Artificial Sequence
  Description of Artificial Sequence: Synthetic oligonucleotide
uguaugcuggugaccuggc

SEQ ID NO: 402574 - RNA, 19 nt, Artificial Sequence
  Description of Artificial Sequence: Synthetic oligonucleotide
gcaaguuuccuagugucgg

SEQ ID NO: 402575 - RNA, 19 nt, Artificial Sequence
  Description of Artificial Sequence: Synthetic oligonucleotide
guuggccguggcuagauca

SEQ ID NO: 402576 - RNA, 19 nt, Artificial Sequence
  Description of Artificial Sequence: Synthetic oligonucleotide
gauuccggacuucaaugga

SEQ ID NO: 402577 - RNA, 19 nt, Artificial Sequence
  Description of Artificial Sequence: Synthetic oligonucleotide
agaaagcccuccuuauggu

SEQ ID NO: 402578 - RNA, 19 nt, Artificial Sequence
  Description of Artificial Sequence: Synthetic oligonucleotide
agcggcacuuguaggagcc

SEQ ID NO: 402579 - RNA, 19 nt, Artificial Sequence
  Description of Artificial Sequence: Synthetic oligonucleotide
aguugaaugugacguucga

SEQ ID NO: 402580 - RNA, 19 nt, Artificial Sequence
  Description of Artificial Sequence: Synthetic oligonucleotide
ugguacacuguggugauau

SEQ ID NO: 402581 - RNA, 19 nt, Artificial Sequence
  Description of Artificial Sequence: Synthetic oligonucleotide
aggcaagaucauugauggc

SEQ ID NO: 402582 - RNA, 19 nt, Artificial Sequence
  Description of Artificial Sequence: Synthetic oligonucleotide
gagggcgacguguagguga

SEQ ID NO: 402583 - RNA, 19 nt, Artificial Sequence
  Description of Artificial Sequence: Synthetic oligonucleotide
aguuuccuagugucggugu

SEQ ID NO: 402584 - RNA, 19 nt, Artificial Sequence
  Description of Artificial Sequence: Synthetic oligonucleotide
agugccguucauugagcag

SEQ ID NO: 402585 - RNA, 19 nt, Artificial Sequence
  Description of Artificial Sequence: Synthetic oligonucleotide
uugagggacccagaaguug

SEQ ID NO: 402586 - RNA, 19 nt, Artificial Sequence
  Description of Artificial Sequence: Synthetic oligonucleotide
aacacgcgcacuacaagga

SEQ ID NO: 402587 - RNA, 19 nt, Artificial Sequence
  Description of Artificial Sequence: Synthetic oligonucleotide
cauguuuggguugauuuca

SEQ ID NO: 402588 - RNA, 19 nt, Artificial Sequence
  Description of Artificial Sequence: Synthetic oligonucleotide
uuuccuagugucgguguug

SEQ ID NO: 402589 - RNA, 19 nt, Artificial Sequence
  Description of Artificial Sequence: Synthetic oligonucleotide
aagcgcuccuccaauauau

SEQ ID NO: 402590 - RNA, 19 nt, Artificial Sequence
  Description of Artificial Sequence: Synthetic oligonucleotide
uagugccguucauugagca

SEQ ID NO: 402591 - RNA, 19 nt, Artificial Sequence
  Description of Artificial Sequence: Synthetic oligonucleotide
gucccacaaagcuccaaag

SEQ ID NO: 402592 - RNA, 19 nt, Artificial Sequence
  Description of Artificial Sequence: Synthetic oligonucleotide
uguuugagggcgacgugua

SEQ ID NO: 402593 - RNA, 19 nt, Artificial Sequence
  Description of Artificial Sequence: Synthetic oligonucleotide
agugagacccuuccucccu

SEQ ID NO: 402594 - RNA, 19 nt, Artificial Sequence
  Description of Artificial Sequence: Synthetic oligonucleotide
ucaguguuugagggcgacg

SEQ ID NO: 402595 - RNA, 19 nt, Artificial Sequence
  Description of Artificial Sequence: Synthetic oligonucleotide
cuccaauauaucccggcuc

SEQ ID NO: 402596 - RNA, 19 nt, Artificial Sequence
  Description of Artificial Sequence: Synthetic oligonucleotide
ggaguggccguuuucugag

SEQ ID NO: 402597 - RNA, 19 nt, Artificial Sequence
  Description of Artificial Sequence: Synthetic oligonucleotide
aguggccguuuucugagcu

SEQ ID NO: 402598 - RNA, 19 nt, Artificial Sequence
  Description of Artificial Sequence: Synthetic oligonucleotide
agauagugccguucauuga

SEQ ID NO: 402599 - RNA, 19 nt, Artificial Sequence
  Description of Artificial Sequence: Synthetic oligonucleotide
gcccaguccaguuucaccc

SEQ ID NO: 402600 - RNA, 19 nt, Artificial Sequence
  Description of Artificial Sequence: Synthetic oligonucleotide
gaugagcgaaagugacagc

SEQ ID NO: 402601 - RNA, 19 nt, Artificial Sequence
  Description of Artificial Sequence: Synthetic oligonucleotide
ggcgaaguugaaugugacg

SEQ ID NO: 402602 - RNA, 19 nt, Artificial Sequence
  Description of Artificial Sequence: Synthetic oligonucleotide
cacgcgcacuacaaggaag

SEQ ID NO: 402603 - RNA, 19 nt, Artificial Sequence
  Description of Artificial Sequence: Synthetic oligonucleotide
aagcuccaaagaaagcccu

SEQ ID NO: 402604 - RNA, 19 nt, Artificial Sequence
  Description of Artificial Sequence: Synthetic oligonucleotide
cauagccgaacaggcagcg

SEQ ID NO: 402605 - RNA, 19 nt, Artificial Sequence
  Description of Artificial Sequence: Synthetic oligonucleotide
caucaacgacaguucagug

SEQ ID NO: 402606 - RNA, 19 nt, Artificial Sequence
  Description of Artificial Sequence: Synthetic oligonucleotide
uggguugauuucagaaaau

SEQ ID NO: 402607 - RNA, 19 nt, Artificial Sequence
  Description of Artificial Sequence: Synthetic oligonucleotide
uugcccauauccauccauu

SEQ ID NO: 402608 - RNA, 19 nt, Artificial Sequence
  Description of Artificial Sequence: Synthetic oligonucleotide
caccaggaauaugacagag

SEQ ID NO: 402609 - RNA, 19 nt, Artificial Sequence
  Description of Artificial Sequence: Synthetic oligonucleotide
acauuuagaagugggcuuu

SEQ ID NO: 402610 - RNA, 19 nt, Artificial Sequence
  Description of Artificial Sequence: Synthetic oligonucleotide
gauguuugagaggagcgua

SEQ ID NO: 402611 - RNA, 19 nt, Artificial Sequence
  Description of Artificial Sequence: Synthetic oligonucleotide
gacagagugacagccuuga

SEQ ID NO: 402612 - RNA, 19 nt, Artificial Sequence
  Description of Artificial Sequence: Synthetic oligonucleotide
acauagcaucagucuucgc

SEQ ID NO: 402613 - RNA, 19 nt, Artificial Sequence
  Description of Artificial Sequence: Synthetic oligonucleotide
ugcacgugguacugggcca

SEQ ID NO: 402614 - RNA, 19 nt, Artificial Sequence
  Description of Artificial Sequence: Synthetic oligonucleotide
uucccaucgucaccagugu

SEQ ID NO: 402615 - RNA, 19 nt, Artificial Sequence
  Description of Artificial Sequence: Synthetic oligonucleotide
uggcaguaguuuugcccgg

SEQ ID NO: 402616 - RNA, 19 nt, Artificial Sequence
  Description of Artificial Sequence: Synthetic oligonucleotide
gacguucgaggcaaguuuc

SEQ ID NO: 402617 - RNA, 19 nt, Artificial Sequence
  Description of Artificial Sequence: Synthetic oligonucleotide
cuguuacagggcucauugc

SEQ ID NO: 402618 - RNA, 19 nt, Artificial Sequence
  Description of Artificial Sequence: Synthetic oligonucleotide
auaugacagagcccaggaa

SEQ ID NO: 402619 - RNA, 19 nt, Artificial Sequence
  Description of Artificial Sequence: Synthetic oligonucleotide
ugucgggaaggauggcucu

SEQ ID NO: 402620 - RNA, 19 nt, Artificial Sequence
  Description of Artificial Sequence: Synthetic oligonucleotide
guucgagagcucugggaug

SEQ ID NO: 402621 - RNA, 19 nt, Artificial Sequence
  Description of Artificial Sequence: Synthetic oligonucleotide
cggacuucaauggagaagc

SEQ ID NO: 402622 - RNA, 19 nt, Artificial Sequence
  Description of Artificial Sequence: Synthetic oligonucleotide
uuugcccggaggugcauuc

SEQ ID NO: 402623 - RNA, 19 nt, Artificial Sequence
  Description of Artificial Sequence: Synthetic oligonucleotide
acguucgaggcaaguuucc

SEQ ID NO: 402624 - RNA, 19 nt, Artificial Sequence
  Description of Artificial Sequence: Synthetic oligonucleotide
cagucuucgcuuaaagaaa

SEQ ID NO: 402625 - RNA, 19 nt, Artificial Sequence
  Description of Artificial Sequence: Synthetic oligonucleotide
cacgguucgagagcucugg

SEQ ID NO: 402626 - RNA, 19 nt, Artificial Sequence
  Description of Artificial Sequence: Synthetic oligonucleotide
agcuuccagacaguaacca

SEQ ID NO: 402627 - RNA, 19 nt, Artificial Sequence
  Description of Artificial Sequence: Synthetic oligonucleotide
agucuucgcuuaaagaaau

SEQ ID NO: 402628 - RNA, 19 nt, Artificial Sequence
  Description of Artificial Sequence: Synthetic oligonucleotide
gcuagaucaaagucuuuga

SEQ ID NO: 402629 - RNA, 19 nt, Artificial Sequence
  Description of Artificial Sequence: Synthetic oligonucleotide
cugagauagccacgaugag

SEQ ID NO: 402630 - RNA, 19 nt, Artificial Sequence
  Description of Artificial Sequence: Synthetic oligonucleotide
guuugagggcgacguguag

SEQ ID NO: 402631 - RNA, 19 nt, Artificial Sequence
  Description of Artificial Sequence: Synthetic oligonucleotide
cagcaguauguuuguugcc

SEQ ID NO: 402632 - RNA, 19 nt, Artificial Sequence
  Description of Artificial Sequence: Synthetic oligonucleotide
ggcaaguuuccuagugucg

SEQ ID NO: 402633 - RNA, 19 nt, Artificial Sequence
  Description of Artificial Sequence: Synthetic oligonucleotide
aacaggccgaagacccagg

SEQ ID NO: 402634 - RNA, 19 nt, Artificial Sequence
  Description of Artificial Sequence: Synthetic oligonucleotide
acgguucgagagcucuggg

SEQ ID NO: 402635 - RNA, 19 nt, Artificial Sequence
  Description of Artificial Sequence: Synthetic oligonucleotide
uuggccguggcuagaucaa

SEQ ID NO: 402636 - RNA, 19 nt, Artificial Sequence
  Description of Artificial Sequence: Synthetic oligonucleotide
auagccgaacaggcagcgc

SEQ ID NO: 402637 - RNA, 19 nt, Artificial Sequence
  Description of Artificial Sequence: Synthetic oligonucleotide
ucuguaccgugagcuuugg

SEQ ID NO: 402638 - RNA, 19 nt, Artificial Sequence
  Description of Artificial Sequence: Synthetic oligonucleotide
ggaacacgcgcacuacaag

SEQ ID NO: 402639 - RNA, 19 nt, Artificial Sequence
  Description of Artificial Sequence: Synthetic oligonucleotide
ggcgacguguaggugaagg

SEQ ID NO: 402640 - RNA, 19 nt, Artificial Sequence
  Description of Artificial Sequence: Synthetic oligonucleotide
ccgucaguggaccagugcc

SEQ ID NO: 402641 - RNA, 19 nt, Artificial Sequence
  Description of Artificial Sequence: Synthetic oligonucleotide
uccuuggcccuggaacacg

SEQ ID NO: 402642 - RNA, 19 nt, Artificial Sequence
  Description of Artificial Sequence: Synthetic oligonucleotide
guguugguugggccauugg

SEQ ID NO: 402643 - RNA, 19 nt, Artificial Sequence
  Description of Artificial Sequence: Synthetic oligonucleotide
ugagcaacugcagcuuguc

SEQ ID NO: 402644 - RNA, 19 nt, Artificial Sequence
  Description of Artificial Sequence: Synthetic oligonucleotide
ccacuuucgguacucuucc

SEQ ID NO: 402645 - RNA, 19 nt, Artificial Sequence
  Description of Artificial Sequence: Synthetic oligonucleotide
agucucggauccugcacgu

SEQ ID NO: 402646 - RNA, 19 nt, Artificial Sequence
  Description of Artificial Sequence: Synthetic oligonucleotide
guaccccauagccgaacag

SEQ ID NO: 402647 - RNA, 19 nt, Artificial Sequence
  Description of Artificial Sequence: Synthetic oligonucleotide
auuguguugguugggccau

SEQ ID NO: 402648 - RNA, 19 nt, Artificial Sequence
  Description of Artificial Sequence: Synthetic oligonucleotide
aggguuuguuccauguacu

SEQ ID NO: 402649 - RNA, 19 nt, Artificial Sequence
  Description of Artificial Sequence: Synthetic oligonucleotide
cccuuuacccuguuacagg

SEQ ID NO: 402650 - RNA, 19 nt, Artificial Sequence
  Description of Artificial Sequence: Synthetic oligonucleotide
uguuuggacuggacaggau

SEQ ID NO: 402651 - RNA, 19 nt, Artificial Sequence
  Description of Artificial Sequence: Synthetic oligonucleotide
uccggacuucaauggagaa

SEQ ID NO: 402652 - RNA, 19 nt, Artificial Sequence
  Description of Artificial Sequence: Synthetic oligonucleotide
ugcccauauccauccauuu

SEQ ID NO: 402653 - RNA, 19 nt, Artificial Sequence
  Description of Artificial Sequence: Synthetic oligonucleotide
uucaguguuugagggcgac

SEQ ID NO: 402654 - RNA, 19 nt, Artificial Sequence
  Description of Artificial Sequence: Synthetic oligonucleotide
cuuucgaagcgcuccucca

SEQ ID NO: 402655 - RNA, 19 nt, Artificial Sequence
  Description of Artificial Sequence: Synthetic oligonucleotide
gcuaugguacacuguggug

SEQ ID NO: 402656 - RNA, 19 nt, Artificial Sequence
  Description of Artificial Sequence: Synthetic oligonucleotide
acguggcgaaguugaaugu

SEQ ID NO: 402657 - RNA, 19 nt, Artificial Sequence
  Description of Artificial Sequence: Synthetic oligonucleotide
cagaugagcgaaagugaca

SEQ ID NO: 402658 - RNA, 19 nt, Artificial Sequence
  Description of Artificial Sequence: Synthetic oligonucleotide
gcuuucgaagcgcuccucc

SEQ ID NO: 402659 - RNA, 19 nt, Artificial Sequence
  Description of Artificial Sequence: Synthetic oligonucleotide
uuagcaacuucugcauguu

SEQ ID NO: 402660 - RNA, 19 nt, Artificial Sequence
  Description of Artificial Sequence: Synthetic oligonucleotide
ucccugauucugagggccu

SEQ ID NO: 402661 - RNA, 19 nt, Artificial Sequence
  Description of Artificial Sequence: Synthetic oligonucleotide
accacgguucgagagcucu

SEQ ID NO: 402662 - RNA, 19 nt, Artificial Sequence
  Description of Artificial Sequence: Synthetic oligonucleotide
acaggccgaagacccaggu

SEQ ID NO: 402663 - RNA, 19 nt, Artificial Sequence
  Description of Artificial Sequence: Synthetic oligonucleotide
ucgggaaggauggcucuug

SEQ ID NO: 402664 - RNA, 19 nt, Artificial Sequence
  Description of Artificial Sequence: Synthetic oligonucleotide
gcagaugagcgaaagugac

SEQ ID NO: 402665 - RNA, 19 nt, Artificial Sequence
  Description of Artificial Sequence: Synthetic oligonucleotide
cacccaagcuuggcuaugg

SEQ ID NO: 402666 - RNA, 19 nt, Artificial Sequence
  Description of Artificial Sequence: Synthetic oligonucleotide
augcaggcccacuuucggu

SEQ ID NO: 402667 - RNA, 19 nt, Artificial Sequence
  Description of Artificial Sequence: Synthetic oligonucleotide
guauguuuguugcccauau

SEQ ID NO: 402668 - RNA, 19 nt, Artificial Sequence
  Description of Artificial Sequence: Synthetic oligonucleotide
uggccucuuaugugccaag

SEQ ID NO: 402669 - RNA, 19 nt, Artificial Sequence
  Description of Artificial Sequence: Synthetic oligonucleotide
gcgaaguugaaugugacgu

SEQ ID NO: 402670 - RNA, 19 nt, Artificial Sequence
  Description of Artificial Sequence: Synthetic oligonucleotide
ggguuucaccagcaggaag

SEQ ID NO: 402671 - RNA, 19 nt, Artificial Sequence
  Description of Artificial Sequence: Synthetic oligonucleotide
uuauaacagugagacccuu

SEQ ID NO: 402672 - RNA, 19 nt, Artificial Sequence
  Description of Artificial Sequence: Synthetic oligonucleotide
uucacguggcgaaguugaa

SEQ ID NO: 402673 - RNA, 19 nt, Artificial Sequence
  Description of Artificial Sequence: Synthetic oligonucleotide
auguaccagggcagugggc

SEQ ID NO: 402674 - RNA, 19 nt, Artificial Sequence
  Description of Artificial Sequence: Synthetic oligonucleotide
acccgugccuuccuuaauu

SEQ ID NO: 402675 - RNA, 19 nt, Artificial Sequence
  Description of Artificial Sequence: Synthetic oligonucleotide
caguccaguuucacccaag

SEQ ID NO: 402676 - RNA, 19 nt, Artificial Sequence
  Description of Artificial Sequence: Synthetic oligonucleotide
cacaaaugguggagcugug

SEQ ID NO: 402677 - RNA, 19 nt, Artificial Sequence
  Description of Artificial Sequence: Synthetic oligonucleotide
acacgcgcacuacaaggaa

SEQ ID NO: 402678 - RNA, 19 nt, Artificial Sequence
  Description of Artificial Sequence: Synthetic oligonucleotide
gagcagauuccggacuuca

SEQ ID NO: 402679 - RNA, 19 nt, Artificial Sequence
  Description of Artificial Sequence: Synthetic oligonucleotide
gagcguaagugaaacauuu

SEQ ID NO: 402680 - RNA, 19 nt, Artificial Sequence
  Description of Artificial Sequence: Synthetic oligonucleotide
ugagagcccgugugugacu

SEQ ID NO: 402681 - RNA, 19 nt, Artificial Sequence
  Description of Artificial Sequence: Synthetic oligonucleotide
gguggauugguggcaguag

SEQ ID NO: 402682 - RNA, 19 nt, Artificial Sequence
  Description of Artificial Sequence: Synthetic oligonucleotide
gaguggccguuuucugagc

SEQ ID NO: 402683 - RNA, 19 nt, Artificial Sequence
  Description of Artificial Sequence: Synthetic oligonucleotide
cagcggcacuuguaggagc

SEQ ID NO: 402684 - RNA, 19 nt, Artificial Sequence
  Description of Artificial Sequence: Synthetic oligonucleotide
gcgacagaugcaagcauag

SEQ ID NO: 402685 - RNA, 19 nt, Artificial Sequence
  Description of Artificial Sequence: Synthetic oligonucleotide
gagagcccgugugugacuc

SEQ ID NO: 402686 - RNA, 19 nt, Artificial Sequence
  Description of Artificial Sequence: Synthetic oligonucleotide
cauucucgaugcccaccag

SEQ ID NO: 402687 - RNA, 19 nt, Artificial Sequence
  Description of Artificial Sequence: Synthetic oligonucleotide
cauuuagaagugggcuuuc

SEQ ID NO: 402688 - RNA, 19 nt, Artificial Sequence
  Description of Artificial Sequence: Synthetic oligonucleotide
gccuuuggguaagaacugg

SEQ ID NO: 402689 - RNA, 19 nt, Artificial Sequence
  Description of Artificial Sequence: Synthetic oligonucleotide
cucugaguacuuguugcca

SEQ ID NO: 402690 - RNA, 19 nt, Artificial Sequence
  Description of Artificial Sequence: Synthetic oligonucleotide
ccuagugucgguguugguc

SEQ ID NO: 402691 - RNA, 19 nt, Artificial Sequence
  Description of Artificial Sequence: Synthetic oligonucleotide
gucaacauugagagguuua

SEQ ID NO: 402692 - RNA, 19 nt, Artificial Sequence
  Description of Artificial Sequence: Synthetic oligonucleotide
ggaccaguggccccuuuac

SEQ ID NO: 402693 - RNA, 19 nt, Artificial Sequence
  Description of Artificial Sequence: Synthetic oligonucleotide
auguuugagaggagcguaa

SEQ ID NO: 402694 - RNA, 19 nt, Artificial Sequence
  Description of Artificial Sequence: Synthetic oligonucleotide
gcgcacuacaaggaaguag

SEQ ID NO: 402695 - RNA, 19 nt, Artificial Sequence
  Description of Artificial Sequence: Synthetic oligonucleotide
ugcccggaggugcauucau

SEQ ID NO: 402696 - RNA, 19 nt, Artificial Sequence
  Description of Artificial Sequence: Synthetic oligonucleotide
caagcauaggugcccagcu

SEQ ID NO: 402697 - RNA, 19 nt, Artificial Sequence
  Description of Artificial Sequence: Synthetic oligonucleotide
aaggcacauaucaggucuu

SEQ ID NO: 402698 - RNA, 19 nt, Artificial Sequence
  Description of Artificial Sequence: Synthetic oligonucleotide
gcaagcauaggugcccagc

SEQ ID NO: 402699 - RNA, 19 nt, Artificial Sequence
  Description of Artificial Sequence: Synthetic oligonucleotide
agugggcuuucgaagcgcu

SEQ ID NO: 402700 - RNA, 19 nt, Artificial Sequence
  Description of Artificial Sequence: Synthetic oligonucleotide
ggcuaugguacacuguggu

SEQ ID NO: 402701 - RNA, 19 nt, Artificial Sequence
  Description of Artificial Sequence: Synthetic oligonucleotide
cuggaacacgcgcacuaca

SEQ ID NO: 402702 - RNA, 19 nt, Artificial Sequence
  Description of Artificial Sequence: Synthetic oligonucleotide
guggauugguggcaguagu

SEQ ID NO: 402703 - RNA, 19 nt, Artificial Sequence
  Description of Artificial Sequence: Synthetic oligonucleotide
gagaggagcguaagugaaa

SEQ ID NO: 402704 - RNA, 19 nt, Artificial Sequence
  Description of Artificial Sequence: Synthetic oligonucleotide
cuguaccgugagcuuuggc

SEQ ID NO: 402705 - RNA, 19 nt, Artificial Sequence
  Description of Artificial Sequence: Synthetic oligonucleotide
uccgaaggguuuguuccau

SEQ ID NO: 402706 - RNA, 19 nt, Artificial Sequence
  Description of Artificial Sequence: Synthetic oligonucleotide
acuugccuucauaucccug

SEQ ID NO: 402707 - RNA, 19 nt, Artificial Sequence
  Description of Artificial Sequence: Synthetic oligonucleotide
ggucccacaaagcuccaaa

SEQ ID NO: 402708 - RNA, 19 nt, Artificial Sequence
  Description of Artificial Sequence: Synthetic oligonucleotide
gcucuuggcacuuaguguu

SEQ ID NO: 402709 - RNA, 19 nt, Artificial Sequence
  Description of Artificial Sequence: Synthetic oligonucleotide
auugagggacccagaaguu

SEQ ID NO: 402710 - RNA, 19 nt, Artificial Sequence
  Description of Artificial Sequence: Synthetic oligonucleotide
aggcccacuuucgguacuc

SEQ ID NO: 402711 - RNA, 19 nt, Artificial Sequence
  Description of Artificial Sequence: Synthetic oligonucleotide
cuuuggcucugggcugugg

SEQ ID NO: 402712 - RNA, 19 nt, Artificial Sequence
  Description of Artificial Sequence: Synthetic oligonucleotide
agcgaaagugacagcccca

SEQ ID NO: 402713 - RNA, 19 nt, Artificial Sequence
  Description of Artificial Sequence: Synthetic oligonucleotide
caaggaguggccguuuucu

SEQ ID NO: 402714 - RNA, 19 nt, Artificial Sequence
  Description of Artificial Sequence: Synthetic oligonucleotide
uggacggcagcggcacuug

SEQ ID NO: 402715 - RNA, 19 nt, Artificial Sequence
  Description of Artificial Sequence: Synthetic oligonucleotide
ccccuuuacccuguuacag

SEQ ID NO: 402716 - RNA, 19 nt, Artificial Sequence
  Description of Artificial Sequence: Synthetic oligonucleotide
ucgagagcucugggauggg

SEQ ID NO: 402717 - RNA, 19 nt, Artificial Sequence
  Description of Artificial Sequence: Synthetic oligonucleotide
ggacuucaauggagaagcg

SEQ ID NO: 402718 - RNA, 19 nt, Artificial Sequence
  Description of Artificial Sequence: Synthetic oligonucleotide
caggcagcgccauugugua

SEQ ID NO: 402719 - RNA, 19 nt, Artificial Sequence
  Description of Artificial Sequence: Synthetic oligonucleotide
acccaagcuuggcuauggu

SEQ ID NO: 402720 - RNA, 19 nt, Artificial Sequence
  Description of Artificial Sequence: Synthetic oligonucleotide
cguucauugagcagccguc

SEQ ID NO: 402721 - RNA, 19 nt, Artificial Sequence
  Description of Artificial Sequence: Synthetic oligonucleotide
gguaccccauagccgaaca

SEQ ID NO: 402722 - RNA, 19 nt, Artificial Sequence
  Description of Artificial Sequence: Synthetic oligonucleotide
acgcaauggguggauuggu

SEQ ID NO: 402723 - RNA, 19 nt, Artificial Sequence
  Description of Artificial Sequence: Synthetic oligonucleotide
agcaaccaugcaggcccac

SEQ ID NO: 402724 - RNA, 19 nt, Artificial Sequence
  Description of Artificial Sequence: Synthetic oligonucleotide
ucaguggaccagugcccau

SEQ ID NO: 402725 - RNA, 19 nt, Artificial Sequence
  Description of Artificial Sequence: Synthetic oligonucleotide
aguggcagauagugccguu

SEQ ID NO: 402726 - RNA, 19 nt, Artificial Sequence
  Description of Artificial Sequence: Synthetic oligonucleotide
agcguaagugaaacauuua

SEQ ID NO: 402727 - RNA, 19 nt, Artificial Sequence
  Description of Artificial Sequence: Synthetic oligonucleotide
caguguuugagggcgacgu

SEQ ID NO: 402728 - RNA, 19 nt, Artificial Sequence
  Description of Artificial Sequence: Synthetic oligonucleotide
gcgaaagugacagccccac

SEQ ID NO: 402729 - RNA, 19 nt, Artificial Sequence
  Description of Artificial Sequence: Synthetic oligonucleotide
uggcuagaucaaagucuuu

SEQ ID NO: 402730 - RNA, 19 nt, Artificial Sequence
  Description of Artificial Sequence: Synthetic oligonucleotide
uccuagugucgguguuggu

SEQ ID NO: 402731 - RNA, 19 nt, Artificial Sequence
  Description of Artificial Sequence: Synthetic oligonucleotide
ccgugccuuccuuaauugc

SEQ ID NO: 402732 - RNA, 19 nt, Artificial Sequence
  Description of Artificial Sequence: Synthetic oligonucleotide
ccggacuucaauggagaag

SEQ ID NO: 402733 - RNA, 19 nt, Artificial Sequence
  Description of Artificial Sequence: Synthetic oligonucleotide
gcacuacaaggaaguagag

SEQ ID NO: 402734 - RNA, 19 nt, Artificial Sequence
  Description of Artificial Sequence: Synthetic oligonucleotide
cgucaguggaccagugccc

SEQ ID NO: 402735 - RNA, 19 nt, Artificial Sequence
  Description of Artificial Sequence: Synthetic oligonucleotide
uugcccggaggugcauuca

SEQ ID NO: 402736 - RNA, 19 nt, Artificial Sequence
  Description of Artificial Sequence: Synthetic oligonucleotide
gugucgguguuggucagaa

SEQ ID NO: 402737 - RNA, 19 nt, Artificial Sequence
  Description of Artificial Sequence: Synthetic oligonucleotide
ucauugccaccaggcggca

SEQ ID NO: 402738 - RNA, 19 nt, Artificial Sequence
  Description of Artificial Sequence: Synthetic oligonucleotide
cccgugccuuccuuaauug

SEQ ID NO: 402739 - RNA, 19 nt, Artificial Sequence
  Description of Artificial Sequence: Synthetic oligonucleotide
uugacgcaauggguggauu

SEQ ID NO: 402740 - RNA, 19 nt, Artificial Sequence
  Description of Artificial Sequence: Synthetic oligonucleotide
agagcccgugugugacucu

SEQ ID NO: 402741 - RNA, 19 nt, Artificial Sequence
  Description of Artificial Sequence: Synthetic oligonucleotide
ccuuaauugcuucauguuu

SEQ ID NO: 402742 - RNA, 19 nt, Artificial Sequence
  Description of Artificial Sequence: Synthetic oligonucleotide
gcagccgucaguggaccag

SEQ ID NO: 402743 - RNA, 19 nt, Artificial Sequence
  Description of Artificial Sequence: Synthetic oligonucleotide
agccgaacaggcagcgcca

SEQ ID NO: 402744 - RNA, 19 nt, Artificial Sequence
  Description of Artificial Sequence: Synthetic oligonucleotide
gguacacuguggugauauc

SEQ ID NO: 402745 - RNA, 19 nt, Artificial Sequence
  Description of Artificial Sequence: Synthetic oligonucleotide
ggauccugcacgugguacu

SEQ ID NO: 402746 - RNA, 19 nt, Artificial Sequence
  Description of Artificial Sequence: Synthetic oligonucleotide
gcgacguguaggugaagga

SEQ ID NO: 402747 - RNA, 19 nt, Artificial Sequence
  Description of Artificial Sequence: Synthetic oligonucleotide
uggccguggcuagaucaaa

SEQ ID NO: 402748 - RNA, 19 nt, Artificial Sequence
  Description of Artificial Sequence: Synthetic oligonucleotide
guuuccuagugucgguguu

SEQ ID NO: 402749 - RNA, 19 nt, Artificial Sequence
  Description of Artificial Sequence: Synthetic oligonucleotide
ccaagguccgaaggguuug

SEQ ID NO: 402750 - RNA, 19 nt, Artificial Sequence
  Description of Artificial Sequence: Synthetic oligonucleotide
guaugcuggugaccuggcu

SEQ ID NO: 402751 - RNA, 19 nt, Artificial Sequence
  Description of Artificial Sequence: Synthetic oligonucleotide
ggcgacagaugcaagcaua

SEQ ID NO: 402752 - RNA, 19 nt, Artificial Sequence
  Description of Artificial Sequence: Synthetic oligonucleotide
agggcgacguguaggugaa

SEQ ID NO: 402753 - RNA, 19 nt, Artificial Sequence
  Description of Artificial Sequence: Synthetic oligonucleotide
ggcaguugagcaaggugaa

SEQ ID NO: 402754 - RNA, 19 nt, Artificial Sequence
  Description of Artificial Sequence: Synthetic oligonucleotide
cgcaauggguggauuggug

SEQ ID NO: 402755 - RNA, 19 nt, Artificial Sequence
  Description of Artificial Sequence: Synthetic oligonucleotide
uggccccuuuacccuguua

SEQ ID NO: 402756 - RNA, 19 nt, Artificial Sequence
  Description of Artificial Sequence: Synthetic oligonucleotide
gccccuuuacccuguuaca

SEQ ID NO: 402757 - RNA, 19 nt, Artificial Sequence
  Description of Artificial Sequence: Synthetic oligonucleotide
ggguugauuucagaaaauu

SEQ ID NO: 402758 - RNA, 19 nt, Artificial Sequence
  Description of Artificial Sequence: Synthetic oligonucleotide
gucucggauccugcacgug

SEQ ID NO: 402759 - RNA, 19 nt, Artificial Sequence
  Description of Artificial Sequence: Synthetic oligonucleotide
gacggcagcggcacuugua

SEQ ID NO: 402760 - RNA, 19 nt, Artificial Sequence
  Description of Artificial Sequence: Synthetic oligonucleotide
ccuuggcgacagaugcaag

SEQ ID NO: 402761 - RNA, 19 nt, Artificial Sequence
  Description of Artificial Sequence: Synthetic oligonucleotide
ccaaggaguggccguuuuc

SEQ ID NO: 402762 - RNA, 19 nt, Artificial Sequence
  Description of Artificial Sequence: Synthetic oligonucleotide
gccuuggcgacagaugcaa

SEQ ID NO: 402763 - RNA, 19 nt, Artificial Sequence
  Description of Artificial Sequence: Synthetic oligonucleotide
gggcuaagguggugcuggc

SEQ ID NO: 402764 - RNA, 19 nt, Artificial Sequence
  Description of Artificial Sequence: Synthetic oligonucleotide
ccgaaggguuuguuccaug

SEQ ID NO: 402765 - RNA, 19 nt, Artificial Sequence
  Description of Artificial Sequence: Synthetic oligonucleotide
caaccaugcaggcccacuu

SEQ ID NO: 402766 - RNA, 19 nt, Artificial Sequence
  Description of Artificial Sequence: Synthetic oligonucleotide
gugacguucgaggcaaguu

SEQ ID NO: 402767 - RNA, 19 nt, Artificial Sequence
  Description of Artificial Sequence: Synthetic oligonucleotide
gccucuuaugugccaaggu

SEQ ID NO: 402768 - RNA, 19 nt, Artificial Sequence
  Description of Artificial Sequence: Synthetic oligonucleotide
guugacgcaauggguggau

SEQ ID NO: 402769 - RNA, 19 nt, Artificial Sequence
  Description of Artificial Sequence: Synthetic oligonucleotide
caggcagaugagcgaaagu

SEQ ID NO: 402770 - RNA, 19 nt, Artificial Sequence
  Description of Artificial Sequence: Synthetic oligonucleotide
ggguuuguuccauguacuu

SEQ ID NO: 402771 - RNA, 19 nt, Artificial Sequence
  Description of Artificial Sequence: Synthetic oligonucleotide
gugggcuuucgaagcgcuc

SEQ ID NO: 402772 - RNA, 19 nt, Artificial Sequence
  Description of Artificial Sequence: Synthetic oligonucleotide
ccacgguucgagagcucug

SEQ ID NO: 402773 - RNA, 19 nt, Artificial Sequence
  Description of Artificial Sequence: Synthetic oligonucleotide
ggcggcaucgcaggcucac

SEQ ID NO: 402774 - RNA, 19 nt, Artificial Sequence
  Description of Artificial Sequence: Synthetic oligonucleotide
caccacgguucgagagcuc

SEQ ID NO: 402775 - RNA, 19 nt, Artificial Sequence
  Description of Artificial Sequence: Synthetic oligonucleotide
ccguucauugagcagccgu

SEQ ID NO: 402776 - RNA, 19 nt, Artificial Sequence
  Description of Artificial Sequence: Synthetic oligonucleotide
gccguucauugagcagccg

SEQ ID NO: 402777 - RNA, 19 nt, Artificial Sequence
  Description of Artificial Sequence: Synthetic oligonucleotide
gcagauagugccguucauu

SEQ ID NO: 402778 - RNA, 19 nt, Artificial Sequence
  Description of Artificial Sequence: Synthetic oligonucleotide
ggccgaagacccagguaca

SEQ ID NO: 402779 - RNA, 19 nt, Artificial Sequence
  Description of Artificial Sequence: Synthetic oligonucleotide
gcccauauccauccauuuu

SEQ ID NO: 402780 - RNA, 19 nt, Artificial Sequence
  Description of Artificial Sequence: Synthetic oligonucleotide
cuuggcacuuaguguucuu

SEQ ID NO: 402781 - RNA, 19 nt, Artificial Sequence
  Description of Artificial Sequence: Synthetic oligonucleotide
cggauccugcacgugguac

SEQ ID NO: 402782 - RNA, 19 nt, Artificial Sequence
  Description of Artificial Sequence: Synthetic oligonucleotide
ggucuucacguggcgaagu

SEQ ID NO: 402783 - RNA, 19 nt, Artificial Sequence
  Description of Artificial Sequence: Synthetic oligonucleotide
cccugauucugagggccug

SEQ ID NO: 402784 - RNA, 19 nt, Artificial Sequence
  Description of Artificial Sequence: Synthetic oligonucleotide
gcaccacgguucgagagcu

SEQ ID NO: 402785 - RNA, 19 nt, Artificial Sequence
  Description of Artificial Sequence: Synthetic oligonucleotide
gucuucgcuuaaagaaauu

SEQ ID NO: 402786 - RNA, 19 nt, Artificial Sequence
  Description of Artificial Sequence: Synthetic oligonucleotide
gagaagcgagaaagacuuu

SEQ ID NO: 402787 - RNA, 19 nt, Artificial Sequence
  Description of Artificial Sequence: Synthetic oligonucleotide
gggcuuucgaagcgcuccu

SEQ ID NO: 402788 - RNA, 19 nt, Artificial Sequence
  Description of Artificial Sequence: Synthetic oligonucleotide
caagguccgaaggguuugu

SEQ ID NO: 402789 - RNA, 19 nt, Artificial Sequence
  Description of Artificial Sequence: Synthetic oligonucleotide
ccugccaaggaguggccgu

SEQ ID NO: 402790 - RNA, 19 nt, Artificial Sequence
  Description of Artificial Sequence: Synthetic oligonucleotide
ccugauucugagggccuga

SEQ ID NO: 402791 - RNA, 19 nt, Artificial Sequence
  Description of Artificial Sequence: Synthetic oligonucleotide
ggcagauagugccguucau

SEQ ID NO: 402792 - RNA, 19 nt, Artificial Sequence
  Description of Artificial Sequence: Synthetic oligonucleotide
caacgacaguucaguguuu

SEQ ID NO: 402793 - RNA, 19 nt, Artificial Sequence
  Description of Artificial Sequence: Synthetic oligonucleotide
gcaaccaugcaggcccacu

SEQ ID NO: 402794 - RNA, 19 nt, Artificial Sequence
  Description of Artificial Sequence: Synthetic oligonucleotide
gcggcaucgcaggcucacc

SEQ ID NO: 402795 - RNA, 19 nt, Artificial Sequence
  Description of Artificial Sequence: Synthetic oligonucleotide
caaagucuuugagcagauu

SEQ ID NO: 402796 - RNA, 19 nt, Artificial Sequence
  Description of Artificial Sequence: Synthetic oligonucleotide
ggugaccuggcuggaacuu

SEQ ID NO: 402797 - RNA, 19 nt, Artificial Sequence
  Description of Artificial Sequence: Synthetic oligonucleotide
caggcccacuuucgguacu

SEQ ID NO: 402798 - RNA, 19 nt, Artificial Sequence
  Description of Artificial Sequence: Synthetic oligonucleotide
caguggaccagugcccauu

SEQ ID NO: 402799 - RNA, 19 nt, Artificial Sequence
  Description of Artificial Sequence: Synthetic oligonucleotide
cagcgccauuguguacuca

SEQ ID NO: 402800 - RNA, 19 nt, Artificial Sequence
  Description of Artificial Sequence: Synthetic oligonucleotide
cagccgucaguggaccagu

SEQ ID NO: 402801 - RNA, 19 nt, Artificial Sequence
  Description of Artificial Sequence: Synthetic oligonucleotide
gucgggaaggauggcucuu

SEQ ID NO: 402802 - RNA, 19 nt, Artificial Sequence
  Description of Artificial Sequence: Synthetic oligonucleotide
guuuugcccggaggugcau

SEQ ID NO: 402803 - RNA, 19 nt, Artificial Sequence
  Description of Artificial Sequence: Synthetic oligonucleotide
gccaagguccgaaggguuu

SEQ ID NO: 402804 - RNA, 19 nt, Artificial Sequence
  Description of Artificial Sequence: Synthetic oligonucleotide
cugcugagauagccacgau

SEQ ID NO: 402805 - RNA, 19 nt, Artificial Sequence
  Description of Artificial Sequence: Synthetic oligonucleotide
cugccaaggaguggccguu

SEQ ID NO: 402806 - RNA, 19 nt, Artificial Sequence
  Description of Artificial Sequence: Synthetic oligonucleotide
gggcgacguguaggugaag

SEQ ID NO: 402807 - RNA, 19 nt, Artificial Sequence
  Description of Artificial Sequence: Synthetic oligonucleotide
caggugcaccacgguucga

SEQ ID NO: 402808 - RNA, 19 nt, Artificial Sequence
  Description of Artificial Sequence: Synthetic oligonucleotide
gccaaggaguggccguuuu

SEQ ID NO: 402809 - RNA, 19 nt, Artificial Sequence
  Description of Artificial Sequence: Synthetic oligonucleotide
ggacggcagcggcacuugu

SEQ ID NO: 402810 - RNA, 19 nt, Artificial Sequence
  Description of Artificial Sequence: Synthetic oligonucleotide
cacccgugccuuccuuaau

SEQ ID NO: 402811 - RNA, 19 nt, Artificial Sequence
  Description of Artificial Sequence: Synthetic oligonucleotide
gcgccauuguguacucagu

SEQ ID NO: 402812 - RNA, 19 nt, Artificial Sequence
  Description of Artificial Sequence: Synthetic oligonucleotide
cgaagcgcuccuccaauau

SEQ ID NO: 402813 - RNA, 19 nt, Artificial Sequence
  Description of Artificial Sequence: Synthetic oligonucleotide
ggauggcucuuggcacuua

SEQ ID NO: 402814 - RNA, 19 nt, Artificial Sequence
  Description of Artificial Sequence: Synthetic oligonucleotide
cauugccaccaggcggcau

SEQ ID NO: 402815 - RNA, 19 nt, Artificial Sequence
  Description of Artificial Sequence: Synthetic oligonucleotide
cguucgaggcaaguuuccu

SEQ ID NO: 402816 - RNA, 19 nt, Artificial Sequence
  Description of Artificial Sequence: Synthetic oligonucleotide
ggcccacuuucgguacucu

SEQ ID NO: 402817 - RNA, 19 nt, Artificial Sequence
  Description of Artificial Sequence: Synthetic oligonucleotide
cagcacccgugccuuccuu

SEQ ID NO: 402818 - RNA, 19 nt, Artificial Sequence
  Description of Artificial Sequence: Synthetic oligonucleotide
gcccggaggugcauucauu

SEQ ID NO: 402819 - RNA, 19 nt, Artificial Sequence
  Description of Artificial Sequence: Synthetic oligonucleotide
cgcgcacuacaaggaagua

SEQ ID NO: 402820 - RNA, 19 nt, Artificial Sequence
  Description of Artificial Sequence: Synthetic oligonucleotide
ccgaacaggcagcgccauu

SEQ ID NO: 402821 - RNA, 19 nt, Artificial Sequence
  Description of Artificial Sequence: Synthetic oligonucleotide
uucgaugucaacaagaugc

SEQ ID NO: 402822 - RNA, 19 nt, Artificial Sequence
  Description of Artificial Sequence: Synthetic oligonucleotide
ugguauauggcucaaagcg

SEQ ID NO: 402823 - RNA, 19 nt, Artificial Sequence
  Description of Artificial Sequence: Synthetic oligonucleotide
aauacuggaggccaugugg

SEQ ID NO: 402824 - RNA, 19 nt, Artificial Sequence
  Description of Artificial Sequence: Synthetic oligonucleotide
aauccuaugccuuccauuc

SEQ ID NO: 402825 - RNA, 19 nt, Artificial Sequence
  Description of Artificial Sequence: Synthetic oligonucleotide
cucaaauuuaaccacaccg

SEQ ID NO: 402826 - RNA, 19 nt, Artificial Sequence
  Description of Artificial Sequence: Synthetic oligonucleotide
aaugguuuggcccacucgg

SEQ ID NO: 402827 - RNA, 19 nt, Artificial Sequence
  Description of Artificial Sequence: Synthetic oligonucleotide
uuaaccaggucuuuaaggg

SEQ ID NO: 402828 - RNA, 19 nt, Artificial Sequence
  Description of Artificial Sequence: Synthetic oligonucleotide
ugcuuaagcauuucuaucg

SEQ ID NO: 402829 - RNA, 19 nt, Artificial Sequence
  Description of Artificial Sequence: Synthetic oligonucleotide
agccauacuaaauacuucc

SEQ ID NO: 402830 - RNA, 19 nt, Artificial Sequence
  Description of Artificial Sequence: Synthetic oligonucleotide
ucagcguccauuaagagcu

SEQ ID NO: 402831 - RNA, 19 nt, Artificial Sequence
  Description of Artificial Sequence: Synthetic oligonucleotide
cauacgauccaucacaggg

SEQ ID NO: 402832 - RNA, 19 nt, Artificial Sequence
  Description of Artificial Sequence: Synthetic oligonucleotide
aaagucacagugccuauuc

SEQ ID NO: 402833 - RNA, 19 nt, Artificial Sequence
  Description of Artificial Sequence: Synthetic oligonucleotide
auugguauauggcucaaag

SEQ ID NO: 402834 - RNA, 19 nt, Artificial Sequence
  Description of Artificial Sequence: Synthetic oligonucleotide
uauaauccagauuugcuac

SEQ ID NO: 402835 - RNA, 19 nt, Artificial Sequence
  Description of Artificial Sequence: Synthetic oligonucleotide
uauuccacgacuuuuccca

SEQ ID NO: 402836 - RNA, 19 nt, Artificial Sequence
  Description of Artificial Sequence: Synthetic oligonucleotide
acaaauaucuggcaggccu

SEQ ID NO: 402837 - RNA, 19 nt, Artificial Sequence
  Description of Artificial Sequence: Synthetic oligonucleotide
uggagacucaaauuuaacc

SEQ ID NO: 402838 - RNA, 19 nt, Artificial Sequence
  Description of Artificial Sequence: Synthetic oligonucleotide
guggucaagaccuauuggg

SEQ ID NO: 402839 - RNA, 19 nt, Artificial Sequence
  Description of Artificial Sequence: Synthetic oligonucleotide
aauggaaccccacucauua

SEQ ID NO: 402840 - RNA, 19 nt, Artificial Sequence
  Description of Artificial Sequence: Synthetic oligonucleotide
aaauuuaaccacaccgcac

SEQ ID NO: 402841 - RNA, 19 nt, Artificial Sequence
  Description of Artificial Sequence: Synthetic oligonucleotide
ucuaucgauucgaacauca

SEQ ID NO: 402842 - RNA, 19 nt, Artificial Sequence
  Description of Artificial Sequence: Synthetic oligonucleotide
acuguuggcgcccauucgc

SEQ ID NO: 402843 - RNA, 19 nt, Artificial Sequence
  Description of Artificial Sequence: Synthetic oligonucleotide
gguauguugguaaugaagg

SEQ ID NO: 402844 - RNA, 19 nt, Artificial Sequence
  Description of Artificial Sequence: Synthetic oligonucleotide
aaugccagcgcccaaugcu

SEQ ID NO: 402845 - RNA, 19 nt, Artificial Sequence
  Description of Artificial Sequence: Synthetic oligonucleotide
agaccuauugggcccaugc

SEQ ID NO: 402846 - RNA, 19 nt, Artificial Sequence
  Description of Artificial Sequence: Synthetic oligonucleotide
uuauaauccagauuugcua

SEQ ID NO: 402847 - RNA, 19 nt, Artificial Sequence
  Description of Artificial Sequence: Synthetic oligonucleotide
uacgcucuacaccagagcc

SEQ ID NO: 402848 - RNA, 19 nt, Artificial Sequence
  Description of Artificial Sequence: Synthetic oligonucleotide
aauugcgcacauugcaauc

SEQ ID NO: 402849 - RNA, 19 nt, Artificial Sequence
  Description of Artificial Sequence: Synthetic oligonucleotide
gaugucggcguacagcacg

SEQ ID NO: 402850 - RNA, 19 nt, Artificial Sequence
  Description of Artificial Sequence: Synthetic oligonucleotide
augcgauccaugcucaggc

SEQ ID NO: 402851 - RNA, 19 nt, Artificial Sequence
  Description of Artificial Sequence: Synthetic oligonucleotide
aaucaaauggaaccccacu

SEQ ID NO: 402852 - RNA, 19 nt, Artificial Sequence
  Description of Artificial Sequence: Synthetic oligonucleotide
ucucccuuugguaaggccc

SEQ ID NO: 402853 - RNA, 19 nt, Artificial Sequence
  Description of Artificial Sequence: Synthetic oligonucleotide
agauuucucacaaauaucu

SEQ ID NO: 402854 - RNA, 19 nt, Artificial Sequence
  Description of Artificial Sequence: Synthetic oligonucleotide
uuugcaaugaucucuccuc

SEQ ID NO: 402855 - RNA, 19 nt, Artificial Sequence
  Description of Artificial Sequence: Synthetic oligonucleotide
auacgcuccagacuguugg

SEQ ID NO: 402856 - RNA, 19 nt, Artificial Sequence
  Description of Artificial Sequence: Synthetic oligonucleotide
uguucgaaagucacagugc

SEQ ID NO: 402857 - RNA, 19 nt, Artificial Sequence
  Description of Artificial Sequence: Synthetic oligonucleotide
auacgcucaaucucagagc

SEQ ID NO: 402858 - RNA, 19 nt, Artificial Sequence
  Description of Artificial Sequence: Synthetic oligonucleotide
uucagugcauuacuuagga

SEQ ID NO: 402859 - RNA, 19 nt, Artificial Sequence
  Description of Artificial Sequence: Synthetic oligonucleotide
uugaugucggcguacagca

SEQ ID NO: 402860 - RNA, 19 nt, Artificial Sequence
  Description of Artificial Sequence: Synthetic oligonucleotide
uguggucaagaccuauugg

SEQ ID NO: 402861 - RNA, 19 nt, Artificial Sequence
  Description of Artificial Sequence: Synthetic oligonucleotide
uuauuccaaauccuaugcc

SEQ ID NO: 402862 - RNA, 19 nt, Artificial Sequence
  Description of Artificial Sequence: Synthetic oligonucleotide
cauagauauagcuuggaca

SEQ ID NO: 402863 - RNA, 19 nt, Artificial Sequence
  Description of Artificial Sequence: Synthetic oligonucleotide
ugaauucaacaacagcaca

SEQ ID NO: 402864 - RNA, 19 nt, Artificial Sequence
  Description of Artificial Sequence: Synthetic oligonucleotide
ucauauucgaugucaacaa

SEQ ID NO: 402865 - RNA, 19 nt, Artificial Sequence
  Description of Artificial Sequence: Synthetic oligonucleotide
cauuggucuaucaaacagc

SEQ ID NO: 402866 - RNA, 19 nt, Artificial Sequence
  Description of Artificial Sequence: Synthetic oligonucleotide
aaccugcgaagcuuccucc

SEQ ID NO: 402867 - RNA, 19 nt, Artificial Sequence
  Description of Artificial Sequence: Synthetic oligonucleotide
aaugggcgcggccaugcgc

SEQ ID NO: 402868 - RNA, 19 nt, Artificial Sequence
  Description of Artificial Sequence: Synthetic oligonucleotide
aaaugggagauuucucaca

SEQ ID NO: 402869 - RNA, 19 nt, Artificial Sequence
  Description of Artificial Sequence: Synthetic oligonucleotide
uucagcguccauuaagagc

SEQ ID NO: 402870 - RNA, 19 nt, Artificial Sequence
  Description of Artificial Sequence: Synthetic oligonucleotide
gagacucaaauuuaaccac

SEQ ID NO: 402871 - RNA, 19 nt, Artificial Sequence
  Description of Artificial Sequence: Synthetic oligonucleotide
auucgcuccaggcccaugc

SEQ ID NO: 402872 - RNA, 19 nt, Artificial Sequence
  Description of Artificial Sequence: Synthetic oligonucleotide
accuauugggcccaugcgg

SEQ ID NO: 402873 - RNA, 19 nt, Artificial Sequence
  Description of Artificial Sequence: Synthetic oligonucleotide
ugguaaggcccucucaucc

SEQ ID NO: 402874 - RNA, 19 nt, Artificial Sequence
  Description of Artificial Sequence: Synthetic oligonucleotide
ucucaaugcaaacaaucaa

SEQ ID NO: 402875 - RNA, 19 nt, Artificial Sequence
  Description of Artificial Sequence: Synthetic oligonucleotide
uuaagcauuucuaucgauu

SEQ ID NO: 402876 - RNA, 19 nt, Artificial Sequence
  Description of Artificial Sequence: Synthetic oligonucleotide
ugucaaagcuagcaccucc

SEQ ID NO: 402877 - RNA, 19 nt, Artificial Sequence
  Description of Artificial Sequence: Synthetic oligonucleotide
uuucuaucgauucgaacau

SEQ ID NO: 402878 - RNA, 19 nt, Artificial Sequence
  Description of Artificial Sequence: Synthetic oligonucleotide
ugguuggauugguauaugg

SEQ ID NO: 402879 - RNA, 19 nt, Artificial Sequence
  Description of Artificial Sequence: Synthetic oligonucleotide
guucgaaagucacagugcc

SEQ ID NO: 402880 - RNA, 19 nt, Artificial Sequence
  Description of Artificial Sequence: Synthetic oligonucleotide
aaauugcgcacauugcaau

SEQ ID NO: 402881 - RNA, 19 nt, Artificial Sequence
  Description of Artificial Sequence: Synthetic oligonucleotide
uacgauccaucacagggcc

SEQ ID NO: 402882 - RNA, 19 nt, Artificial Sequence
  Description of Artificial Sequence: Synthetic oligonucleotide
uugguauauggcucaaagc

SEQ ID NO: 402883 - RNA, 19 nt, Artificial Sequence
  Description of Artificial Sequence: Synthetic oligonucleotide
augcgcucaauacuggagg

SEQ ID NO: 402884 - RNA, 19 nt, Artificial Sequence
  Description of Artificial Sequence: Synthetic oligonucleotide
ccauuaaacauagauauag

SEQ ID NO: 402885 - RNA, 19 nt, Artificial Sequence
  Description of Artificial Sequence: Synthetic oligonucleotide
uaucgauucgaacaucaau

SEQ ID NO: 402886 - RNA, 19 nt, Artificial Sequence
  Description of Artificial Sequence: Synthetic oligonucleotide
uguuaccucaccaacuuuu

SEQ ID NO: 402887 - RNA, 19 nt, Artificial Sequence
  Description of Artificial Sequence: Synthetic oligonucleotide
aaaagguauguugguaaug

SEQ ID NO: 402888 - RNA, 19 nt, Artificial Sequence
  Description of Artificial Sequence: Synthetic oligonucleotide
ggagacucaaauuuaacca

SEQ ID NO: 402889 - RNA, 19 nt, Artificial Sequence
  Description of Artificial Sequence: Synthetic oligonucleotide
ucgauucgaacaucaaucu

SEQ ID NO: 402890 - RNA, 19 nt, Artificial Sequence
  Description of Artificial Sequence: Synthetic oligonucleotide
uuuugacgugcauuggucu

SEQ ID NO: 402891 - RNA, 19 nt, Artificial Sequence
  Description of Artificial Sequence: Synthetic oligonucleotide
guuguuggcgcccaugcgc

SEQ ID NO: 402892 - RNA, 19 nt, Artificial Sequence
  Description of Artificial Sequence: Synthetic oligonucleotide
aaauccuaugccuuccauu

SEQ ID NO: 402893 - RNA, 19 nt, Artificial Sequence
  Description of Artificial Sequence: Synthetic oligonucleotide
ucgaugucaacaagaugcc

SEQ ID NO: 402894 - RNA, 19 nt, Artificial Sequence
  Description of Artificial Sequence: Synthetic oligonucleotide
auacgauccaucacagggc

SEQ ID NO: 402895 - RNA, 19 nt, Artificial Sequence
  Description of Artificial Sequence: Synthetic oligonucleotide
auucgcucaaugccagcgc

SEQ ID NO: 402896 - RNA, 19 nt, Artificial Sequence
  Description of Artificial Sequence: Synthetic oligonucleotide
cuuuauacauccagccaac

SEQ ID NO: 402897 - RNA, 19 nt, Artificial Sequence
  Description of Artificial Sequence: Synthetic oligonucleotide
gauucgaacaucaaucucu

SEQ ID NO: 402898 - RNA, 19 nt, Artificial Sequence
  Description of Artificial Sequence: Synthetic oligonucleotide
uccaucuugaugucggcgu

SEQ ID NO: 402899 - RNA, 19 nt, Artificial Sequence
  Description of Artificial Sequence: Synthetic oligonucleotide
uccauaccaccaccaaagg

SEQ ID NO: 402900 - RNA, 19 nt, Artificial Sequence
  Description of Artificial Sequence: Synthetic oligonucleotide
uggccauuaaacauagaua

SEQ ID NO: 402901 - RNA, 19 nt, Artificial Sequence
  Description of Artificial Sequence: Synthetic oligonucleotide
auggcucaaagcgauugcc

SEQ ID NO: 402902 - RNA, 19 nt, Artificial Sequence
  Description of Artificial Sequence: Synthetic oligonucleotide
auuuugacgugcauugguc

SEQ ID NO: 402903 - RNA, 19 nt, Artificial Sequence
  Description of Artificial Sequence: Synthetic oligonucleotide
aaaauugcgcacauugcaa

SEQ ID NO: 402904 - RNA, 19 nt, Artificial Sequence
  Description of Artificial Sequence: Synthetic oligonucleotide
auguggucaagaccuauug

SEQ ID NO: 402905 - RNA, 19 nt, Artificial Sequence
  Description of Artificial Sequence: Synthetic oligonucleotide
uccguugccgcucggcacg

SEQ ID NO: 402906 - RNA, 19 nt, Artificial Sequence
  Description of Artificial Sequence: Synthetic oligonucleotide
guauguugguaaugaaggc

SEQ ID NO: 402907 - RNA, 19 nt, Artificial Sequence
  Description of Artificial Sequence: Synthetic oligonucleotide
gucaagaccuauugggccc

SEQ ID NO: 402908 - RNA, 19 nt, Artificial Sequence
  Description of Artificial Sequence: Synthetic oligonucleotide
ugacuuuccuucagcgucc

SEQ ID NO: 402909 - RNA, 19 nt, Artificial Sequence
  Description of Artificial Sequence: Synthetic oligonucleotide
uccacgacuuuucccaucu

SEQ ID NO: 402910 - RNA, 19 nt, Artificial Sequence
  Description of Artificial Sequence: Synthetic oligonucleotide
ucugguauugauguuuaaa

SEQ ID NO: 402911 - RNA, 19 nt, Artificial Sequence
  Description of Artificial Sequence: Synthetic oligonucleotide
cuugaugucggcguacagc

SEQ ID NO: 402912 - RNA, 19 nt, Artificial Sequence
  Description of Artificial Sequence: Synthetic oligonucleotide
caaauuuaaccacaccgca

SEQ ID NO: 402913 - RNA, 19 nt, Artificial Sequence
  Description of Artificial Sequence: Synthetic oligonucleotide
uugcuacaaauacugugcu

SEQ ID NO: 402914 - RNA, 19 nt, Artificial Sequence
  Description of Artificial Sequence: Synthetic oligonucleotide
auuggucuaucaaacagca

SEQ ID NO: 402915 - RNA, 19 nt, Artificial Sequence
  Description of Artificial Sequence: Synthetic oligonucleotide
ucugcucggaccaccacac

SEQ ID NO: 402916 - RNA, 19 nt, Artificial Sequence
  Description of Artificial Sequence: Synthetic oligonucleotide
ugcgaagcuuccuccaaag

SEQ ID NO: 402917 - RNA, 19 nt, Artificial Sequence
  Description of Artificial Sequence: Synthetic oligonucleotide
uuuuccauaccaccaccaa

SEQ ID NO: 402918 - RNA, 19 nt, Artificial Sequence
  Description of Artificial Sequence: Synthetic oligonucleotide
ugcucggaccaccacacca

SEQ ID NO: 402919 - RNA, 19 nt, Artificial Sequence
  Description of Artificial Sequence: Synthetic oligonucleotide
ucaauaggcuguccuccag

SEQ ID NO: 402920 - RNA, 19 nt, Artificial Sequence
  Description of Artificial Sequence: Synthetic oligonucleotide
cauacgcucuacaccagag

SEQ ID NO: 402921 - RNA, 19 nt, Artificial Sequence
  Description of Artificial Sequence: Synthetic oligonucleotide
gaccuauugggcccaugcg

SEQ ID NO: 402922 - RNA, 19 nt, Artificial Sequence
  Description of Artificial Sequence: Synthetic oligonucleotide
ucgaaagucacagugccua

SEQ ID NO: 402923 - RNA, 19 nt, Artificial Sequence
  Description of Artificial Sequence: Synthetic oligonucleotide
uacuuaggauuucauuuau

SEQ ID NO: 402924 - RNA, 19 nt, Artificial Sequence
  Description of Artificial Sequence: Synthetic oligonucleotide
cauucgcucaaugccagcg

SEQ ID NO: 402925 - RNA, 19 nt, Artificial Sequence
  Description of Artificial Sequence: Synthetic oligonucleotide
caugcgcucaauacuggag

SEQ ID NO: 402926 - RNA, 19 nt, Artificial Sequence
  Description of Artificial Sequence: Synthetic oligonucleotide
uucagcaacugguauuuau

SEQ ID NO: 402927 - RNA, 19 nt, Artificial Sequence
  Description of Artificial Sequence: Synthetic oligonucleotide
uuucccauuccaaugccuu

SEQ ID NO: 402928 - RNA, 19 nt, Artificial Sequence
  Description of Artificial Sequence: Synthetic oligonucleotide
cauuucuaucgauucgaac

SEQ ID NO: 402929 - RNA, 19 nt, Artificial Sequence
  Description of Artificial Sequence: Synthetic oligonucleotide
caaucucucggccacucag

SEQ ID NO: 402930 - RNA, 19 nt, Artificial Sequence
  Description of Artificial Sequence: Synthetic oligonucleotide
auaauccagauuugcuaca

SEQ ID NO: 402931 - RNA, 19 nt, Artificial Sequence
  Description of Artificial Sequence: Synthetic oligonucleotide
uauugggcccaugcggucg

SEQ ID NO: 402932 - RNA, 19 nt, Artificial Sequence
  Description of Artificial Sequence: Synthetic oligonucleotide
auucgaacaucaaucucuc

SEQ ID NO: 402933 - RNA, 19 nt, Artificial Sequence
  Description of Artificial Sequence: Synthetic oligonucleotide
auucgaugucaacaagaug

SEQ ID NO: 402934 - RNA, 19 nt, Artificial Sequence
  Description of Artificial Sequence: Synthetic oligonucleotide
uacgcucaauggcagggcc

SEQ ID NO: 402935 - RNA, 19 nt, Artificial Sequence
  Description of Artificial Sequence: Synthetic oligonucleotide
auuaagagcuccacguaug

SEQ ID NO: 402936 - RNA, 19 nt, Artificial Sequence
  Description of Artificial Sequence: Synthetic oligonucleotide
cuuuccguucuccaucuug

SEQ ID NO: 402937 - RNA, 19 nt, Artificial Sequence
  Description of Artificial Sequence: Synthetic oligonucleotide
ggugguuggcaucaauagg

SEQ ID NO: 402938 - RNA, 19 nt, Artificial Sequence
  Description of Artificial Sequence: Synthetic oligonucleotide
uugacuuucaguggucuuc

SEQ ID NO: 402939 - RNA, 19 nt, Artificial Sequence
  Description of Artificial Sequence: Synthetic oligonucleotide
ugcgcucaauacuggaggc

SEQ ID NO: 402940 - RNA, 19 nt, Artificial Sequence
  Description of Artificial Sequence: Synthetic oligonucleotide
caaucaaauggaaccccac

SEQ ID NO: 402941 - RNA, 19 nt, Artificial Sequence
  Description of Artificial Sequence: Synthetic oligonucleotide
agagcuccacguauguuac

SEQ ID NO: 402942 - RNA, 19 nt, Artificial Sequence
  Description of Artificial Sequence: Synthetic oligonucleotide
ggccauuaaacauagauau

SEQ ID NO: 402943 - RNA, 19 nt, Artificial Sequence
  Description of Artificial Sequence: Synthetic oligonucleotide
cauccagccaacaaauuaa

SEQ ID NO: 402944 - RNA, 19 nt, Artificial Sequence
  Description of Artificial Sequence: Synthetic oligonucleotide
gacucaaauuuaaccacac

SEQ ID NO: 402945 - RNA, 19 nt, Artificial Sequence
  Description of Artificial Sequence: Synthetic oligonucleotide
augcggucaaugccagggc

SEQ ID NO: 402946 - RNA, 19 nt, Artificial Sequence
  Description of Artificial Sequence: Synthetic oligonucleotide
ccuuuguuaaggugguugg

SEQ ID NO: 402947 - RNA, 19 nt, Artificial Sequence
  Description of Artificial Sequence: Synthetic oligonucleotide
uuugacgugcauuggucua

SEQ ID NO: 402948 - RNA, 19 nt, Artificial Sequence
  Description of Artificial Sequence: Synthetic oligonucleotide
uggcucaaagcgauugccu

SEQ ID NO: 402949 - RNA, 19 nt, Artificial Sequence
  Description of Artificial Sequence: Synthetic oligonucleotide
aacugcuuaagcauuucua

SEQ ID NO: 402950 - RNA, 19 nt, Artificial Sequence
  Description of Artificial Sequence: Synthetic oligonucleotide
gucaacaagaugccacaac

SEQ ID NO: 402951 - RNA, 19 nt, Artificial Sequence
  Description of Artificial Sequence: Synthetic oligonucleotide
cauucaucauccggcaggc

SEQ ID NO: 402952 - RNA, 19 nt, Artificial Sequence
  Description of Artificial Sequence: Synthetic oligonucleotide
caugcgguccaugaccagg

SEQ ID NO: 402953 - RNA, 19 nt, Artificial Sequence
  Description of Artificial Sequence: Synthetic oligonucleotide
augcgcuccacgccagagc

SEQ ID NO: 402954 - RNA, 19 nt, Artificial Sequence
  Description of Artificial Sequence: Synthetic oligonucleotide
agugcauuacuuaggauuu

SEQ ID NO: 402955 - RNA, 19 nt, Artificial Sequence
  Description of Artificial Sequence: Synthetic oligonucleotide
uucgcuccaggcccaugcg

SEQ ID NO: 402956 - RNA, 19 nt, Artificial Sequence
  Description of Artificial Sequence: Synthetic oligonucleotide
acagugccuauuccacgac

SEQ ID NO: 402957 - RNA, 19 nt, Artificial Sequence
  Description of Artificial Sequence: Synthetic oligonucleotide
aucccagauccaaaucgcc

SEQ ID NO: 402958 - RNA, 19 nt, Artificial Sequence
  Description of Artificial Sequence: Synthetic oligonucleotide
acguauguuaccucaccaa

SEQ ID NO: 402959 - RNA, 19 nt, Artificial Sequence
  Description of Artificial Sequence: Synthetic oligonucleotide
acauugcaaucucaaugca

SEQ ID NO: 402960 - RNA, 19 nt, Artificial Sequence
  Description of Artificial Sequence: Synthetic oligonucleotide
augcggucgaugccagagc

SEQ ID NO: 402961 - RNA, 19 nt, Artificial Sequence
  Description of Artificial Sequence: Synthetic oligonucleotide
auacgcucaauggcagggc

SEQ ID NO: 402962 - RNA, 19 nt, Artificial Sequence
  Description of Artificial Sequence: Synthetic oligonucleotide
aggcccauacgcucaaucu

SEQ ID NO: 402963 - RNA, 19 nt, Artificial Sequence
  Description of Artificial Sequence: Synthetic oligonucleotide
cauggccgggcccauacgc

SEQ ID NO: 402964 - RNA, 19 nt, Artificial Sequence
  Description of Artificial Sequence: Synthetic oligonucleotide
caugcggucgaugccagag

SEQ ID NO: 402965 - RNA, 19 nt, Artificial Sequence
  Description of Artificial Sequence: Synthetic oligonucleotide
caccagccauacuaaauac

SEQ ID NO: 402966 - RNA, 19 nt, Artificial Sequence
  Description of Artificial Sequence: Synthetic oligonucleotide
uaauccagauuugcuacaa

SEQ ID NO: 402967 - RNA, 19 nt, Artificial Sequence
  Description of Artificial Sequence: Synthetic oligonucleotide
uggcccaugcgcucaauac

SEQ ID NO: 402968 - RNA, 19 nt, Artificial Sequence
  Description of Artificial Sequence: Synthetic oligonucleotide
uggucguucaggagggaaa

SEQ ID NO: 402969 - RNA, 19 nt, Artificial Sequence
  Description of Artificial Sequence: Synthetic oligonucleotide
auaccaccaccaaaggguc

SEQ ID NO: 402970 - RNA, 19 nt, Artificial Sequence
  Description of Artificial Sequence: Synthetic oligonucleotide
aaugcgcuccauggucugg

SEQ ID NO: 402971 - RNA, 19 nt, Artificial Sequence
  Description of Artificial Sequence: Synthetic oligonucleotide
cauggccuaggccugcgcc

SEQ ID NO: 402972 - RNA, 19 nt, Artificial Sequence
  Description of Artificial Sequence: Synthetic oligonucleotide
agguccuaaccccaugcca

SEQ ID NO: 402973 - RNA, 19 nt, Artificial Sequence
  Description of Artificial Sequence: Synthetic oligonucleotide
guuggcgcccauucgcucc

SEQ ID NO: 402974 - RNA, 19 nt, Artificial Sequence
  Description of Artificial Sequence: Synthetic oligonucleotide
ucuuuaagggacugccauu

SEQ ID NO: 402975 - RNA, 19 nt, Artificial Sequence
  Description of Artificial Sequence: Synthetic oligonucleotide
cagcacguggccacauucg

SEQ ID NO: 402976 - RNA, 19 nt, Artificial Sequence
  Description of Artificial Sequence: Synthetic oligonucleotide
caugcgauccaugcucagg

SEQ ID NO: 402977 - RNA, 19 nt, Artificial Sequence
  Description of Artificial Sequence: Synthetic oligonucleotide
ucaaugggcgcggccaugc

SEQ ID NO: 402978 - RNA, 19 nt, Artificial Sequence
  Description of Artificial Sequence: Synthetic oligonucleotide
agcguccauuaagagcucc

SEQ ID NO: 402979 - RNA, 19 nt, Artificial Sequence
  Description of Artificial Sequence: Synthetic oligonucleotide
acaagaugccacaacuaca

SEQ ID NO: 402980 - RNA, 19 nt, Artificial Sequence
  Description of Artificial Sequence: Synthetic oligonucleotide
cauccucucgaucccuggg

SEQ ID NO: 402981 - RNA, 19 nt, Artificial Sequence
  Description of Artificial Sequence: Synthetic oligonucleotide
gguuggauugguauauggc

SEQ ID NO: 402982 - RNA, 19 nt, Artificial Sequence
  Description of Artificial Sequence: Synthetic oligonucleotide
cauugcaaucucaaugcaa

SEQ ID NO: 402983 - RNA, 19 nt, Artificial Sequence
  Description of Artificial Sequence: Synthetic oligonucleotide
cuggccauuaaacauagau

SEQ ID NO: 402984 - RNA, 19 nt, Artificial Sequence
  Description of Artificial Sequence: Synthetic oligonucleotide
ugaccaggcccauacgcuc

SEQ ID NO: 402985 - RNA, 19 nt, Artificial Sequence
  Description of Artificial Sequence: Synthetic oligonucleotide
ucaaucucucggccacuca

SEQ ID NO: 402986 - RNA, 19 nt, Artificial Sequence
  Description of Artificial Sequence: Synthetic oligonucleotide
aagucauauucgaugucaa

SEQ ID NO: 402987 - RNA, 19 nt, Artificial Sequence
  Description of Artificial Sequence: Synthetic oligonucleotide
guuuaaaacuucagcagcu

SEQ ID NO: 402988 - RNA, 19 nt, Artificial Sequence
  Description of Artificial Sequence: Synthetic oligonucleotide
uagauauagcuuggacagc

SEQ ID NO: 402989 - RNA, 19 nt, Artificial Sequence
  Description of Artificial Sequence: Synthetic oligonucleotide
ugcgcucaaugguuuggcc

SEQ ID NO: 402990 - RNA, 19 nt, Artificial Sequence
  Description of Artificial Sequence: Synthetic oligonucleotide
ugguuuggcccacucgguc

SEQ ID NO: 402991 - RNA, 19 nt, Artificial Sequence
  Description of Artificial Sequence: Synthetic oligonucleotide
agcccaugcgcucuacuga

SEQ ID NO: 402992 - RNA, 19 nt, Artificial Sequence
  Description of Artificial Sequence: Synthetic oligonucleotide
ucauccggcaggcucucuc

SEQ ID NO: 402993 - RNA, 19 nt, Artificial Sequence
  Description of Artificial Sequence: Synthetic oligonucleotide
cucugucgcugccacuucg

SEQ ID NO: 402994 - RNA, 19 nt, Artificial Sequence
  Description of Artificial Sequence: Synthetic oligonucleotide
cagugcauuacuuaggauu

SEQ ID NO: 402995 - RNA, 19 nt, Artificial Sequence
  Description of Artificial Sequence: Synthetic oligonucleotide
uuugacuuucaguggucuu

SEQ ID NO: 402996 - RNA, 19 nt, Artificial Sequence
  Description of Artificial Sequence: Synthetic oligonucleotide
cagccauacuaaauacuuc

SEQ ID NO: 402997 - RNA, 19 nt, Artificial Sequence
  Description of Artificial Sequence: Synthetic oligonucleotide
augcgcuccauggucuggc

SEQ ID NO: 402998 - RNA, 19 nt, Artificial Sequence
  Description of Artificial Sequence: Synthetic oligonucleotide
cuacaccagagcccaugcg

SEQ ID NO: 402999 - RNA, 19 nt, Artificial Sequence
  Description of Artificial Sequence: Synthetic oligonucleotide
ucgcucaaugccagcgccc

SEQ ID NO: 403000 - RNA, 19 nt, Artificial Sequence
  Description of Artificial Sequence: Synthetic oligonucleotide
agcccaugcgguccaugac

SEQ ID NO: 403001 - RNA, 19 nt, Artificial Sequence
  Description of Artificial Sequence: Synthetic oligonucleotide
cacagugccuauuccacga

SEQ ID NO: 403002 - RNA, 19 nt, Artificial Sequence
  Description of Artificial Sequence: Synthetic oligonucleotide
ucggaccaccacaccagcc

SEQ ID NO: 403003 - RNA, 19 nt, Artificial Sequence
  Description of Artificial Sequence: Synthetic oligonucleotide
caccacaccagccauacua

SEQ ID NO: 403004 - RNA, 19 nt, Artificial Sequence
  Description of Artificial Sequence: Synthetic oligonucleotide
auacuggaggccauguggu

SEQ ID NO: 403005 - RNA, 19 nt, Artificial Sequence
  Description of Artificial Sequence: Synthetic oligonucleotide
cgaacaucaaucucucggc

SEQ ID NO: 403006 - RNA, 19 nt, Artificial Sequence
  Description of Artificial Sequence: Synthetic oligonucleotide
gccaaaggaaccugcgaag

SEQ ID NO: 403007 - RNA, 19 nt, Artificial Sequence
  Description of Artificial Sequence: Synthetic oligonucleotide
cuacuccaggugcauggcc

SEQ ID NO: 403008 - RNA, 19 nt, Artificial Sequence
  Description of Artificial Sequence: Synthetic oligonucleotide
gauccaaaucgccccaugu

SEQ ID NO: 403009 - RNA, 19 nt, Artificial Sequence
  Description of Artificial Sequence: Synthetic oligonucleotide
ucaagaccuauugggccca

SEQ ID NO: 403010 - RNA, 19 nt, Artificial Sequence
  Description of Artificial Sequence: Synthetic oligonucleotide
acgugcauuggucuaucaa

SEQ ID NO: 403011 - RNA, 19 nt, Artificial Sequence
  Description of Artificial Sequence: Synthetic oligonucleotide
aagcgauugccuccucuuu

SEQ ID NO: 403012 - RNA, 19 nt, Artificial Sequence
  Description of Artificial Sequence: Synthetic oligonucleotide
caugcgcucuacugagccc

SEQ ID NO: 403013 - RNA, 19 nt, Artificial Sequence
  Description of Artificial Sequence: Synthetic oligonucleotide
uauauggcucaaagcgauu

SEQ ID NO: 403014 - RNA, 19 nt, Artificial Sequence
  Description of Artificial Sequence: Synthetic oligonucleotide
uucugaguuggucguucuc

SEQ ID NO: 403015 - RNA, 19 nt, Artificial Sequence
  Description of Artificial Sequence: Synthetic oligonucleotide
agcuggccauuaaacauag

SEQ ID NO: 403016 - RNA, 19 nt, Artificial Sequence
  Description of Artificial Sequence: Synthetic oligonucleotide
ucagugcauuacuuaggau

SEQ ID NO: 403017 - RNA, 19 nt, Artificial Sequence
  Description of Artificial Sequence: Synthetic oligonucleotide
ugcuacaaauacugugcuu

SEQ ID NO: 403018 - RNA, 19 nt, Artificial Sequence
  Description of Artificial Sequence: Synthetic oligonucleotide
cauacgcuccagacuguug

SEQ ID NO: 403019 - RNA, 19 nt, Artificial Sequence
  Description of Artificial Sequence: Synthetic oligonucleotide
aguugccccgcuccaucuc

SEQ ID NO: 403020 - RNA, 19 nt, Artificial Sequence
  Description of Artificial Sequence: Synthetic oligonucleotide
cacguauguuaccucacca

SEQ ID NO: 403021 - RNA, 19 nt, Artificial Sequence
  Description of Artificial Sequence: Synthetic oligonucleotide
agcuagcaccuccagcgcu

SEQ ID NO: 403022 - RNA, 19 nt, Artificial Sequence
  Description of Artificial Sequence: Synthetic oligonucleotide
guugguaaugaaggcucug

SEQ ID NO: 403023 - RNA, 19 nt, Artificial Sequence
  Description of Artificial Sequence: Synthetic oligonucleotide
cagguccuaaccccaugcc

SEQ ID NO: 403024 - RNA, 19 nt, Artificial Sequence
  Description of Artificial Sequence: Synthetic oligonucleotide
accgccaaugcggucaaug

SEQ ID NO: 403025 - RNA, 19 nt, Artificial Sequence
  Description of Artificial Sequence: Synthetic oligonucleotide
agcgauugccuccucuuuu

SEQ ID NO: 403026 - RNA, 19 nt, Artificial Sequence
  Description of Artificial Sequence: Synthetic oligonucleotide
gguauauggcucaaagcga

SEQ ID NO: 403027 - RNA, 19 nt, Artificial Sequence
  Description of Artificial Sequence: Synthetic oligonucleotide
acgcucaauggcagggccc

SEQ ID NO: 403028 - RNA, 19 nt, Artificial Sequence
  Description of Artificial Sequence: Synthetic oligonucleotide
augcgcucuacugagccca

SEQ ID NO: 403029 - RNA, 19 nt, Artificial Sequence
  Description of Artificial Sequence: Synthetic oligonucleotide
gagcccaugcgguccauga

SEQ ID NO: 403030 - RNA, 19 nt, Artificial Sequence
  Description of Artificial Sequence: Synthetic oligonucleotide
gccuuuguuaaggugguug

SEQ ID NO: 403031 - RNA, 19 nt, Artificial Sequence
  Description of Artificial Sequence: Synthetic oligonucleotide
uacauccagccaacaaauu

SEQ ID NO: 403032 - RNA, 19 nt, Artificial Sequence
  Description of Artificial Sequence: Synthetic oligonucleotide
cuccgccaaaggaaccugc

SEQ ID NO: 403033 - RNA, 19 nt, Artificial Sequence
  Description of Artificial Sequence: Synthetic oligonucleotide
guugccgcucggcacgcag

SEQ ID NO: 403034 - RNA, 19 nt, Artificial Sequence
  Description of Artificial Sequence: Synthetic oligonucleotide
ucggucaaugggcgcggcc

SEQ ID NO: 403035 - RNA, 19 nt, Artificial Sequence
  Description of Artificial Sequence: Synthetic oligonucleotide
gcccaugcgcuccagacug

SEQ ID NO: 403036 - RNA, 19 nt, Artificial Sequence
  Description of Artificial Sequence: Synthetic oligonucleotide
gucuaucaaacagcagcug

SEQ ID NO: 403037 - RNA, 19 nt, Artificial Sequence
  Description of Artificial Sequence: Synthetic oligonucleotide
ggcccauacgcucuacacc

SEQ ID NO: 403038 - RNA, 19 nt, Artificial Sequence
  Description of Artificial Sequence: Synthetic oligonucleotide
gauccaugccauggccuag

SEQ ID NO: 403039 - RNA, 19 nt, Artificial Sequence
  Description of Artificial Sequence: Synthetic oligonucleotide
cauuuugacgugcauuggu

SEQ ID NO: 403040 - RNA, 19 nt, Artificial Sequence
  Description of Artificial Sequence: Synthetic oligonucleotide
gggacugccauuucacauc

SEQ ID NO: 403041 - RNA, 19 nt, Artificial Sequence
  Description of Artificial Sequence: Synthetic oligonucleotide
agcuccguugccgcucggc

SEQ ID NO: 403042 - RNA, 19 nt, Artificial Sequence
  Description of Artificial Sequence: Synthetic oligonucleotide
ggcucaaagcgauugccuc

SEQ ID NO: 403043 - RNA, 19 nt, Artificial Sequence
  Description of Artificial Sequence: Synthetic oligonucleotide
uugacgugcauuggucuau

SEQ ID NO: 403044 - RNA, 19 nt, Artificial Sequence
  Description of Artificial Sequence: Synthetic oligonucleotide
cagacuaugcuuguuuaaa

SEQ ID NO: 403045 - RNA, 19 nt, Artificial Sequence
  Description of Artificial Sequence: Synthetic oligonucleotide
cguauguuaccucaccaac

SEQ ID NO: 403046 - RNA, 19 nt, Artificial Sequence
  Description of Artificial Sequence: Synthetic oligonucleotide
cucagacuaugcuuguuua

SEQ ID NO: 403047 - RNA, 19 nt, Artificial Sequence
  Description of Artificial Sequence: Synthetic oligonucleotide
agcgcuacccauggccagg

SEQ ID NO: 403048 - RNA, 19 nt, Artificial Sequence
  Description of Artificial Sequence: Synthetic oligonucleotide
uccaugccuccaauuuuau

SEQ ID NO: 403049 - RNA, 19 nt, Artificial Sequence
  Description of Artificial Sequence: Synthetic oligonucleotide
gacuuuccguucuccaucu

SEQ ID NO: 403050 - RNA, 19 nt, Artificial Sequence
  Description of Artificial Sequence: Synthetic oligonucleotide
caacaagaugccacaacua

SEQ ID NO: 403051 - RNA, 19 nt, Artificial Sequence
  Description of Artificial Sequence: Synthetic oligonucleotide
ccuauuccacgacuuuucc

SEQ ID NO: 403052 - RNA, 19 nt, Artificial Sequence
  Description of Artificial Sequence: Synthetic oligonucleotide
cauuaagagcuccacguau

SEQ ID NO: 403053 - RNA, 19 nt, Artificial Sequence
  Description of Artificial Sequence: Synthetic oligonucleotide
uucuaucgauucgaacauc

SEQ ID NO: 403054 - RNA, 19 nt, Artificial Sequence
  Description of Artificial Sequence: Synthetic oligonucleotide
ugccuauuccacgacuuuu

SEQ ID NO: 403055 - RNA, 19 nt, Artificial Sequence
  Description of Artificial Sequence: Synthetic oligonucleotide
ccaaaggaaccugcgaagc

SEQ ID NO: 403056 - RNA, 19 nt, Artificial Sequence
  Description of Artificial Sequence: Synthetic oligonucleotide
accugcgaagcuuccucca

SEQ ID NO: 403057 - RNA, 19 nt, Artificial Sequence
  Description of Artificial Sequence: Synthetic oligonucleotide
auggacuguucgaaaguca

SEQ ID NO: 403058 - RNA, 19 nt, Artificial Sequence
  Description of Artificial Sequence: Synthetic oligonucleotide
guauguuaccucaccaacu

SEQ ID NO: 403059 - RNA, 19 nt, Artificial Sequence
  Description of Artificial Sequence: Synthetic oligonucleotide
guauauggcucaaagcgau

SEQ ID NO: 403060 - RNA, 19 nt, Artificial Sequence
  Description of Artificial Sequence: Synthetic oligonucleotide
acaccagagcccaugcgcu

SEQ ID NO: 403061 - RNA, 19 nt, Artificial Sequence
  Description of Artificial Sequence: Synthetic oligonucleotide
gcccaugcgguccaugacc

SEQ ID NO: 403062 - RNA, 19 nt, Artificial Sequence
  Description of Artificial Sequence: Synthetic oligonucleotide
ugcgcuccaggccggcccc

SEQ ID NO: 403063 - RNA, 19 nt, Artificial Sequence
  Description of Artificial Sequence: Synthetic oligonucleotide
auuccacgacuuuucccau

SEQ ID NO: 403064 - RNA, 19 nt, Artificial Sequence
  Description of Artificial Sequence: Synthetic oligonucleotide
ccuugcauguucaccauca

SEQ ID NO: 403065 - RNA, 19 nt, Artificial Sequence
  Description of Artificial Sequence: Synthetic oligonucleotide
agugccuauuccacgacuu

SEQ ID NO: 403066 - RNA, 19 nt, Artificial Sequence
  Description of Artificial Sequence: Synthetic oligonucleotide
gccaguggccauacgaucc

SEQ ID NO: 403067 - RNA, 19 nt, Artificial Sequence
  Description of Artificial Sequence: Synthetic oligonucleotide
gguaaugaaggcucuguau

SEQ ID NO: 403068 - RNA, 19 nt, Artificial Sequence
  Description of Artificial Sequence: Synthetic oligonucleotide
cuauugggcccaugcgguc

SEQ ID NO: 403069 - RNA, 19 nt, Artificial Sequence
  Description of Artificial Sequence: Synthetic oligonucleotide
caggcccauacgcucaauc

SEQ ID NO: 403070 - RNA, 19 nt, Artificial Sequence
  Description of Artificial Sequence: Synthetic oligonucleotide
gcacccaugcgcuccacgc

SEQ ID NO: 403071 - RNA, 19 nt, Artificial Sequence
  Description of Artificial Sequence: Synthetic oligonucleotide
agcuccgccaaaggaaccu

SEQ ID NO: 403072 - RNA, 19 nt, Artificial Sequence
  Description of Artificial Sequence: Synthetic oligonucleotide
cuaucgauucgaacaucaa

SEQ ID NO: 403073 - RNA, 19 nt, Artificial Sequence
  Description of Artificial Sequence: Synthetic oligonucleotide
uguuggcgcccauucgcuc

SEQ ID NO: 403074 - RNA, 19 nt, Artificial Sequence
  Description of Artificial Sequence: Synthetic oligonucleotide
auugggcccaugcggucga

SEQ ID NO: 403075 - RNA, 19 nt, Artificial Sequence
  Description of Artificial Sequence: Synthetic oligonucleotide
caugcgcuccagacuguug

SEQ ID NO: 403076 - RNA, 19 nt, Artificial Sequence
  Description of Artificial Sequence: Synthetic oligonucleotide
ugucugcucggaccaccac

SEQ ID NO: 403077 - RNA, 19 nt, Artificial Sequence
  Description of Artificial Sequence: Synthetic oligonucleotide
ggacugccauuucacauca

SEQ ID NO: 403078 - RNA, 19 nt, Artificial Sequence
  Description of Artificial Sequence: Synthetic oligonucleotide
ccagguccuaaccccaugc

SEQ ID NO: 403079 - RNA, 19 nt, Artificial Sequence
  Description of Artificial Sequence: Synthetic oligonucleotide
acgauccaucacagggccc

SEQ ID NO: 403080 - RNA, 19 nt, Artificial Sequence
  Description of Artificial Sequence: Synthetic oligonucleotide
guugccccgcuccaucuca

SEQ ID NO: 403081 - RNA, 19 nt, Artificial Sequence
  Description of Artificial Sequence: Synthetic oligonucleotide
ggccauguggucaagaccu

SEQ ID NO: 403082 - RNA, 19 nt, Artificial Sequence
  Description of Artificial Sequence: Synthetic oligonucleotide
auguuaccucaccaacuuu

SEQ ID NO: 403083 - RNA, 19 nt, Artificial Sequence
  Description of Artificial Sequence: Synthetic oligonucleotide
cuccguugccgcucggcac

SEQ ID NO: 403084 - RNA, 19 nt, Artificial Sequence
  Description of Artificial Sequence: Synthetic oligonucleotide
augccagcgcccaaugcug

SEQ ID NO: 403085 - RNA, 19 nt, Artificial Sequence
  Description of Artificial Sequence: Synthetic oligonucleotide
ggcccauacgcucaaucuc

SEQ ID NO: 403086 - RNA, 19 nt, Artificial Sequence
  Description of Artificial Sequence: Synthetic oligonucleotide
ccagcuccgccaaaggaac

SEQ ID NO: 403087 - RNA, 19 nt, Artificial Sequence
  Description of Artificial Sequence: Synthetic oligonucleotide
guuggcgcccaugcgcucc

SEQ ID NO: 403088 - RNA, 19 nt, Artificial Sequence
  Description of Artificial Sequence: Synthetic oligonucleotide
caugcgcuccacgccagag

SEQ ID NO: 403089 - RNA, 19 nt, Artificial Sequence
  Description of Artificial Sequence: Synthetic oligonucleotide
aagaccuauugggcccaug

SEQ ID NO: 403090 - RNA, 19 nt, Artificial Sequence
  Description of Artificial Sequence: Synthetic oligonucleotide
cuccacgccagagccaaug

SEQ ID NO: 403091 - RNA, 19 nt, Artificial Sequence
  Description of Artificial Sequence: Synthetic oligonucleotide
gacgugcauuggucuauca

SEQ ID NO: 403092 - RNA, 19 nt, Artificial Sequence
  Description of Artificial Sequence: Synthetic oligonucleotide
uccagguuguuggcgccca

SEQ ID NO: 403093 - RNA, 19 nt, Artificial Sequence
  Description of Artificial Sequence: Synthetic oligonucleotide
gccauacgauccaucacag

SEQ ID NO: 403094 - RNA, 19 nt, Artificial Sequence
  Description of Artificial Sequence: Synthetic oligonucleotide
agggcccauacgcucuaca

SEQ ID NO: 403095 - RNA, 19 nt, Artificial Sequence
  Description of Artificial Sequence: Synthetic oligonucleotide
ccacguauguuaccucacc

SEQ ID NO: 403096 - RNA, 19 nt, Artificial Sequence
  Description of Artificial Sequence: Synthetic oligonucleotide
ggcaucaauaggcuguccu

SEQ ID NO: 403097 - RNA, 19 nt, Artificial Sequence
  Description of Artificial Sequence: Synthetic oligonucleotide
ggagcuccguugccgcucg

SEQ ID NO: 403098 - RNA, 19 nt, Artificial Sequence
  Description of Artificial Sequence: Synthetic oligonucleotide
gauugguauauggcucaaa

SEQ ID NO: 403099 - RNA, 19 nt, Artificial Sequence
  Description of Artificial Sequence: Synthetic oligonucleotide
acuuaggauuucauuuauu

SEQ ID NO: 403100 - RNA, 19 nt, Artificial Sequence
  Description of Artificial Sequence: Synthetic oligonucleotide
cccauacgcucaauggcag

SEQ ID NO: 403101 - RNA, 19 nt, Artificial Sequence
  Description of Artificial Sequence: Synthetic oligonucleotide
cuuaagcauuucuaucgau

SEQ ID NO: 403102 - RNA, 19 nt, Artificial Sequence
  Description of Artificial Sequence: Synthetic oligonucleotide
gguccuaaccccaugccaa

SEQ ID NO: 403103 - RNA, 19 nt, Artificial Sequence
  Description of Artificial Sequence: Synthetic oligonucleotide
cagcuccgccaaaggaacc

SEQ ID NO: 403104 - RNA, 19 nt, Artificial Sequence
  Description of Artificial Sequence: Synthetic oligonucleotide
ccauacgauccaucacagg

SEQ ID NO: 403105 - RNA, 19 nt, Artificial Sequence
  Description of Artificial Sequence: Synthetic oligonucleotide
accaugcgauccaugcuca

SEQ ID NO: 403106 - RNA, 19 nt, Artificial Sequence
  Description of Artificial Sequence: Synthetic oligonucleotide
gggcccauacgcucuacac

SEQ ID NO: 403107 - RNA, 19 nt, Artificial Sequence
  Description of Artificial Sequence: Synthetic oligonucleotide
caaugggcgcggccaugcg

SEQ ID NO: 403108 - RNA, 19 nt, Artificial Sequence
  Description of Artificial Sequence: Synthetic oligonucleotide
accacaccagccauacuaa

SEQ ID NO: 403109 - RNA, 19 nt, Artificial Sequence
  Description of Artificial Sequence: Synthetic oligonucleotide
ucaaagcgauugccuccuc

SEQ ID NO: 403110 - RNA, 19 nt, Artificial Sequence
  Description of Artificial Sequence: Synthetic oligonucleotide
ccgccaaugcggucaaugc

SEQ ID NO: 403111 - RNA, 19 nt, Artificial Sequence
  Description of Artificial Sequence: Synthetic oligonucleotide
cagcgcuacccauggccag

SEQ ID NO: 403112 - RNA, 19 nt, Artificial Sequence
  Description of Artificial Sequence: Synthetic oligonucleotide
cccauucgcucaaugccag

SEQ ID NO: 403113 - RNA, 19 nt, Artificial Sequence
  Description of Artificial Sequence: Synthetic oligonucleotide
ccauacgcucaauggcagg

SEQ ID NO: 403114 - RNA, 19 nt, Artificial Sequence
  Description of Artificial Sequence: Synthetic oligonucleotide
gggcccauacgcuccagac

SEQ ID NO: 403115 - RNA, 19 nt, Artificial Sequence
  Description of Artificial Sequence: Synthetic oligonucleotide
ccaaugcggucaaugccag

SEQ ID NO: 403116 - RNA, 19 nt, Artificial Sequence
  Description of Artificial Sequence: Synthetic oligonucleotide
gcgcccaugcgcuccaugc

SEQ ID NO: 403117 - RNA, 19 nt, Artificial Sequence
  Description of Artificial Sequence: Synthetic oligonucleotide
aucgccccauguuuuccau

SEQ ID NO: 403118 - RNA, 19 nt, Artificial Sequence
  Description of Artificial Sequence: Synthetic oligonucleotide
ugacgugcauuggucuauc

SEQ ID NO: 403119 - RNA, 19 nt, Artificial Sequence
  Description of Artificial Sequence: Synthetic oligonucleotide
gccauucaucauccggcag

SEQ ID NO: 403120 - RNA, 19 nt, Artificial Sequence
  Description of Artificial Sequence: Synthetic oligonucleotide
cgugcauuggucuaucaaa

SEQ ID NO: 403121 - RNA, 19 nt, Artificial Sequence
  Description of Artificial Sequence: Synthetic oligonucleotide
guuggucguucuccuucac

SEQ ID NO: 403122 - RNA, 19 nt, Artificial Sequence
  Description of Artificial Sequence: Synthetic oligonucleotide
acguggccacauucguuga

SEQ ID NO: 403123 - RNA, 19 nt, Artificial Sequence
  Description of Artificial Sequence: Synthetic oligonucleotide
cauguucaucccagaucca

SEQ ID NO: 403124 - RNA, 19 nt, Artificial Sequence
  Description of Artificial Sequence: Synthetic oligonucleotide
ucauucugaguuggucguu

SEQ ID NO: 403125 - RNA, 19 nt, Artificial Sequence
  Description of Artificial Sequence: Synthetic oligonucleotide
ccaugcucaggcccauacg

SEQ ID NO: 403126 - RNA, 19 nt, Artificial Sequence
  Description of Artificial Sequence: Synthetic oligonucleotide
cugucaaagcuagcaccuc

SEQ ID NO: 403127 - RNA, 19 nt, Artificial Sequence
  Description of Artificial Sequence: Synthetic oligonucleotide
augguuuggcccacucggu

SEQ ID NO: 403128 - RNA, 19 nt, Artificial Sequence
  Description of Artificial Sequence: Synthetic oligonucleotide
gcccauacgcucaaucuca

SEQ ID NO: 403129 - RNA, 19 nt, Artificial Sequence
  Description of Artificial Sequence: Synthetic oligonucleotide
gcccacucggucaaugggc

SEQ ID NO: 403130 - RNA, 19 nt, Artificial Sequence
  Description of Artificial Sequence: Synthetic oligonucleotide
gcccauacgcucaauggca

SEQ ID NO: 403131 - RNA, 19 nt, Artificial Sequence
  Description of Artificial Sequence: Synthetic oligonucleotide
gccuauuccacgacuuuuc

SEQ ID NO: 403132 - RNA, 19 nt, Artificial Sequence
  Description of Artificial Sequence: Synthetic oligonucleotide
augccggcacccaugcgcu

SEQ ID NO: 403133 - RNA, 19 nt, Artificial Sequence
  Description of Artificial Sequence: Synthetic oligonucleotide
ggccaguggccauacgauc

SEQ ID NO: 403134 - RNA, 19 nt, Artificial Sequence
  Description of Artificial Sequence: Synthetic oligonucleotide
gggcgcgccgcucucuucc

SEQ ID NO: 403135 - RNA, 19 nt, Artificial Sequence
  Description of Artificial Sequence: Synthetic oligonucleotide
cccauacgcucaaucucag

SEQ ID NO: 403136 - RNA, 19 nt, Artificial Sequence
  Description of Artificial Sequence: Synthetic oligonucleotide
caccccuuggacuuuccgu

SEQ ID NO: 403137 - RNA, 19 nt, Artificial Sequence
  Description of Artificial Sequence: Synthetic oligonucleotide
agggcgcgccgcucucuuc

SEQ ID NO: 403138 - RNA, 19 nt, Artificial Sequence
  Description of Artificial Sequence: Synthetic oligonucleotide
cugcucggaccaccacacc

SEQ ID NO: 403139 - RNA, 19 nt, Artificial Sequence
  Description of Artificial Sequence: Synthetic oligonucleotide
caugcgcuccaugccagca

SEQ ID NO: 403140 - RNA, 19 nt, Artificial Sequence
  Description of Artificial Sequence: Synthetic oligonucleotide
ucgccccauguuuuccaua

SEQ ID NO: 403141 - RNA, 19 nt, Artificial Sequence
  Description of Artificial Sequence: Synthetic oligonucleotide
gucugguauugauguuuaa

SEQ ID NO: 403142 - RNA, 19 nt, Artificial Sequence
  Description of Artificial Sequence: Synthetic oligonucleotide
guaaggcccucucauccau

SEQ ID NO: 403143 - RNA, 19 nt, Artificial Sequence
  Description of Artificial Sequence: Synthetic oligonucleotide
caccucuggagacucaaau

SEQ ID NO: 403144 - RNA, 19 nt, Artificial Sequence
  Description of Artificial Sequence: Synthetic oligonucleotide
cauguggucaagaccuauu

SEQ ID NO: 403145 - RNA, 19 nt, Artificial Sequence
  Description of Artificial Sequence: Synthetic oligonucleotide
cugcgaagcuuccuccaaa

SEQ ID NO: 403146 - RNA, 19 nt, Artificial Sequence
  Description of Artificial Sequence: Synthetic oligonucleotide
cuguuggcucccaugcgcu

SEQ ID NO: 403147 - RNA, 19 nt, Artificial Sequence
  Description of Artificial Sequence: Synthetic oligonucleotide
ugcgcucuacugagcccau

SEQ ID NO: 403148 - RNA, 19 nt, Artificial Sequence
  Description of Artificial Sequence: Synthetic oligonucleotide
cacgacuuuucccaucuuu

SEQ ID NO: 403149 - RNA, 19 nt, Artificial Sequence
  Description of Artificial Sequence: Synthetic oligonucleotide
ggucguucaggagggaaaa

SEQ ID NO: 403150 - RNA, 19 nt, Artificial Sequence
  Description of Artificial Sequence: Synthetic oligonucleotide
cgauucgaacaucaaucuc

SEQ ID NO: 403151 - RNA, 19 nt, Artificial Sequence
  Description of Artificial Sequence: Synthetic oligonucleotide
ucucgaucccugggacacu

SEQ ID NO: 403152 - RNA, 19 nt, Artificial Sequence
  Description of Artificial Sequence: Synthetic oligonucleotide
gcccauucgcucaaugcca

SEQ ID NO: 403153 - RNA, 19 nt, Artificial Sequence
  Description of Artificial Sequence: Synthetic oligonucleotide
ccuauugggcccaugcggu

SEQ ID NO: 403154 - RNA, 19 nt, Artificial Sequence
  Description of Artificial Sequence: Synthetic oligonucleotide
cuguuggcgcccauucgcu

SEQ ID NO: 403155 - RNA, 19 nt, Artificial Sequence
  Description of Artificial Sequence: Synthetic oligonucleotide
gcgcucaauacuggaggcc

SEQ ID NO: 403156 - RNA, 19 nt, Artificial Sequence
  Description of Artificial Sequence: Synthetic oligonucleotide
ccaugcgcucaaugguuug

SEQ ID NO: 403157 - RNA, 19 nt, Artificial Sequence
  Description of Artificial Sequence: Synthetic oligonucleotide
ggcccaugcgcucaauacu

SEQ ID NO: 403158 - RNA, 19 nt, Artificial Sequence
  Description of Artificial Sequence: Synthetic oligonucleotide
cuucggccgccgcuucgac

SEQ ID NO: 403159 - RNA, 19 nt, Artificial Sequence
  Description of Artificial Sequence: Synthetic oligonucleotide
gcuccguugccgcucggca

SEQ ID NO: 403160 - RNA, 19 nt, Artificial Sequence
  Description of Artificial Sequence: Synthetic oligonucleotide
ccagcgcuacccauggcca

SEQ ID NO: 403161 - RNA, 19 nt, Artificial Sequence
  Description of Artificial Sequence: Synthetic oligonucleotide
caucauccggcaggcucuc

SEQ ID NO: 403162 - RNA, 19 nt, Artificial Sequence
  Description of Artificial Sequence: Synthetic oligonucleotide
cugggcccauggccgggcc

SEQ ID NO: 403163 - RNA, 19 nt, Artificial Sequence
  Description of Artificial Sequence: Synthetic oligonucleotide
gcuccacguauguuaccuc

SEQ ID NO: 403164 - RNA, 19 nt, Artificial Sequence
  Description of Artificial Sequence: Synthetic oligonucleotide
gagcuccguugccgcucgg

SEQ ID NO: 403165 - RNA, 19 nt, Artificial Sequence
  Description of Artificial Sequence: Synthetic oligonucleotide
cccauacgcucuacaccag

SEQ ID NO: 403166 - RNA, 19 nt, Artificial Sequence
  Description of Artificial Sequence: Synthetic oligonucleotide
ccaugcgcucaauacugga

SEQ ID NO: 403167 - RNA, 19 nt, Artificial Sequence
  Description of Artificial Sequence: Synthetic oligonucleotide
ccuggcuacuccaggugca

SEQ ID NO: 403168 - RNA, 19 nt, Artificial Sequence
  Description of Artificial Sequence: Synthetic oligonucleotide
cagugccuauuccacgacu

SEQ ID NO: 403169 - RNA, 19 nt, Artificial Sequence
  Description of Artificial Sequence: Synthetic oligonucleotide
ccauuaagagcuccacgua

SEQ ID NO: 403170 - RNA, 19 nt, Artificial Sequence
  Description of Artificial Sequence: Synthetic oligonucleotide
ccaugcgauccaugcucag

SEQ ID NO: 403171 - RNA, 19 nt, Artificial Sequence
  Description of Artificial Sequence: Synthetic oligonucleotide
cccaugcgcucuacugagc

SEQ ID NO: 403172 - RNA, 19 nt, Artificial Sequence
  Description of Artificial Sequence: Synthetic oligonucleotide
ccauacgcucuacaccaga

SEQ ID NO: 403173 - RNA, 19 nt, Artificial Sequence
  Description of Artificial Sequence: Synthetic oligonucleotide
gcacauccccuugacuuuc

SEQ ID NO: 403174 - RNA, 19 nt, Artificial Sequence
  Description of Artificial Sequence: Synthetic oligonucleotide
guccuaaccccaugccaau

SEQ ID NO: 403175 - RNA, 19 nt, Artificial Sequence
  Description of Artificial Sequence: Synthetic oligonucleotide
gccauacuaaauacuuccu

SEQ ID NO: 403176 - RNA, 19 nt, Artificial Sequence
  Description of Artificial Sequence: Synthetic oligonucleotide
gcgcacauugcaaucucaa

SEQ ID NO: 403177 - RNA, 19 nt, Artificial Sequence
  Description of Artificial Sequence: Synthetic oligonucleotide
cgauccaucacagggccca

SEQ ID NO: 403178 - RNA, 19 nt, Artificial Sequence
  Description of Artificial Sequence: Synthetic oligonucleotide
ggcccauacgcuccagacu

SEQ ID NO: 403179 - RNA, 19 nt, Artificial Sequence
  Description of Artificial Sequence: Synthetic oligonucleotide
gcuccgccaaaggaaccug

SEQ ID NO: 403180 - RNA, 19 nt, Artificial Sequence
  Description of Artificial Sequence: Synthetic oligonucleotide
gugccuauuccacgacuuu

SEQ ID NO: 403181 - RNA, 19 nt, Artificial Sequence
  Description of Artificial Sequence: Synthetic oligonucleotide
caccgcaccccuuggacuu

SEQ ID NO: 403182 - RNA, 19 nt, Artificial Sequence
  Description of Artificial Sequence: Synthetic oligonucleotide
ccauggccgggcccauacg

SEQ ID NO: 403183 - RNA, 19 nt, Artificial Sequence
  Description of Artificial Sequence: Synthetic oligonucleotide
aucauccggcaggcucucu

SEQ ID NO: 403184 - RNA, 19 nt, Artificial Sequence
  Description of Artificial Sequence: Synthetic oligonucleotide
ccauacgcucaaucucaga

SEQ ID NO: 403185 - RNA, 19 nt, Artificial Sequence
  Description of Artificial Sequence: Synthetic oligonucleotide
ugccggcacccaugcgcuc

SEQ ID NO: 403186 - RNA, 19 nt, Artificial Sequence
  Description of Artificial Sequence: Synthetic oligonucleotide
gcuagcaccuccagcgcua

SEQ ID NO: 403187 - RNA, 19 nt, Artificial Sequence
  Description of Artificial Sequence: Synthetic oligonucleotide
ccucucgaucccugggaca

SEQ ID NO: 403188 - RNA, 19 nt, Artificial Sequence
  Description of Artificial Sequence: Synthetic oligonucleotide
gcgaagcuuccuccaaagu

SEQ ID NO: 403189 - RNA, 19 nt, Artificial Sequence
  Description of Artificial Sequence: Synthetic oligonucleotide
ggaaccugcgaagcuuccu

SEQ ID NO: 403190 - RNA, 19 nt, Artificial Sequence
  Description of Artificial Sequence: Synthetic oligonucleotide
gcgcuacccauggccaggc

SEQ ID NO: 403191 - RNA, 19 nt, Artificial Sequence
  Description of Artificial Sequence: Synthetic oligonucleotide
gcucugucgcugccacuuc

SEQ ID NO: 403192 - RNA, 19 nt, Artificial Sequence
  Description of Artificial Sequence: Synthetic oligonucleotide
ggcccaugcgcuccagacu

SEQ ID NO: 403193 - RNA, 19 nt, Artificial Sequence
  Description of Artificial Sequence: Synthetic oligonucleotide
gucuggcccaugcgcucaa

SEQ ID NO: 403194 - RNA, 19 nt, Artificial Sequence
  Description of Artificial Sequence: Synthetic oligonucleotide
cggucaaugggcgcggcca

SEQ ID NO: 403195 - RNA, 19 nt, Artificial Sequence
  Description of Artificial Sequence: Synthetic oligonucleotide
ccauuccugcaggcccuag

SEQ ID NO: 403196 - RNA, 19 nt, Artificial Sequence
  Description of Artificial Sequence: Synthetic oligonucleotide
gcgcccaaugcugggccca

SEQ ID NO: 403197 - RNA, 19 nt, Artificial Sequence
  Description of Artificial Sequence: Synthetic oligonucleotide
caccuccagcgcuacccau

SEQ ID NO: 403198 - RNA, 19 nt, Artificial Sequence
  Description of Artificial Sequence: Synthetic oligonucleotide
gcgcucuacugagcccaug

SEQ ID NO: 403199 - RNA, 19 nt, Artificial Sequence
  Description of Artificial Sequence: Synthetic oligonucleotide
gcccaugcgcucaaugguu

SEQ ID NO: 403200 - RNA, 19 nt, Artificial Sequence
  Description of Artificial Sequence: Synthetic oligonucleotide
cgcacauugcaaucucaau

SEQ ID NO: 403201 - RNA, 19 nt, Artificial Sequence
  Description of Artificial Sequence: Synthetic oligonucleotide
gcucaauacuggaggccau

SEQ ID NO: 403202 - RNA, 19 nt, Artificial Sequence
  Description of Artificial Sequence: Synthetic oligonucleotide
cccaugcgcucaaugguuu

SEQ ID NO: 403203 - RNA, 19 nt, Artificial Sequence
  Description of Artificial Sequence: Synthetic oligonucleotide
ccguugccgcucggcacgc

SEQ ID NO: 403204 - RNA, 19 nt, Artificial Sequence
  Description of Artificial Sequence: Synthetic oligonucleotide
cguggccacauucguugaa

SEQ ID NO: 403205 - RNA, 19 nt, Artificial Sequence
  Description of Artificial Sequence: Synthetic oligonucleotide
ccaugcgcuccacgccaga

SEQ ID NO: 403206 - RNA, 19 nt, Artificial Sequence
  Description of Artificial Sequence: Synthetic oligonucleotide
cgaaagucacagugccuau

SEQ ID NO: 403207 - RNA, 19 nt, Artificial Sequence
  Description of Artificial Sequence: Synthetic oligonucleotide
ccgccgcuucgaccccugc

SEQ ID NO: 403208 - RNA, 19 nt, Artificial Sequence
  Description of Artificial Sequence: Synthetic oligonucleotide
cccauacgcuccagacugu

SEQ ID NO: 403209 - RNA, 19 nt, Artificial Sequence
  Description of Artificial Sequence: Synthetic oligonucleotide
ccggcacccaugcgcucca

SEQ ID NO: 403210 - RNA, 19 nt, Artificial Sequence
  Description of Artificial Sequence: Synthetic oligonucleotide
gcacgcagggcgcgccgcu

SEQ ID NO: 403211 - RNA, 19 nt, Artificial Sequence
  Description of Artificial Sequence: Synthetic oligonucleotide
ccauacgcuccagacuguu

SEQ ID NO: 403212 - RNA, 19 nt, Artificial Sequence
  Description of Artificial Sequence: Synthetic oligonucleotide
gcgcggccaugcgcuccag

SEQ ID NO: 403213 - RNA, 19 nt, Artificial Sequence
  Description of Artificial Sequence: Synthetic oligonucleotide
ccaugcgcuccagacuguu

SEQ ID NO: 403214 - RNA, 19 nt, Artificial Sequence
  Description of Artificial Sequence: Synthetic oligonucleotide
ccacgacuuuucccaucuu

SEQ ID NO: 403215 - RNA, 19 nt, Artificial Sequence
  Description of Artificial Sequence: Synthetic oligonucleotide
cugcgcccaugcgcuccau

SEQ ID NO: 403216 - RNA, 19 nt, Artificial Sequence
  Description of Artificial Sequence: Synthetic oligonucleotide
aacaccacgcuguuguucc

SEQ ID NO: 403217 - RNA, 19 nt, Artificial Sequence
  Description of Artificial Sequence: Synthetic oligonucleotide
cauuuuacuuccuuaagcc

SEQ ID NO: 403218 - RNA, 19 nt, Artificial Sequence
  Description of Artificial Sequence: Synthetic oligonucleotide
aauaugaugaggucugagu

SEQ ID NO: 403219 - RNA, 19 nt, Artificial Sequence
  Description of Artificial Sequence: Synthetic oligonucleotide
cuuacauuggaucugcagc

SEQ ID NO: 403220 - RNA, 19 nt, Artificial Sequence
  Description of Artificial Sequence: Synthetic oligonucleotide
acacgaacagcuuacauug

SEQ ID NO: 403221 - RNA, 19 nt, Artificial Sequence
  Description of Artificial Sequence: Synthetic oligonucleotide
aguucgaacugucacugcc

SEQ ID NO: 403222 - RNA, 19 nt, Artificial Sequence
  Description of Artificial Sequence: Synthetic oligonucleotide
auagacaccaccaugaugu

SEQ ID NO: 403223 - RNA, 19 nt, Artificial Sequence
  Description of Artificial Sequence: Synthetic oligonucleotide
caucaagucagcucaaccc

SEQ ID NO: 403224 - RNA, 19 nt, Artificial Sequence
  Description of Artificial Sequence: Synthetic oligonucleotide
aacaagaggcauuagucau

SEQ ID NO: 403225 - RNA, 19 nt, Artificial Sequence
  Description of Artificial Sequence: Synthetic oligonucleotide
ugcguagucucccugcugg

SEQ ID NO: 403226 - RNA, 19 nt, Artificial Sequence
  Description of Artificial Sequence: Synthetic oligonucleotide
ucuucguucgccagguccg

SEQ ID NO: 403227 - RNA, 19 nt, Artificial Sequence
  Description of Artificial Sequence: Synthetic oligonucleotide
ugugacaagugucaaugug

SEQ ID NO: 403228 - RNA, 19 nt, Artificial Sequence
  Description of Artificial Sequence: Synthetic oligonucleotide
uagauggucaaucaccuaa

SEQ ID NO: 403229 - RNA, 19 nt, Artificial Sequence
  Description of Artificial Sequence: Synthetic oligonucleotide
ucaaacacgaacagcuuac

SEQ ID NO: 403230 - RNA, 19 nt, Artificial Sequence
  Description of Artificial Sequence: Synthetic oligonucleotide
cugcucaucaauaugauga

SEQ ID NO: 403231 - RNA, 19 nt, Artificial Sequence
  Description of Artificial Sequence: Synthetic oligonucleotide
gaugcggaugcucuuuucg

SEQ ID NO: 403232 - RNA, 19 nt, Artificial Sequence
  Description of Artificial Sequence: Synthetic oligonucleotide
auguggacccgguagagcg

SEQ ID NO: 403233 - RNA, 19 nt, Artificial Sequence
  Description of Artificial Sequence: Synthetic oligonucleotide
aacacgaacagcuuacauu

SEQ ID NO: 403234 - RNA, 19 nt, Artificial Sequence
  Description of Artificial Sequence: Synthetic oligonucleotide
gaaaucaaaagaccuugac

SEQ ID NO: 403235 - RNA, 19 nt, Artificial Sequence
  Description of Artificial Sequence: Synthetic oligonucleotide
aagccaagccaucagaaau

SEQ ID NO: 403236 - RNA, 19 nt, Artificial Sequence
  Description of Artificial Sequence: Synthetic oligonucleotide
acuguaacgugccaucguc

SEQ ID NO: 403237 - RNA, 19 nt, Artificial Sequence
  Description of Artificial Sequence: Synthetic oligonucleotide
uguguuagagaggaugucc

SEQ ID NO: 403238 - RNA, 19 nt, Artificial Sequence
  Description of Artificial Sequence: Synthetic oligonucleotide
cucugcguguguuagagag

SEQ ID NO: 403239 - RNA, 19 nt, Artificial Sequence
  Description of Artificial Sequence: Synthetic oligonucleotide
gggacgauggcucagaccc

SEQ ID NO: 403240 - RNA, 19 nt, Artificial Sequence
  Description of Artificial Sequence: Synthetic oligonucleotide
cuggccgaaaucaaaagac

SEQ ID NO: 403241 - RNA, 19 nt, Artificial Sequence
  Description of Artificial Sequence: Synthetic oligonucleotide
uguaacgugccaucgucag

SEQ ID NO: 403242 - RNA, 19 nt, Artificial Sequence
  Description of Artificial Sequence: Synthetic oligonucleotide
caaugcugcguacaguugg

SEQ ID NO: 403243 - RNA, 19 nt, Artificial Sequence
  Description of Artificial Sequence: Synthetic oligonucleotide
acauuucaaucuuacauaa

SEQ ID NO: 403244 - RNA, 19 nt, Artificial Sequence
  Description of Artificial Sequence: Synthetic oligonucleotide
ucaaucuuacauaaauguu

SEQ ID NO: 403245 - RNA, 19 nt, Artificial Sequence
  Description of Artificial Sequence: Synthetic oligonucleotide
uuucgaucggaggagggcg

SEQ ID NO: 403246 - RNA, 19 nt, Artificial Sequence
  Description of Artificial Sequence: Synthetic oligonucleotide
gaacaagaggcauuaguca

SEQ ID NO: 403247 - RNA, 19 nt, Artificial Sequence
  Description of Artificial Sequence: Synthetic oligonucleotide
agcucaacccacaagcagc

SEQ ID NO: 403248 - RNA, 19 nt, Artificial Sequence
  Description of Artificial Sequence: Synthetic oligonucleotide
uuugcaggcucccuuugcc

SEQ ID NO: 403249 - RNA, 19 nt, Artificial Sequence
  Description of Artificial Sequence: Synthetic oligonucleotide
aaccuagggagucaccgug

SEQ ID NO: 403250 - RNA, 19 nt, Artificial Sequence
  Description of Artificial Sequence: Synthetic oligonucleotide
aaugcugcguacaguuggc

SEQ ID NO: 403251 - RNA, 19 nt, Artificial Sequence
  Description of Artificial Sequence: Synthetic oligonucleotide
caaaccuagggagucaccg

SEQ ID NO: 403252 - RNA, 19 nt, Artificial Sequence
  Description of Artificial Sequence: Synthetic oligonucleotide
aucaagucagcucaaccca

SEQ ID NO: 403253 - RNA, 19 nt, Artificial Sequence
  Description of Artificial Sequence: Synthetic oligonucleotide
ucuuccccuguuaugaccu

SEQ ID NO: 403254 - RNA, 19 nt, Artificial Sequence
  Description of Artificial Sequence: Synthetic oligonucleotide
augcggaugcucuuuucgc

SEQ ID NO: 403255 - RNA, 19 nt, Artificial Sequence
  Description of Artificial Sequence: Synthetic oligonucleotide
ucggacagacgacaaagca

SEQ ID NO: 403256 - RNA, 19 nt, Artificial Sequence
  Description of Artificial Sequence: Synthetic oligonucleotide
aaaugaacaagaggcauua

SEQ ID NO: 403257 - RNA, 19 nt, Artificial Sequence
  Description of Artificial Sequence: Synthetic oligonucleotide
ucggcauucucauucauua

SEQ ID NO: 403258 - RNA, 19 nt, Artificial Sequence
  Description of Artificial Sequence: Synthetic oligonucleotide
ugauguacugcagaaagua

SEQ ID NO: 403259 - RNA, 19 nt, Artificial Sequence
  Description of Artificial Sequence: Synthetic oligonucleotide
ucaacccacaagcagcuuc

SEQ ID NO: 403260 - RNA, 19 nt, Artificial Sequence
  Description of Artificial Sequence: Synthetic oligonucleotide
uggccgaaaucaaaagacc

SEQ ID NO: 403261 - RNA, 19 nt, Artificial Sequence
  Description of Artificial Sequence: Synthetic oligonucleotide
aguugaagccaugucauug

SEQ ID NO: 403262 - RNA, 19 nt, Artificial Sequence
  Description of Artificial Sequence: Synthetic oligonucleotide
ugccguuucgaucggagga

SEQ ID NO: 403263 - RNA, 19 nt, Artificial Sequence
  Description of Artificial Sequence: Synthetic oligonucleotide
uaugcgguggugcaaugcu

SEQ ID NO: 403264 - RNA, 19 nt, Artificial Sequence
  Description of Artificial Sequence: Synthetic oligonucleotide
cacaucggcauucucauuc

SEQ ID NO: 403265 - RNA, 19 nt, Artificial Sequence
  Description of Artificial Sequence: Synthetic oligonucleotide
ugagcccagaguucgaacu

SEQ ID NO: 403266 - RNA, 19 nt, Artificial Sequence
  Description of Artificial Sequence: Synthetic oligonucleotide
ugcaaugcugcguacaguu

SEQ ID NO: 403267 - RNA, 19 nt, Artificial Sequence
  Description of Artificial Sequence: Synthetic oligonucleotide
ucugcguguguuagagagg

SEQ ID NO: 403268 - RNA, 19 nt, Artificial Sequence
  Description of Artificial Sequence: Synthetic oligonucleotide
ugugccguuucgaucggag

SEQ ID NO: 403269 - RNA, 19 nt, Artificial Sequence
  Description of Artificial Sequence: Synthetic oligonucleotide
gauguacugcagaaaguag

SEQ ID NO: 403270 - RNA, 19 nt, Artificial Sequence
  Description of Artificial Sequence: Synthetic oligonucleotide
gacacccugguccucggcg

SEQ ID NO: 403271 - RNA, 19 nt, Artificial Sequence
  Description of Artificial Sequence: Synthetic oligonucleotide
aaacacgaacagcuuacau

SEQ ID NO: 403272 - RNA, 19 nt, Artificial Sequence
  Description of Artificial Sequence: Synthetic oligonucleotide
auguggaguuuucugaagu

SEQ ID NO: 403273 - RNA, 19 nt, Artificial Sequence
  Description of Artificial Sequence: Synthetic oligonucleotide
guguuagagaggauguccg

SEQ ID NO: 403274 - RNA, 19 nt, Artificial Sequence
  Description of Artificial Sequence: Synthetic oligonucleotide
gagguuuucuggugaugcg

SEQ ID NO: 403275 - RNA, 19 nt, Artificial Sequence
  Description of Artificial Sequence: Synthetic oligonucleotide
auugagccggagaaguccc

SEQ ID NO: 403276 - RNA, 19 nt, Artificial Sequence
  Description of Artificial Sequence: Synthetic oligonucleotide
uucgaacugucacugccca

SEQ ID NO: 403277 - RNA, 19 nt, Artificial Sequence
  Description of Artificial Sequence: Synthetic oligonucleotide
aaaccuagggagucaccgu

SEQ ID NO: 403278 - RNA, 19 nt, Artificial Sequence
  Description of Artificial Sequence: Synthetic oligonucleotide
agaguucgaacugucacug

SEQ ID NO: 403279 - RNA, 19 nt, Artificial Sequence
  Description of Artificial Sequence: Synthetic oligonucleotide
agaaaguaguugguugcgg

SEQ ID NO: 403280 - RNA, 19 nt, Artificial Sequence
  Description of Artificial Sequence: Synthetic oligonucleotide
ucaccuaagggcugugcug

SEQ ID NO: 403281 - RNA, 19 nt, Artificial Sequence
  Description of Artificial Sequence: Synthetic oligonucleotide
gucacuugucacuggcugg

SEQ ID NO: 403282 - RNA, 19 nt, Artificial Sequence
  Description of Artificial Sequence: Synthetic oligonucleotide
cuacgcagggccaguaugc

SEQ ID NO: 403283 - RNA, 19 nt, Artificial Sequence
  Description of Artificial Sequence: Synthetic oligonucleotide
cauugagccggagaagucc

SEQ ID NO: 403284 - RNA, 19 nt, Artificial Sequence
  Description of Artificial Sequence: Synthetic oligonucleotide
ucaaugugccguuucgauc

SEQ ID NO: 403285 - RNA, 19 nt, Artificial Sequence
  Description of Artificial Sequence: Synthetic oligonucleotide
cacacugaccccauuggug

SEQ ID NO: 403286 - RNA, 19 nt, Artificial Sequence
  Description of Artificial Sequence: Synthetic oligonucleotide
cuuccuuaagcccucccac

SEQ ID NO: 403287 - RNA, 19 nt, Artificial Sequence
  Description of Artificial Sequence: Synthetic oligonucleotide
ccauuuuacuuccuuaagc

SEQ ID NO: 403288 - RNA, 19 nt, Artificial Sequence
  Description of Artificial Sequence: Synthetic oligonucleotide
aggcuuuucuucguucgcc

SEQ ID NO: 403289 - RNA, 19 nt, Artificial Sequence
  Description of Artificial Sequence: Synthetic oligonucleotide
aggcauuagucauguggac

SEQ ID NO: 403290 - RNA, 19 nt, Artificial Sequence
  Description of Artificial Sequence: Synthetic oligonucleotide
acuuccuuaagcccuccca

SEQ ID NO: 403291 - RNA, 19 nt, Artificial Sequence
  Description of Artificial Sequence: Synthetic oligonucleotide
uccucugcguguguuagag

SEQ ID NO: 403292 - RNA, 19 nt, Artificial Sequence
  Description of Artificial Sequence: Synthetic oligonucleotide
uggcacacugaccccauug

SEQ ID NO: 403293 - RNA, 19 nt, Artificial Sequence
  Description of Artificial Sequence: Synthetic oligonucleotide
ugcuaugugcucccaggug

SEQ ID NO: 403294 - RNA, 19 nt, Artificial Sequence
  Description of Artificial Sequence: Synthetic oligonucleotide
agucgggacuguaacgugc

SEQ ID NO: 403295 - RNA, 19 nt, Artificial Sequence
  Description of Artificial Sequence: Synthetic oligonucleotide
cauucauuaacuucacucu

SEQ ID NO: 403296 - RNA, 19 nt, Artificial Sequence
  Description of Artificial Sequence: Synthetic oligonucleotide
agcacugugggucgaguug

SEQ ID NO: 403297 - RNA, 19 nt, Artificial Sequence
  Description of Artificial Sequence: Synthetic oligonucleotide
accagucgggacuguaacg

SEQ ID NO: 403298 - RNA, 19 nt, Artificial Sequence
  Description of Artificial Sequence: Synthetic oligonucleotide
acgaacagcuuacauugga

SEQ ID NO: 403299 - RNA, 19 nt, Artificial Sequence
  Description of Artificial Sequence: Synthetic oligonucleotide
uaugcagcgcugucuacac

SEQ ID NO: 403300 - RNA, 19 nt, Artificial Sequence
  Description of Artificial Sequence: Synthetic oligonucleotide
guaugcguagucucccugc

SEQ ID NO: 403301 - RNA, 19 nt, Artificial Sequence
  Description of Artificial Sequence: Synthetic oligonucleotide
uaugcguagucucccugcu

SEQ ID NO: 403302 - RNA, 19 nt, Artificial Sequence
  Description of Artificial Sequence: Synthetic oligonucleotide
uguccgcucacgcuugaca

SEQ ID NO: 403303 - RNA, 19 nt, Artificial Sequence
  Description of Artificial Sequence: Synthetic oligonucleotide
uguggacccgguagagcgg

SEQ ID NO: 403304 - RNA, 19 nt, Artificial Sequence
  Description of Artificial Sequence: Synthetic oligonucleotide
gugaggucuugucaaacac

SEQ ID NO: 403305 - RNA, 19 nt, Artificial Sequence
  Description of Artificial Sequence: Synthetic oligonucleotide
ucuuccgcccaaugacagg

SEQ ID NO: 403306 - RNA, 19 nt, Artificial Sequence
  Description of Artificial Sequence: Synthetic oligonucleotide
gaguugucugcaccggagc

SEQ ID NO: 403307 - RNA, 19 nt, Artificial Sequence
  Description of Artificial Sequence: Synthetic oligonucleotide
aucggacagacgacaaagc

SEQ ID NO: 403308 - RNA, 19 nt, Artificial Sequence
  Description of Artificial Sequence: Synthetic oligonucleotide
ugcagcacguugcuuucug

SEQ ID NO: 403309 - RNA, 19 nt, Artificial Sequence
  Description of Artificial Sequence: Synthetic oligonucleotide
agagaggauguccgcucac

SEQ ID NO: 403310 - RNA, 19 nt, Artificial Sequence
  Description of Artificial Sequence: Synthetic oligonucleotide
cucagcccgacuacgcagg

SEQ ID NO: 403311 - RNA, 19 nt, Artificial Sequence
  Description of Artificial Sequence: Synthetic oligonucleotide
gccaucgucaguugaagcc

SEQ ID NO: 403312 - RNA, 19 nt, Artificial Sequence
  Description of Artificial Sequence: Synthetic oligonucleotide
agcuggccgaaaucaaaag

SEQ ID NO: 403313 - RNA, 19 nt, Artificial Sequence
  Description of Artificial Sequence: Synthetic oligonucleotide
gagaggauguccgcucacg

SEQ ID NO: 403314 - RNA, 19 nt, Artificial Sequence
  Description of Artificial Sequence: Synthetic oligonucleotide
gaaaguaguugguugcggu

SEQ ID NO: 403315 - RNA, 19 nt, Artificial Sequence
  Description of Artificial Sequence: Synthetic oligonucleotide
ugcugcguacaguuggcca

SEQ ID NO: 403316 - RNA, 19 nt, Artificial Sequence
  Description of Artificial Sequence: Synthetic oligonucleotide
cccuagauggucaaucacc

SEQ ID NO: 403317 - RNA, 19 nt, Artificial Sequence
  Description of Artificial Sequence: Synthetic oligonucleotide
gcugcuaugugcucccagg

SEQ ID NO: 403318 - RNA, 19 nt, Artificial Sequence
  Description of Artificial Sequence: Synthetic oligonucleotide
ggucgaguugucugcaccg

SEQ ID NO: 403319 - RNA, 19 nt, Artificial Sequence
  Description of Artificial Sequence: Synthetic oligonucleotide
gcuuacauuggaucugcag

SEQ ID NO: 403320 - RNA, 19 nt, Artificial Sequence
  Description of Artificial Sequence: Synthetic oligonucleotide
ccucaaguauguuuguccc

SEQ ID NO: 403321 - RNA, 19 nt, Artificial Sequence
  Description of Artificial Sequence: Synthetic oligonucleotide
ggggcaucaagucagcuca

SEQ ID NO: 403322 - RNA, 19 nt, Artificial Sequence
  Description of Artificial Sequence: Synthetic oligonucleotide
gaacacugagcccagaguu

SEQ ID NO: 403323 - RNA, 19 nt, Artificial Sequence
  Description of Artificial Sequence: Synthetic oligonucleotide
agcacguugcuuucugccu

SEQ ID NO: 403324 - RNA, 19 nt, Artificial Sequence
  Description of Artificial Sequence: Synthetic oligonucleotide
caauaugaugaggucugag

SEQ ID NO: 403325 - RNA, 19 nt, Artificial Sequence
  Description of Artificial Sequence: Synthetic oligonucleotide
ggugcaaugcugcguacag

SEQ ID NO: 403326 - RNA, 19 nt, Artificial Sequence
  Description of Artificial Sequence: Synthetic oligonucleotide
aggauguccgcucacgcuu

SEQ ID NO: 403327 - RNA, 19 nt, Artificial Sequence
  Description of Artificial Sequence: Synthetic oligonucleotide
ugccaucgucaguugaagc

SEQ ID NO: 403328 - RNA, 19 nt, Artificial Sequence
  Description of Artificial Sequence: Synthetic oligonucleotide
cuuagagagcaggugagca

SEQ ID NO: 403329 - RNA, 19 nt, Artificial Sequence
  Description of Artificial Sequence: Synthetic oligonucleotide
uguggccuagccagagaug

SEQ ID NO: 403330 - RNA, 19 nt, Artificial Sequence
  Description of Artificial Sequence: Synthetic oligonucleotide
auaugcagcgcugucuaca

SEQ ID NO: 403331 - RNA, 19 nt, Artificial Sequence
  Description of Artificial Sequence: Synthetic oligonucleotide
ugagccgcaagcugcccug

SEQ ID NO: 403332 - RNA, 19 nt, Artificial Sequence
  Description of Artificial Sequence: Synthetic oligonucleotide
cagcucaacccacaagcag

SEQ ID NO: 403333 - RNA, 19 nt, Artificial Sequence
  Description of Artificial Sequence: Synthetic oligonucleotide
ucauugagccggagaaguc

SEQ ID NO: 403334 - RNA, 19 nt, Artificial Sequence
  Description of Artificial Sequence: Synthetic oligonucleotide
gcaauagacaccaccauga

SEQ ID NO: 403335 - RNA, 19 nt, Artificial Sequence
  Description of Artificial Sequence: Synthetic oligonucleotide
ugcaguucucaaauacauu

SEQ ID NO: 403336 - RNA, 19 nt, Artificial Sequence
  Description of Artificial Sequence: Synthetic oligonucleotide
ucgaguugucugcaccgga

SEQ ID NO: 403337 - RNA, 19 nt, Artificial Sequence
  Description of Artificial Sequence: Synthetic oligonucleotide
ugucaaugugccguuucga

SEQ ID NO: 403338 - RNA, 19 nt, Artificial Sequence
  Description of Artificial Sequence: Synthetic oligonucleotide
ugcggugggcgucucugag

SEQ ID NO: 403339 - RNA, 19 nt, Artificial Sequence
  Description of Artificial Sequence: Synthetic oligonucleotide
ucagcccgacuacgcaggg

SEQ ID NO: 403340 - RNA, 19 nt, Artificial Sequence
  Description of Artificial Sequence: Synthetic oligonucleotide
uacgcagggccaguaugcg

SEQ ID NO: 403341 - RNA, 19 nt, Artificial Sequence
  Description of Artificial Sequence: Synthetic oligonucleotide
cuugcuggcuccccgggug

SEQ ID NO: 403342 - RNA, 19 nt, Artificial Sequence
  Description of Artificial Sequence: Synthetic oligonucleotide
uccguggcggugaugcgga

SEQ ID NO: 403343 - RNA, 19 nt, Artificial Sequence
  Description of Artificial Sequence: Synthetic oligonucleotide
augcaguucucaaauacau

SEQ ID NO: 403344 - RNA, 19 nt, Artificial Sequence
  Description of Artificial Sequence: Synthetic oligonucleotide
ggaaauguucuuucugcuc

SEQ ID NO: 403345 - RNA, 19 nt, Artificial Sequence
  Description of Artificial Sequence: Synthetic oligonucleotide
guuucgaucggaggagggc

SEQ ID NO: 403346 - RNA, 19 nt, Artificial Sequence
  Description of Artificial Sequence: Synthetic oligonucleotide
uggguaugcguagucuccc

SEQ ID NO: 403347 - RNA, 19 nt, Artificial Sequence
  Description of Artificial Sequence: Synthetic oligonucleotide
ucgucaguugaagccaugu

SEQ ID NO: 403348 - RNA, 19 nt, Artificial Sequence
  Description of Artificial Sequence: Synthetic oligonucleotide
gcaucaagucagcucaacc

SEQ ID NO: 403349 - RNA, 19 nt, Artificial Sequence
  Description of Artificial Sequence: Synthetic oligonucleotide
acaucggcauucucauuca

SEQ ID NO: 403350 - RNA, 19 nt, Artificial Sequence
  Description of Artificial Sequence: Synthetic oligonucleotide
ugggacgauggcucagacc

SEQ ID NO: 403351 - RNA, 19 nt, Artificial Sequence
  Description of Artificial Sequence: Synthetic oligonucleotide
ucacgcuugacaggagggc

SEQ ID NO: 403352 - RNA, 19 nt, Artificial Sequence
  Description of Artificial Sequence: Synthetic oligonucleotide
gcugcguacaguuggccag

SEQ ID NO: 403353 - RNA, 19 nt, Artificial Sequence
  Description of Artificial Sequence: Synthetic oligonucleotide
acaagaggcauuagucaug

SEQ ID NO: 403354 - RNA, 19 nt, Artificial Sequence
  Description of Artificial Sequence: Synthetic oligonucleotide
guccgcaucaccagucggg

SEQ ID NO: 403355 - RNA, 19 nt, Artificial Sequence
  Description of Artificial Sequence: Synthetic oligonucleotide
guucgaacugucacugccc

SEQ ID NO: 403356 - RNA, 19 nt, Artificial Sequence
  Description of Artificial Sequence: Synthetic oligonucleotide
agccaucagaaaugaacaa

SEQ ID NO: 403357 - RNA, 19 nt, Artificial Sequence
  Description of Artificial Sequence: Synthetic oligonucleotide
augcagcgcugucuacacc

SEQ ID NO: 403358 - RNA, 19 nt, Artificial Sequence
  Description of Artificial Sequence: Synthetic oligonucleotide
agccaagccaucagaaaug

SEQ ID NO: 403359 - RNA, 19 nt, Artificial Sequence
  Description of Artificial Sequence: Synthetic oligonucleotide
gugccguuucgaucggagg

SEQ ID NO: 403360 - RNA, 19 nt, Artificial Sequence
  Description of Artificial Sequence: Synthetic oligonucleotide
gacguggcugguccugugc

SEQ ID NO: 403361 - RNA, 19 nt, Artificial Sequence
  Description of Artificial Sequence: Synthetic oligonucleotide
aagccgcauccuggcaucc

SEQ ID NO: 403362 - RNA, 19 nt, Artificial Sequence
  Description of Artificial Sequence: Synthetic oligonucleotide
gaguucgaacugucacugc

SEQ ID NO: 403363 - RNA, 19 nt, Artificial Sequence
  Description of Artificial Sequence: Synthetic oligonucleotide
ucggccagugacucuuucu

SEQ ID NO: 403364 - RNA, 19 nt, Artificial Sequence
  Description of Artificial Sequence: Synthetic oligonucleotide
uccgccauuuuacuuccuu

SEQ ID NO: 403365 - RNA, 19 nt, Artificial Sequence
  Description of Artificial Sequence: Synthetic oligonucleotide
cuaugugcucccagguguc

SEQ ID NO: 403366 - RNA, 19 nt, Artificial Sequence
  Description of Artificial Sequence: Synthetic oligonucleotide
aucuuccgcccaaugacag

SEQ ID NO: 403367 - RNA, 19 nt, Artificial Sequence
  Description of Artificial Sequence: Synthetic oligonucleotide
gucccaagccgcauccugg

SEQ ID NO: 403368 - RNA, 19 nt, Artificial Sequence
  Description of Artificial Sequence: Synthetic oligonucleotide
caccagucgggacuguaac

SEQ ID NO: 403369 - RNA, 19 nt, Artificial Sequence
  Description of Artificial Sequence: Synthetic oligonucleotide
gaccccauuggugccacug

SEQ ID NO: 403370 - RNA, 19 nt, Artificial Sequence
  Description of Artificial Sequence: Synthetic oligonucleotide
ccgaaaucaaaagaccuug

SEQ ID NO: 403371 - RNA, 19 nt, Artificial Sequence
  Description of Artificial Sequence: Synthetic oligonucleotide
gggcgcgucaccuucuucc

SEQ ID NO: 403372 - RNA, 19 nt, Artificial Sequence
  Description of Artificial Sequence: Synthetic oligonucleotide
gugugagguuuucugguga

SEQ ID NO: 403373 - RNA, 19 nt, Artificial Sequence
  Description of Artificial Sequence: Synthetic oligonucleotide
uaguuuccauccucauggu

SEQ ID NO: 403374 - RNA, 19 nt, Artificial Sequence
  Description of Artificial Sequence: Synthetic oligonucleotide
acccugacuggguaugcgu

SEQ ID NO: 403375 - RNA, 19 nt, Artificial Sequence
  Description of Artificial Sequence: Synthetic oligonucleotide
agcacagccgggcggagaa

SEQ ID NO: 403376 - RNA, 19 nt, Artificial Sequence
  Description of Artificial Sequence: Synthetic oligonucleotide
uggguccgcaucaccaguc

SEQ ID NO: 403377 - RNA, 19 nt, Artificial Sequence
  Description of Artificial Sequence: Synthetic oligonucleotide
augagccgcaagcugcccu

SEQ ID NO: 403378 - RNA, 19 nt, Artificial Sequence
  Description of Artificial Sequence: Synthetic oligonucleotide
aguaugcgguggugcaaug

SEQ ID NO: 403379 - RNA, 19 nt, Artificial Sequence
  Description of Artificial Sequence: Synthetic oligonucleotide
gagaaguccccggccacgc

SEQ ID NO: 403380 - RNA, 19 nt, Artificial Sequence
  Description of Artificial Sequence: Synthetic oligonucleotide
gucgaguugucugcaccgg

SEQ ID NO: 403381 - RNA, 19 nt, Artificial Sequence
  Description of Artificial Sequence: Synthetic oligonucleotide
cuggcuaaggcuggaagca

SEQ ID NO: 403382 - RNA, 19 nt, Artificial Sequence
  Description of Artificial Sequence: Synthetic oligonucleotide
guugcggugggcgucucug

SEQ ID NO: 403383 - RNA, 19 nt, Artificial Sequence
  Description of Artificial Sequence: Synthetic oligonucleotide
gcguguguuagagaggaug

SEQ ID NO: 403384 - RNA, 19 nt, Artificial Sequence
  Description of Artificial Sequence: Synthetic oligonucleotide
guaugcgguggugcaaugc

SEQ ID NO: 403385 - RNA, 19 nt, Artificial Sequence
  Description of Artificial Sequence: Synthetic oligonucleotide
guccguggcggugaugcgg

SEQ ID NO: 403386 - RNA, 19 nt, Artificial Sequence
  Description of Artificial Sequence: Synthetic oligonucleotide
acguggcugguccugugca

SEQ ID NO: 403387 - RNA, 19 nt, Artificial Sequence
  Description of Artificial Sequence: Synthetic oligonucleotide
accuagggagucaccgugg

SEQ ID NO: 403388 - RNA, 19 nt, Artificial Sequence
  Description of Artificial Sequence: Synthetic oligonucleotide
gcuggccgaaaucaaaaga

SEQ ID NO: 403389 - RNA, 19 nt, Artificial Sequence
  Description of Artificial Sequence: Synthetic oligonucleotide
guggacccgguagagcggg

SEQ ID NO: 403390 - RNA, 19 nt, Artificial Sequence
  Description of Artificial Sequence: Synthetic oligonucleotide
ggacuguaacgugccaucg

SEQ ID NO: 403391 - RNA, 19 nt, Artificial Sequence
  Description of Artificial Sequence: Synthetic oligonucleotide
cuguaacgugccaucguca

SEQ ID NO: 403392 - RNA, 19 nt, Artificial Sequence
  Description of Artificial Sequence: Synthetic oligonucleotide
caagccgcauccuggcauc

SEQ ID NO: 403393 - RNA, 19 nt, Artificial Sequence
  Description of Artificial Sequence: Synthetic oligonucleotide
gaagccgagcagacagcag

SEQ ID NO: 403394 - RNA, 19 nt, Artificial Sequence
  Description of Artificial Sequence: Synthetic oligonucleotide
gguaugcguagucucccug

SEQ ID NO: 403395 - RNA, 19 nt, Artificial Sequence
  Description of Artificial Sequence: Synthetic oligonucleotide
gucaaucaccuaagggcug

SEQ ID NO: 403396 - RNA, 19 nt, Artificial Sequence
  Description of Artificial Sequence: Synthetic oligonucleotide
cauuggaucugcagcacgu

SEQ ID NO: 403397 - RNA, 19 nt, Artificial Sequence
  Description of Artificial Sequence: Synthetic oligonucleotide
gagcuggccgaaaucaaaa

SEQ ID NO: 403398 - RNA, 19 nt, Artificial Sequence
  Description of Artificial Sequence: Synthetic oligonucleotide
ccggacgcugcccacaggg

SEQ ID NO: 403399 - RNA, 19 nt, Artificial Sequence
  Description of Artificial Sequence: Synthetic oligonucleotide
augcguagucucccugcug

SEQ ID NO: 403400 - RNA, 19 nt, Artificial Sequence
  Description of Artificial Sequence: Synthetic oligonucleotide
guuagagaggauguccgcu

SEQ ID NO: 403401 - RNA, 19 nt, Artificial Sequence
  Description of Artificial Sequence: Synthetic oligonucleotide
gucaaugugccguuucgau

SEQ ID NO: 403402 - RNA, 19 nt, Artificial Sequence
  Description of Artificial Sequence: Synthetic oligonucleotide
cagucgggacuguaacgug

SEQ ID NO: 403403 - RNA, 19 nt, Artificial Sequence
  Description of Artificial Sequence: Synthetic oligonucleotide
gcucagcccgacuacgcag

SEQ ID NO: 403404 - RNA, 19 nt, Artificial Sequence
  Description of Artificial Sequence: Synthetic oligonucleotide
gguggugcaaugcugcgua

SEQ ID NO: 403405 - RNA, 19 nt, Artificial Sequence
  Description of Artificial Sequence: Synthetic oligonucleotide
acgugccaucgucaguuga

SEQ ID NO: 403406 - RNA, 19 nt, Artificial Sequence
  Description of Artificial Sequence: Synthetic oligonucleotide
gagggacgggcaucggaca

SEQ ID NO: 403407 - RNA, 19 nt, Artificial Sequence
  Description of Artificial Sequence: Synthetic oligonucleotide
ucgggacuguaacgugcca

SEQ ID NO: 403408 - RNA, 19 nt, Artificial Sequence
  Description of Artificial Sequence: Synthetic oligonucleotide
cuccucaaguauguuuguc

SEQ ID NO: 403409 - RNA, 19 nt, Artificial Sequence
  Description of Artificial Sequence: Synthetic oligonucleotide
caccggagcugauguacug

SEQ ID NO: 403410 - RNA, 19 nt, Artificial Sequence
  Description of Artificial Sequence: Synthetic oligonucleotide
ccugacuggguaugcguag

SEQ ID NO: 403411 - RNA, 19 nt, Artificial Sequence
  Description of Artificial Sequence: Synthetic oligonucleotide
gacuguaacgugccaucgu

SEQ ID NO: 403412 - RNA, 19 nt, Artificial Sequence
  Description of Artificial Sequence: Synthetic oligonucleotide
acggauggugcaacagcag

SEQ ID NO: 403413 - RNA, 19 nt, Artificial Sequence
  Description of Artificial Sequence: Synthetic oligonucleotide
cccuguuaugaccuccacc

SEQ ID NO: 403414 - RNA, 19 nt, Artificial Sequence
  Description of Artificial Sequence: Synthetic oligonucleotide
uucgccagguccgccauuu

SEQ ID NO: 403415 - RNA, 19 nt, Artificial Sequence
  Description of Artificial Sequence: Synthetic oligonucleotide
ggguccgcaucaccagucg

SEQ ID NO: 403416 - RNA, 19 nt, Artificial Sequence
  Description of Artificial Sequence: Synthetic oligonucleotide
ugggucgaguugucugcac

SEQ ID NO: 403417 - RNA, 19 nt, Artificial Sequence
  Description of Artificial Sequence: Synthetic oligonucleotide
ccuagggagucaccguggg

SEQ ID NO: 403418 - RNA, 19 nt, Artificial Sequence
  Description of Artificial Sequence: Synthetic oligonucleotide
gggaccgucugugacagca

SEQ ID NO: 403419 - RNA, 19 nt, Artificial Sequence
  Description of Artificial Sequence: Synthetic oligonucleotide
ggggugucaucuuccgccc

SEQ ID NO: 403420 - RNA, 19 nt, Artificial Sequence
  Description of Artificial Sequence: Synthetic oligonucleotide
ggagggacgggcaucggac

SEQ ID NO: 403421 - RNA, 19 nt, Artificial Sequence
  Description of Artificial Sequence: Synthetic oligonucleotide
cugauguacugcagaaagu

SEQ ID NO: 403422 - RNA, 19 nt, Artificial Sequence
  Description of Artificial Sequence: Synthetic oligonucleotide
acugaccccauuggugcca

SEQ ID NO: 403423 - RNA, 19 nt, Artificial Sequence
  Description of Artificial Sequence: Synthetic oligonucleotide
uugcggugggcgucucuga

SEQ ID NO: 403424 - RNA, 19 nt, Artificial Sequence
  Description of Artificial Sequence: Synthetic oligonucleotide
gggacacguggauccagcc

SEQ ID NO: 403425 - RNA, 19 nt, Artificial Sequence
  Description of Artificial Sequence: Synthetic oligonucleotide
caaacacgaacagcuuaca

SEQ ID NO: 403426 - RNA, 19 nt, Artificial Sequence
  Description of Artificial Sequence: Synthetic oligonucleotide
guaguugguugcggugggc

SEQ ID NO: 403427 - RNA, 19 nt, Artificial Sequence
  Description of Artificial Sequence: Synthetic oligonucleotide
cacgcuugacaggagggca

SEQ ID NO: 403428 - RNA, 19 nt, Artificial Sequence
  Description of Artificial Sequence: Synthetic oligonucleotide
cuucguucgccagguccgc

SEQ ID NO: 403429 - RNA, 19 nt, Artificial Sequence
  Description of Artificial Sequence: Synthetic oligonucleotide
acagccgggcggagaacac

SEQ ID NO: 403430 - RNA, 19 nt, Artificial Sequence
  Description of Artificial Sequence: Synthetic oligonucleotide
gucugcaccggagcugaug

SEQ ID NO: 403431 - RNA, 19 nt, Artificial Sequence
  Description of Artificial Sequence: Synthetic oligonucleotide
gaugcggacguggcugguc

SEQ ID NO: 403432 - RNA, 19 nt, Artificial Sequence
  Description of Artificial Sequence: Synthetic oligonucleotide
ugcguacaguuggccagug

SEQ ID NO: 403433 - RNA, 19 nt, Artificial Sequence
  Description of Artificial Sequence: Synthetic oligonucleotide
cugcacugggcgccuggcc

SEQ ID NO: 403434 - RNA, 19 nt, Artificial Sequence
  Description of Artificial Sequence: Synthetic oligonucleotide
uucguucgccagguccgcc

SEQ ID NO: 403435 - RNA, 19 nt, Artificial Sequence
  Description of Artificial Sequence: Synthetic oligonucleotide
gcuuagagagcaggugagc

SEQ ID NO: 403436 - RNA, 19 nt, Artificial Sequence
  Description of Artificial Sequence: Synthetic oligonucleotide
ggcccuagauggucaauca

SEQ ID NO: 403437 - RNA, 19 nt, Artificial Sequence
  Description of Artificial Sequence: Synthetic oligonucleotide
gccguuucgaucggaggag

SEQ ID NO: 403438 - RNA, 19 nt, Artificial Sequence
  Description of Artificial Sequence: Synthetic oligonucleotide
cgaguugucugcaccggag

SEQ ID NO: 403439 - RNA, 19 nt, Artificial Sequence
  Description of Artificial Sequence: Synthetic oligonucleotide
gcacguugcuuucugccuc

SEQ ID NO: 403440 - RNA, 19 nt, Artificial Sequence
  Description of Artificial Sequence: Synthetic oligonucleotide
accuaagggcugugcugca

SEQ ID NO: 403441 - RNA, 19 nt, Artificial Sequence
  Description of Artificial Sequence: Synthetic oligonucleotide
ggaagccgagcagacagca

SEQ ID NO: 403442 - RNA, 19 nt, Artificial Sequence
  Description of Artificial Sequence: Synthetic oligonucleotide
gaucggaggagggcgggaa

SEQ ID NO: 403443 - RNA, 19 nt, Artificial Sequence
  Description of Artificial Sequence: Synthetic oligonucleotide
cccgugaccccugagggag

SEQ ID NO: 403444 - RNA, 19 nt, Artificial Sequence
  Description of Artificial Sequence: Synthetic oligonucleotide
ugucuacaccugccacauc

SEQ ID NO: 403445 - RNA, 19 nt, Artificial Sequence
  Description of Artificial Sequence: Synthetic oligonucleotide
augcgguggugcaaugcug

SEQ ID NO: 403446 - RNA, 19 nt, Artificial Sequence
  Description of Artificial Sequence: Synthetic oligonucleotide
cuagauggucaaucaccua

SEQ ID NO: 403447 - RNA, 19 nt, Artificial Sequence
  Description of Artificial Sequence: Synthetic oligonucleotide
gacuggguaugcguagucu

SEQ ID NO: 403448 - RNA, 19 nt, Artificial Sequence
  Description of Artificial Sequence: Synthetic oligonucleotide
accgucugugacagcaccu

SEQ ID NO: 403449 - RNA, 19 nt, Artificial Sequence
  Description of Artificial Sequence: Synthetic oligonucleotide
gccaguaugcgguggugca

SEQ ID NO: 403450 - RNA, 19 nt, Artificial Sequence
  Description of Artificial Sequence: Synthetic oligonucleotide
aggaacccuccugggcgcg

SEQ ID NO: 403451 - RNA, 19 nt, Artificial Sequence
  Description of Artificial Sequence: Synthetic oligonucleotide
ggccgaaaucaaaagaccu

SEQ ID NO: 403452 - RNA, 19 nt, Artificial Sequence
  Description of Artificial Sequence: Synthetic oligonucleotide
cguuucgaucggaggaggg

SEQ ID NO: 403453 - RNA, 19 nt, Artificial Sequence
  Description of Artificial Sequence: Synthetic oligonucleotide
gcccuagauggucaaucac

SEQ ID NO: 403454 - RNA, 19 nt, Artificial Sequence
  Description of Artificial Sequence: Synthetic oligonucleotide
ggccaguaugcgguggugc

SEQ ID NO: 403455 - RNA, 19 nt, Artificial Sequence
  Description of Artificial Sequence: Synthetic oligonucleotide
ggggcucaagacgcgcucg

SEQ ID NO: 403456 - RNA, 19 nt, Artificial Sequence
  Description of Artificial Sequence: Synthetic oligonucleotide
acaguuggccaguguccuu

SEQ ID NO: 403457 - RNA, 19 nt, Artificial Sequence
  Description of Artificial Sequence: Synthetic oligonucleotide
ccaaaccuagggagucacc

SEQ ID NO: 403458 - RNA, 19 nt, Artificial Sequence
  Description of Artificial Sequence: Synthetic oligonucleotide
ugcggacguggcugguccu

SEQ ID NO: 403459 - RNA, 19 nt, Artificial Sequence
  Description of Artificial Sequence: Synthetic oligonucleotide
cacagccgggcggagaaca

SEQ ID NO: 403460 - RNA, 19 nt, Artificial Sequence
  Description of Artificial Sequence: Synthetic oligonucleotide
cacguggauccagccugcg

SEQ ID NO: 403461 - RNA, 19 nt, Artificial Sequence
  Description of Artificial Sequence: Synthetic oligonucleotide
guagagcgggaagccgagc

SEQ ID NO: 403462 - RNA, 19 nt, Artificial Sequence
  Description of Artificial Sequence: Synthetic oligonucleotide
guaacgugccaucgucagu

SEQ ID NO: 403463 - RNA, 19 nt, Artificial Sequence
  Description of Artificial Sequence: Synthetic oligonucleotide
caaucaccuaagggcugug

SEQ ID NO: 403464 - RNA, 19 nt, Artificial Sequence
  Description of Artificial Sequence: Synthetic oligonucleotide
cagccgggcggagaacacc

SEQ ID NO: 403465 - RNA, 19 nt, Artificial Sequence
  Description of Artificial Sequence: Synthetic oligonucleotide
aucgucaguugaagccaug

SEQ ID NO: 403466 - RNA, 19 nt, Artificial Sequence
  Description of Artificial Sequence: Synthetic oligonucleotide
ugggcgcgucaccuucuuc

SEQ ID NO: 403467 - RNA, 19 nt, Artificial Sequence
  Description of Artificial Sequence: Synthetic oligonucleotide
gccggagaaguccccggcc

SEQ ID NO: 403468 - RNA, 19 nt, Artificial Sequence
  Description of Artificial Sequence: Synthetic oligonucleotide
gggcucaagacgcgcucgc

SEQ ID NO: 403469 - RNA, 19 nt, Artificial Sequence
  Description of Artificial Sequence: Synthetic oligonucleotide
caauagacaccaccaugau

SEQ ID NO: 403470 - RNA, 19 nt, Artificial Sequence
  Description of Artificial Sequence: Synthetic oligonucleotide
acccuccugggcgcgucac

SEQ ID NO: 403471 - RNA, 19 nt, Artificial Sequence
  Description of Artificial Sequence: Synthetic oligonucleotide
ggcaucaagucagcucaac

SEQ ID NO: 403472 - RNA, 19 nt, Artificial Sequence
  Description of Artificial Sequence: Synthetic oligonucleotide
cugaccccauuggugccac

SEQ ID NO: 403473 - RNA, 19 nt, Artificial Sequence
  Description of Artificial Sequence: Synthetic oligonucleotide
caugggcaaugucuggagu

SEQ ID NO: 403474 - RNA, 19 nt, Artificial Sequence
  Description of Artificial Sequence: Synthetic oligonucleotide
gggcccuagauggucaauc

SEQ ID NO: 403475 - RNA, 19 nt, Artificial Sequence
  Description of Artificial Sequence: Synthetic oligonucleotide
ccaucgucaguugaagcca

SEQ ID NO: 403476 - RNA, 19 nt, Artificial Sequence
  Description of Artificial Sequence: Synthetic oligonucleotide
gacgggcaucggacagacg

SEQ ID NO: 403477 - RNA, 19 nt, Artificial Sequence
  Description of Artificial Sequence: Synthetic oligonucleotide
ggacgggcaucggacagac

SEQ ID NO: 403478 - RNA, 19 nt, Artificial Sequence
  Description of Artificial Sequence: Synthetic oligonucleotide
cuggaacacaaagacggau

SEQ ID NO: 403479 - RNA, 19 nt, Artificial Sequence
  Description of Artificial Sequence: Synthetic oligonucleotide
agcuuacauuggaucugca

SEQ ID NO: 403480 - RNA, 19 nt, Artificial Sequence
  Description of Artificial Sequence: Synthetic oligonucleotide
ggauccagccugcggccac

SEQ ID NO: 403481 - RNA, 19 nt, Artificial Sequence
  Description of Artificial Sequence: Synthetic oligonucleotide
ggcccaaaccuagggaguc

SEQ ID NO: 403482 - RNA, 19 nt, Artificial Sequence
  Description of Artificial Sequence: Synthetic oligonucleotide
gugggucgaguugucugca

SEQ ID NO: 403483 - RNA, 19 nt, Artificial Sequence
  Description of Artificial Sequence: Synthetic oligonucleotide
gccuagccagagauggagc

SEQ ID NO: 403484 - RNA, 19 nt, Artificial Sequence
  Description of Artificial Sequence: Synthetic oligonucleotide
gccacaucggcauucucau

SEQ ID NO: 403485 - RNA, 19 nt, Artificial Sequence
  Description of Artificial Sequence: Synthetic oligonucleotide
cuucagccggaagccgcug

SEQ ID NO: 403486 - RNA, 19 nt, Artificial Sequence
  Description of Artificial Sequence: Synthetic oligonucleotide
gcggugggcgucucugagc

SEQ ID NO: 403487 - RNA, 19 nt, Artificial Sequence
  Description of Artificial Sequence: Synthetic oligonucleotide
ccgcaagcugcccuggguc

SEQ ID NO: 403488 - RNA, 19 nt, Artificial Sequence
  Description of Artificial Sequence: Synthetic oligonucleotide
caccuucucuagcaaacau

SEQ ID NO: 403489 - RNA, 19 nt, Artificial Sequence
  Description of Artificial Sequence: Synthetic oligonucleotide
gcggagaacaccacgcugu

SEQ ID NO: 403490 - RNA, 19 nt, Artificial Sequence
  Description of Artificial Sequence: Synthetic oligonucleotide
caagugucaaugugccguu

SEQ ID NO: 403491 - RNA, 19 nt, Artificial Sequence
  Description of Artificial Sequence: Synthetic oligonucleotide
aggucuugucaaacacgaa

SEQ ID NO: 403492 - RNA, 19 nt, Artificial Sequence
  Description of Artificial Sequence: Synthetic oligonucleotide
ccguuucgaucggaggagg

SEQ ID NO: 403493 - RNA, 19 nt, Artificial Sequence
  Description of Artificial Sequence: Synthetic oligonucleotide
ggccggacgcugcccacag

SEQ ID NO: 403494 - RNA, 19 nt, Artificial Sequence
  Description of Artificial Sequence: Synthetic oligonucleotide
gcguagucucccugcuggc

SEQ ID NO: 403495 - RNA, 19 nt, Artificial Sequence
  Description of Artificial Sequence: Synthetic oligonucleotide
cacccugguccucggcguc

SEQ ID NO: 403496 - RNA, 19 nt, Artificial Sequence
  Description of Artificial Sequence: Synthetic oligonucleotide
ggacacguggauccagccu

SEQ ID NO: 403497 - RNA, 19 nt, Artificial Sequence
  Description of Artificial Sequence: Synthetic oligonucleotide
cagcccgacuacgcagggc

SEQ ID NO: 403498 - RNA, 19 nt, Artificial Sequence
  Description of Artificial Sequence: Synthetic oligonucleotide
cacguugcuuucugccucu

SEQ ID NO: 403499 - RNA, 19 nt, Artificial Sequence
  Description of Artificial Sequence: Synthetic oligonucleotide
gggaagccgagcagacagc

SEQ ID NO: 403500 - RNA, 19 nt, Artificial Sequence
  Description of Artificial Sequence: Synthetic oligonucleotide
ggcgggaaauguucuuucu

SEQ ID NO: 403501 - RNA, 19 nt, Artificial Sequence
  Description of Artificial Sequence: Synthetic oligonucleotide
acgcuccacccaugacugu

SEQ ID NO: 403502 - RNA, 19 nt, Artificial Sequence
  Description of Artificial Sequence: Synthetic oligonucleotide
gcggccaccccggcaauag

SEQ ID NO: 403503 - RNA, 19 nt, Artificial Sequence
  Description of Artificial Sequence: Synthetic oligonucleotide
agaccugcacugggcgccu

SEQ ID NO: 403504 - RNA, 19 nt, Artificial Sequence
  Description of Artificial Sequence: Synthetic oligonucleotide
augugccguuucgaucgga

SEQ ID NO: 403505 - RNA, 19 nt, Artificial Sequence
  Description of Artificial Sequence: Synthetic oligonucleotide
cacugagcccagaguucga

SEQ ID NO: 403506 - RNA, 19 nt, Artificial Sequence
  Description of Artificial Sequence: Synthetic oligonucleotide
cucggcguccguggcggug

SEQ ID NO: 403507 - RNA, 19 nt, Artificial Sequence
  Description of Artificial Sequence: Synthetic oligonucleotide
cuaaggcuggaagcagugu

SEQ ID NO: 403508 - RNA, 19 nt, Artificial Sequence
  Description of Artificial Sequence: Synthetic oligonucleotide
gcgcgucaccuucuuccag

SEQ ID NO: 403509 - RNA, 19 nt, Artificial Sequence
  Description of Artificial Sequence: Synthetic oligonucleotide
gcgcucgcucauguucugg

SEQ ID NO: 403510 - RNA, 19 nt, Artificial Sequence
  Description of Artificial Sequence: Synthetic oligonucleotide
cugacuggguaugcguagu

SEQ ID NO: 403511 - RNA, 19 nt, Artificial Sequence
  Description of Artificial Sequence: Synthetic oligonucleotide
ccucgguggcccguggggc

SEQ ID NO: 403512 - RNA, 19 nt, Artificial Sequence
  Description of Artificial Sequence: Synthetic oligonucleotide
ucgccagguccgccauuuu

SEQ ID NO: 403513 - RNA, 19 nt, Artificial Sequence
  Description of Artificial Sequence: Synthetic oligonucleotide
cuggguccgcaucaccagu

SEQ ID NO: 403514 - RNA, 19 nt, Artificial Sequence
  Description of Artificial Sequence: Synthetic oligonucleotide
cgguagagcgggaagccga

SEQ ID NO: 403515 - RNA, 19 nt, Artificial Sequence
  Description of Artificial Sequence: Synthetic oligonucleotide
gcggcugacucggccagug

SEQ ID NO: 403516 - RNA, 19 nt, Artificial Sequence
  Description of Artificial Sequence: Synthetic oligonucleotide
ccagucgggacuguaacgu

SEQ ID NO: 403517 - RNA, 19 nt, Artificial Sequence
  Description of Artificial Sequence: Synthetic oligonucleotide
cccgacuacgcagggccag

SEQ ID NO: 403518 - RNA, 19 nt, Artificial Sequence
  Description of Artificial Sequence: Synthetic oligonucleotide
gccaccccggcaauagaca

SEQ ID NO: 403519 - RNA, 19 nt, Artificial Sequence
  Description of Artificial Sequence: Synthetic oligonucleotide
gccgaaaucaaaagaccuu

SEQ ID NO: 403520 - RNA, 19 nt, Artificial Sequence
  Description of Artificial Sequence: Synthetic oligonucleotide
ggaccgucugugacagcac

SEQ ID NO: 403521 - RNA, 19 nt, Artificial Sequence
  Description of Artificial Sequence: Synthetic oligonucleotide
cagguccgccauuuuacuu

SEQ ID NO: 403522 - RNA, 19 nt, Artificial Sequence
  Description of Artificial Sequence: Synthetic oligonucleotide
gggugucaucuuccgccca

SEQ ID NO: 403523 - RNA, 19 nt, Artificial Sequence
  Description of Artificial Sequence: Synthetic oligonucleotide
ggugggcgucucugagcug

SEQ ID NO: 403524 - RNA, 19 nt, Artificial Sequence
  Description of Artificial Sequence: Synthetic oligonucleotide
uccccggguguggccuagc

SEQ ID NO: 403525 - RNA, 19 nt, Artificial Sequence
  Description of Artificial Sequence: Synthetic oligonucleotide
cuccccggguguggccuag

SEQ ID NO: 403526 - RNA, 19 nt, Artificial Sequence
  Description of Artificial Sequence: Synthetic oligonucleotide
ggagggcgggaaauguucu

SEQ ID NO: 403527 - RNA, 19 nt, Artificial Sequence
  Description of Artificial Sequence: Synthetic oligonucleotide
cccugacuggguaugcgua

SEQ ID NO: 403528 - RNA, 19 nt, Artificial Sequence
  Description of Artificial Sequence: Synthetic oligonucleotide
ggguaugcguagucucccu

SEQ ID NO: 403529 - RNA, 19 nt, Artificial Sequence
  Description of Artificial Sequence: Synthetic oligonucleotide
gcggacguggcugguccug

SEQ ID NO: 403530 - RNA, 19 nt, Artificial Sequence
  Description of Artificial Sequence: Synthetic oligonucleotide
agcggcugacucggccagu

SEQ ID NO: 403531 - RNA, 19 nt, Artificial Sequence
  Description of Artificial Sequence: Synthetic oligonucleotide
cuguuaugaccuccaccuu

SEQ ID NO: 403532 - RNA, 19 nt, Artificial Sequence
  Description of Artificial Sequence: Synthetic oligonucleotide
ccgcaucaccagucgggac

SEQ ID NO: 403533 - RNA, 19 nt, Artificial Sequence
  Description of Artificial Sequence: Synthetic oligonucleotide
ccccuguuaugaccuccac

SEQ ID NO: 403534 - RNA, 19 nt, Artificial Sequence
  Description of Artificial Sequence: Synthetic oligonucleotide
cgcaucaccagucgggacu

SEQ ID NO: 403535 - RNA, 19 nt, Artificial Sequence
  Description of Artificial Sequence: Synthetic oligonucleotide
ccggaagccgcugcucuuc

SEQ ID NO: 403536 - RNA, 19 nt, Artificial Sequence
  Description of Artificial Sequence: Synthetic oligonucleotide
gccggacgcugcccacagg

SEQ ID NO: 403537 - RNA, 19 nt, Artificial Sequence
  Description of Artificial Sequence: Synthetic oligonucleotide
cgaacagcuuacauuggau

SEQ ID NO: 403538 - RNA, 19 nt, Artificial Sequence
  Description of Artificial Sequence: Synthetic oligonucleotide
cggcuccgcugcuaugugc

SEQ ID NO: 403539 - RNA, 19 nt, Artificial Sequence
  Description of Artificial Sequence: Synthetic oligonucleotide
cugcguacaguuggccagu

SEQ ID NO: 403540 - RNA, 19 nt, Artificial Sequence
  Description of Artificial Sequence: Synthetic oligonucleotide
cagaccucuucuguccuuu

SEQ ID NO: 403541 - RNA, 19 nt, Artificial Sequence
  Description of Artificial Sequence: Synthetic oligonucleotide
ccuccucgguggcccgugg

SEQ ID NO: 403542 - RNA, 19 nt, Artificial Sequence
  Description of Artificial Sequence: Synthetic oligonucleotide
cagcacagccgggcggaga

SEQ ID NO: 403543 - RNA, 19 nt, Artificial Sequence
  Description of Artificial Sequence: Synthetic oligonucleotide
ccugggacgauggcucaga

SEQ ID NO: 403544 - RNA, 19 nt, Artificial Sequence
  Description of Artificial Sequence: Synthetic oligonucleotide
ccaagccgcauccuggcau

SEQ ID NO: 403545 - RNA, 19 nt, Artificial Sequence
  Description of Artificial Sequence: Synthetic oligonucleotide
cguccguggcggugaugcg

SEQ ID NO: 403546 - RNA, 19 nt, Artificial Sequence
  Description of Artificial Sequence: Synthetic oligonucleotide
ccucugcguguguuagaga

SEQ ID NO: 403547 - RNA, 19 nt, Artificial Sequence
  Description of Artificial Sequence: Synthetic oligonucleotide
guccccggccacgcuccac

SEQ ID NO: 403548 - RNA, 19 nt, Artificial Sequence
  Description of Artificial Sequence: Synthetic oligonucleotide
ccaguaugcgguggugcaa

SEQ ID NO: 403549 - RNA, 19 nt, Artificial Sequence
  Description of Artificial Sequence: Synthetic oligonucleotide
gccucucaggggcccuaga

SEQ ID NO: 403550 - RNA, 19 nt, Artificial Sequence
  Description of Artificial Sequence: Synthetic oligonucleotide
gcguacaguuggccagugu

SEQ ID NO: 403551 - RNA, 19 nt, Artificial Sequence
  Description of Artificial Sequence: Synthetic oligonucleotide
cccaagccgcauccuggca

SEQ ID NO: 403552 - RNA, 19 nt, Artificial Sequence
  Description of Artificial Sequence: Synthetic oligonucleotide
gggcaucaagucagcucaa

SEQ ID NO: 403553 - RNA, 19 nt, Artificial Sequence
  Description of Artificial Sequence: Synthetic oligonucleotide
gccugcggccaccccggca

SEQ ID NO: 403554 - RNA, 19 nt, Artificial Sequence
  Description of Artificial Sequence: Synthetic oligonucleotide
gguugcggugggcgucucu

SEQ ID NO: 403555 - RNA, 19 nt, Artificial Sequence
  Description of Artificial Sequence: Synthetic oligonucleotide
ggacgauggcucagacccu

SEQ ID NO: 403556 - RNA, 19 nt, Artificial Sequence
  Description of Artificial Sequence: Synthetic oligonucleotide
gcacagccgggcggagaac

SEQ ID NO: 403557 - RNA, 19 nt, Artificial Sequence
  Description of Artificial Sequence: Synthetic oligonucleotide
gggcgucucugagcuggga

SEQ ID NO: 403558 - RNA, 19 nt, Artificial Sequence
  Description of Artificial Sequence: Synthetic oligonucleotide
ggcguccguggcggugaug

SEQ ID NO: 403559 - RNA, 19 nt, Artificial Sequence
  Description of Artificial Sequence: Synthetic oligonucleotide
gcccgacuacgcagggcca

SEQ ID NO: 403560 - RNA, 19 nt, Artificial Sequence
  Description of Artificial Sequence: Synthetic oligonucleotide
ccgcccaaugacaggcccu

SEQ ID NO: 403561 - RNA, 19 nt, Artificial Sequence
  Description of Artificial Sequence: Synthetic oligonucleotide
cugggcgcgucaccuucuu

SEQ ID NO: 403562 - RNA, 19 nt, Artificial Sequence
  Description of Artificial Sequence: Synthetic oligonucleotide
caucaccagucgggacugu

SEQ ID NO: 403563 - RNA, 19 nt, Artificial Sequence
  Description of Artificial Sequence: Synthetic oligonucleotide
ccuugcuggcuccccgggu

SEQ ID NO: 403564 - RNA, 19 nt, Artificial Sequence
  Description of Artificial Sequence: Synthetic oligonucleotide
ccugggcgcgucaccuucu

SEQ ID NO: 403565 - RNA, 19 nt, Artificial Sequence
  Description of Artificial Sequence: Synthetic oligonucleotide
ggaacccuccugggcgcgu

SEQ ID NO: 403566 - RNA, 19 nt, Artificial Sequence
  Description of Artificial Sequence: Synthetic oligonucleotide
ccgucugugacagcaccuu

SEQ ID NO: 403567 - RNA, 19 nt, Artificial Sequence
  Description of Artificial Sequence: Synthetic oligonucleotide
ggggcccuagauggucaau

SEQ ID NO: 403568 - RNA, 19 nt, Artificial Sequence
  Description of Artificial Sequence: Synthetic oligonucleotide
ccacaucggcauucucauu

SEQ ID NO: 403569 - RNA, 19 nt, Artificial Sequence
  Description of Artificial Sequence: Synthetic oligonucleotide
ccgacuacgcagggccagu

SEQ ID NO: 403570 - RNA, 19 nt, Artificial Sequence
  Description of Artificial Sequence: Synthetic oligonucleotide
cgacuacgcagggccagua

SEQ ID NO: 403571 - RNA, 19 nt, Artificial Sequence
  Description of Artificial Sequence: Synthetic oligonucleotide
ccgugaccccugagggagu

SEQ ID NO: 403572 - RNA, 19 nt, Artificial Sequence
  Description of Artificial Sequence: Synthetic oligonucleotide
cggccaccccggcaauaga

SEQ ID NO: 403573 - RNA, 19 nt, Artificial Sequence
  Description of Artificial Sequence: Synthetic oligonucleotide
cgcucauguucuggccaaa

SEQ ID NO: 403574 - RNA, 19 nt, Artificial Sequence
  Description of Artificial Sequence: Synthetic oligonucleotide
gcccaaugacaggcccuuu

SEQ ID NO: 403575 - RNA, 19 nt, Artificial Sequence
  Description of Artificial Sequence: Synthetic oligonucleotide
ccucggcguccguggcggu

SEQ ID NO: 403576 - RNA, 19 nt, Artificial Sequence
  Description of Artificial Sequence: Synthetic oligonucleotide
cggcguccguggcggugau

SEQ ID NO: 403577 - RNA, 19 nt, Artificial Sequence
  Description of Artificial Sequence: Synthetic oligonucleotide
agugaauugguucagaagg

SEQ ID NO: 403578 - RNA, 19 nt, Artificial Sequence
  Description of Artificial Sequence: Synthetic oligonucleotide
auucguaacacucagucac

SEQ ID NO: 403579 - RNA, 19 nt, Artificial Sequence
  Description of Artificial Sequence: Synthetic oligonucleotide
ucugaagauaucaggaucg

SEQ ID NO: 403580 - RNA, 19 nt, Artificial Sequence
  Description of Artificial Sequence: Synthetic oligonucleotide
aaaaccuuugguucugacc

SEQ ID NO: 403581 - RNA, 19 nt, Artificial Sequence
  Description of Artificial Sequence: Synthetic oligonucleotide
uuuaacugggucauauccg

SEQ ID NO: 403582 - RNA, 19 nt, Artificial Sequence
  Description of Artificial Sequence: Synthetic oligonucleotide
acauucguaacacucaguc

SEQ ID NO: 403583 - RNA, 19 nt, Artificial Sequence
  Description of Artificial Sequence: Synthetic oligonucleotide
gauuuuauaucaaaccugc

SEQ ID NO: 403584 - RNA, 19 nt, Artificial Sequence
  Description of Artificial Sequence: Synthetic oligonucleotide
uggugaaaaguuuaacugg

SEQ ID NO: 403585 - RNA, 19 nt, Artificial Sequence
  Description of Artificial Sequence: Synthetic oligonucleotide
aggacaaaaccuuugguuc

SEQ ID NO: 403586 - RNA, 19 nt, Artificial Sequence
  Description of Artificial Sequence: Synthetic oligonucleotide
uaaccaauauaaacugucg

SEQ ID NO: 403587 - RNA, 19 nt, Artificial Sequence
  Description of Artificial Sequence: Synthetic oligonucleotide
uuaacugggucauauccgg

SEQ ID NO: 403588 - RNA, 19 nt, Artificial Sequence
  Description of Artificial Sequence: Synthetic oligonucleotide
aaaugguuagaucuaggcu

SEQ ID NO: 403589 - RNA, 19 nt, Artificial Sequence
  Description of Artificial Sequence: Synthetic oligonucleotide
agcucuguuaucuaacgcg

SEQ ID NO: 403590 - RNA, 19 nt, Artificial Sequence
  Description of Artificial Sequence: Synthetic oligonucleotide
acuaucuuauccuguaagg

SEQ ID NO: 403591 - RNA, 19 nt, Artificial Sequence
  Description of Artificial Sequence: Synthetic oligonucleotide
aucuaacgcguucauaacc

SEQ ID NO: 403592 - RNA, 19 nt, Artificial Sequence
  Description of Artificial Sequence: Synthetic oligonucleotide
gaagguguguuccggaucg

SEQ ID NO: 403593 - RNA, 19 nt, Artificial Sequence
  Description of Artificial Sequence: Synthetic oligonucleotide
ugguugaacaaauacuuug

SEQ ID NO: 403594 - RNA, 19 nt, Artificial Sequence
  Description of Artificial Sequence: Synthetic oligonucleotide
ucagucuaacgcuaugacg

SEQ ID NO: 403595 - RNA, 19 nt, Artificial Sequence
  Description of Artificial Sequence: Synthetic oligonucleotide
gacgccauuuauuuggucc

SEQ ID NO: 403596 - RNA, 19 nt, Artificial Sequence
  Description of Artificial Sequence: Synthetic oligonucleotide
ucuaacgcguucauaacca

SEQ ID NO: 403597 - RNA, 19 nt, Artificial Sequence
  Description of Artificial Sequence: Synthetic oligonucleotide
agaguaugaaaaugguuag

SEQ ID NO: 403598 - RNA, 19 nt, Artificial Sequence
  Description of Artificial Sequence: Synthetic oligonucleotide
aacacgaucaagccggcga

SEQ ID NO: 403599 - RNA, 19 nt, Artificial Sequence
  Description of Artificial Sequence: Synthetic oligonucleotide
uaugagcacaucaucuugc

SEQ ID NO: 403600 - RNA, 19 nt, Artificial Sequence
  Description of Artificial Sequence: Synthetic oligonucleotide
agucggcucagucuaacgc

SEQ ID NO: 403601 - RNA, 19 nt, Artificial Sequence
  Description of Artificial Sequence: Synthetic oligonucleotide
uuuacaugguuucgggcag

SEQ ID NO: 403602 - RNA, 19 nt, Artificial Sequence
  Description of Artificial Sequence: Synthetic oligonucleotide
ucuucuauuuggacauccg

SEQ ID NO: 403603 - RNA, 19 nt, Artificial Sequence
  Description of Artificial Sequence: Synthetic oligonucleotide
cuuuucugcuaaauggacc

SEQ ID NO: 403604 - RNA, 19 nt, Artificial Sequence
  Description of Artificial Sequence: Synthetic oligonucleotide
uuauuugguccauaaguac

SEQ ID NO: 403605 - RNA, 19 nt, Artificial Sequence
  Description of Artificial Sequence: Synthetic oligonucleotide
ugacauucguaacacucag

SEQ ID NO: 403606 - RNA, 19 nt, Artificial Sequence
  Description of Artificial Sequence: Synthetic oligonucleotide
ugacgaaguccauugcugg

SEQ ID NO: 403607 - RNA, 19 nt, Artificial Sequence
  Description of Artificial Sequence: Synthetic oligonucleotide
agaauguugaucaguaaag

SEQ ID NO: 403608 - RNA, 19 nt, Artificial Sequence
  Description of Artificial Sequence: Synthetic oligonucleotide
aguggagauacgcuuaaug

SEQ ID NO: 403609 - RNA, 19 nt, Artificial Sequence
  Description of Artificial Sequence: Synthetic oligonucleotide
cuugcuagcacaaacguaa

SEQ ID NO: 403610 - RNA, 19 nt, Artificial Sequence
  Description of Artificial Sequence: Synthetic oligonucleotide
uggcuugcuagcacaaacg

SEQ ID NO: 403611 - RNA, 19 nt, Artificial Sequence
  Description of Artificial Sequence: Synthetic oligonucleotide
ucauauccgguugacuucg

SEQ ID NO: 403612 - RNA, 19 nt, Artificial Sequence
  Description of Artificial Sequence: Synthetic oligonucleotide
uucgucggaaucaacuaug

SEQ ID NO: 403613 - RNA, 19 nt, Artificial Sequence
  Description of Artificial Sequence: Synthetic oligonucleotide
gagguuagcagccgaagug

SEQ ID NO: 403614 - RNA, 19 nt, Artificial Sequence
  Description of Artificial Sequence: Synthetic oligonucleotide
ggaaaacagacuugcauag

SEQ ID NO: 403615 - RNA, 19 nt, Artificial Sequence
  Description of Artificial Sequence: Synthetic oligonucleotide
agcuaaggcuauuuacagg

SEQ ID NO: 403616 - RNA, 19 nt, Artificial Sequence
  Description of Artificial Sequence: Synthetic oligonucleotide
aaaugguucuacacugguc

SEQ ID NO: 403617 - RNA, 19 nt, Artificial Sequence
  Description of Artificial Sequence: Synthetic oligonucleotide
cacuaucuuauccuguaag

SEQ ID NO: 403618 - RNA, 19 nt, Artificial Sequence
  Description of Artificial Sequence: Synthetic oligonucleotide
agugacgaaguccauugcu

SEQ ID NO: 403619 - RNA, 19 nt, Artificial Sequence
  Description of Artificial Sequence: Synthetic oligonucleotide
agacgaugcagugaauugg

SEQ ID NO: 403620 - RNA, 19 nt, Artificial Sequence
  Description of Artificial Sequence: Synthetic oligonucleotide
uuguuugggacccacuuuu

SEQ ID NO: 403621 - RNA, 19 nt, Artificial Sequence
  Description of Artificial Sequence: Synthetic oligonucleotide
aaguuuaacugggucauau

SEQ ID NO: 403622 - RNA, 19 nt, Artificial Sequence
  Description of Artificial Sequence: Synthetic oligonucleotide
aaguuucaaugcauagcac

SEQ ID NO: 403623 - RNA, 19 nt, Artificial Sequence
  Description of Artificial Sequence: Synthetic oligonucleotide
agcacuugacacuuaugug

SEQ ID NO: 403624 - RNA, 19 nt, Artificial Sequence
  Description of Artificial Sequence: Synthetic oligonucleotide
uuaggaugacauucguaac

SEQ ID NO: 403625 - RNA, 19 nt, Artificial Sequence
  Description of Artificial Sequence: Synthetic oligonucleotide
uauccuguaaggugaggac

SEQ ID NO: 403626 - RNA, 19 nt, Artificial Sequence
  Description of Artificial Sequence: Synthetic oligonucleotide
uagcacaaacguaacaguu

SEQ ID NO: 403627 - RNA, 19 nt, Artificial Sequence
  Description of Artificial Sequence: Synthetic oligonucleotide
uuccacguuauagucuggg

SEQ ID NO: 403628 - RNA, 19 nt, Artificial Sequence
  Description of Artificial Sequence: Synthetic oligonucleotide
ucgcccauuccuuagugga

SEQ ID NO: 403629 - RNA, 19 nt, Artificial Sequence
  Description of Artificial Sequence: Synthetic oligonucleotide
agguaagaguaugaaaaug

SEQ ID NO: 403630 - RNA, 19 nt, Artificial Sequence
  Description of Artificial Sequence: Synthetic oligonucleotide
uugagcagcucgcagccga

SEQ ID NO: 403631 - RNA, 19 nt, Artificial Sequence
  Description of Artificial Sequence: Synthetic oligonucleotide
cagucuaacgcuaugacgu

SEQ ID NO: 403632 - RNA, 19 nt, Artificial Sequence
  Description of Artificial Sequence: Synthetic oligonucleotide
augauauuccccgccauug

SEQ ID NO: 403633 - RNA, 19 nt, Artificial Sequence
  Description of Artificial Sequence: Synthetic oligonucleotide
uucgcccauuccuuagugg

SEQ ID NO: 403634 - RNA, 19 nt, Artificial Sequence
  Description of Artificial Sequence: Synthetic oligonucleotide
caaugcauagcacuugaca

SEQ ID NO: 403635 - RNA, 19 nt, Artificial Sequence
  Description of Artificial Sequence: Synthetic oligonucleotide
ucuaacgcuaugacgucau

SEQ ID NO: 403636 - RNA, 19 nt, Artificial Sequence
  Description of Artificial Sequence: Synthetic oligonucleotide
agucuaacgcuaugacguc

SEQ ID NO: 403637 - RNA, 19 nt, Artificial Sequence
  Description of Artificial Sequence: Synthetic oligonucleotide
uaucuaacgcguucauaac

SEQ ID NO: 403638 - RNA, 19 nt, Artificial Sequence
  Description of Artificial Sequence: Synthetic oligonucleotide
uauuccccgccauugauuu

SEQ ID NO: 403639 - RNA, 19 nt, Artificial Sequence
  Description of Artificial Sequence: Synthetic oligonucleotide
agaaaggacaaaaccuuug

SEQ ID NO: 403640 - RNA, 19 nt, Artificial Sequence
  Description of Artificial Sequence: Synthetic oligonucleotide
uucguaacacucagucaca

SEQ ID NO: 403641 - RNA, 19 nt, Artificial Sequence
  Description of Artificial Sequence: Synthetic oligonucleotide
uacgcuuaaugucuccguc

SEQ ID NO: 403642 - RNA, 19 nt, Artificial Sequence
  Description of Artificial Sequence: Synthetic oligonucleotide
ugcuagcacaaacguaaca

SEQ ID NO: 403643 - RNA, 19 nt, Artificial Sequence
  Description of Artificial Sequence: Synthetic oligonucleotide
gguugaacaaauacuuugc

SEQ ID NO: 403644 - RNA, 19 nt, Artificial Sequence
  Description of Artificial Sequence: Synthetic oligonucleotide
cuucauuagccgcucuggc

SEQ ID NO: 403645 - RNA, 19 nt, Artificial Sequence
  Description of Artificial Sequence: Synthetic oligonucleotide
aaccuuugguucugaccag

SEQ ID NO: 403646 - RNA, 19 nt, Artificial Sequence
  Description of Artificial Sequence: Synthetic oligonucleotide
ucuucgucggaaucaacua

SEQ ID NO: 403647 - RNA, 19 nt, Artificial Sequence
  Description of Artificial Sequence: Synthetic oligonucleotide
ucgucggaaucaacuauga

SEQ ID NO: 403648 - RNA, 19 nt, Artificial Sequence
  Description of Artificial Sequence: Synthetic oligonucleotide
gucccagaugagcucagcg

SEQ ID NO: 403649 - RNA, 19 nt, Artificial Sequence
  Description of Artificial Sequence: Synthetic oligonucleotide
aacgcguucauaaccaaua

SEQ ID NO: 403650 - RNA, 19 nt, Artificial Sequence
  Description of Artificial Sequence: Synthetic oligonucleotide
gucgaugugcgagaagccg

SEQ ID NO: 403651 - RNA, 19 nt, Artificial Sequence
  Description of Artificial Sequence: Synthetic oligonucleotide
cuugcgccagaguuugucc

SEQ ID NO: 403652 - RNA, 19 nt, Artificial Sequence
  Description of Artificial Sequence: Synthetic oligonucleotide
cucagucuaacgcuaugac

SEQ ID NO: 403653 - RNA, 19 nt, Artificial Sequence
  Description of Artificial Sequence: Synthetic oligonucleotide
aguaaaguguagucuugaa

SEQ ID NO: 403654 - RNA, 19 nt, Artificial Sequence
  Description of Artificial Sequence: Synthetic oligonucleotide
accauagcgaacuucucuu

SEQ ID NO: 403655 - RNA, 19 nt, Artificial Sequence
  Description of Artificial Sequence: Synthetic oligonucleotide
cagcagguaccuaauauca

SEQ ID NO: 403656 - RNA, 19 nt, Artificial Sequence
  Description of Artificial Sequence: Synthetic oligonucleotide
aaacaaguuucaaugcaua

SEQ ID NO: 403657 - RNA, 19 nt, Artificial Sequence
  Description of Artificial Sequence: Synthetic oligonucleotide
auccgguugacuucgccca

SEQ ID NO: 403658 - RNA, 19 nt, Artificial Sequence
  Description of Artificial Sequence: Synthetic oligonucleotide
uguuaucuaacgcguucau

SEQ ID NO: 403659 - RNA, 19 nt, Artificial Sequence
  Description of Artificial Sequence: Synthetic oligonucleotide
acgccauuuauuuggucca

SEQ ID NO: 403660 - RNA, 19 nt, Artificial Sequence
  Description of Artificial Sequence: Synthetic oligonucleotide
guggagauacgcuuaaugu

SEQ ID NO: 403661 - RNA, 19 nt, Artificial Sequence
  Description of Artificial Sequence: Synthetic oligonucleotide
aaguaugcagacgccauuu

SEQ ID NO: 403662 - RNA, 19 nt, Artificial Sequence
  Description of Artificial Sequence: Synthetic oligonucleotide
guucccacuaggcaaugac

SEQ ID NO: 403663 - RNA, 19 nt, Artificial Sequence
  Description of Artificial Sequence: Synthetic oligonucleotide
cauagcgaacuucucuuuc

SEQ ID NO: 403664 - RNA, 19 nt, Artificial Sequence
  Description of Artificial Sequence: Synthetic oligonucleotide
cuggagguuuccucuugcg

SEQ ID NO: 403665 - RNA, 19 nt, Artificial Sequence
  Description of Artificial Sequence: Synthetic oligonucleotide
ucagcguuccuaccccaca

SEQ ID NO: 403666 - RNA, 19 nt, Artificial Sequence
  Description of Artificial Sequence: Synthetic oligonucleotide
gucagcgcuguuugaaggc

SEQ ID NO: 403667 - RNA, 19 nt, Artificial Sequence
  Description of Artificial Sequence: Synthetic oligonucleotide
gcagcucuguuaucuaacg

SEQ ID NO: 403668 - RNA, 19 nt, Artificial Sequence
  Description of Artificial Sequence: Synthetic oligonucleotide
gaucaguaaaguguagucu

SEQ ID NO: 403669 - RNA, 19 nt, Artificial Sequence
  Description of Artificial Sequence: Synthetic oligonucleotide
uaacgcguucauaaccaau

SEQ ID NO: 403670 - RNA, 19 nt, Artificial Sequence
  Description of Artificial Sequence: Synthetic oligonucleotide
gaagaauguugaucaguaa

SEQ ID NO: 403671 - RNA, 19 nt, Artificial Sequence
  Description of Artificial Sequence: Synthetic oligonucleotide
auacccaggucucagcguu

SEQ ID NO: 403672 - RNA, 19 nt, Artificial Sequence
  Description of Artificial Sequence: Synthetic oligonucleotide
aaguccauugcuggugggu

SEQ ID NO: 403673 - RNA, 19 nt, Artificial Sequence
  Description of Artificial Sequence: Synthetic oligonucleotide
uugcgccagaguuugucca

SEQ ID NO: 403674 - RNA, 19 nt, Artificial Sequence
  Description of Artificial Sequence: Synthetic oligonucleotide
gucauauccgguugacuuc

SEQ ID NO: 403675 - RNA, 19 nt, Artificial Sequence
  Description of Artificial Sequence: Synthetic oligonucleotide
augucuccgucuucauuag

SEQ ID NO: 403676 - RNA, 19 nt, Artificial Sequence
  Description of Artificial Sequence: Synthetic oligonucleotide
cuuaguggagauacgcuua

SEQ ID NO: 403677 - RNA, 19 nt, Artificial Sequence
  Description of Artificial Sequence: Synthetic oligonucleotide
ggugggucguccuuguccc

SEQ ID NO: 403678 - RNA, 19 nt, Artificial Sequence
  Description of Artificial Sequence: Synthetic oligonucleotide
cauucguaacacucaguca

SEQ ID NO: 403679 - RNA, 19 nt, Artificial Sequence
  Description of Artificial Sequence: Synthetic oligonucleotide
cagcucuguuaucuaacgc

SEQ ID NO: 403680 - RNA, 19 nt, Artificial Sequence
  Description of Artificial Sequence: Synthetic oligonucleotide
augugcgagaagccgguga

SEQ ID NO: 403681 - RNA, 19 nt, Artificial Sequence
  Description of Artificial Sequence: Synthetic oligonucleotide
gguagcgauagcaggaaug

SEQ ID NO: 403682 - RNA, 19 nt, Artificial Sequence
  Description of Artificial Sequence: Synthetic oligonucleotide
ggucucagcguuccuaccc

SEQ ID NO: 403683 - RNA, 19 nt, Artificial Sequence
  Description of Artificial Sequence: Synthetic oligonucleotide
uuggcaaccugggccuucg

SEQ ID NO: 403684 - RNA, 19 nt, Artificial Sequence
  Description of Artificial Sequence: Synthetic oligonucleotide
ucuugcgccagaguuuguc

SEQ ID NO: 403685 - RNA, 19 nt, Artificial Sequence
  Description of Artificial Sequence: Synthetic oligonucleotide
gaauugguucagaaggugu

SEQ ID NO: 403686 - RNA, 19 nt, Artificial Sequence
  Description of Artificial Sequence: Synthetic oligonucleotide
ucguaacacucagucacac

SEQ ID NO: 403687 - RNA, 19 nt, Artificial Sequence
  Description of Artificial Sequence: Synthetic oligonucleotide
acauccggugccaccauag

SEQ ID NO: 403688 - RNA, 19 nt, Artificial Sequence
  Description of Artificial Sequence: Synthetic oligonucleotide
guguguuccggaucgugca

SEQ ID NO: 403689 - RNA, 19 nt, Artificial Sequence
  Description of Artificial Sequence: Synthetic oligonucleotide
cagucggcucagucuaacg

SEQ ID NO: 403690 - RNA, 19 nt, Artificial Sequence
  Description of Artificial Sequence: Synthetic oligonucleotide
ucggcucagucuaacgcua

SEQ ID NO: 403691 - RNA, 19 nt, Artificial Sequence
  Description of Artificial Sequence: Synthetic oligonucleotide
cuuucaaugagaggcacgu

SEQ ID NO: 403692 - RNA, 19 nt, Artificial Sequence
  Description of Artificial Sequence: Synthetic oligonucleotide
agcgggaccucuuggcacu

SEQ ID NO: 403693 - RNA, 19 nt, Artificial Sequence
  Description of Artificial Sequence: Synthetic oligonucleotide
cagguaccuaauaucaucu

SEQ ID NO: 403694 - RNA, 19 nt, Artificial Sequence
  Description of Artificial Sequence: Synthetic oligonucleotide
ggagauacgcuuaaugucu

SEQ ID NO: 403695 - RNA, 19 nt, Artificial Sequence
  Description of Artificial Sequence: Synthetic oligonucleotide
uuccccgccauugauuuua

SEQ ID NO: 403696 - RNA, 19 nt, Artificial Sequence
  Description of Artificial Sequence: Synthetic oligonucleotide
cuaugacgucaucaagauc

SEQ ID NO: 403697 - RNA, 19 nt, Artificial Sequence
  Description of Artificial Sequence: Synthetic oligonucleotide
cugcuaaauggacccucag

SEQ ID NO: 403698 - RNA, 19 nt, Artificial Sequence
  Description of Artificial Sequence: Synthetic oligonucleotide
ucucagcguuccuacccca

SEQ ID NO: 403699 - RNA, 19 nt, Artificial Sequence
  Description of Artificial Sequence: Synthetic oligonucleotide
cuaucuuauccuguaaggu

SEQ ID NO: 403700 - RNA, 19 nt, Artificial Sequence
  Description of Artificial Sequence: Synthetic oligonucleotide
uuucugcuaaauggacccu

SEQ ID NO: 403701 - RNA, 19 nt, Artificial Sequence
  Description of Artificial Sequence: Synthetic oligonucleotide
acgcccgacagaaaggaca

SEQ ID NO: 403702 - RNA, 19 nt, Artificial Sequence
  Description of Artificial Sequence: Synthetic oligonucleotide
gguccauaaguacaguaua

SEQ ID NO: 403703 - RNA, 19 nt, Artificial Sequence
  Description of Artificial Sequence: Synthetic oligonucleotide
aguaugcagacgccauuua

SEQ ID NO: 403704 - RNA, 19 nt, Artificial Sequence
  Description of Artificial Sequence: Synthetic oligonucleotide
caagccggcgaucacugca

SEQ ID NO: 403705 - RNA, 19 nt, Artificial Sequence
  Description of Artificial Sequence: Synthetic oligonucleotide
acagacauaccaggcagua

SEQ ID NO: 403706 - RNA, 19 nt, Artificial Sequence
  Description of Artificial Sequence: Synthetic oligonucleotide
cagcucgcagccgaugccg

SEQ ID NO: 403707 - RNA, 19 nt, Artificial Sequence
  Description of Artificial Sequence: Synthetic oligonucleotide
uacaugguuucgggcagcu

SEQ ID NO: 403708 - RNA, 19 nt, Artificial Sequence
  Description of Artificial Sequence: Synthetic oligonucleotide
augacagcuaaggcuauuu

SEQ ID NO: 403709 - RNA, 19 nt, Artificial Sequence
  Description of Artificial Sequence: Synthetic oligonucleotide
aaaguuuaacugggucaua

SEQ ID NO: 403710 - RNA, 19 nt, Artificial Sequence
  Description of Artificial Sequence: Synthetic oligonucleotide
ggucauauccgguugacuu

SEQ ID NO: 403711 - RNA, 19 nt, Artificial Sequence
  Description of Artificial Sequence: Synthetic oligonucleotide
ccgccauugauuuuauauc

SEQ ID NO: 403712 - RNA, 19 nt, Artificial Sequence
  Description of Artificial Sequence: Synthetic oligonucleotide
gguguguuccggaucgugc

SEQ ID NO: 403713 - RNA, 19 nt, Artificial Sequence
  Description of Artificial Sequence: Synthetic oligonucleotide
cucagcguuccuaccccac

SEQ ID NO: 403714 - RNA, 19 nt, Artificial Sequence
  Description of Artificial Sequence: Synthetic oligonucleotide
cauccggugccaccauagc

SEQ ID NO: 403715 - RNA, 19 nt, Artificial Sequence
  Description of Artificial Sequence: Synthetic oligonucleotide
ccuuguggacauucagccg

SEQ ID NO: 403716 - RNA, 19 nt, Artificial Sequence
  Description of Artificial Sequence: Synthetic oligonucleotide
ucagucggcucagucuaac

SEQ ID NO: 403717 - RNA, 19 nt, Artificial Sequence
  Description of Artificial Sequence: Synthetic oligonucleotide
agguaccuaauaucaucuu

SEQ ID NO: 403718 - RNA, 19 nt, Artificial Sequence
  Description of Artificial Sequence: Synthetic oligonucleotide
ugcgccagaguuuguccau

SEQ ID NO: 403719 - RNA, 19 nt, Artificial Sequence
  Description of Artificial Sequence: Synthetic oligonucleotide
gacgaugcagugaauuggu

SEQ ID NO: 403720 - RNA, 19 nt, Artificial Sequence
  Description of Artificial Sequence: Synthetic oligonucleotide
ugggucauauccgguugac

SEQ ID NO: 403721 - RNA, 19 nt, Artificial Sequence
  Description of Artificial Sequence: Synthetic oligonucleotide
cauauccgguugacuucgc

SEQ ID NO: 403722 - RNA, 19 nt, Artificial Sequence
  Description of Artificial Sequence: Synthetic oligonucleotide
aagggcggcucagucggcu

SEQ ID NO: 403723 - RNA, 19 nt, Artificial Sequence
  Description of Artificial Sequence: Synthetic oligonucleotide
ccaagcgggaccucuuggc

SEQ ID NO: 403724 - RNA, 19 nt, Artificial Sequence
  Description of Artificial Sequence: Synthetic oligonucleotide
gucggcucagucuaacgcu

SEQ ID NO: 403725 - RNA, 19 nt, Artificial Sequence
  Description of Artificial Sequence: Synthetic oligonucleotide
guuucaaugcauagcacuu

SEQ ID NO: 403726 - RNA, 19 nt, Artificial Sequence
  Description of Artificial Sequence: Synthetic oligonucleotide
agguguguuccggaucgug

SEQ ID NO: 403727 - RNA, 19 nt, Artificial Sequence
  Description of Artificial Sequence: Synthetic oligonucleotide
cuugagcagcucgcagccg

SEQ ID NO: 403728 - RNA, 19 nt, Artificial Sequence
  Description of Artificial Sequence: Synthetic oligonucleotide
guaugcagacgccauuuau

SEQ ID NO: 403729 - RNA, 19 nt, Artificial Sequence
  Description of Artificial Sequence: Synthetic oligonucleotide
gucuaacgcuaugacguca

SEQ ID NO: 403730 - RNA, 19 nt, Artificial Sequence
  Description of Artificial Sequence: Synthetic oligonucleotide
cuaacgcuaugacgucauc

SEQ ID NO: 403731 - RNA, 19 nt, Artificial Sequence
  Description of Artificial Sequence: Synthetic oligonucleotide
cuaacgcguucauaaccaa

SEQ ID NO: 403732 - RNA, 19 nt, Artificial Sequence
  Description of Artificial Sequence: Synthetic oligonucleotide
auauuccccgccauugauu

SEQ ID NO: 403733 - RNA, 19 nt, Artificial Sequence
  Description of Artificial Sequence: Synthetic oligonucleotide
cgccauugauuuuauauca

SEQ ID NO: 403734 - RNA, 19 nt, Artificial Sequence
  Description of Artificial Sequence: Synthetic oligonucleotide
auuccacguuauagucugg

SEQ ID NO: 403735 - RNA, 19 nt, Artificial Sequence
  Description of Artificial Sequence: Synthetic oligonucleotide
cgucagcgcuguuugaagg

SEQ ID NO: 403736 - RNA, 19 nt, Artificial Sequence
  Description of Artificial Sequence: Synthetic oligonucleotide
gguaccuaauaucaucuuu

SEQ ID NO: 403737 - RNA, 19 nt, Artificial Sequence
  Description of Artificial Sequence: Synthetic oligonucleotide
gaugugcgagaagccggug

SEQ ID NO: 403738 - RNA, 19 nt, Artificial Sequence
  Description of Artificial Sequence: Synthetic oligonucleotide
cagguaagaguaugaaaau

SEQ ID NO: 403739 - RNA, 19 nt, Artificial Sequence
  Description of Artificial Sequence: Synthetic oligonucleotide
gcuaugacgucaucaagau

SEQ ID NO: 403740 - RNA, 19 nt, Artificial Sequence
  Description of Artificial Sequence: Synthetic oligonucleotide
cgcuaugacgucaucaaga

SEQ ID NO: 403741 - RNA, 19 nt, Artificial Sequence
  Description of Artificial Sequence: Synthetic oligonucleotide
gguuagaucuaggcuaaaa

SEQ ID NO: 403742 - RNA, 19 nt, Artificial Sequence
  Description of Artificial Sequence: Synthetic oligonucleotide
uacccaggucucagcguuc

SEQ ID NO: 403743 - RNA, 19 nt, Artificial Sequence
  Description of Artificial Sequence: Synthetic oligonucleotide
gcucagucggcucagucua

SEQ ID NO: 403744 - RNA, 19 nt, Artificial Sequence
  Description of Artificial Sequence: Synthetic oligonucleotide
uagcgauagcaggaaugau

SEQ ID NO: 403745 - RNA, 19 nt, Artificial Sequence
  Description of Artificial Sequence: Synthetic oligonucleotide
gcucagucuaacgcuauga

SEQ ID NO: 403746 - RNA, 19 nt, Artificial Sequence
  Description of Artificial Sequence: Synthetic oligonucleotide
cacgcccgacagaaaggac

SEQ ID NO: 403747 - RNA, 19 nt, Artificial Sequence
  Description of Artificial Sequence: Synthetic oligonucleotide
ggucucgaugcucuuggaa

SEQ ID NO: 403748 - RNA, 19 nt, Artificial Sequence
  Description of Artificial Sequence: Synthetic oligonucleotide
ggcucagucuaacgcuaug

SEQ ID NO: 403749 - RNA, 19 nt, Artificial Sequence
  Description of Artificial Sequence: Synthetic oligonucleotide
aagguguguuccggaucgu

SEQ ID NO: 403750 - RNA, 19 nt, Artificial Sequence
  Description of Artificial Sequence: Synthetic oligonucleotide
cuucgucggaaucaacuau

SEQ ID NO: 403751 - RNA, 19 nt, Artificial Sequence
  Description of Artificial Sequence: Synthetic oligonucleotide
gugaaaaguuuaacugggu

SEQ ID NO: 403752 - RNA, 19 nt, Artificial Sequence
  Description of Artificial Sequence: Synthetic oligonucleotide
ggucgaugugcgagaagcc

SEQ ID NO: 403753 - RNA, 19 nt, Artificial Sequence
  Description of Artificial Sequence: Synthetic oligonucleotide
ccgcuugcgggcucugucg

SEQ ID NO: 403754 - RNA, 19 nt, Artificial Sequence
  Description of Artificial Sequence: Synthetic oligonucleotide
ugcguuggcuuaggaugac

SEQ ID NO: 403755 - RNA, 19 nt, Artificial Sequence
  Description of Artificial Sequence: Synthetic oligonucleotide
gugguagcgauagcaggaa

SEQ ID NO: 403756 - RNA, 19 nt, Artificial Sequence
  Description of Artificial Sequence: Synthetic oligonucleotide
cugguugaacaaauacuuu

SEQ ID NO: 403757 - RNA, 19 nt, Artificial Sequence
  Description of Artificial Sequence: Synthetic oligonucleotide
ugccgucagcgcuguuuga

SEQ ID NO: 403758 - RNA, 19 nt, Artificial Sequence
  Description of Artificial Sequence: Synthetic oligonucleotide
cccgccauugauuuuauau

SEQ ID NO: 403759 - RNA, 19 nt, Artificial Sequence
  Description of Artificial Sequence: Synthetic oligonucleotide
ccgucagcgcuguuugaag

SEQ ID NO: 403760 - RNA, 19 nt, Artificial Sequence
  Description of Artificial Sequence: Synthetic oligonucleotide
cuucccacgugcuucuuuu

SEQ ID NO: 403761 - RNA, 19 nt, Artificial Sequence
  Description of Artificial Sequence: Synthetic oligonucleotide
uccccgccauugauuuuau

SEQ ID NO: 403762 - RNA, 19 nt, Artificial Sequence
  Description of Artificial Sequence: Synthetic oligonucleotide
gaucuucggcuuguuccaa

SEQ ID NO: 403763 - RNA, 19 nt, Artificial Sequence
  Description of Artificial Sequence: Synthetic oligonucleotide
caagggcggcucagucggc

SEQ ID NO: 403764 - RNA, 19 nt, Artificial Sequence
  Description of Artificial Sequence: Synthetic oligonucleotide
cucugcguuggcuuaggau

SEQ ID NO: 403765 - RNA, 19 nt, Artificial Sequence
  Description of Artificial Sequence: Synthetic oligonucleotide
ggcucagucggcucagucu

SEQ ID NO: 403766 - RNA, 19 nt, Artificial Sequence
  Description of Artificial Sequence: Synthetic oligonucleotide
ggcuuguuccaagcgggac

SEQ ID NO: 403767 - RNA, 19 nt, Artificial Sequence
  Description of Artificial Sequence: Synthetic oligonucleotide
ugguuagaucuaggcuaaa

SEQ ID NO: 403768 - RNA, 19 nt, Artificial Sequence
  Description of Artificial Sequence: Synthetic oligonucleotide
gccggcgaucacugcauug

SEQ ID NO: 403769 - RNA, 19 nt, Artificial Sequence
  Description of Artificial Sequence: Synthetic oligonucleotide
acgucagcugccagacaca

SEQ ID NO: 403770 - RNA, 19 nt, Artificial Sequence
  Description of Artificial Sequence: Synthetic oligonucleotide
gcucuguuaucuaacgcgu

SEQ ID NO: 403771 - RNA, 19 nt, Artificial Sequence
  Description of Artificial Sequence: Synthetic oligonucleotide
auuccccgccauugauuuu

SEQ ID NO: 403772 - RNA, 19 nt, Artificial Sequence
  Description of Artificial Sequence: Synthetic oligonucleotide
cauuagccgcucuggcucu

SEQ ID NO: 403773 - RNA, 19 nt, Artificial Sequence
  Description of Artificial Sequence: Synthetic oligonucleotide
ccuuaguggagauacgcuu

SEQ ID NO: 403774 - RNA, 19 nt, Artificial Sequence
  Description of Artificial Sequence: Synthetic oligonucleotide
caaguaugcagacgccauu

SEQ ID NO: 403775 - RNA, 19 nt, Artificial Sequence
  Description of Artificial Sequence: Synthetic oligonucleotide
ccuagaucuucgcuaugaa

SEQ ID NO: 403776 - RNA, 19 nt, Artificial Sequence
  Description of Artificial Sequence: Synthetic oligonucleotide
gcguuccuaccccacaggu

SEQ ID NO: 403777 - RNA, 19 nt, Artificial Sequence
  Description of Artificial Sequence: Synthetic oligonucleotide
gcccuucuucgucggaauc

SEQ ID NO: 403778 - RNA, 19 nt, Artificial Sequence
  Description of Artificial Sequence: Synthetic oligonucleotide
guuccggaucgugcagcca

SEQ ID NO: 403779 - RNA, 19 nt, Artificial Sequence
  Description of Artificial Sequence: Synthetic oligonucleotide
cggaaucaacuaugagcac

SEQ ID NO: 403780 - RNA, 19 nt, Artificial Sequence
  Description of Artificial Sequence: Synthetic oligonucleotide
gguucccacuaggcaauga

SEQ ID NO: 403781 - RNA, 19 nt, Artificial Sequence
  Description of Artificial Sequence: Synthetic oligonucleotide
gccgucagcgcuguuugaa

SEQ ID NO: 403782 - RNA, 19 nt, Artificial Sequence
  Description of Artificial Sequence: Synthetic oligonucleotide
cauugucagcagguaccua

SEQ ID NO: 403783 - RNA, 19 nt, Artificial Sequence
  Description of Artificial Sequence: Synthetic oligonucleotide
ccgcacggucaccucuggc

SEQ ID NO: 403784 - RNA, 19 nt, Artificial Sequence
  Description of Artificial Sequence: Synthetic oligonucleotide
gggucauauccgguugacu

SEQ ID NO: 403785 - RNA, 19 nt, Artificial Sequence
  Description of Artificial Sequence: Synthetic oligonucleotide
cgcguucauaaccaauaua

SEQ ID NO: 403786 - RNA, 19 nt, Artificial Sequence
  Description of Artificial Sequence: Synthetic oligonucleotide
ccaggucucagcguuccua

SEQ ID NO: 403787 - RNA, 19 nt, Artificial Sequence
  Description of Artificial Sequence: Synthetic oligonucleotide
ggcccuucuucgucggaau

SEQ ID NO: 403788 - RNA, 19 nt, Artificial Sequence
  Description of Artificial Sequence: Synthetic oligonucleotide
gguuucgggcagcucuguu

SEQ ID NO: 403789 - RNA, 19 nt, Artificial Sequence
  Description of Artificial Sequence: Synthetic oligonucleotide
ccauagcgaacuucucuuu

SEQ ID NO: 403790 - RNA, 19 nt, Artificial Sequence
  Description of Artificial Sequence: Synthetic oligonucleotide
ccgaugccgccccgcgccc

SEQ ID NO: 403791 - RNA, 19 nt, Artificial Sequence
  Description of Artificial Sequence: Synthetic oligonucleotide
ccucugcguuggcuuagga

SEQ ID NO: 403792 - RNA, 19 nt, Artificial Sequence
  Description of Artificial Sequence: Synthetic oligonucleotide
cgaucacugcauugguggu

SEQ ID NO: 403793 - RNA, 19 nt, Artificial Sequence
  Description of Artificial Sequence: Synthetic oligonucleotide
ccggaucgugcagccagga

SEQ ID NO: 403794 - RNA, 19 nt, Artificial Sequence
  Description of Artificial Sequence: Synthetic oligonucleotide
cgaugccgccccgcgcccc

SEQ ID NO: 403795 - RNA, 19 nt, Artificial Sequence
  Description of Artificial Sequence: Synthetic oligonucleotide
cgcuugcgggcucugucgu

SEQ ID NO: 403796 - RNA, 19 nt, Artificial Sequence
  Description of Artificial Sequence: Synthetic oligonucleotide
cgccauuuauuugguccau

SEQ ID NO: 403797 - RNA, 19 nt, Artificial Sequence
  Description of Artificial Sequence: Synthetic oligonucleotide
gcgcuguuugaaggcccuu

SEQ ID NO: 403798 - RNA, 19 nt, Artificial Sequence
  Description of Artificial Sequence: Synthetic oligonucleotide
aauucauugaucuccacca

SEQ ID NO: 403799 - RNA, 19 nt, Artificial Sequence
  Description of Artificial Sequence: Synthetic oligonucleotide
uccauugauuucauuaugg

SEQ ID NO: 403800 - RNA, 19 nt, Artificial Sequence
  Description of Artificial Sequence: Synthetic oligonucleotide
gacuagaugacccuucggg

SEQ ID NO: 403801 - RNA, 19 nt, Artificial Sequence
  Description of Artificial Sequence: Synthetic oligonucleotide
acuucuacgagaaagaugu

SEQ ID NO: 403802 - RNA, 19 nt, Artificial Sequence
  Description of Artificial Sequence: Synthetic oligonucleotide
ugagaggcgagcauuaacc

SEQ ID NO: 403803 - RNA, 19 nt, Artificial Sequence
  Description of Artificial Sequence: Synthetic oligonucleotide
ugaacauagcuccgcaugg

SEQ ID NO: 403804 - RNA, 19 nt, Artificial Sequence
  Description of Artificial Sequence: Synthetic oligonucleotide
ucaggcagcguuaagaccu

SEQ ID NO: 403805 - RNA, 19 nt, Artificial Sequence
  Description of Artificial Sequence: Synthetic oligonucleotide
uaccucucuacccacauag

SEQ ID NO: 403806 - RNA, 19 nt, Artificial Sequence
  Description of Artificial Sequence: Synthetic oligonucleotide
cucuaaagggccuuggagg

SEQ ID NO: 403807 - RNA, 19 nt, Artificial Sequence
  Description of Artificial Sequence: Synthetic oligonucleotide
gagacuucagcggaaaugg

SEQ ID NO: 403808 - RNA, 19 nt, Artificial Sequence
  Description of Artificial Sequence: Synthetic oligonucleotide
uguguaaccccucugcggc

SEQ ID NO: 403809 - RNA, 19 nt, Artificial Sequence
  Description of Artificial Sequence: Synthetic oligonucleotide
caauuuaaggccaaggcca

SEQ ID NO: 403810 - RNA, 19 nt, Artificial Sequence
  Description of Artificial Sequence: Synthetic oligonucleotide
uugucuaccucaauuuaag

SEQ ID NO: 403811 - RNA, 19 nt, Artificial Sequence
  Description of Artificial Sequence: Synthetic oligonucleotide
uucuaggucccacacaggc

SEQ ID NO: 403812 - RNA, 19 nt, Artificial Sequence
  Description of Artificial Sequence: Synthetic oligonucleotide
ucgccuuagcucuaaaggg

SEQ ID NO: 403813 - RNA, 19 nt, Artificial Sequence
  Description of Artificial Sequence: Synthetic oligonucleotide
acuagaugacccuucgggg

SEQ ID NO: 403814 - RNA, 19 nt, Artificial Sequence
  Description of Artificial Sequence: Synthetic oligonucleotide
aacuuucccacuucuacga

SEQ ID NO: 403815 - RNA, 19 nt, Artificial Sequence
  Description of Artificial Sequence: Synthetic oligonucleotide
guaaccaugggccuugacc

SEQ ID NO: 403816 - RNA, 19 nt, Artificial Sequence
  Description of Artificial Sequence: Synthetic oligonucleotide
acuccaaacuugcucaccg

SEQ ID NO: 403817 - RNA, 19 nt, Artificial Sequence
  Description of Artificial Sequence: Synthetic oligonucleotide
guagugacugggcuuaugg

SEQ ID NO: 403818 - RNA, 19 nt, Artificial Sequence
  Description of Artificial Sequence: Synthetic oligonucleotide
gucuaccucaauuuaaggc

SEQ ID NO: 403819 - RNA, 19 nt, Artificial Sequence
  Description of Artificial Sequence: Synthetic oligonucleotide
aagcacacgaaggauacag

SEQ ID NO: 403820 - RNA, 19 nt, Artificial Sequence
  Description of Artificial Sequence: Synthetic oligonucleotide
aaccaaagaaccacugaac

SEQ ID NO: 403821 - RNA, 19 nt, Artificial Sequence
  Description of Artificial Sequence: Synthetic oligonucleotide
uugggugacuagaugaccc

SEQ ID NO: 403822 - RNA, 19 nt, Artificial Sequence
  Description of Artificial Sequence: Synthetic oligonucleotide
uucgcauucagcaccguca

SEQ ID NO: 403823 - RNA, 19 nt, Artificial Sequence
  Description of Artificial Sequence: Synthetic oligonucleotide
ucugaagaauuuguagggg

SEQ ID NO: 403824 - RNA, 19 nt, Artificial Sequence
  Description of Artificial Sequence: Synthetic oligonucleotide
uguauagaaaagccuggac

SEQ ID NO: 403825 - RNA, 19 nt, Artificial Sequence
  Description of Artificial Sequence: Synthetic oligonucleotide
uuaaccuuguuguggcuag

SEQ ID NO: 403826 - RNA, 19 nt, Artificial Sequence
  Description of Artificial Sequence: Synthetic oligonucleotide
aaauguggcuuacugcccu

SEQ ID NO: 403827 - RNA, 19 nt, Artificial Sequence
  Description of Artificial Sequence: Synthetic oligonucleotide
acucuccuaagcuaggcag

SEQ ID NO: 403828 - RNA, 19 nt, Artificial Sequence
  Description of Artificial Sequence: Synthetic oligonucleotide
gacucaauggguucacugc

SEQ ID NO: 403829 - RNA, 19 nt, Artificial Sequence
  Description of Artificial Sequence: Synthetic oligonucleotide
ucuaaagggccuuggaggu

SEQ ID NO: 403830 - RNA, 19 nt, Artificial Sequence
  Description of Artificial Sequence: Synthetic oligonucleotide
auggcuaguaagcacacga

SEQ ID NO: 403831 - RNA, 19 nt, Artificial Sequence
  Description of Artificial Sequence: Synthetic oligonucleotide
agauguaauguagugagga

SEQ ID NO: 403832 - RNA, 19 nt, Artificial Sequence
  Description of Artificial Sequence: Synthetic oligonucleotide
auagaaaagccuggacucc

SEQ ID NO: 403833 - RNA, 19 nt, Artificial Sequence
  Description of Artificial Sequence: Synthetic oligonucleotide
aauguuauuccagaaccau

SEQ ID NO: 403834 - RNA, 19 nt, Artificial Sequence
  Description of Artificial Sequence: Synthetic oligonucleotide
gaaggauacagaguagagc

SEQ ID NO: 403835 - RNA, 19 nt, Artificial Sequence
  Description of Artificial Sequence: Synthetic oligonucleotide
guaggauguauagaaaagc

SEQ ID NO: 403836 - RNA, 19 nt, Artificial Sequence
  Description of Artificial Sequence: Synthetic oligonucleotide
agucucgacaaccaaagaa

SEQ ID NO: 403837 - RNA, 19 nt, Artificial Sequence
  Description of Artificial Sequence: Synthetic oligonucleotide
agaguuaccucucuaccca

SEQ ID NO: 403838 - RNA, 19 nt, Artificial Sequence
  Description of Artificial Sequence: Synthetic oligonucleotide
aagauucaguacuggccuc

SEQ ID NO: 403839 - RNA, 19 nt, Artificial Sequence
  Description of Artificial Sequence: Synthetic oligonucleotide
accguguucgcauucagca

SEQ ID NO: 403840 - RNA, 19 nt, Artificial Sequence
  Description of Artificial Sequence: Synthetic oligonucleotide
ucacauaugcugccaaaac

SEQ ID NO: 403841 - RNA, 19 nt, Artificial Sequence
  Description of Artificial Sequence: Synthetic oligonucleotide
guggguacuacaucaguag

SEQ ID NO: 403842 - RNA, 19 nt, Artificial Sequence
  Description of Artificial Sequence: Synthetic oligonucleotide
auucccucacgucguaggc

SEQ ID NO: 403843 - RNA, 19 nt, Artificial Sequence
  Description of Artificial Sequence: Synthetic oligonucleotide
cuucauguugagagggagg

SEQ ID NO: 403844 - RNA, 19 nt, Artificial Sequence
  Description of Artificial Sequence: Synthetic oligonucleotide
agguaggauguauagaaaa

SEQ ID NO: 403845 - RNA, 19 nt, Artificial Sequence
  Description of Artificial Sequence: Synthetic oligonucleotide
cuuguuguggcuaguccag

SEQ ID NO: 403846 - RNA, 19 nt, Artificial Sequence
  Description of Artificial Sequence: Synthetic oligonucleotide
agauucaguacuggccucc

SEQ ID NO: 403847 - RNA, 19 nt, Artificial Sequence
  Description of Artificial Sequence: Synthetic oligonucleotide
cugaacauagcuccgcaug

SEQ ID NO: 403848 - RNA, 19 nt, Artificial Sequence
  Description of Artificial Sequence: Synthetic oligonucleotide
agcacagucgagcgcaccg

SEQ ID NO: 403849 - RNA, 19 nt, Artificial Sequence
  Description of Artificial Sequence: Synthetic oligonucleotide
cuacguagugucuccacgc

SEQ ID NO: 403850 - RNA, 19 nt, Artificial Sequence
  Description of Artificial Sequence: Synthetic oligonucleotide
gcuagcaucagccacuggc

SEQ ID NO: 403851 - RNA, 19 nt, Artificial Sequence
  Description of Artificial Sequence: Synthetic oligonucleotide
gaggcgagcauuaaccuug

SEQ ID NO: 403852 - RNA, 19 nt, Artificial Sequence
  Description of Artificial Sequence: Synthetic oligonucleotide
cuacgagaaagauguaaug

SEQ ID NO: 403853 - RNA, 19 nt, Artificial Sequence
  Description of Artificial Sequence: Synthetic oligonucleotide
cuccacgcuagcaucagcc

SEQ ID NO: 403854 - RNA, 19 nt, Artificial Sequence
  Description of Artificial Sequence: Synthetic oligonucleotide
cuaguaagcacacgaagga

SEQ ID NO: 403855 - RNA, 19 nt, Artificial Sequence
  Description of Artificial Sequence: Synthetic oligonucleotide
aagugagccuugagaaacc

SEQ ID NO: 403856 - RNA, 19 nt, Artificial Sequence
  Description of Artificial Sequence: Synthetic oligonucleotide
cauuauggcaaucgaaaca

SEQ ID NO: 403857 - RNA, 19 nt, Artificial Sequence
  Description of Artificial Sequence: Synthetic oligonucleotide
gucucgacaaccaaagaac

SEQ ID NO: 403858 - RNA, 19 nt, Artificial Sequence
  Description of Artificial Sequence: Synthetic oligonucleotide
gcaaucgaaacacaguuca

SEQ ID NO: 403859 - RNA, 19 nt, Artificial Sequence
  Description of Artificial Sequence: Synthetic oligonucleotide
cauagcuccgcauggcuug

SEQ ID NO: 403860 - RNA, 19 nt, Artificial Sequence
  Description of Artificial Sequence: Synthetic oligonucleotide
uucaggguauguugacuag

SEQ ID NO: 403861 - RNA, 19 nt, Artificial Sequence
  Description of Artificial Sequence: Synthetic oligonucleotide
uacucuccuaagcuaggca

SEQ ID NO: 403862 - RNA, 19 nt, Artificial Sequence
  Description of Artificial Sequence: Synthetic oligonucleotide
cacgauggaaauucaacga

SEQ ID NO: 403863 - RNA, 19 nt, Artificial Sequence
  Description of Artificial Sequence: Synthetic oligonucleotide
uccgaaacagcagguagca

SEQ ID NO: 403864 - RNA, 19 nt, Artificial Sequence
  Description of Artificial Sequence: Synthetic oligonucleotide
guuaagaccucagugucuc

SEQ ID NO: 403865 - RNA, 19 nt, Artificial Sequence
  Description of Artificial Sequence: Synthetic oligonucleotide
agaaagagccauuccgaaa

SEQ ID NO: 403866 - RNA, 19 nt, Artificial Sequence
  Description of Artificial Sequence: Synthetic oligonucleotide
gguagcacgauggaaauuc

SEQ ID NO: 403867 - RNA, 19 nt, Artificial Sequence
  Description of Artificial Sequence: Synthetic oligonucleotide
acacuguggguacuacauc

SEQ ID NO: 403868 - RNA, 19 nt, Artificial Sequence
  Description of Artificial Sequence: Synthetic oligonucleotide
gaaauguggcuuacugccc

SEQ ID NO: 403869 - RNA, 19 nt, Artificial Sequence
  Description of Artificial Sequence: Synthetic oligonucleotide
gcgagcauuaaccuuguug

SEQ ID NO: 403870 - RNA, 19 nt, Artificial Sequence
  Description of Artificial Sequence: Synthetic oligonucleotide
acugagaacuuucccacuu

SEQ ID NO: 403871 - RNA, 19 nt, Artificial Sequence
  Description of Artificial Sequence: Synthetic oligonucleotide
guagugaggauuccagguc

SEQ ID NO: 403872 - RNA, 19 nt, Artificial Sequence
  Description of Artificial Sequence: Synthetic oligonucleotide
ggcuaguaagcacacgaag

SEQ ID NO: 403873 - RNA, 19 nt, Artificial Sequence
  Description of Artificial Sequence: Synthetic oligonucleotide
ucguaggcuagcuccuucc

SEQ ID NO: 403874 - RNA, 19 nt, Artificial Sequence
  Description of Artificial Sequence: Synthetic oligonucleotide
gugacugggcuuaugguug

SEQ ID NO: 403875 - RNA, 19 nt, Artificial Sequence
  Description of Artificial Sequence: Synthetic oligonucleotide
uucagcggaaauggggcag

SEQ ID NO: 403876 - RNA, 19 nt, Artificial Sequence
  Description of Artificial Sequence: Synthetic oligonucleotide
gcaagauucaguacuggcc

SEQ ID NO: 403877 - RNA, 19 nt, Artificial Sequence
  Description of Artificial Sequence: Synthetic oligonucleotide
ucacuguaccgacuugccu

SEQ ID NO: 403878 - RNA, 19 nt, Artificial Sequence
  Description of Artificial Sequence: Synthetic oligonucleotide
cuaccucaauuuaaggcca

SEQ ID NO: 403879 - RNA, 19 nt, Artificial Sequence
  Description of Artificial Sequence: Synthetic oligonucleotide
uuccacgucggggcgaagg

SEQ ID NO: 403880 - RNA, 19 nt, Artificial Sequence
  Description of Artificial Sequence: Synthetic oligonucleotide
cuugucuagggaaccuuuc

SEQ ID NO: 403881 - RNA, 19 nt, Artificial Sequence
  Description of Artificial Sequence: Synthetic oligonucleotide
acuugucuaccucaauuua

SEQ ID NO: 403882 - RNA, 19 nt, Artificial Sequence
  Description of Artificial Sequence: Synthetic oligonucleotide
gcucuaaagggccuuggag

SEQ ID NO: 403883 - RNA, 19 nt, Artificial Sequence
  Description of Artificial Sequence: Synthetic oligonucleotide
cuagcuccuuccacgucgg

SEQ ID NO: 403884 - RNA, 19 nt, Artificial Sequence
  Description of Artificial Sequence: Synthetic oligonucleotide
ggauacagaguagagcccc

SEQ ID NO: 403885 - RNA, 19 nt, Artificial Sequence
  Description of Artificial Sequence: Synthetic oligonucleotide
auguauagaaaagccugga

SEQ ID NO: 403886 - RNA, 19 nt, Artificial Sequence
  Description of Artificial Sequence: Synthetic oligonucleotide
caggcuauugggugacuag

SEQ ID NO: 403887 - RNA, 19 nt, Artificial Sequence
  Description of Artificial Sequence: Synthetic oligonucleotide
cuugcuacucuccuaagcu

SEQ ID NO: 403888 - RNA, 19 nt, Artificial Sequence
  Description of Artificial Sequence: Synthetic oligonucleotide
uagauccuggcgugguuug

SEQ ID NO: 403889 - RNA, 19 nt, Artificial Sequence
  Description of Artificial Sequence: Synthetic oligonucleotide
gaacauagcuccgcauggc

SEQ ID NO: 403890 - RNA, 19 nt, Artificial Sequence
  Description of Artificial Sequence: Synthetic oligonucleotide
uggcuaguaagcacacgaa

SEQ ID NO: 403891 - RNA, 19 nt, Artificial Sequence
  Description of Artificial Sequence: Synthetic oligonucleotide
uuagcucuaaagggccuug

SEQ ID NO: 403892 - RNA, 19 nt, Artificial Sequence
  Description of Artificial Sequence: Synthetic oligonucleotide
gguacuacaucaguaguga

SEQ ID NO: 403893 - RNA, 19 nt, Artificial Sequence
  Description of Artificial Sequence: Synthetic oligonucleotide
agaggcuaauguccaggug

SEQ ID NO: 403894 - RNA, 19 nt, Artificial Sequence
  Description of Artificial Sequence: Synthetic oligonucleotide
cucuguauucaagacccug

SEQ ID NO: 403895 - RNA, 19 nt, Artificial Sequence
  Description of Artificial Sequence: Synthetic oligonucleotide
gucgagcgcaccguguucg

SEQ ID NO: 403896 - RNA, 19 nt, Artificial Sequence
  Description of Artificial Sequence: Synthetic oligonucleotide
guaggcgcuguccuuccag

SEQ ID NO: 403897 - RNA, 19 nt, Artificial Sequence
  Description of Artificial Sequence: Synthetic oligonucleotide
gaaguggaagaggauccac

SEQ ID NO: 403898 - RNA, 19 nt, Artificial Sequence
  Description of Artificial Sequence: Synthetic oligonucleotide
uagcacgauggaaauucaa

SEQ ID NO: 403899 - RNA, 19 nt, Artificial Sequence
  Description of Artificial Sequence: Synthetic oligonucleotide
cugagaggcgagcauuaac

SEQ ID NO: 403900 - RNA, 19 nt, Artificial Sequence
  Description of Artificial Sequence: Synthetic oligonucleotide
ugggugacuagaugacccu

SEQ ID NO: 403901 - RNA, 19 nt, Artificial Sequence
  Description of Artificial Sequence: Synthetic oligonucleotide
uaguaagcacacgaaggau

SEQ ID NO: 403902 - RNA, 19 nt, Artificial Sequence
  Description of Artificial Sequence: Synthetic oligonucleotide
acugaacauagcuccgcau

SEQ ID NO: 403903 - RNA, 19 nt, Artificial Sequence
  Description of Artificial Sequence: Synthetic oligonucleotide
cauguagauccuggcgugg

SEQ ID NO: 403904 - RNA, 19 nt, Artificial Sequence
  Description of Artificial Sequence: Synthetic oligonucleotide
agucgagcgcaccguguuc

SEQ ID NO: 403905 - RNA, 19 nt, Artificial Sequence
  Description of Artificial Sequence: Synthetic oligonucleotide
uagcucuaaagggccuugg

SEQ ID NO: 403906 - RNA, 19 nt, Artificial Sequence
  Description of Artificial Sequence: Synthetic oligonucleotide
gcuauugggugacuagaug

SEQ ID NO: 403907 - RNA, 19 nt, Artificial Sequence
  Description of Artificial Sequence: Synthetic oligonucleotide
ucccucacgucguaggcua

SEQ ID NO: 403908 - RNA, 19 nt, Artificial Sequence
  Description of Artificial Sequence: Synthetic oligonucleotide
uccuacguagugucuccac

SEQ ID NO: 403909 - RNA, 19 nt, Artificial Sequence
  Description of Artificial Sequence: Synthetic oligonucleotide
caccguguucgcauucagc

SEQ ID NO: 403910 - RNA, 19 nt, Artificial Sequence
  Description of Artificial Sequence: Synthetic oligonucleotide
guguucgcauucagcaccg

SEQ ID NO: 403911 - RNA, 19 nt, Artificial Sequence
  Description of Artificial Sequence: Synthetic oligonucleotide
ccuacguagugucuccacg

SEQ ID NO: 403912 - RNA, 19 nt, Artificial Sequence
  Description of Artificial Sequence: Synthetic oligonucleotide
agauccuggcgugguuugc

SEQ ID NO: 403913 - RNA, 19 nt, Artificial Sequence
  Description of Artificial Sequence: Synthetic oligonucleotide
agaggcgagcauuaaccuu

SEQ ID NO: 403914 - RNA, 19 nt, Artificial Sequence
  Description of Artificial Sequence: Synthetic oligonucleotide
cagguaaucuucauuaguu

SEQ ID NO: 403915 - RNA, 19 nt, Artificial Sequence
  Description of Artificial Sequence: Synthetic oligonucleotide
ggguacuacaucaguagug

SEQ ID NO: 403916 - RNA, 19 nt, Artificial Sequence
  Description of Artificial Sequence: Synthetic oligonucleotide
uuuugggccaaaggccgac

SEQ ID NO: 403917 - RNA, 19 nt, Artificial Sequence
  Description of Artificial Sequence: Synthetic oligonucleotide
aggcuauugggugacuaga

SEQ ID NO: 403918 - RNA, 19 nt, Artificial Sequence
  Description of Artificial Sequence: Synthetic oligonucleotide
ggcgaagaacuccaccgcc

SEQ ID NO: 403919 - RNA, 19 nt, Artificial Sequence
  Description of Artificial Sequence: Synthetic oligonucleotide
ugacugggcuuaugguugu

SEQ ID NO: 403920 - RNA, 19 nt, Artificial Sequence
  Description of Artificial Sequence: Synthetic oligonucleotide
cguguucgcauucagcacc

SEQ ID NO: 403921 - RNA, 19 nt, Artificial Sequence
  Description of Artificial Sequence: Synthetic oligonucleotide
agcuccgcauggcuuggag

SEQ ID NO: 403922 - RNA, 19 nt, Artificial Sequence
  Description of Artificial Sequence: Synthetic oligonucleotide
ccuguguaaccccucugcg

SEQ ID NO: 403923 - RNA, 19 nt, Artificial Sequence
  Description of Artificial Sequence: Synthetic oligonucleotide
guucgcauucagcaccguc

SEQ ID NO: 403924 - RNA, 19 nt, Artificial Sequence
  Description of Artificial Sequence: Synthetic oligonucleotide
gagaggcgagcauuaaccu

SEQ ID NO: 403925 - RNA, 19 nt, Artificial Sequence
  Description of Artificial Sequence: Synthetic oligonucleotide
gcguuaagaccucaguguc

SEQ ID NO: 403926 - RNA, 19 nt, Artificial Sequence
  Description of Artificial Sequence: Synthetic oligonucleotide
aggcuagcuccuuccacgu

SEQ ID NO: 403927 - RNA, 19 nt, Artificial Sequence
  Description of Artificial Sequence: Synthetic oligonucleotide
uuaccucucuacccacaua

SEQ ID NO: 403928 - RNA, 19 nt, Artificial Sequence
  Description of Artificial Sequence: Synthetic oligonucleotide
ucuccuaagcuaggcaguu

SEQ ID NO: 403929 - RNA, 19 nt, Artificial Sequence
  Description of Artificial Sequence: Synthetic oligonucleotide
agcggaaauggggcaggac

SEQ ID NO: 403930 - RNA, 19 nt, Artificial Sequence
  Description of Artificial Sequence: Synthetic oligonucleotide
guagugucuccacgcuagc

SEQ ID NO: 403931 - RNA, 19 nt, Artificial Sequence
  Description of Artificial Sequence: Synthetic oligonucleotide
uggaaacucuggacuuguc

SEQ ID NO: 403932 - RNA, 19 nt, Artificial Sequence
  Description of Artificial Sequence: Synthetic oligonucleotide
ucacccggugcauggugga

SEQ ID NO: 403933 - RNA, 19 nt, Artificial Sequence
  Description of Artificial Sequence: Synthetic oligonucleotide
uggcccgaaaguaggugua

SEQ ID NO: 403934 - RNA, 19 nt, Artificial Sequence
  Description of Artificial Sequence: Synthetic oligonucleotide
ugcucaccgcauuucucuc

SEQ ID NO: 403935 - RNA, 19 nt, Artificial Sequence
  Description of Artificial Sequence: Synthetic oligonucleotide
cagucauguauggagugca

SEQ ID NO: 403936 - RNA, 19 nt, Artificial Sequence
  Description of Artificial Sequence: Synthetic oligonucleotide
uguaaccccucugcggcuc

SEQ ID NO: 403937 - RNA, 19 nt, Artificial Sequence
  Description of Artificial Sequence: Synthetic oligonucleotide
uucccucacgucguaggcu

SEQ ID NO: 403938 - RNA, 19 nt, Artificial Sequence
  Description of Artificial Sequence: Synthetic oligonucleotide
ccuuguuguggcuagucca

SEQ ID NO: 403939 - RNA, 19 nt, Artificial Sequence
  Description of Artificial Sequence: Synthetic oligonucleotide
cacagucgagcgcaccgug

SEQ ID NO: 403940 - RNA, 19 nt, Artificial Sequence
  Description of Artificial Sequence: Synthetic oligonucleotide
uccuggcgugguuugcaac

SEQ ID NO: 403941 - RNA, 19 nt, Artificial Sequence
  Description of Artificial Sequence: Synthetic oligonucleotide
gcuccgcauggcuuggagg

SEQ ID NO: 403942 - RNA, 19 nt, Artificial Sequence
  Description of Artificial Sequence: Synthetic oligonucleotide
cgagcauuaaccuuguugu

SEQ ID NO: 403943 - RNA, 19 nt, Artificial Sequence
  Description of Artificial Sequence: Synthetic oligonucleotide
cacugaacauagcuccgca

SEQ ID NO: 403944 - RNA, 19 nt, Artificial Sequence
  Description of Artificial Sequence: Synthetic oligonucleotide
gccuuagcucuaaagggcc

SEQ ID NO: 403945 - RNA, 19 nt, Artificial Sequence
  Description of Artificial Sequence: Synthetic oligonucleotide
cucaauggguucacugcaa

SEQ ID NO: 403946 - RNA, 19 nt, Artificial Sequence
  Description of Artificial Sequence: Synthetic oligonucleotide
cgccuuagcucuaaagggc

SEQ ID NO: 403947 - RNA, 19 nt, Artificial Sequence
  Description of Artificial Sequence: Synthetic oligonucleotide
uuccuacguagugucucca

SEQ ID NO: 403948 - RNA, 19 nt, Artificial Sequence
  Description of Artificial Sequence: Synthetic oligonucleotide
gucggggcgaaggcgauac

SEQ ID NO: 403949 - RNA, 19 nt, Artificial Sequence
  Description of Artificial Sequence: Synthetic oligonucleotide
cccaaccccugcuuuaggc

SEQ ID NO: 403950 - RNA, 19 nt, Artificial Sequence
  Description of Artificial Sequence: Synthetic oligonucleotide
acguagugucuccacgcua

SEQ ID NO: 403951 - RNA, 19 nt, Artificial Sequence
  Description of Artificial Sequence: Synthetic oligonucleotide
guuugcaaccuuccacacu

SEQ ID NO: 403952 - RNA, 19 nt, Artificial Sequence
  Description of Artificial Sequence: Synthetic oligonucleotide
gucguaggcuagcuccuuc

SEQ ID NO: 403953 - RNA, 19 nt, Artificial Sequence
  Description of Artificial Sequence: Synthetic oligonucleotide
ucgagcgcaccguguucgc

SEQ ID NO: 403954 - RNA, 19 nt, Artificial Sequence
  Description of Artificial Sequence: Synthetic oligonucleotide
ggacagcaagauucaguac

SEQ ID NO: 403955 - RNA, 19 nt, Artificial Sequence
  Description of Artificial Sequence: Synthetic oligonucleotide
ccaaaggccgaccagggaa

SEQ ID NO: 403956 - RNA, 19 nt, Artificial Sequence
  Description of Artificial Sequence: Synthetic oligonucleotide
agcacacgaaggauacaga

SEQ ID NO: 403957 - RNA, 19 nt, Artificial Sequence
  Description of Artificial Sequence: Synthetic oligonucleotide
guuaccucucuacccacau

SEQ ID NO: 403958 - RNA, 19 nt, Artificial Sequence
  Description of Artificial Sequence: Synthetic oligonucleotide
gauuccaggucggccaugu

SEQ ID NO: 403959 - RNA, 19 nt, Artificial Sequence
  Description of Artificial Sequence: Synthetic oligonucleotide
guucacggagaggccacug

SEQ ID NO: 403960 - RNA, 19 nt, Artificial Sequence
  Description of Artificial Sequence: Synthetic oligonucleotide
accgcccaggcgccauugg

SEQ ID NO: 403961 - RNA, 19 nt, Artificial Sequence
  Description of Artificial Sequence: Synthetic oligonucleotide
guagcacgauggaaauuca

SEQ ID NO: 403962 - RNA, 19 nt, Artificial Sequence
  Description of Artificial Sequence: Synthetic oligonucleotide
ggcaaucgaaacacaguuc

SEQ ID NO: 403963 - RNA, 19 nt, Artificial Sequence
  Description of Artificial Sequence: Synthetic oligonucleotide
gcuuccuacguagugucuc

SEQ ID NO: 403964 - RNA, 19 nt, Artificial Sequence
  Description of Artificial Sequence: Synthetic oligonucleotide
cucuccuaagcuaggcagu

SEQ ID NO: 403965 - RNA, 19 nt, Artificial Sequence
  Description of Artificial Sequence: Synthetic oligonucleotide
gccuugaccccguauagcu

SEQ ID NO: 403966 - RNA, 19 nt, Artificial Sequence
  Description of Artificial Sequence: Synthetic oligonucleotide
ggccaauaccgccacaagu

SEQ ID NO: 403967 - RNA, 19 nt, Artificial Sequence
  Description of Artificial Sequence: Synthetic oligonucleotide
cauuccgaaacagcaggua

SEQ ID NO: 403968 - RNA, 19 nt, Artificial Sequence
  Description of Artificial Sequence: Synthetic oligonucleotide
acagucgagcgcaccgugu

SEQ ID NO: 403969 - RNA, 19 nt, Artificial Sequence
  Description of Artificial Sequence: Synthetic oligonucleotide
caggcagcguuaagaccuc

SEQ ID NO: 403970 - RNA, 19 nt, Artificial Sequence
  Description of Artificial Sequence: Synthetic oligonucleotide
ggcagcguuaagaccucag

SEQ ID NO: 403971 - RNA, 19 nt, Artificial Sequence
  Description of Artificial Sequence: Synthetic oligonucleotide
gcuuaugguugugguuggg

SEQ ID NO: 403972 - RNA, 19 nt, Artificial Sequence
  Description of Artificial Sequence: Synthetic oligonucleotide
ccuguaaccaugggccuug

SEQ ID NO: 403973 - RNA, 19 nt, Artificial Sequence
  Description of Artificial Sequence: Synthetic oligonucleotide
acgucguaggcuagcuccu

SEQ ID NO: 403974 - RNA, 19 nt, Artificial Sequence
  Description of Artificial Sequence: Synthetic oligonucleotide
aaggccgaccagggaagua

SEQ ID NO: 403975 - RNA, 19 nt, Artificial Sequence
  Description of Artificial Sequence: Synthetic oligonucleotide
cuccuaagcuaggcaguuc

SEQ ID NO: 403976 - RNA, 19 nt, Artificial Sequence
  Description of Artificial Sequence: Synthetic oligonucleotide
caauaccgccacaaguuuu

SEQ ID NO: 403977 - RNA, 19 nt, Artificial Sequence
  Description of Artificial Sequence: Synthetic oligonucleotide
uggcgugguuugcaaccuu

SEQ ID NO: 403978 - RNA, 19 nt, Artificial Sequence
  Description of Artificial Sequence: Synthetic oligonucleotide
ggcgccauuggagcgcagc

SEQ ID NO: 403979 - RNA, 19 nt, Artificial Sequence
  Description of Artificial Sequence: Synthetic oligonucleotide
gggaaagccccggaaaugu

SEQ ID NO: 403980 - RNA, 19 nt, Artificial Sequence
  Description of Artificial Sequence: Synthetic oligonucleotide
ccguguucgcauucagcac

SEQ ID NO: 403981 - RNA, 19 nt, Artificial Sequence
  Description of Artificial Sequence: Synthetic oligonucleotide
agcgcaccguguucgcauu

SEQ ID NO: 403982 - RNA, 19 nt, Artificial Sequence
  Description of Artificial Sequence: Synthetic oligonucleotide
ucggggcgaaggcgauaca

SEQ ID NO: 403983 - RNA, 19 nt, Artificial Sequence
  Description of Artificial Sequence: Synthetic oligonucleotide
uguucgcauucagcaccgu

SEQ ID NO: 403984 - RNA, 19 nt, Artificial Sequence
  Description of Artificial Sequence: Synthetic oligonucleotide
ggauccucucuucauggau

SEQ ID NO: 403985 - RNA, 19 nt, Artificial Sequence
  Description of Artificial Sequence: Synthetic oligonucleotide
ggcgugguuugcaaccuuc

SEQ ID NO: 403986 - RNA, 19 nt, Artificial Sequence
  Description of Artificial Sequence: Synthetic oligonucleotide
gccaauaccgccacaaguu

SEQ ID NO: 403987 - RNA, 19 nt, Artificial Sequence
  Description of Artificial Sequence: Synthetic oligonucleotide
ccgaccagggaaguacuug

SEQ ID NO: 403988 - RNA, 19 nt, Artificial Sequence
  Description of Artificial Sequence: Synthetic oligonucleotide
agguagcacgauggaaauu

SEQ ID NO: 403989 - RNA, 19 nt, Artificial Sequence
  Description of Artificial Sequence: Synthetic oligonucleotide
guagguguacauggcuagu

SEQ ID NO: 403990 - RNA, 19 nt, Artificial Sequence
  Description of Artificial Sequence: Synthetic oligonucleotide
cuucuacgagaaagaugua

SEQ ID NO: 403991 - RNA, 19 nt, Artificial Sequence
  Description of Artificial Sequence: Synthetic oligonucleotide
cugccaaaacaggaaugua

SEQ ID NO: 403992 - RNA, 19 nt, Artificial Sequence
  Description of Artificial Sequence: Synthetic oligonucleotide
aggcgagcauuaaccuugu

SEQ ID NO: 403993 - RNA, 19 nt, Artificial Sequence
  Description of Artificial Sequence: Synthetic oligonucleotide
ccuaagcuaggcaguucca

SEQ ID NO: 403994 - RNA, 19 nt, Artificial Sequence
  Description of Artificial Sequence: Synthetic oligonucleotide
gcgccauuggagcgcagca

SEQ ID NO: 403995 - RNA, 19 nt, Artificial Sequence
  Description of Artificial Sequence: Synthetic oligonucleotide
ccgucaccgggucugagga

SEQ ID NO: 403996 - RNA, 19 nt, Artificial Sequence
  Description of Artificial Sequence: Synthetic oligonucleotide
cgauggaaauucaacgacu

SEQ ID NO: 403997 - RNA, 19 nt, Artificial Sequence
  Description of Artificial Sequence: Synthetic oligonucleotide
ccaggcgccauuggagcgc

SEQ ID NO: 403998 - RNA, 19 nt, Artificial Sequence
  Description of Artificial Sequence: Synthetic oligonucleotide
gccaaaggccgaccaggga

SEQ ID NO: 403999 - RNA, 19 nt, Artificial Sequence
  Description of Artificial Sequence: Synthetic oligonucleotide
aggcagcguuaagaccuca

SEQ ID NO: 404000 - RNA, 19 nt, Artificial Sequence
  Description of Artificial Sequence: Synthetic oligonucleotide
cggggcgaaggcgauacag

SEQ ID NO: 404001 - RNA, 19 nt, Artificial Sequence
  Description of Artificial Sequence: Synthetic oligonucleotide
caccgcccaggcgccauug

SEQ ID NO: 404002 - RNA, 19 nt, Artificial Sequence
  Description of Artificial Sequence: Synthetic oligonucleotide
gcccgaaaguagguguaca

SEQ ID NO: 404003 - RNA, 19 nt, Artificial Sequence
  Description of Artificial Sequence: Synthetic oligonucleotide
gcgauacaguggccacacc

SEQ ID NO: 404004 - RNA, 19 nt, Artificial Sequence
  Description of Artificial Sequence: Synthetic oligonucleotide
guaaccccucugcggcucu

SEQ ID NO: 404005 - RNA, 19 nt, Artificial Sequence
  Description of Artificial Sequence: Synthetic oligonucleotide
ggcuauugggugacuagau

SEQ ID NO: 404006 - RNA, 19 nt, Artificial Sequence
  Description of Artificial Sequence: Synthetic oligonucleotide
ggagcgcagcacagucgag

SEQ ID NO: 404007 - RNA, 19 nt, Artificial Sequence
  Description of Artificial Sequence: Synthetic oligonucleotide
cagucgagcgcaccguguu

SEQ ID NO: 404008 - RNA, 19 nt, Artificial Sequence
  Description of Artificial Sequence: Synthetic oligonucleotide
caggcgccauuggagcgca

SEQ ID NO: 404009 - RNA, 19 nt, Artificial Sequence
  Description of Artificial Sequence: Synthetic oligonucleotide
cuggcgugguuugcaaccu

SEQ ID NO: 404010 - RNA, 19 nt, Artificial Sequence
  Description of Artificial Sequence: Synthetic oligonucleotide
cagcggaaauggggcagga

SEQ ID NO: 404011 - RNA, 19 nt, Artificial Sequence
  Description of Artificial Sequence: Synthetic oligonucleotide
cguuaagaccucagugucu

SEQ ID NO: 404012 - RNA, 19 nt, Artificial Sequence
  Description of Artificial Sequence: Synthetic oligonucleotide
cuuccacgucggggcgaag

SEQ ID NO: 404013 - RNA, 19 nt, Artificial Sequence
  Description of Artificial Sequence: Synthetic oligonucleotide
gccccggaaauguggcuua

SEQ ID NO: 404014 - RNA, 19 nt, Artificial Sequence
  Description of Artificial Sequence: Synthetic oligonucleotide
ccuuagcucuaaagggccu

SEQ ID NO: 404015 - RNA, 19 nt, Artificial Sequence
  Description of Artificial Sequence: Synthetic oligonucleotide
cguaggcuagcuccuucca

SEQ ID NO: 404016 - RNA, 19 nt, Artificial Sequence
  Description of Artificial Sequence: Synthetic oligonucleotide
ccaauaccgccacaaguuu

SEQ ID NO: 404017 - RNA, 19 nt, Artificial Sequence
  Description of Artificial Sequence: Synthetic oligonucleotide
cuguaccgacuugccugca

SEQ ID NO: 404018 - RNA, 19 nt, Artificial Sequence
  Description of Artificial Sequence: Synthetic oligonucleotide
acgucggggcgaaggcgau

SEQ ID NO: 404019 - RNA, 19 nt, Artificial Sequence
  Description of Artificial Sequence: Synthetic oligonucleotide
gcgcaccguguucgcauuc

SEQ ID NO: 404020 - RNA, 19 nt, Artificial Sequence
  Description of Artificial Sequence: Synthetic oligonucleotide
ccgcccaggcgccauugga

SEQ ID NO: 404021 - RNA, 19 nt, Artificial Sequence
  Description of Artificial Sequence: Synthetic oligonucleotide
ccugagaggcgagcauuaa

SEQ ID NO: 404022 - RNA, 19 nt, Artificial Sequence
  Description of Artificial Sequence: Synthetic oligonucleotide
gcacagucgagcgcaccgu

SEQ ID NO: 404023 - RNA, 19 nt, Artificial Sequence
  Description of Artificial Sequence: Synthetic oligonucleotide
ggccgaccagggaaguacu

SEQ ID NO: 404024 - RNA, 19 nt, Artificial Sequence
  Description of Artificial Sequence: Synthetic oligonucleotide
aggcgccauuggagcgcag

SEQ ID NO: 404025 - RNA, 19 nt, Artificial Sequence
  Description of Artificial Sequence: Synthetic oligonucleotide
ggcgagcauuaaccuuguu

SEQ ID NO: 404026 - RNA, 19 nt, Artificial Sequence
  Description of Artificial Sequence: Synthetic oligonucleotide
gccgaccagggaaguacuu

SEQ ID NO: 404027 - RNA, 19 nt, Artificial Sequence
  Description of Artificial Sequence: Synthetic oligonucleotide
ccccucgccuuagcucuaa

SEQ ID NO: 404028 - RNA, 19 nt, Artificial Sequence
  Description of Artificial Sequence: Synthetic oligonucleotide
cgucggggcgaaggcgaua

SEQ ID NO: 404029 - RNA, 19 nt, Artificial Sequence
  Description of Artificial Sequence: Synthetic oligonucleotide
cgucguaggcuagcuccuu

SEQ ID NO: 404030 - RNA, 19 nt, Artificial Sequence
  Description of Artificial Sequence: Synthetic oligonucleotide
acuaggauaaguuuguugc

SEQ ID NO: 404031 - RNA, 19 nt, Artificial Sequence
  Description of Artificial Sequence: Synthetic oligonucleotide
cacaauaaaacucaggucg

SEQ ID NO: 404032 - RNA, 19 nt, Artificial Sequence
  Description of Artificial Sequence: Synthetic oligonucleotide
uaagguauaauacauuagc

SEQ ID NO: 404033 - RNA, 19 nt, Artificial Sequence
  Description of Artificial Sequence: Synthetic oligonucleotide
ucauugauuggucauagcc

SEQ ID NO: 404034 - RNA, 19 nt, Artificial Sequence
  Description of Artificial Sequence: Synthetic oligonucleotide
aagauaaugguauucugug

SEQ ID NO: 404035 - RNA, 19 nt, Artificial Sequence
  Description of Artificial Sequence: Synthetic oligonucleotide
aacuacucaugacagugcc

SEQ ID NO: 404036 - RNA, 19 nt, Artificial Sequence
  Description of Artificial Sequence: Synthetic oligonucleotide
ugguaaauaagagagaagc

SEQ ID NO: 404037 - RNA, 19 nt, Artificial Sequence
  Description of Artificial Sequence: Synthetic oligonucleotide
cuuguaaugaguuauuaug

SEQ ID NO: 404038 - RNA, 19 nt, Artificial Sequence
  Description of Artificial Sequence: Synthetic oligonucleotide
aaugacgcaacuaaagggg

SEQ ID NO: 404039 - RNA, 19 nt, Artificial Sequence
  Description of Artificial Sequence: Synthetic oligonucleotide
aagguauaauacauuagcc

SEQ ID NO: 404040 - RNA, 19 nt, Artificial Sequence
  Description of Artificial Sequence: Synthetic oligonucleotide
uuauuaugccaauauuucg

SEQ ID NO: 404041 - RNA, 19 nt, Artificial Sequence
  Description of Artificial Sequence: Synthetic oligonucleotide
uucaugaaaacauaacuga

SEQ ID NO: 404042 - RNA, 19 nt, Artificial Sequence
  Description of Artificial Sequence: Synthetic oligonucleotide
aaucuaacgacacacacuu

SEQ ID NO: 404043 - RNA, 19 nt, Artificial Sequence
  Description of Artificial Sequence: Synthetic oligonucleotide
uuguaaugaguuauuaugc

SEQ ID NO: 404044 - RNA, 19 nt, Artificial Sequence
  Description of Artificial Sequence: Synthetic oligonucleotide
ucgaaaagcagacucaagc

SEQ ID NO: 404045 - RNA, 19 nt, Artificial Sequence
  Description of Artificial Sequence: Synthetic oligonucleotide
caaagcuacagaaagauuc

SEQ ID NO: 404046 - RNA, 19 nt, Artificial Sequence
  Description of Artificial Sequence: Synthetic oligonucleotide
augaccaauagccuaaggg

SEQ ID NO: 404047 - RNA, 19 nt, Artificial Sequence
  Description of Artificial Sequence: Synthetic oligonucleotide
agacuguccagccucaucc

SEQ ID NO: 404048 - RNA, 19 nt, Artificial Sequence
  Description of Artificial Sequence: Synthetic oligonucleotide
auaagagagaagcaaagug

SEQ ID NO: 404049 - RNA, 19 nt, Artificial Sequence
  Description of Artificial Sequence: Synthetic oligonucleotide
uaugguacagagaagcagc

SEQ ID NO: 404050 - RNA, 19 nt, Artificial Sequence
  Description of Artificial Sequence: Synthetic oligonucleotide
aaagcuacagaaagauucc

SEQ ID NO: 404051 - RNA, 19 nt, Artificial Sequence
  Description of Artificial Sequence: Synthetic oligonucleotide
aaagauucccaaugugcac

SEQ ID NO: 404052 - RNA, 19 nt, Artificial Sequence
  Description of Artificial Sequence: Synthetic oligonucleotide
ucuaacgacacacacuuac

SEQ ID NO: 404053 - RNA, 19 nt, Artificial Sequence
  Description of Artificial Sequence: Synthetic oligonucleotide
uuaauaauggcccacgcuu

SEQ ID NO: 404054 - RNA, 19 nt, Artificial Sequence
  Description of Artificial Sequence: Synthetic oligonucleotide
aagaugucuuggcaagucc

SEQ ID NO: 404055 - RNA, 19 nt, Artificial Sequence
  Description of Artificial Sequence: Synthetic oligonucleotide
acaaugacgcaacuaaagg

SEQ ID NO: 404056 - RNA, 19 nt, Artificial Sequence
  Description of Artificial Sequence: Synthetic oligonucleotide
uccaaguguauacaauugg

SEQ ID NO: 404057 - RNA, 19 nt, Artificial Sequence
  Description of Artificial Sequence: Synthetic oligonucleotide
uaucccgucguucugaacc

SEQ ID NO: 404058 - RNA, 19 nt, Artificial Sequence
  Description of Artificial Sequence: Synthetic oligonucleotide
accucuuuaauuuucgaag

SEQ ID NO: 404059 - RNA, 19 nt, Artificial Sequence
  Description of Artificial Sequence: Synthetic oligonucleotide
aauaccuuuacuaacugga

SEQ ID NO: 404060 - RNA, 19 nt, Artificial Sequence
  Description of Artificial Sequence: Synthetic oligonucleotide
uccaauugaaccuugcaca

SEQ ID NO: 404061 - RNA, 19 nt, Artificial Sequence
  Description of Artificial Sequence: Synthetic oligonucleotide
acuaaaacccagcugaugu

SEQ ID NO: 404062 - RNA, 19 nt, Artificial Sequence
  Description of Artificial Sequence: Synthetic oligonucleotide
uuaacuacucaugacagug

SEQ ID NO: 404063 - RNA, 19 nt, Artificial Sequence
  Description of Artificial Sequence: Synthetic oligonucleotide
auccaauugaaccuugcac

SEQ ID NO: 404064 - RNA, 19 nt, Artificial Sequence
  Description of Artificial Sequence: Synthetic oligonucleotide
uguaaugaguuauuaugcc

SEQ ID NO: 404065 - RNA, 19 nt, Artificial Sequence
  Description of Artificial Sequence: Synthetic oligonucleotide
uuuaguacacucuuguuau

SEQ ID NO: 404066 - RNA, 19 nt, Artificial Sequence
  Description of Artificial Sequence: Synthetic oligonucleotide
ucugaugaacaccgaaugg

SEQ ID NO: 404067 - RNA, 19 nt, Artificial Sequence
  Description of Artificial Sequence: Synthetic oligonucleotide
caaugacgcaacuaaaggg

SEQ ID NO: 404068 - RNA, 19 nt, Artificial Sequence
  Description of Artificial Sequence: Synthetic oligonucleotide
uaaugaguuauuaugccaa

SEQ ID NO: 404069 - RNA, 19 nt, Artificial Sequence
  Description of Artificial Sequence: Synthetic oligonucleotide
aaugguauucuguguuuuc

SEQ ID NO: 404070 - RNA, 19 nt, Artificial Sequence
  Description of Artificial Sequence: Synthetic oligonucleotide
agggcauguucuuuuaacc

SEQ ID NO: 404071 - RNA, 19 nt, Artificial Sequence
  Description of Artificial Sequence: Synthetic oligonucleotide
ugaguuauuaugccaauau

SEQ ID NO: 404072 - RNA, 19 nt, Artificial Sequence
  Description of Artificial Sequence: Synthetic oligonucleotide
aaaacucauuuacaggaga

SEQ ID NO: 404073 - RNA, 19 nt, Artificial Sequence
  Description of Artificial Sequence: Synthetic oligonucleotide
acacagguaacaauuauac

SEQ ID NO: 404074 - RNA, 19 nt, Artificial Sequence
  Description of Artificial Sequence: Synthetic oligonucleotide
gauuaacuacucaugacag

SEQ ID NO: 404075 - RNA, 19 nt, Artificial Sequence
  Description of Artificial Sequence: Synthetic oligonucleotide
aaguagucagggcauguuc

SEQ ID NO: 404076 - RNA, 19 nt, Artificial Sequence
  Description of Artificial Sequence: Synthetic oligonucleotide
ugaauaaguggagaaagug

SEQ ID NO: 404077 - RNA, 19 nt, Artificial Sequence
  Description of Artificial Sequence: Synthetic oligonucleotide
agguauaauacauuagccu

SEQ ID NO: 404078 - RNA, 19 nt, Artificial Sequence
  Description of Artificial Sequence: Synthetic oligonucleotide
ucgaagucggucuugaaga

SEQ ID NO: 404079 - RNA, 19 nt, Artificial Sequence
  Description of Artificial Sequence: Synthetic oligonucleotide
acuuacaauccgcugagag

SEQ ID NO: 404080 - RNA, 19 nt, Artificial Sequence
  Description of Artificial Sequence: Synthetic oligonucleotide
aagugucucaacuucacaa

SEQ ID NO: 404081 - RNA, 19 nt, Artificial Sequence
  Description of Artificial Sequence: Synthetic oligonucleotide
gauggacuagcccagggag

SEQ ID NO: 404082 - RNA, 19 nt, Artificial Sequence
  Description of Artificial Sequence: Synthetic oligonucleotide
aggauaaguuuguugcagc

SEQ ID NO: 404083 - RNA, 19 nt, Artificial Sequence
  Description of Artificial Sequence: Synthetic oligonucleotide
ugugguaaauaagagagaa

SEQ ID NO: 404084 - RNA, 19 nt, Artificial Sequence
  Description of Artificial Sequence: Synthetic oligonucleotide
augguaagcuguaaaaucg

SEQ ID NO: 404085 - RNA, 19 nt, Artificial Sequence
  Description of Artificial Sequence: Synthetic oligonucleotide
aaaagaucccaauguuuug

SEQ ID NO: 404086 - RNA, 19 nt, Artificial Sequence
  Description of Artificial Sequence: Synthetic oligonucleotide
ucucaacuucacaagacug

SEQ ID NO: 404087 - RNA, 19 nt, Artificial Sequence
  Description of Artificial Sequence: Synthetic oligonucleotide
augucuauaguuuggguca

SEQ ID NO: 404088 - RNA, 19 nt, Artificial Sequence
  Description of Artificial Sequence: Synthetic oligonucleotide
aggauuaacuacucaugac

SEQ ID NO: 404089 - RNA, 19 nt, Artificial Sequence
  Description of Artificial Sequence: Synthetic oligonucleotide
aggaggauaacaaaagauc

SEQ ID NO: 404090 - RNA, 19 nt, Artificial Sequence
  Description of Artificial Sequence: Synthetic oligonucleotide
acagguaagguauaauaca

SEQ ID NO: 404091 - RNA, 19 nt, Artificial Sequence
  Description of Artificial Sequence: Synthetic oligonucleotide
ugacauucaaucuuugcaa

SEQ ID NO: 404092 - RNA, 19 nt, Artificial Sequence
  Description of Artificial Sequence: Synthetic oligonucleotide
caaaagaugucuuggcaag

SEQ ID NO: 404093 - RNA, 19 nt, Artificial Sequence
  Description of Artificial Sequence: Synthetic oligonucleotide
uuaugaauccagagcauac

SEQ ID NO: 404094 - RNA, 19 nt, Artificial Sequence
  Description of Artificial Sequence: Synthetic oligonucleotide
aaaaucggcagccugccaa

SEQ ID NO: 404095 - RNA, 19 nt, Artificial Sequence
  Description of Artificial Sequence: Synthetic oligonucleotide
ggagcuacuauagaaaccg

SEQ ID NO: 404096 - RNA, 19 nt, Artificial Sequence
  Description of Artificial Sequence: Synthetic oligonucleotide
uccaaaucuaacgacacac

SEQ ID NO: 404097 - RNA, 19 nt, Artificial Sequence
  Description of Artificial Sequence: Synthetic oligonucleotide
uguacugaaugguaagcug

SEQ ID NO: 404098 - RNA, 19 nt, Artificial Sequence
  Description of Artificial Sequence: Synthetic oligonucleotide
gaugguggcacaauaaaac

SEQ ID NO: 404099 - RNA, 19 nt, Artificial Sequence
  Description of Artificial Sequence: Synthetic oligonucleotide
aaagaugucuuggcaaguc

SEQ ID NO: 404100 - RNA, 19 nt, Artificial Sequence
  Description of Artificial Sequence: Synthetic oligonucleotide
aaccuugcacagcacuagc

SEQ ID NO: 404101 - RNA, 19 nt, Artificial Sequence
  Description of Artificial Sequence: Synthetic oligonucleotide
uagccuugaaauaacauuu

SEQ ID NO: 404102 - RNA, 19 nt, Artificial Sequence
  Description of Artificial Sequence: Synthetic oligonucleotide
uuucgggucuccuacuagg

SEQ ID NO: 404103 - RNA, 19 nt, Artificial Sequence
  Description of Artificial Sequence: Synthetic oligonucleotide
uaagcagucguggaucucg

SEQ ID NO: 404104 - RNA, 19 nt, Artificial Sequence
  Description of Artificial Sequence: Synthetic oligonucleotide
ucaagcagcuugcagaauc

SEQ ID NO: 404105 - RNA, 19 nt, Artificial Sequence
  Description of Artificial Sequence: Synthetic oligonucleotide
aauccaauugaaccuugca

SEQ ID NO: 404106 - RNA, 19 nt, Artificial Sequence
  Description of Artificial Sequence: Synthetic oligonucleotide
cacaaugacgcaacuaaag

SEQ ID NO: 404107 - RNA, 19 nt, Artificial Sequence
  Description of Artificial Sequence: Synthetic oligonucleotide
aauaauggcccacgcuuug

SEQ ID NO: 404108 - RNA, 19 nt, Artificial Sequence
  Description of Artificial Sequence: Synthetic oligonucleotide
ugagucauuaucccgucgu

SEQ ID NO: 404109 - RNA, 19 nt, Artificial Sequence
  Description of Artificial Sequence: Synthetic oligonucleotide
aauaaaacucaggucgugu

SEQ ID NO: 404110 - RNA, 19 nt, Artificial Sequence
  Description of Artificial Sequence: Synthetic oligonucleotide
auugauuggucauagccau

SEQ ID NO: 404111 - RNA, 19 nt, Artificial Sequence
  Description of Artificial Sequence: Synthetic oligonucleotide
uguguauggugucacuagc

SEQ ID NO: 404112 - RNA, 19 nt, Artificial Sequence
  Description of Artificial Sequence: Synthetic oligonucleotide
aaccgucucuucuuagcac

SEQ ID NO: 404113 - RNA, 19 nt, Artificial Sequence
  Description of Artificial Sequence: Synthetic oligonucleotide
gauucuaaggcaaggcuug

SEQ ID NO: 404114 - RNA, 19 nt, Artificial Sequence
  Description of Artificial Sequence: Synthetic oligonucleotide
ucuuaauaauggcccacgc

SEQ ID NO: 404115 - RNA, 19 nt, Artificial Sequence
  Description of Artificial Sequence: Synthetic oligonucleotide
ugacaugagacuccaagau

SEQ ID NO: 404116 - RNA, 19 nt, Artificial Sequence
  Description of Artificial Sequence: Synthetic oligonucleotide
aaacauaacugaacaaacu

SEQ ID NO: 404117 - RNA, 19 nt, Artificial Sequence
  Description of Artificial Sequence: Synthetic oligonucleotide
uaguuugggucacaggucu

SEQ ID NO: 404118 - RNA, 19 nt, Artificial Sequence
  Description of Artificial Sequence: Synthetic oligonucleotide
aguuauuaugccaauauuu

SEQ ID NO: 404119 - RNA, 19 nt, Artificial Sequence
  Description of Artificial Sequence: Synthetic oligonucleotide
auagccuaaggguuagaag

SEQ ID NO: 404120 - RNA, 19 nt, Artificial Sequence
  Description of Artificial Sequence: Synthetic oligonucleotide
gaaaccgucucuucuuagc

SEQ ID NO: 404121 - RNA, 19 nt, Artificial Sequence
  Description of Artificial Sequence: Synthetic oligonucleotide
ugcaucaugucuauaguuu

SEQ ID NO: 404122 - RNA, 19 nt, Artificial Sequence
  Description of Artificial Sequence: Synthetic oligonucleotide
uuugaauuuugaccucaca

SEQ ID NO: 404123 - RNA, 19 nt, Artificial Sequence
  Description of Artificial Sequence: Synthetic oligonucleotide
aaggaggauaacaaaagau

SEQ ID NO: 404124 - RNA, 19 nt, Artificial Sequence
  Description of Artificial Sequence: Synthetic oligonucleotide
aacugaacaaacuguggua

SEQ ID NO: 404125 - RNA, 19 nt, Artificial Sequence
  Description of Artificial Sequence: Synthetic oligonucleotide
gacacacacuuacaauccg

SEQ ID NO: 404126 - RNA, 19 nt, Artificial Sequence
  Description of Artificial Sequence: Synthetic oligonucleotide
uggcacaauaaaacucagg

SEQ ID NO: 404127 - RNA, 19 nt, Artificial Sequence
  Description of Artificial Sequence: Synthetic oligonucleotide
ggaggauaacaaaagaucc

SEQ ID NO: 404128 - RNA, 19 nt, Artificial Sequence
  Description of Artificial Sequence: Synthetic oligonucleotide
agcacuagcccugacacag

SEQ ID NO: 404129 - RNA, 19 nt, Artificial Sequence
  Description of Artificial Sequence: Synthetic oligonucleotide
ggauuaacuacucaugaca

SEQ ID NO: 404130 - RNA, 19 nt, Artificial Sequence
  Description of Artificial Sequence: Synthetic oligonucleotide
uaacgacacacacuuacaa

SEQ ID NO: 404131 - RNA, 19 nt, Artificial Sequence
  Description of Artificial Sequence: Synthetic oligonucleotide
gaggauaacaaaagauccc

SEQ ID NO: 404132 - RNA, 19 nt, Artificial Sequence
  Description of Artificial Sequence: Synthetic oligonucleotide
ucccuucuaugacugaacc

SEQ ID NO: 404133 - RNA, 19 nt, Artificial Sequence
  Description of Artificial Sequence: Synthetic oligonucleotide
gaagaggagaccuauggcu

SEQ ID NO: 404134 - RNA, 19 nt, Artificial Sequence
  Description of Artificial Sequence: Synthetic oligonucleotide
uugccaggaauccaauuga

SEQ ID NO: 404135 - RNA, 19 nt, Artificial Sequence
  Description of Artificial Sequence: Synthetic oligonucleotide
gcuuucauagaaaugacug

SEQ ID NO: 404136 - RNA, 19 nt, Artificial Sequence
  Description of Artificial Sequence: Synthetic oligonucleotide
aaugaguuauuaugccaau

SEQ ID NO: 404137 - RNA, 19 nt, Artificial Sequence
  Description of Artificial Sequence: Synthetic oligonucleotide
guuagaagguauuuucauc

SEQ ID NO: 404138 - RNA, 19 nt, Artificial Sequence
  Description of Artificial Sequence: Synthetic oligonucleotide
agacagguaagguauaaua

SEQ ID NO: 404139 - RNA, 19 nt, Artificial Sequence
  Description of Artificial Sequence: Synthetic oligonucleotide
agcauccaaucuccuaagc

SEQ ID NO: 404140 - RNA, 19 nt, Artificial Sequence
  Description of Artificial Sequence: Synthetic oligonucleotide
aaugacugugggagggagc

SEQ ID NO: 404141 - RNA, 19 nt, Artificial Sequence
  Description of Artificial Sequence: Synthetic oligonucleotide
uuguccucgaaaagcagac

SEQ ID NO: 404142 - RNA, 19 nt, Artificial Sequence
  Description of Artificial Sequence: Synthetic oligonucleotide
aggauaacaaaagauccca

SEQ ID NO: 404143 - RNA, 19 nt, Artificial Sequence
  Description of Artificial Sequence: Synthetic oligonucleotide
guuuaguacacucuuguua

SEQ ID NO: 404144 - RNA, 19 nt, Artificial Sequence
  Description of Artificial Sequence: Synthetic oligonucleotide
aucauugauuggucauagc

SEQ ID NO: 404145 - RNA, 19 nt, Artificial Sequence
  Description of Artificial Sequence: Synthetic oligonucleotide
cucugaugaacaccgaaug

SEQ ID NO: 404146 - RNA, 19 nt, Artificial Sequence
  Description of Artificial Sequence: Synthetic oligonucleotide
acauuuauguaugagucau

SEQ ID NO: 404147 - RNA, 19 nt, Artificial Sequence
  Description of Artificial Sequence: Synthetic oligonucleotide
uauuucgggaggaaauauc

SEQ ID NO: 404148 - RNA, 19 nt, Artificial Sequence
  Description of Artificial Sequence: Synthetic oligonucleotide
gaccuauggcuguucauag

SEQ ID NO: 404149 - RNA, 19 nt, Artificial Sequence
  Description of Artificial Sequence: Synthetic oligonucleotide
uccuguacugaaugguaag

SEQ ID NO: 404150 - RNA, 19 nt, Artificial Sequence
  Description of Artificial Sequence: Synthetic oligonucleotide
cauugauuggucauagcca

SEQ ID NO: 404151 - RNA, 19 nt, Artificial Sequence
  Description of Artificial Sequence: Synthetic oligonucleotide
aauagccuaaggguuagaa

SEQ ID NO: 404152 - RNA, 19 nt, Artificial Sequence
  Description of Artificial Sequence: Synthetic oligonucleotide
uacaggagauuauucacau

SEQ ID NO: 404153 - RNA, 19 nt, Artificial Sequence
  Description of Artificial Sequence: Synthetic oligonucleotide
aucgugccaucauugauug

SEQ ID NO: 404154 - RNA, 19 nt, Artificial Sequence
  Description of Artificial Sequence: Synthetic oligonucleotide
aauauuucgggaggaaaua

SEQ ID NO: 404155 - RNA, 19 nt, Artificial Sequence
  Description of Artificial Sequence: Synthetic oligonucleotide
aaagugagacagguaaggu

SEQ ID NO: 404156 - RNA, 19 nt, Artificial Sequence
  Description of Artificial Sequence: Synthetic oligonucleotide
aggauucuaaggcaaggcu

SEQ ID NO: 404157 - RNA, 19 nt, Artificial Sequence
  Description of Artificial Sequence: Synthetic oligonucleotide
gacucaagcagcaaaccac

SEQ ID NO: 404158 - RNA, 19 nt, Artificial Sequence
  Description of Artificial Sequence: Synthetic oligonucleotide
uguauggugucacuagcua

SEQ ID NO: 404159 - RNA, 19 nt, Artificial Sequence
  Description of Artificial Sequence: Synthetic oligonucleotide
agauaaugguauucugugu

SEQ ID NO: 404160 - RNA, 19 nt, Artificial Sequence
  Description of Artificial Sequence: Synthetic oligonucleotide
ucguguaauggugacauuc

SEQ ID NO: 404161 - RNA, 19 nt, Artificial Sequence
  Description of Artificial Sequence: Synthetic oligonucleotide
caaguguauacaauuggca

SEQ ID NO: 404162 - RNA, 19 nt, Artificial Sequence
  Description of Artificial Sequence: Synthetic oligonucleotide
uaugaauccagagcauaca

SEQ ID NO: 404163 - RNA, 19 nt, Artificial Sequence
  Description of Artificial Sequence: Synthetic oligonucleotide
guaugguacagagaagcag

SEQ ID NO: 404164 - RNA, 19 nt, Artificial Sequence
  Description of Artificial Sequence: Synthetic oligonucleotide
caggagcuacuauagaaac

SEQ ID NO: 404165 - RNA, 19 nt, Artificial Sequence
  Description of Artificial Sequence: Synthetic oligonucleotide
auuaacuacucaugacagu

SEQ ID NO: 404166 - RNA, 19 nt, Artificial Sequence
  Description of Artificial Sequence: Synthetic oligonucleotide
cagaaucgugccaucauug

SEQ ID NO: 404167 - RNA, 19 nt, Artificial Sequence
  Description of Artificial Sequence: Synthetic oligonucleotide
agauuauucacauguucuu

SEQ ID NO: 404168 - RNA, 19 nt, Artificial Sequence
  Description of Artificial Sequence: Synthetic oligonucleotide
uccucgaaaagcagacuca

SEQ ID NO: 404169 - RNA, 19 nt, Artificial Sequence
  Description of Artificial Sequence: Synthetic oligonucleotide
auuucgggaggaaauaucu

SEQ ID NO: 404170 - RNA, 19 nt, Artificial Sequence
  Description of Artificial Sequence: Synthetic oligonucleotide
uaauggcccacgcuuugag

SEQ ID NO: 404171 - RNA, 19 nt, Artificial Sequence
  Description of Artificial Sequence: Synthetic oligonucleotide
gauaaugguauucuguguu

SEQ ID NO: 404172 - RNA, 19 nt, Artificial Sequence
  Description of Artificial Sequence: Synthetic oligonucleotide
ugaugaacaccgaaugguu

SEQ ID NO: 404173 - RNA, 19 nt, Artificial Sequence
  Description of Artificial Sequence: Synthetic oligonucleotide
uucgggaggaaauaucuuu

SEQ ID NO: 404174 - RNA, 19 nt, Artificial Sequence
  Description of Artificial Sequence: Synthetic oligonucleotide
gguaagguauaauacauua

SEQ ID NO: 404175 - RNA, 19 nt, Artificial Sequence
  Description of Artificial Sequence: Synthetic oligonucleotide
agaggauucuaaggcaagg

SEQ ID NO: 404176 - RNA, 19 nt, Artificial Sequence
  Description of Artificial Sequence: Synthetic oligonucleotide
aggagcuacuauagaaacc

SEQ ID NO: 404177 - RNA, 19 nt, Artificial Sequence
  Description of Artificial Sequence: Synthetic oligonucleotide
cuauggcuguucauagggg

SEQ ID NO: 404178 - RNA, 19 nt, Artificial Sequence
  Description of Artificial Sequence: Synthetic oligonucleotide
gucuuaauaauggcccacg

SEQ ID NO: 404179 - RNA, 19 nt, Artificial Sequence
  Description of Artificial Sequence: Synthetic oligonucleotide
ccuauggcuguucauaggg

SEQ ID NO: 404180 - RNA, 19 nt, Artificial Sequence
  Description of Artificial Sequence: Synthetic oligonucleotide
caggagauuauucacaugu

SEQ ID NO: 404181 - RNA, 19 nt, Artificial Sequence
  Description of Artificial Sequence: Synthetic oligonucleotide
cuguggucgccccugaacc

SEQ ID NO: 404182 - RNA, 19 nt, Artificial Sequence
  Description of Artificial Sequence: Synthetic oligonucleotide
cacaagacuguccagccuc

SEQ ID NO: 404183 - RNA, 19 nt, Artificial Sequence
  Description of Artificial Sequence: Synthetic oligonucleotide
agucauuaucccgucguuc

SEQ ID NO: 404184 - RNA, 19 nt, Artificial Sequence
  Description of Artificial Sequence: Synthetic oligonucleotide
accaacuuuauuucuugaa

SEQ ID NO: 404185 - RNA, 19 nt, Artificial Sequence
  Description of Artificial Sequence: Synthetic oligonucleotide
ucagcaugugaugagucac

SEQ ID NO: 404186 - RNA, 19 nt, Artificial Sequence
  Description of Artificial Sequence: Synthetic oligonucleotide
ugacacagguaacaauuau

SEQ ID NO: 404187 - RNA, 19 nt, Artificial Sequence
  Description of Artificial Sequence: Synthetic oligonucleotide
cuaaaacccagcugaugug

SEQ ID NO: 404188 - RNA, 19 nt, Artificial Sequence
  Description of Artificial Sequence: Synthetic oligonucleotide
ggcacaauaaaacucaggu

SEQ ID NO: 404189 - RNA, 19 nt, Artificial Sequence
  Description of Artificial Sequence: Synthetic oligonucleotide
cacacuuacaauccgcuga

SEQ ID NO: 404190 - RNA, 19 nt, Artificial Sequence
  Description of Artificial Sequence: Synthetic oligonucleotide
cacgcuuugagcauccuga

SEQ ID NO: 404191 - RNA, 19 nt, Artificial Sequence
  Description of Artificial Sequence: Synthetic oligonucleotide
acucauuuacaggagauua

SEQ ID NO: 404192 - RNA, 19 nt, Artificial Sequence
  Description of Artificial Sequence: Synthetic oligonucleotide
aaucgugccaucauugauu

SEQ ID NO: 404193 - RNA, 19 nt, Artificial Sequence
  Description of Artificial Sequence: Synthetic oligonucleotide
cuacuauagaaaccgucuc

SEQ ID NO: 404194 - RNA, 19 nt, Artificial Sequence
  Description of Artificial Sequence: Synthetic oligonucleotide
uaauaauggcccacgcuuu

SEQ ID NO: 404195 - RNA, 19 nt, Artificial Sequence
  Description of Artificial Sequence: Synthetic oligonucleotide
agaaucgugccaucauuga

SEQ ID NO: 404196 - RNA, 19 nt, Artificial Sequence
  Description of Artificial Sequence: Synthetic oligonucleotide
caacgauggcaguggaugg

SEQ ID NO: 404197 - RNA, 19 nt, Artificial Sequence
  Description of Artificial Sequence: Synthetic oligonucleotide
cagagcauacaaaacacaa

SEQ ID NO: 404198 - RNA, 19 nt, Artificial Sequence
  Description of Artificial Sequence: Synthetic oligonucleotide
auaggggcaacgauggcag

SEQ ID NO: 404199 - RNA, 19 nt, Artificial Sequence
  Description of Artificial Sequence: Synthetic oligonucleotide
auaguuugggucacagguc

SEQ ID NO: 404200 - RNA, 19 nt, Artificial Sequence
  Description of Artificial Sequence: Synthetic oligonucleotide
agucguggaucucgaaguc

SEQ ID NO: 404201 - RNA, 19 nt, Artificial Sequence
  Description of Artificial Sequence: Synthetic oligonucleotide
ugaacaaacugugguaaau

SEQ ID NO: 404202 - RNA, 19 nt, Artificial Sequence
  Description of Artificial Sequence: Synthetic oligonucleotide
caucauugauuggucauag

SEQ ID NO: 404203 - RNA, 19 nt, Artificial Sequence
  Description of Artificial Sequence: Synthetic oligonucleotide
ucccaaugugcacaaguaa

SEQ ID NO: 404204 - RNA, 19 nt, Artificial Sequence
  Description of Artificial Sequence: Synthetic oligonucleotide
uaguacacucuuguuauaa

SEQ ID NO: 404205 - RNA, 19 nt, Artificial Sequence
  Description of Artificial Sequence: Synthetic oligonucleotide
ucaugucuauaguuugggu

SEQ ID NO: 404206 - RNA, 19 nt, Artificial Sequence
  Description of Artificial Sequence: Synthetic oligonucleotide
caggauuaacuacucauga

SEQ ID NO: 404207 - RNA, 19 nt, Artificial Sequence
  Description of Artificial Sequence: Synthetic oligonucleotide
gucacaggucuuaauaaug

SEQ ID NO: 404208 - RNA, 19 nt, Artificial Sequence
  Description of Artificial Sequence: Synthetic oligonucleotide
agaaaccgucucuucuuag

SEQ ID NO: 404209 - RNA, 19 nt, Artificial Sequence
  Description of Artificial Sequence: Synthetic oligonucleotide
ucauuaucccgucguucug

SEQ ID NO: 404210 - RNA, 19 nt, Artificial Sequence
  Description of Artificial Sequence: Synthetic oligonucleotide
guccucgaaaagcagacuc

SEQ ID NO: 404211 - RNA, 19 nt, Artificial Sequence
  Description of Artificial Sequence: Synthetic oligonucleotide
uucuaugacugaacccaga

SEQ ID NO: 404212 - RNA, 19 nt, Artificial Sequence
  Description of Artificial Sequence: Synthetic oligonucleotide
ggagauuauucacauguuc

SEQ ID NO: 404213 - RNA, 19 nt, Artificial Sequence
  Description of Artificial Sequence: Synthetic oligonucleotide
gcagcaaaagaugucuugg

SEQ ID NO: 404214 - RNA, 19 nt, Artificial Sequence
  Description of Artificial Sequence: Synthetic oligonucleotide
auaaugguauucuguguuu

SEQ ID NO: 404215 - RNA, 19 nt, Artificial Sequence
  Description of Artificial Sequence: Synthetic oligonucleotide
cuccugauaauucaugaaa

SEQ ID NO: 404216 - RNA, 19 nt, Artificial Sequence
  Description of Artificial Sequence: Synthetic oligonucleotide
uucccuuggcuucagcauc

SEQ ID NO: 404217 - RNA, 19 nt, Artificial Sequence
  Description of Artificial Sequence: Synthetic oligonucleotide
uuuucuguggucgccccug

SEQ ID NO: 404218 - RNA, 19 nt, Artificial Sequence
  Description of Artificial Sequence: Synthetic oligonucleotide
accuauggcuguucauagg

SEQ ID NO: 404219 - RNA, 19 nt, Artificial Sequence
  Description of Artificial Sequence: Synthetic oligonucleotide
gauaaguuuguugcagcga

SEQ ID NO: 404220 - RNA, 19 nt, Artificial Sequence
  Description of Artificial Sequence: Synthetic oligonucleotide
uguuuucuguggucgcccc

SEQ ID NO: 404221 - RNA, 19 nt, Artificial Sequence
  Description of Artificial Sequence: Synthetic oligonucleotide
uacaauccgcugagagagg

SEQ ID NO: 404222 - RNA, 19 nt, Artificial Sequence
  Description of Artificial Sequence: Synthetic oligonucleotide
uuugcaagcuugccaggaa

SEQ ID NO: 404223 - RNA, 19 nt, Artificial Sequence
  Description of Artificial Sequence: Synthetic oligonucleotide
guaaaaucggcagccugcc

SEQ ID NO: 404224 - RNA, 19 nt, Artificial Sequence
  Description of Artificial Sequence: Synthetic oligonucleotide
ucugagccuuguaaugagu

SEQ ID NO: 404225 - RNA, 19 nt, Artificial Sequence
  Description of Artificial Sequence: Synthetic oligonucleotide
aaaucggcagccugccaau

SEQ ID NO: 404226 - RNA, 19 nt, Artificial Sequence
  Description of Artificial Sequence: Synthetic oligonucleotide
uacuccucagcaugugaug

SEQ ID NO: 404227 - RNA, 19 nt, Artificial Sequence
  Description of Artificial Sequence: Synthetic oligonucleotide
ugacgcaacuaaaggggac

SEQ ID NO: 404228 - RNA, 19 nt, Artificial Sequence
  Description of Artificial Sequence: Synthetic oligonucleotide
uucgggucuccuacuagga

SEQ ID NO: 404229 - RNA, 19 nt, Artificial Sequence
  Description of Artificial Sequence: Synthetic oligonucleotide
uuauuuccaucaccaacuu

SEQ ID NO: 404230 - RNA, 19 nt, Artificial Sequence
  Description of Artificial Sequence: Synthetic oligonucleotide
ucgggaggaaauaucuuuu

SEQ ID NO: 404231 - RNA, 19 nt, Artificial Sequence
  Description of Artificial Sequence: Synthetic oligonucleotide
gaauccaauugaaccuugc

SEQ ID NO: 404232 - RNA, 19 nt, Artificial Sequence
  Description of Artificial Sequence: Synthetic oligonucleotide
caacuaaaggggacacccc

SEQ ID NO: 404233 - RNA, 19 nt, Artificial Sequence
  Description of Artificial Sequence: Synthetic oligonucleotide
ugaaaguagucagggcaug

SEQ ID NO: 404234 - RNA, 19 nt, Artificial Sequence
  Description of Artificial Sequence: Synthetic oligonucleotide
aguagucagggcauguucu

SEQ ID NO: 404235 - RNA, 19 nt, Artificial Sequence
  Description of Artificial Sequence: Synthetic oligonucleotide
guaagcuguaaaaucggca

SEQ ID NO: 404236 - RNA, 19 nt, Artificial Sequence
  Description of Artificial Sequence: Synthetic oligonucleotide
accgaaugguuucagucau

SEQ ID NO: 404237 - RNA, 19 nt, Artificial Sequence
  Description of Artificial Sequence: Synthetic oligonucleotide
gguauaauacauuagccuu

SEQ ID NO: 404238 - RNA, 19 nt, Artificial Sequence
  Description of Artificial Sequence: Synthetic oligonucleotide
acacacuuacaauccgcug

SEQ ID NO: 404239 - RNA, 19 nt, Artificial Sequence
  Description of Artificial Sequence: Synthetic oligonucleotide
acaauaaaacucaggucgu

SEQ ID NO: 404240 - RNA, 19 nt, Artificial Sequence
  Description of Artificial Sequence: Synthetic oligonucleotide
gguuuccaaaucuaacgac

SEQ ID NO: 404241 - RNA, 19 nt, Artificial Sequence
  Description of Artificial Sequence: Synthetic oligonucleotide
aguacacucuuguuauaaa

SEQ ID NO: 404242 - RNA, 19 nt, Artificial Sequence
  Description of Artificial Sequence: Synthetic oligonucleotide
gcaucaugucuauaguuug

SEQ ID NO: 404243 - RNA, 19 nt, Artificial Sequence
  Description of Artificial Sequence: Synthetic oligonucleotide
uugcaagcuugccaggaau

SEQ ID NO: 404244 - RNA, 19 nt, Artificial Sequence
  Description of Artificial Sequence: Synthetic oligonucleotide
aauccgcugagagaggauu

SEQ ID NO: 404245 - RNA, 19 nt, Artificial Sequence
  Description of Artificial Sequence: Synthetic oligonucleotide
auggacuagcccagggagc

SEQ ID NO: 404246 - RNA, 19 nt, Artificial Sequence
  Description of Artificial Sequence: Synthetic oligonucleotide
uagaaaccgucucuucuua

SEQ ID NO: 404247 - RNA, 19 nt, Artificial Sequence
  Description of Artificial Sequence: Synthetic oligonucleotide
cucgaaaagcagacucaag

SEQ ID NO: 404248 - RNA, 19 nt, Artificial Sequence
  Description of Artificial Sequence: Synthetic oligonucleotide
gacuccaagauaaugguau

SEQ ID NO: 404249 - RNA, 19 nt, Artificial Sequence
  Description of Artificial Sequence: Synthetic oligonucleotide
ccaauugaaccuugcacag

SEQ ID NO: 404250 - RNA, 19 nt, Artificial Sequence
  Description of Artificial Sequence: Synthetic oligonucleotide
uuccucuuacugguggaag

SEQ ID NO: 404251 - RNA, 19 nt, Artificial Sequence
  Description of Artificial Sequence: Synthetic oligonucleotide
ugaacaccgaaugguuuca

SEQ ID NO: 404252 - RNA, 19 nt, Artificial Sequence
  Description of Artificial Sequence: Synthetic oligonucleotide
ucacaagacuguccagccu

SEQ ID NO: 404253 - RNA, 19 nt, Artificial Sequence
  Description of Artificial Sequence: Synthetic oligonucleotide
gacaugagacuccaagaua

SEQ ID NO: 404254 - RNA, 19 nt, Artificial Sequence
  Description of Artificial Sequence: Synthetic oligonucleotide
gucaggauuaacuacucau

SEQ ID NO: 404255 - RNA, 19 nt, Artificial Sequence
  Description of Artificial Sequence: Synthetic oligonucleotide
gugguaaauaagagagaag

SEQ ID NO: 404256 - RNA, 19 nt, Artificial Sequence
  Description of Artificial Sequence: Synthetic oligonucleotide
cuaggauaaguuuguugca

SEQ ID NO: 404257 - RNA, 19 nt, Artificial Sequence
  Description of Artificial Sequence: Synthetic oligonucleotide
aacucauuuacaggagauu

SEQ ID NO: 404258 - RNA, 19 nt, Artificial Sequence
  Description of Artificial Sequence: Synthetic oligonucleotide
uaaaaucggcagccugcca

SEQ ID NO: 404259 - RNA, 19 nt, Artificial Sequence
  Description of Artificial Sequence: Synthetic oligonucleotide
uguuucgggucuccuacua

SEQ ID NO: 404260 - RNA, 19 nt, Artificial Sequence
  Description of Artificial Sequence: Synthetic oligonucleotide
guuucgggucuccuacuag

SEQ ID NO: 404261 - RNA, 19 nt, Artificial Sequence
  Description of Artificial Sequence: Synthetic oligonucleotide
gaugagucacagagccacg

SEQ ID NO: 404262 - RNA, 19 nt, Artificial Sequence
  Description of Artificial Sequence: Synthetic oligonucleotide
cuaacgacacacacuuaca

SEQ ID NO: 404263 - RNA, 19 nt, Artificial Sequence
  Description of Artificial Sequence: Synthetic oligonucleotide
ucacuagcuaccugaggau

SEQ ID NO: 404264 - RNA, 19 nt, Artificial Sequence
  Description of Artificial Sequence: Synthetic oligonucleotide
ugccaggaauccaauugaa

SEQ ID NO: 404265 - RNA, 19 nt, Artificial Sequence
  Description of Artificial Sequence: Synthetic oligonucleotide
agcgaugaauaaguggaga

SEQ ID NO: 404266 - RNA, 19 nt, Artificial Sequence
  Description of Artificial Sequence: Synthetic oligonucleotide
aacgauggcaguggauggu

SEQ ID NO: 404267 - RNA, 19 nt, Artificial Sequence
  Description of Artificial Sequence: Synthetic oligonucleotide
auauuucgggaggaaauau

SEQ ID NO: 404268 - RNA, 19 nt, Artificial Sequence
  Description of Artificial Sequence: Synthetic oligonucleotide
cagucaguacuccucagca

SEQ ID NO: 404269 - RNA, 19 nt, Artificial Sequence
  Description of Artificial Sequence: Synthetic oligonucleotide
gcaaaagaugucuuggcaa

SEQ ID NO: 404270 - RNA, 19 nt, Artificial Sequence
  Description of Artificial Sequence: Synthetic oligonucleotide
caaaugcccucuccaagug

SEQ ID NO: 404271 - RNA, 19 nt, Artificial Sequence
  Description of Artificial Sequence: Synthetic oligonucleotide
gcagucguggaucucgaag

SEQ ID NO: 404272 - RNA, 19 nt, Artificial Sequence
  Description of Artificial Sequence: Synthetic oligonucleotide
auucuaaggcaaggcuugg

SEQ ID NO: 404273 - RNA, 19 nt, Artificial Sequence
  Description of Artificial Sequence: Synthetic oligonucleotide
gacgcaacuaaaggggaca

SEQ ID NO: 404274 - RNA, 19 nt, Artificial Sequence
  Description of Artificial Sequence: Synthetic oligonucleotide
uaaugguauucuguguuuu

SEQ ID NO: 404275 - RNA, 19 nt, Artificial Sequence
  Description of Artificial Sequence: Synthetic oligonucleotide
aaacuaaaacccagcugau

SEQ ID NO: 404276 - RNA, 19 nt, Artificial Sequence
  Description of Artificial Sequence: Synthetic oligonucleotide
acauaugucuggauccugu

SEQ ID NO: 404277 - RNA, 19 nt, Artificial Sequence
  Description of Artificial Sequence: Synthetic oligonucleotide
acuccucagcaugugauga

SEQ ID NO: 404278 - RNA, 19 nt, Artificial Sequence
  Description of Artificial Sequence: Synthetic oligonucleotide
aaucuccuaagcagucgug

SEQ ID NO: 404279 - RNA, 19 nt, Artificial Sequence
  Description of Artificial Sequence: Synthetic oligonucleotide
acgcaacuaaaggggacac

SEQ ID NO: 404280 - RNA, 19 nt, Artificial Sequence
  Description of Artificial Sequence: Synthetic oligonucleotide
agacucuucaagggaaaca

SEQ ID NO: 404281 - RNA, 19 nt, Artificial Sequence
  Description of Artificial Sequence: Synthetic oligonucleotide
agaccuauggcuguucaua

SEQ ID NO: 404282 - RNA, 19 nt, Artificial Sequence
  Description of Artificial Sequence: Synthetic oligonucleotide
acaauccgcugagagagga

SEQ ID NO: 404283 - RNA, 19 nt, Artificial Sequence
  Description of Artificial Sequence: Synthetic oligonucleotide
gcuguuucgggucuccuac

SEQ ID NO: 404284 - RNA, 19 nt, Artificial Sequence
  Description of Artificial Sequence: Synthetic oligonucleotide
acuagcuaccugaggauga

SEQ ID NO: 404285 - RNA, 19 nt, Artificial Sequence
  Description of Artificial Sequence: Synthetic oligonucleotide
gaaugguaagcuguaaaau

SEQ ID NO: 404286 - RNA, 19 nt, Artificial Sequence
  Description of Artificial Sequence: Synthetic oligonucleotide
cuuaauaauggcccacgcu

SEQ ID NO: 404287 - RNA, 19 nt, Artificial Sequence
  Description of Artificial Sequence: Synthetic oligonucleotide
uaccaauguugguuuucca

SEQ ID NO: 404288 - RNA, 19 nt, Artificial Sequence
  Description of Artificial Sequence: Synthetic oligonucleotide
guagggcugaaauggccac

SEQ ID NO: 404289 - RNA, 19 nt, Artificial Sequence
  Description of Artificial Sequence: Synthetic oligonucleotide
aggucucggugccucuugg

SEQ ID NO: 404290 - RNA, 19 nt, Artificial Sequence
  Description of Artificial Sequence: Synthetic oligonucleotide
cucagcaugugaugaguca

SEQ ID NO: 404291 - RNA, 19 nt, Artificial Sequence
  Description of Artificial Sequence: Synthetic oligonucleotide
augccagacucucccagga

SEQ ID NO: 404292 - RNA, 19 nt, Artificial Sequence
  Description of Artificial Sequence: Synthetic oligonucleotide
uguggucgccccugaaccu

SEQ ID NO: 404293 - RNA, 19 nt, Artificial Sequence
  Description of Artificial Sequence: Synthetic oligonucleotide
gacauaugucuggauccug

SEQ ID NO: 404294 - RNA, 19 nt, Artificial Sequence
  Description of Artificial Sequence: Synthetic oligonucleotide
ccuugcacagcacuagccc

SEQ ID NO: 404295 - RNA, 19 nt, Artificial Sequence
  Description of Artificial Sequence: Synthetic oligonucleotide
auuaucccgucguucugaa

SEQ ID NO: 404296 - RNA, 19 nt, Artificial Sequence
  Description of Artificial Sequence: Synthetic oligonucleotide
uuaguacacucuuguuaua

SEQ ID NO: 404297 - RNA, 19 nt, Artificial Sequence
  Description of Artificial Sequence: Synthetic oligonucleotide
guauccacuucugcaggcc

SEQ ID NO: 404298 - RNA, 19 nt, Artificial Sequence
  Description of Artificial Sequence: Synthetic oligonucleotide
ucccaggagauggacuagc

SEQ ID NO: 404299 - RNA, 19 nt, Artificial Sequence
  Description of Artificial Sequence: Synthetic oligonucleotide
cagguaagguauaauacau

SEQ ID NO: 404300 - RNA, 19 nt, Artificial Sequence
  Description of Artificial Sequence: Synthetic oligonucleotide
aucggcagccugccaauca

SEQ ID NO: 404301 - RNA, 19 nt, Artificial Sequence
  Description of Artificial Sequence: Synthetic oligonucleotide
ucggcagccugccaaucau

SEQ ID NO: 404302 - RNA, 19 nt, Artificial Sequence
  Description of Artificial Sequence: Synthetic oligonucleotide
uuucuguggucgccccuga

SEQ ID NO: 404303 - RNA, 19 nt, Artificial Sequence
  Description of Artificial Sequence: Synthetic oligonucleotide
guacugaaugguaagcugu

SEQ ID NO: 404304 - RNA, 19 nt, Artificial Sequence
  Description of Artificial Sequence: Synthetic oligonucleotide
acuccaagauaaugguauu

SEQ ID NO: 404305 - RNA, 19 nt, Artificial Sequence
  Description of Artificial Sequence: Synthetic oligonucleotide
aucccgucguucugaacca

SEQ ID NO: 404306 - RNA, 19 nt, Artificial Sequence
  Description of Artificial Sequence: Synthetic oligonucleotide
gaguuauuaugccaauauu

SEQ ID NO: 404307 - RNA, 19 nt, Artificial Sequence
  Description of Artificial Sequence: Synthetic oligonucleotide
gaacaccgaaugguuucag

SEQ ID NO: 404308 - RNA, 19 nt, Artificial Sequence
  Description of Artificial Sequence: Synthetic oligonucleotide
cugaugaacaccgaauggu

SEQ ID NO: 404309 - RNA, 19 nt, Artificial Sequence
  Description of Artificial Sequence: Synthetic oligonucleotide
caucagaggguguauggua

SEQ ID NO: 404310 - RNA, 19 nt, Artificial Sequence
  Description of Artificial Sequence: Synthetic oligonucleotide
augacgcaacuaaagggga

SEQ ID NO: 404311 - RNA, 19 nt, Artificial Sequence
  Description of Artificial Sequence: Synthetic oligonucleotide
aggcuucaguuucaguaau

SEQ ID NO: 404312 - RNA, 19 nt, Artificial Sequence
  Description of Artificial Sequence: Synthetic oligonucleotide
uccgcugagagaggauucu

SEQ ID NO: 404313 - RNA, 19 nt, Artificial Sequence
  Description of Artificial Sequence: Synthetic oligonucleotide
cuagcuaccugaggaugac

SEQ ID NO: 404314 - RNA, 19 nt, Artificial Sequence
  Description of Artificial Sequence: Synthetic oligonucleotide
guggcacaauaaaacucag

SEQ ID NO: 404315 - RNA, 19 nt, Artificial Sequence
  Description of Artificial Sequence: Synthetic oligonucleotide
auaccuuuacuaacuggaa

SEQ ID NO: 404316 - RNA, 19 nt, Artificial Sequence
  Description of Artificial Sequence: Synthetic oligonucleotide
auccgcugagagaggauuc

SEQ ID NO: 404317 - RNA, 19 nt, Artificial Sequence
  Description of Artificial Sequence: Synthetic oligonucleotide
auaauggcccacgcuuuga

SEQ ID NO: 404318 - RNA, 19 nt, Artificial Sequence
  Description of Artificial Sequence: Synthetic oligonucleotide
augaguuauuaugccaaua

SEQ ID NO: 404319 - RNA, 19 nt, Artificial Sequence
  Description of Artificial Sequence: Synthetic oligonucleotide
gauucccuucuaugacuga

SEQ ID NO: 404320 - RNA, 19 nt, Artificial Sequence
  Description of Artificial Sequence: Synthetic oligonucleotide
uggcucguguaauggugac

SEQ ID NO: 404321 - RNA, 19 nt, Artificial Sequence
  Description of Artificial Sequence: Synthetic oligonucleotide
ucgccccugaaccucuuua

SEQ ID NO: 404322 - RNA, 19 nt, Artificial Sequence
  Description of Artificial Sequence: Synthetic oligonucleotide
gugucacuagcuaccugag

SEQ ID NO: 404323 - RNA, 19 nt, Artificial Sequence
  Description of Artificial Sequence: Synthetic oligonucleotide
cagucguggaucucgaagu

SEQ ID NO: 404324 - RNA, 19 nt, Artificial Sequence
  Description of Artificial Sequence: Synthetic oligonucleotide
gcagaugacaugagacucc

SEQ ID NO: 404325 - RNA, 19 nt, Artificial Sequence
  Description of Artificial Sequence: Synthetic oligonucleotide
accaauagccuaaggguua

SEQ ID NO: 404326 - RNA, 19 nt, Artificial Sequence
  Description of Artificial Sequence: Synthetic oligonucleotide
uguccucgaaaagcagacu

SEQ ID NO: 404327 - RNA, 19 nt, Artificial Sequence
  Description of Artificial Sequence: Synthetic oligonucleotide
cauuaucccgucguucuga

SEQ ID NO: 404328 - RNA, 19 nt, Artificial Sequence
  Description of Artificial Sequence: Synthetic oligonucleotide
auggcuguucauaggggca

SEQ ID NO: 404329 - RNA, 19 nt, Artificial Sequence
  Description of Artificial Sequence: Synthetic oligonucleotide
gagccuuguaaugaguuau

SEQ ID NO: 404330 - RNA, 19 nt, Artificial Sequence
  Description of Artificial Sequence: Synthetic oligonucleotide
cagacucuucaagggaaac

SEQ ID NO: 404331 - RNA, 19 nt, Artificial Sequence
  Description of Artificial Sequence: Synthetic oligonucleotide
ccuguacugaaugguaagc

SEQ ID NO: 404332 - RNA, 19 nt, Artificial Sequence
  Description of Artificial Sequence: Synthetic oligonucleotide
gguuagaagguauuuucau

SEQ ID NO: 404333 - RNA, 19 nt, Artificial Sequence
  Description of Artificial Sequence: Synthetic oligonucleotide
cugaacaaacugugguaaa

SEQ ID NO: 404334 - RNA, 19 nt, Artificial Sequence
  Description of Artificial Sequence: Synthetic oligonucleotide
gcaagcuugccaggaaucc

SEQ ID NO: 404335 - RNA, 19 nt, Artificial Sequence
  Description of Artificial Sequence: Synthetic oligonucleotide
uuaucccgucguucugaac

SEQ ID NO: 404336 - RNA, 19 nt, Artificial Sequence
  Description of Artificial Sequence: Synthetic oligonucleotide
cccuucuaugacugaaccc

SEQ ID NO: 404337 - RNA, 19 nt, Artificial Sequence
  Description of Artificial Sequence: Synthetic oligonucleotide
cucggugccucuuggggca

SEQ ID NO: 404338 - RNA, 19 nt, Artificial Sequence
  Description of Artificial Sequence: Synthetic oligonucleotide
cacucugaugaacaccgaa

SEQ ID NO: 404339 - RNA, 19 nt, Artificial Sequence
  Description of Artificial Sequence: Synthetic oligonucleotide
gggcaagccacccugaggu

SEQ ID NO: 404340 - RNA, 19 nt, Artificial Sequence
  Description of Artificial Sequence: Synthetic oligonucleotide
acuacucaugacagugccu

SEQ ID NO: 404341 - RNA, 19 nt, Artificial Sequence
  Description of Artificial Sequence: Synthetic oligonucleotide
cugggcaagccacccugag

SEQ ID NO: 404342 - RNA, 19 nt, Artificial Sequence
  Description of Artificial Sequence: Synthetic oligonucleotide
cagaugacaugagacucca

SEQ ID NO: 404343 - RNA, 19 nt, Artificial Sequence
  Description of Artificial Sequence: Synthetic oligonucleotide
gaccaauagccuaaggguu

SEQ ID NO: 404344 - RNA, 19 nt, Artificial Sequence
  Description of Artificial Sequence: Synthetic oligonucleotide
cauaugucuggauccugua

SEQ ID NO: 404345 - RNA, 19 nt, Artificial Sequence
  Description of Artificial Sequence: Synthetic oligonucleotide
aggagaccuauggcuguuc

SEQ ID NO: 404346 - RNA, 19 nt, Artificial Sequence
  Description of Artificial Sequence: Synthetic oligonucleotide
agguaagguauaauacauu

SEQ ID NO: 404347 - RNA, 19 nt, Artificial Sequence
  Description of Artificial Sequence: Synthetic oligonucleotide
cuguacuuuggcucgugua

SEQ ID NO: 404348 - RNA, 19 nt, Artificial Sequence
  Description of Artificial Sequence: Synthetic oligonucleotide
cucauuuacaggagauuau

SEQ ID NO: 404349 - RNA, 19 nt, Artificial Sequence
  Description of Artificial Sequence: Synthetic oligonucleotide
aagcagucguggaucucga

SEQ ID NO: 404350 - RNA, 19 nt, Artificial Sequence
  Description of Artificial Sequence: Synthetic oligonucleotide
ccaaaucuaacgacacaca

SEQ ID NO: 404351 - RNA, 19 nt, Artificial Sequence
  Description of Artificial Sequence: Synthetic oligonucleotide
cagcaucagaggguguaug

SEQ ID NO: 404352 - RNA, 19 nt, Artificial Sequence
  Description of Artificial Sequence: Synthetic oligonucleotide
uucuguggucgccccugaa

SEQ ID NO: 404353 - RNA, 19 nt, Artificial Sequence
  Description of Artificial Sequence: Synthetic oligonucleotide
ggagaccuauggcuguuca

SEQ ID NO: 404354 - RNA, 19 nt, Artificial Sequence
  Description of Artificial Sequence: Synthetic oligonucleotide
agacuccaagauaauggua

SEQ ID NO: 404355 - RNA, 19 nt, Artificial Sequence
  Description of Artificial Sequence: Synthetic oligonucleotide
aggagauuauucacauguu

SEQ ID NO: 404356 - RNA, 19 nt, Artificial Sequence
  Description of Artificial Sequence: Synthetic oligonucleotide
cuaaggguuagaagguauu

SEQ ID NO: 404357 - RNA, 19 nt, Artificial Sequence
  Description of Artificial Sequence: Synthetic oligonucleotide
ggagauggacuagcccagg

SEQ ID NO: 404358 - RNA, 19 nt, Artificial Sequence
  Description of Artificial Sequence: Synthetic oligonucleotide
ccuacuaggauaaguuugu

SEQ ID NO: 404359 - RNA, 19 nt, Artificial Sequence
  Description of Artificial Sequence: Synthetic oligonucleotide
cugagccuuguaaugaguu

SEQ ID NO: 404360 - RNA, 19 nt, Artificial Sequence
  Description of Artificial Sequence: Synthetic oligonucleotide
uggcccacgcuuugagcau

SEQ ID NO: 404361 - RNA, 19 nt, Artificial Sequence
  Description of Artificial Sequence: Synthetic oligonucleotide
aggguguaugguacagaga

SEQ ID NO: 404362 - RNA, 19 nt, Artificial Sequence
  Description of Artificial Sequence: Synthetic oligonucleotide
gggaguucagaggcugugc

SEQ ID NO: 404363 - RNA, 19 nt, Artificial Sequence
  Description of Artificial Sequence: Synthetic oligonucleotide
gccaggaauccaauugaac

SEQ ID NO: 404364 - RNA, 19 nt, Artificial Sequence
  Description of Artificial Sequence: Synthetic oligonucleotide
cguguaauggugacauuca

SEQ ID NO: 404365 - RNA, 19 nt, Artificial Sequence
  Description of Artificial Sequence: Synthetic oligonucleotide
ugcccucuccaaguguaua

SEQ ID NO: 404366 - RNA, 19 nt, Artificial Sequence
  Description of Artificial Sequence: Synthetic oligonucleotide
caaugugcacaaguaauuu

SEQ ID NO: 404367 - RNA, 19 nt, Artificial Sequence
  Description of Artificial Sequence: Synthetic oligonucleotide
accaccacuugugcucagu

SEQ ID NO: 404368 - RNA, 19 nt, Artificial Sequence
  Description of Artificial Sequence: Synthetic oligonucleotide
gagaccuauggcuguucau

SEQ ID NO: 404369 - RNA, 19 nt, Artificial Sequence
  Description of Artificial Sequence: Synthetic oligonucleotide
gccacgucuuuccucuuca

SEQ ID NO: 404370 - RNA, 19 nt, Artificial Sequence
  Description of Artificial Sequence: Synthetic oligonucleotide
ggauucuaaggcaaggcuu

SEQ ID NO: 404371 - RNA, 19 nt, Artificial Sequence
  Description of Artificial Sequence: Synthetic oligonucleotide
gagucauuaucccgucguu

SEQ ID NO: 404372 - RNA, 19 nt, Artificial Sequence
  Description of Artificial Sequence: Synthetic oligonucleotide
gacucucccaggagaugga

SEQ ID NO: 404373 - RNA, 19 nt, Artificial Sequence
  Description of Artificial Sequence: Synthetic oligonucleotide
gagacagguaagguauaau

SEQ ID NO: 404374 - RNA, 19 nt, Artificial Sequence
  Description of Artificial Sequence: Synthetic oligonucleotide
ggauccuguacugaauggu

SEQ ID NO: 404375 - RNA, 19 nt, Artificial Sequence
  Description of Artificial Sequence: Synthetic oligonucleotide
ccuuuacuaacuggaauaa

SEQ ID NO: 404376 - RNA, 19 nt, Artificial Sequence
  Description of Artificial Sequence: Synthetic oligonucleotide
gcucguguaauggugacau

SEQ ID NO: 404377 - RNA, 19 nt, Artificial Sequence
  Description of Artificial Sequence: Synthetic oligonucleotide
cccaaugugcacaaguaau

SEQ ID NO: 404378 - RNA, 19 nt, Artificial Sequence
  Description of Artificial Sequence: Synthetic oligonucleotide
ccaauauuucgggaggaaa

SEQ ID NO: 404379 - RNA, 19 nt, Artificial Sequence
  Description of Artificial Sequence: Synthetic oligonucleotide
ccacgcuuugagcauccug

SEQ ID NO: 404380 - RNA, 19 nt, Artificial Sequence
  Description of Artificial Sequence: Synthetic oligonucleotide
gucuauaguuugggucaca

SEQ ID NO: 404381 - RNA, 19 nt, Artificial Sequence
  Description of Artificial Sequence: Synthetic oligonucleotide
cacuagcccugacacaggu

SEQ ID NO: 404382 - RNA, 19 nt, Artificial Sequence
  Description of Artificial Sequence: Synthetic oligonucleotide
ucggugccucuuggggcag

SEQ ID NO: 404383 - RNA, 19 nt, Artificial Sequence
  Description of Artificial Sequence: Synthetic oligonucleotide
cuccuaagcagucguggau

SEQ ID NO: 404384 - RNA, 19 nt, Artificial Sequence
  Description of Artificial Sequence: Synthetic oligonucleotide
gagcuacuauagaaaccgu

SEQ ID NO: 404385 - RNA, 19 nt, Artificial Sequence
  Description of Artificial Sequence: Synthetic oligonucleotide
ggcccuuucuuaucaaauu

SEQ ID NO: 404386 - RNA, 19 nt, Artificial Sequence
  Description of Artificial Sequence: Synthetic oligonucleotide
gcuugcagaaucgugccau

SEQ ID NO: 404387 - RNA, 19 nt, Artificial Sequence
  Description of Artificial Sequence: Synthetic oligonucleotide
gcagaaucgugccaucauu

SEQ ID NO: 404388 - RNA, 19 nt, Artificial Sequence
  Description of Artificial Sequence: Synthetic oligonucleotide
acuagcccugacacaggua

SEQ ID NO: 404389 - RNA, 19 nt, Artificial Sequence
  Description of Artificial Sequence: Synthetic oligonucleotide
gugagacagguaagguaua

SEQ ID NO: 404390 - RNA, 19 nt, Artificial Sequence
  Description of Artificial Sequence: Synthetic oligonucleotide
ccuaaggguuagaagguau

SEQ ID NO: 404391 - RNA, 19 nt, Artificial Sequence
  Description of Artificial Sequence: Synthetic oligonucleotide
ccucgaaaagcagacucaa

SEQ ID NO: 404392 - RNA, 19 nt, Artificial Sequence
  Description of Artificial Sequence: Synthetic oligonucleotide
aucuaacgacacacacuua

SEQ ID NO: 404393 - RNA, 19 nt, Artificial Sequence
  Description of Artificial Sequence: Synthetic oligonucleotide
ggcaagccacccugagguc

SEQ ID NO: 404394 - RNA, 19 nt, Artificial Sequence
  Description of Artificial Sequence: Synthetic oligonucleotide
agccugaagaggagaccua

SEQ ID NO: 404395 - RNA, 19 nt, Artificial Sequence
  Description of Artificial Sequence: Synthetic oligonucleotide
ccaucauugauuggucaua

SEQ ID NO: 404396 - RNA, 19 nt, Artificial Sequence
  Description of Artificial Sequence: Synthetic oligonucleotide
cgcaacuaaaggggacacc

SEQ ID NO: 404397 - RNA, 19 nt, Artificial Sequence
  Description of Artificial Sequence: Synthetic oligonucleotide
gcuguacuuuggcucgugu

SEQ ID NO: 404398 - RNA, 19 nt, Artificial Sequence
  Description of Artificial Sequence: Synthetic oligonucleotide
gggcaacgauggcagugga

SEQ ID NO: 404399 - RNA, 19 nt, Artificial Sequence
  Description of Artificial Sequence: Synthetic oligonucleotide
caauccgcugagagaggau

SEQ ID NO: 404400 - RNA, 19 nt, Artificial Sequence
  Description of Artificial Sequence: Synthetic oligonucleotide
ccgucguucugaaccaucu

SEQ ID NO: 404401 - RNA, 19 nt, Artificial Sequence
  Description of Artificial Sequence: Synthetic oligonucleotide
gcccacgcuuugagcaucc

SEQ ID NO: 404402 - RNA, 19 nt, Artificial Sequence
  Description of Artificial Sequence: Synthetic oligonucleotide
gcccugacacagguaacaa

SEQ ID NO: 404403 - RNA, 19 nt, Artificial Sequence
  Description of Artificial Sequence: Synthetic oligonucleotide
ggcccacgcuuugagcauc

SEQ ID NO: 404404 - RNA, 19 nt, Artificial Sequence
  Description of Artificial Sequence: Synthetic oligonucleotide
gccccugaaccucuuuaau

SEQ ID NO: 404405 - RNA, 19 nt, Artificial Sequence
  Description of Artificial Sequence: Synthetic oligonucleotide
ggcauccacuguauccacu

SEQ ID NO: 404406 - RNA, 19 nt, Artificial Sequence
  Description of Artificial Sequence: Synthetic oligonucleotide
cucguguaauggugacauu

SEQ ID NO: 404407 - RNA, 19 nt, Artificial Sequence
  Description of Artificial Sequence: Synthetic oligonucleotide
gggcugaaauggccacucu

SEQ ID NO: 404408 - RNA, 19 nt, Artificial Sequence
  Description of Artificial Sequence: Synthetic oligonucleotide
cgccccugaaccucuuuaa

SEQ ID NO: 404409 - RNA, 19 nt, Artificial Sequence
  Description of Artificial Sequence: Synthetic oligonucleotide
ggcaacgauggcaguggau

SEQ ID NO: 404410 - RNA, 19 nt, Artificial Sequence
  Description of Artificial Sequence: Synthetic oligonucleotide
gucgccccugaaccucuuu

SEQ ID NO: 404411 - RNA, 19 nt, Artificial Sequence
  Description of Artificial Sequence: Synthetic oligonucleotide
ccgcugagagaggauucua

SEQ ID NO: 404412 - RNA, 19 nt, Artificial Sequence
  Description of Artificial Sequence: Synthetic oligonucleotide
ccgaaugguuucagucauu

SEQ ID NO: 404413 - RNA, 19 nt, Artificial Sequence
  Description of Artificial Sequence: Synthetic oligonucleotide
cccacgcuuugagcauccu

SEQ ID NO: 404414 - RNA, 19 nt, Artificial Sequence
  Description of Artificial Sequence: Synthetic oligonucleotide
uuuauuauaguguugucac

SEQ ID NO: 404415 - RNA, 19 nt, Artificial Sequence
  Description of Artificial Sequence: Synthetic oligonucleotide
gauaauucggcaaucagag

SEQ ID NO: 404416 - RNA, 19 nt, Artificial Sequence
  Description of Artificial Sequence: Synthetic oligonucleotide
uaauucggcaaucagagga

SEQ ID NO: 404417 - RNA, 19 nt, Artificial Sequence
  Description of Artificial Sequence: Synthetic oligonucleotide
ugugagaccacuagcgucg

SEQ ID NO: 404418 - RNA, 19 nt, Artificial Sequence
  Description of Artificial Sequence: Synthetic oligonucleotide
auagccacgacauucguuc

SEQ ID NO: 404419 - RNA, 19 nt, Artificial Sequence
  Description of Artificial Sequence: Synthetic oligonucleotide
gagaaaaucuggcacaggc

SEQ ID NO: 404420 - RNA, 19 nt, Artificial Sequence
  Description of Artificial Sequence: Synthetic oligonucleotide
acgacauucguucuggagg

SEQ ID NO: 404421 - RNA, 19 nt, Artificial Sequence
  Description of Artificial Sequence: Synthetic oligonucleotide
gucaaaauuaauguagccg

SEQ ID NO: 404422 - RNA, 19 nt, Artificial Sequence
  Description of Artificial Sequence: Synthetic oligonucleotide
aagacguuagcggagggcg

SEQ ID NO: 404423 - RNA, 19 nt, Artificial Sequence
  Description of Artificial Sequence: Synthetic oligonucleotide
aauguggcuauaugaccac

SEQ ID NO: 404424 - RNA, 19 nt, Artificial Sequence
  Description of Artificial Sequence: Synthetic oligonucleotide
ucuggacucggauaauucg

SEQ ID NO: 404425 - RNA, 19 nt, Artificial Sequence
  Description of Artificial Sequence: Synthetic oligonucleotide
ugugauuucuguaaaccaa

SEQ ID NO: 404426 - RNA, 19 nt, Artificial Sequence
  Description of Artificial Sequence: Synthetic oligonucleotide
aaagcacggagauggcuac

SEQ ID NO: 404427 - RNA, 19 nt, Artificial Sequence
  Description of Artificial Sequence: Synthetic oligonucleotide
uccaauguggcuauaugac

SEQ ID NO: 404428 - RNA, 19 nt, Artificial Sequence
  Description of Artificial Sequence: Synthetic oligonucleotide
gaagcaagaagcucucaag

SEQ ID NO: 404429 - RNA, 19 nt, Artificial Sequence
  Description of Artificial Sequence: Synthetic oligonucleotide
cugagaauaauuguccucc

SEQ ID NO: 404430 - RNA, 19 nt, Artificial Sequence
  Description of Artificial Sequence: Synthetic oligonucleotide
aacgucuugucauuguccu

SEQ ID NO: 404431 - RNA, 19 nt, Artificial Sequence
  Description of Artificial Sequence: Synthetic oligonucleotide
aucagauugagaaacagcu

SEQ ID NO: 404432 - RNA, 19 nt, Artificial Sequence
  Description of Artificial Sequence: Synthetic oligonucleotide
gaggggaucagauugagaa

SEQ ID NO: 404433 - RNA, 19 nt, Artificial Sequence
  Description of Artificial Sequence: Synthetic oligonucleotide
cacugugagaccacuagcg

SEQ ID NO: 404434 - RNA, 19 nt, Artificial Sequence
  Description of Artificial Sequence: Synthetic oligonucleotide
gacccuugaccucagagcc

SEQ ID NO: 404435 - RNA, 19 nt, Artificial Sequence
  Description of Artificial Sequence: Synthetic oligonucleotide
ugguuuauuauaguguugu

SEQ ID NO: 404436 - RNA, 19 nt, Artificial Sequence
  Description of Artificial Sequence: Synthetic oligonucleotide
aauucggcaaucagaggac

SEQ ID NO: 404437 - RNA, 19 nt, Artificial Sequence
  Description of Artificial Sequence: Synthetic oligonucleotide
gaauaauuguccuccucug

SEQ ID NO: 404438 - RNA, 19 nt, Artificial Sequence
  Description of Artificial Sequence: Synthetic oligonucleotide
gaccucagagccaaaaucc

SEQ ID NO: 404439 - RNA, 19 nt, Artificial Sequence
  Description of Artificial Sequence: Synthetic oligonucleotide
uuucuuaaggacacggcua

SEQ ID NO: 404440 - RNA, 19 nt, Artificial Sequence
  Description of Artificial Sequence: Synthetic oligonucleotide
aggaaaucgugagaugagc

SEQ ID NO: 404441 - RNA, 19 nt, Artificial Sequence
  Description of Artificial Sequence: Synthetic oligonucleotide
uccuccgccacacggaucc

SEQ ID NO: 404442 - RNA, 19 nt, Artificial Sequence
  Description of Artificial Sequence: Synthetic oligonucleotide
auuguuggauaucgggguc

SEQ ID NO: 404443 - RNA, 19 nt, Artificial Sequence
  Description of Artificial Sequence: Synthetic oligonucleotide
aaggacacggcuaaugaca

SEQ ID NO: 404444 - RNA, 19 nt, Artificial Sequence
  Description of Artificial Sequence: Synthetic oligonucleotide
ugauuucuguaaaccaaca

SEQ ID NO: 404445 - RNA, 19 nt, Artificial Sequence
  Description of Artificial Sequence: Synthetic oligonucleotide
gagccauuguuggauaucg

SEQ ID NO: 404446 - RNA, 19 nt, Artificial Sequence
  Description of Artificial Sequence: Synthetic oligonucleotide
uucuuaaggacacggcuaa

SEQ ID NO: 404447 - RNA, 19 nt, Artificial Sequence
  Description of Artificial Sequence: Synthetic oligonucleotide
ugacccuugaccucagagc

SEQ ID NO: 404448 - RNA, 19 nt, Artificial Sequence
  Description of Artificial Sequence: Synthetic oligonucleotide
gaaaucgugagaugagcca

SEQ ID NO: 404449 - RNA, 19 nt, Artificial Sequence
  Description of Artificial Sequence: Synthetic oligonucleotide
uguggcuauaugaccacca

SEQ ID NO: 404450 - RNA, 19 nt, Artificial Sequence
  Description of Artificial Sequence: Synthetic oligonucleotide
uuggauaucggggucaggu

SEQ ID NO: 404451 - RNA, 19 nt, Artificial Sequence
  Description of Artificial Sequence: Synthetic oligonucleotide
gacacggcuaaugacacug

SEQ ID NO: 404452 - RNA, 19 nt, Artificial Sequence
  Description of Artificial Sequence: Synthetic oligonucleotide
acgggguuggcuuucgagg

SEQ ID NO: 404453 - RNA, 19 nt, Artificial Sequence
  Description of Artificial Sequence: Synthetic oligonucleotide
cauagaagacguuagcgga

SEQ ID NO: 404454 - RNA, 19 nt, Artificial Sequence
  Description of Artificial Sequence: Synthetic oligonucleotide
ugugcugcauacccugucc

SEQ ID NO: 404455 - RNA, 19 nt, Artificial Sequence
  Description of Artificial Sequence: Synthetic oligonucleotide
ucugcgcugccguaggagg

SEQ ID NO: 404456 - RNA, 19 nt, Artificial Sequence
  Description of Artificial Sequence: Synthetic oligonucleotide
cagucgcucggacagaugg

SEQ ID NO: 404457 - RNA, 19 nt, Artificial Sequence
  Description of Artificial Sequence: Synthetic oligonucleotide
gacgguacgccacauuccc

SEQ ID NO: 404458 - RNA, 19 nt, Artificial Sequence
  Description of Artificial Sequence: Synthetic oligonucleotide
auaauucggcaaucagagg

SEQ ID NO: 404459 - RNA, 19 nt, Artificial Sequence
  Description of Artificial Sequence: Synthetic oligonucleotide
ucugagaauaauuguccuc

SEQ ID NO: 404460 - RNA, 19 nt, Artificial Sequence
  Description of Artificial Sequence: Synthetic oligonucleotide
ggauaucggggucaggucg

SEQ ID NO: 404461 - RNA, 19 nt, Artificial Sequence
  Description of Artificial Sequence: Synthetic oligonucleotide
caauguggcuauaugacca

SEQ ID NO: 404462 - RNA, 19 nt, Artificial Sequence
  Description of Artificial Sequence: Synthetic oligonucleotide
ucuccaauugagguggccc

SEQ ID NO: 404463 - RNA, 19 nt, Artificial Sequence
  Description of Artificial Sequence: Synthetic oligonucleotide
uggacucggauaauucggc

SEQ ID NO: 404464 - RNA, 19 nt, Artificial Sequence
  Description of Artificial Sequence: Synthetic oligonucleotide
uagaagacguuagcggagg

SEQ ID NO: 404465 - RNA, 19 nt, Artificial Sequence
  Description of Artificial Sequence: Synthetic oligonucleotide
agcagcaccgugcaaggag

SEQ ID NO: 404466 - RNA, 19 nt, Artificial Sequence
  Description of Artificial Sequence: Synthetic oligonucleotide
agaaguuccgaagcagacg

SEQ ID NO: 404467 - RNA, 19 nt, Artificial Sequence
  Description of Artificial Sequence: Synthetic oligonucleotide
uccgcaucuagcaggguca

SEQ ID NO: 404468 - RNA, 19 nt, Artificial Sequence
  Description of Artificial Sequence: Synthetic oligonucleotide
uucucaacacugacgguac

SEQ ID NO: 404469 - RNA, 19 nt, Artificial Sequence
  Description of Artificial Sequence: Synthetic oligonucleotide
aaaucgugagaugagccau

SEQ ID NO: 404470 - RNA, 19 nt, Artificial Sequence
  Description of Artificial Sequence: Synthetic oligonucleotide
agcaucacgagauccuuca

SEQ ID NO: 404471 - RNA, 19 nt, Artificial Sequence
  Description of Artificial Sequence: Synthetic oligonucleotide
uguucggccaaguggucag

SEQ ID NO: 404472 - RNA, 19 nt, Artificial Sequence
  Description of Artificial Sequence: Synthetic oligonucleotide
ugugguccucucuagcuca

SEQ ID NO: 404473 - RNA, 19 nt, Artificial Sequence
  Description of Artificial Sequence: Synthetic oligonucleotide
acauucguucuggaggcgc

SEQ ID NO: 404474 - RNA, 19 nt, Artificial Sequence
  Description of Artificial Sequence: Synthetic oligonucleotide
auuauaguguugucacagu

SEQ ID NO: 404475 - RNA, 19 nt, Artificial Sequence
  Description of Artificial Sequence: Synthetic oligonucleotide
ucaacacugacgguacgcc

SEQ ID NO: 404476 - RNA, 19 nt, Artificial Sequence
  Description of Artificial Sequence: Synthetic oligonucleotide
gauaucggggucaggucgg

SEQ ID NO: 404477 - RNA, 19 nt, Artificial Sequence
  Description of Artificial Sequence: Synthetic oligonucleotide
gagaccacuagcgucggcc

SEQ ID NO: 404478 - RNA, 19 nt, Artificial Sequence
  Description of Artificial Sequence: Synthetic oligonucleotide
auccagcaucacgagaucc

SEQ ID NO: 404479 - RNA, 19 nt, Artificial Sequence
  Description of Artificial Sequence: Synthetic oligonucleotide
uccagcaucacgagauccu

SEQ ID NO: 404480 - RNA, 19 nt, Artificial Sequence
  Description of Artificial Sequence: Synthetic oligonucleotide
ugcagggauccaauguggc

SEQ ID NO: 404481 - RNA, 19 nt, Artificial Sequence
  Description of Artificial Sequence: Synthetic oligonucleotide
acggucaccucaccuggcc

SEQ ID NO: 404482 - RNA, 19 nt, Artificial Sequence
  Description of Artificial Sequence: Synthetic oligonucleotide
gacacaagagggguggggc

SEQ ID NO: 404483 - RNA, 19 nt, Artificial Sequence
  Description of Artificial Sequence: Synthetic oligonucleotide
agcacggagauggcuaccc

SEQ ID NO: 404484 - RNA, 19 nt, Artificial Sequence
  Description of Artificial Sequence: Synthetic oligonucleotide
caccuuucgggcuuucugc

SEQ ID NO: 404485 - RNA, 19 nt, Artificial Sequence
  Description of Artificial Sequence: Synthetic oligonucleotide
ugcgugaggagcucucugc

SEQ ID NO: 404486 - RNA, 19 nt, Artificial Sequence
  Description of Artificial Sequence: Synthetic oligonucleotide
cuccaauugagguggcccc

SEQ ID NO: 404487 - RNA, 19 nt, Artificial Sequence
  Description of Artificial Sequence: Synthetic oligonucleotide
ugacgguacgccacauucc

SEQ ID NO: 404488 - RNA, 19 nt, Artificial Sequence
  Description of Artificial Sequence: Synthetic oligonucleotide
acuagcgucggccgaagca

SEQ ID NO: 404489 - RNA, 19 nt, Artificial Sequence
  Description of Artificial Sequence: Synthetic oligonucleotide
gaacgucuugucauugucc

SEQ ID NO: 404490 - RNA, 19 nt, Artificial Sequence
  Description of Artificial Sequence: Synthetic oligonucleotide
ucacaggacacacggugac

SEQ ID NO: 404491 - RNA, 19 nt, Artificial Sequence
  Description of Artificial Sequence: Synthetic oligonucleotide
ggaaaagacucugaggcug

SEQ ID NO: 404492 - RNA, 19 nt, Artificial Sequence
  Description of Artificial Sequence: Synthetic oligonucleotide
ugccguaggaggaaaucgu

SEQ ID NO: 404493 - RNA, 19 nt, Artificial Sequence
  Description of Artificial Sequence: Synthetic oligonucleotide
aaucgugagaugagccauc

SEQ ID NO: 404494 - RNA, 19 nt, Artificial Sequence
  Description of Artificial Sequence: Synthetic oligonucleotide
agaccacuagcgucggccg

SEQ ID NO: 404495 - RNA, 19 nt, Artificial Sequence
  Description of Artificial Sequence: Synthetic oligonucleotide
ucucaacacugacgguacg

SEQ ID NO: 404496 - RNA, 19 nt, Artificial Sequence
  Description of Artificial Sequence: Synthetic oligonucleotide
cacggagcugacuacugcc

SEQ ID NO: 404497 - RNA, 19 nt, Artificial Sequence
  Description of Artificial Sequence: Synthetic oligonucleotide
agguugaaagcacggagau

SEQ ID NO: 404498 - RNA, 19 nt, Artificial Sequence
  Description of Artificial Sequence: Synthetic oligonucleotide
cucacggucaccucaccug

SEQ ID NO: 404499 - RNA, 19 nt, Artificial Sequence
  Description of Artificial Sequence: Synthetic oligonucleotide
cauccgugcagccggagag

SEQ ID NO: 404500 - RNA, 19 nt, Artificial Sequence
  Description of Artificial Sequence: Synthetic oligonucleotide
agcgaggaacaccaggaca

SEQ ID NO: 404501 - RNA, 19 nt, Artificial Sequence
  Description of Artificial Sequence: Synthetic oligonucleotide
auagaagacguuagcggag

SEQ ID NO: 404502 - RNA, 19 nt, Artificial Sequence
  Description of Artificial Sequence: Synthetic oligonucleotide
cacgacagcauagacugag

SEQ ID NO: 404503 - RNA, 19 nt, Artificial Sequence
  Description of Artificial Sequence: Synthetic oligonucleotide
cacacggugacucugagcu

SEQ ID NO: 404504 - RNA, 19 nt, Artificial Sequence
  Description of Artificial Sequence: Synthetic oligonucleotide
guggccuuaauccugggaa

SEQ ID NO: 404505 - RNA, 19 nt, Artificial Sequence
  Description of Artificial Sequence: Synthetic oligonucleotide
acucggauaauucggcaau

SEQ ID NO: 404506 - RNA, 19 nt, Artificial Sequence
  Description of Artificial Sequence: Synthetic oligonucleotide
gaaggccuaggggaggagg

SEQ ID NO: 404507 - RNA, 19 nt, Artificial Sequence
  Description of Artificial Sequence: Synthetic oligonucleotide
ggaaucgccaggaagggcc

SEQ ID NO: 404508 - RNA, 19 nt, Artificial Sequence
  Description of Artificial Sequence: Synthetic oligonucleotide
aucuagcagggucagcugu

SEQ ID NO: 404509 - RNA, 19 nt, Artificial Sequence
  Description of Artificial Sequence: Synthetic oligonucleotide
uggcuuucgaggugguuug

SEQ ID NO: 404510 - RNA, 19 nt, Artificial Sequence
  Description of Artificial Sequence: Synthetic oligonucleotide
cuccgaaaggacagcaaac

SEQ ID NO: 404511 - RNA, 19 nt, Artificial Sequence
  Description of Artificial Sequence: Synthetic oligonucleotide
agaagacguuagcggaggg

SEQ ID NO: 404512 - RNA, 19 nt, Artificial Sequence
  Description of Artificial Sequence: Synthetic oligonucleotide
cacgacauucguucuggag

SEQ ID NO: 404513 - RNA, 19 nt, Artificial Sequence
  Description of Artificial Sequence: Synthetic oligonucleotide
cugccguaggaggaaaucg

SEQ ID NO: 404514 - RNA, 19 nt, Artificial Sequence
  Description of Artificial Sequence: Synthetic oligonucleotide
uuccgaagcagacggcacu

SEQ ID NO: 404515 - RNA, 19 nt, Artificial Sequence
  Description of Artificial Sequence: Synthetic oligonucleotide
aaaagacucugaggcuguc

SEQ ID NO: 404516 - RNA, 19 nt, Artificial Sequence
  Description of Artificial Sequence: Synthetic oligonucleotide
ucggauaauucggcaauca

SEQ ID NO: 404517 - RNA, 19 nt, Artificial Sequence
  Description of Artificial Sequence: Synthetic oligonucleotide
gaagacguuagcggagggc

SEQ ID NO: 404518 - RNA, 19 nt, Artificial Sequence
  Description of Artificial Sequence: Synthetic oligonucleotide
uacccuguccgaagcaaga

SEQ ID NO: 404519 - RNA, 19 nt, Artificial Sequence
  Description of Artificial Sequence: Synthetic oligonucleotide
gacguuagcggagggcggg

SEQ ID NO: 404520 - RNA, 19 nt, Artificial Sequence
  Description of Artificial Sequence: Synthetic oligonucleotide
ucuacccgggcccggaggu

SEQ ID NO: 404521 - RNA, 19 nt, Artificial Sequence
  Description of Artificial Sequence: Synthetic oligonucleotide
auguggcuauaugaccacc

SEQ ID NO: 404522 - RNA, 19 nt, Artificial Sequence
  Description of Artificial Sequence: Synthetic oligonucleotide
uguuggauaucggggucag

SEQ ID NO: 404523 - RNA, 19 nt, Artificial Sequence
  Description of Artificial Sequence: Synthetic oligonucleotide
gguuccacgucacaggaca

SEQ ID NO: 404524 - RNA, 19 nt, Artificial Sequence
  Description of Artificial Sequence: Synthetic oligonucleotide
ggucccuagguauggaacc

SEQ ID NO: 404525 - RNA, 19 nt, Artificial Sequence
  Description of Artificial Sequence: Synthetic oligonucleotide
cacggcuaaugacacuggg

SEQ ID NO: 404526 - RNA, 19 nt, Artificial Sequence
  Description of Artificial Sequence: Synthetic oligonucleotide
acggacggccacuucaugu

SEQ ID NO: 404527 - RNA, 19 nt, Artificial Sequence
  Description of Artificial Sequence: Synthetic oligonucleotide
aucuggacucggauaauuc

SEQ ID NO: 404528 - RNA, 19 nt, Artificial Sequence
  Description of Artificial Sequence: Synthetic oligonucleotide
agcuguucggccaaguggu

SEQ ID NO: 404529 - RNA, 19 nt, Artificial Sequence
  Description of Artificial Sequence: Synthetic oligonucleotide
ggcuuaggaagguuggggc

SEQ ID NO: 404530 - RNA, 19 nt, Artificial Sequence
  Description of Artificial Sequence: Synthetic oligonucleotide
aguuccgaagcagacggca

SEQ ID NO: 404531 - RNA, 19 nt, Artificial Sequence
  Description of Artificial Sequence: Synthetic oligonucleotide
uccgcuugucaaaauuaau

SEQ ID NO: 404532 - RNA, 19 nt, Artificial Sequence
  Description of Artificial Sequence: Synthetic oligonucleotide
gacucggauaauucggcaa

SEQ ID NO: 404533 - RNA, 19 nt, Artificial Sequence
  Description of Artificial Sequence: Synthetic oligonucleotide
aaguuccgaagcagacggc

SEQ ID NO: 404534 - RNA, 19 nt, Artificial Sequence
  Description of Artificial Sequence: Synthetic oligonucleotide
ucggcaaucagaggacucu

SEQ ID NO: 404535 - RNA, 19 nt, Artificial Sequence
  Description of Artificial Sequence: Synthetic oligonucleotide
gaaagcacggagauggcua

SEQ ID NO: 404536 - RNA, 19 nt, Artificial Sequence
  Description of Artificial Sequence: Synthetic oligonucleotide
aggagcuagcacucuucuc

SEQ ID NO: 404537 - RNA, 19 nt, Artificial Sequence
  Description of Artificial Sequence: Synthetic oligonucleotide
ggauaauucggcaaucaga

SEQ ID NO: 404538 - RNA, 19 nt, Artificial Sequence
  Description of Artificial Sequence: Synthetic oligonucleotide
ucggggucaggucggaggu

SEQ ID NO: 404539 - RNA, 19 nt, Artificial Sequence
  Description of Artificial Sequence: Synthetic oligonucleotide
uguaaaccaacaggacuuc

SEQ ID NO: 404540 - RNA, 19 nt, Artificial Sequence
  Description of Artificial Sequence: Synthetic oligonucleotide
ucggccgaagcauccgugc

SEQ ID NO: 404541 - RNA, 19 nt, Artificial Sequence
  Description of Artificial Sequence: Synthetic oligonucleotide
ggaucagauugagaaacag

SEQ ID NO: 404542 - RNA, 19 nt, Artificial Sequence
  Description of Artificial Sequence: Synthetic oligonucleotide
uggccccucuccaauugag

SEQ ID NO: 404543 - RNA, 19 nt, Artificial Sequence
  Description of Artificial Sequence: Synthetic oligonucleotide
ggucggaguggccucacgg

SEQ ID NO: 404544 - RNA, 19 nt, Artificial Sequence
  Description of Artificial Sequence: Synthetic oligonucleotide
ugugugacagucgcucgga

SEQ ID NO: 404545 - RNA, 19 nt, Artificial Sequence
  Description of Artificial Sequence: Synthetic oligonucleotide
gacacacggugacucugag

SEQ ID NO: 404546 - RNA, 19 nt, Artificial Sequence
  Description of Artificial Sequence: Synthetic oligonucleotide
aucuacccgggcccggagg

SEQ ID NO: 404547 - RNA, 19 nt, Artificial Sequence
  Description of Artificial Sequence: Synthetic oligonucleotide
cacgggguuggcuuucgag

SEQ ID NO: 404548 - RNA, 19 nt, Artificial Sequence
  Description of Artificial Sequence: Synthetic oligonucleotide
uggauaucggggucagguc

SEQ ID NO: 404549 - RNA, 19 nt, Artificial Sequence
  Description of Artificial Sequence: Synthetic oligonucleotide
ugcugcauacccuguccga

SEQ ID NO: 404550 - RNA, 19 nt, Artificial Sequence
  Description of Artificial Sequence: Synthetic oligonucleotide
cuguaaaccaacaggacuu

SEQ ID NO: 404551 - RNA, 19 nt, Artificial Sequence
  Description of Artificial Sequence: Synthetic oligonucleotide
gagaggggaucagauugag

SEQ ID NO: 404552 - RNA, 19 nt, Artificial Sequence
  Description of Artificial Sequence: Synthetic oligonucleotide
uggccuuaauccugggaaa

SEQ ID NO: 404553 - RNA, 19 nt, Artificial Sequence
  Description of Artificial Sequence: Synthetic oligonucleotide
acagaacgucuugucauug

SEQ ID NO: 404554 - RNA, 19 nt, Artificial Sequence
  Description of Artificial Sequence: Synthetic oligonucleotide
ggaugguuagcucucgcuc

SEQ ID NO: 404555 - RNA, 19 nt, Artificial Sequence
  Description of Artificial Sequence: Synthetic oligonucleotide
uguccgaagcaagaagcuc

SEQ ID NO: 404556 - RNA, 19 nt, Artificial Sequence
  Description of Artificial Sequence: Synthetic oligonucleotide
caccaggacauccgugggg

SEQ ID NO: 404557 - RNA, 19 nt, Artificial Sequence
  Description of Artificial Sequence: Synthetic oligonucleotide
caucuccaacacugggccg

SEQ ID NO: 404558 - RNA, 19 nt, Artificial Sequence
  Description of Artificial Sequence: Synthetic oligonucleotide
acucugguccggauacccc

SEQ ID NO: 404559 - RNA, 19 nt, Artificial Sequence
  Description of Artificial Sequence: Synthetic oligonucleotide
acugagaggggaucagauu

SEQ ID NO: 404560 - RNA, 19 nt, Artificial Sequence
  Description of Artificial Sequence: Synthetic oligonucleotide
ugcccgaagccuguggaca

SEQ ID NO: 404561 - RNA, 19 nt, Artificial Sequence
  Description of Artificial Sequence: Synthetic oligonucleotide
agcugacuacugccccugc

SEQ ID NO: 404562 - RNA, 19 nt, Artificial Sequence
  Description of Artificial Sequence: Synthetic oligonucleotide
cugacuacugccccugcca

SEQ ID NO: 404563 - RNA, 19 nt, Artificial Sequence
  Description of Artificial Sequence: Synthetic oligonucleotide
uccgggugccucaucucca

SEQ ID NO: 404564 - RNA, 19 nt, Artificial Sequence
  Description of Artificial Sequence: Synthetic oligonucleotide
cagacggcacuccuccgcc

SEQ ID NO: 404565 - RNA, 19 nt, Artificial Sequence
  Description of Artificial Sequence: Synthetic oligonucleotide
agccacgacauucguucug

SEQ ID NO: 404566 - RNA, 19 nt, Artificial Sequence
  Description of Artificial Sequence: Synthetic oligonucleotide
ggaaggucccuagguaugg

SEQ ID NO: 404567 - RNA, 19 nt, Artificial Sequence
  Description of Artificial Sequence: Synthetic oligonucleotide
gucgcucggacagaugggc

SEQ ID NO: 404568 - RNA, 19 nt, Artificial Sequence
  Description of Artificial Sequence: Synthetic oligonucleotide
agauccacaggacgcugaa

SEQ ID NO: 404569 - RNA, 19 nt, Artificial Sequence
  Description of Artificial Sequence: Synthetic oligonucleotide
gacauucguucuggaggcg

SEQ ID NO: 404570 - RNA, 19 nt, Artificial Sequence
  Description of Artificial Sequence: Synthetic oligonucleotide
agcgucggccgaagcaucc

SEQ ID NO: 404571 - RNA, 19 nt, Artificial Sequence
  Description of Artificial Sequence: Synthetic oligonucleotide
auacccuguccgaagcaag

SEQ ID NO: 404572 - RNA, 19 nt, Artificial Sequence
  Description of Artificial Sequence: Synthetic oligonucleotide
agggauccaauguggcuau

SEQ ID NO: 404573 - RNA, 19 nt, Artificial Sequence
  Description of Artificial Sequence: Synthetic oligonucleotide
gggcuuaggaagguugggg

SEQ ID NO: 404574 - RNA, 19 nt, Artificial Sequence
  Description of Artificial Sequence: Synthetic oligonucleotide
guuagcggagggcgggaug

SEQ ID NO: 404575 - RNA, 19 nt, Artificial Sequence
  Description of Artificial Sequence: Synthetic oligonucleotide
ucgcucggacagaugggca

SEQ ID NO: 404576 - RNA, 19 nt, Artificial Sequence
  Description of Artificial Sequence: Synthetic oligonucleotide
acgcugaacggcggugacc

SEQ ID NO: 404577 - RNA, 19 nt, Artificial Sequence
  Description of Artificial Sequence: Synthetic oligonucleotide
gaagcagacggcacuccuc

SEQ ID NO: 404578 - RNA, 19 nt, Artificial Sequence
  Description of Artificial Sequence: Synthetic oligonucleotide
ggucaccucaccuggcccc

SEQ ID NO: 404579 - RNA, 19 nt, Artificial Sequence
  Description of Artificial Sequence: Synthetic oligonucleotide
cgacauucguucuggaggc

SEQ ID NO: 404580 - RNA, 19 nt, Artificial Sequence
  Description of Artificial Sequence: Synthetic oligonucleotide
gacggcacuccuccgccac

SEQ ID NO: 404581 - RNA, 19 nt, Artificial Sequence
  Description of Artificial Sequence: Synthetic oligonucleotide
acgacagcauagacugagg

SEQ ID NO: 404582 - RNA, 19 nt, Artificial Sequence
  Description of Artificial Sequence: Synthetic oligonucleotide
ucgugagaugagccaucca

SEQ ID NO: 404583 - RNA, 19 nt, Artificial Sequence
  Description of Artificial Sequence: Synthetic oligonucleotide
auucggcaaucagaggacu

SEQ ID NO: 404584 - RNA, 19 nt, Artificial Sequence
  Description of Artificial Sequence: Synthetic oligonucleotide
acggccacuucaugugcug

SEQ ID NO: 404585 - RNA, 19 nt, Artificial Sequence
  Description of Artificial Sequence: Synthetic oligonucleotide
gccacgacauucguucugg

SEQ ID NO: 404586 - RNA, 19 nt, Artificial Sequence
  Description of Artificial Sequence: Synthetic oligonucleotide
augagccauccauagcaua

SEQ ID NO: 404587 - RNA, 19 nt, Artificial Sequence
  Description of Artificial Sequence: Synthetic oligonucleotide
cagccgggucagcagaggc

SEQ ID NO: 404588 - RNA, 19 nt, Artificial Sequence
  Description of Artificial Sequence: Synthetic oligonucleotide
acggcuaaugacacuggga

SEQ ID NO: 404589 - RNA, 19 nt, Artificial Sequence
  Description of Artificial Sequence: Synthetic oligonucleotide
cuccgcuugucaaaauuaa

SEQ ID NO: 404590 - RNA, 19 nt, Artificial Sequence
  Description of Artificial Sequence: Synthetic oligonucleotide
cauucguucuggaggcgca

SEQ ID NO: 404591 - RNA, 19 nt, Artificial Sequence
  Description of Artificial Sequence: Synthetic oligonucleotide
ucggccaaguggucagcga

SEQ ID NO: 404592 - RNA, 19 nt, Artificial Sequence
  Description of Artificial Sequence: Synthetic oligonucleotide
aaucgccaggaagggccag

SEQ ID NO: 404593 - RNA, 19 nt, Artificial Sequence
  Description of Artificial Sequence: Synthetic oligonucleotide
cucugagaauaauuguccu

SEQ ID NO: 404594 - RNA, 19 nt, Artificial Sequence
  Description of Artificial Sequence: Synthetic oligonucleotide
ugcucacaccuggugugag

SEQ ID NO: 404595 - RNA, 19 nt, Artificial Sequence
  Description of Artificial Sequence: Synthetic oligonucleotide
uggcccuucacaggcuagc

SEQ ID NO: 404596 - RNA, 19 nt, Artificial Sequence
  Description of Artificial Sequence: Synthetic oligonucleotide
ggcaaucagaggacucugg

SEQ ID NO: 404597 - RNA, 19 nt, Artificial Sequence
  Description of Artificial Sequence: Synthetic oligonucleotide
agggcccgugcaaucuucc

SEQ ID NO: 404598 - RNA, 19 nt, Artificial Sequence
  Description of Artificial Sequence: Synthetic oligonucleotide
uuucgggcuuucugcccug

SEQ ID NO: 404599 - RNA, 19 nt, Artificial Sequence
  Description of Artificial Sequence: Synthetic oligonucleotide
agucgcucggacagauggg

SEQ ID NO: 404600 - RNA, 19 nt, Artificial Sequence
  Description of Artificial Sequence: Synthetic oligonucleotide
agccauuguuggauaucgg

SEQ ID NO: 404601 - RNA, 19 nt, Artificial Sequence
  Description of Artificial Sequence: Synthetic oligonucleotide
caacacugacgguacgcca

SEQ ID NO: 404602 - RNA, 19 nt, Artificial Sequence
  Description of Artificial Sequence: Synthetic oligonucleotide
uagccacgacauucguucu

SEQ ID NO: 404603 - RNA, 19 nt, Artificial Sequence
  Description of Artificial Sequence: Synthetic oligonucleotide
gacgcugaacggcggugac

SEQ ID NO: 404604 - RNA, 19 nt, Artificial Sequence
  Description of Artificial Sequence: Synthetic oligonucleotide
agccgggucagcagaggcg

SEQ ID NO: 404605 - RNA, 19 nt, Artificial Sequence
  Description of Artificial Sequence: Synthetic oligonucleotide
gacggacggccacuucaug

SEQ ID NO: 404606 - RNA, 19 nt, Artificial Sequence
  Description of Artificial Sequence: Synthetic oligonucleotide
cucggauaauucggcaauc

SEQ ID NO: 404607 - RNA, 19 nt, Artificial Sequence
  Description of Artificial Sequence: Synthetic oligonucleotide
uccugcgugaggagcucuc

SEQ ID NO: 404608 - RNA, 19 nt, Artificial Sequence
  Description of Artificial Sequence: Synthetic oligonucleotide
cauccagcaucacgagauc

SEQ ID NO: 404609 - RNA, 19 nt, Artificial Sequence
  Description of Artificial Sequence: Synthetic oligonucleotide
gcuccgaaaggacagcaaa

SEQ ID NO: 404610 - RNA, 19 nt, Artificial Sequence
  Description of Artificial Sequence: Synthetic oligonucleotide
cagguaguguuuugguuua

SEQ ID NO: 404611 - RNA, 19 nt, Artificial Sequence
  Description of Artificial Sequence: Synthetic oligonucleotide
ggggaaucgccaggaaggg

SEQ ID NO: 404612 - RNA, 19 nt, Artificial Sequence
  Description of Artificial Sequence: Synthetic oligonucleotide
cugcgugaggagcucucug

SEQ ID NO: 404613 - RNA, 19 nt, Artificial Sequence
  Description of Artificial Sequence: Synthetic oligonucleotide
ccacugugagaccacuagc

SEQ ID NO: 404614 - RNA, 19 nt, Artificial Sequence
  Description of Artificial Sequence: Synthetic oligonucleotide
guuccgaagcagacggcac

SEQ ID NO: 404615 - RNA, 19 nt, Artificial Sequence
  Description of Artificial Sequence: Synthetic oligonucleotide
ugcgacucgagggcuucca

SEQ ID NO: 404616 - RNA, 19 nt, Artificial Sequence
  Description of Artificial Sequence: Synthetic oligonucleotide
guuggauaucggggucagg

SEQ ID NO: 404617 - RNA, 19 nt, Artificial Sequence
  Description of Artificial Sequence: Synthetic oligonucleotide
cacggucaccucaccuggc

SEQ ID NO: 404618 - RNA, 19 nt, Artificial Sequence
  Description of Artificial Sequence: Synthetic oligonucleotide
gacagaacgucuugucauu

SEQ ID NO: 404619 - RNA, 19 nt, Artificial Sequence
  Description of Artificial Sequence: Synthetic oligonucleotide
acaggacgcugaacggcgg

SEQ ID NO: 404620 - RNA, 19 nt, Artificial Sequence
  Description of Artificial Sequence: Synthetic oligonucleotide
caaaauuaauguagccguu

SEQ ID NO: 404621 - RNA, 19 nt, Artificial Sequence
  Description of Artificial Sequence: Synthetic oligonucleotide
uaucggggucaggucggag

SEQ ID NO: 404622 - RNA, 19 nt, Artificial Sequence
  Description of Artificial Sequence: Synthetic oligonucleotide
cucggacagaugggcagag

SEQ ID NO: 404623 - RNA, 19 nt, Artificial Sequence
  Description of Artificial Sequence: Synthetic oligonucleotide
uagcgucggccgaagcauc

SEQ ID NO: 404624 - RNA, 19 nt, Artificial Sequence
  Description of Artificial Sequence: Synthetic oligonucleotide
acgccacauuccccagagg

SEQ ID NO: 404625 - RNA, 19 nt, Artificial Sequence
  Description of Artificial Sequence: Synthetic oligonucleotide
gcugacuacugccccugcc

SEQ ID NO: 404626 - RNA, 19 nt, Artificial Sequence
  Description of Artificial Sequence: Synthetic oligonucleotide
gguccggauaccccucccc

SEQ ID NO: 404627 - RNA, 19 nt, Artificial Sequence
  Description of Artificial Sequence: Synthetic oligonucleotide
acugacgguacgccacauu

SEQ ID NO: 404628 - RNA, 19 nt, Artificial Sequence
  Description of Artificial Sequence: Synthetic oligonucleotide
ccgaaaggacagcaaacuc

SEQ ID NO: 404629 - RNA, 19 nt, Artificial Sequence
  Description of Artificial Sequence: Synthetic oligonucleotide
cauacccuguccgaagcaa

SEQ ID NO: 404630 - RNA, 19 nt, Artificial Sequence
  Description of Artificial Sequence: Synthetic oligonucleotide
ggacggccacuucaugugc

SEQ ID NO: 404631 - RNA, 19 nt, Artificial Sequence
  Description of Artificial Sequence: Synthetic oligonucleotide
ugguuagcucucgcucccc

SEQ ID NO: 404632 - RNA, 19 nt, Artificial Sequence
  Description of Artificial Sequence: Synthetic oligonucleotide
cggauaauucggcaaucag

SEQ ID NO: 404633 - RNA, 19 nt, Artificial Sequence
  Description of Artificial Sequence: Synthetic oligonucleotide
aggacgcugaacggcggug

SEQ ID NO: 404634 - RNA, 19 nt, Artificial Sequence
  Description of Artificial Sequence: Synthetic oligonucleotide
gaccacuagcgucggccga

SEQ ID NO: 404635 - RNA, 19 nt, Artificial Sequence
  Description of Artificial Sequence: Synthetic oligonucleotide
ggacucggauaauucggca

SEQ ID NO: 404636 - RNA, 19 nt, Artificial Sequence
  Description of Artificial Sequence: Synthetic oligonucleotide
cauagacugaggagaaguu

SEQ ID NO: 404637 - RNA, 19 nt, Artificial Sequence
  Description of Artificial Sequence: Synthetic oligonucleotide
ggggcuuaggaagguuggg

SEQ ID NO: 404638 - RNA, 19 nt, Artificial Sequence
  Description of Artificial Sequence: Synthetic oligonucleotide
gaaggucccuagguaugga

SEQ ID NO: 404639 - RNA, 19 nt, Artificial Sequence
  Description of Artificial Sequence: Synthetic oligonucleotide
agaggggaucagauugaga

SEQ ID NO: 404640 - RNA, 19 nt, Artificial Sequence
  Description of Artificial Sequence: Synthetic oligonucleotide
gcacggagcugacuacugc

SEQ ID NO: 404641 - RNA, 19 nt, Artificial Sequence
  Description of Artificial Sequence: Synthetic oligonucleotide
gaggggccggugugggccc

SEQ ID NO: 404642 - RNA, 19 nt, Artificial Sequence
  Description of Artificial Sequence: Synthetic oligonucleotide
ccucccagacacugagagg

SEQ ID NO: 404643 - RNA, 19 nt, Artificial Sequence
  Description of Artificial Sequence: Synthetic oligonucleotide
cccuguccgaagcaagaag

SEQ ID NO: 404644 - RNA, 19 nt, Artificial Sequence
  Description of Artificial Sequence: Synthetic oligonucleotide
ccuuaauccugggaaagga

SEQ ID NO: 404645 - RNA, 19 nt, Artificial Sequence
  Description of Artificial Sequence: Synthetic oligonucleotide
ugacagucgcucggacaga

SEQ ID NO: 404646 - RNA, 19 nt, Artificial Sequence
  Description of Artificial Sequence: Synthetic oligonucleotide
accacuagcgucggccgaa

SEQ ID NO: 404647 - RNA, 19 nt, Artificial Sequence
  Description of Artificial Sequence: Synthetic oligonucleotide
gcaucacgagauccuucag

SEQ ID NO: 404648 - RNA, 19 nt, Artificial Sequence
  Description of Artificial Sequence: Synthetic oligonucleotide
cagggcccgugcaaucuuc

SEQ ID NO: 404649 - RNA, 19 nt, Artificial Sequence
  Description of Artificial Sequence: Synthetic oligonucleotide
cacuagcgucggccgaagc

SEQ ID NO: 404650 - RNA, 19 nt, Artificial Sequence
  Description of Artificial Sequence: Synthetic oligonucleotide
gcccgaagccuguggacag

SEQ ID NO: 404651 - RNA, 19 nt, Artificial Sequence
  Description of Artificial Sequence: Synthetic oligonucleotide
guuccacgucacaggacac

SEQ ID NO: 404652 - RNA, 19 nt, Artificial Sequence
  Description of Artificial Sequence: Synthetic oligonucleotide
agagggguggggccuccaa

SEQ ID NO: 404653 - RNA, 19 nt, Artificial Sequence
  Description of Artificial Sequence: Synthetic oligonucleotide
agacggcacuccuccgcca

SEQ ID NO: 404654 - RNA, 19 nt, Artificial Sequence
  Description of Artificial Sequence: Synthetic oligonucleotide
gccgggucagcagaggcgc

SEQ ID NO: 404655 - RNA, 19 nt, Artificial Sequence
  Description of Artificial Sequence: Synthetic oligonucleotide
gccguaggaggaaaucgug

SEQ ID NO: 404656 - RNA, 19 nt, Artificial Sequence
  Description of Artificial Sequence: Synthetic oligonucleotide
gucggccgaagcauccgug

SEQ ID NO: 404657 - RNA, 19 nt, Artificial Sequence
  Description of Artificial Sequence: Synthetic oligonucleotide
gaugagccauccauagcau

SEQ ID NO: 404658 - RNA, 19 nt, Artificial Sequence
  Description of Artificial Sequence: Synthetic oligonucleotide
cacggagauggcuaccccu

SEQ ID NO: 404659 - RNA, 19 nt, Artificial Sequence
  Description of Artificial Sequence: Synthetic oligonucleotide
agguuggggcccggggauc

SEQ ID NO: 404660 - RNA, 19 nt, Artificial Sequence
  Description of Artificial Sequence: Synthetic oligonucleotide
cugggccgaucccaggaca

SEQ ID NO: 404661 - RNA, 19 nt, Artificial Sequence
  Description of Artificial Sequence: Synthetic oligonucleotide
cugcgcugccguaggagga

SEQ ID NO: 404662 - RNA, 19 nt, Artificial Sequence
  Description of Artificial Sequence: Synthetic oligonucleotide
acccuguccgaagcaagaa

SEQ ID NO: 404663 - RNA, 19 nt, Artificial Sequence
  Description of Artificial Sequence: Synthetic oligonucleotide
ccucccuguggccuuaauc

SEQ ID NO: 404664 - RNA, 19 nt, Artificial Sequence
  Description of Artificial Sequence: Synthetic oligonucleotide
agacggacggccacuucau

SEQ ID NO: 404665 - RNA, 19 nt, Artificial Sequence
  Description of Artificial Sequence: Synthetic oligonucleotide
ccguaggaggaaaucguga

SEQ ID NO: 404666 - RNA, 19 nt, Artificial Sequence
  Description of Artificial Sequence: Synthetic oligonucleotide
cgaagcauccgugcagccg

SEQ ID NO: 404667 - RNA, 19 nt, Artificial Sequence
  Description of Artificial Sequence: Synthetic oligonucleotide
uuggggcccggggaucuac

SEQ ID NO: 404668 - RNA, 19 nt, Artificial Sequence
  Description of Artificial Sequence: Synthetic oligonucleotide
auaucggggucaggucgga

SEQ ID NO: 404669 - RNA, 19 nt, Artificial Sequence
  Description of Artificial Sequence: Synthetic oligonucleotide
gggaugguuagcucucgcu

SEQ ID NO: 404670 - RNA, 19 nt, Artificial Sequence
  Description of Artificial Sequence: Synthetic oligonucleotide
ccgacacgacagcauagac

SEQ ID NO: 404671 - RNA, 19 nt, Artificial Sequence
  Description of Artificial Sequence: Synthetic oligonucleotide
acggcacuccuccgccaca

SEQ ID NO: 404672 - RNA, 19 nt, Artificial Sequence
  Description of Artificial Sequence: Synthetic oligonucleotide
agcauccgugcagccggag

SEQ ID NO: 404673 - RNA, 19 nt, Artificial Sequence
  Description of Artificial Sequence: Synthetic oligonucleotide
cggccaaguggucagcgag

SEQ ID NO: 404674 - RNA, 19 nt, Artificial Sequence
  Description of Artificial Sequence: Synthetic oligonucleotide
gggaaucgccaggaagggc

SEQ ID NO: 404675 - RNA, 19 nt, Artificial Sequence
  Description of Artificial Sequence: Synthetic oligonucleotide
augagacggacggccacuu

SEQ ID NO: 404676 - RNA, 19 nt, Artificial Sequence
  Description of Artificial Sequence: Synthetic oligonucleotide
cuagcgucggccgaagcau

SEQ ID NO: 404677 - RNA, 19 nt, Artificial Sequence
  Description of Artificial Sequence: Synthetic oligonucleotide
cggacggccacuucaugug

SEQ ID NO: 404678 - RNA, 19 nt, Artificial Sequence
  Description of Artificial Sequence: Synthetic oligonucleotide
aagcauccgugcagccgga

SEQ ID NO: 404679 - RNA, 19 nt, Artificial Sequence
  Description of Artificial Sequence: Synthetic oligonucleotide
gacagucgcucggacagau

SEQ ID NO: 404680 - RNA, 19 nt, Artificial Sequence
  Description of Artificial Sequence: Synthetic oligonucleotide
gccggugugggccccuggc

SEQ ID NO: 404681 - RNA, 19 nt, Artificial Sequence
  Description of Artificial Sequence: Synthetic oligonucleotide
gcacggagauggcuacccc

SEQ ID NO: 404682 - RNA, 19 nt, Artificial Sequence
  Description of Artificial Sequence: Synthetic oligonucleotide
cuccgccacacggauccac

SEQ ID NO: 404683 - RNA, 19 nt, Artificial Sequence
  Description of Artificial Sequence: Synthetic oligonucleotide
gccacacggauccacuucu

SEQ ID NO: 404684 - RNA, 19 nt, Artificial Sequence
  Description of Artificial Sequence: Synthetic oligonucleotide
ggcuuucgaggugguuugg

SEQ ID NO: 404685 - RNA, 19 nt, Artificial Sequence
  Description of Artificial Sequence: Synthetic oligonucleotide
ggccgacacgacagcauag

SEQ ID NO: 404686 - RNA, 19 nt, Artificial Sequence
  Description of Artificial Sequence: Synthetic oligonucleotide
gcgacucgagggcuuccag

SEQ ID NO: 404687 - RNA, 19 nt, Artificial Sequence
  Description of Artificial Sequence: Synthetic oligonucleotide
ccuccgcuugucaaaauua

SEQ ID NO: 404688 - RNA, 19 nt, Artificial Sequence
  Description of Artificial Sequence: Synthetic oligonucleotide
ccggagguuucggaugagg

SEQ ID NO: 404689 - RNA, 19 nt, Artificial Sequence
  Description of Artificial Sequence: Synthetic oligonucleotide
gccauaugcagggauccaa

SEQ ID NO: 404690 - RNA, 19 nt, Artificial Sequence
  Description of Artificial Sequence: Synthetic oligonucleotide
cggggaucuacccgggccc

SEQ ID NO: 404691 - RNA, 19 nt, Artificial Sequence
  Description of Artificial Sequence: Synthetic oligonucleotide
ccucaccuggccccucucc

SEQ ID NO: 404692 - RNA, 19 nt, Artificial Sequence
  Description of Artificial Sequence: Synthetic oligonucleotide
ccucucuagcucaccagga

SEQ ID NO: 404693 - RNA, 19 nt, Artificial Sequence
  Description of Artificial Sequence: Synthetic oligonucleotide
gcugcauacccuguccgaa

SEQ ID NO: 404694 - RNA, 19 nt, Artificial Sequence
  Description of Artificial Sequence: Synthetic oligonucleotide
cgaagcaagaagcucucaa

SEQ ID NO: 404695 - RNA, 19 nt, Artificial Sequence
  Description of Artificial Sequence: Synthetic oligonucleotide
cuaccccugugguccucuc

SEQ ID NO: 404696 - RNA, 19 nt, Artificial Sequence
  Description of Artificial Sequence: Synthetic oligonucleotide
gggucggaguggccucacg

SEQ ID NO: 404697 - RNA, 19 nt, Artificial Sequence
  Description of Artificial Sequence: Synthetic oligonucleotide
ccgaucccaggacacaaga

SEQ ID NO: 404698 - RNA, 19 nt, Artificial Sequence
  Description of Artificial Sequence: Synthetic oligonucleotide
gcauccgugcagccggaga

SEQ ID NO: 404699 - RNA, 19 nt, Artificial Sequence
  Description of Artificial Sequence: Synthetic oligonucleotide
cuucugcgcugccguagga

SEQ ID NO: 404700 - RNA, 19 nt, Artificial Sequence
  Description of Artificial Sequence: Synthetic oligonucleotide
acguuagcggagggcggga

SEQ ID NO: 404701 - RNA, 19 nt, Artificial Sequence
  Description of Artificial Sequence: Synthetic oligonucleotide
accgugcaaggaggggcug

SEQ ID NO: 404702 - RNA, 19 nt, Artificial Sequence
  Description of Artificial Sequence: Synthetic oligonucleotide
caccgugcaaggaggggcu

SEQ ID NO: 404703 - RNA, 19 nt, Artificial Sequence
  Description of Artificial Sequence: Synthetic oligonucleotide
gccgacacgacagcauaga

SEQ ID NO: 404704 - RNA, 19 nt, Artificial Sequence
  Description of Artificial Sequence: Synthetic oligonucleotide
gcagggccgacacgacagc

SEQ ID NO: 404705 - RNA, 19 nt, Artificial Sequence
  Description of Artificial Sequence: Synthetic oligonucleotide
gcgggaugguuagcucucg

SEQ ID NO: 404706 - RNA, 19 nt, Artificial Sequence
  Description of Artificial Sequence: Synthetic oligonucleotide
ggcgggaugguuagcucuc

SEQ ID NO: 404707 - RNA, 19 nt, Artificial Sequence
  Description of Artificial Sequence: Synthetic oligonucleotide
acggugacucugagcuuca

SEQ ID NO: 404708 - RNA, 19 nt, Artificial Sequence
  Description of Artificial Sequence: Synthetic oligonucleotide
gccgaucccaggacacaag

SEQ ID NO: 404709 - RNA, 19 nt, Artificial Sequence
  Description of Artificial Sequence: Synthetic oligonucleotide
cuccugugcugcauacccu

SEQ ID NO: 404710 - RNA, 19 nt, Artificial Sequence
  Description of Artificial Sequence: Synthetic oligonucleotide
gggccgacacgacagcaua

SEQ ID NO: 404711 - RNA, 19 nt, Artificial Sequence
  Description of Artificial Sequence: Synthetic oligonucleotide
ccuucacaggcuagcaugu

SEQ ID NO: 404712 - RNA, 19 nt, Artificial Sequence
  Description of Artificial Sequence: Synthetic oligonucleotide
cccgugcaaucuuccuccc

SEQ ID NO: 404713 - RNA, 19 nt, Artificial Sequence
  Description of Artificial Sequence: Synthetic oligonucleotide
caucuggacucggauaauu

SEQ ID NO: 404714 - RNA, 19 nt, Artificial Sequence
  Description of Artificial Sequence: Synthetic oligonucleotide
gcgucggccgaagcauccg

SEQ ID NO: 404715 - RNA, 19 nt, Artificial Sequence
  Description of Artificial Sequence: Synthetic oligonucleotide
ggaucuacccgggcccgga

SEQ ID NO: 404716 - RNA, 19 nt, Artificial Sequence
  Description of Artificial Sequence: Synthetic oligonucleotide
gcucggacagaugggcaga

SEQ ID NO: 404717 - RNA, 19 nt, Artificial Sequence
  Description of Artificial Sequence: Synthetic oligonucleotide
cgacacgacagcauagacu

SEQ ID NO: 404718 - RNA, 19 nt, Artificial Sequence
  Description of Artificial Sequence: Synthetic oligonucleotide
ccgaagcagacggcacucc

SEQ ID NO: 404719 - RNA, 19 nt, Artificial Sequence
  Description of Artificial Sequence: Synthetic oligonucleotide
ccauaugcagggauccaau

SEQ ID NO: 404720 - RNA, 19 nt, Artificial Sequence
  Description of Artificial Sequence: Synthetic oligonucleotide
cgggaugguuagcucucgc

SEQ ID NO: 404721 - RNA, 19 nt, Artificial Sequence
  Description of Artificial Sequence: Synthetic oligonucleotide
gcugcgacucgagggcuuc

SEQ ID NO: 404722 - RNA, 19 nt, Artificial Sequence
  Description of Artificial Sequence: Synthetic oligonucleotide
caggacgcugaacggcggu

SEQ ID NO: 404723 - RNA, 19 nt, Artificial Sequence
  Description of Artificial Sequence: Synthetic oligonucleotide
ccgcaucuagcagggucag

SEQ ID NO: 404724 - RNA, 19 nt, Artificial Sequence
  Description of Artificial Sequence: Synthetic oligonucleotide
cgccacacggauccacuuc

SEQ ID NO: 404725 - RNA, 19 nt, Artificial Sequence
  Description of Artificial Sequence: Synthetic oligonucleotide
ccggucucugugaccccac

SEQ ID NO: 404726 - RNA, 19 nt, Artificial Sequence
  Description of Artificial Sequence: Synthetic oligonucleotide
gcucacaccuggugugagu

SEQ ID NO: 404727 - RNA, 19 nt, Artificial Sequence
  Description of Artificial Sequence: Synthetic oligonucleotide
cccaggacacaagaggggu

SEQ ID NO: 404728 - RNA, 19 nt, Artificial Sequence
  Description of Artificial Sequence: Synthetic oligonucleotide
ccacuagcgucggccgaag

SEQ ID NO: 404729 - RNA, 19 nt, Artificial Sequence
  Description of Artificial Sequence: Synthetic oligonucleotide
uggccaccuuucgggcuuu

SEQ ID NO: 404730 - RNA, 19 nt, Artificial Sequence
  Description of Artificial Sequence: Synthetic oligonucleotide
ccucacggucaccucaccu

SEQ ID NO: 404731 - RNA, 19 nt, Artificial Sequence
  Description of Artificial Sequence: Synthetic oligonucleotide
ccacgacauucguucugga

SEQ ID NO: 404732 - RNA, 19 nt, Artificial Sequence
  Description of Artificial Sequence: Synthetic oligonucleotide
gcugaacggcggugaccuc

SEQ ID NO: 404733 - RNA, 19 nt, Artificial Sequence
  Description of Artificial Sequence: Synthetic oligonucleotide
cgcugaacggcggugaccu

SEQ ID NO: 404734 - RNA, 19 nt, Artificial Sequence
  Description of Artificial Sequence: Synthetic oligonucleotide
gcccuucacaggcuagcau

SEQ ID NO: 404735 - RNA, 19 nt, Artificial Sequence
  Description of Artificial Sequence: Synthetic oligonucleotide
cggcggugaccucgggaag

SEQ ID NO: 404736 - RNA, 19 nt, Artificial Sequence
  Description of Artificial Sequence: Synthetic oligonucleotide
cgaagcagacggcacuccu

SEQ ID NO: 404737 - RNA, 19 nt, Artificial Sequence
  Description of Artificial Sequence: Synthetic oligonucleotide
ggguuccgggugccucauc

SEQ ID NO: 404738 - RNA, 19 nt, Artificial Sequence
  Description of Artificial Sequence: Synthetic oligonucleotide
ggggucggaguggccucac

SEQ ID NO: 404739 - RNA, 19 nt, Artificial Sequence
  Description of Artificial Sequence: Synthetic oligonucleotide
ccgggcccggagguuucgg

SEQ ID NO: 404740 - RNA, 19 nt, Artificial Sequence
  Description of Artificial Sequence: Synthetic oligonucleotide
cccgggcccggagguuucg

SEQ ID NO: 404741 - RNA, 19 nt, Artificial Sequence
  Description of Artificial Sequence: Synthetic oligonucleotide
cacugacgguacgccacau

SEQ ID NO: 404742 - RNA, 19 nt, Artificial Sequence
  Description of Artificial Sequence: Synthetic oligonucleotide
ggcuaccccugugguccuc

SEQ ID NO: 404743 - RNA, 19 nt, Artificial Sequence
  Description of Artificial Sequence: Synthetic oligonucleotide
cggugacucugagcuucag

SEQ ID NO: 404744 - RNA, 19 nt, Artificial Sequence
  Description of Artificial Sequence: Synthetic oligonucleotide
ccgugcaaucuuccucccu

SEQ ID NO: 404745 - RNA, 19 nt, Artificial Sequence
  Description of Artificial Sequence: Synthetic oligonucleotide
ccacgggguuggcuuucga

SEQ ID NO: 404746 - RNA, 19 nt, Artificial Sequence
  Description of Artificial Sequence: Synthetic oligonucleotide
gcgcugccguaggaggaaa

SEQ ID NO: 404747 - RNA, 19 nt, Artificial Sequence
  Description of Artificial Sequence: Synthetic oligonucleotide
cgucggccgaagcauccgu

SEQ ID NO: 404748 - RNA, 19 nt, Artificial Sequence
  Description of Artificial Sequence: Synthetic oligonucleotide
ggcugcgacucgagggcuu

SEQ ID NO: 404749 - RNA, 19 nt, Artificial Sequence
  Description of Artificial Sequence: Synthetic oligonucleotide
gggguuccgggugccucau

SEQ ID NO: 404750 - RNA, 19 nt, Artificial Sequence
  Description of Artificial Sequence: Synthetic oligonucleotide
ccgccacacggauccacuu

SEQ ID NO: 404751 - RNA, 19 nt, Artificial Sequence
  Description of Artificial Sequence: Synthetic oligonucleotide
cguuagcggagggcgggau

SEQ ID NO: 404752 - RNA, 19 nt, Artificial Sequence
  Description of Artificial Sequence: Synthetic oligonucleotide
aaugacaaccuccaaugcc

SEQ ID NO: 404753 - RNA, 19 nt, Artificial Sequence
  Description of Artificial Sequence: Synthetic oligonucleotide
uuauauagguuccagaaga

SEQ ID NO: 404754 - RNA, 19 nt, Artificial Sequence
  Description of Artificial Sequence: Synthetic oligonucleotide
aagaggaagaguucgcccc

SEQ ID NO: 404755 - RNA, 19 nt, Artificial Sequence
  Description of Artificial Sequence: Synthetic oligonucleotide
ugaugagagauauacauca

SEQ ID NO: 404756 - RNA, 19 nt, Artificial Sequence
  Description of Artificial Sequence: Synthetic oligonucleotide
aaguugauaagaccauggc

SEQ ID NO: 404757 - RNA, 19 nt, Artificial Sequence
  Description of Artificial Sequence: Synthetic oligonucleotide
aaccauaacugcaaugugc

SEQ ID NO: 404758 - RNA, 19 nt, Artificial Sequence
  Description of Artificial Sequence: Synthetic oligonucleotide
aguugauaagaccauggcg

SEQ ID NO: 404759 - RNA, 19 nt, Artificial Sequence
  Description of Artificial Sequence: Synthetic oligonucleotide
guugauaagaccauggcgc

SEQ ID NO: 404760 - RNA, 19 nt, Artificial Sequence
  Description of Artificial Sequence: Synthetic oligonucleotide
cuagcaaccgguuaaauuc

SEQ ID NO: 404761 - RNA, 19 nt, Artificial Sequence
  Description of Artificial Sequence: Synthetic oligonucleotide
aauguagcaacccguccac

SEQ ID NO: 404762 - RNA, 19 nt, Artificial Sequence
  Description of Artificial Sequence: Synthetic oligonucleotide
aaagucgugggauuggcug

SEQ ID NO: 404763 - RNA, 19 nt, Artificial Sequence
  Description of Artificial Sequence: Synthetic oligonucleotide
uucgaaauguagcaacccg

SEQ ID NO: 404764 - RNA, 19 nt, Artificial Sequence
  Description of Artificial Sequence: Synthetic oligonucleotide
uguuaagguugccaaaucc

SEQ ID NO: 404765 - RNA, 19 nt, Artificial Sequence
  Description of Artificial Sequence: Synthetic oligonucleotide
agucguacugccaacaugc

SEQ ID NO: 404766 - RNA, 19 nt, Artificial Sequence
  Description of Artificial Sequence: Synthetic oligonucleotide
aaagguuugacuuguggaa

SEQ ID NO: 404767 - RNA, 19 nt, Artificial Sequence
  Description of Artificial Sequence: Synthetic oligonucleotide
uuauuaagaagcucuuuca

SEQ ID NO: 404768 - RNA, 19 nt, Artificial Sequence
  Description of Artificial Sequence: Synthetic oligonucleotide
auaaagguuugacuugugg

SEQ ID NO: 404769 - RNA, 19 nt, Artificial Sequence
  Description of Artificial Sequence: Synthetic oligonucleotide
augaguagccauuucuuac

SEQ ID NO: 404770 - RNA, 19 nt, Artificial Sequence
  Description of Artificial Sequence: Synthetic oligonucleotide
aacugcgucacacuuauaa

SEQ ID NO: 404771 - RNA, 19 nt, Artificial Sequence
  Description of Artificial Sequence: Synthetic oligonucleotide
uuuucgaaauguagcaacc

SEQ ID NO: 404772 - RNA, 19 nt, Artificial Sequence
  Description of Artificial Sequence: Synthetic oligonucleotide
accgguuaaauucuuguuc

SEQ ID NO: 404773 - RNA, 19 nt, Artificial Sequence
  Description of Artificial Sequence: Synthetic oligonucleotide
gagccauuaaaucauaguc

SEQ ID NO: 404774 - RNA, 19 nt, Artificial Sequence
  Description of Artificial Sequence: Synthetic oligonucleotide
uaguauuggagcuuuauau

SEQ ID NO: 404775 - RNA, 19 nt, Artificial Sequence
  Description of Artificial Sequence: Synthetic oligonucleotide
uguuuaagagagaggguag

SEQ ID NO: 404776 - RNA, 19 nt, Artificial Sequence
  Description of Artificial Sequence: Synthetic oligonucleotide
uggagcuuuauauagguuc

SEQ ID NO: 404777 - RNA, 19 nt, Artificial Sequence
  Description of Artificial Sequence: Synthetic oligonucleotide
ggaacguguauucacagcg

SEQ ID NO: 404778 - RNA, 19 nt, Artificial Sequence
  Description of Artificial Sequence: Synthetic oligonucleotide
ugugguacugcacugcuac

SEQ ID NO: 404779 - RNA, 19 nt, Artificial Sequence
  Description of Artificial Sequence: Synthetic oligonucleotide
agcaaagaaaagucguggg

SEQ ID NO: 404780 - RNA, 19 nt, Artificial Sequence
  Description of Artificial Sequence: Synthetic oligonucleotide
uugagaauggccaggcacc

SEQ ID NO: 404781 - RNA, 19 nt, Artificial Sequence
  Description of Artificial Sequence: Synthetic oligonucleotide
aacugcaaugugcgguucc

SEQ ID NO: 404782 - RNA, 19 nt, Artificial Sequence
  Description of Artificial Sequence: Synthetic oligonucleotide
cuuuucgaaauguagcaac

SEQ ID NO: 404783 - RNA, 19 nt, Artificial Sequence
  Description of Artificial Sequence: Synthetic oligonucleotide
aagguuugacuuguggaac

SEQ ID NO: 404784 - RNA, 19 nt, Artificial Sequence
  Description of Artificial Sequence: Synthetic oligonucleotide
acuuguggaacguguauuc

SEQ ID NO: 404785 - RNA, 19 nt, Artificial Sequence
  Description of Artificial Sequence: Synthetic oligonucleotide
uuugacuuguggaacgugu

SEQ ID NO: 404786 - RNA, 19 nt, Artificial Sequence
  Description of Artificial Sequence: Synthetic oligonucleotide
gacguugaagucuagcuga

SEQ ID NO: 404787 - RNA, 19 nt, Artificial Sequence
  Description of Artificial Sequence: Synthetic oligonucleotide
ugcuagaagaguuugcuua

SEQ ID NO: 404788 - RNA, 19 nt, Artificial Sequence
  Description of Artificial Sequence: Synthetic oligonucleotide
aguuccgaauuguauguuc

SEQ ID NO: 404789 - RNA, 19 nt, Artificial Sequence
  Description of Artificial Sequence: Synthetic oligonucleotide
accauaacugcaaugugcg

SEQ ID NO: 404790 - RNA, 19 nt, Artificial Sequence
  Description of Artificial Sequence: Synthetic oligonucleotide
ucgaaauguagcaacccgu

SEQ ID NO: 404791 - RNA, 19 nt, Artificial Sequence
  Description of Artificial Sequence: Synthetic oligonucleotide
uuuaagagagaggguagag

SEQ ID NO: 404792 - RNA, 19 nt, Artificial Sequence
  Description of Artificial Sequence: Synthetic oligonucleotide
cuauaauaaucaccuuucc

SEQ ID NO: 404793 - RNA, 19 nt, Artificial Sequence
  Description of Artificial Sequence: Synthetic oligonucleotide
guuaagguugccaaauccc

SEQ ID NO: 404794 - RNA, 19 nt, Artificial Sequence
  Description of Artificial Sequence: Synthetic oligonucleotide
uacauaguuuccuuuucga

SEQ ID NO: 404795 - RNA, 19 nt, Artificial Sequence
  Description of Artificial Sequence: Synthetic oligonucleotide
ugagccauuaaaucauagu

SEQ ID NO: 404796 - RNA, 19 nt, Artificial Sequence
  Description of Artificial Sequence: Synthetic oligonucleotide
uguaauaucucgggguggc

SEQ ID NO: 404797 - RNA, 19 nt, Artificial Sequence
  Description of Artificial Sequence: Synthetic oligonucleotide
gguaguuccgaauuguaug

SEQ ID NO: 404798 - RNA, 19 nt, Artificial Sequence
  Description of Artificial Sequence: Synthetic oligonucleotide
agggcuauuaguauuggag

SEQ ID NO: 404799 - RNA, 19 nt, Artificial Sequence
  Description of Artificial Sequence: Synthetic oligonucleotide
aaaucccuuugagaauggc

SEQ ID NO: 404800 - RNA, 19 nt, Artificial Sequence
  Description of Artificial Sequence: Synthetic oligonucleotide
agaacacgcggucaaaaca

SEQ ID NO: 404801 - RNA, 19 nt, Artificial Sequence
  Description of Artificial Sequence: Synthetic oligonucleotide
aagccggaaacacccgaac

SEQ ID NO: 404802 - RNA, 19 nt, Artificial Sequence
  Description of Artificial Sequence: Synthetic oligonucleotide
ucgaagcccacucagcaga

SEQ ID NO: 404803 - RNA, 19 nt, Artificial Sequence
  Description of Artificial Sequence: Synthetic oligonucleotide
uuaguauuggagcuuuaua

SEQ ID NO: 404804 - RNA, 19 nt, Artificial Sequence
  Description of Artificial Sequence: Synthetic oligonucleotide
acucagcuguaauaucucg

SEQ ID NO: 404805 - RNA, 19 nt, Artificial Sequence
  Description of Artificial Sequence: Synthetic oligonucleotide
agccggaaacacccgaacc

SEQ ID NO: 404806 - RNA, 19 nt, Artificial Sequence
  Description of Artificial Sequence: Synthetic oligonucleotide
aguauuggagcuuuauaua

SEQ ID NO: 404807 - RNA, 19 nt, Artificial Sequence
  Description of Artificial Sequence: Synthetic oligonucleotide
ugcugaggcccacugauga

SEQ ID NO: 404808 - RNA, 19 nt, Artificial Sequence
  Description of Artificial Sequence: Synthetic oligonucleotide
uuguaaggggcuuccaacu

SEQ ID NO: 404809 - RNA, 19 nt, Artificial Sequence
  Description of Artificial Sequence: Synthetic oligonucleotide
aacguguauucacagcgau

SEQ ID NO: 404810 - RNA, 19 nt, Artificial Sequence
  Description of Artificial Sequence: Synthetic oligonucleotide
guuguaaggggcuuccaac

SEQ ID NO: 404811 - RNA, 19 nt, Artificial Sequence
  Description of Artificial Sequence: Synthetic oligonucleotide
uuucgaaauguagcaaccc

SEQ ID NO: 404812 - RNA, 19 nt, Artificial Sequence
  Description of Artificial Sequence: Synthetic oligonucleotide
uguagcaacccguccaccu

SEQ ID NO: 404813 - RNA, 19 nt, Artificial Sequence
  Description of Artificial Sequence: Synthetic oligonucleotide
gaugccgaaguugauaaga

SEQ ID NO: 404814 - RNA, 19 nt, Artificial Sequence
  Description of Artificial Sequence: Synthetic oligonucleotide
ugcgucacacuuauaaaua

SEQ ID NO: 404815 - RNA, 19 nt, Artificial Sequence
  Description of Artificial Sequence: Synthetic oligonucleotide
uccgaauuguauguucucc

SEQ ID NO: 404816 - RNA, 19 nt, Artificial Sequence
  Description of Artificial Sequence: Synthetic oligonucleotide
agauuugcaaaaugccagu

SEQ ID NO: 404817 - RNA, 19 nt, Artificial Sequence
  Description of Artificial Sequence: Synthetic oligonucleotide
ucuagcaaccgguuaaauu

SEQ ID NO: 404818 - RNA, 19 nt, Artificial Sequence
  Description of Artificial Sequence: Synthetic oligonucleotide
cagcgaucacuucacaucc

SEQ ID NO: 404819 - RNA, 19 nt, Artificial Sequence
  Description of Artificial Sequence: Synthetic oligonucleotide
uugauaagaccauggcgcu

SEQ ID NO: 404820 - RNA, 19 nt, Artificial Sequence
  Description of Artificial Sequence: Synthetic oligonucleotide
auguuuaagagagagggua

SEQ ID NO: 404821 - RNA, 19 nt, Artificial Sequence
  Description of Artificial Sequence: Synthetic oligonucleotide
gaacacgcggucaaaacac

SEQ ID NO: 404822 - RNA, 19 nt, Artificial Sequence
  Description of Artificial Sequence: Synthetic oligonucleotide
ccuauaauaaucaccuuuc

SEQ ID NO: 404823 - RNA, 19 nt, Artificial Sequence
  Description of Artificial Sequence: Synthetic oligonucleotide
acccgaaccuauaauaauc

SEQ ID NO: 404824 - RNA, 19 nt, Artificial Sequence
  Description of Artificial Sequence: Synthetic oligonucleotide
ucguacugccaacaugccc

SEQ ID NO: 404825 - RNA, 19 nt, Artificial Sequence
  Description of Artificial Sequence: Synthetic oligonucleotide
agccauuaaaucauaguca

SEQ ID NO: 404826 - RNA, 19 nt, Artificial Sequence
  Description of Artificial Sequence: Synthetic oligonucleotide
gcuauucccgucuccaugg

SEQ ID NO: 404827 - RNA, 19 nt, Artificial Sequence
  Description of Artificial Sequence: Synthetic oligonucleotide
aagucgugggauuggcugu

SEQ ID NO: 404828 - RNA, 19 nt, Artificial Sequence
  Description of Artificial Sequence: Synthetic oligonucleotide
acgcggucaaaacacaaca

SEQ ID NO: 404829 - RNA, 19 nt, Artificial Sequence
  Description of Artificial Sequence: Synthetic oligonucleotide
uugaagucuagcugaugac

SEQ ID NO: 404830 - RNA, 19 nt, Artificial Sequence
  Description of Artificial Sequence: Synthetic oligonucleotide
ucgguggacaagcacagua

SEQ ID NO: 404831 - RNA, 19 nt, Artificial Sequence
  Description of Artificial Sequence: Synthetic oligonucleotide
aaacacccgaaccuauaau

SEQ ID NO: 404832 - RNA, 19 nt, Artificial Sequence
  Description of Artificial Sequence: Synthetic oligonucleotide
acauaguuuccuuuucgaa

SEQ ID NO: 404833 - RNA, 19 nt, Artificial Sequence
  Description of Artificial Sequence: Synthetic oligonucleotide
gggcuauuaguauuggagc

SEQ ID NO: 404834 - RNA, 19 nt, Artificial Sequence
  Description of Artificial Sequence: Synthetic oligonucleotide
gaaaagucgugggauuggc

SEQ ID NO: 404835 - RNA, 19 nt, Artificial Sequence
  Description of Artificial Sequence: Synthetic oligonucleotide
ugccgaaguugauaagacc

SEQ ID NO: 404836 - RNA, 19 nt, Artificial Sequence
  Description of Artificial Sequence: Synthetic oligonucleotide
uagcaaccgguuaaauucu

SEQ ID NO: 404837 - RNA, 19 nt, Artificial Sequence
  Description of Artificial Sequence: Synthetic oligonucleotide
aaccgguuaaauucuuguu

SEQ ID NO: 404838 - RNA, 19 nt, Artificial Sequence
  Description of Artificial Sequence: Synthetic oligonucleotide
aauaggaaccucgggccca

SEQ ID NO: 404839 - RNA, 19 nt, Artificial Sequence
  Description of Artificial Sequence: Synthetic oligonucleotide
uaguugucgagcugcugcc

SEQ ID NO: 404840 - RNA, 19 nt, Artificial Sequence
  Description of Artificial Sequence: Synthetic oligonucleotide
auaacugcaaugugcgguu

SEQ ID NO: 404841 - RNA, 19 nt, Artificial Sequence
  Description of Artificial Sequence: Synthetic oligonucleotide
gaaacacccgaaccuauaa

SEQ ID NO: 404842 - RNA, 19 nt, Artificial Sequence
  Description of Artificial Sequence: Synthetic oligonucleotide
uuguuaagguugccaaauc

SEQ ID NO: 404843 - RNA, 19 nt, Artificial Sequence
  Description of Artificial Sequence: Synthetic oligonucleotide
gugaacucgguggacaagc

SEQ ID NO: 404844 - RNA, 19 nt, Artificial Sequence
  Description of Artificial Sequence: Synthetic oligonucleotide
ugacuuguggaacguguau

SEQ ID NO: 404845 - RNA, 19 nt, Artificial Sequence
  Description of Artificial Sequence: Synthetic oligonucleotide
uauucccgucuccaugggc

SEQ ID NO: 404846 - RNA, 19 nt, Artificial Sequence
  Description of Artificial Sequence: Synthetic oligonucleotide
augacuaagguaagaggug

SEQ ID NO: 404847 - RNA, 19 nt, Artificial Sequence
  Description of Artificial Sequence: Synthetic oligonucleotide
gcggucaaaacacaacacc

SEQ ID NO: 404848 - RNA, 19 nt, Artificial Sequence
  Description of Artificial Sequence: Synthetic oligonucleotide
agaguucgccccugcuagc

SEQ ID NO: 404849 - RNA, 19 nt, Artificial Sequence
  Description of Artificial Sequence: Synthetic oligonucleotide
uggcgcucuaaguagcugu

SEQ ID NO: 404850 - RNA, 19 nt, Artificial Sequence
  Description of Artificial Sequence: Synthetic oligonucleotide
ugaacucgguggacaagca

SEQ ID NO: 404851 - RNA, 19 nt, Artificial Sequence
  Description of Artificial Sequence: Synthetic oligonucleotide
uagcgaaccugucgcacug

SEQ ID NO: 404852 - RNA, 19 nt, Artificial Sequence
  Description of Artificial Sequence: Synthetic oligonucleotide
ucgggguggcuucacuucc

SEQ ID NO: 404853 - RNA, 19 nt, Artificial Sequence
  Description of Artificial Sequence: Synthetic oligonucleotide
ggcguuggcaaauucaaga

SEQ ID NO: 404854 - RNA, 19 nt, Artificial Sequence
  Description of Artificial Sequence: Synthetic oligonucleotide
acuaagguaagagguggcu

SEQ ID NO: 404855 - RNA, 19 nt, Artificial Sequence
  Description of Artificial Sequence: Synthetic oligonucleotide
caacccguccaccuacgcg

SEQ ID NO: 404856 - RNA, 19 nt, Artificial Sequence
  Description of Artificial Sequence: Synthetic oligonucleotide
ugguccgucggcccucggg

SEQ ID NO: 404857 - RNA, 19 nt, Artificial Sequence
  Description of Artificial Sequence: Synthetic oligonucleotide
gauaagaccauggcgcucu

SEQ ID NO: 404858 - RNA, 19 nt, Artificial Sequence
  Description of Artificial Sequence: Synthetic oligonucleotide
ggacguugaagucuagcug

SEQ ID NO: 404859 - RNA, 19 nt, Artificial Sequence
  Description of Artificial Sequence: Synthetic oligonucleotide
uuacuaccauggcuccaag

SEQ ID NO: 404860 - RNA, 19 nt, Artificial Sequence
  Description of Artificial Sequence: Synthetic oligonucleotide
gguggcuucuagcaaccgg

SEQ ID NO: 404861 - RNA, 19 nt, Artificial Sequence
  Description of Artificial Sequence: Synthetic oligonucleotide
caaccauaacugcaaugug

SEQ ID NO: 404862 - RNA, 19 nt, Artificial Sequence
  Description of Artificial Sequence: Synthetic oligonucleotide
ccaacuguugaagaguagc

SEQ ID NO: 404863 - RNA, 19 nt, Artificial Sequence
  Description of Artificial Sequence: Synthetic oligonucleotide
uguagcuggguaguuccga

SEQ ID NO: 404864 - RNA, 19 nt, Artificial Sequence
  Description of Artificial Sequence: Synthetic oligonucleotide
aaaagucgugggauuggcu

SEQ ID NO: 404865 - RNA, 19 nt, Artificial Sequence
  Description of Artificial Sequence: Synthetic oligonucleotide
cuguaauaucucggggugg

SEQ ID NO: 404866 - RNA, 19 nt, Artificial Sequence
  Description of Artificial Sequence: Synthetic oligonucleotide
uugccaaaucccauccuuu

SEQ ID NO: 404867 - RNA, 19 nt, Artificial Sequence
  Description of Artificial Sequence: Synthetic oligonucleotide
ucagagccguucucggcgc

SEQ ID NO: 404868 - RNA, 19 nt, Artificial Sequence
  Description of Artificial Sequence: Synthetic oligonucleotide
caucauccugaucccaaug

SEQ ID NO: 404869 - RNA, 19 nt, Artificial Sequence
  Description of Artificial Sequence: Synthetic oligonucleotide
gccgaaguugauaagacca

SEQ ID NO: 404870 - RNA, 19 nt, Artificial Sequence
  Description of Artificial Sequence: Synthetic oligonucleotide
ggccugacgaggcaaagug

SEQ ID NO: 404871 - RNA, 19 nt, Artificial Sequence
  Description of Artificial Sequence: Synthetic oligonucleotide
uuccgaauuguauguucuc

SEQ ID NO: 404872 - RNA, 19 nt, Artificial Sequence
  Description of Artificial Sequence: Synthetic oligonucleotide
uugucgagcugcugccaag

SEQ ID NO: 404873 - RNA, 19 nt, Artificial Sequence
  Description of Artificial Sequence: Synthetic oligonucleotide
agcgggacaccaccgucuc

SEQ ID NO: 404874 - RNA, 19 nt, Artificial Sequence
  Description of Artificial Sequence: Synthetic oligonucleotide
guuuaagagagaggguaga

SEQ ID NO: 404875 - RNA, 19 nt, Artificial Sequence
  Description of Artificial Sequence: Synthetic oligonucleotide
accuacgcgaucccuggcu

SEQ ID NO: 404876 - RNA, 19 nt, Artificial Sequence
  Description of Artificial Sequence: Synthetic oligonucleotide
gaccuguuacuaccauggc

SEQ ID NO: 404877 - RNA, 19 nt, Artificial Sequence
  Description of Artificial Sequence: Synthetic oligonucleotide
uauuaguauuggagcuuua

SEQ ID NO: 404878 - RNA, 19 nt, Artificial Sequence
  Description of Artificial Sequence: Synthetic oligonucleotide
caugaguagccauuucuua

SEQ ID NO: 404879 - RNA, 19 nt, Artificial Sequence
  Description of Artificial Sequence: Synthetic oligonucleotide
cauaacugcaaugugcggu

SEQ ID NO: 404880 - RNA, 19 nt, Artificial Sequence
  Description of Artificial Sequence: Synthetic oligonucleotide
cuucuuucggggcgugcgc

SEQ ID NO: 404881 - RNA, 19 nt, Artificial Sequence
  Description of Artificial Sequence: Synthetic oligonucleotide
gguccgucggcccucgggg

SEQ ID NO: 404882 - RNA, 19 nt, Artificial Sequence
  Description of Artificial Sequence: Synthetic oligonucleotide
guuacuaccauggcuccaa

SEQ ID NO: 404883 - RNA, 19 nt, Artificial Sequence
  Description of Artificial Sequence: Synthetic oligonucleotide
cacaugaguagccauuucu

SEQ ID NO: 404884 - RNA, 19 nt, Artificial Sequence
  Description of Artificial Sequence: Synthetic oligonucleotide
cuauucccgucuccauggg

SEQ ID NO: 404885 - RNA, 19 nt, Artificial Sequence
  Description of Artificial Sequence: Synthetic oligonucleotide
agccaugggauucccucca

SEQ ID NO: 404886 - RNA, 19 nt, Artificial Sequence
  Description of Artificial Sequence: Synthetic oligonucleotide
acguguauucacagcgauc

SEQ ID NO: 404887 - RNA, 19 nt, Artificial Sequence
  Description of Artificial Sequence: Synthetic oligonucleotide
uagagagugguguggcguu

SEQ ID NO: 404888 - RNA, 19 nt, Artificial Sequence
  Description of Artificial Sequence: Synthetic oligonucleotide
gcuuacauggcagaucaca

SEQ ID NO: 404889 - RNA, 19 nt, Artificial Sequence
  Description of Artificial Sequence: Synthetic oligonucleotide
aacacgcggucaaaacaca

SEQ ID NO: 404890 - RNA, 19 nt, Artificial Sequence
  Description of Artificial Sequence: Synthetic oligonucleotide
acaugaguagccauuucuu

SEQ ID NO: 404891 - RNA, 19 nt, Artificial Sequence
  Description of Artificial Sequence: Synthetic oligonucleotide
ccugauguggccugacgag

SEQ ID NO: 404892 - RNA, 19 nt, Artificial Sequence
  Description of Artificial Sequence: Synthetic oligonucleotide
uccugaucccaauguuuaa

SEQ ID NO: 404893 - RNA, 19 nt, Artificial Sequence
  Description of Artificial Sequence: Synthetic oligonucleotide
gaacguguauucacagcga

SEQ ID NO: 404894 - RNA, 19 nt, Artificial Sequence
  Description of Artificial Sequence: Synthetic oligonucleotide
cuuacauggcagaucacau

SEQ ID NO: 404895 - RNA, 19 nt, Artificial Sequence
  Description of Artificial Sequence: Synthetic oligonucleotide
ggcuauucccgucuccaug

SEQ ID NO: 404896 - RNA, 19 nt, Artificial Sequence
  Description of Artificial Sequence: Synthetic oligonucleotide
cuaucucuugaugagagau

SEQ ID NO: 404897 - RNA, 19 nt, Artificial Sequence
  Description of Artificial Sequence: Synthetic oligonucleotide
guuugacuuguggaacgug

SEQ ID NO: 404898 - RNA, 19 nt, Artificial Sequence
  Description of Artificial Sequence: Synthetic oligonucleotide
ggcuauuaguauuggagcu

SEQ ID NO: 404899 - RNA, 19 nt, Artificial Sequence
  Description of Artificial Sequence: Synthetic oligonucleotide
auccugaucccaauguuua

SEQ ID NO: 404900 - RNA, 19 nt, Artificial Sequence
  Description of Artificial Sequence: Synthetic oligonucleotide
uucuuucggggcgugcgcu

SEQ ID NO: 404901 - RNA, 19 nt, Artificial Sequence
  Description of Artificial Sequence: Synthetic oligonucleotide
ugauaagaccauggcgcuc

SEQ ID NO: 404902 - RNA, 19 nt, Artificial Sequence
  Description of Artificial Sequence: Synthetic oligonucleotide
ucucuugaugagagauaua

SEQ ID NO: 404903 - RNA, 19 nt, Artificial Sequence
  Description of Artificial Sequence: Synthetic oligonucleotide
ggggucucggcuauucccg

SEQ ID NO: 404904 - RNA, 19 nt, Artificial Sequence
  Description of Artificial Sequence: Synthetic oligonucleotide
cuuguuaagguugccaaau

SEQ ID NO: 404905 - RNA, 19 nt, Artificial Sequence
  Description of Artificial Sequence: Synthetic oligonucleotide
agcgaaccugucgcacugc

SEQ ID NO: 404906 - RNA, 19 nt, Artificial Sequence
  Description of Artificial Sequence: Synthetic oligonucleotide
cgaauuguauguucuccag

SEQ ID NO: 404907 - RNA, 19 nt, Artificial Sequence
  Description of Artificial Sequence: Synthetic oligonucleotide
cguguauucacagcgauca

SEQ ID NO: 404908 - RNA, 19 nt, Artificial Sequence
  Description of Artificial Sequence: Synthetic oligonucleotide
auaggaaccucgggcccag

SEQ ID NO: 404909 - RNA, 19 nt, Artificial Sequence
  Description of Artificial Sequence: Synthetic oligonucleotide
cuuguggaacguguauuca

SEQ ID NO: 404910 - RNA, 19 nt, Artificial Sequence
  Description of Artificial Sequence: Synthetic oligonucleotide
guuccgaauuguauguucu

SEQ ID NO: 404911 - RNA, 19 nt, Artificial Sequence
  Description of Artificial Sequence: Synthetic oligonucleotide
cucggcuauucccgucucc

SEQ ID NO: 404912 - RNA, 19 nt, Artificial Sequence
  Description of Artificial Sequence: Synthetic oligonucleotide
gacgaggcaaaguguacau

SEQ ID NO: 404913 - RNA, 19 nt, Artificial Sequence
  Description of Artificial Sequence: Synthetic oligonucleotide
ucuuucggggcgugcgcuc

SEQ ID NO: 404914 - RNA, 19 nt, Artificial Sequence
  Description of Artificial Sequence: Synthetic oligonucleotide
caugaacuguagcugggua

SEQ ID NO: 404915 - RNA, 19 nt, Artificial Sequence
  Description of Artificial Sequence: Synthetic oligonucleotide
uucccgucuccaugggcgu

SEQ ID NO: 404916 - RNA, 19 nt, Artificial Sequence
  Description of Artificial Sequence: Synthetic oligonucleotide
ucagcacgccagcgggaca

SEQ ID NO: 404917 - RNA, 19 nt, Artificial Sequence
  Description of Artificial Sequence: Synthetic oligonucleotide
agagccguucucggcgccg

SEQ ID NO: 404918 - RNA, 19 nt, Artificial Sequence
  Description of Artificial Sequence: Synthetic oligonucleotide
agucgugggauuggcugug

SEQ ID NO: 404919 - RNA, 19 nt, Artificial Sequence
  Description of Artificial Sequence: Synthetic oligonucleotide
cccgaaccuauaauaauca

SEQ ID NO: 404920 - RNA, 19 nt, Artificial Sequence
  Description of Artificial Sequence: Synthetic oligonucleotide
guuggcgcggccaccucag

SEQ ID NO: 404921 - RNA, 19 nt, Artificial Sequence
  Description of Artificial Sequence: Synthetic oligonucleotide
ucucggcuauucccgucuc

SEQ ID NO: 404922 - RNA, 19 nt, Artificial Sequence
  Description of Artificial Sequence: Synthetic oligonucleotide
ccaccuacgcgaucccugg

SEQ ID NO: 404923 - RNA, 19 nt, Artificial Sequence
  Description of Artificial Sequence: Synthetic oligonucleotide
gaguucgccccugcuagca

SEQ ID NO: 404924 - RNA, 19 nt, Artificial Sequence
  Description of Artificial Sequence: Synthetic oligonucleotide
cggucaaaacacaacacca

SEQ ID NO: 404925 - RNA, 19 nt, Artificial Sequence
  Description of Artificial Sequence: Synthetic oligonucleotide
caagccggaaacacccgaa

SEQ ID NO: 404926 - RNA, 19 nt, Artificial Sequence
  Description of Artificial Sequence: Synthetic oligonucleotide
ugguguggcguuggcaaau

SEQ ID NO: 404927 - RNA, 19 nt, Artificial Sequence
  Description of Artificial Sequence: Synthetic oligonucleotide
cagcacgccagcgggacac

SEQ ID NO: 404928 - RNA, 19 nt, Artificial Sequence
  Description of Artificial Sequence: Synthetic oligonucleotide
cagggcuauuaguauugga

SEQ ID NO: 404929 - RNA, 19 nt, Artificial Sequence
  Description of Artificial Sequence: Synthetic oligonucleotide
gagaacugcgucacacuua

SEQ ID NO: 404930 - RNA, 19 nt, Artificial Sequence
  Description of Artificial Sequence: Synthetic oligonucleotide
guagcgaaccugucgcacu

SEQ ID NO: 404931 - RNA, 19 nt, Artificial Sequence
  Description of Artificial Sequence: Synthetic oligonucleotide
ccauggcgcucuaaguagc

SEQ ID NO: 404932 - RNA, 19 nt, Artificial Sequence
  Description of Artificial Sequence: Synthetic oligonucleotide
gagcuucgcccgcuugcgc

SEQ ID NO: 404933 - RNA, 19 nt, Artificial Sequence
  Description of Artificial Sequence: Synthetic oligonucleotide
ccgaauuguauguucucca

SEQ ID NO: 404934 - RNA, 19 nt, Artificial Sequence
  Description of Artificial Sequence: Synthetic oligonucleotide
uaguuccgaauuguauguu

SEQ ID NO: 404935 - RNA, 19 nt, Artificial Sequence
  Description of Artificial Sequence: Synthetic oligonucleotide
gcgacgucgguggagcccg

SEQ ID NO: 404936 - RNA, 19 nt, Artificial Sequence
  Description of Artificial Sequence: Synthetic oligonucleotide
gucguacugccaacaugcc

SEQ ID NO: 404937 - RNA, 19 nt, Artificial Sequence
  Description of Artificial Sequence: Synthetic oligonucleotide
auggcgcucuaaguagcug

SEQ ID NO: 404938 - RNA, 19 nt, Artificial Sequence
  Description of Artificial Sequence: Synthetic oligonucleotide
gcuucgcccgcuugcgccg

SEQ ID NO: 404939 - RNA, 19 nt, Artificial Sequence
  Description of Artificial Sequence: Synthetic oligonucleotide
guguagcgaaccugucgca

SEQ ID NO: 404940 - RNA, 19 nt, Artificial Sequence
  Description of Artificial Sequence: Synthetic oligonucleotide
ggacaccugauguggccug

SEQ ID NO: 404941 - RNA, 19 nt, Artificial Sequence
  Description of Artificial Sequence: Synthetic oligonucleotide
gacuuguggaacguguauu

SEQ ID NO: 404942 - RNA, 19 nt, Artificial Sequence
  Description of Artificial Sequence: Synthetic oligonucleotide
cacgccagcgggacaccac

SEQ ID NO: 404943 - RNA, 19 nt, Artificial Sequence
  Description of Artificial Sequence: Synthetic oligonucleotide
gcaaccgguuaaauucuug

SEQ ID NO: 404944 - RNA, 19 nt, Artificial Sequence
  Description of Artificial Sequence: Synthetic oligonucleotide
accugucgcacugcugugu

SEQ ID NO: 404945 - RNA, 19 nt, Artificial Sequence
  Description of Artificial Sequence: Synthetic oligonucleotide
gcccacucagcagagcacc

SEQ ID NO: 404946 - RNA, 19 nt, Artificial Sequence
  Description of Artificial Sequence: Synthetic oligonucleotide
gcugaugacuaagguaaga

SEQ ID NO: 404947 - RNA, 19 nt, Artificial Sequence
  Description of Artificial Sequence: Synthetic oligonucleotide
gccggaaacacccgaaccu

SEQ ID NO: 404948 - RNA, 19 nt, Artificial Sequence
  Description of Artificial Sequence: Synthetic oligonucleotide
agcacgccagcgggacacc

SEQ ID NO: 404949 - RNA, 19 nt, Artificial Sequence
  Description of Artificial Sequence: Synthetic oligonucleotide
acacgcggucaaaacacaa

SEQ ID NO: 404950 - RNA, 19 nt, Artificial Sequence
  Description of Artificial Sequence: Synthetic oligonucleotide
gaucagcacgccagcggga

SEQ ID NO: 404951 - RNA, 19 nt, Artificial Sequence
  Description of Artificial Sequence: Synthetic oligonucleotide
ggcggauccgggaggcucg

SEQ ID NO: 404952 - RNA, 19 nt, Artificial Sequence
  Description of Artificial Sequence: Synthetic oligonucleotide
ucgccccugcuagcagucg

SEQ ID NO: 404953 - RNA, 19 nt, Artificial Sequence
  Description of Artificial Sequence: Synthetic oligonucleotide
caccuacgcgaucccuggc

SEQ ID NO: 404954 - RNA, 19 nt, Artificial Sequence
  Description of Artificial Sequence: Synthetic oligonucleotide
ggcgcucuaaguagcugug

SEQ ID NO: 404955 - RNA, 19 nt, Artificial Sequence
  Description of Artificial Sequence: Synthetic oligonucleotide
ccaugggauucccuccaag

SEQ ID NO: 404956 - RNA, 19 nt, Artificial Sequence
  Description of Artificial Sequence: Synthetic oligonucleotide
caggagugauuggcugagc

SEQ ID NO: 404957 - RNA, 19 nt, Artificial Sequence
  Description of Artificial Sequence: Synthetic oligonucleotide
agcgaucacuucacauccu

SEQ ID NO: 404958 - RNA, 19 nt, Artificial Sequence
  Description of Artificial Sequence: Synthetic oligonucleotide
gcccaaacaaauugacacu

SEQ ID NO: 404959 - RNA, 19 nt, Artificial Sequence
  Description of Artificial Sequence: Synthetic oligonucleotide
ccaugggcgucgcggagcc

SEQ ID NO: 404960 - RNA, 19 nt, Artificial Sequence
  Description of Artificial Sequence: Synthetic oligonucleotide
cauggcgcucuaaguagcu

SEQ ID NO: 404961 - RNA, 19 nt, Artificial Sequence
  Description of Artificial Sequence: Synthetic oligonucleotide
gacgucgguggagcccgcc

SEQ ID NO: 404962 - RNA, 19 nt, Artificial Sequence
  Description of Artificial Sequence: Synthetic oligonucleotide
gcaacccguccaccuacgc

SEQ ID NO: 404963 - RNA, 19 nt, Artificial Sequence
  Description of Artificial Sequence: Synthetic oligonucleotide
gcguuggcaaauucaagau

SEQ ID NO: 404964 - RNA, 19 nt, Artificial Sequence
  Description of Artificial Sequence: Synthetic oligonucleotide
agcaaccgguuaaauucuu

SEQ ID NO: 404965 - RNA, 19 nt, Artificial Sequence
  Description of Artificial Sequence: Synthetic oligonucleotide
cuucgcccgcuugcgccgg

SEQ ID NO: 404966 - RNA, 19 nt, Artificial Sequence
  Description of Artificial Sequence: Synthetic oligonucleotide
aggcccgcgguuggcgcgg

SEQ ID NO: 404967 - RNA, 19 nt, Artificial Sequence
  Description of Artificial Sequence: Synthetic oligonucleotide
ccgaugccucuuuguauug

SEQ ID NO: 404968 - RNA, 19 nt, Artificial Sequence
  Description of Artificial Sequence: Synthetic oligonucleotide
ggaaacacccgaaccuaua

SEQ ID NO: 404969 - RNA, 19 nt, Artificial Sequence
  Description of Artificial Sequence: Synthetic oligonucleotide
gccaagccggaaacacccg

SEQ ID NO: 404970 - RNA, 19 nt, Artificial Sequence
  Description of Artificial Sequence: Synthetic oligonucleotide
ccaagccggaaacacccga

SEQ ID NO: 404971 - RNA, 19 nt, Artificial Sequence
  Description of Artificial Sequence: Synthetic oligonucleotide
ccagcgggacaccaccguc

SEQ ID NO: 404972 - RNA, 19 nt, Artificial Sequence
  Description of Artificial Sequence: Synthetic oligonucleotide
ggguaguuccgaauuguau

SEQ ID NO: 404973 - RNA, 19 nt, Artificial Sequence
  Description of Artificial Sequence: Synthetic oligonucleotide
ccuccaagaccuguuacua

SEQ ID NO: 404974 - RNA, 19 nt, Artificial Sequence
  Description of Artificial Sequence: Synthetic oligonucleotide
ccggcugguccgucggccc

SEQ ID NO: 404975 - RNA, 19 nt, Artificial Sequence
  Description of Artificial Sequence: Synthetic oligonucleotide
accgucucuuugggcugug

SEQ ID NO: 404976 - RNA, 19 nt, Artificial Sequence
  Description of Artificial Sequence: Synthetic oligonucleotide
caugggcgucgcggagccg

SEQ ID NO: 404977 - RNA, 19 nt, Artificial Sequence
  Description of Artificial Sequence: Synthetic oligonucleotide
gcugguccgucggcccucg

SEQ ID NO: 404978 - RNA, 19 nt, Artificial Sequence
  Description of Artificial Sequence: Synthetic oligonucleotide
gugcgcucgcccgccgccc

SEQ ID NO: 404979 - RNA, 19 nt, Artificial Sequence
  Description of Artificial Sequence: Synthetic oligonucleotide
gcagucguacugccaacau

SEQ ID NO: 404980 - RNA, 19 nt, Artificial Sequence
  Description of Artificial Sequence: Synthetic oligonucleotide
acgcgaucccuggcuucca

SEQ ID NO: 404981 - RNA, 19 nt, Artificial Sequence
  Description of Artificial Sequence: Synthetic oligonucleotide
gcgcucuaaguagcuguga

SEQ ID NO: 404982 - RNA, 19 nt, Artificial Sequence
  Description of Artificial Sequence: Synthetic oligonucleotide
ccggaaacacccgaaccua

SEQ ID NO: 404983 - RNA, 19 nt, Artificial Sequence
  Description of Artificial Sequence: Synthetic oligonucleotide
gccaugggauucccuccaa

SEQ ID NO: 404984 - RNA, 19 nt, Artificial Sequence
  Description of Artificial Sequence: Synthetic oligonucleotide
ccgcgguuggcgcggccac

SEQ ID NO: 404985 - RNA, 19 nt, Artificial Sequence
  Description of Artificial Sequence: Synthetic oligonucleotide
uugcgccggcugguccguc

SEQ ID NO: 404986 - RNA, 19 nt, Artificial Sequence
  Description of Artificial Sequence: Synthetic oligonucleotide
caccgucucuuugggcugu

SEQ ID NO: 404987 - RNA, 19 nt, Artificial Sequence
  Description of Artificial Sequence: Synthetic oligonucleotide
gcacgccagcgggacacca

SEQ ID NO: 404988 - RNA, 19 nt, Artificial Sequence
  Description of Artificial Sequence: Synthetic oligonucleotide
cguucucggcgccgcucgc

SEQ ID NO: 404989 - RNA, 19 nt, Artificial Sequence
  Description of Artificial Sequence: Synthetic oligonucleotide
ggguggcuucacuuccgau

SEQ ID NO: 404990 - RNA, 19 nt, Artificial Sequence
  Description of Artificial Sequence: Synthetic oligonucleotide
ccuacgcgaucccuggcuu

SEQ ID NO: 404991 - RNA, 19 nt, Artificial Sequence
  Description of Artificial Sequence: Synthetic oligonucleotide
ccugucgcacugcuguguu

SEQ ID NO: 404992 - RNA, 19 nt, Artificial Sequence
  Description of Artificial Sequence: Synthetic oligonucleotide
cccguccaccuacgcgauc

SEQ ID NO: 404993 - RNA, 19 nt, Artificial Sequence
  Description of Artificial Sequence: Synthetic oligonucleotide
gcgggacaccaccgucucu

SEQ ID NO: 404994 - RNA, 19 nt, Artificial Sequence
  Description of Artificial Sequence: Synthetic oligonucleotide
cccgcggaggcuccuucuu

SEQ ID NO: 404995 - RNA, 19 nt, Artificial Sequence
  Description of Artificial Sequence: Synthetic oligonucleotide
ccgcggaggcuccuucuuu

SEQ ID NO: 404996 - RNA, 19 nt, Artificial Sequence
  Description of Artificial Sequence: Synthetic oligonucleotide
gcccgccaggcccgcgguu

SEQ ID NO: 404997 - RNA, 19 nt, Artificial Sequence
  Description of Artificial Sequence: Synthetic oligonucleotide
aaaagacacucuuggaucc

SEQ ID NO: 404998 - RNA, 19 nt, Artificial Sequence
  Description of Artificial Sequence: Synthetic oligonucleotide
agugacauagaccaaaccg

SEQ ID NO: 404999 - RNA, 19 nt, Artificial Sequence
  Description of Artificial Sequence: Synthetic oligonucleotide
gaaaguguaacucugagca

SEQ ID NO: 405000 - RNA, 19 nt, Artificial Sequence
  Description of Artificial Sequence: Synthetic oligonucleotide
ugucaauuauucaaagugg

SEQ ID NO: 405001 - RNA, 19 nt, Artificial Sequence
  Description of Artificial Sequence: Synthetic oligonucleotide
uaauagaccagcuuccugg

SEQ ID NO: 405002 - RNA, 19 nt, Artificial Sequence
  Description of Artificial Sequence: Synthetic oligonucleotide
acuuaaagugcauuguccc

SEQ ID NO: 405003 - RNA, 19 nt, Artificial Sequence
  Description of Artificial Sequence: Synthetic oligonucleotide
uuagugucgacuucgaugc

SEQ ID NO: 405004 - RNA, 19 nt, Artificial Sequence
  Description of Artificial Sequence: Synthetic oligonucleotide
aaauggcccauucacaauc

SEQ ID NO: 405005 - RNA, 19 nt, Artificial Sequence
  Description of Artificial Sequence: Synthetic oligonucleotide
uauguaaagaaccucggac

SEQ ID NO: 405006 - RNA, 19 nt, Artificial Sequence
  Description of Artificial Sequence: Synthetic oligonucleotide
aagugcauugucccaaggc

SEQ ID NO: 405007 - RNA, 19 nt, Artificial Sequence
  Description of Artificial Sequence: Synthetic oligonucleotide
uuaugcuucacgcugccgg

SEQ ID NO: 405008 - RNA, 19 nt, Artificial Sequence
  Description of Artificial Sequence: Synthetic oligonucleotide
aaaacgauuucccaauaca

SEQ ID NO: 405009 - RNA, 19 nt, Artificial Sequence
  Description of Artificial Sequence: Synthetic oligonucleotide
auauuauaaagaaagagcu

SEQ ID NO: 405010 - RNA, 19 nt, Artificial Sequence
  Description of Artificial Sequence: Synthetic oligonucleotide
aaggccaucgggcaaaauc

SEQ ID NO: 405011 - RNA, 19 nt, Artificial Sequence
  Description of Artificial Sequence: Synthetic oligonucleotide
gagaugaacacacacacac

SEQ ID NO: 405012 - RNA, 19 nt, Artificial Sequence
  Description of Artificial Sequence: Synthetic oligonucleotide
aaagagcuaaguuuggggu

SEQ ID NO: 405013 - RNA, 19 nt, Artificial Sequence
  Description of Artificial Sequence: Synthetic oligonucleotide
aauaugguaaacaaaugcu

SEQ ID NO: 405014 - RNA, 19 nt, Artificial Sequence
  Description of Artificial Sequence: Synthetic oligonucleotide
aauaugaguuucuuuagaa

SEQ ID NO: 405015 - RNA, 19 nt, Artificial Sequence
  Description of Artificial Sequence: Synthetic oligonucleotide
ugaacacacacacacacca

SEQ ID NO: 405016 - RNA, 19 nt, Artificial Sequence
  Description of Artificial Sequence: Synthetic oligonucleotide
agcaaaauaaugucaugac

SEQ ID NO: 405017 - RNA, 19 nt, Artificial Sequence
  Description of Artificial Sequence: Synthetic oligonucleotide
acacacacacaccacaacc

SEQ ID NO: 405018 - RNA, 19 nt, Artificial Sequence
  Description of Artificial Sequence: Synthetic oligonucleotide
aauagaccagcuuccuggc

SEQ ID NO: 405019 - RNA, 19 nt, Artificial Sequence
  Description of Artificial Sequence: Synthetic oligonucleotide
uaauacuuaaagugcauug

SEQ ID NO: 405020 - RNA, 19 nt, Artificial Sequence
  Description of Artificial Sequence: Synthetic oligonucleotide
aaaugcagcauaaauaaca

SEQ ID NO: 405021 - RNA, 19 nt, Artificial Sequence
  Description of Artificial Sequence: Synthetic oligonucleotide
aagcgcuuaugcuucacgc

SEQ ID NO: 405022 - RNA, 19 nt, Artificial Sequence
  Description of Artificial Sequence: Synthetic oligonucleotide
uggaguaucaaaauauggu

SEQ ID NO: 405023 - RNA, 19 nt, Artificial Sequence
  Description of Artificial Sequence: Synthetic oligonucleotide
aaacauguauuugagcuag

SEQ ID NO: 405024 - RNA, 19 nt, Artificial Sequence
  Description of Artificial Sequence: Synthetic oligonucleotide
ucuuaugcaaucaggguug

SEQ ID NO: 405025 - RNA, 19 nt, Artificial Sequence
  Description of Artificial Sequence: Synthetic oligonucleotide
augucaugaccacagaacg

SEQ ID NO: 405026 - RNA, 19 nt, Artificial Sequence
  Description of Artificial Sequence: Synthetic oligonucleotide
agcuggguaaacuauaaag

SEQ ID NO: 405027 - RNA, 19 nt, Artificial Sequence
  Description of Artificial Sequence: Synthetic oligonucleotide
uuacacaacgaacucuggg

SEQ ID NO: 405028 - RNA, 19 nt, Artificial Sequence
  Description of Artificial Sequence: Synthetic oligonucleotide
ugaagugcgagcaacauuu

SEQ ID NO: 405029 - RNA, 19 nt, Artificial Sequence
  Description of Artificial Sequence: Synthetic oligonucleotide
gaugaacacacacacacac

SEQ ID NO: 405030 - RNA, 19 nt, Artificial Sequence
  Description of Artificial Sequence: Synthetic oligonucleotide
uauggcagaacccuggaga

SEQ ID NO: 405031 - RNA, 19 nt, Artificial Sequence
  Description of Artificial Sequence: Synthetic oligonucleotide
uuccacgugauaaacaugu

SEQ ID NO: 405032 - RNA, 19 nt, Artificial Sequence
  Description of Artificial Sequence: Synthetic oligonucleotide
aaauaugaguuucuuuaga

SEQ ID NO: 405033 - RNA, 19 nt, Artificial Sequence
  Description of Artificial Sequence: Synthetic oligonucleotide
aauauguaaagaaccucgg

SEQ ID NO: 405034 - RNA, 19 nt, Artificial Sequence
  Description of Artificial Sequence: Synthetic oligonucleotide
ugagguuaugcaaugacuc

SEQ ID NO: 405035 - RNA, 19 nt, Artificial Sequence
  Description of Artificial Sequence: Synthetic oligonucleotide
caaccuaacagucuggaag

SEQ ID NO: 405036 - RNA, 19 nt, Artificial Sequence
  Description of Artificial Sequence: Synthetic oligonucleotide
uugguuuucggcauaguca

SEQ ID NO: 405037 - RNA, 19 nt, Artificial Sequence
  Description of Artificial Sequence: Synthetic oligonucleotide
cuuagugucgacuucgaug

SEQ ID NO: 405038 - RNA, 19 nt, Artificial Sequence
  Description of Artificial Sequence: Synthetic oligonucleotide
aaaccgguguauuaaccag

SEQ ID NO: 405039 - RNA, 19 nt, Artificial Sequence
  Description of Artificial Sequence: Synthetic oligonucleotide
uucuguguaucuuuuaccu

SEQ ID NO: 405040 - RNA, 19 nt, Artificial Sequence
  Description of Artificial Sequence: Synthetic oligonucleotide
aaacauggcaaucuggguu

SEQ ID NO: 405041 - RNA, 19 nt, Artificial Sequence
  Description of Artificial Sequence: Synthetic oligonucleotide
cacagaaaggauuauuuac

SEQ ID NO: 405042 - RNA, 19 nt, Artificial Sequence
  Description of Artificial Sequence: Synthetic oligonucleotide
agauaagucuuaugcaauc

SEQ ID NO: 405043 - RNA, 19 nt, Artificial Sequence
  Description of Artificial Sequence: Synthetic oligonucleotide
uaacucuacauuuaucaac

SEQ ID NO: 405044 - RNA, 19 nt, Artificial Sequence
  Description of Artificial Sequence: Synthetic oligonucleotide
uuuaccucugcauaauacu

SEQ ID NO: 405045 - RNA, 19 nt, Artificial Sequence
  Description of Artificial Sequence: Synthetic oligonucleotide
ucauaagcaaaagaaguca

SEQ ID NO: 405046 - RNA, 19 nt, Artificial Sequence
  Description of Artificial Sequence: Synthetic oligonucleotide
caaucuggguucuugagag

SEQ ID NO: 405047 - RNA, 19 nt, Artificial Sequence
  Description of Artificial Sequence: Synthetic oligonucleotide
agguggaacuuacacaacg

SEQ ID NO: 405048 - RNA, 19 nt, Artificial Sequence
  Description of Artificial Sequence: Synthetic oligonucleotide
auaauauguaaagaaccuc

SEQ ID NO: 405049 - RNA, 19 nt, Artificial Sequence
  Description of Artificial Sequence: Synthetic oligonucleotide
uguuugaaaagcuccccag

SEQ ID NO: 405050 - RNA, 19 nt, Artificial Sequence
  Description of Artificial Sequence: Synthetic oligonucleotide
aacacacacacacaccaca

SEQ ID NO: 405051 - RNA, 19 nt, Artificial Sequence
  Description of Artificial Sequence: Synthetic oligonucleotide
uacacaacgaacucuggga

SEQ ID NO: 405052 - RNA, 19 nt, Artificial Sequence
  Description of Artificial Sequence: Synthetic oligonucleotide
uauuugagcuagaaaacaa

SEQ ID NO: 405053 - RNA, 19 nt, Artificial Sequence
  Description of Artificial Sequence: Synthetic oligonucleotide
auaagucuuaugcaaucag

SEQ ID NO: 405054 - RNA, 19 nt, Artificial Sequence
  Description of Artificial Sequence: Synthetic oligonucleotide
auguaaagaaccucggacu

SEQ ID NO: 405055 - RNA, 19 nt, Artificial Sequence
  Description of Artificial Sequence: Synthetic oligonucleotide
agggucaauaaacauccgg

SEQ ID NO: 405056 - RNA, 19 nt, Artificial Sequence
  Description of Artificial Sequence: Synthetic oligonucleotide
uguaaagaaccucggacuc

SEQ ID NO: 405057 - RNA, 19 nt, Artificial Sequence
  Description of Artificial Sequence: Synthetic oligonucleotide
uggaguggcgggauaagcg

SEQ ID NO: 405058 - RNA, 19 nt, Artificial Sequence
  Description of Artificial Sequence: Synthetic oligonucleotide
cugcauaucaaguugauaa

SEQ ID NO: 405059 - RNA, 19 nt, Artificial Sequence
  Description of Artificial Sequence: Synthetic oligonucleotide
uggguaaacuauaaagcac

SEQ ID NO: 405060 - RNA, 19 nt, Artificial Sequence
  Description of Artificial Sequence: Synthetic oligonucleotide
uggauauuauaaagaaaga

SEQ ID NO: 405061 - RNA, 19 nt, Artificial Sequence
  Description of Artificial Sequence: Synthetic oligonucleotide
uaugcaaucaggguugaga

SEQ ID NO: 405062 - RNA, 19 nt, Artificial Sequence
  Description of Artificial Sequence: Synthetic oligonucleotide
uguacccuaaaucuauuuc

SEQ ID NO: 405063 - RNA, 19 nt, Artificial Sequence
  Description of Artificial Sequence: Synthetic oligonucleotide
aaaguguaacucugagcag

SEQ ID NO: 405064 - RNA, 19 nt, Artificial Sequence
  Description of Artificial Sequence: Synthetic oligonucleotide
gauguugacgcacugcuga

SEQ ID NO: 405065 - RNA, 19 nt, Artificial Sequence
  Description of Artificial Sequence: Synthetic oligonucleotide
ucuucguuacuugaaaaca

SEQ ID NO: 405066 - RNA, 19 nt, Artificial Sequence
  Description of Artificial Sequence: Synthetic oligonucleotide
uggaacuuacacaacgaac

SEQ ID NO: 405067 - RNA, 19 nt, Artificial Sequence
  Description of Artificial Sequence: Synthetic oligonucleotide
ugcugguucuuuuaaccgg

SEQ ID NO: 405068 - RNA, 19 nt, Artificial Sequence
  Description of Artificial Sequence: Synthetic oligonucleotide
uucaacuuucauccuuccg

SEQ ID NO: 405069 - RNA, 19 nt, Artificial Sequence
  Description of Artificial Sequence: Synthetic oligonucleotide
aucgggcaaaaucucaaac

SEQ ID NO: 405070 - RNA, 19 nt, Artificial Sequence
  Description of Artificial Sequence: Synthetic oligonucleotide
cucauaagcaaaagaaguc

SEQ ID NO: 405071 - RNA, 19 nt, Artificial Sequence
  Description of Artificial Sequence: Synthetic oligonucleotide
agugcauugucccaaggcu

SEQ ID NO: 405072 - RNA, 19 nt, Artificial Sequence
  Description of Artificial Sequence: Synthetic oligonucleotide
uuaagucaucccuucaacu

SEQ ID NO: 405073 - RNA, 19 nt, Artificial Sequence
  Description of Artificial Sequence: Synthetic oligonucleotide
acaagagacugauuuaagu

SEQ ID NO: 405074 - RNA, 19 nt, Artificial Sequence
  Description of Artificial Sequence: Synthetic oligonucleotide
cuguugcaaauacaaaugc

SEQ ID NO: 405075 - RNA, 19 nt, Artificial Sequence
  Description of Artificial Sequence: Synthetic oligonucleotide
aagugcgagcaacauuuuc

SEQ ID NO: 405076 - RNA, 19 nt, Artificial Sequence
  Description of Artificial Sequence: Synthetic oligonucleotide
uguaacucugagcaguguc

SEQ ID NO: 405077 - RNA, 19 nt, Artificial Sequence
  Description of Artificial Sequence: Synthetic oligonucleotide
uuaugcaaugacucauaag

SEQ ID NO: 405078 - RNA, 19 nt, Artificial Sequence
  Description of Artificial Sequence: Synthetic oligonucleotide
cuguauacuuuucuuuucc

SEQ ID NO: 405079 - RNA, 19 nt, Artificial Sequence
  Description of Artificial Sequence: Synthetic oligonucleotide
ucccacaagagacugauuu

SEQ ID NO: 405080 - RNA, 19 nt, Artificial Sequence
  Description of Artificial Sequence: Synthetic oligonucleotide
aaguguaacucugagcagu

SEQ ID NO: 405081 - RNA, 19 nt, Artificial Sequence
  Description of Artificial Sequence: Synthetic oligonucleotide
gaugacguggagcagugac

SEQ ID NO: 405082 - RNA, 19 nt, Artificial Sequence
  Description of Artificial Sequence: Synthetic oligonucleotide
ucgacuucgaugcccgagg

SEQ ID NO: 405083 - RNA, 19 nt, Artificial Sequence
  Description of Artificial Sequence: Synthetic oligonucleotide
uaagcgcuuaugcuucacg

SEQ ID NO: 405084 - RNA, 19 nt, Artificial Sequence
  Description of Artificial Sequence: Synthetic oligonucleotide
uuguuugaaaagcucccca

SEQ ID NO: 405085 - RNA, 19 nt, Artificial Sequence
  Description of Artificial Sequence: Synthetic oligonucleotide
uauuaaccagcaacggaca

SEQ ID NO: 405086 - RNA, 19 nt, Artificial Sequence
  Description of Artificial Sequence: Synthetic oligonucleotide
ugcaaugacucauaagcaa

SEQ ID NO: 405087 - RNA, 19 nt, Artificial Sequence
  Description of Artificial Sequence: Synthetic oligonucleotide
uccgcaaggagacugaguu

SEQ ID NO: 405088 - RNA, 19 nt, Artificial Sequence
  Description of Artificial Sequence: Synthetic oligonucleotide
auaugguaaacaaaugcug

SEQ ID NO: 405089 - RNA, 19 nt, Artificial Sequence
  Description of Artificial Sequence: Synthetic oligonucleotide
aaccgguguauuaaccagc

SEQ ID NO: 405090 - RNA, 19 nt, Artificial Sequence
  Description of Artificial Sequence: Synthetic oligonucleotide
uuuaaguuggcccgggguu

SEQ ID NO: 405091 - RNA, 19 nt, Artificial Sequence
  Description of Artificial Sequence: Synthetic oligonucleotide
ucccgaagggucaauaaac

SEQ ID NO: 405092 - RNA, 19 nt, Artificial Sequence
  Description of Artificial Sequence: Synthetic oligonucleotide
ucaauuauucaaaguggau

SEQ ID NO: 405093 - RNA, 19 nt, Artificial Sequence
  Description of Artificial Sequence: Synthetic oligonucleotide
augacucauaagcaaaaga

SEQ ID NO: 405094 - RNA, 19 nt, Artificial Sequence
  Description of Artificial Sequence: Synthetic oligonucleotide
ucguuacuugaaaacauaa

SEQ ID NO: 405095 - RNA, 19 nt, Artificial Sequence
  Description of Artificial Sequence: Synthetic oligonucleotide
uuucggcauagucauggag

SEQ ID NO: 405096 - RNA, 19 nt, Artificial Sequence
  Description of Artificial Sequence: Synthetic oligonucleotide
acuguugcaaauacaaaug

SEQ ID NO: 405097 - RNA, 19 nt, Artificial Sequence
  Description of Artificial Sequence: Synthetic oligonucleotide
uaaagggucaggugagagc

SEQ ID NO: 405098 - RNA, 19 nt, Artificial Sequence
  Description of Artificial Sequence: Synthetic oligonucleotide
auuuaaguuggcccggggu

SEQ ID NO: 405099 - RNA, 19 nt, Artificial Sequence
  Description of Artificial Sequence: Synthetic oligonucleotide
auacauauggcagaacccu

SEQ ID NO: 405100 - RNA, 19 nt, Artificial Sequence
  Description of Artificial Sequence: Synthetic oligonucleotide
aaauaaugucaugaccaca

SEQ ID NO: 405101 - RNA, 19 nt, Artificial Sequence
  Description of Artificial Sequence: Synthetic oligonucleotide
auaacagcuguauacuuuu

SEQ ID NO: 405102 - RNA, 19 nt, Artificial Sequence
  Description of Artificial Sequence: Synthetic oligonucleotide
auauguaaagaaccucgga

SEQ ID NO: 405103 - RNA, 19 nt, Artificial Sequence
  Description of Artificial Sequence: Synthetic oligonucleotide
agugucgacuucgaugccc

SEQ ID NO: 405104 - RNA, 19 nt, Artificial Sequence
  Description of Artificial Sequence: Synthetic oligonucleotide
ucuuuguaaagggucaggu

SEQ ID NO: 405105 - RNA, 19 nt, Artificial Sequence
  Description of Artificial Sequence: Synthetic oligonucleotide
guugacgcacugcugagcc

SEQ ID NO: 405106 - RNA, 19 nt, Artificial Sequence
  Description of Artificial Sequence: Synthetic oligonucleotide
uucauguacaggcgguggc

SEQ ID NO: 405107 - RNA, 19 nt, Artificial Sequence
  Description of Artificial Sequence: Synthetic oligonucleotide
accaaaccgguguauuaac

SEQ ID NO: 405108 - RNA, 19 nt, Artificial Sequence
  Description of Artificial Sequence: Synthetic oligonucleotide
agcuauugcaguagaggcc

SEQ ID NO: 405109 - RNA, 19 nt, Artificial Sequence
  Description of Artificial Sequence: Synthetic oligonucleotide
auaugaguuucuuuagaaa

SEQ ID NO: 405110 - RNA, 19 nt, Artificial Sequence
  Description of Artificial Sequence: Synthetic oligonucleotide
uaaccgggaaagcaucuug

SEQ ID NO: 405111 - RNA, 19 nt, Artificial Sequence
  Description of Artificial Sequence: Synthetic oligonucleotide
aucauggauauuauaaaga

SEQ ID NO: 405112 - RNA, 19 nt, Artificial Sequence
  Description of Artificial Sequence: Synthetic oligonucleotide
ucacucuuaacucuacauu

SEQ ID NO: 405113 - RNA, 19 nt, Artificial Sequence
  Description of Artificial Sequence: Synthetic oligonucleotide
acuuacacaacgaacucug

SEQ ID NO: 405114 - RNA, 19 nt, Artificial Sequence
  Description of Artificial Sequence: Synthetic oligonucleotide
ugaguuacauucugguauc

SEQ ID NO: 405115 - RNA, 19 nt, Artificial Sequence
  Description of Artificial Sequence: Synthetic oligonucleotide
cuuuguaaagggucaggug

SEQ ID NO: 405116 - RNA, 19 nt, Artificial Sequence
  Description of Artificial Sequence: Synthetic oligonucleotide
aggaaaacauggcaaucug

SEQ ID NO: 405117 - RNA, 19 nt, Artificial Sequence
  Description of Artificial Sequence: Synthetic oligonucleotide
acagcgacugcccgcaggg

SEQ ID NO: 405118 - RNA, 19 nt, Artificial Sequence
  Description of Artificial Sequence: Synthetic oligonucleotide
gauuuaaguuggcccgggg

SEQ ID NO: 405119 - RNA, 19 nt, Artificial Sequence
  Description of Artificial Sequence: Synthetic oligonucleotide
agucuuaugcaaucagggu

SEQ ID NO: 405120 - RNA, 19 nt, Artificial Sequence
  Description of Artificial Sequence: Synthetic oligonucleotide
uaaagaaccucggacucca

SEQ ID NO: 405121 - RNA, 19 nt, Artificial Sequence
  Description of Artificial Sequence: Synthetic oligonucleotide
gaucgguggaagucuuugg

SEQ ID NO: 405122 - RNA, 19 nt, Artificial Sequence
  Description of Artificial Sequence: Synthetic oligonucleotide
gcugauguaggauucccgg

SEQ ID NO: 405123 - RNA, 19 nt, Artificial Sequence
  Description of Artificial Sequence: Synthetic oligonucleotide
gaugccgggagcguguggg

SEQ ID NO: 405124 - RNA, 19 nt, Artificial Sequence
  Description of Artificial Sequence: Synthetic oligonucleotide
aaccgggaaagcaucuugg

SEQ ID NO: 405125 - RNA, 19 nt, Artificial Sequence
  Description of Artificial Sequence: Synthetic oligonucleotide
uugguuguucuaaaagcau

SEQ ID NO: 405126 - RNA, 19 nt, Artificial Sequence
  Description of Artificial Sequence: Synthetic oligonucleotide
ugguaucagaaacuuuggu

SEQ ID NO: 405127 - RNA, 19 nt, Artificial Sequence
  Description of Artificial Sequence: Synthetic oligonucleotide
aagaaccucggacuccaca

SEQ ID NO: 405128 - RNA, 19 nt, Artificial Sequence
  Description of Artificial Sequence: Synthetic oligonucleotide
gauguaggauucccgguac

SEQ ID NO: 405129 - RNA, 19 nt, Artificial Sequence
  Description of Artificial Sequence: Synthetic oligonucleotide
uucguuacuugaaaacaua

SEQ ID NO: 405130 - RNA, 19 nt, Artificial Sequence
  Description of Artificial Sequence: Synthetic oligonucleotide
ugucaugaccacagaacgu

SEQ ID NO: 405131 - RNA, 19 nt, Artificial Sequence
  Description of Artificial Sequence: Synthetic oligonucleotide
agagcuaaguuugggguag

SEQ ID NO: 405132 - RNA, 19 nt, Artificial Sequence
  Description of Artificial Sequence: Synthetic oligonucleotide
acacccgaaaguguaacuc

SEQ ID NO: 405133 - RNA, 19 nt, Artificial Sequence
  Description of Artificial Sequence: Synthetic oligonucleotide
augaacacacacacacacc

SEQ ID NO: 405134 - RNA, 19 nt, Artificial Sequence
  Description of Artificial Sequence: Synthetic oligonucleotide
gauaagucuuaugcaauca

SEQ ID NO: 405135 - RNA, 19 nt, Artificial Sequence
  Description of Artificial Sequence: Synthetic oligonucleotide
agugcgagcaacauuuuca

SEQ ID NO: 405136 - RNA, 19 nt, Artificial Sequence
  Description of Artificial Sequence: Synthetic oligonucleotide
aguaucaucccaacaugag

SEQ ID NO: 405137 - RNA, 19 nt, Artificial Sequence
  Description of Artificial Sequence: Synthetic oligonucleotide
cuuguuugaaaagcucccc

SEQ ID NO: 405138 - RNA, 19 nt, Artificial Sequence
  Description of Artificial Sequence: Synthetic oligonucleotide
ugguaaacaaaugcuguaa

SEQ ID NO: 405139 - RNA, 19 nt, Artificial Sequence
  Description of Artificial Sequence: Synthetic oligonucleotide
ugguuguucuaaaagcauu

SEQ ID NO: 405140 - RNA, 19 nt, Artificial Sequence
  Description of Artificial Sequence: Synthetic oligonucleotide
ugauuuaaguuggcccggg

SEQ ID NO: 405141 - RNA, 19 nt, Artificial Sequence
  Description of Artificial Sequence: Synthetic oligonucleotide
caaaugcagcauaaauaac

SEQ ID NO: 405142 - RNA, 19 nt, Artificial Sequence
  Description of Artificial Sequence: Synthetic oligonucleotide
uuaaguuggcccgggguug

SEQ ID NO: 405143 - RNA, 19 nt, Artificial Sequence
  Description of Artificial Sequence: Synthetic oligonucleotide
uggcuaacaucuuccacgu

SEQ ID NO: 405144 - RNA, 19 nt, Artificial Sequence
  Description of Artificial Sequence: Synthetic oligonucleotide
caaaccgguguauuaacca

SEQ ID NO: 405145 - RNA, 19 nt, Artificial Sequence
  Description of Artificial Sequence: Synthetic oligonucleotide
aucuuggauguugacgcac

SEQ ID NO: 405146 - RNA, 19 nt, Artificial Sequence
  Description of Artificial Sequence: Synthetic oligonucleotide
aucgguggaagucuuuggu

SEQ ID NO: 405147 - RNA, 19 nt, Artificial Sequence
  Description of Artificial Sequence: Synthetic oligonucleotide
guaauagaccagcuuccug

SEQ ID NO: 405148 - RNA, 19 nt, Artificial Sequence
  Description of Artificial Sequence: Synthetic oligonucleotide
ucccuuagaaagacauugu

SEQ ID NO: 405149 - RNA, 19 nt, Artificial Sequence
  Description of Artificial Sequence: Synthetic oligonucleotide
auaaagcucacuguugcaa

SEQ ID NO: 405150 - RNA, 19 nt, Artificial Sequence
  Description of Artificial Sequence: Synthetic oligonucleotide
acaacgaacucugggaccu

SEQ ID NO: 405151 - RNA, 19 nt, Artificial Sequence
  Description of Artificial Sequence: Synthetic oligonucleotide
uuggaucccacaagagacu

SEQ ID NO: 405152 - RNA, 19 nt, Artificial Sequence
  Description of Artificial Sequence: Synthetic oligonucleotide
cauaucaaguugauaaacu

SEQ ID NO: 405153 - RNA, 19 nt, Artificial Sequence
  Description of Artificial Sequence: Synthetic oligonucleotide
uaaacauccgggcgcacuu

SEQ ID NO: 405154 - RNA, 19 nt, Artificial Sequence
  Description of Artificial Sequence: Synthetic oligonucleotide
aagucacucuuaacucuac

SEQ ID NO: 405155 - RNA, 19 nt, Artificial Sequence
  Description of Artificial Sequence: Synthetic oligonucleotide
augguaaacaaaugcugua

SEQ ID NO: 405156 - RNA, 19 nt, Artificial Sequence
  Description of Artificial Sequence: Synthetic oligonucleotide
aauaaacauccgggcgcac

SEQ ID NO: 405157 - RNA, 19 nt, Artificial Sequence
  Description of Artificial Sequence: Synthetic oligonucleotide
auaaaaccuggcagauagc

SEQ ID NO: 405158 - RNA, 19 nt, Artificial Sequence
  Description of Artificial Sequence: Synthetic oligonucleotide
auaauacuuaaagugcauu

SEQ ID NO: 405159 - RNA, 19 nt, Artificial Sequence
  Description of Artificial Sequence: Synthetic oligonucleotide
caacuucccaacauuuguc

SEQ ID NO: 405160 - RNA, 19 nt, Artificial Sequence
  Description of Artificial Sequence: Synthetic oligonucleotide
accagcaacggacauguua

SEQ ID NO: 405161 - RNA, 19 nt, Artificial Sequence
  Description of Artificial Sequence: Synthetic oligonucleotide
acacccuguguaauagacc

SEQ ID NO: 405162 - RNA, 19 nt, Artificial Sequence
  Description of Artificial Sequence: Synthetic oligonucleotide
aacauccgggcgcacuugu

SEQ ID NO: 405163 - RNA, 19 nt, Artificial Sequence
  Description of Artificial Sequence: Synthetic oligonucleotide
uugucgcugauguaggauu

SEQ ID NO: 405164 - RNA, 19 nt, Artificial Sequence
  Description of Artificial Sequence: Synthetic oligonucleotide
ugucgcugauguaggauuc

SEQ ID NO: 405165 - RNA, 19 nt, Artificial Sequence
  Description of Artificial Sequence: Synthetic oligonucleotide
uaugucgaucgguggaagu

SEQ ID NO: 405166 - RNA, 19 nt, Artificial Sequence
  Description of Artificial Sequence: Synthetic oligonucleotide
cauugugcuaugaaguucu

SEQ ID NO: 405167 - RNA, 19 nt, Artificial Sequence
  Description of Artificial Sequence: Synthetic oligonucleotide
cugaguuacauucugguau

SEQ ID NO: 405168 - RNA, 19 nt, Artificial Sequence
  Description of Artificial Sequence: Synthetic oligonucleotide
uuucugguacagucugaug

SEQ ID NO: 405169 - RNA, 19 nt, Artificial Sequence
  Description of Artificial Sequence: Synthetic oligonucleotide
cauggcgcugccugaacag

SEQ ID NO: 405170 - RNA, 19 nt, Artificial Sequence
  Description of Artificial Sequence: Synthetic oligonucleotide
cugauuuaaguuggcccgg

SEQ ID NO: 405171 - RNA, 19 nt, Artificial Sequence
  Description of Artificial Sequence: Synthetic oligonucleotide
auuaaccagcaacggacau

SEQ ID NO: 405172 - RNA, 19 nt, Artificial Sequence
  Description of Artificial Sequence: Synthetic oligonucleotide
gcaaucaggguugagaauc

SEQ ID NO: 405173 - RNA, 19 nt, Artificial Sequence
  Description of Artificial Sequence: Synthetic oligonucleotide
ggaacuuacacaacgaacu

SEQ ID NO: 405174 - RNA, 19 nt, Artificial Sequence
  Description of Artificial Sequence: Synthetic oligonucleotide
acacaaggaaagucacucu

SEQ ID NO: 405175 - RNA, 19 nt, Artificial Sequence
  Description of Artificial Sequence: Synthetic oligonucleotide
ggguaaacuauaaagcaca

SEQ ID NO: 405176 - RNA, 19 nt, Artificial Sequence
  Description of Artificial Sequence: Synthetic oligonucleotide
agaaacuuugguuguucua

SEQ ID NO: 405177 - RNA, 19 nt, Artificial Sequence
  Description of Artificial Sequence: Synthetic oligonucleotide
ggaucgcuuuuccagcugg

SEQ ID NO: 405178 - RNA, 19 nt, Artificial Sequence
  Description of Artificial Sequence: Synthetic oligonucleotide
ggugagguuaugcaaugac

SEQ ID NO: 405179 - RNA, 19 nt, Artificial Sequence
  Description of Artificial Sequence: Synthetic oligonucleotide
guuaugcaaugacucauaa

SEQ ID NO: 405180 - RNA, 19 nt, Artificial Sequence
  Description of Artificial Sequence: Synthetic oligonucleotide
guaaagaaccucggacucc

SEQ ID NO: 405181 - RNA, 19 nt, Artificial Sequence
  Description of Artificial Sequence: Synthetic oligonucleotide
agcgcuuaugcuucacgcu

SEQ ID NO: 405182 - RNA, 19 nt, Artificial Sequence
  Description of Artificial Sequence: Synthetic oligonucleotide
caguaucaucccaacauga

SEQ ID NO: 405183 - RNA, 19 nt, Artificial Sequence
  Description of Artificial Sequence: Synthetic oligonucleotide
aagcuggguaaacuauaaa

SEQ ID NO: 405184 - RNA, 19 nt, Artificial Sequence
  Description of Artificial Sequence: Synthetic oligonucleotide
uccuuccgcaaggagacug

SEQ ID NO: 405185 - RNA, 19 nt, Artificial Sequence
  Description of Artificial Sequence: Synthetic oligonucleotide
gucgucaaggcucaggcua

SEQ ID NO: 405186 - RNA, 19 nt, Artificial Sequence
  Description of Artificial Sequence: Synthetic oligonucleotide
ugucgaucgguggaagucu

SEQ ID NO: 405187 - RNA, 19 nt, Artificial Sequence
  Description of Artificial Sequence: Synthetic oligonucleotide
uggccccuaagccucuaag

SEQ ID NO: 405188 - RNA, 19 nt, Artificial Sequence
  Description of Artificial Sequence: Synthetic oligonucleotide
augcccgaggugugggagc

SEQ ID NO: 405189 - RNA, 19 nt, Artificial Sequence
  Description of Artificial Sequence: Synthetic oligonucleotide
aauggcccauucacaauca

SEQ ID NO: 405190 - RNA, 19 nt, Artificial Sequence
  Description of Artificial Sequence: Synthetic oligonucleotide
gaaccucggacuccacagc

SEQ ID NO: 405191 - RNA, 19 nt, Artificial Sequence
  Description of Artificial Sequence: Synthetic oligonucleotide
gaaaagcuccccagauaag

SEQ ID NO: 405192 - RNA, 19 nt, Artificial Sequence
  Description of Artificial Sequence: Synthetic oligonucleotide
ggcaguaacugucuuaaaa

SEQ ID NO: 405193 - RNA, 19 nt, Artificial Sequence
  Description of Artificial Sequence: Synthetic oligonucleotide
uggcaaucuggguucuuga

SEQ ID NO: 405194 - RNA, 19 nt, Artificial Sequence
  Description of Artificial Sequence: Synthetic oligonucleotide
ucauguacaggcgguggcu

SEQ ID NO: 405195 - RNA, 19 nt, Artificial Sequence
  Description of Artificial Sequence: Synthetic oligonucleotide
ugguugcuuucauuagaca

SEQ ID NO: 405196 - RNA, 19 nt, Artificial Sequence
  Description of Artificial Sequence: Synthetic oligonucleotide
acggacauguuaacaaaug

SEQ ID NO: 405197 - RNA, 19 nt, Artificial Sequence
  Description of Artificial Sequence: Synthetic oligonucleotide
cugguugaaacugugccca

SEQ ID NO: 405198 - RNA, 19 nt, Artificial Sequence
  Description of Artificial Sequence: Synthetic oligonucleotide
gucuuaugcaaucaggguu

SEQ ID NO: 405199 - RNA, 19 nt, Artificial Sequence
  Description of Artificial Sequence: Synthetic oligonucleotide
ggaguggcgggauaagcgc

SEQ ID NO: 405200 - RNA, 19 nt, Artificial Sequence
  Description of Artificial Sequence: Synthetic oligonucleotide
ugcuucacgcugccggcgc

SEQ ID NO: 405201 - RNA, 19 nt, Artificial Sequence
  Description of Artificial Sequence: Synthetic oligonucleotide
augcaaugacucauaagca

SEQ ID NO: 405202 - RNA, 19 nt, Artificial Sequence
  Description of Artificial Sequence: Synthetic oligonucleotide
caggcgguggcuauugcuc

SEQ ID NO: 405203 - RNA, 19 nt, Artificial Sequence
  Description of Artificial Sequence: Synthetic oligonucleotide
ucaggcuaugucgaucggu

SEQ ID NO: 405204 - RNA, 19 nt, Artificial Sequence
  Description of Artificial Sequence: Synthetic oligonucleotide
acauguauuugagcuagaa

SEQ ID NO: 405205 - RNA, 19 nt, Artificial Sequence
  Description of Artificial Sequence: Synthetic oligonucleotide
ucccaacauuuguccaggg

SEQ ID NO: 405206 - RNA, 19 nt, Artificial Sequence
  Description of Artificial Sequence: Synthetic oligonucleotide
gugucgacuucgaugcccg

SEQ ID NO: 405207 - RNA, 19 nt, Artificial Sequence
  Description of Artificial Sequence: Synthetic oligonucleotide
uacagcuuacuuagauaua

SEQ ID NO: 405208 - RNA, 19 nt, Artificial Sequence
  Description of Artificial Sequence: Synthetic oligonucleotide
aggcuuguuugaaaagcuc

SEQ ID NO: 405209 - RNA, 19 nt, Artificial Sequence
  Description of Artificial Sequence: Synthetic oligonucleotide
uguugacgcacugcugagc

SEQ ID NO: 405210 - RNA, 19 nt, Artificial Sequence
  Description of Artificial Sequence: Synthetic oligonucleotide
gguaaacaaaugcuguaaa

SEQ ID NO: 405211 - RNA, 19 nt, Artificial Sequence
  Description of Artificial Sequence: Synthetic oligonucleotide
ugacgcacugcugagccaa

SEQ ID NO: 405212 - RNA, 19 nt, Artificial Sequence
  Description of Artificial Sequence: Synthetic oligonucleotide
auaagcgcuuaugcuucac

SEQ ID NO: 405213 - RNA, 19 nt, Artificial Sequence
  Description of Artificial Sequence: Synthetic oligonucleotide
gcaacggacauguuaacaa

SEQ ID NO: 405214 - RNA, 19 nt, Artificial Sequence
  Description of Artificial Sequence: Synthetic oligonucleotide
aguguaacucugagcagug

SEQ ID NO: 405215 - RNA, 19 nt, Artificial Sequence
  Description of Artificial Sequence: Synthetic oligonucleotide
agcgacugcccgcagggcu

SEQ ID NO: 405216 - RNA, 19 nt, Artificial Sequence
  Description of Artificial Sequence: Synthetic oligonucleotide
gcgggauaagcgcuuaugc

SEQ ID NO: 405217 - RNA, 19 nt, Artificial Sequence
  Description of Artificial Sequence: Synthetic oligonucleotide
uugugcuaugaaguucucu

SEQ ID NO: 405218 - RNA, 19 nt, Artificial Sequence
  Description of Artificial Sequence: Synthetic oligonucleotide
gcuauugcaguagaggcca

SEQ ID NO: 405219 - RNA, 19 nt, Artificial Sequence
  Description of Artificial Sequence: Synthetic oligonucleotide
auggcgcugccugaacagc

SEQ ID NO: 405220 - RNA, 19 nt, Artificial Sequence
  Description of Artificial Sequence: Synthetic oligonucleotide
guggaacuuacacaacgaa

SEQ ID NO: 405221 - RNA, 19 nt, Artificial Sequence
  Description of Artificial Sequence: Synthetic oligonucleotide
uuccgcuggcacgggaucg

SEQ ID NO: 405222 - RNA, 19 nt, Artificial Sequence
  Description of Artificial Sequence: Synthetic oligonucleotide
gguggcuauugcucaacag

SEQ ID NO: 405223 - RNA, 19 nt, Artificial Sequence
  Description of Artificial Sequence: Synthetic oligonucleotide
agaccaaaccgguguauua

SEQ ID NO: 405224 - RNA, 19 nt, Artificial Sequence
  Description of Artificial Sequence: Synthetic oligonucleotide
uccccagauaagucuuaug

SEQ ID NO: 405225 - RNA, 19 nt, Artificial Sequence
  Description of Artificial Sequence: Synthetic oligonucleotide
acaaccuaacagucuggaa

SEQ ID NO: 405226 - RNA, 19 nt, Artificial Sequence
  Description of Artificial Sequence: Synthetic oligonucleotide
ucgucaaggcucaggcuau

SEQ ID NO: 405227 - RNA, 19 nt, Artificial Sequence
  Description of Artificial Sequence: Synthetic oligonucleotide
gauaagcgcuuaugcuuca

SEQ ID NO: 405228 - RNA, 19 nt, Artificial Sequence
  Description of Artificial Sequence: Synthetic oligonucleotide
ugcgagcaacauuuucacu

SEQ ID NO: 405229 - RNA, 19 nt, Artificial Sequence
  Description of Artificial Sequence: Synthetic oligonucleotide
cgaagggucaauaaacauc

SEQ ID NO: 405230 - RNA, 19 nt, Artificial Sequence
  Description of Artificial Sequence: Synthetic oligonucleotide
cacacacacacaccacaac

SEQ ID NO: 405231 - RNA, 19 nt, Artificial Sequence
  Description of Artificial Sequence: Synthetic oligonucleotide
agucuuucugguacagucu

SEQ ID NO: 405232 - RNA, 19 nt, Artificial Sequence
  Description of Artificial Sequence: Synthetic oligonucleotide
gguaucagaaacuuugguu

SEQ ID NO: 405233 - RNA, 19 nt, Artificial Sequence
  Description of Artificial Sequence: Synthetic oligonucleotide
gacuucgaugcccgaggug

SEQ ID NO: 405234 - RNA, 19 nt, Artificial Sequence
  Description of Artificial Sequence: Synthetic oligonucleotide
ccaaaccgguguauuaacc

SEQ ID NO: 405235 - RNA, 19 nt, Artificial Sequence
  Description of Artificial Sequence: Synthetic oligonucleotide
ucgaugcccgagguguggg

SEQ ID NO: 405236 - RNA, 19 nt, Artificial Sequence
  Description of Artificial Sequence: Synthetic oligonucleotide
aaacauccgggcgcacuug

SEQ ID NO: 405237 - RNA, 19 nt, Artificial Sequence
  Description of Artificial Sequence: Synthetic oligonucleotide
agucauuaagucaucccuu

SEQ ID NO: 405238 - RNA, 19 nt, Artificial Sequence
  Description of Artificial Sequence: Synthetic oligonucleotide
uuccgcaaggagacugagu

SEQ ID NO: 405239 - RNA, 19 nt, Artificial Sequence
  Description of Artificial Sequence: Synthetic oligonucleotide
gaccaaaccgguguauuaa

SEQ ID NO: 405240 - RNA, 19 nt, Artificial Sequence
  Description of Artificial Sequence: Synthetic oligonucleotide
cuuaugcuucacgcugccg

SEQ ID NO: 405241 - RNA, 19 nt, Artificial Sequence
  Description of Artificial Sequence: Synthetic oligonucleotide
gcgcuuaugcuucacgcug

SEQ ID NO: 405242 - RNA, 19 nt, Artificial Sequence
  Description of Artificial Sequence: Synthetic oligonucleotide
caaaugcagaugacgugga

SEQ ID NO: 405243 - RNA, 19 nt, Artificial Sequence
  Description of Artificial Sequence: Synthetic oligonucleotide
gaacacacacacacaccac

SEQ ID NO: 405244 - RNA, 19 nt, Artificial Sequence
  Description of Artificial Sequence: Synthetic oligonucleotide
agaugaacacacacacaca

SEQ ID NO: 405245 - RNA, 19 nt, Artificial Sequence
  Description of Artificial Sequence: Synthetic oligonucleotide
gggcuuagugucgacuucg

SEQ ID NO: 405246 - RNA, 19 nt, Artificial Sequence
  Description of Artificial Sequence: Synthetic oligonucleotide
agauucugguugaaacugu

SEQ ID NO: 405247 - RNA, 19 nt, Artificial Sequence
  Description of Artificial Sequence: Synthetic oligonucleotide
gguaaacuauaaagcacac

SEQ ID NO: 405248 - RNA, 19 nt, Artificial Sequence
  Description of Artificial Sequence: Synthetic oligonucleotide
ggauaagcgcuuaugcuuc

SEQ ID NO: 405249 - RNA, 19 nt, Artificial Sequence
  Description of Artificial Sequence: Synthetic oligonucleotide
cgaaaguguaacucugagc

SEQ ID NO: 405250 - RNA, 19 nt, Artificial Sequence
  Description of Artificial Sequence: Synthetic oligonucleotide
auguaggauucccgguacu

SEQ ID NO: 405251 - RNA, 19 nt, Artificial Sequence
  Description of Artificial Sequence: Synthetic oligonucleotide
caauaaacauccgggcgca

SEQ ID NO: 405252 - RNA, 19 nt, Artificial Sequence
  Description of Artificial Sequence: Synthetic oligonucleotide
gucgacuucgaugcccgag

SEQ ID NO: 405253 - RNA, 19 nt, Artificial Sequence
  Description of Artificial Sequence: Synthetic oligonucleotide
cuaugucgaucgguggaag

SEQ ID NO: 405254 - RNA, 19 nt, Artificial Sequence
  Description of Artificial Sequence: Synthetic oligonucleotide
accgguguauuaaccagca

SEQ ID NO: 405255 - RNA, 19 nt, Artificial Sequence
  Description of Artificial Sequence: Synthetic oligonucleotide
ccgaaaguguaacucugag

SEQ ID NO: 405256 - RNA, 19 nt, Artificial Sequence
  Description of Artificial Sequence: Synthetic oligonucleotide
agguccagagaaaaguauu

SEQ ID NO: 405257 - RNA, 19 nt, Artificial Sequence
  Description of Artificial Sequence: Synthetic oligonucleotide
aggccugcgaugcgcagga

SEQ ID NO: 405258 - RNA, 19 nt, Artificial Sequence
  Description of Artificial Sequence: Synthetic oligonucleotide
acucuuaacucuacauuua

SEQ ID NO: 405259 - RNA, 19 nt, Artificial Sequence
  Description of Artificial Sequence: Synthetic oligonucleotide
ccagcaacggacauguuaa

SEQ ID NO: 405260 - RNA, 19 nt, Artificial Sequence
  Description of Artificial Sequence: Synthetic oligonucleotide
cccuaagccucuaagaaaa

SEQ ID NO: 405261 - RNA, 19 nt, Artificial Sequence
  Description of Artificial Sequence: Synthetic oligonucleotide
uagugucgacuucgaugcc

SEQ ID NO: 405262 - RNA, 19 nt, Artificial Sequence
  Description of Artificial Sequence: Synthetic oligonucleotide
cacacacacaccacaaccu

SEQ ID NO: 405263 - RNA, 19 nt, Artificial Sequence
  Description of Artificial Sequence: Synthetic oligonucleotide
aacauguauuugagcuaga

SEQ ID NO: 405264 - RNA, 19 nt, Artificial Sequence
  Description of Artificial Sequence: Synthetic oligonucleotide
gaucccacaagagacugau

SEQ ID NO: 405265 - RNA, 19 nt, Artificial Sequence
  Description of Artificial Sequence: Synthetic oligonucleotide
cauagucauggagcugcag

SEQ ID NO: 405266 - RNA, 19 nt, Artificial Sequence
  Description of Artificial Sequence: Synthetic oligonucleotide
ggcuaugucgaucggugga

SEQ ID NO: 405267 - RNA, 19 nt, Artificial Sequence
  Description of Artificial Sequence: Synthetic oligonucleotide
uugacgcacugcugagcca

SEQ ID NO: 405268 - RNA, 19 nt, Artificial Sequence
  Description of Artificial Sequence: Synthetic oligonucleotide
ggucccggggcuuaguguc

SEQ ID NO: 405269 - RNA, 19 nt, Artificial Sequence
  Description of Artificial Sequence: Synthetic oligonucleotide
augacguggagcagugaca

SEQ ID NO: 405270 - RNA, 19 nt, Artificial Sequence
  Description of Artificial Sequence: Synthetic oligonucleotide
ucuucccgaagggucaaua

SEQ ID NO: 405271 - RNA, 19 nt, Artificial Sequence
  Description of Artificial Sequence: Synthetic oligonucleotide
auugugcuaugaaguucuc

SEQ ID NO: 405272 - RNA, 19 nt, Artificial Sequence
  Description of Artificial Sequence: Synthetic oligonucleotide
guaaacuauaaagcacacu

SEQ ID NO: 405273 - RNA, 19 nt, Artificial Sequence
  Description of Artificial Sequence: Synthetic oligonucleotide
agaugccgggagcgugugg

SEQ ID NO: 405274 - RNA, 19 nt, Artificial Sequence
  Description of Artificial Sequence: Synthetic oligonucleotide
ugcauggcgcugccugaac

SEQ ID NO: 405275 - RNA, 19 nt, Artificial Sequence
  Description of Artificial Sequence: Synthetic oligonucleotide
cagguggaacuuacacaac

SEQ ID NO: 405276 - RNA, 19 nt, Artificial Sequence
  Description of Artificial Sequence: Synthetic oligonucleotide
cuucccgaagggucaauaa

SEQ ID NO: 405277 - RNA, 19 nt, Artificial Sequence
  Description of Artificial Sequence: Synthetic oligonucleotide
cucaggcuaugucgaucgg

SEQ ID NO: 405278 - RNA, 19 nt, Artificial Sequence
  Description of Artificial Sequence: Synthetic oligonucleotide
augcuucacgcugccggcg

SEQ ID NO: 405279 - RNA, 19 nt, Artificial Sequence
  Description of Artificial Sequence: Synthetic oligonucleotide
guacaggcgguggcuauug

SEQ ID NO: 405280 - RNA, 19 nt, Artificial Sequence
  Description of Artificial Sequence: Synthetic oligonucleotide
gacucccauccacagggaa

SEQ ID NO: 405281 - RNA, 19 nt, Artificial Sequence
  Description of Artificial Sequence: Synthetic oligonucleotide
cauugucccaaggcuuuug

SEQ ID NO: 405282 - RNA, 19 nt, Artificial Sequence
  Description of Artificial Sequence: Synthetic oligonucleotide
acacacacacacaccacaa

SEQ ID NO: 405283 - RNA, 19 nt, Artificial Sequence
  Description of Artificial Sequence: Synthetic oligonucleotide
caggcuuguuugaaaagcu

SEQ ID NO: 405284 - RNA, 19 nt, Artificial Sequence
  Description of Artificial Sequence: Synthetic oligonucleotide
gugagguuaugcaaugacu

SEQ ID NO: 405285 - RNA, 19 nt, Artificial Sequence
  Description of Artificial Sequence: Synthetic oligonucleotide
caaaguggauuuucacaua

SEQ ID NO: 405286 - RNA, 19 nt, Artificial Sequence
  Description of Artificial Sequence: Synthetic oligonucleotide
cuuccgcaaggagacugag

SEQ ID NO: 405287 - RNA, 19 nt, Artificial Sequence
  Description of Artificial Sequence: Synthetic oligonucleotide
gggauaagcgcuuaugcuu

SEQ ID NO: 405288 - RNA, 19 nt, Artificial Sequence
  Description of Artificial Sequence: Synthetic oligonucleotide
cccagauaagucuuaugca

SEQ ID NO: 405289 - RNA, 19 nt, Artificial Sequence
  Description of Artificial Sequence: Synthetic oligonucleotide
gcuuaugcuucacgcugcc

SEQ ID NO: 405290 - RNA, 19 nt, Artificial Sequence
  Description of Artificial Sequence: Synthetic oligonucleotide
gcagacagcgacugcccgc

SEQ ID NO: 405291 - RNA, 19 nt, Artificial Sequence
  Description of Artificial Sequence: Synthetic oligonucleotide
gucaugaccacagaacguu

SEQ ID NO: 405292 - RNA, 19 nt, Artificial Sequence
  Description of Artificial Sequence: Synthetic oligonucleotide
caucuuggauguugacgca

SEQ ID NO: 405293 - RNA, 19 nt, Artificial Sequence
  Description of Artificial Sequence: Synthetic oligonucleotide
gcuacugggugagauucug

SEQ ID NO: 405294 - RNA, 19 nt, Artificial Sequence
  Description of Artificial Sequence: Synthetic oligonucleotide
cacugccuauguucugcug

SEQ ID NO: 405295 - RNA, 19 nt, Artificial Sequence
  Description of Artificial Sequence: Synthetic oligonucleotide
cuuccgcuggcacgggauc

SEQ ID NO: 405296 - RNA, 19 nt, Artificial Sequence
  Description of Artificial Sequence: Synthetic oligonucleotide
cacaaggaaagucacucuu

SEQ ID NO: 405297 - RNA, 19 nt, Artificial Sequence
  Description of Artificial Sequence: Synthetic oligonucleotide
ggcacgggaucgcuuuucc

SEQ ID NO: 405298 - RNA, 19 nt, Artificial Sequence
  Description of Artificial Sequence: Synthetic oligonucleotide
uccgcuggcacgggaucgc

SEQ ID NO: 405299 - RNA, 19 nt, Artificial Sequence
  Description of Artificial Sequence: Synthetic oligonucleotide
ugccgccaguucuguaaca

SEQ ID NO: 405300 - RNA, 19 nt, Artificial Sequence
  Description of Artificial Sequence: Synthetic oligonucleotide
gggcaaaaucucaaacuuc

SEQ ID NO: 405301 - RNA, 19 nt, Artificial Sequence
  Description of Artificial Sequence: Synthetic oligonucleotide
gggagcgugugggacaccc

SEQ ID NO: 405302 - RNA, 19 nt, Artificial Sequence
  Description of Artificial Sequence: Synthetic oligonucleotide
ucgaucgguggaagucuuu

SEQ ID NO: 405303 - RNA, 19 nt, Artificial Sequence
  Description of Artificial Sequence: Synthetic oligonucleotide
gagagcuacugggugagau

SEQ ID NO: 405304 - RNA, 19 nt, Artificial Sequence
  Description of Artificial Sequence: Synthetic oligonucleotide
caaucaggguugagaaucu

SEQ ID NO: 405305 - RNA, 19 nt, Artificial Sequence
  Description of Artificial Sequence: Synthetic oligonucleotide
ugucgacuucgaugcccga

SEQ ID NO: 405306 - RNA, 19 nt, Artificial Sequence
  Description of Artificial Sequence: Synthetic oligonucleotide
auccgggcgcacuugucuu

SEQ ID NO: 405307 - RNA, 19 nt, Artificial Sequence
  Description of Artificial Sequence: Synthetic oligonucleotide
gagaugccgggagcgugug

SEQ ID NO: 405308 - RNA, 19 nt, Artificial Sequence
  Description of Artificial Sequence: Synthetic oligonucleotide
cagacagcgacugcccgca

SEQ ID NO: 405309 - RNA, 19 nt, Artificial Sequence
  Description of Artificial Sequence: Synthetic oligonucleotide
ggcgggauaagcgcuuaug

SEQ ID NO: 405310 - RNA, 19 nt, Artificial Sequence
  Description of Artificial Sequence: Synthetic oligonucleotide
cccgaagggucaauaaaca

SEQ ID NO: 405311 - RNA, 19 nt, Artificial Sequence
  Description of Artificial Sequence: Synthetic oligonucleotide
acauccgggcgcacuuguc

SEQ ID NO: 405312 - RNA, 19 nt, Artificial Sequence
  Description of Artificial Sequence: Synthetic oligonucleotide
cugccuauguucugcugua

SEQ ID NO: 405313 - RNA, 19 nt, Artificial Sequence
  Description of Artificial Sequence: Synthetic oligonucleotide
agcuaaguuugggguagaa

SEQ ID NO: 405314 - RNA, 19 nt, Artificial Sequence
  Description of Artificial Sequence: Synthetic oligonucleotide
gguugucgcugauguagga

SEQ ID NO: 405315 - RNA, 19 nt, Artificial Sequence
  Description of Artificial Sequence: Synthetic oligonucleotide
ugaugucgucaaggcucag

SEQ ID NO: 405316 - RNA, 19 nt, Artificial Sequence
  Description of Artificial Sequence: Synthetic oligonucleotide
gucccggggcuuagugucg

SEQ ID NO: 405317 - RNA, 19 nt, Artificial Sequence
  Description of Artificial Sequence: Synthetic oligonucleotide
cgcuuaugcuucacgcugc

SEQ ID NO: 405318 - RNA, 19 nt, Artificial Sequence
  Description of Artificial Sequence: Synthetic oligonucleotide
gguuaugcaaugacucaua

SEQ ID NO: 405319 - RNA, 19 nt, Artificial Sequence
  Description of Artificial Sequence: Synthetic oligonucleotide
gacgcacugcugagccaag

SEQ ID NO: 405320 - RNA, 19 nt, Artificial Sequence
  Description of Artificial Sequence: Synthetic oligonucleotide
gcuaaguuugggguagaaa

SEQ ID NO: 405321 - RNA, 19 nt, Artificial Sequence
  Description of Artificial Sequence: Synthetic oligonucleotide
uggcacgggaucgcuuuuc

SEQ ID NO: 405322 - RNA, 19 nt, Artificial Sequence
  Description of Artificial Sequence: Synthetic oligonucleotide
agcuacugggugagauucu

SEQ ID NO: 405323 - RNA, 19 nt, Artificial Sequence
  Description of Artificial Sequence: Synthetic oligonucleotide
uggcgggauaagcgcuuau

SEQ ID NO: 405324 - RNA, 19 nt, Artificial Sequence
  Description of Artificial Sequence: Synthetic oligonucleotide
cauccgggcgcacuugucu

SEQ ID NO: 405325 - RNA, 19 nt, Artificial Sequence
  Description of Artificial Sequence: Synthetic oligonucleotide
gcgugugggacacccugug

SEQ ID NO: 405326 - RNA, 19 nt, Artificial Sequence
  Description of Artificial Sequence: Synthetic oligonucleotide
ucccggggcuuagugucga

SEQ ID NO: 405327 - RNA, 19 nt, Artificial Sequence
  Description of Artificial Sequence: Synthetic oligonucleotide
cagggaacacugccuaugu

SEQ ID NO: 405328 - RNA, 19 nt, Artificial Sequence
  Description of Artificial Sequence: Synthetic oligonucleotide
augccgggagcguguggga

SEQ ID NO: 405329 - RNA, 19 nt, Artificial Sequence
  Description of Artificial Sequence: Synthetic oligonucleotide
aggaccggcugcagguuca

SEQ ID NO: 405330 - RNA, 19 nt, Artificial Sequence
  Description of Artificial Sequence: Synthetic oligonucleotide
guugucgcugauguaggau

SEQ ID NO: 405331 - RNA, 19 nt, Artificial Sequence
  Description of Artificial Sequence: Synthetic oligonucleotide
gccgccaguucuguaacac

SEQ ID NO: 405332 - RNA, 19 nt, Artificial Sequence
  Description of Artificial Sequence: Synthetic oligonucleotide
gaguggcgggauaagcgcu

SEQ ID NO: 405333 - RNA, 19 nt, Artificial Sequence
  Description of Artificial Sequence: Synthetic oligonucleotide
gcuaugucgaucgguggaa

SEQ ID NO: 405334 - RNA, 19 nt, Artificial Sequence
  Description of Artificial Sequence: Synthetic oligonucleotide
cacacccgaaaguguaacu

SEQ ID NO: 405335 - RNA, 19 nt, Artificial Sequence
  Description of Artificial Sequence: Synthetic oligonucleotide
ccaucgggcaaaaucucaa

SEQ ID NO: 405336 - RNA, 19 nt, Artificial Sequence
  Description of Artificial Sequence: Synthetic oligonucleotide
aguggcgggauaagcgcuu

SEQ ID NO: 405337 - RNA, 19 nt, Artificial Sequence
  Description of Artificial Sequence: Synthetic oligonucleotide
gagcuaaguuugggguaga

SEQ ID NO: 405338 - RNA, 19 nt, Artificial Sequence
  Description of Artificial Sequence: Synthetic oligonucleotide
cccgaaaguguaacucuga

SEQ ID NO: 405339 - RNA, 19 nt, Artificial Sequence
  Description of Artificial Sequence: Synthetic oligonucleotide
ggagacugaguuacauucu

SEQ ID NO: 405340 - RNA, 19 nt, Artificial Sequence
  Description of Artificial Sequence: Synthetic oligonucleotide
ccacacccgaaaguguaac

SEQ ID NO: 405341 - RNA, 19 nt, Artificial Sequence
  Description of Artificial Sequence: Synthetic oligonucleotide
cgaucgguggaagucuuug

SEQ ID NO: 405342 - RNA, 19 nt, Artificial Sequence
  Description of Artificial Sequence: Synthetic oligonucleotide
ccccuaagccucuaagaaa

SEQ ID NO: 405343 - RNA, 19 nt, Artificial Sequence
  Description of Artificial Sequence: Synthetic oligonucleotide
gugcauugucccaaggcuu

SEQ ID NO: 405344 - RNA, 19 nt, Artificial Sequence
  Description of Artificial Sequence: Synthetic oligonucleotide
cggugcauggcgcugccug

SEQ ID NO: 405345 - RNA, 19 nt, Artificial Sequence
  Description of Artificial Sequence: Synthetic oligonucleotide
caucccuuagaaagacauu

SEQ ID NO: 405346 - RNA, 19 nt, Artificial Sequence
  Description of Artificial Sequence: Synthetic oligonucleotide
cccacaagagacugauuua

SEQ ID NO: 405347 - RNA, 19 nt, Artificial Sequence
  Description of Artificial Sequence: Synthetic oligonucleotide
gcgacugcccgcagggcug

SEQ ID NO: 405348 - RNA, 19 nt, Artificial Sequence
  Description of Artificial Sequence: Synthetic oligonucleotide
gaccggcugcagguucaug

SEQ ID NO: 405349 - RNA, 19 nt, Artificial Sequence
  Description of Artificial Sequence: Synthetic oligonucleotide
ccuuccgcaaggagacuga

SEQ ID NO: 405350 - RNA, 19 nt, Artificial Sequence
  Description of Artificial Sequence: Synthetic oligonucleotide
gcacgggaucgcuuuucca

SEQ ID NO: 405351 - RNA, 19 nt, Artificial Sequence
  Description of Artificial Sequence: Synthetic oligonucleotide
caacgaacucugggaccuc

SEQ ID NO: 405352 - RNA, 19 nt, Artificial Sequence
  Description of Artificial Sequence: Synthetic oligonucleotide
auccuuccgcaaggagacu

SEQ ID NO: 405353 - RNA, 19 nt, Artificial Sequence
  Description of Artificial Sequence: Synthetic oligonucleotide
ggaucccacaagagacuga

SEQ ID NO: 405354 - RNA, 19 nt, Artificial Sequence
  Description of Artificial Sequence: Synthetic oligonucleotide
gccgggagcgugugggaca

SEQ ID NO: 405355 - RNA, 19 nt, Artificial Sequence
  Description of Artificial Sequence: Synthetic oligonucleotide
ggcuuagugucgacuucga

SEQ ID NO: 405356 - RNA, 19 nt, Artificial Sequence
  Description of Artificial Sequence: Synthetic oligonucleotide
cguuacuugaaaacauaau

SEQ ID NO: 405357 - RNA, 19 nt, Artificial Sequence
  Description of Artificial Sequence: Synthetic oligonucleotide
ggauucccgguacugcuuu

SEQ ID NO: 405358 - RNA, 19 nt, Artificial Sequence
  Description of Artificial Sequence: Synthetic oligonucleotide
caguagaggccauccucau

SEQ ID NO: 405359 - RNA, 19 nt, Artificial Sequence
  Description of Artificial Sequence: Synthetic oligonucleotide
uggcccgggguuggaccca

SEQ ID NO: 405360 - RNA, 19 nt, Artificial Sequence
  Description of Artificial Sequence: Synthetic oligonucleotide
guguaacucugagcagugu

SEQ ID NO: 405361 - RNA, 19 nt, Artificial Sequence
  Description of Artificial Sequence: Synthetic oligonucleotide
gaagugcgagcaacauuuu

SEQ ID NO: 405362 - RNA, 19 nt, Artificial Sequence
  Description of Artificial Sequence: Synthetic oligonucleotide
gcuggcacgggaucgcuuu

SEQ ID NO: 405363 - RNA, 19 nt, Artificial Sequence
  Description of Artificial Sequence: Synthetic oligonucleotide
gcaaggagacugaguuaca

SEQ ID NO: 405364 - RNA, 19 nt, Artificial Sequence
  Description of Artificial Sequence: Synthetic oligonucleotide
cuguaacacugacucccau

SEQ ID NO: 405365 - RNA, 19 nt, Artificial Sequence
  Description of Artificial Sequence: Synthetic oligonucleotide
cacagggaacacugccuau

SEQ ID NO: 405366 - RNA, 19 nt, Artificial Sequence
  Description of Artificial Sequence: Synthetic oligonucleotide
cuuugguuuucggcauagu

SEQ ID NO: 405367 - RNA, 19 nt, Artificial Sequence
  Description of Artificial Sequence: Synthetic oligonucleotide
ccgaagggucaauaaacau

SEQ ID NO: 405368 - RNA, 19 nt, Artificial Sequence
  Description of Artificial Sequence: Synthetic oligonucleotide
ggagaugccgggagcgugu

SEQ ID NO: 405369 - RNA, 19 nt, Artificial Sequence
  Description of Artificial Sequence: Synthetic oligonucleotide
cgggauaagcgcuuaugcu

SEQ ID NO: 405370 - RNA, 19 nt, Artificial Sequence
  Description of Artificial Sequence: Synthetic oligonucleotide
gcuuagugucgacuucgau

SEQ ID NO: 405371 - RNA, 19 nt, Artificial Sequence
  Description of Artificial Sequence: Synthetic oligonucleotide
aaccagcaacggacauguu

SEQ ID NO: 405372 - RNA, 19 nt, Artificial Sequence
  Description of Artificial Sequence: Synthetic oligonucleotide
ccgggagcgugugggacac

SEQ ID NO: 405373 - RNA, 19 nt, Artificial Sequence
  Description of Artificial Sequence: Synthetic oligonucleotide
gggucccggggcuuagugu

SEQ ID NO: 405374 - RNA, 19 nt, Artificial Sequence
  Description of Artificial Sequence: Synthetic oligonucleotide
gucgaucgguggaagucuu

SEQ ID NO: 405375 - RNA, 19 nt, Artificial Sequence
  Description of Artificial Sequence: Synthetic oligonucleotide
cccuucaacuuucauccuu

SEQ ID NO: 405376 - RNA, 19 nt, Artificial Sequence
  Description of Artificial Sequence: Synthetic oligonucleotide
cccgcagguggaacuuaca

SEQ ID NO: 405377 - RNA, 19 nt, Artificial Sequence
  Description of Artificial Sequence: Synthetic oligonucleotide
ccgcaaggagacugaguua

SEQ ID NO: 405378 - RNA, 19 nt, Artificial Sequence
  Description of Artificial Sequence: Synthetic oligonucleotide
gcuguacccuaaaucuauu

SEQ ID NO: 405379 - RNA, 19 nt, Artificial Sequence
  Description of Artificial Sequence: Synthetic oligonucleotide
ccguggaguggcgggauaa

SEQ ID NO: 405380 - RNA, 19 nt, Artificial Sequence
  Description of Artificial Sequence: Synthetic oligonucleotide
ccgccaguucuguaacacu

SEQ ID NO: 405381 - RNA, 19 nt, Artificial Sequence
  Description of Artificial Sequence: Synthetic oligonucleotide
ccgguguauuaaccagcaa

SEQ ID NO: 405382 - RNA, 19 nt, Artificial Sequence
  Description of Artificial Sequence: Synthetic oligonucleotide
cuggcacgggaucgcuuuu

SEQ ID NO: 405383 - RNA, 19 nt, Artificial Sequence
  Description of Artificial Sequence: Synthetic oligonucleotide
cgaugcccgagguguggga

SEQ ID NO: 405384 - RNA, 19 nt, Artificial Sequence
  Description of Artificial Sequence: Synthetic oligonucleotide
cggggcuuagugucgacuu

SEQ ID NO: 405385 - RNA, 19 nt, Artificial Sequence
  Description of Artificial Sequence: Synthetic oligonucleotide
cugcccgcagguggaacuu

SEQ ID NO: 405386 - RNA, 19 nt, Artificial Sequence
  Description of Artificial Sequence: Synthetic oligonucleotide
cgacuucgaugcccgaggu

SEQ ID NO: 405387 - RNA, 19 nt, Artificial Sequence
  Description of Artificial Sequence: Synthetic oligonucleotide
ggaccggcugcagguucau

SEQ ID NO: 405388 - RNA, 19 nt, Artificial Sequence
  Description of Artificial Sequence: Synthetic oligonucleotide
cgggagcgugugggacacc

SEQ ID NO: 405389 - RNA, 19 nt, Artificial Sequence
  Description of Artificial Sequence: Synthetic oligonucleotide
ccgggcgcacuugucuuuu

SEQ ID NO: 405390 - RNA, 19 nt, Artificial Sequence
  Description of Artificial Sequence: Synthetic oligonucleotide
cgcuggcacgggaucgcuu

SEQ ID NO: 405391 - RNA, 19 nt, Artificial Sequence
  Description of Artificial Sequence: Synthetic oligonucleotide
agaauugccuuuuauaaag

SEQ ID NO: 405392 - RNA, 19 nt, Artificial Sequence
  Description of Artificial Sequence: Synthetic oligonucleotide
gaugaagcuucguagacgg

SEQ ID NO: 405393 - RNA, 19 nt, Artificial Sequence
  Description of Artificial Sequence: Synthetic oligonucleotide
aaaaucccgaagaaggugc

SEQ ID NO: 405394 - RNA, 19 nt, Artificial Sequence
  Description of Artificial Sequence: Synthetic oligonucleotide
aagauugacauccaucccu

SEQ ID NO: 405395 - RNA, 19 nt, Artificial Sequence
  Description of Artificial Sequence: Synthetic oligonucleotide
ugcgccuuuccucagagcg

SEQ ID NO: 405396 - RNA, 19 nt, Artificial Sequence
  Description of Artificial Sequence: Synthetic oligonucleotide
agagcguugcgccaggucc

SEQ ID NO: 405397 - RNA, 19 nt, Artificial Sequence
  Description of Artificial Sequence: Synthetic oligonucleotide
aauccgucagcacaaacca

SEQ ID NO: 405398 - RNA, 19 nt, Artificial Sequence
  Description of Artificial Sequence: Synthetic oligonucleotide
aauggagagagcuccacgu

SEQ ID NO: 405399 - RNA, 19 nt, Artificial Sequence
  Description of Artificial Sequence: Synthetic oligonucleotide
guauaaacggcaucuuugg

SEQ ID NO: 405400 - RNA, 19 nt, Artificial Sequence
  Description of Artificial Sequence: Synthetic oligonucleotide
uguccguggacucaaacca

SEQ ID NO: 405401 - RNA, 19 nt, Artificial Sequence
  Description of Artificial Sequence: Synthetic oligonucleotide
uaaccucagagccuguccg

SEQ ID NO: 405402 - RNA, 19 nt, Artificial Sequence
  Description of Artificial Sequence: Synthetic oligonucleotide
uugggguuaauggagagag

SEQ ID NO: 405403 - RNA, 19 nt, Artificial Sequence
  Description of Artificial Sequence: Synthetic oligonucleotide
caugccaccaagaauugcc

SEQ ID NO: 405404 - RNA, 19 nt, Artificial Sequence
  Description of Artificial Sequence: Synthetic oligonucleotide
gucccuguaauauuugagg

SEQ ID NO: 405405 - RNA, 19 nt, Artificial Sequence
  Description of Artificial Sequence: Synthetic oligonucleotide
gacucaaaccacuugcgcc

SEQ ID NO: 405406 - RNA, 19 nt, Artificial Sequence
  Description of Artificial Sequence: Synthetic oligonucleotide
agcguguuuuccuuauugc

SEQ ID NO: 405407 - RNA, 19 nt, Artificial Sequence
  Description of Artificial Sequence: Synthetic oligonucleotide
ucuagauccuccuguuugg

SEQ ID NO: 405408 - RNA, 19 nt, Artificial Sequence
  Description of Artificial Sequence: Synthetic oligonucleotide
ucuugauaugccuucuuca

SEQ ID NO: 405409 - RNA, 19 nt, Artificial Sequence
  Description of Artificial Sequence: Synthetic oligonucleotide
agauuggaccuccuucucc

SEQ ID NO: 405410 - RNA, 19 nt, Artificial Sequence
  Description of Artificial Sequence: Synthetic oligonucleotide
uaauggagagagcuccacg

SEQ ID NO: 405411 - RNA, 19 nt, Artificial Sequence
  Description of Artificial Sequence: Synthetic oligonucleotide
ucccuguaauauuugaggc

SEQ ID NO: 405412 - RNA, 19 nt, Artificial Sequence
  Description of Artificial Sequence: Synthetic oligonucleotide
gggaguaccucucagacag

SEQ ID NO: 405413 - RNA, 19 nt, Artificial Sequence
  Description of Artificial Sequence: Synthetic oligonucleotide
uggguggacgcucagaagu

SEQ ID NO: 405414 - RNA, 19 nt, Artificial Sequence
  Description of Artificial Sequence: Synthetic oligonucleotide
gaauccgucagcacaaacc

SEQ ID NO: 405415 - RNA, 19 nt, Artificial Sequence
  Description of Artificial Sequence: Synthetic oligonucleotide
uggacucaaaccacuugcg

SEQ ID NO: 405416 - RNA, 19 nt, Artificial Sequence
  Description of Artificial Sequence: Synthetic oligonucleotide
aacggcaucuuugguaugg

SEQ ID NO: 405417 - RNA, 19 nt, Artificial Sequence
  Description of Artificial Sequence: Synthetic oligonucleotide
cuuauucucccgcaggggc

SEQ ID NO: 405418 - RNA, 19 nt, Artificial Sequence
  Description of Artificial Sequence: Synthetic oligonucleotide
uguguguguguguacaugu

SEQ ID NO: 405419 - RNA, 19 nt, Artificial Sequence
  Description of Artificial Sequence: Synthetic oligonucleotide
gagggacgagcucagaucc

SEQ ID NO: 405420 - RNA, 19 nt, Artificial Sequence
  Description of Artificial Sequence: Synthetic oligonucleotide
aaccucagagccuguccgc

SEQ ID NO: 405421 - RNA, 19 nt, Artificial Sequence
  Description of Artificial Sequence: Synthetic oligonucleotide
uuuggguggacgcucagaa

SEQ ID NO: 405422 - RNA, 19 nt, Artificial Sequence
  Description of Artificial Sequence: Synthetic oligonucleotide
uccaagauugacauccauc

SEQ ID NO: 405423 - RNA, 19 nt, Artificial Sequence
  Description of Artificial Sequence: Synthetic oligonucleotide
auaaacggcaucuuuggua

SEQ ID NO: 405424 - RNA, 19 nt, Artificial Sequence
  Description of Artificial Sequence: Synthetic oligonucleotide
uugggccuuugcaagaugc

SEQ ID NO: 405425 - RNA, 19 nt, Artificial Sequence
  Description of Artificial Sequence: Synthetic oligonucleotide
uguuuugcucaguucccgg

SEQ ID NO: 405426 - RNA, 19 nt, Artificial Sequence
  Description of Artificial Sequence: Synthetic oligonucleotide
gccgacaagguauaaacgg

SEQ ID NO: 405427 - RNA, 19 nt, Artificial Sequence
  Description of Artificial Sequence: Synthetic oligonucleotide
acucaaaccacuugcgccu

SEQ ID NO: 405428 - RNA, 19 nt, Artificial Sequence
  Description of Artificial Sequence: Synthetic oligonucleotide
guaccucucagacagcacc

SEQ ID NO: 405429 - RNA, 19 nt, Artificial Sequence
  Description of Artificial Sequence: Synthetic oligonucleotide
gaagcuucguagacggucg

SEQ ID NO: 405430 - RNA, 19 nt, Artificial Sequence
  Description of Artificial Sequence: Synthetic oligonucleotide
ugacgucugugcaggagcg

SEQ ID NO: 405431 - RNA, 19 nt, Artificial Sequence
  Description of Artificial Sequence: Synthetic oligonucleotide
uucuugauaugccuucuuc

SEQ ID NO: 405432 - RNA, 19 nt, Artificial Sequence
  Description of Artificial Sequence: Synthetic oligonucleotide
agcagaucgggcgucaugg

SEQ ID NO: 405433 - RNA, 19 nt, Artificial Sequence
  Description of Artificial Sequence: Synthetic oligonucleotide
ugugucagggcaccgauuu

SEQ ID NO: 405434 - RNA, 19 nt, Artificial Sequence
  Description of Artificial Sequence: Synthetic oligonucleotide
ucgcuuauucucccgcagg

SEQ ID NO: 405435 - RNA, 19 nt, Artificial Sequence
  Description of Artificial Sequence: Synthetic oligonucleotide
guaagacccagugcgaggg

SEQ ID NO: 405436 - RNA, 19 nt, Artificial Sequence
  Description of Artificial Sequence: Synthetic oligonucleotide
uauuugaggcuggaauccg

SEQ ID NO: 405437 - RNA, 19 nt, Artificial Sequence
  Description of Artificial Sequence: Synthetic oligonucleotide
uauaaacggcaucuuuggu

SEQ ID NO: 405438 - RNA, 19 nt, Artificial Sequence
  Description of Artificial Sequence: Synthetic oligonucleotide
aggcgaugaagcuucguag

SEQ ID NO: 405439 - RNA, 19 nt, Artificial Sequence
  Description of Artificial Sequence: Synthetic oligonucleotide
gggagcuugggguuaaugg

SEQ ID NO: 405440 - RNA, 19 nt, Artificial Sequence
  Description of Artificial Sequence: Synthetic oligonucleotide
gauuggaccuccuucucca

SEQ ID NO: 405441 - RNA, 19 nt, Artificial Sequence
  Description of Artificial Sequence: Synthetic oligonucleotide
gguuaauggagagagcucc

SEQ ID NO: 405442 - RNA, 19 nt, Artificial Sequence
  Description of Artificial Sequence: Synthetic oligonucleotide
cuguccguggacucaaacc

SEQ ID NO: 405443 - RNA, 19 nt, Artificial Sequence
  Description of Artificial Sequence: Synthetic oligonucleotide
ucugcgagggccaccccgg

SEQ ID NO: 405444 - RNA, 19 nt, Artificial Sequence
  Description of Artificial Sequence: Synthetic oligonucleotide
uacucggugacgucugugc

SEQ ID NO: 405445 - RNA, 19 nt, Artificial Sequence
  Description of Artificial Sequence: Synthetic oligonucleotide
gguacuuccccgugaagcg

SEQ ID NO: 405446 - RNA, 19 nt, Artificial Sequence
  Description of Artificial Sequence: Synthetic oligonucleotide
uuugcaagaugcccagggu

SEQ ID NO: 405447 - RNA, 19 nt, Artificial Sequence
  Description of Artificial Sequence: Synthetic oligonucleotide
ugcgcuguacugcauacuc

SEQ ID NO: 405448 - RNA, 19 nt, Artificial Sequence
  Description of Artificial Sequence: Synthetic oligonucleotide
uuuuacucucaggagcacc

SEQ ID NO: 405449 - RNA, 19 nt, Artificial Sequence
  Description of Artificial Sequence: Synthetic oligonucleotide
ugcgaggcgaugaagcuuc

SEQ ID NO: 405450 - RNA, 19 nt, Artificial Sequence
  Description of Artificial Sequence: Synthetic oligonucleotide
ugauccaucacgugccggu

SEQ ID NO: 405451 - RNA, 19 nt, Artificial Sequence
  Description of Artificial Sequence: Synthetic oligonucleotide
ggucaacucacucuggccc

SEQ ID NO: 405452 - RNA, 19 nt, Artificial Sequence
  Description of Artificial Sequence: Synthetic oligonucleotide
ucguagacggucgaucucc

SEQ ID NO: 405453 - RNA, 19 nt, Artificial Sequence
  Description of Artificial Sequence: Synthetic oligonucleotide
cauccaucccuucuugaag

SEQ ID NO: 405454 - RNA, 19 nt, Artificial Sequence
  Description of Artificial Sequence: Synthetic oligonucleotide
aaccacuugcgccuuuccu

SEQ ID NO: 405455 - RNA, 19 nt, Artificial Sequence
  Description of Artificial Sequence: Synthetic oligonucleotide
gaaguugagcagaucgggc

SEQ ID NO: 405456 - RNA, 19 nt, Artificial Sequence
  Description of Artificial Sequence: Synthetic oligonucleotide
ggcacggagagauuggacc

SEQ ID NO: 405457 - RNA, 19 nt, Artificial Sequence
  Description of Artificial Sequence: Synthetic oligonucleotide
cuguacugcauacucggug

SEQ ID NO: 405458 - RNA, 19 nt, Artificial Sequence
  Description of Artificial Sequence: Synthetic oligonucleotide
ugcgcccacagcuauugcc

SEQ ID NO: 405459 - RNA, 19 nt, Artificial Sequence
  Description of Artificial Sequence: Synthetic oligonucleotide
gaugcccgaggucauugcc

SEQ ID NO: 405460 - RNA, 19 nt, Artificial Sequence
  Description of Artificial Sequence: Synthetic oligonucleotide
uggacgcucagaaguggag

SEQ ID NO: 405461 - RNA, 19 nt, Artificial Sequence
  Description of Artificial Sequence: Synthetic oligonucleotide
agaucgggcgucauggcgg

SEQ ID NO: 405462 - RNA, 19 nt, Artificial Sequence
  Description of Artificial Sequence: Synthetic oligonucleotide
cuggaagccauaguugcgc

SEQ ID NO: 405463 - RNA, 19 nt, Artificial Sequence
  Description of Artificial Sequence: Synthetic oligonucleotide
uucgaggcccaucaccacu

SEQ ID NO: 405464 - RNA, 19 nt, Artificial Sequence
  Description of Artificial Sequence: Synthetic oligonucleotide
ggccgauaaccucagagcc

SEQ ID NO: 405465 - RNA, 19 nt, Artificial Sequence
  Description of Artificial Sequence: Synthetic oligonucleotide
agugcgagggacgagcuca

SEQ ID NO: 405466 - RNA, 19 nt, Artificial Sequence
  Description of Artificial Sequence: Synthetic oligonucleotide
agcugaaccacagggaccu

SEQ ID NO: 405467 - RNA, 19 nt, Artificial Sequence
  Description of Artificial Sequence: Synthetic oligonucleotide
aguugagcagaucgggcgu

SEQ ID NO: 405468 - RNA, 19 nt, Artificial Sequence
  Description of Artificial Sequence: Synthetic oligonucleotide
aagaaggugcaagguaaga

SEQ ID NO: 405469 - RNA, 19 nt, Artificial Sequence
  Description of Artificial Sequence: Synthetic oligonucleotide
gacccuguuggagacuccg

SEQ ID NO: 405470 - RNA, 19 nt, Artificial Sequence
  Description of Artificial Sequence: Synthetic oligonucleotide
ucgaggcccaucaccacug

SEQ ID NO: 405471 - RNA, 19 nt, Artificial Sequence
  Description of Artificial Sequence: Synthetic oligonucleotide
gagauccauccacucugcg

SEQ ID NO: 405472 - RNA, 19 nt, Artificial Sequence
  Description of Artificial Sequence: Synthetic oligonucleotide
uacugcauacucggugacg

SEQ ID NO: 405473 - RNA, 19 nt, Artificial Sequence
  Description of Artificial Sequence: Synthetic oligonucleotide
ccguguuuugcucaguucc

SEQ ID NO: 405474 - RNA, 19 nt, Artificial Sequence
  Description of Artificial Sequence: Synthetic oligonucleotide
ucgaucucacgcucugacc

SEQ ID NO: 405475 - RNA, 19 nt, Artificial Sequence
  Description of Artificial Sequence: Synthetic oligonucleotide
uaccucucagacagcaccu

SEQ ID NO: 405476 - RNA, 19 nt, Artificial Sequence
  Description of Artificial Sequence: Synthetic oligonucleotide
ucagagugcgcacgcgcug

SEQ ID NO: 405477 - RNA, 19 nt, Artificial Sequence
  Description of Artificial Sequence: Synthetic oligonucleotide
gguacuggaguucauucuc

SEQ ID NO: 405478 - RNA, 19 nt, Artificial Sequence
  Description of Artificial Sequence: Synthetic oligonucleotide
agcgccgcaggguaugcuc

SEQ ID NO: 405479 - RNA, 19 nt, Artificial Sequence
  Description of Artificial Sequence: Synthetic oligonucleotide
gguaagacccagugcgagg

SEQ ID NO: 405480 - RNA, 19 nt, Artificial Sequence
  Description of Artificial Sequence: Synthetic oligonucleotide
gaaguggagcgggucagag

SEQ ID NO: 405481 - RNA, 19 nt, Artificial Sequence
  Description of Artificial Sequence: Synthetic oligonucleotide
gaggcuggaauccgucagc

SEQ ID NO: 405482 - RNA, 19 nt, Artificial Sequence
  Description of Artificial Sequence: Synthetic oligonucleotide
cuccccuaucuucagggag

SEQ ID NO: 405483 - RNA, 19 nt, Artificial Sequence
  Description of Artificial Sequence: Synthetic oligonucleotide
ugguauggaucuggaagcc

SEQ ID NO: 405484 - RNA, 19 nt, Artificial Sequence
  Description of Artificial Sequence: Synthetic oligonucleotide
aaguggagcgggucagagu

SEQ ID NO: 405485 - RNA, 19 nt, Artificial Sequence
  Description of Artificial Sequence: Synthetic oligonucleotide
caggucgaucucaccaucc

SEQ ID NO: 405486 - RNA, 19 nt, Artificial Sequence
  Description of Artificial Sequence: Synthetic oligonucleotide
uccacguaguccagugacu

SEQ ID NO: 405487 - RNA, 19 nt, Artificial Sequence
  Description of Artificial Sequence: Synthetic oligonucleotide
uccgcagugugugugugug

SEQ ID NO: 405488 - RNA, 19 nt, Artificial Sequence
  Description of Artificial Sequence: Synthetic oligonucleotide
gagacuccguguuuugcuc

SEQ ID NO: 405489 - RNA, 19 nt, Artificial Sequence
  Description of Artificial Sequence: Synthetic oligonucleotide
caagguauaaacggcaucu

SEQ ID NO: 405490 - RNA, 19 nt, Artificial Sequence
  Description of Artificial Sequence: Synthetic oligonucleotide
gagucccuguaauauuuga

SEQ ID NO: 405491 - RNA, 19 nt, Artificial Sequence
  Description of Artificial Sequence: Synthetic oligonucleotide
agccaugcagcguguuuuc

SEQ ID NO: 405492 - RNA, 19 nt, Artificial Sequence
  Description of Artificial Sequence: Synthetic oligonucleotide
ugggaguaccucucagaca

SEQ ID NO: 405493 - RNA, 19 nt, Artificial Sequence
  Description of Artificial Sequence: Synthetic oligonucleotide
cgaucucacgcucugaccg

SEQ ID NO: 405494 - RNA, 19 nt, Artificial Sequence
  Description of Artificial Sequence: Synthetic oligonucleotide
cucugcgagggccaccccg

SEQ ID NO: 405495 - RNA, 19 nt, Artificial Sequence
  Description of Artificial Sequence: Synthetic oligonucleotide
guugcgcuguacugcauac

SEQ ID NO: 405496 - RNA, 19 nt, Artificial Sequence
  Description of Artificial Sequence: Synthetic oligonucleotide
acggucgaucuccucugac

SEQ ID NO: 405497 - RNA, 19 nt, Artificial Sequence
  Description of Artificial Sequence: Synthetic oligonucleotide
uguguguguguguguguac

SEQ ID NO: 405498 - RNA, 19 nt, Artificial Sequence
  Description of Artificial Sequence: Synthetic oligonucleotide
cacucgcuuauucucccgc

SEQ ID NO: 405499 - RNA, 19 nt, Artificial Sequence
  Description of Artificial Sequence: Synthetic oligonucleotide
cauccacucugcgagggcc

SEQ ID NO: 405500 - RNA, 19 nt, Artificial Sequence
  Description of Artificial Sequence: Synthetic oligonucleotide
cucgcuuauucucccgcag

SEQ ID NO: 405501 - RNA, 19 nt, Artificial Sequence
  Description of Artificial Sequence: Synthetic oligonucleotide
uguuuggguggacgcucag

SEQ ID NO: 405502 - RNA, 19 nt, Artificial Sequence
  Description of Artificial Sequence: Synthetic oligonucleotide
ccgacaagguauaaacggc

SEQ ID NO: 405503 - RNA, 19 nt, Artificial Sequence
  Description of Artificial Sequence: Synthetic oligonucleotide
aaacggcaucuuugguaug

SEQ ID NO: 405504 - RNA, 19 nt, Artificial Sequence
  Description of Artificial Sequence: Synthetic oligonucleotide
ugugugugugugugugugu

SEQ ID NO: 405505 - RNA, 19 nt, Artificial Sequence
  Description of Artificial Sequence: Synthetic oligonucleotide
ugggguuaauggagagagc

SEQ ID NO: 405506 - RNA, 19 nt, Artificial Sequence
  Description of Artificial Sequence: Synthetic oligonucleotide
uguguguguguguguacau

SEQ ID NO: 405507 - RNA, 19 nt, Artificial Sequence
  Description of Artificial Sequence: Synthetic oligonucleotide
ucauugccgacaagguaua

SEQ ID NO: 405508 - RNA, 19 nt, Artificial Sequence
  Description of Artificial Sequence: Synthetic oligonucleotide
gaggaauauggcuguucuc

SEQ ID NO: 405509 - RNA, 19 nt, Artificial Sequence
  Description of Artificial Sequence: Synthetic oligonucleotide
agcggcacucgcuuauucu

SEQ ID NO: 405510 - RNA, 19 nt, Artificial Sequence
  Description of Artificial Sequence: Synthetic oligonucleotide
gaguaccucucagacagca

SEQ ID NO: 405511 - RNA, 19 nt, Artificial Sequence
  Description of Artificial Sequence: Synthetic oligonucleotide
uggaagccauaguugcgcu

SEQ ID NO: 405512 - RNA, 19 nt, Artificial Sequence
  Description of Artificial Sequence: Synthetic oligonucleotide
aucacgugccggugugagg

SEQ ID NO: 405513 - RNA, 19 nt, Artificial Sequence
  Description of Artificial Sequence: Synthetic oligonucleotide
ggacucaaaccacuugcgc

SEQ ID NO: 405514 - RNA, 19 nt, Artificial Sequence
  Description of Artificial Sequence: Synthetic oligonucleotide
gauaaccucagagccuguc

SEQ ID NO: 405515 - RNA, 19 nt, Artificial Sequence
  Description of Artificial Sequence: Synthetic oligonucleotide
uucguagacggucgaucuc

SEQ ID NO: 405516 - RNA, 19 nt, Artificial Sequence
  Description of Artificial Sequence: Synthetic oligonucleotide
cugggcacggagagauugg

SEQ ID NO: 405517 - RNA, 19 nt, Artificial Sequence
  Description of Artificial Sequence: Synthetic oligonucleotide
acgagcucagauccgcagu

SEQ ID NO: 405518 - RNA, 19 nt, Artificial Sequence
  Description of Artificial Sequence: Synthetic oligonucleotide
gugugugugugugugugug

SEQ ID NO: 405519 - RNA, 19 nt, Artificial Sequence
  Description of Artificial Sequence: Synthetic oligonucleotide
cacguaguccagugacugc

SEQ ID NO: 405520 - RNA, 19 nt, Artificial Sequence
  Description of Artificial Sequence: Synthetic oligonucleotide
agugugugugugugugugu

SEQ ID NO: 405521 - RNA, 19 nt, Artificial Sequence
  Description of Artificial Sequence: Synthetic oligonucleotide
ugcucgggacucucgggcc

SEQ ID NO: 405522 - RNA, 19 nt, Artificial Sequence
  Description of Artificial Sequence: Synthetic oligonucleotide
auccauccacucugcgagg

SEQ ID NO: 405523 - RNA, 19 nt, Artificial Sequence
  Description of Artificial Sequence: Synthetic oligonucleotide
gaucgggcgucauggcggc

SEQ ID NO: 405524 - RNA, 19 nt, Artificial Sequence
  Description of Artificial Sequence: Synthetic oligonucleotide
aguugcgcuguacugcaua

SEQ ID NO: 405525 - RNA, 19 nt, Artificial Sequence
  Description of Artificial Sequence: Synthetic oligonucleotide
acucgcuuauucucccgca

SEQ ID NO: 405526 - RNA, 19 nt, Artificial Sequence
  Description of Artificial Sequence: Synthetic oligonucleotide
gagcugaaccacagggacc

SEQ ID NO: 405527 - RNA, 19 nt, Artificial Sequence
  Description of Artificial Sequence: Synthetic oligonucleotide
ucacgcucugaccgugucu

SEQ ID NO: 405528 - RNA, 19 nt, Artificial Sequence
  Description of Artificial Sequence: Synthetic oligonucleotide
aagcuucguagacggucga

SEQ ID NO: 405529 - RNA, 19 nt, Artificial Sequence
  Description of Artificial Sequence: Synthetic oligonucleotide
cagugugugugugugugug

SEQ ID NO: 405530 - RNA, 19 nt, Artificial Sequence
  Description of Artificial Sequence: Synthetic oligonucleotide
auugccgacaagguauaaa

SEQ ID NO: 405531 - RNA, 19 nt, Artificial Sequence
  Description of Artificial Sequence: Synthetic oligonucleotide
agccauaguugcgcuguac

SEQ ID NO: 405532 - RNA, 19 nt, Artificial Sequence
  Description of Artificial Sequence: Synthetic oligonucleotide
augcuucuagcugggcacg

SEQ ID NO: 405533 - RNA, 19 nt, Artificial Sequence
  Description of Artificial Sequence: Synthetic oligonucleotide
acucagccaagcuguuucu

SEQ ID NO: 405534 - RNA, 19 nt, Artificial Sequence
  Description of Artificial Sequence: Synthetic oligonucleotide
ucccuucuugaaguugagc

SEQ ID NO: 405535 - RNA, 19 nt, Artificial Sequence
  Description of Artificial Sequence: Synthetic oligonucleotide
cacucugcgagggccaccc

SEQ ID NO: 405536 - RNA, 19 nt, Artificial Sequence
  Description of Artificial Sequence: Synthetic oligonucleotide
cuguucuccuggagucugg

SEQ ID NO: 405537 - RNA, 19 nt, Artificial Sequence
  Description of Artificial Sequence: Synthetic oligonucleotide
ucagauccgcagugugugu

SEQ ID NO: 405538 - RNA, 19 nt, Artificial Sequence
  Description of Artificial Sequence: Synthetic oligonucleotide
cgcuguacugcauacucgg

SEQ ID NO: 405539 - RNA, 19 nt, Artificial Sequence
  Description of Artificial Sequence: Synthetic oligonucleotide
cagggaccucuacucagcc

SEQ ID NO: 405540 - RNA, 19 nt, Artificial Sequence
  Description of Artificial Sequence: Synthetic oligonucleotide
gggaccucuacucagccaa

SEQ ID NO: 405541 - RNA, 19 nt, Artificial Sequence
  Description of Artificial Sequence: Synthetic oligonucleotide
ucacugagucggcucugcu

SEQ ID NO: 405542 - RNA, 19 nt, Artificial Sequence
  Description of Artificial Sequence: Synthetic oligonucleotide
caucacgugccggugugag

SEQ ID NO: 405543 - RNA, 19 nt, Artificial Sequence
  Description of Artificial Sequence: Synthetic oligonucleotide
ccgagauccauccacucug

SEQ ID NO: 405544 - RNA, 19 nt, Artificial Sequence
  Description of Artificial Sequence: Synthetic oligonucleotide
uacuggaguucauucucuu

SEQ ID NO: 405545 - RNA, 19 nt, Artificial Sequence
  Description of Artificial Sequence: Synthetic oligonucleotide
ggcgaugaagcuucguaga

SEQ ID NO: 405546 - RNA, 19 nt, Artificial Sequence
  Description of Artificial Sequence: Synthetic oligonucleotide
gagcagaucgggcgucaug

SEQ ID NO: 405547 - RNA, 19 nt, Artificial Sequence
  Description of Artificial Sequence: Synthetic oligonucleotide
ggucagagugcgcacgcgc

SEQ ID NO: 405548 - RNA, 19 nt, Artificial Sequence
  Description of Artificial Sequence: Synthetic oligonucleotide
cagucuuccugagagccuc

SEQ ID NO: 405549 - RNA, 19 nt, Artificial Sequence
  Description of Artificial Sequence: Synthetic oligonucleotide
guguguguguguguacaug

SEQ ID NO: 405550 - RNA, 19 nt, Artificial Sequence
  Description of Artificial Sequence: Synthetic oligonucleotide
gcguguuuuccuuauugca

SEQ ID NO: 405551 - RNA, 19 nt, Artificial Sequence
  Description of Artificial Sequence: Synthetic oligonucleotide
guaugcucgcgcuccucug

SEQ ID NO: 405552 - RNA, 19 nt, Artificial Sequence
  Description of Artificial Sequence: Synthetic oligonucleotide
cuucguagacggucgaucu

SEQ ID NO: 405553 - RNA, 19 nt, Artificial Sequence
  Description of Artificial Sequence: Synthetic oligonucleotide
agauugacauccaucccuu

SEQ ID NO: 405554 - RNA, 19 nt, Artificial Sequence
  Description of Artificial Sequence: Synthetic oligonucleotide
agacccagugcgagggacg

SEQ ID NO: 405555 - RNA, 19 nt, Artificial Sequence
  Description of Artificial Sequence: Synthetic oligonucleotide
guguguguguguguguaca

SEQ ID NO: 405556 - RNA, 19 nt, Artificial Sequence
  Description of Artificial Sequence: Synthetic oligonucleotide
guacugcauacucggugac

SEQ ID NO: 405557 - RNA, 19 nt, Artificial Sequence
  Description of Artificial Sequence: Synthetic oligonucleotide
ucaacucacucuggcccug

SEQ ID NO: 405558 - RNA, 19 nt, Artificial Sequence
  Description of Artificial Sequence: Synthetic oligonucleotide
gucauggcggcgccccggg

SEQ ID NO: 405559 - RNA, 19 nt, Artificial Sequence
  Description of Artificial Sequence: Synthetic oligonucleotide
acgucugugcaggagcgca

SEQ ID NO: 405560 - RNA, 19 nt, Artificial Sequence
  Description of Artificial Sequence: Synthetic oligonucleotide
gagcguugcgccagguccc

SEQ ID NO: 405561 - RNA, 19 nt, Artificial Sequence
  Description of Artificial Sequence: Synthetic oligonucleotide
cagauccgcagugugugug

SEQ ID NO: 405562 - RNA, 19 nt, Artificial Sequence
  Description of Artificial Sequence: Synthetic oligonucleotide
ggaggaauauggcuguucu

SEQ ID NO: 405563 - RNA, 19 nt, Artificial Sequence
  Description of Artificial Sequence: Synthetic oligonucleotide
agccuccaugcuucuagcu

SEQ ID NO: 405564 - RNA, 19 nt, Artificial Sequence
  Description of Artificial Sequence: Synthetic oligonucleotide
cccugcgaggcgaugaagc

SEQ ID NO: 405565 - RNA, 19 nt, Artificial Sequence
  Description of Artificial Sequence: Synthetic oligonucleotide
cuuugguauggaucuggaa

SEQ ID NO: 405566 - RNA, 19 nt, Artificial Sequence
  Description of Artificial Sequence: Synthetic oligonucleotide
acgcucagaaguggagcgg

SEQ ID NO: 405567 - RNA, 19 nt, Artificial Sequence
  Description of Artificial Sequence: Synthetic oligonucleotide
ucucacgcucugaccgugu

SEQ ID NO: 405568 - RNA, 19 nt, Artificial Sequence
  Description of Artificial Sequence: Synthetic oligonucleotide
ugggcacggagagauugga

SEQ ID NO: 405569 - RNA, 19 nt, Artificial Sequence
  Description of Artificial Sequence: Synthetic oligonucleotide
ccucuacucagccaagcug

SEQ ID NO: 405570 - RNA, 19 nt, Artificial Sequence
  Description of Artificial Sequence: Synthetic oligonucleotide
aaucccgaagaaggugcaa

SEQ ID NO: 405571 - RNA, 19 nt, Artificial Sequence
  Description of Artificial Sequence: Synthetic oligonucleotide
ucgggcgucauggcggcgc

SEQ ID NO: 405572 - RNA, 19 nt, Artificial Sequence
  Description of Artificial Sequence: Synthetic oligonucleotide
agccucaauccaguuccuc

SEQ ID NO: 405573 - RNA, 19 nt, Artificial Sequence
  Description of Artificial Sequence: Synthetic oligonucleotide
ccggccgauaaccucagag

SEQ ID NO: 405574 - RNA, 19 nt, Artificial Sequence
  Description of Artificial Sequence: Synthetic oligonucleotide
gggguuaauggagagagcu

SEQ ID NO: 405575 - RNA, 19 nt, Artificial Sequence
  Description of Artificial Sequence: Synthetic oligonucleotide
cucagaaguggagcggguc

SEQ ID NO: 405576 - RNA, 19 nt, Artificial Sequence
  Description of Artificial Sequence: Synthetic oligonucleotide
cucacugagucggcucugc

SEQ ID NO: 405577 - RNA, 19 nt, Artificial Sequence
  Description of Artificial Sequence: Synthetic oligonucleotide
cucugaccgugucuugaug

SEQ ID NO: 405578 - RNA, 19 nt, Artificial Sequence
  Description of Artificial Sequence: Synthetic oligonucleotide
gguggacgcucagaagugg

SEQ ID NO: 405579 - RNA, 19 nt, Artificial Sequence
  Description of Artificial Sequence: Synthetic oligonucleotide
guguguguguguacaugug

SEQ ID NO: 405580 - RNA, 19 nt, Artificial Sequence
  Description of Artificial Sequence: Synthetic oligonucleotide
ugccgagauccauccacuc

SEQ ID NO: 405581 - RNA, 19 nt, Artificial Sequence
  Description of Artificial Sequence: Synthetic oligonucleotide
cuucgaggcccaucaccac

SEQ ID NO: 405582 - RNA, 19 nt, Artificial Sequence
  Description of Artificial Sequence: Synthetic oligonucleotide
gcgaugaagcuucguagac

SEQ ID NO: 405583 - RNA, 19 nt, Artificial Sequence
  Description of Artificial Sequence: Synthetic oligonucleotide
cucagagcguugcgccagg

SEQ ID NO: 405584 - RNA, 19 nt, Artificial Sequence
  Description of Artificial Sequence: Synthetic oligonucleotide
ucggcgguggagucccugu

SEQ ID NO: 405585 - RNA, 19 nt, Artificial Sequence
  Description of Artificial Sequence: Synthetic oligonucleotide
gcugauccaucacgugccg

SEQ ID NO: 405586 - RNA, 19 nt, Artificial Sequence
  Description of Artificial Sequence: Synthetic oligonucleotide
caucccggaggcacugcac

SEQ ID NO: 405587 - RNA, 19 nt, Artificial Sequence
  Description of Artificial Sequence: Synthetic oligonucleotide
ggacgcucagaaguggagc

SEQ ID NO: 405588 - RNA, 19 nt, Artificial Sequence
  Description of Artificial Sequence: Synthetic oligonucleotide
ccgauaaccucagagccug

SEQ ID NO: 405589 - RNA, 19 nt, Artificial Sequence
  Description of Artificial Sequence: Synthetic oligonucleotide
ggaauccgucagcacaaac

SEQ ID NO: 405590 - RNA, 19 nt, Artificial Sequence
  Description of Artificial Sequence: Synthetic oligonucleotide
acucugcgagggccacccc

SEQ ID NO: 405591 - RNA, 19 nt, Artificial Sequence
  Description of Artificial Sequence: Synthetic oligonucleotide
agcgcuuguccuugugcau

SEQ ID NO: 405592 - RNA, 19 nt, Artificial Sequence
  Description of Artificial Sequence: Synthetic oligonucleotide
ccuucgaggcccaucacca

SEQ ID NO: 405593 - RNA, 19 nt, Artificial Sequence
  Description of Artificial Sequence: Synthetic oligonucleotide
cccgguucagcucuucuug

SEQ ID NO: 405594 - RNA, 19 nt, Artificial Sequence
  Description of Artificial Sequence: Synthetic oligonucleotide
aucucacgcucugaccgug

SEQ ID NO: 405595 - RNA, 19 nt, Artificial Sequence
  Description of Artificial Sequence: Synthetic oligonucleotide
gacaucuggggcugaaguu

SEQ ID NO: 405596 - RNA, 19 nt, Artificial Sequence
  Description of Artificial Sequence: Synthetic oligonucleotide
gacaagguauaaacggcau

SEQ ID NO: 405597 - RNA, 19 nt, Artificial Sequence
  Description of Artificial Sequence: Synthetic oligonucleotide
ccgugguugagcagggcag

SEQ ID NO: 405598 - RNA, 19 nt, Artificial Sequence
  Description of Artificial Sequence: Synthetic oligonucleotide
auccgcagugugugugugu

SEQ ID NO: 405599 - RNA, 19 nt, Artificial Sequence
  Description of Artificial Sequence: Synthetic oligonucleotide
ugcccugcgaggcgaugaa

SEQ ID NO: 405600 - RNA, 19 nt, Artificial Sequence
  Description of Artificial Sequence: Synthetic oligonucleotide
cagcccgccgccccucucg

SEQ ID NO: 405601 - RNA, 19 nt, Artificial Sequence
  Description of Artificial Sequence: Synthetic oligonucleotide
agcguugcgccaggucccg

SEQ ID NO: 405602 - RNA, 19 nt, Artificial Sequence
  Description of Artificial Sequence: Synthetic oligonucleotide
gucaacucacucuggcccu

SEQ ID NO: 405603 - RNA, 19 nt, Artificial Sequence
  Description of Artificial Sequence: Synthetic oligonucleotide
gacgucugugcaggagcgc

SEQ ID NO: 405604 - RNA, 19 nt, Artificial Sequence
  Description of Artificial Sequence: Synthetic oligonucleotide
cgaugaagcuucguagacg

SEQ ID NO: 405605 - RNA, 19 nt, Artificial Sequence
  Description of Artificial Sequence: Synthetic oligonucleotide
gaucucacgcucugaccgu

SEQ ID NO: 405606 - RNA, 19 nt, Artificial Sequence
  Description of Artificial Sequence: Synthetic oligonucleotide
uugcgcuguacugcauacu

SEQ ID NO: 405607 - RNA, 19 nt, Artificial Sequence
  Description of Artificial Sequence: Synthetic oligonucleotide
accccggccgauaaccuca

SEQ ID NO: 405608 - RNA, 19 nt, Artificial Sequence
  Description of Artificial Sequence: Synthetic oligonucleotide
gggacgagcucagauccgc

SEQ ID NO: 405609 - RNA, 19 nt, Artificial Sequence
  Description of Artificial Sequence: Synthetic oligonucleotide
agggacgagcucagauccg

SEQ ID NO: 405610 - RNA, 19 nt, Artificial Sequence
  Description of Artificial Sequence: Synthetic oligonucleotide
cggccgauaaccucagagc

SEQ ID NO: 405611 - RNA, 19 nt, Artificial Sequence
  Description of Artificial Sequence: Synthetic oligonucleotide
cucacgcucugaccguguc

SEQ ID NO: 405612 - RNA, 19 nt, Artificial Sequence
  Description of Artificial Sequence: Synthetic oligonucleotide
agugagcggcacucgcuua

SEQ ID NO: 405613 - RNA, 19 nt, Artificial Sequence
  Description of Artificial Sequence: Synthetic oligonucleotide
gacccagugcgagggacga

SEQ ID NO: 405614 - RNA, 19 nt, Artificial Sequence
  Description of Artificial Sequence: Synthetic oligonucleotide
gcggcacucgcuuauucuc

SEQ ID NO: 405615 - RNA, 19 nt, Artificial Sequence
  Description of Artificial Sequence: Synthetic oligonucleotide
ccacguaguccagugacug

SEQ ID NO: 405616 - RNA, 19 nt, Artificial Sequence
  Description of Artificial Sequence: Synthetic oligonucleotide
ggaauauggcuguucuccu

SEQ ID NO: 405617 - RNA, 19 nt, Artificial Sequence
  Description of Artificial Sequence: Synthetic oligonucleotide
cagagcguugcgccagguc

SEQ ID NO: 405618 - RNA, 19 nt, Artificial Sequence
  Description of Artificial Sequence: Synthetic oligonucleotide
gccgcuguagcucccguuc

SEQ ID NO: 405619 - RNA, 19 nt, Artificial Sequence
  Description of Artificial Sequence: Synthetic oligonucleotide
cccuguuggagacuccgug

SEQ ID NO: 405620 - RNA, 19 nt, Artificial Sequence
  Description of Artificial Sequence: Synthetic oligonucleotide
gugugugugugugugugua

SEQ ID NO: 405621 - RNA, 19 nt, Artificial Sequence
  Description of Artificial Sequence: Synthetic oligonucleotide
gcgugcauguguguagcag

SEQ ID NO: 405622 - RNA, 19 nt, Artificial Sequence
  Description of Artificial Sequence: Synthetic oligonucleotide
gcuucguagacggucgauc

SEQ ID NO: 405623 - RNA, 19 nt, Artificial Sequence
  Description of Artificial Sequence: Synthetic oligonucleotide
cacaagagcuccucucacu

SEQ ID NO: 405624 - RNA, 19 nt, Artificial Sequence
  Description of Artificial Sequence: Synthetic oligonucleotide
ggaugcccgaggucauugc

SEQ ID NO: 405625 - RNA, 19 nt, Artificial Sequence
  Description of Artificial Sequence: Synthetic oligonucleotide
cacggagagauuggaccuc

SEQ ID NO: 405626 - RNA, 19 nt, Artificial Sequence
  Description of Artificial Sequence: Synthetic oligonucleotide
gccaccccggccgauaacc

SEQ ID NO: 405627 - RNA, 19 nt, Artificial Sequence
  Description of Artificial Sequence: Synthetic oligonucleotide
guggacgcucagaagugga

SEQ ID NO: 405628 - RNA, 19 nt, Artificial Sequence
  Description of Artificial Sequence: Synthetic oligonucleotide
cucgggacucucgggccgg

SEQ ID NO: 405629 - RNA, 19 nt, Artificial Sequence
  Description of Artificial Sequence: Synthetic oligonucleotide
gcuguccguggacucaaac

SEQ ID NO: 405630 - RNA, 19 nt, Artificial Sequence
  Description of Artificial Sequence: Synthetic oligonucleotide
gguggagucccuguaauau

SEQ ID NO: 405631 - RNA, 19 nt, Artificial Sequence
  Description of Artificial Sequence: Synthetic oligonucleotide
uaguugcgcuguacugcau

SEQ ID NO: 405632 - RNA, 19 nt, Artificial Sequence
  Description of Artificial Sequence: Synthetic oligonucleotide
cgacaagguauaaacggca

SEQ ID NO: 405633 - RNA, 19 nt, Artificial Sequence
  Description of Artificial Sequence: Synthetic oligonucleotide
cauccugguacuuccccgu

SEQ ID NO: 405634 - RNA, 19 nt, Artificial Sequence
  Description of Artificial Sequence: Synthetic oligonucleotide
uggaauccgucagcacaaa

SEQ ID NO: 405635 - RNA, 19 nt, Artificial Sequence
  Description of Artificial Sequence: Synthetic oligonucleotide
gguauggaucuggaagcca

SEQ ID NO: 405636 - RNA, 19 nt, Artificial Sequence
  Description of Artificial Sequence: Synthetic oligonucleotide
caccccggccgauaaccuc

SEQ ID NO: 405637 - RNA, 19 nt, Artificial Sequence
  Description of Artificial Sequence: Synthetic oligonucleotide
ucagagcguugcgccaggu

SEQ ID NO: 405638 - RNA, 19 nt, Artificial Sequence
  Description of Artificial Sequence: Synthetic oligonucleotide
ggguuaauggagagagcuc

SEQ ID NO: 405639 - RNA, 19 nt, Artificial Sequence
  Description of Artificial Sequence: Synthetic oligonucleotide
gccccuucgaggcccauca

SEQ ID NO: 405640 - RNA, 19 nt, Artificial Sequence
  Description of Artificial Sequence: Synthetic oligonucleotide
uccgccaggcugcgcucac

SEQ ID NO: 405641 - RNA, 19 nt, Artificial Sequence
  Description of Artificial Sequence: Synthetic oligonucleotide
acgcucugaccgugucuug

SEQ ID NO: 405642 - RNA, 19 nt, Artificial Sequence
  Description of Artificial Sequence: Synthetic oligonucleotide
caugcagcguguuuuccuu

SEQ ID NO: 405643 - RNA, 19 nt, Artificial Sequence
  Description of Artificial Sequence: Synthetic oligonucleotide
cgagggacgagcucagauc

SEQ ID NO: 405644 - RNA, 19 nt, Artificial Sequence
  Description of Artificial Sequence: Synthetic oligonucleotide
gcacggagagauuggaccu

SEQ ID NO: 405645 - RNA, 19 nt, Artificial Sequence
  Description of Artificial Sequence: Synthetic oligonucleotide
ggguggacgcucagaagug

SEQ ID NO: 405646 - RNA, 19 nt, Artificial Sequence
  Description of Artificial Sequence: Synthetic oligonucleotide
gguaugcucgcgcuccucu

SEQ ID NO: 405647 - RNA, 19 nt, Artificial Sequence
  Description of Artificial Sequence: Synthetic oligonucleotide
ugagcagaucgggcgucau

SEQ ID NO: 405648 - RNA, 19 nt, Artificial Sequence
  Description of Artificial Sequence: Synthetic oligonucleotide
ugccggugugaggacucca

SEQ ID NO: 405649 - RNA, 19 nt, Artificial Sequence
  Description of Artificial Sequence: Synthetic oligonucleotide
agcuucguagacggucgau

SEQ ID NO: 405650 - RNA, 19 nt, Artificial Sequence
  Description of Artificial Sequence: Synthetic oligonucleotide
uccccgugaagcgcuuguc

SEQ ID NO: 405651 - RNA, 19 nt, Artificial Sequence
  Description of Artificial Sequence: Synthetic oligonucleotide
cacgugccggugugaggac

SEQ ID NO: 405652 - RNA, 19 nt, Artificial Sequence
  Description of Artificial Sequence: Synthetic oligonucleotide
cugcgcccacagcuauugc

SEQ ID NO: 405653 - RNA, 19 nt, Artificial Sequence
  Description of Artificial Sequence: Synthetic oligonucleotide
cagugcgagggacgagcuc

SEQ ID NO: 405654 - RNA, 19 nt, Artificial Sequence
  Description of Artificial Sequence: Synthetic oligonucleotide
cgcucagaaguggagcggg

SEQ ID NO: 405655 - RNA, 19 nt, Artificial Sequence
  Description of Artificial Sequence: Synthetic oligonucleotide
ucgggacucucgggccggg

SEQ ID NO: 405656 - RNA, 19 nt, Artificial Sequence
  Description of Artificial Sequence: Synthetic oligonucleotide
gugcgagggacgagcucag

SEQ ID NO: 405657 - RNA, 19 nt, Artificial Sequence
  Description of Artificial Sequence: Synthetic oligonucleotide
acgugccggugugaggacu

SEQ ID NO: 405658 - RNA, 19 nt, Artificial Sequence
  Description of Artificial Sequence: Synthetic oligonucleotide
gucagagugcgcacgcgcu

SEQ ID NO: 405659 - RNA, 19 nt, Artificial Sequence
  Description of Artificial Sequence: Synthetic oligonucleotide
guggagucccuguaauauu

SEQ ID NO: 405660 - RNA, 19 nt, Artificial Sequence
  Description of Artificial Sequence: Synthetic oligonucleotide
ggacucucgggccgggcuc

SEQ ID NO: 405661 - RNA, 19 nt, Artificial Sequence
  Description of Artificial Sequence: Synthetic oligonucleotide
ugagcggcacucgcuuauu

SEQ ID NO: 405662 - RNA, 19 nt, Artificial Sequence
  Description of Artificial Sequence: Synthetic oligonucleotide
cugaaguuggacgcacagu

SEQ ID NO: 405663 - RNA, 19 nt, Artificial Sequence
  Description of Artificial Sequence: Synthetic oligonucleotide
cugcgagggccaccccggc

SEQ ID NO: 405664 - RNA, 19 nt, Artificial Sequence
  Description of Artificial Sequence: Synthetic oligonucleotide
gcgccgcaggguaugcucg

SEQ ID NO: 405665 - RNA, 19 nt, Artificial Sequence
  Description of Artificial Sequence: Synthetic oligonucleotide
gugagcggcacucgcuuau

SEQ ID NO: 405666 - RNA, 19 nt, Artificial Sequence
  Description of Artificial Sequence: Synthetic oligonucleotide
ccgaagaaggugcaaggua

SEQ ID NO: 405667 - RNA, 19 nt, Artificial Sequence
  Description of Artificial Sequence: Synthetic oligonucleotide
cgcagugugugugugugug

SEQ ID NO: 405668 - RNA, 19 nt, Artificial Sequence
  Description of Artificial Sequence: Synthetic oligonucleotide
ggcaccgauuuccaggcau

SEQ ID NO: 405669 - RNA, 19 nt, Artificial Sequence
  Description of Artificial Sequence: Synthetic oligonucleotide
ccccuaucuucagggagcc

SEQ ID NO: 405670 - RNA, 19 nt, Artificial Sequence
  Description of Artificial Sequence: Synthetic oligonucleotide
ggaccucuacucagccaag

SEQ ID NO: 405671 - RNA, 19 nt, Artificial Sequence
  Description of Artificial Sequence: Synthetic oligonucleotide
gcaggguaugcucgcgcuc

SEQ ID NO: 405672 - RNA, 19 nt, Artificial Sequence
  Description of Artificial Sequence: Synthetic oligonucleotide
acccuguuggagacuccgu

SEQ ID NO: 405673 - RNA, 19 nt, Artificial Sequence
  Description of Artificial Sequence: Synthetic oligonucleotide
cucggcgguggagucccug

SEQ ID NO: 405674 - RNA, 19 nt, Artificial Sequence
  Description of Artificial Sequence: Synthetic oligonucleotide
cugugagauguagccugga

SEQ ID NO: 405675 - RNA, 19 nt, Artificial Sequence
  Description of Artificial Sequence: Synthetic oligonucleotide
gccgagauccauccacucu

SEQ ID NO: 405676 - RNA, 19 nt, Artificial Sequence
  Description of Artificial Sequence: Synthetic oligonucleotide
acccagugcgagggacgag

SEQ ID NO: 405677 - RNA, 19 nt, Artificial Sequence
  Description of Artificial Sequence: Synthetic oligonucleotide
ccuguuggagacuccgugu

SEQ ID NO: 405678 - RNA, 19 nt, Artificial Sequence
  Description of Artificial Sequence: Synthetic oligonucleotide
ggaguaccucucagacagc

SEQ ID NO: 405679 - RNA, 19 nt, Artificial Sequence
  Description of Artificial Sequence: Synthetic oligonucleotide
aucgggcgucauggcggcg

SEQ ID NO: 405680 - RNA, 19 nt, Artificial Sequence
  Description of Artificial Sequence: Synthetic oligonucleotide
ccgcaggguaugcucgcgc

SEQ ID NO: 405681 - RNA, 19 nt, Artificial Sequence
  Description of Artificial Sequence: Synthetic oligonucleotide
gguccccggcgcucgcugc

SEQ ID NO: 405682 - RNA, 19 nt, Artificial Sequence
  Description of Artificial Sequence: Synthetic oligonucleotide
gggcacggagagauuggac

SEQ ID NO: 405683 - RNA, 19 nt, Artificial Sequence
  Description of Artificial Sequence: Synthetic oligonucleotide
gccgcaggguaugcucgcg

SEQ ID NO: 405684 - RNA, 19 nt, Artificial Sequence
  Description of Artificial Sequence: Synthetic oligonucleotide
cgucugugcaggagcgcag

SEQ ID NO: 405685 - RNA, 19 nt, Artificial Sequence
  Description of Artificial Sequence: Synthetic oligonucleotide
cauugccgacaagguauaa

SEQ ID NO: 405686 - RNA, 19 nt, Artificial Sequence
  Description of Artificial Sequence: Synthetic oligonucleotide
ccgccggcagccucaacuc

SEQ ID NO: 405687 - RNA, 19 nt, Artificial Sequence
  Description of Artificial Sequence: Synthetic oligonucleotide
cagugagcggcacucgcuu

SEQ ID NO: 405688 - RNA, 19 nt, Artificial Sequence
  Description of Artificial Sequence: Synthetic oligonucleotide
cgugccggugugaggacuc

SEQ ID NO: 405689 - RNA, 19 nt, Artificial Sequence
  Description of Artificial Sequence: Synthetic oligonucleotide
gcgucauggcggcgccccg

SEQ ID NO: 405690 - RNA, 19 nt, Artificial Sequence
  Description of Artificial Sequence: Synthetic oligonucleotide
cccgaggucauugccgaca

SEQ ID NO: 405691 - RNA, 19 nt, Artificial Sequence
  Description of Artificial Sequence: Synthetic oligonucleotide
ggacgagcucagauccgca

SEQ ID NO: 405692 - RNA, 19 nt, Artificial Sequence
  Description of Artificial Sequence: Synthetic oligonucleotide
gcucagauccgcagugugu

SEQ ID NO: 405693 - RNA, 19 nt, Artificial Sequence
  Description of Artificial Sequence: Synthetic oligonucleotide
gcagugugugugugugugu

SEQ ID NO: 405694 - RNA, 19 nt, Artificial Sequence
  Description of Artificial Sequence: Synthetic oligonucleotide
ccugcgaggcgaugaagcu

SEQ ID NO: 405695 - RNA, 19 nt, Artificial Sequence
  Description of Artificial Sequence: Synthetic oligonucleotide
gcgcccacagcuauugccu

SEQ ID NO: 405696 - RNA, 19 nt, Artificial Sequence
  Description of Artificial Sequence: Synthetic oligonucleotide
ccgaggucauugccgacaa

SEQ ID NO: 405697 - RNA, 19 nt, Artificial Sequence
  Description of Artificial Sequence: Synthetic oligonucleotide
gcccugcgaggcgaugaag

SEQ ID NO: 405698 - RNA, 19 nt, Artificial Sequence
  Description of Artificial Sequence: Synthetic oligonucleotide
cggaugcccgaggucauug

SEQ ID NO: 405699 - RNA, 19 nt, Artificial Sequence
  Description of Artificial Sequence: Synthetic oligonucleotide
ggagcgggucagagugcgc

SEQ ID NO: 405700 - RNA, 19 nt, Artificial Sequence
  Description of Artificial Sequence: Synthetic oligonucleotide
gcgaggcgaugaagcuucg

SEQ ID NO: 405701 - RNA, 19 nt, Artificial Sequence
  Description of Artificial Sequence: Synthetic oligonucleotide
gcgguggagucccuguaau

SEQ ID NO: 405702 - RNA, 19 nt, Artificial Sequence
  Description of Artificial Sequence: Synthetic oligonucleotide
gcagcgccgcaggguaugc

SEQ ID NO: 405703 - RNA, 19 nt, Artificial Sequence
  Description of Artificial Sequence: Synthetic oligonucleotide
ccccggccgauaaccucag

SEQ ID NO: 405704 - RNA, 19 nt, Artificial Sequence
  Description of Artificial Sequence: Synthetic oligonucleotide
cgucauggcggcgccccgg

SEQ ID NO: 405705 - RNA, 19 nt, Artificial Sequence
  Description of Artificial Sequence: Synthetic oligonucleotide
cuacucagccaagcuguuu

SEQ ID NO: 405706 - RNA, 19 nt, Artificial Sequence
  Description of Artificial Sequence: Synthetic oligonucleotide
gcuguacugcauacucggu

SEQ ID NO: 405707 - RNA, 19 nt, Artificial Sequence
  Description of Artificial Sequence: Synthetic oligonucleotide
ccucggcgcuggagggucc

SEQ ID NO: 405708 - RNA, 19 nt, Artificial Sequence
  Description of Artificial Sequence: Synthetic oligonucleotide
cugcgaggcgaugaagcuu

SEQ ID NO: 405709 - RNA, 19 nt, Artificial Sequence
  Description of Artificial Sequence: Synthetic oligonucleotide
ccgcuguagcucccguuca

SEQ ID NO: 405710 - RNA, 19 nt, Artificial Sequence
  Description of Artificial Sequence: Synthetic oligonucleotide
cccuaucuucagggagccc

SEQ ID NO: 405711 - RNA, 19 nt, Artificial Sequence
  Description of Artificial Sequence: Synthetic oligonucleotide
cgaggucauugccgacaag

SEQ ID NO: 405712 - RNA, 19 nt, Artificial Sequence
  Description of Artificial Sequence: Synthetic oligonucleotide
gcccgaggucauugccgac

SEQ ID NO: 405713 - RNA, 19 nt, Artificial Sequence
  Description of Artificial Sequence: Synthetic oligonucleotide
cucaaaccacuugcgccuu

SEQ ID NO: 405714 - RNA, 19 nt, Artificial Sequence
  Description of Artificial Sequence: Synthetic oligonucleotide
ccagugcgagggacgagcu

SEQ ID NO: 405715 - RNA, 19 nt, Artificial Sequence
  Description of Artificial Sequence: Synthetic oligonucleotide
ccccuucgaggcccaucac

SEQ ID NO: 405716 - RNA, 19 nt, Artificial Sequence
  Description of Artificial Sequence: Synthetic oligonucleotide
cgggcgucauggcggcgcc

SEQ ID NO: 405717 - RNA, 19 nt, Artificial Sequence
  Description of Artificial Sequence: Synthetic oligonucleotide
gcaccgauuuccaggcauu

SEQ ID NO: 405718 - RNA, 19 nt, Artificial Sequence
  Description of Artificial Sequence: Synthetic oligonucleotide
gccggugugaggacuccau

SEQ ID NO: 405719 - RNA, 19 nt, Artificial Sequence
  Description of Artificial Sequence: Synthetic oligonucleotide
ccaucacgugccgguguga

SEQ ID NO: 405720 - RNA, 19 nt, Artificial Sequence
  Description of Artificial Sequence: Synthetic oligonucleotide
cucggcgcuggaggguccu

SEQ ID NO: 405721 - RNA, 19 nt, Artificial Sequence
  Description of Artificial Sequence: Synthetic oligonucleotide
cgcgugcauguguguagca

SEQ ID NO: 405722 - RNA, 19 nt, Artificial Sequence
  Description of Artificial Sequence: Synthetic oligonucleotide
cugugcccugcgaggcgau

SEQ ID NO: 405723 - RNA, 19 nt, Artificial Sequence
  Description of Artificial Sequence: Synthetic oligonucleotide
gcguugcgccaggucccgc

SEQ ID NO: 405724 - RNA, 19 nt, Artificial Sequence
  Description of Artificial Sequence: Synthetic oligonucleotide
ccguggacucaaaccacuu

SEQ ID NO: 405725 - RNA, 19 nt, Artificial Sequence
  Description of Artificial Sequence: Synthetic oligonucleotide
cguugcgccaggucccgcu

SEQ ID NO: 405726 - RNA, 19 nt, Artificial Sequence
  Description of Artificial Sequence: Synthetic oligonucleotide
cacagccaugcagcguguu

SEQ ID NO: 405727 - RNA, 19 nt, Artificial Sequence
  Description of Artificial Sequence: Synthetic oligonucleotide
gcggggagcuugggguuaa

SEQ ID NO: 405728 - RNA, 19 nt, Artificial Sequence
  Description of Artificial Sequence: Synthetic oligonucleotide
gcacgcgcugcggggagcu

SEQ ID NO: 405729 - RNA, 19 nt, Artificial Sequence
  Description of Artificial Sequence: Synthetic oligonucleotide
cgagugcgcgugcaugugu

SEQ ID NO: 405730 - RNA, 19 nt, Artificial Sequence
  Description of Artificial Sequence: Synthetic oligonucleotide
ccaccccggccgauaaccu

SEQ ID NO: 405731 - RNA, 19 nt, Artificial Sequence
  Description of Artificial Sequence: Synthetic oligonucleotide
cagcgccgcaggguaugcu

SEQ ID NO: 405732 - RNA, 19 nt, Artificial Sequence
  Description of Artificial Sequence: Synthetic oligonucleotide
cccucggagccuccaugcu

SEQ ID NO: 405733 - RNA, 19 nt, Artificial Sequence
  Description of Artificial Sequence: Synthetic oligonucleotide
ccgccccucucggccgccg

SEQ ID NO: 405734 - RNA, 19 nt, Artificial Sequence
  Description of Artificial Sequence: Synthetic oligonucleotide
ccgcagugugugugugugu

SEQ ID NO: 405735 - RNA, 19 nt, Artificial Sequence
  Description of Artificial Sequence: Synthetic oligonucleotide
cggcaucuuugguauggau

SEQ ID NO: 405736 - RNA, 19 nt, Artificial Sequence
  Description of Artificial Sequence: Synthetic oligonucleotide
cgauaaccucagagccugu

SEQ ID NO: 405737 - RNA, 19 nt, Artificial Sequence
  Description of Artificial Sequence: Synthetic oligonucleotide
cccggccgauaaccucaga

SEQ ID NO: 405738 - RNA, 19 nt, Artificial Sequence
  Description of Artificial Sequence: Synthetic oligonucleotide
cgagggccaccccggccga

SEQ ID NO: 405739 - RNA, 19 nt, Artificial Sequence
  Description of Artificial Sequence: Synthetic oligonucleotide
ccggaugcccgaggucauu

SEQ ID NO: 405740 - RNA, 19 nt, Artificial Sequence
  Description of Artificial Sequence: Synthetic oligonucleotide
ugaaacauuacucagaccu

SEQ ID NO: 405741 - RNA, 19 nt, Artificial Sequence
  Description of Artificial Sequence: Synthetic oligonucleotide
uuuaauuuaguucacuuca

SEQ ID NO: 405742 - RNA, 19 nt, Artificial Sequence
  Description of Artificial Sequence: Synthetic oligonucleotide
acgacgaugauuuugauag

SEQ ID NO: 405743 - RNA, 19 nt, Artificial Sequence
  Description of Artificial Sequence: Synthetic oligonucleotide
uauaauaagagaaacugaa

SEQ ID NO: 405744 - RNA, 19 nt, Artificial Sequence
  Description of Artificial Sequence: Synthetic oligonucleotide
uguaucauuaaacaugcug

SEQ ID NO: 405745 - RNA, 19 nt, Artificial Sequence
  Description of Artificial Sequence: Synthetic oligonucleotide
ucuuaaucuaaacugaaac

SEQ ID NO: 405746 - RNA, 19 nt, Artificial Sequence
  Description of Artificial Sequence: Synthetic oligonucleotide
ucuacuaugaaccauugaa

SEQ ID NO: 405747 - RNA, 19 nt, Artificial Sequence
  Description of Artificial Sequence: Synthetic oligonucleotide
aauagcuccacauggagca

SEQ ID NO: 405748 - RNA, 19 nt, Artificial Sequence
  Description of Artificial Sequence: Synthetic oligonucleotide
guuuaugccaauuuacugg

SEQ ID NO: 405749 - RNA, 19 nt, Artificial Sequence
  Description of Artificial Sequence: Synthetic oligonucleotide
auacuaaccagacaucagc

SEQ ID NO: 405750 - RNA, 19 nt, Artificial Sequence
  Description of Artificial Sequence: Synthetic oligonucleotide
auaaguggcacauuucuac

SEQ ID NO: 405751 - RNA, 19 nt, Artificial Sequence
  Description of Artificial Sequence: Synthetic oligonucleotide
uaauguuggauguaaauca

SEQ ID NO: 405752 - RNA, 19 nt, Artificial Sequence
  Description of Artificial Sequence: Synthetic oligonucleotide
acuauaauaagagaaacug

SEQ ID NO: 405753 - RNA, 19 nt, Artificial Sequence
  Description of Artificial Sequence: Synthetic oligonucleotide
acugaaacauuacucagac

SEQ ID NO: 405754 - RNA, 19 nt, Artificial Sequence
  Description of Artificial Sequence: Synthetic oligonucleotide
auuuaguucacuucaacug

SEQ ID NO: 405755 - RNA, 19 nt, Artificial Sequence
  Description of Artificial Sequence: Synthetic oligonucleotide
uuucauaaguuaaaaguca

SEQ ID NO: 405756 - RNA, 19 nt, Artificial Sequence
  Description of Artificial Sequence: Synthetic oligonucleotide
aauuaaauggugaugucag

SEQ ID NO: 405757 - RNA, 19 nt, Artificial Sequence
  Description of Artificial Sequence: Synthetic oligonucleotide
ucaaaagcuagguugaaca

SEQ ID NO: 405758 - RNA, 19 nt, Artificial Sequence
  Description of Artificial Sequence: Synthetic oligonucleotide
uagauuucacguaacgacg

SEQ ID NO: 405759 - RNA, 19 nt, Artificial Sequence
  Description of Artificial Sequence: Synthetic oligonucleotide
agcauaaacguuuaagcag

SEQ ID NO: 405760 - RNA, 19 nt, Artificial Sequence
  Description of Artificial Sequence: Synthetic oligonucleotide
uaaacguuuaagcaguaga

SEQ ID NO: 405761 - RNA, 19 nt, Artificial Sequence
  Description of Artificial Sequence: Synthetic oligonucleotide
aacgcugcaguacgcaucc

SEQ ID NO: 405762 - RNA, 19 nt, Artificial Sequence
  Description of Artificial Sequence: Synthetic oligonucleotide
aaugacauacuaaccagac

SEQ ID NO: 405763 - RNA, 19 nt, Artificial Sequence
  Description of Artificial Sequence: Synthetic oligonucleotide
aaaauuaaauggugauguc

SEQ ID NO: 405764 - RNA, 19 nt, Artificial Sequence
  Description of Artificial Sequence: Synthetic oligonucleotide
acuccuacaucucauaauc

SEQ ID NO: 405765 - RNA, 19 nt, Artificial Sequence
  Description of Artificial Sequence: Synthetic oligonucleotide
aaucaauauaccuaauuuu

SEQ ID NO: 405766 - RNA, 19 nt, Artificial Sequence
  Description of Artificial Sequence: Synthetic oligonucleotide
aaacguuuaagcaguagac

SEQ ID NO: 405767 - RNA, 19 nt, Artificial Sequence
  Description of Artificial Sequence: Synthetic oligonucleotide
uugugauuaauuacuagca

SEQ ID NO: 405768 - RNA, 19 nt, Artificial Sequence
  Description of Artificial Sequence: Synthetic oligonucleotide
gaaauagugcucaagauca

SEQ ID NO: 405769 - RNA, 19 nt, Artificial Sequence
  Description of Artificial Sequence: Synthetic oligonucleotide
ugugauuaauuacuagcag

SEQ ID NO: 405770 - RNA, 19 nt, Artificial Sequence
  Description of Artificial Sequence: Synthetic oligonucleotide
uucgguaagguucacauuc

SEQ ID NO: 405771 - RNA, 19 nt, Artificial Sequence
  Description of Artificial Sequence: Synthetic oligonucleotide
acaauauugauauaaucaa

SEQ ID NO: 405772 - RNA, 19 nt, Artificial Sequence
  Description of Artificial Sequence: Synthetic oligonucleotide
auacccgucauauauuuuc

SEQ ID NO: 405773 - RNA, 19 nt, Artificial Sequence
  Description of Artificial Sequence: Synthetic oligonucleotide
aaauuaaauggugauguca

SEQ ID NO: 405774 - RNA, 19 nt, Artificial Sequence
  Description of Artificial Sequence: Synthetic oligonucleotide
uagcacuuacucuagaaag

SEQ ID NO: 405775 - RNA, 19 nt, Artificial Sequence
  Description of Artificial Sequence: Synthetic oligonucleotide
uuuaguucacuucaacugu

SEQ ID NO: 405776 - RNA, 19 nt, Artificial Sequence
  Description of Artificial Sequence: Synthetic oligonucleotide
uuggauuaagcaaagcacu

SEQ ID NO: 405777 - RNA, 19 nt, Artificial Sequence
  Description of Artificial Sequence: Synthetic oligonucleotide
uuucacguaacgacgauga

SEQ ID NO: 405778 - RNA, 19 nt, Artificial Sequence
  Description of Artificial Sequence: Synthetic oligonucleotide
uucgcguuauaguucaucg

SEQ ID NO: 405779 - RNA, 19 nt, Artificial Sequence
  Description of Artificial Sequence: Synthetic oligonucleotide
acaacuuacgaaaaguagg

SEQ ID NO: 405780 - RNA, 19 nt, Artificial Sequence
  Description of Artificial Sequence: Synthetic oligonucleotide
uaugugaaagacaauuuuc

SEQ ID NO: 405781 - RNA, 19 nt, Artificial Sequence
  Description of Artificial Sequence: Synthetic oligonucleotide
ugauuaauuacuagcagua

SEQ ID NO: 405782 - RNA, 19 nt, Artificial Sequence
  Description of Artificial Sequence: Synthetic oligonucleotide
ucuauaagacgguacaacu

SEQ ID NO: 405783 - RNA, 19 nt, Artificial Sequence
  Description of Artificial Sequence: Synthetic oligonucleotide
ugaaguuaaugguacaaac

SEQ ID NO: 405784 - RNA, 19 nt, Artificial Sequence
  Description of Artificial Sequence: Synthetic oligonucleotide
ucuccgcucuauaagacgg

SEQ ID NO: 405785 - RNA, 19 nt, Artificial Sequence
  Description of Artificial Sequence: Synthetic oligonucleotide
auuuucauaagucauccau

SEQ ID NO: 405786 - RNA, 19 nt, Artificial Sequence
  Description of Artificial Sequence: Synthetic oligonucleotide
uuagcaagccauuacacuc

SEQ ID NO: 405787 - RNA, 19 nt, Artificial Sequence
  Description of Artificial Sequence: Synthetic oligonucleotide
aucaucucuagauuucacg

SEQ ID NO: 405788 - RNA, 19 nt, Artificial Sequence
  Description of Artificial Sequence: Synthetic oligonucleotide
uauaagacgguacaacuua

SEQ ID NO: 405789 - RNA, 19 nt, Artificial Sequence
  Description of Artificial Sequence: Synthetic oligonucleotide
uuaacuggcuaucaucucu

SEQ ID NO: 405790 - RNA, 19 nt, Artificial Sequence
  Description of Artificial Sequence: Synthetic oligonucleotide
uacaacaucaugucaauau

SEQ ID NO: 405791 - RNA, 19 nt, Artificial Sequence
  Description of Artificial Sequence: Synthetic oligonucleotide
uuaaacaugcuguuggcaa

SEQ ID NO: 405792 - RNA, 19 nt, Artificial Sequence
  Description of Artificial Sequence: Synthetic oligonucleotide
uuacacacgacacaugaaa

SEQ ID NO: 405793 - RNA, 19 nt, Artificial Sequence
  Description of Artificial Sequence: Synthetic oligonucleotide
uucauaaguuaaaagucac

SEQ ID NO: 405794 - RNA, 19 nt, Artificial Sequence
  Description of Artificial Sequence: Synthetic oligonucleotide
auuaaauggugaugucagc

SEQ ID NO: 405795 - RNA, 19 nt, Artificial Sequence
  Description of Artificial Sequence: Synthetic oligonucleotide
cauuagaaugccauuuuag

SEQ ID NO: 405796 - RNA, 19 nt, Artificial Sequence
  Description of Artificial Sequence: Synthetic oligonucleotide
uagguaacgcugcaguacg

SEQ ID NO: 405797 - RNA, 19 nt, Artificial Sequence
  Description of Artificial Sequence: Synthetic oligonucleotide
uuacuagcaguacaacucc

SEQ ID NO: 405798 - RNA, 19 nt, Artificial Sequence
  Description of Artificial Sequence: Synthetic oligonucleotide
uuaagcaguagacucauuu

SEQ ID NO: 405799 - RNA, 19 nt, Artificial Sequence
  Description of Artificial Sequence: Synthetic oligonucleotide
uuaaauggugaugucagca

SEQ ID NO: 405800 - RNA, 19 nt, Artificial Sequence
  Description of Artificial Sequence: Synthetic oligonucleotide
cuuacgaaaaguagguaac

SEQ ID NO: 405801 - RNA, 19 nt, Artificial Sequence
  Description of Artificial Sequence: Synthetic oligonucleotide
uaaauggugaugucagcag

SEQ ID NO: 405802 - RNA, 19 nt, Artificial Sequence
  Description of Artificial Sequence: Synthetic oligonucleotide
ucauaaguuaaaagucacc

SEQ ID NO: 405803 - RNA, 19 nt, Artificial Sequence
  Description of Artificial Sequence: Synthetic oligonucleotide
uaaauagcacuuacucuag

SEQ ID NO: 405804 - RNA, 19 nt, Artificial Sequence
  Description of Artificial Sequence: Synthetic oligonucleotide
aaguagguaacgcugcagu

SEQ ID NO: 405805 - RNA, 19 nt, Artificial Sequence
  Description of Artificial Sequence: Synthetic oligonucleotide
uguacuggguaauuguaug

SEQ ID NO: 405806 - RNA, 19 nt, Artificial Sequence
  Description of Artificial Sequence: Synthetic oligonucleotide
uucauaucagacaaagcau

SEQ ID NO: 405807 - RNA, 19 nt, Artificial Sequence
  Description of Artificial Sequence: Synthetic oligonucleotide
auaaucccuuucuucacac

SEQ ID NO: 405808 - RNA, 19 nt, Artificial Sequence
  Description of Artificial Sequence: Synthetic oligonucleotide
uaauuguaugugauguuca

SEQ ID NO: 405809 - RNA, 19 nt, Artificial Sequence
  Description of Artificial Sequence: Synthetic oligonucleotide
ucuuaagcacaucuuaauc

SEQ ID NO: 405810 - RNA, 19 nt, Artificial Sequence
  Description of Artificial Sequence: Synthetic oligonucleotide
acuuacgaaaaguagguaa

SEQ ID NO: 405811 - RNA, 19 nt, Artificial Sequence
  Description of Artificial Sequence: Synthetic oligonucleotide
aagacgguacaacuuacga

SEQ ID NO: 405812 - RNA, 19 nt, Artificial Sequence
  Description of Artificial Sequence: Synthetic oligonucleotide
acuuacucuagaaagacug

SEQ ID NO: 405813 - RNA, 19 nt, Artificial Sequence
  Description of Artificial Sequence: Synthetic oligonucleotide
uaaucaaucucgaucucac

SEQ ID NO: 405814 - RNA, 19 nt, Artificial Sequence
  Description of Artificial Sequence: Synthetic oligonucleotide
gauccaauagugauguaag

SEQ ID NO: 405815 - RNA, 19 nt, Artificial Sequence
  Description of Artificial Sequence: Synthetic oligonucleotide
agugugaaguuaaugguac

SEQ ID NO: 405816 - RNA, 19 nt, Artificial Sequence
  Description of Artificial Sequence: Synthetic oligonucleotide
aaucaaucucgaucucacg

SEQ ID NO: 405817 - RNA, 19 nt, Artificial Sequence
  Description of Artificial Sequence: Synthetic oligonucleotide
uaacuauaauaagagaaac

SEQ ID NO: 405818 - RNA, 19 nt, Artificial Sequence
  Description of Artificial Sequence: Synthetic oligonucleotide
auuaccacuguuucuauau

SEQ ID NO: 405819 - RNA, 19 nt, Artificial Sequence
  Description of Artificial Sequence: Synthetic oligonucleotide
uaagacgguacaacuuacg

SEQ ID NO: 405820 - RNA, 19 nt, Artificial Sequence
  Description of Artificial Sequence: Synthetic oligonucleotide
gacgguacaacuuacgaaa

SEQ ID NO: 405821 - RNA, 19 nt, Artificial Sequence
  Description of Artificial Sequence: Synthetic oligonucleotide
caugucuuaugaaaauccc

SEQ ID NO: 405822 - RNA, 19 nt, Artificial Sequence
  Description of Artificial Sequence: Synthetic oligonucleotide
aaagcuagguugaacagga

SEQ ID NO: 405823 - RNA, 19 nt, Artificial Sequence
  Description of Artificial Sequence: Synthetic oligonucleotide
auccaauagugauguaagc

SEQ ID NO: 405824 - RNA, 19 nt, Artificial Sequence
  Description of Artificial Sequence: Synthetic oligonucleotide
aacuauaauaagagaaacu

SEQ ID NO: 405825 - RNA, 19 nt, Artificial Sequence
  Description of Artificial Sequence: Synthetic oligonucleotide
agccguugcuguuugaagg

SEQ ID NO: 405826 - RNA, 19 nt, Artificial Sequence
  Description of Artificial Sequence: Synthetic oligonucleotide
guucaaauaguacugucca

SEQ ID NO: 405827 - RNA, 19 nt, Artificial Sequence
  Description of Artificial Sequence: Synthetic oligonucleotide
ugggaucagauucauuggc

SEQ ID NO: 405828 - RNA, 19 nt, Artificial Sequence
  Description of Artificial Sequence: Synthetic oligonucleotide
uacuaugaaccauugaauu

SEQ ID NO: 405829 - RNA, 19 nt, Artificial Sequence
  Description of Artificial Sequence: Synthetic oligonucleotide
uacgcauccaaacaaugaa

SEQ ID NO: 405830 - RNA, 19 nt, Artificial Sequence
  Description of Artificial Sequence: Synthetic oligonucleotide
uguuuuaaguuaugugcca

SEQ ID NO: 405831 - RNA, 19 nt, Artificial Sequence
  Description of Artificial Sequence: Synthetic oligonucleotide
uccauauguaagaagcaaa

SEQ ID NO: 405832 - RNA, 19 nt, Artificial Sequence
  Description of Artificial Sequence: Synthetic oligonucleotide
cuuacucuagaaagacugg

SEQ ID NO: 405833 - RNA, 19 nt, Artificial Sequence
  Description of Artificial Sequence: Synthetic oligonucleotide
gaaaaguagguaacgcugc

SEQ ID NO: 405834 - RNA, 19 nt, Artificial Sequence
  Description of Artificial Sequence: Synthetic oligonucleotide
augucagcaguauuaccac

SEQ ID NO: 405835 - RNA, 19 nt, Artificial Sequence
  Description of Artificial Sequence: Synthetic oligonucleotide
aaaaguagguaacgcugca

SEQ ID NO: 405836 - RNA, 19 nt, Artificial Sequence
  Description of Artificial Sequence: Synthetic oligonucleotide
ugcaguacgcauccaaaca

SEQ ID NO: 405837 - RNA, 19 nt, Artificial Sequence
  Description of Artificial Sequence: Synthetic oligonucleotide
ucuaugcaucacaugaccu

SEQ ID NO: 405838 - RNA, 19 nt, Artificial Sequence
  Description of Artificial Sequence: Synthetic oligonucleotide
auuucuccgcucuauaaga

SEQ ID NO: 405839 - RNA, 19 nt, Artificial Sequence
  Description of Artificial Sequence: Synthetic oligonucleotide
aaugucaucaacacagcau

SEQ ID NO: 405840 - RNA, 19 nt, Artificial Sequence
  Description of Artificial Sequence: Synthetic oligonucleotide
guagacucauuucacauga

SEQ ID NO: 405841 - RNA, 19 nt, Artificial Sequence
  Description of Artificial Sequence: Synthetic oligonucleotide
uuaauuuaguucacuucaa

SEQ ID NO: 405842 - RNA, 19 nt, Artificial Sequence
  Description of Artificial Sequence: Synthetic oligonucleotide
auaugugaaagacaauuuu

SEQ ID NO: 405843 - RNA, 19 nt, Artificial Sequence
  Description of Artificial Sequence: Synthetic oligonucleotide
aagguaggcagcaccgugc

SEQ ID NO: 405844 - RNA, 19 nt, Artificial Sequence
  Description of Artificial Sequence: Synthetic oligonucleotide
uacucuagaaagacuggca

SEQ ID NO: 405845 - RNA, 19 nt, Artificial Sequence
  Description of Artificial Sequence: Synthetic oligonucleotide
uauuauccucaucaggguc

SEQ ID NO: 405846 - RNA, 19 nt, Artificial Sequence
  Description of Artificial Sequence: Synthetic oligonucleotide
ucaaucucgaucucacgga

SEQ ID NO: 405847 - RNA, 19 nt, Artificial Sequence
  Description of Artificial Sequence: Synthetic oligonucleotide
caagacgugggaaugucag

SEQ ID NO: 405848 - RNA, 19 nt, Artificial Sequence
  Description of Artificial Sequence: Synthetic oligonucleotide
aauuggcauagguauggga

SEQ ID NO: 405849 - RNA, 19 nt, Artificial Sequence
  Description of Artificial Sequence: Synthetic oligonucleotide
uccguuuucguccaucaaa

SEQ ID NO: 405850 - RNA, 19 nt, Artificial Sequence
  Description of Artificial Sequence: Synthetic oligonucleotide
uacucagaccuuuugauuu

SEQ ID NO: 405851 - RNA, 19 nt, Artificial Sequence
  Description of Artificial Sequence: Synthetic oligonucleotide
agacgugggaaugucagac

SEQ ID NO: 405852 - RNA, 19 nt, Artificial Sequence
  Description of Artificial Sequence: Synthetic oligonucleotide
uucuccgcucuauaagacg

SEQ ID NO: 405853 - RNA, 19 nt, Artificial Sequence
  Description of Artificial Sequence: Synthetic oligonucleotide
uuacucuagaaagacuggc

SEQ ID NO: 405854 - RNA, 19 nt, Artificial Sequence
  Description of Artificial Sequence: Synthetic oligonucleotide
cuuuacacacgacacauga

SEQ ID NO: 405855 - RNA, 19 nt, Artificial Sequence
  Description of Artificial Sequence: Synthetic oligonucleotide
cucuagauuucacguaacg

SEQ ID NO: 405856 - RNA, 19 nt, Artificial Sequence
  Description of Artificial Sequence: Synthetic oligonucleotide
uucguccaucaaaagaaug

SEQ ID NO: 405857 - RNA, 19 nt, Artificial Sequence
  Description of Artificial Sequence: Synthetic oligonucleotide
cauuaaacaugcuguuggc

SEQ ID NO: 405858 - RNA, 19 nt, Artificial Sequence
  Description of Artificial Sequence: Synthetic oligonucleotide
aacuuauguccugagaaau

SEQ ID NO: 405859 - RNA, 19 nt, Artificial Sequence
  Description of Artificial Sequence: Synthetic oligonucleotide
gauagaaauuagacagucc

SEQ ID NO: 405860 - RNA, 19 nt, Artificial Sequence
  Description of Artificial Sequence: Synthetic oligonucleotide
gugauguucaaauaguacu

SEQ ID NO: 405861 - RNA, 19 nt, Artificial Sequence
  Description of Artificial Sequence: Synthetic oligonucleotide
agaauaguuugagagaaaa

SEQ ID NO: 405862 - RNA, 19 nt, Artificial Sequence
  Description of Artificial Sequence: Synthetic oligonucleotide
aaaugacauacuaaccaga

SEQ ID NO: 405863 - RNA, 19 nt, Artificial Sequence
  Description of Artificial Sequence: Synthetic oligonucleotide
aucucuagauuucacguaa

SEQ ID NO: 405864 - RNA, 19 nt, Artificial Sequence
  Description of Artificial Sequence: Synthetic oligonucleotide
aaaguagguaacgcugcag

SEQ ID NO: 405865 - RNA, 19 nt, Artificial Sequence
  Description of Artificial Sequence: Synthetic oligonucleotide
aggagauggauccaauagu

SEQ ID NO: 405866 - RNA, 19 nt, Artificial Sequence
  Description of Artificial Sequence: Synthetic oligonucleotide
cacagcauaaacguuuaag

SEQ ID NO: 405867 - RNA, 19 nt, Artificial Sequence
  Description of Artificial Sequence: Synthetic oligonucleotide
guaauuguaugugauguuc

SEQ ID NO: 405868 - RNA, 19 nt, Artificial Sequence
  Description of Artificial Sequence: Synthetic oligonucleotide
aacucuaguguaucauuaa

SEQ ID NO: 405869 - RNA, 19 nt, Artificial Sequence
  Description of Artificial Sequence: Synthetic oligonucleotide
agcuagguugaacaggacu

SEQ ID NO: 405870 - RNA, 19 nt, Artificial Sequence
  Description of Artificial Sequence: Synthetic oligonucleotide
uuauacccgucauauauuu

SEQ ID NO: 405871 - RNA, 19 nt, Artificial Sequence
  Description of Artificial Sequence: Synthetic oligonucleotide
guguaaucaaucucgaucu

SEQ ID NO: 405872 - RNA, 19 nt, Artificial Sequence
  Description of Artificial Sequence: Synthetic oligonucleotide
uggguaauuguaugugaug

SEQ ID NO: 405873 - RNA, 19 nt, Artificial Sequence
  Description of Artificial Sequence: Synthetic oligonucleotide
uucuuaagcacaucuuaau

SEQ ID NO: 405874 - RNA, 19 nt, Artificial Sequence
  Description of Artificial Sequence: Synthetic oligonucleotide
augugaaagacaauuuuca

SEQ ID NO: 405875 - RNA, 19 nt, Artificial Sequence
  Description of Artificial Sequence: Synthetic oligonucleotide
aaguuaugugccaacuuca

SEQ ID NO: 405876 - RNA, 19 nt, Artificial Sequence
  Description of Artificial Sequence: Synthetic oligonucleotide
ucuagcauauauacugguu

SEQ ID NO: 405877 - RNA, 19 nt, Artificial Sequence
  Description of Artificial Sequence: Synthetic oligonucleotide
acaucucauaaucccuuuc

SEQ ID NO: 405878 - RNA, 19 nt, Artificial Sequence
  Description of Artificial Sequence: Synthetic oligonucleotide
auagcacuuacucuagaaa

SEQ ID NO: 405879 - RNA, 19 nt, Artificial Sequence
  Description of Artificial Sequence: Synthetic oligonucleotide
uccuucgcguuauaguuca

SEQ ID NO: 405880 - RNA, 19 nt, Artificial Sequence
  Description of Artificial Sequence: Synthetic oligonucleotide
aaccaaauuucaaaggguu

SEQ ID NO: 405881 - RNA, 19 nt, Artificial Sequence
  Description of Artificial Sequence: Synthetic oligonucleotide
uagaaauuagacaguccau

SEQ ID NO: 405882 - RNA, 19 nt, Artificial Sequence
  Description of Artificial Sequence: Synthetic oligonucleotide
gauuaauuacuagcaguac

SEQ ID NO: 405883 - RNA, 19 nt, Artificial Sequence
  Description of Artificial Sequence: Synthetic oligonucleotide
guaggcagcaccgugccgg

SEQ ID NO: 405884 - RNA, 19 nt, Artificial Sequence
  Description of Artificial Sequence: Synthetic oligonucleotide
uuuauacccgucauauauu

SEQ ID NO: 405885 - RNA, 19 nt, Artificial Sequence
  Description of Artificial Sequence: Synthetic oligonucleotide
aacgacgaugauuuugaua

SEQ ID NO: 405886 - RNA, 19 nt, Artificial Sequence
  Description of Artificial Sequence: Synthetic oligonucleotide
gcuacuaccuccuccaccc

SEQ ID NO: 405887 - RNA, 19 nt, Artificial Sequence
  Description of Artificial Sequence: Synthetic oligonucleotide
aaacaaugaaguccucauu

SEQ ID NO: 405888 - RNA, 19 nt, Artificial Sequence
  Description of Artificial Sequence: Synthetic oligonucleotide
acuagggucuccauuuaac

SEQ ID NO: 405889 - RNA, 19 nt, Artificial Sequence
  Description of Artificial Sequence: Synthetic oligonucleotide
uaugcaucacaugaccugu

SEQ ID NO: 405890 - RNA, 19 nt, Artificial Sequence
  Description of Artificial Sequence: Synthetic oligonucleotide
cacauugcccucaaaugac

SEQ ID NO: 405891 - RNA, 19 nt, Artificial Sequence
  Description of Artificial Sequence: Synthetic oligonucleotide
acaucuuaaucuaaacuga

SEQ ID NO: 405892 - RNA, 19 nt, Artificial Sequence
  Description of Artificial Sequence: Synthetic oligonucleotide
ucccauccaugaaauagug

SEQ ID NO: 405893 - RNA, 19 nt, Artificial Sequence
  Description of Artificial Sequence: Synthetic oligonucleotide
uggauuaagcaaagcacua

SEQ ID NO: 405894 - RNA, 19 nt, Artificial Sequence
  Description of Artificial Sequence: Synthetic oligonucleotide
auuggcauagguaugggau

SEQ ID NO: 405895 - RNA, 19 nt, Artificial Sequence
  Description of Artificial Sequence: Synthetic oligonucleotide
ggcucuaugcaucacauga

SEQ ID NO: 405896 - RNA, 19 nt, Artificial Sequence
  Description of Artificial Sequence: Synthetic oligonucleotide
agacaucagcauucaaaag

SEQ ID NO: 405897 - RNA, 19 nt, Artificial Sequence
  Description of Artificial Sequence: Synthetic oligonucleotide
agaaauuagacaguccaua

SEQ ID NO: 405898 - RNA, 19 nt, Artificial Sequence
  Description of Artificial Sequence: Synthetic oligonucleotide
cuagcaguacaacucccag

SEQ ID NO: 405899 - RNA, 19 nt, Artificial Sequence
  Description of Artificial Sequence: Synthetic oligonucleotide
agcacuagggucuccauuu

SEQ ID NO: 405900 - RNA, 19 nt, Artificial Sequence
  Description of Artificial Sequence: Synthetic oligonucleotide
uuucuccgcucuauaagac

SEQ ID NO: 405901 - RNA, 19 nt, Artificial Sequence
  Description of Artificial Sequence: Synthetic oligonucleotide
uuaguucacuucaacugua

SEQ ID NO: 405902 - RNA, 19 nt, Artificial Sequence
  Description of Artificial Sequence: Synthetic oligonucleotide
cucuauaagacgguacaac

SEQ ID NO: 405903 - RNA, 19 nt, Artificial Sequence
  Description of Artificial Sequence: Synthetic oligonucleotide
ucaacaaggagggacuuua

SEQ ID NO: 405904 - RNA, 19 nt, Artificial Sequence
  Description of Artificial Sequence: Synthetic oligonucleotide
agcaguagacucauuucac

SEQ ID NO: 405905 - RNA, 19 nt, Artificial Sequence
  Description of Artificial Sequence: Synthetic oligonucleotide
ucgguaagguucacauucc

SEQ ID NO: 405906 - RNA, 19 nt, Artificial Sequence
  Description of Artificial Sequence: Synthetic oligonucleotide
guaacgacgaugauuuuga

SEQ ID NO: 405907 - RNA, 19 nt, Artificial Sequence
  Description of Artificial Sequence: Synthetic oligonucleotide
gugauuaauuacuagcagu

SEQ ID NO: 405908 - RNA, 19 nt, Artificial Sequence
  Description of Artificial Sequence: Synthetic oligonucleotide
aauagugauguaagcaauu

SEQ ID NO: 405909 - RNA, 19 nt, Artificial Sequence
  Description of Artificial Sequence: Synthetic oligonucleotide
auguacaacaucaugucaa

SEQ ID NO: 405910 - RNA, 19 nt, Artificial Sequence
  Description of Artificial Sequence: Synthetic oligonucleotide
uaaacaugcuguuggcaau

SEQ ID NO: 405911 - RNA, 19 nt, Artificial Sequence
  Description of Artificial Sequence: Synthetic oligonucleotide
auuaaacaugcuguuggca

SEQ ID NO: 405912 - RNA, 19 nt, Artificial Sequence
  Description of Artificial Sequence: Synthetic oligonucleotide
aacuggcuaucaucucuag

SEQ ID NO: 405913 - RNA, 19 nt, Artificial Sequence
  Description of Artificial Sequence: Synthetic oligonucleotide
auaaacguuuaagcaguag

SEQ ID NO: 405914 - RNA, 19 nt, Artificial Sequence
  Description of Artificial Sequence: Synthetic oligonucleotide
agccugccgacccugacag

SEQ ID NO: 405915 - RNA, 19 nt, Artificial Sequence
  Description of Artificial Sequence: Synthetic oligonucleotide
agguggauuucugaauuuc

SEQ ID NO: 405916 - RNA, 19 nt, Artificial Sequence
  Description of Artificial Sequence: Synthetic oligonucleotide
uaauuacuagcaguacaac

SEQ ID NO: 405917 - RNA, 19 nt, Artificial Sequence
  Description of Artificial Sequence: Synthetic oligonucleotide
acucuaguguaucauuaaa

SEQ ID NO: 405918 - RNA, 19 nt, Artificial Sequence
  Description of Artificial Sequence: Synthetic oligonucleotide
uccauuuaacuggcuauca

SEQ ID NO: 405919 - RNA, 19 nt, Artificial Sequence
  Description of Artificial Sequence: Synthetic oligonucleotide
agacgguacaacuuacgaa

SEQ ID NO: 405920 - RNA, 19 nt, Artificial Sequence
  Description of Artificial Sequence: Synthetic oligonucleotide
uuacacuccuacaucucau

SEQ ID NO: 405921 - RNA, 19 nt, Artificial Sequence
  Description of Artificial Sequence: Synthetic oligonucleotide
aagacgugggaaugucaga

SEQ ID NO: 405922 - RNA, 19 nt, Artificial Sequence
  Description of Artificial Sequence: Synthetic oligonucleotide
uuacucagaccuuuugauu

SEQ ID NO: 405923 - RNA, 19 nt, Artificial Sequence
  Description of Artificial Sequence: Synthetic oligonucleotide
acaacucuaguguaucauu

SEQ ID NO: 405924 - RNA, 19 nt, Artificial Sequence
  Description of Artificial Sequence: Synthetic oligonucleotide
uagcaguuacaauauugau

SEQ ID NO: 405925 - RNA, 19 nt, Artificial Sequence
  Description of Artificial Sequence: Synthetic oligonucleotide
ucucuagauuucacguaac

SEQ ID NO: 405926 - RNA, 19 nt, Artificial Sequence
  Description of Artificial Sequence: Synthetic oligonucleotide
agaaagagaugcaggcuag

SEQ ID NO: 405927 - RNA, 19 nt, Artificial Sequence
  Description of Artificial Sequence: Synthetic oligonucleotide
gaauuggcauagguauggg

SEQ ID NO: 405928 - RNA, 19 nt, Artificial Sequence
  Description of Artificial Sequence: Synthetic oligonucleotide
uaacuggcuaucaucucua

SEQ ID NO: 405929 - RNA, 19 nt, Artificial Sequence
  Description of Artificial Sequence: Synthetic oligonucleotide
auuucacguaacgacgaug

SEQ ID NO: 405930 - RNA, 19 nt, Artificial Sequence
  Description of Artificial Sequence: Synthetic oligonucleotide
ucgcguuauaguucaucgc

SEQ ID NO: 405931 - RNA, 19 nt, Artificial Sequence
  Description of Artificial Sequence: Synthetic oligonucleotide
cauugcccucaaaugacug

SEQ ID NO: 405932 - RNA, 19 nt, Artificial Sequence
  Description of Artificial Sequence: Synthetic oligonucleotide
agaugcaggcuagcagucc

SEQ ID NO: 405933 - RNA, 19 nt, Artificial Sequence
  Description of Artificial Sequence: Synthetic oligonucleotide
uaacgcugcaguacgcauc

SEQ ID NO: 405934 - RNA, 19 nt, Artificial Sequence
  Description of Artificial Sequence: Synthetic oligonucleotide
agguucacauuccuuacuu

SEQ ID NO: 405935 - RNA, 19 nt, Artificial Sequence
  Description of Artificial Sequence: Synthetic oligonucleotide
cgaaaaguagguaacgcug

SEQ ID NO: 405936 - RNA, 19 nt, Artificial Sequence
  Description of Artificial Sequence: Synthetic oligonucleotide
cugaaacauuacucagacc

SEQ ID NO: 405937 - RNA, 19 nt, Artificial Sequence
  Description of Artificial Sequence: Synthetic oligonucleotide
ucacguaacgacgaugauu

SEQ ID NO: 405938 - RNA, 19 nt, Artificial Sequence
  Description of Artificial Sequence: Synthetic oligonucleotide
aguacgcauccaaacaaug

SEQ ID NO: 405939 - RNA, 19 nt, Artificial Sequence
  Description of Artificial Sequence: Synthetic oligonucleotide
uucggcucggccacgucca

SEQ ID NO: 405940 - RNA, 19 nt, Artificial Sequence
  Description of Artificial Sequence: Synthetic oligonucleotide
caacuuacgaaaaguaggu

SEQ ID NO: 405941 - RNA, 19 nt, Artificial Sequence
  Description of Artificial Sequence: Synthetic oligonucleotide
agcauaaguggcacauuuc

SEQ ID NO: 405942 - RNA, 19 nt, Artificial Sequence
  Description of Artificial Sequence: Synthetic oligonucleotide
agauuucacguaacgacga

SEQ ID NO: 405943 - RNA, 19 nt, Artificial Sequence
  Description of Artificial Sequence: Synthetic oligonucleotide
cacguaacgacgaugauuu

SEQ ID NO: 405944 - RNA, 19 nt, Artificial Sequence
  Description of Artificial Sequence: Synthetic oligonucleotide
caccucaacaaggagggac

SEQ ID NO: 405945 - RNA, 19 nt, Artificial Sequence
  Description of Artificial Sequence: Synthetic oligonucleotide
auccauauguaagaagcaa

SEQ ID NO: 405946 - RNA, 19 nt, Artificial Sequence
  Description of Artificial Sequence: Synthetic oligonucleotide
agcacuuacucuagaaaga

SEQ ID NO: 405947 - RNA, 19 nt, Artificial Sequence
  Description of Artificial Sequence: Synthetic oligonucleotide
aguccucuuuaaauagcac

SEQ ID NO: 405948 - RNA, 19 nt, Artificial Sequence
  Description of Artificial Sequence: Synthetic oligonucleotide
cuucggcucggccacgucc

SEQ ID NO: 405949 - RNA, 19 nt, Artificial Sequence
  Description of Artificial Sequence: Synthetic oligonucleotide
ucggccacguccagcuggg

SEQ ID NO: 405950 - RNA, 19 nt, Artificial Sequence
  Description of Artificial Sequence: Synthetic oligonucleotide
agaugccgaugccaauggg

SEQ ID NO: 405951 - RNA, 19 nt, Artificial Sequence
  Description of Artificial Sequence: Synthetic oligonucleotide
uuccucccauccaugaaau

SEQ ID NO: 405952 - RNA, 19 nt, Artificial Sequence
  Description of Artificial Sequence: Synthetic oligonucleotide
uuaagccuuuacacacgac

SEQ ID NO: 405953 - RNA, 19 nt, Artificial Sequence
  Description of Artificial Sequence: Synthetic oligonucleotide
cauccauauguaagaagca

SEQ ID NO: 405954 - RNA, 19 nt, Artificial Sequence
  Description of Artificial Sequence: Synthetic oligonucleotide
guuagcaagccauuacacu

SEQ ID NO: 405955 - RNA, 19 nt, Artificial Sequence
  Description of Artificial Sequence: Synthetic oligonucleotide
agccuuuacacacgacaca

SEQ ID NO: 405956 - RNA, 19 nt, Artificial Sequence
  Description of Artificial Sequence: Synthetic oligonucleotide
cauaaucccuuucuucaca

SEQ ID NO: 405957 - RNA, 19 nt, Artificial Sequence
  Description of Artificial Sequence: Synthetic oligonucleotide
acgcauccaaacaaugaag

SEQ ID NO: 405958 - RNA, 19 nt, Artificial Sequence
  Description of Artificial Sequence: Synthetic oligonucleotide
ggucuagcauauauacugg

SEQ ID NO: 405959 - RNA, 19 nt, Artificial Sequence
  Description of Artificial Sequence: Synthetic oligonucleotide
aaucucgaucucacggaug

SEQ ID NO: 405960 - RNA, 19 nt, Artificial Sequence
  Description of Artificial Sequence: Synthetic oligonucleotide
acacuccuacaucucauaa

SEQ ID NO: 405961 - RNA, 19 nt, Artificial Sequence
  Description of Artificial Sequence: Synthetic oligonucleotide
ccaagcaauaccuuuccuc

SEQ ID NO: 405962 - RNA, 19 nt, Artificial Sequence
  Description of Artificial Sequence: Synthetic oligonucleotide
gaucauccguuuucgucca

SEQ ID NO: 405963 - RNA, 19 nt, Artificial Sequence
  Description of Artificial Sequence: Synthetic oligonucleotide
cgcguuauaguucaucgcc

SEQ ID NO: 405964 - RNA, 19 nt, Artificial Sequence
  Description of Artificial Sequence: Synthetic oligonucleotide
acgugggaaugucagacuu

SEQ ID NO: 405965 - RNA, 19 nt, Artificial Sequence
  Description of Artificial Sequence: Synthetic oligonucleotide
gacauacuaaccagacauc

SEQ ID NO: 405966 - RNA, 19 nt, Artificial Sequence
  Description of Artificial Sequence: Synthetic oligonucleotide
uuaccacuguuucuauauu

SEQ ID NO: 405967 - RNA, 19 nt, Artificial Sequence
  Description of Artificial Sequence: Synthetic oligonucleotide
uauacccgucauauauuuu

SEQ ID NO: 405968 - RNA, 19 nt, Artificial Sequence
  Description of Artificial Sequence: Synthetic oligonucleotide
aacuuacgaaaaguaggua

SEQ ID NO: 405969 - RNA, 19 nt, Artificial Sequence
  Description of Artificial Sequence: Synthetic oligonucleotide
gccacguccagcugggccg

SEQ ID NO: 405970 - RNA, 19 nt, Artificial Sequence
  Description of Artificial Sequence: Synthetic oligonucleotide
ccucccauccaugaaauag

SEQ ID NO: 405971 - RNA, 19 nt, Artificial Sequence
  Description of Artificial Sequence: Synthetic oligonucleotide
ugcucaagaucauccguuu

SEQ ID NO: 405972 - RNA, 19 nt, Artificial Sequence
  Description of Artificial Sequence: Synthetic oligonucleotide
ccaauagugauguaagcaa

SEQ ID NO: 405973 - RNA, 19 nt, Artificial Sequence
  Description of Artificial Sequence: Synthetic oligonucleotide
caauauugauauaaucaau

SEQ ID NO: 405974 - RNA, 19 nt, Artificial Sequence
  Description of Artificial Sequence: Synthetic oligonucleotide
ucagaggaauuggcauagg

SEQ ID NO: 405975 - RNA, 19 nt, Artificial Sequence
  Description of Artificial Sequence: Synthetic oligonucleotide
aaccagacaucagcauuca

SEQ ID NO: 405976 - RNA, 19 nt, Artificial Sequence
  Description of Artificial Sequence: Synthetic oligonucleotide
auccuucgcguuauaguuc

SEQ ID NO: 405977 - RNA, 19 nt, Artificial Sequence
  Description of Artificial Sequence: Synthetic oligonucleotide
guacgcauccaaacaauga

SEQ ID NO: 405978 - RNA, 19 nt, Artificial Sequence
  Description of Artificial Sequence: Synthetic oligonucleotide
agcaagccauuacacuccu

SEQ ID NO: 405979 - RNA, 19 nt, Artificial Sequence
  Description of Artificial Sequence: Synthetic oligonucleotide
augaccugucccaauaaaa

SEQ ID NO: 405980 - RNA, 19 nt, Artificial Sequence
  Description of Artificial Sequence: Synthetic oligonucleotide
gaugcaggcuagcaguccu

SEQ ID NO: 405981 - RNA, 19 nt, Artificial Sequence
  Description of Artificial Sequence: Synthetic oligonucleotide
cuccauuuaacuggcuauc

SEQ ID NO: 405982 - RNA, 19 nt, Artificial Sequence
  Description of Artificial Sequence: Synthetic oligonucleotide
gagaaacugaacacaugaa

SEQ ID NO: 405983 - RNA, 19 nt, Artificial Sequence
  Description of Artificial Sequence: Synthetic oligonucleotide
ggguuagcaagccauuaca

SEQ ID NO: 405984 - RNA, 19 nt, Artificial Sequence
  Description of Artificial Sequence: Synthetic oligonucleotide
cagccguugcuguuugaag

SEQ ID NO: 405985 - RNA, 19 nt, Artificial Sequence
  Description of Artificial Sequence: Synthetic oligonucleotide
uccaugaaauagugcucaa

SEQ ID NO: 405986 - RNA, 19 nt, Artificial Sequence
  Description of Artificial Sequence: Synthetic oligonucleotide
cauccguuuucguccauca

SEQ ID NO: 405987 - RNA, 19 nt, Artificial Sequence
  Description of Artificial Sequence: Synthetic oligonucleotide
acgacacaugaaaaugaug

SEQ ID NO: 405988 - RNA, 19 nt, Artificial Sequence
  Description of Artificial Sequence: Synthetic oligonucleotide
ucagaccuuuugauuuaau

SEQ ID NO: 405989 - RNA, 19 nt, Artificial Sequence
  Description of Artificial Sequence: Synthetic oligonucleotide
ccuuacuuggauuaagcaa

SEQ ID NO: 405990 - RNA, 19 nt, Artificial Sequence
  Description of Artificial Sequence: Synthetic oligonucleotide
uggcaaccagaaacaacuc

SEQ ID NO: 405991 - RNA, 19 nt, Artificial Sequence
  Description of Artificial Sequence: Synthetic oligonucleotide
aaaggguuagcaagccauu

SEQ ID NO: 405992 - RNA, 19 nt, Artificial Sequence
  Description of Artificial Sequence: Synthetic oligonucleotide
accucaacaaggagggacu

SEQ ID NO: 405993 - RNA, 19 nt, Artificial Sequence
  Description of Artificial Sequence: Synthetic oligonucleotide
guaggcacacauguacaac

SEQ ID NO: 405994 - RNA, 19 nt, Artificial Sequence
  Description of Artificial Sequence: Synthetic oligonucleotide
aaauagugcucaagaucau

SEQ ID NO: 405995 - RNA, 19 nt, Artificial Sequence
  Description of Artificial Sequence: Synthetic oligonucleotide
ccgucauauauuuucauaa

SEQ ID NO: 405996 - RNA, 19 nt, Artificial Sequence
  Description of Artificial Sequence: Synthetic oligonucleotide
acucagaccuuuugauuua

SEQ ID NO: 405997 - RNA, 19 nt, Artificial Sequence
  Description of Artificial Sequence: Synthetic oligonucleotide
ugccgacccugacaggaga

SEQ ID NO: 405998 - RNA, 19 nt, Artificial Sequence
  Description of Artificial Sequence: Synthetic oligonucleotide
uucacguaacgacgaugau

SEQ ID NO: 405999 - RNA, 19 nt, Artificial Sequence
  Description of Artificial Sequence: Synthetic oligonucleotide
cuaugaaccauugaauuuu

SEQ ID NO: 406000 - RNA, 19 nt, Artificial Sequence
  Description of Artificial Sequence: Synthetic oligonucleotide
ucacuucaacuguacuuuu

SEQ ID NO: 406001 - RNA, 19 nt, Artificial Sequence
  Description of Artificial Sequence: Synthetic oligonucleotide
cuucgcguuauaguucauc

SEQ ID NO: 406002 - RNA, 19 nt, Artificial Sequence
  Description of Artificial Sequence: Synthetic oligonucleotide
agguaacgcugcaguacgc

SEQ ID NO: 406003 - RNA, 19 nt, Artificial Sequence
  Description of Artificial Sequence: Synthetic oligonucleotide
aguuaugugccaacuucaa

SEQ ID NO: 406004 - RNA, 19 nt, Artificial Sequence
  Description of Artificial Sequence: Synthetic oligonucleotide
agguaugggaucagauuca

SEQ ID NO: 406005 - RNA, 19 nt, Artificial Sequence
  Description of Artificial Sequence: Synthetic oligonucleotide
gguaauguuggauguaaau

SEQ ID NO: 406006 - RNA, 19 nt, Artificial Sequence
  Description of Artificial Sequence: Synthetic oligonucleotide
guacuggguaauuguaugu

SEQ ID NO: 406007 - RNA, 19 nt, Artificial Sequence
  Description of Artificial Sequence: Synthetic oligonucleotide
uuuaagcaguagacucauu

SEQ ID NO: 406008 - RNA, 19 nt, Artificial Sequence
  Description of Artificial Sequence: Synthetic oligonucleotide
gccguugcuguuugaaggc

SEQ ID NO: 406009 - RNA, 19 nt, Artificial Sequence
  Description of Artificial Sequence: Synthetic oligonucleotide
gugugaaguuaaugguaca

SEQ ID NO: 406010 - RNA, 19 nt, Artificial Sequence
  Description of Artificial Sequence: Synthetic oligonucleotide
gcaguacgcauccaaacaa

SEQ ID NO: 406011 - RNA, 19 nt, Artificial Sequence
  Description of Artificial Sequence: Synthetic oligonucleotide
ucauccguuuucguccauc

SEQ ID NO: 406012 - RNA, 19 nt, Artificial Sequence
  Description of Artificial Sequence: Synthetic oligonucleotide
caauagugauguaagcaau

SEQ ID NO: 406013 - RNA, 19 nt, Artificial Sequence
  Description of Artificial Sequence: Synthetic oligonucleotide
cuauaagacgguacaacuu

SEQ ID NO: 406014 - RNA, 19 nt, Artificial Sequence
  Description of Artificial Sequence: Synthetic oligonucleotide
cauccuucgcguuauaguu

SEQ ID NO: 406015 - RNA, 19 nt, Artificial Sequence
  Description of Artificial Sequence: Synthetic oligonucleotide
gucaucaacacagcauaaa

SEQ ID NO: 406016 - RNA, 19 nt, Artificial Sequence
  Description of Artificial Sequence: Synthetic oligonucleotide
caucucuagauuucacgua

SEQ ID NO: 406017 - RNA, 19 nt, Artificial Sequence
  Description of Artificial Sequence: Synthetic oligonucleotide
accaaauuucaaaggguua

SEQ ID NO: 406018 - RNA, 19 nt, Artificial Sequence
  Description of Artificial Sequence: Synthetic oligonucleotide
cauagguaugggaucagau

SEQ ID NO: 406019 - RNA, 19 nt, Artificial Sequence
  Description of Artificial Sequence: Synthetic oligonucleotide
gccaauggggaugaagaug

SEQ ID NO: 406020 - RNA, 19 nt, Artificial Sequence
  Description of Artificial Sequence: Synthetic oligonucleotide
gaaggccguguuauccggc

SEQ ID NO: 406021 - RNA, 19 nt, Artificial Sequence
  Description of Artificial Sequence: Synthetic oligonucleotide
uccaaacaaugaaguccuc

SEQ ID NO: 406022 - RNA, 19 nt, Artificial Sequence
  Description of Artificial Sequence: Synthetic oligonucleotide
uaacgacgaugauuuugau

SEQ ID NO: 406023 - RNA, 19 nt, Artificial Sequence
  Description of Artificial Sequence: Synthetic oligonucleotide
acccgucauauauuuucau

SEQ ID NO: 406024 - RNA, 19 nt, Artificial Sequence
  Description of Artificial Sequence: Synthetic oligonucleotide
agacuggcagaaacaucuc

SEQ ID NO: 406025 - RNA, 19 nt, Artificial Sequence
  Description of Artificial Sequence: Synthetic oligonucleotide
gugccggccgugaggaugg

SEQ ID NO: 406026 - RNA, 19 nt, Artificial Sequence
  Description of Artificial Sequence: Synthetic oligonucleotide
gucuagcauauauacuggu

SEQ ID NO: 406027 - RNA, 19 nt, Artificial Sequence
  Description of Artificial Sequence: Synthetic oligonucleotide
gcauaaacguuuaagcagu

SEQ ID NO: 406028 - RNA, 19 nt, Artificial Sequence
  Description of Artificial Sequence: Synthetic oligonucleotide
caguagacucauuucacau

SEQ ID NO: 406029 - RNA, 19 nt, Artificial Sequence
  Description of Artificial Sequence: Synthetic oligonucleotide
cucccauccaugaaauagu

SEQ ID NO: 406030 - RNA, 19 nt, Artificial Sequence
  Description of Artificial Sequence: Synthetic oligonucleotide
uccgcucuauaagacggua

SEQ ID NO: 406031 - RNA, 19 nt, Artificial Sequence
  Description of Artificial Sequence: Synthetic oligonucleotide
guuauccggccuccggguc

SEQ ID NO: 406032 - RNA, 19 nt, Artificial Sequence
  Description of Artificial Sequence: Synthetic oligonucleotide
cuguuucuauauuugugau

SEQ ID NO: 406033 - RNA, 19 nt, Artificial Sequence
  Description of Artificial Sequence: Synthetic oligonucleotide
cguaacgacgaugauuuug

SEQ ID NO: 406034 - RNA, 19 nt, Artificial Sequence
  Description of Artificial Sequence: Synthetic oligonucleotide
gauuucacguaacgacgau

SEQ ID NO: 406035 - RNA, 19 nt, Artificial Sequence
  Description of Artificial Sequence: Synthetic oligonucleotide
cauaaacguuuaagcagua

SEQ ID NO: 406036 - RNA, 19 nt, Artificial Sequence
  Description of Artificial Sequence: Synthetic oligonucleotide
caccgugccggccgugagg

SEQ ID NO: 406037 - RNA, 19 nt, Artificial Sequence
  Description of Artificial Sequence: Synthetic oligonucleotide
accgugccggccgugagga

SEQ ID NO: 406038 - RNA, 19 nt, Artificial Sequence
  Description of Artificial Sequence: Synthetic oligonucleotide
gccgcuacuaccuccucca

SEQ ID NO: 406039 - RNA, 19 nt, Artificial Sequence
  Description of Artificial Sequence: Synthetic oligonucleotide
auccguuuucguccaucaa

SEQ ID NO: 406040 - RNA, 19 nt, Artificial Sequence
  Description of Artificial Sequence: Synthetic oligonucleotide
gacgugggaaugucagacu

SEQ ID NO: 406041 - RNA, 19 nt, Artificial Sequence
  Description of Artificial Sequence: Synthetic oligonucleotide
gaaacauuacucagaccuu

SEQ ID NO: 406042 - RNA, 19 nt, Artificial Sequence
  Description of Artificial Sequence: Synthetic oligonucleotide
ggugacgaagaugccgaug

SEQ ID NO: 406043 - RNA, 19 nt, Artificial Sequence
  Description of Artificial Sequence: Synthetic oligonucleotide
gguaacgcugcaguacgca

SEQ ID NO: 406044 - RNA, 19 nt, Artificial Sequence
  Description of Artificial Sequence: Synthetic oligonucleotide
gccgaugccaauggggaug

SEQ ID NO: 406045 - RNA, 19 nt, Artificial Sequence
  Description of Artificial Sequence: Synthetic oligonucleotide
cacgacacaugaaaaugau

SEQ ID NO: 406046 - RNA, 19 nt, Artificial Sequence
  Description of Artificial Sequence: Synthetic oligonucleotide
accagacaucagcauucaa

SEQ ID NO: 406047 - RNA, 19 nt, Artificial Sequence
  Description of Artificial Sequence: Synthetic oligonucleotide
cuaccuccuccacccgcgc

SEQ ID NO: 406048 - RNA, 19 nt, Artificial Sequence
  Description of Artificial Sequence: Synthetic oligonucleotide
ggcuaucaucucuagauuu

SEQ ID NO: 406049 - RNA, 19 nt, Artificial Sequence
  Description of Artificial Sequence: Synthetic oligonucleotide
acgguacaacuuacgaaaa

SEQ ID NO: 406050 - RNA, 19 nt, Artificial Sequence
  Description of Artificial Sequence: Synthetic oligonucleotide
gcagacauuagaaugccau

SEQ ID NO: 406051 - RNA, 19 nt, Artificial Sequence
  Description of Artificial Sequence: Synthetic oligonucleotide
gaggcucuaugcaucacau

SEQ ID NO: 406052 - RNA, 19 nt, Artificial Sequence
  Description of Artificial Sequence: Synthetic oligonucleotide
guaacgcugcaguacgcau

SEQ ID NO: 406053 - RNA, 19 nt, Artificial Sequence
  Description of Artificial Sequence: Synthetic oligonucleotide
gcuagcaguccucuuuaaa

SEQ ID NO: 406054 - RNA, 19 nt, Artificial Sequence
  Description of Artificial Sequence: Synthetic oligonucleotide
uccggccuccgggucuugg

SEQ ID NO: 406055 - RNA, 19 nt, Artificial Sequence
  Description of Artificial Sequence: Synthetic oligonucleotide
acuggccucgaugcacaug

SEQ ID NO: 406056 - RNA, 19 nt, Artificial Sequence
  Description of Artificial Sequence: Synthetic oligonucleotide
cacuagggucuccauuuaa

SEQ ID NO: 406057 - RNA, 19 nt, Artificial Sequence
  Description of Artificial Sequence: Synthetic oligonucleotide
ccuacaucucauaaucccu

SEQ ID NO: 406058 - RNA, 19 nt, Artificial Sequence
  Description of Artificial Sequence: Synthetic oligonucleotide
cguuuucguccaucaaaag

SEQ ID NO: 406059 - RNA, 19 nt, Artificial Sequence
  Description of Artificial Sequence: Synthetic oligonucleotide
ccgcucuauaagacgguac

SEQ ID NO: 406060 - RNA, 19 nt, Artificial Sequence
  Description of Artificial Sequence: Synthetic oligonucleotide
cgcucuauaagacgguaca

SEQ ID NO: 406061 - RNA, 19 nt, Artificial Sequence
  Description of Artificial Sequence: Synthetic oligonucleotide
cagacauuagaaugccauu

SEQ ID NO: 406062 - RNA, 19 nt, Artificial Sequence
  Description of Artificial Sequence: Synthetic oligonucleotide
guugcuguuugaaggccgu

SEQ ID NO: 406063 - RNA, 19 nt, Artificial Sequence
  Description of Artificial Sequence: Synthetic oligonucleotide
caguacgcauccaaacaau

SEQ ID NO: 406064 - RNA, 19 nt, Artificial Sequence
  Description of Artificial Sequence: Synthetic oligonucleotide
ccccaguuagagaaagaga

SEQ ID NO: 406065 - RNA, 19 nt, Artificial Sequence
  Description of Artificial Sequence: Synthetic oligonucleotide
ggccguguuauccggccuc

SEQ ID NO: 406066 - RNA, 19 nt, Artificial Sequence
  Description of Artificial Sequence: Synthetic oligonucleotide
ggcauagguaugggaucag

SEQ ID NO: 406067 - RNA, 19 nt, Artificial Sequence
  Description of Artificial Sequence: Synthetic oligonucleotide
cccgucauauauuuucaua

SEQ ID NO: 406068 - RNA, 19 nt, Artificial Sequence
  Description of Artificial Sequence: Synthetic oligonucleotide
gugcucaagaucauccguu

SEQ ID NO: 406069 - RNA, 19 nt, Artificial Sequence
  Description of Artificial Sequence: Synthetic oligonucleotide
aucauccguuuucguccau

SEQ ID NO: 406070 - RNA, 19 nt, Artificial Sequence
  Description of Artificial Sequence: Synthetic oligonucleotide
acguaacgacgaugauuuu

SEQ ID NO: 406071 - RNA, 19 nt, Artificial Sequence
  Description of Artificial Sequence: Synthetic oligonucleotide
ccguugcuguuugaaggcc

SEQ ID NO: 406072 - RNA, 19 nt, Artificial Sequence
  Description of Artificial Sequence: Synthetic oligonucleotide
gggcccgccguccaccuca

SEQ ID NO: 406073 - RNA, 19 nt, Artificial Sequence
  Description of Artificial Sequence: Synthetic oligonucleotide
ccgacccugacaggagacg

SEQ ID NO: 406074 - RNA, 19 nt, Artificial Sequence
  Description of Artificial Sequence: Synthetic oligonucleotide
ggacuggccucgaugcaca

SEQ ID NO: 406075 - RNA, 19 nt, Artificial Sequence
  Description of Artificial Sequence: Synthetic oligonucleotide
cgacccugacaggagacgc

SEQ ID NO: 406076 - RNA, 19 nt, Artificial Sequence
  Description of Artificial Sequence: Synthetic oligonucleotide
gcagccguugcuguuugaa

SEQ ID NO: 406077 - RNA, 19 nt, Artificial Sequence
  Description of Artificial Sequence: Synthetic oligonucleotide
cuucgguaagguucacauu

SEQ ID NO: 406078 - RNA, 19 nt, Artificial Sequence
  Description of Artificial Sequence: Synthetic oligonucleotide
gccguguuauccggccucc

SEQ ID NO: 406079 - RNA, 19 nt, Artificial Sequence
  Description of Artificial Sequence: Synthetic oligonucleotide
cuccgcucuauaagacggu

SEQ ID NO: 406080 - RNA, 19 nt, Artificial Sequence
  Description of Artificial Sequence: Synthetic oligonucleotide
ccgggcuucggcucggcca

SEQ ID NO: 406081 - RNA, 19 nt, Artificial Sequence
  Description of Artificial Sequence: Synthetic oligonucleotide
cuccaagacgugggaaugu

SEQ ID NO: 406082 - RNA, 19 nt, Artificial Sequence
  Description of Artificial Sequence: Synthetic oligonucleotide
gccgugaggaugggcugcc

SEQ ID NO: 406083 - RNA, 19 nt, Artificial Sequence
  Description of Artificial Sequence: Synthetic oligonucleotide
gagggacuuuaagccuuua

SEQ ID NO: 406084 - RNA, 19 nt, Artificial Sequence
  Description of Artificial Sequence: Synthetic oligonucleotide
cgggcuucggcucggccac

SEQ ID NO: 406085 - RNA, 19 nt, Artificial Sequence
  Description of Artificial Sequence: Synthetic oligonucleotide
cgugccggccgugaggaug

SEQ ID NO: 406086 - RNA, 19 nt, Artificial Sequence
  Description of Artificial Sequence: Synthetic oligonucleotide
ugccggccgugaggauggg

SEQ ID NO: 406087 - RNA, 19 nt, Artificial Sequence
  Description of Artificial Sequence: Synthetic oligonucleotide
gcacuagggucuccauuua

SEQ ID NO: 406088 - RNA, 19 nt, Artificial Sequence
  Description of Artificial Sequence: Synthetic oligonucleotide
gccugccgacccugacagg

SEQ ID NO: 406089 - RNA, 19 nt, Artificial Sequence
  Description of Artificial Sequence: Synthetic oligonucleotide
gacuggccucgaugcacau

SEQ ID NO: 406090 - RNA, 19 nt, Artificial Sequence
  Description of Artificial Sequence: Synthetic oligonucleotide
cucaacaaggagggacuuu

SEQ ID NO: 406091 - RNA, 19 nt, Artificial Sequence
  Description of Artificial Sequence: Synthetic oligonucleotide
gcucaagaucauccguuuu

SEQ ID NO: 406092 - RNA, 19 nt, Artificial Sequence
  Description of Artificial Sequence: Synthetic oligonucleotide
ccguguuauccggccuccg

SEQ ID NO: 406093 - RNA, 19 nt, Artificial Sequence
  Description of Artificial Sequence: Synthetic oligonucleotide
gccguccaccucauccuuc

SEQ ID NO: 406094 - RNA, 19 nt, Artificial Sequence
  Description of Artificial Sequence: Synthetic oligonucleotide
ccgcuacuaccuccuccac

SEQ ID NO: 406095 - RNA, 19 nt, Artificial Sequence
  Description of Artificial Sequence: Synthetic oligonucleotide
ggcagccguugcuguuuga

SEQ ID NO: 406096 - RNA, 19 nt, Artificial Sequence
  Description of Artificial Sequence: Synthetic oligonucleotide
gggcuucggcucggccacg

SEQ ID NO: 406097 - RNA, 19 nt, Artificial Sequence
  Description of Artificial Sequence: Synthetic oligonucleotide
gccggccgugaggaugggc

SEQ ID NO: 406098 - RNA, 19 nt, Artificial Sequence
  Description of Artificial Sequence: Synthetic oligonucleotide
cgguaagguucacauuccu

SEQ ID NO: 406099 - RNA, 19 nt, Artificial Sequence
  Description of Artificial Sequence: Synthetic oligonucleotide
auccggccuccgggucuug

SEQ ID NO: 406100 - RNA, 19 nt, Artificial Sequence
  Description of Artificial Sequence: Synthetic oligonucleotide
ccaccucaacaaggaggga

SEQ ID NO: 406101 - RNA, 19 nt, Artificial Sequence
  Description of Artificial Sequence: Synthetic oligonucleotide
ccucaacaaggagggacuu

SEQ ID NO: 406102 - RNA, 19 nt, Artificial Sequence
  Description of Artificial Sequence: Synthetic oligonucleotide
ccgugaggaugggcugcca

SEQ ID NO: 406103 - RNA, 19 nt, Artificial Sequence
  Description of Artificial Sequence: Synthetic oligonucleotide
ccgcccaggggaccagccu

SEQ ID NO: 406104 - RNA, 19 nt, Artificial Sequence
  Description of Artificial Sequence: Synthetic oligonucleotide
ccuucgcguuauaguucau

SEQ ID NO: 406105 - RNA, 19 nt, Artificial Sequence
  Description of Artificial Sequence: Synthetic oligonucleotide
ccgugccggccgugaggau

SEQ ID NO: 406106 - RNA, 19 nt, Artificial Sequence
  Description of Artificial Sequence: Synthetic oligonucleotide
agauauuugagauucacac

SEQ ID NO: 406107 - RNA, 19 nt, Artificial Sequence
  Description of Artificial Sequence: Synthetic oligonucleotide
aaguacauagauucgaguc

SEQ ID NO: 406108 - RNA, 19 nt, Artificial Sequence
  Description of Artificial Sequence: Synthetic oligonucleotide
auagauucgagucaauagc

SEQ ID NO: 406109 - RNA, 19 nt, Artificial Sequence
  Description of Artificial Sequence: Synthetic oligonucleotide
ucuguuaaaacuaaacugu

SEQ ID NO: 406110 - RNA, 19 nt, Artificial Sequence
  Description of Artificial Sequence: Synthetic oligonucleotide
uguguuuucgacaauaaac

SEQ ID NO: 406111 - RNA, 19 nt, Artificial Sequence
  Description of Artificial Sequence: Synthetic oligonucleotide
uuauuugcaaaucucauuc

SEQ ID NO: 406112 - RNA, 19 nt, Artificial Sequence
  Description of Artificial Sequence: Synthetic oligonucleotide
uguguggagaccuaucucg

SEQ ID NO: 406113 - RNA, 19 nt, Artificial Sequence
  Description of Artificial Sequence: Synthetic oligonucleotide
aaagcauagaaguugcagu

SEQ ID NO: 406114 - RNA, 19 nt, Artificial Sequence
  Description of Artificial Sequence: Synthetic oligonucleotide
uugagauucacacauuugu

SEQ ID NO: 406115 - RNA, 19 nt, Artificial Sequence
  Description of Artificial Sequence: Synthetic oligonucleotide
aauaaaccauguaaaugcc

SEQ ID NO: 406116 - RNA, 19 nt, Artificial Sequence
  Description of Artificial Sequence: Synthetic oligonucleotide
uuugagauauuugagauuc

SEQ ID NO: 406117 - RNA, 19 nt, Artificial Sequence
  Description of Artificial Sequence: Synthetic oligonucleotide
aaaguauagaaacgcaagu

SEQ ID NO: 406118 - RNA, 19 nt, Artificial Sequence
  Description of Artificial Sequence: Synthetic oligonucleotide
ugagcuuuaucaugcagcg

SEQ ID NO: 406119 - RNA, 19 nt, Artificial Sequence
  Description of Artificial Sequence: Synthetic oligonucleotide
uccuucuaaaguaacaaca

SEQ ID NO: 406120 - RNA, 19 nt, Artificial Sequence
  Description of Artificial Sequence: Synthetic oligonucleotide
gucuguuaaaacuaaacug

SEQ ID NO: 406121 - RNA, 19 nt, Artificial Sequence
  Description of Artificial Sequence: Synthetic oligonucleotide
aagacguacaaggcaaucc

SEQ ID NO: 406122 - RNA, 19 nt, Artificial Sequence
  Description of Artificial Sequence: Synthetic oligonucleotide
ucaauugcuagucuucccc

SEQ ID NO: 406123 - RNA, 19 nt, Artificial Sequence
  Description of Artificial Sequence: Synthetic oligonucleotide
uccaauaguagcaccaggc

SEQ ID NO: 406124 - RNA, 19 nt, Artificial Sequence
  Description of Artificial Sequence: Synthetic oligonucleotide
ucuugaguaguguacacug

SEQ ID NO: 406125 - RNA, 19 nt, Artificial Sequence
  Description of Artificial Sequence: Synthetic oligonucleotide
cauagauucgagucaauag

SEQ ID NO: 406126 - RNA, 19 nt, Artificial Sequence
  Description of Artificial Sequence: Synthetic oligonucleotide
aaaguguacauuucauccu

SEQ ID NO: 406127 - RNA, 19 nt, Artificial Sequence
  Description of Artificial Sequence: Synthetic oligonucleotide
aacaaguaccaccucaagu

SEQ ID NO: 406128 - RNA, 19 nt, Artificial Sequence
  Description of Artificial Sequence: Synthetic oligonucleotide
uauacgcuugcaaagauua

SEQ ID NO: 406129 - RNA, 19 nt, Artificial Sequence
  Description of Artificial Sequence: Synthetic oligonucleotide
agcuuuaucaugcagcgca

SEQ ID NO: 406130 - RNA, 19 nt, Artificial Sequence
  Description of Artificial Sequence: Synthetic oligonucleotide
uuuaucaugcagcgcacag

SEQ ID NO: 406131 - RNA, 19 nt, Artificial Sequence
  Description of Artificial Sequence: Synthetic oligonucleotide
caugcacuuauaaugugcg

SEQ ID NO: 406132 - RNA, 19 nt, Artificial Sequence
  Description of Artificial Sequence: Synthetic oligonucleotide
uuucauucgaggagagacg

SEQ ID NO: 406133 - RNA, 19 nt, Artificial Sequence
  Description of Artificial Sequence: Synthetic oligonucleotide
aauaguagcaccaggcuga

SEQ ID NO: 406134 - RNA, 19 nt, Artificial Sequence
  Description of Artificial Sequence: Synthetic oligonucleotide
uuuaaguaaauguguaaau

SEQ ID NO: 406135 - RNA, 19 nt, Artificial Sequence
  Description of Artificial Sequence: Synthetic oligonucleotide
uagauucgagucaauagca

SEQ ID NO: 406136 - RNA, 19 nt, Artificial Sequence
  Description of Artificial Sequence: Synthetic oligonucleotide
ugauuuaaguaaaugugua

SEQ ID NO: 406137 - RNA, 19 nt, Artificial Sequence
  Description of Artificial Sequence: Synthetic oligonucleotide
ucaauagcagaucucuaga

SEQ ID NO: 406138 - RNA, 19 nt, Artificial Sequence
  Description of Artificial Sequence: Synthetic oligonucleotide
aguacauagauucgaguca

SEQ ID NO: 406139 - RNA, 19 nt, Artificial Sequence
  Description of Artificial Sequence: Synthetic oligonucleotide
guacagucaaguuagcaug

SEQ ID NO: 406140 - RNA, 19 nt, Artificial Sequence
  Description of Artificial Sequence: Synthetic oligonucleotide
auagaaacgcaagucuacc

SEQ ID NO: 406141 - RNA, 19 nt, Artificial Sequence
  Description of Artificial Sequence: Synthetic oligonucleotide
guguuuucgacaauaaacc

SEQ ID NO: 406142 - RNA, 19 nt, Artificial Sequence
  Description of Artificial Sequence: Synthetic oligonucleotide
uuaagccucaagaaaugca

SEQ ID NO: 406143 - RNA, 19 nt, Artificial Sequence
  Description of Artificial Sequence: Synthetic oligonucleotide
uuauucucgguuucuaacu

SEQ ID NO: 406144 - RNA, 19 nt, Artificial Sequence
  Description of Artificial Sequence: Synthetic oligonucleotide
aucuuaagggacuagcagu

SEQ ID NO: 406145 - RNA, 19 nt, Artificial Sequence
  Description of Artificial Sequence: Synthetic oligonucleotide
ugcacuuauaaugugcggc

SEQ ID NO: 406146 - RNA, 19 nt, Artificial Sequence
  Description of Artificial Sequence: Synthetic oligonucleotide
guagugguaaguccugugg

SEQ ID NO: 406147 - RNA, 19 nt, Artificial Sequence
  Description of Artificial Sequence: Synthetic oligonucleotide
cacacauuuguucaaguac

SEQ ID NO: 406148 - RNA, 19 nt, Artificial Sequence
  Description of Artificial Sequence: Synthetic oligonucleotide
uguuuucgacaauaaacca

SEQ ID NO: 406149 - RNA, 19 nt, Artificial Sequence
  Description of Artificial Sequence: Synthetic oligonucleotide
uaguguacacugaacaagu

SEQ ID NO: 406150 - RNA, 19 nt, Artificial Sequence
  Description of Artificial Sequence: Synthetic oligonucleotide
cuuauucucgguuucuaac

SEQ ID NO: 406151 - RNA, 19 nt, Artificial Sequence
  Description of Artificial Sequence: Synthetic oligonucleotide
aauauacgcuugcaaagau

SEQ ID NO: 406152 - RNA, 19 nt, Artificial Sequence
  Description of Artificial Sequence: Synthetic oligonucleotide
ugagcuugacauuuuacaa

SEQ ID NO: 406153 - RNA, 19 nt, Artificial Sequence
  Description of Artificial Sequence: Synthetic oligonucleotide
aucaauugcuagucuuccc

SEQ ID NO: 406154 - RNA, 19 nt, Artificial Sequence
  Description of Artificial Sequence: Synthetic oligonucleotide
gauauuugagauucacaca

SEQ ID NO: 406155 - RNA, 19 nt, Artificial Sequence
  Description of Artificial Sequence: Synthetic oligonucleotide
uuguaaauuccucgggaca

SEQ ID NO: 406156 - RNA, 19 nt, Artificial Sequence
  Description of Artificial Sequence: Synthetic oligonucleotide
guuaguugcugaucaauug

SEQ ID NO: 406157 - RNA, 19 nt, Artificial Sequence
  Description of Artificial Sequence: Synthetic oligonucleotide
acuaaacugugccuugguc

SEQ ID NO: 406158 - RNA, 19 nt, Artificial Sequence
  Description of Artificial Sequence: Synthetic oligonucleotide
aagagcggggcuccgucgc

SEQ ID NO: 406159 - RNA, 19 nt, Artificial Sequence
  Description of Artificial Sequence: Synthetic oligonucleotide
ucgcuuaaucucuugaagu

SEQ ID NO: 406160 - RNA, 19 nt, Artificial Sequence
  Description of Artificial Sequence: Synthetic oligonucleotide
gaaccuaguuuccauuaag

SEQ ID NO: 406161 - RNA, 19 nt, Artificial Sequence
  Description of Artificial Sequence: Synthetic oligonucleotide
uucaucgguuccaugggag

SEQ ID NO: 406162 - RNA, 19 nt, Artificial Sequence
  Description of Artificial Sequence: Synthetic oligonucleotide
aauuuacucaggugugggu

SEQ ID NO: 406163 - RNA, 19 nt, Artificial Sequence
  Description of Artificial Sequence: Synthetic oligonucleotide
agaaacgcaagucuacccu

SEQ ID NO: 406164 - RNA, 19 nt, Artificial Sequence
  Description of Artificial Sequence: Synthetic oligonucleotide
ugaugaaccuugaaauuaa

SEQ ID NO: 406165 - RNA, 19 nt, Artificial Sequence
  Description of Artificial Sequence: Synthetic oligonucleotide
ucauuaucagaaugugaug

SEQ ID NO: 406166 - RNA, 19 nt, Artificial Sequence
  Description of Artificial Sequence: Synthetic oligonucleotide
ucgagucaauagcagaucu

SEQ ID NO: 406167 - RNA, 19 nt, Artificial Sequence
  Description of Artificial Sequence: Synthetic oligonucleotide
uggacuuacaaaagccaca

SEQ ID NO: 406168 - RNA, 19 nt, Artificial Sequence
  Description of Artificial Sequence: Synthetic oligonucleotide
uacuaagcuaguuuccuuc

SEQ ID NO: 406169 - RNA, 19 nt, Artificial Sequence
  Description of Artificial Sequence: Synthetic oligonucleotide
uccacuacuaagcuaguuu

SEQ ID NO: 406170 - RNA, 19 nt, Artificial Sequence
  Description of Artificial Sequence: Synthetic oligonucleotide
cauuaucagaaugugauga

SEQ ID NO: 406171 - RNA, 19 nt, Artificial Sequence
  Description of Artificial Sequence: Synthetic oligonucleotide
gaacuuauuaaaguauaga

SEQ ID NO: 406172 - RNA, 19 nt, Artificial Sequence
  Description of Artificial Sequence: Synthetic oligonucleotide
uagaaacgcaagucuaccc

SEQ ID NO: 406173 - RNA, 19 nt, Artificial Sequence
  Description of Artificial Sequence: Synthetic oligonucleotide
acuagagaucuguccuugc

SEQ ID NO: 406174 - RNA, 19 nt, Artificial Sequence
  Description of Artificial Sequence: Synthetic oligonucleotide
auaaugugcggcugccuuc

SEQ ID NO: 406175 - RNA, 19 nt, Artificial Sequence
  Description of Artificial Sequence: Synthetic oligonucleotide
uauaaugugcggcugccuu

SEQ ID NO: 406176 - RNA, 19 nt, Artificial Sequence
  Description of Artificial Sequence: Synthetic oligonucleotide
caauugcuagucuuccccg

SEQ ID NO: 406177 - RNA, 19 nt, Artificial Sequence
  Description of Artificial Sequence: Synthetic oligonucleotide
gaucaauugcuagucuucc

SEQ ID NO: 406178 - RNA, 19 nt, Artificial Sequence
  Description of Artificial Sequence: Synthetic oligonucleotide
ucaucgguuccaugggagg

SEQ ID NO: 406179 - RNA, 19 nt, Artificial Sequence
  Description of Artificial Sequence: Synthetic oligonucleotide
agacguacaaggcaaucca

SEQ ID NO: 406180 - RNA, 19 nt, Artificial Sequence
  Description of Artificial Sequence: Synthetic oligonucleotide
uguaaauuccucgggacau

SEQ ID NO: 406181 - RNA, 19 nt, Artificial Sequence
  Description of Artificial Sequence: Synthetic oligonucleotide
aguaguguacacugaacaa

SEQ ID NO: 406182 - RNA, 19 nt, Artificial Sequence
  Description of Artificial Sequence: Synthetic oligonucleotide
uauucucgguuucuaacuc

SEQ ID NO: 406183 - RNA, 19 nt, Artificial Sequence
  Description of Artificial Sequence: Synthetic oligonucleotide
uuaagggacuagcaguuua

SEQ ID NO: 406184 - RNA, 19 nt, Artificial Sequence
  Description of Artificial Sequence: Synthetic oligonucleotide
uaggccuggugucauuagg

SEQ ID NO: 406185 - RNA, 19 nt, Artificial Sequence
  Description of Artificial Sequence: Synthetic oligonucleotide
uacgcuugcaaagauuaca

SEQ ID NO: 406186 - RNA, 19 nt, Artificial Sequence
  Description of Artificial Sequence: Synthetic oligonucleotide
aaugccuugcgaaggcuuc

SEQ ID NO: 406187 - RNA, 19 nt, Artificial Sequence
  Description of Artificial Sequence: Synthetic oligonucleotide
ugacgcauuccuuauacuu

SEQ ID NO: 406188 - RNA, 19 nt, Artificial Sequence
  Description of Artificial Sequence: Synthetic oligonucleotide
uucaagucaugaugaaccu

SEQ ID NO: 406189 - RNA, 19 nt, Artificial Sequence
  Description of Artificial Sequence: Synthetic oligonucleotide
acaucgcuugguaacaaac

SEQ ID NO: 406190 - RNA, 19 nt, Artificial Sequence
  Description of Artificial Sequence: Synthetic oligonucleotide
guacacaucgcuugguaac

SEQ ID NO: 406191 - RNA, 19 nt, Artificial Sequence
  Description of Artificial Sequence: Synthetic oligonucleotide
aggaacuacuuuccauuuc

SEQ ID NO: 406192 - RNA, 19 nt, Artificial Sequence
  Description of Artificial Sequence: Synthetic oligonucleotide
ucgguuucuaacucucucu

SEQ ID NO: 406193 - RNA, 19 nt, Artificial Sequence
  Description of Artificial Sequence: Synthetic oligonucleotide
ucagacacgaguagcuguc

SEQ ID NO: 406194 - RNA, 19 nt, Artificial Sequence
  Description of Artificial Sequence: Synthetic oligonucleotide
uuucaucgguuccauggga

SEQ ID NO: 406195 - RNA, 19 nt, Artificial Sequence
  Description of Artificial Sequence: Synthetic oligonucleotide
acuaagcuaguuuccuucu

SEQ ID NO: 406196 - RNA, 19 nt, Artificial Sequence
  Description of Artificial Sequence: Synthetic oligonucleotide
uagaucauguuacucuguu

SEQ ID NO: 406197 - RNA, 19 nt, Artificial Sequence
  Description of Artificial Sequence: Synthetic oligonucleotide
uaagggacuagcaguuuaa

SEQ ID NO: 406198 - RNA, 19 nt, Artificial Sequence
  Description of Artificial Sequence: Synthetic oligonucleotide
gccacuuuaagccucaaga

SEQ ID NO: 406199 - RNA, 19 nt, Artificial Sequence
  Description of Artificial Sequence: Synthetic oligonucleotide
aaaugcagcguggcccucg

SEQ ID NO: 406200 - RNA, 19 nt, Artificial Sequence
  Description of Artificial Sequence: Synthetic oligonucleotide
uccuacuaacauuucuggu

SEQ ID NO: 406201 - RNA, 19 nt, Artificial Sequence
  Description of Artificial Sequence: Synthetic oligonucleotide
acuacuaagcuaguuuccu

SEQ ID NO: 406202 - RNA, 19 nt, Artificial Sequence
  Description of Artificial Sequence: Synthetic oligonucleotide
uucagaauuaugugcgguu

SEQ ID NO: 406203 - RNA, 19 nt, Artificial Sequence
  Description of Artificial Sequence: Synthetic oligonucleotide
augaugaaccuugaaauua

SEQ ID NO: 406204 - RNA, 19 nt, Artificial Sequence
  Description of Artificial Sequence: Synthetic oligonucleotide
aaguacacaucgcuuggua

SEQ ID NO: 406205 - RNA, 19 nt, Artificial Sequence
  Description of Artificial Sequence: Synthetic oligonucleotide
uaucucgguaggaacuacu

SEQ ID NO: 406206 - RNA, 19 nt, Artificial Sequence
  Description of Artificial Sequence: Synthetic oligonucleotide
aguacacaucgcuugguaa

SEQ ID NO: 406207 - RNA, 19 nt, Artificial Sequence
  Description of Artificial Sequence: Synthetic oligonucleotide
gagacgggcucgccgagcg

SEQ ID NO: 406208 - RNA, 19 nt, Artificial Sequence
  Description of Artificial Sequence: Synthetic oligonucleotide
aguugucuuauucucgguu

SEQ ID NO: 406209 - RNA, 19 nt, Artificial Sequence
  Description of Artificial Sequence: Synthetic oligonucleotide
aucgcuugguaacaaacua

SEQ ID NO: 406210 - RNA, 19 nt, Artificial Sequence
  Description of Artificial Sequence: Synthetic oligonucleotide
uaguaucuugaguagugua

SEQ ID NO: 406211 - RNA, 19 nt, Artificial Sequence
  Description of Artificial Sequence: Synthetic oligonucleotide
aacgcaagucuacccuucu

SEQ ID NO: 406212 - RNA, 19 nt, Artificial Sequence
  Description of Artificial Sequence: Synthetic oligonucleotide
uccaaauucugcucuugau

SEQ ID NO: 406213 - RNA, 19 nt, Artificial Sequence
  Description of Artificial Sequence: Synthetic oligonucleotide
gaagagcggggcuccgucg

SEQ ID NO: 406214 - RNA, 19 nt, Artificial Sequence
  Description of Artificial Sequence: Synthetic oligonucleotide
gagauauuugagauucaca

SEQ ID NO: 406215 - RNA, 19 nt, Artificial Sequence
  Description of Artificial Sequence: Synthetic oligonucleotide
uuugagacugcugauccuu

SEQ ID NO: 406216 - RNA, 19 nt, Artificial Sequence
  Description of Artificial Sequence: Synthetic oligonucleotide
guucaugcucauuaaaagu

SEQ ID NO: 406217 - RNA, 19 nt, Artificial Sequence
  Description of Artificial Sequence: Synthetic oligonucleotide
gaccuaucucgguaggaac

SEQ ID NO: 406218 - RNA, 19 nt, Artificial Sequence
  Description of Artificial Sequence: Synthetic oligonucleotide
ucgccgagcgcccuuacgu

SEQ ID NO: 406219 - RNA, 19 nt, Artificial Sequence
  Description of Artificial Sequence: Synthetic oligonucleotide
uuuacucagguguggguuu

SEQ ID NO: 406220 - RNA, 19 nt, Artificial Sequence
  Description of Artificial Sequence: Synthetic oligonucleotide
uacacaucgcuugguaaca

SEQ ID NO: 406221 - RNA, 19 nt, Artificial Sequence
  Description of Artificial Sequence: Synthetic oligonucleotide
guacaaggcaauccacuac

SEQ ID NO: 406222 - RNA, 19 nt, Artificial Sequence
  Description of Artificial Sequence: Synthetic oligonucleotide
auaaaccauguaaaugccu

SEQ ID NO: 406223 - RNA, 19 nt, Artificial Sequence
  Description of Artificial Sequence: Synthetic oligonucleotide
auuuacucagguguggguu

SEQ ID NO: 406224 - RNA, 19 nt, Artificial Sequence
  Description of Artificial Sequence: Synthetic oligonucleotide
uuaggccuggugucauuag

SEQ ID NO: 406225 - RNA, 19 nt, Artificial Sequence
  Description of Artificial Sequence: Synthetic oligonucleotide
auucgagucaauagcagau

SEQ ID NO: 406226 - RNA, 19 nt, Artificial Sequence
  Description of Artificial Sequence: Synthetic oligonucleotide
guucucagacacgaguagc

SEQ ID NO: 406227 - RNA, 19 nt, Artificial Sequence
  Description of Artificial Sequence: Synthetic oligonucleotide
aggaaccuaguuuccauua

SEQ ID NO: 406228 - RNA, 19 nt, Artificial Sequence
  Description of Artificial Sequence: Synthetic oligonucleotide
uaaauuccucgggacauau

SEQ ID NO: 406229 - RNA, 19 nt, Artificial Sequence
  Description of Artificial Sequence: Synthetic oligonucleotide
caauauacgcuugcaaaga

SEQ ID NO: 406230 - RNA, 19 nt, Artificial Sequence
  Description of Artificial Sequence: Synthetic oligonucleotide
uaaugugcggcugccuucu

SEQ ID NO: 406231 - RNA, 19 nt, Artificial Sequence
  Description of Artificial Sequence: Synthetic oligonucleotide
acgaguagcuguccgcacu

SEQ ID NO: 406232 - RNA, 19 nt, Artificial Sequence
  Description of Artificial Sequence: Synthetic oligonucleotide
uguggagaccuaucucggu

SEQ ID NO: 406233 - RNA, 19 nt, Artificial Sequence
  Description of Artificial Sequence: Synthetic oligonucleotide
ggcaauaaaugcuccagaa

SEQ ID NO: 406234 - RNA, 19 nt, Artificial Sequence
  Description of Artificial Sequence: Synthetic oligonucleotide
guauagaaacgcaagucua

SEQ ID NO: 406235 - RNA, 19 nt, Artificial Sequence
  Description of Artificial Sequence: Synthetic oligonucleotide
ucuguucaauugagcuuga

SEQ ID NO: 406236 - RNA, 19 nt, Artificial Sequence
  Description of Artificial Sequence: Synthetic oligonucleotide
ccaauuguugcuccgggac

SEQ ID NO: 406237 - RNA, 19 nt, Artificial Sequence
  Description of Artificial Sequence: Synthetic oligonucleotide
uuauaaugugcggcugccu

SEQ ID NO: 406238 - RNA, 19 nt, Artificial Sequence
  Description of Artificial Sequence: Synthetic oligonucleotide
guacauagauucgagucaa

SEQ ID NO: 406239 - RNA, 19 nt, Artificial Sequence
  Description of Artificial Sequence: Synthetic oligonucleotide
caccaagacucucauuauc

SEQ ID NO: 406240 - RNA, 19 nt, Artificial Sequence
  Description of Artificial Sequence: Synthetic oligonucleotide
ucgucauuuccgcuaugau

SEQ ID NO: 406241 - RNA, 19 nt, Artificial Sequence
  Description of Artificial Sequence: Synthetic oligonucleotide
auacgcuugcaaagauuac

SEQ ID NO: 406242 - RNA, 19 nt, Artificial Sequence
  Description of Artificial Sequence: Synthetic oligonucleotide
uugugccccuuuuaauuuc

SEQ ID NO: 406243 - RNA, 19 nt, Artificial Sequence
  Description of Artificial Sequence: Synthetic oligonucleotide
aaaugccuugcgaaggcuu

SEQ ID NO: 406244 - RNA, 19 nt, Artificial Sequence
  Description of Artificial Sequence: Synthetic oligonucleotide
accuaucucgguaggaacu

SEQ ID NO: 406245 - RNA, 19 nt, Artificial Sequence
  Description of Artificial Sequence: Synthetic oligonucleotide
augacgcauuccuuauacu

SEQ ID NO: 406246 - RNA, 19 nt, Artificial Sequence
  Description of Artificial Sequence: Synthetic oligonucleotide
ccuacuaacauuucuggua

SEQ ID NO: 406247 - RNA, 19 nt, Artificial Sequence
  Description of Artificial Sequence: Synthetic oligonucleotide
agaccuaucucgguaggaa

SEQ ID NO: 406248 - RNA, 19 nt, Artificial Sequence
  Description of Artificial Sequence: Synthetic oligonucleotide
ugcgaaggcuucucucgga

SEQ ID NO: 406249 - RNA, 19 nt, Artificial Sequence
  Description of Artificial Sequence: Synthetic oligonucleotide
guuuucgacaauaaaccau

SEQ ID NO: 406250 - RNA, 19 nt, Artificial Sequence
  Description of Artificial Sequence: Synthetic oligonucleotide
aagggacuagcaguuuaaa

SEQ ID NO: 406251 - RNA, 19 nt, Artificial Sequence
  Description of Artificial Sequence: Synthetic oligonucleotide
gugguaaguccuguggcac

SEQ ID NO: 406252 - RNA, 19 nt, Artificial Sequence
  Description of Artificial Sequence: Synthetic oligonucleotide
uguccgcacuccuugucuc

SEQ ID NO: 406253 - RNA, 19 nt, Artificial Sequence
  Description of Artificial Sequence: Synthetic oligonucleotide
ucgcucgucauuuccgcua

SEQ ID NO: 406254 - RNA, 19 nt, Artificial Sequence
  Description of Artificial Sequence: Synthetic oligonucleotide
uacauagauucgagucaau

SEQ ID NO: 406255 - RNA, 19 nt, Artificial Sequence
  Description of Artificial Sequence: Synthetic oligonucleotide
augugcggcugccuucuug

SEQ ID NO: 406256 - RNA, 19 nt, Artificial Sequence
  Description of Artificial Sequence: Synthetic oligonucleotide
cauggcauauuaagagcaa

SEQ ID NO: 406257 - RNA, 19 nt, Artificial Sequence
  Description of Artificial Sequence: Synthetic oligonucleotide
auauacgcuugcaaagauu

SEQ ID NO: 406258 - RNA, 19 nt, Artificial Sequence
  Description of Artificial Sequence: Synthetic oligonucleotide
ucgguuccaugggaggaug

SEQ ID NO: 406259 - RNA, 19 nt, Artificial Sequence
  Description of Artificial Sequence: Synthetic oligonucleotide
gagcuuuaucaugcagcgc

SEQ ID NO: 406260 - RNA, 19 nt, Artificial Sequence
  Description of Artificial Sequence: Synthetic oligonucleotide
cucgucauuuccgcuauga

SEQ ID NO: 406261 - RNA, 19 nt, Artificial Sequence
  Description of Artificial Sequence: Synthetic oligonucleotide
ccccuacauggcaaaaucc

SEQ ID NO: 406262 - RNA, 19 nt, Artificial Sequence
  Description of Artificial Sequence: Synthetic oligonucleotide
gaaacgcaagucuacccuu

SEQ ID NO: 406263 - RNA, 19 nt, Artificial Sequence
  Description of Artificial Sequence: Synthetic oligonucleotide
guggagaccuaucucggua

SEQ ID NO: 406264 - RNA, 19 nt, Artificial Sequence
  Description of Artificial Sequence: Synthetic oligonucleotide
caaaagccacauuugcgcu

SEQ ID NO: 406265 - RNA, 19 nt, Artificial Sequence
  Description of Artificial Sequence: Synthetic oligonucleotide
caucgcuugguaacaaacu

SEQ ID NO: 406266 - RNA, 19 nt, Artificial Sequence
  Description of Artificial Sequence: Synthetic oligonucleotide
uggcacguuuucacaucac

SEQ ID NO: 406267 - RNA, 19 nt, Artificial Sequence
  Description of Artificial Sequence: Synthetic oligonucleotide
agacgggcucgccgagcgc

SEQ ID NO: 406268 - RNA, 19 nt, Artificial Sequence
  Description of Artificial Sequence: Synthetic oligonucleotide
ggagagacgggcucgccga

SEQ ID NO: 406269 - RNA, 19 nt, Artificial Sequence
  Description of Artificial Sequence: Synthetic oligonucleotide
caauagcagaucucuagau

SEQ ID NO: 406270 - RNA, 19 nt, Artificial Sequence
  Description of Artificial Sequence: Synthetic oligonucleotide
cgcccuuacguuaccaucc

SEQ ID NO: 406271 - RNA, 19 nt, Artificial Sequence
  Description of Artificial Sequence: Synthetic oligonucleotide
agcgcccuuacguuaccau

SEQ ID NO: 406272 - RNA, 19 nt, Artificial Sequence
  Description of Artificial Sequence: Synthetic oligonucleotide
gagaccuaucucgguagga

SEQ ID NO: 406273 - RNA, 19 nt, Artificial Sequence
  Description of Artificial Sequence: Synthetic oligonucleotide
caggcugacugcaaagugu

SEQ ID NO: 406274 - RNA, 19 nt, Artificial Sequence
  Description of Artificial Sequence: Synthetic oligonucleotide
caugcacuugugaugugcu

SEQ ID NO: 406275 - RNA, 19 nt, Artificial Sequence
  Description of Artificial Sequence: Synthetic oligonucleotide
cucgccgagcgcccuuacg

SEQ ID NO: 406276 - RNA, 19 nt, Artificial Sequence
  Description of Artificial Sequence: Synthetic oligonucleotide
uccccggcuuuuacuuucu

SEQ ID NO: 406277 - RNA, 19 nt, Artificial Sequence
  Description of Artificial Sequence: Synthetic oligonucleotide
uucagucaauaagcacagu

SEQ ID NO: 406278 - RNA, 19 nt, Artificial Sequence
  Description of Artificial Sequence: Synthetic oligonucleotide
gacgcauuccuuauacuuu

SEQ ID NO: 406279 - RNA, 19 nt, Artificial Sequence
  Description of Artificial Sequence: Synthetic oligonucleotide
aucucgguaggaacuacuu

SEQ ID NO: 406280 - RNA, 19 nt, Artificial Sequence
  Description of Artificial Sequence: Synthetic oligonucleotide
gcacuuauaaugugcggcu

SEQ ID NO: 406281 - RNA, 19 nt, Artificial Sequence
  Description of Artificial Sequence: Synthetic oligonucleotide
caucgguuccaugggagga

SEQ ID NO: 406282 - RNA, 19 nt, Artificial Sequence
  Description of Artificial Sequence: Synthetic oligonucleotide
ccacuuuaagccucaagaa

SEQ ID NO: 406283 - RNA, 19 nt, Artificial Sequence
  Description of Artificial Sequence: Synthetic oligonucleotide
ggaaccuaguuuccauuaa

SEQ ID NO: 406284 - RNA, 19 nt, Artificial Sequence
  Description of Artificial Sequence: Synthetic oligonucleotide
uuacucagguguggguuuu

SEQ ID NO: 406285 - RNA, 19 nt, Artificial Sequence
  Description of Artificial Sequence: Synthetic oligonucleotide
acacaucauggcauauuaa

SEQ ID NO: 406286 - RNA, 19 nt, Artificial Sequence
  Description of Artificial Sequence: Synthetic oligonucleotide
agaagacguacaaggcaau

SEQ ID NO: 406287 - RNA, 19 nt, Artificial Sequence
  Description of Artificial Sequence: Synthetic oligonucleotide
agcaugcacuugugaugug

SEQ ID NO: 406288 - RNA, 19 nt, Artificial Sequence
  Description of Artificial Sequence: Synthetic oligonucleotide
ucgcuucgguuucuuccuc

SEQ ID NO: 406289 - RNA, 19 nt, Artificial Sequence
  Description of Artificial Sequence: Synthetic oligonucleotide
cuaagcuaguuuccuucua

SEQ ID NO: 406290 - RNA, 19 nt, Artificial Sequence
  Description of Artificial Sequence: Synthetic oligonucleotide
agccacauuugcgcugucu

SEQ ID NO: 406291 - RNA, 19 nt, Artificial Sequence
  Description of Artificial Sequence: Synthetic oligonucleotide
uccgggacaauggcacaaa

SEQ ID NO: 406292 - RNA, 19 nt, Artificial Sequence
  Description of Artificial Sequence: Synthetic oligonucleotide
gcaauaaaugcuccagaau

SEQ ID NO: 406293 - RNA, 19 nt, Artificial Sequence
  Description of Artificial Sequence: Synthetic oligonucleotide
cgguuucuaacucucucug

SEQ ID NO: 406294 - RNA, 19 nt, Artificial Sequence
  Description of Artificial Sequence: Synthetic oligonucleotide
auccacuacuaagcuaguu

SEQ ID NO: 406295 - RNA, 19 nt, Artificial Sequence
  Description of Artificial Sequence: Synthetic oligonucleotide
acgcaagucuacccuucua

SEQ ID NO: 406296 - RNA, 19 nt, Artificial Sequence
  Description of Artificial Sequence: Synthetic oligonucleotide
gcccuuacguuaccauccc

SEQ ID NO: 406297 - RNA, 19 nt, Artificial Sequence
  Description of Artificial Sequence: Synthetic oligonucleotide
aaugugcggcugccuucuu

SEQ ID NO: 406298 - RNA, 19 nt, Artificial Sequence
  Description of Artificial Sequence: Synthetic oligonucleotide
guaaauuccucgggacaua

SEQ ID NO: 406299 - RNA, 19 nt, Artificial Sequence
  Description of Artificial Sequence: Synthetic oligonucleotide
gcgggcgucgguucuccgg

SEQ ID NO: 406300 - RNA, 19 nt, Artificial Sequence
  Description of Artificial Sequence: Synthetic oligonucleotide
ugccuugcgaaggcuucuc

SEQ ID NO: 406301 - RNA, 19 nt, Artificial Sequence
  Description of Artificial Sequence: Synthetic oligonucleotide
gccaauuguugcuccggga

SEQ ID NO: 406302 - RNA, 19 nt, Artificial Sequence
  Description of Artificial Sequence: Synthetic oligonucleotide
cacugccgaagagcggggc

SEQ ID NO: 406303 - RNA, 19 nt, Artificial Sequence
  Description of Artificial Sequence: Synthetic oligonucleotide
ccggcuuuuacuuucucgu

SEQ ID NO: 406304 - RNA, 19 nt, Artificial Sequence
  Description of Artificial Sequence: Synthetic oligonucleotide
cuacuaagcuaguuuccuu

SEQ ID NO: 406305 - RNA, 19 nt, Artificial Sequence
  Description of Artificial Sequence: Synthetic oligonucleotide
gucuuccccggcuuuuacu

SEQ ID NO: 406306 - RNA, 19 nt, Artificial Sequence
  Description of Artificial Sequence: Synthetic oligonucleotide
gcgcccuuacguuaccauc

SEQ ID NO: 406307 - RNA, 19 nt, Artificial Sequence
  Description of Artificial Sequence: Synthetic oligonucleotide
cguuuucacaucacagcca

SEQ ID NO: 406308 - RNA, 19 nt, Artificial Sequence
  Description of Artificial Sequence: Synthetic oligonucleotide
ggaaggcgggcgucgguuc

SEQ ID NO: 406309 - RNA, 19 nt, Artificial Sequence
  Description of Artificial Sequence: Synthetic oligonucleotide
gcugaucaauugcuagucu

SEQ ID NO: 406310 - RNA, 19 nt, Artificial Sequence
  Description of Artificial Sequence: Synthetic oligonucleotide
cacagugguagugguaagu

SEQ ID NO: 406311 - RNA, 19 nt, Artificial Sequence
  Description of Artificial Sequence: Synthetic oligonucleotide
ccaauaguagcaccaggcu

SEQ ID NO: 406312 - RNA, 19 nt, Artificial Sequence
  Description of Artificial Sequence: Synthetic oligonucleotide
ccgggacaauggcacaaag

SEQ ID NO: 406313 - RNA, 19 nt, Artificial Sequence
  Description of Artificial Sequence: Synthetic oligonucleotide
ccauuucaucgguuccaug

SEQ ID NO: 406314 - RNA, 19 nt, Artificial Sequence
  Description of Artificial Sequence: Synthetic oligonucleotide
ccgagcgcccuuacguuac

SEQ ID NO: 406315 - RNA, 19 nt, Artificial Sequence
  Description of Artificial Sequence: Synthetic oligonucleotide
ccucgggacauauuuucaa

SEQ ID NO: 406316 - RNA, 19 nt, Artificial Sequence
  Description of Artificial Sequence: Synthetic oligonucleotide
cguacaaggcaauccacua

SEQ ID NO: 406317 - RNA, 19 nt, Artificial Sequence
  Description of Artificial Sequence: Synthetic oligonucleotide
gggcgacgggaggacagcg

SEQ ID NO: 406318 - RNA, 19 nt, Artificial Sequence
  Description of Artificial Sequence: Synthetic oligonucleotide
gagcgcccuuacguuacca

SEQ ID NO: 406319 - RNA, 19 nt, Artificial Sequence
  Description of Artificial Sequence: Synthetic oligonucleotide
caguugucuuauucucggu

SEQ ID NO: 406320 - RNA, 19 nt, Artificial Sequence
  Description of Artificial Sequence: Synthetic oligonucleotide
ggcgucgguucuccggcac

SEQ ID NO: 406321 - RNA, 19 nt, Artificial Sequence
  Description of Artificial Sequence: Synthetic oligonucleotide
cgggacauauuuucaaugu

SEQ ID NO: 406322 - RNA, 19 nt, Artificial Sequence
  Description of Artificial Sequence: Synthetic oligonucleotide
cucgcucgucauuuccgcu

SEQ ID NO: 406323 - RNA, 19 nt, Artificial Sequence
  Description of Artificial Sequence: Synthetic oligonucleotide
ggcgacgggaggacagcgc

SEQ ID NO: 406324 - RNA, 19 nt, Artificial Sequence
  Description of Artificial Sequence: Synthetic oligonucleotide
ggucuaacuucagugcuuu

SEQ ID NO: 406325 - RNA, 19 nt, Artificial Sequence
  Description of Artificial Sequence: Synthetic oligonucleotide
guccgcacuccuugucucu

SEQ ID NO: 406326 - RNA, 19 nt, Artificial Sequence
  Description of Artificial Sequence: Synthetic oligonucleotide
gagcggggcuccgucgcca

SEQ ID NO: 406327 - RNA, 19 nt, Artificial Sequence
  Description of Artificial Sequence: Synthetic oligonucleotide
agcgcccacgaggggagaa

SEQ ID NO: 406328 - RNA, 19 nt, Artificial Sequence
  Description of Artificial Sequence: Synthetic oligonucleotide
cgcacagugguagugguaa

SEQ ID NO: 406329 - RNA, 19 nt, Artificial Sequence
  Description of Artificial Sequence: Synthetic oligonucleotide
cugugccuuggucuaacuu

SEQ ID NO: 406330 - RNA, 19 nt, Artificial Sequence
  Description of Artificial Sequence: Synthetic oligonucleotide
cuuaagggacuagcaguuu

SEQ ID NO: 406331 - RNA, 19 nt, Artificial Sequence
  Description of Artificial Sequence: Synthetic oligonucleotide
cgucauuuccgcuaugauu

SEQ ID NO: 406332 - RNA, 19 nt, Artificial Sequence
  Description of Artificial Sequence: Synthetic oligonucleotide
gcucgucauuuccgcuaug

SEQ ID NO: 406333 - RNA, 19 nt, Artificial Sequence
  Description of Artificial Sequence: Synthetic oligonucleotide
ccuaucucgguaggaacua

SEQ ID NO: 406334 - RNA, 19 nt, Artificial Sequence
  Description of Artificial Sequence: Synthetic oligonucleotide
ggcgggcgucgguucuccg

SEQ ID NO: 406335 - RNA, 19 nt, Artificial Sequence
  Description of Artificial Sequence: Synthetic oligonucleotide
gccgagcgcccuuacguua

SEQ ID NO: 406336 - RNA, 19 nt, Artificial Sequence
  Description of Artificial Sequence: Synthetic oligonucleotide
guucuccggcacugccgaa

SEQ ID NO: 406337 - RNA, 19 nt, Artificial Sequence
  Description of Artificial Sequence: Synthetic oligonucleotide
gcgaaggcuucucucggau

SEQ ID NO: 406338 - RNA, 19 nt, Artificial Sequence
  Description of Artificial Sequence: Synthetic oligonucleotide
ccuuucauucgaggagaga

SEQ ID NO: 406339 - RNA, 19 nt, Artificial Sequence
  Description of Artificial Sequence: Synthetic oligonucleotide
gcgcccacgaggggagaag

SEQ ID NO: 406340 - RNA, 19 nt, Artificial Sequence
  Description of Artificial Sequence: Synthetic oligonucleotide
gcggggcuccgucgccagg

SEQ ID NO: 406341 - RNA, 19 nt, Artificial Sequence
  Description of Artificial Sequence: Synthetic oligonucleotide
ccaccaagacucucauuau

SEQ ID NO: 406342 - RNA, 19 nt, Artificial Sequence
  Description of Artificial Sequence: Synthetic oligonucleotide
cgagcgcccuuacguuacc

SEQ ID NO: 406343 - RNA, 19 nt, Artificial Sequence
  Description of Artificial Sequence: Synthetic oligonucleotide
gcucgccgagcgcccuuac

SEQ ID NO: 406344 - RNA, 19 nt, Artificial Sequence
  Description of Artificial Sequence: Synthetic oligonucleotide
guaaguccuguggcacguu

SEQ ID NO: 406345 - RNA, 19 nt, Artificial Sequence
  Description of Artificial Sequence: Synthetic oligonucleotide
ggcuccgucgccagggguu

SEQ ID NO: 406346 - RNA, 19 nt, Artificial Sequence
  Description of Artificial Sequence: Synthetic oligonucleotide
ccccggcuuuuacuuucuc

SEQ ID NO: 406347 - RNA, 19 nt, Artificial Sequence
  Description of Artificial Sequence: Synthetic oligonucleotide
cgggcgacgggaggacagc

SEQ ID NO: 406348 - RNA, 19 nt, Artificial Sequence
  Description of Artificial Sequence: Synthetic oligonucleotide
cgcucgucauuuccgcuau

SEQ ID NO: 406349 - RNA, 19 nt, Artificial Sequence
  Description of Artificial Sequence: Synthetic oligonucleotide
cccucggcccaggaacuua

SEQ ID NO: 406350 - RNA, 19 nt, Artificial Sequence
  Description of Artificial Sequence: Synthetic oligonucleotide
cuccgucgccagggguugu

SEQ ID NO: 406351 - RNA, 19 nt, Artificial Sequence
  Description of Artificial Sequence: Synthetic oligonucleotide
ccgcacuccuugucucuau

SEQ ID NO: 406352 - RNA, 19 nt, Artificial Sequence
  Description of Artificial Sequence: Synthetic oligonucleotide
ccgaagagcggggcuccgu

SEQ ID NO: 406353 - RNA, 19 nt, Artificial Sequence
  Description of Artificial Sequence: Synthetic oligonucleotide
cgccgagcgcccuuacguu

SEQ ID NO: 406354 - RNA, 19 nt, Artificial Sequence
  Description of Artificial Sequence: Synthetic oligonucleotide
gggcucgccgagcgcccuu

SEQ ID NO: 406355 - RNA, 19 nt, Artificial Sequence
  Description of Artificial Sequence: Synthetic oligonucleotide
ccgucgccagggguuguuu

SEQ ID NO: 406356 - RNA, 19 nt, Artificial Sequence
  Description of Artificial Sequence: Synthetic oligonucleotide
auaaauaagaccuugaucc

SEQ ID NO: 406357 - RNA, 19 nt, Artificial Sequence
  Description of Artificial Sequence: Synthetic oligonucleotide
aauauaauucuuuaagcag

SEQ ID NO: 406358 - RNA, 19 nt, Artificial Sequence
  Description of Artificial Sequence: Synthetic oligonucleotide
uuaacaugaggacagaaca

SEQ ID NO: 406359 - RNA, 19 nt, Artificial Sequence
  Description of Artificial Sequence: Synthetic oligonucleotide
uuaucagccauuuacacca

SEQ ID NO: 406360 - RNA, 19 nt, Artificial Sequence
  Description of Artificial Sequence: Synthetic oligonucleotide
ucaaucaccaaacacaauc

SEQ ID NO: 406361 - RNA, 19 nt, Artificial Sequence
  Description of Artificial Sequence: Synthetic oligonucleotide
aagaccucaacauuccggg

SEQ ID NO: 406362 - RNA, 19 nt, Artificial Sequence
  Description of Artificial Sequence: Synthetic oligonucleotide
ucagacgacugcaagaggg

SEQ ID NO: 406363 - RNA, 19 nt, Artificial Sequence
  Description of Artificial Sequence: Synthetic oligonucleotide
aagaguaugugcgggaugc

SEQ ID NO: 406364 - RNA, 19 nt, Artificial Sequence
  Description of Artificial Sequence: Synthetic oligonucleotide
uggagaacuaaauuauugg

SEQ ID NO: 406365 - RNA, 19 nt, Artificial Sequence
  Description of Artificial Sequence: Synthetic oligonucleotide
acaaucaccuggcaggugc

SEQ ID NO: 406366 - RNA, 19 nt, Artificial Sequence
  Description of Artificial Sequence: Synthetic oligonucleotide
auauaauucuuuaagcagg

SEQ ID NO: 406367 - RNA, 19 nt, Artificial Sequence
  Description of Artificial Sequence: Synthetic oligonucleotide
gaacuaaauuauuggacgg

SEQ ID NO: 406368 - RNA, 19 nt, Artificial Sequence
  Description of Artificial Sequence: Synthetic oligonucleotide
uggacagcggcccagaaag

SEQ ID NO: 406369 - RNA, 19 nt, Artificial Sequence
  Description of Artificial Sequence: Synthetic oligonucleotide
ucuuuuacaugacaagaca

SEQ ID NO: 406370 - RNA, 19 nt, Artificial Sequence
  Description of Artificial Sequence: Synthetic oligonucleotide
acggaggacaggcagagcc

SEQ ID NO: 406371 - RNA, 19 nt, Artificial Sequence
  Description of Artificial Sequence: Synthetic oligonucleotide
cuuugauucagaacagagg

SEQ ID NO: 406372 - RNA, 19 nt, Artificial Sequence
  Description of Artificial Sequence: Synthetic oligonucleotide
gaugccugacuccauaggg

SEQ ID NO: 406373 - RNA, 19 nt, Artificial Sequence
  Description of Artificial Sequence: Synthetic oligonucleotide
agauggacggcccagcugg

SEQ ID NO: 406374 - RNA, 19 nt, Artificial Sequence
  Description of Artificial Sequence: Synthetic oligonucleotide
uagcuuaacaugaggacag

SEQ ID NO: 406375 - RNA, 19 nt, Artificial Sequence
  Description of Artificial Sequence: Synthetic oligonucleotide
aacuaaauuauuggacggg

SEQ ID NO: 406376 - RNA, 19 nt, Artificial Sequence
  Description of Artificial Sequence: Synthetic oligonucleotide
uccaaauauggacagcggc

SEQ ID NO: 406377 - RNA, 19 nt, Artificial Sequence
  Description of Artificial Sequence: Synthetic oligonucleotide
guacagacaugauaggagg

SEQ ID NO: 406378 - RNA, 19 nt, Artificial Sequence
  Description of Artificial Sequence: Synthetic oligonucleotide
uaaauuauuggacgggguc

SEQ ID NO: 406379 - RNA, 19 nt, Artificial Sequence
  Description of Artificial Sequence: Synthetic oligonucleotide
uguaaggcuaacuggggag

SEQ ID NO: 406380 - RNA, 19 nt, Artificial Sequence
  Description of Artificial Sequence: Synthetic oligonucleotide
cagaaaguagaccaccugg

SEQ ID NO: 406381 - RNA, 19 nt, Artificial Sequence
  Description of Artificial Sequence: Synthetic oligonucleotide
aagugacugaagccgaguc

SEQ ID NO: 406382 - RNA, 19 nt, Artificial Sequence
  Description of Artificial Sequence: Synthetic oligonucleotide
aaguagaccaccugggcga

SEQ ID NO: 406383 - RNA, 19 nt, Artificial Sequence
  Description of Artificial Sequence: Synthetic oligonucleotide
cuuaucagccauuuacacc

SEQ ID NO: 406384 - RNA, 19 nt, Artificial Sequence
  Description of Artificial Sequence: Synthetic oligonucleotide
aaagaccucaacauuccgg

SEQ ID NO: 406385 - RNA, 19 nt, Artificial Sequence
  Description of Artificial Sequence: Synthetic oligonucleotide
aaacaguggggcgaugacc

SEQ ID NO: 406386 - RNA, 19 nt, Artificial Sequence
  Description of Artificial Sequence: Synthetic oligonucleotide
uccuagcuuaacaugagga

SEQ ID NO: 406387 - RNA, 19 nt, Artificial Sequence
  Description of Artificial Sequence: Synthetic oligonucleotide
acuaaauuauuggacgggg

SEQ ID NO: 406388 - RNA, 19 nt, Artificial Sequence
  Description of Artificial Sequence: Synthetic oligonucleotide
uuuacaccaagugaagcag

SEQ ID NO: 406389 - RNA, 19 nt, Artificial Sequence
  Description of Artificial Sequence: Synthetic oligonucleotide
ugggcgaugccaaacagug

SEQ ID NO: 406390 - RNA, 19 nt, Artificial Sequence
  Description of Artificial Sequence: Synthetic oligonucleotide
aauugauguggccgcacag

SEQ ID NO: 406391 - RNA, 19 nt, Artificial Sequence
  Description of Artificial Sequence: Synthetic oligonucleotide
aaauuauuggacgggguca

SEQ ID NO: 406392 - RNA, 19 nt, Artificial Sequence
  Description of Artificial Sequence: Synthetic oligonucleotide
ucauaggcacacaaagacc

SEQ ID NO: 406393 - RNA, 19 nt, Artificial Sequence
  Description of Artificial Sequence: Synthetic oligonucleotide
uaggacucuaucagaagag

SEQ ID NO: 406394 - RNA, 19 nt, Artificial Sequence
  Description of Artificial Sequence: Synthetic oligonucleotide
cucauuaacaccucgcuca

SEQ ID NO: 406395 - RNA, 19 nt, Artificial Sequence
  Description of Artificial Sequence: Synthetic oligonucleotide
agcaggggcaaacagacug

SEQ ID NO: 406396 - RNA, 19 nt, Artificial Sequence
  Description of Artificial Sequence: Synthetic oligonucleotide
cuggagaacuaaauuauug

SEQ ID NO: 406397 - RNA, 19 nt, Artificial Sequence
  Description of Artificial Sequence: Synthetic oligonucleotide
caugcguuggccauucugc

SEQ ID NO: 406398 - RNA, 19 nt, Artificial Sequence
  Description of Artificial Sequence: Synthetic oligonucleotide
aauuauuggacggggucag

SEQ ID NO: 406399 - RNA, 19 nt, Artificial Sequence
  Description of Artificial Sequence: Synthetic oligonucleotide
aucuuuuacaugacaagac

SEQ ID NO: 406400 - RNA, 19 nt, Artificial Sequence
  Description of Artificial Sequence: Synthetic oligonucleotide
aacaugaggacagaacacu

SEQ ID NO: 406401 - RNA, 19 nt, Artificial Sequence
  Description of Artificial Sequence: Synthetic oligonucleotide
uguuuguuggggaggacug

SEQ ID NO: 406402 - RNA, 19 nt, Artificial Sequence
  Description of Artificial Sequence: Synthetic oligonucleotide
uuacaccaagugaagcagg

SEQ ID NO: 406403 - RNA, 19 nt, Artificial Sequence
  Description of Artificial Sequence: Synthetic oligonucleotide
augcccagaaaguagacca

SEQ ID NO: 406404 - RNA, 19 nt, Artificial Sequence
  Description of Artificial Sequence: Synthetic oligonucleotide
gaugccaaacaguggggcg

SEQ ID NO: 406405 - RNA, 19 nt, Artificial Sequence
  Description of Artificial Sequence: Synthetic oligonucleotide
ugauucagaacagaggauc

SEQ ID NO: 406406 - RNA, 19 nt, Artificial Sequence
  Description of Artificial Sequence: Synthetic oligonucleotide
uggacuacaggguaggguc

SEQ ID NO: 406407 - RNA, 19 nt, Artificial Sequence
  Description of Artificial Sequence: Synthetic oligonucleotide
agcaauucggccugcaucu

SEQ ID NO: 406408 - RNA, 19 nt, Artificial Sequence
  Description of Artificial Sequence: Synthetic oligonucleotide
acgagggucagguuuacag

SEQ ID NO: 406409 - RNA, 19 nt, Artificial Sequence
  Description of Artificial Sequence: Synthetic oligonucleotide
gaagaccugaggcauacac

SEQ ID NO: 406410 - RNA, 19 nt, Artificial Sequence
  Description of Artificial Sequence: Synthetic oligonucleotide
ugcuuaucagccauuuaca

SEQ ID NO: 406411 - RNA, 19 nt, Artificial Sequence
  Description of Artificial Sequence: Synthetic oligonucleotide
cagucaaucaccaaacaca

SEQ ID NO: 406412 - RNA, 19 nt, Artificial Sequence
  Description of Artificial Sequence: Synthetic oligonucleotide
agaaaucccgaguaagugu

SEQ ID NO: 406413 - RNA, 19 nt, Artificial Sequence
  Description of Artificial Sequence: Synthetic oligonucleotide
auugauguggccgcacagc

SEQ ID NO: 406414 - RNA, 19 nt, Artificial Sequence
  Description of Artificial Sequence: Synthetic oligonucleotide
agugaagcaggaggcaucc

SEQ ID NO: 406415 - RNA, 19 nt, Artificial Sequence
  Description of Artificial Sequence: Synthetic oligonucleotide
uuccaaauauggacagcgg

SEQ ID NO: 406416 - RNA, 19 nt, Artificial Sequence
  Description of Artificial Sequence: Synthetic oligonucleotide
ugaugucugaagaagucau

SEQ ID NO: 406417 - RNA, 19 nt, Artificial Sequence
  Description of Artificial Sequence: Synthetic oligonucleotide
gaauccuagcuuaacauga

SEQ ID NO: 406418 - RNA, 19 nt, Artificial Sequence
  Description of Artificial Sequence: Synthetic oligonucleotide
ucagccauuuacaccaagu

SEQ ID NO: 406419 - RNA, 19 nt, Artificial Sequence
  Description of Artificial Sequence: Synthetic oligonucleotide
caggucacgggucagcugg

SEQ ID NO: 406420 - RNA, 19 nt, Artificial Sequence
  Description of Artificial Sequence: Synthetic oligonucleotide
acaggaagaguaugugcgg

SEQ ID NO: 406421 - RNA, 19 nt, Artificial Sequence
  Description of Artificial Sequence: Synthetic oligonucleotide
uguccauccuuagagagcu

SEQ ID NO: 406422 - RNA, 19 nt, Artificial Sequence
  Description of Artificial Sequence: Synthetic oligonucleotide
caaauauggacagcggccc

SEQ ID NO: 406423 - RNA, 19 nt, Artificial Sequence
  Description of Artificial Sequence: Synthetic oligonucleotide
caaccgugaaguaggaggc

SEQ ID NO: 406424 - RNA, 19 nt, Artificial Sequence
  Description of Artificial Sequence: Synthetic oligonucleotide
acagacaugauaggagggg

SEQ ID NO: 406425 - RNA, 19 nt, Artificial Sequence
  Description of Artificial Sequence: Synthetic oligonucleotide
aacaguggggcgaugacca

SEQ ID NO: 406426 - RNA, 19 nt, Artificial Sequence
  Description of Artificial Sequence: Synthetic oligonucleotide
uguagaggccagcaaugcc

SEQ ID NO: 406427 - RNA, 19 nt, Artificial Sequence
  Description of Artificial Sequence: Synthetic oligonucleotide
guaugcgccuuucaggaag

SEQ ID NO: 406428 - RNA, 19 nt, Artificial Sequence
  Description of Artificial Sequence: Synthetic oligonucleotide
acaugauaggaggggaggc

SEQ ID NO: 406429 - RNA, 19 nt, Artificial Sequence
  Description of Artificial Sequence: Synthetic oligonucleotide
ugaggcauacacagcacac

SEQ ID NO: 406430 - RNA, 19 nt, Artificial Sequence
  Description of Artificial Sequence: Synthetic oligonucleotide
uaugcgccuuucaggaagg

SEQ ID NO: 406431 - RNA, 19 nt, Artificial Sequence
  Description of Artificial Sequence: Synthetic oligonucleotide
agcacacaagcacaggaug

SEQ ID NO: 406432 - RNA, 19 nt, Artificial Sequence
  Description of Artificial Sequence: Synthetic oligonucleotide
agccauuuacaccaaguga

SEQ ID NO: 406433 - RNA, 19 nt, Artificial Sequence
  Description of Artificial Sequence: Synthetic oligonucleotide
guaggacucuaucagaaga

SEQ ID NO: 406434 - RNA, 19 nt, Artificial Sequence
  Description of Artificial Sequence: Synthetic oligonucleotide
uacaccaagugaagcagga

SEQ ID NO: 406435 - RNA, 19 nt, Artificial Sequence
  Description of Artificial Sequence: Synthetic oligonucleotide
aauauggacagcggcccag

SEQ ID NO: 406436 - RNA, 19 nt, Artificial Sequence
  Description of Artificial Sequence: Synthetic oligonucleotide
gugggauccugguagaggc

SEQ ID NO: 406437 - RNA, 19 nt, Artificial Sequence
  Description of Artificial Sequence: Synthetic oligonucleotide
cuuagagagcugaugucug

SEQ ID NO: 406438 - RNA, 19 nt, Artificial Sequence
  Description of Artificial Sequence: Synthetic oligonucleotide
aauuuugggugggugggug

SEQ ID NO: 406439 - RNA, 19 nt, Artificial Sequence
  Description of Artificial Sequence: Synthetic oligonucleotide
uagcccucagagcggaugg

SEQ ID NO: 406440 - RNA, 19 nt, Artificial Sequence
  Description of Artificial Sequence: Synthetic oligonucleotide
gaaaucccgaguaaguguc

SEQ ID NO: 406441 - RNA, 19 nt, Artificial Sequence
  Description of Artificial Sequence: Synthetic oligonucleotide
auccuagcuuaacaugagg

SEQ ID NO: 406442 - RNA, 19 nt, Artificial Sequence
  Description of Artificial Sequence: Synthetic oligonucleotide
agugcacggcaguaugcgc

SEQ ID NO: 406443 - RNA, 19 nt, Artificial Sequence
  Description of Artificial Sequence: Synthetic oligonucleotide
uaagggccuauccccaugc

SEQ ID NO: 406444 - RNA, 19 nt, Artificial Sequence
  Description of Artificial Sequence: Synthetic oligonucleotide
aaggacacauagaaaggug

SEQ ID NO: 406445 - RNA, 19 nt, Artificial Sequence
  Description of Artificial Sequence: Synthetic oligonucleotide
agucagaccaugcuggcau

SEQ ID NO: 406446 - RNA, 19 nt, Artificial Sequence
  Description of Artificial Sequence: Synthetic oligonucleotide
agguuuacagcugcucccc

SEQ ID NO: 406447 - RNA, 19 nt, Artificial Sequence
  Description of Artificial Sequence: Synthetic oligonucleotide
cauuuacaccaagugaagc

SEQ ID NO: 406448 - RNA, 19 nt, Artificial Sequence
  Description of Artificial Sequence: Synthetic oligonucleotide
uuaacaccucgcucaagug

SEQ ID NO: 406449 - RNA, 19 nt, Artificial Sequence
  Description of Artificial Sequence: Synthetic oligonucleotide
aaaucccgaguaagugucc

SEQ ID NO: 406450 - RNA, 19 nt, Artificial Sequence
  Description of Artificial Sequence: Synthetic oligonucleotide
uauuggacggggucagcag

SEQ ID NO: 406451 - RNA, 19 nt, Artificial Sequence
  Description of Artificial Sequence: Synthetic oligonucleotide
ccaaauauggacagcggcc

SEQ ID NO: 406452 - RNA, 19 nt, Artificial Sequence
  Description of Artificial Sequence: Synthetic oligonucleotide
caggugaccccgauuagcc

SEQ ID NO: 406453 - RNA, 19 nt, Artificial Sequence
  Description of Artificial Sequence: Synthetic oligonucleotide
aauccuagcuuaacaugag

SEQ ID NO: 406454 - RNA, 19 nt, Artificial Sequence
  Description of Artificial Sequence: Synthetic oligonucleotide
uacaugccgaaguagcccu

SEQ ID NO: 406455 - RNA, 19 nt, Artificial Sequence
  Description of Artificial Sequence: Synthetic oligonucleotide
cugguagaggcagaaagag

SEQ ID NO: 406456 - RNA, 19 nt, Artificial Sequence
  Description of Artificial Sequence: Synthetic oligonucleotide
accgugaaguaggaggccc

SEQ ID NO: 406457 - RNA, 19 nt, Artificial Sequence
  Description of Artificial Sequence: Synthetic oligonucleotide
ggagcaaccgugaaguagg

SEQ ID NO: 406458 - RNA, 19 nt, Artificial Sequence
  Description of Artificial Sequence: Synthetic oligonucleotide
gaagcaggaggcaucccgg

SEQ ID NO: 406459 - RNA, 19 nt, Artificial Sequence
  Description of Artificial Sequence: Synthetic oligonucleotide
ucgggcuugagggacacag

SEQ ID NO: 406460 - RNA, 19 nt, Artificial Sequence
  Description of Artificial Sequence: Synthetic oligonucleotide
cauaggcacacaaagaccu

SEQ ID NO: 406461 - RNA, 19 nt, Artificial Sequence
  Description of Artificial Sequence: Synthetic oligonucleotide
uuauuggacggggucagca

SEQ ID NO: 406462 - RNA, 19 nt, Artificial Sequence
  Description of Artificial Sequence: Synthetic oligonucleotide
ugauaggaggggaggcucc

SEQ ID NO: 406463 - RNA, 19 nt, Artificial Sequence
  Description of Artificial Sequence: Synthetic oligonucleotide
auagggaaaggcaacugug

SEQ ID NO: 406464 - RNA, 19 nt, Artificial Sequence
  Description of Artificial Sequence: Synthetic oligonucleotide
guaugugcgggaugccugg

SEQ ID NO: 406465 - RNA, 19 nt, Artificial Sequence
  Description of Artificial Sequence: Synthetic oligonucleotide
gaccucaacauuccggguc

SEQ ID NO: 406466 - RNA, 19 nt, Artificial Sequence
  Description of Artificial Sequence: Synthetic oligonucleotide
agccucggagaccggagcc

SEQ ID NO: 406467 - RNA, 19 nt, Artificial Sequence
  Description of Artificial Sequence: Synthetic oligonucleotide
ggacagaacacuccagucc

SEQ ID NO: 406468 - RNA, 19 nt, Artificial Sequence
  Description of Artificial Sequence: Synthetic oligonucleotide
ggaauccuagcuuaacaug

SEQ ID NO: 406469 - RNA, 19 nt, Artificial Sequence
  Description of Artificial Sequence: Synthetic oligonucleotide
uggucagacgacugcaaga

SEQ ID NO: 406470 - RNA, 19 nt, Artificial Sequence
  Description of Artificial Sequence: Synthetic oligonucleotide
gaacacuccaguccuccug

SEQ ID NO: 406471 - RNA, 19 nt, Artificial Sequence
  Description of Artificial Sequence: Synthetic oligonucleotide
agccuggucagacgacugc

SEQ ID NO: 406472 - RNA, 19 nt, Artificial Sequence
  Description of Artificial Sequence: Synthetic oligonucleotide
cauagaaaggugacuucuc

SEQ ID NO: 406473 - RNA, 19 nt, Artificial Sequence
  Description of Artificial Sequence: Synthetic oligonucleotide
gaagaguaugugcgggaug

SEQ ID NO: 406474 - RNA, 19 nt, Artificial Sequence
  Description of Artificial Sequence: Synthetic oligonucleotide
uuaagggccuauccccaug

SEQ ID NO: 406475 - RNA, 19 nt, Artificial Sequence
  Description of Artificial Sequence: Synthetic oligonucleotide
gcaguaugcgccuuucagg

SEQ ID NO: 406476 - RNA, 19 nt, Artificial Sequence
  Description of Artificial Sequence: Synthetic oligonucleotide
acgugggcacagcaaauuc

SEQ ID NO: 406477 - RNA, 19 nt, Artificial Sequence
  Description of Artificial Sequence: Synthetic oligonucleotide
cuagcuuaacaugaggaca

SEQ ID NO: 406478 - RNA, 19 nt, Artificial Sequence
  Description of Artificial Sequence: Synthetic oligonucleotide
ucagaagauggacggccca

SEQ ID NO: 406479 - RNA, 19 nt, Artificial Sequence
  Description of Artificial Sequence: Synthetic oligonucleotide
uugauucagaacagaggau

SEQ ID NO: 406480 - RNA, 19 nt, Artificial Sequence
  Description of Artificial Sequence: Synthetic oligonucleotide
acaugcguuggccauucug

SEQ ID NO: 406481 - RNA, 19 nt, Artificial Sequence
  Description of Artificial Sequence: Synthetic oligonucleotide
uccauccuuagagagcuga

SEQ ID NO: 406482 - RNA, 19 nt, Artificial Sequence
  Description of Artificial Sequence: Synthetic oligonucleotide
gaugccugggaucagaauu

SEQ ID NO: 406483 - RNA, 19 nt, Artificial Sequence
  Description of Artificial Sequence: Synthetic oligonucleotide
ugggaucagaauugaugug

SEQ ID NO: 406484 - RNA, 19 nt, Artificial Sequence
  Description of Artificial Sequence: Synthetic oligonucleotide
cagcuuccaagguacagac

SEQ ID NO: 406485 - RNA, 19 nt, Artificial Sequence
  Description of Artificial Sequence: Synthetic oligonucleotide
aggugaccccgauuagccc

SEQ ID NO: 406486 - RNA, 19 nt, Artificial Sequence
  Description of Artificial Sequence: Synthetic oligonucleotide
caguaugcgccuuucagga

SEQ ID NO: 406487 - RNA, 19 nt, Artificial Sequence
  Description of Artificial Sequence: Synthetic oligonucleotide
uucuguccauccuuagaga

SEQ ID NO: 406488 - RNA, 19 nt, Artificial Sequence
  Description of Artificial Sequence: Synthetic oligonucleotide
agucaaucaccaaacacaa

SEQ ID NO: 406489 - RNA, 19 nt, Artificial Sequence
  Description of Artificial Sequence: Synthetic oligonucleotide
gaaguagcccucagagcgg

SEQ ID NO: 406490 - RNA, 19 nt, Artificial Sequence
  Description of Artificial Sequence: Synthetic oligonucleotide
agaauugauguggccgcac

SEQ ID NO: 406491 - RNA, 19 nt, Artificial Sequence
  Description of Artificial Sequence: Synthetic oligonucleotide
gaauugauguggccgcaca

SEQ ID NO: 406492 - RNA, 19 nt, Artificial Sequence
  Description of Artificial Sequence: Synthetic oligonucleotide
gcuuuccaaauauggacag

SEQ ID NO: 406493 - RNA, 19 nt, Artificial Sequence
  Description of Artificial Sequence: Synthetic oligonucleotide
gcguuggccauucugcugg

SEQ ID NO: 406494 - RNA, 19 nt, Artificial Sequence
  Description of Artificial Sequence: Synthetic oligonucleotide
uggcauacaugcguuggcc

SEQ ID NO: 406495 - RNA, 19 nt, Artificial Sequence
  Description of Artificial Sequence: Synthetic oligonucleotide
agacugauggacggaggac

SEQ ID NO: 406496 - RNA, 19 nt, Artificial Sequence
  Description of Artificial Sequence: Synthetic oligonucleotide
uucggccugcaucuugcag

SEQ ID NO: 406497 - RNA, 19 nt, Artificial Sequence
  Description of Artificial Sequence: Synthetic oligonucleotide
ggcaguaugcgccuuucag

SEQ ID NO: 406498 - RNA, 19 nt, Artificial Sequence
  Description of Artificial Sequence: Synthetic oligonucleotide
uccccugccuuguuguuug

SEQ ID NO: 406499 - RNA, 19 nt, Artificial Sequence
  Description of Artificial Sequence: Synthetic oligonucleotide
gcagccgugucuuagccag

SEQ ID NO: 406500 - RNA, 19 nt, Artificial Sequence
  Description of Artificial Sequence: Synthetic oligonucleotide
guacaugccgaaguagccc

SEQ ID NO: 406501 - RNA, 19 nt, Artificial Sequence
  Description of Artificial Sequence: Synthetic oligonucleotide
agggccuauccccaugcag

SEQ ID NO: 406502 - RNA, 19 nt, Artificial Sequence
  Description of Artificial Sequence: Synthetic oligonucleotide
ucaugucuccagaucuuuc

SEQ ID NO: 406503 - RNA, 19 nt, Artificial Sequence
  Description of Artificial Sequence: Synthetic oligonucleotide
uggcccaggcgccacacug

SEQ ID NO: 406504 - RNA, 19 nt, Artificial Sequence
  Description of Artificial Sequence: Synthetic oligonucleotide
cuccauagggaaaggcaac

SEQ ID NO: 406505 - RNA, 19 nt, Artificial Sequence
  Description of Artificial Sequence: Synthetic oligonucleotide
auacaugcguuggccauuc

SEQ ID NO: 406506 - RNA, 19 nt, Artificial Sequence
  Description of Artificial Sequence: Synthetic oligonucleotide
ggucagacgacugcaagag

SEQ ID NO: 406507 - RNA, 19 nt, Artificial Sequence
  Description of Artificial Sequence: Synthetic oligonucleotide
caucacagggguugacagc

SEQ ID NO: 406508 - RNA, 19 nt, Artificial Sequence
  Description of Artificial Sequence: Synthetic oligonucleotide
auuauuggacggggucagc

SEQ ID NO: 406509 - RNA, 19 nt, Artificial Sequence
  Description of Artificial Sequence: Synthetic oligonucleotide
uggggaacacacaggugac

SEQ ID NO: 406510 - RNA, 19 nt, Artificial Sequence
  Description of Artificial Sequence: Synthetic oligonucleotide
gagggucagguuuacagcu

SEQ ID NO: 406511 - RNA, 19 nt, Artificial Sequence
  Description of Artificial Sequence: Synthetic oligonucleotide
ugacuccauagggaaaggc

SEQ ID NO: 406512 - RNA, 19 nt, Artificial Sequence
  Description of Artificial Sequence: Synthetic oligonucleotide
uaaggcuaacuggggaggc

SEQ ID NO: 406513 - RNA, 19 nt, Artificial Sequence
  Description of Artificial Sequence: Synthetic oligonucleotide
ugugcgggaugccugggau

SEQ ID NO: 406514 - RNA, 19 nt, Artificial Sequence
  Description of Artificial Sequence: Synthetic oligonucleotide
cuggucagacgacugcaag

SEQ ID NO: 406515 - RNA, 19 nt, Artificial Sequence
  Description of Artificial Sequence: Synthetic oligonucleotide
ucaacauuccgggucccac

SEQ ID NO: 406516 - RNA, 19 nt, Artificial Sequence
  Description of Artificial Sequence: Synthetic oligonucleotide
ugucuuagccaggucgaug

SEQ ID NO: 406517 - RNA, 19 nt, Artificial Sequence
  Description of Artificial Sequence: Synthetic oligonucleotide
cuaucagaagagccaccag

SEQ ID NO: 406518 - RNA, 19 nt, Artificial Sequence
  Description of Artificial Sequence: Synthetic oligonucleotide
ccuagcuuaacaugaggac

SEQ ID NO: 406519 - RNA, 19 nt, Artificial Sequence
  Description of Artificial Sequence: Synthetic oligonucleotide
aguaugugcgggaugccug

SEQ ID NO: 406520 - RNA, 19 nt, Artificial Sequence
  Description of Artificial Sequence: Synthetic oligonucleotide
ugcuuugauucagaacaga

SEQ ID NO: 406521 - RNA, 19 nt, Artificial Sequence
  Description of Artificial Sequence: Synthetic oligonucleotide
gaguaggacucuaucagaa

SEQ ID NO: 406522 - RNA, 19 nt, Artificial Sequence
  Description of Artificial Sequence: Synthetic oligonucleotide
cuggcauacaugcguuggc

SEQ ID NO: 406523 - RNA, 19 nt, Artificial Sequence
  Description of Artificial Sequence: Synthetic oligonucleotide
gagagaccaguccuucuca

SEQ ID NO: 406524 - RNA, 19 nt, Artificial Sequence
  Description of Artificial Sequence: Synthetic oligonucleotide
ugcguuggccauucugcug

SEQ ID NO: 406525 - RNA, 19 nt, Artificial Sequence
  Description of Artificial Sequence: Synthetic oligonucleotide
gccauuuacaccaagugaa

SEQ ID NO: 406526 - RNA, 19 nt, Artificial Sequence
  Description of Artificial Sequence: Synthetic oligonucleotide
agaguaugugcgggaugcc

SEQ ID NO: 406527 - RNA, 19 nt, Artificial Sequence
  Description of Artificial Sequence: Synthetic oligonucleotide
ucagcccguaggcugggga

SEQ ID NO: 406528 - RNA, 19 nt, Artificial Sequence
  Description of Artificial Sequence: Synthetic oligonucleotide
agguagugucacugggaag

SEQ ID NO: 406529 - RNA, 19 nt, Artificial Sequence
  Description of Artificial Sequence: Synthetic oligonucleotide
ccgugucuuagccaggucg

SEQ ID NO: 406530 - RNA, 19 nt, Artificial Sequence
  Description of Artificial Sequence: Synthetic oligonucleotide
cccuuaagggccuaucccc

SEQ ID NO: 406531 - RNA, 19 nt, Artificial Sequence
  Description of Artificial Sequence: Synthetic oligonucleotide
ggagccaguggacuacagg

SEQ ID NO: 406532 - RNA, 19 nt, Artificial Sequence
  Description of Artificial Sequence: Synthetic oligonucleotide
uuggacggggucagcagaa

SEQ ID NO: 406533 - RNA, 19 nt, Artificial Sequence
  Description of Artificial Sequence: Synthetic oligonucleotide
cagugcacggcaguaugcg

SEQ ID NO: 406534 - RNA, 19 nt, Artificial Sequence
  Description of Artificial Sequence: Synthetic oligonucleotide
cuucaugcccacccuuuac

SEQ ID NO: 406535 - RNA, 19 nt, Artificial Sequence
  Description of Artificial Sequence: Synthetic oligonucleotide
gucagacgacugcaagagg

SEQ ID NO: 406536 - RNA, 19 nt, Artificial Sequence
  Description of Artificial Sequence: Synthetic oligonucleotide
ugcccagaaaguagaccac

SEQ ID NO: 406537 - RNA, 19 nt, Artificial Sequence
  Description of Artificial Sequence: Synthetic oligonucleotide
uggacggcccagcugguuc

SEQ ID NO: 406538 - RNA, 19 nt, Artificial Sequence
  Description of Artificial Sequence: Synthetic oligonucleotide
caaucaccuggcaggugcc

SEQ ID NO: 406539 - RNA, 19 nt, Artificial Sequence
  Description of Artificial Sequence: Synthetic oligonucleotide
auucagaacagaggaucca

SEQ ID NO: 406540 - RNA, 19 nt, Artificial Sequence
  Description of Artificial Sequence: Synthetic oligonucleotide
cagccugccaggaaggaca

SEQ ID NO: 406541 - RNA, 19 nt, Artificial Sequence
  Description of Artificial Sequence: Synthetic oligonucleotide
uguggacccugcacccucc

SEQ ID NO: 406542 - RNA, 19 nt, Artificial Sequence
  Description of Artificial Sequence: Synthetic oligonucleotide
cucaagugacugaagccga

SEQ ID NO: 406543 - RNA, 19 nt, Artificial Sequence
  Description of Artificial Sequence: Synthetic oligonucleotide
ggguguucaggccagguga

SEQ ID NO: 406544 - RNA, 19 nt, Artificial Sequence
  Description of Artificial Sequence: Synthetic oligonucleotide
augccugggaucagaauug

SEQ ID NO: 406545 - RNA, 19 nt, Artificial Sequence
  Description of Artificial Sequence: Synthetic oligonucleotide
aaguagcccucagagcgga

SEQ ID NO: 406546 - RNA, 19 nt, Artificial Sequence
  Description of Artificial Sequence: Synthetic oligonucleotide
ggaugccugacuccauagg

SEQ ID NO: 406547 - RNA, 19 nt, Artificial Sequence
  Description of Artificial Sequence: Synthetic oligonucleotide
ugccgaaguagcccucaga

SEQ ID NO: 406548 - RNA, 19 nt, Artificial Sequence
  Description of Artificial Sequence: Synthetic oligonucleotide
guuuguagaccaggagagc

SEQ ID NO: 406549 - RNA, 19 nt, Artificial Sequence
  Description of Artificial Sequence: Synthetic oligonucleotide
gauaggaggggaggcuccc

SEQ ID NO: 406550 - RNA, 19 nt, Artificial Sequence
  Description of Artificial Sequence: Synthetic oligonucleotide
agagugggauccugguaga

SEQ ID NO: 406551 - RNA, 19 nt, Artificial Sequence
  Description of Artificial Sequence: Synthetic oligonucleotide
augcguuggccauucugcu

SEQ ID NO: 406552 - RNA, 19 nt, Artificial Sequence
  Description of Artificial Sequence: Synthetic oligonucleotide
gaccccgauuagcccagcg

SEQ ID NO: 406553 - RNA, 19 nt, Artificial Sequence
  Description of Artificial Sequence: Synthetic oligonucleotide
gugcacggcaguaugcgcc

SEQ ID NO: 406554 - RNA, 19 nt, Artificial Sequence
  Description of Artificial Sequence: Synthetic oligonucleotide
ugcacggcaguaugcgccu

SEQ ID NO: 406555 - RNA, 19 nt, Artificial Sequence
  Description of Artificial Sequence: Synthetic oligonucleotide
cuguaaggcuaacugggga

SEQ ID NO: 406556 - RNA, 19 nt, Artificial Sequence
  Description of Artificial Sequence: Synthetic oligonucleotide
agccaggucgauggggaac

SEQ ID NO: 406557 - RNA, 19 nt, Artificial Sequence
  Description of Artificial Sequence: Synthetic oligonucleotide
uguggccgcacagccagcc

SEQ ID NO: 406558 - RNA, 19 nt, Artificial Sequence
  Description of Artificial Sequence: Synthetic oligonucleotide
augccaaacaguggggcga

SEQ ID NO: 406559 - RNA, 19 nt, Artificial Sequence
  Description of Artificial Sequence: Synthetic oligonucleotide
cugaggcauacacagcaca

SEQ ID NO: 406560 - RNA, 19 nt, Artificial Sequence
  Description of Artificial Sequence: Synthetic oligonucleotide
ccuguaaggcuaacugggg

SEQ ID NO: 406561 - RNA, 19 nt, Artificial Sequence
  Description of Artificial Sequence: Synthetic oligonucleotide
cuaaauuauuggacggggu

SEQ ID NO: 406562 - RNA, 19 nt, Artificial Sequence
  Description of Artificial Sequence: Synthetic oligonucleotide
auaggcacacaaagaccuc

SEQ ID NO: 406563 - RNA, 19 nt, Artificial Sequence
  Description of Artificial Sequence: Synthetic oligonucleotide
ggcgaugaccagugcacgg

SEQ ID NO: 406564 - RNA, 19 nt, Artificial Sequence
  Description of Artificial Sequence: Synthetic oligonucleotide
aguggggcgaugaccagug

SEQ ID NO: 406565 - RNA, 19 nt, Artificial Sequence
  Description of Artificial Sequence: Synthetic oligonucleotide
gcuggcauacaugcguugg

SEQ ID NO: 406566 - RNA, 19 nt, Artificial Sequence
  Description of Artificial Sequence: Synthetic oligonucleotide
gacuacaggguagggucug

SEQ ID NO: 406567 - RNA, 19 nt, Artificial Sequence
  Description of Artificial Sequence: Synthetic oligonucleotide
aaggcuaacuggggaggca

SEQ ID NO: 406568 - RNA, 19 nt, Artificial Sequence
  Description of Artificial Sequence: Synthetic oligonucleotide
ggugaccccgauuagccca

SEQ ID NO: 406569 - RNA, 19 nt, Artificial Sequence
  Description of Artificial Sequence: Synthetic oligonucleotide
accccgauuagcccagcga

SEQ ID NO: 406570 - RNA, 19 nt, Artificial Sequence
  Description of Artificial Sequence: Synthetic oligonucleotide
uaugugcgggaugccuggg

SEQ ID NO: 406571 - RNA, 19 nt, Artificial Sequence
  Description of Artificial Sequence: Synthetic oligonucleotide
ucagaccaugcuggcauac

SEQ ID NO: 406572 - RNA, 19 nt, Artificial Sequence
  Description of Artificial Sequence: Synthetic oligonucleotide
ggagagaccaguccuucuc

SEQ ID NO: 406573 - RNA, 19 nt, Artificial Sequence
  Description of Artificial Sequence: Synthetic oligonucleotide
cauagggaaaggcaacugu

SEQ ID NO: 406574 - RNA, 19 nt, Artificial Sequence
  Description of Artificial Sequence: Synthetic oligonucleotide
cagguagugucacugggaa

SEQ ID NO: 406575 - RNA, 19 nt, Artificial Sequence
  Description of Artificial Sequence: Synthetic oligonucleotide
ggaguaggacucuaucaga

SEQ ID NO: 406576 - RNA, 19 nt, Artificial Sequence
  Description of Artificial Sequence: Synthetic oligonucleotide
uauggacagcggcccagaa

SEQ ID NO: 406577 - RNA, 19 nt, Artificial Sequence
  Description of Artificial Sequence: Synthetic oligonucleotide
gaaggggacaucccugagu

SEQ ID NO: 406578 - RNA, 19 nt, Artificial Sequence
  Description of Artificial Sequence: Synthetic oligonucleotide
caggcugaucugcuuauca

SEQ ID NO: 406579 - RNA, 19 nt, Artificial Sequence
  Description of Artificial Sequence: Synthetic oligonucleotide
aaucaccuggcaggugcca

SEQ ID NO: 406580 - RNA, 19 nt, Artificial Sequence
  Description of Artificial Sequence: Synthetic oligonucleotide
agaccucaacauuccgggu

SEQ ID NO: 406581 - RNA, 19 nt, Artificial Sequence
  Description of Artificial Sequence: Synthetic oligonucleotide
cagcccguaggcuggggag

SEQ ID NO: 406582 - RNA, 19 nt, Artificial Sequence
  Description of Artificial Sequence: Synthetic oligonucleotide
auggacagcggcccagaaa

SEQ ID NO: 406583 - RNA, 19 nt, Artificial Sequence
  Description of Artificial Sequence: Synthetic oligonucleotide
caugguuccgcagcagguc

SEQ ID NO: 406584 - RNA, 19 nt, Artificial Sequence
  Description of Artificial Sequence: Synthetic oligonucleotide
gcgccuuucaggaaggcug

SEQ ID NO: 406585 - RNA, 19 nt, Artificial Sequence
  Description of Artificial Sequence: Synthetic oligonucleotide
gggucugccuguccaaacc

SEQ ID NO: 406586 - RNA, 19 nt, Artificial Sequence
  Description of Artificial Sequence: Synthetic oligonucleotide
ccgauuagcccagcgaugc

SEQ ID NO: 406587 - RNA, 19 nt, Artificial Sequence
  Description of Artificial Sequence: Synthetic oligonucleotide
ugcgccuuucaggaaggcu

SEQ ID NO: 406588 - RNA, 19 nt, Artificial Sequence
  Description of Artificial Sequence: Synthetic oligonucleotide
cacaagcaaucucugccca

SEQ ID NO: 406589 - RNA, 19 nt, Artificial Sequence
  Description of Artificial Sequence: Synthetic oligonucleotide
aguaugcgccuuucaggaa

SEQ ID NO: 406590 - RNA, 19 nt, Artificial Sequence
  Description of Artificial Sequence: Synthetic oligonucleotide
gaagauggacggcccagcu

SEQ ID NO: 406591 - RNA, 19 nt, Artificial Sequence
  Description of Artificial Sequence: Synthetic oligonucleotide
gggugggucccguuuguag

SEQ ID NO: 406592 - RNA, 19 nt, Artificial Sequence
  Description of Artificial Sequence: Synthetic oligonucleotide
ccguuuguagaccaggaga

SEQ ID NO: 406593 - RNA, 19 nt, Artificial Sequence
  Description of Artificial Sequence: Synthetic oligonucleotide
ugggcacagcaaauucaau

SEQ ID NO: 406594 - RNA, 19 nt, Artificial Sequence
  Description of Artificial Sequence: Synthetic oligonucleotide
cugggaauccuagcuuaac

SEQ ID NO: 406595 - RNA, 19 nt, Artificial Sequence
  Description of Artificial Sequence: Synthetic oligonucleotide
agcaaccgugaaguaggag

SEQ ID NO: 406596 - RNA, 19 nt, Artificial Sequence
  Description of Artificial Sequence: Synthetic oligonucleotide
caacauuccgggucccaca

SEQ ID NO: 406597 - RNA, 19 nt, Artificial Sequence
  Description of Artificial Sequence: Synthetic oligonucleotide
ggccuauccccaugcagcc

SEQ ID NO: 406598 - RNA, 19 nt, Artificial Sequence
  Description of Artificial Sequence: Synthetic oligonucleotide
auaagaccuugaucccaau

SEQ ID NO: 406599 - RNA, 19 nt, Artificial Sequence
  Description of Artificial Sequence: Synthetic oligonucleotide
agagccucggagaccggag

SEQ ID NO: 406600 - RNA, 19 nt, Artificial Sequence
  Description of Artificial Sequence: Synthetic oligonucleotide
aucugcuuaucagccauuu

SEQ ID NO: 406601 - RNA, 19 nt, Artificial Sequence
  Description of Artificial Sequence: Synthetic oligonucleotide
acggcaguaugcgccuuuc

SEQ ID NO: 406602 - RNA, 19 nt, Artificial Sequence
  Description of Artificial Sequence: Synthetic oligonucleotide
uggguaccucccugggcug

SEQ ID NO: 406603 - RNA, 19 nt, Artificial Sequence
  Description of Artificial Sequence: Synthetic oligonucleotide
cugauggacggaggacagg

SEQ ID NO: 406604 - RNA, 19 nt, Artificial Sequence
  Description of Artificial Sequence: Synthetic oligonucleotide
cauuaacaccucgcucaag

SEQ ID NO: 406605 - RNA, 19 nt, Artificial Sequence
  Description of Artificial Sequence: Synthetic oligonucleotide
accucgcucaagugacuga

SEQ ID NO: 406606 - RNA, 19 nt, Artificial Sequence
  Description of Artificial Sequence: Synthetic oligonucleotide
agaccggagccaguggacu

SEQ ID NO: 406607 - RNA, 19 nt, Artificial Sequence
  Description of Artificial Sequence: Synthetic oligonucleotide
ggagaccggagccagugga

SEQ ID NO: 406608 - RNA, 19 nt, Artificial Sequence
  Description of Artificial Sequence: Synthetic oligonucleotide
ccauguggacccugcaccc

SEQ ID NO: 406609 - RNA, 19 nt, Artificial Sequence
  Description of Artificial Sequence: Synthetic oligonucleotide
ugccugggaucagaauuga

SEQ ID NO: 406610 - RNA, 19 nt, Artificial Sequence
  Description of Artificial Sequence: Synthetic oligonucleotide
ggcauacaugcguuggcca

SEQ ID NO: 406611 - RNA, 19 nt, Artificial Sequence
  Description of Artificial Sequence: Synthetic oligonucleotide
ccaguggacuacaggguag

SEQ ID NO: 406612 - RNA, 19 nt, Artificial Sequence
  Description of Artificial Sequence: Synthetic oligonucleotide
gagaccggagccaguggac

SEQ ID NO: 406613 - RNA, 19 nt, Artificial Sequence
  Description of Artificial Sequence: Synthetic oligonucleotide
gccuaugugugcaccaccc

SEQ ID NO: 406614 - RNA, 19 nt, Artificial Sequence
  Description of Artificial Sequence: Synthetic oligonucleotide
guuccgcagcaggucacgg

SEQ ID NO: 406615 - RNA, 19 nt, Artificial Sequence
  Description of Artificial Sequence: Synthetic oligonucleotide
auauggacagcggcccaga

SEQ ID NO: 406616 - RNA, 19 nt, Artificial Sequence
  Description of Artificial Sequence: Synthetic oligonucleotide
aacacacaggugaccccga

SEQ ID NO: 406617 - RNA, 19 nt, Artificial Sequence
  Description of Artificial Sequence: Synthetic oligonucleotide
ccucauuaacaccucgcuc

SEQ ID NO: 406618 - RNA, 19 nt, Artificial Sequence
  Description of Artificial Sequence: Synthetic oligonucleotide
ugggucccguuuguagacc

SEQ ID NO: 406619 - RNA, 19 nt, Artificial Sequence
  Description of Artificial Sequence: Synthetic oligonucleotide
ugaccagugcacggcagua

SEQ ID NO: 406620 - RNA, 19 nt, Artificial Sequence
  Description of Artificial Sequence: Synthetic oligonucleotide
caccucgcucaagugacug

SEQ ID NO: 406621 - RNA, 19 nt, Artificial Sequence
  Description of Artificial Sequence: Synthetic oligonucleotide
ggcauacacagcacacaag

SEQ ID NO: 406622 - RNA, 19 nt, Artificial Sequence
  Description of Artificial Sequence: Synthetic oligonucleotide
uuugucccucaggacccca

SEQ ID NO: 406623 - RNA, 19 nt, Artificial Sequence
  Description of Artificial Sequence: Synthetic oligonucleotide
augcgccuuucaggaaggc

SEQ ID NO: 406624 - RNA, 19 nt, Artificial Sequence
  Description of Artificial Sequence: Synthetic oligonucleotide
ggagccucuacugagggcu

SEQ ID NO: 406625 - RNA, 19 nt, Artificial Sequence
  Description of Artificial Sequence: Synthetic oligonucleotide
uuacagcugcuccccugua

SEQ ID NO: 406626 - RNA, 19 nt, Artificial Sequence
  Description of Artificial Sequence: Synthetic oligonucleotide
ggucugccuguccaaacca

SEQ ID NO: 406627 - RNA, 19 nt, Artificial Sequence
  Description of Artificial Sequence: Synthetic oligonucleotide
ccuguacaugccgaaguag

SEQ ID NO: 406628 - RNA, 19 nt, Artificial Sequence
  Description of Artificial Sequence: Synthetic oligonucleotide
uucuggccucagcccguag

SEQ ID NO: 406629 - RNA, 19 nt, Artificial Sequence
  Description of Artificial Sequence: Synthetic oligonucleotide
caggcuugugcuggucacc

SEQ ID NO: 406630 - RNA, 19 nt, Artificial Sequence
  Description of Artificial Sequence: Synthetic oligonucleotide
agccgugucuuagccaggu

SEQ ID NO: 406631 - RNA, 19 nt, Artificial Sequence
  Description of Artificial Sequence: Synthetic oligonucleotide
agcuuaacaugaggacaga

SEQ ID NO: 406632 - RNA, 19 nt, Artificial Sequence
  Description of Artificial Sequence: Synthetic oligonucleotide
ugccaugguuccgcagcag

SEQ ID NO: 406633 - RNA, 19 nt, Artificial Sequence
  Description of Artificial Sequence: Synthetic oligonucleotide
gcagucagaccaugcuggc

SEQ ID NO: 406634 - RNA, 19 nt, Artificial Sequence
  Description of Artificial Sequence: Synthetic oligonucleotide
gugaccccgauuagcccag

SEQ ID NO: 406635 - RNA, 19 nt, Artificial Sequence
  Description of Artificial Sequence: Synthetic oligonucleotide
ccaggaguaggacucuauc

SEQ ID NO: 406636 - RNA, 19 nt, Artificial Sequence
  Description of Artificial Sequence: Synthetic oligonucleotide
ggccuaugugugcaccacc

SEQ ID NO: 406637 - RNA, 19 nt, Artificial Sequence
  Description of Artificial Sequence: Synthetic oligonucleotide
aggguagggucugccuguc

SEQ ID NO: 406638 - RNA, 19 nt, Artificial Sequence
  Description of Artificial Sequence: Synthetic oligonucleotide
cccagcgaugccaccauug

SEQ ID NO: 406639 - RNA, 19 nt, Artificial Sequence
  Description of Artificial Sequence: Synthetic oligonucleotide
gacuggggagagaccaguc

SEQ ID NO: 406640 - RNA, 19 nt, Artificial Sequence
  Description of Artificial Sequence: Synthetic oligonucleotide
acacacaggugaccccgau

SEQ ID NO: 406641 - RNA, 19 nt, Artificial Sequence
  Description of Artificial Sequence: Synthetic oligonucleotide
ugccaaacaguggggcgau

SEQ ID NO: 406642 - RNA, 19 nt, Artificial Sequence
  Description of Artificial Sequence: Synthetic oligonucleotide
acaugccgaaguagcccuc

SEQ ID NO: 406643 - RNA, 19 nt, Artificial Sequence
  Description of Artificial Sequence: Synthetic oligonucleotide
gcgaugaccagugcacggc

SEQ ID NO: 406644 - RNA, 19 nt, Artificial Sequence
  Description of Artificial Sequence: Synthetic oligonucleotide
uacaugcguuggccauucu

SEQ ID NO: 406645 - RNA, 19 nt, Artificial Sequence
  Description of Artificial Sequence: Synthetic oligonucleotide
gggacaucccugaguagug

SEQ ID NO: 406646 - RNA, 19 nt, Artificial Sequence
  Description of Artificial Sequence: Synthetic oligonucleotide
cagccgugucuuagccagg

SEQ ID NO: 406647 - RNA, 19 nt, Artificial Sequence
  Description of Artificial Sequence: Synthetic oligonucleotide
guuguuuguuggggaggac

SEQ ID NO: 406648 - RNA, 19 nt, Artificial Sequence
  Description of Artificial Sequence: Synthetic oligonucleotide
gggcgaugaccagugcacg

SEQ ID NO: 406649 - RNA, 19 nt, Artificial Sequence
  Description of Artificial Sequence: Synthetic oligonucleotide
cccugaguaguguggcccc

SEQ ID NO: 406650 - RNA, 19 nt, Artificial Sequence
  Description of Artificial Sequence: Synthetic oligonucleotide
gugacgagggucagguuua

SEQ ID NO: 406651 - RNA, 19 nt, Artificial Sequence
  Description of Artificial Sequence: Synthetic oligonucleotide
gaccggagccaguggacua

SEQ ID NO: 406652 - RNA, 19 nt, Artificial Sequence
  Description of Artificial Sequence: Synthetic oligonucleotide
ccuuaagggccuaucccca

SEQ ID NO: 406653 - RNA, 19 nt, Artificial Sequence
  Description of Artificial Sequence: Synthetic oligonucleotide
gagccucuacugagggcug

SEQ ID NO: 406654 - RNA, 19 nt, Artificial Sequence
  Description of Artificial Sequence: Synthetic oligonucleotide
aguagaccaccugggcgau

SEQ ID NO: 406655 - RNA, 19 nt, Artificial Sequence
  Description of Artificial Sequence: Synthetic oligonucleotide
agccgagucuucaccacau

SEQ ID NO: 406656 - RNA, 19 nt, Artificial Sequence
  Description of Artificial Sequence: Synthetic oligonucleotide
ugugcccuuaagggccuau

SEQ ID NO: 406657 - RNA, 19 nt, Artificial Sequence
  Description of Artificial Sequence: Synthetic oligonucleotide
cccgauuagcccagcgaug

SEQ ID NO: 406658 - RNA, 19 nt, Artificial Sequence
  Description of Artificial Sequence: Synthetic oligonucleotide
gugcgggaugccugggauc

SEQ ID NO: 406659 - RNA, 19 nt, Artificial Sequence
  Description of Artificial Sequence: Synthetic oligonucleotide
guggacuacaggguagggu

SEQ ID NO: 406660 - RNA, 19 nt, Artificial Sequence
  Description of Artificial Sequence: Synthetic oligonucleotide
cgaguaaguguccucauua

SEQ ID NO: 406661 - RNA, 19 nt, Artificial Sequence
  Description of Artificial Sequence: Synthetic oligonucleotide
agcccguaggcuggggaga

SEQ ID NO: 406662 - RNA, 19 nt, Artificial Sequence
  Description of Artificial Sequence: Synthetic oligonucleotide
cagaauugauguggccgca

SEQ ID NO: 406663 - RNA, 19 nt, Artificial Sequence
  Description of Artificial Sequence: Synthetic oligonucleotide
ccauagggaaaggcaacug

SEQ ID NO: 406664 - RNA, 19 nt, Artificial Sequence
  Description of Artificial Sequence: Synthetic oligonucleotide
gggcgaugccaaacagugg

SEQ ID NO: 406665 - RNA, 19 nt, Artificial Sequence
  Description of Artificial Sequence: Synthetic oligonucleotide
aguccuccuguaaggcuaa

SEQ ID NO: 406666 - RNA, 19 nt, Artificial Sequence
  Description of Artificial Sequence: Synthetic oligonucleotide
caggguagggucugccugu

SEQ ID NO: 406667 - RNA, 19 nt, Artificial Sequence
  Description of Artificial Sequence: Synthetic oligonucleotide
ggggccuaugugugcacca

SEQ ID NO: 406668 - RNA, 19 nt, Artificial Sequence
  Description of Artificial Sequence: Synthetic oligonucleotide
gacgagggucagguuuaca

SEQ ID NO: 406669 - RNA, 19 nt, Artificial Sequence
  Description of Artificial Sequence: Synthetic oligonucleotide
aggcgccacacuggccuuc

SEQ ID NO: 406670 - RNA, 19 nt, Artificial Sequence
  Description of Artificial Sequence: Synthetic oligonucleotide
cuuaagggccuauccccau

SEQ ID NO: 406671 - RNA, 19 nt, Artificial Sequence
  Description of Artificial Sequence: Synthetic oligonucleotide
cgugucuuagccaggucga

SEQ ID NO: 406672 - RNA, 19 nt, Artificial Sequence
  Description of Artificial Sequence: Synthetic oligonucleotide
cagucagaccaugcuggca

SEQ ID NO: 406673 - RNA, 19 nt, Artificial Sequence
  Description of Artificial Sequence: Synthetic oligonucleotide
cgugggcacagcaaauuca

SEQ ID NO: 406674 - RNA, 19 nt, Artificial Sequence
  Description of Artificial Sequence: Synthetic oligonucleotide
gugcaccacccauguggac

SEQ ID NO: 406675 - RNA, 19 nt, Artificial Sequence
  Description of Artificial Sequence: Synthetic oligonucleotide
gcauacaugcguuggccau

SEQ ID NO: 406676 - RNA, 19 nt, Artificial Sequence
  Description of Artificial Sequence: Synthetic oligonucleotide
ggacccugcacccuccccu

SEQ ID NO: 406677 - RNA, 19 nt, Artificial Sequence
  Description of Artificial Sequence: Synthetic oligonucleotide
cagcgaugcccagaaagua

SEQ ID NO: 406678 - RNA, 19 nt, Artificial Sequence
  Description of Artificial Sequence: Synthetic oligonucleotide
ggggucgggcuugagggac

SEQ ID NO: 406679 - RNA, 19 nt, Artificial Sequence
  Description of Artificial Sequence: Synthetic oligonucleotide
auccugguagaggcagaaa

SEQ ID NO: 406680 - RNA, 19 nt, Artificial Sequence
  Description of Artificial Sequence: Synthetic oligonucleotide
aggggccuccacggagggg

SEQ ID NO: 406681 - RNA, 19 nt, Artificial Sequence
  Description of Artificial Sequence: Synthetic oligonucleotide
caagugacugaagccgagu

SEQ ID NO: 406682 - RNA, 19 nt, Artificial Sequence
  Description of Artificial Sequence: Synthetic oligonucleotide
ugggugggucccguuugua

SEQ ID NO: 406683 - RNA, 19 nt, Artificial Sequence
  Description of Artificial Sequence: Synthetic oligonucleotide
ugaccccgauuagcccagc

SEQ ID NO: 406684 - RNA, 19 nt, Artificial Sequence
  Description of Artificial Sequence: Synthetic oligonucleotide
ggguagggucugccugucc

SEQ ID NO: 406685 - RNA, 19 nt, Artificial Sequence
  Description of Artificial Sequence: Synthetic oligonucleotide
ggaagaguaugugcgggau

SEQ ID NO: 406686 - RNA, 19 nt, Artificial Sequence
  Description of Artificial Sequence: Synthetic oligonucleotide
guagaccaccugggcgaug

SEQ ID NO: 406687 - RNA, 19 nt, Artificial Sequence
  Description of Artificial Sequence: Synthetic oligonucleotide
gggccuaugugugcaccac

SEQ ID NO: 406688 - RNA, 19 nt, Artificial Sequence
  Description of Artificial Sequence: Synthetic oligonucleotide
ccuaugugugcaccaccca

SEQ ID NO: 406689 - RNA, 19 nt, Artificial Sequence
  Description of Artificial Sequence: Synthetic oligonucleotide
ggucgauggggaacacaca

SEQ ID NO: 406690 - RNA, 19 nt, Artificial Sequence
  Description of Artificial Sequence: Synthetic oligonucleotide
ggacagcggcccagaaagc

SEQ ID NO: 406691 - RNA, 19 nt, Artificial Sequence
  Description of Artificial Sequence: Synthetic oligonucleotide
cucaugucuccagaucuuu

SEQ ID NO: 406692 - RNA, 19 nt, Artificial Sequence
  Description of Artificial Sequence: Synthetic oligonucleotide
gaccagugcacggcaguau

SEQ ID NO: 406693 - RNA, 19 nt, Artificial Sequence
  Description of Artificial Sequence: Synthetic oligonucleotide
ggccggcaggcugaucugc

SEQ ID NO: 406694 - RNA, 19 nt, Artificial Sequence
  Description of Artificial Sequence: Synthetic oligonucleotide
cgauuagcccagcgaugcc

SEQ ID NO: 406695 - RNA, 19 nt, Artificial Sequence
  Description of Artificial Sequence: Synthetic oligonucleotide
gugggugggucccguuugu

SEQ ID NO: 406696 - RNA, 19 nt, Artificial Sequence
  Description of Artificial Sequence: Synthetic oligonucleotide
cauacaugcguuggccauu

SEQ ID NO: 406697 - RNA, 19 nt, Artificial Sequence
  Description of Artificial Sequence: Synthetic oligonucleotide
gucaaucaccaaacacaau

SEQ ID NO: 406698 - RNA, 19 nt, Artificial Sequence
  Description of Artificial Sequence: Synthetic oligonucleotide
gguuuacagcugcuccccu

SEQ ID NO: 406699 - RNA, 19 nt, Artificial Sequence
  Description of Artificial Sequence: Synthetic oligonucleotide
ggaagagggcugcuuugau

SEQ ID NO: 406700 - RNA, 19 nt, Artificial Sequence
  Description of Artificial Sequence: Synthetic oligonucleotide
ccgugaaguaggaggccca

SEQ ID NO: 406701 - RNA, 19 nt, Artificial Sequence
  Description of Artificial Sequence: Synthetic oligonucleotide
ggauccugguagaggcaga

SEQ ID NO: 406702 - RNA, 19 nt, Artificial Sequence
  Description of Artificial Sequence: Synthetic oligonucleotide
ccucgcucaagugacugaa

SEQ ID NO: 406703 - RNA, 19 nt, Artificial Sequence
  Description of Artificial Sequence: Synthetic oligonucleotide
cugccccaucauaggcaca

SEQ ID NO: 406704 - RNA, 19 nt, Artificial Sequence
  Description of Artificial Sequence: Synthetic oligonucleotide
cgggcuugagggacacagc

SEQ ID NO: 406705 - RNA, 19 nt, Artificial Sequence
  Description of Artificial Sequence: Synthetic oligonucleotide
aggggcccucaugucucca

SEQ ID NO: 406706 - RNA, 19 nt, Artificial Sequence
  Description of Artificial Sequence: Synthetic oligonucleotide
cauguggacccugcacccu

SEQ ID NO: 406707 - RNA, 19 nt, Artificial Sequence
  Description of Artificial Sequence: Synthetic oligonucleotide
ccaugguuccgcagcaggu

SEQ ID NO: 406708 - RNA, 19 nt, Artificial Sequence
  Description of Artificial Sequence: Synthetic oligonucleotide
ggacuacaggguagggucu

SEQ ID NO: 406709 - RNA, 19 nt, Artificial Sequence
  Description of Artificial Sequence: Synthetic oligonucleotide
ccucaacauuccggguccc

SEQ ID NO: 406710 - RNA, 19 nt, Artificial Sequence
  Description of Artificial Sequence: Synthetic oligonucleotide
gauggacggcccagcuggu

SEQ ID NO: 406711 - RNA, 19 nt, Artificial Sequence
  Description of Artificial Sequence: Synthetic oligonucleotide
aguagcccucagagcggau

SEQ ID NO: 406712 - RNA, 19 nt, Artificial Sequence
  Description of Artificial Sequence: Synthetic oligonucleotide
cggagaccggagccagugg

SEQ ID NO: 406713 - RNA, 19 nt, Artificial Sequence
  Description of Artificial Sequence: Synthetic oligonucleotide
cacacaggugaccccgauu

SEQ ID NO: 406714 - RNA, 19 nt, Artificial Sequence
  Description of Artificial Sequence: Synthetic oligonucleotide
ccccgauuagcccagcgau

SEQ ID NO: 406715 - RNA, 19 nt, Artificial Sequence
  Description of Artificial Sequence: Synthetic oligonucleotide
guaccucccugggcugaga

SEQ ID NO: 406716 - RNA, 19 nt, Artificial Sequence
  Description of Artificial Sequence: Synthetic oligonucleotide
ccuucaugcccacccuuua

SEQ ID NO: 406717 - RNA, 19 nt, Artificial Sequence
  Description of Artificial Sequence: Synthetic oligonucleotide
gugucuuagccaggucgau

SEQ ID NO: 406718 - RNA, 19 nt, Artificial Sequence
  Description of Artificial Sequence: Synthetic oligonucleotide
ggagagccucggagaccgg

SEQ ID NO: 406719 - RNA, 19 nt, Artificial Sequence
  Description of Artificial Sequence: Synthetic oligonucleotide
gccgugucuuagccagguc

SEQ ID NO: 406720 - RNA, 19 nt, Artificial Sequence
  Description of Artificial Sequence: Synthetic oligonucleotide
cuuggccggcaggcugauc

SEQ ID NO: 406721 - RNA, 19 nt, Artificial Sequence
  Description of Artificial Sequence: Synthetic oligonucleotide
acgggucagcuggguggcu

SEQ ID NO: 406722 - RNA, 19 nt, Artificial Sequence
  Description of Artificial Sequence: Synthetic oligonucleotide
ggcgccacacuggccuuca

SEQ ID NO: 406723 - RNA, 19 nt, Artificial Sequence
  Description of Artificial Sequence: Synthetic oligonucleotide
cccgcagccugccaaacau

SEQ ID NO: 406724 - RNA, 19 nt, Artificial Sequence
  Description of Artificial Sequence: Synthetic oligonucleotide
cucggagaccggagccagu

SEQ ID NO: 406725 - RNA, 19 nt, Artificial Sequence
  Description of Artificial Sequence: Synthetic oligonucleotide
cauuagcugccagcuugau

SEQ ID NO: 406726 - RNA, 19 nt, Artificial Sequence
  Description of Artificial Sequence: Synthetic oligonucleotide
cacggcaguaugcgccuuu

SEQ ID NO: 406727 - RNA, 19 nt, Artificial Sequence
  Description of Artificial Sequence: Synthetic oligonucleotide
ccauccuuagagagcugau

SEQ ID NO: 406728 - RNA, 19 nt, Artificial Sequence
  Description of Artificial Sequence: Synthetic oligonucleotide
gucgggcuugagggacaca

SEQ ID NO: 406729 - RNA, 19 nt, Artificial Sequence
  Description of Artificial Sequence: Synthetic oligonucleotide
ggcuugugcuggucacccu

SEQ ID NO: 406730 - RNA, 19 nt, Artificial Sequence
  Description of Artificial Sequence: Synthetic oligonucleotide
gcccguaggcuggggagaa

SEQ ID NO: 406731 - RNA, 19 nt, Artificial Sequence
  Description of Artificial Sequence: Synthetic oligonucleotide
cccaggaguaggacucuau

SEQ ID NO: 406732 - RNA, 19 nt, Artificial Sequence
  Description of Artificial Sequence: Synthetic oligonucleotide
ccccgcagccugccaaaca

SEQ ID NO: 406733 - RNA, 19 nt, Artificial Sequence
  Description of Artificial Sequence: Synthetic oligonucleotide
ccgaguaaguguccucauu

SEQ ID NO: 406734 - RNA, 19 nt, Artificial Sequence
  Description of Artificial Sequence: Synthetic oligonucleotide
cggcaggcugaucugcuua

SEQ ID NO: 406735 - RNA, 19 nt, Artificial Sequence
  Description of Artificial Sequence: Synthetic oligonucleotide
ccaccugggcgaugccaaa

SEQ ID NO: 406736 - RNA, 19 nt, Artificial Sequence
  Description of Artificial Sequence: Synthetic oligonucleotide
cccgaguaaguguccucau

SEQ ID NO: 406737 - RNA, 19 nt, Artificial Sequence
  Description of Artificial Sequence: Synthetic oligonucleotide
ccggagccaguggacuaca

SEQ ID NO: 406738 - RNA, 19 nt, Artificial Sequence
  Description of Artificial Sequence: Synthetic oligonucleotide
cggcaguaugcgccuuuca

SEQ ID NO: 406739 - RNA, 19 nt, Artificial Sequence
  Description of Artificial Sequence: Synthetic oligonucleotide
gccugggaucagaauugau

SEQ ID NO: 406740 - RNA, 19 nt, Artificial Sequence
  Description of Artificial Sequence: Synthetic oligonucleotide
cugugcccuuaagggccua

SEQ ID NO: 406741 - RNA, 19 nt, Artificial Sequence
  Description of Artificial Sequence: Synthetic oligonucleotide
gggcaaccugccccaucau

SEQ ID NO: 406742 - RNA, 19 nt, Artificial Sequence
  Description of Artificial Sequence: Synthetic oligonucleotide
gcaauucggccugcaucuu

SEQ ID NO: 406743 - RNA, 19 nt, Artificial Sequence
  Description of Artificial Sequence: Synthetic oligonucleotide
gcggcccagaaagcugggu

SEQ ID NO: 406744 - RNA, 19 nt, Artificial Sequence
  Description of Artificial Sequence: Synthetic oligonucleotide
ccagccccgcagccugcca

SEQ ID NO: 406745 - RNA, 19 nt, Artificial Sequence
  Description of Artificial Sequence: Synthetic oligonucleotide
gcccagcgaugccaccauu

SEQ ID NO: 406746 - RNA, 19 nt, Artificial Sequence
  Description of Artificial Sequence: Synthetic oligonucleotide
gcuuggccggcaggcugau

SEQ ID NO: 406747 - RNA, 19 nt, Artificial Sequence
  Description of Artificial Sequence: Synthetic oligonucleotide
ccccugccuuguuguuugu

SEQ ID NO: 406748 - RNA, 19 nt, Artificial Sequence
  Description of Artificial Sequence: Synthetic oligonucleotide
gcacggcaguaugcgccuu

SEQ ID NO: 406749 - RNA, 19 nt, Artificial Sequence
  Description of Artificial Sequence: Synthetic oligonucleotide
aaauauguguuccauuaac

SEQ ID NO: 406750 - RNA, 19 nt, Artificial Sequence
  Description of Artificial Sequence: Synthetic oligonucleotide
agcacuuuuaacuacuuuc

SEQ ID NO: 406751 - RNA, 19 nt, Artificial Sequence
  Description of Artificial Sequence: Synthetic oligonucleotide
auuguuacuguuuucagug

SEQ ID NO: 406752 - RNA, 19 nt, Artificial Sequence
  Description of Artificial Sequence: Synthetic oligonucleotide
ugauaguuagacuugauaa

SEQ ID NO: 406753 - RNA, 19 nt, Artificial Sequence
  Description of Artificial Sequence: Synthetic oligonucleotide
uuuaacuacuuucauugcc

SEQ ID NO: 406754 - RNA, 19 nt, Artificial Sequence
  Description of Artificial Sequence: Synthetic oligonucleotide
auuacgaaccgauuucagc

SEQ ID NO: 406755 - RNA, 19 nt, Artificial Sequence
  Description of Artificial Sequence: Synthetic oligonucleotide
uugauaauccauuugagua

SEQ ID NO: 406756 - RNA, 19 nt, Artificial Sequence
  Description of Artificial Sequence: Synthetic oligonucleotide
ucucccguuaaauagaucu

SEQ ID NO: 406757 - RNA, 19 nt, Artificial Sequence
  Description of Artificial Sequence: Synthetic oligonucleotide
uuaggaauugagccaaggg

SEQ ID NO: 406758 - RNA, 19 nt, Artificial Sequence
  Description of Artificial Sequence: Synthetic oligonucleotide
uccucuuucagccucaaug

SEQ ID NO: 406759 - RNA, 19 nt, Artificial Sequence
  Description of Artificial Sequence: Synthetic oligonucleotide
aucgcugccauucuguggc

SEQ ID NO: 406760 - RNA, 19 nt, Artificial Sequence
  Description of Artificial Sequence: Synthetic oligonucleotide
aauuaacgacuccaauuac

SEQ ID NO: 406761 - RNA, 19 nt, Artificial Sequence
  Description of Artificial Sequence: Synthetic oligonucleotide
uuaaauagaucuccgauuu

SEQ ID NO: 406762 - RNA, 19 nt, Artificial Sequence
  Description of Artificial Sequence: Synthetic oligonucleotide
uaauuaacgacuccaauua

SEQ ID NO: 406763 - RNA, 19 nt, Artificial Sequence
  Description of Artificial Sequence: Synthetic oligonucleotide
uuugacacaaggcagcgga

SEQ ID NO: 406764 - RNA, 19 nt, Artificial Sequence
  Description of Artificial Sequence: Synthetic oligonucleotide
agugaaaugcuugugcacc

SEQ ID NO: 406765 - RNA, 19 nt, Artificial Sequence
  Description of Artificial Sequence: Synthetic oligonucleotide
uuacgaaccgauuucagca

SEQ ID NO: 406766 - RNA, 19 nt, Artificial Sequence
  Description of Artificial Sequence: Synthetic oligonucleotide
ucucuaguaacucugccug

SEQ ID NO: 406767 - RNA, 19 nt, Artificial Sequence
  Description of Artificial Sequence: Synthetic oligonucleotide
aguucuaugaucaaggcga

SEQ ID NO: 406768 - RNA, 19 nt, Artificial Sequence
  Description of Artificial Sequence: Synthetic oligonucleotide
gaugacauggccuggacac

SEQ ID NO: 406769 - RNA, 19 nt, Artificial Sequence
  Description of Artificial Sequence: Synthetic oligonucleotide
ugaauaucccaugauaacc

SEQ ID NO: 406770 - RNA, 19 nt, Artificial Sequence
  Description of Artificial Sequence: Synthetic oligonucleotide
ugcuugugcacccagcagg

SEQ ID NO: 406771 - RNA, 19 nt, Artificial Sequence
  Description of Artificial Sequence: Synthetic oligonucleotide
aauguuucauuguuacugu

SEQ ID NO: 406772 - RNA, 19 nt, Artificial Sequence
  Description of Artificial Sequence: Synthetic oligonucleotide
ucaaggguguuucaacagg

SEQ ID NO: 406773 - RNA, 19 nt, Artificial Sequence
  Description of Artificial Sequence: Synthetic oligonucleotide
auuuggaucauucgggucu

SEQ ID NO: 406774 - RNA, 19 nt, Artificial Sequence
  Description of Artificial Sequence: Synthetic oligonucleotide
ucuaugaucaaggcgaugu

SEQ ID NO: 406775 - RNA, 19 nt, Artificial Sequence
  Description of Artificial Sequence: Synthetic oligonucleotide
aucgucagaccccagaauc

SEQ ID NO: 406776 - RNA, 19 nt, Artificial Sequence
  Description of Artificial Sequence: Synthetic oligonucleotide
agucauuagcauuacgcag

SEQ ID NO: 406777 - RNA, 19 nt, Artificial Sequence
  Description of Artificial Sequence: Synthetic oligonucleotide
uuaacgacuccaauuacuc

SEQ ID NO: 406778 - RNA, 19 nt, Artificial Sequence
  Description of Artificial Sequence: Synthetic oligonucleotide
ugaauuacgaaccgauuuc

SEQ ID NO: 406779 - RNA, 19 nt, Artificial Sequence
  Description of Artificial Sequence: Synthetic oligonucleotide
aagaaaagagcuucacccu

SEQ ID NO: 406780 - RNA, 19 nt, Artificial Sequence
  Description of Artificial Sequence: Synthetic oligonucleotide
cuagcuuccugcuucaaag

SEQ ID NO: 406781 - RNA, 19 nt, Artificial Sequence
  Description of Artificial Sequence: Synthetic oligonucleotide
uacgaauuagaaaccagac

SEQ ID NO: 406782 - RNA, 19 nt, Artificial Sequence
  Description of Artificial Sequence: Synthetic oligonucleotide
aauaaaaggaggggcucac

SEQ ID NO: 406783 - RNA, 19 nt, Artificial Sequence
  Description of Artificial Sequence: Synthetic oligonucleotide
gaaacuagcuuccugcuuc

SEQ ID NO: 406784 - RNA, 19 nt, Artificial Sequence
  Description of Artificial Sequence: Synthetic oligonucleotide
gguaucucccguuaaauag

SEQ ID NO: 406785 - RNA, 19 nt, Artificial Sequence
  Description of Artificial Sequence: Synthetic oligonucleotide
ucaauuuccugcauucgcu

SEQ ID NO: 406786 - RNA, 19 nt, Artificial Sequence
  Description of Artificial Sequence: Synthetic oligonucleotide
auagaucuccgauuuucac

SEQ ID NO: 406787 - RNA, 19 nt, Artificial Sequence
  Description of Artificial Sequence: Synthetic oligonucleotide
aaccuaaugaaaagggcag

SEQ ID NO: 406788 - RNA, 19 nt, Artificial Sequence
  Description of Artificial Sequence: Synthetic oligonucleotide
ggcucaaacaaauaguccc

SEQ ID NO: 406789 - RNA, 19 nt, Artificial Sequence
  Description of Artificial Sequence: Synthetic oligonucleotide
ucagugaaaugcuugugca

SEQ ID NO: 406790 - RNA, 19 nt, Artificial Sequence
  Description of Artificial Sequence: Synthetic oligonucleotide
uucaucacguguguaaucc

SEQ ID NO: 406791 - RNA, 19 nt, Artificial Sequence
  Description of Artificial Sequence: Synthetic oligonucleotide
uguguaauccuccccugag

SEQ ID NO: 406792 - RNA, 19 nt, Artificial Sequence
  Description of Artificial Sequence: Synthetic oligonucleotide
uugcaauuaauuucugugu

SEQ ID NO: 406793 - RNA, 19 nt, Artificial Sequence
  Description of Artificial Sequence: Synthetic oligonucleotide
aaccgauuucagcagucgg

SEQ ID NO: 406794 - RNA, 19 nt, Artificial Sequence
  Description of Artificial Sequence: Synthetic oligonucleotide
caggaaacuagcuuccugc

SEQ ID NO: 406795 - RNA, 19 nt, Artificial Sequence
  Description of Artificial Sequence: Synthetic oligonucleotide
agauucauaccccucccuc

SEQ ID NO: 406796 - RNA, 19 nt, Artificial Sequence
  Description of Artificial Sequence: Synthetic oligonucleotide
ucuccgaauguacugguca

SEQ ID NO: 406797 - RNA, 19 nt, Artificial Sequence
  Description of Artificial Sequence: Synthetic oligonucleotide
acaaccuaaugaaaagggc

SEQ ID NO: 406798 - RNA, 19 nt, Artificial Sequence
  Description of Artificial Sequence: Synthetic oligonucleotide
uccuuuguuguccaguggu

SEQ ID NO: 406799 - RNA, 19 nt, Artificial Sequence
  Description of Artificial Sequence: Synthetic oligonucleotide
aauuacuccauugcaauua

SEQ ID NO: 406800 - RNA, 19 nt, Artificial Sequence
  Description of Artificial Sequence: Synthetic oligonucleotide
agaaaagagcuucacccug

SEQ ID NO: 406801 - RNA, 19 nt, Artificial Sequence
  Description of Artificial Sequence: Synthetic oligonucleotide
accgauacugccuugucug

SEQ ID NO: 406802 - RNA, 19 nt, Artificial Sequence
  Description of Artificial Sequence: Synthetic oligonucleotide
acuugagucuucaaguuuc

SEQ ID NO: 406803 - RNA, 19 nt, Artificial Sequence
  Description of Artificial Sequence: Synthetic oligonucleotide
accaaaaccuccagaaggc

SEQ ID NO: 406804 - RNA, 19 nt, Artificial Sequence
  Description of Artificial Sequence: Synthetic oligonucleotide
uguaauuaacgacuccaau

SEQ ID NO: 406805 - RNA, 19 nt, Artificial Sequence
  Description of Artificial Sequence: Synthetic oligonucleotide
uuacaguagucauuggggu

SEQ ID NO: 406806 - RNA, 19 nt, Artificial Sequence
  Description of Artificial Sequence: Synthetic oligonucleotide
uguuucuggagaugcacug

SEQ ID NO: 406807 - RNA, 19 nt, Artificial Sequence
  Description of Artificial Sequence: Synthetic oligonucleotide
ugucaaggguguuucaaca

SEQ ID NO: 406808 - RNA, 19 nt, Artificial Sequence
  Description of Artificial Sequence: Synthetic oligonucleotide
aggccacucauacuucucc

SEQ ID NO: 406809 - RNA, 19 nt, Artificial Sequence
  Description of Artificial Sequence: Synthetic oligonucleotide
gauacgaauuagaaaccag

SEQ ID NO: 406810 - RNA, 19 nt, Artificial Sequence
  Description of Artificial Sequence: Synthetic oligonucleotide
aaaauuuccagcagugaau

SEQ ID NO: 406811 - RNA, 19 nt, Artificial Sequence
  Description of Artificial Sequence: Synthetic oligonucleotide
ugaugaacucuguugcagc

SEQ ID NO: 406812 - RNA, 19 nt, Artificial Sequence
  Description of Artificial Sequence: Synthetic oligonucleotide
gguguugacaaccuaauga

SEQ ID NO: 406813 - RNA, 19 nt, Artificial Sequence
  Description of Artificial Sequence: Synthetic oligonucleotide
uuucggaucacaugguauc

SEQ ID NO: 406814 - RNA, 19 nt, Artificial Sequence
  Description of Artificial Sequence: Synthetic oligonucleotide
caaccuaaugaaaagggca

SEQ ID NO: 406815 - RNA, 19 nt, Artificial Sequence
  Description of Artificial Sequence: Synthetic oligonucleotide
auuacgcagguccucuuuc

SEQ ID NO: 406816 - RNA, 19 nt, Artificial Sequence
  Description of Artificial Sequence: Synthetic oligonucleotide
uuaacaccugauauuuuaa

SEQ ID NO: 406817 - RNA, 19 nt, Artificial Sequence
  Description of Artificial Sequence: Synthetic oligonucleotide
ugcaagagucuguuucugg

SEQ ID NO: 406818 - RNA, 19 nt, Artificial Sequence
  Description of Artificial Sequence: Synthetic oligonucleotide
aagccccugauaguuagac

SEQ ID NO: 406819 - RNA, 19 nt, Artificial Sequence
  Description of Artificial Sequence: Synthetic oligonucleotide
acgaauuagaaaccagacu

SEQ ID NO: 406820 - RNA, 19 nt, Artificial Sequence
  Description of Artificial Sequence: Synthetic oligonucleotide
guuucaacaggacucucug

SEQ ID NO: 406821 - RNA, 19 nt, Artificial Sequence
  Description of Artificial Sequence: Synthetic oligonucleotide
ucaguguaauuaacgacuc

SEQ ID NO: 406822 - RNA, 19 nt, Artificial Sequence
  Description of Artificial Sequence: Synthetic oligonucleotide
ggggcuuaggaauugagcc

SEQ ID NO: 406823 - RNA, 19 nt, Artificial Sequence
  Description of Artificial Sequence: Synthetic oligonucleotide
ggcgaugugaucuucauca

SEQ ID NO: 406824 - RNA, 19 nt, Artificial Sequence
  Description of Artificial Sequence: Synthetic oligonucleotide
ucacagaucuucacagccc

SEQ ID NO: 406825 - RNA, 19 nt, Artificial Sequence
  Description of Artificial Sequence: Synthetic oligonucleotide
ucaaccuuaugcuggcagc

SEQ ID NO: 406826 - RNA, 19 nt, Artificial Sequence
  Description of Artificial Sequence: Synthetic oligonucleotide
cgaauuagaaaccagacuc

SEQ ID NO: 406827 - RNA, 19 nt, Artificial Sequence
  Description of Artificial Sequence: Synthetic oligonucleotide
gcaggcauucccaagaucg

SEQ ID NO: 406828 - RNA, 19 nt, Artificial Sequence
  Description of Artificial Sequence: Synthetic oligonucleotide
cgggauacgaauuagaaac

SEQ ID NO: 406829 - RNA, 19 nt, Artificial Sequence
  Description of Artificial Sequence: Synthetic oligonucleotide
aagaucggcgaucuucacu

SEQ ID NO: 406830 - RNA, 19 nt, Artificial Sequence
  Description of Artificial Sequence: Synthetic oligonucleotide
caauuaauuucugugucac

SEQ ID NO: 406831 - RNA, 19 nt, Artificial Sequence
  Description of Artificial Sequence: Synthetic oligonucleotide
uuagcauuacgcagguccu

SEQ ID NO: 406832 - RNA, 19 nt, Artificial Sequence
  Description of Artificial Sequence: Synthetic oligonucleotide
ucgggucugaauuacgaac

SEQ ID NO: 406833 - RNA, 19 nt, Artificial Sequence
  Description of Artificial Sequence: Synthetic oligonucleotide
uauuagguggguucucugu

SEQ ID NO: 406834 - RNA, 19 nt, Artificial Sequence
  Description of Artificial Sequence: Synthetic oligonucleotide
auguacuggucauucacug

SEQ ID NO: 406835 - RNA, 19 nt, Artificial Sequence
  Description of Artificial Sequence: Synthetic oligonucleotide
uuaauuucugugucaccac

SEQ ID NO: 406836 - RNA, 19 nt, Artificial Sequence
  Description of Artificial Sequence: Synthetic oligonucleotide
agcugaacaaccauuucuc

SEQ ID NO: 406837 - RNA, 19 nt, Artificial Sequence
  Description of Artificial Sequence: Synthetic oligonucleotide
uaguaacucugccuggcgc

SEQ ID NO: 406838 - RNA, 19 nt, Artificial Sequence
  Description of Artificial Sequence: Synthetic oligonucleotide
ggugauguguuucagguca

SEQ ID NO: 406839 - RNA, 19 nt, Artificial Sequence
  Description of Artificial Sequence: Synthetic oligonucleotide
uaugaucaaggcgauguga

SEQ ID NO: 406840 - RNA, 19 nt, Artificial Sequence
  Description of Artificial Sequence: Synthetic oligonucleotide
guacuggucauucacugac

SEQ ID NO: 406841 - RNA, 19 nt, Artificial Sequence
  Description of Artificial Sequence: Synthetic oligonucleotide
acuuggugugcaaauaauc

SEQ ID NO: 406842 - RNA, 19 nt, Artificial Sequence
  Description of Artificial Sequence: Synthetic oligonucleotide
cauacuucuccaccaaaac

SEQ ID NO: 406843 - RNA, 19 nt, Artificial Sequence
  Description of Artificial Sequence: Synthetic oligonucleotide
aauagaucuccgauuuuca

SEQ ID NO: 406844 - RNA, 19 nt, Artificial Sequence
  Description of Artificial Sequence: Synthetic oligonucleotide
aauuacgaaccgauuucag

SEQ ID NO: 406845 - RNA, 19 nt, Artificial Sequence
  Description of Artificial Sequence: Synthetic oligonucleotide
ucccguuaaauagaucucc

SEQ ID NO: 406846 - RNA, 19 nt, Artificial Sequence
  Description of Artificial Sequence: Synthetic oligonucleotide
agucggauuucaucuagug

SEQ ID NO: 406847 - RNA, 19 nt, Artificial Sequence
  Description of Artificial Sequence: Synthetic oligonucleotide
agaucggcgaucuucacuu

SEQ ID NO: 406848 - RNA, 19 nt, Artificial Sequence
  Description of Artificial Sequence: Synthetic oligonucleotide
uguagcacuugcugaauaa

SEQ ID NO: 406849 - RNA, 19 nt, Artificial Sequence
  Description of Artificial Sequence: Synthetic oligonucleotide
ucuaguaacucugccuggc

SEQ ID NO: 406850 - RNA, 19 nt, Artificial Sequence
  Description of Artificial Sequence: Synthetic oligonucleotide
uacgaaccgauuucagcag

SEQ ID NO: 406851 - RNA, 19 nt, Artificial Sequence
  Description of Artificial Sequence: Synthetic oligonucleotide
ucagcagucggauuucauc

SEQ ID NO: 406852 - RNA, 19 nt, Artificial Sequence
  Description of Artificial Sequence: Synthetic oligonucleotide
ugauccggcacuuggugug

SEQ ID NO: 406853 - RNA, 19 nt, Artificial Sequence
  Description of Artificial Sequence: Synthetic oligonucleotide
auacgaauuagaaaccaga

SEQ ID NO: 406854 - RNA, 19 nt, Artificial Sequence
  Description of Artificial Sequence: Synthetic oligonucleotide
aguaacucugccuggcgcu

SEQ ID NO: 406855 - RNA, 19 nt, Artificial Sequence
  Description of Artificial Sequence: Synthetic oligonucleotide
ugccacaaacuucuuuccc

SEQ ID NO: 406856 - RNA, 19 nt, Artificial Sequence
  Description of Artificial Sequence: Synthetic oligonucleotide
auuaacgacuccaauuacu

SEQ ID NO: 406857 - RNA, 19 nt, Artificial Sequence
  Description of Artificial Sequence: Synthetic oligonucleotide
uuauuagguggguucucug

SEQ ID NO: 406858 - RNA, 19 nt, Artificial Sequence
  Description of Artificial Sequence: Synthetic oligonucleotide
ucuccauuuggggagguca

SEQ ID NO: 406859 - RNA, 19 nt, Artificial Sequence
  Description of Artificial Sequence: Synthetic oligonucleotide
aacuacuuucauugccaca

SEQ ID NO: 406860 - RNA, 19 nt, Artificial Sequence
  Description of Artificial Sequence: Synthetic oligonucleotide
guguugacaaccuaaugaa

SEQ ID NO: 406861 - RNA, 19 nt, Artificial Sequence
  Description of Artificial Sequence: Synthetic oligonucleotide
uuucccugaauaucccaug

SEQ ID NO: 406862 - RNA, 19 nt, Artificial Sequence
  Description of Artificial Sequence: Synthetic oligonucleotide
ucaucuagugccguuucug

SEQ ID NO: 406863 - RNA, 19 nt, Artificial Sequence
  Description of Artificial Sequence: Synthetic oligonucleotide
accuuaugcuggcagcggg

SEQ ID NO: 406864 - RNA, 19 nt, Artificial Sequence
  Description of Artificial Sequence: Synthetic oligonucleotide
aucuccgauuuucacaaga

SEQ ID NO: 406865 - RNA, 19 nt, Artificial Sequence
  Description of Artificial Sequence: Synthetic oligonucleotide
accaugcaaauauguguuc

SEQ ID NO: 406866 - RNA, 19 nt, Artificial Sequence
  Description of Artificial Sequence: Synthetic oligonucleotide
ugaauaaaaggaggggcuc

SEQ ID NO: 406867 - RNA, 19 nt, Artificial Sequence
  Description of Artificial Sequence: Synthetic oligonucleotide
aaggguguuucaacaggac

SEQ ID NO: 406868 - RNA, 19 nt, Artificial Sequence
  Description of Artificial Sequence: Synthetic oligonucleotide
gauaguuagacuugauaau

SEQ ID NO: 406869 - RNA, 19 nt, Artificial Sequence
  Description of Artificial Sequence: Synthetic oligonucleotide
gacucuuagaguuggugaa

SEQ ID NO: 406870 - RNA, 19 nt, Artificial Sequence
  Description of Artificial Sequence: Synthetic oligonucleotide
ucuccgauuuucacaagau

SEQ ID NO: 406871 - RNA, 19 nt, Artificial Sequence
  Description of Artificial Sequence: Synthetic oligonucleotide
aggggcuuaggaauugagc

SEQ ID NO: 406872 - RNA, 19 nt, Artificial Sequence
  Description of Artificial Sequence: Synthetic oligonucleotide
cacaaugagcuugcgaggc

SEQ ID NO: 406873 - RNA, 19 nt, Artificial Sequence
  Description of Artificial Sequence: Synthetic oligonucleotide
aaauaguccccuguggcua

SEQ ID NO: 406874 - RNA, 19 nt, Artificial Sequence
  Description of Artificial Sequence: Synthetic oligonucleotide
guaauuaacgacuccaauu

SEQ ID NO: 406875 - RNA, 19 nt, Artificial Sequence
  Description of Artificial Sequence: Synthetic oligonucleotide
aaaaggguguugacaaccu

SEQ ID NO: 406876 - RNA, 19 nt, Artificial Sequence
  Description of Artificial Sequence: Synthetic oligonucleotide
gaaccgauuucagcagucg

SEQ ID NO: 406877 - RNA, 19 nt, Artificial Sequence
  Description of Artificial Sequence: Synthetic oligonucleotide
uucaccuaggauguccagc

SEQ ID NO: 406878 - RNA, 19 nt, Artificial Sequence
  Description of Artificial Sequence: Synthetic oligonucleotide
gaauuacgaaccgauuuca

SEQ ID NO: 406879 - RNA, 19 nt, Artificial Sequence
  Description of Artificial Sequence: Synthetic oligonucleotide
auucauaccccucccuccu

SEQ ID NO: 406880 - RNA, 19 nt, Artificial Sequence
  Description of Artificial Sequence: Synthetic oligonucleotide
auaaccuccuuuacaguag

SEQ ID NO: 406881 - RNA, 19 nt, Artificial Sequence
  Description of Artificial Sequence: Synthetic oligonucleotide
gaauauuucccugccacaa

SEQ ID NO: 406882 - RNA, 19 nt, Artificial Sequence
  Description of Artificial Sequence: Synthetic oligonucleotide
ugcuucaaagugugcacac

SEQ ID NO: 406883 - RNA, 19 nt, Artificial Sequence
  Description of Artificial Sequence: Synthetic oligonucleotide
cauuuugucagcugguuua

SEQ ID NO: 406884 - RNA, 19 nt, Artificial Sequence
  Description of Artificial Sequence: Synthetic oligonucleotide
aaccuuaugcuggcagcgg

SEQ ID NO: 406885 - RNA, 19 nt, Artificial Sequence
  Description of Artificial Sequence: Synthetic oligonucleotide
uaucucccguuaaauagau

SEQ ID NO: 406886 - RNA, 19 nt, Artificial Sequence
  Description of Artificial Sequence: Synthetic oligonucleotide
uuuugacacaaggcagcgg

SEQ ID NO: 406887 - RNA, 19 nt, Artificial Sequence
  Description of Artificial Sequence: Synthetic oligonucleotide
cagucauuagcauuacgca

SEQ ID NO: 406888 - RNA, 19 nt, Artificial Sequence
  Description of Artificial Sequence: Synthetic oligonucleotide
uggguucucugucaagggu

SEQ ID NO: 406889 - RNA, 19 nt, Artificial Sequence
  Description of Artificial Sequence: Synthetic oligonucleotide
uaaccuccuuuacaguagu

SEQ ID NO: 406890 - RNA, 19 nt, Artificial Sequence
  Description of Artificial Sequence: Synthetic oligonucleotide
caaccuuaugcuggcagcg

SEQ ID NO: 406891 - RNA, 19 nt, Artificial Sequence
  Description of Artificial Sequence: Synthetic oligonucleotide
aucacaugguaucucccgu

SEQ ID NO: 406892 - RNA, 19 nt, Artificial Sequence
  Description of Artificial Sequence: Synthetic oligonucleotide
gaucaaggcgaugugaucu

SEQ ID NO: 406893 - RNA, 19 nt, Artificial Sequence
  Description of Artificial Sequence: Synthetic oligonucleotide
auucccaagaucggcgauc

SEQ ID NO: 406894 - RNA, 19 nt, Artificial Sequence
  Description of Artificial Sequence: Synthetic oligonucleotide
aaagaccgauacugccuug

SEQ ID NO: 406895 - RNA, 19 nt, Artificial Sequence
  Description of Artificial Sequence: Synthetic oligonucleotide
uccucaaccuuaugcuggc

SEQ ID NO: 406896 - RNA, 19 nt, Artificial Sequence
  Description of Artificial Sequence: Synthetic oligonucleotide
gcuguggcgauuuccacag

SEQ ID NO: 406897 - RNA, 19 nt, Artificial Sequence
  Description of Artificial Sequence: Synthetic oligonucleotide
ugaucgcugccauucugug

SEQ ID NO: 406898 - RNA, 19 nt, Artificial Sequence
  Description of Artificial Sequence: Synthetic oligonucleotide
agaugacauggccuggaca

SEQ ID NO: 406899 - RNA, 19 nt, Artificial Sequence
  Description of Artificial Sequence: Synthetic oligonucleotide
caucacguguguaauccuc

SEQ ID NO: 406900 - RNA, 19 nt, Artificial Sequence
  Description of Artificial Sequence: Synthetic oligonucleotide
uuguuacuguuuucagugu

SEQ ID NO: 406901 - RNA, 19 nt, Artificial Sequence
  Description of Artificial Sequence: Synthetic oligonucleotide
aagaccgauacugccuugu

SEQ ID NO: 406902 - RNA, 19 nt, Artificial Sequence
  Description of Artificial Sequence: Synthetic oligonucleotide
guuaaauagaucuccgauu

SEQ ID NO: 406903 - RNA, 19 nt, Artificial Sequence
  Description of Artificial Sequence: Synthetic oligonucleotide
uuacgcagguccucuuuca

SEQ ID NO: 406904 - RNA, 19 nt, Artificial Sequence
  Description of Artificial Sequence: Synthetic oligonucleotide
cagugaaaugcuugugcac

SEQ ID NO: 406905 - RNA, 19 nt, Artificial Sequence
  Description of Artificial Sequence: Synthetic oligonucleotide
ugccacaaugagcuugcga

SEQ ID NO: 406906 - RNA, 19 nt, Artificial Sequence
  Description of Artificial Sequence: Synthetic oligonucleotide
aggaaucucugcccggaug

SEQ ID NO: 406907 - RNA, 19 nt, Artificial Sequence
  Description of Artificial Sequence: Synthetic oligonucleotide
gcucaaggggauuaauaag

SEQ ID NO: 406908 - RNA, 19 nt, Artificial Sequence
  Description of Artificial Sequence: Synthetic oligonucleotide
caggcauucccaagaucgg

SEQ ID NO: 406909 - RNA, 19 nt, Artificial Sequence
  Description of Artificial Sequence: Synthetic oligonucleotide
gaaaagagcuucacccuga

SEQ ID NO: 406910 - RNA, 19 nt, Artificial Sequence
  Description of Artificial Sequence: Synthetic oligonucleotide
cauuuggaucauucggguc

SEQ ID NO: 406911 - RNA, 19 nt, Artificial Sequence
  Description of Artificial Sequence: Synthetic oligonucleotide
uguugcagcuugagcagaa

SEQ ID NO: 406912 - RNA, 19 nt, Artificial Sequence
  Description of Artificial Sequence: Synthetic oligonucleotide
cagucuccgaauguacugg

SEQ ID NO: 406913 - RNA, 19 nt, Artificial Sequence
  Description of Artificial Sequence: Synthetic oligonucleotide
acauuuugucagcugguuu

SEQ ID NO: 406914 - RNA, 19 nt, Artificial Sequence
  Description of Artificial Sequence: Synthetic oligonucleotide
uuagaagcccuggaagaaa

SEQ ID NO: 406915 - RNA, 19 nt, Artificial Sequence
  Description of Artificial Sequence: Synthetic oligonucleotide
agcaggcauucccaagauc

SEQ ID NO: 406916 - RNA, 19 nt, Artificial Sequence
  Description of Artificial Sequence: Synthetic oligonucleotide
gcuaguucaaaggccaugc

SEQ ID NO: 406917 - RNA, 19 nt, Artificial Sequence
  Description of Artificial Sequence: Synthetic oligonucleotide
agaccgauacugccuuguc

SEQ ID NO: 406918 - RNA, 19 nt, Artificial Sequence
  Description of Artificial Sequence: Synthetic oligonucleotide
aucggcgaucuucacuuug

SEQ ID NO: 406919 - RNA, 19 nt, Artificial Sequence
  Description of Artificial Sequence: Synthetic oligonucleotide
ugaucaaggcgaugugauc

SEQ ID NO: 406920 - RNA, 19 nt, Artificial Sequence
  Description of Artificial Sequence: Synthetic oligonucleotide
caguguaauuaacgacucc

SEQ ID NO: 406921 - RNA, 19 nt, Artificial Sequence
  Description of Artificial Sequence: Synthetic oligonucleotide
uucgggucugaauuacgaa

SEQ ID NO: 406922 - RNA, 19 nt, Artificial Sequence
  Description of Artificial Sequence: Synthetic oligonucleotide
cucggaguggggugcagag

SEQ ID NO: 406923 - RNA, 19 nt, Artificial Sequence
  Description of Artificial Sequence: Synthetic oligonucleotide
gcugguuuaggcuguggag

SEQ ID NO: 406924 - RNA, 19 nt, Artificial Sequence
  Description of Artificial Sequence: Synthetic oligonucleotide
ucaucacguguguaauccu

SEQ ID NO: 406925 - RNA, 19 nt, Artificial Sequence
  Description of Artificial Sequence: Synthetic oligonucleotide
uucggaucacaugguaucu

SEQ ID NO: 406926 - RNA, 19 nt, Artificial Sequence
  Description of Artificial Sequence: Synthetic oligonucleotide
cccaacuaaggccaaauuc

SEQ ID NO: 406927 - RNA, 19 nt, Artificial Sequence
  Description of Artificial Sequence: Synthetic oligonucleotide
gcaauuaauuucuguguca

SEQ ID NO: 406928 - RNA, 19 nt, Artificial Sequence
  Description of Artificial Sequence: Synthetic oligonucleotide
gaauugagccaaggguggc

SEQ ID NO: 406929 - RNA, 19 nt, Artificial Sequence
  Description of Artificial Sequence: Synthetic oligonucleotide
auucaccuaggauguccag

SEQ ID NO: 406930 - RNA, 19 nt, Artificial Sequence
  Description of Artificial Sequence: Synthetic oligonucleotide
aggccaaauucaccuagga

SEQ ID NO: 406931 - RNA, 19 nt, Artificial Sequence
  Description of Artificial Sequence: Synthetic oligonucleotide
augaucaaggcgaugugau

SEQ ID NO: 406932 - RNA, 19 nt, Artificial Sequence
  Description of Artificial Sequence: Synthetic oligonucleotide
uuuuauuagguggguucuc

SEQ ID NO: 406933 - RNA, 19 nt, Artificial Sequence
  Description of Artificial Sequence: Synthetic oligonucleotide
uuuuggcucaaggggauua

SEQ ID NO: 406934 - RNA, 19 nt, Artificial Sequence
  Description of Artificial Sequence: Synthetic oligonucleotide
guggcuaguucaaaggcca

SEQ ID NO: 406935 - RNA, 19 nt, Artificial Sequence
  Description of Artificial Sequence: Synthetic oligonucleotide
ugaaaugcuugugcaccca

SEQ ID NO: 406936 - RNA, 19 nt, Artificial Sequence
  Description of Artificial Sequence: Synthetic oligonucleotide
uacugccuugucuggauau

SEQ ID NO: 406937 - RNA, 19 nt, Artificial Sequence
  Description of Artificial Sequence: Synthetic oligonucleotide
gggucugaauuacgaaccg

SEQ ID NO: 406938 - RNA, 19 nt, Artificial Sequence
  Description of Artificial Sequence: Synthetic oligonucleotide
ggcucaaggggauuaauaa

SEQ ID NO: 406939 - RNA, 19 nt, Artificial Sequence
  Description of Artificial Sequence: Synthetic oligonucleotide
uucccaagaucggcgaucu

SEQ ID NO: 406940 - RNA, 19 nt, Artificial Sequence
  Description of Artificial Sequence: Synthetic oligonucleotide
agccucaauguuucauugu

SEQ ID NO: 406941 - RNA, 19 nt, Artificial Sequence
  Description of Artificial Sequence: Synthetic oligonucleotide
agucuccgaauguacuggu

SEQ ID NO: 406942 - RNA, 19 nt, Artificial Sequence
  Description of Artificial Sequence: Synthetic oligonucleotide
cuguguaauguucagcacu

SEQ ID NO: 406943 - RNA, 19 nt, Artificial Sequence
  Description of Artificial Sequence: Synthetic oligonucleotide
agcacuugcugaauaauuu

SEQ ID NO: 406944 - RNA, 19 nt, Artificial Sequence
  Description of Artificial Sequence: Synthetic oligonucleotide
cucccguuaaauagaucuc

SEQ ID NO: 406945 - RNA, 19 nt, Artificial Sequence
  Description of Artificial Sequence: Synthetic oligonucleotide
agggucugauccugaccac

SEQ ID NO: 406946 - RNA, 19 nt, Artificial Sequence
  Description of Artificial Sequence: Synthetic oligonucleotide
caaugagcuugcgaggcac

SEQ ID NO: 406947 - RNA, 19 nt, Artificial Sequence
  Description of Artificial Sequence: Synthetic oligonucleotide
acaaugagcuugcgaggca

SEQ ID NO: 406948 - RNA, 19 nt, Artificial Sequence
  Description of Artificial Sequence: Synthetic oligonucleotide
ggcauucccaagaucggcg

SEQ ID NO: 406949 - RNA, 19 nt, Artificial Sequence
  Description of Artificial Sequence: Synthetic oligonucleotide
ugauguguuucaggucacc

SEQ ID NO: 406950 - RNA, 19 nt, Artificial Sequence
  Description of Artificial Sequence: Synthetic oligonucleotide
acgaaccgauuucagcagu

SEQ ID NO: 406951 - RNA, 19 nt, Artificial Sequence
  Description of Artificial Sequence: Synthetic oligonucleotide
uuugcccggggcccgacuc

SEQ ID NO: 406952 - RNA, 19 nt, Artificial Sequence
  Description of Artificial Sequence: Synthetic oligonucleotide
agcauuacgcagguccucu

SEQ ID NO: 406953 - RNA, 19 nt, Artificial Sequence
  Description of Artificial Sequence: Synthetic oligonucleotide
cccguuaaauagaucuccg

SEQ ID NO: 406954 - RNA, 19 nt, Artificial Sequence
  Description of Artificial Sequence: Synthetic oligonucleotide
gaugucgcucucggagugg

SEQ ID NO: 406955 - RNA, 19 nt, Artificial Sequence
  Description of Artificial Sequence: Synthetic oligonucleotide
ucccugaauaucccaugau

SEQ ID NO: 406956 - RNA, 19 nt, Artificial Sequence
  Description of Artificial Sequence: Synthetic oligonucleotide
cugaauuacgaaccgauuu

SEQ ID NO: 406957 - RNA, 19 nt, Artificial Sequence
  Description of Artificial Sequence: Synthetic oligonucleotide
cuccugaucgcugccauuc

SEQ ID NO: 406958 - RNA, 19 nt, Artificial Sequence
  Description of Artificial Sequence: Synthetic oligonucleotide
gugaauaaaaggaggggcu

SEQ ID NO: 406959 - RNA, 19 nt, Artificial Sequence
  Description of Artificial Sequence: Synthetic oligonucleotide
uuguccagugguccauuau

SEQ ID NO: 406960 - RNA, 19 nt, Artificial Sequence
  Description of Artificial Sequence: Synthetic oligonucleotide
accgauuucagcagucgga

SEQ ID NO: 406961 - RNA, 19 nt, Artificial Sequence
  Description of Artificial Sequence: Synthetic oligonucleotide
ucacaugguaucucccguu

SEQ ID NO: 406962 - RNA, 19 nt, Artificial Sequence
  Description of Artificial Sequence: Synthetic oligonucleotide
uuucugguuugaugucagu

SEQ ID NO: 406963 - RNA, 19 nt, Artificial Sequence
  Description of Artificial Sequence: Synthetic oligonucleotide
gcagucggauuucaucuag

SEQ ID NO: 406964 - RNA, 19 nt, Artificial Sequence
  Description of Artificial Sequence: Synthetic oligonucleotide
agccagucuccgaauguac

SEQ ID NO: 406965 - RNA, 19 nt, Artificial Sequence
  Description of Artificial Sequence: Synthetic oligonucleotide
agcgggauacgaauuagaa

SEQ ID NO: 406966 - RNA, 19 nt, Artificial Sequence
  Description of Artificial Sequence: Synthetic oligonucleotide
guuacuguuuucaguguaa

SEQ ID NO: 406967 - RNA, 19 nt, Artificial Sequence
  Description of Artificial Sequence: Synthetic oligonucleotide
uucagcagucggauuucau

SEQ ID NO: 406968 - RNA, 19 nt, Artificial Sequence
  Description of Artificial Sequence: Synthetic oligonucleotide
auaucccaugauaaccaca

SEQ ID NO: 406969 - RNA, 19 nt, Artificial Sequence
  Description of Artificial Sequence: Synthetic oligonucleotide
ggauacgaauuagaaacca

SEQ ID NO: 406970 - RNA, 19 nt, Artificial Sequence
  Description of Artificial Sequence: Synthetic oligonucleotide
gucagccugaugaacucug

SEQ ID NO: 406971 - RNA, 19 nt, Artificial Sequence
  Description of Artificial Sequence: Synthetic oligonucleotide
uucuaugaucaaggcgaug

SEQ ID NO: 406972 - RNA, 19 nt, Artificial Sequence
  Description of Artificial Sequence: Synthetic oligonucleotide
acaugguaucucccguuaa

SEQ ID NO: 406973 - RNA, 19 nt, Artificial Sequence
  Description of Artificial Sequence: Synthetic oligonucleotide
gggauacgaauuagaaacc

SEQ ID NO: 406974 - RNA, 19 nt, Artificial Sequence
  Description of Artificial Sequence: Synthetic oligonucleotide
cagcagucggauuucaucu

SEQ ID NO: 406975 - RNA, 19 nt, Artificial Sequence
  Description of Artificial Sequence: Synthetic oligonucleotide
ggcagucauuagcauuacg

SEQ ID NO: 406976 - RNA, 19 nt, Artificial Sequence
  Description of Artificial Sequence: Synthetic oligonucleotide
uccugaucgcugccauucu

SEQ ID NO: 406977 - RNA, 19 nt, Artificial Sequence
  Description of Artificial Sequence: Synthetic oligonucleotide
auaaaaggaggggcucaca

SEQ ID NO: 406978 - RNA, 19 nt, Artificial Sequence
  Description of Artificial Sequence: Synthetic oligonucleotide
cagcccaacuuucggauca

SEQ ID NO: 406979 - RNA, 19 nt, Artificial Sequence
  Description of Artificial Sequence: Synthetic oligonucleotide
ugcacacggcagucauuag

SEQ ID NO: 406980 - RNA, 19 nt, Artificial Sequence
  Description of Artificial Sequence: Synthetic oligonucleotide
aucaaggcgaugugaucuu

SEQ ID NO: 406981 - RNA, 19 nt, Artificial Sequence
  Description of Artificial Sequence: Synthetic oligonucleotide
uuucagccucaauguuuca

SEQ ID NO: 406982 - RNA, 19 nt, Artificial Sequence
  Description of Artificial Sequence: Synthetic oligonucleotide
guguguaauccuccccuga

SEQ ID NO: 406983 - RNA, 19 nt, Artificial Sequence
  Description of Artificial Sequence: Synthetic oligonucleotide
guguaauuaacgacuccaa

SEQ ID NO: 406984 - RNA, 19 nt, Artificial Sequence
  Description of Artificial Sequence: Synthetic oligonucleotide
uuaggcuguggagcaguac

SEQ ID NO: 406985 - RNA, 19 nt, Artificial Sequence
  Description of Artificial Sequence: Synthetic oligonucleotide
caagaugauaaccuccuuu

SEQ ID NO: 406986 - RNA, 19 nt, Artificial Sequence
  Description of Artificial Sequence: Synthetic oligonucleotide
agcggaagccccugauagu

SEQ ID NO: 406987 - RNA, 19 nt, Artificial Sequence
  Description of Artificial Sequence: Synthetic oligonucleotide
ugccuugucuggauaucuu

SEQ ID NO: 406988 - RNA, 19 nt, Artificial Sequence
  Description of Artificial Sequence: Synthetic oligonucleotide
uuaugcuggcagcgggaua

SEQ ID NO: 406989 - RNA, 19 nt, Artificial Sequence
  Description of Artificial Sequence: Synthetic oligonucleotide
uggggcuguucauacuuuu

SEQ ID NO: 406990 - RNA, 19 nt, Artificial Sequence
  Description of Artificial Sequence: Synthetic oligonucleotide
ggagaugcacugcugucuc

SEQ ID NO: 406991 - RNA, 19 nt, Artificial Sequence
  Description of Artificial Sequence: Synthetic oligonucleotide
ccagucuccgaauguacug

SEQ ID NO: 406992 - RNA, 19 nt, Artificial Sequence
  Description of Artificial Sequence: Synthetic oligonucleotide
augcucucuugaagguggc

SEQ ID NO: 406993 - RNA, 19 nt, Artificial Sequence
  Description of Artificial Sequence: Synthetic oligonucleotide
cucacagauucauaccccu

SEQ ID NO: 406994 - RNA, 19 nt, Artificial Sequence
  Description of Artificial Sequence: Synthetic oligonucleotide
uggaucauucgggucugaa

SEQ ID NO: 406995 - RNA, 19 nt, Artificial Sequence
  Description of Artificial Sequence: Synthetic oligonucleotide
gaccgauacugccuugucu

SEQ ID NO: 406996 - RNA, 19 nt, Artificial Sequence
  Description of Artificial Sequence: Synthetic oligonucleotide
caagaucggcgaucuucac

SEQ ID NO: 406997 - RNA, 19 nt, Artificial Sequence
  Description of Artificial Sequence: Synthetic oligonucleotide
agcagucggauuucaucua

SEQ ID NO: 406998 - RNA, 19 nt, Artificial Sequence
  Description of Artificial Sequence: Synthetic oligonucleotide
caccuaggauguccagcgg

SEQ ID NO: 406999 - RNA, 19 nt, Artificial Sequence
  Description of Artificial Sequence: Synthetic oligonucleotide
caccaugcaaauauguguu

SEQ ID NO: 407000 - RNA, 19 nt, Artificial Sequence
  Description of Artificial Sequence: Synthetic oligonucleotide
gggcuuaggaauugagcca

SEQ ID NO: 407001 - RNA, 19 nt, Artificial Sequence
  Description of Artificial Sequence: Synthetic oligonucleotide
gggucggagggucagccug

SEQ ID NO: 407002 - RNA, 19 nt, Artificial Sequence
  Description of Artificial Sequence: Synthetic oligonucleotide
gugccguuucuguguaaug

SEQ ID NO: 407003 - RNA, 19 nt, Artificial Sequence
  Description of Artificial Sequence: Synthetic oligonucleotide
gauccggcacuuggugugc

SEQ ID NO: 407004 - RNA, 19 nt, Artificial Sequence
  Description of Artificial Sequence: Synthetic oligonucleotide
augagcuugcgaggcaccu

SEQ ID NO: 407005 - RNA, 19 nt, Artificial Sequence
  Description of Artificial Sequence: Synthetic oligonucleotide
cggaucacaugguaucucc

SEQ ID NO: 407006 - RNA, 19 nt, Artificial Sequence
  Description of Artificial Sequence: Synthetic oligonucleotide
uggcuaguucaaaggccau

SEQ ID NO: 407007 - RNA, 19 nt, Artificial Sequence
  Description of Artificial Sequence: Synthetic oligonucleotide
uuuugcccggggcccgacu

SEQ ID NO: 407008 - RNA, 19 nt, Artificial Sequence
  Description of Artificial Sequence: Synthetic oligonucleotide
gaaggggcuuaggaauuga

SEQ ID NO: 407009 - RNA, 19 nt, Artificial Sequence
  Description of Artificial Sequence: Synthetic oligonucleotide
ucggaguggggugcagagc

SEQ ID NO: 407010 - RNA, 19 nt, Artificial Sequence
  Description of Artificial Sequence: Synthetic oligonucleotide
ccaagaucggcgaucuuca

SEQ ID NO: 407011 - RNA, 19 nt, Artificial Sequence
  Description of Artificial Sequence: Synthetic oligonucleotide
caugcacgcagugcuccag

SEQ ID NO: 407012 - RNA, 19 nt, Artificial Sequence
  Description of Artificial Sequence: Synthetic oligonucleotide
ggucugauccugaccacug

SEQ ID NO: 407013 - RNA, 19 nt, Artificial Sequence
  Description of Artificial Sequence: Synthetic oligonucleotide
auacugccuugucuggaua

SEQ ID NO: 407014 - RNA, 19 nt, Artificial Sequence
  Description of Artificial Sequence: Synthetic oligonucleotide
cccaagaucggcgaucuuc

SEQ ID NO: 407015 - RNA, 19 nt, Artificial Sequence
  Description of Artificial Sequence: Synthetic oligonucleotide
uagcauuacgcagguccuc

SEQ ID NO: 407016 - RNA, 19 nt, Artificial Sequence
  Description of Artificial Sequence: Synthetic oligonucleotide
agcccaacuuucggaucac

SEQ ID NO: 407017 - RNA, 19 nt, Artificial Sequence
  Description of Artificial Sequence: Synthetic oligonucleotide
uggcagcgggauacgaauu

SEQ ID NO: 407018 - RNA, 19 nt, Artificial Sequence
  Description of Artificial Sequence: Synthetic oligonucleotide
caucuagugccguuucugu

SEQ ID NO: 407019 - RNA, 19 nt, Artificial Sequence
  Description of Artificial Sequence: Synthetic oligonucleotide
gcacuuggugugcaaauaa

SEQ ID NO: 407020 - RNA, 19 nt, Artificial Sequence
  Description of Artificial Sequence: Synthetic oligonucleotide
cugaucgcugccauucugu

SEQ ID NO: 407021 - RNA, 19 nt, Artificial Sequence
  Description of Artificial Sequence: Synthetic oligonucleotide
ggcuuaggaauugagccaa

SEQ ID NO: 407022 - RNA, 19 nt, Artificial Sequence
  Description of Artificial Sequence: Synthetic oligonucleotide
cagcgggauacgaauuaga

SEQ ID NO: 407023 - RNA, 19 nt, Artificial Sequence
  Description of Artificial Sequence: Synthetic oligonucleotide
uuggcucaaggggauuaau

SEQ ID NO: 407024 - RNA, 19 nt, Artificial Sequence
  Description of Artificial Sequence: Synthetic oligonucleotide
ccgaauguacuggucauuc

SEQ ID NO: 407025 - RNA, 19 nt, Artificial Sequence
  Description of Artificial Sequence: Synthetic oligonucleotide
acacggcagucauuagcau

SEQ ID NO: 407026 - RNA, 19 nt, Artificial Sequence
  Description of Artificial Sequence: Synthetic oligonucleotide
cucuacggaggaggccugg

SEQ ID NO: 407027 - RNA, 19 nt, Artificial Sequence
  Description of Artificial Sequence: Synthetic oligonucleotide
cuuuggcagagcccaacua

SEQ ID NO: 407028 - RNA, 19 nt, Artificial Sequence
  Description of Artificial Sequence: Synthetic oligonucleotide
cacaugguaucucccguua

SEQ ID NO: 407029 - RNA, 19 nt, Artificial Sequence
  Description of Artificial Sequence: Synthetic oligonucleotide
ccuuuguuguccagugguc

SEQ ID NO: 407030 - RNA, 19 nt, Artificial Sequence
  Description of Artificial Sequence: Synthetic oligonucleotide
ccgauacugccuugucugg

SEQ ID NO: 407031 - RNA, 19 nt, Artificial Sequence
  Description of Artificial Sequence: Synthetic oligonucleotide
gcgggauacgaauuagaaa

SEQ ID NO: 407032 - RNA, 19 nt, Artificial Sequence
  Description of Artificial Sequence: Synthetic oligonucleotide
caaauucaccuaggauguc

SEQ ID NO: 407033 - RNA, 19 nt, Artificial Sequence
  Description of Artificial Sequence: Synthetic oligonucleotide
agccucggugcugcguuuc

SEQ ID NO: 407034 - RNA, 19 nt, Artificial Sequence
  Description of Artificial Sequence: Synthetic oligonucleotide
gcagcgggauacgaauuag

SEQ ID NO: 407035 - RNA, 19 nt, Artificial Sequence
  Description of Artificial Sequence: Synthetic oligonucleotide
cuacggaggaggccuggca

SEQ ID NO: 407036 - RNA, 19 nt, Artificial Sequence
  Description of Artificial Sequence: Synthetic oligonucleotide
gccccugauaguuagacuu

SEQ ID NO: 407037 - RNA, 19 nt, Artificial Sequence
  Description of Artificial Sequence: Synthetic oligonucleotide
caaagaccgauacugccuu

SEQ ID NO: 407038 - RNA, 19 nt, Artificial Sequence
  Description of Artificial Sequence: Synthetic oligonucleotide
guuuaggcuguggagcagu

SEQ ID NO: 407039 - RNA, 19 nt, Artificial Sequence
  Description of Artificial Sequence: Synthetic oligonucleotide
gaacuuccaaagaccgaua

SEQ ID NO: 407040 - RNA, 19 nt, Artificial Sequence
  Description of Artificial Sequence: Synthetic oligonucleotide
agggucggagggucagccu

SEQ ID NO: 407041 - RNA, 19 nt, Artificial Sequence
  Description of Artificial Sequence: Synthetic oligonucleotide
cuguagcacuugcugaaua

SEQ ID NO: 407042 - RNA, 19 nt, Artificial Sequence
  Description of Artificial Sequence: Synthetic oligonucleotide
ccccugauaguuagacuug

SEQ ID NO: 407043 - RNA, 19 nt, Artificial Sequence
  Description of Artificial Sequence: Synthetic oligonucleotide
cuagugccguuucugugua

SEQ ID NO: 407044 - RNA, 19 nt, Artificial Sequence
  Description of Artificial Sequence: Synthetic oligonucleotide
cuggcagcgggauacgaau

SEQ ID NO: 407045 - RNA, 19 nt, Artificial Sequence
  Description of Artificial Sequence: Synthetic oligonucleotide
gggucagccugaugaacuc

SEQ ID NO: 407046 - RNA, 19 nt, Artificial Sequence
  Description of Artificial Sequence: Synthetic oligonucleotide
ugagcuugcgaggcaccuu

SEQ ID NO: 407047 - RNA, 19 nt, Artificial Sequence
  Description of Artificial Sequence: Synthetic oligonucleotide
cacuuggugugcaaauaau

SEQ ID NO: 407048 - RNA, 19 nt, Artificial Sequence
  Description of Artificial Sequence: Synthetic oligonucleotide
gaagccccugauaguuaga

SEQ ID NO: 407049 - RNA, 19 nt, Artificial Sequence
  Description of Artificial Sequence: Synthetic oligonucleotide
guagcacuugcugaauaau

SEQ ID NO: 407050 - RNA, 19 nt, Artificial Sequence
  Description of Artificial Sequence: Synthetic oligonucleotide
ccugaucgcugccauucug

SEQ ID NO: 407051 - RNA, 19 nt, Artificial Sequence
  Description of Artificial Sequence: Synthetic oligonucleotide
ccaaagaccgauacugccu

SEQ ID NO: 407052 - RNA, 19 nt, Artificial Sequence
  Description of Artificial Sequence: Synthetic oligonucleotide
gucuccgaauguacugguc

SEQ ID NO: 407053 - RNA, 19 nt, Artificial Sequence
  Description of Artificial Sequence: Synthetic oligonucleotide
cccugaauaucccaugaua

SEQ ID NO: 407054 - RNA, 19 nt, Artificial Sequence
  Description of Artificial Sequence: Synthetic oligonucleotide
ggcagcgggauacgaauua

SEQ ID NO: 407055 - RNA, 19 nt, Artificial Sequence
  Description of Artificial Sequence: Synthetic oligonucleotide
uagugccguuucuguguaa

SEQ ID NO: 407056 - RNA, 19 nt, Artificial Sequence
  Description of Artificial Sequence: Synthetic oligonucleotide
acgcagugcuccagauguc

SEQ ID NO: 407057 - RNA, 19 nt, Artificial Sequence
  Description of Artificial Sequence: Synthetic oligonucleotide
gcgauuuccacagggucaa

SEQ ID NO: 407058 - RNA, 19 nt, Artificial Sequence
  Description of Artificial Sequence: Synthetic oligonucleotide
ggggcccgacucuuucucc

SEQ ID NO: 407059 - RNA, 19 nt, Artificial Sequence
  Description of Artificial Sequence: Synthetic oligonucleotide
cacaggugugcaagagucu

SEQ ID NO: 407060 - RNA, 19 nt, Artificial Sequence
  Description of Artificial Sequence: Synthetic oligonucleotide
ggccaaauucaccuaggau

SEQ ID NO: 407061 - RNA, 19 nt, Artificial Sequence
  Description of Artificial Sequence: Synthetic oligonucleotide
cacggcagucauuagcauu

SEQ ID NO: 407062 - RNA, 19 nt, Artificial Sequence
  Description of Artificial Sequence: Synthetic oligonucleotide
ggcgaucuucacuuugagu

SEQ ID NO: 407063 - RNA, 19 nt, Artificial Sequence
  Description of Artificial Sequence: Synthetic oligonucleotide
cacacuccgugagggucug

SEQ ID NO: 407064 - RNA, 19 nt, Artificial Sequence
  Description of Artificial Sequence: Synthetic oligonucleotide
ccuuaugcuggcagcggga

SEQ ID NO: 407065 - RNA, 19 nt, Artificial Sequence
  Description of Artificial Sequence: Synthetic oligonucleotide
gggcccgacucuuucucca

SEQ ID NO: 407066 - RNA, 19 nt, Artificial Sequence
  Description of Artificial Sequence: Synthetic oligonucleotide
ccauuuggggaggucagga

SEQ ID NO: 407067 - RNA, 19 nt, Artificial Sequence
  Description of Artificial Sequence: Synthetic oligonucleotide
ccauuuggaucauucgggu

SEQ ID NO: 407068 - RNA, 19 nt, Artificial Sequence
  Description of Artificial Sequence: Synthetic oligonucleotide
cagucggauuucaucuagu

SEQ ID NO: 407069 - RNA, 19 nt, Artificial Sequence
  Description of Artificial Sequence: Synthetic oligonucleotide
ccgauuuucacaagaugau

SEQ ID NO: 407070 - RNA, 19 nt, Artificial Sequence
  Description of Artificial Sequence: Synthetic oligonucleotide
guggcgauuuccacagggu

SEQ ID NO: 407071 - RNA, 19 nt, Artificial Sequence
  Description of Artificial Sequence: Synthetic oligonucleotide
gggaugucgcucucggagu

SEQ ID NO: 407072 - RNA, 19 nt, Artificial Sequence
  Description of Artificial Sequence: Synthetic oligonucleotide
aaccuccagaaggccccaa

SEQ ID NO: 407073 - RNA, 19 nt, Artificial Sequence
  Description of Artificial Sequence: Synthetic oligonucleotide
cauuacgcagguccucuuu

SEQ ID NO: 407074 - RNA, 19 nt, Artificial Sequence
  Description of Artificial Sequence: Synthetic oligonucleotide
cuuaugcuggcagcgggau

SEQ ID NO: 407075 - RNA, 19 nt, Artificial Sequence
  Description of Artificial Sequence: Synthetic oligonucleotide
guucuaugaucaaggcgau

SEQ ID NO: 407076 - RNA, 19 nt, Artificial Sequence
  Description of Artificial Sequence: Synthetic oligonucleotide
cucucggaguggggugcag

SEQ ID NO: 407077 - RNA, 19 nt, Artificial Sequence
  Description of Artificial Sequence: Synthetic oligonucleotide
ccgacucuuucuccauuuc

SEQ ID NO: 407078 - RNA, 19 nt, Artificial Sequence
  Description of Artificial Sequence: Synthetic oligonucleotide
agagcccaacuaaggccaa

SEQ ID NO: 407079 - RNA, 19 nt, Artificial Sequence
  Description of Artificial Sequence: Synthetic oligonucleotide
auccggcacuuggugugca

SEQ ID NO: 407080 - RNA, 19 nt, Artificial Sequence
  Description of Artificial Sequence: Synthetic oligonucleotide
cauucccaagaucggcgau

SEQ ID NO: 407081 - RNA, 19 nt, Artificial Sequence
  Description of Artificial Sequence: Synthetic oligonucleotide
cccugauaguuagacuuga

SEQ ID NO: 407082 - RNA, 19 nt, Artificial Sequence
  Description of Artificial Sequence: Synthetic oligonucleotide
ggaugauccggcacuuggu

SEQ ID NO: 407083 - RNA, 19 nt, Artificial Sequence
  Description of Artificial Sequence: Synthetic oligonucleotide
ccaaaugaacauguuggau

SEQ ID NO: 407084 - RNA, 19 nt, Artificial Sequence
  Description of Artificial Sequence: Synthetic oligonucleotide
ggucggagggucagccuga

SEQ ID NO: 407085 - RNA, 19 nt, Artificial Sequence
  Description of Artificial Sequence: Synthetic oligonucleotide
gcuggcagcgggauacgaa

SEQ ID NO: 407086 - RNA, 19 nt, Artificial Sequence
  Description of Artificial Sequence: Synthetic oligonucleotide
gaucggcgaucuucacuuu

SEQ ID NO: 407087 - RNA, 19 nt, Artificial Sequence
  Description of Artificial Sequence: Synthetic oligonucleotide
cgauuuucacaagaugaua

SEQ ID NO: 407088 - RNA, 19 nt, Artificial Sequence
  Description of Artificial Sequence: Synthetic oligonucleotide
ggggcuguucauacuuuua

SEQ ID NO: 407089 - RNA, 19 nt, Artificial Sequence
  Description of Artificial Sequence: Synthetic oligonucleotide
ccgugagggucugauccug

SEQ ID NO: 407090 - RNA, 19 nt, Artificial Sequence
  Description of Artificial Sequence: Synthetic oligonucleotide
gggucugauccugaccacu

SEQ ID NO: 407091 - RNA, 19 nt, Artificial Sequence
  Description of Artificial Sequence: Synthetic oligonucleotide
guaacucugccuggcgcuu

SEQ ID NO: 407092 - RNA, 19 nt, Artificial Sequence
  Description of Artificial Sequence: Synthetic oligonucleotide
cacuccgugagggucugau

SEQ ID NO: 407093 - RNA, 19 nt, Artificial Sequence
  Description of Artificial Sequence: Synthetic oligonucleotide
ccaugauaaccacacuguu

SEQ ID NO: 407094 - RNA, 19 nt, Artificial Sequence
  Description of Artificial Sequence: Synthetic oligonucleotide
ggucagccugaugaacucu

SEQ ID NO: 407095 - RNA, 19 nt, Artificial Sequence
  Description of Artificial Sequence: Synthetic oligonucleotide
gcggaagccccugauaguu

SEQ ID NO: 407096 - RNA, 19 nt, Artificial Sequence
  Description of Artificial Sequence: Synthetic oligonucleotide
ccagauccuaucagaacuu

SEQ ID NO: 407097 - RNA, 19 nt, Artificial Sequence
  Description of Artificial Sequence: Synthetic oligonucleotide
ggguguguuguagccagau

SEQ ID NO: 407098 - RNA, 19 nt, Artificial Sequence
  Description of Artificial Sequence: Synthetic oligonucleotide
ccauuaugcuccugcuccu

SEQ ID NO: 407099 - RNA, 19 nt, Artificial Sequence
  Description of Artificial Sequence: Synthetic oligonucleotide
ccaugcacgcagugcucca

SEQ ID NO: 407100 - RNA, 19 nt, Artificial Sequence
  Description of Artificial Sequence: Synthetic oligonucleotide
ggugugcaagagucuguuu

SEQ ID NO: 407101 - RNA, 19 nt, Artificial Sequence
  Description of Artificial Sequence: Synthetic oligonucleotide
ccgauuucagcagucggau

SEQ ID NO: 407102 - RNA, 19 nt, Artificial Sequence
  Description of Artificial Sequence: Synthetic oligonucleotide
cagcggcuguggcgauuuc

SEQ ID NO: 407103 - RNA, 19 nt, Artificial Sequence
  Description of Artificial Sequence: Synthetic oligonucleotide
gcccaacuuucggaucaca

SEQ ID NO: 407104 - RNA, 19 nt, Artificial Sequence
  Description of Artificial Sequence: Synthetic oligonucleotide
gcccaacuaaggccaaauu

SEQ ID NO: 407105 - RNA, 19 nt, Artificial Sequence
  Description of Artificial Sequence: Synthetic oligonucleotide
cggggcccgacucuuucuc

SEQ ID NO: 407106 - RNA, 19 nt, Artificial Sequence
  Description of Artificial Sequence: Synthetic oligonucleotide
gagccucggugcugcguuu

SEQ ID NO: 407107 - RNA, 19 nt, Artificial Sequence
  Description of Artificial Sequence: Synthetic oligonucleotide
cccgacucuuucuccauuu

SEQ ID NO: 407108 - RNA, 19 nt, Artificial Sequence
  Description of Artificial Sequence: Synthetic oligonucleotide
gcauuacgcagguccucuu

SEQ ID NO: 407109 - RNA, 19 nt, Artificial Sequence
  Description of Artificial Sequence: Synthetic oligonucleotide
ggcccgacucuuucuccau

SEQ ID NO: 407110 - RNA, 19 nt, Artificial Sequence
  Description of Artificial Sequence: Synthetic oligonucleotide
ccucaaccuuaugcuggca

SEQ ID NO: 407111 - RNA, 19 nt, Artificial Sequence
  Description of Artificial Sequence: Synthetic oligonucleotide
gucggagggucagccugau

SEQ ID NO: 407112 - RNA, 19 nt, Artificial Sequence
  Description of Artificial Sequence: Synthetic oligonucleotide
gcccgacucuuucuccauu

SEQ ID NO: 407113 - RNA, 19 nt, Artificial Sequence
  Description of Artificial Sequence: Synthetic oligonucleotide
cggguguguuguagccaga

SEQ ID NO: 407114 - RNA, 19 nt, Artificial Sequence
  Description of Artificial Sequence: Synthetic oligonucleotide
ccggggcccgacucuuucu

SEQ ID NO: 407115 - RNA, 19 nt, Artificial Sequence
  Description of Artificial Sequence: Synthetic oligonucleotide
aacucauuaauacaaagag

SEQ ID NO: 407116 - RNA, 19 nt, Artificial Sequence
  Description of Artificial Sequence: Synthetic oligonucleotide
uacuaaguaauccagaucc

SEQ ID NO: 407117 - RNA, 19 nt, Artificial Sequence
  Description of Artificial Sequence: Synthetic oligonucleotide
aacucaacacuucaaacac

SEQ ID NO: 407118 - RNA, 19 nt, Artificial Sequence
  Description of Artificial Sequence: Synthetic oligonucleotide
auaaccacaaauuucucac

SEQ ID NO: 407119 - RNA, 19 nt, Artificial Sequence
  Description of Artificial Sequence: Synthetic oligonucleotide
aguaaagccugcuugagcg

SEQ ID NO: 407120 - RNA, 19 nt, Artificial Sequence
  Description of Artificial Sequence: Synthetic oligonucleotide
auagagacugcuucaaugc

SEQ ID NO: 407121 - RNA, 19 nt, Artificial Sequence
  Description of Artificial Sequence: Synthetic oligonucleotide
guaguaacaguucugacag

SEQ ID NO: 407122 - RNA, 19 nt, Artificial Sequence
  Description of Artificial Sequence: Synthetic oligonucleotide
uuugguagacuuuauuccg

SEQ ID NO: 407123 - RNA, 19 nt, Artificial Sequence
  Description of Artificial Sequence: Synthetic oligonucleotide
gacaguaucaguguggccg

SEQ ID NO: 407124 - RNA, 19 nt, Artificial Sequence
  Description of Artificial Sequence: Synthetic oligonucleotide
auugaugcuccacacaugg

SEQ ID NO: 407125 - RNA, 19 nt, Artificial Sequence
  Description of Artificial Sequence: Synthetic oligonucleotide
acaauuaugugauaggcca

SEQ ID NO: 407126 - RNA, 19 nt, Artificial Sequence
  Description of Artificial Sequence: Synthetic oligonucleotide
uguuaacucauuaauacaa

SEQ ID NO: 407127 - RNA, 19 nt, Artificial Sequence
  Description of Artificial Sequence: Synthetic oligonucleotide
cuuggaaacacccaaugcg

SEQ ID NO: 407128 - RNA, 19 nt, Artificial Sequence
  Description of Artificial Sequence: Synthetic oligonucleotide
uuggaaacacccaaugcgg

SEQ ID NO: 407129 - RNA, 19 nt, Artificial Sequence
  Description of Artificial Sequence: Synthetic oligonucleotide
uguaguaacaguucugaca

SEQ ID NO: 407130 - RNA, 19 nt, Artificial Sequence
  Description of Artificial Sequence: Synthetic oligonucleotide
uuacuaauagcagcaaugg

SEQ ID NO: 407131 - RNA, 19 nt, Artificial Sequence
  Description of Artificial Sequence: Synthetic oligonucleotide
uucuuuuacagguugucag

SEQ ID NO: 407132 - RNA, 19 nt, Artificial Sequence
  Description of Artificial Sequence: Synthetic oligonucleotide
aaugucuccuguuaacuca

SEQ ID NO: 407133 - RNA, 19 nt, Artificial Sequence
  Description of Artificial Sequence: Synthetic oligonucleotide
ugagcgauggcacaacugc

SEQ ID NO: 407134 - RNA, 19 nt, Artificial Sequence
  Description of Artificial Sequence: Synthetic oligonucleotide
ugugauaggccagugaugc

SEQ ID NO: 407135 - RNA, 19 nt, Artificial Sequence
  Description of Artificial Sequence: Synthetic oligonucleotide
ucgacugcacuucugacag

SEQ ID NO: 407136 - RNA, 19 nt, Artificial Sequence
  Description of Artificial Sequence: Synthetic oligonucleotide
ucuuuuacagguugucagg

SEQ ID NO: 407137 - RNA, 19 nt, Artificial Sequence
  Description of Artificial Sequence: Synthetic oligonucleotide
auacaaagagcagaaacgg

SEQ ID NO: 407138 - RNA, 19 nt, Artificial Sequence
  Description of Artificial Sequence: Synthetic oligonucleotide
auuguaggauccuuccagc

SEQ ID NO: 407139 - RNA, 19 nt, Artificial Sequence
  Description of Artificial Sequence: Synthetic oligonucleotide
ugcauuguccuuucgauca

SEQ ID NO: 407140 - RNA, 19 nt, Artificial Sequence
  Description of Artificial Sequence: Synthetic oligonucleotide
uaugugauaggccagugau

SEQ ID NO: 407141 - RNA, 19 nt, Artificial Sequence
  Description of Artificial Sequence: Synthetic oligonucleotide
ucaaucggcuguaauuccg

SEQ ID NO: 407142 - RNA, 19 nt, Artificial Sequence
  Description of Artificial Sequence: Synthetic oligonucleotide
aagaucaaccuccuccgag

SEQ ID NO: 407143 - RNA, 19 nt, Artificial Sequence
  Description of Artificial Sequence: Synthetic oligonucleotide
gaacucaacacuucaaaca

SEQ ID NO: 407144 - RNA, 19 nt, Artificial Sequence
  Description of Artificial Sequence: Synthetic oligonucleotide
ucuuguaaugucuugggau

SEQ ID NO: 407145 - RNA, 19 nt, Artificial Sequence
  Description of Artificial Sequence: Synthetic oligonucleotide
auuacuaauagcagcaaug

SEQ ID NO: 407146 - RNA, 19 nt, Artificial Sequence
  Description of Artificial Sequence: Synthetic oligonucleotide
uaauuccgugcuucgaugg

SEQ ID NO: 407147 - RNA, 19 nt, Artificial Sequence
  Description of Artificial Sequence: Synthetic oligonucleotide
gaagaaaugaacuggccaa

SEQ ID NO: 407148 - RNA, 19 nt, Artificial Sequence
  Description of Artificial Sequence: Synthetic oligonucleotide
aaucgacugcacuucugac

SEQ ID NO: 407149 - RNA, 19 nt, Artificial Sequence
  Description of Artificial Sequence: Synthetic oligonucleotide
ugugugcauagucaguuug

SEQ ID NO: 407150 - RNA, 19 nt, Artificial Sequence
  Description of Artificial Sequence: Synthetic oligonucleotide
gacgauuugccccacgggc

SEQ ID NO: 407151 - RNA, 19 nt, Artificial Sequence
  Description of Artificial Sequence: Synthetic oligonucleotide
gaagccuugcagcaggaag

SEQ ID NO: 407152 - RNA, 19 nt, Artificial Sequence
  Description of Artificial Sequence: Synthetic oligonucleotide
uaugcgaaagggcugcaug

SEQ ID NO: 407153 - RNA, 19 nt, Artificial Sequence
  Description of Artificial Sequence: Synthetic oligonucleotide
aauuccgugcuucgauggg

SEQ ID NO: 407154 - RNA, 19 nt, Artificial Sequence
  Description of Artificial Sequence: Synthetic oligonucleotide
agagaaucugaccccacuc

SEQ ID NO: 407155 - RNA, 19 nt, Artificial Sequence
  Description of Artificial Sequence: Synthetic oligonucleotide
uaauuccauaaccacaaau

SEQ ID NO: 407156 - RNA, 19 nt, Artificial Sequence
  Description of Artificial Sequence: Synthetic oligonucleotide
agacuuuauuccgaauucc

SEQ ID NO: 407157 - RNA, 19 nt, Artificial Sequence
  Description of Artificial Sequence: Synthetic oligonucleotide
uaucuucauaugcgaaagg

SEQ ID NO: 407158 - RNA, 19 nt, Artificial Sequence
  Description of Artificial Sequence: Synthetic oligonucleotide
uuucaaucggcuguaauuc

SEQ ID NO: 407159 - RNA, 19 nt, Artificial Sequence
  Description of Artificial Sequence: Synthetic oligonucleotide
aucggcuguaauuccgugc

SEQ ID NO: 407160 - RNA, 19 nt, Artificial Sequence
  Description of Artificial Sequence: Synthetic oligonucleotide
agucucggcaguuucgagg

SEQ ID NO: 407161 - RNA, 19 nt, Artificial Sequence
  Description of Artificial Sequence: Synthetic oligonucleotide
uucauaugcgaaagggcug

SEQ ID NO: 407162 - RNA, 19 nt, Artificial Sequence
  Description of Artificial Sequence: Synthetic oligonucleotide
uguacgugccugcacagga

SEQ ID NO: 407163 - RNA, 19 nt, Artificial Sequence
  Description of Artificial Sequence: Synthetic oligonucleotide
cugucaguacaccaugugg

SEQ ID NO: 407164 - RNA, 19 nt, Artificial Sequence
  Description of Artificial Sequence: Synthetic oligonucleotide
ucugcgagggauccagggg

SEQ ID NO: 407165 - RNA, 19 nt, Artificial Sequence
  Description of Artificial Sequence: Synthetic oligonucleotide
aauuaugugauaggccagu

SEQ ID NO: 407166 - RNA, 19 nt, Artificial Sequence
  Description of Artificial Sequence: Synthetic oligonucleotide
uguaggauccuuccagcca

SEQ ID NO: 407167 - RNA, 19 nt, Artificial Sequence
  Description of Artificial Sequence: Synthetic oligonucleotide
aagcucagcacauuacuaa

SEQ ID NO: 407168 - RNA, 19 nt, Artificial Sequence
  Description of Artificial Sequence: Synthetic oligonucleotide
cacauuacuaauagcagca

SEQ ID NO: 407169 - RNA, 19 nt, Artificial Sequence
  Description of Artificial Sequence: Synthetic oligonucleotide
uucgaucaaaggcugugug

SEQ ID NO: 407170 - RNA, 19 nt, Artificial Sequence
  Description of Artificial Sequence: Synthetic oligonucleotide
cuucgaugggguuagggug

SEQ ID NO: 407171 - RNA, 19 nt, Artificial Sequence
  Description of Artificial Sequence: Synthetic oligonucleotide
ucggcuguaauuccgugcu

SEQ ID NO: 407172 - RNA, 19 nt, Artificial Sequence
  Description of Artificial Sequence: Synthetic oligonucleotide
caaauuucucacacacugc

SEQ ID NO: 407173 - RNA, 19 nt, Artificial Sequence
  Description of Artificial Sequence: Synthetic oligonucleotide
aggugugugguaaauagag

SEQ ID NO: 407174 - RNA, 19 nt, Artificial Sequence
  Description of Artificial Sequence: Synthetic oligonucleotide
cugaggucugcauagcccc

SEQ ID NO: 407175 - RNA, 19 nt, Artificial Sequence
  Description of Artificial Sequence: Synthetic oligonucleotide
uuaugugauaggccaguga

SEQ ID NO: 407176 - RNA, 19 nt, Artificial Sequence
  Description of Artificial Sequence: Synthetic oligonucleotide
ugauaucuucauaugcgaa

SEQ ID NO: 407177 - RNA, 19 nt, Artificial Sequence
  Description of Artificial Sequence: Synthetic oligonucleotide
aacacucagcgugaagagg

SEQ ID NO: 407178 - RNA, 19 nt, Artificial Sequence
  Description of Artificial Sequence: Synthetic oligonucleotide
uuaguaagaucaaccuccu

SEQ ID NO: 407179 - RNA, 19 nt, Artificial Sequence
  Description of Artificial Sequence: Synthetic oligonucleotide
ugugcauuguccuuucgau

SEQ ID NO: 407180 - RNA, 19 nt, Artificial Sequence
  Description of Artificial Sequence: Synthetic oligonucleotide
gugugguaaauagagacug

SEQ ID NO: 407181 - RNA, 19 nt, Artificial Sequence
  Description of Artificial Sequence: Synthetic oligonucleotide
acaccaccgugcuuguucc

SEQ ID NO: 407182 - RNA, 19 nt, Artificial Sequence
  Description of Artificial Sequence: Synthetic oligonucleotide
aaugaucccuuugaacuca

SEQ ID NO: 407183 - RNA, 19 nt, Artificial Sequence
  Description of Artificial Sequence: Synthetic oligonucleotide
ucgaucaaaggcugugugc

SEQ ID NO: 407184 - RNA, 19 nt, Artificial Sequence
  Description of Artificial Sequence: Synthetic oligonucleotide
ucauaugcgaaagggcugc

SEQ ID NO: 407185 - RNA, 19 nt, Artificial Sequence
  Description of Artificial Sequence: Synthetic oligonucleotide
cuaucugugcuucaggaca

SEQ ID NO: 407186 - RNA, 19 nt, Artificial Sequence
  Description of Artificial Sequence: Synthetic oligonucleotide
uugccauugaugcuccaca

SEQ ID NO: 407187 - RNA, 19 nt, Artificial Sequence
  Description of Artificial Sequence: Synthetic oligonucleotide
uggcaggacccaaagagcu

SEQ ID NO: 407188 - RNA, 19 nt, Artificial Sequence
  Description of Artificial Sequence: Synthetic oligonucleotide
ucagacaaacauucauaga

SEQ ID NO: 407189 - RNA, 19 nt, Artificial Sequence
  Description of Artificial Sequence: Synthetic oligonucleotide
acugucaccgaccaggauu

SEQ ID NO: 407190 - RNA, 19 nt, Artificial Sequence
  Description of Artificial Sequence: Synthetic oligonucleotide
agcgugaagaggugugugg

SEQ ID NO: 407191 - RNA, 19 nt, Artificial Sequence
  Description of Artificial Sequence: Synthetic oligonucleotide
aaauagagacugcuucaau

SEQ ID NO: 407192 - RNA, 19 nt, Artificial Sequence
  Description of Artificial Sequence: Synthetic oligonucleotide
uccagaaccggaccacucc

SEQ ID NO: 407193 - RNA, 19 nt, Artificial Sequence
  Description of Artificial Sequence: Synthetic oligonucleotide
uacuaauagcagcaauggu

SEQ ID NO: 407194 - RNA, 19 nt, Artificial Sequence
  Description of Artificial Sequence: Synthetic oligonucleotide
agaccagcugaacacucgg

SEQ ID NO: 407195 - RNA, 19 nt, Artificial Sequence
  Description of Artificial Sequence: Synthetic oligonucleotide
uucaaucggcuguaauucc

SEQ ID NO: 407196 - RNA, 19 nt, Artificial Sequence
  Description of Artificial Sequence: Synthetic oligonucleotide
aggguguucaagugcauca

SEQ ID NO: 407197 - RNA, 19 nt, Artificial Sequence
  Description of Artificial Sequence: Synthetic oligonucleotide
uuguaggauccuuccagcc

SEQ ID NO: 407198 - RNA, 19 nt, Artificial Sequence
  Description of Artificial Sequence: Synthetic oligonucleotide
ucaugcuguaagcuguagu

SEQ ID NO: 407199 - RNA, 19 nt, Artificial Sequence
  Description of Artificial Sequence: Synthetic oligonucleotide
ucuuauguaccuccuugau

SEQ ID NO: 407200 - RNA, 19 nt, Artificial Sequence
  Description of Artificial Sequence: Synthetic oligonucleotide
cugagcagaucguugcugc

SEQ ID NO: 407201 - RNA, 19 nt, Artificial Sequence
  Description of Artificial Sequence: Synthetic oligonucleotide
guuggucacucacagacca

SEQ ID NO: 407202 - RNA, 19 nt, Artificial Sequence
  Description of Artificial Sequence: Synthetic oligonucleotide
gguacccagguuucaaucg

SEQ ID NO: 407203 - RNA, 19 nt, Artificial Sequence
  Description of Artificial Sequence: Synthetic oligonucleotide
ucuggccggagacagacuc

SEQ ID NO: 407204 - RNA, 19 nt, Artificial Sequence
  Description of Artificial Sequence: Synthetic oligonucleotide
ucaaacacucagcgugaag

SEQ ID NO: 407205 - RNA, 19 nt, Artificial Sequence
  Description of Artificial Sequence: Synthetic oligonucleotide
uauuccgaauucccuuuug

SEQ ID NO: 407206 - RNA, 19 nt, Artificial Sequence
  Description of Artificial Sequence: Synthetic oligonucleotide
acgaucuguugacuccugc

SEQ ID NO: 407207 - RNA, 19 nt, Artificial Sequence
  Description of Artificial Sequence: Synthetic oligonucleotide
ucagcacauuacuaauagc

SEQ ID NO: 407208 - RNA, 19 nt, Artificial Sequence
  Description of Artificial Sequence: Synthetic oligonucleotide
ucuuuggaggugcccaucu

SEQ ID NO: 407209 - RNA, 19 nt, Artificial Sequence
  Description of Artificial Sequence: Synthetic oligonucleotide
uaaauagagacugcuucaa

SEQ ID NO: 407210 - RNA, 19 nt, Artificial Sequence
  Description of Artificial Sequence: Synthetic oligonucleotide
uguaaugucuugggauuag

SEQ ID NO: 407211 - RNA, 19 nt, Artificial Sequence
  Description of Artificial Sequence: Synthetic oligonucleotide
ucauagguccccagucugc

SEQ ID NO: 407212 - RNA, 19 nt, Artificial Sequence
  Description of Artificial Sequence: Synthetic oligonucleotide
gggauuaguaagaucaacc

SEQ ID NO: 407213 - RNA, 19 nt, Artificial Sequence
  Description of Artificial Sequence: Synthetic oligonucleotide
uuuuacagguugucaggga

SEQ ID NO: 407214 - RNA, 19 nt, Artificial Sequence
  Description of Artificial Sequence: Synthetic oligonucleotide
guaauccagauccuuguuc

SEQ ID NO: 407215 - RNA, 19 nt, Artificial Sequence
  Description of Artificial Sequence: Synthetic oligonucleotide
guagaugugcucuggucug

SEQ ID NO: 407216 - RNA, 19 nt, Artificial Sequence
  Description of Artificial Sequence: Synthetic oligonucleotide
gauguacgugccugcacag

SEQ ID NO: 407217 - RNA, 19 nt, Artificial Sequence
  Description of Artificial Sequence: Synthetic oligonucleotide
gauggcacaacugccagga

SEQ ID NO: 407218 - RNA, 19 nt, Artificial Sequence
  Description of Artificial Sequence: Synthetic oligonucleotide
aucgacugcacuucugaca

SEQ ID NO: 407219 - RNA, 19 nt, Artificial Sequence
  Description of Artificial Sequence: Synthetic oligonucleotide
aguugcugauuucaccucu

SEQ ID NO: 407220 - RNA, 19 nt, Artificial Sequence
  Description of Artificial Sequence: Synthetic oligonucleotide
gaaacgggagcucgguggc

SEQ ID NO: 407221 - RNA, 19 nt, Artificial Sequence
  Description of Artificial Sequence: Synthetic oligonucleotide
ugugugucccauucauuca

SEQ ID NO: 407222 - RNA, 19 nt, Artificial Sequence
  Description of Artificial Sequence: Synthetic oligonucleotide
guaauuccgugcuucgaug

SEQ ID NO: 407223 - RNA, 19 nt, Artificial Sequence
  Description of Artificial Sequence: Synthetic oligonucleotide
gucucggcaguuucgaggc

SEQ ID NO: 407224 - RNA, 19 nt, Artificial Sequence
  Description of Artificial Sequence: Synthetic oligonucleotide
cagacgaucuguugacucc

SEQ ID NO: 407225 - RNA, 19 nt, Artificial Sequence
  Description of Artificial Sequence: Synthetic oligonucleotide
gagaaucugaccccacuca

SEQ ID NO: 407226 - RNA, 19 nt, Artificial Sequence
  Description of Artificial Sequence: Synthetic oligonucleotide
aaucggcuguaauuccgug

SEQ ID NO: 407227 - RNA, 19 nt, Artificial Sequence
  Description of Artificial Sequence: Synthetic oligonucleotide
agacgauuugccccacggg

SEQ ID NO: 407228 - RNA, 19 nt, Artificial Sequence
  Description of Artificial Sequence: Synthetic oligonucleotide
agaaccggaccacuccauc

SEQ ID NO: 407229 - RNA, 19 nt, Artificial Sequence
  Description of Artificial Sequence: Synthetic oligonucleotide
uggaaacacccaaugcggu

SEQ ID NO: 407230 - RNA, 19 nt, Artificial Sequence
  Description of Artificial Sequence: Synthetic oligonucleotide
uguggccgaguaaagccug

SEQ ID NO: 407231 - RNA, 19 nt, Artificial Sequence
  Description of Artificial Sequence: Synthetic oligonucleotide
uccguggucucccucaguc

SEQ ID NO: 407232 - RNA, 19 nt, Artificial Sequence
  Description of Artificial Sequence: Synthetic oligonucleotide
gguaccgccucuuauguac

SEQ ID NO: 407233 - RNA, 19 nt, Artificial Sequence
  Description of Artificial Sequence: Synthetic oligonucleotide
gugaucaccagcuuggggu

SEQ ID NO: 407234 - RNA, 19 nt, Artificial Sequence
  Description of Artificial Sequence: Synthetic oligonucleotide
ccugugaucaccagcuugg

SEQ ID NO: 407235 - RNA, 19 nt, Artificial Sequence
  Description of Artificial Sequence: Synthetic oligonucleotide
agaauuccauccuccagaa

SEQ ID NO: 407236 - RNA, 19 nt, Artificial Sequence
  Description of Artificial Sequence: Synthetic oligonucleotide
ugacucauagguccccagu

SEQ ID NO: 407237 - RNA, 19 nt, Artificial Sequence
  Description of Artificial Sequence: Synthetic oligonucleotide
caugcuguaagcuguagua

SEQ ID NO: 407238 - RNA, 19 nt, Artificial Sequence
  Description of Artificial Sequence: Synthetic oligonucleotide
ucaguacaccauguggcag

SEQ ID NO: 407239 - RNA, 19 nt, Artificial Sequence
  Description of Artificial Sequence: Synthetic oligonucleotide
gucuaggugauggaagaag

SEQ ID NO: 407240 - RNA, 19 nt, Artificial Sequence
  Description of Artificial Sequence: Synthetic oligonucleotide
agcgucaggggcuuggccu

SEQ ID NO: 407241 - RNA, 19 nt, Artificial Sequence
  Description of Artificial Sequence: Synthetic oligonucleotide
aagcgcacggagcaaccug

SEQ ID NO: 407242 - RNA, 19 nt, Artificial Sequence
  Description of Artificial Sequence: Synthetic oligonucleotide
ucggaauaguucacaaaua

SEQ ID NO: 407243 - RNA, 19 nt, Artificial Sequence
  Description of Artificial Sequence: Synthetic oligonucleotide
caaugucuccuguuaacuc

SEQ ID NO: 407244 - RNA, 19 nt, Artificial Sequence
  Description of Artificial Sequence: Synthetic oligonucleotide
agagcggccggguugguca

SEQ ID NO: 407245 - RNA, 19 nt, Artificial Sequence
  Description of Artificial Sequence: Synthetic oligonucleotide
ugcaaagguuggcaaagua

SEQ ID NO: 407246 - RNA, 19 nt, Artificial Sequence
  Description of Artificial Sequence: Synthetic oligonucleotide
augcgaaagggcugcaugu

SEQ ID NO: 407247 - RNA, 19 nt, Artificial Sequence
  Description of Artificial Sequence: Synthetic oligonucleotide
cuuucgaucaaaggcugug

SEQ ID NO: 407248 - RNA, 19 nt, Artificial Sequence
  Description of Artificial Sequence: Synthetic oligonucleotide
uguuugggucucuggccgg

SEQ ID NO: 407249 - RNA, 19 nt, Artificial Sequence
  Description of Artificial Sequence: Synthetic oligonucleotide
acacauggauguacgugcc

SEQ ID NO: 407250 - RNA, 19 nt, Artificial Sequence
  Description of Artificial Sequence: Synthetic oligonucleotide
gucugcgagggauccaggg

SEQ ID NO: 407251 - RNA, 19 nt, Artificial Sequence
  Description of Artificial Sequence: Synthetic oligonucleotide
uggucacucacagaccagc

SEQ ID NO: 407252 - RNA, 19 nt, Artificial Sequence
  Description of Artificial Sequence: Synthetic oligonucleotide
aagaauccccuugucugug

SEQ ID NO: 407253 - RNA, 19 nt, Artificial Sequence
  Description of Artificial Sequence: Synthetic oligonucleotide
ucggccccgacugucaccg

SEQ ID NO: 407254 - RNA, 19 nt, Artificial Sequence
  Description of Artificial Sequence: Synthetic oligonucleotide
gcaaagguuggcaaaguag

SEQ ID NO: 407255 - RNA, 19 nt, Artificial Sequence
  Description of Artificial Sequence: Synthetic oligonucleotide
ugcuucgaugggguuaggg

SEQ ID NO: 407256 - RNA, 19 nt, Artificial Sequence
  Description of Artificial Sequence: Synthetic oligonucleotide
acauggauguacgugccug

SEQ ID NO: 407257 - RNA, 19 nt, Artificial Sequence
  Description of Artificial Sequence: Synthetic oligonucleotide
ggugccgucucucugugag

SEQ ID NO: 407258 - RNA, 19 nt, Artificial Sequence
  Description of Artificial Sequence: Synthetic oligonucleotide
ccaaaguacuaaguaaucc

SEQ ID NO: 407259 - RNA, 19 nt, Artificial Sequence
  Description of Artificial Sequence: Synthetic oligonucleotide
uacccagguuucaaucggc

SEQ ID NO: 407260 - RNA, 19 nt, Artificial Sequence
  Description of Artificial Sequence: Synthetic oligonucleotide
agcgccuggagucaucaga

SEQ ID NO: 407261 - RNA, 19 nt, Artificial Sequence
  Description of Artificial Sequence: Synthetic oligonucleotide
cagcugaacacucggcccc

SEQ ID NO: 407262 - RNA, 19 nt, Artificial Sequence
  Description of Artificial Sequence: Synthetic oligonucleotide
aaagguuggcaaaguagaa

SEQ ID NO: 407263 - RNA, 19 nt, Artificial Sequence
  Description of Artificial Sequence: Synthetic oligonucleotide
guugacuccugccagugaa

SEQ ID NO: 407264 - RNA, 19 nt, Artificial Sequence
  Description of Artificial Sequence: Synthetic oligonucleotide
ugguagacuuuauuccgaa

SEQ ID NO: 407265 - RNA, 19 nt, Artificial Sequence
  Description of Artificial Sequence: Synthetic oligonucleotide
ggaugagauuuucaagcgc

SEQ ID NO: 407266 - RNA, 19 nt, Artificial Sequence
  Description of Artificial Sequence: Synthetic oligonucleotide
uuucgaucaaaggcugugu

SEQ ID NO: 407267 - RNA, 19 nt, Artificial Sequence
  Description of Artificial Sequence: Synthetic oligonucleotide
ugccauugaugcuccacac

SEQ ID NO: 407268 - RNA, 19 nt, Artificial Sequence
  Description of Artificial Sequence: Synthetic oligonucleotide
cucggaauaguucacaaau

SEQ ID NO: 407269 - RNA, 19 nt, Artificial Sequence
  Description of Artificial Sequence: Synthetic oligonucleotide
aaacgggagcucgguggcc

SEQ ID NO: 407270 - RNA, 19 nt, Artificial Sequence
  Description of Artificial Sequence: Synthetic oligonucleotide
cuggcugaugcucggcucc

SEQ ID NO: 407271 - RNA, 19 nt, Artificial Sequence
  Description of Artificial Sequence: Synthetic oligonucleotide
agcucagcacauuacuaau

SEQ ID NO: 407272 - RNA, 19 nt, Artificial Sequence
  Description of Artificial Sequence: Synthetic oligonucleotide
gcuguaauuccgugcuucg

SEQ ID NO: 407273 - RNA, 19 nt, Artificial Sequence
  Description of Artificial Sequence: Synthetic oligonucleotide
cuguaguaacaguucugac

SEQ ID NO: 407274 - RNA, 19 nt, Artificial Sequence
  Description of Artificial Sequence: Synthetic oligonucleotide
auuaugugauaggccagug

SEQ ID NO: 407275 - RNA, 19 nt, Artificial Sequence
  Description of Artificial Sequence: Synthetic oligonucleotide
ggcacaacugccaggaacc

SEQ ID NO: 407276 - RNA, 19 nt, Artificial Sequence
  Description of Artificial Sequence: Synthetic oligonucleotide
ucagucucggcaguuucga

SEQ ID NO: 407277 - RNA, 19 nt, Artificial Sequence
  Description of Artificial Sequence: Synthetic oligonucleotide
aguguccugucacgaugac

SEQ ID NO: 407278 - RNA, 19 nt, Artificial Sequence
  Description of Artificial Sequence: Synthetic oligonucleotide
cauugaugcuccacacaug

SEQ ID NO: 407279 - RNA, 19 nt, Artificial Sequence
  Description of Artificial Sequence: Synthetic oligonucleotide
guuucaaucggcuguaauu

SEQ ID NO: 407280 - RNA, 19 nt, Artificial Sequence
  Description of Artificial Sequence: Synthetic oligonucleotide
gccgaguaaagccugcuug

SEQ ID NO: 407281 - RNA, 19 nt, Artificial Sequence
  Description of Artificial Sequence: Synthetic oligonucleotide
uuccgugcuucgauggggu

SEQ ID NO: 407282 - RNA, 19 nt, Artificial Sequence
  Description of Artificial Sequence: Synthetic oligonucleotide
gacacgcagcagcagacga

SEQ ID NO: 407283 - RNA, 19 nt, Artificial Sequence
  Description of Artificial Sequence: Synthetic oligonucleotide
aguuggguuucucaucauu

SEQ ID NO: 407284 - RNA, 19 nt, Artificial Sequence
  Description of Artificial Sequence: Synthetic oligonucleotide
acgcuggugggaucagaac

SEQ ID NO: 407285 - RNA, 19 nt, Artificial Sequence
  Description of Artificial Sequence: Synthetic oligonucleotide
uaggauccuuccagccagg

SEQ ID NO: 407286 - RNA, 19 nt, Artificial Sequence
  Description of Artificial Sequence: Synthetic oligonucleotide
cucuuauguaccuccuuga

SEQ ID NO: 407287 - RNA, 19 nt, Artificial Sequence
  Description of Artificial Sequence: Synthetic oligonucleotide
caguuugcuucugaacacc

SEQ ID NO: 407288 - RNA, 19 nt, Artificial Sequence
  Description of Artificial Sequence: Synthetic oligonucleotide
guuaacucauuaauacaaa

SEQ ID NO: 407289 - RNA, 19 nt, Artificial Sequence
  Description of Artificial Sequence: Synthetic oligonucleotide
uguugacuccugccaguga

SEQ ID NO: 407290 - RNA, 19 nt, Artificial Sequence
  Description of Artificial Sequence: Synthetic oligonucleotide
agugaugccguggcacagg

SEQ ID NO: 407291 - RNA, 19 nt, Artificial Sequence
  Description of Artificial Sequence: Synthetic oligonucleotide
cagcagacgaucuguugac

SEQ ID NO: 407292 - RNA, 19 nt, Artificial Sequence
  Description of Artificial Sequence: Synthetic oligonucleotide
guuaggguggagugggcga

SEQ ID NO: 407293 - RNA, 19 nt, Artificial Sequence
  Description of Artificial Sequence: Synthetic oligonucleotide
uuucgaggcccaucuucug

SEQ ID NO: 407294 - RNA, 19 nt, Artificial Sequence
  Description of Artificial Sequence: Synthetic oligonucleotide
uccacacauggauguacgu

SEQ ID NO: 407295 - RNA, 19 nt, Artificial Sequence
  Description of Artificial Sequence: Synthetic oligonucleotide
ucagugagcgauggcacaa

SEQ ID NO: 407296 - RNA, 19 nt, Artificial Sequence
  Description of Artificial Sequence: Synthetic oligonucleotide
gauuucugacugaaaucga

SEQ ID NO: 407297 - RNA, 19 nt, Artificial Sequence
  Description of Artificial Sequence: Synthetic oligonucleotide
acucagacaaacauucaua

SEQ ID NO: 407298 - RNA, 19 nt, Artificial Sequence
  Description of Artificial Sequence: Synthetic oligonucleotide
ggauguacgugccugcaca

SEQ ID NO: 407299 - RNA, 19 nt, Artificial Sequence
  Description of Artificial Sequence: Synthetic oligonucleotide
gauuucaccucucucccau

SEQ ID NO: 407300 - RNA, 19 nt, Artificial Sequence
  Description of Artificial Sequence: Synthetic oligonucleotide
ugacaguaucaguguggcc

SEQ ID NO: 407301 - RNA, 19 nt, Artificial Sequence
  Description of Artificial Sequence: Synthetic oligonucleotide
uuguaaugucuugggauua

SEQ ID NO: 407302 - RNA, 19 nt, Artificial Sequence
  Description of Artificial Sequence: Synthetic oligonucleotide
agcagagcggccggguugg

SEQ ID NO: 407303 - RNA, 19 nt, Artificial Sequence
  Description of Artificial Sequence: Synthetic oligonucleotide
aucguugcugcuggggaag

SEQ ID NO: 407304 - RNA, 19 nt, Artificial Sequence
  Description of Artificial Sequence: Synthetic oligonucleotide
gcagcagacgaucuguuga

SEQ ID NO: 407305 - RNA, 19 nt, Artificial Sequence
  Description of Artificial Sequence: Synthetic oligonucleotide
cucggcaguuucgaggccc

SEQ ID NO: 407306 - RNA, 19 nt, Artificial Sequence
  Description of Artificial Sequence: Synthetic oligonucleotide
uguuccacgcuggugggau

SEQ ID NO: 407307 - RNA, 19 nt, Artificial Sequence
  Description of Artificial Sequence: Synthetic oligonucleotide
gagaagcgcacggagcaac

SEQ ID NO: 407308 - RNA, 19 nt, Artificial Sequence
  Description of Artificial Sequence: Synthetic oligonucleotide
cuuguaaugucuugggauu

SEQ ID NO: 407309 - RNA, 19 nt, Artificial Sequence
  Description of Artificial Sequence: Synthetic oligonucleotide
cacgaugggguugccauug

SEQ ID NO: 407310 - RNA, 19 nt, Artificial Sequence
  Description of Artificial Sequence: Synthetic oligonucleotide
gugcauuguccuuucgauc

SEQ ID NO: 407311 - RNA, 19 nt, Artificial Sequence
  Description of Artificial Sequence: Synthetic oligonucleotide
cugacucauagguccccag

SEQ ID NO: 407312 - RNA, 19 nt, Artificial Sequence
  Description of Artificial Sequence: Synthetic oligonucleotide
agacgaucuguugacuccu

SEQ ID NO: 407313 - RNA, 19 nt, Artificial Sequence
  Description of Artificial Sequence: Synthetic oligonucleotide
aucaaccuccuccgaguca

SEQ ID NO: 407314 - RNA, 19 nt, Artificial Sequence
  Description of Artificial Sequence: Synthetic oligonucleotide
cccaaaugaugcagguucg

SEQ ID NO: 407315 - RNA, 19 nt, Artificial Sequence
  Description of Artificial Sequence: Synthetic oligonucleotide
guugccauugaugcuccac

SEQ ID NO: 407316 - RNA, 19 nt, Artificial Sequence
  Description of Artificial Sequence: Synthetic oligonucleotide
guggcaggacccaaagagc

SEQ ID NO: 407317 - RNA, 19 nt, Artificial Sequence
  Description of Artificial Sequence: Synthetic oligonucleotide
uaguaagaucaaccuccuc

SEQ ID NO: 407318 - RNA, 19 nt, Artificial Sequence
  Description of Artificial Sequence: Synthetic oligonucleotide
guucuacacugguguuugg

SEQ ID NO: 407319 - RNA, 19 nt, Artificial Sequence
  Description of Artificial Sequence: Synthetic oligonucleotide
ucgggacccacugacaauu

SEQ ID NO: 407320 - RNA, 19 nt, Artificial Sequence
  Description of Artificial Sequence: Synthetic oligonucleotide
auguacgugccugcacagg

SEQ ID NO: 407321 - RNA, 19 nt, Artificial Sequence
  Description of Artificial Sequence: Synthetic oligonucleotide
agguucggucucgggaccc

SEQ ID NO: 407322 - RNA, 19 nt, Artificial Sequence
  Description of Artificial Sequence: Synthetic oligonucleotide
uaguaacaguucugacaga

SEQ ID NO: 407323 - RNA, 19 nt, Artificial Sequence
  Description of Artificial Sequence: Synthetic oligonucleotide
uauguaccuccuugauauc

SEQ ID NO: 407324 - RNA, 19 nt, Artificial Sequence
  Description of Artificial Sequence: Synthetic oligonucleotide
guaauuccguccaucccca

SEQ ID NO: 407325 - RNA, 19 nt, Artificial Sequence
  Description of Artificial Sequence: Synthetic oligonucleotide
agucauagucugcgaggga

SEQ ID NO: 407326 - RNA, 19 nt, Artificial Sequence
  Description of Artificial Sequence: Synthetic oligonucleotide
augugauaggccagugaug

SEQ ID NO: 407327 - RNA, 19 nt, Artificial Sequence
  Description of Artificial Sequence: Synthetic oligonucleotide
guaccuccuugauaucuuc

SEQ ID NO: 407328 - RNA, 19 nt, Artificial Sequence
  Description of Artificial Sequence: Synthetic oligonucleotide
gugcagacgauuugcccca

SEQ ID NO: 407329 - RNA, 19 nt, Artificial Sequence
  Description of Artificial Sequence: Synthetic oligonucleotide
gaaccggaccacuccaucu

SEQ ID NO: 407330 - RNA, 19 nt, Artificial Sequence
  Description of Artificial Sequence: Synthetic oligonucleotide
gcugucaguacaccaugug

SEQ ID NO: 407331 - RNA, 19 nt, Artificial Sequence
  Description of Artificial Sequence: Synthetic oligonucleotide
gcaaaguagaagaaaugaa

SEQ ID NO: 407332 - RNA, 19 nt, Artificial Sequence
  Description of Artificial Sequence: Synthetic oligonucleotide
acgauuugccccacgggcu

SEQ ID NO: 407333 - RNA, 19 nt, Artificial Sequence
  Description of Artificial Sequence: Synthetic oligonucleotide
ugguccgaccagcgccugg

SEQ ID NO: 407334 - RNA, 19 nt, Artificial Sequence
  Description of Artificial Sequence: Synthetic oligonucleotide
ugcgagggauccaggggaa

SEQ ID NO: 407335 - RNA, 19 nt, Artificial Sequence
  Description of Artificial Sequence: Synthetic oligonucleotide
ugcgaaagggcugcauguc

SEQ ID NO: 407336 - RNA, 19 nt, Artificial Sequence
  Description of Artificial Sequence: Synthetic oligonucleotide
gccggagacagacucugag

SEQ ID NO: 407337 - RNA, 19 nt, Artificial Sequence
  Description of Artificial Sequence: Synthetic oligonucleotide
acucaacacuucaaacacu

SEQ ID NO: 407338 - RNA, 19 nt, Artificial Sequence
  Description of Artificial Sequence: Synthetic oligonucleotide
ggacccacugacaauuaug

SEQ ID NO: 407339 - RNA, 19 nt, Artificial Sequence
  Description of Artificial Sequence: Synthetic oligonucleotide
gcagacgaucuguugacuc

SEQ ID NO: 407340 - RNA, 19 nt, Artificial Sequence
  Description of Artificial Sequence: Synthetic oligonucleotide
cuguugacuccugccagug

SEQ ID NO: 407341 - RNA, 19 nt, Artificial Sequence
  Description of Artificial Sequence: Synthetic oligonucleotide
acacccaaugcggugacuu

SEQ ID NO: 407342 - RNA, 19 nt, Artificial Sequence
  Description of Artificial Sequence: Synthetic oligonucleotide
cagaaacgggagcucggug

SEQ ID NO: 407343 - RNA, 19 nt, Artificial Sequence
  Description of Artificial Sequence: Synthetic oligonucleotide
acucucacuggggaugaga

SEQ ID NO: 407344 - RNA, 19 nt, Artificial Sequence
  Description of Artificial Sequence: Synthetic oligonucleotide
gugagcgauggcacaacug

SEQ ID NO: 407345 - RNA, 19 nt, Artificial Sequence
  Description of Artificial Sequence: Synthetic oligonucleotide
caaugcggugacuucagcu

SEQ ID NO: 407346 - RNA, 19 nt, Artificial Sequence
  Description of Artificial Sequence: Synthetic oligonucleotide
ccaaccaaaguacuaagua

SEQ ID NO: 407347 - RNA, 19 nt, Artificial Sequence
  Description of Artificial Sequence: Synthetic oligonucleotide
acacugguguuugggucuc

SEQ ID NO: 407348 - RNA, 19 nt, Artificial Sequence
  Description of Artificial Sequence: Synthetic oligonucleotide
cugugaucaccagcuuggg

SEQ ID NO: 407349 - RNA, 19 nt, Artificial Sequence
  Description of Artificial Sequence: Synthetic oligonucleotide
uccugcaauggugccgucu

SEQ ID NO: 407350 - RNA, 19 nt, Artificial Sequence
  Description of Artificial Sequence: Synthetic oligonucleotide
agcugaacacucggccccg

SEQ ID NO: 407351 - RNA, 19 nt, Artificial Sequence
  Description of Artificial Sequence: Synthetic oligonucleotide
gaagaucuuguaaugucuu

SEQ ID NO: 407352 - RNA, 19 nt, Artificial Sequence
  Description of Artificial Sequence: Synthetic oligonucleotide
gauuugccccacgggcucc

SEQ ID NO: 407353 - RNA, 19 nt, Artificial Sequence
  Description of Artificial Sequence: Synthetic oligonucleotide
cucggcuccucuguuucag

SEQ ID NO: 407354 - RNA, 19 nt, Artificial Sequence
  Description of Artificial Sequence: Synthetic oligonucleotide
uaccgccucuuauguaccu

SEQ ID NO: 407355 - RNA, 19 nt, Artificial Sequence
  Description of Artificial Sequence: Synthetic oligonucleotide
cacucagcgugaagaggug

SEQ ID NO: 407356 - RNA, 19 nt, Artificial Sequence
  Description of Artificial Sequence: Synthetic oligonucleotide
cauuacuaauagcagcaau

SEQ ID NO: 407357 - RNA, 19 nt, Artificial Sequence
  Description of Artificial Sequence: Synthetic oligonucleotide
acacucggccccgacuguc

SEQ ID NO: 407358 - RNA, 19 nt, Artificial Sequence
  Description of Artificial Sequence: Synthetic oligonucleotide
cagcagagcggccggguug

SEQ ID NO: 407359 - RNA, 19 nt, Artificial Sequence
  Description of Artificial Sequence: Synthetic oligonucleotide
acucagcgugaagaggugu

SEQ ID NO: 407360 - RNA, 19 nt, Artificial Sequence
  Description of Artificial Sequence: Synthetic oligonucleotide
cagguucggucucgggacc

SEQ ID NO: 407361 - RNA, 19 nt, Artificial Sequence
  Description of Artificial Sequence: Synthetic oligonucleotide
gagcugguccgaccagcgc

SEQ ID NO: 407362 - RNA, 19 nt, Artificial Sequence
  Description of Artificial Sequence: Synthetic oligonucleotide
cucaugcuguaagcuguag

SEQ ID NO: 407363 - RNA, 19 nt, Artificial Sequence
  Description of Artificial Sequence: Synthetic oligonucleotide
ccgagucauagucugcgag

SEQ ID NO: 407364 - RNA, 19 nt, Artificial Sequence
  Description of Artificial Sequence: Synthetic oligonucleotide
acgugccugcacaggacac

SEQ ID NO: 407365 - RNA, 19 nt, Artificial Sequence
  Description of Artificial Sequence: Synthetic oligonucleotide
cauccguggucucccucag

SEQ ID NO: 407366 - RNA, 19 nt, Artificial Sequence
  Description of Artificial Sequence: Synthetic oligonucleotide
ccuucgaagccguggcagg

SEQ ID NO: 407367 - RNA, 19 nt, Artificial Sequence
  Description of Artificial Sequence: Synthetic oligonucleotide
ccggagacagacucugagc

SEQ ID NO: 407368 - RNA, 19 nt, Artificial Sequence
  Description of Artificial Sequence: Synthetic oligonucleotide
cauagguccccagucugca

SEQ ID NO: 407369 - RNA, 19 nt, Artificial Sequence
  Description of Artificial Sequence: Synthetic oligonucleotide
ggugugcauuguccuuucg

SEQ ID NO: 407370 - RNA, 19 nt, Artificial Sequence
  Description of Artificial Sequence: Synthetic oligonucleotide
guuucgaggcccaucuucu

SEQ ID NO: 407371 - RNA, 19 nt, Artificial Sequence
  Description of Artificial Sequence: Synthetic oligonucleotide
agcgcacggagcaaccuga

SEQ ID NO: 407372 - RNA, 19 nt, Artificial Sequence
  Description of Artificial Sequence: Synthetic oligonucleotide
guaccgccucuuauguacc

SEQ ID NO: 407373 - RNA, 19 nt, Artificial Sequence
  Description of Artificial Sequence: Synthetic oligonucleotide
cacgcuggugggaucagaa

SEQ ID NO: 407374 - RNA, 19 nt, Artificial Sequence
  Description of Artificial Sequence: Synthetic oligonucleotide
gucaccgaccaggauucug

SEQ ID NO: 407375 - RNA, 19 nt, Artificial Sequence
  Description of Artificial Sequence: Synthetic oligonucleotide
ugucgccaccuucauccuu

SEQ ID NO: 407376 - RNA, 19 nt, Artificial Sequence
  Description of Artificial Sequence: Synthetic oligonucleotide
aaccuuugguagacuuuau

SEQ ID NO: 407377 - RNA, 19 nt, Artificial Sequence
  Description of Artificial Sequence: Synthetic oligonucleotide
agcagacgaucuguugacu

SEQ ID NO: 407378 - RNA, 19 nt, Artificial Sequence
  Description of Artificial Sequence: Synthetic oligonucleotide
aacacccaaugcggugacu

SEQ ID NO: 407379 - RNA, 19 nt, Artificial Sequence
  Description of Artificial Sequence: Synthetic oligonucleotide
auaugcgaaagggcugcau

SEQ ID NO: 407380 - RNA, 19 nt, Artificial Sequence
  Description of Artificial Sequence: Synthetic oligonucleotide
caguacaccauguggcagu

SEQ ID NO: 407381 - RNA, 19 nt, Artificial Sequence
  Description of Artificial Sequence: Synthetic oligonucleotide
cuaggugauggaagaagau

SEQ ID NO: 407382 - RNA, 19 nt, Artificial Sequence
  Description of Artificial Sequence: Synthetic oligonucleotide
gguuggucacucacagacc

SEQ ID NO: 407383 - RNA, 19 nt, Artificial Sequence
  Description of Artificial Sequence: Synthetic oligonucleotide
cuucggauccuggcugaug

SEQ ID NO: 407384 - RNA, 19 nt, Artificial Sequence
  Description of Artificial Sequence: Synthetic oligonucleotide
gcuucgaugggguuagggu

SEQ ID NO: 407385 - RNA, 19 nt, Artificial Sequence
  Description of Artificial Sequence: Synthetic oligonucleotide
acccagguuucaaucggcu

SEQ ID NO: 407386 - RNA, 19 nt, Artificial Sequence
  Description of Artificial Sequence: Synthetic oligonucleotide
gguugucuaggugauggaa

SEQ ID NO: 407387 - RNA, 19 nt, Artificial Sequence
  Description of Artificial Sequence: Synthetic oligonucleotide
cugcauagccccaggcaaa

SEQ ID NO: 407388 - RNA, 19 nt, Artificial Sequence
  Description of Artificial Sequence: Synthetic oligonucleotide
guacgugccugcacaggac

SEQ ID NO: 407389 - RNA, 19 nt, Artificial Sequence
  Description of Artificial Sequence: Synthetic oligonucleotide
caaucggcuguaauuccgu

SEQ ID NO: 407390 - RNA, 19 nt, Artificial Sequence
  Description of Artificial Sequence: Synthetic oligonucleotide
cucggccccgacugucacc

SEQ ID NO: 407391 - RNA, 19 nt, Artificial Sequence
  Description of Artificial Sequence: Synthetic oligonucleotide
gccguggcaggacccaaag

SEQ ID NO: 407392 - RNA, 19 nt, Artificial Sequence
  Description of Artificial Sequence: Synthetic oligonucleotide
gagcugucagugagcgaug

SEQ ID NO: 407393 - RNA, 19 nt, Artificial Sequence
  Description of Artificial Sequence: Synthetic oligonucleotide
acgaugggguugccauuga

SEQ ID NO: 407394 - RNA, 19 nt, Artificial Sequence
  Description of Artificial Sequence: Synthetic oligonucleotide
agucugcgagggauccagg

SEQ ID NO: 407395 - RNA, 19 nt, Artificial Sequence
  Description of Artificial Sequence: Synthetic oligonucleotide
ccgaguaaagccugcuuga

SEQ ID NO: 407396 - RNA, 19 nt, Artificial Sequence
  Description of Artificial Sequence: Synthetic oligonucleotide
cccuaucugugcuucagga

SEQ ID NO: 407397 - RNA, 19 nt, Artificial Sequence
  Description of Artificial Sequence: Synthetic oligonucleotide
ccauaaccacaaauuucuc

SEQ ID NO: 407398 - RNA, 19 nt, Artificial Sequence
  Description of Artificial Sequence: Synthetic oligonucleotide
cagaaccuugucugcucca

SEQ ID NO: 407399 - RNA, 19 nt, Artificial Sequence
  Description of Artificial Sequence: Synthetic oligonucleotide
gccaggaaccuuugguaga

SEQ ID NO: 407400 - RNA, 19 nt, Artificial Sequence
  Description of Artificial Sequence: Synthetic oligonucleotide
cuucgaagccguggcagga

SEQ ID NO: 407401 - RNA, 19 nt, Artificial Sequence
  Description of Artificial Sequence: Synthetic oligonucleotide
cagagccgcugucaguaca

SEQ ID NO: 407402 - RNA, 19 nt, Artificial Sequence
  Description of Artificial Sequence: Synthetic oligonucleotide
gcagacgauuugccccacg

SEQ ID NO: 407403 - RNA, 19 nt, Artificial Sequence
  Description of Artificial Sequence: Synthetic oligonucleotide
cagagaaucugaccccacu

SEQ ID NO: 407404 - RNA, 19 nt, Artificial Sequence
  Description of Artificial Sequence: Synthetic oligonucleotide
cagugagcgauggcacaac

SEQ ID NO: 407405 - RNA, 19 nt, Artificial Sequence
  Description of Artificial Sequence: Synthetic oligonucleotide
cagacucugagcugucagu

SEQ ID NO: 407406 - RNA, 19 nt, Artificial Sequence
  Description of Artificial Sequence: Synthetic oligonucleotide
guaaugucuugggauuagu

SEQ ID NO: 407407 - RNA, 19 nt, Artificial Sequence
  Description of Artificial Sequence: Synthetic oligonucleotide
accgguacccagguuucaa

SEQ ID NO: 407408 - RNA, 19 nt, Artificial Sequence
  Description of Artificial Sequence: Synthetic oligonucleotide
agguaccgccucuuaugua

SEQ ID NO: 407409 - RNA, 19 nt, Artificial Sequence
  Description of Artificial Sequence: Synthetic oligonucleotide
cucggacacgcagcagcag

SEQ ID NO: 407410 - RNA, 19 nt, Artificial Sequence
  Description of Artificial Sequence: Synthetic oligonucleotide
guggccgaguaaagccugc

SEQ ID NO: 407411 - RNA, 19 nt, Artificial Sequence
  Description of Artificial Sequence: Synthetic oligonucleotide
ccgucucucugugagggag

SEQ ID NO: 407412 - RNA, 19 nt, Artificial Sequence
  Description of Artificial Sequence: Synthetic oligonucleotide
ccgaauucccuuuuggaau

SEQ ID NO: 407413 - RNA, 19 nt, Artificial Sequence
  Description of Artificial Sequence: Synthetic oligonucleotide
guccgaccagcgccuggag

SEQ ID NO: 407414 - RNA, 19 nt, Artificial Sequence
  Description of Artificial Sequence: Synthetic oligonucleotide
ggccggguuggucacucac

SEQ ID NO: 407415 - RNA, 19 nt, Artificial Sequence
  Description of Artificial Sequence: Synthetic oligonucleotide
auuugccccacgggcuccu

SEQ ID NO: 407416 - RNA, 19 nt, Artificial Sequence
  Description of Artificial Sequence: Synthetic oligonucleotide
cauuguccuuucgaucaaa

SEQ ID NO: 407417 - RNA, 19 nt, Artificial Sequence
  Description of Artificial Sequence: Synthetic oligonucleotide
gagcggccggguuggucac

SEQ ID NO: 407418 - RNA, 19 nt, Artificial Sequence
  Description of Artificial Sequence: Synthetic oligonucleotide
uccgugcuucgaugggguu

SEQ ID NO: 407419 - RNA, 19 nt, Artificial Sequence
  Description of Artificial Sequence: Synthetic oligonucleotide
cacucggccccgacuguca

SEQ ID NO: 407420 - RNA, 19 nt, Artificial Sequence
  Description of Artificial Sequence: Synthetic oligonucleotide
gaagcgcacggagcaaccu

SEQ ID NO: 407421 - RNA, 19 nt, Artificial Sequence
  Description of Artificial Sequence: Synthetic oligonucleotide
ugcagacgauuugccccac

SEQ ID NO: 407422 - RNA, 19 nt, Artificial Sequence
  Description of Artificial Sequence: Synthetic oligonucleotide
guuccacgcuggugggauc

SEQ ID NO: 407423 - RNA, 19 nt, Artificial Sequence
  Description of Artificial Sequence: Synthetic oligonucleotide
cagguuucaaucggcugua

SEQ ID NO: 407424 - RNA, 19 nt, Artificial Sequence
  Description of Artificial Sequence: Synthetic oligonucleotide
caaaccugagcagaucguu

SEQ ID NO: 407425 - RNA, 19 nt, Artificial Sequence
  Description of Artificial Sequence: Synthetic oligonucleotide
cccuguagaugugcucugg

SEQ ID NO: 407426 - RNA, 19 nt, Artificial Sequence
  Description of Artificial Sequence: Synthetic oligonucleotide
ggguugccauugaugcucc

SEQ ID NO: 407427 - RNA, 19 nt, Artificial Sequence
  Description of Artificial Sequence: Synthetic oligonucleotide
cgauggcacaacugccagg

SEQ ID NO: 407428 - RNA, 19 nt, Artificial Sequence
  Description of Artificial Sequence: Synthetic oligonucleotide
ugucaccgaccaggauucu

SEQ ID NO: 407429 - RNA, 19 nt, Artificial Sequence
  Description of Artificial Sequence: Synthetic oligonucleotide
cauaugcgaaagggcugca

SEQ ID NO: 407430 - RNA, 19 nt, Artificial Sequence
  Description of Artificial Sequence: Synthetic oligonucleotide
gugcauagucaguuugcuu

SEQ ID NO: 407431 - RNA, 19 nt, Artificial Sequence
  Description of Artificial Sequence: Synthetic oligonucleotide
accagcgccuggagucauc

SEQ ID NO: 407432 - RNA, 19 nt, Artificial Sequence
  Description of Artificial Sequence: Synthetic oligonucleotide
ccugucacgaugacauucu

SEQ ID NO: 407433 - RNA, 19 nt, Artificial Sequence
  Description of Artificial Sequence: Synthetic oligonucleotide
acgcagcagcagacgaucu

SEQ ID NO: 407434 - RNA, 19 nt, Artificial Sequence
  Description of Artificial Sequence: Synthetic oligonucleotide
gguccgaccagcgccugga

SEQ ID NO: 407435 - RNA, 19 nt, Artificial Sequence
  Description of Artificial Sequence: Synthetic oligonucleotide
cacauggauguacgugccu

SEQ ID NO: 407436 - RNA, 19 nt, Artificial Sequence
  Description of Artificial Sequence: Synthetic oligonucleotide
ggccucggagcuggguuag

SEQ ID NO: 407437 - RNA, 19 nt, Artificial Sequence
  Description of Artificial Sequence: Synthetic oligonucleotide
ggcaggacccaaagagcuc

SEQ ID NO: 407438 - RNA, 19 nt, Artificial Sequence
  Description of Artificial Sequence: Synthetic oligonucleotide
cgauuugccccacgggcuc

SEQ ID NO: 407439 - RNA, 19 nt, Artificial Sequence
  Description of Artificial Sequence: Synthetic oligonucleotide
uuccugcaauggugccguc

SEQ ID NO: 407440 - RNA, 19 nt, Artificial Sequence
  Description of Artificial Sequence: Synthetic oligonucleotide
cuggucuggcccucggaau

SEQ ID NO: 407441 - RNA, 19 nt, Artificial Sequence
  Description of Artificial Sequence: Synthetic oligonucleotide
cccucggaauaguucacaa

SEQ ID NO: 407442 - RNA, 19 nt, Artificial Sequence
  Description of Artificial Sequence: Synthetic oligonucleotide
ggauccuuccagccagggu

SEQ ID NO: 407443 - RNA, 19 nt, Artificial Sequence
  Description of Artificial Sequence: Synthetic oligonucleotide
ggccaaaccugagcagauc

SEQ ID NO: 407444 - RNA, 19 nt, Artificial Sequence
  Description of Artificial Sequence: Synthetic oligonucleotide
cacgggcuccuugaguucu

SEQ ID NO: 407445 - RNA, 19 nt, Artificial Sequence
  Description of Artificial Sequence: Synthetic oligonucleotide
ucccaccgguacccagguu

SEQ ID NO: 407446 - RNA, 19 nt, Artificial Sequence
  Description of Artificial Sequence: Synthetic oligonucleotide
gcgugaagagguguguggu

SEQ ID NO: 407447 - RNA, 19 nt, Artificial Sequence
  Description of Artificial Sequence: Synthetic oligonucleotide
gcgagggauccaggggaag

SEQ ID NO: 407448 - RNA, 19 nt, Artificial Sequence
  Description of Artificial Sequence: Synthetic oligonucleotide
caccaccgugcuuguucca

SEQ ID NO: 407449 - RNA, 19 nt, Artificial Sequence
  Description of Artificial Sequence: Synthetic oligonucleotide
gugcuucgaugggguuagg

SEQ ID NO: 407450 - RNA, 19 nt, Artificial Sequence
  Description of Artificial Sequence: Synthetic oligonucleotide
cacucacgaugggguugcc

SEQ ID NO: 407451 - RNA, 19 nt, Artificial Sequence
  Description of Artificial Sequence: Synthetic oligonucleotide
gcccucggaauaguucaca

SEQ ID NO: 407452 - RNA, 19 nt, Artificial Sequence
  Description of Artificial Sequence: Synthetic oligonucleotide
cccauucauucaucucgga

SEQ ID NO: 407453 - RNA, 19 nt, Artificial Sequence
  Description of Artificial Sequence: Synthetic oligonucleotide
cugguccgaccagcgccug

SEQ ID NO: 407454 - RNA, 19 nt, Artificial Sequence
  Description of Artificial Sequence: Synthetic oligonucleotide
cucccaccgguacccaggu

SEQ ID NO: 407455 - RNA, 19 nt, Artificial Sequence
  Description of Artificial Sequence: Synthetic oligonucleotide
cccaccgguacccagguuu

SEQ ID NO: 407456 - RNA, 19 nt, Artificial Sequence
  Description of Artificial Sequence: Synthetic oligonucleotide
ccacgggcuccuugaguuc

SEQ ID NO: 407457 - RNA, 19 nt, Artificial Sequence
  Description of Artificial Sequence: Synthetic oligonucleotide
gggacccacugacaauuau

SEQ ID NO: 407458 - RNA, 19 nt, Artificial Sequence
  Description of Artificial Sequence: Synthetic oligonucleotide
uuugccccacgggcuccuu

SEQ ID NO: 407459 - RNA, 19 nt, Artificial Sequence
  Description of Artificial Sequence: Synthetic oligonucleotide
ccagcgccuggagucauca

SEQ ID NO: 407460 - RNA, 19 nt, Artificial Sequence
  Description of Artificial Sequence: Synthetic oligonucleotide
ccuuucgaucaaaggcugu

SEQ ID NO: 407461 - RNA, 19 nt, Artificial Sequence
  Description of Artificial Sequence: Synthetic oligonucleotide
cccgacugucaccgaccag

SEQ ID NO: 407462 - RNA, 19 nt, Artificial Sequence
  Description of Artificial Sequence: Synthetic oligonucleotide
ccccgacugucaccgacca

SEQ ID NO: 407463 - RNA, 19 nt, Artificial Sequence
  Description of Artificial Sequence: Synthetic oligonucleotide
ggagcucgguggccucgga

SEQ ID NO: 407464 - RNA, 19 nt, Artificial Sequence
  Description of Artificial Sequence: Synthetic oligonucleotide
gccucuuauguaccuccuu

SEQ ID NO: 407465 - RNA, 19 nt, Artificial Sequence
  Description of Artificial Sequence: Synthetic oligonucleotide
acgggcuccuugaguucuu

SEQ ID NO: 407466 - RNA, 19 nt, Artificial Sequence
  Description of Artificial Sequence: Synthetic oligonucleotide
ccgugcuucgaugggguua

SEQ ID NO: 407467 - RNA, 19 nt, Artificial Sequence
  Description of Artificial Sequence: Synthetic oligonucleotide
gaccagcgccuggagucau

SEQ ID NO: 407468 - RNA, 19 nt, Artificial Sequence
  Description of Artificial Sequence: Synthetic oligonucleotide
cagcugucgccaccuucau

SEQ ID NO: 407469 - RNA, 19 nt, Artificial Sequence
  Description of Artificial Sequence: Synthetic oligonucleotide
cgcugucaguacaccaugu

SEQ ID NO: 407470 - RNA, 19 nt, Artificial Sequence
  Description of Artificial Sequence: Synthetic oligonucleotide
ccgguacccagguuucaau

SEQ ID NO: 407471 - RNA, 19 nt, Artificial Sequence
  Description of Artificial Sequence: Synthetic oligonucleotide
ccguggucucccucagucu

SEQ ID NO: 407472 - RNA, 19 nt, Artificial Sequence
  Description of Artificial Sequence: Synthetic oligonucleotide
gcggugacuucagcugggu

SEQ ID NO: 407473 - RNA, 19 nt, Artificial Sequence
  Description of Artificial Sequence: Synthetic oligonucleotide
ccccacgggcuccuugagu

SEQ ID NO: 407474 - RNA, 19 nt, Artificial Sequence
  Description of Artificial Sequence: Synthetic oligonucleotide
ccuucggauccuggcugau

SEQ ID NO: 407475 - RNA, 19 nt, Artificial Sequence
  Description of Artificial Sequence: Synthetic oligonucleotide
ccgcucccaccgguaccca

SEQ ID NO: 407476 - RNA, 19 nt, Artificial Sequence
  Description of Artificial Sequence: Synthetic oligonucleotide
cggcuguaauuccgugcuu

SEQ ID NO: 407477 - RNA, 19 nt, Artificial Sequence
  Description of Artificial Sequence: Synthetic oligonucleotide
agaggaacccauuugaacc

SEQ ID NO: 407478 - RNA, 19 nt, Artificial Sequence
  Description of Artificial Sequence: Synthetic oligonucleotide
auuaccagggacuugggcc

SEQ ID NO: 407479 - RNA, 19 nt, Artificial Sequence
  Description of Artificial Sequence: Synthetic oligonucleotide
guaaugaaaaccaagguag

SEQ ID NO: 407480 - RNA, 19 nt, Artificial Sequence
  Description of Artificial Sequence: Synthetic oligonucleotide
ugucugguuuaauagaugg

SEQ ID NO: 407481 - RNA, 19 nt, Artificial Sequence
  Description of Artificial Sequence: Synthetic oligonucleotide
aagaaaggcagacgcacgc

SEQ ID NO: 407482 - RNA, 19 nt, Artificial Sequence
  Description of Artificial Sequence: Synthetic oligonucleotide
auaacaauugcucugggcu

SEQ ID NO: 407483 - RNA, 19 nt, Artificial Sequence
  Description of Artificial Sequence: Synthetic oligonucleotide
agaacuaccagagugaaag

SEQ ID NO: 407484 - RNA, 19 nt, Artificial Sequence
  Description of Artificial Sequence: Synthetic oligonucleotide
uaauguuuuggauacagga

SEQ ID NO: 407485 - RNA, 19 nt, Artificial Sequence
  Description of Artificial Sequence: Synthetic oligonucleotide
uuuaccagcugcuagcuag

SEQ ID NO: 407486 - RNA, 19 nt, Artificial Sequence
  Description of Artificial Sequence: Synthetic oligonucleotide
uccugauucaguuaagggc

SEQ ID NO: 407487 - RNA, 19 nt, Artificial Sequence
  Description of Artificial Sequence: Synthetic oligonucleotide
aauugcucugggcuacucc

SEQ ID NO: 407488 - RNA, 19 nt, Artificial Sequence
  Description of Artificial Sequence: Synthetic oligonucleotide
agacucaaaagucugagga

SEQ ID NO: 407489 - RNA, 19 nt, Artificial Sequence
  Description of Artificial Sequence: Synthetic oligonucleotide
uuuaauagauggaaaggaa

SEQ ID NO: 407490 - RNA, 19 nt, Artificial Sequence
  Description of Artificial Sequence: Synthetic oligonucleotide
agagugugaagacuuuacc

SEQ ID NO: 407491 - RNA, 19 nt, Artificial Sequence
  Description of Artificial Sequence: Synthetic oligonucleotide
uuauccaacuucuuguggu

SEQ ID NO: 407492 - RNA, 19 nt, Artificial Sequence
  Description of Artificial Sequence: Synthetic oligonucleotide
aacacggggaucuggagca

SEQ ID NO: 407493 - RNA, 19 nt, Artificial Sequence
  Description of Artificial Sequence: Synthetic oligonucleotide
aacgaaaaggggauuuugg

SEQ ID NO: 407494 - RNA, 19 nt, Artificial Sequence
  Description of Artificial Sequence: Synthetic oligonucleotide
uuggcgagaaggcaaagug

SEQ ID NO: 407495 - RNA, 19 nt, Artificial Sequence
  Description of Artificial Sequence: Synthetic oligonucleotide
gguaacugaggccaggucg

SEQ ID NO: 407496 - RNA, 19 nt, Artificial Sequence
  Description of Artificial Sequence: Synthetic oligonucleotide
gaggcuccgacauggaugg

SEQ ID NO: 407497 - RNA, 19 nt, Artificial Sequence
  Description of Artificial Sequence: Synthetic oligonucleotide
uauaacaauugcucugggc

SEQ ID NO: 407498 - RNA, 19 nt, Artificial Sequence
  Description of Artificial Sequence: Synthetic oligonucleotide
acgcuuuuacgccagcgcc

SEQ ID NO: 407499 - RNA, 19 nt, Artificial Sequence
  Description of Artificial Sequence: Synthetic oligonucleotide
caagguuugggcuugguuc

SEQ ID NO: 407500 - RNA, 19 nt, Artificial Sequence
  Description of Artificial Sequence: Synthetic oligonucleotide
cauacuucuuagaggaacc

SEQ ID NO: 407501 - RNA, 19 nt, Artificial Sequence
  Description of Artificial Sequence: Synthetic oligonucleotide
ggugagacaguacaugugg

SEQ ID NO: 407502 - RNA, 19 nt, Artificial Sequence
  Description of Artificial Sequence: Synthetic oligonucleotide
aaacaagucagggccugcc

SEQ ID NO: 407503 - RNA, 19 nt, Artificial Sequence
  Description of Artificial Sequence: Synthetic oligonucleotide
cuacgcucagcacagaggc

SEQ ID NO: 407504 - RNA, 19 nt, Artificial Sequence
  Description of Artificial Sequence: Synthetic oligonucleotide
cuuacuaauguuuuggaua

SEQ ID NO: 407505 - RNA, 19 nt, Artificial Sequence
  Description of Artificial Sequence: Synthetic oligonucleotide
gugauuaccagggacuugg

SEQ ID NO: 407506 - RNA, 19 nt, Artificial Sequence
  Description of Artificial Sequence: Synthetic oligonucleotide
agcucgacgcuuuuacgcc

SEQ ID NO: 407507 - RNA, 19 nt, Artificial Sequence
  Description of Artificial Sequence: Synthetic oligonucleotide
ugugucugguuuaauagau

SEQ ID NO: 407508 - RNA, 19 nt, Artificial Sequence
  Description of Artificial Sequence: Synthetic oligonucleotide
aagguuugggcuugguuca

SEQ ID NO: 407509 - RNA, 19 nt, Artificial Sequence
  Description of Artificial Sequence: Synthetic oligonucleotide
agugaaagaagaagaagag

SEQ ID NO: 407510 - RNA, 19 nt, Artificial Sequence
  Description of Artificial Sequence: Synthetic oligonucleotide
acaugugguagccacgguc

SEQ ID NO: 407511 - RNA, 19 nt, Artificial Sequence
  Description of Artificial Sequence: Synthetic oligonucleotide
gauggggugagacaguaca

SEQ ID NO: 407512 - RNA, 19 nt, Artificial Sequence
  Description of Artificial Sequence: Synthetic oligonucleotide
aacaagggguaggaaaggg

SEQ ID NO: 407513 - RNA, 19 nt, Artificial Sequence
  Description of Artificial Sequence: Synthetic oligonucleotide
uccgaagugccgcagaggu

SEQ ID NO: 407514 - RNA, 19 nt, Artificial Sequence
  Description of Artificial Sequence: Synthetic oligonucleotide
auuugaacccugugauuac

SEQ ID NO: 407515 - RNA, 19 nt, Artificial Sequence
  Description of Artificial Sequence: Synthetic oligonucleotide
aguguucuggcauggacug

SEQ ID NO: 407516 - RNA, 19 nt, Artificial Sequence
  Description of Artificial Sequence: Synthetic oligonucleotide
ugagauauaagccccucuu

SEQ ID NO: 407517 - RNA, 19 nt, Artificial Sequence
  Description of Artificial Sequence: Synthetic oligonucleotide
aggacgggugcccugagcg

SEQ ID NO: 407518 - RNA, 19 nt, Artificial Sequence
  Description of Artificial Sequence: Synthetic oligonucleotide
cuuuguaguacuguucccc

SEQ ID NO: 407519 - RNA, 19 nt, Artificial Sequence
  Description of Artificial Sequence: Synthetic oligonucleotide
caggcuugagacaagugag

SEQ ID NO: 407520 - RNA, 19 nt, Artificial Sequence
  Description of Artificial Sequence: Synthetic oligonucleotide
ucagguucaaggauccgcu

SEQ ID NO: 407521 - RNA, 19 nt, Artificial Sequence
  Description of Artificial Sequence: Synthetic oligonucleotide
aaggggauuuuggagguag

SEQ ID NO: 407522 - RNA, 19 nt, Artificial Sequence
  Description of Artificial Sequence: Synthetic oligonucleotide
gagcucgacgcuuuuacgc

SEQ ID NO: 407523 - RNA, 19 nt, Artificial Sequence
  Description of Artificial Sequence: Synthetic oligonucleotide
aagaguugccaccucccug

SEQ ID NO: 407524 - RNA, 19 nt, Artificial Sequence
  Description of Artificial Sequence: Synthetic oligonucleotide
ucgacuguuggugacagga

SEQ ID NO: 407525 - RNA, 19 nt, Artificial Sequence
  Description of Artificial Sequence: Synthetic oligonucleotide
aaggcagacgcacgcuacg

SEQ ID NO: 407526 - RNA, 19 nt, Artificial Sequence
  Description of Artificial Sequence: Synthetic oligonucleotide
ugaaugcacuucuuggaga

SEQ ID NO: 407527 - RNA, 19 nt, Artificial Sequence
  Description of Artificial Sequence: Synthetic oligonucleotide
uagaggaacccauuugaac

SEQ ID NO: 407528 - RNA, 19 nt, Artificial Sequence
  Description of Artificial Sequence: Synthetic oligonucleotide
agguucaaggauccgcuuc

SEQ ID NO: 407529 - RNA, 19 nt, Artificial Sequence
  Description of Artificial Sequence: Synthetic oligonucleotide
caaggauccgcuuccgugc

SEQ ID NO: 407530 - RNA, 19 nt, Artificial Sequence
  Description of Artificial Sequence: Synthetic oligonucleotide
auacuucuuagaggaaccc

SEQ ID NO: 407531 - RNA, 19 nt, Artificial Sequence
  Description of Artificial Sequence: Synthetic oligonucleotide
aggugaagcugcuugucuc

SEQ ID NO: 407532 - RNA, 19 nt, Artificial Sequence
  Description of Artificial Sequence: Synthetic oligonucleotide
auagggcuuaucacggucc

SEQ ID NO: 407533 - RNA, 19 nt, Artificial Sequence
  Description of Artificial Sequence: Synthetic oligonucleotide
agcgguaggucuucacagc

SEQ ID NO: 407534 - RNA, 19 nt, Artificial Sequence
  Description of Artificial Sequence: Synthetic oligonucleotide
gggguaaugaaaaccaagg

SEQ ID NO: 407535 - RNA, 19 nt, Artificial Sequence
  Description of Artificial Sequence: Synthetic oligonucleotide
aggaagaacgaaaagggga

SEQ ID NO: 407536 - RNA, 19 nt, Artificial Sequence
  Description of Artificial Sequence: Synthetic oligonucleotide
acacaggacugcuuuggcg

SEQ ID NO: 407537 - RNA, 19 nt, Artificial Sequence
  Description of Artificial Sequence: Synthetic oligonucleotide
cucuaaacugcugccaucc

SEQ ID NO: 407538 - RNA, 19 nt, Artificial Sequence
  Description of Artificial Sequence: Synthetic oligonucleotide
ucgucauucuccgaagugc

SEQ ID NO: 407539 - RNA, 19 nt, Artificial Sequence
  Description of Artificial Sequence: Synthetic oligonucleotide
aucaucaacacggggaucu

SEQ ID NO: 407540 - RNA, 19 nt, Artificial Sequence
  Description of Artificial Sequence: Synthetic oligonucleotide
uuagaggaacccauuugaa

SEQ ID NO: 407541 - RNA, 19 nt, Artificial Sequence
  Description of Artificial Sequence: Synthetic oligonucleotide
cauguagcaugacagaaga

SEQ ID NO: 407542 - RNA, 19 nt, Artificial Sequence
  Description of Artificial Sequence: Synthetic oligonucleotide
caagaaaggcagacgcacg

SEQ ID NO: 407543 - RNA, 19 nt, Artificial Sequence
  Description of Artificial Sequence: Synthetic oligonucleotide
guaguacuguuccccaagg

SEQ ID NO: 407544 - RNA, 19 nt, Artificial Sequence
  Description of Artificial Sequence: Synthetic oligonucleotide
uuccgugcucgacuguugg

SEQ ID NO: 407545 - RNA, 19 nt, Artificial Sequence
  Description of Artificial Sequence: Synthetic oligonucleotide
uugggcuugguucaccccu

SEQ ID NO: 407546 - RNA, 19 nt, Artificial Sequence
  Description of Artificial Sequence: Synthetic oligonucleotide
gacgcuuuuacgccagcgc

SEQ ID NO: 407547 - RNA, 19 nt, Artificial Sequence
  Description of Artificial Sequence: Synthetic oligonucleotide
ugagcucgacgcuuuuacg

SEQ ID NO: 407548 - RNA, 19 nt, Artificial Sequence
  Description of Artificial Sequence: Synthetic oligonucleotide
gauuaccagggacuugggc

SEQ ID NO: 407549 - RNA, 19 nt, Artificial Sequence
  Description of Artificial Sequence: Synthetic oligonucleotide
gggguaaaacuuuuggccc

SEQ ID NO: 407550 - RNA, 19 nt, Artificial Sequence
  Description of Artificial Sequence: Synthetic oligonucleotide
gggcuaauccaucaggucc

SEQ ID NO: 407551 - RNA, 19 nt, Artificial Sequence
  Description of Artificial Sequence: Synthetic oligonucleotide
ugacaggaaacucgcccag

SEQ ID NO: 407552 - RNA, 19 nt, Artificial Sequence
  Description of Artificial Sequence: Synthetic oligonucleotide
agauggaaaggaaagccug

SEQ ID NO: 407553 - RNA, 19 nt, Artificial Sequence
  Description of Artificial Sequence: Synthetic oligonucleotide
ugcuuuggcgagaaggcaa

SEQ ID NO: 407554 - RNA, 19 nt, Artificial Sequence
  Description of Artificial Sequence: Synthetic oligonucleotide
agggcuaauccaucagguc

SEQ ID NO: 407555 - RNA, 19 nt, Artificial Sequence
  Description of Artificial Sequence: Synthetic oligonucleotide
aggaguacaacuguccaga

SEQ ID NO: 407556 - RNA, 19 nt, Artificial Sequence
  Description of Artificial Sequence: Synthetic oligonucleotide
cagaggccaauccuggucc

SEQ ID NO: 407557 - RNA, 19 nt, Artificial Sequence
  Description of Artificial Sequence: Synthetic oligonucleotide
uguccccuccuacuuaaug

SEQ ID NO: 407558 - RNA, 19 nt, Artificial Sequence
  Description of Artificial Sequence: Synthetic oligonucleotide
cugugaguccaagaaaggc

SEQ ID NO: 407559 - RNA, 19 nt, Artificial Sequence
  Description of Artificial Sequence: Synthetic oligonucleotide
gaacgaaaaggggauuuug

SEQ ID NO: 407560 - RNA, 19 nt, Artificial Sequence
  Description of Artificial Sequence: Synthetic oligonucleotide
gguucugguagauggacgc

SEQ ID NO: 407561 - RNA, 19 nt, Artificial Sequence
  Description of Artificial Sequence: Synthetic oligonucleotide
aagaacgaaaaggggauuu

SEQ ID NO: 407562 - RNA, 19 nt, Artificial Sequence
  Description of Artificial Sequence: Synthetic oligonucleotide
uauaagccccucuuucuuc

SEQ ID NO: 407563 - RNA, 19 nt, Artificial Sequence
  Description of Artificial Sequence: Synthetic oligonucleotide
auggcaucuuuguaguacu

SEQ ID NO: 407564 - RNA, 19 nt, Artificial Sequence
  Description of Artificial Sequence: Synthetic oligonucleotide
auggacuguccccuccuac

SEQ ID NO: 407565 - RNA, 19 nt, Artificial Sequence
  Description of Artificial Sequence: Synthetic oligonucleotide
ugauuaccagggacuuggg

SEQ ID NO: 407566 - RNA, 19 nt, Artificial Sequence
  Description of Artificial Sequence: Synthetic oligonucleotide
caacacggggaucuggagc

SEQ ID NO: 407567 - RNA, 19 nt, Artificial Sequence
  Description of Artificial Sequence: Synthetic oligonucleotide
ggcuacuccagucugugag

SEQ ID NO: 407568 - RNA, 19 nt, Artificial Sequence
  Description of Artificial Sequence: Synthetic oligonucleotide
aggacacuagcuccucagg

SEQ ID NO: 407569 - RNA, 19 nt, Artificial Sequence
  Description of Artificial Sequence: Synthetic oligonucleotide
uaacaauugcucugggcua

SEQ ID NO: 407570 - RNA, 19 nt, Artificial Sequence
  Description of Artificial Sequence: Synthetic oligonucleotide
uuuuacgccagcgccgggc

SEQ ID NO: 407571 - RNA, 19 nt, Artificial Sequence
  Description of Artificial Sequence: Synthetic oligonucleotide
caugugguagccacgguca

SEQ ID NO: 407572 - RNA, 19 nt, Artificial Sequence
  Description of Artificial Sequence: Synthetic oligonucleotide
agauccagacacagguggc

SEQ ID NO: 407573 - RNA, 19 nt, Artificial Sequence
  Description of Artificial Sequence: Synthetic oligonucleotide
caggucgauucuuguagcg

SEQ ID NO: 407574 - RNA, 19 nt, Artificial Sequence
  Description of Artificial Sequence: Synthetic oligonucleotide
uccgcuuccgugcucgacu

SEQ ID NO: 407575 - RNA, 19 nt, Artificial Sequence
  Description of Artificial Sequence: Synthetic oligonucleotide
uauccaacuucuugugguc

SEQ ID NO: 407576 - RNA, 19 nt, Artificial Sequence
  Description of Artificial Sequence: Synthetic oligonucleotide
guuugggcuugguucaccc

SEQ ID NO: 407577 - RNA, 19 nt, Artificial Sequence
  Description of Artificial Sequence: Synthetic oligonucleotide
uuuacgccagcgccgggca

SEQ ID NO: 407578 - RNA, 19 nt, Artificial Sequence
  Description of Artificial Sequence: Synthetic oligonucleotide
gguucaaggauccgcuucc

SEQ ID NO: 407579 - RNA, 19 nt, Artificial Sequence
  Description of Artificial Sequence: Synthetic oligonucleotide
uccgacauggaugggguga

SEQ ID NO: 407580 - RNA, 19 nt, Artificial Sequence
  Description of Artificial Sequence: Synthetic oligonucleotide
augggcauagugguaacug

SEQ ID NO: 407581 - RNA, 19 nt, Artificial Sequence
  Description of Artificial Sequence: Synthetic oligonucleotide
aggcuugagacaagugagc

SEQ ID NO: 407582 - RNA, 19 nt, Artificial Sequence
  Description of Artificial Sequence: Synthetic oligonucleotide
uguucuggcauggacuguc

SEQ ID NO: 407583 - RNA, 19 nt, Artificial Sequence
  Description of Artificial Sequence: Synthetic oligonucleotide
uacgcucagcacagaggcg

SEQ ID NO: 407584 - RNA, 19 nt, Artificial Sequence
  Description of Artificial Sequence: Synthetic oligonucleotide
gugagcucgacgcuuuuac

SEQ ID NO: 407585 - RNA, 19 nt, Artificial Sequence
  Description of Artificial Sequence: Synthetic oligonucleotide
uggggugagacaguacaug

SEQ ID NO: 407586 - RNA, 19 nt, Artificial Sequence
  Description of Artificial Sequence: Synthetic oligonucleotide
ucaguacgcaguagagccu

SEQ ID NO: 407587 - RNA, 19 nt, Artificial Sequence
  Description of Artificial Sequence: Synthetic oligonucleotide
auuguaauuguggcacugu

SEQ ID NO: 407588 - RNA, 19 nt, Artificial Sequence
  Description of Artificial Sequence: Synthetic oligonucleotide
gucgucauucuccgaagug

SEQ ID NO: 407589 - RNA, 19 nt, Artificial Sequence
  Description of Artificial Sequence: Synthetic oligonucleotide
uggucgucauucuccgaag

SEQ ID NO: 407590 - RNA, 19 nt, Artificial Sequence
  Description of Artificial Sequence: Synthetic oligonucleotide
guugagagucuucuuuguc

SEQ ID NO: 407591 - RNA, 19 nt, Artificial Sequence
  Description of Artificial Sequence: Synthetic oligonucleotide
ucuaaacugcugccauccu

SEQ ID NO: 407592 - RNA, 19 nt, Artificial Sequence
  Description of Artificial Sequence: Synthetic oligonucleotide
gguaggaguacaacugucc

SEQ ID NO: 407593 - RNA, 19 nt, Artificial Sequence
  Description of Artificial Sequence: Synthetic oligonucleotide
uccuuacucccugagggcu

SEQ ID NO: 407594 - RNA, 19 nt, Artificial Sequence
  Description of Artificial Sequence: Synthetic oligonucleotide
uuugggcuugguucacccc

SEQ ID NO: 407595 - RNA, 19 nt, Artificial Sequence
  Description of Artificial Sequence: Synthetic oligonucleotide
uuagguguguggggagccg

SEQ ID NO: 407596 - RNA, 19 nt, Artificial Sequence
  Description of Artificial Sequence: Synthetic oligonucleotide
cuacuuaaugucagugcca

SEQ ID NO: 407597 - RNA, 19 nt, Artificial Sequence
  Description of Artificial Sequence: Synthetic oligonucleotide
gaggcagucaagaguugcc

SEQ ID NO: 407598 - RNA, 19 nt, Artificial Sequence
  Description of Artificial Sequence: Synthetic oligonucleotide
cuuagguguguggggagcc

SEQ ID NO: 407599 - RNA, 19 nt, Artificial Sequence
  Description of Artificial Sequence: Synthetic oligonucleotide
ugguagauggacgcuuucu

SEQ ID NO: 407600 - RNA, 19 nt, Artificial Sequence
  Description of Artificial Sequence: Synthetic oligonucleotide
uccugagauauaagccccu

SEQ ID NO: 407601 - RNA, 19 nt, Artificial Sequence
  Description of Artificial Sequence: Synthetic oligonucleotide
cuuguagcguuuuccacaa

SEQ ID NO: 407602 - RNA, 19 nt, Artificial Sequence
  Description of Artificial Sequence: Synthetic oligonucleotide
ucgaugcacugccagcggu

SEQ ID NO: 407603 - RNA, 19 nt, Artificial Sequence
  Description of Artificial Sequence: Synthetic oligonucleotide
agcaccucguuucuccaga

SEQ ID NO: 407604 - RNA, 19 nt, Artificial Sequence
  Description of Artificial Sequence: Synthetic oligonucleotide
uacgcaguagagccucuaa

SEQ ID NO: 407605 - RNA, 19 nt, Artificial Sequence
  Description of Artificial Sequence: Synthetic oligonucleotide
cuccuuacucccugagggc

SEQ ID NO: 407606 - RNA, 19 nt, Artificial Sequence
  Description of Artificial Sequence: Synthetic oligonucleotide
agcuagugugcaaggaaag

SEQ ID NO: 407607 - RNA, 19 nt, Artificial Sequence
  Description of Artificial Sequence: Synthetic oligonucleotide
agcagaacaagggguagga

SEQ ID NO: 407608 - RNA, 19 nt, Artificial Sequence
  Description of Artificial Sequence: Synthetic oligonucleotide
uggcaucuuuguaguacug

SEQ ID NO: 407609 - RNA, 19 nt, Artificial Sequence
  Description of Artificial Sequence: Synthetic oligonucleotide
aacucgcccaggcugucau

SEQ ID NO: 407610 - RNA, 19 nt, Artificial Sequence
  Description of Artificial Sequence: Synthetic oligonucleotide
cugugucugguuuaauaga

SEQ ID NO: 407611 - RNA, 19 nt, Artificial Sequence
  Description of Artificial Sequence: Synthetic oligonucleotide
ugugauuaccagggacuug

SEQ ID NO: 407612 - RNA, 19 nt, Artificial Sequence
  Description of Artificial Sequence: Synthetic oligonucleotide
caggauacacagguaggag

SEQ ID NO: 407613 - RNA, 19 nt, Artificial Sequence
  Description of Artificial Sequence: Synthetic oligonucleotide
aggcagacgcacgcuacgc

SEQ ID NO: 407614 - RNA, 19 nt, Artificial Sequence
  Description of Artificial Sequence: Synthetic oligonucleotide
gcguuuuccacaaauguca

SEQ ID NO: 407615 - RNA, 19 nt, Artificial Sequence
  Description of Artificial Sequence: Synthetic oligonucleotide
aacuucuugugguccccaa

SEQ ID NO: 407616 - RNA, 19 nt, Artificial Sequence
  Description of Artificial Sequence: Synthetic oligonucleotide
cagccuuaggugugugggg

SEQ ID NO: 407617 - RNA, 19 nt, Artificial Sequence
  Description of Artificial Sequence: Synthetic oligonucleotide
gguaggaaaggguccuagc

SEQ ID NO: 407618 - RNA, 19 nt, Artificial Sequence
  Description of Artificial Sequence: Synthetic oligonucleotide
ggggccucaacuuugcaga

SEQ ID NO: 407619 - RNA, 19 nt, Artificial Sequence
  Description of Artificial Sequence: Synthetic oligonucleotide
gaacuaccagagugaaaga

SEQ ID NO: 407620 - RNA, 19 nt, Artificial Sequence
  Description of Artificial Sequence: Synthetic oligonucleotide
cucgacgcuuuuacgccag

SEQ ID NO: 407621 - RNA, 19 nt, Artificial Sequence
  Description of Artificial Sequence: Synthetic oligonucleotide
ucgcuuuuccauccagaua

SEQ ID NO: 407622 - RNA, 19 nt, Artificial Sequence
  Description of Artificial Sequence: Synthetic oligonucleotide
gagcaccucguuucuccag

SEQ ID NO: 407623 - RNA, 19 nt, Artificial Sequence
  Description of Artificial Sequence: Synthetic oligonucleotide
gauccagacacagguggca

SEQ ID NO: 407624 - RNA, 19 nt, Artificial Sequence
  Description of Artificial Sequence: Synthetic oligonucleotide
ucggugucgcuuuuccauc

SEQ ID NO: 407625 - RNA, 19 nt, Artificial Sequence
  Description of Artificial Sequence: Synthetic oligonucleotide
gguccuagcaagugccacc

SEQ ID NO: 407626 - RNA, 19 nt, Artificial Sequence
  Description of Artificial Sequence: Synthetic oligonucleotide
gggcuuaucacgguccucc

SEQ ID NO: 407627 - RNA, 19 nt, Artificial Sequence
  Description of Artificial Sequence: Synthetic oligonucleotide
gcgggcauuguaauugugg

SEQ ID NO: 407628 - RNA, 19 nt, Artificial Sequence
  Description of Artificial Sequence: Synthetic oligonucleotide
agcgcgccagccaagcacg

SEQ ID NO: 407629 - RNA, 19 nt, Artificial Sequence
  Description of Artificial Sequence: Synthetic oligonucleotide
acgcaguagagccucuaaa

SEQ ID NO: 407630 - RNA, 19 nt, Artificial Sequence
  Description of Artificial Sequence: Synthetic oligonucleotide
gacgggugcccugagcggc

SEQ ID NO: 407631 - RNA, 19 nt, Artificial Sequence
  Description of Artificial Sequence: Synthetic oligonucleotide
ugcacucgaugcacugcca

SEQ ID NO: 407632 - RNA, 19 nt, Artificial Sequence
  Description of Artificial Sequence: Synthetic oligonucleotide
guucaaggauccgcuuccg

SEQ ID NO: 407633 - RNA, 19 nt, Artificial Sequence
  Description of Artificial Sequence: Synthetic oligonucleotide
cuccaacuuccuucaggag

SEQ ID NO: 407634 - RNA, 19 nt, Artificial Sequence
  Description of Artificial Sequence: Synthetic oligonucleotide
agccuuaggugugugggga

SEQ ID NO: 407635 - RNA, 19 nt, Artificial Sequence
  Description of Artificial Sequence: Synthetic oligonucleotide
uacaugugguagccacggu

SEQ ID NO: 407636 - RNA, 19 nt, Artificial Sequence
  Description of Artificial Sequence: Synthetic oligonucleotide
gcuuuuacgccagcgccgg

SEQ ID NO: 407637 - RNA, 19 nt, Artificial Sequence
  Description of Artificial Sequence: Synthetic oligonucleotide
agaaaggcagacgcacgcu

SEQ ID NO: 407638 - RNA, 19 nt, Artificial Sequence
  Description of Artificial Sequence: Synthetic oligonucleotide
gugucugguuuaauagaug

SEQ ID NO: 407639 - RNA, 19 nt, Artificial Sequence
  Description of Artificial Sequence: Synthetic oligonucleotide
aggucgauucuuguagcgu

SEQ ID NO: 407640 - RNA, 19 nt, Artificial Sequence
  Description of Artificial Sequence: Synthetic oligonucleotide
caccucguuucuccagagg

SEQ ID NO: 407641 - RNA, 19 nt, Artificial Sequence
  Description of Artificial Sequence: Synthetic oligonucleotide
ggauccgcuuccgugcucg

SEQ ID NO: 407642 - RNA, 19 nt, Artificial Sequence
  Description of Artificial Sequence: Synthetic oligonucleotide
acucccugagggcuuggga

SEQ ID NO: 407643 - RNA, 19 nt, Artificial Sequence
  Description of Artificial Sequence: Synthetic oligonucleotide
ggaaauguuuggauugcca

SEQ ID NO: 407644 - RNA, 19 nt, Artificial Sequence
  Description of Artificial Sequence: Synthetic oligonucleotide
agggguaggaaaggguccu

SEQ ID NO: 407645 - RNA, 19 nt, Artificial Sequence
  Description of Artificial Sequence: Synthetic oligonucleotide
ggcuccgacauggaugggg

SEQ ID NO: 407646 - RNA, 19 nt, Artificial Sequence
  Description of Artificial Sequence: Synthetic oligonucleotide
ggucaguacgcaguagagc

SEQ ID NO: 407647 - RNA, 19 nt, Artificial Sequence
  Description of Artificial Sequence: Synthetic oligonucleotide
caguacgcaguagagccuc

SEQ ID NO: 407648 - RNA, 19 nt, Artificial Sequence
  Description of Artificial Sequence: Synthetic oligonucleotide
caucaagaucaucuaggaa

SEQ ID NO: 407649 - RNA, 19 nt, Artificial Sequence
  Description of Artificial Sequence: Synthetic oligonucleotide
ugcagcacuugcacucgau

SEQ ID NO: 407650 - RNA, 19 nt, Artificial Sequence
  Description of Artificial Sequence: Synthetic oligonucleotide
agaacgaaaaggggauuuu

SEQ ID NO: 407651 - RNA, 19 nt, Artificial Sequence
  Description of Artificial Sequence: Synthetic oligonucleotide
cgcaguagagccucuaaac

SEQ ID NO: 407652 - RNA, 19 nt, Artificial Sequence
  Description of Artificial Sequence: Synthetic oligonucleotide
agacgcacgcuacgcucag

SEQ ID NO: 407653 - RNA, 19 nt, Artificial Sequence
  Description of Artificial Sequence: Synthetic oligonucleotide
gaucaucuaggaagucauc

SEQ ID NO: 407654 - RNA, 19 nt, Artificial Sequence
  Description of Artificial Sequence: Synthetic oligonucleotide
guccccuccuacuuaaugu

SEQ ID NO: 407655 - RNA, 19 nt, Artificial Sequence
  Description of Artificial Sequence: Synthetic oligonucleotide
uuacgccagcgccgggcag

SEQ ID NO: 407656 - RNA, 19 nt, Artificial Sequence
  Description of Artificial Sequence: Synthetic oligonucleotide
uugcagcacuugcacucga

SEQ ID NO: 407657 - RNA, 19 nt, Artificial Sequence
  Description of Artificial Sequence: Synthetic oligonucleotide
agccucuaaacugcugcca

SEQ ID NO: 407658 - RNA, 19 nt, Artificial Sequence
  Description of Artificial Sequence: Synthetic oligonucleotide
cccuccuacuuaaugucag

SEQ ID NO: 407659 - RNA, 19 nt, Artificial Sequence
  Description of Artificial Sequence: Synthetic oligonucleotide
acccuuacucuuggauuuc

SEQ ID NO: 407660 - RNA, 19 nt, Artificial Sequence
  Description of Artificial Sequence: Synthetic oligonucleotide
ugagcgcgccagccaagca

SEQ ID NO: 407661 - RNA, 19 nt, Artificial Sequence
  Description of Artificial Sequence: Synthetic oligonucleotide
gacuugggcccaaggcaag

SEQ ID NO: 407662 - RNA, 19 nt, Artificial Sequence
  Description of Artificial Sequence: Synthetic oligonucleotide
ggcgagaaggcaaagugaa

SEQ ID NO: 407663 - RNA, 19 nt, Artificial Sequence
  Description of Artificial Sequence: Synthetic oligonucleotide
aaacucgcccaggcuguca

SEQ ID NO: 407664 - RNA, 19 nt, Artificial Sequence
  Description of Artificial Sequence: Synthetic oligonucleotide
aggggauuuuggagguagg

SEQ ID NO: 407665 - RNA, 19 nt, Artificial Sequence
  Description of Artificial Sequence: Synthetic oligonucleotide
gcacgcuacgcucagcaca

SEQ ID NO: 407666 - RNA, 19 nt, Artificial Sequence
  Description of Artificial Sequence: Synthetic oligonucleotide
ggguaaugaaaaccaaggu

SEQ ID NO: 407667 - RNA, 19 nt, Artificial Sequence
  Description of Artificial Sequence: Synthetic oligonucleotide
cauucuccgaagugccgca

SEQ ID NO: 407668 - RNA, 19 nt, Artificial Sequence
  Description of Artificial Sequence: Synthetic oligonucleotide
gcuuaucacgguccuccag

SEQ ID NO: 407669 - RNA, 19 nt, Artificial Sequence
  Description of Artificial Sequence: Synthetic oligonucleotide
uccgugcucgacuguuggu

SEQ ID NO: 407670 - RNA, 19 nt, Artificial Sequence
  Description of Artificial Sequence: Synthetic oligonucleotide
gucgcuuuuccauccagau

SEQ ID NO: 407671 - RNA, 19 nt, Artificial Sequence
  Description of Artificial Sequence: Synthetic oligonucleotide
ucgacgcuuuuacgccagc

SEQ ID NO: 407672 - RNA, 19 nt, Artificial Sequence
  Description of Artificial Sequence: Synthetic oligonucleotide
ccaggucgauucuuguagc

SEQ ID NO: 407673 - RNA, 19 nt, Artificial Sequence
  Description of Artificial Sequence: Synthetic oligonucleotide
agguuugggcuugguucac

SEQ ID NO: 407674 - RNA, 19 nt, Artificial Sequence
  Description of Artificial Sequence: Synthetic oligonucleotide
ucgauucuuguagcguuuu

SEQ ID NO: 407675 - RNA, 19 nt, Artificial Sequence
  Description of Artificial Sequence: Synthetic oligonucleotide
cuuuggcgagaaggcaaag

SEQ ID NO: 407676 - RNA, 19 nt, Artificial Sequence
  Description of Artificial Sequence: Synthetic oligonucleotide
cagacgcacgcuacgcuca

SEQ ID NO: 407677 - RNA, 19 nt, Artificial Sequence
  Description of Artificial Sequence: Synthetic oligonucleotide
auucuccgaagugccgcag

SEQ ID NO: 407678 - RNA, 19 nt, Artificial Sequence
  Description of Artificial Sequence: Synthetic oligonucleotide
aggaacccauuugaacccu

SEQ ID NO: 407679 - RNA, 19 nt, Artificial Sequence
  Description of Artificial Sequence: Synthetic oligonucleotide
gggaaauguuuggauugcc

SEQ ID NO: 407680 - RNA, 19 nt, Artificial Sequence
  Description of Artificial Sequence: Synthetic oligonucleotide
acgggaagggcaggugaag

SEQ ID NO: 407681 - RNA, 19 nt, Artificial Sequence
  Description of Artificial Sequence: Synthetic oligonucleotide
ccaauccugguccucggug

SEQ ID NO: 407682 - RNA, 19 nt, Artificial Sequence
  Description of Artificial Sequence: Synthetic oligonucleotide
gaagugccgcagagguugc

SEQ ID NO: 407683 - RNA, 19 nt, Artificial Sequence
  Description of Artificial Sequence: Synthetic oligonucleotide
auccgcuuccgugcucgac

SEQ ID NO: 407684 - RNA, 19 nt, Artificial Sequence
  Description of Artificial Sequence: Synthetic oligonucleotide
ggaagaacgaaaaggggau

SEQ ID NO: 407685 - RNA, 19 nt, Artificial Sequence
  Description of Artificial Sequence: Synthetic oligonucleotide
cgcuuuuacgccagcgccg

SEQ ID NO: 407686 - RNA, 19 nt, Artificial Sequence
  Description of Artificial Sequence: Synthetic oligonucleotide
caauccugguccucggugu

SEQ ID NO: 407687 - RNA, 19 nt, Artificial Sequence
  Description of Artificial Sequence: Synthetic oligonucleotide
gcagacgcacgcuacgcuc

SEQ ID NO: 407688 - RNA, 19 nt, Artificial Sequence
  Description of Artificial Sequence: Synthetic oligonucleotide
ggaaacaggaguagguggu

SEQ ID NO: 407689 - RNA, 19 nt, Artificial Sequence
  Description of Artificial Sequence: Synthetic oligonucleotide
ggacgggugcccugagcgg

SEQ ID NO: 407690 - RNA, 19 nt, Artificial Sequence
  Description of Artificial Sequence: Synthetic oligonucleotide
gugcucgacuguuggugac

SEQ ID NO: 407691 - RNA, 19 nt, Artificial Sequence
  Description of Artificial Sequence: Synthetic oligonucleotide
gggugagacaguacaugug

SEQ ID NO: 407692 - RNA, 19 nt, Artificial Sequence
  Description of Artificial Sequence: Synthetic oligonucleotide
uuuuggagguaggcauuuu

SEQ ID NO: 407693 - RNA, 19 nt, Artificial Sequence
  Description of Artificial Sequence: Synthetic oligonucleotide
gugagcgcgccagccaagc

SEQ ID NO: 407694 - RNA, 19 nt, Artificial Sequence
  Description of Artificial Sequence: Synthetic oligonucleotide
guggcacaucaggaggagc

SEQ ID NO: 407695 - RNA, 19 nt, Artificial Sequence
  Description of Artificial Sequence: Synthetic oligonucleotide
cacggggaucuggagcacc

SEQ ID NO: 407696 - RNA, 19 nt, Artificial Sequence
  Description of Artificial Sequence: Synthetic oligonucleotide
cacccuuacucuuggauuu

SEQ ID NO: 407697 - RNA, 19 nt, Artificial Sequence
  Description of Artificial Sequence: Synthetic oligonucleotide
gcccugagcggccacaguc

SEQ ID NO: 407698 - RNA, 19 nt, Artificial Sequence
  Description of Artificial Sequence: Synthetic oligonucleotide
caggacgggugcccugagc

SEQ ID NO: 407699 - RNA, 19 nt, Artificial Sequence
  Description of Artificial Sequence: Synthetic oligonucleotide
cugagauauaagccccucu

SEQ ID NO: 407700 - RNA, 19 nt, Artificial Sequence
  Description of Artificial Sequence: Synthetic oligonucleotide
cuccgacauggauggggug

SEQ ID NO: 407701 - RNA, 19 nt, Artificial Sequence
  Description of Artificial Sequence: Synthetic oligonucleotide
uuguagcguuuuccacaaa

SEQ ID NO: 407702 - RNA, 19 nt, Artificial Sequence
  Description of Artificial Sequence: Synthetic oligonucleotide
gcucgacuguuggugacag

SEQ ID NO: 407703 - RNA, 19 nt, Artificial Sequence
  Description of Artificial Sequence: Synthetic oligonucleotide
ggaugggaaauguuuggau

SEQ ID NO: 407704 - RNA, 19 nt, Artificial Sequence
  Description of Artificial Sequence: Synthetic oligonucleotide
cugugagcgcgccagccaa

SEQ ID NO: 407705 - RNA, 19 nt, Artificial Sequence
  Description of Artificial Sequence: Synthetic oligonucleotide
auggggugagacaguacau

SEQ ID NO: 407706 - RNA, 19 nt, Artificial Sequence
  Description of Artificial Sequence: Synthetic oligonucleotide
cagaacuaccagagugaaa

SEQ ID NO: 407707 - RNA, 19 nt, Artificial Sequence
  Description of Artificial Sequence: Synthetic oligonucleotide
uccuagcaagugccaccuc

SEQ ID NO: 407708 - RNA, 19 nt, Artificial Sequence
  Description of Artificial Sequence: Synthetic oligonucleotide
gcaccucguuucuccagag

SEQ ID NO: 407709 - RNA, 19 nt, Artificial Sequence
  Description of Artificial Sequence: Synthetic oligonucleotide
cacacccuuacucuuggau

SEQ ID NO: 407710 - RNA, 19 nt, Artificial Sequence
  Description of Artificial Sequence: Synthetic oligonucleotide
aagugccgcagagguugca

SEQ ID NO: 407711 - RNA, 19 nt, Artificial Sequence
  Description of Artificial Sequence: Synthetic oligonucleotide
caauugcucugggcuacuc

SEQ ID NO: 407712 - RNA, 19 nt, Artificial Sequence
  Description of Artificial Sequence: Synthetic oligonucleotide
gcacuugcacucgaugcac

SEQ ID NO: 407713 - RNA, 19 nt, Artificial Sequence
  Description of Artificial Sequence: Synthetic oligonucleotide
ggucgauucuuguagcguu

SEQ ID NO: 407714 - RNA, 19 nt, Artificial Sequence
  Description of Artificial Sequence: Synthetic oligonucleotide
gaggggccucaacuuugca

SEQ ID NO: 407715 - RNA, 19 nt, Artificial Sequence
  Description of Artificial Sequence: Synthetic oligonucleotide
gcgagaaggcaaagugaag

SEQ ID NO: 407716 - RNA, 19 nt, Artificial Sequence
  Description of Artificial Sequence: Synthetic oligonucleotide
ccucuaaacugcugccauc

SEQ ID NO: 407717 - RNA, 19 nt, Artificial Sequence
  Description of Artificial Sequence: Synthetic oligonucleotide
gggcuugguucaccccugg

SEQ ID NO: 407718 - RNA, 19 nt, Artificial Sequence
  Description of Artificial Sequence: Synthetic oligonucleotide
gaagaacgaaaaggggauu

SEQ ID NO: 407719 - RNA, 19 nt, Artificial Sequence
  Description of Artificial Sequence: Synthetic oligonucleotide
gguuugggcuugguucacc

SEQ ID NO: 407720 - RNA, 19 nt, Artificial Sequence
  Description of Artificial Sequence: Synthetic oligonucleotide
gcagaacuaccagagugaa

SEQ ID NO: 407721 - RNA, 19 nt, Artificial Sequence
  Description of Artificial Sequence: Synthetic oligonucleotide
ggcuaauccaucagguccu

SEQ ID NO: 407722 - RNA, 19 nt, Artificial Sequence
  Description of Artificial Sequence: Synthetic oligonucleotide
ggaacccauuugaacccug

SEQ ID NO: 407723 - RNA, 19 nt, Artificial Sequence
  Description of Artificial Sequence: Synthetic oligonucleotide
ccgugcucgacuguuggug

SEQ ID NO: 407724 - RNA, 19 nt, Artificial Sequence
  Description of Artificial Sequence: Synthetic oligonucleotide
ggaggcugaaugcccaggu

SEQ ID NO: 407725 - RNA, 19 nt, Artificial Sequence
  Description of Artificial Sequence: Synthetic oligonucleotide
ggugucgcuuuuccaucca

SEQ ID NO: 407726 - RNA, 19 nt, Artificial Sequence
  Description of Artificial Sequence: Synthetic oligonucleotide
gcucgacgcuuuuacgcca

SEQ ID NO: 407727 - RNA, 19 nt, Artificial Sequence
  Description of Artificial Sequence: Synthetic oligonucleotide
caacagccuuaggugugug

SEQ ID NO: 407728 - RNA, 19 nt, Artificial Sequence
  Description of Artificial Sequence: Synthetic oligonucleotide
aguacgcaguagagccucu

SEQ ID NO: 407729 - RNA, 19 nt, Artificial Sequence
  Description of Artificial Sequence: Synthetic oligonucleotide
aggguccuagcaagugcca

SEQ ID NO: 407730 - RNA, 19 nt, Artificial Sequence
  Description of Artificial Sequence: Synthetic oligonucleotide
ggaccucccugugacccag

SEQ ID NO: 407731 - RNA, 19 nt, Artificial Sequence
  Description of Artificial Sequence: Synthetic oligonucleotide
cccuuacucuuggauuucc

SEQ ID NO: 407732 - RNA, 19 nt, Artificial Sequence
  Description of Artificial Sequence: Synthetic oligonucleotide
gauccgcuuccgugcucga

SEQ ID NO: 407733 - RNA, 19 nt, Artificial Sequence
  Description of Artificial Sequence: Synthetic oligonucleotide
cgcuacgcucagcacagag

SEQ ID NO: 407734 - RNA, 19 nt, Artificial Sequence
  Description of Artificial Sequence: Synthetic oligonucleotide
ccugagauauaagccccuc

SEQ ID NO: 407735 - RNA, 19 nt, Artificial Sequence
  Description of Artificial Sequence: Synthetic oligonucleotide
cggugucgcuuuuccaucc

SEQ ID NO: 407736 - RNA, 19 nt, Artificial Sequence
  Description of Artificial Sequence: Synthetic oligonucleotide
cugagcggccacagucaga

SEQ ID NO: 407737 - RNA, 19 nt, Artificial Sequence
  Description of Artificial Sequence: Synthetic oligonucleotide
ggcuccugauucaguuaag

SEQ ID NO: 407738 - RNA, 19 nt, Artificial Sequence
  Description of Artificial Sequence: Synthetic oligonucleotide
gcuacuccagucugugagu

SEQ ID NO: 407739 - RNA, 19 nt, Artificial Sequence
  Description of Artificial Sequence: Synthetic oligonucleotide
guucugguagauggacgcu

SEQ ID NO: 407740 - RNA, 19 nt, Artificial Sequence
  Description of Artificial Sequence: Synthetic oligonucleotide
ggucgucauucuccgaagu

SEQ ID NO: 407741 - RNA, 19 nt, Artificial Sequence
  Description of Artificial Sequence: Synthetic oligonucleotide
gaccguuuuggaguaucuu

SEQ ID NO: 407742 - RNA, 19 nt, Artificial Sequence
  Description of Artificial Sequence: Synthetic oligonucleotide
gagcggccacagucagaac

SEQ ID NO: 407743 - RNA, 19 nt, Artificial Sequence
  Description of Artificial Sequence: Synthetic oligonucleotide
cugccagcgguaggucuuc

SEQ ID NO: 407744 - RNA, 19 nt, Artificial Sequence
  Description of Artificial Sequence: Synthetic oligonucleotide
cgacgcuuuuacgccagcg

SEQ ID NO: 407745 - RNA, 19 nt, Artificial Sequence
  Description of Artificial Sequence: Synthetic oligonucleotide
guaggugguugagagucuu

SEQ ID NO: 407746 - RNA, 19 nt, Artificial Sequence
  Description of Artificial Sequence: Synthetic oligonucleotide
gccucuaaacugcugccau

SEQ ID NO: 407747 - RNA, 19 nt, Artificial Sequence
  Description of Artificial Sequence: Synthetic oligonucleotide
cugugauuaccagggacuu

SEQ ID NO: 407748 - RNA, 19 nt, Artificial Sequence
  Description of Artificial Sequence: Synthetic oligonucleotide
ccccuccuacuuaauguca

SEQ ID NO: 407749 - RNA, 19 nt, Artificial Sequence
  Description of Artificial Sequence: Synthetic oligonucleotide
ccccauguagcaugacaga

SEQ ID NO: 407750 - RNA, 19 nt, Artificial Sequence
  Description of Artificial Sequence: Synthetic oligonucleotide
ccuuuccccgaccguuuug

SEQ ID NO: 407751 - RNA, 19 nt, Artificial Sequence
  Description of Artificial Sequence: Synthetic oligonucleotide
ggcgggcauuguaauugug

SEQ ID NO: 407752 - RNA, 19 nt, Artificial Sequence
  Description of Artificial Sequence: Synthetic oligonucleotide
ggauaggaggaggggccuc

SEQ ID NO: 407753 - RNA, 19 nt, Artificial Sequence
  Description of Artificial Sequence: Synthetic oligonucleotide
gcaagguuugggcuugguu

SEQ ID NO: 407754 - RNA, 19 nt, Artificial Sequence
  Description of Artificial Sequence: Synthetic oligonucleotide
ggacugcuuuggcgagaag

SEQ ID NO: 407755 - RNA, 19 nt, Artificial Sequence
  Description of Artificial Sequence: Synthetic oligonucleotide
gggccucaacuuugcagaa

SEQ ID NO: 407756 - RNA, 19 nt, Artificial Sequence
  Description of Artificial Sequence: Synthetic oligonucleotide
caggacugcuuuggcgaga

SEQ ID NO: 407757 - RNA, 19 nt, Artificial Sequence
  Description of Artificial Sequence: Synthetic oligonucleotide
gucgauucuuguagcguuu

SEQ ID NO: 407758 - RNA, 19 nt, Artificial Sequence
  Description of Artificial Sequence: Synthetic oligonucleotide
gccagcgccgggcagggua

SEQ ID NO: 407759 - RNA, 19 nt, Artificial Sequence
  Description of Artificial Sequence: Synthetic oligonucleotide
cgugcucgacuguugguga

SEQ ID NO: 407760 - RNA, 19 nt, Artificial Sequence
  Description of Artificial Sequence: Synthetic oligonucleotide
ggcagacgcacgcuacgcu

SEQ ID NO: 407761 - RNA, 19 nt, Artificial Sequence
  Description of Artificial Sequence: Synthetic oligonucleotide
gggcuacuccagucuguga

SEQ ID NO: 407762 - RNA, 19 nt, Artificial Sequence
  Description of Artificial Sequence: Synthetic oligonucleotide
cagguucaaggauccgcuu

SEQ ID NO: 407763 - RNA, 19 nt, Artificial Sequence
  Description of Artificial Sequence: Synthetic oligonucleotide
gcgccgggcaggguaggag

SEQ ID NO: 407764 - RNA, 19 nt, Artificial Sequence
  Description of Artificial Sequence: Synthetic oligonucleotide
ccuccuacuuaaugucagu

SEQ ID NO: 407765 - RNA, 19 nt, Artificial Sequence
  Description of Artificial Sequence: Synthetic oligonucleotide
guguucuggcauggacugu

SEQ ID NO: 407766 - RNA, 19 nt, Artificial Sequence
  Description of Artificial Sequence: Synthetic oligonucleotide
cgcacgcuacgcucagcac

SEQ ID NO: 407767 - RNA, 19 nt, Artificial Sequence
  Description of Artificial Sequence: Synthetic oligonucleotide
ggccaggcuugagacaagu

SEQ ID NO: 407768 - RNA, 19 nt, Artificial Sequence
  Description of Artificial Sequence: Synthetic oligonucleotide
acgcuacgcucagcacaga

SEQ ID NO: 407769 - RNA, 19 nt, Artificial Sequence
  Description of Artificial Sequence: Synthetic oligonucleotide
ccgggcaggguaggaguac

SEQ ID NO: 407770 - RNA, 19 nt, Artificial Sequence
  Description of Artificial Sequence: Synthetic oligonucleotide
gccaauccugguccucggu

SEQ ID NO: 407771 - RNA, 19 nt, Artificial Sequence
  Description of Artificial Sequence: Synthetic oligonucleotide
cgacuguuggugacaggaa

SEQ ID NO: 407772 - RNA, 19 nt, Artificial Sequence
  Description of Artificial Sequence: Synthetic oligonucleotide
cgaugcacugccagcggua

SEQ ID NO: 407773 - RNA, 19 nt, Artificial Sequence
  Description of Artificial Sequence: Synthetic oligonucleotide
caacuuccuucaggaggcu

SEQ ID NO: 407774 - RNA, 19 nt, Artificial Sequence
  Description of Artificial Sequence: Synthetic oligonucleotide
cuguccccuccuacuuaau

SEQ ID NO: 407775 - RNA, 19 nt, Artificial Sequence
  Description of Artificial Sequence: Synthetic oligonucleotide
ccgcagagguugcagcacu

SEQ ID NO: 407776 - RNA, 19 nt, Artificial Sequence
  Description of Artificial Sequence: Synthetic oligonucleotide
cgaccguuuuggaguaucu

SEQ ID NO: 407777 - RNA, 19 nt, Artificial Sequence
  Description of Artificial Sequence: Synthetic oligonucleotide
ccccgaccguuuuggagua

SEQ ID NO: 407778 - RNA, 19 nt, Artificial Sequence
  Description of Artificial Sequence: Synthetic oligonucleotide
ccuuacucccugagggcuu

SEQ ID NO: 407779 - RNA, 19 nt, Artificial Sequence
  Description of Artificial Sequence: Synthetic oligonucleotide
ggcaagguuugggcuuggu

SEQ ID NO: 407780 - RNA, 19 nt, Artificial Sequence
  Description of Artificial Sequence: Synthetic oligonucleotide
gcuaauccaucagguccuu

SEQ ID NO: 407781 - RNA, 19 nt, Artificial Sequence
  Description of Artificial Sequence: Synthetic oligonucleotide
ccgaagugccgcagagguu

SEQ ID NO: 407782 - RNA, 19 nt, Artificial Sequence
  Description of Artificial Sequence: Synthetic oligonucleotide
aauaauacccugaagacuc

SEQ ID NO: 407783 - RNA, 19 nt, Artificial Sequence
  Description of Artificial Sequence: Synthetic oligonucleotide
aacuauuaauagcacaagg

SEQ ID NO: 407784 - RNA, 19 nt, Artificial Sequence
  Description of Artificial Sequence: Synthetic oligonucleotide
aauuguagucaacacugcc

SEQ ID NO: 407785 - RNA, 19 nt, Artificial Sequence
  Description of Artificial Sequence: Synthetic oligonucleotide
auauacacaaggcuauugc

SEQ ID NO: 407786 - RNA, 19 nt, Artificial Sequence
  Description of Artificial Sequence: Synthetic oligonucleotide
uaaaggagcuccuuuaagg

SEQ ID NO: 407787 - RNA, 19 nt, Artificial Sequence
  Description of Artificial Sequence: Synthetic oligonucleotide
uguuguaggaucauaauaa

SEQ ID NO: 407788 - RNA, 19 nt, Artificial Sequence
  Description of Artificial Sequence: Synthetic oligonucleotide
acuauuaauagcacaaggc

SEQ ID NO: 407789 - RNA, 19 nt, Artificial Sequence
  Description of Artificial Sequence: Synthetic oligonucleotide
uccauuucguaccaguucg

SEQ ID NO: 407790 - RNA, 19 nt, Artificial Sequence
  Description of Artificial Sequence: Synthetic oligonucleotide
uguuaaugaguuauaguag

SEQ ID NO: 407791 - RNA, 19 nt, Artificial Sequence
  Description of Artificial Sequence: Synthetic oligonucleotide
uuauuuaaacucuuagccc

SEQ ID NO: 407792 - RNA, 19 nt, Artificial Sequence
  Description of Artificial Sequence: Synthetic oligonucleotide
guuauaguaguauugugag

SEQ ID NO: 407793 - RNA, 19 nt, Artificial Sequence
  Description of Artificial Sequence: Synthetic oligonucleotide
accacuuugagacugagug

SEQ ID NO: 407794 - RNA, 19 nt, Artificial Sequence
  Description of Artificial Sequence: Synthetic oligonucleotide
acaguaguaauccaccgac

SEQ ID NO: 407795 - RNA, 19 nt, Artificial Sequence
  Description of Artificial Sequence: Synthetic oligonucleotide
agacucaucauauugauaa

SEQ ID NO: 407796 - RNA, 19 nt, Artificial Sequence
  Description of Artificial Sequence: Synthetic oligonucleotide
aagugguucacccuaaacu

SEQ ID NO: 407797 - RNA, 19 nt, Artificial Sequence
  Description of Artificial Sequence: Synthetic oligonucleotide
aauuguaucacaguaguaa

SEQ ID NO: 407798 - RNA, 19 nt, Artificial Sequence
  Description of Artificial Sequence: Synthetic oligonucleotide
uguuuacccacauaaagga

SEQ ID NO: 407799 - RNA, 19 nt, Artificial Sequence
  Description of Artificial Sequence: Synthetic oligonucleotide
uuuuguggaaggcaggccc

SEQ ID NO: 407800 - RNA, 19 nt, Artificial Sequence
  Description of Artificial Sequence: Synthetic oligonucleotide
guaauuguagucaacacug

SEQ ID NO: 407801 - RNA, 19 nt, Artificial Sequence
  Description of Artificial Sequence: Synthetic oligonucleotide
cuguuuacccacauaaagg

SEQ ID NO: 407802 - RNA, 19 nt, Artificial Sequence
  Description of Artificial Sequence: Synthetic oligonucleotide
ucaacgaauucacaggcug

SEQ ID NO: 407803 - RNA, 19 nt, Artificial Sequence
  Description of Artificial Sequence: Synthetic oligonucleotide
gagcaaauugaggagaugg

SEQ ID NO: 407804 - RNA, 19 nt, Artificial Sequence
  Description of Artificial Sequence: Synthetic oligonucleotide
aauccugugaguacuagag

SEQ ID NO: 407805 - RNA, 19 nt, Artificial Sequence
  Description of Artificial Sequence: Synthetic oligonucleotide
uaaugcauugcaaugugcu

SEQ ID NO: 407806 - RNA, 19 nt, Artificial Sequence
  Description of Artificial Sequence: Synthetic oligonucleotide
acccuaaacuauuaauagc

SEQ ID NO: 407807 - RNA, 19 nt, Artificial Sequence
  Description of Artificial Sequence: Synthetic oligonucleotide
gauaaguagaugugucagg

SEQ ID NO: 407808 - RNA, 19 nt, Artificial Sequence
  Description of Artificial Sequence: Synthetic oligonucleotide
uauaguaguauugugaguu

SEQ ID NO: 407809 - RNA, 19 nt, Artificial Sequence
  Description of Artificial Sequence: Synthetic oligonucleotide
ucucaacgaauucacaggc

SEQ ID NO: 407810 - RNA, 19 nt, Artificial Sequence
  Description of Artificial Sequence: Synthetic oligonucleotide
aaggcuauugccaagacau

SEQ ID NO: 407811 - RNA, 19 nt, Artificial Sequence
  Description of Artificial Sequence: Synthetic oligonucleotide
uaugaggcgaauguuauug

SEQ ID NO: 407812 - RNA, 19 nt, Artificial Sequence
  Description of Artificial Sequence: Synthetic oligonucleotide
aacuccaauaguuuuccca

SEQ ID NO: 407813 - RNA, 19 nt, Artificial Sequence
  Description of Artificial Sequence: Synthetic oligonucleotide
aguacuagaguguacugug

SEQ ID NO: 407814 - RNA, 19 nt, Artificial Sequence
  Description of Artificial Sequence: Synthetic oligonucleotide
uuucguaccaguucgggga

SEQ ID NO: 407815 - RNA, 19 nt, Artificial Sequence
  Description of Artificial Sequence: Synthetic oligonucleotide
uaauccaccgacugaacag

SEQ ID NO: 407816 - RNA, 19 nt, Artificial Sequence
  Description of Artificial Sequence: Synthetic oligonucleotide
aaugaagugguucacccua

SEQ ID NO: 407817 - RNA, 19 nt, Artificial Sequence
  Description of Artificial Sequence: Synthetic oligonucleotide
gacucuguaauaucugaag

SEQ ID NO: 407818 - RNA, 19 nt, Artificial Sequence
  Description of Artificial Sequence: Synthetic oligonucleotide
ugcauagccauccuggccu

SEQ ID NO: 407819 - RNA, 19 nt, Artificial Sequence
  Description of Artificial Sequence: Synthetic oligonucleotide
ucaaugggagcugugaugc

SEQ ID NO: 407820 - RNA, 19 nt, Artificial Sequence
  Description of Artificial Sequence: Synthetic oligonucleotide
aggcgaauguuauugacag

SEQ ID NO: 407821 - RNA, 19 nt, Artificial Sequence
  Description of Artificial Sequence: Synthetic oligonucleotide
gaguguacugugcauagcc

SEQ ID NO: 407822 - RNA, 19 nt, Artificial Sequence
  Description of Artificial Sequence: Synthetic oligonucleotide
uguugcaaagccaaucuuc

SEQ ID NO: 407823 - RNA, 19 nt, Artificial Sequence
  Description of Artificial Sequence: Synthetic oligonucleotide
cuauuaauagcacaaggca

SEQ ID NO: 407824 - RNA, 19 nt, Artificial Sequence
  Description of Artificial Sequence: Synthetic oligonucleotide
cauauugauaaguagaugu

SEQ ID NO: 407825 - RNA, 19 nt, Artificial Sequence
  Description of Artificial Sequence: Synthetic oligonucleotide
uaagucggagaguugcugg

SEQ ID NO: 407826 - RNA, 19 nt, Artificial Sequence
  Description of Artificial Sequence: Synthetic oligonucleotide
uccaauaguuuucccauca

SEQ ID NO: 407827 - RNA, 19 nt, Artificial Sequence
  Description of Artificial Sequence: Synthetic oligonucleotide
auguuauugacagcuaagg

SEQ ID NO: 407828 - RNA, 19 nt, Artificial Sequence
  Description of Artificial Sequence: Synthetic oligonucleotide
uugccaagacauaacaaca

SEQ ID NO: 407829 - RNA, 19 nt, Artificial Sequence
  Description of Artificial Sequence: Synthetic oligonucleotide
auuaauagcacaaggcaug

SEQ ID NO: 407830 - RNA, 19 nt, Artificial Sequence
  Description of Artificial Sequence: Synthetic oligonucleotide
cacccgacaacccauaugc

SEQ ID NO: 407831 - RNA, 19 nt, Artificial Sequence
  Description of Artificial Sequence: Synthetic oligonucleotide
guaguauugugaguuaggg

SEQ ID NO: 407832 - RNA, 19 nt, Artificial Sequence
  Description of Artificial Sequence: Synthetic oligonucleotide
uguuacuguggucaaugcc

SEQ ID NO: 407833 - RNA, 19 nt, Artificial Sequence
  Description of Artificial Sequence: Synthetic oligonucleotide
aaacucuuagcccagcguu

SEQ ID NO: 407834 - RNA, 19 nt, Artificial Sequence
  Description of Artificial Sequence: Synthetic oligonucleotide
cucucaacgaauucacagg

SEQ ID NO: 407835 - RNA, 19 nt, Artificial Sequence
  Description of Artificial Sequence: Synthetic oligonucleotide
ugaguuauaguaguauugu

SEQ ID NO: 407836 - RNA, 19 nt, Artificial Sequence
  Description of Artificial Sequence: Synthetic oligonucleotide
agguaauuguagucaacac

SEQ ID NO: 407837 - RNA, 19 nt, Artificial Sequence
  Description of Artificial Sequence: Synthetic oligonucleotide
uguguuaaugaguuauagu

SEQ ID NO: 407838 - RNA, 19 nt, Artificial Sequence
  Description of Artificial Sequence: Synthetic oligonucleotide
ucugauuauagagcugggg

SEQ ID NO: 407839 - RNA, 19 nt, Artificial Sequence
  Description of Artificial Sequence: Synthetic oligonucleotide
ugcuagacucugcagcugg

SEQ ID NO: 407840 - RNA, 19 nt, Artificial Sequence
  Description of Artificial Sequence: Synthetic oligonucleotide
uauguuccgaagaauaauu

SEQ ID NO: 407841 - RNA, 19 nt, Artificial Sequence
  Description of Artificial Sequence: Synthetic oligonucleotide
aguuauaguaguauuguga

SEQ ID NO: 407842 - RNA, 19 nt, Artificial Sequence
  Description of Artificial Sequence: Synthetic oligonucleotide
auuucguaccaguucgggg

SEQ ID NO: 407843 - RNA, 19 nt, Artificial Sequence
  Description of Artificial Sequence: Synthetic oligonucleotide
caaaccauccggaagacca

SEQ ID NO: 407844 - RNA, 19 nt, Artificial Sequence
  Description of Artificial Sequence: Synthetic oligonucleotide
ugcuauaaugcauugcaau

SEQ ID NO: 407845 - RNA, 19 nt, Artificial Sequence
  Description of Artificial Sequence: Synthetic oligonucleotide
auacccugaagacucauca

SEQ ID NO: 407846 - RNA, 19 nt, Artificial Sequence
  Description of Artificial Sequence: Synthetic oligonucleotide
aguagaggccuguuguagg

SEQ ID NO: 407847 - RNA, 19 nt, Artificial Sequence
  Description of Artificial Sequence: Synthetic oligonucleotide
aucauaauaauacccugaa

SEQ ID NO: 407848 - RNA, 19 nt, Artificial Sequence
  Description of Artificial Sequence: Synthetic oligonucleotide
uauugacagcuaaggaugc

SEQ ID NO: 407849 - RNA, 19 nt, Artificial Sequence
  Description of Artificial Sequence: Synthetic oligonucleotide
aauaucugaagcagcugag

SEQ ID NO: 407850 - RNA, 19 nt, Artificial Sequence
  Description of Artificial Sequence: Synthetic oligonucleotide
auaugcacugccuuuggcu

SEQ ID NO: 407851 - RNA, 19 nt, Artificial Sequence
  Description of Artificial Sequence: Synthetic oligonucleotide
uccugaaauuguuaaggca

SEQ ID NO: 407852 - RNA, 19 nt, Artificial Sequence
  Description of Artificial Sequence: Synthetic oligonucleotide
gauaaaacugcugguaauc

SEQ ID NO: 407853 - RNA, 19 nt, Artificial Sequence
  Description of Artificial Sequence: Synthetic oligonucleotide
caagacauaacaacaacaa

SEQ ID NO: 407854 - RNA, 19 nt, Artificial Sequence
  Description of Artificial Sequence: Synthetic oligonucleotide
uaauuguagucaacacugc

SEQ ID NO: 407855 - RNA, 19 nt, Artificial Sequence
  Description of Artificial Sequence: Synthetic oligonucleotide
ugugcuagugcuaggcugu

SEQ ID NO: 407856 - RNA, 19 nt, Artificial Sequence
  Description of Artificial Sequence: Synthetic oligonucleotide
cugcucguaauucacagug

SEQ ID NO: 407857 - RNA, 19 nt, Artificial Sequence
  Description of Artificial Sequence: Synthetic oligonucleotide
uuccgaagaauaauuguau

SEQ ID NO: 407858 - RNA, 19 nt, Artificial Sequence
  Description of Artificial Sequence: Synthetic oligonucleotide
agugguucacccuaaacua

SEQ ID NO: 407859 - RNA, 19 nt, Artificial Sequence
  Description of Artificial Sequence: Synthetic oligonucleotide
ucucucgucuuucugcagc

SEQ ID NO: 407860 - RNA, 19 nt, Artificial Sequence
  Description of Artificial Sequence: Synthetic oligonucleotide
auuguaucacaguaguaau

SEQ ID NO: 407861 - RNA, 19 nt, Artificial Sequence
  Description of Artificial Sequence: Synthetic oligonucleotide
auaaugcauugcaaugugc

SEQ ID NO: 407862 - RNA, 19 nt, Artificial Sequence
  Description of Artificial Sequence: Synthetic oligonucleotide
gaguuauaguaguauugug

SEQ ID NO: 407863 - RNA, 19 nt, Artificial Sequence
  Description of Artificial Sequence: Synthetic oligonucleotide
ucaauuuucaauggaggau

SEQ ID NO: 407864 - RNA, 19 nt, Artificial Sequence
  Description of Artificial Sequence: Synthetic oligonucleotide
ugguacauaggucuccuuc

SEQ ID NO: 407865 - RNA, 19 nt, Artificial Sequence
  Description of Artificial Sequence: Synthetic oligonucleotide
gcuaaggaugcauagggag

SEQ ID NO: 407866 - RNA, 19 nt, Artificial Sequence
  Description of Artificial Sequence: Synthetic oligonucleotide
uaaacucuuagcccagcgu

SEQ ID NO: 407867 - RNA, 19 nt, Artificial Sequence
  Description of Artificial Sequence: Synthetic oligonucleotide
uggaauccaccacagugug

SEQ ID NO: 407868 - RNA, 19 nt, Artificial Sequence
  Description of Artificial Sequence: Synthetic oligonucleotide
uauugccaagacauaacaa

SEQ ID NO: 407869 - RNA, 19 nt, Artificial Sequence
  Description of Artificial Sequence: Synthetic oligonucleotide
cacaucggaagcauuuuag

SEQ ID NO: 407870 - RNA, 19 nt, Artificial Sequence
  Description of Artificial Sequence: Synthetic oligonucleotide
uucacccuaaacuauuaau

SEQ ID NO: 407871 - RNA, 19 nt, Artificial Sequence
  Description of Artificial Sequence: Synthetic oligonucleotide
gcuuguguaagucggagag

SEQ ID NO: 407872 - RNA, 19 nt, Artificial Sequence
  Description of Artificial Sequence: Synthetic oligonucleotide
guuaaugaguuauaguagu

SEQ ID NO: 407873 - RNA, 19 nt, Artificial Sequence
  Description of Artificial Sequence: Synthetic oligonucleotide
agcaaauugaggagauggc

SEQ ID NO: 407874 - RNA, 19 nt, Artificial Sequence
  Description of Artificial Sequence: Synthetic oligonucleotide
uaaggaugcauagggagac

SEQ ID NO: 407875 - RNA, 19 nt, Artificial Sequence
  Description of Artificial Sequence: Synthetic oligonucleotide
augaguuauaguaguauug

SEQ ID NO: 407876 - RNA, 19 nt, Artificial Sequence
  Description of Artificial Sequence: Synthetic oligonucleotide
accccgaagaaugaagugg

SEQ ID NO: 407877 - RNA, 19 nt, Artificial Sequence
  Description of Artificial Sequence: Synthetic oligonucleotide
auauugauaaguagaugug

SEQ ID NO: 407878 - RNA, 19 nt, Artificial Sequence
  Description of Artificial Sequence: Synthetic oligonucleotide
aaugcauugcaaugugcuu

SEQ ID NO: 407879 - RNA, 19 nt, Artificial Sequence
  Description of Artificial Sequence: Synthetic oligonucleotide
uuauaguaguauugugagu

SEQ ID NO: 407880 - RNA, 19 nt, Artificial Sequence
  Description of Artificial Sequence: Synthetic oligonucleotide
caucggaagcauuuuaguc

SEQ ID NO: 407881 - RNA, 19 nt, Artificial Sequence
  Description of Artificial Sequence: Synthetic oligonucleotide
accaaggcaucucuguuug

SEQ ID NO: 407882 - RNA, 19 nt, Artificial Sequence
  Description of Artificial Sequence: Synthetic oligonucleotide
ugcuguguuaaugaguuau

SEQ ID NO: 407883 - RNA, 19 nt, Artificial Sequence
  Description of Artificial Sequence: Synthetic oligonucleotide
gaaucggcacccgacaacc

SEQ ID NO: 407884 - RNA, 19 nt, Artificial Sequence
  Description of Artificial Sequence: Synthetic oligonucleotide
aaccccgaagaaugaagug

SEQ ID NO: 407885 - RNA, 19 nt, Artificial Sequence
  Description of Artificial Sequence: Synthetic oligonucleotide
uugucuuuuaugaggcgaa

SEQ ID NO: 407886 - RNA, 19 nt, Artificial Sequence
  Description of Artificial Sequence: Synthetic oligonucleotide
ugccaagacauaacaacaa

SEQ ID NO: 407887 - RNA, 19 nt, Artificial Sequence
  Description of Artificial Sequence: Synthetic oligonucleotide
acuguaagcagcaaccaga

SEQ ID NO: 407888 - RNA, 19 nt, Artificial Sequence
  Description of Artificial Sequence: Synthetic oligonucleotide
uaauccugugaguacuaga

SEQ ID NO: 407889 - RNA, 19 nt, Artificial Sequence
  Description of Artificial Sequence: Synthetic oligonucleotide
acucuuagcccagcguucc

SEQ ID NO: 407890 - RNA, 19 nt, Artificial Sequence
  Description of Artificial Sequence: Synthetic oligonucleotide
acagcuaaggaugcauagg

SEQ ID NO: 407891 - RNA, 19 nt, Artificial Sequence
  Description of Artificial Sequence: Synthetic oligonucleotide
ugaguacuagaguguacug

SEQ ID NO: 407892 - RNA, 19 nt, Artificial Sequence
  Description of Artificial Sequence: Synthetic oligonucleotide
uaguauugugaguuagggu

SEQ ID NO: 407893 - RNA, 19 nt, Artificial Sequence
  Description of Artificial Sequence: Synthetic oligonucleotide
guguaagucggagaguugc

SEQ ID NO: 407894 - RNA, 19 nt, Artificial Sequence
  Description of Artificial Sequence: Synthetic oligonucleotide
uccgaagaauaauuguauc

SEQ ID NO: 407895 - RNA, 19 nt, Artificial Sequence
  Description of Artificial Sequence: Synthetic oligonucleotide
ugucagguacugcauauuu

SEQ ID NO: 407896 - RNA, 19 nt, Artificial Sequence
  Description of Artificial Sequence: Synthetic oligonucleotide
agcuccuuuuagccggacc

SEQ ID NO: 407897 - RNA, 19 nt, Artificial Sequence
  Description of Artificial Sequence: Synthetic oligonucleotide
ucuguucacaagcccucag

SEQ ID NO: 407898 - RNA, 19 nt, Artificial Sequence
  Description of Artificial Sequence: Synthetic oligonucleotide
cuguguuaaugaguuauag

SEQ ID NO: 407899 - RNA, 19 nt, Artificial Sequence
  Description of Artificial Sequence: Synthetic oligonucleotide
ugaggcgaauguuauugac

SEQ ID NO: 407900 - RNA, 19 nt, Artificial Sequence
  Description of Artificial Sequence: Synthetic oligonucleotide
aacucuuagcccagcguuc

SEQ ID NO: 407901 - RNA, 19 nt, Artificial Sequence
  Description of Artificial Sequence: Synthetic oligonucleotide
agcguuccaugucuuuggc

SEQ ID NO: 407902 - RNA, 19 nt, Artificial Sequence
  Description of Artificial Sequence: Synthetic oligonucleotide
gaccaaaucuuuucugguc

SEQ ID NO: 407903 - RNA, 19 nt, Artificial Sequence
  Description of Artificial Sequence: Synthetic oligonucleotide
cugacguagaugaugccuc

SEQ ID NO: 407904 - RNA, 19 nt, Artificial Sequence
  Description of Artificial Sequence: Synthetic oligonucleotide
acaucggaagcauuuuagu

SEQ ID NO: 407905 - RNA, 19 nt, Artificial Sequence
  Description of Artificial Sequence: Synthetic oligonucleotide
agugcugucaugauggaau

SEQ ID NO: 407906 - RNA, 19 nt, Artificial Sequence
  Description of Artificial Sequence: Synthetic oligonucleotide
uguaggaaucggcacccga

SEQ ID NO: 407907 - RNA, 19 nt, Artificial Sequence
  Description of Artificial Sequence: Synthetic oligonucleotide
uaguagaggccuguuguag

SEQ ID NO: 407908 - RNA, 19 nt, Artificial Sequence
  Description of Artificial Sequence: Synthetic oligonucleotide
gaguuagggucauaguaga

SEQ ID NO: 407909 - RNA, 19 nt, Artificial Sequence
  Description of Artificial Sequence: Synthetic oligonucleotide
cucaaugggagcugugaug

SEQ ID NO: 407910 - RNA, 19 nt, Artificial Sequence
  Description of Artificial Sequence: Synthetic oligonucleotide
cuauugccaagacauaaca

SEQ ID NO: 407911 - RNA, 19 nt, Artificial Sequence
  Description of Artificial Sequence: Synthetic oligonucleotide
ugugucagguacugcauau

SEQ ID NO: 407912 - RNA, 19 nt, Artificial Sequence
  Description of Artificial Sequence: Synthetic oligonucleotide
uauguacacugaaguauaa

SEQ ID NO: 407913 - RNA, 19 nt, Artificial Sequence
  Description of Artificial Sequence: Synthetic oligonucleotide
ggaucauaauaauacccug

SEQ ID NO: 407914 - RNA, 19 nt, Artificial Sequence
  Description of Artificial Sequence: Synthetic oligonucleotide
uuguguaagucggagaguu

SEQ ID NO: 407915 - RNA, 19 nt, Artificial Sequence
  Description of Artificial Sequence: Synthetic oligonucleotide
cccuaaacuauuaauagca

SEQ ID NO: 407916 - RNA, 19 nt, Artificial Sequence
  Description of Artificial Sequence: Synthetic oligonucleotide
aagucggagaguugcuggu

SEQ ID NO: 407917 - RNA, 19 nt, Artificial Sequence
  Description of Artificial Sequence: Synthetic oligonucleotide
ugcucguaauucacagugc

SEQ ID NO: 407918 - RNA, 19 nt, Artificial Sequence
  Description of Artificial Sequence: Synthetic oligonucleotide
gcugguuagugcuagacuc

SEQ ID NO: 407919 - RNA, 19 nt, Artificial Sequence
  Description of Artificial Sequence: Synthetic oligonucleotide
ucccaguauaaguacugcu

SEQ ID NO: 407920 - RNA, 19 nt, Artificial Sequence
  Description of Artificial Sequence: Synthetic oligonucleotide
cuaaggaugcauagggaga

SEQ ID NO: 407921 - RNA, 19 nt, Artificial Sequence
  Description of Artificial Sequence: Synthetic oligonucleotide
uuuagccggaccugggccu

SEQ ID NO: 407922 - RNA, 19 nt, Artificial Sequence
  Description of Artificial Sequence: Synthetic oligonucleotide
ugcugguuagugcuagacu

SEQ ID NO: 407923 - RNA, 19 nt, Artificial Sequence
  Description of Artificial Sequence: Synthetic oligonucleotide
guacuugugcuagugcuag

SEQ ID NO: 407924 - RNA, 19 nt, Artificial Sequence
  Description of Artificial Sequence: Synthetic oligonucleotide
ugugaguacuagaguguac

SEQ ID NO: 407925 - RNA, 19 nt, Artificial Sequence
  Description of Artificial Sequence: Synthetic oligonucleotide
aacgaauucacaggcugaa

SEQ ID NO: 407926 - RNA, 19 nt, Artificial Sequence
  Description of Artificial Sequence: Synthetic oligonucleotide
uugcuauaaugcauugcaa

SEQ ID NO: 407927 - RNA, 19 nt, Artificial Sequence
  Description of Artificial Sequence: Synthetic oligonucleotide
guagucaacacugccuccc

SEQ ID NO: 407928 - RNA, 19 nt, Artificial Sequence
  Description of Artificial Sequence: Synthetic oligonucleotide
ucgaucucgguauuucauc

SEQ ID NO: 407929 - RNA, 19 nt, Artificial Sequence
  Description of Artificial Sequence: Synthetic oligonucleotide
uguguaagucggagaguug

SEQ ID NO: 407930 - RNA, 19 nt, Artificial Sequence
  Description of Artificial Sequence: Synthetic oligonucleotide
caaaaccucuguucuguug

SEQ ID NO: 407931 - RNA, 19 nt, Artificial Sequence
  Description of Artificial Sequence: Synthetic oligonucleotide
ugugcggagcuauguuccg

SEQ ID NO: 407932 - RNA, 19 nt, Artificial Sequence
  Description of Artificial Sequence: Synthetic oligonucleotide
aucucagugaaccgggcaa
